United States Patent Application Publication US 2013/0267429 A1 - sequence listing, part 11

SEQ ID NO: 237552 - DNA, 50 bp, Artificial
  Synthetic oligonucleotide
aatctgccgtcgcgcctgttccaattccccatcgaggttatccgcgcaga

SEQ ID NO: 237553 - DNA, 50 bp, Artificial
  Synthetic oligonucleotide
accgggatctcggcgcatgaccgggctcataccattgccgtagcggtgga

SEQ ID NO: 237554 - DNA, 50 bp, Artificial
  Synthetic oligonucleotide
gccggaagtggctcgggctcctataccgactttctcacccccgccttcga

SEQ ID NO: 237555 - DNA, 50 bp, Artificial
  Synthetic oligonucleotide
cctctcccacgttttctagtccggcctgaaagcgccgtgtgcatctggcc

SEQ ID NO: 237556 - DNA, 50 bp, Artificial
  Synthetic oligonucleotide
acccgaggtcgcgactaccagagcctcaatacccgcggtctctacccggc

SEQ ID NO: 237557 - DNA, 50 bp, Artificial
  Synthetic oligonucleotide
atccggcgcccgacctgagcaactgcgcatgacctggtccgtggttcagg

SEQ ID NO: 237558 - DNA, 50 bp, Artificial
  Synthetic oligonucleotide
acggtaaccgccgggccgttctgaaaagcctgccacgcgccgattatcgc

SEQ ID NO: 237559 - DNA, 60 bp, Artificial
  Synthetic oligonucleotide
cagaatgggtgatttgctacagatcaaacatgctccagctatttacactcggagaggggt

SEQ ID NO: 237560 - DNA, 50 bp, Artificial
  Synthetic oligonucleotide
gtgccggcttggcggctgtctccgacgtttcacttgcaaaagcgatcgtc

SEQ ID NO: 237561 - DNA, 50 bp, Artificial
  Synthetic oligonucleotide
atcgacttcgtatcggctctgatgcagcatccgcgtttccgctcggggga

SEQ ID NO: 237562 - DNA, 50 bp, Artificial
  Synthetic oligonucleotide
atcgagcaaaggcgacgggggtttatgatcgagcgggatcgcttgacggc

SEQ ID NO: 237563 - DNA, 50 bp, Artificial
  Synthetic oligonucleotide
atcgagtgtcggaatggtcgcgacgaccactgtgcggcccgtctttttgc

SEQ ID NO: 237564 - DNA, 50 bp, Artificial
  Synthetic oligonucleotide
aattaccggctcggcgggtcgctccagctcgattaccgaccagaaggacg

SEQ ID NO: 237565 - DNA, 50 bp, Artificial
  Synthetic oligonucleotide
gtcttcccggtggcattcttcggagcccccgttcccgggctgactcgacc

SEQ ID NO: 237566 - DNA, 50 bp, Artificial
  Synthetic oligonucleotide
aagcgggcctctggcgcgtggcgcaagtaatcgggcatcgtatcaatgac

SEQ ID NO: 237567 - DNA, 50 bp, Artificial
  Synthetic oligonucleotide
atcgcacgatcgattttctgagggagcgttgcatccatgccgcaccgcaa

SEQ ID NO: 237568 - DNA, 50 bp, Artificial
  Synthetic oligonucleotide
atcgcactgatccggcaagaactcccgcgctagaaggcgttcagcggtgc

SEQ ID NO: 237569 - DNA, 50 bp, Artificial
  Synthetic oligonucleotide
atcgcccggacatcgacggattgagagccattgcggtgacctccgttgtc

SEQ ID NO: 237570 - DNA, 59 bp, Artificial
  Synthetic oligonucleotide
tcctacggctagtcagattgctcgtcggagtgatctggttttagttccgattagaccaa

SEQ ID NO: 237571 - DNA, 50 bp, Artificial
  Synthetic oligonucleotide
aagctcccgttctgccttgcgcccggtccgtcagagcactggcgtctggt

SEQ ID NO: 237572 - DNA, 50 bp, Artificial
  Synthetic oligonucleotide
atcgcgtgctgccgctctgagttaacgctcatcgccatggcaccggatcg

SEQ ID NO: 237573 - DNA, 50 bp, Artificial
  Synthetic oligonucleotide
gtcgccatccccgctggcataaagacccgacaggcgaaaccgcatccaat

SEQ ID NO: 237574 - DNA, 50 bp, Artificial
  Synthetic oligonucleotide
accaaagcaggtgccagcctcgcggcctgtaagttggcgataggcgcagg

SEQ ID NO: 237575 - DNA, 50 bp, Artificial
  Synthetic oligonucleotide
atcggcctccgaaccgcttgcgtagacgaaggcacgccagatcaccgtgc

SEQ ID NO: 237576 - DNA, 50 bp, Artificial
  Synthetic oligonucleotide
atcgggataccattccccaccctcgcatctgggcagtccactcggcagag

SEQ ID NO: 237577 - DNA, 50 bp, Artificial
  Synthetic oligonucleotide
aagctccggtcgctacgctccctccgcttcacgccccaacggtgacgctg

SEQ ID NO: 237578 - DNA, 50 bp, Artificial
  Synthetic oligonucleotide
acgggttcgtcgatcttcggtccgcgcagcgagaatcttgggtctggagc

SEQ ID NO: 237579 - DNA, 50 bp, Artificial
  Synthetic oligonucleotide
atcggtctctcgagggtctagagtagcccgttgcctgtgggcccgcgctc

SEQ ID NO: 237580 - DNA, 50 bp, Artificial
  Synthetic oligonucleotide
acggcggccattcacatgaacggtaggctgatctgaccagtgcgcgcgat

SEQ ID NO: 237581 - DNA, 53 bp, Artificial
  Synthetic oligonucleotide
tcgaggcaagcgttggtctggtcttgacggtaaccgcgagtttgaagggtttt

SEQ ID NO: 237582 - DNA, 50 bp, Artificial
  Synthetic oligonucleotide
atcgtcggaggttcgcctaaagaaaggccaacttcccgttgcgcatgggc

SEQ ID NO: 237583 - DNA, 50 bp, Artificial
  Synthetic oligonucleotide
acggcagccttagccgtgcagatgcctacagcatggcgctttatggcagc

SEQ ID NO: 237584 - DNA, 50 bp, Artificial
  Synthetic oligonucleotide
atcttcgggcaatatcttcgcgctctggcggaacgggatggggcgagcct

SEQ ID NO: 237585 - DNA, 50 bp, Artificial
  Synthetic oligonucleotide
acggcaattatgtagcccgcatgtcagtccccaccgcgaggcacgtcatg

SEQ ID NO: 237586 - DNA, 50 bp, Artificial
  Synthetic oligonucleotide
acggcaacacgccccattgccgggtagattgcagccatcaagtcaggcat

SEQ ID NO: 237587 - DNA, 50 bp, Artificial
  Synthetic oligonucleotide
acggatctctcctcaaccggccactcgacgggccattgcgcgacagggtc

SEQ ID NO: 237588 - DNA, 50 bp, Artificial
  Synthetic oligonucleotide
atgagcgggcgtgcctaaggccgcttaaccaactctttcgcggtgccctg

SEQ ID NO: 237589 - DNA, 50 bp, Artificial
  Synthetic oligonucleotide
atgaggcaccccggcgttctcgttgggccttgccttgggcgtgtgtgctt

SEQ ID NO: 237590 - DNA, 50 bp, Artificial
  Synthetic oligonucleotide
tacacctttccccgagcagcccacggacgaaggcgaaatgtccaaggttg

SEQ ID NO: 237591 - DNA, 50 bp, Artificial
  Synthetic oligonucleotide
agttcatagctaggtgttttgacgtttctcgctctcatcgggtcttctgg

SEQ ID NO: 237592 - DNA, 60 bp, Artificial
  Synthetic oligonucleotide
tcgatgatactgtcagctgctttcatgtcctgcctcgcgtgatccttcggtcgtggaacg

SEQ ID NO: 237593 - DNA, 50 bp, Artificial
  Synthetic oligonucleotide
agttgcggggcgcaccctttcggacagccactcgctcggagatacgctca

SEQ ID NO: 237594 - DNA, 50 bp, Artificial
  Synthetic oligonucleotide
agttgtcgcgaactgatcgaaggcaataagccgggcgaaccccatggcgg

SEQ ID NO: 237595 - DNA, 50 bp, Artificial
  Synthetic oligonucleotide
ataactcgcagaagcgcccaaacgaagggccggttatccggtccgaacgc

SEQ ID NO: 237596 - DNA, 50 bp, Artificial
  Synthetic oligonucleotide
atacaggacgcccgcctcccattcgcttcgtagcgggtctgagaaagggc

SEQ ID NO: 237597 - DNA, 50 bp, Artificial
  Synthetic oligonucleotide
aagagcggcaccggtctggcctttacacgacaagggacggctcgtggatc

SEQ ID NO: 237598 - DNA, 50 bp, Artificial
  Synthetic oligonucleotide
gaatgctggtaaacctgccccgcgcctcccgttgcaagaatggtagcccg

SEQ ID NO: 237599 - DNA, 50 bp, Artificial
  Synthetic oligonucleotide
taaaagcgacgtccgccaagcccaaagtcgaggcatcgaaattgtcatat

SEQ ID NO: 237600 - DNA, 50 bp, Artificial
  Synthetic oligonucleotide
aagagtccggcgcttacaagcctcctctcgaacggccgctttcgggtagg

SEQ ID NO: 237601 - DNA, 50 bp, Artificial
  Synthetic oligonucleotide
atacgcggaactcgcctttccgtggttgcccgcaccctccagcattcgat

SEQ ID NO: 237602 - DNA, 50 bp, Artificial
  Synthetic oligonucleotide
atacgggacgactggccttacgtggtggtcgtttcggggccttcattgcg

SEQ ID NO: 237603 - DNA, 60 bp, Artificial
  Synthetic oligonucleotide
tcgcactaccgggtgggactgcggcgatccgcgaaccctggcgcaatgcctatgcccatt

SEQ ID NO: 237604 - DNA, 50 bp, Artificial
  Synthetic oligonucleotide
atagaccccgtcgacatagaggcccacgcgcgaatcatagcccgcgttgc

SEQ ID NO: 237605 - DNA, 50 bp, Artificial
  Synthetic oligonucleotide
atagagagtcgcgcgggcactccatcctccgtaaccggccaatcgtccgt

SEQ ID NO: 237606 - DNA, 50 bp, Artificial
  Synthetic oligonucleotide
atagcacaggccctccgcccgatggttcgccctctcgtgtcccttcttgc

SEQ ID NO: 237607 - DNA, 50 bp, Artificial
  Synthetic oligonucleotide
aagccatccgtcgcaggccgacgatcgaacgacagggtatttcgcgcgtg

SEQ ID NO: 237608 - DNA, 49 bp, Artificial
  Synthetic oligonucleotide
aagcccgcttgtcccggaacccgcacggaccaagggtcgtcccgctttt

SEQ ID NO: 237609 - DNA, 50 bp, Artificial
  Synthetic oligonucleotide
aagccctcatatttcggcagggcgcatgcccactgaattaggccttcgcc

SEQ ID NO: 237610 - DNA, 50 bp, Artificial
  Synthetic oligonucleotide
acgtgtcggagagtgacaaatcccggccaaagcgttagcgggcgcatcgc

SEQ ID NO: 237611 - DNA, 50 bp, Artificial
  Synthetic oligonucleotide
atatcggctcacgcgctccgcatgtgtttgacgggcctggcgtagaaacg

SEQ ID NO: 237612 - DNA, 50 bp, Artificial
  Synthetic oligonucleotide
atattgtgcccggcgcaggacgctggacaccggcattcatcgacttggtc

SEQ ID NO: 237613 - DNA, 50 bp, Artificial
  Synthetic oligonucleotide
aagcgcgagccgtgtcagagccgattgcctcaaccgtccggttcggttag

SEQ ID NO: 237614 - DNA, 60 bp, Artificial
  Synthetic oligonucleotide
tcgcgagtatcgcttatgatgtgatttcgagcaggattgcatcgggggagtacagcgcga

SEQ ID NO: 237615 - DNA, 50 bp, Artificial
  Synthetic oligonucleotide
acaatcgggtgggcaaggtccctcttcgggtcagtcaaccccctgagcct

SEQ ID NO: 237616 - DNA, 50 bp, Artificial
  Synthetic oligonucleotide
atcagtcggggaaggccctcgcccgtgacagccgaaaccgcaagcgaccc

SEQ ID NO: 237617 - DNA, 50 bp, Artificial
  Synthetic oligonucleotide
atcatgacctccgaaccgattgtccggaggctcagctaggcgtcagggcc

SEQ ID NO: 237618 - DNA, 50 bp, Artificial
  Synthetic oligonucleotide
gtgtcatacggcagaatgctcccgccgaacgacaggtggaacccgttcct

SEQ ID NO: 237619 - DNA, 50 bp, Artificial
  Synthetic oligonucleotide
atccaacaggaagccgcgacggaatgacgccgcacgacggaagggctcag

SEQ ID NO: 237620 - DNA, 50 bp, Artificial
  Synthetic oligonucleotide
atccctgccggagtagcgggcgggcgtgccaaattgacgtaaaggccaag

SEQ ID NO: 237621 - DNA, 50 bp, Artificial
  Synthetic oligonucleotide
acggttgcagatgcgtagcaggtcttcggtcgcacggctcccagttggct

SEQ ID NO: 237622 - DNA, 50 bp, Artificial
  Synthetic oligonucleotide
atttctcccagcctgcagtgggatggccagtcgcttgccctgaccgcgag

SEQ ID NO: 237623 - DNA, 50 bp, Artificial
  Synthetic oligonucleotide
aagggagttcatggcatggaagcggcttcggggctatcgcagcctagcga

SEQ ID NO: 237624 - DNA, 50 bp, Artificial
  Synthetic oligonucleotide
atttgatgatgggtccactcgcggcatgggccggtgatggagtgtccgac

SEQ ID NO: 237625 - DNA, 58 bp, Artificial
  Synthetic oligonucleotide
tcggcttggcgaatctttcccgcctcgatgactcgcgcaaagtaggcttcaagaaact

SEQ ID NO: 237626 - DNA, 50 bp, Artificial
  Synthetic oligonucleotide
ggggcgcgggcaacactttgcaagtcgaccaaaaaccgcagatttctgcg

SEQ ID NO: 237627 - DNA, 50 bp, Artificial
  Synthetic oligonucleotide
caaagccggtgaaagttgcggggcgcaccctttcggacagccactcgctc

SEQ ID NO: 237628 - DNA, 50 bp, Artificial
  Synthetic oligonucleotide
caaagcggacggggatagcggagtgttcagcgcagagaatgcccccaggc

SEQ ID NO: 237629 - DNA, 50 bp, Artificial
  Synthetic oligonucleotide
acgcgctgaaacaggcccaaccgctcggaatacgcgtcgtcagccccatg

SEQ ID NO: 237630 - DNA, 50 bp, Artificial
  Synthetic oligonucleotide
aagggcgggggacaggatttgccgaggatcggggttatgggaaacaagcg

SEQ ID NO: 237631 - DNA, 50 bp, Artificial
  Synthetic oligonucleotide
gggcgtccgcctcaaatccgcaggcgaggttcttttgctccgacgcaaga

SEQ ID NO: 237632 - DNA, 50 bp, Artificial
  Synthetic oligonucleotide
aagggggcaccccgccactaatctgaacagttacgggcgccgagattacc

SEQ ID NO: 237633 - DNA, 50 bp, Artificial
  Synthetic oligonucleotide
caacctggaaagcaggcggaccgagcctcatgccgtgcctaaatctgcag

SEQ ID NO: 237634 - DNA, 50 bp, Artificial
  Synthetic oligonucleotide
acgcgattacgcgggcaggcttcctgtcgacggaccgacggtaaaggaga

SEQ ID NO: 237635 - DNA, 50 bp, Artificial
  Synthetic oligonucleotide
caatccttcgaccggcctgagctggagcgggacgcaagatcccggcgcaa

SEQ ID NO: 237636 - DNA, 60 bp, Artificial
  Synthetic oligonucleotide
tcgtctcagagcgatcgactatccagacaggcgattgcctggagcaagtagcgacgcgtc

SEQ ID NO: 237637 - DNA, 50 bp, Artificial
  Synthetic oligonucleotide
aagggtccggggccagaggatacccagttccatgcgtcatttccgcctgc

SEQ ID NO: 237638 - DNA, 50 bp, Artificial
  Synthetic oligonucleotide
ctcaccatgattatgccggctcaaagcacataaagcatactgccaaatat

SEQ ID NO: 237639 - DNA, 50 bp, Artificial
  Synthetic oligonucleotide
cacacggtcgagcgccgtttcctcactccggattgcgtctcaccaccccc

SEQ ID NO: 237640 - DNA, 50 bp, Artificial
  Synthetic oligonucleotide
aagggtttccctcgggcttcgctttcgctcaccctgaccggatttgggag

SEQ ID NO: 237641 - DNA, 50 bp, Artificial
  Synthetic oligonucleotide
caccctagcgtgcaaaaccgccgtgtgaagcccaagtgacgcctgcatgt

SEQ ID NO: 237642 - DNA, 50 bp, Artificial
  Synthetic oligonucleotide
accataccgttttcagctcaggcaggctttcgggccagagattgggcgcg

SEQ ID NO: 237643 - DNA, 50 bp, Artificial
  Synthetic oligonucleotide
accattcatcggcgcctctcatggtatggggacgcacacctgcgaagtgc

SEQ ID NO: 237644 - DNA, 50 bp, Artificial
  Synthetic oligonucleotide
ggctggttgcccaaaccggcccggcgctttacacctttccccgagcagcc

SEQ ID NO: 237645 - DNA, 50 bp, Artificial
  Synthetic oligonucleotide
cacgcggactcttgacaggaactgcaatctgcacctgggcggtccaacct

SEQ ID NO: 237646 - DNA, 50 bp, Artificial
  Synthetic oligonucleotide
acgcgatccttgacccaatgcgggaggatccctcgtgcacgtatgctggc

SEQ ID NO: 237647 - DNA, 58 bp, Artificial
  Synthetic oligonucleotide
cgggtctcgtaaagcccctcgcgccattcgcgtaagctatccgcatcagccccgttga

SEQ ID NO: 237648 - DNA, 52 bp, Artificial
  Synthetic oligonucleotide
tctagaatgataactggttataaaaaatttagaaaaatacggtcaaaaatac

SEQ ID NO: 237649 - DNA, 50 bp, Artificial
  Synthetic oligonucleotide
acgccttgcgtcttaccatgcggaccgcccttgtgctgcttgcgatgctg

SEQ ID NO: 237650 - DNA, 50 bp, Artificial
  Synthetic oligonucleotide
cacgtcctcgaatccagctgcgggggattgacagccttaccgaggaagcg

SEQ ID NO: 237651 - DNA, 50 bp, Artificial
  Synthetic oligonucleotide
cactaccccacaccaggtcagccccactctagagcgccccgtcctagtga

SEQ ID NO: 237652 - DNA, 50 bp, Artificial
  Synthetic oligonucleotide
acgccggagggagccccaaacttcgactgcatcgcgcctcatgaatttgc

SEQ ID NO: 237653 - DNA, 50 bp, Artificial
  Synthetic oligonucleotide
aaggttgtacaggcgggttcacagccggttcaagggccggtagctagccc

SEQ ID NO: 237654 - DNA, 50 bp, Artificial
  Synthetic oligonucleotide
atgcagtccgcgtcggcgacacagcacgaaaggaataccccgatgtctga

SEQ ID NO: 237655 - DNA, 50 bp, Artificial
  Synthetic oligonucleotide
accactaagctatacccgctcggtacgccactgcgtgggaagaggcccat

SEQ ID NO: 237656 - DNA, 50 bp, Artificial
  Synthetic oligonucleotide
aaggaccgaagcattctcgccccgggtcggtttggcctagcattcatggc

SEQ ID NO: 237657 - DNA, 50 bp, Artificial
  Synthetic oligonucleotide
aaggacggtcgcagcaggcggggtttaagggcggtggttaaccgaggtgc

SEQ ID NO: 237658 - DNA, 50 bp, Artificial
  Synthetic oligonucleotide
aaggagggtgcgtgtcgcttccgcatccaatctgagcgcgcgtccaaacc

SEQ ID NO: 237659 - DNA, 60 bp, Artificial
  Synthetic oligonucleotide
tctcgatttcgaggccctaataatatccacaattgccggcacagccgctaagtcaaaagc

SEQ ID NO: 237660 - DNA, 50 bp, Artificial
  Synthetic oligonucleotide
atgccggtattgacgctaggggaagcggggcaagagcaaaagggggcgca

SEQ ID NO: 237661 - DNA, 50 bp, Artificial
  Synthetic oligonucleotide
aaggatgtcattgccatcgattgccccgtgcggctgttgcagggacagtg

SEQ ID NO: 237662 - DNA, 50 bp, Artificial
  Synthetic oligonucleotide
aaggccatgggtcgtggcgaaggcaagcgtggagcggacactgaagtagg

SEQ ID NO: 237663 - DNA, 50 bp, Artificial
  Synthetic oligonucleotide
atgcgaccggctttccatacctggctcgcgtcggcgtagatacgtcggcg

SEQ ID NO: 237664 - DNA, 50 bp, Artificial
  Synthetic oligonucleotide
gaccccgtttatgtgagcggttgggggctttatcgtgaggactcgggggc

SEQ ID NO: 237665 - DNA, 50 bp, Artificial
  Synthetic oligonucleotide
atgcgccctgcctatcgactggttccggcccgaatatcgcgatcccatcg

SEQ ID NO: 237666 - DNA, 50 bp, Artificial
  Synthetic oligonucleotide
atgcgggggcggatttggaccccgattgttccagtcagggacaatggcca

SEQ ID NO: 237667 - DNA, 50 bp, Artificial
  Synthetic oligonucleotide
aaggcgtgcctctggtatcgtggcgttacgaagcgatggtcggcagcatt

SEQ ID NO: 237668 - DNA, 50 bp, Artificial
  Synthetic oligonucleotide
atggagcatgtccactggccacgtgatgaataggcggctagggcgcgtgc

SEQ ID NO: 237669 - DNA, 50 bp, Artificial
  Synthetic oligonucleotide
atggagcgggcccatatcggcgcatcccatagacgggtggcggtaagcag

SEQ ID NO: 237670 - DNA, 60 bp, Artificial
  Synthetic oligonucleotide
tctgtccatattgcctatgattgggatgctgtaggacaaagagcagcatcgctattagtc

SEQ ID NO: 237671 - DNA, 50 bp, Artificial
  Synthetic oligonucleotide
atggccccgatgcagcgtgacggcatgttacgccagagcagaacgctgga

SEQ ID NO: 237672 - DNA, 50 bp, Artificial
  Synthetic oligonucleotide
atggcgctcaccgatacagcaattcgagccctccagccggcagaatcccc

SEQ ID NO: 237673 - DNA, 50 bp, Artificial
  Synthetic oligonucleotide
atgggcacgggcgcttggcgggagagtgaaacccaatatggtctcgatct

SEQ ID NO: 237674 - DNA, 50 bp, Artificial
  Synthetic oligonucleotide
ggtcggctatcccttatccttggggtgggcgtgtgcgtcagatacaattt

SEQ ID NO: 237675 - DNA, 50 bp, Artificial
  Synthetic oligonucleotide
atggtccgccggacgttacaattatcgctccgtggcctcagccaaggtcg

SEQ ID NO: 237676 - DNA, 50 bp, Artificial
  Synthetic oligonucleotide
atgtgtcgctcggagttccaggtttgcggtctaaggccagcaaacgcccc

SEQ ID NO: 237677 - DNA, 50 bp, Artificial
  Synthetic oligonucleotide
acgctttcccggccaagtgccctcccctcttaacggagacggcgaatgcc

SEQ ID NO: 237678 - DNA, 50 bp, Artificial
  Synthetic oligonucleotide
ctcgaaaagtcgccgcttcacagctcaaaaaggcaggggtgcgtctggct

SEQ ID NO: 237679 - DNA, 50 bp, Artificial
  Synthetic oligonucleotide
acgctcaaggcgaactgacaggccaccctttccagggctgtgggcgctta

SEQ ID NO: 237680 - DNA, 50 bp, Artificial
  Synthetic oligonucleotide
attatggccgattgcacacgccgcgattttggtccggcgacagcgggaac

SEQ ID NO: 237681 - DNA, 60 bp, Artificial
  Synthetic oligonucleotide
tgaaagcttatctgagtcttaggctcaagtcgccgcctcaatgataaacgtccgctagcg

SEQ ID NO: 237682 - DNA, 50 bp, Artificial
  Synthetic oligonucleotide
aaggctcccggacgggttttggtgacgactttcgcctcgaatgcggcgcg

SEQ ID NO: 237683 - DNA, 50 bp, Artificial
  Synthetic oligonucleotide
aaggctgcgcccctgctcaccgtttggggaccacgcgatccatccgacct

SEQ ID NO: 237684 - DNA, 50 bp, Artificial
  Synthetic oligonucleotide
attctacgggtaatgccagctggacgacaaccggcacctcgggttccctt

SEQ ID NO: 237685 - DNA, 50 bp, Artificial
  Synthetic oligonucleotide
attggccgggcgtcacaatcgccatcgctctgccccctgcctcgcgtcac

SEQ ID NO: 237686 - DNA, 50 bp, Artificial
  Synthetic oligonucleotide
acgcggtcacgaagcaccgctgctgggaaaccgattatgagccatgaggg

SEQ ID NO: 237687 - DNA, 59 bp, Artificial
  Synthetic oligonucleotide
tgaacattgttcgctttggcaacctaagtagccttttccgccagcactcgcgtactcca

SEQ ID NO: 237688 - DNA, 60 bp, Artificial
  Synthetic oligonucleotide
tgaacccatctagcgatctgttggagattagcgttaatgcgaccaaggataactaagcgt

SEQ ID NO: 237689 - DNA, 51 bp, Artificial
  Synthetic oligonucleotide
tgaccgtatttttgaccgtatttttgaccgtatttttgaccgtatttttga

SEQ ID NO: 237690 - DNA, 53 bp, Artificial
  Synthetic oligonucleotide
tgacgttttgtaaccctgccccactcgacccccctggagtgccggatcccgcg

SEQ ID NO: 237691 - DNA, 60 bp, Artificial
  Synthetic oligonucleotide
tgaggacaagtttttgtaaagcagactagatgcgaggagatctgacggacgcggagtggg

SEQ ID NO: 237692 - DNA, 60 bp, Artificial
  Synthetic oligonucleotide
tgatgaggctaggaacaaccttccccccggcgctatcctgacgaattatggctggcaagc

SEQ ID NO: 237693 - DNA, 60 bp, Artificial
  Synthetic oligonucleotide
cggtctgttgctggcgccctgatcccgcatttgtcgactgacccgatcatggctcgccga

SEQ ID NO: 237694 - DNA, 56 bp, Artificial
  Synthetic oligonucleotide
tgcaacgtttcaggaagtggagagcgggaaaggggcggacgcccttgatcgtcgcc

SEQ ID NO: 237695 - DNA, 54 bp, Artificial
  Synthetic oligonucleotide
tacccttccccatcactccgacggtgttaacggtattaacaagagcctcgactg

SEQ ID NO: 237696 - DNA, 60 bp, Artificial
  Synthetic oligonucleotide
tactgcagcaatcccggttcgactgcgcaatcatcttgggagggcaagttcgccttgcac

SEQ ID NO: 237697 - DNA, 60 bp, Artificial
  Synthetic oligonucleotide
tagaggcatagcaggagacgttgatccagcgcggttttcggcagtgcaacacgcgaggcc

SEQ ID NO: 237698 - DNA, 58 bp, Artificial
  Synthetic oligonucleotide
tagcggcgaggaataaacgatggatgctccaaccggccctttatggtcacaacaacag

SEQ ID NO: 237699 - DNA, 55 bp, Artificial
  Synthetic oligonucleotide
taggcttctacggcaaaccctgcggtccgcaacgtgaaacttagtgcttttcgta

SEQ ID NO: 237700 - DNA, 57 bp, Artificial
  Synthetic oligonucleotide
tagtaaagatcacataacccaaacttggggcaagggtcgggactgccataaacagca

SEQ ID NO: 237701 - DNA, 60 bp, Artificial
  Synthetic oligonucleotide
tagtttcgccagcgacgatgctctcgtccgctggcggatcgagacagagggatgggtcgt

SEQ ID NO: 237702 - DNA, 60 bp, Artificial
  Synthetic oligonucleotide
tatcggcagtagcaagctgcacacatgggatagcgaactcaggcagcgtccttttgcgag

SEQ ID NO: 237703 - DNA, 59 bp, Artificial
  Synthetic oligonucleotide
tatggcctacatcggtcgaattatccgccccgttctttgaagccatcctgcgaacagcg

SEQ ID NO: 237704 - DNA, 52 bp, Artificial
  Synthetic oligonucleotide
cgtaatttggagctgtgagacaaccaaaaaaacgaggtttttttatgcactt

SEQ ID NO: 237705 - DNA, 60 bp, Artificial
  Synthetic oligonucleotide
tatgtgatatatcgaatattcagtcgtccagcaatatgcaattggctattgctgtactgt

SEQ ID NO: 237706 - DNA, 58 bp, Artificial
  Synthetic oligonucleotide
tattcgtgacggattacgccaatgctgtttagtcggaaagttcacaatccagcgtgtt

SEQ ID NO: 237707 - DNA, 60 bp, Artificial
  Synthetic oligonucleotide
tcacgtcattaacctcctcgaacattctcgtgaaaggcttaatctccagctgataggatg

SEQ ID NO: 237708 - DNA, 60 bp, Artificial
  Synthetic oligonucleotide
tcagctcaaaaaggagggggtggtgccattgatttgctcatgcacacaacaggccaagac

SEQ ID NO: 237709 - DNA, 57 bp, Artificial
  Synthetic oligonucleotide
tccaagagcgtgacaggttagaaactgttactaaccgccttggctatataatacgtc

SEQ ID NO: 237710 - DNA, 60 bp, Artificial
  Synthetic oligonucleotide
tccacaaatcggcttcaagaaacgcttgcgcgcttgcgtagaggagagccaattgagcta

SEQ ID NO: 237711 - DNA, 59 bp, Artificial
  Synthetic oligonucleotide
tccatttacactcgttgtccaatttattgacttgaaataggtctggcaaaccgtcatgc

SEQ ID NO: 237712 - DNA, 57 bp, Artificial
  Synthetic oligonucleotide
tcccacctaaagaacagatgatacacggaaaagattggaacgatcttttgatggtta

SEQ ID NO: 237713 - DNA, 60 bp, Artificial
  Synthetic oligonucleotide
tccgtcctagcgaagctcatgggctgcaaccggcgcaccatcgtgcgggcgattcaagac

SEQ ID NO: 237714 - DNA, 56 bp, Artificial
  Synthetic oligonucleotide
tcctacacgtatagtcctatacttgtatacgcggtgaaccgagagggaaagcccta

SEQ ID NO: 237715 - DNA, 58 bp, Artificial
  Synthetic oligonucleotide
cgtcattgtctatttccgttctttcacgatcagataatctctggttatcccgaaggtc

SEQ ID NO: 237716 - DNA, 60 bp, Artificial
  Synthetic oligonucleotide
tgtagacaggatcaagtagaatgccttctagacgcgccagcaaccgaagggcttctagtg

SEQ ID NO: 237717 - DNA, 60 bp, Artificial
  Synthetic oligonucleotide
tgtctcggaccagtggacagtgcctgagaactggtattcggacacgttgaatctcccgct

SEQ ID NO: 237718 - DNA, 56 bp, Artificial
  Synthetic oligonucleotide
ttaaccgaatatttcaaagtttctgcaacagctgcccccaaaccctctgtgtaagc

SEQ ID NO: 237719 - DNA, 60 bp, Artificial
  Synthetic oligonucleotide
ttacacttgctcgtgggaaggttgcaatgcaatgaatcgcttcaatctttcagcccttgc

SEQ ID NO: 237720 - DNA, 60 bp, Artificial
  Synthetic oligonucleotide
ttataggggcgtgtaatccagcgccgacccagcctaccgagccggcgcatgaaaagcatc

SEQ ID NO: 237721 - DNA, 60 bp, Artificial
  Synthetic oligonucleotide
ttatatggatgggtttatcaatagaatgactagccgcttttaagagactggacaggatat

SEQ ID NO: 237722 - DNA, 60 bp, Artificial
  Synthetic oligonucleotide
ttccagagtagctgacagctttagccatgaaccccatgcgtcatctcatgatattacagc

SEQ ID NO: 237723 - DNA, 58 bp, Artificial
  Synthetic oligonucleotide
ttgacggtaatataattcttgcctgcgcgagtaacttcgaagcctaactcttcaacat

SEQ ID NO: 237724 - DNA, 60 bp, Artificial
  Synthetic oligonucleotide
ttggcgctcacgtccaggaatagggtgtgccgggctgctgggctgtaatctagccgcagc

SEQ ID NO: 237725 - DNA, 60 bp, Artificial
  Synthetic oligonucleotide
ttgggcgacagccgcagcggcgcaacaagcaagcccatacaaacttatcgtggcatcgag

SEQ ID NO: 237726 - DNA, 60 bp, Artificial
  Synthetic oligonucleotide
cgaccaaggaagctacaagagctgccattttgtatctggctcgaaaagctactgtgctgg

SEQ ID NO: 237727 - DNA, 57 bp, Artificial
  Synthetic oligonucleotide
cccgaacaaacacatggcccaggcttgttgcccttcgtgacagtttgggatgctatt

SEQ ID NO: 237728 - DNA, 55 bp, Artificial
  Synthetic oligonucleotide
tttacttgatacttaagggataactctgggattgattttggcactttccccttgc

SEQ ID NO: 237729 - DNA, 57 bp, Artificial
  Synthetic oligonucleotide
tttagatcatatagaagggcgagattttttattgcgtaatttcaatgtgttggcggg

SEQ ID NO: 237730 - DNA, 59 bp, Artificial
  Synthetic oligonucleotide
tttctcgcactggacccggcccattatgcaccgttcgacgcagtgataatgaacccgcc

SEQ ID NO: 237731 - DNA, 55 bp, Artificial
  Synthetic oligonucleotide
tttgggtcaatcaatcgtaaagactctacgaagataaaccttgaacgtgttcaag

SEQ ID NO: 237732 - DNA, 56 bp, Artificial
  Synthetic oligonucleotide
ttttcagacgataaaacacggttggcttttaattggcagtctgatgaaagccgtta

SEQ ID NO: 237733 - DNA, 58 bp, Artificial
  Synthetic oligonucleotide
ttttccggtagcgcaaagccgcagaaacagagggattccaacgtctgttcttgctgtg

SEQ ID NO: 237734 - DNA, 55 bp, Artificial
  Synthetic oligonucleotide
tttttgtagctttcgacttaaggttttcatctgggaaaactgttcaatcgctcga

SEQ ID NO: 237735 - DNA, 56 bp, Artificial
  Synthetic oligonucleotide
ttttttctacatgtcaaattgaaaatatcccttgtgtagcaaggggaaagtgccaa

SEQ ID NO: 237736 - DNA, 60 bp, Artificial
  Synthetic oligonucleotide
tgcatcgcatgaggcttgggcgcgcttaagcgcatcaaaccccaaggctggggccttact

SEQ ID NO: 237737 - DNA, 60 bp, Artificial
  Synthetic oligonucleotide
tgcattcggagaggcaagttgccaccgactgacctcaatcaggccgctaaagtctggaac

SEQ ID NO: 237738 - DNA, 57 bp, Artificial
  Synthetic oligonucleotide
ccctaagagaagcatccgaaaaggtcggtgtcacccgccaaacgctcatgaaggcga

SEQ ID NO: 237739 - DNA, 55 bp, Artificial
  Synthetic oligonucleotide
tgccaaaatcaatcccagagttatcccttaagtatcaagtaaagtatttttgacc

SEQ ID NO: 237740 - DNA, 57 bp, Artificial
  Synthetic oligonucleotide
tgccgaaccggtcagtgggatggactttcttaatctcgggcaatgttactcgaatgg

SEQ ID NO: 237741 - DNA, 58 bp, Artificial
  Synthetic oligonucleotide
tgcgcttaatacccattacgcctcttatataggttatggtagtctgggtggggtcgca

SEQ ID NO: 237742 - DNA, 60 bp, Artificial
  Synthetic oligonucleotide
tgcgggaatatgcgaccgtatgagctgggcgtctccaacccataacgcgcgccgcgatta

SEQ ID NO: 237743 - DNA, 60 bp, Artificial
  Synthetic oligonucleotide
tgctcatggcaacatggttgggcaattaaatgttgcccgtcaatgagcagataagccccc

SEQ ID NO: 237744 - DNA, 56 bp, Artificial
  Synthetic oligonucleotide
tggacagaatctaggccgtaatagcgatgaaaaatatcgggtaaccagaataaaag

SEQ ID NO: 237745 - DNA, 60 bp, Artificial
  Synthetic oligonucleotide
tggcacccggatatgtcccgaaatcctgagggagatatcccagtttcgcgcgcatctctc

SEQ ID NO: 237746 - DNA, 54 bp, Artificial
  Synthetic oligonucleotide
tggcagaaagtttccgcccaacacggccgggaggtgaggttccaaggagtacat

SEQ ID NO: 237747 - DNA, 60 bp, Artificial
  Synthetic oligonucleotide
tggcatcgagaccaagttgctccgccagatacaagacaccgtcggagggtatcgacgcat

SEQ ID NO: 237748 - DNA, 59 bp, Artificial
  Synthetic oligonucleotide
tggccccaacctcccccgcagcgcatccctgagccatataggccgaaaatcgccttctg

SEQ ID NO: 237749 - DNA, 60 bp, Artificial
  Synthetic oligonucleotide
ccctgcctcaatgcctcgcgccccaatatccgcaacgtggcttcaacatcgcgcgtggga

SEQ ID NO: 237750 - DNA, 60 bp, Artificial
  Synthetic oligonucleotide
tggcgaacacctgtcgtcactgttcgagggttacctgcgcaagcagatagaagacgccga

SEQ ID NO: 237751 - DNA, 60 bp, Artificial
  Synthetic oligonucleotide
tggcgatcattatcgcacttggccccatcttcatcgctctagctctcttcgagccaacga

SEQ ID NO: 237752 - DNA, 59 bp, Artificial
  Synthetic oligonucleotide
tggcgggggggggtagccagtagctgattggctaggggtagccagtagctgattggcta

SEQ ID NO: 237753 - DNA, 60 bp, Artificial
  Synthetic oligonucleotide
tggctccgtccatccaccggacatcagctagtagcatatcatagtggctaaaatcggtag

SEQ ID NO: 237754 - DNA, 60 bp, Artificial
  Synthetic oligonucleotide
tggggcaccgctgatgaaggtgaatgcccgccgtgccacgtcttgatcgtcactccccgc

SEQ ID NO: 237755 - DNA, 60 bp, Artificial
  Synthetic oligonucleotide
tggtgacggaaccacccttttgtgacatgtcgcatatgtcacttccgatcgtcacgttcg

SEQ ID NO: 237756 - DNA, 57 bp, Artificial
  Synthetic oligonucleotide
tggttggggggggtgtgactcctaggagtcacaggggtgtgactcctaggagtcaca

SEQ ID NO: 237757 - DNA, 58 bp, Artificial
  Synthetic oligonucleotide
gcgaccgcgtagctttcacaacagttatagaacgcaaaaagacgctccaaaagcaaga

SEQ ID NO: 237758 - DNA, 60 bp, Artificial
  Synthetic oligonucleotide
gcgcaaatcgcattgcaaactttcaggagagggacatcgtgaggaacctgcttgccgcta

SEQ ID NO: 237759 - DNA, 58 bp, Artificial
  Synthetic oligonucleotide
gcgctgttacgggggaatgaccagtccaatcgaagcagcgtaaacacatccccttcca

SEQ ID NO: 237760 - DNA, 48 bp, Artificial
  Synthetic oligonucleotide
cccttccaacctttaaaaggctggggggggaggatttggtagaggtgg

SEQ ID NO: 237761 - DNA, 52 bp, Artificial
  Synthetic oligonucleotide
gcgctttcccatcgccgcggtttggactttcaccgtcccttacgggtcggac

SEQ ID NO: 237762 - DNA, 60 bp, Artificial
  Synthetic oligonucleotide
gcggaaacggagcctcaggcacgctctacacccccgcttgatgtgagtcgcaccgtcgtg

SEQ ID NO: 237763 - DNA, 60 bp, Artificial
  Synthetic oligonucleotide
gcggctctgtgaattggcgggcagtcgcgatgtctgacgctaccaaccagagttcgtcgc

SEQ ID NO: 237764 - DNA, 60 bp, Artificial
  Synthetic oligonucleotide
gcgtttatcaatcagcacacgcgcagccctcgtaggactacgacggccttgttcccatcc

SEQ ID NO: 237765 - DNA, 60 bp, Artificial
  Synthetic oligonucleotide
gctatacgatccgatcatatgcgaccgaatcatatatgatcggatcgtatatcgccgtca

SEQ ID NO: 237766 - DNA, 56 bp, Artificial
  Synthetic oligonucleotide
gctattctatacgacattttgttacccgcgtcgaactgaaaaatgcgtagaaaagc

SEQ ID NO: 237767 - DNA, 60 bp, Artificial
  Synthetic oligonucleotide
gctcttgatttggtggaggcggctactcacgcgcacacaatcgggcttcctctcaatcaa

SEQ ID NO: 237768 - DNA, 60 bp, Artificial
  Synthetic oligonucleotide
gctggcaagcgcgagcaatctgcattcccggatgagttacaaatggtttgtaaataatcc

SEQ ID NO: 237769 - DNA, 54 bp, Artificial
  Synthetic oligonucleotide
gcttgaacggatcttcccattttttttggttgtgctgttacggcgaaagtagtc

SEQ ID NO: 237770 - DNA, 60 bp, Artificial
  Synthetic oligonucleotide
gcttttcaactccggtttgcccatgtcgtgccaccacgacacccattcgtcatagagcgc

SEQ ID NO: 237771 - DNA, 56 bp, Artificial
  Synthetic oligonucleotide
cccttggacggctcccaaatctcggaacaaggccaatcgggatcacttggatcaaa

SEQ ID NO: 237772 - DNA, 52 bp, Artificial
  Synthetic oligonucleotide
ggaaagacaaatcggattactaagctttaaaacgtaactaggttctggtgta

SEQ ID NO: 237773 - DNA, 60 bp, Artificial
  Synthetic oligonucleotide
ggagggtcacattgctaacctcaccgagccatgtctgactgccgtggaatagaaccatcg

SEQ ID NO: 237774 - DNA, 60 bp, Artificial
  Synthetic oligonucleotide
ggagtggcgagtctcgaacttcgtcgggcgacatcatggagcggtaatggaagcgttggc

SEQ ID NO: 237775 - DNA, 59 bp, Artificial
  Synthetic oligonucleotide
ggatgccacctgaataagtgtcgcgattattgtatagacaagggatcgccggaaataac

SEQ ID NO: 237776 - DNA, 60 bp, Artificial
  Synthetic oligonucleotide
ggcacgattaaagccgcgagcctgcatatgacgcgaggccgcgaaacacaaaacgctgac

SEQ ID NO: 237777 - DNA, 57 bp, Artificial
  Synthetic oligonucleotide
gactagtcctgcacgaaaaaacttattcgcacttcatgctcaacggtaaaaatcaaa

SEQ ID NO: 237778 - DNA, 55 bp, Artificial
  Synthetic oligonucleotide
gagaaagaaatttgcctttcgggggactatctaattcctaacaattcgcattatc

SEQ ID NO: 237779 - DNA, 57 bp, Artificial
  Synthetic oligonucleotide
gataaatcgtgcttatctaaacagggattctgaaaatggaaaagcctgacgattatt

SEQ ID NO: 237780 - DNA, 51 bp, Artificial
  Synthetic oligonucleotide
gatattttttaaaaccccacctgaagcaataaaccttttacgatgaacttg

SEQ ID NO: 237781 - DNA, 60 bp, Artificial
  Synthetic oligonucleotide
gatcactcattagccaaccaattgcctattggtcaattcaaatgtcggcagaccggatcg

SEQ ID NO: 237782 - DNA, 53 bp, Artificial
  Synthetic oligonucleotide
ccgacattgccatccgtgtttctcggttcggaacacgtaattcgaaggggaat

SEQ ID NO: 237783 - DNA, 59 bp, Artificial
  Synthetic oligonucleotide
gatgccaatagagggggggcggccactatgccttcgggaatgcaggttcattgaaatac

SEQ ID NO: 237784 - DNA, 57 bp, Artificial
  Synthetic oligonucleotide
gatgcctgatcccttcgaccctgccgagttcgacgcgccccctccctccgatcccca

SEQ ID NO: 237785 - DNA, 57 bp, Artificial
  Synthetic oligonucleotide
gatgggtcgtgacgttggtgaacgaggaagggccaagtggtgagcccgacgtgacta

SEQ ID NO: 237786 - DNA, 59 bp, Artificial
  Synthetic oligonucleotide
gattcaagacctcgtggaaggacgctggattgaagtccgccagatcggggaccgaggca

SEQ ID NO: 237787 - DNA, 58 bp, Artificial
  Synthetic oligonucleotide
gcaaaccacgccggatatgggccgtccattcgatggggaagaggcgttgcgtgaactg

SEQ ID NO: 237788 - DNA, 59 bp, Artificial
  Synthetic oligonucleotide
gcaacgtccagcagacgatttccgaatttagcgccatcgtccacgcaagggataaatcg

SEQ ID NO: 237789 - DNA, 60 bp, Artificial
  Synthetic oligonucleotide
gcaattactcagatgggcgaatggcttggtgattgcgtgagcgcgcctatggccgaaatc

SEQ ID NO: 237790 - DNA, 60 bp, Artificial
  Synthetic oligonucleotide
gcagggaaggaggatatgtcgtgtcgcacacacgctcgttcatcgatcccctcgacgttg

SEQ ID NO: 237791 - DNA, 60 bp, Artificial
  Synthetic oligonucleotide
gcatggaacttgacccagcagacaaaaagcaatggcgagaccctgaacatagattccgaa

SEQ ID NO: 237792 - DNA, 56 bp, Artificial
  Synthetic oligonucleotide
gcatgttcgccaaggatggtattttattaatcctaatttcgttttcaatggcgacc

SEQ ID NO: 237793 - DNA, 57 bp, Artificial
  Synthetic oligonucleotide
ccgatcaatttctgccggcgacataccggagcccctgcgaaagcgctacttttcgtc

SEQ ID NO: 237794 - DNA, 60 bp, Artificial
  Synthetic oligonucleotide
gccaccagaacgcctcaggatggctcagagcacccaatcaggctcagcgtggcctgacgg

SEQ ID NO: 237795 - DNA, 60 bp, Artificial
  Synthetic oligonucleotide
gcccgtcgtatagtcttctctgttggattcggcgagtggacactacagctagtctattgc

SEQ ID NO: 237796 - DNA, 60 bp, Artificial
  Synthetic oligonucleotide
gccggaccagctggttgctgaaagccggtatgtcacaaaaagacaaacgcaccctgcata

SEQ ID NO: 237797 - DNA, 60 bp, Artificial
  Synthetic oligonucleotide
gcctatgtctctccgcagggtcatgcttttttggatcgagctctgtatcttcctaaggca

SEQ ID NO: 237798 - DNA, 60 bp, Artificial
  Synthetic oligonucleotide
gtcccactcaacgcattttgacgcagcactaccaatctaagcaacacgctggtttttagc

SEQ ID NO: 237799 - DNA, 57 bp, Artificial
  Synthetic oligonucleotide
gtcgggaaaaacaatcgcctctcaatgtgaggcggttcctcagtaattgagacggat

SEQ ID NO: 237800 - DNA, 60 bp, Artificial
  Synthetic oligonucleotide
gtctccgaacgagtcgtcgcgactcccgctgcctgcatgaggcgaaagcgggaagcgctc

SEQ ID NO: 237801 - DNA, 59 bp, Artificial
  Synthetic oligonucleotide
gtctggccccctgtaaatggggtgcagcaacctttacagcctaacataacaggcagtga

SEQ ID NO: 237802 - DNA, 58 bp, Artificial
  Synthetic oligonucleotide
gtctggctcaacgtattggaaactgttccggtattttgcgttttagtcagatagatga

SEQ ID NO: 237803 - DNA, 60 bp, Artificial
  Synthetic oligonucleotide
gtgacgtttgcaaccaaaccctctttggctcgacagatgatagagcgcagtcttcgtgca

SEQ ID NO: 237804 - DNA, 60 bp, Artificial
  Synthetic oligonucleotide
ccgatccatggccgggattttcactcgaccgagcgctgacaggaagatctctcgcccagc

SEQ ID NO: 237805 - DNA, 60 bp, Artificial
  Synthetic oligonucleotide
gtgatggcctattatgctctggcatctagcgctatcactataaaatcagcccatggacga

SEQ ID NO: 237806 - DNA, 57 bp, Artificial
  Synthetic oligonucleotide
gttcatttgttcgttaaatatcaatggattgcttttgtattctttaggcaaaatcga

SEQ ID NO: 237807 - DNA, 60 bp, Artificial
  Synthetic oligonucleotide
gttctacgagtatcgcgcaatacacgattggaaacgatcaatcgtgttcgccacttgctt

SEQ ID NO: 237808 - DNA, 60 bp, Artificial
  Synthetic oligonucleotide
gttgatcggactggagaggatcggctgcaagtggggaagccgcgttcgcatgccgacatc

SEQ ID NO: 237809 - DNA, 56 bp, Artificial
  Synthetic oligonucleotide
gttgttccgcgtgtggccacctgtaaacgaggtgcagcaacctttacaggacggat

SEQ ID NO: 237810 - DNA, 55 bp, Artificial
  Synthetic oligonucleotide
gtttattcctacatcgtgtcgtagcagaacagaaattccctttcgaattacgtgt

SEQ ID NO: 237811 - DNA, 60 bp, Artificial
  Synthetic oligonucleotide
gtttcctggatctatacgggcttggaagcgatgcgctccaatgcggaatgacggtgggac

SEQ ID NO: 237812 - DNA, 60 bp, Artificial
  Synthetic oligonucleotide
gtttcgttatgagactatacggtatcgttttgacttgagcaatgggatatagcagtcgcg

SEQ ID NO: 237813 - DNA, 52 bp, Artificial
  Synthetic oligonucleotide
taaaaaatcttgaaaaaaaacagttaaaatgaagggcaggttaggtgcagga

SEQ ID NO: 237814 - DNA, 54 bp, Artificial
  Synthetic oligonucleotide
taaagactctataggatcaacccccggaggaggtattgttacggtcctagttga

SEQ ID NO: 237815 - DNA, 53 bp, Artificial
  Synthetic oligonucleotide
ccgctggtggcatccgtgtcaaggtaatcggttcgaattttaacggggtgctt

SEQ ID NO: 237816 - DNA, 60 bp, Artificial
  Synthetic oligonucleotide
taaatggctgtatcgcgcctgccccgccttatagcagcgacactatttgttactctagga

SEQ ID NO: 237817 - DNA, 54 bp, Artificial
  Synthetic oligonucleotide
taagaacgtctcttactaaaactctccgaaaaatcgttgaaaaggcatcttctg

SEQ ID NO: 237818 - DNA, 55 bp, Artificial
  Synthetic oligonucleotide
taagaagccaaggcgtagaggggaatatcgcctttaaaccgattagcagcttaac

SEQ ID NO: 237819 - DNA, 58 bp, Artificial
  Synthetic oligonucleotide
ggccacctgtaaacgaggtgcagcaacctttacaggacggattaacaagcagtgacac

SEQ ID NO: 237820 - DNA, 58 bp, Artificial
  Synthetic oligonucleotide
ggcctgacggccaccagaagcgcccagagcggccctaggaggcttgaagacggaccca

SEQ ID NO: 237821 - DNA, 60 bp, Artificial
  Synthetic oligonucleotide
gggaatatcggctcgtcatctctaacgttgttctataatcaacaattgcccaatattctg

SEQ ID NO: 237822 - DNA, 53 bp, Artificial
  Synthetic oligonucleotide
gggatacacgggaacgggggcctgtcaaagtcgcgtccggccgacaggaatcg

SEQ ID NO: 237823 - DNA, 58 bp, Artificial
  Synthetic oligonucleotide
gggcagccctgggtaggacccaccaaacaatctgagcaagcctgtaactgatttaaca

SEQ ID NO: 237824 - DNA, 60 bp, Artificial
  Synthetic oligonucleotide
gggccttactacatctgcttgccgctcgggtcggagataataatgctgttgtagtaagtc

SEQ ID NO: 237825 - DNA, 60 bp, Artificial
  Synthetic oligonucleotide
gggcttgcgaattatagtgagcaaggcagattctgggatgttcatcgtagtcaggcagat

SEQ ID NO: 237826 - DNA, 59 bp, Artificial
  Synthetic oligonucleotide
ccggaatcgatggatgaccggccttcgctgtcctatagaactttgtgcgaagcgccgag

SEQ ID NO: 237827 - DNA, 57 bp, Artificial
  Synthetic oligonucleotide
gggggcgctactttacagcgatcgtccctgttggcgactactaagacaggtacacta

SEQ ID NO: 237828 - DNA, 52 bp, Artificial
  Synthetic oligonucleotide
gggttccgtccaaattaccattggcggttcccgcaagtgagttaaggccgga

SEQ ID NO: 237829 - DNA, 53 bp, Artificial
  Synthetic oligonucleotide
gggtttgcggaattcgtcccgtcgtaggtgaccaatgaaacctcgcggtagcc

SEQ ID NO: 237830 - DNA, 60 bp, Artificial
  Synthetic oligonucleotide
ggttcagttatctcgattaggacgagatgataacattctggtcaatcaagccactggtga

SEQ ID NO: 237831 - DNA, 50 bp, Artificial
  Synthetic oligonucleotide
gtaaaccaagggtttagaccccgtttatgtgagcggttgggggctttatc

SEQ ID NO: 237832 - DNA, 55 bp, Artificial
  Synthetic oligonucleotide
gtaaagtgacacggatggcaaaacgtctttcggtcgtttctgtgagcgattgggg

SEQ ID NO: 237833 - DNA, 58 bp, Artificial
  Synthetic oligonucleotide
gtaagcaagcagatagccaatcttgcccccgagcgtaactttcccctcttcgtcagta

SEQ ID NO: 237834 - DNA, 60 bp, Artificial
  Synthetic oligonucleotide
gtaagcctgaggatgcctcaggaacgcaattctttacagttctgatatcaactaccggag

SEQ ID NO: 237835 - DNA, 60 bp, Artificial
  Synthetic oligonucleotide
gtaatgctatctaacacacggaaacctgatctaatttctgctgtgtcgatattcgggaaa

SEQ ID NO: 237836 - DNA, 59 bp, Artificial
  Synthetic oligonucleotide
gtagtaagtcacaagacattagcagaattgctaggggttagatcaattacaactattaa

SEQ ID NO: 237837 - DNA, 59 bp, Artificial
  Synthetic oligonucleotide
cgacctgcgagcatttaattgtgacaatagctttgacgatcaccccgcaacgtggcccg

SEQ ID NO: 237838 - DNA, 53 bp, Artificial
  Synthetic oligonucleotide
ccgttcagcgtttcggctacggctaggccccccggtctgtcgcaaaaggaggc

SEQ ID NO: 237839 - DNA, 59 bp, Artificial
  Synthetic oligonucleotide
gtcaaaagcgcttggtctaatcggaactaaaactagatcactccgacgagcaatctgac

SEQ ID NO: 237840 - DNA, 56 bp, Artificial
  Synthetic oligonucleotide
acattgccagccgtgtttctgcattcgggacgcgtaattcgaaggggaatttctgt

SEQ ID NO: 237841 - DNA, 59 bp, Artificial
  Synthetic oligonucleotide
aaagattcgactgcacaatgagggccgggcgaggcttgccgtagtcaccttgcaacgaa

SEQ ID NO: 237842 - DNA, 59 bp, Artificial
  Synthetic oligonucleotide
aagctttcagcgttctggtttggatacttcaagacaaaggcatcagcaaagacctcgtc

SEQ ID NO: 237843 - DNA, 59 bp, Artificial
  Synthetic oligonucleotide
acaaggttgtcacatttgaaatcgacgtgtcagacatcggtctcttccgacgaagcgcc

SEQ ID NO: 237844 - DNA, 58 bp, Artificial
  Synthetic oligonucleotide
aagctcgcgaaagcttcaaggccgaagccctcgcctcatgggccgaatatcaggaaac

SEQ ID NO: 237845 - DNA, 60 bp, Artificial
  Synthetic oligonucleotide
accgcacattgcgatcacaatatgtcctcctactatcccagcgcggccagtgtgaacatg

SEQ ID NO: 237846 - DNA, 49 bp, Artificial
  Synthetic oligonucleotide
acggtcaaaaatacggtcaaaaatacggtcaaaaatacggtcaaaaata

SEQ ID NO: 237847 - DNA, 56 bp, Artificial
  Synthetic oligonucleotide
acgtatgctttccttgcggtgccccattgtacgttagaactggggagttcacgtca

SEQ ID NO: 237848 - DNA, 60 bp, Artificial
  Synthetic oligonucleotide
acgtggcaactgccctccatgagccgctgtgaggccgccagatttggtaagttgccacgt

SEQ ID NO: 237849 - DNA, 55 bp, Artificial
  Synthetic oligonucleotide
ccgtttgacagggtgagcctgaacagccttacagggcccgaaatggtcgcgtttg

SEQ ID NO: 237850 - DNA, 57 bp, Artificial
  Synthetic oligonucleotide
accctgcataaccagcgggtcggtccgcggggctatgaggtcgggactgccagcaaa

SEQ ID NO: 237851 - DNA, 52 bp, Artificial
  Synthetic oligonucleotide
actacccaataccaaaacgtggctaagaggacaggcgtagaaaaactaacgc

SEQ ID NO: 237852 - DNA, 60 bp, Artificial
  Synthetic oligonucleotide
aaaggtcgtacagatcgtggcatctgttgcaggaactaccgacttctaagccacgcatca

SEQ ID NO: 237853 - DNA, 55 bp, Artificial
  Synthetic oligonucleotide
aagaacgcaatcccttacgtaaagctggcacattaggttctatattttcgcgagt

SEQ ID NO: 237854 - DNA, 60 bp, Artificial
  Synthetic oligonucleotide
aacttcaagcattgctggcgcacacgctccgcgaagtcagccccgcgcgtgtcgggaacc

SEQ ID NO: 237855 - DNA, 60 bp, Artificial
  Synthetic oligonucleotide
aactgttcgcgccgacagaagcgctctcaagggaacgaatggctccactaggcttgaggc

SEQ ID NO: 237856 - DNA, 59 bp, Artificial
  Synthetic oligonucleotide
acaagacatcacaagcgaatcggacgaatcccacgctaccgacacgggcctaggtgaca

SEQ ID NO: 237857 - DNA, 54 bp, Artificial
  Synthetic oligonucleotide
acaacgatcggacggggcaactaaagtggatcaaagcccccgacccattctgcc

SEQ ID NO: 237858 - DNA, 57 bp, Artificial
  Synthetic oligonucleotide
aactaggggaaacacgctggattgtgagctttccgactaaacagcattggcgtaatc

SEQ ID NO: 237859 - DNA, 55 bp, Artificial
  Synthetic oligonucleotide
aacgttcgtctaggcgttcacctagtctggccgcataatgccccgaacgcgtcgg

SEQ ID NO: 237860 - DNA, 60 bp, Artificial
  Synthetic oligonucleotide
cctctattatctcccactccgcgtccgtcagatctcctcgcatctagtctgctttacaaa

SEQ ID NO: 237861 - DNA, 57 bp, Artificial
  Synthetic oligonucleotide
aacagataatggcgagtggcggattgaacctgtcgaactgttccgtgtctggccccc

SEQ ID NO: 237862 - DNA, 60 bp, Artificial
  Synthetic oligonucleotide
aattcatcgttggagaagtaggattactctcaaatgcagccattacgtaaggcatccatg

SEQ ID NO: 237863 - DNA, 60 bp, Artificial
  Synthetic oligonucleotide
actcgctgtttagcgcaactgtgatccttgccgaggacgaacaaccagaccggagcgagc

SEQ ID NO: 237864 - DNA, 55 bp, Artificial
  Synthetic oligonucleotide
actgagccgtttctacaaggggcgtatttgtcttcgttgcggaagaggccatggt

SEQ ID NO: 237865 - DNA, 56 bp, Artificial
  Synthetic oligonucleotide
aacagtcaaagttaggaacagaaaacgagctttgggatattctttaatgatagcag

SEQ ID NO: 237866 - DNA, 59 bp, Artificial
  Synthetic oligonucleotide
acccaacaacaggaagctgatccaacggtacagcaggaaatttctcagctagtcactgg

SEQ ID NO: 237867 - DNA, 54 bp, Artificial
  Synthetic oligonucleotide
aacgcaaaataccggaacagtttccaatacgttgagccagacgttgaaactcta

SEQ ID NO: 237868 - DNA, 52 bp, Artificial
  Synthetic oligonucleotide
aacgagcggcttccggtgggctggttgcccaaaccggcccggcgctttacac

SEQ ID NO: 237869 - DNA, 60 bp, Artificial
  Synthetic oligonucleotide
actgtgctggtctgttcactggagatagcgtgatcttcgaccaaggaagctacaagagct

SEQ ID NO: 237870 - DNA, 56 bp, Artificial
  Synthetic oligonucleotide
aatcgcgataagtgagaaaccctcctgctctgcgggagggttttttcttggctata

SEQ ID NO: 237871 - DNA, 60 bp, Artificial
  Synthetic oligonucleotide
cctctcaatgtgaggcggttcctcagtaattgagacggatttctctgaatatatcggaat

SEQ ID NO: 237872 - DNA, 55 bp, Artificial
  Synthetic oligonucleotide
acctccggcgagttaggggatggaatttttacgatgccctgttccattatagctc

SEQ ID NO: 237873 - DNA, 56 bp, Artificial
  Synthetic oligonucleotide
accgttgctttaacagtgaaagtgcgtcgcaccgattggcaacggttacgtcagct

SEQ ID NO: 237874 - DNA, 55 bp, Artificial
  Synthetic oligonucleotide
aaacccgttctggcagcctatccggaggcccgcgtgactattgttacgggcggca

SEQ ID NO: 237875 - DNA, 60 bp, Artificial
  Synthetic oligonucleotide
aaggtttatcaaatatggcgacaaaattgagaaagcagccaatcagatatgacgagaatc

SEQ ID NO: 237876 - DNA, 60 bp, Artificial
  Synthetic oligonucleotide
acgcatgcagcctgcccgatatgcgctgccccgcatcacgtagccactcggtcccccgtt

SEQ ID NO: 237877 - DNA, 55 bp, Artificial
  Synthetic oligonucleotide
aaacgctgacccagatagaaaagaactaaacgaaatactcaaaggctctactgac

SEQ ID NO: 237878 - DNA, 55 bp, Artificial
  Synthetic oligonucleotide
accgtgtcctacgcaatcccccctaataggccctgaccctagcgcttgcccgagc

SEQ ID NO: 237879 - DNA, 60 bp, Artificial
  Synthetic oligonucleotide
aataagtcgattgtgctatcagaatactcaactcgacgtattatatagccaaggcgatca

SEQ ID NO: 237880 - DNA, 50 bp, Artificial
  Synthetic oligonucleotide
acgaaaaaccctgacgcattggaagtccgcacgaaaaccccggtttcagg

SEQ ID NO: 237881 - DNA, 60 bp, Artificial
  Synthetic oligonucleotide
aaaaatcatagtggttcacggatttggcatcgagaccaagttgctccgccagatacaaga

SEQ ID NO: 237882 - DNA, 60 bp, Artificial
  Synthetic oligonucleotide
ccttacaagcgccgccttatggatgcgttgcatcctggcgaaagcatggccgactacgag

SEQ ID NO: 237883 - DNA, 52 bp, Artificial
  Synthetic oligonucleotide
accgtatttttctaaattttttataaccagttatcattctagatcgaataac

SEQ ID NO: 237884 - DNA, 55 bp, Artificial
  Synthetic oligonucleotide
aatctcggacttaacgtcgtcacgcgtcccaccagacgtgttcggcaaacgtgta

SEQ ID NO: 237885 - DNA, 60 bp, Artificial
  Synthetic oligonucleotide
aatactcagccggaagctccgtagctgaccgatcagtcgattctggcggttcaatatagg

SEQ ID NO: 237886 - DNA, 60 bp, Artificial
  Synthetic oligonucleotide
acaatatgcgatcgtgtcggttatgcccgtgcgacggtcgtcaaattactgcggcaatta

SEQ ID NO: 237887 - DNA, 55 bp, Artificial
  Synthetic oligonucleotide
tgaccgataagtgccgcgcttgaaacgccccaacctgtccacaaaagggctaccg

SEQ ID NO: 237888 - DNA, 51 bp, Artificial
  Synthetic oligonucleotide
cccccctgtatcggaccatcgccccccccatcaccggaccatcgccccccc

SEQ ID NO: 237889 - DNA, 59 bp, Artificial
  Synthetic oligonucleotide
tatgctgacttgtgcgttacgacgttctccgtagtagcaatattctccatccgaaccat

SEQ ID NO: 237890 - DNA, 59 bp, Artificial
  Synthetic oligonucleotide
aactattaagacagcaataactgcacttgtttctggaaattggattgaagtcaggcgga

SEQ ID NO: 237891 - DNA, 59 bp, Artificial
  Synthetic oligonucleotide
cgtgagttctagagccttgagctccatgttgaacctttgtacgaatgcatctgtgtcgc

SEQ ID NO: 237892 - DNA, 59 bp, Artificial
  Synthetic oligonucleotide
agcgaaatcaccaggcgaaggtcaggtaaactacgcgtcccgatctcgcgtagcatggc

SEQ ID NO: 237893 - DNA, 54 bp, Artificial
  Synthetic oligonucleotide
ccttcaagggcggccccgccgatgcctgacccgttagaccccgctgagttcgac

SEQ ID NO: 237894 - DNA, 59 bp, Artificial
  Synthetic oligonucleotide
cgctactatcacaaagtctaatccggaaaatgccatgttcgcgataaataggctggtcg

SEQ ID NO: 237895 - DNA, 59 bp, Artificial
  Synthetic oligonucleotide
cgtcacattgagcgcaaacccacccttttgtgacagacgaatggtgtcactcggcccta

SEQ ID NO: 237896 - DNA, 59 bp, Artificial
  Synthetic oligonucleotide
cagcactcgcgtactccagtctctcaacaggcgttcttggcgaacccagttccggatgt

SEQ ID NO: 237897 - DNA, 54 bp, Artificial
  Synthetic oligonucleotide
cggttaaccaaccctagcccccgcgccatacatgtcgcttttctacgcaatttc

SEQ ID NO: 237898 - DNA, 58 bp, Artificial
  Synthetic oligonucleotide
cgggctttgatccgacgggcttccggtaatgcgtcttctgaattgacggcaggtgatg

SEQ ID NO: 237899 - DNA, 59 bp, Artificial
  Synthetic oligonucleotide
tccgacgggcttccggtaatgcgtcttctgaattgacggcaggtgatgtccggcttgac

SEQ ID NO: 237900 - DNA, 59 bp, Artificial
  Synthetic oligonucleotide
cattgctcttattgtgcgttagttgcgtgtttgatgtaagaaagcgaactcttttgatc

SEQ ID NO: 237901 - DNA, 56 bp, Artificial
  Synthetic oligonucleotide
aaaacctatcacgagcgcaaacaggcggctgaaaatccctttagcgaggtcgaata

SEQ ID NO: 237902 - DNA, 55 bp, Artificial
  Synthetic oligonucleotide
gacaaggtgggaaaggcccttgacgcgcctgcggcaaccacttaccacgggctta

SEQ ID NO: 237903 - DNA, 59 bp, Artificial
  Synthetic oligonucleotide
cctatgatcgctctgaccggaggttccgggtatattggtgatccagagcccgcctcaga

SEQ ID NO: 237904 - DNA, 58 bp, Artificial
  Synthetic oligonucleotide
ccttctccgacagggacatgggttcaaactgatcgggcaacccacgaagcatgggcgc

SEQ ID NO: 237905 - DNA, 57 bp, Artificial
  Synthetic oligonucleotide
atggcactggttacacccggcgtctttcttgtggcttcaaggataggtcgccaattc

SEQ ID NO: 237906 - DNA, 53 bp, Artificial
  Synthetic oligonucleotide
aaggcgatcaagacaggccgggtttccgccgaaaaatccgataacggcgaatg

SEQ ID NO: 237907 - DNA, 58 bp, Artificial
  Synthetic oligonucleotide
gtattatgtttatcgagtaccttgttatgaatatagccgtcagcagtttcacccccta

SEQ ID NO: 237908 - DNA, 57 bp, Artificial
  Synthetic oligonucleotide
atcgttgatggggcgactatctgcctgtcccgcgcctctgtcgagaaaaacggcttt

SEQ ID NO: 237909 - DNA, 57 bp, Artificial
  Synthetic oligonucleotide
gggcgaacggatttgattcatctgatttcgaagaacaattccgcactttaccaggac

SEQ ID NO: 237910 - DNA, 59 bp, Artificial
  Synthetic oligonucleotide
cactctccattcttttcggcggatcggtagccgtggattttgtggacagtgcgcagcga

SEQ ID NO: 237911 - DNA, 59 bp, Artificial
  Synthetic oligonucleotide
ggcgagcgtcttccgacgagtgtgccaatcacgacaccgtcctgatattggccgttcac

SEQ ID NO: 237912 - DNA, 59 bp, Artificial
  Synthetic oligonucleotide
aagagcgttgcgcctggctatgacgtgtatgcgctctatgaccaatgggtgtcatggtg

SEQ ID NO: 237913 - DNA, 57 bp, Artificial
  Synthetic oligonucleotide
gacccgagatcggaatgacgcgctccgcctacccgagaaccgaggggcttcgcgatg

SEQ ID NO: 237914 - DNA, 59 bp, Artificial
  Synthetic oligonucleotide
caatttttctgcgtagcgtcgcaattcagcgggcgagacagcaatattctcggtcgact

SEQ ID NO: 237915 - DNA, 57 bp, Artificial
  Synthetic oligonucleotide
cgaaagtgagggaagtgcccacttatgcaaacttgcgtttgcgtgggtgaggggata

SEQ ID NO: 237916 - DNA, 58 bp, Artificial
  Synthetic oligonucleotide
gctggtatctgcccccatatcgtagtatcactaggtgatacctcaatcccgaaggtgc

SEQ ID NO: 237917 - DNA, 58 bp, Artificial
  Synthetic oligonucleotide
tcgaggatcacgcatcagacgactttctcgacagcaatggggctgcgttgtcaacact

SEQ ID NO: 237918 - DNA, 58 bp, Artificial
  Synthetic oligonucleotide
tcggcatagtcaccgaaggtggtgtaaagatcggtcgtgttgttgcggttgcactcac

SEQ ID NO: 237919 - DNA, 54 bp, Artificial
  Synthetic oligonucleotide
atcggacagtacagccgggttaaagcggaacctctccaaggacgataacaagat

SEQ ID NO: 237920 - DNA, 58 bp, Artificial
  Synthetic oligonucleotide
taagtagccttttccgccagcactcgcgtactccagtctctcaacaggcgttcttggc

SEQ ID NO: 237921 - DNA, 57 bp, Artificial
  Synthetic oligonucleotide
cggtaaggctaatgcgcaaccaactaacacgtcatggagagttaaaatatggtctta

SEQ ID NO: 237922 - DNA, 58 bp, Artificial
  Synthetic oligonucleotide
atttatggtgagattggcgttattagtaatagcagagctgttggtgatagttccgcta

SEQ ID NO: 237923 - DNA, 58 bp, Artificial
  Synthetic oligonucleotide
tctggctgtctcggctatcaaggcagccgatgtaattttaattccggtgcaaccttct

SEQ ID NO: 237924 - DNA, 58 bp, Artificial
  Synthetic oligonucleotide
tcacatttgaaatcgacgtgtcagacatcggtctcttccgacgaagcgccctgtggcg

SEQ ID NO: 237925 - DNA, 58 bp, Artificial
  Synthetic oligonucleotide
cgcctgaaagggcggcggcatttccgctgtcgacccgcagtggaggaaagggcattgc

SEQ ID NO: 237926 - DNA, 56 bp, Artificial
  Synthetic oligonucleotide
cgaagcccgttcaaaatcagaaggtaaacggcaaccaagatcctgtgcaaatgcgg

SEQ ID NO: 237927 - DNA, 58 bp, Artificial
  Synthetic oligonucleotide
gacgtcttgttcgccattgagcagtgcggttgaaatgcccccatcatcgggatcaggg

SEQ ID NO: 237928 - DNA, 56 bp, Artificial
  Synthetic oligonucleotide
cgacggccttgttcccatccaagaagcgtccctttagacacgccaatgctttttgc

SEQ ID NO: 237929 - DNA, 58 bp, Artificial
  Synthetic oligonucleotide
gcgcttatcacgatcagggcgctacgatcttaaccgtctaaagtctgtcatgatgctc

SEQ ID NO: 237930 - DNA, 56 bp, Artificial
  Synthetic oligonucleotide
agccctatgtcgggttgccacaaattgaggaccgaggacgtcttaatttctggcaa

SEQ ID NO: 237931 - DNA, 58 bp, Artificial
  Synthetic oligonucleotide
aaagtgcgggttcgcttgctatggtatactgtgcagtatattaatcaagcgggattta

SEQ ID NO: 237932 - DNA, 54 bp, Artificial
  Synthetic oligonucleotide
ttaaccgcccgattaattacccctgtgtcagtaacgaaaagacgcagacacagg

SEQ ID NO: 237933 - DNA, 58 bp, Artificial
  Synthetic oligonucleotide
tgttcgggcaaccgacggccattccaacgatattggtggtcgggacagctatggtcaa

SEQ ID NO: 237934 - DNA, 58 bp, Artificial
  Synthetic oligonucleotide
acattccagctatagtcaccggtcagcgagatatgctcccagcccaatggcgcgatgt

SEQ ID NO: 237935 - DNA, 57 bp, Artificial
  Synthetic oligonucleotide
ccgtgaaccggactatcgagcaaggggataggccgattgttgtatagtgtcagaacc

SEQ ID NO: 237936 - DNA, 57 bp, Artificial
  Synthetic oligonucleotide
agtcggaggacggtgaattgcgtctgttagcggcacagggcgactgggcaggaatcc

SEQ ID NO: 237937 - DNA, 51 bp, Artificial
  Synthetic oligonucleotide
gaaaaaagccccatatttggggcttttttttattatgtctcaagattttta

SEQ ID NO: 237938 - DNA, 57 bp, Artificial
  Synthetic oligonucleotide
aaatcgatattttaagcggaatagatgcaacatcatcaattaatatctgagcttctg

SEQ ID NO: 237939 - DNA, 57 bp, Artificial
  Synthetic oligonucleotide
caactcggccggaagcgcgatttcatattcgcgggctacggtggagttcttgcgcgt

SEQ ID NO: 237940 - DNA, 57 bp, Artificial
  Synthetic oligonucleotide
aagcgcaagaaaaatagcgagagggattggtatatccgccacattatggcagatcat

SEQ ID NO: 237941 - DNA, 57 bp, Artificial
  Synthetic oligonucleotide
gccgtgcacggctctctatgcgtgtccattgcgatccattgtcgcccataagtacgc

SEQ ID NO: 237942 - DNA, 57 bp, Artificial
  Synthetic oligonucleotide
gtgccattgtgcccgagtatgctacatcgctgatacgaaaatcaaaagttttgcatc

SEQ ID NO: 237943 - DNA, 57 bp, Artificial
  Synthetic oligonucleotide
ctacccaagcgcagcgagatgcgagcgcgccaagcagacaatagaagcggaaatgaa

SEQ ID NO: 237944 - DNA, 57 bp, Artificial
  Synthetic oligonucleotide
tccagccggttaagctgcacttcaagagccgcgcgcaagacaggtatagtctcgcga

SEQ ID NO: 237945 - DNA, 57 bp, Artificial
  Synthetic oligonucleotide
atcctttatctcggattccatatgatcctccatatcgagctatctgatcggtatgga

SEQ ID NO: 237946 - DNA, 57 bp, Artificial
  Synthetic oligonucleotide
taacagccatcgactacccaagcgcagcgagatgcgagcgcgccaagcagacaatag

SEQ ID NO: 237947 - DNA, 57 bp, Artificial
  Synthetic oligonucleotide
taaggcgtcatatctggaatggtcatatgatagtcagggtgcaagacatcaaggtcg

SEQ ID NO: 237948 - DNA, 55 bp, Artificial
  Synthetic oligonucleotide
cgagattttttaacgtaagaatgagcaaaccagctgggaggaaccataagcaaaa

SEQ ID NO: 237949 - DNA, 60 bp, Artificial
  Synthetic oligonucleotide
gaaagaactccgctagtatagtgatgtttgaaagtcaggctgtcgataatggatgcggtt

SEQ ID NO: 237950 - DNA, 52 bp, Artificial
  Synthetic oligonucleotide
catttagagcgttaagagttccggtattagaagttatccctccaacggttcc

SEQ ID NO: 237951 - DNA, 57 bp, Artificial
  Synthetic oligonucleotide
taatcttgaggcgacgccacagtctttctctcgcagagttcatgccggtatcacctt

SEQ ID NO: 237952 - DNA, 57 bp, Artificial
  Synthetic oligonucleotide
agcccgcagaggttcaggggtatcccctgacgcacgcaaacgcaagtttgcataagt

SEQ ID NO: 237953 - DNA, 57 bp, Artificial
  Synthetic oligonucleotide
cgtcgaggggatcgatgaacgagcgtgtgtgcgacacgacatatcctccttccctgc

SEQ ID NO: 237954 - DNA, 57 bp, Artificial
  Synthetic oligonucleotide
aactggcgattccatggcgcgccccttaatggacgcgccgcgaaatctccactgttc

SEQ ID NO: 237955 - DNA, 57 bp, Artificial
  Synthetic oligonucleotide
cgccgacgtccctcaagctcgcctaccgtgaatctgtggccgaataatgcacagggg

SEQ ID NO: 237956 - DNA, 56 bp, Artificial
  Synthetic oligonucleotide
gttttgtcatttgaagaaaccagttgttaccttcaatcatatcacttggcttaacc

SEQ ID NO: 237957 - DNA, 57 bp, Artificial
  Synthetic oligonucleotide
acatttatcgtgattggcaaaccacgaggggcataacttgagcctgccggatatact

SEQ ID NO: 237958 - DNA, 57 bp, Artificial
  Synthetic oligonucleotide
ccagcgaggcggtccggacccaatgccccgtcattgacgtaggcgatagcgtctatg

SEQ ID NO: 237959 - DNA, 51 bp, Artificial
  Synthetic oligonucleotide
atttccccactaggaagaactaagaaagggaatcgtgaaaatatccctaaa

SEQ ID NO: 237960 - DNA, 60 bp, Artificial
  Synthetic oligonucleotide
gaacatctttatcgcccgtcatgctagcttgttcgacggacgcgaacaaccatctctcct

SEQ ID NO: 237961 - DNA, 57 bp, Artificial
  Synthetic oligonucleotide
tatggccataacgtgacgttacacaagttggtcggatcgacacatgaatacggaacc

SEQ ID NO: 237962 - DNA, 56 bp, Artificial
  Synthetic oligonucleotide
attcgctacgacgggttgaacgcatcgaacccaatgtagtgtgcgtagagcaaggc

SEQ ID NO: 237963 - DNA, 56 bp, Artificial
  Synthetic oligonucleotide
gattggcagattatcccaggcaatcacccatcggacaaggtgacggtcctgatccc

SEQ ID NO: 237964 - DNA, 55 bp, Artificial
  Synthetic oligonucleotide
ggatatatcccgtacaagtaaaatagacctatacggctcctgttaaaatagttca

SEQ ID NO: 237965 - DNA, 56 bp, Artificial
  Synthetic oligonucleotide
cgatcggttccgatcgcttggaaatcgctctagcgctagtttcatgtgaggcggcc

SEQ ID NO: 237966 - DNA, 56 bp, Artificial
  Synthetic oligonucleotide
gatatatacagctggctggcgcataggctttgtagggttaggcgtggaggcgtgac

SEQ ID NO: 237967 - DNA, 56 bp, Artificial
  Synthetic oligonucleotide
atcccgccggacagcgacatttccgtcaaggggatagattaccttccgaatggcgc

SEQ ID NO: 237968 - DNA, 56 bp, Artificial
  Synthetic oligonucleotide
ccgcgcgtggtactcggctggtcgccgggcgacgttgcaacgccgctatctcccgc

SEQ ID NO: 237969 - DNA, 54 bp, Artificial
  Synthetic oligonucleotide
cccacctgaagcaataaaccttttacgatgaacttgttttgtcatttgaagaaa

SEQ ID NO: 237970 - DNA, 56 bp, Artificial
  Synthetic oligonucleotide
agggtagatgagtggacataaagtcgcggtcatccctagatgatgtgaactagttc

SEQ ID NO: 237971 - DNA, 60 bp, Artificial
  Synthetic oligonucleotide
gaacgccacagggcgcttcgtcggaagagaccgatgtctgacacgtcgatttcaaatgtg

SEQ ID NO: 237972 - DNA, 56 bp, Artificial
  Synthetic oligonucleotide
tccggcctctagcaccgcagtcacatgcacgaataccttaggttgcttgtcgtccc

SEQ ID NO: 237973 - DNA, 56 bp, Artificial
  Synthetic oligonucleotide
agtgccactgtgcgaccacttcccgacctttcaacgcccgcatggactgcaaagtt

SEQ ID NO: 237974 - DNA, 56 bp, Artificial
  Synthetic oligonucleotide
ccaacggccaatagggcgtcaaagcccgctgccctacactcgccccaatcatatcg

SEQ ID NO: 237975 - DNA, 56 bp, Artificial
  Synthetic oligonucleotide
atggggcgctccgagtccggcgaagtccgagcttgccaacaggatcgtttcgttat

SEQ ID NO: 237976 - DNA, 56 bp, Artificial
  Synthetic oligonucleotide
gagataccattggccctgggatctgaggtccgtcgcatagccccgcgtcatggtgg

SEQ ID NO: 237977 - DNA, 56 bp, Artificial
  Synthetic oligonucleotide
gagtgagggcggggtaacagccatcgactacccaagcgcagcgagatgcgagcgcg

SEQ ID NO: 237978 - DNA, 56 bp, Artificial
  Synthetic oligonucleotide
taagccagcgagtaccacctgatgtcgagcggcccgatggaaagggcgatcggact

SEQ ID NO: 237979 - DNA, 53 bp, Artificial
  Synthetic oligonucleotide
ctccgaaaaccagaataattcgaaatcctccactcttcccgctaccctctcgg

SEQ ID NO: 237980 - DNA, 56 bp, Artificial
  Synthetic oligonucleotide
tgatcctatagcccccgtcgcttttcacctgattttcggcatcaccgggtgaaaga

SEQ ID NO: 237981 - DNA, 55 bp, Artificial
  Synthetic oligonucleotide
gaatccggttcgtaatgcccttcgacatagacggccagagattttacgctgtgcc

SEQ ID NO: 237982 - DNA, 60 bp, Artificial
  Synthetic oligonucleotide
gaacgtcttggtctcgtcaaaggcgcggtcagccgcaacttgcgtggttttgctcatggc

SEQ ID NO: 237983 - DNA, 55 bp, Artificial
  Synthetic oligonucleotide
ccgcggatagcgaccacaatcgactacgcactgaaggtggcaaacggccaaccgg

SEQ ID NO: 237984 - DNA, 55 bp, Artificial
  Synthetic oligonucleotide
ccgcgagcctgcatatgacgcgaggccgcgaaacacaaaacgctgacccagatag

SEQ ID NO: 237985 - DNA, 55 bp, Artificial
  Synthetic oligonucleotide
gcgaaggtcgctttgttgcgcttcacccgcgggtccgacactgttctgcgtcttg

SEQ ID NO: 237986 - DNA, 55 bp, Artificial
  Synthetic oligonucleotide
gcgaagtttcttcccgtcccagtatgaaggcttaagattctataacggcacagag

SEQ ID NO: 237987 - DNA, 55 bp, Artificial
  Synthetic oligonucleotide
gcgactatggcatgtcatagctctgtccgtgcaggtcgattgctgtccttggccg

SEQ ID NO: 237988 - DNA, 55 bp, Artificial
  Synthetic oligonucleotide
gcgagaatcgtccgctattccaatttgcgcacctgaaaggagccgttccggagtg

SEQ ID NO: 237989 - DNA, 55 bp, Artificial
  Synthetic oligonucleotide
gcgagcgtgctttcgcgccaacagaatccgcgaatgagaatggaaggtgtcgata

SEQ ID NO: 237990 - DNA, 55 bp, Artificial
  Synthetic oligonucleotide
gcgcaaaagatcctctggtgcagaaagcctatcaaataatgtccggaacgcctgc

SEQ ID NO: 237991 - DNA, 55 bp, Artificial
  Synthetic oligonucleotide
aatcggtggcacagacgacatgcgttgcgtccgcgtgcgggagataccaaggcga

SEQ ID NO: 237992 - DNA, 55 bp, Artificial
  Synthetic oligonucleotide
acacagccagcccgtgctcttcatctactggaccgcggacaactatgggcccagc

SEQ ID NO: 237993 - DNA, 59 bp, Artificial
  Synthetic oligonucleotide
gaactttcccagcttgtcaccggcctaggaaacaagctccgcgcacccgatgcatctcc

SEQ ID NO: 237994 - DNA, 54 bp, Artificial
  Synthetic oligonucleotide
ccgacccctagcgaccactccgattgcgagggcgtgggttcgactgaactggtt

SEQ ID NO: 237995 - DNA, 55 bp, Artificial
  Synthetic oligonucleotide
ccgaccatcaatcgaacaatctcagatgcttaccactttagtctaaggttcgacc

SEQ ID NO: 237996 - DNA, 55 bp, Artificial
  Synthetic oligonucleotide
ccgttctttcacgatcagataatctctggttatcccgaaggtctctcgtgtgttt

SEQ ID NO: 237997 - DNA, 55 bp, Artificial
  Synthetic oligonucleotide
gccgtctgatattcgagggtttcctgccccagcgtcttcgacagcaattccgccg

SEQ ID NO: 237998 - DNA, 55 bp, Artificial
  Synthetic oligonucleotide
cctagccgctcagcgtatctggccgaccttccaagacctgacgctcgttcatccg

SEQ ID NO: 237999 - DNA, 55 bp, Artificial
  Synthetic oligonucleotide
gaattgacctatattatgtccgatcatagtcagaacagatgaagaaccgcaaatc

SEQ ID NO: 238000 - DNA, 55 bp, Artificial
  Synthetic oligonucleotide
gccggttgggcgtgaagcaccatatgcccgtttggctcaattgaatcccgccctg

SEQ ID NO: 238001 - DNA, 55 bp, Artificial
  Synthetic oligonucleotide
gccggtaagccgagcctcgtcagttggcgcaccatgctgtctttgctcttgagcg

SEQ ID NO: 238002 - DNA, 55 bp, Artificial
  Synthetic oligonucleotide
gccggaatgtcagctggacatcatggttaagatccctgaacagagtatccatgcc

SEQ ID NO: 238003 - DNA, 51 bp, Artificial
  Synthetic oligonucleotide
gccgcggtttggactttcaccgtcccttacgggtcggaccatcgttcccaa

SEQ ID NO: 238004 - DNA, 59 bp, Artificial
  Synthetic oligonucleotide
gaagcggacgcgccattaggaccggctcaaattctacgcgctagatcctctgaccccgc

SEQ ID NO: 238005 - DNA, 55 bp, Artificial
  Synthetic oligonucleotide
ctgatcagactccgcaccagaggatttgccccgaccatccttcgccgcatgggac

SEQ ID NO: 238006 - DNA, 55 bp, Artificial
  Synthetic oligonucleotide
gccgagaccgtaagggcgaacgcgatgggtaatggtctcatgtgcagcactcctg

SEQ ID NO: 238007 - DNA, 55 bp, Artificial
  Synthetic oligonucleotide
cctgactggtatgctgcttgtttcgttacggatccaaccaacgctgctatgtggg

SEQ ID NO: 238008 - DNA, 55 bp, Artificial
  Synthetic oligonucleotide
gccgaagccctcgcctcatgggccgaatatcaggaaaccgggtttcacttgaccg

SEQ ID NO: 238009 - DNA, 55 bp, Artificial
  Synthetic oligonucleotide
gccgaaagttccactgcgtttcataggactgtgcccgcgatttaatcgtccgcag

SEQ ID NO: 238010 - DNA, 55 bp, Artificial
  Synthetic oligonucleotide
gccctaataatatccacaattgccggcacagccgctaagtcaaaagcgctcggtc

SEQ ID NO: 238011 - DNA, 55 bp, Artificial
  Synthetic oligonucleotide
gcccgtgcaaggcgaacttgccctcccaagatgattgcgcagtcgaaccgggatt

SEQ ID NO: 238012 - DNA, 55 bp, Artificial
  Synthetic oligonucleotide
cctggtcgcacaatatcgcgatggggagcatattcgacctcctgtccctctagtt

SEQ ID NO: 238013 - DNA, 55 bp, Artificial
  Synthetic oligonucleotide
cctgtgatggcgacgctcatccgcgacgtgcgcattttcgacggccagacaatgc

SEQ ID NO: 238014 - DNA, 55 bp, Artificial
  Synthetic oligonucleotide
cctgttcgttcaattcaatcgtcctcaaatctgtccgaatacccagcgcagaacc

SEQ ID NO: 238015 - DNA, 60 bp, Artificial
  Synthetic oligonucleotide
gaagttcccccgcttgggctttgatccccatgctcttgaacagcaaatccatgccaccgc

SEQ ID NO: 238016 - DNA, 55 bp, Artificial
  Synthetic oligonucleotide
gcgaacgcatgttcctagcgaccgggtggcgacacgcatgtccaggcgaaaagct

SEQ ID NO: 238017 - DNA, 55 bp, Artificial
  Synthetic oligonucleotide
ccggagatgatatcagtttgatttctcccgcaggccagaccaccccttttggaac

SEQ ID NO: 238018 - DNA, 55 bp, Artificial
  Synthetic oligonucleotide
ccggatgaataaccgtttcggatatatcccgaccgcccataatggccatagtgat

SEQ ID NO: 238019 - DNA, 55 bp, Artificial
  Synthetic oligonucleotide
gcgaaagacgcgcgactatgacgccgaattgcgggcactgagcgacaaggccaag

SEQ ID NO: 238020 - DNA, 55 bp, Artificial
  Synthetic oligonucleotide
ccggcgccacctcactcagagccaacggcaacatctgtcgtatgggtgtgaaaat

SEQ ID NO: 238021 - DNA, 55 bp, Artificial
  Synthetic oligonucleotide
ccgggatacgatggtaaccgccgtgtgaagtcttgtctttgcagggcgctgcgta

SEQ ID NO: 238022 - DNA, 54 bp, Artificial
  Synthetic oligonucleotide
ccggggcaattcccggcggttccgaatttcacagcctagagtcctcagccgaac

SEQ ID NO: 238023 - DNA, 55 bp, Artificial
  Synthetic oligonucleotide
gcctttagctcattggtaacggcgatcctctatgtatcgagaagacagagcgggg

SEQ ID NO: 238024 - DNA, 55 bp, Artificial
  Synthetic oligonucleotide
gcctgttcctcttggctaagggatttacccgcttcaatcctgtgccatttctcga

SEQ ID NO: 238025 - DNA, 55 bp, Artificial
  Synthetic oligonucleotide
gcctcttatataggttatggtagtctgggtggggtcgcaagttggctacctagag

SEQ ID NO: 238026 - DNA, 57 bp, Artificial
  Synthetic oligonucleotide
gaatatcccaaagctcgttttctgttcctaactttgactgttaagaactgccatata

SEQ ID NO: 238027 - DNA, 55 bp, Artificial
  Synthetic oligonucleotide
ccgtatcgctcaattgggcttaaaagagttggatgttaccaatagcttgggaact

SEQ ID NO: 238028 - DNA, 55 bp, Artificial
  Synthetic oligonucleotide
ccgtcaaacaccaaggcatgaggttcgatccaccgccaagcgggctcaggggatg

SEQ ID NO: 238029 - DNA, 55 bp, Artificial
  Synthetic oligonucleotide
ccgtgaaaatgatggcagtctaaccgctaccttctcgaacgggactaaaatcgaa

SEQ ID NO: 238030 - DNA, 55 bp, Artificial
  Synthetic oligonucleotide
gcctcgcgccccaatatccgcaacgtggcttcaacatcgcgcgtgggatcaagca

SEQ ID NO: 238031 - DNA, 55 bp, Artificial
  Synthetic oligonucleotide
ccgtgcggctattggtgccaacgggacacaaacctatcagcaacgttatcctatg

SEQ ID NO: 238032 - DNA, 55 bp, Artificial
  Synthetic oligonucleotide
gaatgaggcaggaggtgtaacctggctgcgccgaattcatggcggtctgaagaat

SEQ ID NO: 238033 - DNA, 53 bp, Artificial
  Synthetic oligonucleotide
ccgtgtttctcggttcggaacacgtaattcgaaggggaatttctgttctgcta

SEQ ID NO: 238034 - DNA, 55 bp, Artificial
  Synthetic oligonucleotide
gcctatgattgggatgctgtaggacaaagagcagcatcgctattagtcggagcga

SEQ ID NO: 238035 - DNA, 55 bp, Artificial
  Synthetic oligonucleotide
gcctaagaccgcaattaagaaggccgataaagcaatgataaggccatctgatccg

SEQ ID NO: 238036 - DNA, 55 bp, Artificial
  Synthetic oligonucleotide
gcgtgctacgttgagagaccaaattcacagtatcacgtatctgatccaattttcg

SEQ ID NO: 238037 - DNA, 60 bp, Artificial
  Synthetic oligonucleotide
gaatctccataggtatcatgctaagttacatgatacctctttgactgctcccccgcaagt

SEQ ID NO: 238038 - DNA, 55 bp, Artificial
  Synthetic oligonucleotide
ccatgaagggccccgttaatgtgagtcttcccttactggataacggtctgtggcc

SEQ ID NO: 238039 - DNA, 55 bp, Artificial
  Synthetic oligonucleotide
ccatgccaagtattttagttacccaacgcgacggctccgaaagccgcattgaagc

SEQ ID NO: 238040 - DNA, 55 bp, Artificial
  Synthetic oligonucleotide
gcgtgagcatcgcgcatcagcaaatgactgctaatctcgactttgtagttggcag

SEQ ID NO: 238041 - DNA, 55 bp, Artificial
  Synthetic oligonucleotide
ccatggcgcgtgtcatgcgtcctacgcagtctttatgatcccgataggcaatagg

SEQ ID NO: 238042 - DNA, 55 bp, Artificial
  Synthetic oligonucleotide
gcgtgaaggtgcggaggcgacttatgacaatctgatttgggctggcgagctgccg

SEQ ID NO: 238043 - DNA, 55 bp, Artificial
  Synthetic oligonucleotide
gcgtcggcgtagatacgtcggcgcgacgattaatggaagggtacgtattttatga

SEQ ID NO: 238044 - DNA, 55 bp, Artificial
  Synthetic oligonucleotide
gcgtccaagccctttcctttcagcgtcgtggatgaaacgaccctcgctctgcgtt

SEQ ID NO: 238045 - DNA, 55 bp, Artificial
  Synthetic oligonucleotide
ccattcgcccaattagcccttcattggacagacgatatgccgagacctgcggcgc

SEQ ID NO: 238046 - DNA, 55 bp, Artificial
  Synthetic oligonucleotide
ccattgtcaggtccccactgttgcaaatcccacaaatatctgtacggttcggcgc

SEQ ID NO: 238047 - DNA, 55 bp, Artificial
  Synthetic oligonucleotide
gcgtatttaataagcaactcatagagttttagtgcagctaggctaggcggatttt

SEQ ID NO: 238048 - DNA, 60 bp, Artificial
  Synthetic oligonucleotide
gaattcattattctcaacgtatctgacaaatcttctatatggcagttcttaacagtcaaa

SEQ ID NO: 238049 - DNA, 55 bp, Artificial
  Synthetic oligonucleotide
cccaatgggagctttccgtattttcccattataaggattggtgagtattaggcga

SEQ ID NO: 238050 - DNA, 55 bp, Artificial
  Synthetic oligonucleotide
cccagaaggaatcatcggccaggtactcatcaacctttcggtcgccgtaggtacg

SEQ ID NO: 238051 - DNA, 55 bp, Artificial
  Synthetic oligonucleotide
cccagcgttcccggtccgttcgctcttagcgtgcagataagtcactttcgtgcag

SEQ ID NO: 238052 - DNA, 55 bp, Artificial
  Synthetic oligonucleotide
gcggttgcctagcgggattgtcgctcagaaggaacctagtcttgggattagccgc

SEQ ID NO: 238053 - DNA, 55 bp, Artificial
  Synthetic oligonucleotide
gcggctactcacgcgcacacaatcgggcttcctctcaatcaagcggtcgccatcc

SEQ ID NO: 238054 - DNA, 54 bp, Artificial
  Synthetic oligonucleotide
cccatgtcggaaggcgtggtggccatcctttgacaaaccgtagacccttgggga

SEQ ID NO: 238055 - DNA, 55 bp, Artificial
  Synthetic oligonucleotide
ccaataaggcttgtttgcacataccaagagtagttacaagcttgaccagagagcc

SEQ ID NO: 238056 - DNA, 55 bp, Artificial
  Synthetic oligonucleotide
gctgcatatgcccaccaaacgtctcgatatcctggaatagccgactgtcggaagg

SEQ ID NO: 238057 - DNA, 55 bp, Artificial
  Synthetic oligonucleotide
cttttcggcggatcggtagccgtggattttgtggacagtgcgcagcgagccgaca

SEQ ID NO: 238058 - DNA, 55 bp, Artificial
  Synthetic oligonucleotide
cttttcaattctaacgagtttgagcttagtgaccgcggacgcgaggcagttagcc

SEQ ID NO: 238059 - DNA, 58 bp, Artificial
  Synthetic oligonucleotide
cgagggtagtagtaccgctgcccgcctgtgtcagactaccggtgccagatataatttg

SEQ ID NO: 238060 - DNA, 60 bp, Artificial
  Synthetic oligonucleotide
gaattctaccgcaatacgagcgaagaattcagggcacaaaccgcgcgatctgcattgctc

SEQ ID NO: 238061 - DNA, 55 bp, Artificial
  Synthetic oligonucleotide
gaaaaggtcggtgtcacccgccaaacgctcatgaaggcgatcaagacaggccggg

SEQ ID NO: 238062 - DNA, 55 bp, Artificial
  Synthetic oligonucleotide
gctgagcgaaaatttgccgttgcatcgcctagcattccggatcccaaggcttgcc

SEQ ID NO: 238063 - DNA, 55 bp, Artificial
  Synthetic oligonucleotide
gctctggcatctagcgctatcactataaaatcagcccatggacgatttaggcgta

SEQ ID NO: 238064 - DNA, 55 bp, Artificial
  Synthetic oligonucleotide
ccacgggccaggctcattgagaacgcgggtcgccatacgctcgggccagcgccag

SEQ ID NO: 238065 - DNA, 55 bp, Artificial
  Synthetic oligonucleotide
cttgtgtcggtcggaccgaacctcagtcgtcggacttgaggaacgccggcatgtg

SEQ ID NO: 238066 - DNA, 55 bp, Artificial
  Synthetic oligonucleotide
gctctacgattgtcaatcttgatcttgtgcgtcaagttcgtccccataccaacgg

SEQ ID NO: 238067 - DNA, 55 bp, Artificial
  Synthetic oligonucleotide
gctcgtccttttacgctcaatatgtatagtggtacccagcttgatccggtctgcc

SEQ ID NO: 238068 - DNA, 55 bp, Artificial
  Synthetic oligonucleotide
gctcggcctatgacacctctgattgcagtcatgggatgttaggtgccaattctcc

SEQ ID NO: 238069 - DNA, 55 bp, Artificial
  Synthetic oligonucleotide
gctcggccgatccatgttctgacaatcaaatatatcggggcacaggagcatctcg

SEQ ID NO: 238070 - DNA, 55 bp, Artificial
  Synthetic oligonucleotide
gaaaatatcccttgtgtagcaaggggaaagtgccaaaatcaatcccagagttatc

SEQ ID NO: 238071 - DNA, 58 bp, Artificial
  Synthetic oligonucleotide
gacagcgaacagccggaccgcgatactttgggcaagcaagaaccactacgccgccttc

SEQ ID NO: 238072 - DNA, 55 bp, Artificial
  Synthetic oligonucleotide
gctcgacaaagctgacgcgaacagcgggtgcaggactttctggtgcgcatggcca

SEQ ID NO: 238073 - DNA, 55 bp, Artificial
  Synthetic oligonucleotide
aatcaggaacccgctattcccggacttacccgatcaaggagcgaataatggcgct

SEQ ID NO: 238074 - DNA, 55 bp, Artificial
  Synthetic oligonucleotide
gctattcactactggctaaaagcggccggccaatggcttcgcaataggggcgtcc

SEQ ID NO: 238075 - DNA, 55 bp, Artificial
  Synthetic oligonucleotide
gcgtgtcctaggcgtgccctaccgcccaggctacggtgcgggagctttcggatcg

SEQ ID NO: 238076 - DNA, 55 bp, Artificial
  Synthetic oligonucleotide
ccatcctaagctccggttcagtcgctcgatatcgttttctattgaattcagctcg

SEQ ID NO: 238077 - DNA, 55 bp, Artificial
  Synthetic oligonucleotide
cccgcgaaacaatgtgaggatgcccggaggccgagtattcgaacttcgctaggtc

SEQ ID NO: 238078 - DNA, 55 bp, Artificial
  Synthetic oligonucleotide
gcgccgagcaagggcgcaagtcgggaacatcagctatccagcaattgtcgtcggg

SEQ ID NO: 238079 - DNA, 55 bp, Artificial
  Synthetic oligonucleotide
cccgtgaaatgaccgaaagtcatggggcccgcaaggttggctatattgcttcgcc

SEQ ID NO: 238080 - DNA, 55 bp, Artificial
  Synthetic oligonucleotide
cccgtgccaacattcgttcatgccttgtccgctgaccgcttcgacacttatctga

SEQ ID NO: 238081 - DNA, 55 bp, Artificial
  Synthetic oligonucleotide
acatcacagaaagttgaaaagtcccgtatcgcccgctccgaaatagcgacggaga

SEQ ID NO: 238082 - DNA, 53 bp, Artificial
  Synthetic oligonucleotide
gacctcgtccctttagacaaattcgttttagaggactttcttaacgcacaaga

SEQ ID NO: 238083 - DNA, 55 bp, Artificial
  Synthetic oligonucleotide
gcgccattcgcgtaagctatccgcatcagccccgttgaagtccgaacgcgcgttc

SEQ ID NO: 238084 - DNA, 55 bp, Artificial
  Synthetic oligonucleotide
ccctgaacctcgcgcgaatgatgccttcggttgcgaacggcccttgtatggaggc

SEQ ID NO: 238085 - DNA, 55 bp, Artificial
  Synthetic oligonucleotide
acctccccttcgcatcttcgctgctggagcgagcgcctacgcggggctatggtta

SEQ ID NO: 238086 - DNA, 55 bp, Artificial
  Synthetic oligonucleotide
ccctgcggtccatttctagccgacgtcaatttctagccggcagggccaagcaagg

SEQ ID NO: 238087 - DNA, 55 bp, Artificial
  Synthetic oligonucleotide
gcgccatcccttgggcaatccatcaaggccctgaggacgcgaacaccaatttcca

SEQ ID NO: 238088 - DNA, 55 bp, Artificial
  Synthetic oligonucleotide
gcgccagaacttgaatggggtctcgtcgaaatggacctcccagcgatagcccaga

SEQ ID NO: 238089 - DNA, 53 bp, Artificial
  Synthetic oligonucleotide
gaaccaaatcaaatgtacgtggttttcctcgaggttcagtttcgaaccattcc

SEQ ID NO: 238090 - DNA, 55 bp, Artificial
  Synthetic oligonucleotide
ctgtggccacaaccgtgctgcctgatcccttaccgacatatcttcgttgagctcg

SEQ ID NO: 238091 - DNA, 55 bp, Artificial
  Synthetic oligonucleotide
cccttggtgctgaccacgatatgatctgcggccatgaagtcatcggtctcaccgg

SEQ ID NO: 238092 - DNA, 53 bp, Artificial
  Synthetic oligonucleotide
ccgaaaccgcacctggctcgtttcgaccctttcgctgggactaatgttcgggc

SEQ ID NO: 238093 - DNA, 60 bp, Artificial
  Synthetic oligonucleotide
gacctgcaaaggcaagtgggtgcccctctatgagcaacagccctgacatggctggtatct

SEQ ID NO: 238094 - DNA, 55 bp, Artificial
  Synthetic oligonucleotide
ccgaatcacacgaatcgtcatatttgctcgcatgaatcaagacgaagtgatacca

SEQ ID NO: 238095 - DNA, 55 bp, Artificial
  Synthetic oligonucleotide
gcgcaacaacggttgtcccctcacgatagaagtcaatattcgcttggagtgaatc

SEQ ID NO: 238096 - DNA, 52 bp, Artificial
  Synthetic oligonucleotide
ccgacattcctgaaccgaacgaattcgccttcaaattcgggcttttccgacg

SEQ ID NO: 238097 - DNA, 54 bp, Artificial
  Synthetic oligonucleotide
gaagcacggacgttaatagaagcgtaagagcgcaaacctttacgaataaggtgg

SEQ ID NO: 238098 - DNA, 55 bp, Artificial
  Synthetic oligonucleotide
cttgctcccgccatcacaatacgaccattgatcgttcccgctttatttagtgggc

SEQ ID NO: 238099 - DNA, 55 bp, Artificial
  Synthetic oligonucleotide
gcggcgcataaagcgtccgataataaccgaactgacccggattgatgattggcaa

SEQ ID NO: 238100 - DNA, 55 bp, Artificial
  Synthetic oligonucleotide
gaaactgttactaaccgccttggctatataatacgtcgagttgagtattctgata

SEQ ID NO: 238101 - DNA, 55 bp, Artificial
  Synthetic oligonucleotide
gcggcgcaacaagcaagcccatacaaacttatcgtggcatcgagtgagggcgggg

SEQ ID NO: 238102 - DNA, 54 bp, Artificial
  Synthetic oligonucleotide
gaaatccaccccatttcacccaacgcaaaagggccacgcggatacccacgcggc

SEQ ID NO: 238103 - DNA, 55 bp, Artificial
  Synthetic oligonucleotide
gcggccactggcgggagcgcgtaaagcgtcgttggggagcgattttcgactaatg

SEQ ID NO: 238104 - DNA, 57 bp, Artificial
  Synthetic oligonucleotide
gacgagaatcctttcatcgaaggtatggttgtgccagttaaaagtcagagggttcag

SEQ ID NO: 238105 - DNA, 55 bp, Artificial
  Synthetic oligonucleotide
ccccaattccactcggcgacaagagccccatgggccaatccgacttggattcggc

SEQ ID NO: 238106 - DNA, 55 bp, Artificial
  Synthetic oligonucleotide
gcggcaacggcacagtgaaaccgattgactcaaggtcgacgaactctacagagac

SEQ ID NO: 238107 - DNA, 55 bp, Artificial
  Synthetic oligonucleotide
ccccaggctttccctgtatgtcggtaacaaatccgacaatccggatatcgtccat

SEQ ID NO: 238108 - DNA, 55 bp, Artificial
  Synthetic oligonucleotide
gaacagatgatacacggaaaagattggaacgatcttttgatggttaaacgcggtc

SEQ ID NO: 238109 - DNA, 55 bp, Artificial
  Synthetic oligonucleotide
cttctgaacatcatctgcctgactacgatgcaacatcccagaatctgccttgctc

SEQ ID NO: 238110 - DNA, 55 bp, Artificial
  Synthetic oligonucleotide
cttctctgttggattcggcgagtggacactacagctagtctattgccgctcacct

SEQ ID NO: 238111 - DNA, 55 bp, Artificial
  Synthetic oligonucleotide
cttcgatgggaaaatgtcatccgccatccctatatgcgccgggtaacagaaagga

SEQ ID NO: 238112 - DNA, 55 bp, Artificial
  Synthetic oligonucleotide
ccccgtcgttatgcaaagcgaacgattccgtaaacagaagcgcaagtcattcgca

SEQ ID NO: 238113 - DNA, 55 bp, Artificial
  Synthetic oligonucleotide
gcgctgctatacaatttcccaatgttgcagctgcgcggcaggtgtgacccgatgc

SEQ ID NO: 238114 - DNA, 55 bp, Artificial
  Synthetic oligonucleotide
cttaggcagagactgatgcgctgacaacgaccgatgccgcctatggctccccgca

SEQ ID NO: 238115 - DNA, 60 bp, Artificial
  Synthetic oligonucleotide
gacgcgccattaggaccggctcaaattctacgcgctagatcctctgaccccgcgaggatc

SEQ ID NO: 238116 - DNA, 55 bp, Artificial
  Synthetic oligonucleotide
gcgcgcttccataacggcggcatgtcggtccatgagcaattcgcgcaaggacgca

SEQ ID NO: 238117 - DNA, 55 bp, Artificial
  Synthetic oligonucleotide
gcgcctgccccgccttatagcagcgacactatttgttactctaggactcgtcagc

SEQ ID NO: 238118 - DNA, 55 bp, Artificial
  Synthetic oligonucleotide
cccgcaggcctggtcgctacctatttctcgggcatcgatgcagttgcggtgctga

SEQ ID NO: 238119 - DNA, 55 bp, Artificial
  Synthetic oligonucleotide
ctaacctcaccgagccatgtctgactgccgtggaatagaaccatcgagcgtagtg

SEQ ID NO: 238120 - DNA, 53 bp, Artificial
  Synthetic oligonucleotide
acccgggaggcgacatagaatttggcgacgggttactgcagtcggaccgaacc

SEQ ID NO: 238121 - DNA, 55 bp, Artificial
  Synthetic oligonucleotide
cgcttaggggtgccatgaaaagcaccatcatctcaaaccgttcggatcaaaggat

SEQ ID NO: 238122 - DNA, 55 bp, Artificial
  Synthetic oligonucleotide
cgcttatcccatgtccaacggacgcctcctgtaagacggatcgtatcggtgagac

SEQ ID NO: 238123 - DNA, 55 bp, Artificial
  Synthetic oligonucleotide
cggacacttgccgctcccaatttctttccgacagggcttgcacgagttatataac

SEQ ID NO: 238124 - DNA, 54 bp, Artificial
  Synthetic oligonucleotide
cggacgcggttaaggtcgacggggagtttacgcttccaaggccagcgcatcaag

SEQ ID NO: 238125 - DNA, 55 bp, Artificial
  Synthetic oligonucleotide
gagtcccactatgtctcgacgcaaagagcctgccataccgaatgagcttctcgat

SEQ ID NO: 238126 - DNA, 58 bp, Artificial
  Synthetic oligonucleotide
gactaaccaaccatatacgaaaatcgggccgattggcgtcagcgtaatgagcaacgtc

SEQ ID NO: 238127 - DNA, 55 bp, Artificial
  Synthetic oligonucleotide
cggaggaccgaaagagcgccccaattatgggaagagaacctaatactggaatctg

SEQ ID NO: 238128 - DNA, 53 bp, Artificial
  Synthetic oligonucleotide
gaggtttcgggctacgccaacggccaatacatcacccaaaccctgtaaccctc

SEQ ID NO: 238129 - DNA, 55 bp, Artificial
  Synthetic oligonucleotide
gaggatggatcccgaaatgcggacgggctattcgacccatatgaggcagcggagg

SEQ ID NO: 238130 - DNA, 53 bp, Artificial
  Synthetic oligonucleotide
cggattactaagctttaaaacgtaactaggttctggtgtatctccattttgaa

SEQ ID NO: 238131 - DNA, 55 bp, Artificial
  Synthetic oligonucleotide
cggattgccccagatgacagctgcggacccaggcgcaattcgcgaactgcaagga

SEQ ID NO: 238132 - DNA, 55 bp, Artificial
  Synthetic oligonucleotide
cggattggtaacgtcatagcctgtgcgctggcagacctgtgtcgtgtagccatcg

SEQ ID NO: 238133 - DNA, 55 bp, Artificial
  Synthetic oligonucleotide
cggccatcgcgaccccagacattattacggacacgaaacgaactgcgctcgccag

SEQ ID NO: 238134 - DNA, 52 bp, Artificial
  Synthetic oligonucleotide
acccaaaagccatttaaattctttacgatcttttaaacgcaaacgctgccaa

SEQ ID NO: 238135 - DNA, 55 bp, Artificial
  Synthetic oligonucleotide
cggccatctcgattagtcctgctatcccgtttccggcccctcaacaatataggca

SEQ ID NO: 238136 - DNA, 55 bp, Artificial
  Synthetic oligonucleotide
cggccattcaggcgaatggaacctgccgccaaactgcttacccagcgtccaccag

SEQ ID NO: 238137 - DNA, 50 bp, Artificial
  Synthetic oligonucleotide
cgttgggaaaccgttacaattggttttcgttatctaaactaacacgacag

SEQ ID NO: 238138 - DNA, 55 bp, Artificial
  Synthetic oligonucleotide
gatcgagctgtgatgccgcgcatgtcgcggtggagtttctccatccagtgaccgc

SEQ ID NO: 238139 - DNA, 55 bp, Artificial
  Synthetic oligonucleotide
gatccaacggtacagcaggaaatttctcagctagtcactgggctgggtagcaagc

SEQ ID NO: 238140 - DNA, 55 bp, Artificial
  Synthetic oligonucleotide
cgcgcaatacacgattggaaacgatcaatcgtgttcgccacttgcttgctcgtta

SEQ ID NO: 238141 - DNA, 55 bp, Artificial
  Synthetic oligonucleotide
cgcgctataaccttaggaacgtcaatcatgttccacatccgtgaagcggaaaacg

SEQ ID NO: 238142 - DNA, 55 bp, Artificial
  Synthetic oligonucleotide
cgcgcttaagcgcatcaaaccccaaggctggggccttactacatctgcttgccgc

SEQ ID NO: 238143 - DNA, 55 bp, Artificial
  Synthetic oligonucleotide
aatgtggcgttagatgcattggtaacagtaccggctgtcgaattgttgagagagg

SEQ ID NO: 238144 - DNA, 55 bp, Artificial
  Synthetic oligonucleotide
ctcaacgattgagtagaatttaggcgcccagcggttagacatccggcatgggatg

SEQ ID NO: 238145 - DNA, 55 bp, Artificial
  Synthetic oligonucleotide
cgcgggaagctttgcgatagtccccggtcggttttgcataagcggtcccagaatc

SEQ ID NO: 238146 - DNA, 55 bp, Artificial
  Synthetic oligonucleotide
aatttgaactccgaaccagaatccgctatatgctgagttgtcttcaatgacggac

SEQ ID NO: 238147 - DNA, 55 bp, Artificial
  Synthetic oligonucleotide
cgcgtgaatcgatgcatgtacacattttcgccttgcctccaaagcaattgcccgc

SEQ ID NO: 238148 - DNA, 58 bp, Artificial
  Synthetic oligonucleotide
ctaaagcgttgctgccaaccctgcccgtgcatcgctctttctcccgcgccttgggaac

SEQ ID NO: 238149 - DNA, 55 bp, Artificial
  Synthetic oligonucleotide
gacgcccaagggtgtcatttctatctagcagaggggtgtcatttctatccggcgc

SEQ ID NO: 238150 - DNA, 55 bp, Artificial
  Synthetic oligonucleotide
gacgccctgccagccaacgtcctggcgttgacggttgaagccaaaaggtccgttg

SEQ ID NO: 238151 - DNA, 55 bp, Artificial
  Synthetic oligonucleotide
gacgctggattgaagtccgccagatcggggaccgaggcacggtgaacgcctatgt

SEQ ID NO: 238152 - DNA, 55 bp, Artificial
  Synthetic oligonucleotide
gatactatacaggcaaatttaacagcgagtgacactatgggtatcaccctaagag

SEQ ID NO: 238153 - DNA, 55 bp, Artificial
  Synthetic oligonucleotide
cgctccctgacggttcgtgcattcgagagatagatatcggcgcgccggacttact

SEQ ID NO: 238154 - DNA, 55 bp, Artificial
  Synthetic oligonucleotide
gagtgtcgctgagagttctatttacgttgaaggcagtaacttaccgcatatcccc

SEQ ID NO: 238155 - DNA, 55 bp, Artificial
  Synthetic oligonucleotide
gacggttacctcaagcaatgcgcctattacgacatcctcttgggcacaaagagtc

SEQ ID NO: 238156 - DNA, 55 bp, Artificial
  Synthetic oligonucleotide
gagtccgtctttccgggtggatcgtatatagtctgtcattgtcgggcctattccc

SEQ ID NO: 238157 - DNA, 55 bp, Artificial
  Synthetic oligonucleotide
cggtcccgctcactagggccgcgactgccccaaatcccaccaccacgattttcat

SEQ ID NO: 238158 - DNA, 55 bp, Artificial
  Synthetic oligonucleotide
cggtcgctcaatttcccgaatgctgccgtgcactcagacttatccggcggaagcg

SEQ ID NO: 238159 - DNA, 60 bp, Artificial
  Synthetic oligonucleotide
ctaatcaggcacaatggagagcaggctttaattctcaatgtcgttatgcaagagcattgg

SEQ ID NO: 238160 - DNA, 55 bp, Artificial
  Synthetic oligonucleotide
cggtctgcaaaaccattcatcggcgcctctcatggtatggggacgcacacctgcg

SEQ ID NO: 238161 - DNA, 55 bp, Artificial
  Synthetic oligonucleotide
gagacatagcccatgcccttgattgtcacggtcatgttagtcgattgcgccgctg

SEQ ID NO: 238162 - DNA, 55 bp, Artificial
  Synthetic oligonucleotide
cggtggccagtcattcggcaactgcggtcagacatatccccttgtgagaatatgg

SEQ ID NO: 238163 - DNA, 55 bp, Artificial
  Synthetic oligonucleotide
cgtgtgcagtctttggaagcccgcaccccggaaatcgacccaagggccagagttg

SEQ ID NO: 238164 - DNA, 55 bp, Artificial
  Synthetic oligonucleotide
gagaaagcccctaaagcggcccagctaatgcacatcctgaccgcacgggttgggg

SEQ ID NO: 238165 - DNA, 52 bp, Artificial
  Synthetic oligonucleotide
cgtgtccaggcaagggcgcgtggggtaaaattcgggcgtaagttggccctta

SEQ ID NO: 238166 - DNA, 55 bp, Artificial
  Synthetic oligonucleotide
cgtaatttgtacgtccgcgactgcgccatggctgtccttccttcgagtctccgac

SEQ ID NO: 238167 - DNA, 55 bp, Artificial
  Synthetic oligonucleotide
cgtgcttccaccaacgcataagcccggggagaagcatccgctcatcgtagtccag

SEQ ID NO: 238168 - DNA, 55 bp, Artificial
  Synthetic oligonucleotide
cgtacatggataagaaatgagcgtaaacgtataaactggacggcagcaaagttag

SEQ ID NO: 238169 - DNA, 52 bp, Artificial
  Synthetic oligonucleotide
cgtagttccggcttacccaatggaaaacataacggtaattcgcttgcttcgg

SEQ ID NO: 238170 - DNA, 55 bp, Artificial
  Synthetic oligonucleotide
cgatgtaaatcctcgcctttgaggcttttttgtaaggtatctgccgtcagtttat

SEQ ID NO: 238171 - DNA, 59 bp, Artificial
  Synthetic oligonucleotide
ctatctaaaggggctgcttcgccagcgcttaggtccgcgcttgcaccccctttagatca

SEQ ID NO: 238172 - DNA, 55 bp, Artificial
  Synthetic oligonucleotide
aattcgtcgtcgtctgagacccgattgcttatgtcttgcgtatcagacaatcgcc

SEQ ID NO: 238173 - DNA, 55 bp, Artificial
  Synthetic oligonucleotide
cgtgcgtcctctgcaactaggtcttgaggtccccgttctgtgcgaccacaaccta

SEQ ID NO: 238174 - DNA, 55 bp, Artificial
  Synthetic oligonucleotide
cgtcgcatagggatctttcatccgcacatccaccttgacatataagggcccttac

SEQ ID NO: 238175 - DNA, 55 bp, Artificial
  Synthetic oligonucleotide
cgtgagtcggatgtctggccatcagttggcagaatctgcgtagccataacatccg

SEQ ID NO: 238176 - DNA, 55 bp, Artificial
  Synthetic oligonucleotide
cgtgacgctgcggaaatgatagagtgcagcctgggacaggcatccggtaacatcc

SEQ ID NO: 238177 - DNA, 55 bp, Artificial
  Synthetic oligonucleotide
cggcgacataccggagcccctgcgaaagcgctacttttcgtcgaccggcaaatgg

SEQ ID NO: 238178 - DNA, 55 bp, Artificial
  Synthetic oligonucleotide
cggcgcggaatccgattgcatggaatatgagttggacgaccatacgcctcgaact

SEQ ID NO: 238179 - DNA, 55 bp, Artificial
  Synthetic oligonucleotide
gagctcggaactcgatccgttgactatccagcctgcgtatacgcttgtcgatgca

SEQ ID NO: 238180 - DNA, 55 bp, Artificial
  Synthetic oligonucleotide
cggcgttcattcaccgggcggggttttccattcgggcagtgcgctactcagcttg

SEQ ID NO: 238181 - DNA, 55 bp, Artificial
  Synthetic oligonucleotide
cggctcctaaatgtttcggatggttcaaatatgcgggagggcgcatctccggaag

SEQ ID NO: 238182 - DNA, 54 bp, Artificial
  Synthetic oligonucleotide
ctattaacagtcagaaccaaatcaaatgtacgtggttttcctcgaggttcagtt

SEQ ID NO: 238183 - DNA, 55 bp, Artificial
  Synthetic oligonucleotide
gagcctgaacagccttacagggcccgaaatggtcgcgtttggtcggctgtgcgag

SEQ ID NO: 238184 - DNA, 55 bp, Artificial
  Synthetic oligonucleotide
cgggacatatcaacgattgagcaattgacttgatggtatagcttacccatgcgtc

SEQ ID NO: 238185 - DNA, 55 bp, Artificial
  Synthetic oligonucleotide
cgggatttgaccgattttgcccatggcagcgtcgaaaagtcttgaaatatattca

SEQ ID NO: 238186 - DNA, 55 bp, Artificial
  Synthetic oligonucleotide
cgttggtatagtggaggccatatttcctcgccaaacgggcgtcatatcggcccga

SEQ ID NO: 238187 - DNA, 55 bp, Artificial
  Synthetic oligonucleotide
cgttggagtcccgcagatatccgcggctacgtcatgaagcgcggaaggatatgcg

SEQ ID NO: 238188 - DNA, 55 bp, Artificial
  Synthetic oligonucleotide
cgggcacgactcgtgggaatccgccagattcggtgatctgttgcgattgcgtggc

SEQ ID NO: 238189 - DNA, 55 bp, Artificial
  Synthetic oligonucleotide
gagcctgaaagccatgcgcaggttgcaagactgggagttgaaatgacctacaagc

SEQ ID NO: 238190 - DNA, 55 bp, Artificial
  Synthetic oligonucleotide
cgggccataagcggccccatgaaaggcaacgccccatgacgacctggttcaagat

SEQ ID NO: 238191 - DNA, 55 bp, Artificial
  Synthetic oligonucleotide
cgggcctgaggccgggagacattagagcgtgatcatcttaggttgaagcatagcc

SEQ ID NO: 238192 - DNA, 54 bp, Artificial
  Synthetic oligonucleotide
cgttcgaaggggaatgcaggaattacgaggccgacgcaaaactgcgccgtccgg

SEQ ID NO: 238193 - DNA, 54 bp, Artificial
  Synthetic oligonucleotide
ctcagcctgttcgggcacccccgtcttggcctgaccaatggggaacgcgtcccg

SEQ ID NO: 238194 - DNA, 55 bp, Artificial
  Synthetic oligonucleotide
gagccacgagctatcgtcagagtagattcaccttatcgtcactctggaatcgctc

SEQ ID NO: 238195 - DNA, 55 bp, Artificial
  Synthetic oligonucleotide
cgttccgcttcgagacttcctttcctggccatgattgtacctcttgggttggtgc

SEQ ID NO: 238196 - DNA, 55 bp, Artificial
  Synthetic oligonucleotide
cgaattcagccttcacgaactcgcgcgccagcctgatgttgtctttcttcgacag

SEQ ID NO: 238197 - DNA, 55 bp, Artificial
  Synthetic oligonucleotide
cgacaaaattgagaaagcagccaatcagatatgacgagaatcctttcatcgaagg

SEQ ID NO: 238198 - DNA, 55 bp, Artificial
  Synthetic oligonucleotide
cgacagagtcaccgacgacgaataagctccggcggtcgatatctgttcgagatac

SEQ ID NO: 238199 - DNA, 55 bp, Artificial
  Synthetic oligonucleotide
cgacaggatgtaaaagcttacaatatcattcctttgtgtcaacaatggagatcag

SEQ ID NO: 238200 - DNA, 55 bp, Artificial
  Synthetic oligonucleotide
cgacaggcgttctgaaagacaaggctataatcgcaatcttgccgttaatccgtct

SEQ ID NO: 238201 - DNA, 55 bp, Artificial
  Synthetic oligonucleotide
gaccaaggcgcgcgtagcctcattagccgtgctacgttggttgtagctaggcccg

SEQ ID NO: 238202 - DNA, 55 bp, Artificial
  Synthetic oligonucleotide
gaccagtccaatcgaagcagcgtaaacacatccccttccaacctttaaaaggctg

SEQ ID NO: 238203 - DNA, 55 bp, Artificial
  Synthetic oligonucleotide
gccaccactgaccgtcacattatccgctgtaaaactattaagcggttctgaggcg

SEQ ID NO: 238204 - DNA, 60 bp, Artificial
  Synthetic oligonucleotide
ctcggccagagcggcattgagccacgctcgatattcgtctcgaaagtgatccataaggga

SEQ ID NO: 238205 - DNA, 55 bp, Artificial
  Synthetic oligonucleotide
gccaagattgattttgtacatgtcgggtcccttgcctattcagtccatgagagcg

SEQ ID NO: 238206 - DNA, 54 bp, Artificial
  Synthetic oligonucleotide
ctcgcgacctttgccggccgttcagcgaccaattttcgttacctgggtgccgac

SEQ ID NO: 238207 - DNA, 55 bp, Artificial
  Synthetic oligonucleotide
cgagaataagctgtcggtttcccaggcccaaggtgggcgtctggccaacgttcag

SEQ ID NO: 238208 - DNA, 55 bp, Artificial
  Synthetic oligonucleotide
gcataggaggatcgagccttgctcttggacagtgcgaaccagagtccggcttggg

SEQ ID NO: 238209 - DNA, 55 bp, Artificial
  Synthetic oligonucleotide
gcaggacgcaacgcagcgattagggtgccggacatgatttctcgcctttccggcc

SEQ ID NO: 238210 - DNA, 55 bp, Artificial
  Synthetic oligonucleotide
gcagcaatagtcgcggagttgttaatcggctcccgcaacaggcgattatagagcc

SEQ ID NO: 238211 - DNA, 55 bp, Artificial
  Synthetic oligonucleotide
cgagcttgcgcttcgtgcgtcccatggccccattcctatccttccgcacgaatgg

SEQ ID NO: 238212 - DNA, 55 bp, Artificial
  Synthetic oligonucleotide
gcagatgatgttcagaagatttataatcaggaattagagtttcaacgtctggctc

SEQ ID NO: 238213 - DNA, 55 bp, Artificial
  Synthetic oligonucleotide
ctcgaaaatgacttccgtcgagcggcaaggctggcctatcgaacgcgggcgatgg

SEQ ID NO: 238214 - DNA, 55 bp, Artificial
  Synthetic oligonucleotide
aatctggcttgccacattagggaacgcctccactgacagactggacaatgacgca

SEQ ID NO: 238215 - DNA, 54 bp, Artificial
  Synthetic oligonucleotide
ctctctgacgcaccctctatagggaggggtaagtgaacgaacggggcacctaac

SEQ ID NO: 238216 - DNA, 55 bp, Artificial
  Synthetic oligonucleotide
ccttacagcgtgtgcgaggtggagaggatgcggtttcctgtccgccatgcgccta

SEQ ID NO: 238217 - DNA, 55 bp, Artificial
  Synthetic oligonucleotide
ccttacaggcagcccatccgtcggatatcgaagccaatacacagctatccggtac

SEQ ID NO: 238218 - DNA, 55 bp, Artificial
  Synthetic oligonucleotide
gcccggatagatggctgcagtgtcgcaggaatagtacggaatgtactggcccacg

SEQ ID NO: 238219 - DNA, 55 bp, Artificial
  Synthetic oligonucleotide
gcccgatggttcgacctgaactcgccgttggtatcgaaccagctatcgctggcgc

SEQ ID NO: 238220 - DNA, 55 bp, Artificial
  Synthetic oligonucleotide
ccttcacagggacctcctatgaagcgggtgtgaccatttcgggccgcccggtaga

SEQ ID NO: 238221 - DNA, 55 bp, Artificial
  Synthetic oligonucleotide
gacagatcggtgatccgaatgtcctgggcgtaggcgagaggaaggtcggacttcg

SEQ ID NO: 238222 - DNA, 55 bp, Artificial
  Synthetic oligonucleotide
gcccatacttcgttgcttggattacggcgacgcgcccacctttgaactgatcaac

SEQ ID NO: 238223 - DNA, 55 bp, Artificial
  Synthetic oligonucleotide
ccttggcaagtgatcgagcgcgttcctcaggaagtgcacgtagcagcgctggtat

SEQ ID NO: 238224 - DNA, 55 bp, Artificial
  Synthetic oligonucleotide
ctctggttcgcgcagccaggacaagcggctctgccggtcatgtaccttctcatcg

SEQ ID NO: 238225 - DNA, 55 bp, Artificial
  Synthetic oligonucleotide
gcccacaatcatagccacgaggtaaccaataaaattcgagaataaaggagccata

SEQ ID NO: 238226 - DNA, 60 bp, Artificial
  Synthetic oligonucleotide
ctctctttcgttcagtcgggtccggtgctatcaatatcactcagcgaaaggattgtgcat

SEQ ID NO: 238227 - DNA, 55 bp, Artificial
  Synthetic oligonucleotide
gccactccgcaggttatggccgtcgtaaaatccggtcgtggtcgggaacaagcgc

SEQ ID NO: 238228 - DNA, 55 bp, Artificial
  Synthetic oligonucleotide
gccactcacctatccgataaagacccgagcatgaacgatacgcggttcgacccgt

SEQ ID NO: 238229 - DNA, 55 bp, Artificial
  Synthetic oligonucleotide
cgaagggctgtgggtctcgattgtcgccgcaaggtgacgtgctgtcatacccttg

SEQ ID NO: 238230 - DNA, 55 bp, Artificial
  Synthetic oligonucleotide
gacagcgggcataggtgtatcgcagcaattaggtaatgatcggcctcagagatca

SEQ ID NO: 238231 - DNA, 55 bp, Artificial
  Synthetic oligonucleotide
aatgaatgaagtgcggacggacgatgtcatgcagcgtcttctgaggcaggcgggc

SEQ ID NO: 238232 - DNA, 55 bp, Artificial
  Synthetic oligonucleotide
cgaatagaccactcctaaatagcttataaactggagatctattgggcgatttaat

SEQ ID NO: 238233 - DNA, 55 bp, Artificial
  Synthetic oligonucleotide
ctccgcctgcgatcaaaccgacgtggacggttgaatagggtatgtcgtaatcggg

SEQ ID NO: 238234 - DNA, 55 bp, Artificial
  Synthetic oligonucleotide
cgcccctaaacgttgtctgtgactggacatgttcttccttcgacctatcttctta

SEQ ID NO: 238235 - DNA, 55 bp, Artificial
  Synthetic oligonucleotide
gatgggcgaatggcttggtgattgcgtgagcgcgcctatggccgaaatccggacg

SEQ ID NO: 238236 - DNA, 55 bp, Artificial
  Synthetic oligonucleotide
cgccgacccagcctaccgagccggcgcatgaaaagcatctgacgtcgaaactaat

SEQ ID NO: 238237 - DNA, 60 bp, Artificial
  Synthetic oligonucleotide
ctgcacaactactcaggtggttggtgaacgaacatgtgataattgcacttatcacataag

SEQ ID NO: 238238 - DNA, 55 bp, Artificial
  Synthetic oligonucleotide
ctccgatccatgtacagaattgcggcggtatgctggattccacgctccattccga

SEQ ID NO: 238239 - DNA, 53 bp, Artificial
  Synthetic oligonucleotide
cgccgatcgcgagttcgcggggaagttcgacaaggtgtagagcgtttaaaccg

SEQ ID NO: 238240 - DNA, 55 bp, Artificial
  Synthetic oligonucleotide
gatggcatcgagaacatcgcagatgaacaggtcttggttagggtggcgcaccggc

SEQ ID NO: 238241 - DNA, 53 bp, Artificial
  Synthetic oligonucleotide
cgccgtatcaatttccggttctgcctccggggcgggaggttcctccacttcaa

SEQ ID NO: 238242 - DNA, 55 bp, Artificial
  Synthetic oligonucleotide
gatgcaaatttccgttcgccgcgtgcggccttgatcgtggcatcggcacctagcg

SEQ ID NO: 238243 - DNA, 55 bp, Artificial
  Synthetic oligonucleotide
cgcctagtttctaacgcttctctcgacttctgccccaaggcgttgaccgtggtct

SEQ ID NO: 238244 - DNA, 55 bp, Artificial
  Synthetic oligonucleotide
gaccggatgggatcgccagctactatcgcgatacgctgactccggcagggtttgc

SEQ ID NO: 238245 - DNA, 55 bp, Artificial
  Synthetic oligonucleotide
gatgagggctataccagcttcaattaccgccaggaactgactccggcggccgaat

SEQ ID NO: 238246 - DNA, 55 bp, Artificial
  Synthetic oligonucleotide
ctcatctatcgccagatattttctcctcgcacgaacgagcgaccctccatgcgcg

SEQ ID NO: 238247 - DNA, 55 bp, Artificial
  Synthetic oligonucleotide
cgcctgccatcttacctctaaccgcctcctaaccaattcttagcccctgcgacct

SEQ ID NO: 238248 - DNA, 60 bp, Artificial
  Synthetic oligonucleotide
ctggcgataatcggacatagattgactgcccctagccaatctatgtccgatttctcgaca

SEQ ID NO: 238249 - DNA, 55 bp, Artificial
  Synthetic oligonucleotide
gatcggtgcggatgtcacccaatcgctcccgcatgatgtctcgcccgggtccata

SEQ ID NO: 238250 - DNA, 55 bp, Artificial
  Synthetic oligonucleotide
cgccttggccccggtactgttaatcacgaagccttttcgatgatggacgacgtgg

SEQ ID NO: 238251 - DNA, 54 bp, Artificial
  Synthetic oligonucleotide
cgcgaattttgataaactcacctgacttccctataatcccttctgtcccgaccc

SEQ ID NO: 238252 - DNA, 55 bp, Artificial
  Synthetic oligonucleotide
gaccggttgctgtcttattgagggtatccgcatccaatccttgattaagacgggt

SEQ ID NO: 238253 - DNA, 55 bp, Artificial
  Synthetic oligonucleotide
accgatctgcgatcccacctctcgagacttttactgcgtatcgcaacttctcggg

SEQ ID NO: 238254 - DNA, 55 bp, Artificial
  Synthetic oligonucleotide
gcagactaacaaatgccgcaacaggagcgggcaagcgatgcatgatatctcccct

SEQ ID NO: 238255 - DNA, 55 bp, Artificial
  Synthetic oligonucleotide
cgataacaacattgcggagcgtgccatgcgatgcgtggcaacgaccgattcatac

SEQ ID NO: 238256 - DNA, 55 bp, Artificial
  Synthetic oligonucleotide
gcacgcgatgccggacatctgcaatcgtcagatattaccccgcctgacggcaatc

SEQ ID NO: 238257 - DNA, 55 bp, Artificial
  Synthetic oligonucleotide
accgatcgtgacgacatggaccggtagaccgtcgaacaggggtgagttggcgacc

SEQ ID NO: 238258 - DNA, 55 bp, Artificial
  Synthetic oligonucleotide
cgattttaccggcattgcggcttcgcgcttgtttgaataggtctggcccggaatc

SEQ ID NO: 238259 - DNA, 60 bp, Artificial
  Synthetic oligonucleotide
ctgtaaagctcttgcgccgatcgttgcgtcaagagttgtcgcacgcataggtataagcac

SEQ ID NO: 238260 - DNA, 55 bp, Artificial
  Synthetic oligonucleotide
gcaccccaaccggctggcaccgaggtagcaacacattccacgattgcacccactg

SEQ ID NO: 238261 - DNA, 55 bp, Artificial
  Synthetic oligonucleotide
gcaatcgctgtcgtcacaacgaccttggcctgtaagttgcctataccgctggcac

SEQ ID NO: 238262 - DNA, 55 bp, Artificial
  Synthetic oligonucleotide
gcaaactcaacggccgttccggagaggttcgccccatgtaggacactcgacggac

SEQ ID NO: 238263 - DNA, 55 bp, Artificial
  Synthetic oligonucleotide
cgcagagctatcaggcgcataatcgtcggccccgcttgcttcgacagtcggcaca

SEQ ID NO: 238264 - DNA, 55 bp, Artificial
  Synthetic oligonucleotide
gattgtaccgtataacggtatttattgccaaatcgctcactctcgctgttgactg

SEQ ID NO: 238265 - DNA, 55 bp, Artificial
  Synthetic oligonucleotide
cgcataaagcggcacgatacgaaagaaccggcgactgtagaatgcggtaaggttc

SEQ ID NO: 238266 - DNA, 55 bp, Artificial
  Synthetic oligonucleotide
gattcggtcgctaaggcagtcattcggattgtcctttcggtgaactgttggatgc

SEQ ID NO: 238267 - DNA, 55 bp, Artificial
  Synthetic oligonucleotide
accctgcccgtgcatcgctctttctcccgcgccttgggaaccaatgtaacgggag

SEQ ID NO: 238268 - DNA, 55 bp, Artificial
  Synthetic oligonucleotide
cgccacagccccaatagccgcacgatgcccaacgcttagacttaacctgataatc

SEQ ID NO: 238269 - DNA, 55 bp, Artificial
  Synthetic oligonucleotide
gacccgaagcaggggtagcaactgcgctattcaactccccaatataactattctg

SEQ ID NO: 238270 - DNA, 60 bp, Artificial
  Synthetic oligonucleotide
ctgtatgcgtatttcgtattgcctcattctacgcaatcgatatgtagccgccccacaaag

SEQ ID NO: 238271 - DNA, 55 bp, Artificial
  Synthetic oligonucleotide
cgccataatcattaagggtgatcccgcgcacagagaacagggaaaccggaccggc

SEQ ID NO: 238272 - DNA, 55 bp, Artificial
  Synthetic oligonucleotide
gatgtccgattggacgcagtgtgtctccgctcattgaaccgtcccttcccgactc

SEQ ID NO: 238273 - DNA, 55 bp, Artificial
  Synthetic oligonucleotide
tccggtgagcgggcataggatcctggcaggcggcctgctgtcctttacagcggaa

SEQ ID NO: 238274 - DNA, 55 bp, Artificial
  Synthetic oligonucleotide
tcccgcgatactacgtctatcatcaggagtcggcacccggctctgaagaggaggc

SEQ ID NO: 238275 - DNA, 55 bp, Artificial
  Synthetic oligonucleotide
tcagtaaaacagaatcgagcatgacgggtctccgtaaataataaggctggggcgc

SEQ ID NO: 238276 - DNA, 55 bp, Artificial
  Synthetic oligonucleotide
aggtgcgacactatcggcgatctcgcccgactggtcacggagcagaaccgtggca

SEQ ID NO: 238277 - DNA, 55 bp, Artificial
  Synthetic oligonucleotide
tcaggtaaccgaacagacgggactatgccttctgtggagagggtaatgagtcacg

SEQ ID NO: 238278 - DNA, 55 bp, Artificial
  Synthetic oligonucleotide
tcaggatggctcagagcacccaatcaggctcagcgtggcctgacggccaccagaa

SEQ ID NO: 238279 - DNA, 55 bp, Artificial
  Synthetic oligonucleotide
agtccgatggaaggcgtctgccttccgacagaggagacttgcaatgagcctgctg

SEQ ID NO: 238280 - DNA, 55 bp, Artificial
  Synthetic oligonucleotide
tatggagagagcggttccgcccctctccccgcgatccgcgatgaagtgttggagc

SEQ ID NO: 238281 - DNA, 60 bp, Artificial
  Synthetic oligonucleotide
cgcacccctgcgtcaccagctatgacgcacccctgcgtcattcttggcaatccatttaca

SEQ ID NO: 238282 - DNA, 60 bp, Artificial
  Synthetic oligonucleotide
ctgtcgagtgcggcattgtccaatttgtcaatggagaagaagcttaatgtggcaggcgcg

SEQ ID NO: 238283 - DNA, 55 bp, Artificial
  Synthetic oligonucleotide
tatgcatcaggtgaagcgggccaatagatcatggacgggattgttccgatccgcc

SEQ ID NO: 238284 - DNA, 55 bp, Artificial
  Synthetic oligonucleotide
aactgtcaccaattgtcgcaagtcggacagcttcgttcagcttggcgtctgtgcg

SEQ ID NO: 238285 - DNA, 55 bp, Artificial
  Synthetic oligonucleotide
agtgccgcgagctgtcagctctccgtcttcgcatgaaccagcatcactcccatgc

SEQ ID NO: 238286 - DNA, 55 bp, Artificial
  Synthetic oligonucleotide
tacggtatcgttttgacttgagcaatgggatatagcagtcgcgcggctccgaacg

SEQ ID NO: 238287 - DNA, 55 bp, Artificial
  Synthetic oligonucleotide
tacggggctagggtcaagacacgagctgagggagcatgtcgtgcgcctgacgatg

SEQ ID NO: 238288 - DNA, 55 bp, Artificial
  Synthetic oligonucleotide
taccggtctcatcatcatctatctgactaaaacgcaaaataccggaacagtttcc

SEQ ID NO: 238289 - DNA, 55 bp, Artificial
  Synthetic oligonucleotide
taccggcgctgacggccatagggcttggagaagttccactgtcgcccgtcgcttt

SEQ ID NO: 238290 - DNA, 55 bp, Artificial
  Synthetic oligonucleotide
taccatgacgggcgtcacctcaagttgtcgatgcgatgagccgttgttgactgtc

SEQ ID NO: 238291 - DNA, 55 bp, Artificial
  Synthetic oligonucleotide
ataacatgaccgtcatcgatcttttctgcggagccggtggcctttccgaggggtt

SEQ ID NO: 238292 - DNA, 55 bp, Artificial
  Synthetic oligonucleotide
aggcgcggtcagccgcaacttgcgtggttttgctcatggcaacatggttgggcaa

SEQ ID NO: 238293 - DNA, 58 bp, Artificial
  Synthetic oligonucleotide
cttagaactttcgcgacacgaaaaatcgatgccgactttagccatactgtgcgggaga

SEQ ID NO: 238294 - DNA, 55 bp, Artificial
  Synthetic oligonucleotide
tcgcggcttccgatttacagaagcgcggatgggttcgctgcattgggtcgggcga

SEQ ID NO: 238295 - DNA, 55 bp, Artificial
  Synthetic oligonucleotide
aacgccacaagcaatgatggggagtgaaccttcatgcgttcgctaattcttgcac

SEQ ID NO: 238296 - DNA, 55 bp, Artificial
  Synthetic oligonucleotide
tcgcgaataccgcgagcaaggcgatgtgaggcacctgccagcgcgggtgtatgcg

SEQ ID NO: 238297 - DNA, 53 bp, Artificial
  Synthetic oligonucleotide
aacgcccgacaccgcctaccgttttccggtcatggctcccgcaggctgggacg

SEQ ID NO: 238298 - DNA, 55 bp, Artificial
  Synthetic oligonucleotide
aggctcaagtcgccgcctcaatgataaacgtccgctagcgcgtcgtgtcctgaca

SEQ ID NO: 238299 - DNA, 55 bp, Artificial
  Synthetic oligonucleotide
tcgatttatgcctcatggatcggacctgcatcggaacctgaggcgcacaacttgg

SEQ ID NO: 238300 - DNA, 55 bp, Artificial
  Synthetic oligonucleotide
agggaacattgtggacaagaggcgttcaaagggcatctgcggacctaagagtact

SEQ ID NO: 238301 - DNA, 55 bp, Artificial
  Synthetic oligonucleotide
tcgaggaaattgccagtggcgggcgctgggaccggccaaagctcctggagatgat

SEQ ID NO: 238302 - DNA, 54 bp, Artificial
  Synthetic oligonucleotide
tcgacttatatcctttaagcttccggcgacgcattttacgtactttgaacctcc

SEQ ID NO: 238303 - DNA, 55 bp, Artificial
  Synthetic oligonucleotide
tcgaaatgacgatagcgcggcggtgaatctgaaatgacgataatccgcttgcgta

SEQ ID NO: 238304 - DNA, 60 bp, Artificial
  Synthetic oligonucleotide
cttcatttcgccaaggaaggccgcaatgtcatcggtgatgttgatcgacctgttctgcac

SEQ ID NO: 238305 - DNA, 55 bp, Artificial
  Synthetic oligonucleotide
agggccgggcgaggcttgccgtagtcaccttgcaacgaaaccgcgacaatatcgc

SEQ ID NO: 238306 - DNA, 55 bp, Artificial
  Synthetic oligonucleotide
tcctgatatgcgacgtttgcagacagccacggcagcccatacagccggaccgtcc

SEQ ID NO: 238307 - DNA, 55 bp, Artificial
  Synthetic oligonucleotide
tcctcacgccacagcgccactgcgtcgggcgtaccgcgcacataagccatcgacc

SEQ ID NO: 238308 - DNA, 54 bp, Artificial
  Synthetic oligonucleotide
tcctaccctcttgggttggtaccttccattgggcgaaccgcgttgcgtgcctcc

SEQ ID NO: 238309 - DNA, 55 bp, Artificial
  Synthetic oligonucleotide
aggggccgtcattcgggatcgctaacgggttgaggcacgcacgcttgttagccca

SEQ ID NO: 238310 - DNA, 55 bp, Artificial
  Synthetic oligonucleotide
tccggtgctatcaatatcactcagcgaaaggattgtgcatggccgctccgacgcc

SEQ ID NO: 238311 - DNA, 55 bp, Artificial
  Synthetic oligonucleotide
gtgcctcaccaaattggagtgatgcgagttcggtcgctcacgcataacaaatcga

SEQ ID NO: 238312 - DNA, 55 bp, Artificial
  Synthetic oligonucleotide
gtgcagaaccattccgcatctaggctatcgcggattaaccaggagcggatgcgac

SEQ ID NO: 238313 - DNA, 55 bp, Artificial
  Synthetic oligonucleotide
gtgatagaagtcgtattgcttttaattggcgacaatcagaaaagtgttatcgtcg

SEQ ID NO: 238314 - DNA, 55 bp, Artificial
  Synthetic oligonucleotide
gtctggacattcagccgtagtatcaaacaagaaccgaaaaccaactggttgttgg

SEQ ID NO: 238315 - DNA, 57 bp, Artificial
  Synthetic oligonucleotide
cttctgaactccccatacctctgacagtaacaacagggttactgggggtcatgctgg

SEQ ID NO: 238316 - DNA, 55 bp, Artificial
  Synthetic oligonucleotide
gtctccttctaaccgcaatcgcgggccaagtctgcgttcgggctgcggtcgttac

SEQ ID NO: 238317 - DNA, 55 bp, Artificial
  Synthetic oligonucleotide
atcgcatcgcgttggatcataagttcacgcccgacatattgggctatgtgtctta

SEQ ID NO: 238318 - DNA, 55 bp, Artificial
  Synthetic oligonucleotide
gtcgttcctcgcatgggcgaccgtcaacaacaaccagcccgttcccgacctgttc

SEQ ID NO: 238319 - DNA, 55 bp, Artificial
  Synthetic oligonucleotide
atcgcctgttcggagcctcggcgaacagccagacgtcttccaattggcgagacgg

SEQ ID NO: 238320 - DNA, 55 bp, Artificial
  Synthetic oligonucleotide
gtcggaggcgtggaaatggacccaacggcaagactctgaaattgcgctgactgtg

SEQ ID NO: 238321 - DNA, 55 bp, Artificial
  Synthetic oligonucleotide
gtcgaatctggataagcattgcataacctcgccgattccatagtgcgcgggttcg

SEQ ID NO: 238322 - DNA, 55 bp, Artificial
  Synthetic oligonucleotide
gtcctccaatctcgtaaacatcggtctcgatcgagcacctgtagctctctgcgat

SEQ ID NO: 238323 - DNA, 55 bp, Artificial
  Synthetic oligonucleotide
gtccgcatggagtatattcgtgcgtactctattccatagatctccaagtggattc

SEQ ID NO: 238324 - DNA, 55 bp, Artificial
  Synthetic oligonucleotide
gtccaggaatagggtgtgccgggctgctgggctgtaatctagccgcagcccaaca

SEQ ID NO: 238325 - DNA, 55 bp, Artificial
  Synthetic oligonucleotide
gtcactcactgcggttcgtctccactaaagggcggcccatctctcatccgaacgg

SEQ ID NO: 238326 - DNA, 60 bp, Artificial
  Synthetic oligonucleotide
cttgaagccggggtgacttcagctcttgattttcgacaggcggagtcgctactgactcaa

SEQ ID NO: 238327 - DNA, 55 bp, Artificial
  Synthetic oligonucleotide
gtcaatggtggtacagaggcttccgggcgacactaaccccgtgcgtcgtcgtggt

SEQ ID NO: 238328 - DNA, 55 bp, Artificial
  Synthetic oligonucleotide
atctcgaagtcgtccgcagggatacctagcgcatatcgatgcaactggcggccgg

SEQ ID NO: 238329 - DNA, 55 bp, Artificial
  Synthetic oligonucleotide
atctcggccccgccatgtgggtcgtcaccttcggccaagaccgcttgcgggcttg

SEQ ID NO: 238330 - DNA, 55 bp, Artificial
  Synthetic oligonucleotide
actaaggcggaaatgaagcgttgtgtagcaaatttaccggcggttcatatataat

SEQ ID NO: 238331 - DNA, 55 bp, Artificial
  Synthetic oligonucleotide
aagacgctcgttggaagccagcgggacctcaatatgcttctcaccaaactcggta

SEQ ID NO: 238332 - DNA, 55 bp, Artificial
  Synthetic oligonucleotide
gtttgtgtcgaccgtatgcgtgaagcgtggctccgtcattcgcaacggagcgccc

SEQ ID NO: 238333 - DNA, 55 bp, Artificial
  Synthetic oligonucleotide
atagaatgactagccgcttttaagagactggacaggatatccctgcgtattgggt

SEQ ID NO: 238334 - DNA, 55 bp, Artificial
  Synthetic oligonucleotide
gttggtgcaaattgtagatcggcaataaccgatgttaaatgacgattggcttctt

SEQ ID NO: 238335 - DNA, 55 bp, Artificial
  Synthetic oligonucleotide
atagggatacaaggcgcgcggtccgccacagagcgggtgaagactattgcccagc

SEQ ID NO: 238336 - DNA, 55 bp, Artificial
  Synthetic oligonucleotide
gttgccgagacgaccttcgcataggtcgacttcgcgatatcgcggggcccatcct

SEQ ID NO: 238337 - DNA, 60 bp, Artificial
  Synthetic oligonucleotide
cttggataagcgacactggcagccaaacagccctatggcctacatcggtcgaattatccg

SEQ ID NO: 238338 - DNA, 55 bp, Artificial
  Synthetic oligonucleotide
ataggtcgaaacagtcatcctctaatcccctcgtgagttcgccattcaccgatgg

SEQ ID NO: 238339 - DNA, 55 bp, Artificial
  Synthetic oligonucleotide
gttgaggatcaacgcttcgcttcaagccgacccgatgttctaacttacgagacta

SEQ ID NO: 238340 - DNA, 55 bp, Artificial
  Synthetic oligonucleotide
gttctcactatgttccgtagaggggctgccaatgtcaaagtgagaacgcccaatg

SEQ ID NO: 238341 - DNA, 55 bp, Artificial
  Synthetic oligonucleotide
gttcggggagacagatagtcctcccatcttaacatccgcaagggagaattgttgt

SEQ ID NO: 238342 - DNA, 55 bp, Artificial
  Synthetic oligonucleotide
gttcccatccaagaagcgtccctttagacacgccaatgctttttgcgaattcgtt

SEQ ID NO: 238343 - DNA, 55 bp, Artificial
  Synthetic oligonucleotide
gttatgtctcgtctatatgccttgcctggccgtcggggccaatagcgtcgatacc

SEQ ID NO: 238344 - DNA, 55 bp, Artificial
  Synthetic oligonucleotide
gttaaccgaagtatacttccagtgatgatgagagcagcaagtcgctacctgcgtc

SEQ ID NO: 238345 - DNA, 55 bp, Artificial
  Synthetic oligonucleotide
gtggtgccgcctctggcgcatttgaaggagttgcgcatggccactgatgcagacg

SEQ ID NO: 238346 - DNA, 55 bp, Artificial
  Synthetic oligonucleotide
gtgctcatccgccttgatattcctttccgcctctaaacgcctcgggttgtgattc

SEQ ID NO: 238347 - DNA, 55 bp, Artificial
  Synthetic oligonucleotide
gtgcgggaataagcttaaggtggcgtgtcatgtcaagtctgcaagatgcgcgggc

SEQ ID NO: 238348 - DNA, 60 bp, Artificial
  Synthetic oligonucleotide
aggtcactattgggagctatatcaaattttctgattcatgcaagagagatgggcttgcga

SEQ ID NO: 238349 - DNA, 55 bp, Artificial
  Synthetic oligonucleotide
ttcggcagacctattgggactttccttgtgcgccttaactagcgcagcaaccgaa

SEQ ID NO: 238350 - DNA, 55 bp, Artificial
  Synthetic oligonucleotide
ttcgaaattatcgcgggcgtaaggcgatggtggaccgttcaatggctccgtgagc

SEQ ID NO: 238351 - DNA, 55 bp, Artificial
  Synthetic oligonucleotide
ttccgagatctcgtccaatagaagcgtgccgccattagccgagcgaaagaggcct

SEQ ID NO: 238352 - DNA, 55 bp, Artificial
  Synthetic oligonucleotide
ttatcgaggactagagcctgtcctgataggctgaatcgtttggggattcccaagg

SEQ ID NO: 238353 - DNA, 55 bp, Artificial
  Synthetic oligonucleotide
agcatctgtcgtgggtgccgcccaaactgtacgcagatcctgggcgagtgaagcg

SEQ ID NO: 238354 - DNA, 55 bp, Artificial
  Synthetic oligonucleotide
agcatttcgtgtcgcaggggatgattgcggacgtgtcgctgcaccggggccattc

SEQ ID NO: 238355 - DNA, 55 bp, Artificial
  Synthetic oligonucleotide
ttaggaaaggcgtggcatccgcgcatctcttttgtccgcccgcgtcccgcaatcg

SEQ ID NO: 238356 - DNA, 55 bp, Artificial
  Synthetic oligonucleotide
ttagcgtaatgcagcgagagccctccgctgttgcccgtccgctgtccaaggcaac

SEQ ID NO: 238357 - DNA, 55 bp, Artificial
  Synthetic oligonucleotide
tgttaacgcgtatcgcccgacccttgaagcacgttccgttcgccccggtcgcaca

SEQ ID NO: 238358 - DNA, 55 bp, Artificial
  Synthetic oligonucleotide
agccgtgccgttccaacctgttggagttgcgaaccccatgtccttttcgaagata

SEQ ID NO: 238359 - DNA, 59 bp, Artificial
  Synthetic oligonucleotide
aggttcaggcaggcgaccgacaaagaagctgcggcggacccagagctacgggccgcgca

SEQ ID NO: 238360 - DNA, 55 bp, Artificial
  Synthetic oligonucleotide
tgtacggcaatgaagcgcgctagtggaatctcgctcagaggtcgttccgaagcca

SEQ ID NO: 238361 - DNA, 55 bp, Artificial
  Synthetic oligonucleotide
aaatgacctttaaggtgtattagagatgccggtaaagcggaccccgcaccatgac

SEQ ID NO: 238362 - DNA, 55 bp, Artificial
  Synthetic oligonucleotide
tggccactacgcagattagtataaatggcgatgggtggggtattaaaagggacgg

SEQ ID NO: 238363 - DNA, 55 bp, Artificial
  Synthetic oligonucleotide
acttgacaagaaagtcgcgttttgcgactagtgtttgtccaattctcgacaccgg

SEQ ID NO: 238364 - DNA, 52 bp, Artificial
  Synthetic oligonucleotide
aaatttaccatagggtcggtcagtccccatttggggtgctcgaacgtaggcg

SEQ ID NO: 238365 - DNA, 55 bp, Artificial
  Synthetic oligonucleotide
tggaacaccctcatgttgacttgtgtcttcgtgttccatcctgcggtcacctcgt

SEQ ID NO: 238366 - DNA, 55 bp, Artificial
  Synthetic oligonucleotide
tgcttcaaattgtggtcgccactgagtcatgattggttgcttcaagcatctggcg

SEQ ID NO: 238367 - DNA, 55 bp, Artificial
  Synthetic oligonucleotide
agaatactcaactcgacgtattatatagccaaggcgatcagtaacagtttctaac

SEQ ID NO: 238368 - DNA, 55 bp, Artificial
  Synthetic oligonucleotide
agaccgggctatcagcggggcagtcacggacgagggtagggcgcccctcttttga

SEQ ID NO: 238369 - DNA, 53 bp, Artificial
  Synthetic oligonucleotide
tttgcggaccgcccaaccgccgttctgtgataatggtccccaaccggtccgag

SEQ ID NO: 238370 - DNA, 57 bp, Artificial
  Synthetic oligonucleotide
agtcacaggtctgtcctgtaacttgacaagaaagtcgcgttttgcgactagtgtttg

SEQ ID NO: 238371 - DNA, 55 bp, Artificial
  Synthetic oligonucleotide
tttgcatcagaaagcgagtttagaaccggatcgttttgaccaacgccgttgctgc

SEQ ID NO: 238372 - DNA, 55 bp, Artificial
  Synthetic oligonucleotide
tttgagccaggccgggtttgcgcgcttgctgtgggcgcacaagcgcacggtccag

SEQ ID NO: 238373 - DNA, 55 bp, Artificial
  Synthetic oligonucleotide
aaaagggcgccagggatatgggccttacaataggcttcataggccgtcatattag

SEQ ID NO: 238374 - DNA, 55 bp, Artificial
  Synthetic oligonucleotide
tttcgacaattttgttgtcggtaaagcaaatgatctagcctatcgggcggcttgc

SEQ ID NO: 238375 - DNA, 55 bp, Artificial
  Synthetic oligonucleotide
tttacgtccgcccgcaactgcgtgaggcaccttaatggaaggcatctttcagagc

SEQ ID NO: 238376 - DNA, 55 bp, Artificial
  Synthetic oligonucleotide
ttgggcgatcacggcgctgacccttagcccgctcgcgctcatccgccatctgttt

SEQ ID NO: 238377 - DNA, 55 bp, Artificial
  Synthetic oligonucleotide
agaagcgcccagagcggccctaggaggcttgaagacggacccactcgcctttgca

SEQ ID NO: 238378 - DNA, 55 bp, Artificial
  Synthetic oligonucleotide
ttgcgcgcgtatccaagggcaccttgcgcatccggcccaactggtcaggctcgtt

SEQ ID NO: 238379 - DNA, 55 bp, Artificial
  Synthetic oligonucleotide
agatcgcgttaggcactgggcagggagccgccaaagctgcacctgtccacagtgt

SEQ ID NO: 238380 - DNA, 55 bp, Artificial
  Synthetic oligonucleotide
ttgaccccgtccgccaaccggtcagactccgcaccatgttcaagactcggcccaa

SEQ ID NO: 238381 - DNA, 60 bp, Artificial
  Synthetic oligonucleotide
agtcactgggctgggtagcaagcttcgttcatccgatgcatttcccgatgatgatgcaac

SEQ ID NO: 238382 - DNA, 55 bp, Artificial
  Synthetic oligonucleotide
ttgaacggataacaaagccctgtgaagcgcccaatcctacaccggcttcccgcaa

SEQ ID NO: 238383 - DNA, 55 bp, Artificial
  Synthetic oligonucleotide
ttctgtctgcaaagacgctatcgtagaagatagccttatctaaagatggtatggc

SEQ ID NO: 238384 - DNA, 55 bp, Artificial
  Synthetic oligonucleotide
ttctctaggcggaatcgccaggccctaagctttctcccagattaacggattcagg

SEQ ID NO: 238385 - DNA, 55 bp, Artificial
  Synthetic oligonucleotide
tcttcgtagctatcgagaaacgaggggtccgcatcgccacgcaataccagggcca

SEQ ID NO: 238386 - DNA, 55 bp, Artificial
  Synthetic oligonucleotide
tctgtagtgtttcgacctgcgttcttcgatcaccatgatggaaattgcatggatg

SEQ ID NO: 238387 - DNA, 55 bp, Artificial
  Synthetic oligonucleotide
tctgattatggatcccagcccctgttttggttaatgtgccagtcccatttatgct

SEQ ID NO: 238388 - DNA, 55 bp, Artificial
  Synthetic oligonucleotide
tctgaagctggccgtacaacggagcatcttgggttcggtcgcgtcggaaactcgc

SEQ ID NO: 238389 - DNA, 55 bp, Artificial
  Synthetic oligonucleotide
aacgagggtggggacaacgcattcgctgttcgggatgtgaagatttccaacgagt

SEQ ID NO: 238390 - DNA, 55 bp, Artificial
  Synthetic oligonucleotide
tctatgtgggtatccgatcgcaagaacggaaggggaaacagcgagatttcagtgt

SEQ ID NO: 238391 - DNA, 55 bp, Artificial
  Synthetic oligonucleotide
aggagtcatcgaaatgctgcgcgtctgtcaccgatctgcgacgtggacgtaacag

SEQ ID NO: 238392 - DNA, 60 bp, Artificial
  Synthetic oligonucleotide
cgcatcggaatatgacgcaagacaggtcataaatgcctgtatttaggcctataaagcgga

SEQ ID NO: 238393 - DNA, 58 bp, Artificial
  Synthetic oligonucleotide
agtgagttccatcgatcctctcccgttctgtgcgtcgggcacccaatacctccgcgaa

SEQ ID NO: 238394 - DNA, 55 bp, Artificial
  Synthetic oligonucleotide
aggatgaaatcttatcacgcctgttgtttggttcttctgtaacgaccttgtcacc

SEQ ID NO: 238395 - DNA, 55 bp, Artificial
  Synthetic oligonucleotide
aggcaatccgggcctatgtggaccgcgaggaagctcgcgaaagcttcaaggccga

SEQ ID NO: 238396 - DNA, 55 bp, Artificial
  Synthetic oligonucleotide
tcgtggttgacgcttgcgtaaagggaaagcgtaacttacacctgtataaatggag

SEQ ID NO: 238397 - DNA, 55 bp, Artificial
  Synthetic oligonucleotide
tcgtgcgcgcgacgctagcgagtctgacgcgcgaagcattgaggcagatcaagag

SEQ ID NO: 238398 - DNA, 55 bp, Artificial
  Synthetic oligonucleotide
tcgtctggcgagctcaagaggacgtgccgtgcgcccattgggatccagcgttatg

SEQ ID NO: 238399 - DNA, 55 bp, Artificial
  Synthetic oligonucleotide
actgcccatagctcgacgtcgaaagcgccagttcggtcaagcgtctgccttcgcg

SEQ ID NO: 238400 - DNA, 55 bp, Artificial
  Synthetic oligonucleotide
tcgtcgggtcatgattcgtgtcccttcttgccgtattctagccggctctggctgg

SEQ ID NO: 238401 - DNA, 55 bp, Artificial
  Synthetic oligonucleotide
tcggaactaaaactagatcactccgacgagcaatctgactagccgtaggagccgc

SEQ ID NO: 238402 - DNA, 55 bp, Artificial
  Synthetic oligonucleotide
tcgctggctcccggtgcaagggcgaccggcaattgttctaccgagacatagaacg

SEQ ID NO: 238403 - DNA, 55 bp, Artificial
  Synthetic oligonucleotide
tcgcgtcccgatgcgaccatccgcccacccgaaatgaccaaccgaattgccactt

SEQ ID NO: 238404 - DNA, 59 bp, Artificial
  Synthetic oligonucleotide
agtggttcacggatttggcatcgagaccaagttgctccgccagatacaagacaccgtcg

SEQ ID NO: 238405 - DNA, 55 bp, Artificial
  Synthetic oligonucleotide
tgcgcctctagcgacctcaggtagccctctgcagacatttccggtcgcgtaagcc

SEQ ID NO: 238406 - DNA, 55 bp, Artificial
  Synthetic oligonucleotide
tgcgagcgtactggtagtcaaacagaacagggtcgcactggttccgcactgcccc

SEQ ID NO: 238407 - DNA, 55 bp, Artificial
  Synthetic oligonucleotide
tgccttcgcaggagcacgttatttcgagccgcctgacatgctcgccgctccgcta

SEQ ID NO: 238408 - DNA, 55 bp, Artificial
  Synthetic oligonucleotide
tgccccgagtacacggagacagcagcccagtaactcgccatgggcgctttacgct

SEQ ID NO: 238409 - DNA, 55 bp, Artificial
  Synthetic oligonucleotide
aacagtggcgcaagcctgccatagcgcttcgagggttcgaaagcgtagaggcgcc

SEQ ID NO: 238410 - DNA, 55 bp, Artificial
  Synthetic oligonucleotide
tgcatggcatgcgtagcgcgtttcgcgactatatgggcgaaatgacaaaccaccc

SEQ ID NO: 238411 - DNA, 55 bp, Artificial
  Synthetic oligonucleotide
tgcagtaaagcgacacgctcgagagaccgccatcgggcatgagcgtgatcagtgt

SEQ ID NO: 238412 - DNA, 55 bp, Artificial
  Synthetic oligonucleotide
tgcagcgcggtaagtcgcggaattactgcgattcgttgcgaaggctcgcgagttg

SEQ ID NO: 238413 - DNA, 55 bp, Artificial
  Synthetic oligonucleotide
tgcacgcacggcctgaattccccgcttgttctaaagctctgcgccctagtcgcgg

SEQ ID NO: 238414 - DNA, 55 bp, Artificial
  Synthetic oligonucleotide
tgcacccccatgaggacatccagccggttaagctgcacttcaagagccgcgcgca

SEQ ID NO: 238415 - DNA, 58 bp, Artificial
  Synthetic oligonucleotide
agttacgagcacatatttgcgtatttggaatggattccgaatacgcgaaattcacaac

SEQ ID NO: 238416 - DNA, 55 bp, Artificial
  Synthetic oligonucleotide
tgcaacagtccggtgcccttgcgccccgaaccactggtccgccatgcccgttaca

SEQ ID NO: 238417 - DNA, 55 bp, Artificial
  Synthetic oligonucleotide
acttaggccttgccgtccaacgttgcctgtattcacgcggcgagagccctgtcgc

SEQ ID NO: 238418 - DNA, 55 bp, Artificial
  Synthetic oligonucleotide
aaccgggtgccaccacccgaagctggcgggatgatgtatcgtgacctgacgccat

SEQ ID NO: 238419 - DNA, 55 bp, Artificial
  Synthetic oligonucleotide
agctggttcaaatctttccgtagcggcagaagtggtctcaatctgcaccctaccg

SEQ ID NO: 238420 - DNA, 55 bp, Artificial
  Synthetic oligonucleotide
tgaatgcttggcaggcaactgaaagccgtagaagtgacacgagtgcggtccaccc

SEQ ID NO: 238421 - DNA, 55 bp, Artificial
  Synthetic oligonucleotide
tcttgcctgcgcgagtaacttcgaagcctaactcttcaacattagtgagaagagt

SEQ ID NO: 238422 - DNA, 55 bp, Artificial
  Synthetic oligonucleotide
actggttatttcttacattgacggtcagaaactgcgagattggccatttaagagc

SEQ ID NO: 238423 - DNA, 55 bp, Artificial
  Synthetic oligonucleotide
gggcacggtcattatagcccggacgcgcgataaccgcaatcggcatcaaacgcgc

SEQ ID NO: 238424 - DNA, 55 bp, Artificial
  Synthetic oligonucleotide
cacagaactgtgcgcattacgaccgacaactccccatttgggaaatgaccgctgg

SEQ ID NO: 238425 - DNA, 55 bp, Artificial
  Synthetic oligonucleotide
gggatgaggaatgcgggcagcgacgatggcagcttgcccatgtccccgactgtgt

SEQ ID NO: 238426 - DNA, 54 bp, Artificial
  Synthetic oligonucleotide
ataagtatcttgggcgtcataaattttgagggttccgtccaaattaccattggc

SEQ ID NO: 238427 - DNA, 55 bp, Artificial
  Synthetic oligonucleotide
gggagatgctcgagaggtattactcgccgcaacaagggcagccaagacgcagccg

SEQ ID NO: 238428 - DNA, 55 bp, Artificial
  Synthetic oligonucleotide
cacccgctcacgggcaaccagcatccagatataggtcggtagcccttcctcggag

SEQ ID NO: 238429 - DNA, 55 bp, Artificial
  Synthetic oligonucleotide
gggacccatatattggggattatgtctcaatgagggcatgttactaggatatcgg

SEQ ID NO: 238430 - DNA, 55 bp, Artificial
  Synthetic oligonucleotide
cacctgggtatggcgccaatattcgaactgggtggctccgatccagaccggaatg

SEQ ID NO: 238431 - DNA, 49 bp, Artificial
  Synthetic oligonucleotide
gggaaatcccggtttcgtctctcgccgtggagttccttttagggtccgg

SEQ ID NO: 238432 - DNA, 55 bp, Artificial
  Synthetic oligonucleotide
gggaaaaccacgatggccagctttctaacagacaatcagatcatcaggatggctc

SEQ ID NO: 238433 - DNA, 55 bp, Artificial
  Synthetic oligonucleotide
ggctggtcgctatttgtgcgaagctttgggttcatgggtcaattcaacactgggc

SEQ ID NO: 238434 - DNA, 55 bp, Artificial
  Synthetic oligonucleotide
cacgctgatcacattgtggaactataatcccgctaatgaaatcggggcgcgcgtc

SEQ ID NO: 238435 - DNA, 55 bp, Artificial
  Synthetic oligonucleotide
ggctcgctgttcagacgacccaccttggtgtcttcccatgtctgtgataggtggc

SEQ ID NO: 238436 - DNA, 55 bp, Artificial
  Synthetic oligonucleotide
ggcgcgctgcatggtagaaaggtggctaattttctagaaaggcggaccatgagcc

SEQ ID NO: 238437 - DNA, 59 bp, Artificial
  Synthetic oligonucleotide
ataatttaaatgagattagtgatagaagtcgtattgcttttaattggcgacaatcagaa

SEQ ID NO: 238438 - DNA, 55 bp, Artificial
  Synthetic oligonucleotide
ggcgcgctatcatggctggctgacaggtttggtgatgaaactgcccgtcatgata

SEQ ID NO: 238439 - DNA, 55 bp, Artificial
  Synthetic oligonucleotide
ggcgcctacgctcgttcaggagaattttccgcagtttgcctatgtctatcccgcg

SEQ ID NO: 238440 - DNA, 55 bp, Artificial
  Synthetic oligonucleotide
ggcgaccgtcgtcgcagcaacatacagcagacagagcttcaccatccgatagaat

SEQ ID NO: 238441 - DNA, 55 bp, Artificial
  Synthetic oligonucleotide
ggcgaatgcgaaagccgacatcaaacagagcgatgagtggcaaaaggccgtcgcc

SEQ ID NO: 238442 - DNA, 54 bp, Artificial
  Synthetic oligonucleotide
ggccttcgtaggttcgttgagacaaaggaaaccagcaatcggacacttttcgcg

SEQ ID NO: 238443 - DNA, 55 bp, Artificial
  Synthetic oligonucleotide
cactgacgacaaattcaagacccgccggatggagtgatttggatggagagccgtc

SEQ ID NO: 238444 - DNA, 55 bp, Artificial
  Synthetic oligonucleotide
gggtcgttgcgcaagcagcggacttcggcgcttatgccggacaatgtaagacccc

SEQ ID NO: 238445 - DNA, 55 bp, Artificial
  Synthetic oligonucleotide
gggtatccgcttccaatcgatataccagtcattgccggcgcgatttgccgccgac

SEQ ID NO: 238446 - DNA, 55 bp, Artificial
  Synthetic oligonucleotide
ggggtatcattatcggcctatggttgcctgaggtaggctcgaatgcggctgcatt

SEQ ID NO: 238447 - DNA, 55 bp, Artificial
  Synthetic oligonucleotide
ggggcgtggtactcgcccaaatatgacgggttcgatccagacggcgacaggtctg

SEQ ID NO: 238448 - DNA, 54 bp, Artificial
  Synthetic oligonucleotide
atagtttcgtattttgcgtttcaagcttacatcagtaaccagcccgcggttagt

SEQ ID NO: 238449 - DNA, 55 bp, Artificial
  Synthetic oligonucleotide
caaactgggatgattacgtagcgactgagatacgcggttctggaatgctgcactc

SEQ ID NO: 238450 - DNA, 54 bp, Artificial
  Synthetic oligonucleotide
ggggcctgtcaaagtcgcgtccggccgacaggaatcgtctaaggttcacccacc

SEQ ID NO: 238451 - DNA, 52 bp, Artificial
  Synthetic oligonucleotide
ggggatgtcgaacgttcccagaataaaggtatccgccgtcgttccttatagg

SEQ ID NO: 238452 - DNA, 55 bp, Artificial
  Synthetic oligonucleotide
ggggagcgccgatcgcaaagttgtgacgcccaggccatggaactgtcaccaattg

SEQ ID NO: 238453 - DNA, 55 bp, Artificial
  Synthetic oligonucleotide
gggctataaagatatagcgatcttagctaaggaaacgcaggattcttcatggaag

SEQ ID NO: 238454 - DNA, 55 bp, Artificial
  Synthetic oligonucleotide
caaccgatacaagggtatgacagcacgtcactttgcggcgacagtcgagacccac

SEQ ID NO: 238455 - DNA, 53 bp, Artificial
  Synthetic oligonucleotide
gggcgtcataaattttgagggttccgtccaaattaccattggcggttcccgca

SEQ ID NO: 238456 - DNA, 55 bp, Artificial
  Synthetic oligonucleotide
gggccctgtctgctgggttgttctgtcagaaatgttcccgagttccatcaagggc

SEQ ID NO: 238457 - DNA, 55 bp, Artificial
  Synthetic oligonucleotide
acgcgccacaacacactgttcataaccacgagaggaccacttatgtttaacctgc

SEQ ID NO: 238458 - DNA, 55 bp, Artificial
  Synthetic oligonucleotide
caaggccaattgcctttgcaacctccctgacgatccgcaagacggagaagcgggc

SEQ ID NO: 238459 - DNA, 58 bp, Artificial
  Synthetic oligonucleotide
atatgccatttgtgccgatcgttcatttccaacgattgttggcccaatataaaggaac

SEQ ID NO: 238460 - DNA, 55 bp, Artificial
  Synthetic oligonucleotide
gggcatggcgacgaaccctacgatagaggcgaaccaacctgtagcgaccttgttg

SEQ ID NO: 238461 - DNA, 55 bp, Artificial
  Synthetic oligonucleotide
gggcatcggaccgggtagggtttcgatcaagacaagctggtctatcccgattgcg

SEQ ID NO: 238462 - DNA, 55 bp, Artificial
  Synthetic oligonucleotide
caatctatacgcgcaatatacgttcaagaatggcgggccgctgaacgataccagt

SEQ ID NO: 238463 - DNA, 55 bp, Artificial
  Synthetic oligonucleotide
gggcactggcagccttaatataggtgggttctcgctctataccgatccaatgccg

SEQ ID NO: 238464 - DNA, 55 bp, Artificial
  Synthetic oligonucleotide
caatttggacgttgctatatcaagcagcgaggtcgcaacaggcacttactccgcg

SEQ ID NO: 238465 - DNA, 55 bp, Artificial
  Synthetic oligonucleotide
ggacgggtaaatcccagtgagcgagacgcgtcatacacagcgctacatagtgcgc

SEQ ID NO: 238466 - DNA, 55 bp, Artificial
  Synthetic oligonucleotide
ggacgctagacgcgcgcaatttggacaataccctatcgcgccaaacctggtcgac

SEQ ID NO: 238467 - DNA, 55 bp, Artificial
  Synthetic oligonucleotide
ggacgagatgataacattctggtcaatcaagccactggtgagatgcaaggcactc

SEQ ID NO: 238468 - DNA, 55 bp, Artificial
  Synthetic oligonucleotide
catccctgaccttcgatcgatcgcccggtataattactaaacgttaaggatcgaa

SEQ ID NO: 238469 - DNA, 55 bp, Artificial
  Synthetic oligonucleotide
ggaaggccgcaatgtcatcggtgatgttgatcgacctgttctgcaccaccgggta

SEQ ID NO: 238470 - DNA, 57 bp, Artificial
  Synthetic oligonucleotide
atcaaattccgacgcgccaataagctctatgccgtatcgggaattatccgatgtttt

SEQ ID NO: 238471 - DNA, 55 bp, Artificial
  Synthetic oligonucleotide
ggaagaataaccgaggaccataaagaacagcgcctcccttagggtcatcagcccc

SEQ ID NO: 238472 - DNA, 55 bp, Artificial
  Synthetic oligonucleotide
catcggggctcatggacttaatgctgtgccgttcttgcagccgaggctaatcggc

SEQ ID NO: 238473 - DNA, 55 bp, Artificial
  Synthetic oligonucleotide
ggaaatcatgcgaaccaagaataggcaaagtttcgatcacgatacagcgaacgcc

SEQ ID NO: 238474 - DNA, 55 bp, Artificial
  Synthetic oligonucleotide
gcttggaaagctatctgggttgcgctaacggagcgccggtgcatggggagcgtga

SEQ ID NO: 238475 - DNA, 55 bp, Artificial
  Synthetic oligonucleotide
catgcctacatggccctgcaggacacgggaaatcggctcgtccaattaatggaag

SEQ ID NO: 238476 - DNA, 55 bp, Artificial
  Synthetic oligonucleotide
gcttgatccggtctgccacttgttcactatagaatctaatctcggcagacagccc

SEQ ID NO: 238477 - DNA, 55 bp, Artificial
  Synthetic oligonucleotide
gcttcaggcgagcaagctaccttccccacatctatgcggcagaagcgaagtactc

SEQ ID NO: 238478 - DNA, 55 bp, Artificial
  Synthetic oligonucleotide
cattgctgaacgagagcttctgctcccctgtcgggtagaattgcgacaggtctgt

SEQ ID NO: 238479 - DNA, 55 bp, Artificial
  Synthetic oligonucleotide
gctgtcatgaacaataatgttagctgcgcgaagcattaactaaggtgctcctttc

SEQ ID NO: 238480 - DNA, 55 bp, Artificial
  Synthetic oligonucleotide
cattgggaagggaatagcttggataaccgctacgattataggtaatcaggtcgct

SEQ ID NO: 238481 - DNA, 60 bp, Artificial
  Synthetic oligonucleotide
atcaaggggcgtctttctccatgttgcgcccagccaccggccctgcagactgactgtaac

SEQ ID NO: 238482 - DNA, 55 bp, Artificial
  Synthetic oligonucleotide
ccaacaggtcttcttccaatgcagaagaggcgagcgtaatatttccggaaaagcc

SEQ ID NO: 238483 - DNA, 55 bp, Artificial
  Synthetic oligonucleotide
gctgccattttgtatctggctcgaaaagctactgtgctggtctgttcactggaga

SEQ ID NO: 238484 - DNA, 55 bp, Artificial
  Synthetic oligonucleotide
gctgcattcacgcggaaattgcgcacgcgacaacgcctgtgaccagcccacaagc

SEQ ID NO: 238485 - DNA, 55 bp, Artificial
  Synthetic oligonucleotide
cactgatccagttcctccggtcatacgtcttcgctctgcccggccaaccggacag

SEQ ID NO: 238486 - DNA, 55 bp, Artificial
  Synthetic oligonucleotide
ggcctctaacgccataacggtttcgggaatatattgcgcttactcataacgaact

SEQ ID NO: 238487 - DNA, 55 bp, Artificial
  Synthetic oligonucleotide
ggcccttccacgaagggaagaacagtccggaatatcaacgcaactcgctgtcgat

SEQ ID NO: 238488 - DNA, 55 bp, Artificial
  Synthetic oligonucleotide
ggccagcccgctcaaagcgagcttcgtgaaactacgacgatccatgaatcgcaat

SEQ ID NO: 238489 - DNA, 55 bp, Artificial
  Synthetic oligonucleotide
ggccaagtgccctggaggaatcgccgtaatgcacgggaaatgacaggaaaccaca

SEQ ID NO: 238490 - DNA, 55 bp, Artificial
  Synthetic oligonucleotide
ggcaggagccatgaaacgcactaccggaatggaccgagccaagacctctcaatgg

SEQ ID NO: 238491 - DNA, 55 bp, Artificial
  Synthetic oligonucleotide
aagttatgtcgacgcggtcattatccggttattatccgaatttggactgacgccc

SEQ ID NO: 238492 - DNA, 55 bp, Artificial
  Synthetic oligonucleotide
atccaaggaatccttgaggtttcgggctacgccaacggccaatacatcacccaaa

SEQ ID NO: 238493 - DNA, 55 bp, Artificial
  Synthetic oligonucleotide
cagcgggcgcgtgtcgtttagaggaaaagcattacgaattgcaaataaagtgcag

SEQ ID NO: 238494 - DNA, 55 bp, Artificial
  Synthetic oligonucleotide
cagcggttctgccgatacgggtggattgggatgctgcgtcaccgtctggcttcct

SEQ ID NO: 238495 - DNA, 55 bp, Artificial
  Synthetic oligonucleotide
cagctcgaaggtgtaaaggacgagctcctccggacgatgaacgatccgatcgtca

SEQ ID NO: 238496 - DNA, 55 bp, Artificial
  Synthetic oligonucleotide
cagcttccgcaccttgtcgagtaatccaagctcgatcaggcgaacataatagtcg

SEQ ID NO: 238497 - DNA, 55 bp, Artificial
  Synthetic oligonucleotide
ggagtagcgtagtttggcttattatattctcagggtgatcgacgttattgggcgg

SEQ ID NO: 238498 - DNA, 55 bp, Artificial
  Synthetic oligonucleotide
ggagggagcctagcgccaaacacgaccgaacgaaagtgagggaagtgcccactta

SEQ ID NO: 238499 - DNA, 55 bp, Artificial
  Synthetic oligonucleotide
ggaggatcagaaattcgcgcgaatgcccgccaatatggtccgccccggatagtag

SEQ ID NO: 238500 - DNA, 55 bp, Artificial
  Synthetic oligonucleotide
ggagagtcttgggaggccaatggtcgatccttgagagtcggtttctcaagcctta

SEQ ID NO: 238501 - DNA, 55 bp, Artificial
  Synthetic oligonucleotide
caggcgcgcctatgctcggcattcagcactacgtgactgaagataagacgccgcc

SEQ ID NO: 238502 - DNA, 55 bp, Artificial
  Synthetic oligonucleotide
caggggcccgtactcgtacgcagcaccgaagctctattgcagttggtctgtgatg

SEQ ID NO: 238503 - DNA, 58 bp, Artificial
  Synthetic oligonucleotide
cgccaaacgctcatgaaggcgatcaagacaggccgtgtttccgccgaaaaaacagata

SEQ ID NO: 238504 - DNA, 60 bp, Artificial
  Synthetic oligonucleotide
atccgataacggcgaatggcgcattgagcctgtcgagttgttccgcgtgtggccacctgt

SEQ ID NO: 238505 - DNA, 55 bp, Artificial
  Synthetic oligonucleotide
caggtgaaagccagcctgcgtgaggaactcccgattgccgtttgaacctgagtcg

SEQ ID NO: 238506 - DNA, 55 bp, Artificial
  Synthetic oligonucleotide
cagtagctgattggctaggggtagccagtagctgattggctagggtctgtcgatt

SEQ ID NO: 238507 - DNA, 55 bp, Artificial
  Synthetic oligonucleotide
ggagaagtaggattactctcaaatgcagccattacgtaaggcatccatgacggaa

SEQ ID NO: 238508 - DNA, 55 bp, Artificial
  Synthetic oligonucleotide
attccggttaacttgtcgcaggtgggctcagattggcgccttcgcgggaccactt

SEQ ID NO: 238509 - DNA, 55 bp, Artificial
  Synthetic oligonucleotide
ggtaaagcacgccttgctgaccggagcaagtatccggctgttcggaataagaacc

SEQ ID NO: 238510 - DNA, 55 bp, Artificial
  Synthetic oligonucleotide
acgcttgcggcgtcatccgaatgaacggatatcaaggccttctgatcatcagacg

SEQ ID NO: 238511 - DNA, 55 bp, Artificial
  Synthetic oligonucleotide
ggtatcccctgatatgccgcctgtactgacccgaaatgcagtcgcatcgacggga

SEQ ID NO: 238512 - DNA, 55 bp, Artificial
  Synthetic oligonucleotide
ggtcagcaggcatgtcagattggtgtatttgcagcctatgtctctccgcagggtc

SEQ ID NO: 238513 - DNA, 54 bp, Artificial
  Synthetic oligonucleotide
ggtccgatgtctcaatcttacgcgtttcgaccgaaccggtagagcggtggaggg

SEQ ID NO: 238514 - DNA, 52 bp, Artificial
  Synthetic oligonucleotide
atgtaccgaaagctgtggggtttgtatccaacaaacgaacccagttggttgg

SEQ ID NO: 238515 - DNA, 59 bp, Artificial
  Synthetic oligonucleotide
atcctgggaaattacgagccattcgcccaattagcccttcattggacagacgatatgcc

SEQ ID NO: 238516 - DNA, 55 bp, Artificial
  Synthetic oligonucleotide
ggtcgccctcccctgttgccggttcgctatcccgatcccgatctgttcatttgcg

SEQ ID NO: 238517 - DNA, 55 bp, Artificial
  Synthetic oligonucleotide
ggtcggaaacgaccttcttccgagccaaagtgcgagcagcctgatcaatggctta

SEQ ID NO: 238518 - DNA, 52 bp, Artificial
  Synthetic oligonucleotide
ggtcggtcgtcccgttaatttgccgtgtaaaatcaacgttaagcgtaggtgc

SEQ ID NO: 238519 - DNA, 55 bp, Artificial
  Synthetic oligonucleotide
acggacacaatccgggtggccgttcaacggacgtcttacggacagcgacatggag

SEQ ID NO: 238520 - DNA, 55 bp, Artificial
  Synthetic oligonucleotide
ggtctcatcacgacgaagactattgcccaatcgagtaatcgctcggtgcttagcc

SEQ ID NO: 238521 - DNA, 55 bp, Artificial
  Synthetic oligonucleotide
ggtgcaccgagatgcgaatgccgacgtttgtaaagcagcctgcggtatccgatga

SEQ ID NO: 238522 - DNA, 55 bp, Artificial
  Synthetic oligonucleotide
ggtggccgtttctgcgcgtccagccttaccaaatacggtctctacttcgggaatg

SEQ ID NO: 238523 - DNA, 55 bp, Artificial
  Synthetic oligonucleotide
ggtggtgccattgatttgctcatgcacacaacaggccaagactacaaaggcgcgc

SEQ ID NO: 238524 - DNA, 55 bp, Artificial
  Synthetic oligonucleotide
ggtttctggaaagacggtgcaggcaagccccgtgtcgaggcctatgccaatcggc

SEQ ID NO: 238525 - DNA, 55 bp, Artificial
  Synthetic oligonucleotide
ggtttgactccattggcgacgtcgcatgtctgtgaaatgatccgggagtgtctca

SEQ ID NO: 238526 - DNA, 57 bp, Artificial
  Synthetic oligonucleotide
atcgacggactaattcagctattaaggcgcgcgcaggcgttagtttttctacgcctg

SEQ ID NO: 238527 - DNA, 51 bp, Artificial
  Synthetic oligonucleotide
gtaaaacgaggtgaaattctaggccttgttggcggatcgggaacggggaaa

SEQ ID NO: 238528 - DNA, 55 bp, Artificial
  Synthetic oligonucleotide
gtaaccgacatcgattgtgccgaagtccacattggcgttaaagttggccgcccag

SEQ ID NO: 238529 - DNA, 55 bp, Artificial
  Synthetic oligonucleotide
gtaatttcctgcgggaagcgacgcagagccatttccaaatcaggcaaggcatccc

SEQ ID NO: 238530 - DNA, 55 bp, Artificial
  Synthetic oligonucleotide
atgccaccgctgcccatgtccttagccgtccggctaatcagctctttgaacaatg

SEQ ID NO: 238531 - DNA, 55 bp, Artificial
  Synthetic oligonucleotide
acggacccttggaaggcaatcgccgtgtgcgaacgcatttggccgcccaagtacg

SEQ ID NO: 238532 - DNA, 55 bp, Artificial
  Synthetic oligonucleotide
gtacgtgcgataagatcagcaaccaaacgttcgaggtcagcccgagaaatcgttt

SEQ ID NO: 238533 - DNA, 55 bp, Artificial
  Synthetic oligonucleotide
gtagcatgcaatatacactgggcatccgcaggagatgattcgatgtccgaaatcg

SEQ ID NO: 238534 - DNA, 55 bp, Artificial
  Synthetic oligonucleotide
atgagcaaaccagctgggaggaaccataagcaaaatatgaaaatgaggatgtcag

SEQ ID NO: 238535 - DNA, 55 bp, Artificial
  Synthetic oligonucleotide
atgaccccgatatcttcgcgctgggcgactgtgcgagtgtcatgcttccggaccg

SEQ ID NO: 238536 - DNA, 55 bp, Artificial
  Synthetic oligonucleotide
atgaagtcataatgaggaggggattgccacttaacatgagcgacaaaacagacgg

SEQ ID NO: 238537 - DNA, 59 bp, Artificial
  Synthetic oligonucleotide
atcgggccgattggcgtcagcgtaatgagcaacgtcggtacgacaattgcaaacaaggc

SEQ ID NO: 238538 - DNA, 55 bp, Artificial
  Synthetic oligonucleotide
atctttgccaatcgcctgtaaaaccttccgagccatcgctcttttgcgaatatta

SEQ ID NO: 238539 - DNA, 55 bp, Artificial
  Synthetic oligonucleotide
gtatagccacaacgtccagctatgcgacgtgcaccagcctgcggtctatggatcg

SEQ ID NO: 238540 - DNA, 55 bp, Artificial
  Synthetic oligonucleotide
gtattttggggtccttccagcccctgtctgtcgctggagggcggccctgcgacga

SEQ ID NO: 238541 - DNA, 55 bp, Artificial
  Synthetic oligonucleotide
gggtctccattgcgaatcgatggagcgccttatgaaagctcaagtgcagtggagg

SEQ ID NO: 238542 - DNA, 55 bp, Artificial
  Synthetic oligonucleotide
attgactgcccctagccaatctatgtccgatttctcgacactggagtcacacccc

SEQ ID NO: 238543 - DNA, 55 bp, Artificial
  Synthetic oligonucleotide
attgcgaactaacacttcgcgagcctgtcgggatttcgcgcctaccgagtaagtc

SEQ ID NO: 238544 - DNA, 55 bp, Artificial
  Synthetic oligonucleotide
gggtgcctcaacactagccaagtaaacgcgacgagtcgcgggaagatgccgccca

SEQ ID NO: 238545 - DNA, 55 bp, Artificial
  Synthetic oligonucleotide
gggtgccaagctctggaggcgcagagaagctatcttgacacgttaccagttggtc

SEQ ID NO: 238546 - DNA, 54 bp, Artificial
  Synthetic oligonucleotide
gggttccggccttagcaaaatgggttttgggcccgtcactgcggataggctgcc

SEQ ID NO: 238547 - DNA, 52 bp, Artificial
  Synthetic oligonucleotide
ggacaatcttggtccggaaaccccatttgtggcagtcttttccgaaactggg

SEQ ID NO: 238548 - DNA, 60 bp, Artificial
  Synthetic oligonucleotide
atcgtatgcaggacgactacgccttgcatcttagacctaacgctacaggtctgtatgcgt

SEQ ID NO: 238549 - DNA, 54 bp, Artificial
  Synthetic oligonucleotide
ctgacaccggcagctccgccaagataagccgcatattcggttcgacccgggcca

SEQ ID NO: 238550 - DNA, 54 bp, Artificial
  Synthetic oligonucleotide
ttaggcatgcgcaccatcttgctattgggtctggctgcggggtcgttgctgctg

SEQ ID NO: 238551 - DNA, 54 bp, Artificial
  Synthetic oligonucleotide
tcctgactatcatgcgtcagacaatgcagtctggatgcaaaagaatgacggtta

SEQ ID NO: 238552 - DNA, 54 bp, Artificial
  Synthetic oligonucleotide
ctcggttgtagcgaggtcaaggctcgtctcctgtgtggattgtagcaggctcgc

SEQ ID NO: 238553 - DNA, 54 bp, Artificial
  Synthetic oligonucleotide
agcccagcgaagcatttggtttccccttggtagaaccttgcattgaacctaggc

SEQ ID NO: 238554 - DNA, 52 bp, Artificial
  Synthetic oligonucleotide
tgtgggtttaccggatgcgctgacttccccgaaaccgttaattcaagacgtt

SEQ ID NO: 238555 - DNA, 54 bp, Artificial
  Synthetic oligonucleotide
tgtccgcccgagagggtttgcggtgtcggcgtaattcctcgcgacgggtttcga

SEQ ID NO: 238556 - DNA, 54 bp, Artificial
  Synthetic oligonucleotide
gatattcacgcccttctttattcgccgtttccgttgcgcgacctgtaattgtaa

SEQ ID NO: 238557 - DNA, 54 bp, Artificial
  Synthetic oligonucleotide
tgggattgccctaacccgtgacatatgttacgcacagtgacatgtggaacggct

SEQ ID NO: 238558 - DNA, 54 bp, Artificial
  Synthetic oligonucleotide
attgcaactggaaatgcgtacaggacaatttcgcggagaattaccatgcgaaat

SEQ ID NO: 238559 - DNA, 59 bp, Artificial
  Synthetic oligonucleotide
agaggtcatggaacgctagctgttcgggctcgcattcctggttgtctatcgggaggtat

SEQ ID NO: 238560 - DNA, 54 bp, Artificial
  Synthetic oligonucleotide
gtgctatcggcgtctagcatcgatcatcgctatttacttgccgttccgcggttt

SEQ ID NO: 238561 - DNA, 54 bp, Artificial
  Synthetic oligonucleotide
tggagggtcagaacgttcttgctgataacggagcgatacacccattccgacagg

SEQ ID NO: 238562 - DNA, 54 bp, Artificial
  Synthetic oligonucleotide
tggagcgtgtatcgcaaaatgcgtaacttgaccagtcatacctataatgagatc

SEQ ID NO: 238563 - DNA, 54 bp, Artificial
  Synthetic oligonucleotide
cgaaattgcggctgctggcctactgcgttgcctcgcagatcacgagcctttcgt

SEQ ID NO: 238564 - DNA, 54 bp, Artificial
  Synthetic oligonucleotide
ctttggatggcacaaaagccacccccaagcgcctccctgcgtcctacgggccgg

SEQ ID NO: 238565 - DNA, 54 bp, Artificial
  Synthetic oligonucleotide
gggtgagccgcgacggatcgcacctctatccggcgcttccttacgagcatttca

SEQ ID NO: 238566 - DNA, 54 bp, Artificial
  Synthetic oligonucleotide
gtcaataagaccacttacacgcacagataagcaaattttggcagccttcttacc

SEQ ID NO: 238567 - DNA, 54 bp, Artificial
  Synthetic oligonucleotide
gtataagcacaagatcggcttgagatattgctcgagagactaatcgcgacgcaa

SEQ ID NO: 238568 - DNA, 54 bp, Artificial
  Synthetic oligonucleotide
gtcacgctacgggccggagcttaccagcgaggtcaccgatcccagtttcaccgg

SEQ ID NO: 238569 - DNA, 54 bp, Artificial
  Synthetic oligonucleotide
atcgtcatcgggattgcggtatcggtccgccccgacaacccagatttccttaga

SEQ ID NO: 238570 - DNA, 60 bp, Artificial
  Synthetic oligonucleotide
agatcgcgaggcgtcttcggacctctgtctgatcgcctaaccagagctcgataatgtgcc

SEQ ID NO: 238571 - DNA, 50 bp, Artificial
  Synthetic oligonucleotide
actccggactagcgccctaacgtcaaaatagggttaccgggccgccccaa

SEQ ID NO: 238572 - DNA, 54 bp, Artificial
  Synthetic oligonucleotide
accggaactggtctcgtctcctgaatacgccagcttgtgggaaaggcttggccg

SEQ ID NO: 238573 - DNA, 54 bp, Artificial
  Synthetic oligonucleotide
ttggacgggccgacggtgccttgggacggcctcgcacaacttgaatgttcgagc

SEQ ID NO: 238574 - DNA, 54 bp, Artificial
  Synthetic oligonucleotide
agaggcggcgcttttcttccctctgaccgtgcttcaagcactgcgccagtgagt

SEQ ID NO: 238575 - DNA, 54 bp, Artificial
  Synthetic oligonucleotide
agatacagcattcgagctgcacgttctattctagtatctggagtattattacgt

SEQ ID NO: 238576 - DNA, 54 bp, Artificial
  Synthetic oligonucleotide
atttccgatcggccttcatcttgccaattgcctattttctgggcgaattccatt

SEQ ID NO: 238577 - DNA, 54 bp, Artificial
  Synthetic oligonucleotide
ccaggcagcttatatctcgaattcggttaagaattcccggacagcgtaaccgga

SEQ ID NO: 238578 - DNA, 54 bp, Artificial
  Synthetic oligonucleotide
ggaacacactcattctacatgacgatttagcccgcaaaaatccccgaacgtctc

SEQ ID NO: 238579 - DNA, 54 bp, Artificial
  Synthetic oligonucleotide
aacgctctttggctgatggattcgaacgcaacatattgagaacaccgggcgtta

SEQ ID NO: 238580 - DNA, 54 bp, Artificial
  Synthetic oligonucleotide
gcattgcgcatccaggatagccatgtcgcgacctgccccggtcgtcgggccagc

SEQ ID NO: 238581 - DNA, 60 bp, Artificial
  Synthetic oligonucleotide
agatgcgagcgcgccaagcagacaatagaagcggaaatgaagcgacggaatgatgaggct

SEQ ID NO: 238582 - DNA, 54 bp, Artificial
  Synthetic oligonucleotide
ctgcgctcagctttatcgcctcctggccgcttggctatgcagagcgtgttgcct

SEQ ID NO: 238583 - DNA, 54 bp, Artificial
  Synthetic oligonucleotide
ctgccgctattcaaacccgtccgcagagcggattgacgcgtcggacgatgacgg

SEQ ID NO: 238584 - DNA, 54 bp, Artificial
  Synthetic oligonucleotide
agcgtcccgcattcaggcatagtggtgaccatgcgagcgtttgttctgaccaaa

SEQ ID NO: 238585 - DNA, 54 bp, Artificial
  Synthetic oligonucleotide
gagctgatggtgactcgaccggacatattggcggcagaagagaaactgcgggca

SEQ ID NO: 238586 - DNA, 53 bp, Artificial
  Synthetic oligonucleotide
ccccggaggaggtattgttacggtcctagttgaaggagccgtagagtattcaa

SEQ ID NO: 238587 - DNA, 54 bp, Artificial
  Synthetic oligonucleotide
cactactctcgatgcctatctggctggccctgcgaagtacattccgggcaatcg

SEQ ID NO: 238588 - DNA, 53 bp, Artificial
  Synthetic oligonucleotide
aacgaacccgtccggattcctggccttggcactttcgaggggatcaagacgag

SEQ ID NO: 238589 - DNA, 54 bp, Artificial
  Synthetic oligonucleotide
tgaaaaacgaatcgggtgcgcaatgcgttaaaaatagtccgtgcagactgcgaa

SEQ ID NO: 238590 - DNA, 54 bp, Artificial
  Synthetic oligonucleotide
acggaagccgatatcataatcttcggttaaactggttgtatcaaaggggagccc

SEQ ID NO: 238591 - DNA, 54 bp, Artificial
  Synthetic oligonucleotide
aggaccgaccggatcactgattccgttttgtcttcgagataggttgcacgacga

SEQ ID NO: 238592 - DNA, 60 bp, Artificial
  Synthetic oligonucleotide
agcaagctgcacacatgggatagcgaactcaggcagcgtccttttgcgagcgatagacca

SEQ ID NO: 238593 - DNA, 54 bp, Artificial
  Synthetic oligonucleotide
gagcggcggcgcctgcttatcgccgcagcccgctcggtctttcacgaaaaggga

SEQ ID NO: 238594 - DNA, 54 bp, Artificial
  Synthetic oligonucleotide
aagattttttcgtgcaatatcttcccattgagtatatctaatacttccatctaa

SEQ ID NO: 238595 - DNA, 54 bp, Artificial
  Synthetic oligonucleotide
gcgcaagacagcagaagcgcgttttcgtgatccgttagagcgcagcggcattcg

SEQ ID NO: 238596 - DNA, 54 bp, Artificial
  Synthetic oligonucleotide
atacccctgaatgccctctggtgcccgtcagggcaccgccaagcccttggatgg

SEQ ID NO: 238597 - DNA, 54 bp, Artificial
  Synthetic oligonucleotide
tcgttcgggcgaacgacatatgatacggtatggatattacctaacgcgtcaagc

SEQ ID NO: 238598 - DNA, 54 bp, Artificial
  Synthetic oligonucleotide
gatcgcggactaattcggactttgtgatacctgccttactggcgagagcctcca

SEQ ID NO: 238599 - DNA, 54 bp, Artificial
  Synthetic oligonucleotide
attcctcggatacgaggtgcggacttacacgggacgccaatggacagtgcgaag

SEQ ID NO: 238600 - DNA, 54 bp, Artificial
  Synthetic oligonucleotide
gcctcggcggaaggtagagttcgggattgcggggtacgttgttgcgccgcagtt

SEQ ID NO: 238601 - DNA, 54 bp, Artificial
  Synthetic oligonucleotide
tcggcaactttggtcgagacttatgctggacagggttggggcaaccgcttttcc

SEQ ID NO: 238602 - DNA, 54 bp, Artificial
  Synthetic oligonucleotide
acgtagccaacgatcccagttcaagcggtgcctgggagtactacagcggaagct

SEQ ID NO: 238603 - DNA, 60 bp, Artificial
  Synthetic oligonucleotide
agcccatttttgtcgagtgcgtcattgtccagtctgtcagtggaggcgttccctaatgtg

SEQ ID NO: 238604 - DNA, 54 bp, Artificial
  Synthetic oligonucleotide
aacttcaggacaggcatagcaagggaagtcgaatgaacggagttcgcgtaggca

SEQ ID NO: 238605 - DNA, 54 bp, Artificial
  Synthetic oligonucleotide
gatcagtgggaagctattttccgccagatttcaccagaagtcgcaggcacccgt

SEQ ID NO: 238606 - DNA, 54 bp, Artificial
  Synthetic oligonucleotide
cagcacgaagcaagccatcggaaagcaaccgcggaacacgggagctgcttatcg

SEQ ID NO: 238607 - DNA, 54 bp, Artificial
  Synthetic oligonucleotide
cggccctgcaagtatcgagggaacagcacgaaatgaccttgaccgaggatcggt

SEQ ID NO: 238608 - DNA, 54 bp, Artificial
  Synthetic oligonucleotide
ccccagcgcaggcgtctcgaccgggttggtcaagtggtccgggtagatataacg

SEQ ID NO: 238609 - DNA, 54 bp, Artificial
  Synthetic oligonucleotide
tgaccgttgcctggaagaacgccgttccggcgcctacaggcgcctcgtatcgtg

SEQ ID NO: 238610 - DNA, 54 bp, Artificial
  Synthetic oligonucleotide
aacttcgtgctgacagacaacctctatgcccgtatcgctgccgtccacaagcgg

SEQ ID NO: 238611 - DNA, 53 bp, Artificial
  Synthetic oligonucleotide
tgcgcgcccacaactatccggatttccgctttctcgtcgatatccgtagcctt

SEQ ID NO: 238612 - DNA, 53 bp, Artificial
  Synthetic oligonucleotide
gtgcttcgatcctcagcctcagcagcgctcagtaccgtaaccacttcttctat

SEQ ID NO: 238613 - DNA, 53 bp, Artificial
  Synthetic oligonucleotide
gtgttcgagccggtccccaaatcgtcgaagaagtacggcttcccacgaaccac

SEQ ID NO: 238614 - DNA, 55 bp, Artificial
  Synthetic oligonucleotide
accgcagattctacggaggagggcgccactacaggttctaaggggagggtggtca

SEQ ID NO: 238615 - DNA, 57 bp, Artificial
  Synthetic oligonucleotide
cataagtttcgaatgtcattaagggccttacataatggagaaagaattgttcaagaa

SEQ ID NO: 238616 - DNA, 58 bp, Artificial
  Synthetic oligonucleotide
gtctttactctttgaaactccctattcaaattcattataggccatactagaaatagca

SEQ ID NO: 238617 - DNA, 57 bp, Artificial
  Synthetic oligonucleotide
tcgtgaggcagtaggtccaattctattgttttttcgctaatagtcactttgttgtaa

SEQ ID NO: 238618 - DNA, 60 bp, Artificial
  Synthetic oligonucleotide
tcgtgcatctgagtatagtgcacaatcaagcagtgttaaaagccagcttcatatggctag

SEQ ID NO: 238619 - DNA, 57 bp, Artificial
  Synthetic oligonucleotide
tctaaaaatgtaaatacattgccacaactggttggttcagctattacttatttcaaa

SEQ ID NO: 238620 - DNA, 55 bp, Artificial
  Synthetic oligonucleotide
actcttcgaaagtaatttcacacttcagcaggctacttaagcttaaaaatacgcc

SEQ ID NO: 238621 - DNA, 57 bp, Artificial
  Synthetic oligonucleotide
actctagattatcaattagtgaagacactcttgaacaccttttatcgcaaaccttta

SEQ ID NO: 238622 - DNA, 60 bp, Artificial
  Synthetic oligonucleotide
tctaagcttaatgagttgagatgtcataagatagtggaggatatttggtttgattaggag

SEQ ID NO: 238623 - DNA, 60 bp, Artificial
  Synthetic oligonucleotide
actctaaacaatgatggaattttttatacagcatcggagaatgcaagcctagaagtaata

SEQ ID NO: 238624 - DNA, 58 bp, Artificial
  Synthetic oligonucleotide
tctaatatcagtttagaactatcaaaaggtgataccgtattactacttcaatcaagcg

SEQ ID NO: 238625 - DNA, 49 bp, Artificial
  Synthetic oligonucleotide
actccgcgctttatatgtaccccccccaattaactttttgacctatttt

SEQ ID NO: 238626 - DNA, 56 bp, Artificial
  Synthetic oligonucleotide
actcccttattagactacagaatgcaaaaaggaatttcccagctcgttagaactga

SEQ ID NO: 238627 - DNA, 57 bp, Artificial
  Synthetic oligonucleotide
gtctttcataagatttacccaatattctatactcttaagcctaggattttccatgga

SEQ ID NO: 238628 - DNA, 60 bp, Artificial
  Synthetic oligonucleotide
tctagcggtgctatgagcagcgaggatgctgtaaaagctgttaatagtctccttagtgga

SEQ ID NO: 238629 - DNA, 58 bp, Artificial
  Synthetic oligonucleotide
tctagtaaagctaacttagccttattgcctagcctaagagaagctattgctaaggtta

SEQ ID NO: 238630 - DNA, 58 bp, Artificial
  Synthetic oligonucleotide
actcacaatattaggattggagacaatctaagctttaaagacaggcacggaaacaatg

SEQ ID NO: 238631 - DNA, 60 bp, Artificial
  Synthetic oligonucleotide
actcaactattaactatgcaagcctaagagctgcaacttctagaattaccgccgatatca

SEQ ID NO: 238632 - DNA, 60 bp, Artificial
  Synthetic oligonucleotide
tctataggctttagatctttcggtgtttgcagataactgttcagttccgtctggctagaa

SEQ ID NO: 238633 - DNA, 58 bp, Artificial
  Synthetic oligonucleotide
tctattgttagtagtggaggagagaatgacacggttaaaattgctgttgaaattggag

SEQ ID NO: 238634 - DNA, 60 bp, Artificial
  Synthetic oligonucleotide
tctcatgcaagtaaaattcaagcgtatgagtgcataaaaaatagtattgccttatagctt

SEQ ID NO: 238635 - DNA, 60 bp, Artificial
  Synthetic oligonucleotide
actagcccgatagcatatttagacccagcatttagtgttggcggggataacactgcatta

SEQ ID NO: 238636 - DNA, 57 bp, Artificial
  Synthetic oligonucleotide
actagcaactccagtattggttgtatgactaattttatagtttgacatacggataaa

SEQ ID NO: 238637 - DNA, 60 bp, Artificial
  Synthetic oligonucleotide
tctcatgcaagtaaaattcaagcttatgagtgcataaaaagcagcattgacttataactt

SEQ ID NO: 238638 - DNA, 54 bp, Artificial
  Synthetic oligonucleotide
gtctttggcttttaaggctgaagtttttagatcagccatcacccctttaaaagc

SEQ ID NO: 238639 - DNA, 53 bp, Artificial
  Synthetic oligonucleotide
actactgatacgggcattactagtttaggaagtctaaacaacttggatttaat

SEQ ID NO: 238640 - DNA, 60 bp, Artificial
  Synthetic oligonucleotide
tctccatcaagctagtatttttcatgctgtaaatccttatggtatgccgctgactgctac

SEQ ID NO: 238641 - DNA, 60 bp, Artificial
  Synthetic oligonucleotide
tctccttcatcccatcagcaatcccattaacactcgcctggtccgcagcagcaccttgat

SEQ ID NO: 238642 - DNA, 57 bp, Artificial
  Synthetic oligonucleotide
actaccgtttatagatatatgaaattagcaataggaatcgacagtggtaaaatcaat

SEQ ID NO: 238643 - DNA, 59 bp, Artificial
  Synthetic oligonucleotide
actaattgctttgctactatgttgcaccactattgccaacctaccagaagagccaaaac

SEQ ID NO: 238644 - DNA, 59 bp, Artificial
  Synthetic oligonucleotide
tctctccattgtatgcaaaatttaatgtttaagacatgtattttaatcagaagggctaa

SEQ ID NO: 238645 - DNA, 59 bp, Artificial
  Synthetic oligonucleotide
tgcaaggtgacgatcctaataacagtctgtttaatccaccaccagtattgccggcaagt

SEQ ID NO: 238646 - DNA, 59 bp, Artificial
  Synthetic oligonucleotide
tgcaatttaataggttttatccccattagcttgtttgtcttgtatagtaagatgcgcaa

SEQ ID NO: 238647 - DNA, 60 bp, Artificial
  Synthetic oligonucleotide
accggcatcaacaatctccttcatcccatcagcaatcccattaacactcgcctggtccgc

SEQ ID NO: 238648 - DNA, 60 bp, Artificial
  Synthetic oligonucleotide
tgcagaagagagtccatagatattatcaatttcatgggttgaagagtatttcataagttc

SEQ ID NO: 238649 - DNA, 60 bp, Artificial
  Synthetic oligonucleotide
gtcttttttagaatgcctaagagcatagtagatttcagtgcccatattaatacctagatg

SEQ ID NO: 238650 - DNA, 59 bp, Artificial
  Synthetic oligonucleotide
tgcagacgaatctgctacgacaccgggacttgttgagagctaccgttatttcggtctta

SEQ ID NO: 238651 - DNA, 59 bp, Artificial
  Synthetic oligonucleotide
tgcagctggtaaagccaacatatatctaattctaaaggaaactttactagacactagta

SEQ ID NO: 238652 - DNA, 60 bp, Artificial
  Synthetic oligonucleotide
tgcataaacaatgctagtattacgctcacagcaagttttgacacaacgctaaccccaaat

SEQ ID NO: 238653 - DNA, 58 bp, Artificial
  Synthetic oligonucleotide
accgccaacgtgccgccaggaaggatatcaatagtcggatcaacaccagtaggaatag

SEQ ID NO: 238654 - DNA, 58 bp, Artificial
  Synthetic oligonucleotide
accgcagattctatggagggcgccactacaggttctaaggggaggggcacgagatcta

SEQ ID NO: 238655 - DNA, 59 bp, Artificial
  Synthetic oligonucleotide
tgcatatgataaacctttccctggtggtaactatcagcgcttgcctacccctacttatg

SEQ ID NO: 238656 - DNA, 60 bp, Artificial
  Synthetic oligonucleotide
tgcatgctaaagctatcgcgaaaacttaactacattaaatcatttgcatctctaaagctc

SEQ ID NO: 238657 - DNA, 58 bp, Artificial
  Synthetic oligonucleotide
tgcccaaacgccctagacaatgcaatcaaggaatataaagaggttataataaaagcta

SEQ ID NO: 238658 - DNA, 60 bp, Artificial
  Synthetic oligonucleotide
tgccgcaagatacaattagtgcaagtttgcttgactctagaattcaagctagtaggccta

SEQ ID NO: 238659 - DNA, 58 bp, Artificial
  Synthetic oligonucleotide
tgcctgcttttaaagagggtgttgatcttgctggaaatccaatagacacgctttttac

SEQ ID NO: 238660 - DNA, 58 bp, Artificial
  Synthetic oligonucleotide
cagatagttcttttatgttaatagcatggagtgcaatagggttagtatttactccggc

SEQ ID NO: 238661 - DNA, 56 bp, Artificial
  Synthetic oligonucleotide
accctgggttatattatgtctaacaatatagtcgggtgatccaaatccttctttgc

SEQ ID NO: 238662 - DNA, 60 bp, Artificial
  Synthetic oligonucleotide
tgcgccaattggcatacctgtgctagataatattgccggattaacagctattatgtatgc

SEQ ID NO: 238663 - DNA, 60 bp, Artificial
  Synthetic oligonucleotide
tgcgtatagttagttggctgtattcatgtatagaggagttatattctccagatattaagt

SEQ ID NO: 238664 - DNA, 60 bp, Artificial
  Synthetic oligonucleotide
tgctaatagaaaatctcaacaagttaataaggaatctaatgaagctattactgctaggga

SEQ ID NO: 238665 - DNA, 60 bp, Artificial
  Synthetic oligonucleotide
tgctactacaccatttactgcattagcatatttataactagcatcctgcttagccgcaaa

SEQ ID NO: 238666 - DNA, 60 bp, Artificial
  Synthetic oligonucleotide
tgctctgtataatctggataaggccttagacgaacacaaggagagtaatctgaagtatgt

SEQ ID NO: 238667 - DNA, 60 bp, Artificial
  Synthetic oligonucleotide
tgctgcggcctcttgcatgctatattgaccgctagatacaagatcggccataagttctcc

SEQ ID NO: 238668 - DNA, 60 bp, Artificial
  Synthetic oligonucleotide
acccctttaaaagcgtatgtgccaagcccagagatagatattactagcattgctacaatg

SEQ ID NO: 238669 - DNA, 60 bp, Artificial
  Synthetic oligonucleotide
tgctgtcaggacaaacacaaggtctatttaacacccttagcacatttggagagactctag

SEQ ID NO: 238670 - DNA, 60 bp, Artificial
  Synthetic oligonucleotide
tgcttaaattcgctacaagataagctagatgttgcaatagcaaaagcatcagcataagat

SEQ ID NO: 238671 - DNA, 59 bp, Artificial
  Synthetic oligonucleotide
gtgaactgattaaccccatcaataaaatcggcaccaattggatactctattgcataacc

SEQ ID NO: 238672 - DNA, 58 bp, Artificial
  Synthetic oligonucleotide
tctttttttgagcctaagtgaataattacctgctccagattaagttctagaattgcta

SEQ ID NO: 238673 - DNA, 60 bp, Artificial
  Synthetic oligonucleotide
tgaaagcagttttggcaacgacaaatattaccgaagatcaaatatacagagagtttctgc

SEQ ID NO: 238674 - DNA, 60 bp, Artificial
  Synthetic oligonucleotide
tgaacaacttccctgcatctttgttcttatcctcctcactagccgcctgaacatccttta

SEQ ID NO: 238675 - DNA, 57 bp, Artificial
  Synthetic oligonucleotide
tgaaccgctatttctataatctttaatttagcaatagtagttcactacgttgaaata

SEQ ID NO: 238676 - DNA, 60 bp, Artificial
  Synthetic oligonucleotide
tgaagcagtaaaaagcttgcttaaagcagcgcaagcagcattagctaattcagttcaaga

SEQ ID NO: 238677 - DNA, 57 bp, Artificial
  Synthetic oligonucleotide
tgaagttattgaatgttcgtcttttagtgttgataaatccggataagtatattcctg

SEQ ID NO: 238678 - DNA, 60 bp, Artificial
  Synthetic oligonucleotide
tgacaaatatggagctagtgaagtgggcaatgttctaattggtggggctggacttaaaga

SEQ ID NO: 238679 - DNA, 56 bp, Artificial
  Synthetic oligonucleotide
acgatacacatccactagggctctacccccccctcccaattcttttgaagctgcca

SEQ ID NO: 238680 - DNA, 57 bp, Artificial
  Synthetic oligonucleotide
acgaggtatttaatcctgtttatcccctacgcttttgtgactcagcgtcaatcttca

SEQ ID NO: 238681 - DNA, 57 bp, Artificial
  Synthetic oligonucleotide
tgacaattttgtccttacaaagcggattcattactttacacagaaattctgcgttta

SEQ ID NO: 238682 - DNA, 52 bp, Artificial
  Synthetic oligonucleotide
cagaataacaacgttaattacgccgtttacttataagaaacgttacattaca

SEQ ID NO: 238683 - DNA, 58 bp, Artificial
  Synthetic oligonucleotide
tgaccgttcttatagaacctaaaaagctatcatgggatgaaacaagaagctatttcta

SEQ ID NO: 238684 - DNA, 56 bp, Artificial
  Synthetic oligonucleotide
acgagagctttattgtgctctttaaagcctttttacacgcaaatgtagaagtaagc

SEQ ID NO: 238685 - DNA, 51 bp, Artificial
  Synthetic oligonucleotide
acgagaagggatagctaaaaacttaataagttatttaggacttgactttct

SEQ ID NO: 238686 - DNA, 60 bp, Artificial
  Synthetic oligonucleotide
tgagagcattacggttcttatgtaatcaggcgccagcttaataattcctgtcccatcaag

SEQ ID NO: 238687 - DNA, 59 bp, Artificial
  Synthetic oligonucleotide
tgaggaaataatcgcttttcactatcatttcatttgacacattaacctacttatagtaa

SEQ ID NO: 238688 - DNA, 60 bp, Artificial
  Synthetic oligonucleotide
tgaggaatattgaacagttattatttggctttggattgaccttttcaataggtgcacatg

SEQ ID NO: 238689 - DNA, 60 bp, Artificial
  Synthetic oligonucleotide
tgagtcggtgcttgctatccattctcctagcaaaactcttgccttgtatgttggtatatc

SEQ ID NO: 238690 - DNA, 58 bp, Artificial
  Synthetic oligonucleotide
accttgtacaagattccaaaaaacatatatgccacaagttctgtaagtttgttgatca

SEQ ID NO: 238691 - DNA, 56 bp, Artificial
  Synthetic oligonucleotide
tgatactctattacttctaataggcttaagttgttttgcctagtttaatgtcgaaa

SEQ ID NO: 238692 - DNA, 59 bp, Artificial
  Synthetic oligonucleotide
tgatagaattgctaccaaaattatttctaaccatgcaattttcactgaagaaccctcaa

SEQ ID NO: 238693 - DNA, 60 bp, Artificial
  Synthetic oligonucleotide
cagaagcaatcggaatagaatcattaggaataggaaggagaactcacgattacagcatcc

SEQ ID NO: 238694 - DNA, 60 bp, Artificial
  Synthetic oligonucleotide
tgatagttcgaaatttgatggagaaccgttgtacatataatcactaaatatcatgcttga

SEQ ID NO: 238695 - DNA, 60 bp, Artificial
  Synthetic oligonucleotide
tgatcactaatagattaagagacatatttagaaatgaattgccgatgttttatttagtaa

SEQ ID NO: 238696 - DNA, 60 bp, Artificial
  Synthetic oligonucleotide
tgatctcctactcctgtatccgcatcaccctctgttgatttaactattgatgctaaaatt

SEQ ID NO: 238697 - DNA, 60 bp, Artificial
  Synthetic oligonucleotide
tgatgaatggtcagttctaacgagctgggaaattcctttttgcattctgtagtctaataa

SEQ ID NO: 238698 - DNA, 59 bp, Artificial
  Synthetic oligonucleotide
tgatgttcattcggataagcattactataactattatttttgggccagaagtattgcct

SEQ ID NO: 238699 - DNA, 60 bp, Artificial
  Synthetic oligonucleotide
tgatttatgttgaagcattggatatgtaagttaagcgtatttgtaatcttctaaagaatg

SEQ ID NO: 238700 - DNA, 60 bp, Artificial
  Synthetic oligonucleotide
tgcaaacgaatatacaaggagccgtcatgcattggctcttgtagtcgcagacagaatcta

SEQ ID NO: 238701 - DNA, 57 bp, Artificial
  Synthetic oligonucleotide
aacaacccaacagtcggatcaacactagtaggaatagggaaccttgcaattactgca

SEQ ID NO: 238702 - DNA, 55 bp, Artificial
  Synthetic oligonucleotide
aacaacatgtagaacttgttgctcccccacaactgtaaaagtcggaaattgctta

SEQ ID NO: 238703 - DNA, 54 bp, Artificial
  Synthetic oligonucleotide
ttggctttcttcgtggttgtcaccaagtcggtaaaaagtagcaattggcaacct

SEQ ID NO: 238704 - DNA, 60 bp, Artificial
  Synthetic oligonucleotide
cagaaagagccctaatattagaatcaagatttgtcagagttatgggattaagcagagcaa

SEQ ID NO: 238705 - DNA, 55 bp, Artificial
  Synthetic oligonucleotide
ttggggataaaagcggacacaaagaagagtgagataggtgggtattttagtaaga

SEQ ID NO: 238706 - DNA, 56 bp, Artificial
  Synthetic oligonucleotide
aaattgtagacactcctatttggtggcaaggcaaaccatatagctttgggggacta

SEQ ID NO: 238707 - DNA, 54 bp, Artificial
  Synthetic oligonucleotide
aaattctaacatcttatagtttaataaaaatcccaaataagcttcattggagaa

SEQ ID NO: 238708 - DNA, 56 bp, Artificial
  Synthetic oligonucleotide
aaattcctttaaaggacatgctcactttaaaatattaagcgctcgtctagctatta

SEQ ID NO: 238709 - DNA, 60 bp, Artificial
  Synthetic oligonucleotide
ttggtgatgagcctattaattgtgttatagagaggaataatggctttatagggatagtga

SEQ ID NO: 238710 - DNA, 56 bp, Artificial
  Synthetic oligonucleotide
aaattagtacttttctctcgcgatttgctatttcattttgttaagctttgtgtgta

SEQ ID NO: 238711 - DNA, 58 bp, Artificial
  Synthetic oligonucleotide
aaattacaagaaatgcgttcttttatggagcaagcaactaattcttgggtatctgcta

SEQ ID NO: 238712 - DNA, 60 bp, Artificial
  Synthetic oligonucleotide
ttggtggtacgcagttacatagtggcaaactagagcttacaagtgagcctacaacaagag

SEQ ID NO: 238713 - DNA, 55 bp, Artificial
  Synthetic oligonucleotide
ttgtaacctataaagcaggagttgaatttggactaaatagcggaattagtgtaat

SEQ ID NO: 238714 - DNA, 60 bp, Artificial
  Synthetic oligonucleotide
ttgtcggaattagtcataagctcgatacattctcccttaagatatgcgtgaacctcctga

SEQ ID NO: 238715 - DNA, 55 bp, Artificial
  Synthetic oligonucleotide
gtgacattgtattcaaatttttagacccattttcaccgttccattgtaatttatc

SEQ ID NO: 238716 - DNA, 60 bp, Artificial
  Synthetic oligonucleotide
aaatggcagaatctcagctatataagaagtcgatttttgattattgtcctgagagcaggt

SEQ ID NO: 238717 - DNA, 60 bp, Artificial
  Synthetic oligonucleotide
ttgtctgaaataaagcctgtgtgattattctctgatgggcgaccgttcttgtagggctga

SEQ ID NO: 238718 - DNA, 57 bp, Artificial
  Synthetic oligonucleotide
aaatgctaagatagatagcgtagacgttaagatagataatgtagaaaagagtttaaa

SEQ ID NO: 238719 - DNA, 56 bp, Artificial
  Synthetic oligonucleotide
ttgtgctatactttagtactattgttaatttagggtagaggcaattctttctccta

SEQ ID NO: 238720 - DNA, 57 bp, Artificial
  Synthetic oligonucleotide
aaatgatcaatcccaatattgtcaagtctaagtttgacaaaatcggttatatttaga

SEQ ID NO: 238721 - DNA, 54 bp, Artificial
  Synthetic oligonucleotide
ttgtgggttctttagtattactggtctgaaatattgcaaatttgaaactggggt

SEQ ID NO: 238722 - DNA, 56 bp, Artificial
  Synthetic oligonucleotide
aaatccttcatgtaaggatacaaagaaatatggaactaaaagcaaccagataaatc

SEQ ID NO: 238723 - DNA, 52 bp, Artificial
  Synthetic oligonucleotide
aaatcctctcccctattagattggtaggggctttatacgccgtgcgtttact

SEQ ID NO: 238724 - DNA, 58 bp, Artificial
  Synthetic oligonucleotide
ttgttaagggcttctaataaaatagtatcggatgcaatgacagagcttgtagttaaac

SEQ ID NO: 238725 - DNA, 57 bp, Artificial
  Synthetic oligonucleotide
ttgttaggactacattttacagtaaaagtactggatacaaagagtcgcttgatacac

SEQ ID NO: 238726 - DNA, 57 bp, Artificial
  Synthetic oligonucleotide
cataagttaagctagttaaagcaattaaaattcatcatggggcaaggcaagaagtta

SEQ ID NO: 238727 - DNA, 53 bp, Artificial
  Synthetic oligonucleotide
cacttacaagaagagccctggtaaaagctttttggaataccaaaattttgcat

SEQ ID NO: 238728 - DNA, 60 bp, Artificial
  Synthetic oligonucleotide
tttaacagagagcgttctgaatgatagttctattcctacaagaagagcaacgccagatta

SEQ ID NO: 238729 - DNA, 57 bp, Artificial
  Synthetic oligonucleotide
tttaaccccaaaactgactccattaatagctccattaatagccggcgatcatcttaa

SEQ ID NO: 238730 - DNA, 58 bp, Artificial
  Synthetic oligonucleotide
ttgataaagagagcacaataaagattagcccttcggtaaaaacagcggctaatgcaac

SEQ ID NO: 238731 - DNA, 60 bp, Artificial
  Synthetic oligonucleotide
ttgatactaactgatattagaagtcttggtgatgagtggtgaagcgtttggttatgctgc

SEQ ID NO: 238732 - DNA, 57 bp, Artificial
  Synthetic oligonucleotide
ttgatgcacaagatgatttcctagaaacttttaaacttcaacgagatgaggttttta

SEQ ID NO: 238733 - DNA, 59 bp, Artificial
  Synthetic oligonucleotide
ttgatgtctgctagaagtcctttaaaagcgtatgtaccaattccagaaattgatattat

SEQ ID NO: 238734 - DNA, 50 bp, Artificial
  Synthetic oligonucleotide
ttgcaagtcctggcctgtaaccacccgttttggggtccccccttaaaagc

SEQ ID NO: 238735 - DNA, 58 bp, Artificial
  Synthetic oligonucleotide
ttgcacgtaattgattgccaaaggtctttaatatccaatagacagtctttcggaatac

SEQ ID NO: 238736 - DNA, 60 bp, Artificial
  Synthetic oligonucleotide
ttgcacttatgatataaagaactgtcctttgtatatgatttagaatgcaattatagcatt

SEQ ID NO: 238737 - DNA, 58 bp, Artificial
  Synthetic oligonucleotide
ttgcatgcggaatttgggatgtagagtggctgtaaagagtagaagtggtaatttttaa

SEQ ID NO: 238738 - DNA, 59 bp, Artificial
  Synthetic oligonucleotide
ggtatccatacaagcgtggagtaaagcttagttttagtgcagatagtacaacagaacta

SEQ ID NO: 238739 - DNA, 60 bp, Artificial
  Synthetic oligonucleotide
ttgcatgcggaatttgggatgtagagtggctttaataagcagaagtggcaatttctaagg

SEQ ID NO: 238740 - DNA, 50 bp, Artificial
  Synthetic oligonucleotide
aacccgtttgtcccataaatccaattacctgtccctttttaacataagac

SEQ ID NO: 238741 - DNA, 58 bp, Artificial
  Synthetic oligonucleotide
ttgccataagacttttcccctataatgtatgctctcttattgtcttttaaggctccta

SEQ ID NO: 238742 - DNA, 60 bp, Artificial
  Synthetic oligonucleotide
ttgcgcatttagtagttcaacatggcactgtggcgacaataagtgatccccatgaaatag

SEQ ID NO: 238743 - DNA, 58 bp, Artificial
  Synthetic oligonucleotide
ttgcggctgctattgttttgagggggatggctaagggtggaaagtttgccttggctga

SEQ ID NO: 238744 - DNA, 60 bp, Artificial
  Synthetic oligonucleotide
aaccaattacagatgaaccaattacagatgaaccaattacagatgaaccaattacagatg

SEQ ID NO: 238745 - DNA, 60 bp, Artificial
  Synthetic oligonucleotide
ttgctactaatggcaggcaaggtgatgctgctgcgggaaaggaagctgctcttgctgtta

SEQ ID NO: 238746 - DNA, 60 bp, Artificial
  Synthetic oligonucleotide
aacatgccttctatatctaatagatctctcgctacttgtatcagatatcaattcccgcgg

SEQ ID NO: 238747 - DNA, 51 bp, Artificial
  Synthetic oligonucleotide
aacatcgtttgttagtcgatataaaaaagactttagacgggttaaaatatg

SEQ ID NO: 238748 - DNA, 58 bp, Artificial
  Synthetic oligonucleotide
aacagttttacaacatgggcgtgagaaaagaggataaaatgcttgatttagcattcaa

SEQ ID NO: 238749 - DNA, 55 bp, Artificial
  Synthetic oligonucleotide
ccccgaacaaccgcccgactcttctcgattcccgcgaggcctctcgacgacggca

SEQ ID NO: 238750 - DNA, 59 bp, Artificial
  Synthetic oligonucleotide
ttgcttaatatgtaggaaaaatccagttgattaaatattggcgcaatagactcaaatct

SEQ ID NO: 238751 - DNA, 60 bp, Artificial
  Synthetic oligonucleotide
ttgcttcatcaatgggattgtctacataccatttacatgaaattattagcagtatagata

SEQ ID NO: 238752 - DNA, 59 bp, Artificial
  Synthetic oligonucleotide
aacagattccacccttacaccaggaattctaacttcctctatcagactctagacatata

SEQ ID NO: 238753 - DNA, 55 bp, Artificial
  Synthetic oligonucleotide
aacactaacttgcttgctagacatagaattttcgttttcgtggttattgtaaata

SEQ ID NO: 238754 - DNA, 59 bp, Artificial
  Synthetic oligonucleotide
aacacgaaaattaatgccagagattcttgcaatttctgctagatttaaatattcatttc

SEQ ID NO: 238755 - DNA, 56 bp, Artificial
  Synthetic oligonucleotide
aacaatcccctttatctccttcgcaatcccattaacactctcctcattagcttcct

SEQ ID NO: 238756 - DNA, 60 bp, Artificial
  Synthetic oligonucleotide
ttggcattgattaacagataccactagatttttgatcaacattattgatcttgatgatca

SEQ ID NO: 238757 - DNA, 60 bp, Artificial
  Synthetic oligonucleotide
tttgacccacatcactcttaacagcctctatctttgcatctagtttatccattctagcac

SEQ ID NO: 238758 - DNA, 57 bp, Artificial
  Synthetic oligonucleotide
tttgacctattttttaagagctcgacagccactttgtaatattacataaccaatatc

SEQ ID NO: 238759 - DNA, 60 bp, Artificial
  Synthetic oligonucleotide
tttgcacctctaaagctcaatcaaagcaatctaaatcattatctaaacagctctactgga

SEQ ID NO: 238760 - DNA, 60 bp, Artificial
  Synthetic oligonucleotide
ggtattaccatatattgagtagcatttaatgcacactttaatgttaagtctagactagga

SEQ ID NO: 238761 - DNA, 57 bp, Artificial
  Synthetic oligonucleotide
aaacccttccgttgctagtgatgctagtgaaaaacatactaatagacaacctcaaca

SEQ ID NO: 238762 - DNA, 53 bp, Artificial
  Synthetic oligonucleotide
tttgcgttaaattcaggtaaacgggctattaaggatagatttaagttgattac

SEQ ID NO: 238763 - DNA, 57 bp, Artificial
  Synthetic oligonucleotide
tttgctttatccctattatgagtcgtactaaactacggcaagtctccctagtatcac

SEQ ID NO: 238764 - DNA, 54 bp, Artificial
  Synthetic oligonucleotide
tttgggaaatttgtaagaattgacaaacttaataagtccggcatgccggactta

SEQ ID NO: 238765 - DNA, 54 bp, Artificial
  Synthetic oligonucleotide
aaacagtatccgataattccgaaagatctaaagcctatagaaaattggcttacg

SEQ ID NO: 238766 - DNA, 60 bp, Artificial
  Synthetic oligonucleotide
tttgttactcatgtgatcatcaagatcaataatgttgatcaaaaatctagtggtatctgt

SEQ ID NO: 238767 - DNA, 51 bp, Artificial
  Synthetic oligonucleotide
ttttagaagtggtaggattttttggttcgtttggattaacattgccaaaag

SEQ ID NO: 238768 - DNA, 58 bp, Artificial
  Synthetic oligonucleotide
aaaatttattcttgcgtctgccttatcgccatagataccaccaccgcttgcgttcaaa

SEQ ID NO: 238769 - DNA, 60 bp, Artificial
  Synthetic oligonucleotide
aaaattagcacctgcctcagcagtcccaatagcagccgaaatcggattagtagccgcacc

SEQ ID NO: 238770 - DNA, 52 bp, Artificial
  Synthetic oligonucleotide
aaaatggttattatctcttttgtagcttacttttccctcaattttagttcca

SEQ ID NO: 238771 - DNA, 55 bp, Artificial
  Synthetic oligonucleotide
ggtattcaggaggagtattaccttcttgaccaggtggcccccatggactataacc

SEQ ID NO: 238772 - DNA, 60 bp, Artificial
  Synthetic oligonucleotide
aaaatggtagcaaatccagccgttaaacatgtagctgttaccaatgctcctataggcata

SEQ ID NO: 238773 - DNA, 60 bp, Artificial
  Synthetic oligonucleotide
ttttcagtgacattttcagtgacattttcagtgacattttcagtgacattttcagtgaca

SEQ ID NO: 238774 - DNA, 58 bp, Artificial
  Synthetic oligonucleotide
aaaatagcggaatctcagctatataagaagtcgatttttgattattatccggagagta

SEQ ID NO: 238775 - DNA, 57 bp, Artificial
  Synthetic oligonucleotide
ttttgaacattcgtaagaatagttgtatccaaaagttcagtagccgccattattcca

SEQ ID NO: 238776 - DNA, 55 bp, Artificial
  Synthetic oligonucleotide
aaaagtatcgattgccaacctaaatattaggtgcgaacacaaaattaacacatta

SEQ ID NO: 238777 - DNA, 56 bp, Artificial
  Synthetic oligonucleotide
aaaaggcttcctaacgaactttgaatagcaacattaacgctttgagctacaactga

SEQ ID NO: 238778 - DNA, 58 bp, Artificial
  Synthetic oligonucleotide
ttttgacgcgcatcttgtaaaagaacaactagccaatagaatacaagcacaagtccct

SEQ ID NO: 238779 - DNA, 60 bp, Artificial
  Synthetic oligonucleotide
ttttgatgtgcatcttgcaaaagaacaactagccaatagaatacaagctcacgttccttt

SEQ ID NO: 238780 - DNA, 53 bp, Artificial
  Synthetic oligonucleotide
aaaagcggctattttaaaaacaaatggtactaaagataagggtgctcaagagc

SEQ ID NO: 238781 - DNA, 58 bp, Artificial
  Synthetic oligonucleotide
aaaagaggataaaatgcttgatttagcattcaatgatagaattgctaccaaaattatt

SEQ ID NO: 238782 - DNA, 59 bp, Artificial
  Synthetic oligonucleotide
ccccagtagcatcatccttccccgtgaacaacttccctgcatctttgttcttatcctca

SEQ ID NO: 238783 - DNA, 48 bp, Artificial
  Synthetic oligonucleotide
tttttaaggaccccgaacctttaaggttttataagggcaatgttgtaa

SEQ ID NO: 238784 - DNA, 53 bp, Artificial
  Synthetic oligonucleotide
tttttttagtctccgcctttatccccaacgtccctgtaatcatatcgccaaaa

SEQ ID NO: 238785 - DNA, 56 bp, Artificial
  Synthetic oligonucleotide
aaatagttcgtttataattaaattacctagcctatcgctgcaaaattgtggatcaa

SEQ ID NO: 238786 - DNA, 60 bp, Artificial
  Synthetic oligonucleotide
aaatagatcaaaatggcactttgggtgacgatgggggccaaaatggatcattgctagcag

SEQ ID NO: 238787 - DNA, 58 bp, Artificial
  Synthetic oligonucleotide
tttaagacatgtattttaatcagaagggctaatatttaagggtgcagcacaaaatatc

SEQ ID NO: 238788 - DNA, 51 bp, Artificial
  Synthetic oligonucleotide
aaataatcttagcgcaatcgaagaaagtgtaaagggtttaagttaaaagaa

SEQ ID NO: 238789 - DNA, 55 bp, Artificial
  Synthetic oligonucleotide
aaataagggctttttgcctttcttgattagtatatacattattaaaggcatctta

SEQ ID NO: 238790 - DNA, 60 bp, Artificial
  Synthetic oligonucleotide
aaataacttcggagaattcagaggaaagctctgtatatataaggcatcccctattgcata

SEQ ID NO: 238791 - DNA, 58 bp, Artificial
  Synthetic oligonucleotide
aaataaactcggaacttacaaacagcatactaacatctactttaactgaacatgatga

SEQ ID NO: 238792 - DNA, 54 bp, Artificial
  Synthetic oligonucleotide
aaagtgggacgcgtttttaaatgctaatcccacaacgattgccaatgaggttaa

SEQ ID NO: 238793 - DNA, 57 bp, Artificial
  Synthetic oligonucleotide
ggtcattgtagccaaaaatagggatgggcacactggtgttgtaactatggattttgt

SEQ ID NO: 238794 - DNA, 60 bp, Artificial
  Synthetic oligonucleotide
aaagtctccaaacctactgatccatctgtagcaaggcgggctatatcatcaaccatccca

SEQ ID NO: 238795 - DNA, 60 bp, Artificial
  Synthetic oligonucleotide
tttaagtagtagagaatcttagctagtgtagcttcaaagaagacatgacgcttacttata

SEQ ID NO: 238796 - DNA, 59 bp, Artificial
  Synthetic oligonucleotide
aaagtaacggatataagtcatattgatggtgaaatactagagcaacttgtatctttagc

SEQ ID NO: 238797 - DNA, 53 bp, Artificial
  Synthetic oligonucleotide
tttacggctttgtctaaggtttcagaatgtattaaggggagtaatatccttct

SEQ ID NO: 238798 - DNA, 59 bp, Artificial
  Synthetic oligonucleotide
aaagctgtaaagacagctgagggggcttcaaacggtactgatgcaattggagaagttga

SEQ ID NO: 238799 - DNA, 56 bp, Artificial
  Synthetic oligonucleotide
aaagcgtaataaggttgttgatgggcatgctcctggattgtcccccaatttaactc

SEQ ID NO: 238800 - DNA, 60 bp, Artificial
  Synthetic oligonucleotide
aaagcggaatatgtcagctacaatccagtaatgactggtgaacatatctcattaaacggt

SEQ ID NO: 238801 - DNA, 60 bp, Artificial
  Synthetic oligonucleotide
aaagcatgctttatgctactaaaacaaacatagatcagcttatacaataggtgatacctt

SEQ ID NO: 238802 - DNA, 60 bp, Artificial
  Synthetic oligonucleotide
tttaggctctaaaagaacggtcatccactagagcatggtccacaagctttacttcaggca

SEQ ID NO: 238803 - DNA, 58 bp, Artificial
  Synthetic oligonucleotide
aaagcaaacgtaattacatgcttgcgcatcttactatacaagacaaacaaactaatgg

SEQ ID NO: 238804 - DNA, 55 bp, Artificial
  Synthetic oligonucleotide
ccccaacgtccctgtaatcatatcgccaaaactcacaaatacatctaaaaatcct

SEQ ID NO: 238805 - DNA, 51 bp, Artificial
  Synthetic oligonucleotide
aaagacttggacaaaacgaatgaggaatagttaatccaatttccaaaaaaa

SEQ ID NO: 238806 - DNA, 60 bp, Artificial
  Synthetic oligonucleotide
aaagaagctcttcttgaagcaatgataagctatagatttaatggagcaggttatatttta

SEQ ID NO: 238807 - DNA, 60 bp, Artificial
  Synthetic oligonucleotide
tttcagctgattccctaatttctcttacaagtgatggagcatctcccaatgctatcttat

SEQ ID NO: 238808 - DNA, 60 bp, Artificial
  Synthetic oligonucleotide
aaacttgttccgaaagagagctctatatatgttgaagttggagctgataatgatatgtat

SEQ ID NO: 238809 - DNA, 60 bp, Artificial
  Synthetic oligonucleotide
tttcgcaaacttacccttgatgtttgcaatagcaattccaattggactagcaaaagctga

SEQ ID NO: 238810 - DNA, 60 bp, Artificial
  Synthetic oligonucleotide
tttctagacatatgaagctggcttctaatactacctgattgtgcattatgctctgatgca

SEQ ID NO: 238811 - DNA, 53 bp, Artificial
  Synthetic oligonucleotide
aaacgtgccaaggaaattaaaaagatggaatggtattattaagctgtgtttaa

SEQ ID NO: 238812 - DNA, 50 bp, Artificial
  Synthetic oligonucleotide
aaacggggtgttaagcttagttttggagatggaacaaccgaactagaagt

SEQ ID NO: 238813 - DNA, 56 bp, Artificial
  Synthetic oligonucleotide
tttgaaatttttctattggataaattctatacaagaaggtaaataatgtataagca

SEQ ID NO: 238814 - DNA, 60 bp, Artificial
  Synthetic oligonucleotide
ttatacatagcactagtacgattcgttattttaccaccataagcatgacaagccttatca

SEQ ID NO: 238815 - DNA, 56 bp, Artificial
  Synthetic oligonucleotide
ggtctaaagatagttccaattcctttgattcatggagagatagttagtttgggtta

SEQ ID NO: 238816 - DNA, 54 bp, Artificial
  Synthetic oligonucleotide
ttatactaaagtgaaagtatagggagttttgttaaaagatgggagtggacttgc

SEQ ID NO: 238817 - DNA, 60 bp, Artificial
  Synthetic oligonucleotide
ttatagcagactgctcggttttaatctcaaggtctacacactcaacatactctacaaatt

SEQ ID NO: 238818 - DNA, 56 bp, Artificial
  Synthetic oligonucleotide
ttatattagaactactttttacagtaaaagtactgggtacagagaatcatttgata

SEQ ID NO: 238819 - DNA, 56 bp, Artificial
  Synthetic oligonucleotide
aaggcctgaggttgtaacaattaataaagggattttgtcatctatttatgatcaaa

SEQ ID NO: 238820 - DNA, 55 bp, Artificial
  Synthetic oligonucleotide
aaggcccatctactccgtttcgcctcacagcactagaaacaggagtatacttttt

SEQ ID NO: 238821 - DNA, 59 bp, Artificial
  Synthetic oligonucleotide
ttatcgcggaacttatcagaatatggaacttgaacaatagacaaaatagtaaattatca

SEQ ID NO: 238822 - DNA, 60 bp, Artificial
  Synthetic oligonucleotide
ttatcggaataattttcaatcaatcgcactaaaatgctcattttagcagacaactctccc

SEQ ID NO: 238823 - DNA, 60 bp, Artificial
  Synthetic oligonucleotide
aaggattcagaccactctgatttatatgacaattgtcttacaaactcatgccatccttaa

SEQ ID NO: 238824 - DNA, 59 bp, Artificial
  Synthetic oligonucleotide
ttatctgtatgaattaatgtatcaagcgactctttgtatccagtacttttactgtaaaa

SEQ ID NO: 238825 - DNA, 60 bp, Artificial
  Synthetic oligonucleotide
aaggagcacttggcagcggtataaatgatttcaaaaatagcgcaagtagtacgtgcaata

SEQ ID NO: 238826 - DNA, 54 bp, Artificial
  Synthetic oligonucleotide
ggtctttaataccaaatagacagtctttcggaatacttaccttggctaatctat

SEQ ID NO: 238827 - DNA, 58 bp, Artificial
  Synthetic oligonucleotide
aaggaattgggattggcaatcggagaggcaataggaatttctgcagccttgcccccaa

SEQ ID NO: 238828 - DNA, 55 bp, Artificial
  Synthetic oligonucleotide
ttatgtccaacaagtccggcatgccggacttgttaaattcggtaattcttacaat

SEQ ID NO: 238829 - DNA, 60 bp, Artificial
  Synthetic oligonucleotide
ttattatacaagcctatttaagaaacgtgaatttaatgcttatgagataaatgcagcgta

SEQ ID NO: 238830 - DNA, 57 bp, Artificial
  Synthetic oligonucleotide
ttattttaatgatccttgatttagaaatagtagttagcttgttggatacatttggct

SEQ ID NO: 238831 - DNA, 55 bp, Artificial
  Synthetic oligonucleotide
ttattttgagagaagatcgctaagggtaaaaagtttgctgttcgggaatgtgtaa

SEQ ID NO: 238832 - DNA, 60 bp, Artificial
  Synthetic oligonucleotide
aagctcttcaactcgttctgtagtgtcaacatcaatggaaacagcagcgcctactcttag

SEQ ID NO: 238833 - DNA, 57 bp, Artificial
  Synthetic oligonucleotide
ttcaactccatcttgtatgggggttgtctaatgagtggtattagaaaaagactagcg

SEQ ID NO: 238834 - DNA, 60 bp, Artificial
  Synthetic oligonucleotide
ttcaactgatattgctcattcatacattgattttgttttaggagggctacttgctactag

SEQ ID NO: 238835 - DNA, 59 bp, Artificial
  Synthetic oligonucleotide
ttcaactgatattgttcattcatacattgattttgttttaggtgggttgttagccacta

SEQ ID NO: 238836 - DNA, 59 bp, Artificial
  Synthetic oligonucleotide
ttcaatttacgacataataaactttccaagctcaagcattgacaaacaaatatcagagg

SEQ ID NO: 238837 - DNA, 60 bp, Artificial
  Synthetic oligonucleotide
cagtttaatgcgatttttagggctagtcattatggcaagataagaatcatggttcctatg

SEQ ID NO: 238838 - DNA, 53 bp, Artificial
  Synthetic oligonucleotide
ggtctttcctttaattcgaaactttattatgtaaattgacaattcttaatcta

SEQ ID NO: 238839 - DNA, 57 bp, Artificial
  Synthetic oligonucleotide
aagctaaatattggaagtgaacctgccactttagatgcccaactggtaaatgatacg

SEQ ID NO: 238840 - DNA, 51 bp, Artificial
  Synthetic oligonucleotide
aagcgtcaatggttgcgtttaaagcttttacaaagtttcgttttatcttta

SEQ ID NO: 238841 - DNA, 57 bp, Artificial
  Synthetic oligonucleotide
aagcgtaataaggttgttgatggacatgctcctggcttgtctccttatttaacttta

SEQ ID NO: 238842 - DNA, 60 bp, Artificial
  Synthetic oligonucleotide
ttcacgagctaatgtatgtaagatgagacaaaaatgggagattagtcaagataatccaaa

SEQ ID NO: 238843 - DNA, 57 bp, Artificial
  Synthetic oligonucleotide
aatatatactcaaagctggcgaaatatttcccaacggagcttttcacaagatagttc

SEQ ID NO: 238844 - DNA, 56 bp, Artificial
  Synthetic oligonucleotide
aatataaacctcactttattattgaaaatcataaatatagcgatttaagttacata

SEQ ID NO: 238845 - DNA, 60 bp, Artificial
  Synthetic oligonucleotide
ttacgacacagcaggcactacgcttgaaggcaaagcaactgaaattaaagatcttacagc

SEQ ID NO: 238846 - DNA, 53 bp, Artificial
  Synthetic oligonucleotide
aatacggcaccatgccttcaattccttcgggtactaattttttgggctcgttg

SEQ ID NO: 238847 - DNA, 60 bp, Artificial
  Synthetic oligonucleotide
aataagttaatcattcttgtcaaaacactagatcacatgaatcaagaattgttctatagt

SEQ ID NO: 238848 - DNA, 54 bp, Artificial
  Synthetic oligonucleotide
aataacagcttaagtggcctagaatttatctatggactacccggaacactaggg

SEQ ID NO: 238849 - DNA, 60 bp, Artificial
  Synthetic oligonucleotide
ggtgaaacgattattggttcaaaacactacaagactattatcaatcaatatcagatagac

SEQ ID NO: 238850 - DNA, 55 bp, Artificial
  Synthetic oligonucleotide
ttacgggatgacgtcttttaggggattgaattgggggccagggactgaagatatg

SEQ ID NO: 238851 - DNA, 60 bp, Artificial
  Synthetic oligonucleotide
ttactatacaagtctatttaagaaacgcgaatttagtgtgtatgagataaatgcagcgta

SEQ ID NO: 238852 - DNA, 60 bp, Artificial
  Synthetic oligonucleotide
aagtggtactgatgcaattggagaagttgtggataatgctggtgctgcgaaggctgctga

SEQ ID NO: 238853 - DNA, 54 bp, Artificial
  Synthetic oligonucleotide
ttactcataatagatagaataaacggggaatctcctaacttatttataagggga

SEQ ID NO: 238854 - DNA, 58 bp, Artificial
  Synthetic oligonucleotide
ttactgctaaaatagacaatgtagaaaagaatttaatgtctcttacagaaatgcttaa

SEQ ID NO: 238855 - DNA, 60 bp, Artificial
  Synthetic oligonucleotide
aagtgaacttgtaaatgttatgccctcgctgacaatatttgctttttcgctgccaaatga

SEQ ID NO: 238856 - DNA, 59 bp, Artificial
  Synthetic oligonucleotide
ttacttcctaatatgtatggacttcttaacatgccagatcaagtaaaggaagaagttca

SEQ ID NO: 238857 - DNA, 53 bp, Artificial
  Synthetic oligonucleotide
aagtcccttttagtatctacagcccaacttttggccttaaagaattagctgta

SEQ ID NO: 238858 - DNA, 57 bp, Artificial
  Synthetic oligonucleotide
ttactttttgtgtctacattactatacaagtctatttaagcaatgtgaatttaatgt

SEQ ID NO: 238859 - DNA, 54 bp, Artificial
  Synthetic oligonucleotide
ttagaaggactcaatttattctccacaagggaaaatgacaaatttctgggaatt

SEQ ID NO: 238860 - DNA, 56 bp, Artificial
  Synthetic oligonucleotide
cccataatttactcgcaagtattctcttttagttcgtactatatccctaattgtgc

SEQ ID NO: 238861 - DNA, 58 bp, Artificial
  Synthetic oligonucleotide
aagtattaatgattcgacatgttgttaatttggaaggcaattatcatataaatcaggg

SEQ ID NO: 238862 - DNA, 59 bp, Artificial
  Synthetic oligonucleotide
aagtagatagatattccccatcaagtaaactatgtagcaattgtggtatcaaaaataca

SEQ ID NO: 238863 - DNA, 60 bp, Artificial
  Synthetic oligonucleotide
ttagcactctttgccccatcagcattagccgcagcaaactttccatccttagccaatccc

SEQ ID NO: 238864 - DNA, 60 bp, Artificial
  Synthetic oligonucleotide
aagtactaatcatagttctttgatccgcactacatgaaattgatctatagattattcttt

SEQ ID NO: 238865 - DNA, 60 bp, Artificial
  Synthetic oligonucleotide
ttagcagcatcattcgtagtcccaatagcagcgtcaataggattatcagcatcctcagcc

SEQ ID NO: 238866 - DNA, 59 bp, Artificial
  Synthetic oligonucleotide
ttaggcgcagctttacccttttgagtagttcttcttatgattggcagggttgacagtga

SEQ ID NO: 238867 - DNA, 55 bp, Artificial
  Synthetic oligonucleotide
ttaggggaatataaagaatctccttaaactgtagaatcgttatccgagataacta

SEQ ID NO: 238868 - DNA, 56 bp, Artificial
  Synthetic oligonucleotide
aaggatattccaaactctacacatatcaagaccttaactatgaactaaaagaccga

SEQ ID NO: 238869 - DNA, 60 bp, Artificial
  Synthetic oligonucleotide
ttagtgcacttactgctgctcctttaaccgttttctttgcatcaacactagcagcatcac

SEQ ID NO: 238870 - DNA, 57 bp, Artificial
  Synthetic oligonucleotide
aacttgttttaagccctatatcacttagtccaagtcgaaacataccaaatatgctca

SEQ ID NO: 238871 - DNA, 59 bp, Artificial
  Synthetic oligonucleotide
cccataatgaaagcaatcagaagaatgttacacaaggccgcaccttggtggtttactga

SEQ ID NO: 238872 - DNA, 60 bp, Artificial
  Synthetic oligonucleotide
ttctcttcttcagagatagccaaataggcactgcagcggattctatacccctatatgctg

SEQ ID NO: 238873 - DNA, 60 bp, Artificial
  Synthetic oligonucleotide
ttctgaacagcaaacttcccatccttagccatccctcttagcacaatagcagcagcaatc

SEQ ID NO: 238874 - DNA, 57 bp, Artificial
  Synthetic oligonucleotide
ttctgcatttcagaattaacatttaaattgtaagaccaaacagcccaacacaggtgg

SEQ ID NO: 238875 - DNA, 58 bp, Artificial
  Synthetic oligonucleotide
aacttccctgccttttcattgcccccttcagcagcagcaactttcagcttttcactcc

SEQ ID NO: 238876 - DNA, 56 bp, Artificial
  Synthetic oligonucleotide
ttcttatgggtagagaacagtacgcttactacttttcgcttgcttgataaattaaa

SEQ ID NO: 238877 - DNA, 56 bp, Artificial
  Synthetic oligonucleotide
aactgcaataaataatggtgaaaggaatattgcaataaagaacattattcccgtta

SEQ ID NO: 238878 - DNA, 52 bp, Artificial
  Synthetic oligonucleotide
ttctttaagtttttaagcttctaattctgacattgtacttttgaaaaagcct

SEQ ID NO: 238879 - DNA, 56 bp, Artificial
  Synthetic oligonucleotide
ttgaaaagtatgggcaaaggtggacagaccctgagaatatggttgttagtggtcct

SEQ ID NO: 238880 - DNA, 56 bp, Artificial
  Synthetic oligonucleotide
aactcgaattggcactgtaaaggaatttaaacagcaaactcaagaagctgtggtta

SEQ ID NO: 238881 - DNA, 56 bp, Artificial
  Synthetic oligonucleotide
ttgaaaatatcttgatttagagccccttttcatagcggaaatagaacccattccaa

SEQ ID NO: 238882 - DNA, 60 bp, Artificial
  Synthetic oligonucleotide
cccaatgcatctgacattaactctataaatgcataaaatgcattctctgcacttctccct

SEQ ID NO: 238883 - DNA, 57 bp, Artificial
  Synthetic oligonucleotide
aactcaacagtttgctctggtatttttccaattgccgagattgatccgcaagttgtt

SEQ ID NO: 238884 - DNA, 54 bp, Artificial
  Synthetic oligonucleotide
aactattcggaaggggttgatactgtgtatttacattcaaccgctaaggttgag

SEQ ID NO: 238885 - DNA, 54 bp, Artificial
  Synthetic oligonucleotide
aactagtaactaccacagacatttaggtattaacatggggaccgaagttcatta

SEQ ID NO: 238886 - DNA, 53 bp, Artificial
  Synthetic oligonucleotide
aactactacatgcaacggttcctaatagctattagccccctatttgggggctt

SEQ ID NO: 238887 - DNA, 60 bp, Artificial
  Synthetic oligonucleotide
aactaatgcaccaattggcatacccgtgctagataatattgccggattaacagctattat

SEQ ID NO: 238888 - DNA, 60 bp, Artificial
  Synthetic oligonucleotide
aacgtattccggcagcaactgcgctttctggactaaatatagcatatatccaggatatgg

SEQ ID NO: 238889 - DNA, 60 bp, Artificial
  Synthetic oligonucleotide
aacgtattccagcagctactgcgctttctggactaaagattgcatatatccaagctatgg

SEQ ID NO: 238890 - DNA, 54 bp, Artificial
  Synthetic oligonucleotide
ttgaaattgactattatcctaacagtagtgggggcgaagaaaccgatgggggaa

SEQ ID NO: 238891 - DNA, 56 bp, Artificial
  Synthetic oligonucleotide
ttgaacggcttgtttctgcttatcaggtaaataacaacccaataaagctaatatta

SEQ ID NO: 238892 - DNA, 56 bp, Artificial
  Synthetic oligonucleotide
ttgaagcattacaacacgagcccgaagacgccacaaaattaactccctatttttca

SEQ ID NO: 238893 - DNA, 56 bp, Artificial
  Synthetic oligonucleotide
cccaagtattggggggaatactagtactagctggatatggtgtcggcgacaacaac

SEQ ID NO: 238894 - DNA, 58 bp, Artificial
  Synthetic oligonucleotide
ttgaattagaaattggctggtttgggggtcgttctaatattgctaggatgcatgaaaa

SEQ ID NO: 238895 - DNA, 60 bp, Artificial
  Synthetic oligonucleotide
aacgccgccccattatcatcagcagtcccaatcgcagccccgcaatcggattcgtagcct

SEQ ID NO: 238896 - DNA, 52 bp, Artificial
  Synthetic oligonucleotide
ttgacccttaaatcctaacttaccttcaataaatcctaacttaccttcaata

SEQ ID NO: 238897 - DNA, 57 bp, Artificial
  Synthetic oligonucleotide
ttgactcttagccccaaatagtcttacttatggcttccttatactttacaattgcat

SEQ ID NO: 238898 - DNA, 60 bp, Artificial
  Synthetic oligonucleotide
ttgagcttgacgcagaacactacagtaatagcgagagtaaagtactttatctaagatatt

SEQ ID NO: 238899 - DNA, 60 bp, Artificial
  Synthetic oligonucleotide
ttcagctgtagttgtagggtgttgttcagccgcatctgtaactgtctttgtcattcttag

SEQ ID NO: 238900 - DNA, 60 bp, Artificial
  Synthetic oligonucleotide
ttcatagcaggattagcattagatttttgcgtaaaagaaacaatacttgatgcaatcaac

SEQ ID NO: 238901 - DNA, 60 bp, Artificial
  Synthetic oligonucleotide
ttcatcctctatcaaggctaatttctggattattggctggtttaacgagttatatatcta

SEQ ID NO: 238902 - DNA, 58 bp, Artificial
  Synthetic oligonucleotide
ttccagtctatgaatgggatagagtactcggatttaatcaaagtgacgctattttaaa

SEQ ID NO: 238903 - DNA, 60 bp, Artificial
  Synthetic oligonucleotide
aagcaactcaaatcttagcaatagctggaactaacaatcttgatgagattgacttatcgt

SEQ ID NO: 238904 - DNA, 57 bp, Artificial
  Synthetic oligonucleotide
cccaaggctctattttcttgaccccgcctatctgatccactttctctaataagctta

SEQ ID NO: 238905 - DNA, 54 bp, Artificial
  Synthetic oligonucleotide
aagcaacgaaaacggaggcatttggcccatacactgtgtcaaaaatacttgggg

SEQ ID NO: 238906 - DNA, 57 bp, Artificial
  Synthetic oligonucleotide
aagatgaggctaccaccacttatacagctcaaacaaatagttacccgtcttattaca

SEQ ID NO: 238907 - DNA, 55 bp, Artificial
  Synthetic oligonucleotide
aagatgaatgggttttactataggaatttgaaacattggtttctctagaagaata

SEQ ID NO: 238908 - DNA, 60 bp, Artificial
  Synthetic oligonucleotide
aagatataccaacatataaggcaagggttttgctaggagaatggatagcgagcatcgatt

SEQ ID NO: 238909 - DNA, 55 bp, Artificial
  Synthetic oligonucleotide
aagatacgtgggatgttgcccaaatggctcggtggtactggaaacgataaccctc

SEQ ID NO: 238910 - DNA, 60 bp, Artificial
  Synthetic oligonucleotide
ttccattatgctaaactccaattaatccacatgacttaatgattcactttaaatggcggc

SEQ ID NO: 238911 - DNA, 53 bp, Artificial
  Synthetic oligonucleotide
aagagtgttagttaagtacactttgagctttgaatccttattaaagtcaactt

SEQ ID NO: 238912 - DNA, 57 bp, Artificial
  Synthetic oligonucleotide
ttccccgtgaacaacttccctgcatctttgttcttctcctcactaaccgcctgaaca

SEQ ID NO: 238913 - DNA, 53 bp, Artificial
  Synthetic oligonucleotide
ttcctactagcaaaccgccaagaatatttataagggttatcaaaaatccaacc

SEQ ID NO: 238914 - DNA, 57 bp, Artificial
  Synthetic oligonucleotide
ttcgacaatatatccagttatacaaagtattcctcctaatacttgagttccaagtac

SEQ ID NO: 238915 - DNA, 56 bp, Artificial
  Synthetic oligonucleotide
ggtgccactttccagtaataatgtgaatatttgctcgtacgacacggttaagaaat

SEQ ID NO: 238916 - DNA, 60 bp, Artificial
  Synthetic oligonucleotide
aagactgtctcaagaacggacttgttcttgagagtactggtcgcaatgttagtgaggcga

SEQ ID NO: 238917 - DNA, 60 bp, Artificial
  Synthetic oligonucleotide
ttcggtacgaatgagataagccccgtcttcaacaatacgatgaacagtagtatctgcaat

SEQ ID NO: 238918 - DNA, 60 bp, Artificial
  Synthetic oligonucleotide
aagacaggaaccacctgaagcaaagcttgtggataatgctctaatggatgcccgcttctt

SEQ ID NO: 238919 - DNA, 60 bp, Artificial
  Synthetic oligonucleotide
ttcgtagtcccaatagcagcgtcaataggattttcagcatccgcagccttcactcctgtc

SEQ ID NO: 238920 - DNA, 60 bp, Artificial
  Synthetic oligonucleotide
aagaatacagcaataactatataaatagctatgctttaattaggtgtgtagatcgcgtca

SEQ ID NO: 238921 - DNA, 60 bp, Artificial
  Synthetic oligonucleotide
aagaagctgcattctataatctttgatttagaaatagcagttcactattactatttgcaa

SEQ ID NO: 238922 - DNA, 54 bp, Artificial
  Synthetic oligonucleotide
ttctaaaaagtagcgattctccaacagaagtcaaggtagaaaagggaatatact

SEQ ID NO: 238923 - DNA, 58 bp, Artificial
  Synthetic oligonucleotide
aagaagccaggatatgctgcatctaaaaaggctttggtattcaattcacttccaaaag

SEQ ID NO: 238924 - DNA, 51 bp, Artificial
  Synthetic oligonucleotide
aacttttggccttaaagaattagctgtaattacaagtctttcgtttaaaga

SEQ ID NO: 238925 - DNA, 59 bp, Artificial
  Synthetic oligonucleotide
ttctagtagaggatcgttcttttaagagcctaaatccatcataggaagaagacataagc

SEQ ID NO: 238926 - DNA, 54 bp, Artificial
  Synthetic oligonucleotide
ggtgtacaagaacaagttgagaacgcttgtaacttgaaacttacaaagtatttc

SEQ ID NO: 238927 - DNA, 57 bp, Artificial
  Synthetic oligonucleotide
aactttccatccttagccaaccccctcaaaacaatagccgcagcaatcttatcatcc

SEQ ID NO: 238928 - DNA, 60 bp, Artificial
  Synthetic oligonucleotide
ttctattcctgtgcaactttcaatatatgctgttacagtagacactcccattattgctcc

SEQ ID NO: 238929 - DNA, 60 bp, Artificial
  Synthetic oligonucleotide
tatttgatctagtaagcgtccaatcatttcgccaacagaacctctcaataaagttgtcaa

SEQ ID NO: 238930 - DNA, 57 bp, Artificial
  Synthetic oligonucleotide
tatttggccttagagttgcttatataaaaatgtgggcgttggttgtgtgtcttaata

SEQ ID NO: 238931 - DNA, 60 bp, Artificial
  Synthetic oligonucleotide
tcaacagcccacttttctgcagtcattggtacaataacataattgctacacacaagagca

SEQ ID NO: 238932 - DNA, 60 bp, Artificial
  Synthetic oligonucleotide
tcaacatcatttctaatattagcattatcaataccagaattattctctagagcaggacca

SEQ ID NO: 238933 - DNA, 56 bp, Artificial
  Synthetic oligonucleotide
tcaataagggaatcttcaattctttatcgccgaaaggagattgttaactaaatcaa

SEQ ID NO: 238934 - DNA, 60 bp, Artificial
  Synthetic oligonucleotide
agcccagatatcatttgcttttcacactgaaaagcatcctcttgaacactagaattaaaa

SEQ ID NO: 238935 - DNA, 60 bp, Artificial
  Synthetic oligonucleotide
tcaatcttatcaatgtgaagaattctcttaaagaagtgcacggtgccattgacaagaatg

SEQ ID NO: 238936 - DNA, 57 bp, Artificial
  Synthetic oligonucleotide
agccacactatgggtaaaattacaagaaatgcgttcttttatggagcaagcaactaa

SEQ ID NO: 238937 - DNA, 58 bp, Artificial
  Synthetic oligonucleotide
ccattgtctcagcaatcttactaaaatacgttcctatctcacttttcttcgtatacgc

SEQ ID NO: 238938 - DNA, 58 bp, Artificial
  Synthetic oligonucleotide
agccaatttaaacacattcacctcccactaaagacagtactccatcttctattctata

SEQ ID NO: 238939 - DNA, 60 bp, Artificial
  Synthetic oligonucleotide
agccaagaggattatattggcagcacggtgaattgcttagatctcaggtactcggggaaa

SEQ ID NO: 238940 - DNA, 59 bp, Artificial
  Synthetic oligonucleotide
agcattcatccacacagcgccccctagtgttccgggtagtccatagataaattctaggc

SEQ ID NO: 238941 - DNA, 56 bp, Artificial
  Synthetic oligonucleotide
agcaggtcgttcaggaggcccttaaagggggcatagacggctttgaaaatactgca

SEQ ID NO: 238942 - DNA, 60 bp, Artificial
  Synthetic oligonucleotide
agcaggaccattcctcatatcaaaaccattagctacaacaaaatcactcttggctctaga

SEQ ID NO: 238943 - DNA, 56 bp, Artificial
  Synthetic oligonucleotide
agcagcgaactaaatcaataaaggccaacaaatattccccgctaaatatcaagaag

SEQ ID NO: 238944 - DNA, 59 bp, Artificial
  Synthetic oligonucleotide
agcagcctatctttattagagggtgagcccattttccacgattctaatgcaggtgagtt

SEQ ID NO: 238945 - DNA, 54 bp, Artificial
  Synthetic oligonucleotide
tcactgcatatatttagttaattatccccccccccgagtactagttactaacca

SEQ ID NO: 238946 - DNA, 57 bp, Artificial
  Synthetic oligonucleotide
tcacttacttgctcacttaccaaaccttgctcacttagactaccctgcttacttaac

SEQ ID NO: 238947 - DNA, 58 bp, Artificial
  Synthetic oligonucleotide
tcagctcttattagactttgcgacgtacataatgtaccgctagcaaccaacgtaaaaa

SEQ ID NO: 238948 - DNA, 60 bp, Artificial
  Synthetic oligonucleotide
gtattgggaattatgggggcaatgtctatcacaatgatagccgggctaatatttgctttc

SEQ ID NO: 238949 - DNA, 59 bp, Artificial
  Synthetic oligonucleotide
ccattagcatcattagcctgcttcttagcaaacaacttccccgcattctcgttaccctc

SEQ ID NO: 238950 - DNA, 58 bp, Artificial
  Synthetic oligonucleotide
agcacgcccaaaagctcaacttacgaagcaataagaaaagctctgctaaatgttgaag

SEQ ID NO: 238951 - DNA, 57 bp, Artificial
  Synthetic oligonucleotide
agcacctgcaacgctcaaaatggttcctaatagctagtagcccccaaatagggggca

SEQ ID NO: 238952 - DNA, 60 bp, Artificial
  Synthetic oligonucleotide
tcagctctttcacctgttgcatatagtttctgcttattttgtgcacatcgatcagtctag

SEQ ID NO: 238953 - DNA, 60 bp, Artificial
  Synthetic oligonucleotide
tatgaatatgatcaagaccgttttagagaatttcaatgtacatacactgtatttagagga

SEQ ID NO: 238954 - DNA, 59 bp, Artificial
  Synthetic oligonucleotide
agcgtaattactacgttgcagaataatactctttgttatgagcaagttgcatttttgag

SEQ ID NO: 238955 - DNA, 55 bp, Artificial
  Synthetic oligonucleotide
agcggttagtaactgcaataatggtggctaataatctaacagccccctatttggg

SEQ ID NO: 238956 - DNA, 60 bp, Artificial
  Synthetic oligonucleotide
tatgacgcctctaattttgcaccgatgcctgcgtagtaaaggagttagaatggatattga

SEQ ID NO: 238957 - DNA, 60 bp, Artificial
  Synthetic oligonucleotide
tatgatcttagtgtataagctggtggtgttaatgatttatgactacaaagccaacattta

SEQ ID NO: 238958 - DNA, 60 bp, Artificial
  Synthetic oligonucleotide
tatgatgtttcatgctcgactaagaccaatctaataggaaataggaggaagtagactaaa

SEQ ID NO: 238959 - DNA, 57 bp, Artificial
  Synthetic oligonucleotide
tatgcctatagtatgcttttctaatttttttgaacatttggtcgcgaattgtttgta

SEQ ID NO: 238960 - DNA, 57 bp, Artificial
  Synthetic oligonucleotide
ccattaatatacgcctttttaagcacaagctttgtgttattcacaatttgtatccta

SEQ ID NO: 238961 - DNA, 52 bp, Artificial
  Synthetic oligonucleotide
tatggaagttagatttaaagcgggcaatgtttttttctactttaagggatta

SEQ ID NO: 238962 - DNA, 60 bp, Artificial
  Synthetic oligonucleotide
tatggtgatgttaaatcgttaacagaagttgctactgattttgaggatgacaattctctt

SEQ ID NO: 238963 - DNA, 60 bp, Artificial
  Synthetic oligonucleotide
tattaacagcactctcaacagtactcttcaaacccgcctttgcattatcatgttcagcat

SEQ ID NO: 238964 - DNA, 57 bp, Artificial
  Synthetic oligonucleotide
tattagagttaagctgtggcgcgtaacttctatcataaactaaagtgtttgaaataa

SEQ ID NO: 238965 - DNA, 58 bp, Artificial
  Synthetic oligonucleotide
tattagataaacttgaaatcctaagttgattgcatcaagtattgtttcttttacgcaa

SEQ ID NO: 238966 - DNA, 60 bp, Artificial
  Synthetic oligonucleotide
agcgcatcataaggcaatttcttaaccgtgtcgtacgagcaaatattcacattattactg

SEQ ID NO: 238967 - DNA, 60 bp, Artificial
  Synthetic oligonucleotide
tattatgacttattcggaagttacatattctgatcaaagcaaggttaatcaagctatatc

SEQ ID NO: 238968 - DNA, 58 bp, Artificial
  Synthetic oligonucleotide
tattatttggtaaagggaagatgaaagcttgtcatttatgcatttatacccatattta

SEQ ID NO: 238969 - DNA, 57 bp, Artificial
  Synthetic oligonucleotide
tattcaattatgatcctaagaaaagggcaatatcagatagatttaaaggacttttac

SEQ ID NO: 238970 - DNA, 55 bp, Artificial
  Synthetic oligonucleotide
tattccaactgtgatagagtactttaaatttactggtatggaatttacaatactt

SEQ ID NO: 238971 - DNA, 56 bp, Artificial
  Synthetic oligonucleotide
ccattaaatcttttagccctacaccaccaataagaatattcctacttcactagcgc

SEQ ID NO: 238972 - DNA, 60 bp, Artificial
  Synthetic oligonucleotide
tattccaatagcctgggcaccttctaaattaaagattgcatatatccaagctatggcagt

SEQ ID NO: 238973 - DNA, 55 bp, Artificial
  Synthetic oligonucleotide
tattgctctaattaggtaaaggggcttcaagaaagcccgggcgtattaattcata

SEQ ID NO: 238974 - DNA, 56 bp, Artificial
  Synthetic oligonucleotide
tattggaatcgaatcaactgtggttgggtttgacctaaaagataacgtactgatat

SEQ ID NO: 238975 - DNA, 60 bp, Artificial
  Synthetic oligonucleotide
tattggcaatatctatactgctaataatttcatgtaaatggcatgtagacaatcccattg

SEQ ID NO: 238976 - DNA, 57 bp, Artificial
  Synthetic oligonucleotide
tatttctataatctttgatttagaaatagtagttcactacccaagtacaaattatga

SEQ ID NO: 238977 - DNA, 56 bp, Artificial
  Synthetic oligonucleotide
agagggacggacaggttaaaagaggaacaggcagttactatgttgtaatgctgtcc

SEQ ID NO: 238978 - DNA, 56 bp, Artificial
  Synthetic oligonucleotide
agagctaaacacagtatgcctttaaaaccatccgcttatatttactatacaaaagc

SEQ ID NO: 238979 - DNA, 56 bp, Artificial
  Synthetic oligonucleotide
tccccatttagattctacgttatccaatgctttagttgttagtaaacatgttatag

SEQ ID NO: 238980 - DNA, 60 bp, Artificial
  Synthetic oligonucleotide
agagccaaacaaaaattttcaagcattaagtagcgtctctgacgagcttagcagagagct

SEQ ID NO: 238981 - DNA, 55 bp, Artificial
  Synthetic oligonucleotide
agagataagatttactactaaacaattttcagttgtttagtctacgactgtcaag

SEQ ID NO: 238982 - DNA, 60 bp, Artificial
  Synthetic oligonucleotide
ccatgaagcacacagagaaataatacatcaatcagccactaatccaagctctgttaaaac

SEQ ID NO: 238983 - DNA, 60 bp, Artificial
  Synthetic oligonucleotide
agagaggaataatggcgttatagggatagtgatgatttatgttgaagcattggatatgta

SEQ ID NO: 238984 - DNA, 60 bp, Artificial
  Synthetic oligonucleotide
tccctcaacaagactcttgacacttgctatatctgcctgcactgcatcctcagtaccatt

SEQ ID NO: 238985 - DNA, 57 bp, Artificial
  Synthetic oligonucleotide
tccgattaacgccgaaagcaaaaagatcgttaaatatctttgtatgatatattgttc

SEQ ID NO: 238986 - DNA, 60 bp, Artificial
  Synthetic oligonucleotide
agagaagtaaagatccataagagtcgtttgatcatatatgagaattatgactatattttg

SEQ ID NO: 238987 - DNA, 52 bp, Artificial
  Synthetic oligonucleotide
agactttattggaaactttagtttgtctggtctaattaacaccataggaaat

SEQ ID NO: 238988 - DNA, 56 bp, Artificial
  Synthetic oligonucleotide
agacttccagttccaccacaaatcaaattcaaagaacaaaacgacattatctctaa

SEQ ID NO: 238989 - DNA, 56 bp, Artificial
  Synthetic oligonucleotide
agactcttggaaaaatagtctagagagtgttttaaaagacttagattcttcagaca

SEQ ID NO: 238990 - DNA, 55 bp, Artificial
  Synthetic oligonucleotide
tccgccaagtttagactttgctttgacaaacgctttggtaagtagtcaatatgtt

SEQ ID NO: 238991 - DNA, 56 bp, Artificial
  Synthetic oligonucleotide
tccgtaagtattggcgtatcaaatgattctctgtacccagtacttttactgtaaaa

SEQ ID NO: 238992 - DNA, 60 bp, Artificial
  Synthetic oligonucleotide
agacatcgaccaaagttaaggatgcttatagttaatagcaccacttgccaagagtataca

SEQ ID NO: 238993 - DNA, 57 bp, Artificial
  Synthetic oligonucleotide
ccatcttcaaaatctcaccataactactaataagagaaggtctacaccgcccaattc

SEQ ID NO: 238994 - DNA, 54 bp, Artificial
  Synthetic oligonucleotide
tccgtttatagatatataactcgttaaaccagccaataatccggaaattagcct

SEQ ID NO: 238995 - DNA, 58 bp, Artificial
  Synthetic oligonucleotide
tcctaagtcccagtttatttggcttgagttttcttgttcttgccatttgttagcagca

SEQ ID NO: 238996 - DNA, 55 bp, Artificial
  Synthetic oligonucleotide
tcctaattgagcaaaggataaggttttatttggatctcctcctgcaacccttggg

SEQ ID NO: 238997 - DNA, 60 bp, Artificial
  Synthetic oligonucleotide
agacaatgctgtcaatgttattgtaggcactatttctagtatgacttatgtcaaatttaa

SEQ ID NO: 238998 - DNA, 60 bp, Artificial
  Synthetic oligonucleotide
agaattctaacgaaggtgctaggcatcatgacaaacaaaggataccttgacaaggtggca

SEQ ID NO: 238999 - DNA, 57 bp, Artificial
  Synthetic oligonucleotide
tcctactaatgataagggcgctaaagaacttggagagttatttgagtcagtagaaat

SEQ ID NO: 239000 - DNA, 57 bp, Artificial
  Synthetic oligonucleotide
tcataagccctaaaccaggcataaacgttggccttgtcgttgtgaacatagccccac

SEQ ID NO: 239001 - DNA, 60 bp, Artificial
  Synthetic oligonucleotide
tcataattttttcatgctctacaatagcaagccttccagaagaaccatcatccccacaag

SEQ ID NO: 239002 - DNA, 60 bp, Artificial
  Synthetic oligonucleotide
agcaatatgatacaactactctcaaattatctctttgtgctcagccgaaaactccgcgct

SEQ ID NO: 239003 - DNA, 60 bp, Artificial
  Synthetic oligonucleotide
agcaaggctagtggagagcagatattaaatgctattgttgcggctgctgatggtgataag

SEQ ID NO: 239004 - DNA, 59 bp, Artificial
  Synthetic oligonucleotide
ccatctcccctaaccacacgctaacttcctttatcgcactctcaacagcatttttcaca

SEQ ID NO: 239005 - DNA, 58 bp, Artificial
  Synthetic oligonucleotide
tcatgatattatcgctactctggataacaaattttactctaaatttcgttgtgggttc

SEQ ID NO: 239006 - DNA, 60 bp, Artificial
  Synthetic oligonucleotide
agcaaacttcccatccttagccatccctcttagcacaatagcagcagcaatcttatcatt

SEQ ID NO: 239007 - DNA, 55 bp, Artificial
  Synthetic oligonucleotide
agcaaactgttgagtttagcggatactccgttagagaaaccgcaactaataagga

SEQ ID NO: 239008 - DNA, 57 bp, Artificial
  Synthetic oligonucleotide
agattatattgattactcttacaaaagtaatttaagcttatttgatgttgaaatggc

SEQ ID NO: 239009 - DNA, 59 bp, Artificial
  Synthetic oligonucleotide
tcattaagtctttaagtccagccccaccaattagaacattgcccacttcactagcacca

SEQ ID NO: 239010 - DNA, 54 bp, Artificial
  Synthetic oligonucleotide
agatggagatcccagaactggggggtacaggccgggacttgcaaaaagttggga

SEQ ID NO: 239011 - DNA, 60 bp, Artificial
  Synthetic oligonucleotide
tcattaatgtgaatctctaaatctctggcatacattttaaatgtcattcaacgccttatc

SEQ ID NO: 239012 - DNA, 60 bp, Artificial
  Synthetic oligonucleotide
agatgaaccaattacagatgaaccaattacagatgaaccaattgcagatgtatcaattgc

SEQ ID NO: 239013 - DNA, 59 bp, Artificial
  Synthetic oligonucleotide
agatagccttttgatttgagctatatccaattcgattcccttataagcattttcattac

SEQ ID NO: 239014 - DNA, 57 bp, Artificial
  Synthetic oligonucleotide
agagttctaacgaaggattgctaggtatcataacaaacaaatggataccttgacaag

SEQ ID NO: 239015 - DNA, 60 bp, Artificial
  Synthetic oligonucleotide
ccatcccccgcaaaacaatagcagcagcaatctgatcatcctttgtcaacgtagcaaacg

SEQ ID NO: 239016 - DNA, 60 bp, Artificial
  Synthetic oligonucleotide
tcatttattgactcagttgatcttgagctttcttctgttgacatatcagttggaccatcg

SEQ ID NO: 239017 - DNA, 60 bp, Artificial
  Synthetic oligonucleotide
agagtgctagaatcatttaggcttgtattagagtttgcattagcaataagggcgtcaact

SEQ ID NO: 239018 - DNA, 57 bp, Artificial
  Synthetic oligonucleotide
tcatttggggatatggtagggagtgtattggggttgagtgttgagagtaagaaatcg

SEQ ID NO: 239019 - DNA, 57 bp, Artificial
  Synthetic oligonucleotide
tccacacagcgccccctagtgttccgggtagtccatagataaattctaggccactta

SEQ ID NO: 239020 - DNA, 59 bp, Artificial
  Synthetic oligonucleotide
agagtataagtatgtcttctaaattttatagatctctcagtattgtcagacaccttttc

SEQ ID NO: 239021 - DNA, 58 bp, Artificial
  Synthetic oligonucleotide
tccagaaaatccatctaaagatgtcagacatggtaagccaggttaccccccctgaaga

SEQ ID NO: 239022 - DNA, 56 bp, Artificial
  Synthetic oligonucleotide
agagggcaatttaacttatctaaccccttcagctctttggagtgaatctagttcta

SEQ ID NO: 239023 - DNA, 56 bp, Artificial
  Synthetic oligonucleotide
agagggatttattgggaagataagtaagatcgaagaaggagcaaggaaagctgctt

SEQ ID NO: 239024 - DNA, 56 bp, Artificial
  Synthetic oligonucleotide
agtattcttgaccttagtaaaataagctcctatctcactcttctttgtgtccgcct

SEQ ID NO: 239025 - DNA, 60 bp, Artificial
  Synthetic oligonucleotide
agtatgttggagatgttaacaataactacctgccttttggcactgcatataaactagcat

SEQ ID NO: 239026 - DNA, 58 bp, Artificial
  Synthetic oligonucleotide
ccatccccatactcggacgatgtaacgggcaagcggtgtacaagtgcctgagaacgta

SEQ ID NO: 239027 - DNA, 60 bp, Artificial
  Synthetic oligonucleotide
agtatatctacgtgtgcttttacaagctcttcaactcgttctaaggtgtcaatatcaatg

SEQ ID NO: 239028 - DNA, 60 bp, Artificial
  Synthetic oligonucleotide
tagcagcatcattcttcttagcaaacaacttcccagcatccgcgttagcctcaccagcag

SEQ ID NO: 239029 - DNA, 60 bp, Artificial
  Synthetic oligonucleotide
tagcagcattattacactctttaacagcttgcttaaattcgctacaagataagctagatg

SEQ ID NO: 239030 - DNA, 60 bp, Artificial
  Synthetic oligonucleotide
agtatagatccggctatcgatatccttcctggtggcacgttggctgcgctttcgacaata

SEQ ID NO: 239031 - DNA, 57 bp, Artificial
  Synthetic oligonucleotide
tagcaggcttaacaattgaggggtggtttatcaatagtgatggtgttgtggagtttt

SEQ ID NO: 239032 - DNA, 58 bp, Artificial
  Synthetic oligonucleotide
agtagagtgttctcaaattaggtttgtttagatgttgtagcttgtctcttacattcaa

SEQ ID NO: 239033 - DNA, 58 bp, Artificial
  Synthetic oligonucleotide
agtaccacttgaagccccctcagctgtctttacagctgttaccagcttatccaacaac

SEQ ID NO: 239034 - DNA, 60 bp, Artificial
  Synthetic oligonucleotide
agtaccacgtattatgatcaacatcgatgacaaatctggtggagccactagaccaatacc

SEQ ID NO: 239035 - DNA, 59 bp, Artificial
  Synthetic oligonucleotide
agtaactagcgcaccaattggcatacccgtgttcgatagtattgctgggttaacagcta

SEQ ID NO: 239036 - DNA, 59 bp, Artificial
  Synthetic oligonucleotide
agtaacccggtttttgcatttgcctatgaagacccagacatgattacaagcagtctgtc

SEQ ID NO: 239037 - DNA, 58 bp, Artificial
  Synthetic oligonucleotide
ccgctgggaagttgtattccaatagcctgggcgccttctaaattaaagattgcatata

SEQ ID NO: 239038 - DNA, 60 bp, Artificial
  Synthetic oligonucleotide
tagcgatctcaaggggagcacaaggctttctctctgacaacgttctaaaagtatcagaat

SEQ ID NO: 239039 - DNA, 57 bp, Artificial
  Synthetic oligonucleotide
tagcgccgtatctatcaagtttgtttctttgaatactaaaatcttgatttcggtcga

SEQ ID NO: 239040 - DNA, 55 bp, Artificial
  Synthetic oligonucleotide
tagcgctctagaactaaattcattccaaagactagaaggggttagataagttaaa

SEQ ID NO: 239041 - DNA, 55 bp, Artificial
  Synthetic oligonucleotide
aggttaattggccgtattgtccgtcttcaagtttaaatgcaagagccacagttgg

SEQ ID NO: 239042 - DNA, 59 bp, Artificial
  Synthetic oligonucleotide
aggttaatattggtgcttggatgggctatattttgtcaaaatacaagataagtcatata

SEQ ID NO: 239043 - DNA, 59 bp, Artificial
  Synthetic oligonucleotide
aggtggagtttcccaactcgttaggactgaccacgcatcagtagctctatcaattccta

SEQ ID NO: 239044 - DNA, 58 bp, Artificial
  Synthetic oligonucleotide
tagctttttaggttctacaagaacggtcatccactagagcatggtccacaagctttac

SEQ ID NO: 239045 - DNA, 60 bp, Artificial
  Synthetic oligonucleotide
taggacctcctatgagcactgattatccgagtggggattttagtgtagatcttgatgttc

SEQ ID NO: 239046 - DNA, 54 bp, Artificial
  Synthetic oligonucleotide
agggttagatagtgaagggctgttaaagcgtatagcttctggaaagttttaata

SEQ ID NO: 239047 - DNA, 57 bp, Artificial
  Synthetic oligonucleotide
tactgaagatagtgtgaagtttttatcaattgaaaaccaagagtggcttattagtaa

SEQ ID NO: 239048 - DNA, 52 bp, Artificial
  Synthetic oligonucleotide
ggggatttagttttaagccgttcttcaattgaagacacaaccataaattccg

SEQ ID NO: 239049 - DNA, 60 bp, Artificial
  Synthetic oligonucleotide
agttgattctaagaatagcattggtggaagacttgcagatctgagacctagagttgttat

SEQ ID NO: 239050 - DNA, 59 bp, Artificial
  Synthetic oligonucleotide
tactgaggattatgtgtttactagtccaatagcctatttagacccagcatttagcgttg

SEQ ID NO: 239051 - DNA, 54 bp, Artificial
  Synthetic oligonucleotide
agttcaataatcctccttaacagcaaactttccatccttagccacccccctcaa

SEQ ID NO: 239052 - DNA, 57 bp, Artificial
  Synthetic oligonucleotide
agttacccgatttatcgctgcaaaactgtggatcaagtgatgttggttcgtttccga

SEQ ID NO: 239053 - DNA, 54 bp, Artificial
  Synthetic oligonucleotide
agttaagggtcttagtgaaagagaagttttatcaacatcttctagctgggaact

SEQ ID NO: 239054 - DNA, 60 bp, Artificial
  Synthetic oligonucleotide
agtgttggaggggataacactgcattatgtgttatggagcgagttgatgataagtattat

SEQ ID NO: 239055 - DNA, 57 bp, Artificial
  Synthetic oligonucleotide
tacttaacgcaagtttgtctattcctaatagcaataacacttcagaatgaagttttg

SEQ ID NO: 239056 - DNA, 60 bp, Artificial
  Synthetic oligonucleotide
tacttcagacgagccagaaagcagtacttcagacgagccagaaagcagtacttcagacga

SEQ ID NO: 239057 - DNA, 56 bp, Artificial
  Synthetic oligonucleotide
tacttcggagaaccatccccatactcggacgatgtaacgggcaagcggtgtacaag

SEQ ID NO: 239058 - DNA, 56 bp, Artificial
  Synthetic oligonucleotide
agtggtattctaatttaacagacatgcccacactaaaggttaatgattttaacaca

SEQ ID NO: 239059 - DNA, 57 bp, Artificial
  Synthetic oligonucleotide
cagttatacaaagtattcctcctaatacttgagttccaagaactgcgccaccaccaa

SEQ ID NO: 239060 - DNA, 58 bp, Artificial
  Synthetic oligonucleotide
gggggagtgaaaagctgaaagctgttgctgctacaggggagaataatgaaaaggcagg

SEQ ID NO: 239061 - DNA, 52 bp, Artificial
  Synthetic oligonucleotide
tactttttgcccctctattactgtaaaagttggaaattgcccaaaatcaagg

SEQ ID NO: 239062 - DNA, 60 bp, Artificial
  Synthetic oligonucleotide
tagaaaagaagtcaagatccataagagtcgtttgatcatatatgagaattatgactatat

SEQ ID NO: 239063 - DNA, 56 bp, Artificial
  Synthetic oligonucleotide
tagaaaagaatttaatgtctcttacagaaatgcttaaatgggtattgggaattatg

SEQ ID NO: 239064 - DNA, 57 bp, Artificial
  Synthetic oligonucleotide
tagaaaggcgctgtcttttgctattgatagaaaaaccttaacagagagcgttcttaa

SEQ ID NO: 239065 - DNA, 60 bp, Artificial
  Synthetic oligonucleotide
tagaaattttatcaaaagcagctcaagaagcactaactaattcaattgcagaacttacaa

SEQ ID NO: 239066 - DNA, 58 bp, Artificial
  Synthetic oligonucleotide
agtctagattatcctataatctagttttaggggttcttatgtctagtttgctatgagc

SEQ ID NO: 239067 - DNA, 60 bp, Artificial
  Synthetic oligonucleotide
tagacgctgcaccagttaattgtaagataaagagaaatgattctttaatatcaaaagtgc

SEQ ID NO: 239068 - DNA, 60 bp, Artificial
  Synthetic oligonucleotide
tagatagtcattcaagaatggttaatggagtattaacttctcttaatggagagagtggtg

SEQ ID NO: 239069 - DNA, 57 bp, Artificial
  Synthetic oligonucleotide
agtccctacctccgtatcacttaattttagagctgcattttaatgtcacaattacta

SEQ ID NO: 239070 - DNA, 56 bp, Artificial
  Synthetic oligonucleotide
agtcccaactaaagtatcgctaattcgtaaaacaggtctaaacatgctcataatta

SEQ ID NO: 239071 - DNA, 58 bp, Artificial
  Synthetic oligonucleotide
gggggatgtatatgcagataaaacttaataagagaactttggatgattctaatgtaac

SEQ ID NO: 239072 - DNA, 60 bp, Artificial
  Synthetic oligonucleotide
tagattatacgctaaccaatgctttagtatgtagtgattatataatagttccaataacag

SEQ ID NO: 239073 - DNA, 57 bp, Artificial
  Synthetic oligonucleotide
aggaatagtagttagcttgttggatacatttggcttaattacaatcaatacaataag

SEQ ID NO: 239074 - DNA, 60 bp, Artificial
  Synthetic oligonucleotide
aggaagatgtatgccaatagatttggcaccctctaaattaaatattgcatatatccaagc

SEQ ID NO: 239075 - DNA, 56 bp, Artificial
  Synthetic oligonucleotide
aggaacttttctacttcattaatggcttgtacttttgcttctcttaaggctgatcc

SEQ ID NO: 239076 - DNA, 60 bp, Artificial
  Synthetic oligonucleotide
aggaactgcctgaagtaaagcttgtggaccatgctctagtggatgatcgttcttttagag

SEQ ID NO: 239077 - DNA, 59 bp, Artificial
  Synthetic oligonucleotide
agcttttcgaattgcgatttgtgctcattcacgaattttttgtacattaattgaatgtc

SEQ ID NO: 239078 - DNA, 60 bp, Artificial
  Synthetic oligonucleotide
agcttgtagtagcagcttgatcgtctgtatcaaccaaaagtaccttgtgtttctgagaca

SEQ ID NO: 239079 - DNA, 55 bp, Artificial
  Synthetic oligonucleotide
tatagtaggggctttatacgccgtgcgtttacttttaacatagataaatattaca

SEQ ID NO: 239080 - DNA, 60 bp, Artificial
  Synthetic oligonucleotide
tatatccttcatatttgtatgtagtttactataagtaagctcaggtgtcaaataaagcgc

SEQ ID NO: 239081 - DNA, 60 bp, Artificial
  Synthetic oligonucleotide
tatattaaccctattatttaatgatactgaaggtgctacaggatcaattaaatcctcata

SEQ ID NO: 239082 - DNA, 55 bp, Artificial
  Synthetic oligonucleotide
ccgattataatgaaaggccgttgttatgtcatttggctcgtgccccaaaaccttc

SEQ ID NO: 239083 - DNA, 57 bp, Artificial
  Synthetic oligonucleotide
agctctaattttgtaagaccaattgctcttaaagttccaagctctctagttctttca

SEQ ID NO: 239084 - DNA, 60 bp, Artificial
  Synthetic oligonucleotide
tatcaaatcgactaaacattttattaacaagcgtgaactcagcgctatctctaaattcta

SEQ ID NO: 239085 - DNA, 60 bp, Artificial
  Synthetic oligonucleotide
agctcagcaatcaacaaaaatcacctcaatattactctcaactttaagcctacattatca

SEQ ID NO: 239086 - DNA, 55 bp, Artificial
  Synthetic oligonucleotide
tatcaaattaggtattacaaaatagtatcaataattaggtactttcaaaagaaca

SEQ ID NO: 239087 - DNA, 60 bp, Artificial
  Synthetic oligonucleotide
agctataccggtaatggcgcccacaataacatcaacagcgtggtctcctctatctccatt

SEQ ID NO: 239088 - DNA, 60 bp, Artificial
  Synthetic oligonucleotide
tatcacgtggacacagtttagatgagattatgttggcgcaaaagcgagaacttgttagaa

SEQ ID NO: 239089 - DNA, 60 bp, Artificial
  Synthetic oligonucleotide
agctagtgtggcttatgccaatgcttttgctgttatagtatctagattatcttctgccga

SEQ ID NO: 239090 - DNA, 56 bp, Artificial
  Synthetic oligonucleotide
agctagtagtgctcacattaaatacaaaattagggccatagagtagttaaaataaa

SEQ ID NO: 239091 - DNA, 60 bp, Artificial
  Synthetic oligonucleotide
tatcattcccattcatagcagcaccaaaattagcacctgcctgagcagccccaatagcag

SEQ ID NO: 239092 - DNA, 56 bp, Artificial
  Synthetic oligonucleotide
agcgttcccataatcgtattccgttcatctttctcaaaaaacgcactgttgagaag

SEQ ID NO: 239093 - DNA, 51 bp, Artificial
  Synthetic oligonucleotide
ggggggttgaatttaattgggtaaaagaatttgtagagtatgttaattgta

SEQ ID NO: 239094 - DNA, 56 bp, Artificial
  Synthetic oligonucleotide
tatgaaagtccgctttatttgcccaaatctggtagagagtttgaaataacacaggt

SEQ ID NO: 239095 - DNA, 60 bp, Artificial
  Synthetic oligonucleotide
tatgaaccagttgtagtaccaggtggtggtagtgatctatatggcatatgcgttgacatt

SEQ ID NO: 239096 - DNA, 57 bp, Artificial
  Synthetic oligonucleotide
taggctccctaccctcggcacttctagtaagttgagacaacgctattattggtatct

SEQ ID NO: 239097 - DNA, 56 bp, Artificial
  Synthetic oligonucleotide
agggggctcgcatggcgttttgtataatgagaactgcgaagttaaaagaggacgga

SEQ ID NO: 239098 - DNA, 54 bp, Artificial
  Synthetic oligonucleotide
agggggctattaaagaagttagcgagttgttggataagctggtaaaagctgtaa

SEQ ID NO: 239099 - DNA, 60 bp, Artificial
  Synthetic oligonucleotide
tagggaaggctgatgctggggattctaataaggctagtgatggtactgcgagaactgcta

SEQ ID NO: 239100 - DNA, 60 bp, Artificial
  Synthetic oligonucleotide
tagggacttttgaaaccttgggctaagcatcatcaccaggtgaaaaggcaactgctgata

SEQ ID NO: 239101 - DNA, 60 bp, Artificial
  Synthetic oligonucleotide
tagggccccctatgagcactgattatcccggtggagattttagtgtagagcttgatgttc

SEQ ID NO: 239102 - DNA, 56 bp, Artificial
  Synthetic oligonucleotide
tagtagcaaataacttccccgcatccccattattattaccagtagcctctttaaca

SEQ ID NO: 239103 - DNA, 59 bp, Artificial
  Synthetic oligonucleotide
agagcctcgaaccctatttttccatcgctcgcggccttatataatgcctctccagctaa

SEQ ID NO: 239104 - DNA, 54 bp, Artificial
  Synthetic oligonucleotide
ggggtaacataatctacaaatacctatatatctatttaaacaaagtgataggtt

SEQ ID NO: 239105 - DNA, 53 bp, Artificial
  Synthetic oligonucleotide
tagtatgagtaccggttctaaatttgccatttcctaacggtttatataaacca

SEQ ID NO: 239106 - DNA, 60 bp, Artificial
  Synthetic oligonucleotide
tagtggcaccttccatagaatctgcggcatctttagaggaatctaataataggattggta

SEQ ID NO: 239107 - DNA, 60 bp, Artificial
  Synthetic oligonucleotide
agggagtgtgttttgatatttgcataccattgcttatctacttgcagaacgccagcttgc

SEQ ID NO: 239108 - DNA, 57 bp, Artificial
  Synthetic oligonucleotide
tagttcttctgtatttaatgatatttattcgtataagggggatagcaaaacccatga

SEQ ID NO: 239109 - DNA, 57 bp, Artificial
  Synthetic oligonucleotide
tagttgtcacattaaaaatacgactctaagattaagtgatactaggtggacttgtag

SEQ ID NO: 239110 - DNA, 56 bp, Artificial
  Synthetic oligonucleotide
tagtttattagacttattagtgttagctttattatggttatggtcaagtgaattta

SEQ ID NO: 239111 - DNA, 60 bp, Artificial
  Synthetic oligonucleotide
tataatctgctttccactaaccgcactaaccgcgtccgaagctttcccaacatcagcagc

SEQ ID NO: 239112 - DNA, 60 bp, Artificial
  Synthetic oligonucleotide
tataattaggaattgatagagctactgatgcatggtcagtcctaacgagttgggaaactc

SEQ ID NO: 239113 - DNA, 59 bp, Artificial
  Synthetic oligonucleotide
aggcctgttttgcttagctgagatccgttataagctccaggttctacagatcttgaggg

SEQ ID NO: 239114 - DNA, 59 bp, Artificial
  Synthetic oligonucleotide
tatacagtagttgtcacattaaaaatacgactctaagattaagtgatgctaggtggact

SEQ ID NO: 239115 - DNA, 60 bp, Artificial
  Synthetic oligonucleotide
ggggtatcaaatgactctctatacccactgcttgtgctgtagaatgtggtcctaataaca

SEQ ID NO: 239116 - DNA, 59 bp, Artificial
  Synthetic oligonucleotide
aggcaggaactgcctgaagtaaagcttgtggactatgctctaatagtctagaacctaaa

SEQ ID NO: 239117 - DNA, 59 bp, Artificial
  Synthetic oligonucleotide
tatagataattttgcaaacaatgcggttagtaactgcaacaatggtggttcctaatagc

SEQ ID NO: 239118 - DNA, 55 bp, Artificial
  Synthetic oligonucleotide
tatagcaaaaaagcccgatatgggcagttccgtttacaacgaacaaatagtatag

SEQ ID NO: 239119 - DNA, 58 bp, Artificial
  Synthetic oligonucleotide
aggagaagttctatccattaacgcaattcttcttgcaacattggtttgtacctctgtg

SEQ ID NO: 239120 - DNA, 51 bp, Artificial
  Synthetic oligonucleotide
actttaagaccggagatacaaaaatggggttgttactttttgtgtctacat

SEQ ID NO: 239121 - DNA, 53 bp, Artificial
  Synthetic oligonucleotide
actttacgcccagagatacaaaggtggggttgttactttttgtgtctacatta

SEQ ID NO: 239122 - DNA, 53 bp, Artificial
  Synthetic oligonucleotide
actttaggaagtttgcttaataacagtttaataattactgattatcttattgt

SEQ ID NO: 239123 - DNA, 60 bp, Artificial
  Synthetic oligonucleotide
tcctttttatcatcctctgtggtcttagtagcatctgcactaccttcaccatctcttaac

SEQ ID NO: 239124 - DNA, 60 bp, Artificial
  Synthetic oligonucleotide
tccttagccattcccctcaaaacaatagcagcagcaatctgatcatccttcgtcatctta

SEQ ID NO: 239125 - DNA, 58 bp, Artificial
  Synthetic oligonucleotide
actttggtagcattgacaactttattgagaggttctgttggcgaaatgattggacgct

SEQ ID NO: 239126 - DNA, 57 bp, Artificial
  Synthetic oligonucleotide
ccgaagtaaagcttgtggaccatacttctagtggatgaccgttcctttgtgtagagc

SEQ ID NO: 239127 - DNA, 57 bp, Artificial
  Synthetic oligonucleotide
tccttaagcaaaaagtagtttttgattgctgtttggaggcacaagcaccataaataa

SEQ ID NO: 239128 - DNA, 54 bp, Artificial
  Synthetic oligonucleotide
acttttaagacatataattttacgacttacgataatgttctacttagcaaagga

SEQ ID NO: 239129 - DNA, 60 bp, Artificial
  Synthetic oligonucleotide
agaaacgccacaattatatttgcaatctcaagtcctaaagtaggacgcatgctacactcc

SEQ ID NO: 239130 - DNA, 54 bp, Artificial
  Synthetic oligonucleotide
agaaagggaaggctgagggggctattaaagaagttagcgagttgttggataagc

SEQ ID NO: 239131 - DNA, 58 bp, Artificial
  Synthetic oligonucleotide
agaaatagcttcttgtttcatcccatgatagctttttaggctctacaagaaacgggca

SEQ ID NO: 239132 - DNA, 56 bp, Artificial
  Synthetic oligonucleotide
tcctgggctactgatttgttgtaaagctttgggtttggatgaaactttgatcctaa

SEQ ID NO: 239133 - DNA, 54 bp, Artificial
  Synthetic oligonucleotide
agaaattaaggtggttgggggcaactgtcccgaagtaaagcttgtagattatgc

SEQ ID NO: 239134 - DNA, 60 bp, Artificial
  Synthetic oligonucleotide
tcctgagcaccattagcatcctgaacagcaaacttcccatccttagccatccctcttagc

SEQ ID NO: 239135 - DNA, 50 bp, Artificial
  Synthetic oligonucleotide
agaaccttttaaaaaatgataacggattaaaacccgaatctatagcttcg

SEQ ID NO: 239136 - DNA, 60 bp, Artificial
  Synthetic oligonucleotide
agaagattcaatttccgtcataatgtttctagcttcactagcttcattatcttggatatt

SEQ ID NO: 239137 - DNA, 56 bp, Artificial
  Synthetic oligonucleotide
ccgaagagtcagcattaagactttttgaattcttaaccaatctacgagtcaaagga

SEQ ID NO: 239138 - DNA, 55 bp, Artificial
  Synthetic oligonucleotide
agaagtaataaaatatgacttagagtttttaaaggacgcatttgatctgattaaa

SEQ ID NO: 239139 - DNA, 60 bp, Artificial
  Synthetic oligonucleotide
tcctgaattattaattcaggagtagccgttatgcttcttgtagcatctgttattagataa

SEQ ID NO: 239140 - DNA, 57 bp, Artificial
  Synthetic oligonucleotide
actgatcctcttgctactgataaagaaggtattggtatgctatttggggctaaaaat

SEQ ID NO: 239141 - DNA, 56 bp, Artificial
  Synthetic oligonucleotide
actgattgattcaccccgtattaatttatatggggggataaggcaagtgattttga

SEQ ID NO: 239142 - DNA, 56 bp, Artificial
  Synthetic oligonucleotide
tcgtagtatatcacatattcagtctaattcccttgaaactaccacctttgtttatt

SEQ ID NO: 239143 - DNA, 57 bp, Artificial
  Synthetic oligonucleotide
tcggtggtatacaactacatagtgggaaactagaacttacaagtgagcctacaacaa

SEQ ID NO: 239144 - DNA, 60 bp, Artificial
  Synthetic oligonucleotide
tcggatttgtagcctctgcaggcttctctccatcctgctcagcctcaccagcagccttaa

SEQ ID NO: 239145 - DNA, 56 bp, Artificial
  Synthetic oligonucleotide
tcggattggaaaagtaatcttggacttagtaatgaagagcttgatacactaacttt

SEQ ID NO: 239146 - DNA, 60 bp, Artificial
  Synthetic oligonucleotide
actgctcttgttgtaggctcacttgtaagctcaagtttgccactatgcagctgtatatac

SEQ ID NO: 239147 - DNA, 57 bp, Artificial
  Synthetic oligonucleotide
actgcttggcttaccatcccagtatcttcctatcggcaataaaacttcaggtactac

SEQ ID NO: 239148 - DNA, 54 bp, Artificial
  Synthetic oligonucleotide
ggggttttaggaagcgatggtattgattcacaagaaagtagtagtaagagtacc

SEQ ID NO: 239149 - DNA, 56 bp, Artificial
  Synthetic oligonucleotide
actggactttgcaacaggaacaggtacattcttacttgaagttattcgtactataa

SEQ ID NO: 239150 - DNA, 57 bp, Artificial
  Synthetic oligonucleotide
actggttaagctataaggcaatactattttttatgcactcatacgcttgaattttac

SEQ ID NO: 239151 - DNA, 60 bp, Artificial
  Synthetic oligonucleotide
tcgcattatctcagcttacaagagatacggaagggcgtgagcctaatcttgctagtctaa

SEQ ID NO: 239152 - DNA, 57 bp, Artificial
  Synthetic oligonucleotide
acttaatcatacctttgccaacagatcaatgggcaattgaaagtttagacctaataa

SEQ ID NO: 239153 - DNA, 57 bp, Artificial
  Synthetic oligonucleotide
acttaatgatgaccgcactaagtttattagatttgcagaacatagaattaaaagttc

SEQ ID NO: 239154 - DNA, 58 bp, Artificial
  Synthetic oligonucleotide
tcgagttctcaagaaaaaggattcgttgccaaaattgctataggtagcaccattggaa

SEQ ID NO: 239155 - DNA, 59 bp, Artificial
  Synthetic oligonucleotide
acttcattcagaagtattattgctattaggaatagaccaatttgcactaagtagacaaa

SEQ ID NO: 239156 - DNA, 58 bp, Artificial
  Synthetic oligonucleotide
acttcccagcagcatcaacaatcccctttatccccttcgcaatctctttaacactctc

SEQ ID NO: 239157 - DNA, 59 bp, Artificial
  Synthetic oligonucleotide
acttgaatgttttgcaaattccaaagccgctaatttagcattcctaattgaatctgcta

SEQ ID NO: 239158 - DNA, 55 bp, Artificial
  Synthetic oligonucleotide
acttggaactcaagtattagagggaatactcctactaactggatatattttcgaa

SEQ ID NO: 239159 - DNA, 57 bp, Artificial
  Synthetic oligonucleotide
gggtaatttaaagattaatggaactaaattcgaaaatcatatgcacagttctggcac

SEQ ID NO: 239160 - DNA, 55 bp, Artificial
  Synthetic oligonucleotide
tcctagacataaataataacggtgttattatcaaggccggaggtgggccaccaac

SEQ ID NO: 239161 - DNA, 60 bp, Artificial
  Synthetic oligonucleotide
tcctagtacctttttctcagtacttgctgctgatgccttaacaatattcactatcagcat

SEQ ID NO: 239162 - DNA, 54 bp, Artificial
  Synthetic oligonucleotide
tttggggaaatggtggggagtgtattgggattgaatttggagagtaagaaatcg

SEQ ID NO: 239163 - DNA, 59 bp, Artificial
  Synthetic oligonucleotide
ggattaatttactatgtcttgttagcagttcttttataagcaacattccagcaagatat

SEQ ID NO: 239164 - DNA, 50 bp, Artificial
  Synthetic oligonucleotide
cttagaatcgggggctttaccagtacctaatagtaacgaaataattccct

SEQ ID NO: 239165 - DNA, 54 bp, Artificial
  Synthetic oligonucleotide
tttgttaaatgtaggcctcccccgaaattaatgtactcttcactaagagtacta

SEQ ID NO: 239166 - DNA, 58 bp, Artificial
  Synthetic oligonucleotide
taagtcatttcttgcaaattctagcagttcttcggttctttggtttggagagtgtgat

SEQ ID NO: 239167 - DNA, 59 bp, Artificial
  Synthetic oligonucleotide
ggtcgtgcgttagcttatgatactaagggtagattattggttcatcatacagtactgcc

SEQ ID NO: 239168 - DNA, 55 bp, Artificial
  Synthetic oligonucleotide
cttgttttgctctagaaccatcttgtggaaagctccgttaggaaatatttcccca

SEQ ID NO: 239169 - DNA, 59 bp, Artificial
  Synthetic oligonucleotide
attataaacaaacaatggataccttgataacatcacattcagaggcatgagtatacatt

SEQ ID NO: 239170 - DNA, 57 bp, Artificial
  Synthetic oligonucleotide
cagttactaggcctgtaaacaaaaaaggccagcgaagcatcaaatgcttcgcctaac

SEQ ID NO: 239171 - DNA, 54 bp, Artificial
  Synthetic oligonucleotide
ccctgtagacaaaaaagccgcaataggggcaggggttgtccatggagtcaaggt

SEQ ID NO: 239172 - DNA, 57 bp, Artificial
  Synthetic oligonucleotide
gctaaccccaatgagttcttttattggggctccattcaaatccactaattccatgta

SEQ ID NO: 239173 - DNA, 59 bp, Artificial
  Synthetic oligonucleotide
cacaatgatagcagggctaatatttgctttcatttctaaatagctactacctcacttaa

SEQ ID NO: 239174 - DNA, 57 bp, Artificial
  Synthetic oligonucleotide
aaatagtagtcataatctgctaacagtactattaatgatggtttaatttttgagtta

SEQ ID NO: 239175 - DNA, 57 bp, Artificial
  Synthetic oligonucleotide
cctaatctacatataagtttacttaatagctttataagcctcctcaagttctacagc

SEQ ID NO: 239176 - DNA, 58 bp, Artificial
  Synthetic oligonucleotide
accaaattgatttaaaggcttgattttgctctatccaagatcatttgagctttaataa

SEQ ID NO: 239177 - DNA, 58 bp, Artificial
  Synthetic oligonucleotide
atctgagttcccaccattacatgctagtaacagataataagggttgtactcgttgtaa

SEQ ID NO: 239178 - DNA, 59 bp, Artificial
  Synthetic oligonucleotide
gtagagaatcttagctagtgtagcttcaaagaagacatgacgcttacttataaataagg

SEQ ID NO: 239179 - DNA, 52 bp, Artificial
  Synthetic oligonucleotide
aatttaggtactataaaattggtttggtctacttattaacttagatggtaca

SEQ ID NO: 239180 - DNA, 54 bp, Artificial
  Synthetic oligonucleotide
caagttaaatcttttctaagggttcttagtgcaatctccttaagtccatcttgg

SEQ ID NO: 239181 - DNA, 59 bp, Artificial
  Synthetic oligonucleotide
atccctactaatcatactgctaagataaacgcttattgctctagccttactctgagggt

SEQ ID NO: 239182 - DNA, 56 bp, Artificial
  Synthetic oligonucleotide
gggtctattgtaatatacaacaacctagctcaaccaataaaacaagattgatttgg

SEQ ID NO: 239183 - DNA, 59 bp, Artificial
  Synthetic oligonucleotide
taatatcttgcaaagcaagaccttcacccaacatatctgtcatcaaagttaacttagaa

SEQ ID NO: 239184 - DNA, 56 bp, Artificial
  Synthetic oligonucleotide
caatagagtgattacggattctaaggaagttggaaatttgtttggggagactgcta

SEQ ID NO: 239185 - DNA, 54 bp, Artificial
  Synthetic oligonucleotide
ggaactttatctactatctataccggagaagatgaaaagtttagtggtcttagt

SEQ ID NO: 239186 - DNA, 58 bp, Artificial
  Synthetic oligonucleotide
ccgtccatgctgtcaacgagagcgccttttccgtaagaacctcggcttattgctcctg

SEQ ID NO: 239187 - DNA, 52 bp, Artificial
  Synthetic oligonucleotide
accattttgtaccatctaagttaataagtagaccaaaccaattttatagtac

SEQ ID NO: 239188 - DNA, 59 bp, Artificial
  Synthetic oligonucleotide
tttcgtgagctttttgaatagcctcaaattcttcagatttgatgacaatttctctaatg

SEQ ID NO: 239189 - DNA, 57 bp, Artificial
  Synthetic oligonucleotide
ccttgattataccataagcatccgttatagaagtaggttctggcgttgtaacaataa

SEQ ID NO: 239190 - DNA, 59 bp, Artificial
  Synthetic oligonucleotide
aagacatagaaacttattacggaatattgacttaataagtattgagataagcaatatca

SEQ ID NO: 239191 - DNA, 59 bp, Artificial
  Synthetic oligonucleotide
cataagaccccttagaagtattaagacgcgacatatgtgcataaagagtcgcaagccca

SEQ ID NO: 239192 - DNA, 59 bp, Artificial
  Synthetic oligonucleotide
tagaagttcgcctgctaatgctagtgattcgctttattgtgctagacttgggtctaacg

SEQ ID NO: 239193 - DNA, 59 bp, Artificial
  Synthetic oligonucleotide
gggtggcacttattgggctgctattgaagaacacatttcttccaaaagcacaacttaca

SEQ ID NO: 239194 - DNA, 54 bp, Artificial
  Synthetic oligonucleotide
ccttagtactctttaatccatctccaatagtcttaaaatgttcacccactttac

SEQ ID NO: 239195 - DNA, 57 bp, Artificial
  Synthetic oligonucleotide
ttgatcctaagaaaagggcaatatcagatagattaaagggactactaccaacaagtg

SEQ ID NO: 239196 - DNA, 56 bp, Artificial
  Synthetic oligonucleotide
gattataatgactggtttgagattaatccttactttaaatctgttttagggatgac

SEQ ID NO: 239197 - DNA, 58 bp, Artificial
  Synthetic oligonucleotide
ggttagaagagcgccaaggtttgctcaacctggagaatcgggcagtagcttaaatgta

SEQ ID NO: 239198 - DNA, 54 bp, Artificial
  Synthetic oligonucleotide
tagtgtgaagtttttatcaattgaaaaccaagagtggcttattagtaaaaagat

SEQ ID NO: 239199 - DNA, 57 bp, Artificial
  Synthetic oligonucleotide
ctttattagatctaggagtagttctagcttcttttaaataagaggtagctgtgctaa

SEQ ID NO: 239200 - DNA, 59 bp, Artificial
  Synthetic oligonucleotide
ccaagagcaagctcacgaattattaacgcagatgcctgagaaccagcattacccgaagt

SEQ ID NO: 239201 - DNA, 54 bp, Artificial
  Synthetic oligonucleotide
ccttaaatacttactaaaaacctatgatagcgtagtgcttggatcttaggtatt

SEQ ID NO: 239202 - DNA, 57 bp, Artificial
  Synthetic oligonucleotide
agggacaacagaactggcggatattcacaaaacagggacaacagaactggcggatat

SEQ ID NO: 239203 - DNA, 52 bp, Artificial
  Synthetic oligonucleotide
tttctattaggttaaagtttatagattttcaaacagtagtactaaaaagaga

SEQ ID NO: 239204 - DNA, 48 bp, Artificial
  Synthetic oligonucleotide
ccctagggttcttaaaccatttcgaatagtctaaaaaggttcccccac

SEQ ID NO: 239205 - DNA, 55 bp, Artificial
  Synthetic oligonucleotide
cttaaagactaagtaggcaatgtaaatcccaaagagacaaatcgttatttaagca

SEQ ID NO: 239206 - DNA, 57 bp, Artificial
  Synthetic oligonucleotide
ctttctttactactatgttgcaatactattgctagtttaccagatgaaccaaaacca

SEQ ID NO: 239207 - DNA, 59 bp, Artificial
  Synthetic oligonucleotide
aacccctatcatcataaagcctacgcctgatttccattctttggagatcacaatacagg

SEQ ID NO: 239208 - DNA, 59 bp, Artificial
  Synthetic oligonucleotide
cacctggcgttatcaacattaagctcaaaagcgatatcaaaactaatgttatagcattc

SEQ ID NO: 239209 - DNA, 52 bp, Artificial
  Synthetic oligonucleotide
cgattatgggagctaaaggtaaaagggggattcttagtggaatgaagggatt

SEQ ID NO: 239210 - DNA, 54 bp, Artificial
  Synthetic oligonucleotide
ggctcaacttaacaatattcttcaaacaataccgggatttaatcgggaaattga

SEQ ID NO: 239211 - DNA, 59 bp, Artificial
  Synthetic oligonucleotide
tctacaaattcatttatccaatcaaactcaactccagattgataaaaatcactctttac

SEQ ID NO: 239212 - DNA, 58 bp, Artificial
  Synthetic oligonucleotide
aaagctaacgcttataagaatcgattttatgagcattaataattgtcttaatcaaata

SEQ ID NO: 239213 - DNA, 59 bp, Artificial
  Synthetic oligonucleotide
cctgagaaaactttagctgaatatataagcgatgccattgactgtaaagaaaatccttc

SEQ ID NO: 239214 - DNA, 59 bp, Artificial
  Synthetic oligonucleotide
cctgaagaagtagctattcttgaatgactaattttgttagcaacatcaagtaaagaagc

SEQ ID NO: 239215 - DNA, 60 bp, Artificial
  Synthetic oligonucleotide
ccctacacccacttattgagagtagatgtacgaatcagccagatattggatcaatttgtt

SEQ ID NO: 239216 - DNA, 55 bp, Artificial
  Synthetic oligonucleotide
cattaagattctaaatgatcttggcctaattcaaaccgtactccgaaaattcgga

SEQ ID NO: 239217 - DNA, 59 bp, Artificial
  Synthetic oligonucleotide
ccagaatacttaatatctggagaatataactcctctatacatgaatacagccaatgaac

SEQ ID NO: 239218 - DNA, 56 bp, Artificial
  Synthetic oligonucleotide
aacgatatggaaagaagcaaaattggttggagtaactataaaattcagaggaagca

SEQ ID NO: 239219 - DNA, 59 bp, Artificial
  Synthetic oligonucleotide
cggtgcccctgcagccacttattgcgagtaaatgtaaaaaccaaccagatattggatca

SEQ ID NO: 239220 - DNA, 57 bp, Artificial
  Synthetic oligonucleotide
gcctaaagacttacaagcacgatcacattaaaggtagtcctaaaatgatagtactac

SEQ ID NO: 239221 - DNA, 57 bp, Artificial
  Synthetic oligonucleotide
cggttctaaacgtaatatagtgcaacaatctaagtcctaaaagatcaaacatatctc

SEQ ID NO: 239222 - DNA, 59 bp, Artificial
  Synthetic oligonucleotide
tcctggtgcaaataataaagaatccctaccaaattcaagtccagcaataatgcaaaatg

SEQ ID NO: 239223 - DNA, 53 bp, Artificial
  Synthetic oligonucleotide
atctgacaaaaaggcaacttatgagttaaaagtcggaacggtagaatacttta

SEQ ID NO: 239224 - DNA, 52 bp, Artificial
  Synthetic oligonucleotide
gatgcttgcttaaaggccgaaaactcaaaattaaaacttatttctacggtta

SEQ ID NO: 239225 - DNA, 58 bp, Artificial
  Synthetic oligonucleotide
cgtcaatttgacgcattctaggttggatctaaatcaagtaagttattatacaccacta

SEQ ID NO: 239226 - DNA, 57 bp, Artificial
  Synthetic oligonucleotide
gggttttaggagatgttaatttaatgctcttgaggtattctggtggtgcagctttaa

SEQ ID NO: 239227 - DNA, 55 bp, Artificial
  Synthetic oligonucleotide
gtttctatgggttcaagtacaaccaatcattacttagcaaatgggattaataaaa

SEQ ID NO: 239228 - DNA, 59 bp, Artificial
  Synthetic oligonucleotide
cacaaaacttcattctgaagtgttattgctattaggaatagaccaatttgcactaagca

SEQ ID NO: 239229 - DNA, 58 bp, Artificial
  Synthetic oligonucleotide
tcaagaatgctaaaagcttgtttgagaatgctaagaataaacaagaagaacttaacga

SEQ ID NO: 239230 - DNA, 51 bp, Artificial
  Synthetic oligonucleotide
aagggaaatttaagcgaaattggcattaacgaaaatagcgttttattagac

SEQ ID NO: 239231 - DNA, 53 bp, Artificial
  Synthetic oligonucleotide
aaaagaagattttagtagtgtagtaaaatcctaattagtatagtattgtagta

SEQ ID NO: 239232 - DNA, 59 bp, Artificial
  Synthetic oligonucleotide
ggtgctaacaaaatacagcaacaaaattgaagataatgaacagtatgggatgaaatggg

SEQ ID NO: 239233 - DNA, 59 bp, Artificial
  Synthetic oligonucleotide
gcacatgacaaatttgctaaatagcgctagtgaattaaattcaagaggaattgatgacg

SEQ ID NO: 239234 - DNA, 57 bp, Artificial
  Synthetic oligonucleotide
gaactagcgatgaatacttgtgtaaagcggcaaatataattatcgaaaataaaggag

SEQ ID NO: 239235 - DNA, 59 bp, Artificial
  Synthetic oligonucleotide
tgattctaaatgcccttttaatatacttaaagtcatcttagctgaatcaactgccgctc

SEQ ID NO: 239236 - DNA, 59 bp, Artificial
  Synthetic oligonucleotide
ttatattggcagcacggtgaattgcttagatctcaggtactcggggaaatatacttgag

SEQ ID NO: 239237 - DNA, 55 bp, Artificial
  Synthetic oligonucleotide
cccgcttcttgtagtagagtaaaactttaaaagccatcatgggatgaagaaagaa

SEQ ID NO: 239238 - DNA, 53 bp, Artificial
  Synthetic oligonucleotide
ccgtaaaatttaccgccttcgctagtagccttagaaagagcattgtttaaggc

SEQ ID NO: 239239 - DNA, 56 bp, Artificial
  Synthetic oligonucleotide
cttagcgaatctatgtacccgttagaaacggccttagaattgccaagtgaatccca

SEQ ID NO: 239240 - DNA, 53 bp, Artificial
  Synthetic oligonucleotide
atgaaacaaaagggaaaggtttaattgataaatctgatgtctctaaatttagg

SEQ ID NO: 239241 - DNA, 59 bp, Artificial
  Synthetic oligonucleotide
gctagaagtcctttaaaagcgtatgtaccaattccagaaattgatattattagcatggc

SEQ ID NO: 239242 - DNA, 58 bp, Artificial
  Synthetic oligonucleotide
caaaatttgagtgttggatggtttacatatgaaatgacaagtaaaactgtcactcgga

SEQ ID NO: 239243 - DNA, 59 bp, Artificial
  Synthetic oligonucleotide
cactaattatgctggtgatgctaattcgtctagtaattgttttgtgtataatatgccgg

SEQ ID NO: 239244 - DNA, 58 bp, Artificial
  Synthetic oligonucleotide
tgtgctgtagaatgtagttctaataacatgtaaaacttgcccctctacaactgtaaac

SEQ ID NO: 239245 - DNA, 58 bp, Artificial
  Synthetic oligonucleotide
gactttcaaatgcccaacgttcagcagtcattggtactattatataatcacttacaac

SEQ ID NO: 239246 - DNA, 58 bp, Artificial
  Synthetic oligonucleotide
cgatgatgttttgcttcatagctggatcagtatgacttctatagaatctttacgtatg

SEQ ID NO: 239247 - DNA, 58 bp, Artificial
  Synthetic oligonucleotide
aatcctccgccttgcactactcttccgctgccgttacacatgttacatatcgaaggac

SEQ ID NO: 239248 - DNA, 58 bp, Artificial
  Synthetic oligonucleotide
cccgccttctctgcagcatcaacaatcccctttatccccctagcaatcccattaacac

SEQ ID NO: 239249 - DNA, 56 bp, Artificial
  Synthetic oligonucleotide
cacacttatactgttttaagccccctggatcctcatgaattaaaggaattcgcaaa

SEQ ID NO: 239250 - DNA, 58 bp, Artificial
  Synthetic oligonucleotide
tcaaatcattctctaaaatctcaaaaagttgccatagaacacatactaaaaaatgtct

SEQ ID NO: 239251 - DNA, 56 bp, Artificial
  Synthetic oligonucleotide
ctttgcttcttagcaacatttacacgtaaactctaaaacacatcaccattattgtt

SEQ ID NO: 239252 - DNA, 58 bp, Artificial
  Synthetic oligonucleotide
tgccgcaagatacaattagtgtaagtttaattgactctagaattcaagcaagcaagcc

SEQ ID NO: 239253 - DNA, 58 bp, Artificial
  Synthetic oligonucleotide
catcccccgacacagtgtcttattaacagcactctcaacagtactcttcaaacccttc

SEQ ID NO: 239254 - DNA, 58 bp, Artificial
  Synthetic oligonucleotide
gatttctggtatacagaattaaccatcacgaacgaaacagctctaatcttaacagacg

SEQ ID NO: 239255 - DNA, 54 bp, Artificial
  Synthetic oligonucleotide
ctcgccccacctaaaagacaatagttttacacaagctaactatttaatgcttta

SEQ ID NO: 239256 - DNA, 58 bp, Artificial
  Synthetic oligonucleotide
gcaagccttgctgtatgaatttggatacgcatacactttctcttcagtcggcaaacta

SEQ ID NO: 239257 - DNA, 58 bp, Artificial
  Synthetic oligonucleotide
tagtccttctactcttattattggcaatggggatgttttgagcctcaaggatgctaga

SEQ ID NO: 239258 - DNA, 58 bp, Artificial
  Synthetic oligonucleotide
tataggttggatagttgaaaggcgaattagatgaattagcgttggtgatggtgcgtgt

SEQ ID NO: 239259 - DNA, 55 bp, Artificial
  Synthetic oligonucleotide
cccgagacactttctatgatggataatattttggcaaacgaatttttaagcgtct

SEQ ID NO: 239260 - DNA, 58 bp, Artificial
  Synthetic oligonucleotide
atccagtgcttgtgctgtagaatgtggtcctaataacatgctctttttgaccatctac

SEQ ID NO: 239261 - DNA, 55 bp, Artificial
  Synthetic oligonucleotide
gaattagctgtaattacaagtctttcgtttaaggacactcctttcattgacgaag

SEQ ID NO: 239262 - DNA, 51 bp, Artificial
  Synthetic oligonucleotide
aatcggtttttgcgtttggatcaactttcttgtctctttggggttcgggac

SEQ ID NO: 239263 - DNA, 54 bp, Artificial
  Synthetic oligonucleotide
gtccttacaaagcggattcattactttacacagaaattctgcgtttaactttgt

SEQ ID NO: 239264 - DNA, 58 bp, Artificial
  Synthetic oligonucleotide
ctaaaaaatattgcataggagttgctcgttaatgcaggtaaatcatgttagaactaaa

SEQ ID NO: 239265 - DNA, 58 bp, Artificial
  Synthetic oligonucleotide
taatcaggtgatccaaagccctctttgcttcgccttggctcatgctgaatagcaatac

SEQ ID NO: 239266 - DNA, 58 bp, Artificial
  Synthetic oligonucleotide
aaattctgatacttatatccatatccctgaagatttttgtcaatgactgctagattca

SEQ ID NO: 239267 - DNA, 58 bp, Artificial
  Synthetic oligonucleotide
ctacaatccagtaatgactggtgaacatatatcattaaacggtggaattctaacatcc

SEQ ID NO: 239268 - DNA, 58 bp, Artificial
  Synthetic oligonucleotide
gtaagggccaaaatccatttaagatgagcatactaaggtagatcaatcatgatctaac

SEQ ID NO: 239269 - DNA, 53 bp, Artificial
  Synthetic oligonucleotide
taaaattatgaaagagtatttaggcactcttaaaaggggtgaaaatgcttaaa

SEQ ID NO: 239270 - DNA, 53 bp, Artificial
  Synthetic oligonucleotide
ggtagaaaactatctaccaacagtccccaacacccctattaatcctctccaaa

SEQ ID NO: 239271 - DNA, 58 bp, Artificial
  Synthetic oligonucleotide
tatagctagtccatgaacccgcattaactttgccaaccccacaattaatagctataac

SEQ ID NO: 239272 - DNA, 58 bp, Artificial
  Synthetic oligonucleotide
gtgaccgccattagagcttaattaagtctttgcctcgtgtaaatgcttaattaagctc

SEQ ID NO: 239273 - DNA, 55 bp, Artificial
  Synthetic oligonucleotide
cgtgtccctattcaacggggacacgggcattatttgaaaacgctatgttattaga

SEQ ID NO: 239274 - DNA, 56 bp, Artificial
  Synthetic oligonucleotide
cacggcatgcctccaaaaccgcccgcttatatttactatacaaaagcccccaatga

SEQ ID NO: 239275 - DNA, 57 bp, Artificial
  Synthetic oligonucleotide
gcttatcaggcaaataacaccccaataaaatgcccatctgaataccaaaataaacta

SEQ ID NO: 239276 - DNA, 58 bp, Artificial
  Synthetic oligonucleotide
cgctggagttcacatatgccaacaaccaatgagcaagctctacattaacggaggagat

SEQ ID NO: 239277 - DNA, 58 bp, Artificial
  Synthetic oligonucleotide
cttagccccaacaattatcttatcaagtatctcactaaccaatttctttattgcagtc

SEQ ID NO: 239278 - DNA, 52 bp, Artificial
  Synthetic oligonucleotide
aacaaaacatactctttattaaaacctccttgaattccacaaactaaatatg

SEQ ID NO: 239279 - DNA, 55 bp, Artificial
  Synthetic oligonucleotide
gaatacgtaagctacaaccccgtaatgacgggagaacatatctcattaaacggag

SEQ ID NO: 239280 - DNA, 58 bp, Artificial
  Synthetic oligonucleotide
gaaacataaacgatatttggagtgcaatattgcttgagataaaaagttctaatcttac

SEQ ID NO: 239281 - DNA, 57 bp, Artificial
  Synthetic oligonucleotide
gtatttcactaactaattcaagagatctattaactcatatttacgacaaaagtatag

SEQ ID NO: 239282 - DNA, 59 bp, Artificial
  Synthetic oligonucleotide
cccgaattaaagccagaagatttggattatgagtatatatactgctatgttaaagactg

SEQ ID NO: 239283 - DNA, 58 bp, Artificial
  Synthetic oligonucleotide
gtccattcatggtattagttgatcctctaaccagcataaaatttgttgaaccttatgg

SEQ ID NO: 239284 - DNA, 58 bp, Artificial
  Synthetic oligonucleotide
ctaactataggatatcttaacgaaaaatcctgtgcaagccttacaagagcctcataaa

SEQ ID NO: 239285 - DNA, 55 bp, Artificial
  Synthetic oligonucleotide
ggttctgagtgatctaaagaaccgattaagttgtttggtaggataaaaaatgatc

SEQ ID NO: 239286 - DNA, 55 bp, Artificial
  Synthetic oligonucleotide
ctaagctttaaattccctggcaaacttttaacactcaaatctagaatatttctca

SEQ ID NO: 239287 - DNA, 51 bp, Artificial
  Synthetic oligonucleotide
ttaaacttttgtggtaaattagggacttgtcctattttgtgtccaaacttg

SEQ ID NO: 239288 - DNA, 54 bp, Artificial
  Synthetic oligonucleotide
ttggatgcttttgtgtcttttggagagctattaaaagggacgtttggtattact

SEQ ID NO: 239289 - DNA, 53 bp, Artificial
  Synthetic oligonucleotide
gaagtgttcaagttttactccaaagatttacagcccgaaggaattattactaa

SEQ ID NO: 239290 - DNA, 58 bp, Artificial
  Synthetic oligonucleotide
ttactaaatatatgctttcttagcaagctaagaccaaatatcacaatagaagtaattc

SEQ ID NO: 239291 - DNA, 56 bp, Artificial
  Synthetic oligonucleotide
acaacttccccgcattctcgttaccctccttagcaccaccagcagtattcaacttc

SEQ ID NO: 239292 - DNA, 58 bp, Artificial
  Synthetic oligonucleotide
tagatccctactaatagaagcaagaacacgtatagttgcagcattatagtaacctcac

SEQ ID NO: 239293 - DNA, 60 bp, Artificial
  Synthetic oligonucleotide
ccccttcttcgccagaatacttaatatctggagaatataactcctctatacatgaataca

SEQ ID NO: 239294 - DNA, 58 bp, Artificial
  Synthetic oligonucleotide
gctgctccattctgtctagcctgcccaatagccgcagcaatcggattcgtagccgcac

SEQ ID NO: 239295 - DNA, 57 bp, Artificial
  Synthetic oligonucleotide
ggacaaccaacaatactttagagaatgcaattgtaaagtataaggaagccataagta

SEQ ID NO: 239296 - DNA, 56 bp, Artificial
  Synthetic oligonucleotide
tcaattttagtaagccttcctccgaatttataacttattgctagcatactaattaa

SEQ ID NO: 239297 - DNA, 56 bp, Artificial
  Synthetic oligonucleotide
cattaaaaatacaactctgaaattaagtgatactaggtggacttgtaggagttgta

SEQ ID NO: 239298 - DNA, 57 bp, Artificial
  Synthetic oligonucleotide
gaatggttaatggagtattaacttctcttaatggagagagtggtgaattaaaggaga

SEQ ID NO: 239299 - DNA, 55 bp, Artificial
  Synthetic oligonucleotide
aatttagacattaagattgataacgtagaaaagaatttaaatgccaaaatagatg

SEQ ID NO: 239300 - DNA, 58 bp, Artificial
  Synthetic oligonucleotide
cttataagccccgattctaatagagagtctccaggatattatattgaagagactactt

SEQ ID NO: 239301 - DNA, 58 bp, Artificial
  Synthetic oligonucleotide
cgcatatgatgcaagcccataacgagacaaacctccataagaaggcttaaacccaatt

SEQ ID NO: 239302 - DNA, 56 bp, Artificial
  Synthetic oligonucleotide
tcaatagtagtggtgctccaacagttacaactgggaaaacgggtcctcttatttga

SEQ ID NO: 239303 - DNA, 58 bp, Artificial
  Synthetic oligonucleotide
gatttttatctgcgatataaaattgagaaagcttcattacttcaacaggacgacgtcc

SEQ ID NO: 239304 - DNA, 56 bp, Artificial
  Synthetic oligonucleotide
ggtatagtgtgtaattattagagcgcaagaaaaagaccattagcaaaagctaacgg

SEQ ID NO: 239305 - DNA, 58 bp, Artificial
  Synthetic oligonucleotide
tgatttgtgttacaatgtatttagcgggtgagtaaattatgaaatcggcattgacaaa

SEQ ID NO: 239306 - DNA, 54 bp, Artificial
  Synthetic oligonucleotide
gctacatagtttacttatgggaaaatctatctactttagtaaacttgtagttag

SEQ ID NO: 239307 - DNA, 58 bp, Artificial
  Synthetic oligonucleotide
tgttgtggaaatgtatttacactgttgcattgtaatttatctgtatgaattcgtgtat

SEQ ID NO: 239308 - DNA, 58 bp, Artificial
  Synthetic oligonucleotide
tatttccatacagccttgcatcatattgacggctggttttgtattcgttatataaata

SEQ ID NO: 239309 - DNA, 58 bp, Artificial
  Synthetic oligonucleotide
aagtgcatacaaatcttctaaattcacttggttactagattctacacgagaatatact

SEQ ID NO: 239310 - DNA, 58 bp, Artificial
  Synthetic oligonucleotide
tgatgatgaagcgtagtgatggcgttgttagcgattataaacttatttggcaggaacg

SEQ ID NO: 239311 - DNA, 57 bp, Artificial
  Synthetic oligonucleotide
taacactattggtttagggcttaatttgctatccaaatgaaccaatatagctaaagc

SEQ ID NO: 239312 - DNA, 58 bp, Artificial
  Synthetic oligonucleotide
gcgctgatgtttttgttgcggttgctgccagtctatcttgtagtgaatttagtcaagc

SEQ ID NO: 239313 - DNA, 56 bp, Artificial
  Synthetic oligonucleotide
ccgttggttttgttctcttatttgcattgctgatcgttaaagtattttatatgtcc

SEQ ID NO: 239314 - DNA, 58 bp, Artificial
  Synthetic oligonucleotide
ctattcataagaggctgatagttcatatctaacttcaaccgctacagttgatattgac

SEQ ID NO: 239315 - DNA, 50 bp, Artificial
  Synthetic oligonucleotide
ggtatatgtaatttcgactttaagttaaaaatccgattgttcttttaact

SEQ ID NO: 239316 - DNA, 57 bp, Artificial
  Synthetic oligonucleotide
ctcatgcttatatcaactatagttaaaagataccagtagtaattgttattttaaaga

SEQ ID NO: 239317 - DNA, 56 bp, Artificial
  Synthetic oligonucleotide
ctgcggcaatgggtcctaatagttaacagcccccatattgggggctttaatcttgc

SEQ ID NO: 239318 - DNA, 58 bp, Artificial
  Synthetic oligonucleotide
caccagcggagttataatggctgtattggggatatctagattaagttatggtacgtgg

SEQ ID NO: 239319 - DNA, 58 bp, Artificial
  Synthetic oligonucleotide
gataagaatcataatagcattattagccatcgtatcatgcagtgtccaacaaaaccac

SEQ ID NO: 239320 - DNA, 58 bp, Artificial
  Synthetic oligonucleotide
tatacattcatgatgtaatagctgattatggcaataacaactctgatgttgaatgtac

SEQ ID NO: 239321 - DNA, 58 bp, Artificial
  Synthetic oligonucleotide
tatagactctgatttggggccaaaacatatttcaggctcaaatactattgcatacact

SEQ ID NO: 239322 - DNA, 53 bp, Artificial
  Synthetic oligonucleotide
cttgtgtgtgtaaaatgttttggagttccaaaatataagatttattttaagtg

SEQ ID NO: 239323 - DNA, 58 bp, Artificial
  Synthetic oligonucleotide
cctattgcaacaaacatagcaacatacgttggaatgaaaactgcaggaattgcgggag

SEQ ID NO: 239324 - DNA, 54 bp, Artificial
  Synthetic oligonucleotide
aaacaagactaataaataactagtcttgttcgctttatgcttaagtggttataa

SEQ ID NO: 239325 - DNA, 58 bp, Artificial
  Synthetic oligonucleotide
caatttagaaaaagaagacttcctgcgaacagcaattgtgcttaaaggcgatataaga

SEQ ID NO: 239326 - DNA, 57 bp, Artificial
  Synthetic oligonucleotide
ccaccacccaaatccacaaatctggtgtatctagaaacaaaatccatagttacaaca

SEQ ID NO: 239327 - DNA, 58 bp, Artificial
  Synthetic oligonucleotide
agtgtcaaaactaaatgatggacgcttaacttctgctataagcaagatatcttcagcc

SEQ ID NO: 239328 - DNA, 58 bp, Artificial
  Synthetic oligonucleotide
gtctctgtcctctaaatacagtgtatgtacattgaaattctctaaaacggtcttgatc

SEQ ID NO: 239329 - DNA, 58 bp, Artificial
  Synthetic oligonucleotide
actctacaaaccctacattaaaatctgcttagcatagctaagtatgctcaacaacatc

SEQ ID NO: 239330 - DNA, 58 bp, Artificial
  Synthetic oligonucleotide
gtccaaggagattatattggtggtggcgcagtgcttggatctcagttattaggaggca

SEQ ID NO: 239331 - DNA, 53 bp, Artificial
  Synthetic oligonucleotide
gggttttagcagggtaaatagcattgttgttcaggttggacgtagtggtaaaa

SEQ ID NO: 239332 - DNA, 58 bp, Artificial
  Synthetic oligonucleotide
ttttttaacttcagccagatcatatgcagtcatatccttaaccgatggcagagttgct

SEQ ID NO: 239333 - DNA, 58 bp, Artificial
  Synthetic oligonucleotide
gatcttgaggttttagtaagtcatcttgagatttagtaatttgtgcagagtcaggcat

SEQ ID NO: 239334 - DNA, 58 bp, Artificial
  Synthetic oligonucleotide
tgcatctttctttacaaccttcccaatcaaatcactaccaccatctttagtagcctcc

SEQ ID NO: 239335 - DNA, 55 bp, Artificial
  Synthetic oligonucleotide
taaatgggctttatacgccgtgcgtttacttttaacatagataaatactccagta

SEQ ID NO: 239336 - DNA, 58 bp, Artificial
  Synthetic oligonucleotide
cttgcatttgtgtcgtggctaacagtagctcgagttgtacgaggtcaagtacaatcac

SEQ ID NO: 239337 - DNA, 58 bp, Artificial
  Synthetic oligonucleotide
ccacaattagggctagaatcagaaattccagttgctcctagatctaaacgtcaaacaa

SEQ ID NO: 239338 - DNA, 58 bp, Artificial
  Synthetic oligonucleotide
caatgatgaggttaatcgacttaggaaggtaattgagagcgattatgttgtagaaggg

SEQ ID NO: 239339 - DNA, 58 bp, Artificial
  Synthetic oligonucleotide
ccgccaaacttagcaatataggagaatgttcattgatacttaaactatatgacgattc

SEQ ID NO: 239340 - DNA, 58 bp, Artificial
  Synthetic oligonucleotide
cttcttcaagatagaatgatggataattttcactatttagatgataagatcaatattc

SEQ ID NO: 239341 - DNA, 56 bp, Artificial
  Synthetic oligonucleotide
tactctactgctttaacgaaaatctaaaaagaaatggtctagctccaactacacta

SEQ ID NO: 239342 - DNA, 58 bp, Artificial
  Synthetic oligonucleotide
gggctagattcgcttttgaaaggccataattatatagcttaagcacattttctattgg

SEQ ID NO: 239343 - DNA, 53 bp, Artificial
  Synthetic oligonucleotide
tatacactataaacttgtaaagtagactaaaccagttttaaatgccctataaa

SEQ ID NO: 239344 - DNA, 58 bp, Artificial
  Synthetic oligonucleotide
gggcatgctagtagtagtgagcttaagtttaatgatgatcctaattctagttttagtg

SEQ ID NO: 239345 - DNA, 58 bp, Artificial
  Synthetic oligonucleotide
atgtacattgatcctgcattctcagtaggtggggacaatacagctatttgtgttttag

SEQ ID NO: 239346 - DNA, 58 bp, Artificial
  Synthetic oligonucleotide
ccattctagcatctagtttatccattctagcatctagtttatccattctagcatctag

SEQ ID NO: 239347 - DNA, 57 bp, Artificial
  Synthetic oligonucleotide
tactagcaatgaactttttcttgttattagtaggcaagtgcctgttaagcttaatag

SEQ ID NO: 239348 - DNA, 60 bp, Artificial
  Synthetic oligonucleotide
gtacaagctctattattcttgtagaatgcccatgagcagagtctattacaagtatatcta

SEQ ID NO: 239349 - DNA, 56 bp, Artificial
  Synthetic oligonucleotide
gggatgcgtttctaaatgctaaccctacaactattgccaatgaagttaatactatt

SEQ ID NO: 239350 - DNA, 58 bp, Artificial
  Synthetic oligonucleotide
gatagtgccaattcctttgattcatggagagatagttagtttaggctataggataggc

SEQ ID NO: 239351 - DNA, 58 bp, Artificial
  Synthetic oligonucleotide
gccagaaaatacaattagtgtaagtttagttgactctagcattcaagctaatacaccc

SEQ ID NO: 239352 - DNA, 54 bp, Artificial
  Synthetic oligonucleotide
acttatagccgtaatgatttttgtaacagtgctagttttaggagtattaattct

SEQ ID NO: 239353 - DNA, 58 bp, Artificial
  Synthetic oligonucleotide
tagtaaagagatgggtgtaagtcgtgctaatgtatgtaaaatgaggcgtagatgggag

SEQ ID NO: 239354 - DNA, 56 bp, Artificial
  Synthetic oligonucleotide
acagcaataataaagacaatttacaccttaaatttataagtcagtatttacatcaa

SEQ ID NO: 239355 - DNA, 58 bp, Artificial
  Synthetic oligonucleotide
gtacagtgtaccatcggtaccagcaacattgattggggctgagtacagtggtcgtttt

SEQ ID NO: 239356 - DNA, 58 bp, Artificial
  Synthetic oligonucleotide
tgtagcaaaaactcaagcgtataagtatttaagattagcaactgcactgcaagaaggg

SEQ ID NO: 239357 - DNA, 58 bp, Artificial
  Synthetic oligonucleotide
tttgcaagtctagataatttgaagtcaaaattagaaaaatctgctaaatctggatcca

SEQ ID NO: 239358 - DNA, 58 bp, Artificial
  Synthetic oligonucleotide
tatagatatagcttgattaaccttacttttatcagaagatgtaccttccgaataagtc

SEQ ID NO: 239359 - DNA, 57 bp, Artificial
  Synthetic oligonucleotide
ccaatttcaagtccttcgccccatgtattggatatagaatcttgtccgggattatta

SEQ ID NO: 239360 - DNA, 58 bp, Artificial
  Synthetic oligonucleotide
caagcataactagtacaaatggtataataagagttggcaggatgagttgtaaagagac

SEQ ID NO: 239361 - DNA, 53 bp, Artificial
  Synthetic oligonucleotide
tagaagcaatacaattttttgtaaaagctaactgtttaaaattgttgggaatc

SEQ ID NO: 239362 - DNA, 57 bp, Artificial
  Synthetic oligonucleotide
tcacatgatgttgagacatatcttgatacgatgggcattgcaactagatctggaaaa

SEQ ID NO: 239363 - DNA, 57 bp, Artificial
  Synthetic oligonucleotide
agtaccaatctttgaatcggacttcccatatgaactcatagccgtttattacgccat

SEQ ID NO: 239364 - DNA, 57 bp, Artificial
  Synthetic oligonucleotide
cccaaggtccaaaacttttcattacgtctttagatatgtctaacatagagcccatca

SEQ ID NO: 239365 - DNA, 57 bp, Artificial
  Synthetic oligonucleotide
ccattctcgtcataaaaacttaccacaatagccttaggcctcattaaatcataataa

SEQ ID NO: 239366 - DNA, 57 bp, Artificial
  Synthetic oligonucleotide
tgtagagccgattgcttgtatagcctttacagccataataattggggcaaaagccgc

SEQ ID NO: 239367 - DNA, 57 bp, Artificial
  Synthetic oligonucleotide
ccttattatcacccgtactcccaatagccgcatcaatcggattcgtagcatccttca

SEQ ID NO: 239368 - DNA, 57 bp, Artificial
  Synthetic oligonucleotide
cgtttaatgctgcgcgatattggtggaagcccagaacacgctaagggcaaatctcct

SEQ ID NO: 239369 - DNA, 57 bp, Artificial
  Synthetic oligonucleotide
cagcttcagcattaccctcattcttaagcactacatatactatatctttaattcccc

SEQ ID NO: 239370 - DNA, 60 bp, Artificial
  Synthetic oligonucleotide
ccaattggcatccctgcactagataatattgccggattaacagctattatgtatgccata

SEQ ID NO: 239371 - DNA, 57 bp, Artificial
  Synthetic oligonucleotide
atttgctttccgtgacgatgatgttattagtaataacattccaaatgttaagtctag

SEQ ID NO: 239372 - DNA, 57 bp, Artificial
  Synthetic oligonucleotide
cgaatatggtcccagccccttgactcaagataagatatatcgtcactagaatccgcc

SEQ ID NO: 239373 - DNA, 57 bp, Artificial
  Synthetic oligonucleotide
gattcctaatatgctttttgatcatagcggaaaaactttctctctagtataaataag

SEQ ID NO: 239374 - DNA, 51 bp, Artificial
  Synthetic oligonucleotide
aaaagcgatactagaaaagctattaattcaatccaaaccccaaaatttacc

SEQ ID NO: 239375 - DNA, 56 bp, Artificial
  Synthetic oligonucleotide
ctcactataactgattagtaaaatacactttttggatcgtttttatcagctttgac

SEQ ID NO: 239376 - DNA, 52 bp, Artificial
  Synthetic oligonucleotide
cggggaaattactcgaataataagagatgtaataacccaaatatttgccctt

SEQ ID NO: 239377 - DNA, 57 bp, Artificial
  Synthetic oligonucleotide
gctttactccctataatatcatcatagaataggataagtatccttatcttaagccct

SEQ ID NO: 239378 - DNA, 57 bp, Artificial
  Synthetic oligonucleotide
ccggcgcatataaggtgtttcaacttattaacatcatacaatataataagcaatacc

SEQ ID NO: 239379 - DNA, 57 bp, Artificial
  Synthetic oligonucleotide
tcactaactaattcaagagatctgctaactcacatttacgataaaagcataggaaaa

SEQ ID NO: 239380 - DNA, 57 bp, Artificial
  Synthetic oligonucleotide
gggcaatgtctatcacaatgatagcagggctaatatttgctttcatttctaaatagc

SEQ ID NO: 239381 - DNA, 57 bp, Artificial
  Synthetic oligonucleotide
ccaattcctttgattcatggagagatagttagtttgggttataggataggcaattta

SEQ ID NO: 239382 - DNA, 56 bp, Artificial
  Synthetic oligonucleotide
caatagttattcttcaactaacagaactatatttacacttgcttccgtacacggtg

SEQ ID NO: 239383 - DNA, 53 bp, Artificial
  Synthetic oligonucleotide
tggaactccggtcgtacttttttacaccttccagaacataaagcgtacctatg

SEQ ID NO: 239384 - DNA, 57 bp, Artificial
  Synthetic oligonucleotide
ggcctaagaattgcagatactactgttcatcgtattatttaagacgggatttatctc

SEQ ID NO: 239385 - DNA, 57 bp, Artificial
  Synthetic oligonucleotide
tgcaagagtacacgtgttgcttaatgtatgatatttgcaagtagttgcccgggctta

SEQ ID NO: 239386 - DNA, 57 bp, Artificial
  Synthetic oligonucleotide
gtgaggaaagatatagaaatagaataagttggagattgatactaagcttggcaaggc

SEQ ID NO: 239387 - DNA, 57 bp, Artificial
  Synthetic oligonucleotide
gcccttaaattaccagattttgcccatgtaacataacctcctgcaaataattgcgaa

SEQ ID NO: 239388 - DNA, 57 bp, Artificial
  Synthetic oligonucleotide
ctatgtgggatgctataatcgtgcctactcctatcgttgttattatatgcccagttg

SEQ ID NO: 239389 - DNA, 57 bp, Artificial
  Synthetic oligonucleotide
atcacaattccatattatcgtctgaatatttaccgctttattgtttaaattatgccg

SEQ ID NO: 239390 - DNA, 56 bp, Artificial
  Synthetic oligonucleotide
tagcgtaaataccaagatagatagtgtagaaaaaacgttacaaaaggatatatcta

SEQ ID NO: 239391 - DNA, 54 bp, Artificial
  Synthetic oligonucleotide
tttttcaaaaaatcccacttgccacaataaacaccaacacaaactaatatctct

SEQ ID NO: 239392 - DNA, 57 bp, Artificial
  Synthetic oligonucleotide
gtcaagagtgttttagatttagtcgtaatattgattttggtttgcaaagaagcaagc

SEQ ID NO: 239393 - DNA, 59 bp, Artificial
  Synthetic oligonucleotide
gtacagtatttttccctagtaatatagcatttgcaaatagtgttagtgtccccatgtga

SEQ ID NO: 239394 - DNA, 53 bp, Artificial
  Synthetic oligonucleotide
gttccagttacgccaaagtctaataaatttagcagaataacaacgttaattac

SEQ ID NO: 239395 - DNA, 57 bp, Artificial
  Synthetic oligonucleotide
tatcctataatttaaatctatgtatccttcgagataatgtcttaaaacaagggctcc

SEQ ID NO: 239396 - DNA, 57 bp, Artificial
  Synthetic oligonucleotide
taatcgcacaccttaaattccctggtatagcatttacaatctcttcacgcattcctg

SEQ ID NO: 239397 - DNA, 57 bp, Artificial
  Synthetic oligonucleotide
ggtggtgttatagcttagtgatgaataaaattgtcttctcattttttgagattctgc

SEQ ID NO: 239398 - DNA, 57 bp, Artificial
  Synthetic oligonucleotide
gcattcaagctcattccagaagccaatgctaaaggcgtattggtataaagtcccatt

SEQ ID NO: 239399 - DNA, 57 bp, Artificial
  Synthetic oligonucleotide
gcacttcttcctacttccagtagtaatatttcactcaaacttcaaaccttatcttgc

SEQ ID NO: 239400 - DNA, 54 bp, Artificial
  Synthetic oligonucleotide
ccctttatggggatacttgcggaggactttctttgatcggagatctttttaaga

SEQ ID NO: 239401 - DNA, 57 bp, Artificial
  Synthetic oligonucleotide
tgtattcgattagcacggacgacaaatatctgttatggagcggccttgttcccccag

SEQ ID NO: 239402 - DNA, 57 bp, Artificial
  Synthetic oligonucleotide
actagtgggagtgaggctagtcaatctgatgctactcacactacagctcctaaataa

SEQ ID NO: 239403 - DNA, 56 bp, Artificial
  Synthetic oligonucleotide
caatgttactatacaagcgccaaccaaagttttcatacgtactccttatttactgc

SEQ ID NO: 239404 - DNA, 60 bp, Artificial
  Synthetic oligonucleotide
ccaatgctttagtatgtagtgattatataatagttccaataacagcagagaaatgggctg

SEQ ID NO: 239405 - DNA, 57 bp, Artificial
  Synthetic oligonucleotide
gatcttagcaataatcctacaacttacagaaatgctctgtataatctggataaggcc

SEQ ID NO: 239406 - DNA, 57 bp, Artificial
  Synthetic oligonucleotide
gcacctcttgatgagattcctttgaagacgctatcattcctgcaacaacatcacata

SEQ ID NO: 239407 - DNA, 55 bp, Artificial
  Synthetic oligonucleotide
gcaattttctacacaataaagcccataagtatactttagaaagtcaatcccaacc

SEQ ID NO: 239408 - DNA, 57 bp, Artificial
  Synthetic oligonucleotide
ttttgtgaagcaaataaggttgctcatgtagttagttaaagagggctgccagctatt

SEQ ID NO: 239409 - DNA, 57 bp, Artificial
  Synthetic oligonucleotide
gatcaaagatgatgatcaagcaaataagtgtaggattgaaatatgaatattgggttg

SEQ ID NO: 239410 - DNA, 55 bp, Artificial
  Synthetic oligonucleotide
taatattgtaattggaaatccgccatgggagaaaaccaagtttaataaagcagag

SEQ ID NO: 239411 - DNA, 56 bp, Artificial
  Synthetic oligonucleotide
caatgcgtatacttcagcaattgaatgtctttttaaaaggttcgttgataggggat

SEQ ID NO: 239412 - DNA, 57 bp, Artificial
  Synthetic oligonucleotide
gcaattcatactggttcggcagtaattttaacaaacgcaatatacaagatttagcaa

SEQ ID NO: 239413 - DNA, 57 bp, Artificial
  Synthetic oligonucleotide
tgctgtaaggtaaattataattcccggcattccctatctcataagaatcgttatcgg

SEQ ID NO: 239414 - DNA, 54 bp, Artificial
  Synthetic oligonucleotide
cggtttatgaatgggacaaagtgttaggatttaatcaaagcgacgctattttaa

SEQ ID NO: 239415 - DNA, 57 bp, Artificial
  Synthetic oligonucleotide
ccaatcttgaaagttctaagacagatctactctccggataataatcaaaaatcgact

SEQ ID NO: 239416 - DNA, 57 bp, Artificial
  Synthetic oligonucleotide
gagctttactatgaatgtatgaaaagacttgctgctgctcatgaagttgatagtaaa

SEQ ID NO: 239417 - DNA, 57 bp, Artificial
  Synthetic oligonucleotide
aagtattattccgatggttatatctttacagagattgtgccttctcgaacgataaga

SEQ ID NO: 239418 - DNA, 51 bp, Artificial
  Synthetic oligonucleotide
cgaaatttagattcccctctttagtaaacctgtctttaaggtgtctgttaa

SEQ ID NO: 239419 - DNA, 57 bp, Artificial
  Synthetic oligonucleotide
gctaggcatagaattttcgttttcgtgattattgtaaataggagctgcatcagtatc

SEQ ID NO: 239420 - DNA, 57 bp, Artificial
  Synthetic oligonucleotide
accttattgaactatattcaagtgagtgcaaggactgcgacaaattttgtatatgca

SEQ ID NO: 239421 - DNA, 57 bp, Artificial
  Synthetic oligonucleotide
acccctattggcatgaatccagcgtttattgcagttagcatatccacatcactgtct

SEQ ID NO: 239422 - DNA, 57 bp, Artificial
  Synthetic oligonucleotide
cctagttgatctgatttgctatgattaaatcttaatgtaaattggatcatgatagta

SEQ ID NO: 239423 - DNA, 54 bp, Artificial
  Synthetic oligonucleotide
gaggtagctaaaggcaaattagaaggtattaagggaactgagcagtttagttta

SEQ ID NO: 239424 - DNA, 57 bp, Artificial
  Synthetic oligonucleotide
tagcttccgcatacttctttattgcgtcttctaaagtgttgttcttataactagaaa

SEQ ID NO: 239425 - DNA, 53 bp, Artificial
  Synthetic oligonucleotide
cctataatgaactgtttggttgagaaccttttagtaggttatattaatgtccc

SEQ ID NO: 239426 - DNA, 56 bp, Artificial
  Synthetic oligonucleotide
ccaatcataggaccataaacagaataataagaacccatcttaaatcgttctctaaa

SEQ ID NO: 239427 - DNA, 55 bp, Artificial
  Synthetic oligonucleotide
ttgaaacctatcgacaaatttggagaaaaatatctagaagctatgaaaaacaggt

SEQ ID NO: 239428 - DNA, 57 bp, Artificial
  Synthetic oligonucleotide
acattactatacaagtctatttaagcaacgcgaatttaatgcatatgagataaatgc

SEQ ID NO: 239429 - DNA, 57 bp, Artificial
  Synthetic oligonucleotide
ctatcgcgaaaacttaactacattaaatcatttgcatctctaaagctcaatcacggc

SEQ ID NO: 239430 - DNA, 57 bp, Artificial
  Synthetic oligonucleotide
gtgattcaacatcaactattgcggtttcagtttgatgtacgcatgctttgtgttcaa

SEQ ID NO: 239431 - DNA, 57 bp, Artificial
  Synthetic oligonucleotide
cgctaaagatgcaatggagagggctaaaagggtgctagataacgctaagcataacca

SEQ ID NO: 239432 - DNA, 57 bp, Artificial
  Synthetic oligonucleotide
acgaatgagataaatcccgtcttcaacaatacgatgaacagtagcatctgcaattct

SEQ ID NO: 239433 - DNA, 57 bp, Artificial
  Synthetic oligonucleotide
cactctagataatcataacggatcattgttggcgggagcttatgctatatcagctct

SEQ ID NO: 239434 - DNA, 55 bp, Artificial
  Synthetic oligonucleotide
gtaccttattaagatcgattctggtaacaaatctagtattaccgtctgaccaaaa

SEQ ID NO: 239435 - DNA, 54 bp, Artificial
  Synthetic oligonucleotide
ggagtataaacggttaaaaagataatttatgagtaatttggcgtatataacata

SEQ ID NO: 239436 - DNA, 57 bp, Artificial
  Synthetic oligonucleotide
taatacttctattgcaagttggtatttgtatgccccaaggattgcaggaggagatcc

SEQ ID NO: 239437 - DNA, 60 bp, Artificial
  Synthetic oligonucleotide
ccaatcagcgacacaacataaggaactagtatagatatagcaataggaattactactatt

SEQ ID NO: 239438 - DNA, 53 bp, Artificial
  Synthetic oligonucleotide
acttgcaatttgatttacgaagagcactgtaaattcaaagtttttaggtaaac

SEQ ID NO: 239439 - DNA, 52 bp, Artificial
  Synthetic oligonucleotide
ggagtgaataaaaaccagccgaagttaaggaggtagaagtgaaagttaataa

SEQ ID NO: 239440 - DNA, 57 bp, Artificial
  Synthetic oligonucleotide
attcgtataagggggatagcaaaacccatgatgatgctcttgatgcaatgtccgcag

SEQ ID NO: 239441 - DNA, 57 bp, Artificial
  Synthetic oligonucleotide
aagtgttggtttagtagattgtagcagtcttttttcgaatgcctaagagcatagtag

SEQ ID NO: 239442 - DNA, 57 bp, Artificial
  Synthetic oligonucleotide
acgaataaggtaaactccgtcttcaataatacgatgaacagtggtatctgcaattct

SEQ ID NO: 239443 - DNA, 57 bp, Artificial
  Synthetic oligonucleotide
atataggtgataagttaaagcacatctactgtactttaactattgttatagctttcc

SEQ ID NO: 239444 - DNA, 51 bp, Artificial
  Synthetic oligonucleotide
ttaggactttattaaattaaagtcaagtaagtgtaaagacggcagaaaatt

SEQ ID NO: 239445 - DNA, 52 bp, Artificial
  Synthetic oligonucleotide
ggatcctcaacctttaaggttttataaaggcactgttgttaagcttgaaaac

SEQ ID NO: 239446 - DNA, 55 bp, Artificial
  Synthetic oligonucleotide
ctttaacgagttcacttaaaaccatttcctgcgtaattaatgcttgtggatacaa

SEQ ID NO: 239447 - DNA, 57 bp, Artificial
  Synthetic oligonucleotide
ccagttcataagcaagtgtacttatgaacggatcaaacatgcaacttgctcaaaacg

SEQ ID NO: 239448 - DNA, 59 bp, Artificial
  Synthetic oligonucleotide
ccaagtataccaagtatcagcactacgataaattaatgtcacatattttactaatcggc

SEQ ID NO: 239449 - DNA, 57 bp, Artificial
  Synthetic oligonucleotide
ttcgctcaaactcgtaaagccatacgcagcagcacagggtgcagcaagtagctgcga

SEQ ID NO: 239450 - DNA, 56 bp, Artificial
  Synthetic oligonucleotide
agatgatagagaaatagcggttaaattgggagtttctagggtaaatgtgtggagaa

SEQ ID NO: 239451 - DNA, 52 bp, Artificial
  Synthetic oligonucleotide
tttacagcccaacttttggcctaaaagaattagccgtaattacaagtctttc

SEQ ID NO: 239452 - DNA, 56 bp, Artificial
  Synthetic oligonucleotide
gtatctaggatttcttccttattagttgcagtttctctaacggaatatccgctaaa

SEQ ID NO: 239453 - DNA, 57 bp, Artificial
  Synthetic oligonucleotide
gatagcagttgcatatcaggatggatttagtgggcttgtaggcaaagttgtaaaggt

SEQ ID NO: 239454 - DNA, 57 bp, Artificial
  Synthetic oligonucleotide
ctgctatgagagttcagtctaacaataaagatgcttcgttaaaggttgtttcaagtg

SEQ ID NO: 239455 - DNA, 57 bp, Artificial
  Synthetic oligonucleotide
gttgtgctgattaatactcaaaatgataatgggagttcagatgatggactaacagtc

SEQ ID NO: 239456 - DNA, 57 bp, Artificial
  Synthetic oligonucleotide
caaagccatttccagattatgaagagcattaacgtaagtttgctcattattgctaag

SEQ ID NO: 239457 - DNA, 57 bp, Artificial
  Synthetic oligonucleotide
tagacgtagtatatactataagccgtgtaatacccttaatatcccaacttcttgcta

SEQ ID NO: 239458 - DNA, 56 bp, Artificial
  Synthetic oligonucleotide
ggtcttgctttatgtaaagcggaaagacgtaagtacaaactgaaaatacattctga

SEQ ID NO: 239459 - DNA, 58 bp, Artificial
  Synthetic oligonucleotide
gtactacgttctatccgtatgaatacatgggtcaaagaacgattattaatatggacga

SEQ ID NO: 239460 - DNA, 55 bp, Artificial
  Synthetic oligonucleotide
tagagaaaagctatttgaagaccaaaaaacacatcttgactggttaaaagccgct

SEQ ID NO: 239461 - DNA, 57 bp, Artificial
  Synthetic oligonucleotide
gacaaattatcaccgttagataagccttcttatgatgacattgattcaaaagagggg

SEQ ID NO: 239462 - DNA, 57 bp, Artificial
  Synthetic oligonucleotide
ttcaaacaatattctagtattgaacttgctagtatgctttctaaaatagacgattta

SEQ ID NO: 239463 - DNA, 57 bp, Artificial
  Synthetic oligonucleotide
ctaggcagatggtattaaatgagcttgtaaaagtgggtattaatagagatattgcgg

SEQ ID NO: 239464 - DNA, 57 bp, Artificial
  Synthetic oligonucleotide
gttacagaacatgctaatagtgaacttatgcttaatgatgaccctgattctagtatt

SEQ ID NO: 239465 - DNA, 57 bp, Artificial
  Synthetic oligonucleotide
attatgggggcaatgtctatcacaatgatagccgggctaatatttgctttcatttct

SEQ ID NO: 239466 - DNA, 57 bp, Artificial
  Synthetic oligonucleotide
agtatgacaacgcagtccacagtatcaatgacattgcaaaagtttttgattggtatt

SEQ ID NO: 239467 - DNA, 57 bp, Artificial
  Synthetic oligonucleotide
gagaaactgtataaagatataccaacatacaaggcaagagttttgttaggagagtgg

SEQ ID NO: 239468 - DNA, 57 bp, Artificial
  Synthetic oligonucleotide
gagaaggaagcctttagagaagctaaggccacacaaagtcttattggcgattccaac

SEQ ID NO: 239469 - DNA, 55 bp, Artificial
  Synthetic oligonucleotide
ttttcagaagtcgcgtctgctgtagtttttttaagtctcgctcccttataccaac

SEQ ID NO: 239470 - DNA, 59 bp, Artificial
  Synthetic oligonucleotide
gtactctactttctattgatcttgcttttgttacacctatagatggtttgtctgtacta

SEQ ID NO: 239471 - DNA, 57 bp, Artificial
  Synthetic oligonucleotide
attgacccgagttcccgcgcaatactaataaggcttgcaaagactaacattgatcat

SEQ ID NO: 239472 - DNA, 56 bp, Artificial
  Synthetic oligonucleotide
ggtaataggtctaattctatgctattttcggtaatagacactttgttgtaatctat

SEQ ID NO: 239473 - DNA, 56 bp, Artificial
  Synthetic oligonucleotide
gtatactttctctgttggcttatcaaatggcacttaaaatatcgttaaaccaccgc

SEQ ID NO: 239474 - DNA, 55 bp, Artificial
  Synthetic oligonucleotide
gtacaattttccgatgtatcttctttgggatttgagatttcttcagtttcggaac

SEQ ID NO: 239475 - DNA, 56 bp, Artificial
  Synthetic oligonucleotide
gtttgaatgcaccactgacatagacgagtttaacagtatggcaaccgtaattccaa

SEQ ID NO: 239476 - DNA, 53 bp, Artificial
  Synthetic oligonucleotide
ttatattaggggttaagatgaaaaggcttaataagatcaaaaggaaagaatac

SEQ ID NO: 239477 - DNA, 55 bp, Artificial
  Synthetic oligonucleotide
ctatagagaggaatacttaatggcacataattttaacgaggatacgtttagaaaa

SEQ ID NO: 239478 - DNA, 56 bp, Artificial
  Synthetic oligonucleotide
ctttacacataccaagaccttaactttgagcttaaagaccgaatatcaattgcaga

SEQ ID NO: 239479 - DNA, 53 bp, Artificial
  Synthetic oligonucleotide
ctagaagcgctgaaggtaaagagcctggtttggcaaatttaagggaatcgggg

SEQ ID NO: 239480 - DNA, 56 bp, Artificial
  Synthetic oligonucleotide
gtaccgtacaagcaaatagctataatagtagtagccaatcttatagagaatccgtg

SEQ ID NO: 239481 - DNA, 57 bp, Artificial
  Synthetic oligonucleotide
ccaactaaagtatcgctaactctcaaaacaggcctaaacacactcataatgatttcg

SEQ ID NO: 239482 - DNA, 56 bp, Artificial
  Synthetic oligonucleotide
ctactatttactttgctattatgctgtactactattgctagcctaccagaagaacc

SEQ ID NO: 239483 - DNA, 53 bp, Artificial
  Synthetic oligonucleotide
aagcctggctttttgctattttgtaattcctagtaaacatttcaaagttttga

SEQ ID NO: 239484 - DNA, 55 bp, Artificial
  Synthetic oligonucleotide
tagctcaaaattcatttctaccttaactgcaaaaatctttacaattaacttgtgg

SEQ ID NO: 239485 - DNA, 52 bp, Artificial
  Synthetic oligonucleotide
acttttggccttaaagaattggccataattacaaatttgacgtttagggata

SEQ ID NO: 239486 - DNA, 56 bp, Artificial
  Synthetic oligonucleotide
cagctgtcattaggtgtgttaatactttagattttatgacagctagttgggttgag

SEQ ID NO: 239487 - DNA, 56 bp, Artificial
  Synthetic oligonucleotide
aacagcactgcatcaattccacttgttgatacatctagaatgttatcagaacttac

SEQ ID NO: 239488 - DNA, 56 bp, Artificial
  Synthetic oligonucleotide
cttgagccattgcagcgctctccatgtctattgcaattgcattttcgaattcttct

SEQ ID NO: 239489 - DNA, 53 bp, Artificial
  Synthetic oligonucleotide
cccctttatcccattagcacaatcccattaacactcgccactttcccaccttt

SEQ ID NO: 239490 - DNA, 56 bp, Artificial
  Synthetic oligonucleotide
ttgcgtagattttcatctattggtgctggagttattcttactaattcgggttgccc

SEQ ID NO: 239491 - DNA, 55 bp, Artificial
  Synthetic oligonucleotide
atccttaagtggcactactaaaggggttggcaatataggttcagtcattttagga

SEQ ID NO: 239492 - DNA, 60 bp, Artificial
  Synthetic oligonucleotide
ccaaccgtaattaatgcctatgccctatctgattcatttacaatcaatttcgcacctgaa

SEQ ID NO: 239493 - DNA, 56 bp, Artificial
  Synthetic oligonucleotide
gctagaatggataaactagatgctagaatggataaactagatgcaaagatagaggc

SEQ ID NO: 239494 - DNA, 56 bp, Artificial
  Synthetic oligonucleotide
aagtatagacaaaaacgaactgctacaagctaaaccggcaaatcaaaagcctgcaa

SEQ ID NO: 239495 - DNA, 56 bp, Artificial
  Synthetic oligonucleotide
cttcaaagcgttactgctggcagttacccggtgtttgagagcagttctaaatttca

SEQ ID NO: 239496 - DNA, 56 bp, Artificial
  Synthetic oligonucleotide
gttctccttttgcagtaactagattggttcctactccccagcagtcgatgggagca

SEQ ID NO: 239497 - DNA, 56 bp, Artificial
  Synthetic oligonucleotide
gtaagcttaaaatgttaagtgtaggcaattatgctgcttttgatccacagccagag

SEQ ID NO: 239498 - DNA, 56 bp, Artificial
  Synthetic oligonucleotide
ccaccagatttacttaaggatcttaagcttagagaagattattattcaataggtat

SEQ ID NO: 239499 - DNA, 56 bp, Artificial
  Synthetic oligonucleotide
cagttggagctaatttaaaccgaagcttctattatttagtagctagagtttgagta

SEQ ID NO: 239500 - DNA, 56 bp, Artificial
  Synthetic oligonucleotide
cctgctactttagatgctcaattgataaacgattcgattggatcaaagattgtaag

SEQ ID NO: 239501 - DNA, 56 bp, Artificial
  Synthetic oligonucleotide
cctgctagtatatcttcgatgatactactactttcaggaatgctcacgtttggatc

SEQ ID NO: 239502 - DNA, 56 bp, Artificial
  Synthetic oligonucleotide
gaggtagctgtgctaagcaagcattccatattactaaggcttacttttatttcatc

SEQ ID NO: 239503 - DNA, 59 bp, Artificial
  Synthetic oligonucleotide
cagtgggcctcctaggcatatcacgaacatactcaaccccttcttcgccagaatactta

SEQ ID NO: 239504 - DNA, 58 bp, Artificial
  Synthetic oligonucleotide
gtacttaatccgattccaacattgttgataaatagccacaccacaacaaatacaccaa

SEQ ID NO: 239505 - DNA, 54 bp, Artificial
  Synthetic oligonucleotide
agagtacaagtgggtttcttgaacaattctttctccattatgtaaggcccttaa

SEQ ID NO: 239506 - DNA, 55 bp, Artificial
  Synthetic oligonucleotide
ccatccgtatgaatacaagggtaaaagaacgattattaatatggacaattacggc

SEQ ID NO: 239507 - DNA, 56 bp, Artificial
  Synthetic oligonucleotide
ggcgttatagggatagtgatgatttatgttgaagcattggatatgtaagttaagcg

SEQ ID NO: 239508 - DNA, 51 bp, Artificial
  Synthetic oligonucleotide
atacgatcttagttacttaaagggggctttagcattaattaaggcaaaaat

SEQ ID NO: 239509 - DNA, 56 bp, Artificial
  Synthetic oligonucleotide
ccttacaacttcaactaaaataggaataagcgactatttgtctggagtgcacaaag

SEQ ID NO: 239510 - DNA, 56 bp, Artificial
  Synthetic oligonucleotide
ggcgactttacaataacgggattcataaacaaaataggtacttcaatggcaaatgc

SEQ ID NO: 239511 - DNA, 56 bp, Artificial
  Synthetic oligonucleotide
ccttatttttggtctagaagctattgccttatctctatagaggagaggaacgcctc

SEQ ID NO: 239512 - DNA, 56 bp, Artificial
  Synthetic oligonucleotide
ccttcttctctagcttctacaccttgactatcatcttgtattttctcaacattcac

SEQ ID NO: 239513 - DNA, 56 bp, Artificial
  Synthetic oligonucleotide
aactaactgatgatcgaggtagatatgatactaacggaaatggccagtttgattcc

SEQ ID NO: 239514 - DNA, 54 bp, Artificial
  Synthetic oligonucleotide
gtttcggcatcaggaatttacttggcaaaataggaggttaaagaattttgtgag

SEQ ID NO: 239515 - DNA, 59 bp, Artificial
  Synthetic oligonucleotide
ccaaagtattcctcctaatacttgagatccaagcactgcaccaccaccaatataatccc

SEQ ID NO: 239516 - DNA, 56 bp, Artificial
  Synthetic oligonucleotide
cacatatcctcatcttcaatgcacaagtacagtaaaagaacctctgtttcaaacag

SEQ ID NO: 239517 - DNA, 56 bp, Artificial
  Synthetic oligonucleotide
ggcatagaatttgcgttttcataattattgtaaataggtgctgcatcagtgtccac

SEQ ID NO: 239518 - DNA, 56 bp, Artificial
  Synthetic oligonucleotide
tcgtacatttgtgttgacattttttccagaccttcaccccaattcacatcctcccc

SEQ ID NO: 239519 - DNA, 56 bp, Artificial
  Synthetic oligonucleotide
tgataagctcagaaaaaacaagcttatcagaaaccgcttcaaaagtattagaaggc

SEQ ID NO: 239520 - DNA, 56 bp, Artificial
  Synthetic oligonucleotide
gcatagaatatagattctatgccatttggtaatatgcccaatttaattgcatattt

SEQ ID NO: 239521 - DNA, 56 bp, Artificial
  Synthetic oligonucleotide
tttagacttacatttatatccctatcatgcaaagtgttacaactactgtaagtcca

SEQ ID NO: 239522 - DNA, 56 bp, Artificial
  Synthetic oligonucleotide
ggcaatttctaaggggtgcacacaagaaagatactatactttgtgtgatatatagc

SEQ ID NO: 239523 - DNA, 56 bp, Artificial
  Synthetic oligonucleotide
tttttgacgtctactgcgtctagtaactcattaatgtttttaattgcgttcattac

SEQ ID NO: 239524 - DNA, 55 bp, Artificial
  Synthetic oligonucleotide
agggggatttatgagtgatactgtgcctaagcgttttaaagaggcggtgactctt

SEQ ID NO: 239525 - DNA, 56 bp, Artificial
  Synthetic oligonucleotide
gggtactgacatacatgagttagaagataaagctagacaaatgaaattgaaccacg

SEQ ID NO: 239526 - DNA, 59 bp, Artificial
  Synthetic oligonucleotide
ccaaactctacacatatcaagaccttaactatgaactaaaagaccgaatatcaattgca

SEQ ID NO: 239527 - DNA, 56 bp, Artificial
  Synthetic oligonucleotide
gatcctaagaaaagggcaatatcagatagatttaaaggacttttaccgacaagcag

SEQ ID NO: 239528 - DNA, 56 bp, Artificial
  Synthetic oligonucleotide
gatgctattactaacgccaccaaaacaattctatcctatgacaccacaaccacaca

SEQ ID NO: 239529 - DNA, 56 bp, Artificial
  Synthetic oligonucleotide
cttctccttaacaaataatacttgctatatgttctttacggaaaaggactcttgca

SEQ ID NO: 239530 - DNA, 56 bp, Artificial
  Synthetic oligonucleotide
gtgtattgggattgaaggccgattctaagaagtctgatgtagggaaatattttaag

SEQ ID NO: 239531 - DNA, 55 bp, Artificial
  Synthetic oligonucleotide
ccggcaagttcccacgataacacacccgtattaaaagcggtgcaagcaaaagatg

SEQ ID NO: 239532 - DNA, 56 bp, Artificial
  Synthetic oligonucleotide
ggtgtgacattacatcgctttcagtctctatgtctggaagtagtgttgagggaact

SEQ ID NO: 239533 - DNA, 56 bp, Artificial
  Synthetic oligonucleotide
tctaaaatggctagaagatgtttatatgcagttttagattacaatgaaagtgagtt

SEQ ID NO: 239534 - DNA, 56 bp, Artificial
  Synthetic oligonucleotide
accacttttaacggttttagtagcagcacaacaatagatcctaatatctgctctcc

SEQ ID NO: 239535 - DNA, 56 bp, Artificial
  Synthetic oligonucleotide
cctaaacaaagagagaagatattctgagctttataagtatgctctgcccacaattc

SEQ ID NO: 239536 - DNA, 56 bp, Artificial
  Synthetic oligonucleotide
tggcacgaagaaccacgtgaaacagtatccgataattctgaaagatctaaagccta

SEQ ID NO: 239537 - DNA, 59 bp, Artificial
  Synthetic oligonucleotide
ccaaacgccattcttgtcaatgataccttgcacttctttaagagaatccctcattaata

SEQ ID NO: 239538 - DNA, 56 bp, Artificial
  Synthetic oligonucleotide
caagtcctgctgtataagcatttggtttcccatcagcaaattttaattcactaagc

SEQ ID NO: 239539 - DNA, 54 bp, Artificial
  Synthetic oligonucleotide
ggttaaaaatcttaatacaaacgtcgaaaaagatgaacaagcagtcagagttaa

SEQ ID NO: 239540 - DNA, 53 bp, Artificial
  Synthetic oligonucleotide
tacctttacgatccagcgaatagttttccatacaaacgcggcgttaaacttgt

SEQ ID NO: 239541 - DNA, 56 bp, Artificial
  Synthetic oligonucleotide
gtgtcgctgaaagtatattcactgataacaatgacaaggatgggatttataagtgc

SEQ ID NO: 239542 - DNA, 56 bp, Artificial
  Synthetic oligonucleotide
cctccattgcaattaagataatcattaccatctattctgatgcccaaggttgtatc

SEQ ID NO: 239543 - DNA, 56 bp, Artificial
  Synthetic oligonucleotide
ggcttaatgattcactttaaatggcggctttgaatttcaaaaaagcacgctgcctt

SEQ ID NO: 239544 - DNA, 54 bp, Artificial
  Synthetic oligonucleotide
aactttttttgtcaacgcgttaaaaagtgaattgccaaaggcatatactggtgc

SEQ ID NO: 239545 - DNA, 56 bp, Artificial
  Synthetic oligonucleotide
ctgattgctattgtcaatgtactcaataccttacttactgcatttgctactacacc

SEQ ID NO: 239546 - DNA, 49 bp, Artificial
  Synthetic oligonucleotide
cggcaaaactatgtaaccccaaacactcccggtttcaaaaaaaccgtca

SEQ ID NO: 239547 - DNA, 55 bp, Artificial
  Synthetic oligonucleotide
ctctaatagctcacaatggcggtcacaaattaaggtaaattctaaatggaaaact

SEQ ID NO: 239548 - DNA, 56 bp, Artificial
  Synthetic oligonucleotide
ccaaacctgagattgaaaggcaagttaagaatttgaagcacgaagaagattcttaa

SEQ ID NO: 239549 - DNA, 56 bp, Artificial
  Synthetic oligonucleotide
ggtttatatatgggatgtcagctgctattagcaccggtacgattgacattagcttt

SEQ ID NO: 239550 - DNA, 56 bp, Artificial
  Synthetic oligonucleotide
gtatgaattaattctaattagtgaacatcttattaattcttatagcactactcacc

SEQ ID NO: 239551 - DNA, 52 bp, Artificial
  Synthetic oligonucleotide
ggttttaagtagtaaaaaggggaatgctagtatagcattgggagaggttccc

SEQ ID NO: 239552 - DNA, 56 bp, Artificial
  Synthetic oligonucleotide
ggaacaaagtatagcaatcatgcatacagcgcgtctgtagcatgtaatgctagtat

SEQ ID NO: 239553 - DNA, 56 bp, Artificial
  Synthetic oligonucleotide
actatgacatctatagattccttggttaatttagcattatcacaattaccagaacc

SEQ ID NO: 239554 - DNA, 56 bp, Artificial
  Synthetic oligonucleotide
gttttagtgttctcatgagaactttctgttaccattagcttcaaactctggtccaa

SEQ ID NO: 239555 - DNA, 51 bp, Artificial
  Synthetic oligonucleotide
gaatatttataagggttatcaaaaatccaaccttaacgtttcccgacacaa

SEQ ID NO: 239556 - DNA, 56 bp, Artificial
  Synthetic oligonucleotide
caaaagtggattgtaatagttgggcttactagcttgaatgctagagtcaactaaac

SEQ ID NO: 239557 - DNA, 56 bp, Artificial
  Synthetic oligonucleotide
cactacgaggcattagaagattatggacttgagtttatcccacaacaagaaattac

SEQ ID NO: 239558 - DNA, 56 bp, Artificial
  Synthetic oligonucleotide
gcaatcattaaagtcccaactaaagtatcgctaattctcaaaacaggcctaaacac

SEQ ID NO: 239559 - DNA, 60 bp, Artificial
  Synthetic oligonucleotide
ccaaaccctcttgtatagcatttgctatctttaaatattcataagcttgagtctttgcta

SEQ ID NO: 239560 - DNA, 56 bp, Artificial
  Synthetic oligonucleotide
tgaattgcttgggcagatgctatttgttttggcggtgtagcttgtacatttgccac

SEQ ID NO: 239561 - DNA, 56 bp, Artificial
  Synthetic oligonucleotide
ccactactgtaggcaatatagagtccgcagtcctccctgtagggcatgtagtgtct

SEQ ID NO: 239562 - DNA, 56 bp, Artificial
  Synthetic oligonucleotide
gctgctttattgtagaaaccccatcaatatacacattaaccccattaatatacgcc

SEQ ID NO: 239563 - DNA, 54 bp, Artificial
  Synthetic oligonucleotide
ttaaagttaaattgggggacaaaccaggagcatgcccatcaacaaccttattac

SEQ ID NO: 239564 - DNA, 56 bp, Artificial
  Synthetic oligonucleotide
aatgcaacagttagggattctgttattaaacttatgcgacagggatggagtgcatt

SEQ ID NO: 239565 - DNA, 55 bp, Artificial
  Synthetic oligonucleotide
aatgatttctaagtgggaatattatagggtcggcgttgaaaacgaatattactga

SEQ ID NO: 239566 - DNA, 56 bp, Artificial
  Synthetic oligonucleotide
ttccataatggaataagagaagggctgtttttattgagaaatgaaaaagctatact

SEQ ID NO: 239567 - DNA, 54 bp, Artificial
  Synthetic oligonucleotide
gtatcttacctcgactatcaaccaaattaccctttgacgcaactcctaccaaag

SEQ ID NO: 239568 - DNA, 56 bp, Artificial
  Synthetic oligonucleotide
atctattctttgctgctgccagaatatttaccaactcattgctcaaattaagcctt

SEQ ID NO: 239569 - DNA, 56 bp, Artificial
  Synthetic oligonucleotide
attgtacgaagctctactagaatatgatttgagaattgctgatactactgttcatc

SEQ ID NO: 239570 - DNA, 55 bp, Artificial
  Synthetic oligonucleotide
gtagaacttggaagtcgtgtttctgggacggttgttaacattatgaaggattatg

SEQ ID NO: 239571 - DNA, 56 bp, Artificial
  Synthetic oligonucleotide
gcataagattaagagcgcggggttttattgggccgatatccattttctgtgttttc

SEQ ID NO: 239572 - DNA, 56 bp, Artificial
  Synthetic oligonucleotide
tgtgatactataattggaatcctgtgtagttccgccgtcaatgtctgaaaggtctc

SEQ ID NO: 239573 - DNA, 56 bp, Artificial
  Synthetic oligonucleotide
ggttcgcctttgttagaatcaatttcgcttatttgaacaatatcctctgatctgtc

SEQ ID NO: 239574 - DNA, 56 bp, Artificial
  Synthetic oligonucleotide
acaagcagtctgtctttgctgagggggagctatttttcatgattctaatgcagata

SEQ ID NO: 239575 - DNA, 55 bp, Artificial
  Synthetic oligonucleotide
aaaggtccttttcaaggtattgatagttgcataataaattatgaactatcaacgt

SEQ ID NO: 239576 - DNA, 56 bp, Artificial
  Synthetic oligonucleotide
gcaaagagttcagtatgcatatgatatttgggataaagcttgttctgcaaggaatg

SEQ ID NO: 239577 - DNA, 56 bp, Artificial
  Synthetic oligonucleotide
gcaaatatggaaagacttgagagtgcattaaccccggcaataaatgcggcactcgc

SEQ ID NO: 239578 - DNA, 53 bp, Artificial
  Synthetic oligonucleotide
acaacacttaactaacagggtaaaagaaagtgtgccatttagtgtttacagcc

SEQ ID NO: 239579 - DNA, 54 bp, Artificial
  Synthetic oligonucleotide
gccgagggaataagaaaatcttatctgagaattttagataaagaaaccggatcg

SEQ ID NO: 239580 - DNA, 53 bp, Artificial
  Synthetic oligonucleotide
tagatggtgtagaaaagaccctaaaaaaggatatatctagtttaaaaaatgaa

SEQ ID NO: 239581 - DNA, 60 bp, Artificial
  Synthetic oligonucleotide
gtagatgcatcatagtttctaacaagattacaagcctcttcaatgctcttggtagtcgta

SEQ ID NO: 239582 - DNA, 56 bp, Artificial
  Synthetic oligonucleotide
ggagttgtctagtgaatagtgttaggaaaagactagcaaatatgtctgtacgtatg

SEQ ID NO: 239583 - DNA, 56 bp, Artificial
  Synthetic oligonucleotide
tagatgttttaggttcgcattaatgtatagctttagagtatgtaaatttttgtaag

SEQ ID NO: 239584 - DNA, 56 bp, Artificial
  Synthetic oligonucleotide
ggagtatatacaaatggaacctgtaattactaggcagatggtactaaatgagcttg

SEQ ID NO: 239585 - DNA, 56 bp, Artificial
  Synthetic oligonucleotide
cttagagaaaggctatctaatgatcagaaaacacaacttgattggttgaaaaccgc

SEQ ID NO: 239586 - DNA, 47 bp, Artificial
  Synthetic oligonucleotide
acgtatatttaaaccgaaatagttttactaaagtttaaggcactttt

SEQ ID NO: 239587 - DNA, 54 bp, Artificial
  Synthetic oligonucleotide
cttcgtattaatttgtatggaggggataaggcaagtgattttgaaaggtttaga

SEQ ID NO: 239588 - DNA, 56 bp, Artificial
  Synthetic oligonucleotide
atatcctagtaaggcatttcctacttttatatggtgctcaataaagcttagtggtg

SEQ ID NO: 239589 - DNA, 56 bp, Artificial
  Synthetic oligonucleotide
ggagacgtagttatgatgtgcccccaatgtctttggatgagtctgatgatcgtcat

SEQ ID NO: 239590 - DNA, 56 bp, Artificial
  Synthetic oligonucleotide
ggactcgtatcggctggagaaatttgcggaactgacagcggattataacgaagggc

SEQ ID NO: 239591 - DNA, 56 bp, Artificial
  Synthetic oligonucleotide
cggacaatctaaatttgaaagcttaagagagcgtgttgagaaatacagacttacac

SEQ ID NO: 239592 - DNA, 60 bp, Artificial
  Synthetic oligonucleotide
gtagcaaacgcagcagcattcttattcgcatccgaactcccaatagccgcctcaatcgga

SEQ ID NO: 239593 - DNA, 56 bp, Artificial
  Synthetic oligonucleotide
gttacttctgttgttggaacattttgatgactaggtagtgtatcttgtttgctcag

SEQ ID NO: 239594 - DNA, 56 bp, Artificial
  Synthetic oligonucleotide
gtcctcctttaacttctatatcttgtaccttagaagctgatgtttccttcaatgac

SEQ ID NO: 239595 - DNA, 54 bp, Artificial
  Synthetic oligonucleotide
acgtacaaaagaataatagcgggctagggccataagaagtcctcttaaacgcca

SEQ ID NO: 239596 - DNA, 55 bp, Artificial
  Synthetic oligonucleotide
gcaggagtacatagcgtagtatcttctataaagactaaattggaagcattggaac

SEQ ID NO: 239597 - DNA, 55 bp, Artificial
  Synthetic oligonucleotide
gtagcgttggtgatggcttctcttgcaaataaagtttcatcgccaaagtttctca

SEQ ID NO: 239598 - DNA, 55 bp, Artificial
  Synthetic oligonucleotide
gtggaggctcagtacttggattcaatttgttaggagcaatccttttgggaactgg

SEQ ID NO: 239599 - DNA, 55 bp, Artificial
  Synthetic oligonucleotide
tataaatcttgagattaaaaccgaggagtctgctataaatcttgaggagaatctt

SEQ ID NO: 239600 - DNA, 55 bp, Artificial
  Synthetic oligonucleotide
tgcagctagtaaaataggagccaataatggctctacagctttatactaaaaaaaa

SEQ ID NO: 239601 - DNA, 55 bp, Artificial
  Synthetic oligonucleotide
taacaatatagtcgggtgatccaaatccttctttgcttcgccttggctcatgctg

SEQ ID NO: 239602 - DNA, 55 bp, Artificial
  Synthetic oligonucleotide
gcatcggtaagcaggattcttgccccgttggtactctccagcctcgaccgtatag

SEQ ID NO: 239603 - DNA, 59 bp, Artificial
  Synthetic oligonucleotide
catttgacattatacagcttaaatagatatttctattacctaaataagcacaaagctat

SEQ ID NO: 239604 - DNA, 55 bp, Artificial
  Synthetic oligonucleotide
tcgcaatcccattaacactctcctcattagcttccttaccttgctcattagcagc

SEQ ID NO: 239605 - DNA, 55 bp, Artificial
  Synthetic oligonucleotide
gtaggcatcaacatatactggaagtcgccttaatctcatagttcaccctttgtaa

SEQ ID NO: 239606 - DNA, 55 bp, Artificial
  Synthetic oligonucleotide
gcatcaataggagcaataagtggagctgatatcttgcaggctatatcacattctg

SEQ ID NO: 239607 - DNA, 55 bp, Artificial
  Synthetic oligonucleotide
gcatatagtagtggtggggataatacttctctttgtgttttagagaaggtgtcgg

SEQ ID NO: 239608 - DNA, 55 bp, Artificial
  Synthetic oligonucleotide
taaccgcagaccctggcagtcccacaatatccactaccggcagtcccctccgaag

SEQ ID NO: 239609 - DNA, 55 bp, Artificial
  Synthetic oligonucleotide
ttgaaactttaacttaaacgcatgaaggattagtatgacaataactcattgcatc

SEQ ID NO: 239610 - DNA, 55 bp, Artificial
  Synthetic oligonucleotide
gtctcctcttgggtgaagtctaatttcgcttttcctatggagtcaatagggatgg

SEQ ID NO: 239611 - DNA, 55 bp, Artificial
  Synthetic oligonucleotide
gcatactttagagaaggatcgttagatgatagagaaatagcggttaaattgggag

SEQ ID NO: 239612 - DNA, 55 bp, Artificial
  Synthetic oligonucleotide
gcatactgttctattactcccttcactttaagatattgttgatcaatagtgggcc

SEQ ID NO: 239613 - DNA, 55 bp, Artificial
  Synthetic oligonucleotide
gcatactaccgtaacttcattcccaacggtgaagttataatagagcttgtccgca

SEQ ID NO: 239614 - DNA, 60 bp, Artificial
  Synthetic oligonucleotide
cagtgggcctaggcatatcacgatcatactcaatccctccttcgccagaatacttaatat

SEQ ID NO: 239615 - DNA, 60 bp, Artificial
  Synthetic oligonucleotide
gtagcaaacgcatcagcatccttatcagcacccgaactcccaatagccgccgcaatcgga

SEQ ID NO: 239616 - DNA, 55 bp, Artificial
  Synthetic oligonucleotide
ttgaatagcgtcgaattcgtgagagttaatgacaatttctctaatgcaggcgata

SEQ ID NO: 239617 - DNA, 55 bp, Artificial
  Synthetic oligonucleotide
gtagggagtgtattggggttgagtgttgagagtaagaaatcggatgtagggaaat

SEQ ID NO: 239618 - DNA, 55 bp, Artificial
  Synthetic oligonucleotide
taggtgttacagaagtggatgctttagttaagtcaatagacaatcttgttgcggc

SEQ ID NO: 239619 - DNA, 55 bp, Artificial
  Synthetic oligonucleotide
ggtccagggtatactcatagaaagtctcggcccttccgccgtgataggagaagtg

SEQ ID NO: 239620 - DNA, 55 bp, Artificial
  Synthetic oligonucleotide
taagcgaggttatgtgggatgctgcaatcgtgtccactccgctcctgtccctatt

SEQ ID NO: 239621 - DNA, 55 bp, Artificial
  Synthetic oligonucleotide
taaggcacctactgcatctgaataattagagttagcataagcatggctgctacta

SEQ ID NO: 239622 - DNA, 51 bp, Artificial
  Synthetic oligonucleotide
tacttggcctaaaaatcttgtaggggtaggagaaaaagtacagggagtaat

SEQ ID NO: 239623 - DNA, 55 bp, Artificial
  Synthetic oligonucleotide
gattacagggacgttggggataaaggctgatacaaagaagagtgagataggtgga

SEQ ID NO: 239624 - DNA, 55 bp, Artificial
  Synthetic oligonucleotide
gtattcccgatccaaagttctggaatcatattcacagtgacccgtcacgaatatc

SEQ ID NO: 239625 - DNA, 55 bp, Artificial
  Synthetic oligonucleotide
gtattacagaggttgagcgaagagctgtaaaagagagcgcaatgaatgccggtgc

SEQ ID NO: 239626 - DNA, 60 bp, Artificial
  Synthetic oligonucleotide
ggttaaaaattgcatatgtccaggctatgacagtgactgagcaaattgcccaaagtatac

SEQ ID NO: 239627 - DNA, 55 bp, Artificial
  Synthetic oligonucleotide
taccacaggaatacggcctgatattgtggaagtatgcgagctgtattttgaggcg

SEQ ID NO: 239628 - DNA, 55 bp, Artificial
  Synthetic oligonucleotide
tagaaagttggctgatcttagcaaaatttcggctcttgagattggagagttggtt

SEQ ID NO: 239629 - DNA, 55 bp, Artificial
  Synthetic oligonucleotide
gattagctttagataaggatggggagtttgccttgaagaataatgcagagaaggc

SEQ ID NO: 239630 - DNA, 55 bp, Artificial
  Synthetic oligonucleotide
tttctataatctttgatttagaaatagcagttcacagctttaatgtctttaagtc

SEQ ID NO: 239631 - DNA, 55 bp, Artificial
  Synthetic oligonucleotide
gattatagtattggatgttttagtgagggcccttctgaaaggcgtagccaagctc

SEQ ID NO: 239632 - DNA, 55 bp, Artificial
  Synthetic oligonucleotide
tacacttttgacagcgggaacggaaatatggtcactatcaactgcacggagagcc

SEQ ID NO: 239633 - DNA, 55 bp, Artificial
  Synthetic oligonucleotide
tagaagtcttggtgatgagtggtgaagcgtttggttatgctgctgtgcgaaagga

SEQ ID NO: 239634 - DNA, 55 bp, Artificial
  Synthetic oligonucleotide
gattcaagaacaccgtcatttacggctttggaactgccaagcgaatcccaaataa

SEQ ID NO: 239635 - DNA, 55 bp, Artificial
  Synthetic oligonucleotide
tttatatccctctcgaaaagcagcggcaactaacagactgccgggatcactaagg

SEQ ID NO: 239636 - DNA, 55 bp, Artificial
  Synthetic oligonucleotide
tagaatacaagctcacgttccttttagtatctacagtccaacttttggcctaaaa

SEQ ID NO: 239637 - DNA, 60 bp, Artificial
  Synthetic oligonucleotide
ccatcagcaatcccattaacactctcctggttcgcagcagcaccttgattatctgcagtc

SEQ ID NO: 239638 - DNA, 55 bp, Artificial
  Synthetic oligonucleotide
gattgttttagcgtaaggtggagaagaggtatatatgaggattttggttggtgtt

SEQ ID NO: 239639 - DNA, 55 bp, Artificial
  Synthetic oligonucleotide
gatttcgccgagtgggagtaggcaacaacatcccggaaactcgctattcaagcag

SEQ ID NO: 239640 - DNA, 55 bp, Artificial
  Synthetic oligonucleotide
tttagatgtatttgtgagttttggggatatgattacagggacgttggggataaag

SEQ ID NO: 239641 - DNA, 55 bp, Artificial
  Synthetic oligonucleotide
tagagtgcttccggtctatgaatgggatagagtactgggatttaatcaaagtgac

SEQ ID NO: 239642 - DNA, 55 bp, Artificial
  Synthetic oligonucleotide
tctaccctttaaattgggctgattatctttactatattcaataactcagctacct

SEQ ID NO: 239643 - DNA, 55 bp, Artificial
  Synthetic oligonucleotide
ggtgagaagggtttcaataggcttgattgcatagtagcttaagatacagcttcct

SEQ ID NO: 239644 - DNA, 55 bp, Artificial
  Synthetic oligonucleotide
gcaaaactgtggatcaagtgatgatggttcgtttccaattccaactccaaaggca

SEQ ID NO: 239645 - DNA, 55 bp, Artificial
  Synthetic oligonucleotide
gcaaagagaagagcagttgatgctttaggagaaaccaaagatgatagctcttcta

SEQ ID NO: 239646 - DNA, 55 bp, Artificial
  Synthetic oligonucleotide
tacaagctcttcaactcgttctaaggtgtcaatatcaatggaaacagcagcgcct

SEQ ID NO: 239647 - DNA, 55 bp, Artificial
  Synthetic oligonucleotide
tgcaaatacagttcttagtgcattgcaaatggagcccgacagtgcttcagaaatt

SEQ ID NO: 239648 - DNA, 52 bp, Artificial
  Synthetic oligonucleotide
ggttattttgtagggcttaagataagtattcttgctttaagggtatttatgg

SEQ ID NO: 239649 - DNA, 55 bp, Artificial
  Synthetic oligonucleotide
gatgatccaagccaagaatcagacgagctagaaagagagtaccaagatgatgagc

SEQ ID NO: 239650 - DNA, 55 bp, Artificial
  Synthetic oligonucleotide
gtcaatgtactcaataccttatttactgcacttgctactgccccattgactgtct

SEQ ID NO: 239651 - DNA, 55 bp, Artificial
  Synthetic oligonucleotide
gatgctagaagcagtttgagaactagattaaatgaggggaataaaccgcttgttt

SEQ ID NO: 239652 - DNA, 55 bp, Artificial
  Synthetic oligonucleotide
gatgctcaaaacccgattgatgcggctattgggactgctgatgatgcagcagcgt

SEQ ID NO: 239653 - DNA, 55 bp, Artificial
  Synthetic oligonucleotide
ttttgcggatgtcattatatcctttgccggtagcgtttgtcctgcagtacggcag

SEQ ID NO: 239654 - DNA, 55 bp, Artificial
  Synthetic oligonucleotide
gatggacactcaacttctactacaagtaagatatcttcggacggaagcagtatat

SEQ ID NO: 239655 - DNA, 55 bp, Artificial
  Synthetic oligonucleotide
tcgtcatacaaataatccatactagaaacataatcgggaatataattgtctctta

SEQ ID NO: 239656 - DNA, 53 bp, Artificial
  Synthetic oligonucleotide
tcgttccccggttttctcccacgatgcccgcgtgaggttcttcgacgaacgaa

SEQ ID NO: 239657 - DNA, 55 bp, Artificial
  Synthetic oligonucleotide
gatgtattcccggccattaaccccacctcggtggctattgcaaagtccatggagg

SEQ ID NO: 239658 - DNA, 53 bp, Artificial
  Synthetic oligonucleotide
tactaaagaagaccccaaccgcaggtgttaccgttatgttaaccgaatggctg

SEQ ID NO: 239659 - DNA, 60 bp, Artificial
  Synthetic oligonucleotide
ccataccctattgcacgagctactattgaattaatatgtccatgtagtatgtcatttgga

SEQ ID NO: 239660 - DNA, 55 bp, Artificial
  Synthetic oligonucleotide
ggtgaacgggacctattatgactacgactcggttgaaacagtgagcaacaaggag

SEQ ID NO: 239661 - DNA, 54 bp, Artificial
  Synthetic oligonucleotide
gatgtgattatagtaccggaaacattcttaaacggaaagcccctcaattccagg

SEQ ID NO: 239662 - DNA, 53 bp, Artificial
  Synthetic oligonucleotide
ttttcttgagtcgattagatacggttccgaattggttttcgctaaacgaatgg

SEQ ID NO: 239663 - DNA, 55 bp, Artificial
  Synthetic oligonucleotide
gtattgttacttagtcttgcgctagtaatatcttgtaaatgcagcgcagtaccgc

SEQ ID NO: 239664 - DNA, 55 bp, Artificial
  Synthetic oligonucleotide
tactaaacacaatactatatttcttcccagcacactgcggccgctggaccacccc

SEQ ID NO: 239665 - DNA, 55 bp, Artificial
  Synthetic oligonucleotide
tacggcaggctctggcataaaacacggaacgaaggtaccggactcttccaagatt

SEQ ID NO: 239666 - DNA, 55 bp, Artificial
  Synthetic oligonucleotide
tacctcccatatcctctgttttgaaagggtaattccacgagtatatactgtcgcc

SEQ ID NO: 239667 - DNA, 55 bp, Artificial
  Synthetic oligonucleotide
ttttacgcgcatgtatctcggcttattagcctcggcaagtacggttataagagcg

SEQ ID NO: 239668 - DNA, 55 bp, Artificial
  Synthetic oligonucleotide
tttgttcctgtaccaatgcacgttattgaaaagtatgggcaaaggtggacagacc

SEQ ID NO: 239669 - DNA, 55 bp, Artificial
  Synthetic oligonucleotide
tcgtatcagaaatccgtatgtggggatagaggggtaccggtgcttcgggtgtgcc

SEQ ID NO: 239670 - DNA, 60 bp, Artificial
  Synthetic oligonucleotide
ccataccactctgatttgtatgataattgtcttacaaactcagaccatcctaaatcatta

SEQ ID NO: 239671 - DNA, 55 bp, Artificial
  Synthetic oligonucleotide
gtattgcaacggggttgaacaatgatgcttatggaggagggcacaccgctacatt

SEQ ID NO: 239672 - DNA, 55 bp, Artificial
  Synthetic oligonucleotide
gcactaaaataccttgcatcaattacaggaaaccatgaattaggctgaactcccc

SEQ ID NO: 239673 - DNA, 55 bp, Artificial
  Synthetic oligonucleotide
ttggcaacgacaaatattaccgaagatcaaatatacagagagtttctgcgactag

SEQ ID NO: 239674 - DNA, 55 bp, Artificial
  Synthetic oligonucleotide
gcactgttacccataagtagtaaattgggagagaaaagcggagtacttattgcta

SEQ ID NO: 239675 - DNA, 55 bp, Artificial
  Synthetic oligonucleotide
ttgctttgtgagctgttaaagtttgtctggcttgttggttgactagaactagagg

SEQ ID NO: 239676 - DNA, 55 bp, Artificial
  Synthetic oligonucleotide
ttgcttgtaactcgccaaaaggattaatagaatacctaaggcggcaaggatacgt

SEQ ID NO: 239677 - DNA, 55 bp, Artificial
  Synthetic oligonucleotide
taataacgatcacaaagcagttcaatcggtggggataagtgcagtaagtaaactg

SEQ ID NO: 239678 - DNA, 55 bp, Artificial
  Synthetic oligonucleotide
tcctacaacttacagaaatgcactgtataatctggataaggccttagacgaacac

SEQ ID NO: 239679 - DNA, 55 bp, Artificial
  Synthetic oligonucleotide
taagtgttgccaatccaatgacagagggttatgagtatgttagaggctcaatagt

SEQ ID NO: 239680 - DNA, 55 bp, Artificial
  Synthetic oligonucleotide
gcagaaggcttctggttttgcggtagttcccgaatcgacagataaggggcaaggt

SEQ ID NO: 239681 - DNA, 57 bp, Artificial
  Synthetic oligonucleotide
ccataatcagtttaaaagatcctaattatcgtgctgtacccccagttgacgactata

SEQ ID NO: 239682 - DNA, 54 bp, Artificial
  Synthetic oligonucleotide
ttgctccgtaaattaaatccgccggaccttctgtaacaaatggctttagtcttc

SEQ ID NO: 239683 - DNA, 52 bp, Artificial
  Synthetic oligonucleotide
tcgcttcggggaccacctccacaggaatgggaaaccccgtaccgatgtgggg

SEQ ID NO: 239684 - DNA, 55 bp, Artificial
  Synthetic oligonucleotide
gcagatgttcctggcccttgtttctgggaaccccatttcttttgtaagagacaca

SEQ ID NO: 239685 - DNA, 55 bp, Artificial
  Synthetic oligonucleotide
taggctgcaagaatttcttatcgaggagacagtgttaaaaggaaagatgaggaac

SEQ ID NO: 239686 - DNA, 55 bp, Artificial
  Synthetic oligonucleotide
gcagcaacatcggacttcttagaatcggccttcaatcccaatacactccccacca

SEQ ID NO: 239687 - DNA, 55 bp, Artificial
  Synthetic oligonucleotide
gcagcaccaaaattagcacctgcctgagcagccccaatagcagccgaaatcggat

SEQ ID NO: 239688 - DNA, 55 bp, Artificial
  Synthetic oligonucleotide
gcagcagcaatctgatcatccttcttcaacgtagcaaacgcagcagcattctgct

SEQ ID NO: 239689 - DNA, 55 bp, Artificial
  Synthetic oligonucleotide
gcagcagcaatcttatcattcccattcatagcagcaccaaaattagcacctgcct

SEQ ID NO: 239690 - DNA, 55 bp, Artificial
  Synthetic oligonucleotide
gtcgaatttctggagcgtagtcgggaggctgtcgctgatgtttcctattcggcgg

SEQ ID NO: 239691 - DNA, 55 bp, Artificial
  Synthetic oligonucleotide
ttgccctttgccagcagtattgcttccgctgaactttatagttactccaaccaac

SEQ ID NO: 239692 - DNA, 57 bp, Artificial
  Synthetic oligonucleotide
ccataaaatcagttaagtcatctggggtataatatgccccacttttcttcctctcaa

SEQ ID NO: 239693 - DNA, 55 bp, Artificial
  Synthetic oligonucleotide
ttgccataatcccaataccaattagggtcaagccttccagtgcctatcatcattc

SEQ ID NO: 239694 - DNA, 55 bp, Artificial
  Synthetic oligonucleotide
gcagcggacgactacacggtcctcatccgtatgaagcccgagaatcccaacaggc

SEQ ID NO: 239695 - DNA, 55 bp, Artificial
  Synthetic oligonucleotide
tctcggtataagtcaacatacggtattccgatggcaagagtccaatctacagcgg

SEQ ID NO: 239696 - DNA, 55 bp, Artificial
  Synthetic oligonucleotide
gcagcttggcagagagcttggcaagattaaaagcactctaaacaatgatggaatt

SEQ ID NO: 239697 - DNA, 55 bp, Artificial
  Synthetic oligonucleotide
gcaacaacgtgaataaccgcctcagcaggattactcgctgtttctttcttcgagc

SEQ ID NO: 239698 - DNA, 55 bp, Artificial
  Synthetic oligonucleotide
gcaacatactctactactttaatgaaaatctaaaacgtaatggtatggcgcccgt

SEQ ID NO: 239699 - DNA, 55 bp, Artificial
  Synthetic oligonucleotide
gcaacgggaatcttcgatcttctcatattcggttctcgacatggtggtcatgggc

SEQ ID NO: 239700 - DNA, 55 bp, Artificial
  Synthetic oligonucleotide
gcaagatacaattagtgtaagtttgcttgattctaggattcagactagcaggccc

SEQ ID NO: 239701 - DNA, 55 bp, Artificial
  Synthetic oligonucleotide
taattgctaggctccctatgcctactagtgttgatccgactattgatatccttcc

SEQ ID NO: 239702 - DNA, 55 bp, Artificial
  Synthetic oligonucleotide
gtattaatttgtatggcggggacaaggcaagcgattttgaaagatttagaggtag

SEQ ID NO: 239703 - DNA, 52 bp, Artificial
  Synthetic oligonucleotide
ccagttacaccgttagtattagtccctccagttacaccgttaggtcctcgcc

SEQ ID NO: 239704 - DNA, 53 bp, Artificial
  Synthetic oligonucleotide
tcgggaaattaccgaatattctacaaccgaactaggtcttgaattcggcggtc

SEQ ID NO: 239705 - DNA, 54 bp, Artificial
  Synthetic oligonucleotide
tctaggatttcttccttattggttgcggtttctctaacagagtacccgctaaac

SEQ ID NO: 239706 - DNA, 55 bp, Artificial
  Synthetic oligonucleotide
gtcctatagcttatttagatcctgcatatagtagtggtggggataatacttctct

SEQ ID NO: 239707 - DNA, 55 bp, Artificial
  Synthetic oligonucleotide
ggtcttgaatcaatcgaacttgtctgtacggtgcgccaggaccggtgtactatgc

SEQ ID NO: 239708 - DNA, 55 bp, Artificial
  Synthetic oligonucleotide
taattcgtaaaacaggtctaaacatgctcataattatttcggggaaaaggctgcc

SEQ ID NO: 239709 - DNA, 55 bp, Artificial
  Synthetic oligonucleotide
gcaatcagaagaatgttacacaaggccgcaccttggtggtttactgatcctgata

SEQ ID NO: 239710 - DNA, 55 bp, Artificial
  Synthetic oligonucleotide
ttgtgatatccatcgtttccgttgtgttctcggttgccgtctatttggtctttac

SEQ ID NO: 239711 - DNA, 55 bp, Artificial
  Synthetic oligonucleotide
ggtctatttaacacccttagcacatttggagagactctagacgatgtgatcgttc

SEQ ID NO: 239712 - DNA, 55 bp, Artificial
  Synthetic oligonucleotide
gcaatgcttcaaggcatgagagctactactatgctggctaccaccaatttatggc

SEQ ID NO: 239713 - DNA, 55 bp, Artificial
  Synthetic oligonucleotide
ttgtcgtccgtacctggaggtccaagcgccaaagccctctgaggcgtcgcgtcct

SEQ ID NO: 239714 - DNA, 58 bp, Artificial
  Synthetic oligonucleotide
ccaggtattcttgttgctggtctgccttctgttcggagaataataatcccagttataa

SEQ ID NO: 239715 - DNA, 55 bp, Artificial
  Synthetic oligonucleotide
gcaatttccgacttttacagttgtggagggtcaacaagttctacatgttgttaga

SEQ ID NO: 239716 - DNA, 55 bp, Artificial
  Synthetic oligonucleotide
ttggtggaagacttgcagatctgagacctagagttgttattgtgactcaaaatgg

SEQ ID NO: 239717 - DNA, 55 bp, Artificial
  Synthetic oligonucleotide
taatgctccttagccgttatccctccaagttgttcatctctactatcctccccta

SEQ ID NO: 239718 - DNA, 55 bp, Artificial
  Synthetic oligonucleotide
gcacactcaatgcaagccaaaatgttggatgatcatgcacatcgaatgcctgcat

SEQ ID NO: 239719 - DNA, 55 bp, Artificial
  Synthetic oligonucleotide
gcacagaatagccgttcgaggcaaaggatgattcggttatggaaataggtcgccc

SEQ ID NO: 239720 - DNA, 55 bp, Artificial
  Synthetic oligonucleotide
gcacagggtgcagcaagtagctgcgaaaaatgggaggatgttttgattcaaacta

SEQ ID NO: 239721 - DNA, 55 bp, Artificial
  Synthetic oligonucleotide
gtatctcgctttctccgttccgaatcacggaaatacatgatgtatcgtatccgtc

SEQ ID NO: 239722 - DNA, 55 bp, Artificial
  Synthetic oligonucleotide
ggcagctcagcatataataccgttagtaatgcttataactccgcatatgaatgga

SEQ ID NO: 239723 - DNA, 55 bp, Artificial
  Synthetic oligonucleotide
gtgttgagagtaagaagtcggatgtagggaagtattttaaggcaattcaggagac

SEQ ID NO: 239724 - DNA, 55 bp, Artificial
  Synthetic oligonucleotide
tgtcttctgtatcttatagatctttcggtattgtcagacatcctttcagttccgg

SEQ ID NO: 239725 - DNA, 54 bp, Artificial
  Synthetic oligonucleotide
tttagacgtgaccaccctccccttagaacctgtagtggcgccctcctccgtaga

SEQ ID NO: 239726 - DNA, 56 bp, Artificial
  Synthetic oligonucleotide
gtcaccattctctgccactacaacgtttaatttactttttactgaactcatagtct

SEQ ID NO: 239727 - DNA, 57 bp, Artificial
  Synthetic oligonucleotide
ggttgcggctgctattgttttgagggggatggctaagaatggaaagtttgctttgaa

SEQ ID NO: 239728 - DNA, 55 bp, Artificial
  Synthetic oligonucleotide
gtgttgtactactattgctagcctaccagaagaaccaaaacctccacttatccaa

SEQ ID NO: 239729 - DNA, 55 bp, Artificial
  Synthetic oligonucleotide
tcattggttaagacaggtaaactaggagcaggcgcggcagctaataatgcaggag

SEQ ID NO: 239730 - DNA, 55 bp, Artificial
  Synthetic oligonucleotide
ggcaagggattcgtctactgcatcgtggccgatgcactcctcaccctggtgtact

SEQ ID NO: 239731 - DNA, 55 bp, Artificial
  Synthetic oligonucleotide
tgagggtatcagtcataatgttagtaaacttgaacttgctaaactgaaggtgcaa

SEQ ID NO: 239732 - DNA, 55 bp, Artificial
  Synthetic oligonucleotide
ggcaaattgttgttatatgcctgtcctgagtctagaaattcagaaagaggggagc

SEQ ID NO: 239733 - DNA, 55 bp, Artificial
  Synthetic oligonucleotide
tgaggaggttggccatcatggacccgtaaagggtggtgataagggcgacggccat

SEQ ID NO: 239734 - DNA, 55 bp, Artificial
  Synthetic oligonucleotide
tcatggagagatagttagtttgggttataggataggcaatttagcgtatcttacc

SEQ ID NO: 239735 - DNA, 55 bp, Artificial
  Synthetic oligonucleotide
tgtgtgattattctctgatgggcgaccgttcttgtagggctgaaaagctagcgcg

SEQ ID NO: 239736 - DNA, 55 bp, Artificial
  Synthetic oligonucleotide
ggatgttttatacagctacctctagtgcctagtttggaggttattaagtatgatc

SEQ ID NO: 239737 - DNA, 55 bp, Artificial
  Synthetic oligonucleotide
ggatggttctggtgttgcagcagttcccggatcgggaggtaagaggcaaggtgga

SEQ ID NO: 239738 - DNA, 58 bp, Artificial
  Synthetic oligonucleotide
ggttgctaatgcgtccacattggtttgaatgttttttgaatctttattgtaatcgtca

SEQ ID NO: 239739 - DNA, 55 bp, Artificial
  Synthetic oligonucleotide
tgtgtgccacccctagaaattggcacttatccttattacagctatcctacagccc

SEQ ID NO: 239740 - DNA, 55 bp, Artificial
  Synthetic oligonucleotide
ggatccctgtcagtcagtctgccgtaccgaataatccgattgtaaaggtcggaga

SEQ ID NO: 239741 - DNA, 55 bp, Artificial
  Synthetic oligonucleotide
tcatgctctacaatagcaagccttccagaagagccttcatacccaaaagagcaaa

SEQ ID NO: 239742 - DNA, 55 bp, Artificial
  Synthetic oligonucleotide
ggatcccggatagtaagcacgccttatgaatagtcttcccatagtctactccgtc

SEQ ID NO: 239743 - DNA, 55 bp, Artificial
  Synthetic oligonucleotide
ggccggtacattttgccgcctcgatatcattcacatgagcgcgacaccagcagga

SEQ ID NO: 239744 - DNA, 55 bp, Artificial
  Synthetic oligonucleotide
ggccgggattcccagaaatcgcaccacgggtatggagacgaaactctcgcacatc

SEQ ID NO: 239745 - DNA, 55 bp, Artificial
  Synthetic oligonucleotide
tgtaggtatttcgaagtaaatgacgggcgtggtagagggtggataggttgttggc

SEQ ID NO: 239746 - DNA, 55 bp, Artificial
  Synthetic oligonucleotide
gtgccaagagacaccattagcaccgcttgatgtatgtgttggtatgagtcaaggg

SEQ ID NO: 239747 - DNA, 55 bp, Artificial
  Synthetic oligonucleotide
ggccgccttttgcaagttgtaatatatctccactgtaactaccgcttgcttctgc

SEQ ID NO: 239748 - DNA, 55 bp, Artificial
  Synthetic oligonucleotide
ggccgaaaagggcagtagtgaaacgtttatatctcatagggtatctgttggtgag

SEQ ID NO: 239749 - DNA, 57 bp, Artificial
  Synthetic oligonucleotide
ggttgggggcgactgtccgaagtaaagcttgtagattatgccccggcagatgtcttc

SEQ ID NO: 239750 - DNA, 55 bp, Artificial
  Synthetic oligonucleotide
ggccaaactcatacttttacaaacagagtatttacgctgcgttatacttacacgc

SEQ ID NO: 239751 - DNA, 55 bp, Artificial
  Synthetic oligonucleotide
ggcatttcccagaacttgacctaccgactggaattggagaatcctgtggttctcg

SEQ ID NO: 239752 - DNA, 55 bp, Artificial
  Synthetic oligonucleotide
ggcatcaccttaggaaatgtcattagcaatgctataagtaaagtaggaggcgggc

SEQ ID NO: 239753 - DNA, 55 bp, Artificial
  Synthetic oligonucleotide
gtgtgttcaagaatattgaatttaatgcgtttggaataaatgtggcgtatcgccg

SEQ ID NO: 239754 - DNA, 55 bp, Artificial
  Synthetic oligonucleotide
ggcatagaactgcaaggattaatgaagtttctggctgctatagcttagcaagaga

SEQ ID NO: 239755 - DNA, 55 bp, Artificial
  Synthetic oligonucleotide
ggcatacccgtgctagataatattgccggattaacagctattatgtatgccatgc

SEQ ID NO: 239756 - DNA, 55 bp, Artificial
  Synthetic oligonucleotide
gtgtgttcctcgttactcgatttggcgatagtggtgattccaaatgttacgaccc

SEQ ID NO: 239757 - DNA, 55 bp, Artificial
  Synthetic oligonucleotide
gtgttatctaaaggatgtatcgacaaatgcctcgtgtggaatttgcctggtcgag

SEQ ID NO: 239758 - DNA, 55 bp, Artificial
  Synthetic oligonucleotide
ggcagtcgtgccatttacacaaaacgcctgttgtgaccgtaccgacaacgtacgc

SEQ ID NO: 239759 - DNA, 55 bp, Artificial
  Synthetic oligonucleotide
ggcaggcaaggtgatgctgctgcgggaaaggaagctgctcttgctgttagtgggg

SEQ ID NO: 239760 - DNA, 56 bp, Artificial
  Synthetic oligonucleotide
ggtttaatcggattttgaaggaattctgagtaggttagaagagaatcacaagacaa

SEQ ID NO: 239761 - DNA, 55 bp, Artificial
  Synthetic oligonucleotide
tgtccttcgcttacttcgtacaggtttggaacattttcgttgcattcagcacagg

SEQ ID NO: 239762 - DNA, 55 bp, Artificial
  Synthetic oligonucleotide
tgacggaaagctgtatgggagtacaaactcaggtttccctactaactatgtaagc

SEQ ID NO: 239763 - DNA, 55 bp, Artificial
  Synthetic oligonucleotide
ggacaaaagcgtaaaagggttgcgatggggatgtactcatcagatttaattgagt

SEQ ID NO: 239764 - DNA, 55 bp, Artificial
  Synthetic oligonucleotide
ggaattgaactggattttcgaatgcaatctttagtaggctagagtagtcgttaac

SEQ ID NO: 239765 - DNA, 55 bp, Artificial
  Synthetic oligonucleotide
ggaagtgaacctgccactttagatgcccaactggtaaatgatacggttggatcaa

SEQ ID NO: 239766 - DNA, 55 bp, Artificial
  Synthetic oligonucleotide
ggaaggtgggtaagcgatgccacaaattgggagttccccagttgcaaggttcctg

SEQ ID NO: 239767 - DNA, 55 bp, Artificial
  Synthetic oligonucleotide
ggtacctatgtcctctaatatgcgtgttaacaagtgctgcagcctcttgcatgct

SEQ ID NO: 239768 - DNA, 55 bp, Artificial
  Synthetic oligonucleotide
tcagacgcccctggggattctaatagccggttagctttatatggagctcttacac

SEQ ID NO: 239769 - DNA, 55 bp, Artificial
  Synthetic oligonucleotide
gttatacagtacccaatgctattctagggttaagccccaggatttcacaccaggc

SEQ ID NO: 239770 - DNA, 55 bp, Artificial
  Synthetic oligonucleotide
ggaacaccttctgttttagctatattcactattccttgcagtgctttaagaactt

SEQ ID NO: 239771 - DNA, 57 bp, Artificial
  Synthetic oligonucleotide
ccagcctgatattggatcagctttttagggttttaatgcgccttacgattaagttgc

SEQ ID NO: 239772 - DNA, 55 bp, Artificial
  Synthetic oligonucleotide
ggaaaccagagacagcccggacaacaggcttggtcaaaggctaaagaatttggct

SEQ ID NO: 239773 - DNA, 55 bp, Artificial
  Synthetic oligonucleotide
ggtactgttcgatgcaggttctgcctatccggtaaccttaaatgcaacattccgc

SEQ ID NO: 239774 - DNA, 55 bp, Artificial
  Synthetic oligonucleotide
tgcccagtgctttgtgataaagtagtcctctgattatattttcgtaatcggggct

SEQ ID NO: 239775 - DNA, 54 bp, Artificial
  Synthetic oligonucleotide
gctttggttcaacattggggaaacaggtattccgtaggttgggtgcagcctacc

SEQ ID NO: 239776 - DNA, 55 bp, Artificial
  Synthetic oligonucleotide
gctttcaaagaaggggttagtctctcaggagatccgattgatgaggcttttacgc

SEQ ID NO: 239777 - DNA, 55 bp, Artificial
  Synthetic oligonucleotide
gctttatatggagctcttacacttcaaaaaggaatagtgtcctgactttacagac

SEQ ID NO: 239778 - DNA, 51 bp, Artificial
  Synthetic oligonucleotide
gttatattgaatgaaaaggtacccgctccggaaagggtagtaaaattggta

SEQ ID NO: 239779 - DNA, 55 bp, Artificial
  Synthetic oligonucleotide
gcttgctaggcatagaatttacgttttcgtggttattgtaaataggagctgcatc

SEQ ID NO: 239780 - DNA, 55 bp, Artificial
  Synthetic oligonucleotide
ggttctgaaagtctgctaaccgctgctcttgttattgggcttgctagaggtgtta

SEQ ID NO: 239781 - DNA, 54 bp, Artificial
  Synthetic oligonucleotide
ggatacacttggtttaattattagacggacagttagaatggagattggtaaggg

SEQ ID NO: 239782 - DNA, 60 bp, Artificial
  Synthetic oligonucleotide
ccagcaagcctactttctatcctataatgctccttagcatctatcccaagttgttcatct

SEQ ID NO: 239783 - DNA, 55 bp, Artificial
  Synthetic oligonucleotide
ggatacaccctaaaagacattatgcaggcacaacgtagagagcttgttcgtaagt

SEQ ID NO: 239784 - DNA, 55 bp, Artificial
  Synthetic oligonucleotide
gttaacctcctttgattcgtacaccaaaccgcacatacaccaccaattagtagtg

SEQ ID NO: 239785 - DNA, 55 bp, Artificial
  Synthetic oligonucleotide
ggagtagccgttatgcttcttgtagcatctgttattagataaacttgaaatccca

SEQ ID NO: 239786 - DNA, 55 bp, Artificial
  Synthetic oligonucleotide
ggttgaccgacccctgcgagaggagtgctcacggtgtacaaactgtcggcttcga

SEQ ID NO: 239787 - DNA, 55 bp, Artificial
  Synthetic oligonucleotide
ggagctagagacaatgcatatacttcagcaattgaatgcctacttaaacggtttg

SEQ ID NO: 239788 - DNA, 55 bp, Artificial
  Synthetic oligonucleotide
ggagcgagttgatgataagtattatgcttttgtatttcaagaccaaagaccagct

SEQ ID NO: 239789 - DNA, 55 bp, Artificial
  Synthetic oligonucleotide
ggagcaatgatggaactagggagaagtgcagagagagtattttatgcatttatag

SEQ ID NO: 239790 - DNA, 55 bp, Artificial
  Synthetic oligonucleotide
gttaagtacgttgacaatagcaatcaggaatacagtggatgagggattgaaaggg

SEQ ID NO: 239791 - DNA, 55 bp, Artificial
  Synthetic oligonucleotide
ggagaggattaagtggcgcaatgatggaagtagggaggagtgcagagaatgcatt

SEQ ID NO: 239792 - DNA, 55 bp, Artificial
  Synthetic oligonucleotide
ggagacgaattttctacacatatgatggtaatagttgaccctacaacttcgctca

SEQ ID NO: 239793 - DNA, 57 bp, Artificial
  Synthetic oligonucleotide
ggttttctcttcttcaaagatagccaaatgggtactgctgaggattctataccctta

SEQ ID NO: 239794 - DNA, 55 bp, Artificial
  Synthetic oligonucleotide
ggacttgctttataccgaaatacatagagaacacgaagcctatccaagctatgat

SEQ ID NO: 239795 - DNA, 55 bp, Artificial
  Synthetic oligonucleotide
tgttcctttgcatccataccaacatgtgcatctctaccctctacattaggtggat

SEQ ID NO: 239796 - DNA, 54 bp, Artificial
  Synthetic oligonucleotide
ggactcctactacaaacatgttccgatgacgggactaggggttgacgtggtaac

SEQ ID NO: 239797 - DNA, 55 bp, Artificial
  Synthetic oligonucleotide
ggaccgcagtacagaccgcagggaccatcaacgatccctccacggtagaccaagg

SEQ ID NO: 239798 - DNA, 55 bp, Artificial
  Synthetic oligonucleotide
ggaccagcacaagcaataaccggacttacaataatggggataggaataggcacga

SEQ ID NO: 239799 - DNA, 55 bp, Artificial
  Synthetic oligonucleotide
ggggcccttggcggtggtatagatactttcacggctcaagcaactactacatgca

SEQ ID NO: 239800 - DNA, 55 bp, Artificial
  Synthetic oligonucleotide
ggggagaggaaacggtgctctgcgcgcttccatggagccaagtatatggatgggg

SEQ ID NO: 239801 - DNA, 55 bp, Artificial
  Synthetic oligonucleotide
gggcggtgttaaagtgggcatacaaagagaacatcgcgatatccacaagcggatc

SEQ ID NO: 239802 - DNA, 55 bp, Artificial
  Synthetic oligonucleotide
gggcatcttttgcgtaaacagaggcagggcttccacttagtattattcccgcgat

SEQ ID NO: 239803 - DNA, 55 bp, Artificial
  Synthetic oligonucleotide
gggcacaagcttggcagtgtgctaatagtttggggttgggtgtaagttattctag

SEQ ID NO: 239804 - DNA, 59 bp, Artificial
  Synthetic oligonucleotide
gtaaacaaaaaaggccagcgaagcatcaaatgcttcgcctaaccttctaagctgcttgc

SEQ ID NO: 239805 - DNA, 55 bp, Artificial
  Synthetic oligonucleotide
tggacatgctcctggcttgtctccttatttaactttaaagtacgtgtcttcaggt

SEQ ID NO: 239806 - DNA, 55 bp, Artificial
  Synthetic oligonucleotide
gggatgggcacactggtgttgtaactatggattttgtttctagatacactagatt

SEQ ID NO: 239807 - DNA, 55 bp, Artificial
  Synthetic oligonucleotide
gggatgatattaaaggagctggggctttaacacgtgaatatgttagacttcgaaa

SEQ ID NO: 239808 - DNA, 55 bp, Artificial
  Synthetic oligonucleotide
gggatcacagaccgctatcttgtagaccgctgagctctgcttgagggccgatccc

SEQ ID NO: 239809 - DNA, 55 bp, Artificial
  Synthetic oligonucleotide
gggatacgcaatttgtattcacgcaatgttgtgctttcaatactcaccggtatga

SEQ ID NO: 239810 - DNA, 55 bp, Artificial
  Synthetic oligonucleotide
gtgtcgctaattggcagccatttgaattagcttgcaaagaattttgcactccgat

SEQ ID NO: 239811 - DNA, 55 bp, Artificial
  Synthetic oligonucleotide
tccctcaacaaaaacagcggctaatgcaacttgccaaggaatattcataccaatt

SEQ ID NO: 239812 - DNA, 55 bp, Artificial
  Synthetic oligonucleotide
tggatgcatcttcagggagatggtattgtaatcggaaagacagggcgtgcagggg

SEQ ID NO: 239813 - DNA, 55 bp, Artificial
  Synthetic oligonucleotide
gggacctttgatgacaggagttacctcctctatgtcagagccaattcatcctacc

SEQ ID NO: 239814 - DNA, 55 bp, Artificial
  Synthetic oligonucleotide
gggaccgattcaccctccgcatggagggctaagaggcgttcttccttgtcgctta

SEQ ID NO: 239815 - DNA, 57 bp, Artificial
  Synthetic oligonucleotide
gtaaacaggaacattagaataattcgccaaacattcaacagtctgttgagaaaagcc

SEQ ID NO: 239816 - DNA, 55 bp, Artificial
  Synthetic oligonucleotide
tgatgacaatgttccacctggtgagattggaggtggagctaatccagaggatatt

SEQ ID NO: 239817 - DNA, 54 bp, Artificial
  Synthetic oligonucleotide
tggccaggcgtgcggtcaagcgttaccggaaaccctccgggctcttttggttga

SEQ ID NO: 239818 - DNA, 55 bp, Artificial
  Synthetic oligonucleotide
ggtaaccgaagatgttactactaaattagagggagttagagaatcatctcttgag

SEQ ID NO: 239819 - DNA, 55 bp, Artificial
  Synthetic oligonucleotide
gggttgtcgcggtaagtgcttttgattatacacacagcgggattgtcttggtttg

SEQ ID NO: 239820 - DNA, 55 bp, Artificial
  Synthetic oligonucleotide
tgccttattaagcatattattctggaaaagaatatcttcgctgtcaggtaagttt

SEQ ID NO: 239821 - DNA, 55 bp, Artificial
  Synthetic oligonucleotide
gggttcatcaatgcaggatggaaccaaggactgaccagtttcctgtactgggcgt

SEQ ID NO: 239822 - DNA, 53 bp, Artificial
  Synthetic oligonucleotide
gggtggttagttgacttaatgttctcgcctaagttttcccaaagcgtgttata

SEQ ID NO: 239823 - DNA, 55 bp, Artificial
  Synthetic oligonucleotide
tgcgattcctcaacatcttttcgcctagtaggtcccaaaaattccatgtcctcct

SEQ ID NO: 239824 - DNA, 55 bp, Artificial
  Synthetic oligonucleotide
gggtagtgtgtttttgtatctccacgctatagcttatttgcttaaggatcgagat

SEQ ID NO: 239825 - DNA, 55 bp, Artificial
  Synthetic oligonucleotide
gggtagtaagtggtgctgacatattacaagctattgctaagtctggtgatgtttc

SEQ ID NO: 239826 - DNA, 58 bp, Artificial
  Synthetic oligonucleotide
ccagacatcaatccaccttttagttgagtcaaaatgtcctttaattgtccagaatatg

SEQ ID NO: 239827 - DNA, 55 bp, Artificial
  Synthetic oligonucleotide
gggtagagatgtatatgttggtatggatgcaaaggaacattataggcttgagaga

SEQ ID NO: 239828 - DNA, 53 bp, Artificial
  Synthetic oligonucleotide
tgcggtacgcaaaatcgttttaaggttttccgcttcatcggcactaaacccgc

SEQ ID NO: 239829 - DNA, 55 bp, Artificial
  Synthetic oligonucleotide
gtgctctacaatagcaagccttccagaagagccatcatccccaaaagagtcaaca

SEQ ID NO: 239830 - DNA, 55 bp, Artificial
  Synthetic oligonucleotide
ggggttaaaggttcagttaaaagaagctcttcttgaagcaatgataagctacaga

SEQ ID NO: 239831 - DNA, 53 bp, Artificial
  Synthetic oligonucleotide
ggggtgtttcaaataatacttactgtaaagggtggattgacaaaattagagac

SEQ ID NO: 239832 - DNA, 55 bp, Artificial
  Synthetic oligonucleotide
ggggtgatctacaccaatatcgcacgggacgggatgctctcagggcccgatgtgg

SEQ ID NO: 239833 - DNA, 55 bp, Artificial
  Synthetic oligonucleotide
tgatggacgcttaacttctactataagtaagatatcttcagctggaataggctca

SEQ ID NO: 239834 - DNA, 52 bp, Artificial
  Synthetic oligonucleotide
gtggttgtttaatcctgctttagaacttgatgggttttaaaaggcggaccaa

SEQ ID NO: 239835 - DNA, 52 bp, Artificial
  Synthetic oligonucleotide
tccgcacctaccccgaatataaaatccttatcccgttgttacgaaacggcac

SEQ ID NO: 239836 - DNA, 55 bp, Artificial
  Synthetic oligonucleotide
gtgtgcgcactgtgcagcgggatcttaaactgcttaacgaaattggcttgattaa

SEQ ID NO: 239837 - DNA, 59 bp, Artificial
  Synthetic oligonucleotide
gtcacttttgtcggaataatttccaatcaatcgcaccaaggtgctcattttagaagaca

SEQ ID NO: 239838 - DNA, 56 bp, Artificial
  Synthetic oligonucleotide
gtaaaggagaattggatttagagcgagccaatttagaattagggtttattcgtgca

SEQ ID NO: 239839 - DNA, 55 bp, Artificial
  Synthetic oligonucleotide
tggtccttcatacggtagccgatcctgcgtgcgaggtgttcgtactccagggacc

SEQ ID NO: 239840 - DNA, 55 bp, Artificial
  Synthetic oligonucleotide
tggtgctgatactgatctatatggcatatgtgttgatgtatgtgagtttagttgc

SEQ ID NO: 239841 - DNA, 55 bp, Artificial
  Synthetic oligonucleotide
ggctatgcgctcgaagattatgctcaaacgggaacttctccgttcagtactattg

SEQ ID NO: 239842 - DNA, 55 bp, Artificial
  Synthetic oligonucleotide
tggttaatactgatgctaagtcacgaaagtgtagggagcaagcatgattaggtac

SEQ ID NO: 239843 - DNA, 54 bp, Artificial
  Synthetic oligonucleotide
ggctacagggagcttgtagaggttaaccgagtagccaatttaaagcttaacaag

SEQ ID NO: 239844 - DNA, 55 bp, Artificial
  Synthetic oligonucleotide
ggcgtaagaaggtccagcggtttgcaggctaaggctctaaatgacctcggtgcaa

SEQ ID NO: 239845 - DNA, 55 bp, Artificial
  Synthetic oligonucleotide
ggcggctattgggagttcgggtgagcagaatgctgctgcgtttgctacgttgaag

SEQ ID NO: 239846 - DNA, 55 bp, Artificial
  Synthetic oligonucleotide
gtgcggatgctaacaaaacaggggatgataagaaagatattggcacacacactgt

SEQ ID NO: 239847 - DNA, 55 bp, Artificial
  Synthetic oligonucleotide
ggcgctctagacgcctgtatcttccctgcaaaacgtatgtgacactcttgacagc

SEQ ID NO: 239848 - DNA, 55 bp, Artificial
  Synthetic oligonucleotide
ggtaagggtgaagcgaaagaggaaaatattgcaaaggcagcggcaagtataggag

SEQ ID NO: 239849 - DNA, 59 bp, Artificial
  Synthetic oligonucleotide
gtaacaacgctattccacacacaccgctaattagtagtgtatgtggtcacaacaggtgt

SEQ ID NO: 239850 - DNA, 55 bp, Artificial
  Synthetic oligonucleotide
ggcgctatctcttgccattgataggaaaactttaacagagagcgttctgaatgat

SEQ ID NO: 239851 - DNA, 55 bp, Artificial
  Synthetic oligonucleotide
ggcgctaatggtaaaatcggaaatgctaatggtactgaggatgcagtgcaggcag

SEQ ID NO: 239852 - DNA, 55 bp, Artificial
  Synthetic oligonucleotide
ggcgacaatactgctttatgtgttatggatcgggttgatgacaaatattatgctt

SEQ ID NO: 239853 - DNA, 53 bp, Artificial
  Synthetic oligonucleotide
ggcctttcggagtacccggttaagctaaggtctttgcgggatattgtccttgc

SEQ ID NO: 239854 - DNA, 55 bp, Artificial
  Synthetic oligonucleotide
ggcctatatatgatgatttcgtagatgggaataattctatacgaacaacttgggg

SEQ ID NO: 239855 - DNA, 55 bp, Artificial
  Synthetic oligonucleotide
tgtagcttacttttccctcaattttagttccatccggcaacaataaaggattctg

SEQ ID NO: 239856 - DNA, 55 bp, Artificial
  Synthetic oligonucleotide
gggaagcaatcgttgacgatcctattaaactctatttgcgcgatatcggtaagga

SEQ ID NO: 239857 - DNA, 55 bp, Artificial
  Synthetic oligonucleotide
tccctagtaatatagcatttgcaaatagtgttagtgtccccatgtgaatgggtgc

SEQ ID NO: 239858 - DNA, 55 bp, Artificial
  Synthetic oligonucleotide
gggaaagtcctccctctcgcccggaacatacaccggatgaccgtcattctggggc

SEQ ID NO: 239859 - DNA, 55 bp, Artificial
  Synthetic oligonucleotide
ggtgttaggggccgctctgtaccgtaggactgcgcgtttgctgtttgccacagcg

SEQ ID NO: 239860 - DNA, 53 bp, Artificial
  Synthetic oligonucleotide
gtaaccgttgattgcactagtgttaaaaacatgtattgtaaaataaacgaaat

SEQ ID NO: 239861 - DNA, 55 bp, Artificial
  Synthetic oligonucleotide
tgggccaagccattgcagaaattgtcatacaaatcggagagttcctatggggatg

SEQ ID NO: 239862 - DNA, 55 bp, Artificial
  Synthetic oligonucleotide
tccatctgtagcaaggcgggctatatcatcaaccatcccaatgactgtacgtctc

SEQ ID NO: 239863 - DNA, 55 bp, Artificial
  Synthetic oligonucleotide
gtgcgggacttagcaacacaggagattgttcattgacacttaagctatatgacgc

SEQ ID NO: 239864 - DNA, 55 bp, Artificial
  Synthetic oligonucleotide
ggctttaaaaggcaacatgcaagtagaaaatcttgaggctgttgacaatccgcag

SEQ ID NO: 239865 - DNA, 55 bp, Artificial
  Synthetic oligonucleotide
ggcttggtcgtaagtcgtctcacaggaaggcccttatacggaatatggtgacttc

SEQ ID NO: 239866 - DNA, 55 bp, Artificial
  Synthetic oligonucleotide
ggcttggtataggtgggagtttgcacttcgccgcttgttataagggaatccatgt

SEQ ID NO: 239867 - DNA, 55 bp, Artificial
  Synthetic oligonucleotide
tggtaataggccctttaatctatctgatatagcccttttattagggtcataattg

SEQ ID NO: 239868 - DNA, 55 bp, Artificial
  Synthetic oligonucleotide
tgatcgtgactcttataagaatcttcttgtgtatgccctaagcttcttgtaccgt

SEQ ID NO: 239869 - DNA, 55 bp, Artificial
  Synthetic oligonucleotide
ggcttatgagcaatcagacgctccccaaggactatgtagtagatttcccatgtat

SEQ ID NO: 239870 - DNA, 55 bp, Artificial
  Synthetic oligonucleotide
ggctgtgaactcctctgtagccagggttcggtgtttgcctttgtccaggatagcg

SEQ ID NO: 239871 - DNA, 59 bp, Artificial
  Synthetic oligonucleotide
gtaacgtcaatcttattaatgagggattctcttaaagaagtgcaaggtatcattgacaa

SEQ ID NO: 239872 - DNA, 55 bp, Artificial
  Synthetic oligonucleotide
ggctggtaagaatggatcattgcttgcaggagcatataatattgcgttggatatc

SEQ ID NO: 239873 - DNA, 55 bp, Artificial
  Synthetic oligonucleotide
gtgtctttcgcacctcccgggctaatcgccacgcaatagtccgcaccgcggctaa

SEQ ID NO: 239874 - DNA, 55 bp, Artificial
  Synthetic oligonucleotide
ggctgatgcatcttcttgcccctttccccaagtacgaatttcaaaacccatcccg

SEQ ID NO: 239875 - DNA, 55 bp, Artificial
  Synthetic oligonucleotide
gccttcagagctactgctgctgccaaatctgcattggtaactgctttagcaccat

SEQ ID NO: 239876 - DNA, 55 bp, Artificial
  Synthetic oligonucleotide
gccttaactttagattcagaaccctctccttgcttaatctcgcctaataccttat

SEQ ID NO: 239877 - DNA, 55 bp, Artificial
  Synthetic oligonucleotide
gccttaactttaacttcagaaccctctccttgcttaatctcccctaatgcctcac

SEQ ID NO: 239878 - DNA, 55 bp, Artificial
  Synthetic oligonucleotide
ttcagaatgtgatatagcctgcaagatatcagctccacttatttatcagctccac

SEQ ID NO: 239879 - DNA, 55 bp, Artificial
  Synthetic oligonucleotide
gcctggaggcaacttaacttatttgaccccttccgttttgtggtgcgaatgcagc

SEQ ID NO: 239880 - DNA, 55 bp, Artificial
  Synthetic oligonucleotide
gcctgcggctgctgagaagccgtaagttttgctatatggttcagaggggtgtgtc

SEQ ID NO: 239881 - DNA, 55 bp, Artificial
  Synthetic oligonucleotide
tatataccgctcgatagtaatgtccgtcggctggctaatctatatgattggggca

SEQ ID NO: 239882 - DNA, 60 bp, Artificial
  Synthetic oligonucleotide
ccactaaccgcgctaacagcagcagccgccttcccagcatccgtagcatccccaccacca

SEQ ID NO: 239883 - DNA, 55 bp, Artificial
  Synthetic oligonucleotide
gcctcctacggatcatgacaagcgaaccatcagtgcgaagcaggtattctgccgg

SEQ ID NO: 239884 - DNA, 55 bp, Artificial
  Synthetic oligonucleotide
ttcatgctgtaaatccttatggtatgccgctgactgctacaccgcttgttgacga

SEQ ID NO: 239885 - DNA, 55 bp, Artificial
  Synthetic oligonucleotide
gcctcaagatctttctctaacctataaaacccgtctcttaaaaccatcatctcat

SEQ ID NO: 239886 - DNA, 55 bp, Artificial
  Synthetic oligonucleotide
ttccaattggatcactagcatctcctattgcctcacttgcctcctttgctccacc

SEQ ID NO: 239887 - DNA, 55 bp, Artificial
  Synthetic oligonucleotide
gtttgaatggtgaatagctagacgagcgcttcaatattttagagtgagtatgccc

SEQ ID NO: 239888 - DNA, 55 bp, Artificial
  Synthetic oligonucleotide
gcctatgccctatctgattcatttacaatcaatttcgcacctgaagatggaaatc

SEQ ID NO: 239889 - DNA, 55 bp, Artificial
  Synthetic oligonucleotide
gtttgtttgataaggtgcattctgtcttagatgctagtgccaagtctattagtag

SEQ ID NO: 239890 - DNA, 55 bp, Artificial
  Synthetic oligonucleotide
gcctaatcaagcactcccagagaaaggctacctgagtagaactctcttaagtagg

SEQ ID NO: 239891 - DNA, 55 bp, Artificial
  Synthetic oligonucleotide
tcgagtgcccgttcctacattcgtgaggggtggcacatcaccgttatcccggggc

SEQ ID NO: 239892 - DNA, 54 bp, Artificial
  Synthetic oligonucleotide
gttttccatacaagcgtggggtaaaacttgttccaaaagagaactctatacatg

SEQ ID NO: 239893 - DNA, 56 bp, Artificial
  Synthetic oligonucleotide
ccactaaaagtattgccggtctatgaatgggatagagtactaggatttaatcaaag

SEQ ID NO: 239894 - DNA, 55 bp, Artificial
  Synthetic oligonucleotide
gcgccatccgattacgagtatagtggcacagcttatggaaccactctttatccgc

SEQ ID NO: 239895 - DNA, 55 bp, Artificial
  Synthetic oligonucleotide
gcgcatcttagcaaccattttaacaaggaagtgttacttgcaaaaggatacaccc

SEQ ID NO: 239896 - DNA, 54 bp, Artificial
  Synthetic oligonucleotide
gtaccgcgtatgtattaccaattacgaataactttgagggataccttgttacaa

SEQ ID NO: 239897 - DNA, 55 bp, Artificial
  Synthetic oligonucleotide
tatcttgtgagaagttctccagctaatgctagtgattctctttattgtgctcgtc

SEQ ID NO: 239898 - DNA, 55 bp, Artificial
  Synthetic oligonucleotide
gtttatgtctcccgttaaagcttcggtagcaatcattagagcctcgcgcaagcga

SEQ ID NO: 239899 - DNA, 55 bp, Artificial
  Synthetic oligonucleotide
gtgggcagccgaagggaaacagattgccctacagcaaggattgacgatcgaccga

SEQ ID NO: 239900 - DNA, 55 bp, Artificial
  Synthetic oligonucleotide
gtactcaataccttacttactgcacttgctactacaccatttactgcattagcat

SEQ ID NO: 239901 - DNA, 55 bp, Artificial
  Synthetic oligonucleotide
ggtatccaggacacgggctgtgcgtagcattgctttcttggagcattgggaaaca

SEQ ID NO: 239902 - DNA, 55 bp, Artificial
  Synthetic oligonucleotide
gtttccgattattctgacaagagttgagtctgtccttaaagctatgtcgtttgcg

SEQ ID NO: 239903 - DNA, 55 bp, Artificial
  Synthetic oligonucleotide
tcttctcctggatagagaaggtgtccgctctctatgggattaaggatcacgcctg

SEQ ID NO: 239904 - DNA, 58 bp, Artificial
  Synthetic oligonucleotide
gtaacttttgtgattatgagaatgtaggcttaaagttgagagtaatattgaggtgatt

SEQ ID NO: 239905 - DNA, 55 bp, Artificial
  Synthetic oligonucleotide
gcgaggattctagattaacaattagtgaagacacttttgaacaccttttgtcgca

SEQ ID NO: 239906 - DNA, 55 bp, Artificial
  Synthetic oligonucleotide
gcgaatatttaagcttaagtagttatactacagctttaagctatttttggcgtat

SEQ ID NO: 239907 - DNA, 55 bp, Artificial
  Synthetic oligonucleotide
gtgaacctacaacaagagctgtgtctagtactgaagatatgggacttccggtagt

SEQ ID NO: 239908 - DNA, 55 bp, Artificial
  Synthetic oligonucleotide
gtactctgtaggtcaatgtttctctgtcaactgcaagagataatgcttctcttac

SEQ ID NO: 239909 - DNA, 55 bp, Artificial
  Synthetic oligonucleotide
gcgaaggggatagatagcataataacacttcaattgacggcactaaagtaagaag

SEQ ID NO: 239910 - DNA, 55 bp, Artificial
  Synthetic oligonucleotide
gtgaaaatcaatgttaatgatactcctgaggtgtctgacaagggtaattctggtg

SEQ ID NO: 239911 - DNA, 55 bp, Artificial
  Synthetic oligonucleotide
ttcacattaaagctttccctaattagcagtaattatgtaatatctccaatgacgg

SEQ ID NO: 239912 - DNA, 55 bp, Artificial
  Synthetic oligonucleotide
taaaccaggagctggtattaaacttgctgaagaagtgtctaaagcagatccatgg

SEQ ID NO: 239913 - DNA, 55 bp, Artificial
  Synthetic oligonucleotide
taaacggtagataacgctctataagcatctgcaagataacctgtcgctttcatca

SEQ ID NO: 239914 - DNA, 55 bp, Artificial
  Synthetic oligonucleotide
taaagataatcatcctttgagcatccagtactatgaggaaaagaacagcttgagg

SEQ ID NO: 239915 - DNA, 55 bp, Artificial
  Synthetic oligonucleotide
gtaataaacagaagtagtgatttttgagggtggtacacaagaaagatagtatact

SEQ ID NO: 239916 - DNA, 55 bp, Artificial
  Synthetic oligonucleotide
ttctataattacctgagccatagtggcgcaagaatctcccacttaaattgggtgc

SEQ ID NO: 239917 - DNA, 55 bp, Artificial
  Synthetic oligonucleotide
gccatcagagtcatctataaattctgcctcccctcctcttggcgccaaagcccca

SEQ ID NO: 239918 - DNA, 55 bp, Artificial
  Synthetic oligonucleotide
gccagtgcttaaaggagcttcagaaataattcaatgggttagaggcattatggac

SEQ ID NO: 239919 - DNA, 55 bp, Artificial
  Synthetic oligonucleotide
taaagcaaatttaataacaccacttagggttaggctagaaacacaagaggcatgc

SEQ ID NO: 239920 - DNA, 55 bp, Artificial
  Synthetic oligonucleotide
gccaggaggaccgatatcgttcggtaatggtatctgggccgttagttatatgcgc

SEQ ID NO: 239921 - DNA, 55 bp, Artificial
  Synthetic oligonucleotide
tctgtcattgcctcactagcagtaagaagtcttttaccctcaatagggtaaggcc

SEQ ID NO: 239922 - DNA, 55 bp, Artificial
  Synthetic oligonucleotide
tctgtaaagatgttataaattctagatggatcgtcaagccgccttgtcatcgccg

SEQ ID NO: 239923 - DNA, 55 bp, Artificial
  Synthetic oligonucleotide
gccacaagaacttgcaatgctatatgactctgatatgtctgatattcacgagtat

SEQ ID NO: 239924 - DNA, 55 bp, Artificial
  Synthetic oligonucleotide
ttctgtgtcttatagatctttcggtattcgcagatatcctttcagttcctacccc

SEQ ID NO: 239925 - DNA, 55 bp, Artificial
  Synthetic oligonucleotide
gccaacctaaatattaggtgcgaacacaaaattaacacattactatcggcgcata

SEQ ID NO: 239926 - DNA, 55 bp, Artificial
  Synthetic oligonucleotide
atcttcttttaacgccccaaataatattaacgggctagcgccataaataggctgc

SEQ ID NO: 239927 - DNA, 55 bp, Artificial
  Synthetic oligonucleotide
ggtcaagtgatattgccaggagtgttacatgcgggtcaaattgtagttccagggt

SEQ ID NO: 239928 - DNA, 53 bp, Artificial
  Synthetic oligonucleotide
ttcttcctattgcctcaccttttttagaagaataagtttctaagcaccttaaa

SEQ ID NO: 239929 - DNA, 55 bp, Artificial
  Synthetic oligonucleotide
ttcttgcattagctccttgcccgattacccaatctagctcataatcttccatggc

SEQ ID NO: 239930 - DNA, 55 bp, Artificial
  Synthetic oligonucleotide
gcattccggtgtcttcggacccattttcttgtccaaacaagggatcgaattcctc

SEQ ID NO: 239931 - DNA, 55 bp, Artificial
  Synthetic oligonucleotide
gccgtacccctacatccactgccgtgcagagtactcattagacgccaggcacgcg

SEQ ID NO: 239932 - DNA, 55 bp, Artificial
  Synthetic oligonucleotide
ggtatctgccgccaagataagcttttgggcgccctcattttgcggcaaggtctta

SEQ ID NO: 239933 - DNA, 54 bp, Artificial
  Synthetic oligonucleotide
gccggcttatgggtctttgcccggatagattttcgcttctgggtcctgaaaagg

SEQ ID NO: 239934 - DNA, 55 bp, Artificial
  Synthetic oligonucleotide
ttccgtagcttttgttgagctgattgtgtatgaataaccaaggcagtatgtcttg

SEQ ID NO: 239935 - DNA, 55 bp, Artificial
  Synthetic oligonucleotide
gccgcagtccctgcttttaactctgtaacacctactccctgtgcaactttcacta

SEQ ID NO: 239936 - DNA, 55 bp, Artificial
  Synthetic oligonucleotide
gccgatccatgggcaatgattgataagataaagaatgctaagactggttctcaac

SEQ ID NO: 239937 - DNA, 60 bp, Artificial
  Synthetic oligonucleotide
atcttattatgcattagaattgtctagacaggctttaagtgacgcaagaagtgctttaag

SEQ ID NO: 239938 - DNA, 53 bp, Artificial
  Synthetic oligonucleotide
taaaacggctggacaagggattttaggcggcttttaggtcctccgtagagcat

SEQ ID NO: 239939 - DNA, 55 bp, Artificial
  Synthetic oligonucleotide
tataggatttaccatggaaccgataccacttgataccgatcgaggcaagcgttcc

SEQ ID NO: 239940 - DNA, 55 bp, Artificial
  Synthetic oligonucleotide
ttcgggtggagcccacgatgacccctcggtcctcacaggaccaggttcgtacgca

SEQ ID NO: 239941 - DNA, 55 bp, Artificial
  Synthetic oligonucleotide
ggtgcacttaaggcggcagtgtcaagtgcagtaaataaggtgttaggaatacttg

SEQ ID NO: 239942 - DNA, 55 bp, Artificial
  Synthetic oligonucleotide
gccctttgaatgtgtatgttccgagtcctgatgcaaatataattattcccgctat

SEQ ID NO: 239943 - DNA, 55 bp, Artificial
  Synthetic oligonucleotide
gcccttattcttcttacacctgaggatgaggcttgttccttttgtatcttaaaag

SEQ ID NO: 239944 - DNA, 55 bp, Artificial
  Synthetic oligonucleotide
gccctacaccaccaataagaatattcctacttcactagcgccgtatctatcaagt

SEQ ID NO: 239945 - DNA, 55 bp, Artificial
  Synthetic oligonucleotide
gccccagttgtcggaagcttcatcgagggcctttactatattgtcgtttaagcct

SEQ ID NO: 239946 - DNA, 55 bp, Artificial
  Synthetic oligonucleotide
ttcgtctccgagcctcgacgagaggacctcttctgcccgcgctatggaagtttcc

SEQ ID NO: 239947 - DNA, 55 bp, Artificial
  Synthetic oligonucleotide
gcccatggatctgcctttgacacttcatccgctaactttgaaccagctccctgag

SEQ ID NO: 239948 - DNA, 58 bp, Artificial
  Synthetic oligonucleotide
gtcagtttaatgggggctagattcgcttttgaaaggccataattatatagcttaagca

SEQ ID NO: 239949 - DNA, 60 bp, Artificial
  Synthetic oligonucleotide
atcttaaagtgtgctctattgcttccttcaccataaaatagtgttcatcaatagtgggac

SEQ ID NO: 239950 - DNA, 55 bp, Artificial
  Synthetic oligonucleotide
ggtagctcaaggcgcaagagatcttgcaaaagtaatgaccatttatttatacatg

SEQ ID NO: 239951 - DNA, 55 bp, Artificial
  Synthetic oligonucleotide
gctcatcaagactcatcaatgcagtggcactttctaaggctgtaaaactaaatga

SEQ ID NO: 239952 - DNA, 55 bp, Artificial
  Synthetic oligonucleotide
ttaatgcgtatgagataaatgcagcgtattatagatttataggacttggatacat

SEQ ID NO: 239953 - DNA, 55 bp, Artificial
  Synthetic oligonucleotide
gctcacggcttcacatattaaattgttgatgtattactacactggctgcagacta

SEQ ID NO: 239954 - DNA, 55 bp, Artificial
  Synthetic oligonucleotide
gctcaacttccatatccaatgccgcaatataaatcatcactatccctataacgcc

SEQ ID NO: 239955 - DNA, 55 bp, Artificial
  Synthetic oligonucleotide
gctattgttgagacggctgatggtgataaggagggtaagaaggctagtgatgctc

SEQ ID NO: 239956 - DNA, 55 bp, Artificial
  Synthetic oligonucleotide
gctattgtgttgtactactattgctagcctaccagaagagccaaaacctccaatt

SEQ ID NO: 239957 - DNA, 55 bp, Artificial
  Synthetic oligonucleotide
tgaacttgcaaaatttcataacgaaagatctaaaaactagattagtataattaga

SEQ ID NO: 239958 - DNA, 55 bp, Artificial
  Synthetic oligonucleotide
gctattgctaaatctggtgaggctgctaataatgatgttggtattgatcaagcaa

SEQ ID NO: 239959 - DNA, 53 bp, Artificial
  Synthetic oligonucleotide
gctatggcggcctctaccgattcgggtattaacacgcaccgttttaggggttg

SEQ ID NO: 239960 - DNA, 55 bp, Artificial
  Synthetic oligonucleotide
taacctatcggccttgcccaaattccaccaattttcatcatttaccttatcaact

SEQ ID NO: 239961 - DNA, 55 bp, Artificial
  Synthetic oligonucleotide
gttccttcaggtaaacggtatgcgtctatgagttctcctgtaagggcaatcgcgg

SEQ ID NO: 239962 - DNA, 55 bp, Artificial
  Synthetic oligonucleotide
tcaaagatacggtgcgggaaaactgccccggacacggactcgctctgcatcaggg

SEQ ID NO: 239963 - DNA, 55 bp, Artificial
  Synthetic oligonucleotide
gctagcagtaagcttatgcttgatgatcctgatcctagtattagtgaatatggcc

SEQ ID NO: 239964 - DNA, 55 bp, Artificial
  Synthetic oligonucleotide
gctagcagcctctcaaggaaaaggacttgttcccaaaattgcaataggtagtgct

SEQ ID NO: 239965 - DNA, 55 bp, Artificial
  Synthetic oligonucleotide
gtaagcgaggaattagacggggagtagtagtagtgcttacgcaagttttggtaga

SEQ ID NO: 239966 - DNA, 55 bp, Artificial
  Synthetic oligonucleotide
gttgaagtcgtaaggtattcgtaatgagtgtagtcgccccaggtgattccttcgt

SEQ ID NO: 239967 - DNA, 55 bp, Artificial
  Synthetic oligonucleotide
gctaccagtggtatgtcaacacggtagaatctacggaaggcggtacccctgtgtc

SEQ ID NO: 239968 - DNA, 52 bp, Artificial
  Synthetic oligonucleotide
gcttctcttaaggctagtccaccacttgttaccttggaaccggttttaagac

SEQ ID NO: 239969 - DNA, 55 bp, Artificial
  Synthetic oligonucleotide
gttcacactaattaggacaaccagaaatagttataagaaacgcacgatcttgctc

SEQ ID NO: 239970 - DNA, 55 bp, Artificial
  Synthetic oligonucleotide
gtaaatgctttgtccgataacagaaccgtcactaccgattcctgtcacctgaact

SEQ ID NO: 239971 - DNA, 60 bp, Artificial
  Synthetic oligonucleotide
atctgtaatcaacccatcatcacatactatcataacacctctagcaagcccaataacaag

SEQ ID NO: 239972 - DNA, 55 bp, Artificial
  Synthetic oligonucleotide
gctgtaattacgagtctttcgtttaaagacactcctttcattgatgaggttgaag

SEQ ID NO: 239973 - DNA, 55 bp, Artificial
  Synthetic oligonucleotide
tcaatcaatcgcactaaggtgctcattttaaaagacaaatctccccaccgctttt

SEQ ID NO: 239974 - DNA, 55 bp, Artificial
  Synthetic oligonucleotide
tgcatgtcaggagtaaccaatccgccgaatcggagaaaactagtctcaagacaca

SEQ ID NO: 239975 - DNA, 55 bp, Artificial
  Synthetic oligonucleotide
gctgcgcttaaatctagtggcgctatgagcggcgaggatgctgtaaaagctgtta

SEQ ID NO: 239976 - DNA, 55 bp, Artificial
  Synthetic oligonucleotide
gctgcagccccaacttccccaatctttacttcactaccatcagtagccttcgcaa

SEQ ID NO: 239977 - DNA, 55 bp, Artificial
  Synthetic oligonucleotide
gctgaggctactgctactgccgtgaaaacattggttgagaatacacttgataaga

SEQ ID NO: 239978 - DNA, 55 bp, Artificial
  Synthetic oligonucleotide
gctcttcccgttgaagggcaatataactgatatccgtttcagaagggaggtcccc

SEQ ID NO: 239979 - DNA, 55 bp, Artificial
  Synthetic oligonucleotide
ttaagctgtgattttgctcctcatcgtaaagaaggtccattattgctccaaatcg

SEQ ID NO: 239980 - DNA, 55 bp, Artificial
  Synthetic oligonucleotide
tgaagctctcggctgtctttagcggcacccacgcggaaggtactgcggtgagtgc

SEQ ID NO: 239981 - DNA, 53 bp, Artificial
  Synthetic oligonucleotide
gctctaacgagcataactcccttaaagttgttaaactagactttcttccccac

SEQ ID NO: 239982 - DNA, 57 bp, Artificial
  Synthetic oligonucleotide
taactagaagttttaatgagcaggctaaaggactaggaaatgatggtaaaggtgata

SEQ ID NO: 239983 - DNA, 55 bp, Artificial
  Synthetic oligonucleotide
gctcgggatttgttaaatgggtggcggattcgatttatcaatcaatgacaggacg

SEQ ID NO: 239984 - DNA, 55 bp, Artificial
  Synthetic oligonucleotide
ttaatagcagtggtgcgccaacagttacaactggaaaaacaggtcctcttgtttg

SEQ ID NO: 239985 - DNA, 55 bp, Artificial
  Synthetic oligonucleotide
gctcgccatgttgattaaaatgaagcttgtcacccggttttatatcacttccagg

SEQ ID NO: 239986 - DNA, 55 bp, Artificial
  Synthetic oligonucleotide
gctcgagggaatgccggatctctggcccattatggtgccgccaacttcaagtgcg

SEQ ID NO: 239987 - DNA, 55 bp, Artificial
  Synthetic oligonucleotide
gcgtcaataggattttcagcatccgcagccttcactcctgtcttcccgccaccag

SEQ ID NO: 239988 - DNA, 55 bp, Artificial
  Synthetic oligonucleotide
gcgtatttcatcgcctaaagaaacgaagaacgactgacagcctatgaacagttcc

SEQ ID NO: 239989 - DNA, 55 bp, Artificial
  Synthetic oligonucleotide
ggtagtctctccaaagctctctcttcgattgctgaaggatcacaaattattgcaa

SEQ ID NO: 239990 - DNA, 55 bp, Artificial
  Synthetic oligonucleotide
gcgggttacttggggactcctatgagcactgattaccctagtggggattttagtg

SEQ ID NO: 239991 - DNA, 55 bp, Artificial
  Synthetic oligonucleotide
gcgggttaagaatccgctgctcttaccacctgagctagcagcccgtagtttatat

SEQ ID NO: 239992 - DNA, 55 bp, Artificial
  Synthetic oligonucleotide
gcgggacttaaagacttgatgattaatagagtgcttaaatattttgggatgagcc

SEQ ID NO: 239993 - DNA, 60 bp, Artificial
  Synthetic oligonucleotide
taactattggatcttacgattataagcaactaacagatatgtctcaaaatcaattttaca

SEQ ID NO: 239994 - DNA, 55 bp, Artificial
  Synthetic oligonucleotide
ttagcttttaaagaaggtgtcactctttctggggatccgattgatgaggctttta

SEQ ID NO: 239995 - DNA, 51 bp, Artificial
  Synthetic oligonucleotide
gtttaacggtgaacccaggttagtagcggaaagaccgacgtacatgttggg

SEQ ID NO: 239996 - DNA, 55 bp, Artificial
  Synthetic oligonucleotide
ttagtgatctcaacggagtgcatcaaacttgtatgaccgatatccgttgactcat

SEQ ID NO: 239997 - DNA, 55 bp, Artificial
  Synthetic oligonucleotide
tctttagtttgtaccatccgtcaagaagagtgatagttgtgttatgttgtttccc

SEQ ID NO: 239998 - DNA, 55 bp, Artificial
  Synthetic oligonucleotide
gtacatatgtagaggagaaagtgttgcaagtaataatgccttttctatgtggtgc

SEQ ID NO: 239999 - DNA, 55 bp, Artificial
  Synthetic oligonucleotide
gcggcactgcgaataatcgctccgagattgttggagttccccacgcggtctaaaa

SEQ ID NO: 240000 - DNA, 55 bp, Artificial
  Synthetic oligonucleotide
gcggaattgaatgcgccatgatatgtggttaataaagctacctactatagtatgg

SEQ ID NO: 240001 - DNA, 55 bp, Artificial
  Synthetic oligonucleotide
gtgaagacactcttgaacaccttttatcgcaaacctttagatcagaagttaacgc

SEQ ID NO: 240002 - DNA, 55 bp, Artificial
  Synthetic oligonucleotide
tcttgcatcaattataggaaaccatgaattaggctgaattccccatttagcagca

SEQ ID NO: 240003 - DNA, 52 bp, Artificial
  Synthetic oligonucleotide
gcgcctttcccgttaccgcgtcggttataaacgaaccgatacgccaatcgcc

SEQ ID NO: 240004 - DNA, 60 bp, Artificial
  Synthetic oligonucleotide
taactccaacaatagctgaaacactagctccagtgaatgacaaaatcaatcaatgtatcg

SEQ ID NO: 240005 - DNA, 52 bp, Artificial
  Synthetic oligonucleotide
gtaccgacggaattgggctattacgatctaagggtacccgaggttcgggagc

SEQ ID NO: 240006 - DNA, 55 bp, Artificial
  Synthetic oligonucleotide
gttgcagttcttcaaaaaggcgtagtgtaccccgactttgcagacaaagtcggca

SEQ ID NO: 240007 - DNA, 55 bp, Artificial
  Synthetic oligonucleotide
ttacctgtcttaaccaatgatcgtagcgctataccacctgctaccgctgctgctt

SEQ ID NO: 240008 - DNA, 55 bp, Artificial
  Synthetic oligonucleotide
gtaataaaggagttagaatggatattgactatgcaatttacagaatgggccagcg

SEQ ID NO: 240009 - DNA, 55 bp, Artificial
  Synthetic oligonucleotide
gctaagtctgcacgagtctttgctccagcattagcatcagttccatgaactttag

SEQ ID NO: 240010 - DNA, 55 bp, Artificial
  Synthetic oligonucleotide
tattctggcgaagaggagagccctgagtattattgtaatatgcctagacccactg

SEQ ID NO: 240011 - DNA, 55 bp, Artificial
  Synthetic oligonucleotide
ttacgcataaagttgtaatacctattcaagcagaaaggtggtctgtagagtctct

SEQ ID NO: 240012 - DNA, 55 bp, Artificial
  Synthetic oligonucleotide
gcgttttggttggtttcatttagattgtcgaattgcgatttgtgatcatctacga

SEQ ID NO: 240013 - DNA, 55 bp, Artificial
  Synthetic oligonucleotide
ttacgtaccgttaccagctcaatggctgcgagccccataccctgaagagaattgg

SEQ ID NO: 240014 - DNA, 55 bp, Artificial
  Synthetic oligonucleotide
gcgttttgaattgggtgtagtcaaccgagtatacgttcgactgcctggtcaccat

SEQ ID NO: 240015 - DNA, 56 bp, Artificial
  Synthetic oligonucleotide
taactcgtctattttagaaagcgtggtaacaagcttaatactagaatattgtttga

SEQ ID NO: 240016 - DNA, 54 bp, Artificial
  Synthetic oligonucleotide
gttgcggtttctctaacggagtacccgctaaactcaacagtttgctctggtatt

SEQ ID NO: 240017 - DNA, 55 bp, Artificial
  Synthetic oligonucleotide
gtaatcgcacagattccgcgtttccttcgttccgttattgcagaccgcctcgtat

SEQ ID NO: 240018 - DNA, 55 bp, Artificial
  Synthetic oligonucleotide
gttggcctgtttgaaacaaatctcgcaccacctctagcaagttttagctcttcaa

SEQ ID NO: 240019 - DNA, 55 bp, Artificial
  Synthetic oligonucleotide
gcgtggtaacaagcttaatactagaatattgtttgaatgcaccactgacatagac

SEQ ID NO: 240020 - DNA, 55 bp, Artificial
  Synthetic oligonucleotide
gcgtcgttatcgacttgttcttcgtcagcgaaaccaagctatcaaggatggtcga

SEQ ID NO: 240021 - DNA, 55 bp, Artificial
  Synthetic oligonucleotide
gcgtcgctttgattaaatcccagcaccttgtcccattcatagaccgacaatactc

SEQ ID NO: 240022 - DNA, 55 bp, Artificial
  Synthetic oligonucleotide
gtgactcttataagaatcttcttgtgtatgccctaagcttcttgacccagaagag

SEQ ID NO: 240023 - DNA, 55 bp, Artificial
  Synthetic oligonucleotide
gcgtcatatagcttaagtcatgtcttcttgtgccaatgcatggccataaaggcgc

SEQ ID NO: 240024 - DNA, 55 bp, Artificial
  Synthetic oligonucleotide
gttgtatgacgttgaacccatagaaacgccaatacgctgcaaattgtgaattcct

SEQ ID NO: 240025 - DNA, 55 bp, Artificial
  Synthetic oligonucleotide
acgagaagggagtacatcctgtggcatccttgaaaagtcgctgtgcatgccacgg

SEQ ID NO: 240026 - DNA, 56 bp, Artificial
  Synthetic oligonucleotide
taagaaaagggcaatatcagatagattaaagggactactaccaacaggtggtacag

SEQ ID NO: 240027 - DNA, 55 bp, Artificial
  Synthetic oligonucleotide
caggagcatataatattgcgttggatatcaatggtaagttgacggtattagaggg

SEQ ID NO: 240028 - DNA, 55 bp, Artificial
  Synthetic oligonucleotide
acgagaggtatcataatgtggaatatacagacgaggcaatacaagcttgcattct

SEQ ID NO: 240029 - DNA, 55 bp, Artificial
  Synthetic oligonucleotide
cgctgggaaacaaggcgctgcatagcagtaaatacccggccctctacagtggacg

SEQ ID NO: 240030 - DNA, 55 bp, Artificial
  Synthetic oligonucleotide
cagcggaatctggaaatcgtttcaaatatgcgtgatgcctccaatgcgtatacac

SEQ ID NO: 240031 - DNA, 55 bp, Artificial
  Synthetic oligonucleotide
cgcttgacccactcgaataaactggatctcccggtttgatgatgggtgattcaac

SEQ ID NO: 240032 - DNA, 55 bp, Artificial
  Synthetic oligonucleotide
cgcttgctgatgatatagaagaatctaaaatggctagaagatgtttgtatgcggt

SEQ ID NO: 240033 - DNA, 55 bp, Artificial
  Synthetic oligonucleotide
cgcttgtccagtttgtatattgggttttaggttttctcttcttcagagatagcca

SEQ ID NO: 240034 - DNA, 55 bp, Artificial
  Synthetic oligonucleotide
cgctttgacgctcaccttgtaaaagaacaactagccaatagacttcaagctcaag

SEQ ID NO: 240035 - DNA, 55 bp, Artificial
  Synthetic oligonucleotide
aagtacatatcatctatgtagttcttaatagatacaatgccccctatatcattac

SEQ ID NO: 240036 - DNA, 55 bp, Artificial
  Synthetic oligonucleotide
cggacatccttaactcaggcggtatgacaggcagtgtgcataaggcatgagaagg

SEQ ID NO: 240037 - DNA, 57 bp, Artificial
  Synthetic oligonucleotide
atcggtgcggctttttacttttggaccaattggattaacagcacatgaagtgccaat

SEQ ID NO: 240038 - DNA, 55 bp, Artificial
  Synthetic oligonucleotide
cggacttgttcttgagagtgctgcccacaatgttagtgagcttgaacttgctaga

SEQ ID NO: 240039 - DNA, 55 bp, Artificial
  Synthetic oligonucleotide
cggaggacaaaacgcaccctgcaacgctaaagcgctatgggttcacttctcggcg

SEQ ID NO: 240040 - DNA, 55 bp, Artificial
  Synthetic oligonucleotide
cggaggacttcttatcggatcggtctcatgacaagtacgggatcttagtctgtag

SEQ ID NO: 240041 - DNA, 55 bp, Artificial
  Synthetic oligonucleotide
cagcctgggtgatttgctgtacaatgggatgtaccccaggatttatgatcagcat

SEQ ID NO: 240042 - DNA, 55 bp, Artificial
  Synthetic oligonucleotide
cagcctctccagacttagcaatagcttgcaacatatcagtcccacttacagctcc

SEQ ID NO: 240043 - DNA, 55 bp, Artificial
  Synthetic oligonucleotide
acgatattgcttcggagcggctgatggtacgaaagctcattgtcgattcggctgt

SEQ ID NO: 240044 - DNA, 55 bp, Artificial
  Synthetic oligonucleotide
cagcagggatagcattaagagggatggcaaaagatggtaagtttgcagctaaaag

SEQ ID NO: 240045 - DNA, 55 bp, Artificial
  Synthetic oligonucleotide
cagcagcactaaatttaccactcttagtcattgccttaagagctactgctgctac

SEQ ID NO: 240046 - DNA, 54 bp, Artificial
  Synthetic oligonucleotide
cggatttttctagatgttgttttgctgtaaatatttcgggtttttgctcatttg

SEQ ID NO: 240047 - DNA, 55 bp, Artificial
  Synthetic oligonucleotide
cggcataactatcataggagactcaactattaactatgcaagcctaagagctgta

SEQ ID NO: 240048 - DNA, 60 bp, Artificial
  Synthetic oligonucleotide
taagagcgtatgatcttgctcctcaaggattcttagtatacagagttaaccatcacgaac

SEQ ID NO: 240049 - DNA, 55 bp, Artificial
  Synthetic oligonucleotide
cggcattttagctttcaaagaaggggttagtctctcaggcgatccgattgatgag

SEQ ID NO: 240050 - DNA, 55 bp, Artificial
  Synthetic oligonucleotide
aagggatgtctcctgatacagggtaatcgtatccttgttcccatcgccgtcaggg

SEQ ID NO: 240051 - DNA, 55 bp, Artificial
  Synthetic oligonucleotide
cagcagcaatcggatttgtagcctccccaggcttctctccatcctgctcagcctc

SEQ ID NO: 240052 - DNA, 55 bp, Artificial
  Synthetic oligonucleotide
cggccgaaagcttgcgataatgctcgttgatgtgtgccataatgctatgtactcc

SEQ ID NO: 240053 - DNA, 55 bp, Artificial
  Synthetic oligonucleotide
cagcaacacttgagctaattgctctatagcttgcacttgtggcacatccgcttgc

SEQ ID NO: 240054 - DNA, 55 bp, Artificial
  Synthetic oligonucleotide
cagatggaaagtttgatactatggctggtaagaatggatcattgcttgcaggagc

SEQ ID NO: 240055 - DNA, 55 bp, Artificial
  Synthetic oligonucleotide
cggcgcacttttgctgcgtcgtagccggccctgagaacccgctcaatttctgtcc

SEQ ID NO: 240056 - DNA, 55 bp, Artificial
  Synthetic oligonucleotide
cagaggcctacctcaatgtacggtgttacaaaggttgccggagaacttttgtgcg

SEQ ID NO: 240057 - DNA, 55 bp, Artificial
  Synthetic oligonucleotide
cggctagatcatatgcagtcatgtccttgaccgatggcaaagttgctgattgtag

SEQ ID NO: 240058 - DNA, 55 bp, Artificial
  Synthetic oligonucleotide
cggctttcgttgatgcgtcgcacaagctccgcagccatcggacgaagagcgcctt

SEQ ID NO: 240059 - DNA, 60 bp, Artificial
  Synthetic oligonucleotide
cagtccattcagcagtcatgaagtcttgagtatttacacatctaattacggctgtatatt

SEQ ID NO: 240060 - DNA, 59 bp, Artificial
  Synthetic oligonucleotide
taagcatcctctgtcattgcctcattaacagtaagaagtcttttaccctcaatagggta

SEQ ID NO: 240061 - DNA, 55 bp, Artificial
  Synthetic oligonucleotide
cggctttgctaagctacctaaaccatttattgtgcattacaaagagaatgaggtc

SEQ ID NO: 240062 - DNA, 55 bp, Artificial
  Synthetic oligonucleotide
cgattgccggggaagttacgaggttgtttgcacgttcccagtcagctacaaagcg

SEQ ID NO: 240063 - DNA, 55 bp, Artificial
  Synthetic oligonucleotide
catcacaagaagcaactattgtggcaaagtgttcaggaatggttgctgagggtgc

SEQ ID NO: 240064 - DNA, 55 bp, Artificial
  Synthetic oligonucleotide
cgcagattgctgttatttggggaacgccaactcccgcaacgattcttgtcgtaca

SEQ ID NO: 240065 - DNA, 55 bp, Artificial
  Synthetic oligonucleotide
acctattacaggtcgatccccgaccatgcacaacttcataaggaactactgcgat

SEQ ID NO: 240066 - DNA, 55 bp, Artificial
  Synthetic oligonucleotide
aatcctgtagggttaattttaagtggcggtcctgcttctgtatatttggatgaag

SEQ ID NO: 240067 - DNA, 53 bp, Artificial
  Synthetic oligonucleotide
cgcataaccctggccgtattaccccgcattaccccgttatcggtctatgggcc

SEQ ID NO: 240068 - DNA, 55 bp, Artificial
  Synthetic oligonucleotide
cgcatgatagagttcaagcaccatggaagacaatacctcaaggttcggtcctaaa

SEQ ID NO: 240069 - DNA, 55 bp, Artificial
  Synthetic oligonucleotide
cgcccaaacttctagaattgcttgagtcataatgtcttaggaatcgaccagacaa

SEQ ID NO: 240070 - DNA, 55 bp, Artificial
  Synthetic oligonucleotide
cgccccacttggcacatcagattgatatatgggcaggtcggattaaatgtatcgg

SEQ ID NO: 240071 - DNA, 55 bp, Artificial
  Synthetic oligonucleotide
taaggtggttgggggcaactgtcccgaagtaaagcttgtagattatgccccggca

SEQ ID NO: 240072 - DNA, 55 bp, Artificial
  Synthetic oligonucleotide
cgcccgatgctgtttgcggctatgtatcgcgtggacgcggcgttattatccaccg

SEQ ID NO: 240073 - DNA, 55 bp, Artificial
  Synthetic oligonucleotide
cataaaagaaatgcccgtatggtactgtcctgatcttgggacagtattatcgaac

SEQ ID NO: 240074 - DNA, 55 bp, Artificial
  Synthetic oligonucleotide
cgccgtacaagtttgcatacactttaacccaaccatactcacccatatcatgacg

SEQ ID NO: 240075 - DNA, 55 bp, Artificial
  Synthetic oligonucleotide
cagttcagcgccgatgacatagagatgcttattcctacaatgagagagcaaggcg

SEQ ID NO: 240076 - DNA, 53 bp, Artificial
  Synthetic oligonucleotide
cgcctatctgaaagtccgggacgggaaataacccagaaagggtggcgcagact

SEQ ID NO: 240077 - DNA, 55 bp, Artificial
  Synthetic oligonucleotide
cgccttgagacccctgcagagatacgctcctacagaatactcggggctgattacg

SEQ ID NO: 240078 - DNA, 55 bp, Artificial
  Synthetic oligonucleotide
cagttacctgagcaatatctcttattcgccttaacaatctatttgctatgcgggg

SEQ ID NO: 240079 - DNA, 55 bp, Artificial
  Synthetic oligonucleotide
cagttaagtcatctggggtataatatgctccgcttttctttctatcaagcgatct

SEQ ID NO: 240080 - DNA, 55 bp, Artificial
  Synthetic oligonucleotide
cagtgcacgcacaatgtggtacatggaggtgggttcctacggactgctcaccttc

SEQ ID NO: 240081 - DNA, 55 bp, Artificial
  Synthetic oligonucleotide
cgcgacatgtccgtcttcaataacgaaaatggtatccgcatcttttatggtcgtc

SEQ ID NO: 240082 - DNA, 56 bp, Artificial
  Synthetic oligonucleotide
taagtagagtagtaatcgggtctcttactcttgaagggtgtattatacaacctcca

SEQ ID NO: 240083 - DNA, 55 bp, Artificial
  Synthetic oligonucleotide
cgcgatatgtgcttttgatgatgcatacggcaggattgtcttcatttgacagata

SEQ ID NO: 240084 - DNA, 55 bp, Artificial
  Synthetic oligonucleotide
cgcgcagaagcatgccggcttattttggttctaacgaacatttatacgcacggca

SEQ ID NO: 240085 - DNA, 53 bp, Artificial
  Synthetic oligonucleotide
cagtctaattcccttgaaactaccacctttgtttattttaactactctatggc

SEQ ID NO: 240086 - DNA, 55 bp, Artificial
  Synthetic oligonucleotide
cgcgcctcggacattcttgcaaccctatatcggcaaacaatgttcgcggagtttg

SEQ ID NO: 240087 - DNA, 55 bp, Artificial
  Synthetic oligonucleotide
cgcgcgcgtacaaccgatcctgcacacacgaacagcacagaggaaccgtcccagt

SEQ ID NO: 240088 - DNA, 55 bp, Artificial
  Synthetic oligonucleotide
cgcgcgctaatcgcaagctctgcagtaccacgcgtgagcactacgctccccaaaa

SEQ ID NO: 240089 - DNA, 55 bp, Artificial
  Synthetic oligonucleotide
cagtccacttttaagcagcaagttcagatattttcataccggtaagaagtgcgaa

SEQ ID NO: 240090 - DNA, 55 bp, Artificial
  Synthetic oligonucleotide
caggggcaggttggacaacaagcttggaagtgtgctaatagtttggggttgggcg

SEQ ID NO: 240091 - DNA, 55 bp, Artificial
  Synthetic oligonucleotide
acctttggttgagtgtattacaaatgcgttaagagacggtggtggatttagtgca

SEQ ID NO: 240092 - DNA, 55 bp, Artificial
  Synthetic oligonucleotide
cgcgtggggagcagaaaactctagcgagggaacggagacgtccaactcctgctct

SEQ ID NO: 240093 - DNA, 60 bp, Artificial
  Synthetic oligonucleotide
atcgatttattatagctatctttaagatatcttcagcaatattagattgaaaatctggag

SEQ ID NO: 240094 - DNA, 55 bp, Artificial
  Synthetic oligonucleotide
cgctaggaaagttagaagcgaattagatatagagcgggctaatttagaattagga

SEQ ID NO: 240095 - DNA, 55 bp, Artificial
  Synthetic oligonucleotide
aagtattctggcgaggggagccatgagtataatcgtaatatgcctagacccactg

SEQ ID NO: 240096 - DNA, 55 bp, Artificial
  Synthetic oligonucleotide
acgacttggcgaagttgttgaccgctttgacgttgttttgcttgcaccacagtca

SEQ ID NO: 240097 - DNA, 55 bp, Artificial
  Synthetic oligonucleotide
caccttgagtatcaaacaactttcccgcatcctcattactattaccagcagcctc

SEQ ID NO: 240098 - DNA, 55 bp, Artificial
  Synthetic oligonucleotide
caccctgacccgaggagtgctgaagcggcttactctatttccaacgccatatctg

SEQ ID NO: 240099 - DNA, 55 bp, Artificial
  Synthetic oligonucleotide
cgtccgcagggtatccttggaagggaggaacactcctatggaaggggacatggcc

SEQ ID NO: 240100 - DNA, 52 bp, Artificial
  Synthetic oligonucleotide
cgtcgtaactgacaaggacttaatggttccgacgttctttacgacaccgtaa

SEQ ID NO: 240101 - DNA, 55 bp, Artificial
  Synthetic oligonucleotide
cgtctatggtgtaggggttattcttgctaacttaggctgcacaattcactagaca

SEQ ID NO: 240102 - DNA, 55 bp, Artificial
  Synthetic oligonucleotide
cgtctctgcagagggtgcgttgagtatttcggtagagagtgacgcagatggcgcg

SEQ ID NO: 240103 - DNA, 55 bp, Artificial
  Synthetic oligonucleotide
acgctaattgctcgttagcaaccaaatgtattacccgcgctaattgctcgttagc

SEQ ID NO: 240104 - DNA, 60 bp, Artificial
  Synthetic oligonucleotide
atccttatggtatgccactggctgctacaccgcttgttgacgacactgtaattggaaagt

SEQ ID NO: 240105 - DNA, 55 bp, Artificial
  Synthetic oligonucleotide
cgtgcaaaatagggaaaaccacatcgatagtctgggctgtaggctgaggttcccc

SEQ ID NO: 240106 - DNA, 55 bp, Artificial
  Synthetic oligonucleotide
caccaatttacaatggttggtactacgttgggtcaggcagaatacacaaaggcca

SEQ ID NO: 240107 - DNA, 55 bp, Artificial
  Synthetic oligonucleotide
cgtggatgagtggattcagaagaaatacaacgataaattagggtttaccatccaa

SEQ ID NO: 240108 - DNA, 55 bp, Artificial
  Synthetic oligonucleotide
cacatactatcataacacctctagcaagcccaataacaagagcagcggttagcag

SEQ ID NO: 240109 - DNA, 55 bp, Artificial
  Synthetic oligonucleotide
cacaggaagcagcgaaaggtgctactggcactagtagtgaattaattgggagtgc

SEQ ID NO: 240110 - DNA, 55 bp, Artificial
  Synthetic oligonucleotide
cgtggtttatatatgggatgtcagctgctattaacaccgggacaatcgatattag

SEQ ID NO: 240111 - DNA, 55 bp, Artificial
  Synthetic oligonucleotide
cacaactgacgacttgcttacgctggataccaaggaattcgtctttgaaggacct

SEQ ID NO: 240112 - DNA, 55 bp, Artificial
  Synthetic oligonucleotide
caatttcattgctttcaataggctcctccaattcaccactttcaccgctaaggga

SEQ ID NO: 240113 - DNA, 55 bp, Artificial
  Synthetic oligonucleotide
caatgggcaggactaagttactgggattacattgtactccatccggatgaagatg

SEQ ID NO: 240114 - DNA, 53 bp, Artificial
  Synthetic oligonucleotide
cgttaaataccccgtaaagttatttgtaatcggcattacagttgccatcccac

SEQ ID NO: 240115 - DNA, 55 bp, Artificial
  Synthetic oligonucleotide
taagtctaaatttacacctaatctacatataagtttacttaatagctttataagc

SEQ ID NO: 240116 - DNA, 55 bp, Artificial
  Synthetic oligonucleotide
cgttagctaacgaacttgctaggcttaaaagcaatcttaacaatgaggggatgtt

SEQ ID NO: 240117 - DNA, 55 bp, Artificial
  Synthetic oligonucleotide
caatctcttatggatgtgactgctgcaggcatggagccagtgcttaaaggagctt

SEQ ID NO: 240118 - DNA, 55 bp, Artificial
  Synthetic oligonucleotide
caatcccattaacactcgcctggttcgcagcagtaccttgattagctgcagcccc

SEQ ID NO: 240119 - DNA, 55 bp, Artificial
  Synthetic oligonucleotide
aagacagccatattgttctaccaccactgttttagcgcccgtacgagccgcgccg

SEQ ID NO: 240120 - DNA, 55 bp, Artificial
  Synthetic oligonucleotide
caatccagtaatgactggtgaaaatatctctttaaacggcgggatacttacatcc

SEQ ID NO: 240121 - DNA, 55 bp, Artificial
  Synthetic oligonucleotide
cgtttccctgcgaatttgtgtctaggaagtccacattggattgtggataatgtgt

SEQ ID NO: 240122 - DNA, 54 bp, Artificial
  Synthetic oligonucleotide
acggacggaacggtaataaccgactatgcgtgcatatacttccgttgtagtacc

SEQ ID NO: 240123 - DNA, 55 bp, Artificial
  Synthetic oligonucleotide
cgttttgagcaagttgcatgtttgaagccgagctatagtacacttccttcggggc

SEQ ID NO: 240124 - DNA, 55 bp, Artificial
  Synthetic oligonucleotide
caagggcacactccagatcgataccgtcacggattccctcgaagtaaatcggctc

SEQ ID NO: 240125 - DNA, 54 bp, Artificial
  Synthetic oligonucleotide
caagcggctacttggaacaatacgccctcattaaaagaaaacgtaaatgttagc

SEQ ID NO: 240126 - DNA, 60 bp, Artificial
  Synthetic oligonucleotide
taagtctgtatctaaatcataccaagcaatgtatatagcgttggacctatcggtaaaatg

SEQ ID NO: 240127 - DNA, 55 bp, Artificial
  Synthetic oligonucleotide
ctaaagctataggcaaaaagattgatgctaatggtagtcttgctgctgaagttgg

SEQ ID NO: 240128 - DNA, 55 bp, Artificial
  Synthetic oligonucleotide
ctaaagttataagtgcgctggaatttgaagagtacatgcgctttaaagagcaagc

SEQ ID NO: 240129 - DNA, 55 bp, Artificial
  Synthetic oligonucleotide
ctaaatgaccatggccaatttctcgcctgccagtcattagtctgccggtctcacc

SEQ ID NO: 240130 - DNA, 55 bp, Artificial
  Synthetic oligonucleotide
cgggaactgtatcagtgcaaaaggatggcaatagagcaaaacttctattacctaa

SEQ ID NO: 240131 - DNA, 55 bp, Artificial
  Synthetic oligonucleotide
cgggattccacaaattgtagacactcctatttggtggcaaggcaaaccatatagc

SEQ ID NO: 240132 - DNA, 55 bp, Artificial
  Synthetic oligonucleotide
cgggattttacgcctgttattccaacctcttctagcgattctacaacgtcaagca

SEQ ID NO: 240133 - DNA, 55 bp, Artificial
  Synthetic oligonucleotide
cgggcaggttgaaatttacatattctctataaccctttacaccaatgtaatgggc

SEQ ID NO: 240134 - DNA, 55 bp, Artificial
  Synthetic oligonucleotide
acgcaattctgaatcttgttgttctcaccaccgtacacagcaaaggcattagccc

SEQ ID NO: 240135 - DNA, 55 bp, Artificial
  Synthetic oligonucleotide
cactttgttcatgccctaagcttcttgtaccgtcagaatcggtggagccgccaga

SEQ ID NO: 240136 - DNA, 55 bp, Artificial
  Synthetic oligonucleotide
cacttcttcggggaccttgggtacgccgacgctctgtgctgtaccgaggcccact

SEQ ID NO: 240137 - DNA, 60 bp, Artificial
  Synthetic oligonucleotide
atcctcattaacagaaatctcgccactctcccatttttgtctcattctccacacatttac

SEQ ID NO: 240138 - DNA, 55 bp, Artificial
  Synthetic oligonucleotide
cactggctgctacaccgcttgttgacgacactataattggaaagttacgaactgc

SEQ ID NO: 240139 - DNA, 49 bp, Artificial
  Synthetic oligonucleotide
cggggtatttaacgtttaagaaacctggaagtgatataaaaccgggtga

SEQ ID NO: 240140 - DNA, 55 bp, Artificial
  Synthetic oligonucleotide
cactgatatagatgagtttagtggtatggcaactgtactgccgattacaaataac

SEQ ID NO: 240141 - DNA, 55 bp, Artificial
  Synthetic oligonucleotide
cggggtcgtataagtcggcattggttgctcgtgagggatattacgcagcctagca

SEQ ID NO: 240142 - DNA, 55 bp, Artificial
  Synthetic oligonucleotide
cactaagtccatctttaccattatgacccacaaatccagctaaaccacgctcccc

SEQ ID NO: 240143 - DNA, 55 bp, Artificial
  Synthetic oligonucleotide
cggggttaaatgttgggaagggagactctgatacattcgcaggatacaccgctac

SEQ ID NO: 240144 - DNA, 55 bp, Artificial
  Synthetic oligonucleotide
cacggcctacagggacaaggatgtaaaggttctggccgtggagtatttcgctccc

SEQ ID NO: 240145 - DNA, 55 bp, Artificial
  Synthetic oligonucleotide
cgggttaagacttggaattaacaaaacatggtcgtctcgctggtatgcaagtccg

SEQ ID NO: 240146 - DNA, 55 bp, Artificial
  Synthetic oligonucleotide
cacggagagactaaggctaatgatataagtaaactcttagaagattctcgacaag

SEQ ID NO: 240147 - DNA, 55 bp, Artificial
  Synthetic oligonucleotide
cacggactcgctctgcatcagggaagccaggaccgaatcacggacatattcgtag

SEQ ID NO: 240148 - DNA, 58 bp, Artificial
  Synthetic oligonucleotide
taagtgaactactatttctaaatcaaagattatagaaatagcttcttgtttcatccca

SEQ ID NO: 240149 - DNA, 55 bp, Artificial
  Synthetic oligonucleotide
cggtatgcgcccgctgcgttctcatgccaggtgatcgcgtcggatctctcactca

SEQ ID NO: 240150 - DNA, 55 bp, Artificial
  Synthetic oligonucleotide
cggtatgttgttaattgggaaggcaagtatcatataaatcagcgagtggcacgaa

SEQ ID NO: 240151 - DNA, 55 bp, Artificial
  Synthetic oligonucleotide
cggtctcccctatcccggatattccagaatagtctcccagagatgaccaacgggc

SEQ ID NO: 240152 - DNA, 55 bp, Artificial
  Synthetic oligonucleotide
cggtgagcgagcgcggtattatcatacaggacataagctccgctatgcggctgct

SEQ ID NO: 240153 - DNA, 54 bp, Artificial
  Synthetic oligonucleotide
aagcgctttaacgccgcaggcctgtataaatactaccttatcttcggcctttcg

SEQ ID NO: 240154 - DNA, 55 bp, Artificial
  Synthetic oligonucleotide
acgcctgatatggcaaaatcgactatccctgaaagaaagtacagcgcaaccgtgc

SEQ ID NO: 240155 - DNA, 55 bp, Artificial
  Synthetic oligonucleotide
cggtgggattttggatctctacgagggagagggcactataactaagtgcatcgtg

SEQ ID NO: 240156 - DNA, 55 bp, Artificial
  Synthetic oligonucleotide
cacggaaagagagggcggtctatgatctccagcgatgccgcaagaatatatcgcc

SEQ ID NO: 240157 - DNA, 55 bp, Artificial
  Synthetic oligonucleotide
cacgatggactttaccaacgcaatgtcgtaattgttcgcggcaatttcgtaggcc

SEQ ID NO: 240158 - DNA, 55 bp, Artificial
  Synthetic oligonucleotide
cgtaccttttgacataagtaatagctgatccaaccagttgtggcgttgtatttac

SEQ ID NO: 240159 - DNA, 51 bp, Artificial
  Synthetic oligonucleotide
atccgtaattaatttaaacctatctttaatagcacgtttacctgaatttaa

SEQ ID NO: 240160 - DNA, 55 bp, Artificial
  Synthetic oligonucleotide
cgtactctatggagtcttcacggtgaagcgggaactcaaatcgctcgaatatggg

SEQ ID NO: 240161 - DNA, 55 bp, Artificial
  Synthetic oligonucleotide
cgtactgaggttcactgtacaattctagcaaaagatgcgacaaatcatgtggaag

SEQ ID NO: 240162 - DNA, 55 bp, Artificial
  Synthetic oligonucleotide
cgtatctctaagatatggccatacatcgtgtttcgaatctatactatatggctca

SEQ ID NO: 240163 - DNA, 55 bp, Artificial
  Synthetic oligonucleotide
cacgatattctatactttatcgtgtagtatctctgcaacggcggaccaaggagtc

SEQ ID NO: 240164 - DNA, 55 bp, Artificial
  Synthetic oligonucleotide
cgtcaaaaatcatctatatcttaatgttgacgctaaaattagagatatttacacc

SEQ ID NO: 240165 - DNA, 55 bp, Artificial
  Synthetic oligonucleotide
ccgatctgactgatcccaaagtattgcatgatcatgtcctaagccgtcttgtccc

SEQ ID NO: 240166 - DNA, 55 bp, Artificial
  Synthetic oligonucleotide
cccaaccccgcgttctccgcgtcttgtctcatggcagacggagcaaagaggattg

SEQ ID NO: 240167 - DNA, 55 bp, Artificial
  Synthetic oligonucleotide
ccgatgtacgcacggctatcagtgatgcgcttccctgtgctattcccgtcctggg

SEQ ID NO: 240168 - DNA, 55 bp, Artificial
  Synthetic oligonucleotide
ccgattacttcggaacaccgtcatccgagggcgaaccgccgtgccatacaccctc

SEQ ID NO: 240169 - DNA, 55 bp, Artificial
  Synthetic oligonucleotide
ccgcactaaccgcgtccgaagccttcccaacagcttcagcattagctcgattacc

SEQ ID NO: 240170 - DNA, 60 bp, Artificial
  Synthetic oligonucleotide
gtcattttgagtgtattgttcaagatttgaatttgcataattcagtgttgatattagaat

SEQ ID NO: 240171 - DNA, 60 bp, Artificial
  Synthetic oligonucleotide
taagttcgattctacaaatgaaagattctcttaagatagttcaaagctctactgataaga

SEQ ID NO: 240172 - DNA, 55 bp, Artificial
  Synthetic oligonucleotide
ccgcccatcccataccggtagatttcttaacatcggatgtcataccgataaacga

SEQ ID NO: 240173 - DNA, 55 bp, Artificial
  Synthetic oligonucleotide
cccaaccatactcacccatatcatgacgatacgaaccccagacttttccatacac

SEQ ID NO: 240174 - DNA, 55 bp, Artificial
  Synthetic oligonucleotide
ccgcccatgcgtgtgtagaagcagaaaggcgctgggtaacccgcgtggcaaacac

SEQ ID NO: 240175 - DNA, 55 bp, Artificial
  Synthetic oligonucleotide
ccatcccagtatcttcctatcggctataaaacttcaggtactacgttccatccgt

SEQ ID NO: 240176 - DNA, 55 bp, Artificial
  Synthetic oligonucleotide
ccatataagcgtggggttaaacttgttccgaaagagaccgctatatatgttgaag

SEQ ID NO: 240177 - DNA, 55 bp, Artificial
  Synthetic oligonucleotide
accatcgtgaagcacaattaaccggatacatactaataggggtaggagcaagcat

SEQ ID NO: 240178 - DNA, 55 bp, Artificial
  Synthetic oligonucleotide
ccagtgagtaacggtacatgggcatggctacctgtcatatacagatataaggggt

SEQ ID NO: 240179 - DNA, 55 bp, Artificial
  Synthetic oligonucleotide
acagatagctgtaatgaaaatattaccattcgctacgttaccttcagtataactc

SEQ ID NO: 240180 - DNA, 54 bp, Artificial
  Synthetic oligonucleotide
ccagtaagcaacagactttgtccgttgtacagtgttcgggctttcggccaaggg

SEQ ID NO: 240181 - DNA, 54 bp, Artificial
  Synthetic oligonucleotide
ccaggtataattggttgatacgtaaaacgagcttccaaattccaaatcaccgga

SEQ ID NO: 240182 - DNA, 59 bp, Artificial
  Synthetic oligonucleotide
atccgactattgatatccttcctggcggcacgttggcggtgctttcgaaaatatatcca

SEQ ID NO: 240183 - DNA, 55 bp, Artificial
  Synthetic oligonucleotide
ccgcgagctttcaacgcgcaacattcctgcagagattataggttttgaccccgac

SEQ ID NO: 240184 - DNA, 55 bp, Artificial
  Synthetic oligonucleotide
ccaggaaccggagtatatacccttcggagtcgcggaatctgtgttggttgcatcg

SEQ ID NO: 240185 - DNA, 55 bp, Artificial
  Synthetic oligonucleotide
ccagccgttaaacatgtagctgttaccaatgctcctataggcatacctgcatgag

SEQ ID NO: 240186 - DNA, 54 bp, Artificial
  Synthetic oligonucleotide
ccgctagtaatgttgttggtaatacttataacttcgcgactggttgggttaata

SEQ ID NO: 240187 - DNA, 53 bp, Artificial
  Synthetic oligonucleotide
acccgtagaaggcagaaagaacgcccgctctcccatacggagtacccacccca

SEQ ID NO: 240188 - DNA, 55 bp, Artificial
  Synthetic oligonucleotide
ccggagccgccaattattcaaacactagaatctttggctaaatatgaggcacaac

SEQ ID NO: 240189 - DNA, 55 bp, Artificial
  Synthetic oligonucleotide
ccagattcgatacatagacggcatttgcgtcgatgaaggcccttcggggctctac

SEQ ID NO: 240190 - DNA, 55 bp, Artificial
  Synthetic oligonucleotide
ccagatggaaaagttagtgtggaggcaaacacaaacattaacatgagggaaggac

SEQ ID NO: 240191 - DNA, 55 bp, Artificial
  Synthetic oligonucleotide
ccgggcagtaaagcgtatgcatctccacgataagtacacgaccttattcttggga

SEQ ID NO: 240192 - DNA, 55 bp, Artificial
  Synthetic oligonucleotide
ccgggcccagcgaatatagcttttaccggcccattgtctatcaggattcgaatcg

SEQ ID NO: 240193 - DNA, 60 bp, Artificial
  Synthetic oligonucleotide
taatagttgaccctacaacttcgctcaaactcgtaaagccatacgcagcagcacagggtg

SEQ ID NO: 240194 - DNA, 55 bp, Artificial
  Synthetic oligonucleotide
ccgggcgcaagtaatgtttactcacaatattaggattggagacaatctaagcttt

SEQ ID NO: 240195 - DNA, 55 bp, Artificial
  Synthetic oligonucleotide
ccagatgaaccaaaaccaccaattattcaaacactcggctctttagctaaatatg

SEQ ID NO: 240196 - DNA, 54 bp, Artificial
  Synthetic oligonucleotide
ccgggtacggttgtaacggcttgaataggtattctttgttttgtcggtgatgca

SEQ ID NO: 240197 - DNA, 55 bp, Artificial
  Synthetic oligonucleotide
ccacttgagtaaactggatctccaggtctaatcggtgtggactcaacatcaacta

SEQ ID NO: 240198 - DNA, 55 bp, Artificial
  Synthetic oligonucleotide
ccactggaaatgcagttactcccaaagatgcaactgtagcaggaggaatagctct

SEQ ID NO: 240199 - DNA, 55 bp, Artificial
  Synthetic oligonucleotide
accctaagaaaaggatgatatcagatagatttaagggactattgccgacaagtgg

SEQ ID NO: 240200 - DNA, 55 bp, Artificial
  Synthetic oligonucleotide
ccgtctgcttgcgggtctgaatcaccgcttatattcaccaccgtagaaggccgcg

SEQ ID NO: 240201 - DNA, 52 bp, Artificial
  Synthetic oligonucleotide
cccctacgcaggccgcccggtcattacgtttcacgaagcgtttccgtacttc

SEQ ID NO: 240202 - DNA, 55 bp, Artificial
  Synthetic oligonucleotide
ccccatggtataatattggccgtcctgacagacgataagatcgggatctaaaccg

SEQ ID NO: 240203 - DNA, 55 bp, Artificial
  Synthetic oligonucleotide
ccccatcaataaaatcggcaccaattggatactctattgcataacccctgttaat

SEQ ID NO: 240204 - DNA, 60 bp, Artificial
  Synthetic oligonucleotide
taatatagagcttgtgaggaaagatatagaaatagaataagttggagattgatactaagc

SEQ ID NO: 240205 - DNA, 53 bp, Artificial
  Synthetic oligonucleotide
cccgaaagaaccgcttgtaagacctcttttgtatctgccggcttttcaagggc

SEQ ID NO: 240206 - DNA, 55 bp, Artificial
  Synthetic oligonucleotide
ccccacgaggactatctagtagagttcctatttacaaaggatagtatgtccaaaa

SEQ ID NO: 240207 - DNA, 55 bp, Artificial
  Synthetic oligonucleotide
cccgcaatcttctttgcagcccctaccatcttcttggtgcacaacacttttcacc

SEQ ID NO: 240208 - DNA, 55 bp, Artificial
  Synthetic oligonucleotide
cccgcctaacaatattgccggtatacgctcttcttgaatgaacgtcagcgcagcc

SEQ ID NO: 240209 - DNA, 55 bp, Artificial
  Synthetic oligonucleotide
cccgcttctagcccaggtatattgacaggaatagtgcttgcaataggacgtgccc

SEQ ID NO: 240210 - DNA, 55 bp, Artificial
  Synthetic oligonucleotide
acatggtgctcgtgtggacgtctttcacaggaattacaaacggggtgggagagag

SEQ ID NO: 240211 - DNA, 55 bp, Artificial
  Synthetic oligonucleotide
ccccacaaagtcgcaacgtctcttcttcctcgtctgttaagctgcgattccaatt

SEQ ID NO: 240212 - DNA, 55 bp, Artificial
  Synthetic oligonucleotide
cccattcatagcagcaaaattaccacctgcctcagcagtcccaatagcagccgaa

SEQ ID NO: 240213 - DNA, 55 bp, Artificial
  Synthetic oligonucleotide
acatggggaacttgaaaaggcgactggaaatcagcattctataaatgctatagcg

SEQ ID NO: 240214 - DNA, 55 bp, Artificial
  Synthetic oligonucleotide
cccattcagttttggaatatccgccttatcttcaactttaacaattgaaagatca

SEQ ID NO: 240215 - DNA, 54 bp, Artificial
  Synthetic oligonucleotide
atcccaaaaggaatttcacattaaagctttccctaattagcagtaattatgtaa

SEQ ID NO: 240216 - DNA, 55 bp, Artificial
  Synthetic oligonucleotide
ccctactcctatgtcttgttttggagaggattgataggagtgttggggactgttg

SEQ ID NO: 240217 - DNA, 55 bp, Artificial
  Synthetic oligonucleotide
cccattaacactctcctggttcgcagcagcaccttgattatctgcagtcccaact

SEQ ID NO: 240218 - DNA, 55 bp, Artificial
  Synthetic oligonucleotide
cccatgagtactgattatcccggtggggattttagtgtagagctcgaagttcgtc

SEQ ID NO: 240219 - DNA, 55 bp, Artificial
  Synthetic oligonucleotide
ccctcctgatactgctgatgcttttggagtatttgcagttgctaagttagctaca

SEQ ID NO: 240220 - DNA, 55 bp, Artificial
  Synthetic oligonucleotide
ccctgggcgttgggctcaacattcagtcctatctcgaaaagaaggcgccggggct

SEQ ID NO: 240221 - DNA, 55 bp, Artificial
  Synthetic oligonucleotide
accaacagtacacattaccgccaccctcgagagtacccctgaagccttccgtatg

SEQ ID NO: 240222 - DNA, 55 bp, Artificial
  Synthetic oligonucleotide
cccatcttttgcattagccttagcagcattagtagccgaatgagaaccattgtgc

SEQ ID NO: 240223 - DNA, 55 bp, Artificial
  Synthetic oligonucleotide
ccctgtctccaataaccctggaactacaatttgacccgcatgtaacactcctggc

SEQ ID NO: 240224 - DNA, 55 bp, Artificial
  Synthetic oligonucleotide
cccttatggatgtgaccactacgggtatgcagccagtgcttgaaggcgcttcaag

SEQ ID NO: 240225 - DNA, 55 bp, Artificial
  Synthetic oligonucleotide
cccatatcactagatttgcttgcgtaaaccggatctcctggttttataatgtctg

SEQ ID NO: 240226 - DNA, 52 bp, Artificial
  Synthetic oligonucleotide
atggctagtagggaaatttggacttataagggtgataaaggttatgtaaggg

SEQ ID NO: 240227 - DNA, 55 bp, Artificial
  Synthetic oligonucleotide
accaattccgcttggtattccggcagataccttaacaatgcgggatactacactc

SEQ ID NO: 240228 - DNA, 54 bp, Artificial
  Synthetic oligonucleotide
ccgaacggaagcaaattatcgcacggttcaggtcgggcaaaacacggatattaa

SEQ ID NO: 240229 - DNA, 55 bp, Artificial
  Synthetic oligonucleotide
ccgaacttgcgggacagaaatctctcgagcgctacctgataccaaccgaagacgc

SEQ ID NO: 240230 - DNA, 55 bp, Artificial
  Synthetic oligonucleotide
ccgaaggatcttcccgaggtgatcgtactggatatctcgtctctcgaagtcggcg

SEQ ID NO: 240231 - DNA, 55 bp, Artificial
  Synthetic oligonucleotide
ccgacggtgaatacggtctctaaccttgagtaagagatccttggccgaccgagct

SEQ ID NO: 240232 - DNA, 53 bp, Artificial
  Synthetic oligonucleotide
cccagcaaatagttttccatataagcgtggggttaaacttgttctaaaagaga

SEQ ID NO: 240233 - DNA, 55 bp, Artificial
  Synthetic oligonucleotide
cccaccaatctcactcttctttgtatacgcctttattcctaatgtccccgtaatc

SEQ ID NO: 240234 - DNA, 55 bp, Artificial
  Synthetic oligonucleotide
cccaagcatcaataggagtagatgcaaaagatggagctaaggtattggcagcggg

SEQ ID NO: 240235 - DNA, 55 bp, Artificial
  Synthetic oligonucleotide
cccaactttggtggtccgcacttgggacaattagaaacagtgataaaagcgcacg

SEQ ID NO: 240236 - DNA, 52 bp, Artificial
  Synthetic oligonucleotide
cctggtttgtcccccaatttaactttaaagtatgcatcttcgggtattagta

SEQ ID NO: 240237 - DNA, 60 bp, Artificial
  Synthetic oligonucleotide
atggccgagcttgtatctagcggtcaggcgaacatggaacaggctgcagcggctattgat

SEQ ID NO: 240238 - DNA, 55 bp, Artificial
  Synthetic oligonucleotide
ccaaggcagtacgtcttgaaaagaagtacatcaatttcatctgtatccccaaaac

SEQ ID NO: 240239 - DNA, 54 bp, Artificial
  Synthetic oligonucleotide
cctgtattgatacggtacttgtacacggtatcgggtatgcctaggtatttaccg

SEQ ID NO: 240240 - DNA, 55 bp, Artificial
  Synthetic oligonucleotide
cctgtcccagtgcacgctattgaaaagtatggacaaaggtggacagattctgaga

SEQ ID NO: 240241 - DNA, 55 bp, Artificial
  Synthetic oligonucleotide
ccaaatgatgtaatgcagtatgttgacaagaacggtctgctcgatgatgaaagcc

SEQ ID NO: 240242 - DNA, 55 bp, Artificial
  Synthetic oligonucleotide
aatgcattctctgcacttcttcctacttccagcatcacttcacttaaacttttag

SEQ ID NO: 240243 - DNA, 54 bp, Artificial
  Synthetic oligonucleotide
ccaaataaccgtaaatttgggacagatcacgccctgcacgtttccccactcgcc

SEQ ID NO: 240244 - DNA, 55 bp, Artificial
  Synthetic oligonucleotide
ccttagcatcattatccacaacttctccaattgcatcagtaccacttgaagcccc

SEQ ID NO: 240245 - DNA, 55 bp, Artificial
  Synthetic oligonucleotide
ccaaaatggtttaaatgccagtccggctcaaaacggatcattgttggcgggagcc

SEQ ID NO: 240246 - DNA, 55 bp, Artificial
  Synthetic oligonucleotide
ccttcaatatatctgtatacgggtttatcctcattataaagagcggcaatagccc

SEQ ID NO: 240247 - DNA, 55 bp, Artificial
  Synthetic oligonucleotide
ccttgaaaagggttaagcgctcttttgatgattgtgttgcgtattttagagaagg

SEQ ID NO: 240248 - DNA, 54 bp, Artificial
  Synthetic oligonucleotide
atggcagaataccgtaaaaggctccctcaaaaggtcagaaaaaatggagtaaga

SEQ ID NO: 240249 - DNA, 55 bp, Artificial
  Synthetic oligonucleotide
cattttgcaaaagaacaactagccaatagacttcaagctcaagttccttttagcg

SEQ ID NO: 240250 - DNA, 55 bp, Artificial
  Synthetic oligonucleotide
catttatcactgcttcaagctattctagtaacacgtgggattgatgctagttcac

SEQ ID NO: 240251 - DNA, 50 bp, Artificial
  Synthetic oligonucleotide
ccttttggttcctacggatccaaaagggaaattgaattgccgctattttt

SEQ ID NO: 240252 - DNA, 54 bp, Artificial
  Synthetic oligonucleotide
catttagagtcgttaaaggggataggtggtgatgataacaaaatagtcggttgg

SEQ ID NO: 240253 - DNA, 55 bp, Artificial
  Synthetic oligonucleotide
cgaaatacttcttaagctttaagttacgagagctctcaacttgttcttgtacgcc

SEQ ID NO: 240254 - DNA, 55 bp, Artificial
  Synthetic oligonucleotide
accgcaatcctttcagaaatcgccagacgctgcgaggaaatttccagcttcaagc

SEQ ID NO: 240255 - DNA, 55 bp, Artificial
  Synthetic oligonucleotide
cattaataacaacttacttcctttctctcaagcctataagcttgcaagtagcgag

SEQ ID NO: 240256 - DNA, 55 bp, Artificial
  Synthetic oligonucleotide
cgaacttaatgctaagatagacagtgtaagtgctaagatggatagtgtaagtgct

SEQ ID NO: 240257 - DNA, 55 bp, Artificial
  Synthetic oligonucleotide
cgaataaggccaatatcattgagcatcttaatgtcgcgttgtacggtacgtacac

SEQ ID NO: 240258 - DNA, 55 bp, Artificial
  Synthetic oligonucleotide
cgaatctcaaaattccgtctggaaaacgtattcccgcagcaactgcactttctgg

SEQ ID NO: 240259 - DNA, 60 bp, Artificial
  Synthetic oligonucleotide
gtttgtaaatcaacaatcttaataaatgtggtgcagcaaggtgacaatattctgattagt

SEQ ID NO: 240260 - DNA, 55 bp, Artificial
  Synthetic oligonucleotide
cgacagtgcttattttcctctccacgaataacgaggttgatactttgcctctgat

SEQ ID NO: 240261 - DNA, 55 bp, Artificial
  Synthetic oligonucleotide
cattaaagccacctgatgttggcgacgtaccggagctgttgtatacgatgggccc

SEQ ID NO: 240262 - DNA, 55 bp, Artificial
  Synthetic oligonucleotide
catgtctgtgttcatacgtgcagtgtactttactccgcccggagtatgcaagagc

SEQ ID NO: 240263 - DNA, 55 bp, Artificial
  Synthetic oligonucleotide
cgagcacgcgcgcctttgtctcaaagacaggggagaaagcgtacaattccttgca

SEQ ID NO: 240264 - DNA, 55 bp, Artificial
  Synthetic oligonucleotide
cgagccgccaggtgagggtatagttccacttctcggggaattggtcggaggcaat

SEQ ID NO: 240265 - DNA, 55 bp, Artificial
  Synthetic oligonucleotide
cgagttcaagggtatacggcaggtagggtcccgtgcaactgccaacctgcttgcc

SEQ ID NO: 240266 - DNA, 55 bp, Artificial
  Synthetic oligonucleotide
accgtaaaatgggacgcgtttctaaatgctaatcctacaacaattgccaatgagg

SEQ ID NO: 240267 - DNA, 55 bp, Artificial
  Synthetic oligonucleotide
cgatatgctgcaccgtgcaatggatgcgagtacgcttcggtatcaagtatccgcg

SEQ ID NO: 240268 - DNA, 55 bp, Artificial
  Synthetic oligonucleotide
cgatctagaggtaagacctgcaccgtttcatgaagattgcgggcattccgatagg

SEQ ID NO: 240269 - DNA, 55 bp, Artificial
  Synthetic oligonucleotide
catccgtactcccaatagccgcctcaatcggattcttagcatccttcacatctgc

SEQ ID NO: 240270 - DNA, 60 bp, Artificial
  Synthetic oligonucleotide
atgcttctttgtatttcgtggtttatatatgggatgtcagctgctattaacaccgggaca

SEQ ID NO: 240271 - DNA, 55 bp, Artificial
  Synthetic oligonucleotide
cgatcttccagctccttgccaattgcttttagctctgaagcggtagttcccataa

SEQ ID NO: 240272 - DNA, 55 bp, Artificial
  Synthetic oligonucleotide
ccgtcttccggcaggtacgaggggagtctgttgcacggtcttcgaaggtttgctc

SEQ ID NO: 240273 - DNA, 55 bp, Artificial
  Synthetic oligonucleotide
ccgtgataacagccgccggtaaggattagagtacagttttcacgcttgctaacca

SEQ ID NO: 240274 - DNA, 48 bp, Artificial
  Synthetic oligonucleotide
acaaatttgccccgggtaataattttaccccgaccggtcttataggct

SEQ ID NO: 240275 - DNA, 55 bp, Artificial
  Synthetic oligonucleotide
ccaccgggacgaagcataacacacttcgaccatccggctccacacgctacgggac

SEQ ID NO: 240276 - DNA, 55 bp, Artificial
  Synthetic oligonucleotide
ccgttcgcttatgtcccacaccctgttgaggaagcggtgtactcccacgagcccc

SEQ ID NO: 240277 - DNA, 55 bp, Artificial
  Synthetic oligonucleotide
ccgttctagagacccaatcaccgtgcggtggagtatcactggcatgtgccgttgg

SEQ ID NO: 240278 - DNA, 55 bp, Artificial
  Synthetic oligonucleotide
aatttgggatgtaaagtggctgtaaagagtagaagtggcaatttctaaggggtgc

SEQ ID NO: 240279 - DNA, 50 bp, Artificial
  Synthetic oligonucleotide
ccgtttccgtaggggtgtgcttcgacaaaatccccaagaatccggaaatt

SEQ ID NO: 240280 - DNA, 55 bp, Artificial
  Synthetic oligonucleotide
ccaccgataaatgttctacgcctacataatcatcactaagcatagtatccatagt

SEQ ID NO: 240281 - DNA, 60 bp, Artificial
  Synthetic oligonucleotide
cagtatttctagactttcaaatgcccaacgttcagcagtcattggtactattatataatc

SEQ ID NO: 240282 - DNA, 54 bp, Artificial
  Synthetic oligonucleotide
gttttttagcggagaatttgttgttatgatttttggactacctggggctgcact

SEQ ID NO: 240283 - DNA, 55 bp, Artificial
  Synthetic oligonucleotide
cctaagaattgcagatactactgttcatcgtattcttgaagaaggtacgtatctc

SEQ ID NO: 240284 - DNA, 55 bp, Artificial
  Synthetic oligonucleotide
cctagcctatcgctgcaaaattgtggatcaagcgatgttggttcgtttccaattc

SEQ ID NO: 240285 - DNA, 55 bp, Artificial
  Synthetic oligonucleotide
ccaccctttgtatacaggagttctgctagatagtgctttaggtgcgttcgattgc

SEQ ID NO: 240286 - DNA, 55 bp, Artificial
  Synthetic oligonucleotide
cctataaaattgcattgggtctaaaattatttcattatggttgttagcccggatg

SEQ ID NO: 240287 - DNA, 55 bp, Artificial
  Synthetic oligonucleotide
cctcactagtactaatcatgcgactaaaactagacacctggtaaagaaaattagc

SEQ ID NO: 240288 - DNA, 55 bp, Artificial
  Synthetic oligonucleotide
cctgggagggaatctcgaaggaggaacccgcggcatatgaatctccattaccagc

SEQ ID NO: 240289 - DNA, 55 bp, Artificial
  Synthetic oligonucleotide
cctgctcagcctcaccagcagccttaacaatcgcacttaatatctgctccccact

SEQ ID NO: 240290 - DNA, 55 bp, Artificial
  Synthetic oligonucleotide
ccaatagatttggcgccttctaaattaaatgccgcatatatccaagctacaagag

SEQ ID NO: 240291 - DNA, 55 bp, Artificial
  Synthetic oligonucleotide
ccaatcctattattagattctcctaaagacaccgcagattctatggagggcgcca

SEQ ID NO: 240292 - DNA, 55 bp, Artificial
  Synthetic oligonucleotide
cctgaggagtcttatgttatgcaggaatttcataacgaattgaggacgggagcag

SEQ ID NO: 240293 - DNA, 54 bp, Artificial
  Synthetic oligonucleotide
atgctagtaaaggggcagaagcaactagtgtaataaatttagttaagggaataa

SEQ ID NO: 240294 - DNA, 55 bp, Artificial
  Synthetic oligonucleotide
cctctcgagcaacctcatagagggaaatttccccgcctacaggcgggtcatacct

SEQ ID NO: 240295 - DNA, 55 bp, Artificial
  Synthetic oligonucleotide
ccacaaatctggtgtatctagaaacaaaatccatagttacaacaccagtgtgccc

SEQ ID NO: 240296 - DNA, 55 bp, Artificial
  Synthetic oligonucleotide
accctgtcaaatgctttaatgaccagtaattgtataatagttccaatgactgcgg

SEQ ID NO: 240297 - DNA, 55 bp, Artificial
  Synthetic oligonucleotide
aattgatggactcaactcaaccgagcaactcaaatcctacaaaatatatcgctcg

SEQ ID NO: 240298 - DNA, 55 bp, Artificial
  Synthetic oligonucleotide
ccacaacacttccttactgacttggtgctacactgagtatattcctcgtgcctcg

SEQ ID NO: 240299 - DNA, 55 bp, Artificial
  Synthetic oligonucleotide
cctcccacgccggacgtttcagcgcttcatcccgtaacaacgcactcggatggta

SEQ ID NO: 240300 - DNA, 54 bp, Artificial
  Synthetic oligonucleotide
cctccatattgtttggcatactcggttcggtagtaaccgtaaaacgcatagcgg

SEQ ID NO: 240301 - DNA, 55 bp, Artificial
  Synthetic oligonucleotide
ccacccccattagcagcatcattcttcttagcggcaaacaacttcccagcctccg

SEQ ID NO: 240302 - DNA, 55 bp, Artificial
  Synthetic oligonucleotide
cctccacctgatggttaggatgaaatctcgtaggggtcgtcctgcacgggaaggg

SEQ ID NO: 240303 - DNA, 52 bp, Artificial
  Synthetic oligonucleotide
ccacccgaacctccacctaaacctaaaccttgtcccaactctgatgaattac

SEQ ID NO: 240304 - DNA, 60 bp, Artificial
  Synthetic oligonucleotide
taaaaataatagatcttattatgcattagaattgtctagacaggctttaagtgacgcaag

SEQ ID NO: 240305 - DNA, 55 bp, Artificial
  Synthetic oligonucleotide
cctcaggcttctctccatcctgctcagcctcaccagcagccttaacaatcgcact

SEQ ID NO: 240306 - DNA, 55 bp, Artificial
  Synthetic oligonucleotide
ctttcccggctcggactccaatgcatcgattatgaaggaccagaacgctcttcgc

SEQ ID NO: 240307 - DNA, 55 bp, Artificial
  Synthetic oligonucleotide
atcccttgatgtttcgagaaatttacgagctactcttcggttcttatctgtatca

SEQ ID NO: 240308 - DNA, 55 bp, Artificial
  Synthetic oligonucleotide
cttttgggcttaaaggtggagttaaaagaagctcttcttgaagcaatgataagct

SEQ ID NO: 240309 - DNA, 55 bp, Artificial
  Synthetic oligonucleotide
agcgagttatattctctagatattaagtattctggcgaagaggggagccctgagt

SEQ ID NO: 240310 - DNA, 55 bp, Artificial
  Synthetic oligonucleotide
gaacggacttgttcttgagagttctgaccgcaatgttagtgaatttgaacttgct

SEQ ID NO: 240311 - DNA, 55 bp, Artificial
  Synthetic oligonucleotide
gaacgtacaaacgaacgtccgtgatttggaagcgtctcttaccaagatggttgcg

SEQ ID NO: 240312 - DNA, 55 bp, Artificial
  Synthetic oligonucleotide
gaacgtgggcaccaggtgatccctgacgaaccgtccttcctcctcaccggtgtag

SEQ ID NO: 240313 - DNA, 54 bp, Artificial
  Synthetic oligonucleotide
gaactacaacacgagacgtaaatttattacctctctccgtaataacaccttcga

SEQ ID NO: 240314 - DNA, 55 bp, Artificial
  Synthetic oligonucleotide
gaactgagtcagtatgtcggacgctatgtgaatctaatcgggtatcagatcaccc

SEQ ID NO: 240315 - DNA, 55 bp, Artificial
  Synthetic oligonucleotide
taaaaatcgtcataataaataacacgtttgctatcctctgagaccaactcccctt

SEQ ID NO: 240316 - DNA, 55 bp, Artificial
  Synthetic oligonucleotide
aaagcaatagttgcggctaatgttgcaaaagaagcatataatcttactaaagcag

SEQ ID NO: 240317 - DNA, 54 bp, Artificial
  Synthetic oligonucleotide
gaacttcggttcccatgttaatgcccaaatgtctgtggtagttactagttactt

SEQ ID NO: 240318 - DNA, 55 bp, Artificial
  Synthetic oligonucleotide
gaactttctcatagcctaattatcggacagttttaccgccccgttgaattccaga

SEQ ID NO: 240319 - DNA, 55 bp, Artificial
  Synthetic oligonucleotide
atcatcttgcgcagcaatactttaaattaagtcaatatagatgtggctagtatga

SEQ ID NO: 240320 - DNA, 54 bp, Artificial
  Synthetic oligonucleotide
atcagggcaagttacaccgggtttaaaggctagcacaatcgaaagtaagtcaaa

SEQ ID NO: 240321 - DNA, 55 bp, Artificial
  Synthetic oligonucleotide
gaagcgaaggggtgtcgcgtctctcttgactgggagttatgggagccacacctgc

SEQ ID NO: 240322 - DNA, 55 bp, Artificial
  Synthetic oligonucleotide
gaagcgtagagcccagattaccttggctaccaccccacaaccggccagatgctcg

SEQ ID NO: 240323 - DNA, 55 bp, Artificial
  Synthetic oligonucleotide
aaagaaagtaaatagctaacttatagatcgcgtcatcacggaatgaaactataag

SEQ ID NO: 240324 - DNA, 55 bp, Artificial
  Synthetic oligonucleotide
aaacttaccagccttagtcatagccttaagtgcaacagctgctgctaagtctgca

SEQ ID NO: 240325 - DNA, 55 bp, Artificial
  Synthetic oligonucleotide
atcagcagtcccaatcgcagccccgcaatcggattcgtagcctgagcagcagccg

SEQ ID NO: 240326 - DNA, 56 bp, Artificial
  Synthetic oligonucleotide
taaaacctatgaatatccactaaaagtattgccggtctatgaatgggataaagtac

SEQ ID NO: 240327 - DNA, 55 bp, Artificial
  Synthetic oligonucleotide
gaaggtcggagaaggacttacagcaactaagaataagttaaacgagctatcaggt

SEQ ID NO: 240328 - DNA, 55 bp, Artificial
  Synthetic oligonucleotide
gaagtaagcaaagggtctcttgattacaaactcttaacaaagctaagcaacgagc

SEQ ID NO: 240329 - DNA, 55 bp, Artificial
  Synthetic oligonucleotide
gaagtatgcctgctgttatttgtcctattacctttgggattccgaatttgctcac

SEQ ID NO: 240330 - DNA, 55 bp, Artificial
  Synthetic oligonucleotide
gaagtgagcccgctactttagatagtcaactaataaacgatacagttggatcggg

SEQ ID NO: 240331 - DNA, 55 bp, Artificial
  Synthetic oligonucleotide
gaatacatgggtcaaagaacgattattaatatggacgattacggcgatgtaactc

SEQ ID NO: 240332 - DNA, 55 bp, Artificial
  Synthetic oligonucleotide
agcggtggggatagttgtgggtcaaataagaacttttgctcacaacttgatgcat

SEQ ID NO: 240333 - DNA, 55 bp, Artificial
  Synthetic oligonucleotide
gaattactcctgctgattccattgaggcatgaatgtaatctccgtctgatgatgc

SEQ ID NO: 240334 - DNA, 55 bp, Artificial
  Synthetic oligonucleotide
atatccaaggcagtctcggaagcagcatccagcatatactgaagccccttgaggc

SEQ ID NO: 240335 - DNA, 55 bp, Artificial
  Synthetic oligonucleotide
gaattagttactggtggtaatgtagctaatggtgctaaggtagctaccaatgcag

SEQ ID NO: 240336 - DNA, 55 bp, Artificial
  Synthetic oligonucleotide
agcgttgcttcccgtcccaggacaatgcgggagaagcccatgtttctgtaaacgc

SEQ ID NO: 240337 - DNA, 59 bp, Artificial
  Synthetic oligonucleotide
taaaactgctcattattatctggtaaatacttatataagaaagacgttctaatatctgc

SEQ ID NO: 240338 - DNA, 55 bp, Artificial
  Synthetic oligonucleotide
gaattatcatgtggcggcattgcttggaactgataatatcggcttgattcagatt

SEQ ID NO: 240339 - DNA, 55 bp, Artificial
  Synthetic oligonucleotide
agacacacctcctccaatccatcgggaactcggtgtatggggaattccataacct

SEQ ID NO: 240340 - DNA, 55 bp, Artificial
  Synthetic oligonucleotide
ctgtggtatctatgaagcctgttaattctgaaatttcagtgttgcgatggtatcc

SEQ ID NO: 240341 - DNA, 55 bp, Artificial
  Synthetic oligonucleotide
ctgttattcctgctgattgtactgccttttcatcgttattcgtactatgtgaagc

SEQ ID NO: 240342 - DNA, 55 bp, Artificial
  Synthetic oligonucleotide
ctgttgtgaacccactgcttaacgccattaacggcattactgaatacttaaacaa

SEQ ID NO: 240343 - DNA, 55 bp, Artificial
  Synthetic oligonucleotide
aaattaaatctgatactagagttataagtgttggggaatttgaagagtatatacg

SEQ ID NO: 240344 - DNA, 55 bp, Artificial
  Synthetic oligonucleotide
cttaaagcagcgcaagcagcattagctaattcagttcaagagcttacaagtcctg

SEQ ID NO: 240345 - DNA, 55 bp, Artificial
  Synthetic oligonucleotide
cttaacaatgaggggatgttttatacagcaactcctagcgctagtttagaggtta

SEQ ID NO: 240346 - DNA, 55 bp, Artificial
  Synthetic oligonucleotide
atcttatcaagtgtctcactaaccaatttctttactgcactctctactccctcag

SEQ ID NO: 240347 - DNA, 55 bp, Artificial
  Synthetic oligonucleotide
cttaccgcgtcacgatttagcattccggatcagataggactttcgcctgaaggtc

SEQ ID NO: 240348 - DNA, 60 bp, Artificial
  Synthetic oligonucleotide
taaaagcgcacgatcttgcttctcaaggatttctggtatacagaattaaccatcacgaac

SEQ ID NO: 240349 - DNA, 55 bp, Artificial
  Synthetic oligonucleotide
agagagagcgttgaaaagcaattactgttggaagctgagcgtataaatgaaattg

SEQ ID NO: 240350 - DNA, 55 bp, Artificial
  Synthetic oligonucleotide
cttagcaatagctggaactaacaatcttgatgagattgacttatcgtctcgtgca

SEQ ID NO: 240351 - DNA, 55 bp, Artificial
  Synthetic oligonucleotide
cttagccctttatagcactataaattggcttatttgtgttgtactcatacaagag

SEQ ID NO: 240352 - DNA, 55 bp, Artificial
  Synthetic oligonucleotide
atctcaagtgagacatttgaacggcttcgacaggcaaacaatcttgtatcgttac

SEQ ID NO: 240353 - DNA, 53 bp, Artificial
  Synthetic oligonucleotide
aaatgtgcataaagtccgttgggtaaggcggtttgatattttgtgttaaagct

SEQ ID NO: 240354 - DNA, 55 bp, Artificial
  Synthetic oligonucleotide
cttcaatatctactcttcttagtatctgccttgattctctaacgtctcagtaacc

SEQ ID NO: 240355 - DNA, 55 bp, Artificial
  Synthetic oligonucleotide
atcgttcattggaccaatctccatatatcacgctcagccacaagagccctgatag

SEQ ID NO: 240356 - DNA, 55 bp, Artificial
  Synthetic oligonucleotide
cttccctgcatctttgttcttatcctcactaaccgcctgaacatcctttagccca

SEQ ID NO: 240357 - DNA, 55 bp, Artificial
  Synthetic oligonucleotide
cttcctcagggatcctccaatgcagttctatgatcaattacaggacgggagcggt

SEQ ID NO: 240358 - DNA, 55 bp, Artificial
  Synthetic oligonucleotide
agagttcccggtcctcctataatgagcctgttcgtatcgggagctaaagtcgtag

SEQ ID NO: 240359 - DNA, 60 bp, Artificial
  Synthetic oligonucleotide
atgcagttgtaagacaattatcatatagctatccagaataaagcaaaaagctgtttttat

SEQ ID NO: 240360 - DNA, 55 bp, Artificial
  Synthetic oligonucleotide
agatttgatttgacgaaggattacataatagagtaccaaaacacgcttgacgcgt

SEQ ID NO: 240361 - DNA, 55 bp, Artificial
  Synthetic oligonucleotide
cttgaccctaaatcgggaatggaggctattggacaagcttttataaggtactatg

SEQ ID NO: 240362 - DNA, 55 bp, Artificial
  Synthetic oligonucleotide
cttgacctaacctatctgactcatttcctctaataagtcctccaccctcttgccc

SEQ ID NO: 240363 - DNA, 55 bp, Artificial
  Synthetic oligonucleotide
cttgaggatatttatatctaatcggaggtaattgtgatggagctaacgtattgcc

SEQ ID NO: 240364 - DNA, 55 bp, Artificial
  Synthetic oligonucleotide
agcaccctcgctctcagcctacaagagttggacaagggtccgatcgttctcaacg

SEQ ID NO: 240365 - DNA, 55 bp, Artificial
  Synthetic oligonucleotide
cttgcggcatgtcacgagcaagcgttgataatgcttaaagagaaccaggggaagc

SEQ ID NO: 240366 - DNA, 55 bp, Artificial
  Synthetic oligonucleotide
cttggaaggagtgatagtattctgggtaaaacattatatctaaggtattccgacg

SEQ ID NO: 240367 - DNA, 55 bp, Artificial
  Synthetic oligonucleotide
aaatgcataaaatactctctctgcacttctccctacttccatcattgccccactt

SEQ ID NO: 240368 - DNA, 54 bp, Artificial
  Synthetic oligonucleotide
ctttaaatttggacggtaatttgccaaacgaatatacagcggggcttgaatgct

SEQ ID NO: 240369 - DNA, 55 bp, Artificial
  Synthetic oligonucleotide
atcctgcattctcagtaggtggagacaatacagctatttgtgttttagaacgcac

SEQ ID NO: 240370 - DNA, 57 bp, Artificial
  Synthetic oligonucleotide
atgcagcgcctatttacaataattatgaaaacgaaaattctacacctaataagcaaa

SEQ ID NO: 240371 - DNA, 55 bp, Artificial
  Synthetic oligonucleotide
ctttagatcagaagttaacgctaggaaagttagaagcgaattggatgtagagggg

SEQ ID NO: 240372 - DNA, 55 bp, Artificial
  Synthetic oligonucleotide
agccgtatacaggcgggacttacgtagagatagatccctccgggagcatgctgac

SEQ ID NO: 240373 - DNA, 55 bp, Artificial
  Synthetic oligonucleotide
ataaaatcgcaatcatactgtttaatagcgctcagcctagtcaagatatacttac

SEQ ID NO: 240374 - DNA, 55 bp, Artificial
  Synthetic oligonucleotide
gagcaggctaaagggctaggaaatgatggtaaaggggataggagtaattattacg

SEQ ID NO: 240375 - DNA, 55 bp, Artificial
  Synthetic oligonucleotide
gagcctcatgttgaagctggtggcggtgaagatttatatggcatatgtaccgata

SEQ ID NO: 240376 - DNA, 55 bp, Artificial
  Synthetic oligonucleotide
agtttggggttgggcgtaagttattctagtagtactggtactgatagcaatgaat

SEQ ID NO: 240377 - DNA, 55 bp, Artificial
  Synthetic oligonucleotide
gagcggtttctcaagcatatgaaccgtcacgagggactttcctggaatcccctac

SEQ ID NO: 240378 - DNA, 55 bp, Artificial
  Synthetic oligonucleotide
gagctctccgtaaagacgcattgcatctatctgtctgatagtacgtttgggcgtc

SEQ ID NO: 240379 - DNA, 55 bp, Artificial
  Synthetic oligonucleotide
agggctattacggcattcagcgcatagggtattacggattgctgggcatagagca

SEQ ID NO: 240380 - DNA, 55 bp, Artificial
  Synthetic oligonucleotide
gaggatagagacaatacaaaaggtgctggcggattgactcgtgaatatatgttgc

SEQ ID NO: 240381 - DNA, 57 bp, Artificial
  Synthetic oligonucleotide
atgcagcccctatttacaataattatgaaaacgggaattctatgtccaacaagcaag

SEQ ID NO: 240382 - DNA, 55 bp, Artificial
  Synthetic oligonucleotide
gaggatttggtaattgctgatgtgcctgggataattgagggtgcaagtcgaggga

SEQ ID NO: 240383 - DNA, 55 bp, Artificial
  Synthetic oligonucleotide
gaggctgttgaggacccacagttagatttaggggcacaagtttccgctgctccta

SEQ ID NO: 240384 - DNA, 55 bp, Artificial
  Synthetic oligonucleotide
gagtagtcaccgaatccgacatacccttcatctgcgtagtattgatacgtatcag

SEQ ID NO: 240385 - DNA, 55 bp, Artificial
  Synthetic oligonucleotide
gagtcgctcgaggtgtgatatgccaatgaggaccagcgagattgggtataggatc

SEQ ID NO: 240386 - DNA, 55 bp, Artificial
  Synthetic oligonucleotide
gagtgtgtagaccttgagattaaaaccgagcagtctgctataaatcttgaggaga

SEQ ID NO: 240387 - DNA, 55 bp, Artificial
  Synthetic oligonucleotide
gagttgcattcatttatatctctagcatgagtcgtgcctaaactactataagtcc

SEQ ID NO: 240388 - DNA, 55 bp, Artificial
  Synthetic oligonucleotide
agtggtgctatgagtagcgaagatgcagtaaaggctgttaagagtgtccttgggg

SEQ ID NO: 240389 - DNA, 55 bp, Artificial
  Synthetic oligonucleotide
agtctacggttggctcagggaaaatccgcacaagtgtaatctcatacgtatcggc

SEQ ID NO: 240390 - DNA, 55 bp, Artificial
  Synthetic oligonucleotide
gatagccaaataggtgctacagcggattctatacccctatatgctgcccaattcc

SEQ ID NO: 240391 - DNA, 55 bp, Artificial
  Synthetic oligonucleotide
agtcgcatgaaagggatactaagggttttgttagcgtaagctggcactttagatc

SEQ ID NO: 240392 - DNA, 54 bp, Artificial
  Synthetic oligonucleotide
gtccatcaccctcgtttggttttaacactacatctactatagtctttattccct

SEQ ID NO: 240393 - DNA, 58 bp, Artificial
  Synthetic oligonucleotide
taaagaagaactacttagagaaaggctatctaatgatcagaaaacacaacttgattgg

SEQ ID NO: 240394 - DNA, 55 bp, Artificial
  Synthetic oligonucleotide
aggttttatttggatctcctcctgcaacccttggggcatacaaataccaacttgc

SEQ ID NO: 240395 - DNA, 55 bp, Artificial
  Synthetic oligonucleotide
gatcaagtgttgtgtatattgagtatccgtctttgtatatgtttgctccggctgg

SEQ ID NO: 240396 - DNA, 55 bp, Artificial
  Synthetic oligonucleotide
gatcagaagttaacgctaggaaagttagaagcgaattggatttagagcgagccaa

SEQ ID NO: 240397 - DNA, 55 bp, Artificial
  Synthetic oligonucleotide
gatcagctaactagtaagggtagagatattaaggttggacttgatcgggctaagg

SEQ ID NO: 240398 - DNA, 55 bp, Artificial
  Synthetic oligonucleotide
agtaggggaagcgtagggttagagccactcattcgcgattccaggtattcgtagt

SEQ ID NO: 240399 - DNA, 55 bp, Artificial
  Synthetic oligonucleotide
gatcgaaaggaatatcccaaaggattttcttagtcgcataaaagatcttagcaat

SEQ ID NO: 240400 - DNA, 55 bp, Artificial
  Synthetic oligonucleotide
agtccctccagttacaccgttaggtcctcgcctcacagcactagaaacaggggta

SEQ ID NO: 240401 - DNA, 55 bp, Artificial
  Synthetic oligonucleotide
gatctcaatttgcaattcaacccgccttgaattatcaggggaccctttgggcacc

SEQ ID NO: 240402 - DNA, 55 bp, Artificial
  Synthetic oligonucleotide
agtcagccagtgcgtgtgcgtaggcttgtcgcttcatggcagtgtttgcgcgatt

SEQ ID NO: 240403 - DNA, 55 bp, Artificial
  Synthetic oligonucleotide
gatctctgcgagagaacctcctcaacgaacgagaggtaccgttggaactcccgcc

SEQ ID NO: 240404 - DNA, 58 bp, Artificial
  Synthetic oligonucleotide
atgcacccttaaccttataggatgcgcttaccttcattggaatcttggcttgtcttcc

SEQ ID NO: 240405 - DNA, 55 bp, Artificial
  Synthetic oligonucleotide
agtcaccagattttgcccatgtaacataaccacctgcaagtaattcaagcacgtc

SEQ ID NO: 240406 - DNA, 55 bp, Artificial
  Synthetic oligonucleotide
gaatttggaatgtggagtagctttaataagcggaagtgtcaatttctaagggagg

SEQ ID NO: 240407 - DNA, 52 bp, Artificial
  Synthetic oligonucleotide
gacaaaatagagaattaccctgctaaagggtatccgtataaacggggtgtta

SEQ ID NO: 240408 - DNA, 55 bp, Artificial
  Synthetic oligonucleotide
aaaccttgggctaagcatcatcaccaggtgaaaaggcaactgctgataccgagcg

SEQ ID NO: 240409 - DNA, 55 bp, Artificial
  Synthetic oligonucleotide
atataaagcatttggcttgctattttcatttgcttcgatgacaacttccatcccc

SEQ ID NO: 240410 - DNA, 55 bp, Artificial
  Synthetic oligonucleotide
gacccagcatttagtgttggaggggataacactgcattatgtgttatggagcgag

SEQ ID NO: 240411 - DNA, 54 bp, Artificial
  Synthetic oligonucleotide
gacctcactttaagatgattgccggttattaatggagtcagttttggggttaaa

SEQ ID NO: 240412 - DNA, 55 bp, Artificial
  Synthetic oligonucleotide
gacctcggctacggaggattcgttggacttaaacccaacaatttcatgccctatg

SEQ ID NO: 240413 - DNA, 55 bp, Artificial
  Synthetic oligonucleotide
atagctgataatacagagagatctataagatatagaaaacgaacttatggggccc

SEQ ID NO: 240414 - DNA, 55 bp, Artificial
  Synthetic oligonucleotide
gacgagtatgtaaacgtagtaagggatgttttagtgcaggagtgtccaattcctg

SEQ ID NO: 240415 - DNA, 58 bp, Artificial
  Synthetic oligonucleotide
atgcaattaacttaggatttcaagtttatctaataatagatgctacaagaagtataac

SEQ ID NO: 240416 - DNA, 55 bp, Artificial
  Synthetic oligonucleotide
gacggatcaatcggaaacgcattcggctcaatggacgaagatgtgttgcgccggg

SEQ ID NO: 240417 - DNA, 53 bp, Artificial
  Synthetic oligonucleotide
gacggggttaagcacataaatattttaagtggcccaggaacaattagtcttta

SEQ ID NO: 240418 - DNA, 55 bp, Artificial
  Synthetic oligonucleotide
aaacccctcacccgcaatagccacatctccgctcacgcccgtgtgctggagcgaa

SEQ ID NO: 240419 - DNA, 55 bp, Artificial
  Synthetic oligonucleotide
gacgttgtcatcgtattgggcgtagttgagtcctacggtaataccaccaccgaca

SEQ ID NO: 240420 - DNA, 55 bp, Artificial
  Synthetic oligonucleotide
atagcatggagtgcaatagggttagtatttactccggctgatagagctattgagc

SEQ ID NO: 240421 - DNA, 55 bp, Artificial
  Synthetic oligonucleotide
gactaccttgaagctgatgtatggtccatccagtatgcacagtactatgatcgcc

SEQ ID NO: 240422 - DNA, 55 bp, Artificial
  Synthetic oligonucleotide
agctctaatccaccttgattattgataaaccaaccatctattttgcgccaacaag

SEQ ID NO: 240423 - DNA, 55 bp, Artificial
  Synthetic oligonucleotide
gactcccatctacgtctaattttacatacattagcacaactgacgcccatctctt

SEQ ID NO: 240424 - DNA, 55 bp, Artificial
  Synthetic oligonucleotide
gactcggcattgcacttgcggggcttgaacccaattttgacattggaataaacgg

SEQ ID NO: 240425 - DNA, 55 bp, Artificial
  Synthetic oligonucleotide
atacaatgtggcgaccatttagacttcaattctgaaggcgaattggtaaaagcca

SEQ ID NO: 240426 - DNA, 60 bp, Artificial
  Synthetic oligonucleotide
atgatttgggatggcatgagtttgtaagacaattatcatataaatcagagtggtctaaat

SEQ ID NO: 240427 - DNA, 55 bp, Artificial
  Synthetic oligonucleotide
gactgcctcaagaatggaattgttcttgagagtattagccacaatgttagtgaat

SEQ ID NO: 240428 - DNA, 55 bp, Artificial
  Synthetic oligonucleotide
gagaagggacatggggatcgagagaatcatagccaggaaaagtccgtttaggccg

SEQ ID NO: 240429 - DNA, 51 bp, Artificial
  Synthetic oligonucleotide
gagaattaccctgctaaagggtatccgtataaacggggtgttaagcttagt

SEQ ID NO: 240430 - DNA, 55 bp, Artificial
  Synthetic oligonucleotide
aaacacgcgttcccgaacaattactaggagtaccatcaaatcttgaatatggtgg

SEQ ID NO: 240431 - DNA, 55 bp, Artificial
  Synthetic oligonucleotide
aaacaatacgaatgtcatatgttaaattgcaaataatcaagatgctaaaacgata

SEQ ID NO: 240432 - DNA, 55 bp, Artificial
  Synthetic oligonucleotide
aggcgtatacaaaatggccgcccgcaagagtttaggagaagcggaatggactccg

SEQ ID NO: 240433 - DNA, 55 bp, Artificial
  Synthetic oligonucleotide
aggctggtgaagtaggtaagttattggagaatggggctgctgctgctaagtggga

SEQ ID NO: 240434 - DNA, 55 bp, Artificial
  Synthetic oligonucleotide
aggcttttggtgatacaccagtttaattaccgcatgatttcgagcagggaaaatg

SEQ ID NO: 240435 - DNA, 55 bp, Artificial
  Synthetic oligonucleotide
agggaatactcctactaactggatatattttcgaaagcaccgccaacgtgccgcc

SEQ ID NO: 240436 - DNA, 55 bp, Artificial
  Synthetic oligonucleotide
gagcacgcgagtcattttgcattattgctggacttgaatttggtagggattcttt

SEQ ID NO: 240437 - DNA, 58 bp, Artificial
  Synthetic oligonucleotide
atgatctttgatttagaaatagtagttagcttgttggatacatttggcttaattacaa

SEQ ID NO: 240438 - DNA, 53 bp, Artificial
  Synthetic oligonucleotide
ataacggtgttattatcaaggccggaggtgggccaccaaccgtaattaacata

SEQ ID NO: 240439 - DNA, 55 bp, Artificial
  Synthetic oligonucleotide
ctattgttaatttagggtagaggcaattctttctcctagggtttatcatcgcaga

SEQ ID NO: 240440 - DNA, 53 bp, Artificial
  Synthetic oligonucleotide
ctcaagagaaaactccccgaaatctcctcggtggaagcggtgtaaacctacac

SEQ ID NO: 240441 - DNA, 54 bp, Artificial
  Synthetic oligonucleotide
actcgaaaatcgccggatccaaattccacaacgaatcggaaggtccgtacgcgc

SEQ ID NO: 240442 - DNA, 55 bp, Artificial
  Synthetic oligonucleotide
ctcaagagaaactgtataaagagataccaacatacagggcaagagttttgctagg

SEQ ID NO: 240443 - DNA, 55 bp, Artificial
  Synthetic oligonucleotide
attggctatgttttagtgaaaaccaaagataccctaatagatctcgaacagcccg

SEQ ID NO: 240444 - DNA, 55 bp, Artificial
  Synthetic oligonucleotide
attggaaagataagtaagatcgaagaaggagctaagaaggctgctttgggagtta

SEQ ID NO: 240445 - DNA, 55 bp, Artificial
  Synthetic oligonucleotide
ctcacgattgtaggcaacaaactccctccggtgttgagaatagggagacaacagt

SEQ ID NO: 240446 - DNA, 55 bp, Artificial
  Synthetic oligonucleotide
ctcagtacttgctgctgatgccttaacaatattcactatcagcattgttagaact

SEQ ID NO: 240447 - DNA, 55 bp, Artificial
  Synthetic oligonucleotide
ctcattgcatgagaaatttgtgttgtggagtggctgtgataaacagaagaggcaa

SEQ ID NO: 240448 - DNA, 60 bp, Artificial
  Synthetic oligonucleotide
atgatctttatgagattggacaagatgctaaaatagcagaatctcagttatataaaaagt

SEQ ID NO: 240449 - DNA, 55 bp, Artificial
  Synthetic oligonucleotide
ctcattgcatgcaaaatctgggctgtaggagggctgtaataaacagaagtagtga

SEQ ID NO: 240450 - DNA, 55 bp, Artificial
  Synthetic oligonucleotide
actcggtagattatcctgacatggccaagatagcctgcgatgagtataagaaagg

SEQ ID NO: 240451 - DNA, 55 bp, Artificial
  Synthetic oligonucleotide
ctccaagggttgcataggtgagggaagtccccatagcgagggttaccgccaacag

SEQ ID NO: 240452 - DNA, 53 bp, Artificial
  Synthetic oligonucleotide
ctccacaagggaaaatgacaaatttctgggaatttcctatgggtacaggaaac

SEQ ID NO: 240453 - DNA, 55 bp, Artificial
  Synthetic oligonucleotide
ctccattaatagctccattaatagccggcgatcatcttaaagtgtgctctattgc

SEQ ID NO: 240454 - DNA, 55 bp, Artificial
  Synthetic oligonucleotide
ctcccctactcttctaagtacaactgggtatatttgcgatatacagaaacaacaa

SEQ ID NO: 240455 - DNA, 53 bp, Artificial
  Synthetic oligonucleotide
ctcccttacgggttaggataatacttcggagaaccatccccatactcggacga

SEQ ID NO: 240456 - DNA, 55 bp, Artificial
  Synthetic oligonucleotide
actcttgatagtgtcttaggtcgagtactcgaaaacaatgccaaagcacgtgagc

SEQ ID NO: 240457 - DNA, 55 bp, Artificial
  Synthetic oligonucleotide
aacgcaagttgaaaactacggtacttgcaaactccatccgaaaatggtgcaacgc

SEQ ID NO: 240458 - DNA, 55 bp, Artificial
  Synthetic oligonucleotide
aacgattaacaatccatcaattgatgtgttgagtgcatcaagttcagaagctcct

SEQ ID NO: 240459 - DNA, 57 bp, Artificial
  Synthetic oligonucleotide
atgaggcaaataaagttgtagaagcggttataaatgcagttaatttaatttcatcta

SEQ ID NO: 240460 - DNA, 55 bp, Artificial
  Synthetic oligonucleotide
ctcggacatccttaactcaggcggtatgacgacaggcagtatgtataaggcctga

SEQ ID NO: 240461 - DNA, 55 bp, Artificial
  Synthetic oligonucleotide
ctcggatgctaatactttatgatatgcttagcgagtttctacataatagagccca

SEQ ID NO: 240462 - DNA, 55 bp, Artificial
  Synthetic oligonucleotide
ctcgtattagctattcctagattcttatcaagtaggactattgccatggtgacta

SEQ ID NO: 240463 - DNA, 55 bp, Artificial
  Synthetic oligonucleotide
ctcgttctaaggtgtcaatatcaatggaaacagcagcgcctactcttagcctact

SEQ ID NO: 240464 - DNA, 55 bp, Artificial
  Synthetic oligonucleotide
actgaacgaaagatgctcttccgctatctttcgtaattccggaatagtatcatac

SEQ ID NO: 240465 - DNA, 53 bp, Artificial
  Synthetic oligonucleotide
actgaccggctaaaatcccggttttcccagggcttgaacgtggatctgcaacc

SEQ ID NO: 240466 - DNA, 55 bp, Artificial
  Synthetic oligonucleotide
ctctcaaattatctctttgtgctcagccgaaaactccgcgctttatatgtacccc

SEQ ID NO: 240467 - DNA, 55 bp, Artificial
  Synthetic oligonucleotide
ctctcgcaaaatccttagcatccacaagacccactactgtaggcaatatagagtc

SEQ ID NO: 240468 - DNA, 55 bp, Artificial
  Synthetic oligonucleotide
ctctctgtggaaacagtgcatcgctgttcggtagtcacgaggtatcgcgctatgt

SEQ ID NO: 240469 - DNA, 54 bp, Artificial
  Synthetic oligonucleotide
ctctgctaaacgttgacggggttaagcacttaaacattctaagtgggcctggaa

SEQ ID NO: 240470 - DNA, 60 bp, Artificial
  Synthetic oligonucleotide
atgagcaatcagacgctcccccaaggactatctagtagatttcccatgtataaaggatgg

SEQ ID NO: 240471 - DNA, 55 bp, Artificial
  Synthetic oligonucleotide
actgagtctccccagtcgtactccctcgatacagatgcccgcgtgaatgggatag

SEQ ID NO: 240472 - DNA, 53 bp, Artificial
  Synthetic oligonucleotide
caagccaaaatcccaattaaggtaagttcatcctataaggttaagggtgcgtc

SEQ ID NO: 240473 - DNA, 55 bp, Artificial
  Synthetic oligonucleotide
caagaatatacaaatgtacttggaattttttccctacaaatgagcgtaatgggag

SEQ ID NO: 240474 - DNA, 55 bp, Artificial
  Synthetic oligonucleotide
ctaaattttatagatctctcagtattgtcagacaccttttctttgcccggtcccc

SEQ ID NO: 240475 - DNA, 55 bp, Artificial
  Synthetic oligonucleotide
ctaaccccttcagctctttggagtgaatctagttctagattgctaagaaagcata

SEQ ID NO: 240476 - DNA, 55 bp, Artificial
  Synthetic oligonucleotide
caactcctgtggcactttgcttgagggaaatgtagaaattgatggacttaactca

SEQ ID NO: 240477 - DNA, 55 bp, Artificial
  Synthetic oligonucleotide
caactcctagtgggactttacttgatggagacatagaaattgatggactcaactc

SEQ ID NO: 240478 - DNA, 55 bp, Artificial
  Synthetic oligonucleotide
ctaatcggccttcaaaattaattctactggtgtcgatttcatgtctgtgcctttc

SEQ ID NO: 240479 - DNA, 55 bp, Artificial
  Synthetic oligonucleotide
aagaacaactagccaatagaatacaagcgcaagttccctttagtatctacagccc

SEQ ID NO: 240480 - DNA, 55 bp, Artificial
  Synthetic oligonucleotide
caactattaattagacttagcttcaaaaatttctccttgttgaatctctcctaac

SEQ ID NO: 240481 - DNA, 57 bp, Artificial
  Synthetic oligonucleotide
taaattacttgctaacggatttaaatatgtaagcaagcctatctcttattaaagata

SEQ ID NO: 240482 - DNA, 55 bp, Artificial
  Synthetic oligonucleotide
caactacatagtgggaaactagaacttacaagtgagcctacaacaagagcggttg

SEQ ID NO: 240483 - DNA, 55 bp, Artificial
  Synthetic oligonucleotide
ctaccgatgggaaggcctatccgggacacaccatgcacctgcactatttcccgcc

SEQ ID NO: 240484 - DNA, 53 bp, Artificial
  Synthetic oligonucleotide
aactttctttgggaattcccaatatgaggctaattatcgggcaaaaataaatg

SEQ ID NO: 240485 - DNA, 55 bp, Artificial
  Synthetic oligonucleotide
ctacgagtacgtttgcaagttcttggatgagtggattcagaagaaatacaacgcc

SEQ ID NO: 240486 - DNA, 54 bp, Artificial
  Synthetic oligonucleotide
acgtgaacaaccttagaaccttgaagcaccttagttgataccaaataatcggta

SEQ ID NO: 240487 - DNA, 55 bp, Artificial
  Synthetic oligonucleotide
ctacgcccctaccataccgcatgtaggcccatcccgacaattcctcgcacacgac

SEQ ID NO: 240488 - DNA, 55 bp, Artificial
  Synthetic oligonucleotide
caacatctaaaccttgcacatcaacacttccctcagcagcacttcccaacaaagt

SEQ ID NO: 240489 - DNA, 55 bp, Artificial
  Synthetic oligonucleotide
ctacttatcatcttgtaaggcacaagttcggaaagaccacctcttgcaagttgta

SEQ ID NO: 240490 - DNA, 55 bp, Artificial
  Synthetic oligonucleotide
caacatcgatgacaaatctggtggagccactagaccaataccagtccttatcacg

SEQ ID NO: 240491 - DNA, 55 bp, Artificial
  Synthetic oligonucleotide
ctaggtatcataacaaacaaatggataccttgacaaggtggcattcagaggcatg

SEQ ID NO: 240492 - DNA, 60 bp, Artificial
  Synthetic oligonucleotide
atgaatatccacttagagtgcttccggtctatgaatgggatagagtactgggatttaatc

SEQ ID NO: 240493 - DNA, 55 bp, Artificial
  Synthetic oligonucleotide
ctaggttaaaggcgcagcttaagaatgctctacttaattgtattataagctaccg

SEQ ID NO: 240494 - DNA, 55 bp, Artificial
  Synthetic oligonucleotide
actagtgcaagtagcacctgcaacgttcaaaatggttcctaatagctaacagccc

SEQ ID NO: 240495 - DNA, 54 bp, Artificial
  Synthetic oligonucleotide
ctagtttaggaagtctaaacaacttggatttaattaatcgttcacagcgggtca

SEQ ID NO: 240496 - DNA, 55 bp, Artificial
  Synthetic oligonucleotide
caaacgccaccgcacttgtatttgcagttgcctgatctcctactcctgtatccgc

SEQ ID NO: 240497 - DNA, 55 bp, Artificial
  Synthetic oligonucleotide
caaacaatgcggttagtaactgcaacaatggtggttcctaatagctaacagcccc

SEQ ID NO: 240498 - DNA, 55 bp, Artificial
  Synthetic oligonucleotide
caaacaaccacatttggtatcgttatcgatgccgcaaagtctgggagccgctgcc

SEQ ID NO: 240499 - DNA, 54 bp, Artificial
  Synthetic oligonucleotide
aacttaccagtttaaagccaccgggttcaaagatgaagacactataaatgacgc

SEQ ID NO: 240500 - DNA, 55 bp, Artificial
  Synthetic oligonucleotide
actccctcttgccttgctgcgctcacgaagaaaactgcttgagttgcgaatggag

SEQ ID NO: 240501 - DNA, 55 bp, Artificial
  Synthetic oligonucleotide
attttcaagcattaagtagcgtctctgacgagcttagcagagagcttagcaagat

SEQ ID NO: 240502 - DNA, 55 bp, Artificial
  Synthetic oligonucleotide
ctattgaagaacacatttcttccaaaagcacaacttacagtgcagttcgcaatgc

SEQ ID NO: 240503 - DNA, 60 bp, Artificial
  Synthetic oligonucleotide
caggtcccatatataaccattttaccgatgataataacgctatatatcgcttgatgtgat

SEQ ID NO: 240504 - DNA, 56 bp, Artificial
  Synthetic oligonucleotide
taacaaagtattggatacacttggtttaattattagacggacagttagaatggaga

SEQ ID NO: 240505 - DNA, 55 bp, Artificial
  Synthetic oligonucleotide
actcctacgataatctgagtaaggtcgtggcacaatacatgcccgactgcctcgg

SEQ ID NO: 240506 - DNA, 55 bp, Artificial
  Synthetic oligonucleotide
attggtattctctacatgagggcctccacaaacttcaagcgaaaatccatctatc

SEQ ID NO: 240507 - DNA, 55 bp, Artificial
  Synthetic oligonucleotide
ctgacgatacagttcctcaacaagacaggtggacgtgtagatgacagtcgaatct

SEQ ID NO: 240508 - DNA, 55 bp, Artificial
  Synthetic oligonucleotide
actggagatgggcgtaacgggtatagaatccatagcgatggcggatgaccacgta

SEQ ID NO: 240509 - DNA, 55 bp, Artificial
  Synthetic oligonucleotide
ctgagactagtggaagtgaggctagtcagtctgatgctactcagcctgttgttac

SEQ ID NO: 240510 - DNA, 55 bp, Artificial
  Synthetic oligonucleotide
aacacgtttgctatcctctgagaccaactcccctttagactcaaatcttgtatct

SEQ ID NO: 240511 - DNA, 53 bp, Artificial
  Synthetic oligonucleotide
ctgatacttatacccataccctttaagacttttgtcaatacgtggtaagttcc

SEQ ID NO: 240512 - DNA, 55 bp, Artificial
  Synthetic oligonucleotide
atggtgaattgaaatgtcaggacatcacgggaggcgccctgttcgcttgcgccag

SEQ ID NO: 240513 - DNA, 55 bp, Artificial
  Synthetic oligonucleotide
ctgattgactgggataggctaggccttattctctgtgggacagcctttgatggcc

SEQ ID NO: 240514 - DNA, 55 bp, Artificial
  Synthetic oligonucleotide
ctgcagtctctaatgatgttacaatgagtttctactatggcgtcgaccgtagcat

SEQ ID NO: 240515 - DNA, 52 bp, Artificial
  Synthetic oligonucleotide
atctttatggggtttgtgtagactttgacgatttttcaagaaccggcacggt

SEQ ID NO: 240516 - DNA, 55 bp, Artificial
  Synthetic oligonucleotide
actgtaaaatgggatgcatttcttaatgccaaccctacaacaattgccaatgagg

SEQ ID NO: 240517 - DNA, 55 bp, Artificial
  Synthetic oligonucleotide
atggaaatggtagcaacgatatagagcaatatttcagaggtgtcgctggtgatat

SEQ ID NO: 240518 - DNA, 55 bp, Artificial
  Synthetic oligonucleotide
aaattcctatagtagcattgtctcagcttacacgaggatgtacaagataaagagc

SEQ ID NO: 240519 - DNA, 55 bp, Artificial
  Synthetic oligonucleotide
ctgctaattctggtgctactgttgctcccaaagatgctactatagcaggagggat

SEQ ID NO: 240520 - DNA, 55 bp, Artificial
  Synthetic oligonucleotide
ctggacttgatggtatgcccgcctttaaagagggtgtcgatctagctggaggtgc

SEQ ID NO: 240521 - DNA, 55 bp, Artificial
  Synthetic oligonucleotide
ctggataaggccttagacgaacacaaggagagtaatctgaagtatgtgcttgaac

SEQ ID NO: 240522 - DNA, 55 bp, Artificial
  Synthetic oligonucleotide
ctaaattaaagatcgcatatatccaggatatggcagtgactgagcaaattgccca

SEQ ID NO: 240523 - DNA, 55 bp, Artificial
  Synthetic oligonucleotide
ctggattttcgaatgcaatctttagtaggctagagtagtcgttaactgtgaatga

SEQ ID NO: 240524 - DNA, 55 bp, Artificial
  Synthetic oligonucleotide
ctggctagatggaacaaatgagcaattgtccgcaaataccgaaagatctaaagcc

SEQ ID NO: 240525 - DNA, 55 bp, Artificial
  Synthetic oligonucleotide
atgctcggatcaatcacataggaagcacgtctgttaattccatatgggcgaaacc

SEQ ID NO: 240526 - DNA, 57 bp, Artificial
  Synthetic oligonucleotide
atagtcagacactggaggtacatctcgaccaccactaccatattttaacccgtctaa

SEQ ID NO: 240527 - DNA, 55 bp, Artificial
  Synthetic oligonucleotide
actgtcgttccctttgtaatcgggaatgcgatccataacgctattggggaatggg

SEQ ID NO: 240528 - DNA, 53 bp, Artificial
  Synthetic oligonucleotide
agaaatcctaggctgtttatagataggggaaaacccgaaggcgtatgcttttg

SEQ ID NO: 240529 - DNA, 55 bp, Artificial
  Synthetic oligonucleotide
ctgtactttaagtaacttttaagcacttgataacttccaattttgtattcatata

SEQ ID NO: 240530 - DNA, 55 bp, Artificial
  Synthetic oligonucleotide
agacaagccgagatttaagtataaatgaacgaataacaaaagaactcgcagaagt

SEQ ID NO: 240531 - DNA, 55 bp, Artificial
  Synthetic oligonucleotide
atgcaaataagccccaattcaaggataagcgctattttatggctatagacggtgt

SEQ ID NO: 240532 - DNA, 55 bp, Artificial
  Synthetic oligonucleotide
ctgtcctatgacctccacgggagcatcagggatacccttgtgatatacctgccgg

SEQ ID NO: 240533 - DNA, 55 bp, Artificial
  Synthetic oligonucleotide
ctgtcttgtttgggatataagcggtcaaatattatatcaagaactaccccaatag

SEQ ID NO: 240534 - DNA, 55 bp, Artificial
  Synthetic oligonucleotide
actgcaaaattttttatactcatattaatacttgtctatgattataagaatacta

SEQ ID NO: 240535 - DNA, 55 bp, Artificial
  Synthetic oligonucleotide
aaccttgcaatacttgccgatgtaactcctttaccaatcccagagatcacacccc

SEQ ID NO: 240536 - DNA, 55 bp, Artificial
  Synthetic oligonucleotide
actgctccaacggcttttgccgcatcagctgctgacttctttgcattttccgcag

SEQ ID NO: 240537 - DNA, 58 bp, Artificial
  Synthetic oligonucleotide
atagtaggcattgagtgggcatggactactttagtaagtagtgaatgttagaaaacca

SEQ ID NO: 240538 - DNA, 55 bp, Artificial
  Synthetic oligonucleotide
attcaaattttagaaccccattgggaagatgtattccaatagatttggcgccatc

SEQ ID NO: 240539 - DNA, 55 bp, Artificial
  Synthetic oligonucleotide
ctcttgttctgcaatatcaatgcaacccataattttatcaagttcgtcccctatc

SEQ ID NO: 240540 - DNA, 55 bp, Artificial
  Synthetic oligonucleotide
ctctttagattccgtggtttgacgagaagtatcaagtgtcacattaactcttgca

SEQ ID NO: 240541 - DNA, 55 bp, Artificial
  Synthetic oligonucleotide
attcaactaatccctatggtatgccattatctgctgtaccacttgttgacgacac

SEQ ID NO: 240542 - DNA, 55 bp, Artificial
  Synthetic oligonucleotide
ctgaactgatggtagtttcagcaacaacatctgaatcctcagctgatgttatagc

SEQ ID NO: 240543 - DNA, 55 bp, Artificial
  Synthetic oligonucleotide
ctcttgtatcgggagaacctcccctctctgatgctctctcgaatttcctccacca

SEQ ID NO: 240544 - DNA, 55 bp, Artificial
  Synthetic oligonucleotide
ctcttgtaacatccgtcgtaccaagtccaaaatacgagcctccagaatcaatcaa

SEQ ID NO: 240545 - DNA, 55 bp, Artificial
  Synthetic oligonucleotide
ctcttcaagacttaaccaataatgttttgcgaccaataatcagcactgtttccac

SEQ ID NO: 240546 - DNA, 55 bp, Artificial
  Synthetic oligonucleotide
ctgaccgacggagtcctgcagaacagttgcatagagcttgttctggtccatcgag

SEQ ID NO: 240547 - DNA, 54 bp, Artificial
  Synthetic oligonucleotide
gtggaactaattgggtcttagtagaaggtatgaggagtaatgatctaaatgttg

SEQ ID NO: 240548 - DNA, 57 bp, Artificial
  Synthetic oligonucleotide
tacacattattgaaaaacacggacaaagttggacaaatcctgagaatatggttgtta

SEQ ID NO: 240549 - DNA, 54 bp, Artificial
  Synthetic oligonucleotide
aggggcaattttctcgagatgggaccgtgtgttacttacaacgagatacttcag

SEQ ID NO: 240550 - DNA, 54 bp, Artificial
  Synthetic oligonucleotide
gtgctgtttggatagtctcgaactcttctgagttgatgacaatttctctaatac

SEQ ID NO: 240551 - DNA, 54 bp, Artificial
  Synthetic oligonucleotide
tagtcataaaagattgtcgcaaattgtctatataggttttttcaacctgtaaca

SEQ ID NO: 240552 - DNA, 54 bp, Artificial
  Synthetic oligonucleotide
gttaatatgtggcacatcaagctcattttctaaggccattatgtaggaatctct

SEQ ID NO: 240553 - DNA, 54 bp, Artificial
  Synthetic oligonucleotide
agcggatgtcggaaagtaccgaaggcctgttgcttccccaaatggaccaggtta

SEQ ID NO: 240554 - DNA, 54 bp, Artificial
  Synthetic oligonucleotide
agagagattgactttggcagaagggataagttcggtatacctgctcgagttgta

SEQ ID NO: 240555 - DNA, 54 bp, Artificial
  Synthetic oligonucleotide
gttttacttagagccaatctagataattgcaatgcataagatgccttactttta

SEQ ID NO: 240556 - DNA, 54 bp, Artificial
  Synthetic oligonucleotide
acgcaacggctatttctccagcacgtcttattggaattagttctcccggtgagt

SEQ ID NO: 240557 - DNA, 52 bp, Artificial
  Synthetic oligonucleotide
catcttctttgtaaaagtagtgctaaacctttaaaatctttaagatttagat

SEQ ID NO: 240558 - DNA, 54 bp, Artificial
  Synthetic oligonucleotide
gttggggcgattgcctcagggttatgccttaacctgatacaccgttccgccctg

SEQ ID NO: 240559 - DNA, 58 bp, Artificial
  Synthetic oligonucleotide
tacaccaatattaaaagtgcagctggtaaagccaacatatatctaattctaaaggaaa

SEQ ID NO: 240560 - DNA, 54 bp, Artificial
  Synthetic oligonucleotide
tcgcaacgggtttaaacaatgatgctcatggaggaggacacaccgccacatttt

SEQ ID NO: 240561 - DNA, 54 bp, Artificial
  Synthetic oligonucleotide
acgtctccaccatttaaaaatgggttgtcacggtaagtgcttttgattatacac

SEQ ID NO: 240562 - DNA, 54 bp, Artificial
  Synthetic oligonucleotide
tgatctcatttacattgggattcaaccacgcaaaatcaggacaattggagattc

SEQ ID NO: 240563 - DNA, 54 bp, Artificial
  Synthetic oligonucleotide
tcttaacgttggctgcccatcatctcgtgtccaagatgcaaactatggggcatg

SEQ ID NO: 240564 - DNA, 52 bp, Artificial
  Synthetic oligonucleotide
tagcctaccctttagtttgccggccagtacttatttaccaactcggatttaa

SEQ ID NO: 240565 - DNA, 54 bp, Artificial
  Synthetic oligonucleotide
ccaatgttcctgtttacaatggattgacagatgctgctcacccaacccaaatac

SEQ ID NO: 240566 - DNA, 54 bp, Artificial
  Synthetic oligonucleotide
agaatcgatgcaagctgatgagtggtcacaagggcatgctgaagagcaagtggt

SEQ ID NO: 240567 - DNA, 54 bp, Artificial
  Synthetic oligonucleotide
tattaacgtacccagcactctagtacgtttaatacttaatgctgtctcattatc

SEQ ID NO: 240568 - DNA, 54 bp, Artificial
  Synthetic oligonucleotide
gtaatcaattttaatgagccgggcatttgcaatggagagatttttaggagttga

SEQ ID NO: 240569 - DNA, 54 bp, Artificial
  Synthetic oligonucleotide
agagaatttgtgttcacgtttgactctaagaaaagggcaatatcagatagatta

SEQ ID NO: 240570 - DNA, 55 bp, Artificial
  Synthetic oligonucleotide
atagctaatgcgatttacaataaaatgggggccaataactaaatcaatcttgttt

SEQ ID NO: 240571 - DNA, 54 bp, Artificial
  Synthetic oligonucleotide
tccgcctttatccccaatgtccctgtaatcatatcgccaaaactcacaaataca

SEQ ID NO: 240572 - DNA, 50 bp, Artificial
  Synthetic oligonucleotide
acggtcccgacagttataaatccctaaaaattataaattaggttagctgt

SEQ ID NO: 240573 - DNA, 54 bp, Artificial
  Synthetic oligonucleotide
ccccataattctgaaaaggggcagaatacagtggtcgcttttgtgaaatagact

SEQ ID NO: 240574 - DNA, 54 bp, Artificial
  Synthetic oligonucleotide
agtcacaagtcgccctcgcagactatccaatttgctcaagtcaagataatgatc

SEQ ID NO: 240575 - DNA, 54 bp, Artificial
  Synthetic oligonucleotide
tacacagcggcttggttcatatcagtcggtacagaattgtccaatgttattgta

SEQ ID NO: 240576 - DNA, 54 bp, Artificial
  Synthetic oligonucleotide
attgatccgggacaagtaaggttcctatgcggataatcgaatggtcccgatttt

SEQ ID NO: 240577 - DNA, 54 bp, Artificial
  Synthetic oligonucleotide
gtttactaaaatggttggaatctacggcggtgtgtcggatactttatatgcccc

SEQ ID NO: 240578 - DNA, 54 bp, Artificial
  Synthetic oligonucleotide
gtaaataattggagcaagtgttattcccgctattagcattacttgtattgttct

SEQ ID NO: 240579 - DNA, 54 bp, Artificial
  Synthetic oligonucleotide
accgaggaaaacaatacgtcatcggtagcggtatacactgtgtctagctcggct

SEQ ID NO: 240580 - DNA, 54 bp, Artificial
  Synthetic oligonucleotide
gtaaagtgatatcaattttgatatagctattttcttgtataatattgatgtcat

SEQ ID NO: 240581 - DNA, 60 bp, Artificial
  Synthetic oligonucleotide
tacacttttgaatggaataataagcgaggttatgtgggatgctgcaatcgtgtccactcc

SEQ ID NO: 240582 - DNA, 54 bp, Artificial
  Synthetic oligonucleotide
ccagaagctaatgctagaggcgtattagtataaagccccattaatatggtagag

SEQ ID NO: 240583 - DNA, 54 bp, Artificial
  Synthetic oligonucleotide
gtagactcgggagttgattgtctgtaaggatttttaatcaagctcccactccca

SEQ ID NO: 240584 - DNA, 54 bp, Artificial
  Synthetic oligonucleotide
gtgcaagcttggcagtgtgccaatgaattaggtttgggtgtaagttattctaat

SEQ ID NO: 240585 - DNA, 54 bp, Artificial
  Synthetic oligonucleotide
tattagatctaaagctatttaatgatgttgttaatctaatatttgacaagtatc

SEQ ID NO: 240586 - DNA, 54 bp, Artificial
  Synthetic oligonucleotide
ccaactactacaaacatttgggtgtaaattttggcactgaaatttactatcacc

SEQ ID NO: 240587 - DNA, 53 bp, Artificial
  Synthetic oligonucleotide
gtaaaaagctttctcaagttaaaaactttttgagtatatattccatctttaca

SEQ ID NO: 240588 - DNA, 54 bp, Artificial
  Synthetic oligonucleotide
tcagaattggtagattgctatgttttaaagtaagtatttagaatggcttttact

SEQ ID NO: 240589 - DNA, 54 bp, Artificial
  Synthetic oligonucleotide
tacaactagggataaaatcagaagttacatctacttttcctagatctaaacgta

SEQ ID NO: 240590 - DNA, 54 bp, Artificial
  Synthetic oligonucleotide
atggggctgctgctgctaagtgggaagcattaaaaataacccctaacttggcgt

SEQ ID NO: 240591 - DNA, 54 bp, Artificial
  Synthetic oligonucleotide
gttagcagccttgacgagaaaaacagcgtttcagtagatttgcctggtgaaatg

SEQ ID NO: 240592 - DNA, 58 bp, Artificial
  Synthetic oligonucleotide
tacataattcccctagcagtaatagcttcattagattccttattaacttattgagatt

SEQ ID NO: 240593 - DNA, 54 bp, Artificial
  Synthetic oligonucleotide
gttagcggccttgacgagaaaaacagcacttcagtagatgtacctggggaactt

SEQ ID NO: 240594 - DNA, 54 bp, Artificial
  Synthetic oligonucleotide
tgcaacgtacagtgcactatcggtaccagcaacattgattggggctgagtacag

SEQ ID NO: 240595 - DNA, 53 bp, Artificial
  Synthetic oligonucleotide
taacttctttgtaatcaatggcttccgaattaaattttcccaaaatggggtga

SEQ ID NO: 240596 - DNA, 54 bp, Artificial
  Synthetic oligonucleotide
cagggcttatataagttctctggccaaagaacctatataagccctgtttgcctc

SEQ ID NO: 240597 - DNA, 54 bp, Artificial
  Synthetic oligonucleotide
gtatccatatgtggctttaaaagctttgcgaattttaacattcaatcctctaac

SEQ ID NO: 240598 - DNA, 54 bp, Artificial
  Synthetic oligonucleotide
attgatacttcgtatctttttgattggtgttaaaatttggattgcaagccaaaa

SEQ ID NO: 240599 - DNA, 54 bp, Artificial
  Synthetic oligonucleotide
actatgattctggcggctccaccgactcttctgggtcaagaagcttagggcata

SEQ ID NO: 240600 - DNA, 54 bp, Artificial
  Synthetic oligonucleotide
tatgagaatgtcagaccaagcggagtctttgaaggacgactaatatcacggagc

SEQ ID NO: 240601 - DNA, 54 bp, Artificial
  Synthetic oligonucleotide
agattaaatgtagtgatagtacttatttaatatcagctgttacagagtacaatc

SEQ ID NO: 240602 - DNA, 53 bp, Artificial
  Synthetic oligonucleotide
ataagttaaagggcctggactaaaccttttgattagcattagagcacttttag

SEQ ID NO: 240603 - DNA, 60 bp, Artificial
  Synthetic oligonucleotide
tacatacaaggaatcacaccagaaagcgcaagcttaaaagcattattggaattaggaatg

SEQ ID NO: 240604 - DNA, 54 bp, Artificial
  Synthetic oligonucleotide
taagtaaagtaaatatttaaagttcctcggatcatttttagctaccaatagcga

SEQ ID NO: 240605 - DNA, 54 bp, Artificial
  Synthetic oligonucleotide
agcttgatgaatatataaaggagtgctcaataagagaaatggagctttactatg

SEQ ID NO: 240606 - DNA, 54 bp, Artificial
  Synthetic oligonucleotide
atcattagtcccaatagcagctgcaatcggattagtagcatcagcagccttccc

SEQ ID NO: 240607 - DNA, 54 bp, Artificial
  Synthetic oligonucleotide
cagaacactacagtaatagcgagagtaaagtactttatctaagatattccgatg

SEQ ID NO: 240608 - DNA, 54 bp, Artificial
  Synthetic oligonucleotide
ttagcaaattcggtggtcaagaattcaggataattgttttctaaacgttagttc

SEQ ID NO: 240609 - DNA, 54 bp, Artificial
  Synthetic oligonucleotide
ctattataaagtatcaagcaaacggaactagaaaatcttatggatttgcacggg

SEQ ID NO: 240610 - DNA, 54 bp, Artificial
  Synthetic oligonucleotide
acaagtttaggcacttaaagcagacatctgaaaaattttacacttcagactcat

SEQ ID NO: 240611 - DNA, 54 bp, Artificial
  Synthetic oligonucleotide
tgtgccggctttgtcgttggaatttgaaacctcaggacatgtgttagatgatca

SEQ ID NO: 240612 - DNA, 54 bp, Artificial
  Synthetic oligonucleotide
ccggtcccgtatatgattatttcgttgatggtgagaattctatacgcaaaactt

SEQ ID NO: 240613 - DNA, 54 bp, Artificial
  Synthetic oligonucleotide
gcgactttctacacaataaagcccataagtatattttgcccagtctacaacccg

SEQ ID NO: 240614 - DNA, 55 bp, Artificial
  Synthetic oligonucleotide
caggggctttgcaattctccaatgaagcttatttgggatttttattaaactataa

SEQ ID NO: 240615 - DNA, 58 bp, Artificial
  Synthetic oligonucleotide
atagagcaaactcttcaagatttaaccaataatgttttgcgaccggctattagtatga

SEQ ID NO: 240616 - DNA, 54 bp, Artificial
  Synthetic oligonucleotide
acacacgaagaagtaagtgcggagatatggcagggtttatacggattaaagggg

SEQ ID NO: 240617 - DNA, 54 bp, Artificial
  Synthetic oligonucleotide
cgctgaccccgatatggatagtctatgcggacggagcgaggcttccctggaagt

SEQ ID NO: 240618 - DNA, 54 bp, Artificial
  Synthetic oligonucleotide
gggcaaaggagctttagaaggatttcgtgatgctgaagtagtagaacctgtagc

SEQ ID NO: 240619 - DNA, 54 bp, Artificial
  Synthetic oligonucleotide
ctacaattcctacatcgactctctgacagccgaaatcggagctgcgaaattcaa

SEQ ID NO: 240620 - DNA, 53 bp, Artificial
  Synthetic oligonucleotide
gccttgattcgtggcgttcactaccaataacgtaaagccccccaagactttta

SEQ ID NO: 240621 - DNA, 54 bp, Artificial
  Synthetic oligonucleotide
tgtatgcattagtaggatctgctggaactggtaagagctttagatcgcatttgg

SEQ ID NO: 240622 - DNA, 54 bp, Artificial
  Synthetic oligonucleotide
aactcttccagcgaattgtctcgcatggaccggcccgccatttggtcctatgaa

SEQ ID NO: 240623 - DNA, 54 bp, Artificial
  Synthetic oligonucleotide
cggagtttaactgagtttggtaccctttgacaggccctagctcaattagtgctc

SEQ ID NO: 240624 - DNA, 54 bp, Artificial
  Synthetic oligonucleotide
ctctggaagtctcattatcgacgacatagaagatggtgctcttaagagacgtgg

SEQ ID NO: 240625 - DNA, 54 bp, Artificial
  Synthetic oligonucleotide
cggattctaatgcggttttacttgctgtgaaagaggttgaagcgttgctgtcat

SEQ ID NO: 240626 - DNA, 59 bp, Artificial
  Synthetic oligonucleotide
tacatccttcagcgcattaccctccttaccaaaagccttcccagcagccgcaacaatcc

SEQ ID NO: 240627 - DNA, 54 bp, Artificial
  Synthetic oligonucleotide
tttgcgaagctgatcgaaaataattggattcgctcccaggattccgacggcttt

SEQ ID NO: 240628 - DNA, 52 bp, Artificial
  Synthetic oligonucleotide
acagatactaggtttgagtctaaaggggagctggttttagaaaatagtaaac

SEQ ID NO: 240629 - DNA, 54 bp, Artificial
  Synthetic oligonucleotide
gcatggataaataatccatgtcaaagtcaaagcctatgccattaatctttaaat

SEQ ID NO: 240630 - DNA, 54 bp, Artificial
  Synthetic oligonucleotide
gcatgctccggaacctggcggtacgggatctgctaatcctgaatcagcggccgg

SEQ ID NO: 240631 - DNA, 54 bp, Artificial
  Synthetic oligonucleotide
cttacagtgcagttaaatcgcagttaaatctgccttacttaatcttggtggggt

SEQ ID NO: 240632 - DNA, 54 bp, Artificial
  Synthetic oligonucleotide
ggcgttgttactattaaagagtacgaagggttagagattagtacttgtagtata

SEQ ID NO: 240633 - DNA, 54 bp, Artificial
  Synthetic oligonucleotide
aatgcgtgcggatagcccgaaagcgtcgcccaaatttccgcattgtacacggga

SEQ ID NO: 240634 - DNA, 54 bp, Artificial
  Synthetic oligonucleotide
aattcaagcgtatgagtgcgtaaaggatagtattggtttataagtcacatagtt

SEQ ID NO: 240635 - DNA, 54 bp, Artificial
  Synthetic oligonucleotide
gcattttgtggatcaaggtcaataagtaatactttgctggttttattaagaatt

SEQ ID NO: 240636 - DNA, 54 bp, Artificial
  Synthetic oligonucleotide
ctgcatgcaaaaccctggataggtactgacaatgtaatagtcgcataccctgac

SEQ ID NO: 240637 - DNA, 58 bp, Artificial
  Synthetic oligonucleotide
taccatctcctaacgattcatacaaagcaatctcactttttattacctcatccaaagg

SEQ ID NO: 240638 - DNA, 54 bp, Artificial
  Synthetic oligonucleotide
cctttaaggagatattttatagagaatcgtatattaagtagtttgtataaaaga

SEQ ID NO: 240639 - DNA, 54 bp, Artificial
  Synthetic oligonucleotide
gccatgctcgatgcaattgcattattagtaaagaaagaaggggcttgatagtct

SEQ ID NO: 240640 - DNA, 54 bp, Artificial
  Synthetic oligonucleotide
cctctatcacattggagggtaatatcgactatactattattcacttatatccaa

SEQ ID NO: 240641 - DNA, 54 bp, Artificial
  Synthetic oligonucleotide
aatttgcaatactttccctagctcttgataaagacagtacaataaagattagcc

SEQ ID NO: 240642 - DNA, 54 bp, Artificial
  Synthetic oligonucleotide
cttctaaattagatattgcatatatccaagctataagagtaactagactaattg

SEQ ID NO: 240643 - DNA, 54 bp, Artificial
  Synthetic oligonucleotide
cctcccgctaaaatatggggaagtggaagattgtcagaaagagctctaatatta

SEQ ID NO: 240644 - DNA, 54 bp, Artificial
  Synthetic oligonucleotide
cttgatgttcgtttattaactaaaagcaatttcttcaatcgcgaattggcaggc

SEQ ID NO: 240645 - DNA, 54 bp, Artificial
  Synthetic oligonucleotide
aactttaaagtacgtgtcttcaggtattagcactgatcatgaatgtttaacaat

SEQ ID NO: 240646 - DNA, 54 bp, Artificial
  Synthetic oligonucleotide
ctactacgtgctaagcaaaatatttctatactttggataccttgctattggatt

SEQ ID NO: 240647 - DNA, 54 bp, Artificial
  Synthetic oligonucleotide
ttaagatagccgattcatcaagtgtaaagaggtttgccaattggatacaaactc

SEQ ID NO: 240648 - DNA, 56 bp, Artificial
  Synthetic oligonucleotide
tacccatccccgatgccaatgctaaaggagtatttgtataaaatcccataaaaatg

SEQ ID NO: 240649 - DNA, 54 bp, Artificial
  Synthetic oligonucleotide
ttagaccaataccggtccttatcacgtccaagataatcgtaatctgctactagt

SEQ ID NO: 240650 - DNA, 54 bp, Artificial
  Synthetic oligonucleotide
aagcttcaagcgtcctacaaccctctaaatgcaacgctctgcagcttgacacat

SEQ ID NO: 240651 - DNA, 54 bp, Artificial
  Synthetic oligonucleotide
gagataggtggatattttactaagatagcagagacaatgaaaggagttagagag

SEQ ID NO: 240652 - DNA, 54 bp, Artificial
  Synthetic oligonucleotide
ttcaaggagagctcaaaatgataagtattaatcaacaaagttttactggatgcg

SEQ ID NO: 240653 - DNA, 54 bp, Artificial
  Synthetic oligonucleotide
gggtcctattttgagtgttaggcgtcttaagggtcctgtagcaagaactgtagg

SEQ ID NO: 240654 - DNA, 54 bp, Artificial
  Synthetic oligonucleotide
gggttattactaataatggatatcttgacaacataacatttagaggtatgagat

SEQ ID NO: 240655 - DNA, 53 bp, Artificial
  Synthetic oligonucleotide
aatctcactttttattacctcatccaaaggtctaataaaaattgaagaaacac

SEQ ID NO: 240656 - DNA, 51 bp, Artificial
  Synthetic oligonucleotide
ccctacagttacaccgttagtattagtccctccagttacaccgttaggtcc

SEQ ID NO: 240657 - DNA, 54 bp, Artificial
  Synthetic oligonucleotide
cgtgcatcgtaccgacttttgccgcaggttccggagagtcaatcgcagaactcg

SEQ ID NO: 240658 - DNA, 54 bp, Artificial
  Synthetic oligonucleotide
ggtaaaagcggctaaagagatgctaactaattcagttaaagagcttacaagtcc

SEQ ID NO: 240659 - DNA, 59 bp, Artificial
  Synthetic oligonucleotide
ataccccttgagcactaaaataccttgcatcaattacaggaaaccatgaattaggctga

SEQ ID NO: 240660 - DNA, 54 bp, Artificial
  Synthetic oligonucleotide
aaaagacttgttgccaaaattgctataggtagcgccctaggaaatatcattagc

SEQ ID NO: 240661 - DNA, 53 bp, Artificial
  Synthetic oligonucleotide
ttaatagtagtggtgtgccaacaaccacaaccgggaaaacaggcccgatttct

SEQ ID NO: 240662 - DNA, 54 bp, Artificial
  Synthetic oligonucleotide
gatggtaccattacagtacaagcatatgacacagcaggtactaaacttgagggc

SEQ ID NO: 240663 - DNA, 54 bp, Artificial
  Synthetic oligonucleotide
cgtattcgattagtacggatgacaaatatctattgtggagtggccttgttcctc

SEQ ID NO: 240664 - DNA, 54 bp, Artificial
  Synthetic oligonucleotide
acattgcccggttcagaattaccggtcgagctaccaccgtattgacgctctttt

SEQ ID NO: 240665 - DNA, 54 bp, Artificial
  Synthetic oligonucleotide
aagcactcaattattccgaggcaccgttaaaacttgcgatcggatcagaactta

SEQ ID NO: 240666 - DNA, 53 bp, Artificial
  Synthetic oligonucleotide
gatcagtctaaggcagttttgcccaacccgttgactttctttttaagcgtagt

SEQ ID NO: 240667 - DNA, 54 bp, Artificial
  Synthetic oligonucleotide
gctgtcgaatcctacaggactacgcttcccaatttcgacaagaccctttcgaca

SEQ ID NO: 240668 - DNA, 54 bp, Artificial
  Synthetic oligonucleotide
gctgctccccctaatccgggaaaatgtttaattgccgaaaatactccatgattc

SEQ ID NO: 240669 - DNA, 52 bp, Artificial
  Synthetic oligonucleotide
gaccggccatccgccaaaacataatcccccaagccttactttaggaagttct

SEQ ID NO: 240670 - DNA, 58 bp, Artificial
  Synthetic oligonucleotide
ataccatgatagcttttttttaggttctagactattagagcatagtccacaagcttta

SEQ ID NO: 240671 - DNA, 54 bp, Artificial
  Synthetic oligonucleotide
gggctaaaagctaatgagtggtaaagtcaatgatgtagaatcatcttctcaagt

SEQ ID NO: 240672 - DNA, 54 bp, Artificial
  Synthetic oligonucleotide
ggggaggtgtagcatatgaatattcctaatcctgttcctactcctgcttgtgaa

SEQ ID NO: 240673 - DNA, 54 bp, Artificial
  Synthetic oligonucleotide
ctaaaacaccaccagaaccctgactagcaaaattaccaagtagatcactcccca

SEQ ID NO: 240674 - DNA, 54 bp, Artificial
  Synthetic oligonucleotide
cgtttggaagagacgcaatatatttatctagccggatttcgcctttgtatgttg

SEQ ID NO: 240675 - DNA, 54 bp, Artificial
  Synthetic oligonucleotide
aagaccaattgctcttaaagttccaagctctctagttctttcaagactaagtgc

SEQ ID NO: 240676 - DNA, 54 bp, Artificial
  Synthetic oligonucleotide
cgttctacaatctcaatccaatgttgtagaacaatcagatcaaaaagatggcaa

SEQ ID NO: 240677 - DNA, 54 bp, Artificial
  Synthetic oligonucleotide
tgtactgctcatcaaggaatattacctcatgatgtctgttcatcttatccactg

SEQ ID NO: 240678 - DNA, 54 bp, Artificial
  Synthetic oligonucleotide
gcaaaacaaacccaaaccctaattaatagcgttagatcgtttggagctgctcta

SEQ ID NO: 240679 - DNA, 54 bp, Artificial
  Synthetic oligonucleotide
gctatagctaagtctagtggtaatgtggctgttgggaaggcaagtgcagcaaaa

SEQ ID NO: 240680 - DNA, 54 bp, Artificial
  Synthetic oligonucleotide
ggggcttcaaacggtactgatgcaattggagaagttgaggctaatgctggtgct

SEQ ID NO: 240681 - DNA, 60 bp, Artificial
  Synthetic oligonucleotide
ataccacctgctaccgctgctgctttcggagtatttgcacctgctaaatgatttgctgat

SEQ ID NO: 240682 - DNA, 54 bp, Artificial
  Synthetic oligonucleotide
cgttaaatacaatcaaacaggcttaagctaagcattgctagcaaatttttacat

SEQ ID NO: 240683 - DNA, 54 bp, Artificial
  Synthetic oligonucleotide
ctctactcccctacaacctgtaatttagagtatatgaacaaaccatccctgaga

SEQ ID NO: 240684 - DNA, 54 bp, Artificial
  Synthetic oligonucleotide
tgtacctggttatacgaatcggtcagatgttttgccaaagcgatggtcataccg

SEQ ID NO: 240685 - DNA, 54 bp, Artificial
  Synthetic oligonucleotide
aagctttaccgtatcttgacttgccaatattgtgctttgaagaagcttcttgca

SEQ ID NO: 240686 - DNA, 54 bp, Artificial
  Synthetic oligonucleotide
ggggtctgttcgatggtcacgaaccctgccgcatagccgtctacctgaagggtt

SEQ ID NO: 240687 - DNA, 52 bp, Artificial
  Synthetic oligonucleotide
ttcttcccggtaccgataataactcctacccaaagtttgtggtaacgatgga

SEQ ID NO: 240688 - DNA, 53 bp, Artificial
  Synthetic oligonucleotide
ctcaatcggattcttagcatccttcacatcagcaactgcaacctttccatccc

SEQ ID NO: 240689 - DNA, 53 bp, Artificial
  Synthetic oligonucleotide
ctattaccattccctatcagagcagggacggccagatttacgagctaaacctt

SEQ ID NO: 240690 - DNA, 53 bp, Artificial
  Synthetic oligonucleotide
gcctctaattgtgaacaccatttattaggctctactgtctctaagatctcgta

SEQ ID NO: 240691 - DNA, 52 bp, Artificial
  Synthetic oligonucleotide
gcgagtctttcgaagggcttactcccagaaatctagggggtaggaatttatt

SEQ ID NO: 240692 - DNA, 55 bp, Artificial
  Synthetic oligonucleotide
tacccattaaacccagagcttattaagtttaaacctagcaagtatatgttgccta

SEQ ID NO: 240693 - DNA, 53 bp, Artificial
  Synthetic oligonucleotide
attgcggttggttattgtactctttatggggatacttgtggggggcttgcttt

SEQ ID NO: 240694 - DNA, 53 bp, Artificial
  Synthetic oligonucleotide
ttctcttgctaaagaacttagttaggttcccattctgatgtttttgcaaactg

SEQ ID NO: 240695 - DNA, 53 bp, Artificial
  Synthetic oligonucleotide
ttctcttagtttattaaagtgcgcccgtgttaatgctctttatgaggggcgaa

SEQ ID NO: 240696 - DNA, 53 bp, Artificial
  Synthetic oligonucleotide
ttcctacactagaatcacatagatctaaagatatagaaacccaagcaaaagat

SEQ ID NO: 240697 - DNA, 53 bp, Artificial
  Synthetic oligonucleotide
cgtcttttgagggtgtagattacgagagtaaaagcaaccaagaagatccaaaa

SEQ ID NO: 240698 - DNA, 53 bp, Artificial
  Synthetic oligonucleotide
cgtggtctctcgcgccctcgaagtagatgggttccttctgcagcgtggtccgg

SEQ ID NO: 240699 - DNA, 53 bp, Artificial
  Synthetic oligonucleotide
cgtggtgtttccggattttcagagtacggcaggggcgggtctctatgcatccc

SEQ ID NO: 240700 - DNA, 53 bp, Artificial
  Synthetic oligonucleotide
ttcggatttgatgacaatttctctaatgcaagtgacatttctttttttggcaa

SEQ ID NO: 240701 - DNA, 53 bp, Artificial
  Synthetic oligonucleotide
gtggtattgaaaggtaagggaaatgcggaagcaacgaaaacaggggatgataa

SEQ ID NO: 240702 - DNA, 53 bp, Artificial
  Synthetic oligonucleotide
caagaagattatacctatcgtaactaaacttatactcatttctctgggcaatt

SEQ ID NO: 240703 - DNA, 56 bp, Artificial
  Synthetic oligonucleotide
tacccgcaccctcaactttctttcctatagctttagctaactcatcaaccgactta

SEQ ID NO: 240704 - DNA, 53 bp, Artificial
  Synthetic oligonucleotide
ctaagcacttaaagatgccatatcgataagatatcctcttgtagattttccac

SEQ ID NO: 240705 - DNA, 53 bp, Artificial
  Synthetic oligonucleotide
ctaatgttggtggatcatatcataatgctttaaccgtggaaaacacggttgcc

SEQ ID NO: 240706 - DNA, 53 bp, Artificial
  Synthetic oligonucleotide
ctaattactacaaacacttggggataaattgtggtactgaaatttactataaa

SEQ ID NO: 240707 - DNA, 53 bp, Artificial
  Synthetic oligonucleotide
ctacgatccccattttagcgaatattctcatgaaagatatagcactcgtaagt

SEQ ID NO: 240708 - DNA, 53 bp, Artificial
  Synthetic oligonucleotide
tctgaagctgaacctcccaaaggtactccaagagaattaccaagagaaccttt

SEQ ID NO: 240709 - DNA, 53 bp, Artificial
  Synthetic oligonucleotide
actaaatgttgagcacttgacttctgctataagtaagatatcttcagttggaa

SEQ ID NO: 240710 - DNA, 53 bp, Artificial
  Synthetic oligonucleotide
actaagctttgtaatctcataaataacatctttaagagattggtttagtgtgt

SEQ ID NO: 240711 - DNA, 53 bp, Artificial
  Synthetic oligonucleotide
actactattgctagcctaccagacgaaccaaacccgccaattatttaaacact

SEQ ID NO: 240712 - DNA, 53 bp, Artificial
  Synthetic oligonucleotide
ttctctgggtggcagcaatttttgtcccgtggccaacttgatttccaagcggt

SEQ ID NO: 240713 - DNA, 53 bp, Artificial
  Synthetic oligonucleotide
caaatagaattcatcaaatcagatacctatttcaaaaatttgggtgctagtgg

SEQ ID NO: 240714 - DNA, 60 bp, Artificial
  Synthetic oligonucleotide
tacctacgatcatgtgtccagccattataagtattcctccaagcacttgagagccaagta

SEQ ID NO: 240715 - DNA, 51 bp, Artificial
  Synthetic oligonucleotide
gttactagttactttaaataccttttctagcttgtaaagatagttttgtag

SEQ ID NO: 240716 - DNA, 53 bp, Artificial
  Synthetic oligonucleotide
caaatacagtgtattagctgcttagttcaactattacttatgtcaaaaggtac

SEQ ID NO: 240717 - DNA, 53 bp, Artificial
  Synthetic oligonucleotide
gcgccttgccctccatgcgtacaaactcgaatttgagcacccgcgtacgggca

SEQ ID NO: 240718 - DNA, 53 bp, Artificial
  Synthetic oligonucleotide
ctagtgaggtaggcaatattcttgttggaggtgctgggctgaaagatttaatg

SEQ ID NO: 240719 - DNA, 53 bp, Artificial
  Synthetic oligonucleotide
tctatgtcattttgacttatatgacaattgtcttacaaactcataccatccta

SEQ ID NO: 240720 - DNA, 53 bp, Artificial
  Synthetic oligonucleotide
gcgcaagttaaggatgatcagcaaactaaatctgatactaaggttataagcgc

SEQ ID NO: 240721 - DNA, 52 bp, Artificial
  Synthetic oligonucleotide
ctttcggttccctcggcattctaccgtgaccaggtaaaacagcgttataccg

SEQ ID NO: 240722 - DNA, 53 bp, Artificial
  Synthetic oligonucleotide
tttagttagtagacataagccttctgttaatgtcttgtttcgttctgcggcta

SEQ ID NO: 240723 - DNA, 53 bp, Artificial
  Synthetic oligonucleotide
gaaggaagctgtccacaatataaaaaacccgtctggaaacctgggtggcacac

SEQ ID NO: 240724 - DNA, 53 bp, Artificial
  Synthetic oligonucleotide
gcacaaccgacaaaacctgatcatactgagcatcggtttctattttagttcga

SEQ ID NO: 240725 - DNA, 60 bp, Artificial
  Synthetic oligonucleotide
catttatagagttaatgtcagatacattaggattgaaagtgacgaaagacacaactaagc

SEQ ID NO: 240726 - DNA, 58 bp, Artificial
  Synthetic oligonucleotide
ataattaaattacctagcctatcgctgcaaaattgtggatcaagcgatgttggttcgt

SEQ ID NO: 240727 - DNA, 53 bp, Artificial
  Synthetic oligonucleotide
tatcggcactaaatttttggggaaatcccatgagctgccccaccttgtgtccg

SEQ ID NO: 240728 - DNA, 53 bp, Artificial
  Synthetic oligonucleotide
gcaatagagaccttgagaaaacagtaaatcctgatggtggttaaactttgggc

SEQ ID NO: 240729 - DNA, 53 bp, Artificial
  Synthetic oligonucleotide
tttgagcaatcagtagcttccccgacaacagaaaatagggagcacaaacctgt

SEQ ID NO: 240730 - DNA, 53 bp, Artificial
  Synthetic oligonucleotide
atatatattaataggggtaggagcaagcatggttttaacatcctatatagctt

SEQ ID NO: 240731 - DNA, 50 bp, Artificial
  Synthetic oligonucleotide
aaaccctcctcacacccaaaccgggtccctctgccgcggcaccccctccc

SEQ ID NO: 240732 - DNA, 53 bp, Artificial
  Synthetic oligonucleotide
atagcgtaatagctgatattggtaccgggttaaaggggattgaatgcaatatt

SEQ ID NO: 240733 - DNA, 53 bp, Artificial
  Synthetic oligonucleotide
agctataataattggggcaaaagctgccaacatttggttgaatgcttcaccgg

SEQ ID NO: 240734 - DNA, 53 bp, Artificial
  Synthetic oligonucleotide
gcaaagccattattcacccccaatgctactactaagctggcttcgatctttgg

SEQ ID NO: 240735 - DNA, 53 bp, Artificial
  Synthetic oligonucleotide
agctgaacgtatgcccctgcactttcttaacaaactcgtagtcgattgtgcga

SEQ ID NO: 240736 - DNA, 53 bp, Artificial
  Synthetic oligonucleotide
tacccgctgtaaaacttaaagttagcgtatctgcgcttgtattaaccaatttc

SEQ ID NO: 240737 - DNA, 57 bp, Artificial
  Synthetic oligonucleotide
ataacaaatgataaaagaagtatgactactcttaaccttaacaatagcttggtgcag

SEQ ID NO: 240738 - DNA, 51 bp, Artificial
  Synthetic oligonucleotide
atacaaaaaattaactatctcttcaaaagtacccccaagtgagttaagggc

SEQ ID NO: 240739 - DNA, 53 bp, Artificial
  Synthetic oligonucleotide
tataacaatggtgtagagaacgttccatataaagaccttgcactaaggaaaga

SEQ ID NO: 240740 - DNA, 53 bp, Artificial
  Synthetic oligonucleotide
gagacgctgccgtagtgtatcttccggtggatgtcagtcgatttacaccgtgc

SEQ ID NO: 240741 - DNA, 53 bp, Artificial
  Synthetic oligonucleotide
tacgccaggttcgctctacaaagatgttgtccttgcatcttccgattccgtcc

SEQ ID NO: 240742 - DNA, 53 bp, Artificial
  Synthetic oligonucleotide
gatttaaggccaacgagtgcctcataaaccatttcgggatcaaactctatttc

SEQ ID NO: 240743 - DNA, 53 bp, Artificial
  Synthetic oligonucleotide
gattgatagcaatttattggctccagattttcaatctaatattgccgaagata

SEQ ID NO: 240744 - DNA, 53 bp, Artificial
  Synthetic oligonucleotide
ttttgaagaactgcaacgtacagtgcaccatcggtaccagcaacattgattgg

SEQ ID NO: 240745 - DNA, 53 bp, Artificial
  Synthetic oligonucleotide
agggcaatgaaaaggcagggaagttgtttgggaaagctggtgatgctgctaat

SEQ ID NO: 240746 - DNA, 53 bp, Artificial
  Synthetic oligonucleotide
aaaagcggtgctgggtatgatccgcttcgtcccgtgtgcgtgctcgcagaagg

SEQ ID NO: 240747 - DNA, 53 bp, Artificial
  Synthetic oligonucleotide
tttttaacaatgttccaccagatttgcttaaggatcttaagcttagagacgat

SEQ ID NO: 240748 - DNA, 55 bp, Artificial
  Synthetic oligonucleotide
ataaagtgtaccgagcaggggggattctcaaattcccccctgctgtataattcat

SEQ ID NO: 240749 - DNA, 53 bp, Artificial
  Synthetic oligonucleotide
agtctcaagcaactcatccttattctcagaagtctcacgaagagaatatcctg

SEQ ID NO: 240750 - DNA, 53 bp, Artificial
  Synthetic oligonucleotide
aaaacacggacaaagttggacaaatcctgagaatatggttgttagtggtcctt

SEQ ID NO: 240751 - DNA, 53 bp, Artificial
  Synthetic oligonucleotide
agtatagggaaatacattaacattgactttcaagacaattggaatgtatcgca

SEQ ID NO: 240752 - DNA, 53 bp, Artificial
  Synthetic oligonucleotide
gatctgggatactaatgcttccgtcttcattagtgcactcaattcgtaaagat

SEQ ID NO: 240753 - DNA, 53 bp, Artificial
  Synthetic oligonucleotide
aactagaaagtattcatctgataatgatacggttaagtttacaattcacgcaa

SEQ ID NO: 240754 - DNA, 53 bp, Artificial
  Synthetic oligonucleotide
gccgttttacgggccataataccgcgaacgcagtcggccgtttctttcagcgc

SEQ ID NO: 240755 - DNA, 53 bp, Artificial
  Synthetic oligonucleotide
ctctacgtatggtcatcatctgtaaacttccctttcgtgtaccaaccgaaccg

SEQ ID NO: 240756 - DNA, 53 bp, Artificial
  Synthetic oligonucleotide
tcgtccaggcctacaagggactggccgaagcgtacttctccctcggtcagtac

SEQ ID NO: 240757 - DNA, 53 bp, Artificial
  Synthetic oligonucleotide
attagtacggatgacaaatatctattgtggagcggtcttgttcccccagttcc

SEQ ID NO: 240758 - DNA, 53 bp, Artificial
  Synthetic oligonucleotide
actgctcctattgatgcacttgccgctgctatatgtttctcttctgctccttt

SEQ ID NO: 240759 - DNA, 57 bp, Artificial
  Synthetic oligonucleotide
ataaagggtacaactttgcaatatcaccactagaatcgccattttcaatacttccta

SEQ ID NO: 240760 - DNA, 53 bp, Artificial
  Synthetic oligonucleotide
atgttaagcctattagatcaaaaatgacgatcaagcaaataagtgtaggactg

SEQ ID NO: 240761 - DNA, 53 bp, Artificial
  Synthetic oligonucleotide
aacaggtaggaaaacacatgaatatgtttcactacgatacttgtagtatagac

SEQ ID NO: 240762 - DNA, 53 bp, Artificial
  Synthetic oligonucleotide
ctgatggtaacaccattcatcaattcggtgcttttcaaattcggtttggaatc

SEQ ID NO: 240763 - DNA, 51 bp, Artificial
  Synthetic oligonucleotide
gccaaattccccaaaaagtttgacataatttctaaaaggcggtcaaattag

SEQ ID NO: 240764 - DNA, 53 bp, Artificial
  Synthetic oligonucleotide
acttgatcatataaagagtgaacttgataaatgtactggaaatgatgcagacc

SEQ ID NO: 240765 - DNA, 53 bp, Artificial
  Synthetic oligonucleotide
agaaaacagattaataagccgaggcaaatcacaatattgggaatatgtagaac

SEQ ID NO: 240766 - DNA, 53 bp, Artificial
  Synthetic oligonucleotide
ctggtacaaaattgatagggaattgaactggattttcgaatgcaatctttagt

SEQ ID NO: 240767 - DNA, 53 bp, Artificial
  Synthetic oligonucleotide
atgaacggaatacgattatgggaactcttaaggggatgaaaggatttgagcgc

SEQ ID NO: 240768 - DNA, 53 bp, Artificial
  Synthetic oligonucleotide
taacgtagaaaagaatttacgcaaagatcttaatatggggaacaggttaatac

SEQ ID NO: 240769 - DNA, 53 bp, Artificial
  Synthetic oligonucleotide
agagccccccaccttgccacctgtttgtgtttctgtgaacgcgtctgtcttta

SEQ ID NO: 240770 - DNA, 57 bp, Artificial
  Synthetic oligonucleotide
tactaaattactatgggattagaactagtgtgcgatatgaatcttttggttacttcg

SEQ ID NO: 240771 - DNA, 53 bp, Artificial
  Synthetic oligonucleotide
cttattggagtaagcggagtaggcccaagggccgctttaagagtgttgtccaa

SEQ ID NO: 240772 - DNA, 50 bp, Artificial
  Synthetic oligonucleotide
tccccttcgcccaaattacccaccgttttacccaggccaatagcccgtaa

SEQ ID NO: 240773 - DNA, 53 bp, Artificial
  Synthetic oligonucleotide
tcattgttccgcttcataaacgtatcggtagtagtagtaatcgcgtagtcccc

SEQ ID NO: 240774 - DNA, 53 bp, Artificial
  Synthetic oligonucleotide
agatggattggttctagtactaagtattttgaggtgttggtttctagagaaaa

SEQ ID NO: 240775 - DNA, 53 bp, Artificial
  Synthetic oligonucleotide
ttgtgatctgctttggtgattttggaatttgtgctctgggggggagcagtttt

SEQ ID NO: 240776 - DNA, 53 bp, Artificial
  Synthetic oligonucleotide
cttctttgggatctacttctgtgctaggatttaatgcctttttactagatgga

SEQ ID NO: 240777 - DNA, 53 bp, Artificial
  Synthetic oligonucleotide
gcagatatccggtaaagactgtttcgttggatatcccaagctcgtacgcatag

SEQ ID NO: 240778 - DNA, 53 bp, Artificial
  Synthetic oligonucleotide
agcattattagcatcaaccttcccaaacaacttccctgccttttcattgccct

SEQ ID NO: 240779 - DNA, 53 bp, Artificial
  Synthetic oligonucleotide
agccatagtgaatgcctaaaaacttgtctccttcttttacagaatatagccgg

SEQ ID NO: 240780 - DNA, 53 bp, Artificial
  Synthetic oligonucleotide
tatttctataatctttgatttagaaatagtagttcactcgataattttcggaa

SEQ ID NO: 240781 - DNA, 57 bp, Artificial
  Synthetic oligonucleotide
agtttgcgcaaattttcgtctatggtgtaggggttattcttgctaacttaggctgca

SEQ ID NO: 240782 - DNA, 53 bp, Artificial
  Synthetic oligonucleotide
aaatcattagccttgccccaatacgcatccttagtctctaccttgtcaacttc

SEQ ID NO: 240783 - DNA, 53 bp, Artificial
  Synthetic oligonucleotide
atccgacaataccgagagatctataagatatagaacacggacttatggagcac

SEQ ID NO: 240784 - DNA, 53 bp, Artificial
  Synthetic oligonucleotide
cgcaaaagaataataggggattagaaccataagtagtcctcttaaacaccata

SEQ ID NO: 240785 - DNA, 53 bp, Artificial
  Synthetic oligonucleotide
acaccacccctactatctctttaatccctttaaccaatgccttgacactctca

SEQ ID NO: 240786 - DNA, 53 bp, Artificial
  Synthetic oligonucleotide
cgcagtttgtagcgggtacttgcgaaaggatgtatacgaggagtgagttcatg

SEQ ID NO: 240787 - DNA, 53 bp, Artificial
  Synthetic oligonucleotide
cataacaggcaaaggggcaaacccggtttccgatacaggcaacaatattcctg

SEQ ID NO: 240788 - DNA, 53 bp, Artificial
  Synthetic oligonucleotide
gtattcttgggaggttgattagcagatcatgaggcaaaatttcaagccctacg

SEQ ID NO: 240789 - DNA, 53 bp, Artificial
  Synthetic oligonucleotide
cgccgttcctccggtcagtacggggatatctcccttggatgctatgcggatga

SEQ ID NO: 240790 - DNA, 53 bp, Artificial
  Synthetic oligonucleotide
ttacatcggcaagtattgcaaggttgtttagatatgattttagggtcactcca

SEQ ID NO: 240791 - DNA, 53 bp, Artificial
  Synthetic oligonucleotide
gtaaaaggacaagcggtcgttgactatgcaagcttacaaatagcaacatctag

SEQ ID NO: 240792 - DNA, 60 bp, Artificial
  Synthetic oligonucleotide
tactagcccaatagcatatttggatccggcattcagcattgggggcgacaatactgcttt

SEQ ID NO: 240793 - DNA, 53 bp, Artificial
  Synthetic oligonucleotide
gtaaaacttgtcgcaacaaacaccaacataaattaatatctcttacttcaaca

SEQ ID NO: 240794 - DNA, 53 bp, Artificial
  Synthetic oligonucleotide
acctcttgcaagttgtattatatctgcactgtaactaccacttgcttctgcaa

SEQ ID NO: 240795 - DNA, 53 bp, Artificial
  Synthetic oligonucleotide
acagatacgactttattataatggatactgcacccacattaggaagcttgctc

SEQ ID NO: 240796 - DNA, 53 bp, Artificial
  Synthetic oligonucleotide
tgctccctcagaaacttacgaaacatttgttatagcaaattattacccctgtg

SEQ ID NO: 240797 - DNA, 53 bp, Artificial
  Synthetic oligonucleotide
gtccccaataaactgaatacaagcactgagtcatcagtaatataatccccttg

SEQ ID NO: 240798 - DNA, 53 bp, Artificial
  Synthetic oligonucleotide
acgaactcaaatccagtgcgtccttttcggggaacgtgccgctgaacttaccc

SEQ ID NO: 240799 - DNA, 53 bp, Artificial
  Synthetic oligonucleotide
ccattaattagcgacaaaacaaaaggccctataatagctatagcaataggtac

SEQ ID NO: 240800 - DNA, 53 bp, Artificial
  Synthetic oligonucleotide
ggaattataagcaacatggtttcagctattgtaaatcctataattcagccatt

SEQ ID NO: 240801 - DNA, 53 bp, Artificial
  Synthetic oligonucleotide
acagcacgaacgattataagccgggacgctcctcgttttacggaacgattatt

SEQ ID NO: 240802 - DNA, 53 bp, Artificial
  Synthetic oligonucleotide
cctgtagcatcacttcctgcctcacctactggcttagaatcacctactgttcc

SEQ ID NO: 240803 - DNA, 54 bp, Artificial
  Synthetic oligonucleotide
agtttaagcttttaccgggcgcaagtaatgtttactcacaatattaggattgga

SEQ ID NO: 240804 - DNA, 53 bp, Artificial
  Synthetic oligonucleotide
ttaaatgggtattgggaattatgggaacaatggctatcacaatgatagcgggg

SEQ ID NO: 240805 - DNA, 53 bp, Artificial
  Synthetic oligonucleotide
ccttcaacctacactaaacatacctcaaataccttactctcttatagattaga

SEQ ID NO: 240806 - DNA, 53 bp, Artificial
  Synthetic oligonucleotide
ccaagctcttttgaagtctcttttaaactaattttagcaacaccagttctata

SEQ ID NO: 240807 - DNA, 53 bp, Artificial
  Synthetic oligonucleotide
ggcgaatttagtggctacttcgcaagggaatttaatggagcgatattaatcgg

SEQ ID NO: 240808 - DNA, 53 bp, Artificial
  Synthetic oligonucleotide
tgccatacagtgctgggactccctggagtacaattacggctgtgcctcctgcc

SEQ ID NO: 240809 - DNA, 53 bp, Artificial
  Synthetic oligonucleotide
gtactaccgacttcataagaatctttgtctgacaatctaacttgagaattctt

SEQ ID NO: 240810 - DNA, 53 bp, Artificial
  Synthetic oligonucleotide
ttaacagaaggccggtaacaatactggcgaaccagaaaggccggaccctgaaa

SEQ ID NO: 240811 - DNA, 53 bp, Artificial
  Synthetic oligonucleotide
cgagaactgtgcaccaaggaggtaacggcgcctactctatctatgataccacc

SEQ ID NO: 240812 - DNA, 53 bp, Artificial
  Synthetic oligonucleotide
gtatactacatctaaaaaggctttggtattcaattcacttcctaagggatatg

SEQ ID NO: 240813 - DNA, 53 bp, Artificial
  Synthetic oligonucleotide
tgttttcaattcgcttccatttgattttttactcagaaggtttgttcaagctg

SEQ ID NO: 240814 - DNA, 57 bp, Artificial
  Synthetic oligonucleotide
agttgttggaactagcgatgaatacttgtgtaaagcggcaaatataattatcgaaaa

SEQ ID NO: 240815 - DNA, 52 bp, Artificial
  Synthetic oligonucleotide
cctctatgagactatttatagcccccgcaccaaacgggacccccaaaacaaa

SEQ ID NO: 240816 - DNA, 53 bp, Artificial
  Synthetic oligonucleotide
ccacagaaatccaaatgcaataggagcggtgttaatacacggcgatgtttctt

SEQ ID NO: 240817 - DNA, 53 bp, Artificial
  Synthetic oligonucleotide
ttaaggcaatagcggttattaagcagaaagtgtctacggggtccgttggctct

SEQ ID NO: 240818 - DNA, 53 bp, Artificial
  Synthetic oligonucleotide
gggaaagtggagaaagtattgttaaccaggacgctagagtaacaattagcgaa

SEQ ID NO: 240819 - DNA, 53 bp, Artificial
  Synthetic oligonucleotide
aattttggacgtttttgttactctatggttgccgagacattaggaatcaaagc

SEQ ID NO: 240820 - DNA, 53 bp, Artificial
  Synthetic oligonucleotide
tgtgatgataggtaatctttttgctggggctcatgaatctccctcagaggaag

SEQ ID NO: 240821 - DNA, 53 bp, Artificial
  Synthetic oligonucleotide
cccctcttgcaaaactcattgcagtcgttgtgccatttgcatcagcacttagt

SEQ ID NO: 240822 - DNA, 53 bp, Artificial
  Synthetic oligonucleotide
cccctacaagcaaatagaaatctgttttatagggagcatattgtctcataaag

SEQ ID NO: 240823 - DNA, 53 bp, Artificial
  Synthetic oligonucleotide
ggtatacatcgtttaactgggatactaggtatgcgacaagagaggctaatagt

SEQ ID NO: 240824 - DNA, 53 bp, Artificial
  Synthetic oligonucleotide
tgaagaggggtcatttaaagctagtctatattatggatataagggcgaaaaaa

SEQ ID NO: 240825 - DNA, 60 bp, Artificial
  Synthetic oligonucleotide
atccagacttatcaacactaaaagacgaacactccataactgcggtaagacataatatca

SEQ ID NO: 240826 - DNA, 53 bp, Artificial
  Synthetic oligonucleotide
ccccagcacgtcttattggaattagttcgcctggtgagtaattttcactttct

SEQ ID NO: 240827 - DNA, 53 bp, Artificial
  Synthetic oligonucleotide
aagctaccttatgcctttacacttacagagtgatttccaaccactctaaggta

SEQ ID NO: 240828 - DNA, 53 bp, Artificial
  Synthetic oligonucleotide
cggggcatctactgcgtcgtacgctgaaaataaatgctcaacgtatcatagat

SEQ ID NO: 240829 - DNA, 53 bp, Artificial
  Synthetic oligonucleotide
cccgtgaagagataatggcaattgctagtgctttggatttgaataagcttagt

SEQ ID NO: 240830 - DNA, 53 bp, Artificial
  Synthetic oligonucleotide
cagatagttttcatactactgtaatttacatgacaattgtcttacaatctcat

SEQ ID NO: 240831 - DNA, 53 bp, Artificial
  Synthetic oligonucleotide
ggaaactgttgtttgtaataattcacgaatccatgttagtttaatcccagatc

SEQ ID NO: 240832 - DNA, 53 bp, Artificial
  Synthetic oligonucleotide
cagcaaagggctcaagcataccggtaagtcttccgtccggattaatagtacag

SEQ ID NO: 240833 - DNA, 53 bp, Artificial
  Synthetic oligonucleotide
tggtgaacatatatcattaaacggtgggatactcacatccttatataaggata

SEQ ID NO: 240834 - DNA, 53 bp, Artificial
  Synthetic oligonucleotide
ggtggagcaaaggaggcaagtgatgcgataggagtagaaggtagtgaactaat

SEQ ID NO: 240835 - DNA, 53 bp, Artificial
  Synthetic oligonucleotide
tggtttcaagccctcgccttttagaccaatattctaccaaagatccatacaaa

SEQ ID NO: 240836 - DNA, 57 bp, Artificial
  Synthetic oligonucleotide
catatgaaagtagtaactgatattcataaatggggaattgatactaaaaaaaatgaa

SEQ ID NO: 240837 - DNA, 57 bp, Artificial
  Synthetic oligonucleotide
gtagcggtatgccaacaactacaactgggaaaacaggtccaattgcttgaattagta

SEQ ID NO: 240838 - DNA, 60 bp, Artificial
  Synthetic oligonucleotide
atccacaagacccactactgtaggcaatatagagtccgcagtcctccctgtagggcatgt

SEQ ID NO: 240839 - DNA, 52 bp, Artificial
  Synthetic oligonucleotide
cctgcaaagagatttcctatcattacactgtcggctcctgctgcgatggctt

SEQ ID NO: 240840 - DNA, 52 bp, Artificial
  Synthetic oligonucleotide
tggttaacaaagctaaagaggccgttaaattaaaggttaaaggcgctaatgc

SEQ ID NO: 240841 - DNA, 52 bp, Artificial
  Synthetic oligonucleotide
cccctttatcccatcagcaatcccattaacactccctgcatcagctgtcttt

SEQ ID NO: 240842 - DNA, 52 bp, Artificial
  Synthetic oligonucleotide
cttcacgctccaaatcagtctgtccgccacgaaacacaacgcagtcaagacc

SEQ ID NO: 240843 - DNA, 52 bp, Artificial
  Synthetic oligonucleotide
aaatggagacatgacgattagcctatcccacttgttaaatagtccgctattg

SEQ ID NO: 240844 - DNA, 52 bp, Artificial
  Synthetic oligonucleotide
aaatgctgccttcttttagatctaaatctgatgtaagttttgatttagaatc

SEQ ID NO: 240845 - DNA, 52 bp, Artificial
  Synthetic oligonucleotide
aaaacgtgttctactttgataaccggtctgccgtcagaaacacccgacaccg

SEQ ID NO: 240846 - DNA, 52 bp, Artificial
  Synthetic oligonucleotide
ccaattaaatgtgacggatatttaaataccgatcccgggactattaatcctg

SEQ ID NO: 240847 - DNA, 52 bp, Artificial
  Synthetic oligonucleotide
taccgacataacggatttggttccggcctgtgatgatctttacatttggcga

SEQ ID NO: 240848 - DNA, 52 bp, Artificial
  Synthetic oligonucleotide
aggatgcccagaattattttagctctcatagtcggagcaaaccttgcagctt

SEQ ID NO: 240849 - DNA, 60 bp, Artificial
  Synthetic oligonucleotide
atccacaacttctccaattgcatcagtaccacttgaagccccctcagctgtctttacagc

SEQ ID NO: 240850 - DNA, 52 bp, Artificial
  Synthetic oligonucleotide
ggcttgtattgatatgttcacaaaactagagaaacacgtatatgaattttac

SEQ ID NO: 240851 - DNA, 52 bp, Artificial
  Synthetic oligonucleotide
atccttgtgtgacatacttttctatcattattctcttctaccttaataaaga

SEQ ID NO: 240852 - DNA, 52 bp, Artificial
  Synthetic oligonucleotide
aggtgttaagctcatcgtttgacgggcgggtaactggcaatggtgaggtgga

SEQ ID NO: 240853 - DNA, 52 bp, Artificial
  Synthetic oligonucleotide
tgcgcaaactaaagagtctgtaccaccagaaagtcctaaaataacctttttg

SEQ ID NO: 240854 - DNA, 52 bp, Artificial
  Synthetic oligonucleotide
aaatctatgtatccttcgtgatgatgccttaaagcaaaggatccaaattggg

SEQ ID NO: 240855 - DNA, 52 bp, Artificial
  Synthetic oligonucleotide
agggggctcttggtggcggtatagatagttttgcaactagtgcaagtagtac

SEQ ID NO: 240856 - DNA, 52 bp, Artificial
  Synthetic oligonucleotide
tcctcagtgactgcgccactctcgtgggaactgacggacaagacgaaaatgt

SEQ ID NO: 240857 - DNA, 52 bp, Artificial
  Synthetic oligonucleotide
ctgtaaaaagtagttctaatataatctataacttggccatccacaactgacc

SEQ ID NO: 240858 - DNA, 52 bp, Artificial
  Synthetic oligonucleotide
tagcactttatctagagagtctctaacttgctttaagtattcttttgttatg

SEQ ID NO: 240859 - DNA, 51 bp, Artificial
  Synthetic oligonucleotide
tttttgcgttctacttctaggtttttagtctcttcggtcttagtaagttgg

SEQ ID NO: 240860 - DNA, 54 bp, Artificial
  Synthetic oligonucleotide
atcatcctaaatgatcaacaattttcccaaacattcctttttacatacccttaa

SEQ ID NO: 240861 - DNA, 52 bp, Artificial
  Synthetic oligonucleotide
ctgtatgatcagatcccttctcctcatcaacaacatcaggtgtcttctcccc

SEQ ID NO: 240862 - DNA, 52 bp, Artificial
  Synthetic oligonucleotide
ctgtcaatcttgtgagtatttttaatactcacaagactatttttaggaattg

SEQ ID NO: 240863 - DNA, 52 bp, Artificial
  Synthetic oligonucleotide
atgacaaaagacgcctgcagtaccacctcccgggacaagacacacgcgcctc

SEQ ID NO: 240864 - DNA, 52 bp, Artificial
  Synthetic oligonucleotide
ccccgaaagtcttccagaaggggtttctcaggatacgataaccgctttatgg

SEQ ID NO: 240865 - DNA, 52 bp, Artificial
  Synthetic oligonucleotide
agtcctcagattgggatttatggtaatcatggacttgtggtctctactttaa

SEQ ID NO: 240866 - DNA, 52 bp, Artificial
  Synthetic oligonucleotide
gatggaagcttaggcgcccatgagcgttatcccaaaaaatattaaggatcgt

SEQ ID NO: 240867 - DNA, 52 bp, Artificial
  Synthetic oligonucleotide
ttttaggccccattcatgaacgtgaagacttgaacaaggggatagcatagaa

SEQ ID NO: 240868 - DNA, 52 bp, Artificial
  Synthetic oligonucleotide
gtacgggacaataacagaagacgaagtaaaatctaatctagaacttggcctc

SEQ ID NO: 240869 - DNA, 52 bp, Artificial
  Synthetic oligonucleotide
gcatccccattattattaccagtagcctctttaacaccctttagcgcatcac

SEQ ID NO: 240870 - DNA, 52 bp, Artificial
  Synthetic oligonucleotide
ccaaggcagaaactgtcctaagtaaggcttctggagtatgatttttttgtgg

SEQ ID NO: 240871 - DNA, 60 bp, Artificial
  Synthetic oligonucleotide
atcagtagccttcgcaatcttctttgcagcccctaccatcttctttgatgtacaacactt

SEQ ID NO: 240872 - DNA, 52 bp, Artificial
  Synthetic oligonucleotide
ttgtatccacttttgcagtaaatcccaatacatctgacattaactctataaa

SEQ ID NO: 240873 - DNA, 52 bp, Artificial
  Synthetic oligonucleotide
aatgttagcgagcttgaacttgctaggttaaaggtccagcttaagaatgccc

SEQ ID NO: 240874 - DNA, 52 bp, Artificial
  Synthetic oligonucleotide
gtaccgcattgatgaatggcgttaccattagtttgcatatctgctcaatgtt

SEQ ID NO: 240875 - DNA, 52 bp, Artificial
  Synthetic oligonucleotide
agcggggttgaccaagggcgcccgatacccattgccgagggcaacccctcct

SEQ ID NO: 240876 - DNA, 52 bp, Artificial
  Synthetic oligonucleotide
gaatacctttagcataaaggcttgttgcgtatccttgaactacggctgcaac

SEQ ID NO: 240877 - DNA, 52 bp, Artificial
  Synthetic oligonucleotide
tggaggagttgttcagtcttcagcttcaagtagtgagcaactttctagcatg

SEQ ID NO: 240878 - DNA, 46 bp, Artificial
  Synthetic oligonucleotide
tttcgtggttaaagttttagttttcgtggttaaagttttaactttc

SEQ ID NO: 240879 - DNA, 52 bp, Artificial
  Synthetic oligonucleotide
gggcacgggacatatgattgtaagcattgcaaatgatcgcagtatgagtata

SEQ ID NO: 240880 - DNA, 52 bp, Artificial
  Synthetic oligonucleotide
atatcatgtgtacctatttggaaaggtcaatccaaaacctcatatcaatact

SEQ ID NO: 240881 - DNA, 52 bp, Artificial
  Synthetic oligonucleotide
tatccaagctacaagagtaactatactaattgcccaaagtatgcttcctcgt

SEQ ID NO: 240882 - DNA, 59 bp, Artificial
  Synthetic oligonucleotide
taatggatacggcacccacattgggaagtttgctcaataatagcttaataataacagac

SEQ ID NO: 240883 - DNA, 52 bp, Artificial
  Synthetic oligonucleotide
agtttcgaatcgtggaaagggtcgggttagccgcagaaccacccagcataca

SEQ ID NO: 240884 - DNA, 52 bp, Artificial
  Synthetic oligonucleotide
ggtttaccagtcctaatgaggatagcgtaaccatggcaagttcggctgttaa

SEQ ID NO: 240885 - DNA, 52 bp, Artificial
  Synthetic oligonucleotide
tggtgggtttcagacccatcctcatccggaggcacgatggctaaacagaacg

SEQ ID NO: 240886 - DNA, 52 bp, Artificial
  Synthetic oligonucleotide
accatgatagctttttgggttctaaaagaatggtcatccactagagcacagt

SEQ ID NO: 240887 - DNA, 52 bp, Artificial
  Synthetic oligonucleotide
gagcactgaccacaatgttagcgaggttgaacttgctaggttaaaggtacag

SEQ ID NO: 240888 - DNA, 52 bp, Artificial
  Synthetic oligonucleotide
ccgcctgtttcattaactaaatactgcagcttactattaacaggatcgttac

SEQ ID NO: 240889 - DNA, 52 bp, Artificial
  Synthetic oligonucleotide
ccagtgctggtacaaataccggtgatatgtcaagcggagttataactgatgc

SEQ ID NO: 240890 - DNA, 52 bp, Artificial
  Synthetic oligonucleotide
ggggatggctaagggtggaaagtttgccttggctgatgctaatggacggaag

SEQ ID NO: 240891 - DNA, 52 bp, Artificial
  Synthetic oligonucleotide
tatcacaacaggctttcaggaatgtttcaatcgtctctgaaatactcatact

SEQ ID NO: 240892 - DNA, 52 bp, Artificial
  Synthetic oligonucleotide
cccttcgatcgctgttacaaatttttctgctactgtagtagctcgcactttt

SEQ ID NO: 240893 - DNA, 60 bp, Artificial
  Synthetic oligonucleotide
taatgggttatgatcgttcggctgttaaagttgaggcttcagctgattttcctggtagca

SEQ ID NO: 240894 - DNA, 52 bp, Artificial
  Synthetic oligonucleotide
agtcttttgggatgtctttatttattagacgagtcacgacgttatttttttc

SEQ ID NO: 240895 - DNA, 52 bp, Artificial
  Synthetic oligonucleotide
accaggtattgacaaaagtcttcagggacataagtataagtatcagaatttc

SEQ ID NO: 240896 - DNA, 52 bp, Artificial
  Synthetic oligonucleotide
acaagtctgattgcactcgtcctcactcagaatgcaccaaaaatcgctatga

SEQ ID NO: 240897 - DNA, 52 bp, Artificial
  Synthetic oligonucleotide
agtgcccaaagtatcaaataaatcgttaaacagcaataccaatacaattgta

SEQ ID NO: 240898 - DNA, 52 bp, Artificial
  Synthetic oligonucleotide
agtgcgtttatatttaattcaagggatgttaggcttactaatagaggtaccc

SEQ ID NO: 240899 - DNA, 52 bp, Artificial
  Synthetic oligonucleotide
cccgacatcattttataaaggtacctatgtcctctaatatgcgtgttaacaa

SEQ ID NO: 240900 - DNA, 52 bp, Artificial
  Synthetic oligonucleotide
gagtagctatgatgctaggagttatgagcgaagccaataattttcctcatcc

SEQ ID NO: 240901 - DNA, 52 bp, Artificial
  Synthetic oligonucleotide
aaaataccgagcatccgcggggtagtgacgggtttggtaaagtgcggtaaca

SEQ ID NO: 240902 - DNA, 52 bp, Artificial
  Synthetic oligonucleotide
tattgtagtctactgttacacaataaggggtccctatttcatcttgacgtct

SEQ ID NO: 240903 - DNA, 52 bp, Artificial
  Synthetic oligonucleotide
tagtataggtttatttaatatgaaggaggacgcattaacccattttccactt

SEQ ID NO: 240904 - DNA, 59 bp, Artificial
  Synthetic oligonucleotide
taatgtatgaacaataaaagcaatcattaaagtcccaactaaagtatcgctaattctca

SEQ ID NO: 240905 - DNA, 52 bp, Artificial
  Synthetic oligonucleotide
aaatattaaaagcctatagttcattaccataatatttttatagagctaactt

SEQ ID NO: 240906 - DNA, 52 bp, Artificial
  Synthetic oligonucleotide
aaagcccggctccaatcgcaagcccgaacgctgatgcagtccagattatcgc

SEQ ID NO: 240907 - DNA, 52 bp, Artificial
  Synthetic oligonucleotide
tgtatttagattttggttgtgtgagagataggggttctaagtctccttatgt

SEQ ID NO: 240908 - DNA, 52 bp, Artificial
  Synthetic oligonucleotide
ccatgtaacataacctcctgcaagcaattcaaacacctccccttcttttatc

SEQ ID NO: 240909 - DNA, 52 bp, Artificial
  Synthetic oligonucleotide
gaagcatcctccaatcttgctcgttatactggactttgttacggcaagagaa

SEQ ID NO: 240910 - DNA, 52 bp, Artificial
  Synthetic oligonucleotide
agcttgaaagatggtcagtggaagcttttcccatgttaatggatgcaataga

SEQ ID NO: 240911 - DNA, 52 bp, Artificial
  Synthetic oligonucleotide
tggcgatatgattacagggacgttggggataaaagcggacacaaaaaaatcg

SEQ ID NO: 240912 - DNA, 52 bp, Artificial
  Synthetic oligonucleotide
taccatttgctgtgtgataattggtcgtaactgagccatagaaaatctcctt

SEQ ID NO: 240913 - DNA, 52 bp, Artificial
  Synthetic oligonucleotide
aagacaacaacagaagtggtcgtaaggctaggagcattagtagtggagaagc

SEQ ID NO: 240914 - DNA, 52 bp, Artificial
  Synthetic oligonucleotide
cgccttttgtcgcaaacctttagatcagaagttaacgctaggaaagttagaa

SEQ ID NO: 240915 - DNA, 60 bp, Artificial
  Synthetic oligonucleotide
atcaccaatactacgcacataatcataagatccatgaggatcatagtgcctcaaaaatct

SEQ ID NO: 240916 - DNA, 52 bp, Artificial
  Synthetic oligonucleotide
cagttaggctacattagaaatgattgttatattttaaatccatgcaaaattc

SEQ ID NO: 240917 - DNA, 52 bp, Artificial
  Synthetic oligonucleotide
acctcatgcgtcttccaggggaaagctcaatatgacacacgtctctttgttt

SEQ ID NO: 240918 - DNA, 52 bp, Artificial
  Synthetic oligonucleotide
attggttttgaataccttgattatgaatatgtaagagatttgggagttgatt

SEQ ID NO: 240919 - DNA, 52 bp, Artificial
  Synthetic oligonucleotide
caatgctaatcagaatgattcactagttgtaggagcatacaatataatatca

SEQ ID NO: 240920 - DNA, 52 bp, Artificial
  Synthetic oligonucleotide
gttccaaatggaactaatagttccaatttggaactattagtttaaagaggtg

SEQ ID NO: 240921 - DNA, 52 bp, Artificial
  Synthetic oligonucleotide
gcctggtgctagtgcaataggagtattagtataaagccccattaagatacta

SEQ ID NO: 240922 - DNA, 52 bp, Artificial
  Synthetic oligonucleotide
actctaattattcagatgcagtaggtgctttaaaaagttctaagcacgattt

SEQ ID NO: 240923 - DNA, 52 bp, Artificial
  Synthetic oligonucleotide
gttgacatatcaatcgggtcaccgatcgatgttaacggctcccctattctct

SEQ ID NO: 240924 - DNA, 52 bp, Artificial
  Synthetic oligonucleotide
aaggcaactattaatgcaatagcgttgtctgatgcaaaacaaattagtaacg

SEQ ID NO: 240925 - DNA, 52 bp, Artificial
  Synthetic oligonucleotide
gttgaggcatagggcattgataaaggcatgattttagcacatttgagttaac

SEQ ID NO: 240926 - DNA, 59 bp, Artificial
  Synthetic oligonucleotide
atcacatattaattactttatatcacatattaattactttatatcacatattaattact

SEQ ID NO: 240927 - DNA, 52 bp, Artificial
  Synthetic oligonucleotide
cggctcattccaccacttcgttccggaactgctccgcaggtgctacaatccc

SEQ ID NO: 240928 - DNA, 52 bp, Artificial
  Synthetic oligonucleotide
aatcgccgtgtgccgtaccctgtttccgcttgaatcctcgccgggacaaagt

SEQ ID NO: 240929 - DNA, 52 bp, Artificial
  Synthetic oligonucleotide
gttgcacttaaaaacagaagtagcacatcaattgtaataaacgaatcataca

SEQ ID NO: 240930 - DNA, 50 bp, Artificial
  Synthetic oligonucleotide
ggcagaccaaaacgaccgttactgttaaagggagtgtgggtgccggggtt

SEQ ID NO: 240931 - DNA, 52 bp, Artificial
  Synthetic oligonucleotide
cgggcagtactcggcaacacaggcgggtggaacttggagcgaagatcctctc

SEQ ID NO: 240932 - DNA, 52 bp, Artificial
  Synthetic oligonucleotide
aactttgtataaaagggttgaaatctcaacaggcaaagaattaagtttaggc

SEQ ID NO: 240933 - DNA, 52 bp, Artificial
  Synthetic oligonucleotide
acgtatgttagtgctttatagtatgcttagcaactttctacacaataaagcc

SEQ ID NO: 240934 - DNA, 52 bp, Artificial
  Synthetic oligonucleotide
caaccagtgtcggtcctctcggtatagggaagggtttgcgtggcaagcactt

SEQ ID NO: 240935 - DNA, 52 bp, Artificial
  Synthetic oligonucleotide
aaggggtatatatatccactttctgagtcaatattggcatcctttcttacag

SEQ ID NO: 240936 - DNA, 52 bp, Artificial
  Synthetic oligonucleotide
ttctaactcccccaagatctatgcctttgtgaatataccattgcctagtaaa

SEQ ID NO: 240937 - DNA, 59 bp, Artificial
  Synthetic oligonucleotide
taattatattgatatccttaataaggaaatttatctagctagtataacgattgcaaatg

SEQ ID NO: 240938 - DNA, 52 bp, Artificial
  Synthetic oligonucleotide
gtgtgggagcctcccctcatgcgttcagatcgcttacacggctttcaaacat

SEQ ID NO: 240939 - DNA, 52 bp, Artificial
  Synthetic oligonucleotide
ggaaccgctattaaaggaactcttgcgggcttattagaatgaggcaaaattc

SEQ ID NO: 240940 - DNA, 52 bp, Artificial
  Synthetic oligonucleotide
cgcgcgtttatcccttgcagcagccgatacctcctatccatctcatatagac

SEQ ID NO: 240941 - DNA, 52 bp, Artificial
  Synthetic oligonucleotide
tgaggttgattttcattccggatcacggttcttggacagcattgattctgcg

SEQ ID NO: 240942 - DNA, 52 bp, Artificial
  Synthetic oligonucleotide
ctagtccaccacttgtcaccttagaaccggttttaaggcctgtaaaagctgt

SEQ ID NO: 240943 - DNA, 52 bp, Artificial
  Synthetic oligonucleotide
gctacacgactgtagacaagaatctgttcctcaagcggagtggcgccaagtc

SEQ ID NO: 240944 - DNA, 52 bp, Artificial
  Synthetic oligonucleotide
tcttatataggcttaataattactggggatcaattcatggaccatcaaaatt

SEQ ID NO: 240945 - DNA, 50 bp, Artificial
  Synthetic oligonucleotide
ctaaaaattccaagttttcccgactcaaaagctcatactttaaattaaac

SEQ ID NO: 240946 - DNA, 52 bp, Artificial
  Synthetic oligonucleotide
aatacgggaaattttatggccgagcttgtatctagcggtcaggcaagcatgc

SEQ ID NO: 240947 - DNA, 52 bp, Artificial
  Synthetic oligonucleotide
ctataactcagcaggcaagcttgacggccaagcaagtgaaattaagagcctt

SEQ ID NO: 240948 - DNA, 60 bp, Artificial
  Synthetic oligonucleotide
cattcttatcagcacccgaactcccaatagccgccgcaatcggattcttagcattcttca

SEQ ID NO: 240949 - DNA, 57 bp, Artificial
  Synthetic oligonucleotide
taattcggagcttatttttatgaatgaggttgctactttacataagcaaactttaga

SEQ ID NO: 240950 - DNA, 52 bp, Artificial
  Synthetic oligonucleotide
caaacttagttctttaaatttggacggtaatttgccaaacgaatatacagcg

SEQ ID NO: 240951 - DNA, 52 bp, Artificial
  Synthetic oligonucleotide
ggataattctttgcttaagttatcaattaggataacttaagcggtttatata

SEQ ID NO: 240952 - DNA, 52 bp, Artificial
  Synthetic oligonucleotide
ccaagccctgatcttattaacgatgtgattaagctgtgattttgatcctcct

SEQ ID NO: 240953 - DNA, 52 bp, Artificial
  Synthetic oligonucleotide
tcttttgaacttagtggggagatgccgtcgaatcagatgcggattcagggac

SEQ ID NO: 240954 - DNA, 52 bp, Artificial
  Synthetic oligonucleotide
ccttacacagtgcctttccgatggtacgaagcatcgtttgagcgttacatac

SEQ ID NO: 240955 - DNA, 52 bp, Artificial
  Synthetic oligonucleotide
gtgcagggtatctaatgaagaataatggctccttgatactttggatatcatt

SEQ ID NO: 240956 - DNA, 52 bp, Artificial
  Synthetic oligonucleotide
acttacacccatctctttactaatctgtgcatcactaagcttcccttcatta

SEQ ID NO: 240957 - DNA, 52 bp, Artificial
  Synthetic oligonucleotide
ctgggccatcgtaattaaacggggcaataacaactttgtgcactccagacaa

SEQ ID NO: 240958 - DNA, 52 bp, Artificial
  Synthetic oligonucleotide
ctggcaaagggccttctccaagtcggtgtttaaaagatcacgctctttcaaa

SEQ ID NO: 240959 - DNA, 52 bp, Artificial
  Synthetic oligonucleotide
atggaggcttagaagatatgtcataacaaactctatttatgcctctaacttc

SEQ ID NO: 240960 - DNA, 60 bp, Artificial
  Synthetic oligonucleotide
atatttgcaatctcaagtcctaaagtaggacgcatgctacactctgtgtaaattatgaac

SEQ ID NO: 240961 - DNA, 52 bp, Artificial
  Synthetic oligonucleotide
cggtataatcccgatccgtatgtctgtgaggtcataaacggtaaatcttacc

SEQ ID NO: 240962 - DNA, 52 bp, Artificial
  Synthetic oligonucleotide
gcccaggtgcaaggtgtgccatatctttattaaccccaattacataatgacc

SEQ ID NO: 240963 - DNA, 52 bp, Artificial
  Synthetic oligonucleotide
gtttcgacttctaatgctgatattaaaggagtagaagctgttattcaaggca

SEQ ID NO: 240964 - DNA, 52 bp, Artificial
  Synthetic oligonucleotide
cgaaatcttagaattcttgggagagatttagctattcctgagagacgggaga

SEQ ID NO: 240965 - DNA, 52 bp, Artificial
  Synthetic oligonucleotide
ggccctattttaccagatgttgaatacaaagtagttggaattgatgggagag

SEQ ID NO: 240966 - DNA, 52 bp, Artificial
  Synthetic oligonucleotide
aacatgaagcatgttgagcagcaaagttttattggttgtgaagtgtttgagg

SEQ ID NO: 240967 - DNA, 52 bp, Artificial
  Synthetic oligonucleotide
tgcagtaatagcaggagggatagggattaattaggtaaataattagttaaga

SEQ ID NO: 240968 - DNA, 52 bp, Artificial
  Synthetic oligonucleotide
gctattgccaaggtatcagacataagtcatatcgatggagagatattagagc

SEQ ID NO: 240969 - DNA, 52 bp, Artificial
  Synthetic oligonucleotide
aacctccataatttgtccaagcaaggcccattaccatccctgaatacatagc

SEQ ID NO: 240970 - DNA, 52 bp, Artificial
  Synthetic oligonucleotide
gtataggccttataggaggttgaaacctccatgcccgagaattgagtaacaa

SEQ ID NO: 240971 - DNA, 57 bp, Artificial
  Synthetic oligonucleotide
atatttctgttaatgaggattctagagtaataattagtgaggatacttttgaacacc

SEQ ID NO: 240972 - DNA, 52 bp, Artificial
  Synthetic oligonucleotide
gcttcaggtgtggtttattcatgaatatcgatacaagtataggaaagagata

SEQ ID NO: 240973 - DNA, 52 bp, Artificial
  Synthetic oligonucleotide
ttcgaatagtattctaaaagctccagttactgtatactcactcggcatccca

SEQ ID NO: 240974 - DNA, 52 bp, Artificial
  Synthetic oligonucleotide
tctttataatataaagtagatagatattccccatcaagtaaactatatagca

SEQ ID NO: 240975 - DNA, 52 bp, Artificial
  Synthetic oligonucleotide
gtgggcaattgaaagtttagatctaataaccagcagacttcaagatcttttt

SEQ ID NO: 240976 - DNA, 51 bp, Artificial
  Synthetic oligonucleotide
aggcaaaccacgcgactttgggggactacacacaatagttgacgatgctac

SEQ ID NO: 240977 - DNA, 49 bp, Artificial
  Synthetic oligonucleotide
aggcggaacgagggttcccgtaaggggaccgaagggctctctgttaagg

SEQ ID NO: 240978 - DNA, 51 bp, Artificial
  Synthetic oligonucleotide
aaggggcaaagacagtaagtgaggcaattggtgattctagtgatttcattg

SEQ ID NO: 240979 - DNA, 51 bp, Artificial
  Synthetic oligonucleotide
aaaacaccagtgccagattaagcagtaccagagagtgtgttttaaacctag

SEQ ID NO: 240980 - DNA, 51 bp, Artificial
  Synthetic oligonucleotide
agggggcacgccgatacctgcctacgtgcgggtaccctacgcaaaacttgc

SEQ ID NO: 240981 - DNA, 51 bp, Artificial
  Synthetic oligonucleotide
tgtaaataagatccgtaccactctgatttatatgataattgccttacaagc

SEQ ID NO: 240982 - DNA, 58 bp, Artificial
  Synthetic oligonucleotide
atattggcgttttctcataatttatatatagcgactccatgcaataggagtttttaag

SEQ ID NO: 240983 - DNA, 51 bp, Artificial
  Synthetic oligonucleotide
taggtataataaaccggttctggttttgcctacataaaatctatgagcccc

SEQ ID NO: 240984 - DNA, 51 bp, Artificial
  Synthetic oligonucleotide
tcttggatcatattgtaaggtgtccttagtccaaacctgaaaagactcctc

SEQ ID NO: 240985 - DNA, 51 bp, Artificial
  Synthetic oligonucleotide
tgaataattcctaaattacattgaaggagtattcagcgcaaattagagtac

SEQ ID NO: 240986 - DNA, 51 bp, Artificial
  Synthetic oligonucleotide
ttcgtcttttagtgttgataaatccggataagtatattcctggataattcg

SEQ ID NO: 240987 - DNA, 51 bp, Artificial
  Synthetic oligonucleotide
aaaaaagtgtattgctatcaaaaaaatccaattaagttgggtttagctaag

SEQ ID NO: 240988 - DNA, 51 bp, Artificial
  Synthetic oligonucleotide
aagcagcaggtaagtagtagaatttggatatagttgttgaaatgattagat

SEQ ID NO: 240989 - DNA, 51 bp, Artificial
  Synthetic oligonucleotide
aagcggtacaatcagcaggaataacagcagtaaataaactattagtggcag

SEQ ID NO: 240990 - DNA, 51 bp, Artificial
  Synthetic oligonucleotide
tggctcctataccagcgaacacccctatttgatcgagggtattctgagggg

SEQ ID NO: 240991 - DNA, 51 bp, Artificial
  Synthetic oligonucleotide
aaggcccacacgtggcctctaaaatctaccaccgcatagcagccaagcccg

SEQ ID NO: 240992 - DNA, 51 bp, Artificial
  Synthetic oligonucleotide
agggaatgcctgtaataagcttgagggatcccaaaaccataacttatgttt

SEQ ID NO: 240993 - DNA, 58 bp, Artificial
  Synthetic oligonucleotide
atattattatgcaaacaccaaccaaaatcctcatatatacctcttctccaccttacgc

SEQ ID NO: 240994 - DNA, 51 bp, Artificial
  Synthetic oligonucleotide
acggggaaaggcccgcaggtatttttacggcaggacaggcacaagccctca

SEQ ID NO: 240995 - DNA, 51 bp, Artificial
  Synthetic oligonucleotide
ttccacagttccattcccaattcgattgaggtggatgatgagccggagcct

SEQ ID NO: 240996 - DNA, 51 bp, Artificial
  Synthetic oligonucleotide
acggaaaacgtacctattaaagatacaacacctaaagctgattctacccct

SEQ ID NO: 240997 - DNA, 51 bp, Artificial
  Synthetic oligonucleotide
aagcgtgagttgacacttaaggtcaattttttggttattaagatcctgact

SEQ ID NO: 240998 - DNA, 51 bp, Artificial
  Synthetic oligonucleotide
aggggagttaaagggcggattagatgaattagcactagcaatggttcgtgt

SEQ ID NO: 240999 - DNA, 51 bp, Artificial
  Synthetic oligonucleotide
agggcggggtaaagggggcaaagcggcacattgttaccgactatgagcgta

SEQ ID NO: 241000 - DNA, 51 bp, Artificial
  Synthetic oligonucleotide
acgcatgctttgggattcgccctgaactgagcgactcgccgtgagcctgtg

SEQ ID NO: 241001 - DNA, 51 bp, Artificial
  Synthetic oligonucleotide
ttcctcgatattaccaataggcacatcaggcgacaaaatattgggtactcg

SEQ ID NO: 241002 - DNA, 51 bp, Artificial
  Synthetic oligonucleotide
aggttttaaattgacaattgggattgtattggcatacaaatacaattaatg

SEQ ID NO: 241003 - DNA, 51 bp, Artificial
  Synthetic oligonucleotide
aaaagactttagacgggttaaaatatggtagtggtggtcgtgatgtacctc

SEQ ID NO: 241004 - DNA, 58 bp, Artificial
  Synthetic oligonucleotide
atatgttagtacatcaaacatttattcctgtaccaatgcacgttattgaaaagtatgg

SEQ ID NO: 241005 - DNA, 51 bp, Artificial
  Synthetic oligonucleotide
tgatgttggtcaaaacaattctttgaaagccaatattccatattggttcgc

SEQ ID NO: 241006 - DNA, 51 bp, Artificial
  Synthetic oligonucleotide
agcagcaagttctgacaatggattttgaagaccatcatacacctgacttaa

SEQ ID NO: 241007 - DNA, 51 bp, Artificial
  Synthetic oligonucleotide
tgttgccaatcctgtaagtttgcttacttgccctacaatagaatctgctac

SEQ ID NO: 241008 - DNA, 51 bp, Artificial
  Synthetic oligonucleotide
tcgtctttaaacccggaggctttaaattggtaagtttcggccccatcataa

SEQ ID NO: 241009 - DNA, 51 bp, Artificial
  Synthetic oligonucleotide
agcaatgccggaggcagtccgaacaaagtgaggaccgcgtgcagcaagttg

SEQ ID NO: 241010 - DNA, 51 bp, Artificial
  Synthetic oligonucleotide
tcattatctatacgtctaaccttttcactagtagacaaaggataatattta

SEQ ID NO: 241011 - DNA, 51 bp, Artificial
  Synthetic oligonucleotide
aacccttaacattaggctgagcgctaaaagacgctctattgcccgaaggct

SEQ ID NO: 241012 - DNA, 51 bp, Artificial
  Synthetic oligonucleotide
agagtgcagaccaaataattggaaaagcttctgaaactacaacaaatttca

SEQ ID NO: 241013 - DNA, 51 bp, Artificial
  Synthetic oligonucleotide
aacccataaattccgattcccagtgaagcatctatcgctttagattgttct

SEQ ID NO: 241014 - DNA, 51 bp, Artificial
  Synthetic oligonucleotide
tcccatgataacatgcccgtattaaaagtggcacaagcacaagatgggagt

SEQ ID NO: 241015 - DNA, 54 bp, Artificial
  Synthetic oligonucleotide
taattctcaaaacaggcctaaacacactcataattatttcggggaaaaggcttc

SEQ ID NO: 241016 - DNA, 51 bp, Artificial
  Synthetic oligonucleotide
tgcctgcctttaaagagggcgttgatcttgctggaagttcaatagacgagc

SEQ ID NO: 241017 - DNA, 51 bp, Artificial
  Synthetic oligonucleotide
aaccaagcacagtatcctcaatttctcgcaattgggatcgatagagatttg

SEQ ID NO: 241018 - DNA, 51 bp, Artificial
  Synthetic oligonucleotide
aatgacactaagaataataagatgtaacgcattattcaaaggaggaagcga

SEQ ID NO: 241019 - DNA, 51 bp, Artificial
  Synthetic oligonucleotide
aaatgttctgaagaatttactaataaactaagagttagtcatgcagatctt

SEQ ID NO: 241020 - DNA, 51 bp, Artificial
  Synthetic oligonucleotide
tccgtacccgcggaatccagttcacgaaattcggacgcgcgttcaagacga

SEQ ID NO: 241021 - DNA, 51 bp, Artificial
  Synthetic oligonucleotide
agacagggcatacagggtgtcatcagtgccttctttggtaacagccagatc

SEQ ID NO: 241022 - DNA, 51 bp, Artificial
  Synthetic oligonucleotide
tcgcagtccttcattccgcgctaacaccaagccagcgtctcggagaatgga

SEQ ID NO: 241023 - DNA, 51 bp, Artificial
  Synthetic oligonucleotide
tcgcaggagttattattgacataaagccacaagaacttgcaattctttatg

SEQ ID NO: 241024 - DNA, 51 bp, Artificial
  Synthetic oligonucleotide
tcctactttatgatatttggcctctattaaaatagtgggctcttcatcctt

SEQ ID NO: 241025 - DNA, 51 bp, Artificial
  Synthetic oligonucleotide
agaatcgatgcaagctgatgaaccgaaggggcatgatgaagagcaagtggc

SEQ ID NO: 241026 - DNA, 54 bp, Artificial
  Synthetic oligonucleotide
atatgaaattgacaagaattcaaggtaacttcaaggcgtatttttaagcttaaa

SEQ ID NO: 241027 - DNA, 51 bp, Artificial
  Synthetic oligonucleotide
tcctcgtgactacaagaatcaccgcgtaatcattgatctggaagactataa

SEQ ID NO: 241028 - DNA, 51 bp, Artificial
  Synthetic oligonucleotide
agaatagcaatttctaggggattttgaacaaaagttgagcctatgtcaatt

SEQ ID NO: 241029 - DNA, 51 bp, Artificial
  Synthetic oligonucleotide
aaacactggtgctggaaaacttgaaggtttgaaagctgacaagagtaaagt

SEQ ID NO: 241030 - DNA, 51 bp, Artificial
  Synthetic oligonucleotide
tctgagcttgatagtgattgtacttgacctcgtacaactcgggctactgtt

SEQ ID NO: 241031 - DNA, 51 bp, Artificial
  Synthetic oligonucleotide
ttagcgaatttgaacttaatagactaaaggtacagcttaagaatgcactac

SEQ ID NO: 241032 - DNA, 51 bp, Artificial
  Synthetic oligonucleotide
aagtgctacttgcaaaaggatacactctaaaagacattatgcaagcgcaac

SEQ ID NO: 241033 - DNA, 51 bp, Artificial
  Synthetic oligonucleotide
tttgtgcttaacatgatacatgacatatgctatagacaaaatcaatgtgtt

SEQ ID NO: 241034 - DNA, 51 bp, Artificial
  Synthetic oligonucleotide
agctattcagaagaagatgacagtccaaatttatcgtcagctgctacagtt

SEQ ID NO: 241035 - DNA, 51 bp, Artificial
  Synthetic oligonucleotide
tgagggcttaagcttaagcttagaggttgcacttaagtacaatgacagctt

SEQ ID NO: 241036 - DNA, 51 bp, Artificial
  Synthetic oligonucleotide
acagcaaatataacgagcttatacaaagtagttcctttaataacgaggagc

SEQ ID NO: 241037 - DNA, 54 bp, Artificial
  Synthetic oligonucleotide
taattgatttccaaaggtctttaataccaaatagacagtctttcggaatactta

SEQ ID NO: 241038 - DNA, 51 bp, Artificial
  Synthetic oligonucleotide
aataaacgactatgatctcatatgggagggtcgattcaaagattggtactc

SEQ ID NO: 241039 - DNA, 51 bp, Artificial
  Synthetic oligonucleotide
tctctactgtgattgcttcaagttatatgcaaggaattattggtggccaag

SEQ ID NO: 241040 - DNA, 51 bp, Artificial
  Synthetic oligonucleotide
actaccgcccgccgttcactttccatacaatagacagcaacgcgggatata

SEQ ID NO: 241041 - DNA, 51 bp, Artificial
  Synthetic oligonucleotide
agctagagcttacaagcgaacctacaacaagagcagtgattagtagtgagg

SEQ ID NO: 241042 - DNA, 51 bp, Artificial
  Synthetic oligonucleotide
actactgcagttaaaggggcgctgctgttagtgcagtaactaaggcgctag

SEQ ID NO: 241043 - DNA, 51 bp, Artificial
  Synthetic oligonucleotide
tgagtatttacacatctaatgacagctgtgtattcatatgttctttgatcc

SEQ ID NO: 241044 - DNA, 51 bp, Artificial
  Synthetic oligonucleotide
acctttgcggggccggcgcagattgaagtagggtcggaaacagccgctgca

SEQ ID NO: 241045 - DNA, 51 bp, Artificial
  Synthetic oligonucleotide
acagagttaaccatcatgaacgaaacagctctagccttaacagacgatact

SEQ ID NO: 241046 - DNA, 51 bp, Artificial
  Synthetic oligonucleotide
ttacgatccaaaaagcagttttccatacaagcgtggggttaaacttgttcc

SEQ ID NO: 241047 - DNA, 51 bp, Artificial
  Synthetic oligonucleotide
aaacgacattaaaggtgtatgttatgagttgagaggttcgcattaataata

SEQ ID NO: 241048 - DNA, 56 bp, Artificial
  Synthetic oligonucleotide
taatttcatgcctttaggggctattcagaaacgtattacactaacatattttatta

SEQ ID NO: 241049 - DNA, 51 bp, Artificial
  Synthetic oligonucleotide
agcgtcttttatgctcaaggagcttgcaaaaggtggggtaatttcatattg

SEQ ID NO: 241050 - DNA, 51 bp, Artificial
  Synthetic oligonucleotide
aaactggccgctatcataatacccgctgagaaaccaagcatagcgtccatt

SEQ ID NO: 241051 - DNA, 51 bp, Artificial
  Synthetic oligonucleotide
aataggtatgaaaagtttcctgcctcctatggtcatgggctgggaatacct

SEQ ID NO: 241052 - DNA, 51 bp, Artificial
  Synthetic oligonucleotide
agcggaagcgcgggaatggttcagcctataagcgtggcagttgttggcgga

SEQ ID NO: 241053 - DNA, 51 bp, Artificial
  Synthetic oligonucleotide
aaagcttgaaaagataatcacagatactagatttgagtctaaaggagagtt

SEQ ID NO: 241054 - DNA, 51 bp, Artificial
  Synthetic oligonucleotide
aatcagagcttttaaagtgctgatcttctttgctaaaagggtaagttagta

SEQ ID NO: 241055 - DNA, 51 bp, Artificial
  Synthetic oligonucleotide
acaaagtatagcaaccatgcatacagcgtatctggagcattcaatgctagt

SEQ ID NO: 241056 - DNA, 51 bp, Artificial
  Synthetic oligonucleotide
cgtttcatttggggaaatggtagggagtgtattgggattgaagaccgattc

SEQ ID NO: 241057 - DNA, 51 bp, Artificial
  Synthetic oligonucleotide
ccgtgcgcccttggaaacgggaagcgtaacattgagccgtgccggaagaag

SEQ ID NO: 241058 - DNA, 51 bp, Artificial
  Synthetic oligonucleotide
gcccatctcaagatgccaaaaacaatactttggcataattcttccaactcg

SEQ ID NO: 241059 - DNA, 60 bp, Artificial
  Synthetic oligonucleotide
cattctaacagttcttgcattagctccttgcccgattacccaatctagctcataatcttc

SEQ ID NO: 241060 - DNA, 52 bp, Artificial
  Synthetic oligonucleotide
tacaaatgggatatcaaaaaacggtaaaatgggacgcgtttttaaatgctaa

SEQ ID NO: 241061 - DNA, 50 bp, Artificial
  Synthetic oligonucleotide
cagttcagtattcactttttgaaacaattgaaggttttaaaaagcccggg

SEQ ID NO: 241062 - DNA, 51 bp, Artificial
  Synthetic oligonucleotide
cgttgcacaaacgcgcgacatcccgttctctcacagcttgacacaagaatg

SEQ ID NO: 241063 - DNA, 51 bp, Artificial
  Synthetic oligonucleotide
atcccatggcatcggctcggatggggttcccatcgcaaggaacttccatga

SEQ ID NO: 241064 - DNA, 51 bp, Artificial
  Synthetic oligonucleotide
caattagaaatgcgaaattggcagccttggaatttgcaaaacattcaagtt

SEQ ID NO: 241065 - DNA, 51 bp, Artificial
  Synthetic oligonucleotide
caatatccttaacgtatctagtaaaaccttcttttacataagttatttgat

SEQ ID NO: 241066 - DNA, 51 bp, Artificial
  Synthetic oligonucleotide
cttagatcatttctacttatcatcttgtaaggcacaagttcggaaaggcca

SEQ ID NO: 241067 - DNA, 51 bp, Artificial
  Synthetic oligonucleotide
caaggattatcttgtagcaatattgtattcaattcaatttgatacatttac

SEQ ID NO: 241068 - DNA, 51 bp, Artificial
  Synthetic oligonucleotide
cgtccgataactcagcaaaacttttggagtatgcctttagaaattcttggt

SEQ ID NO: 241069 - DNA, 51 bp, Artificial
  Synthetic oligonucleotide
taatcaaacgcttatcactagtatcgtgccttaaattaagtctatgttcag

SEQ ID NO: 241070 - DNA, 51 bp, Artificial
  Synthetic oligonucleotide
gcagtttcaagtccccaaaggataaaactagcagttctcttaaatcgaagt

SEQ ID NO: 241071 - DNA, 57 bp, Artificial
  Synthetic oligonucleotide
atatatgaggattttggttggtgtttgcataataatattagctttattgggttgtta

SEQ ID NO: 241072 - DNA, 51 bp, Artificial
  Synthetic oligonucleotide
ccgggcgggattaccggaacagtatctacactgccgtgctccggctcggta

SEQ ID NO: 241073 - DNA, 51 bp, Artificial
  Synthetic oligonucleotide
cttccccgcatccgcattactattcccagcagcctctttaacaccctttag

SEQ ID NO: 241074 - DNA, 51 bp, Artificial
  Synthetic oligonucleotide
cttctaaaattcaagctagtaaacccaattattataatccactcttagttt

SEQ ID NO: 241075 - DNA, 51 bp, Artificial
  Synthetic oligonucleotide
cttgtacggaatatgcactgatatagatgaatatactggtatagcgactgt

SEQ ID NO: 241076 - DNA, 51 bp, Artificial
  Synthetic oligonucleotide
caactagtaacggggatcttggtaaagagaatgttactgatgctcatgcac

SEQ ID NO: 241077 - DNA, 51 bp, Artificial
  Synthetic oligonucleotide
atcaaagcatattaaaatccctatcacgcccaatgttgcaacagaatccct

SEQ ID NO: 241078 - DNA, 51 bp, Artificial
  Synthetic oligonucleotide
ctttttcagaattgtcggatagaattccttgagcaccagagctccacttca

SEQ ID NO: 241079 - DNA, 51 bp, Artificial
  Synthetic oligonucleotide
gctctagctaaaactaatcaacatgaagttgattctaaaaccctgttagaa

SEQ ID NO: 241080 - DNA, 51 bp, Artificial
  Synthetic oligonucleotide
cattcatacattgattttgttttaggggggctgcttgctaccaagaatact

SEQ ID NO: 241081 - DNA, 51 bp, Artificial
  Synthetic oligonucleotide
gttttcgtcaaaatgtaaggatgtgtaaagtattcttctttcgtttagata

SEQ ID NO: 241082 - DNA, 57 bp, Artificial
  Synthetic oligonucleotide
atatagagtctttactaaatacatatttgaagaactaaattattcagtagaacagta

SEQ ID NO: 241083 - DNA, 51 bp, Artificial
  Synthetic oligonucleotide
gaaccgccggtatagacgtttccgttcaaaagaatcagcgaattgcgcgtg

SEQ ID NO: 241084 - DNA, 51 bp, Artificial
  Synthetic oligonucleotide
caacgccactgcccacatagtacggcggtttaaggacgccagcgccaacta

SEQ ID NO: 241085 - DNA, 51 bp, Artificial
  Synthetic oligonucleotide
gggcctttaacaaacttctaagattttgtacacgatcttgcatgccttcaa

SEQ ID NO: 241086 - DNA, 51 bp, Artificial
  Synthetic oligonucleotide
gaacttataacacgcacttataatactagttgctctaaaagaccagttatc

SEQ ID NO: 241087 - DNA, 51 bp, Artificial
  Synthetic oligonucleotide
gccttcgcaccagcattagcagcaccaacatccccaatcttatcattacca

SEQ ID NO: 241088 - DNA, 51 bp, Artificial
  Synthetic oligonucleotide
cacgttaagctgaataaacactggaattcttctgccatagacatctgacta

SEQ ID NO: 241089 - DNA, 51 bp, Artificial
  Synthetic oligonucleotide
cgagcctttcgtttaaagacactcctttcattgatgaggttgaagttagcc

SEQ ID NO: 241090 - DNA, 51 bp, Artificial
  Synthetic oligonucleotide
taagataattggtggagcaaaggctgcaagtgaggcgataggagatgctag

SEQ ID NO: 241091 - DNA, 51 bp, Artificial
  Synthetic oligonucleotide
cgagaataccaatggatcgacctgcagtgggataatcgtacttttcctgat

SEQ ID NO: 241092 - DNA, 51 bp, Artificial
  Synthetic oligonucleotide
cgacgcaagcgtcggggtattaaaccctccgcacgaataaagccggcccct

SEQ ID NO: 241093 - DNA, 58 bp, Artificial
  Synthetic oligonucleotide
atatactgattgattcacttcgtattaatttgtatggaggggataaggcaagtgattt

SEQ ID NO: 241094 - DNA, 51 bp, Artificial
  Synthetic oligonucleotide
ctattgcatccctttgggtgttaacatgggtgtggtactgaaggttgctaa

SEQ ID NO: 241095 - DNA, 51 bp, Artificial
  Synthetic oligonucleotide
atcgctcgctcactgcagagtgtattcacattcatcctgggtcctgtgtgt

SEQ ID NO: 241096 - DNA, 51 bp, Artificial
  Synthetic oligonucleotide
atctgcttttaaagagggtgttgatctttctggcaaagcaatagatgagag

SEQ ID NO: 241097 - DNA, 51 bp, Artificial
  Synthetic oligonucleotide
ggcgctcggaaatcgtagttctttatgctcatgtcgttcaaagagccagtc

SEQ ID NO: 241098 - DNA, 51 bp, Artificial
  Synthetic oligonucleotide
atcgatttcctcagcggaattgtgccagtttattaagcccatttccttcgt

SEQ ID NO: 241099 - DNA, 51 bp, Artificial
  Synthetic oligonucleotide
gtgctcaataagagaaatggagctttactatgaatgtatgaaaaaactttc

SEQ ID NO: 241100 - DNA, 51 bp, Artificial
  Synthetic oligonucleotide
cgccgctccagcctgattagcctgcccaatagccgcagcaatcggattcgt

SEQ ID NO: 241101 - DNA, 51 bp, Artificial
  Synthetic oligonucleotide
atccttagtttaaaggatgctaattatcgcaatgtacctccagtgggtaaa

SEQ ID NO: 241102 - DNA, 51 bp, Artificial
  Synthetic oligonucleotide
gtcctaaatcatcgtatttactactctctacaataaagtgcggcttgtcct

SEQ ID NO: 241103 - DNA, 51 bp, Artificial
  Synthetic oligonucleotide
ctagtagcacagaagttagaagtaggtctatttttgatgcgcttattgagc

SEQ ID NO: 241104 - DNA, 56 bp, Artificial
  Synthetic oligonucleotide
atataaattctaagcttaatcttgaccctaaatcgggaatggaggctattggacaa

SEQ ID NO: 241105 - DNA, 51 bp, Artificial
  Synthetic oligonucleotide
cagtaccttgtcccattcatacactgacaatactcttggcgggtattcata

SEQ ID NO: 241106 - DNA, 51 bp, Artificial
  Synthetic oligonucleotide
ctgaacccgttaccaggatgacgcaaggatgtttcgccttgtcatcgggac

SEQ ID NO: 241107 - DNA, 51 bp, Artificial
  Synthetic oligonucleotide
ctaggcgcccagaccatactgtccgtgaccatttcctataccgatagtttt

SEQ ID NO: 241108 - DNA, 51 bp, Artificial
  Synthetic oligonucleotide
cacatatgcagaccttgactatgaactaaaagacagaatatcaatttcgta

SEQ ID NO: 241109 - DNA, 51 bp, Artificial
  Synthetic oligonucleotide
ctaccaaagaactgtaaagtgggatgcgtttttaaatgctaatcctacaac

SEQ ID NO: 241110 - DNA, 51 bp, Artificial
  Synthetic oligonucleotide
ctaatgccttagttaccgcactcaatgctactcctgtaactacaataacaa

SEQ ID NO: 241111 - DNA, 51 bp, Artificial
  Synthetic oligonucleotide
gtggacagattctgagaatatggttgttagtggtcctttcaaattaaaatc

SEQ ID NO: 241112 - DNA, 51 bp, Artificial
  Synthetic oligonucleotide
cagtgattattgtgtatggcataaatatgctccttaagcagaataaccata

SEQ ID NO: 241113 - DNA, 51 bp, Artificial
  Synthetic oligonucleotide
ggctttaagggcggacacccaagggaacgaagtcatactccgcttcacagt

SEQ ID NO: 241114 - DNA, 51 bp, Artificial
  Synthetic oligonucleotide
ctaaatttggatcctttgttttagagcattatcatgcgggaaacatagatt

SEQ ID NO: 241115 - DNA, 59 bp, Artificial
  Synthetic oligonucleotide
atataaagctcagtaattaacacaagtcaacttgatatcacttagacttaagcttacat

SEQ ID NO: 241116 - DNA, 50 bp, Artificial
  Synthetic oligonucleotide
ccgtttacgagggcggggtaaagggggcaaagcggcacattgttaccgac

SEQ ID NO: 241117 - DNA, 51 bp, Artificial
  Synthetic oligonucleotide
gcccattttggacctggtgaacaaacaacacaccaggctatttcgttgctc

SEQ ID NO: 241118 - DNA, 51 bp, Artificial
  Synthetic oligonucleotide
gttaacagctataatatatgacatactcaaaaaagtagtaatgcccgcaaa

SEQ ID NO: 241119 - DNA, 51 bp, Artificial
  Synthetic oligonucleotide
ccactatcaactgtatttcttatcgcaattataagagtacttagtgtttta

SEQ ID NO: 241120 - DNA, 51 bp, Artificial
  Synthetic oligonucleotide
gacggtagtcaattttgattctcatacagtaagtgaaattgactcagtggg

SEQ ID NO: 241121 - DNA, 51 bp, Artificial
  Synthetic oligonucleotide
gttaagtcggttgacgagttgtctaaagccattggaaagaaaattaaggac

SEQ ID NO: 241122 - DNA, 51 bp, Artificial
  Synthetic oligonucleotide
tactagtgctagactaagtagcactagggagtgtgttttaaatctagagct

SEQ ID NO: 241123 - DNA, 51 bp, Artificial
  Synthetic oligonucleotide
gttaatagtttagctctttataatacctaacttgacttaaattatgcgtat

SEQ ID NO: 241124 - DNA, 51 bp, Artificial
  Synthetic oligonucleotide
tactattgccgttattccttttaataacgaaataactgaatttttgtcagc

SEQ ID NO: 241125 - DNA, 51 bp, Artificial
  Synthetic oligonucleotide
agtttagttgactctagcattcaagctagtaagcctaattattacagtcca

SEQ ID NO: 241126 - DNA, 59 bp, Artificial
  Synthetic oligonucleotide
tacaattagcgttaatttgacgcattctagattggatctaaatcaagtaagttattata

SEQ ID NO: 241127 - DNA, 51 bp, Artificial
  Synthetic oligonucleotide
gactgtgccttgggcacggggctttacggaatggttgttctgcctgattgg

SEQ ID NO: 241128 - DNA, 51 bp, Artificial
  Synthetic oligonucleotide
agttgacccgtcgctttccgtttacgaggcgcacgagcttagcgagcaggt

SEQ ID NO: 241129 - DNA, 51 bp, Artificial
  Synthetic oligonucleotide
gcttgaacttgctggactaaaagttcagcttaagaatgccctacttaattg

SEQ ID NO: 241130 - DNA, 51 bp, Artificial
  Synthetic oligonucleotide
tactgctaaggatcttgtagctcttaatggcaatcgagctgttaatcttaa

SEQ ID NO: 241131 - DNA, 51 bp, Artificial
  Synthetic oligonucleotide
gttacccttctcgccaccatcagcattctgctcacccgaactcccaatagc

SEQ ID NO: 241132 - DNA, 51 bp, Artificial
  Synthetic oligonucleotide
cccgttgacggtatcatagtagaggggaattcttcggtagacgaggctgca

SEQ ID NO: 241133 - DNA, 51 bp, Artificial
  Synthetic oligonucleotide
gattgctgtttggaggcacaagcaccataaataatatcctgtaataacgca

SEQ ID NO: 241134 - DNA, 51 bp, Artificial
  Synthetic oligonucleotide
ccaggcttctggaattgcttgagtcgtagtgtcttaaaaatctgcccgaca

SEQ ID NO: 241135 - DNA, 51 bp, Artificial
  Synthetic oligonucleotide
ccataatggaataagagaagggctattcttgctaagaaatgaaaaagcgat

SEQ ID NO: 241136 - DNA, 51 bp, Artificial
  Synthetic oligonucleotide
gagctttacagtaaatataaccagcttatacaaagtagctcctttgataat

SEQ ID NO: 241137 - DNA, 49 bp, Artificial
  Synthetic oligonucleotide
gttaaacaatttacgttattataacccaatctttataaacggtgtttat

SEQ ID NO: 241138 - DNA, 51 bp, Artificial
  Synthetic oligonucleotide
gatgttgttcttgacggtattatattttttatcgcagataatagcattaca

SEQ ID NO: 241139 - DNA, 51 bp, Artificial
  Synthetic oligonucleotide
agtcgatccacgtgctacaaagagccaaactatcaacttcctttaagaatg

SEQ ID NO: 241140 - DNA, 51 bp, Artificial
  Synthetic oligonucleotide
ggaatgttttacactgccacgcctagtgctagtttagaagttgttaaatac

SEQ ID NO: 241141 - DNA, 51 bp, Artificial
  Synthetic oligonucleotide
gatactagagggggtgctgtactatcgtttaaaagtatttgtgcagttcct

SEQ ID NO: 241142 - DNA, 51 bp, Artificial
  Synthetic oligonucleotide
gatatacaagcatatgatagtgttttaggcacagctcattccgatgctagt

SEQ ID NO: 241143 - DNA, 51 bp, Artificial
  Synthetic oligonucleotide
gatctctcctaacaccttatttatcccttttaatccctcatctactctatt

SEQ ID NO: 241144 - DNA, 51 bp, Artificial
  Synthetic oligonucleotide
caaaagagtgcctatgcactttaagatagtttttaagttcctcgggcttat

SEQ ID NO: 241145 - DNA, 51 bp, Artificial
  Synthetic oligonucleotide
gtacatagagtacctttccacctcaaaagacttagatggtgtgggtgagaa

SEQ ID NO: 241146 - DNA, 51 bp, Artificial
  Synthetic oligonucleotide
caaccgctgaaggatgctcaccgcaggcacggaggcgcagaccgaatgagg

SEQ ID NO: 241147 - DNA, 51 bp, Artificial
  Synthetic oligonucleotide
atgttctacttagcaaaggatttatcgaaactcaagaaaagctatataaag

SEQ ID NO: 241148 - DNA, 57 bp, Artificial
  Synthetic oligonucleotide
caaccttcaaacgtccacctttaagctgtcattggtattactatataatccataaca

SEQ ID NO: 241149 - DNA, 51 bp, Artificial
  Synthetic oligonucleotide
gtacaagtgctattataatggcaacattgcttgcaaaagagcacaaagttc

SEQ ID NO: 241150 - DNA, 51 bp, Artificial
  Synthetic oligonucleotide
gtaagtggtcacttgctgtgtcaagaactcccccaagagtgccaaagtcga

SEQ ID NO: 241151 - DNA, 51 bp, Artificial
  Synthetic oligonucleotide
atgtcaacctcgatgacaggaatatttgtcaacttaataagtttagcagcc

SEQ ID NO: 241152 - DNA, 51 bp, Artificial
  Synthetic oligonucleotide
attataccttatattagagagcactcttaaagcagcccttggccctattcc

SEQ ID NO: 241153 - DNA, 51 bp, Artificial
  Synthetic oligonucleotide
gcaatcaaatctattggcactgatgagagctttattgtactctttagggca

SEQ ID NO: 241154 - DNA, 51 bp, Artificial
  Synthetic oligonucleotide
gcaaggctacacgaaatccccctataccacaaaacaagtctataaacttaa

SEQ ID NO: 241155 - DNA, 51 bp, Artificial
  Synthetic oligonucleotide
gcaagcgttgaacagtcctcatcggctatagaagaaatgataggaggaata

SEQ ID NO: 241156 - DNA, 51 bp, Artificial
  Synthetic oligonucleotide
cgggtagtggacgcaggctttcagaatatagaagccctctacgggcgtatt

SEQ ID NO: 241157 - DNA, 51 bp, Artificial
  Synthetic oligonucleotide
gctggattgtgtcctcggcgattgttctgagctcttccggggtcaagtcgc

SEQ ID NO: 241158 - DNA, 51 bp, Artificial
  Synthetic oligonucleotide
tacctattgtaatgaaaggctgttgttatatcgtttggctcgtgtcctaaa

SEQ ID NO: 241159 - DNA, 55 bp, Artificial
  Synthetic oligonucleotide
caacctaggaaaatttaagggaaaactatgtatatataaagtatcgcctattgca

SEQ ID NO: 241160 - DNA, 51 bp, Artificial
  Synthetic oligonucleotide
atacgaatgtccgcgaccttgaagcatctttgaccaaattgatagcctata

SEQ ID NO: 241161 - DNA, 51 bp, Artificial
  Synthetic oligonucleotide
atagaatttgcctttaaaaatggttctattaaagcatatgttcaatcttta

SEQ ID NO: 241162 - DNA, 50 bp, Artificial
  Synthetic oligonucleotide
aagtgcccggcccgtgctgcctgagggcctaccacagtcccgttgtcata

SEQ ID NO: 241163 - DNA, 50 bp, Artificial
  Synthetic oligonucleotide
aaggttgtgtgaatgcaggccgctcaagccttcagggagtgtcggcaacg

SEQ ID NO: 241164 - DNA, 50 bp, Artificial
  Synthetic oligonucleotide
aaggtctgcgacccctacaaggatgaagtactgccccctgcgccaatgga

SEQ ID NO: 241165 - DNA, 50 bp, Artificial
  Synthetic oligonucleotide
aatcagtcggcccgcttcaaggtctgcattggcactgtgttgagcgcagg

SEQ ID NO: 241166 - DNA, 50 bp, Artificial
  Synthetic oligonucleotide
aatcccgtggcgttcaagacatgcgtggccttcaagacatgcgaggcggg

SEQ ID NO: 241167 - DNA, 50 bp, Artificial
  Synthetic oligonucleotide
aagtcactgacagcccccggtccgttgctggctgcattgtttgccacaac

SEQ ID NO: 241168 - DNA, 50 bp, Artificial
  Synthetic oligonucleotide
cggagtccctctcgctccgtgaggggaacgagtagtggcgctccctcgaa

SEQ ID NO: 241169 - DNA, 50 bp, Artificial
  Synthetic oligonucleotide
cgctcaacttctgacctgcgaaaccgccacacggtgcccacttttcctga

SEQ ID NO: 241170 - DNA, 55 bp, Artificial
  Synthetic oligonucleotide
cattcgaagtggtattacacaaaggataagtaatattaagttgacttgtgttaat

SEQ ID NO: 241171 - DNA, 60 bp, Artificial
  Synthetic oligonucleotide
gttaaacattcatgatcagtgctaatgcctgaagatgcatactttaaagttaaattgggg

SEQ ID NO: 241172 - DNA, 50 bp, Artificial
  Synthetic oligonucleotide
aagtcctgcaaagctgatgccgattgcttcacgcggatggggcggggtaa

SEQ ID NO: 241173 - DNA, 50 bp, Artificial
  Synthetic oligonucleotide
aatccgcgtaagccgctcaatctttttcgccagcccgctgtccaaggcat

SEQ ID NO: 241174 - DNA, 50 bp, Artificial
  Synthetic oligonucleotide
ggatttgtaaaaaatctaaacgatggaagggtagaaattgtagctttctt

SEQ ID NO: 241175 - DNA, 50 bp, Artificial
  Synthetic oligonucleotide
ggagatccaaataaaactttgtcatttgctcaattaggatttaaatatgg

SEQ ID NO: 241176 - DNA, 50 bp, Artificial
  Synthetic oligonucleotide
aatcgattgcccccgctacgggcctggagggtgaattacgacagctcgtg

SEQ ID NO: 241177 - DNA, 50 bp, Artificial
  Synthetic oligonucleotide
aataagcgcggccggatagggagttcccgcctgtgccgttacgaactcaa

SEQ ID NO: 241178 - DNA, 50 bp, Artificial
  Synthetic oligonucleotide
cgcgcggacgcactccgagctgcaatcaccgcacggatctcccggtaatg

SEQ ID NO: 241179 - DNA, 50 bp, Artificial
  Synthetic oligonucleotide
cgcgccgacatcccgtctgttgacggtaacattcccgttccccatacgga

SEQ ID NO: 241180 - DNA, 50 bp, Artificial
  Synthetic oligonucleotide
cgccttgagacccgcagtgtggttccatttccctacgcggatccccctat

SEQ ID NO: 241181 - DNA, 50 bp, Artificial
  Synthetic oligonucleotide
aataaaggcgcggttaggacagctcccgcccttctcattgcaaccggggc

SEQ ID NO: 241182 - DNA, 60 bp, Artificial
  Synthetic oligonucleotide
gttaaacgctcaagattttgatgctaattcacgtatgttaatgctttatggtatgcttag

SEQ ID NO: 241183 - DNA, 50 bp, Artificial
  Synthetic oligonucleotide
cgctccggactttagtgacgcagcaacgcgggagcgcgtgttcgcacaca

SEQ ID NO: 241184 - DNA, 50 bp, Artificial
  Synthetic oligonucleotide
aagtagaaatttttaacaatgtccaaatcctccctatatgaaacatatcc

SEQ ID NO: 241185 - DNA, 50 bp, Artificial
  Synthetic oligonucleotide
aagtaccggcggagtccggtgaaaacgccgctccacccctctcagtgcat

SEQ ID NO: 241186 - DNA, 50 bp, Artificial
  Synthetic oligonucleotide
cgcgggtggagggagtgctacaccgtttggggatggcgagtacgcggttt

SEQ ID NO: 241187 - DNA, 50 bp, Artificial
  Synthetic oligonucleotide
aatatgtgtatattcaggtggctgagcatctcccttaaaaagtaaagccc

SEQ ID NO: 241188 - DNA, 50 bp, Artificial
  Synthetic oligonucleotide
aagttggggacccgggctctatacggttcgtgcaagcatagcggatgcct

SEQ ID NO: 241189 - DNA, 50 bp, Artificial
  Synthetic oligonucleotide
aagttcccgggcctcctgtatggccctggcatgaaatcgggtgttggtct

SEQ ID NO: 241190 - DNA, 50 bp, Artificial
  Synthetic oligonucleotide
cggaaacgttataatatctacagaaacaataagttacgattttaatttac

SEQ ID NO: 241191 - DNA, 50 bp, Artificial
  Synthetic oligonucleotide
aagtacaccggggccagcaagtccggaacgcctactccgcaggggaccgc

SEQ ID NO: 241192 - DNA, 50 bp, Artificial
  Synthetic oligonucleotide
aagtaatttgtggacagtgctggaggtctccataagatttttactaatta

SEQ ID NO: 241193 - DNA, 57 bp, Artificial
  Synthetic oligonucleotide
gttaaaggcgaattagatttagagcgctctaatttagaattaggatttatacgtgca

SEQ ID NO: 241194 - DNA, 50 bp, Artificial
  Synthetic oligonucleotide
cgcgtttgcgtatctacctctgtccccggatccactgcgacagtggcctg

SEQ ID NO: 241195 - DNA, 50 bp, Artificial
  Synthetic oligonucleotide
aagtaagaagcccttgcctaccttcgtatgccgccccgacagagcgctga

SEQ ID NO: 241196 - DNA, 50 bp, Artificial
  Synthetic oligonucleotide
ttacatgttaagattgatgccgttaaaagcgaacttaatactaagattga

SEQ ID NO: 241197 - DNA, 50 bp, Artificial
  Synthetic oligonucleotide
ttagagattagctcgctttgacatagcattcttaacatgagcaccatttt

SEQ ID NO: 241198 - DNA, 50 bp, Artificial
  Synthetic oligonucleotide
ggatcactgagttccggcttttcccccttcggaatgcagcggacgcctgg

SEQ ID NO: 241199 - DNA, 50 bp, Artificial
  Synthetic oligonucleotide
ggggtcaatggatcatctaccatattccctttgctccaaggatggtatgt

SEQ ID NO: 241200 - DNA, 50 bp, Artificial
  Synthetic oligonucleotide
acaggtggtcgtccccatagtactgcggtcgatcctccatctcccgcgca

SEQ ID NO: 241201 - DNA, 50 bp, Artificial
  Synthetic oligonucleotide
acaggtgatgcgcgtgacagtccttgccagaggtcggacaagtgccgccg

SEQ ID NO: 241202 - DNA, 50 bp, Artificial
  Synthetic oligonucleotide
acagcaggaggcacgggaatgaccccaccgctggaaacattcaccgcgtt

SEQ ID NO: 241203 - DNA, 50 bp, Artificial
  Synthetic oligonucleotide
ggggtcaaaagtcaaaatacatggccgcagcttgtggggtctgcaataac

SEQ ID NO: 241204 - DNA, 60 bp, Artificial
  Synthetic oligonucleotide
caacatggacgtgagaaaagaggataaaatgcttgatttagcattcaatgatagaattgc

SEQ ID NO: 241205 - DNA, 50 bp, Artificial
  Synthetic oligonucleotide
ggggtagtttaagctatgctcctcattggggactggactatttcttgctt

SEQ ID NO: 241206 - DNA, 50 bp, Artificial
  Synthetic oligonucleotide
ggggcagacagtgtctaccggcatccgaagaatgcgcacctggtgggatg

SEQ ID NO: 241207 - DNA, 50 bp, Artificial
  Synthetic oligonucleotide
ccgcctgccgcacaaaaccgttttgccgtaccttggcgtgattcatgcgc

SEQ ID NO: 241208 - DNA, 50 bp, Artificial
  Synthetic oligonucleotide
ccgcctgctgttggatagatcgcagggacataagacttaccgcggaaaac

SEQ ID NO: 241209 - DNA, 50 bp, Artificial
  Synthetic oligonucleotide
gggcgaaggccacgtaatgcggagcataaacggcagccaagtaaacccct

SEQ ID NO: 241210 - DNA, 50 bp, Artificial
  Synthetic oligonucleotide
ccgctggcgctttaactgcgcggaacggacggtagagtaccgggtaggcc

SEQ ID NO: 241211 - DNA, 50 bp, Artificial
  Synthetic oligonucleotide
ccggataggccggacacttgccgtgagccctgccgtaagcatattgctga

SEQ ID NO: 241212 - DNA, 50 bp, Artificial
  Synthetic oligonucleotide
acagaggccctgttacgagcagcacttacggctgcaagggaaccggcgat

SEQ ID NO: 241213 - DNA, 50 bp, Artificial
  Synthetic oligonucleotide
ccggcttgtgggttcgtggggtgcgagctcttcgagccagtccctgtagt

SEQ ID NO: 241214 - DNA, 50 bp, Artificial
  Synthetic oligonucleotide
acacggggcactttcccaactgcctgagcttcttgcggacgcaggagggg

SEQ ID NO: 241215 - DNA, 58 bp, Artificial
  Synthetic oligonucleotide
gttaaccaaaggattcctcccaataactgagaatctaaacactgtgccactatcaata

SEQ ID NO: 241216 - DNA, 50 bp, Artificial
  Synthetic oligonucleotide
acacgcttcagcgatggagtccccgggaccgaatgagaccgcacggcttt

SEQ ID NO: 241217 - DNA, 50 bp, Artificial
  Synthetic oligonucleotide
acaccgggcgtggtctttcgtcgcacagtggcactcgcgcttcttctgcg

SEQ ID NO: 241218 - DNA, 50 bp, Artificial
  Synthetic oligonucleotide
accaaatgccattcttatcaatggcaccttgcacttctttaagagaatcc

SEQ ID NO: 241219 - DNA, 50 bp, Artificial
  Synthetic oligonucleotide
ccccgcactccttcgacgtggtgtatgcctcggggatgttcaacctgagg

SEQ ID NO: 241220 - DNA, 50 bp, Artificial
  Synthetic oligonucleotide
ccccttacaatggcctgggcatcctctttggtgcgggtatgggggacgac

SEQ ID NO: 241221 - DNA, 50 bp, Artificial
  Synthetic oligonucleotide
cccggaccagggtctatcgggcttgtcagttccccctgcaacaagacacg

SEQ ID NO: 241222 - DNA, 50 bp, Artificial
  Synthetic oligonucleotide
tgggcctaatgtcggtaataggcggccctcttgcgtggatgcgcctttcg

SEQ ID NO: 241223 - DNA, 50 bp, Artificial
  Synthetic oligonucleotide
tgggcttatgataatctagggcgtaataggcccagatttttcttgtattt

SEQ ID NO: 241224 - DNA, 50 bp, Artificial
  Synthetic oligonucleotide
acatctacccgagattgccctggcccaaagccttagaggagcggcgctga

SEQ ID NO: 241225 - DNA, 50 bp, Artificial
  Synthetic oligonucleotide
acatcatccgatccggagcaaggacggcgtgccatagacgcggcattggc

SEQ ID NO: 241226 - DNA, 60 bp, Artificial
  Synthetic oligonucleotide
caacagatataaatcttatctagaaagtgtaagatataatgtagattcagcaattgatac

SEQ ID NO: 241227 - DNA, 50 bp, Artificial
  Synthetic oligonucleotide
acatataaggcaagagttttgctaggagaatgggtatcaagcacggactc

SEQ ID NO: 241228 - DNA, 50 bp, Artificial
  Synthetic oligonucleotide
acataaccctgggtgcgttctatgtggccccctgtcgtctcgtcccggaa

SEQ ID NO: 241229 - DNA, 50 bp, Artificial
  Synthetic oligonucleotide
acagtcctgcccaaaccgttacctggtctgttacagggggcgtgaccggc

SEQ ID NO: 241230 - DNA, 50 bp, Artificial
  Synthetic oligonucleotide
ccctccgccgactattttgcacaggcgacaaagcagccggtgttcggttt

SEQ ID NO: 241231 - DNA, 50 bp, Artificial
  Synthetic oligonucleotide
acagtccgcacggtgaatgataattccccggccgcgcgacacgaatccga

SEQ ID NO: 241232 - DNA, 50 bp, Artificial
  Synthetic oligonucleotide
ccctgggggttgaaagttcgtgcagtagggaccaacccaagggctgctga

SEQ ID NO: 241233 - DNA, 50 bp, Artificial
  Synthetic oligonucleotide
cccttgggctcgcagaaggttcccaccgtaaagccctcgaaactgcacct

SEQ ID NO: 241234 - DNA, 50 bp, Artificial
  Synthetic oligonucleotide
acagtcccaaggtgcgccacgattccccggcgctcggtagctactgacgt

SEQ ID NO: 241235 - DNA, 50 bp, Artificial
  Synthetic oligonucleotide
acaggttctggctatgccggcactattcccgttgacgccccaaccagggt

SEQ ID NO: 241236 - DNA, 50 bp, Artificial
  Synthetic oligonucleotide
ccgataggcgcggattgcatagggggtgcactcacagcggttggtgccag

SEQ ID NO: 241237 - DNA, 58 bp, Artificial
  Synthetic oligonucleotide
caacagataagaaccgaagaatagctggtaaatttctcgaaacatcaaggaatattca

SEQ ID NO: 241238 - DNA, 50 bp, Artificial
  Synthetic oligonucleotide
cctcgagtacgggagggggagtcggggtgaggccctcgtgtcgctcaaga

SEQ ID NO: 241239 - DNA, 50 bp, Artificial
  Synthetic oligonucleotide
aattccccggccgcgcgacacgaatccgacgataggatcgccgaaaacgg

SEQ ID NO: 241240 - DNA, 50 bp, Artificial
  Synthetic oligonucleotide
aattcaaggtaaccagcgccccggccctggagaaacccaaggaccttgcg

SEQ ID NO: 241241 - DNA, 50 bp, Artificial
  Synthetic oligonucleotide
ggctgccgccgtttcaaatgcgggcgggcttggaacaatcgctaccggcg

SEQ ID NO: 241242 - DNA, 50 bp, Artificial
  Synthetic oligonucleotide
ggctgaattccccatttagcagaatcaccagcataaggtatccaatcaga

SEQ ID NO: 241243 - DNA, 50 bp, Artificial
  Synthetic oligonucleotide
aattatcagtgattgtgttttcgtactaatacgaccttaattgtcaattt

SEQ ID NO: 241244 - DNA, 50 bp, Artificial
  Synthetic oligonucleotide
cctgcagataccaccgtgccgtttaaaccgctgcctgaacagacagcgcc

SEQ ID NO: 241245 - DNA, 50 bp, Artificial
  Synthetic oligonucleotide
cctgtgggaacgtatgtgtgccgatccagaaaggcgggagatgcggtggc

SEQ ID NO: 241246 - DNA, 50 bp, Artificial
  Synthetic oligonucleotide
aatgcgcacaggccctgagaccgcctgggtaagatcaatgccccggaaaa

SEQ ID NO: 241247 - DNA, 50 bp, Artificial
  Synthetic oligonucleotide
aatgcccgacaattttgccagcgccatcccttctacccgatttcgggcga

SEQ ID NO: 241248 - DNA, 60 bp, Artificial
  Synthetic oligonucleotide
gttaactctgtgtaccataaatccttgaggagcaagatcgtacgctcttatcactatttc

SEQ ID NO: 241249 - DNA, 50 bp, Artificial
  Synthetic oligonucleotide
ccttaggtaaagcttgtggaccatgctcttagtggatgaccgttctttta

SEQ ID NO: 241250 - DNA, 50 bp, Artificial
  Synthetic oligonucleotide
cctttgtcaaaatgttagctaaaatgttattagctattatgccagcatgt

SEQ ID NO: 241251 - DNA, 50 bp, Artificial
  Synthetic oligonucleotide
aatgatgttggagcagttaaggcagcagcaacaagtgcagtcaataaggt

SEQ ID NO: 241252 - DNA, 50 bp, Artificial
  Synthetic oligonucleotide
ggccggagccgatccaaacagccgtaactcatccggaaacacagccctcc

SEQ ID NO: 241253 - DNA, 50 bp, Artificial
  Synthetic oligonucleotide
aatgacggcagaagcccccatcgttccggcttcacatgcgtcaagccacg

SEQ ID NO: 241254 - DNA, 50 bp, Artificial
  Synthetic oligonucleotide
aatctgcccccgcaggagcggactgttaatgtccaaaccgcgctacccta

SEQ ID NO: 241255 - DNA, 50 bp, Artificial
  Synthetic oligonucleotide
cgagggctaaggggcgaaggccacgtaatgcggagcataaacggcagcca

SEQ ID NO: 241256 - DNA, 50 bp, Artificial
  Synthetic oligonucleotide
acacccgatggtaccgctggggaggccttttacgttacgcctctgggggc

SEQ ID NO: 241257 - DNA, 50 bp, Artificial
  Synthetic oligonucleotide
gggatttagcaagccgcaaccgaagtgagcggagccttcgggcaatcgtg

SEQ ID NO: 241258 - DNA, 50 bp, Artificial
  Synthetic oligonucleotide
ccgggttgtgttatcagtttactagatcttggagtgtcttatgttgatct

SEQ ID NO: 241259 - DNA, 55 bp, Artificial
  Synthetic oligonucleotide
caaattagttccatatggaactaaaagttccatatggaactaatttgaaagtata

SEQ ID NO: 241260 - DNA, 50 bp, Artificial
  Synthetic oligonucleotide
gggatctatatgctcttccccaaccccattaatactcatcggcaaaccta

SEQ ID NO: 241261 - DNA, 50 bp, Artificial
  Synthetic oligonucleotide
acacaacgctttggttctgccctttggtctggggacattttgtcgaattg

SEQ ID NO: 241262 - DNA, 50 bp, Artificial
  Synthetic oligonucleotide
tgtggcccctacggagacaatattagttgcagatgcaatgacgggtcaga

SEQ ID NO: 241263 - DNA, 50 bp, Artificial
  Synthetic oligonucleotide
acaatcacacgctctgattcaaggacggctgagcaggctccccgcgcgga

SEQ ID NO: 241264 - DNA, 50 bp, Artificial
  Synthetic oligonucleotide
ccgtcaactacagctatccccgcaggagccgtaaagcccccgaaaaggcc

SEQ ID NO: 241265 - DNA, 50 bp, Artificial
  Synthetic oligonucleotide
gggaggatcacgatgcctgaaaactatacccgtgtggggccgggtctccg

SEQ ID NO: 241266 - DNA, 50 bp, Artificial
  Synthetic oligonucleotide
acaagaccagccccgctcgaggcggcagacatcgcacaaagaaagggagc

SEQ ID NO: 241267 - DNA, 50 bp, Artificial
  Synthetic oligonucleotide
acaactgcccgcaggatcaccaggggttcgctcagggctaccgctacacc

SEQ ID NO: 241268 - DNA, 50 bp, Artificial
  Synthetic oligonucleotide
ccgtgatgcacctgccgagtgaatacgggcgcgtgtttgcaacttgctcg

SEQ ID NO: 241269 - DNA, 50 bp, Artificial
  Synthetic oligonucleotide
gggagctgccccaaaaggggtcgcgttctcatacccccgtactcccacga

SEQ ID NO: 241270 - DNA, 58 bp, Artificial
  Synthetic oligonucleotide
gttaagtcggttgacgagttggctaaagctataggcaaaaagattgatgctaatggta

SEQ ID NO: 241271 - DNA, 50 bp, Artificial
  Synthetic oligonucleotide
aatttggcgttcggtctccttggcgcatccgacgggatgtgcgttgatgc

SEQ ID NO: 241272 - DNA, 50 bp, Artificial
  Synthetic oligonucleotide
aatttgctggcagaacccacgggcgggcgataatcttcaccgtggacgca

SEQ ID NO: 241273 - DNA, 50 bp, Artificial
  Synthetic oligonucleotide
cctcccgtaatagggagctgccccaaaaggggtcgcgttctcataccccc

SEQ ID NO: 241274 - DNA, 50 bp, Artificial
  Synthetic oligonucleotide
aattggcgtcgcatctttccttgcgtgcggtaagacgcgcggggatcata

SEQ ID NO: 241275 - DNA, 50 bp, Artificial
  Synthetic oligonucleotide
ctgtttcttttcgatgccgtagctcttctttgaacccatggtggtctact

SEQ ID NO: 241276 - DNA, 50 bp, Artificial
  Synthetic oligonucleotide
aaatgtgttccggcgcgtatctgggaccggtggctacgcttgcgctcaaa

SEQ ID NO: 241277 - DNA, 50 bp, Artificial
  Synthetic oligonucleotide
ttgtaaggcggctgtgataaacagaatgggcagtttttgagggtgtcggc

SEQ ID NO: 241278 - DNA, 50 bp, Artificial
  Synthetic oligonucleotide
cttattggagaacctggatttcccgagttaattgagaatgtgtgctcact

SEQ ID NO: 241279 - DNA, 50 bp, Artificial
  Synthetic oligonucleotide
ttgtattccttagcataaaaagtaaagcggatataatgtggtacctaatc

SEQ ID NO: 241280 - DNA, 50 bp, Artificial
  Synthetic oligonucleotide
aaatggtccaccagggaacggaggcaatcgaccggggccaccttaccatt

SEQ ID NO: 241281 - DNA, 59 bp, Artificial
  Synthetic oligonucleotide
cattcaatgatagaattgctaccaaaattatttctaactatgcaatttttactgaagaa

SEQ ID NO: 241282 - DNA, 60 bp, Artificial
  Synthetic oligonucleotide
caaatcagtactataaacaatctctaaggtgattccattatgcaggacgtcttctgcacc

SEQ ID NO: 241283 - DNA, 50 bp, Artificial
  Synthetic oligonucleotide
gcaggcaaaacgggtcattcccgttacgcgggccgaggaggtatcgctcc

SEQ ID NO: 241284 - DNA, 50 bp, Artificial
  Synthetic oligonucleotide
gcagagaagatcaaatattgttcaaagctagaataatggcttaagtagtg

SEQ ID NO: 241285 - DNA, 50 bp, Artificial
  Synthetic oligonucleotide
aaatccgactacatgcccgccgtctcttaaggcgcgaacgagggctgctt

SEQ ID NO: 241286 - DNA, 50 bp, Artificial
  Synthetic oligonucleotide
aaatcccgatacgaattacatccccagcgggttcgctagcccctccggcg

SEQ ID NO: 241287 - DNA, 50 bp, Artificial
  Synthetic oligonucleotide
aaatcccccggctccgactaatcccgtcattgcttcccgccgttgtccca

SEQ ID NO: 241288 - DNA, 50 bp, Artificial
  Synthetic oligonucleotide
gcactttagaaccccccatgagtactgattatcccggtggggattttagt

SEQ ID NO: 241289 - DNA, 50 bp, Artificial
  Synthetic oligonucleotide
aaatacagacgacggccgcctcgtatcgccacgactcgggtaaagcggcg

SEQ ID NO: 241290 - DNA, 50 bp, Artificial
  Synthetic oligonucleotide
aaagtacaccagtgcccacgcaacaccaccgagactcccccaccgatccc

SEQ ID NO: 241291 - DNA, 48 bp, Artificial
  Synthetic oligonucleotide
aaagggtacgcttattctccgggagggatggggattacccccggcccc

SEQ ID NO: 241292 - DNA, 50 bp, Artificial
  Synthetic oligonucleotide
aaaggggcagggaaagtgcgggggtaacccattgtgcccggacaaggatc

SEQ ID NO: 241293 - DNA, 59 bp, Artificial
  Synthetic oligonucleotide
caaataggagactaagatggcactaaattcacttgaccataataaagctaacactaata

SEQ ID NO: 241294 - DNA, 50 bp, Artificial
  Synthetic oligonucleotide
gcacgccggggtatgtgcttgacggtattgcgcgcctccccttatggaag

SEQ ID NO: 241295 - DNA, 50 bp, Artificial
  Synthetic oligonucleotide
aaagcccggaccctgtcagcaaacgacggttatggcggcggggtgtataa

SEQ ID NO: 241296 - DNA, 50 bp, Artificial
  Synthetic oligonucleotide
aacccctccatgaggccgaagatcgggcagggtattaccaccgaggtggc

SEQ ID NO: 241297 - DNA, 50 bp, Artificial
  Synthetic oligonucleotide
aaccccatgcctttgacggagaacgtaaggtcggtacccggggccacaat

SEQ ID NO: 241298 - DNA, 50 bp, Artificial
  Synthetic oligonucleotide
gcccctatcatcccaaccgccttatacgcacggcctttcatgctgcggga

SEQ ID NO: 241299 - DNA, 50 bp, Artificial
  Synthetic oligonucleotide
aaccatatctggaccgcttcctgcctccagatgcaccccagggcgatcat

SEQ ID NO: 241300 - DNA, 50 bp, Artificial
  Synthetic oligonucleotide
aaccatacgggttgcacgaagcgaacaaaccgttgccctcggagcggcaa

SEQ ID NO: 241301 - DNA, 50 bp, Artificial
  Synthetic oligonucleotide
gcccctacatccacttattgagagtagctgtacgaaccagccagatattg

SEQ ID NO: 241302 - DNA, 50 bp, Artificial
  Synthetic oligonucleotide
gcccccaatttatacgcctgccgcgtaacctcgcgaaccatcccaagcgt

SEQ ID NO: 241303 - DNA, 50 bp, Artificial
  Synthetic oligonucleotide
aaccaacccccgcaacagggatggctccgccgcttttgggtcgagcgtcg

SEQ ID NO: 241304 - DNA, 51 bp, Artificial
  Synthetic oligonucleotide
gttagtagaaaccttataattttttacgctacatttgaaccgtagcttact

SEQ ID NO: 241305 - DNA, 50 bp, Artificial
  Synthetic oligonucleotide
ctgaccgtagacgcaggaccactgaccggctccccaagcgcggtgataga

SEQ ID NO: 241306 - DNA, 50 bp, Artificial
  Synthetic oligonucleotide
aacagtacacacatccggcgggacaggggccgtagctgcctatgtctgcg

SEQ ID NO: 241307 - DNA, 50 bp, Artificial
  Synthetic oligonucleotide
aacaggccaatgcgccgtcatagtccccctggctgagaaattccgccacc

SEQ ID NO: 241308 - DNA, 50 bp, Artificial
  Synthetic oligonucleotide
aacagctcgcggaggtcattcaaccccaagtgcatcaaggccatgcggtc

SEQ ID NO: 241309 - DNA, 50 bp, Artificial
  Synthetic oligonucleotide
aacacggatcgccctgcgggacttttcagcgacggccctgttaacgatct

SEQ ID NO: 241310 - DNA, 50 bp, Artificial
  Synthetic oligonucleotide
aacaagtgtgcatggcttcgctctaccaccccaaggcgccaagcgccctg

SEQ ID NO: 241311 - DNA, 50 bp, Artificial
  Synthetic oligonucleotide
aaatttgcgcgcacctgacggaaacggagccgcgctcgtgtaaaacccgt

SEQ ID NO: 241312 - DNA, 50 bp, Artificial
  Synthetic oligonucleotide
ttggggaggtagttaagattgaagtaggagccaagtaagcatcagggggg

SEQ ID NO: 241313 - DNA, 50 bp, Artificial
  Synthetic oligonucleotide
ctgccaaactaggctccttgccctacacacttcggcaacttgctattatt

SEQ ID NO: 241314 - DNA, 50 bp, Artificial
  Synthetic oligonucleotide
gactatcctgattaggcattgaaatcactttaagtccactgtcaggacac

SEQ ID NO: 241315 - DNA, 59 bp, Artificial
  Synthetic oligonucleotide
caaagacgaatcattggttcaactacaaggcgcactctctagcgcaacaacttctttag

SEQ ID NO: 241316 - DNA, 50 bp, Artificial
  Synthetic oligonucleotide
aaacagggctcccgtcccggacagcggtgtaccagggccgttcccgcatg

SEQ ID NO: 241317 - DNA, 50 bp, Artificial
  Synthetic oligonucleotide
aaacagctcccgcaggctatgcacttttcaggatgggccgcctttgtcgg

SEQ ID NO: 241318 - DNA, 50 bp, Artificial
  Synthetic oligonucleotide
gagagcaacggagttcccccgagctggatgatcctccccgccaggagctc

SEQ ID NO: 241319 - DNA, 50 bp, Artificial
  Synthetic oligonucleotide
gagaggacgtttacattgaaacctcaaatttgctaaaacaccaaatactg

SEQ ID NO: 241320 - DNA, 50 bp, Artificial
  Synthetic oligonucleotide
ttttagcgagctgcacaggagatacgcagagtcatgtactcactcacagc

SEQ ID NO: 241321 - DNA, 50 bp, Artificial
  Synthetic oligonucleotide
gagaggcggattcgcacccgaacgtgtccacgactcctcgagaggcacct

SEQ ID NO: 241322 - DNA, 50 bp, Artificial
  Synthetic oligonucleotide
aaaatggaatccctgtcccggggatactgcgggatgatcgctccctcccg

SEQ ID NO: 241323 - DNA, 50 bp, Artificial
  Synthetic oligonucleotide
aaaatcggccatggtgggcaagaagaacacatagtaatttagcaatacag

SEQ ID NO: 241324 - DNA, 50 bp, Artificial
  Synthetic oligonucleotide
aaaatcctattgccactacccagtgggcggctaaagggcccccgtcagcc

SEQ ID NO: 241325 - DNA, 50 bp, Artificial
  Synthetic oligonucleotide
gagccttgtgcgtaacggaaccgaagcgaagaaccaagcgctgtccggta

SEQ ID NO: 241326 - DNA, 54 bp, Artificial
  Synthetic oligonucleotide
caaagaccccaattatcctaaatttacttatttcaatccagcagaacttaaatc

SEQ ID NO: 241327 - DNA, 50 bp, Artificial
  Synthetic oligonucleotide
aaaaggccgagggcactgctgtctggccaaaccttccggaccaaaggccc

SEQ ID NO: 241328 - DNA, 50 bp, Artificial
  Synthetic oligonucleotide
gattattaatatggacaattacggcgatgtaactctttattgtaataaaa

SEQ ID NO: 241329 - DNA, 50 bp, Artificial
  Synthetic oligonucleotide
ttttgcgcatagctgtacctttggcggttcccggtattattgccactgcg

SEQ ID NO: 241330 - DNA, 50 bp, Artificial
  Synthetic oligonucleotide
gaggagtcgttggagggcggagtccctctcgctccgtgaggggaacgagt

SEQ ID NO: 241331 - DNA, 50 bp, Artificial
  Synthetic oligonucleotide
aaaactttacaggcgttttcccgcctatcgggctcgtgtgctttacgggg

SEQ ID NO: 241332 - DNA, 50 bp, Artificial
  Synthetic oligonucleotide
gatctaatagaagaaaatctctcaagtgtaagctcagcccgtgcagtaat

SEQ ID NO: 241333 - DNA, 50 bp, Artificial
  Synthetic oligonucleotide
gatctgtaagaagctccaaaaaccccttcataagcttatcaaggattaaa

SEQ ID NO: 241334 - DNA, 50 bp, Artificial
  Synthetic oligonucleotide
gaagatatcttacttatagcggaagttaagcatccagtatttagttttga

SEQ ID NO: 241335 - DNA, 50 bp, Artificial
  Synthetic oligonucleotide
aaagaacccgttgctccgggaccgattttgctgcaggcggagggattgtc

SEQ ID NO: 241336 - DNA, 50 bp, Artificial
  Synthetic oligonucleotide
gaaggcccttcactaaaacacccaatgcgatacgtatcacagctgccata

SEQ ID NO: 241337 - DNA, 60 bp, Artificial
  Synthetic oligonucleotide
caaacgccttagcatcatcatccgtagtcccaatagcagcgtcaataggattatcagcct

SEQ ID NO: 241338 - DNA, 50 bp, Artificial
  Synthetic oligonucleotide
gcacaactcaaaggggattatcaacaacgtgcggcttcgcgccccgtgcg

SEQ ID NO: 241339 - DNA, 50 bp, Artificial
  Synthetic oligonucleotide
gaaggtcttctcggcagggtactcgatgcccgcggcatgcccatagacga

SEQ ID NO: 241340 - DNA, 50 bp, Artificial
  Synthetic oligonucleotide
gaatgttttaacgcctggaaaagcgaaatcacgttcagcggaaaagcaaa

SEQ ID NO: 241341 - DNA, 50 bp, Artificial
  Synthetic oligonucleotide
aaactgcgccttgatattgccggggagcatgggggagcgccctacccgtc

SEQ ID NO: 241342 - DNA, 50 bp, Artificial
  Synthetic oligonucleotide
aaactcccgaaccaaggcctttgccccggcacggacaaagcgttccatag

SEQ ID NO: 241343 - DNA, 50 bp, Artificial
  Synthetic oligonucleotide
aaacggcgaagcgacaagccttgccgacagcccacatggcgctgaggcca

SEQ ID NO: 241344 - DNA, 50 bp, Artificial
  Synthetic oligonucleotide
tttctcacaaatcactcatagaatattctgtattattccttgcatcctta

SEQ ID NO: 241345 - DNA, 50 bp, Artificial
  Synthetic oligonucleotide
aaacgcggttcctccggatagggccagagccccggttcctcggaataaat

SEQ ID NO: 241346 - DNA, 50 bp, Artificial
  Synthetic oligonucleotide
aaacgcggtatacccgatggcgacctggggagaatccacccaatccggta

SEQ ID NO: 241347 - DNA, 50 bp, Artificial
  Synthetic oligonucleotide
aaacctccgtcatttcggggttgccgtaggttccgctattggcgccgtcc

SEQ ID NO: 241348 - DNA, 57 bp, Artificial
  Synthetic oligonucleotide
caaacgaattggcgtaaaaactagactgatcgatgttcacaaaataagcagaaacta

SEQ ID NO: 241349 - DNA, 50 bp, Artificial
  Synthetic oligonucleotide
gacattgagctccccattaaggctattcttatgatataatgtttgcatcc

SEQ ID NO: 241350 - DNA, 50 bp, Artificial
  Synthetic oligonucleotide
gcaaccgaaggcggaacgagggttcccgtaaggggaccgaagggctctct

SEQ ID NO: 241351 - DNA, 49 bp, Artificial
  Synthetic oligonucleotide
aaacccgacaaagacggccttatcgaaaccacccccggacgcctcgtgt

SEQ ID NO: 241352 - DNA, 50 bp, Artificial
  Synthetic oligonucleotide
aaacatacccttggctggtttgctggtccgtgtccttgccgttcccccac

SEQ ID NO: 241353 - DNA, 50 bp, Artificial
  Synthetic oligonucleotide
aaacagtgccctgccatcgcggatgaatgggaagaccccaaaggagtgcc

SEQ ID NO: 241354 - DNA, 50 bp, Artificial
  Synthetic oligonucleotide
gctgttcctcctactgcaaatcccaatggtgttgtattcacatctgcagc

SEQ ID NO: 241355 - DNA, 50 bp, Artificial
  Synthetic oligonucleotide
aagcggggaaatcctccacaacccggtccccgatgcgataggcgatacag

SEQ ID NO: 241356 - DNA, 50 bp, Artificial
  Synthetic oligonucleotide
ttcagtaatattgattgttgatactaattccataattcctctacttacta

SEQ ID NO: 241357 - DNA, 50 bp, Artificial
  Synthetic oligonucleotide
aagcgcccccgatttcgtatagttcgatagccgggaggggcacgtcccta

SEQ ID NO: 241358 - DNA, 50 bp, Artificial
  Synthetic oligonucleotide
aagcccccgtttacaacctccacgatgcagcaaaccgcggcaaacagact

SEQ ID NO: 241359 - DNA, 58 bp, Artificial
  Synthetic oligonucleotide
caaacccatatatatttatagattgttttagcgtaaggtggagaagaggtatatatga

SEQ ID NO: 241360 - DNA, 50 bp, Artificial
  Synthetic oligonucleotide
cggtgcccctgcacccacttattgtcagtagatgtagtaaccaaccagaa

SEQ ID NO: 241361 - DNA, 50 bp, Artificial
  Synthetic oligonucleotide
cggttagcgctccgagtaaggtactgctcactgcccccagcgcgcaaaat

SEQ ID NO: 241362 - DNA, 50 bp, Artificial
  Synthetic oligonucleotide
aagcacggagcggagcagaaacgccctgctcgcaagaatcgagcctgtca

SEQ ID NO: 241363 - DNA, 50 bp, Artificial
  Synthetic oligonucleotide
aagatggggcaatcccctccatttcgacggtccgcgacgaatctgaccgc

SEQ ID NO: 241364 - DNA, 50 bp, Artificial
  Synthetic oligonucleotide
aagaggtgtcgctcattgccgagcccattcgatcgggggacgccactctt

SEQ ID NO: 241365 - DNA, 50 bp, Artificial
  Synthetic oligonucleotide
ttcccttttttttacaagttgtttgtaaagttcaattacataagatttga

SEQ ID NO: 241366 - DNA, 50 bp, Artificial
  Synthetic oligonucleotide
aagaggggcagatgtgaccggtggcccgaaagaccacaacgctcggaagc

SEQ ID NO: 241367 - DNA, 50 bp, Artificial
  Synthetic oligonucleotide
aagagggcggtactgacagcccccggacgtagcagcgatacactgaaccc

SEQ ID NO: 241368 - DNA, 50 bp, Artificial
  Synthetic oligonucleotide
cgtgcctagcgccggatttagcatccctgaggtaaactgcccgccgttgc

SEQ ID NO: 241369 - DNA, 50 bp, Artificial
  Synthetic oligonucleotide
gctcaaactattacccgattctccaggttgagcaaaccttggaacccttc

SEQ ID NO: 241370 - DNA, 59 bp, Artificial
  Synthetic oligonucleotide
caaacatttgttcctgtcccagtgcacgctattgaaaagtatggacaaaggtggacaga

SEQ ID NO: 241371 - DNA, 50 bp, Artificial
  Synthetic oligonucleotide
aagagcgggtaaccgaggcgcgcacctccgattcatcgtacggcgtttca

SEQ ID NO: 241372 - DNA, 50 bp, Artificial
  Synthetic oligonucleotide
aagagatagcggacgcaaagcagctactcaagccgccggtgaaaggcgcc

SEQ ID NO: 241373 - DNA, 50 bp, Artificial
  Synthetic oligonucleotide
aagggcccaggaacggcgaactttggaccgacggttcccggatattcgat

SEQ ID NO: 241374 - DNA, 50 bp, Artificial
  Synthetic oligonucleotide
aagggcaaggcgtttgtgtcggtcaacaaggggctcgtaacccgtgcaag

SEQ ID NO: 241375 - DNA, 50 bp, Artificial
  Synthetic oligonucleotide
cggccacgtactggaagtcccctacggcacccgggtaggagacctcttga

SEQ ID NO: 241376 - DNA, 50 bp, Artificial
  Synthetic oligonucleotide
aaggctgtaggcgtgcttggctcaggccatagtgtacccaagatggggga

SEQ ID NO: 241377 - DNA, 50 bp, Artificial
  Synthetic oligonucleotide
aaggcgggtgcgccctttggtccgggagccaacccccttcacggaagaga

SEQ ID NO: 241378 - DNA, 50 bp, Artificial
  Synthetic oligonucleotide
aaggcggcgaggggtttcccgacaatggcagaccgccctacaataaccgc

SEQ ID NO: 241379 - DNA, 50 bp, Artificial
  Synthetic oligonucleotide
cggcgggtctaggggcgcagcctccattcctgcgtgaaccctaaaaacat

SEQ ID NO: 241380 - DNA, 50 bp, Artificial
  Synthetic oligonucleotide
aaggataagtccggctgcgccaaaggctacagcttgatgccccaaggccg

SEQ ID NO: 241381 - DNA, 60 bp, Artificial
  Synthetic oligonucleotide
gttatatcactgaagataacgaaaaatggatttgtgttgtctgcctcagtatgtgctagg

SEQ ID NO: 241382 - DNA, 50 bp, Artificial
  Synthetic oligonucleotide
aaggaactggcaaacctccagaccgcaagcctctggttgggggtcaccac

SEQ ID NO: 241383 - DNA, 50 bp, Artificial
  Synthetic oligonucleotide
cggggcttgtgggatttagcaagccgcaaccgaagtgagcggagccttcg

SEQ ID NO: 241384 - DNA, 50 bp, Artificial
  Synthetic oligonucleotide
aagcttatggcggcgcacttttgctgcgtcgtagccggccctgagaaccc

SEQ ID NO: 241385 - DNA, 50 bp, Artificial
  Synthetic oligonucleotide
aagctgtcaccgttaccttgcagggaagtggagcagcccgggaggtgagc

SEQ ID NO: 241386 - DNA, 50 bp, Artificial
  Synthetic oligonucleotide
aagctccgagacaagctggctgaacacgttcccgccacggcgtgaggaat

SEQ ID NO: 241387 - DNA, 50 bp, Artificial
  Synthetic oligonucleotide
aagctcccccgatcccttgtcagcccctaccgcccggaaaacttgcaggc

SEQ ID NO: 241388 - DNA, 50 bp, Artificial
  Synthetic oligonucleotide
aagctccattgattgaagggctccctcaggggctcgctccacactgccgc

SEQ ID NO: 241389 - DNA, 50 bp, Artificial
  Synthetic oligonucleotide
cggggtggtcctttcttcctcatgcgcacttctcgcgccagcgagcgtaa

SEQ ID NO: 241390 - DNA, 50 bp, Artificial
  Synthetic oligonucleotide
aacgggacggagatattccggcagccctgcacatgtggggaaagggatct

SEQ ID NO: 241391 - DNA, 50 bp, Artificial
  Synthetic oligonucleotide
aacggctgcggaactgaacgcaacgatgagactgttggcgagcgccgtcc

SEQ ID NO: 241392 - DNA, 60 bp, Artificial
  Synthetic oligonucleotide
cattacttcctctgaaggagattcatgagccccagcaaaaagattacctatcatcacact

SEQ ID NO: 241393 - DNA, 57 bp, Artificial
  Synthetic oligonucleotide
caaaattgcaataggtagtgctttaggaaatgtcattggcaacgctgtaagtaaagt

SEQ ID NO: 241394 - DNA, 50 bp, Artificial
  Synthetic oligonucleotide
aacggctatgcgagggcaccgggctacgtagttggcagttccgttatgga

SEQ ID NO: 241395 - DNA, 50 bp, Artificial
  Synthetic oligonucleotide
aacggcgaactttggaccgacggttcccggatattcgatccgagcaggct

SEQ ID NO: 241396 - DNA, 50 bp, Artificial
  Synthetic oligonucleotide
aacggacgaccagattgtcaacccaagcggaagcgccctgcgcaacggga

SEQ ID NO: 241397 - DNA, 50 bp, Artificial
  Synthetic oligonucleotide
aacgccgtcccctggatcgttgcggagattggttcggcccaccatggtga

SEQ ID NO: 241398 - DNA, 50 bp, Artificial
  Synthetic oligonucleotide
aacgccgcaggtaccctggagcccctctgcgtggagtccgccctgagggc

SEQ ID NO: 241399 - DNA, 50 bp, Artificial
  Synthetic oligonucleotide
ctccgtgggcactcctcagcggaattggcgcaatgactgcggtgctgttg

SEQ ID NO: 241400 - DNA, 50 bp, Artificial
  Synthetic oligonucleotide
gcctatgataaaaaaaggtttctcgagattatcccaaccgtattttatgc

SEQ ID NO: 241401 - DNA, 50 bp, Artificial
  Synthetic oligonucleotide
gcccttatctatgttaaacctcttaatcctactataagtctctgcaaatc

SEQ ID NO: 241402 - DNA, 50 bp, Artificial
  Synthetic oligonucleotide
aacctctgaaacccccgaaacccctgcggcagttcctacagcaatccccg

SEQ ID NO: 241403 - DNA, 50 bp, Artificial
  Synthetic oligonucleotide
aacctccccgctgggaaactgcaacgggtttttcactggcccaggcttca

SEQ ID NO: 241404 - DNA, 54 bp, Artificial
  Synthetic oligonucleotide
caaaataacactattgggttaggacttaatttactatccagcttaactaacata

SEQ ID NO: 241405 - DNA, 50 bp, Artificial
  Synthetic oligonucleotide
ctcttttaatattgatgcaaaggatttgctttgtactaagtgtatagcat

SEQ ID NO: 241406 - DNA, 50 bp, Artificial
  Synthetic oligonucleotide
aacctccagaccgcaagcctctggttgggggtcaccactgtggcaggcct

SEQ ID NO: 241407 - DNA, 48 bp, Artificial
  Synthetic oligonucleotide
aaccgggccccgaatttttagtcgccctccgtgagcgggggattttgg

SEQ ID NO: 241408 - DNA, 50 bp, Artificial
  Synthetic oligonucleotide
aaccgcgccgctgacagctcattctcactgggcatgcgttccccctttcc

SEQ ID NO: 241409 - DNA, 50 bp, Artificial
  Synthetic oligonucleotide
aaccgcaggaaggaccgccgaaagcaagactgagacccaacgactgggta

SEQ ID NO: 241410 - DNA, 50 bp, Artificial
  Synthetic oligonucleotide
aaccgattcggaaaggggcagggaaagtgcgggggtaacccattgtgccc

SEQ ID NO: 241411 - DNA, 50 bp, Artificial
  Synthetic oligonucleotide
cgtgttaatcggttttaattcatacgactggatatagtgttcttcagatc

SEQ ID NO: 241412 - DNA, 50 bp, Artificial
  Synthetic oligonucleotide
aagacggccgctcaccctcctgtcgacgttgggatcaccgtcgagtaagg

SEQ ID NO: 241413 - DNA, 50 bp, Artificial
  Synthetic oligonucleotide
cgttgaagcgttaagggatgcggtgcaggcaagagggcacgtagtgcaga

SEQ ID NO: 241414 - DNA, 50 bp, Artificial
  Synthetic oligonucleotide
aagaagcgtgctccgttcctccaggtagggtgaaagcccccagctgtagc

SEQ ID NO: 241415 - DNA, 59 bp, Artificial
  Synthetic oligonucleotide
gttcaagcctagtaagtatatgttgcctactcctaatgaacaagttgataaagactcaa

SEQ ID NO: 241416 - DNA, 50 bp, Artificial
  Synthetic oligonucleotide
ctaagaagcacggggcttgctagtgataatgaaagcgctgttaatgttgt

SEQ ID NO: 241417 - DNA, 50 bp, Artificial
  Synthetic oligonucleotide
ctaccgcttcgatgatatcaaatgctcgttcaatagactgaacaccgcgc

SEQ ID NO: 241418 - DNA, 50 bp, Artificial
  Synthetic oligonucleotide
aacttggggttcccaggggccctctatggtcgcgtttgcagcagggaggg

SEQ ID NO: 241419 - DNA, 50 bp, Artificial
  Synthetic oligonucleotide
ctatagtgtaattttggttatactataaattagttcgacattggctcgaa

SEQ ID NO: 241420 - DNA, 50 bp, Artificial
  Synthetic oligonucleotide
aacttgcgaccggatgacagggcaagcagaaggcatgcggccatggagag

SEQ ID NO: 241421 - DNA, 50 bp, Artificial
  Synthetic oligonucleotide
ttctgatcgtcttctttaagcgccatcttttgtacgacgcggctggccat

SEQ ID NO: 241422 - DNA, 50 bp, Artificial
  Synthetic oligonucleotide
aacttgacgtagtcgtagcggcccagggattcgaagagggcacggtgggt

SEQ ID NO: 241423 - DNA, 50 bp, Artificial
  Synthetic oligonucleotide
aacttcgttgcaagtagcgcggggaacttcgttgcaagtagcgcggggaa

SEQ ID NO: 241424 - DNA, 50 bp, Artificial
  Synthetic oligonucleotide
ctatgtaattgatctaaaagtatgttatacatgttggttttcatattgtc

SEQ ID NO: 241425 - DNA, 50 bp, Artificial
  Synthetic oligonucleotide
aactgctccgcacccttccggcgttttacgggatccaggtttcaggcccc

SEQ ID NO: 241426 - DNA, 57 bp, Artificial
  Synthetic oligonucleotide
caaaacttcattccgaagtgttattgttactaggaatagacaaacttgcattaagca

SEQ ID NO: 241427 - DNA, 50 bp, Artificial
  Synthetic oligonucleotide
aactgccccggacacggactcgctctgcatcagggaagccaggaccgaat

SEQ ID NO: 241428 - DNA, 50 bp, Artificial
  Synthetic oligonucleotide
aactctaactgatggcggcgaaacaaaattaacagttacagaaggcactg

SEQ ID NO: 241429 - DNA, 50 bp, Artificial
  Synthetic oligonucleotide
aactccgttcacatgtcggcttggccgctcttgcctggaacgcactcacc

SEQ ID NO: 241430 - DNA, 50 bp, Artificial
  Synthetic oligonucleotide
ctccgagctgcaatcaccgcacggatctcccggtaatgacgcgcctcata

SEQ ID NO: 241431 - DNA, 50 bp, Artificial
  Synthetic oligonucleotide
agcaggcatgctctcgttccccaccctgatgtacgcctccatgactccgt

SEQ ID NO: 241432 - DNA, 50 bp, Artificial
  Synthetic oligonucleotide
tcacgcatcttaagctcctctactctaagagtagcaaacctaattcggtg

SEQ ID NO: 241433 - DNA, 50 bp, Artificial
  Synthetic oligonucleotide
agcagctgtgctccgatcccctgtcgttgatacgcggggtcgacggctat

SEQ ID NO: 241434 - DNA, 50 bp, Artificial
  Synthetic oligonucleotide
atcctaataaggataggcttaatttttgactaaagattgcaaagaacttt

SEQ ID NO: 241435 - DNA, 50 bp, Artificial
  Synthetic oligonucleotide
agcagaaaggcggcggaaataagcgcccactgtcgtcgggaaaggctttt

SEQ ID NO: 241436 - DNA, 50 bp, Artificial
  Synthetic oligonucleotide
agcacggcaactgctccgtccagcacacgcaaggagcgttcaacctcggc

SEQ ID NO: 241437 - DNA, 60 bp, Artificial
  Synthetic oligonucleotide
gtgtacgcagtcgatttcgtaagttttgaaaatgagctgttatttgtctgatatttgtga

SEQ ID NO: 241438 - DNA, 50 bp, Artificial
  Synthetic oligonucleotide
agcacgcctggttcactgccccctttaaaggctacccgttgccagcgctc

SEQ ID NO: 241439 - DNA, 50 bp, Artificial
  Synthetic oligonucleotide
agcaatggcttgcctacacctggccctcctacaacaaggaggcgcatgca

SEQ ID NO: 241440 - DNA, 50 bp, Artificial
  Synthetic oligonucleotide
atcgctcgagctctcctgcccgggggtgaacaaaggaaggctgtacacct

SEQ ID NO: 241441 - DNA, 50 bp, Artificial
  Synthetic oligonucleotide
taaggtattcgtaatgagtgtagtcgccccaggtgattccttcgtattcg

SEQ ID NO: 241442 - DNA, 50 bp, Artificial
  Synthetic oligonucleotide
tcattaaataaaaagactagctttttgtaaggggttaaagcttttgacat

SEQ ID NO: 241443 - DNA, 50 bp, Artificial
  Synthetic oligonucleotide
atcgggaaaggctcttgagcccgtacgtaggacgaagcgaagggcgcatc

SEQ ID NO: 241444 - DNA, 50 bp, Artificial
  Synthetic oligonucleotide
agatgagggaggccacggggtgtttgccgtccagctgggctatgtcaaaa

SEQ ID NO: 241445 - DNA, 50 bp, Artificial
  Synthetic oligonucleotide
atcggtagcgccgccgtagccatggacttgcttacctacaaggatggggg

SEQ ID NO: 241446 - DNA, 50 bp, Artificial
  Synthetic oligonucleotide
tcattcgacatagaaatccagacaacgcacagcacctctcttgcaaaacg

SEQ ID NO: 241447 - DNA, 50 bp, Artificial
  Synthetic oligonucleotide
agatgagcaacgggcaggaggcatcgtttgctaccggtccccagttccac

SEQ ID NO: 241448 - DNA, 59 bp, Artificial
  Synthetic oligonucleotide
gtgtataccttttcatatttcgaactatggctaaattaatagcatccatcatacaaccc

SEQ ID NO: 241449 - DNA, 50 bp, Artificial
  Synthetic oligonucleotide
atcggtagcgtcgggtggtcgatacggggagcaaagccggtaaccgatct

SEQ ID NO: 241450 - DNA, 50 bp, Artificial
  Synthetic oligonucleotide
agcctacagggcagcccttaccgcatgccgggcttatgtgttaccgatga

SEQ ID NO: 241451 - DNA, 50 bp, Artificial
  Synthetic oligonucleotide
agccgttgttgaccctggaaagggcataggcagccccgtcgcccggaagc

SEQ ID NO: 241452 - DNA, 50 bp, Artificial
  Synthetic oligonucleotide
agccgtcgaatgggagaaccggcggaaccttgacacccagtgtctcgggt

SEQ ID NO: 241453 - DNA, 50 bp, Artificial
  Synthetic oligonucleotide
atccgccgaccctgagtgcgattacccttggttcggtctttgggctcggg

SEQ ID NO: 241454 - DNA, 50 bp, Artificial
  Synthetic oligonucleotide
atccgctggccgggtttaaggcgctccacaattggcacctccatggtata

SEQ ID NO: 241455 - DNA, 50 bp, Artificial
  Synthetic oligonucleotide
agccggtagcgcgatagaattcgtcttcgttgcgagccaggccccgggat

SEQ ID NO: 241456 - DNA, 50 bp, Artificial
  Synthetic oligonucleotide
agccggccttgcaaaacgggacgaagaaatctaccgccctggcaacagta

SEQ ID NO: 241457 - DNA, 50 bp, Artificial
  Synthetic oligonucleotide
taataaccgaaacgcattccactaccttgccgagcgggattccccgcccg

SEQ ID NO: 241458 - DNA, 50 bp, Artificial
  Synthetic oligonucleotide
tcaaaattggctgccgccgtttcaaatgcgggcgggcttggaacaatcgc

SEQ ID NO: 241459 - DNA, 60 bp, Artificial
  Synthetic oligonucleotide
gtgtattgatgattcggtatgttgttaattgggaaggcaagtatcatataaatcagcgag

SEQ ID NO: 241460 - DNA, 50 bp, Artificial
  Synthetic oligonucleotide
agccggaggttcgggaggctatgtcagccttgtagggttggttggcacgc

SEQ ID NO: 241461 - DNA, 50 bp, Artificial
  Synthetic oligonucleotide
agccggagcgtgaagcttacccccgtcgggagtacagcgaaagaaagggt

SEQ ID NO: 241462 - DNA, 50 bp, Artificial
  Synthetic oligonucleotide
agccgcctgtcggttccatacagcccgcttcggttgatccttcaggcttg

SEQ ID NO: 241463 - DNA, 50 bp, Artificial
  Synthetic oligonucleotide
agccgacctgccttcgcccctcatgggttaccccggagcattgggccttg

SEQ ID NO: 241464 - DNA, 50 bp, Artificial
  Synthetic oligonucleotide
agcccttgtaagccgagctgcgcttcggtaaggttttccagcccgaagct

SEQ ID NO: 241465 - DNA, 50 bp, Artificial
  Synthetic oligonucleotide
agcccccggtccgttgctggctgcattgtttgccacaaccctcgctccca

SEQ ID NO: 241466 - DNA, 50 bp, Artificial
  Synthetic oligonucleotide
agcccaagttttcggctccctggcggaagggggcattaacatcctgctta

SEQ ID NO: 241467 - DNA, 50 bp, Artificial
  Synthetic oligonucleotide
atccgggacacaccatgcacctgcactatttcccgcctttgctacgcagc

SEQ ID NO: 241468 - DNA, 50 bp, Artificial
  Synthetic oligonucleotide
atccgtaggggcctccaggtgttctggcacccaggcgaataaaaacccct

SEQ ID NO: 241469 - DNA, 50 bp, Artificial
  Synthetic oligonucleotide
atgaagacaggaactggttcgaccgggctgcccacgggaggaatgggatc

SEQ ID NO: 241470 - DNA, 56 bp, Artificial
  Synthetic oligonucleotide
caataggcttaaaagtaccaagttctttacaaacttcatatatctgccatgttagt

SEQ ID NO: 241471 - DNA, 50 bp, Artificial
  Synthetic oligonucleotide
atgagtaagcgcactcaaagaagttgttgcgctagagagcgcgtcttgca

SEQ ID NO: 241472 - DNA, 50 bp, Artificial
  Synthetic oligonucleotide
agacaatgtaaacccctaaagaggtaaggcgtgatgagtataaatgagcg

SEQ ID NO: 241473 - DNA, 50 bp, Artificial
  Synthetic oligonucleotide
atgcaccgtaacacctgccgtcgcagaagaaacactgagctccgctccgg

SEQ ID NO: 241474 - DNA, 50 bp, Artificial
  Synthetic oligonucleotide
atgcagcaatgcacacgctggatgcaatgatccccgcgcattttccacga

SEQ ID NO: 241475 - DNA, 50 bp, Artificial
  Synthetic oligonucleotide
atgcaggtaatgtcgtccttcgcactgaggcggtccaggctgtgtgcccg

SEQ ID NO: 241476 - DNA, 50 bp, Artificial
  Synthetic oligonucleotide
atgcagtacgggcaggcattcgggtacacactcgactggacggacggcac

SEQ ID NO: 241477 - DNA, 50 bp, Artificial
  Synthetic oligonucleotide
agaataggctgtgtgtatctggcagacctcccctccggcaaacaccgccc

SEQ ID NO: 241478 - DNA, 50 bp, Artificial
  Synthetic oligonucleotide
atgcccaggaataccccggacaaaccggcaagggcgccggataccatgaa

SEQ ID NO: 241479 - DNA, 50 bp, Artificial
  Synthetic oligonucleotide
atgccccacgaggggactgcggggtatgtcgtgcgtccgcatgggtgtgg

SEQ ID NO: 241480 - DNA, 50 bp, Artificial
  Synthetic oligonucleotide
tcctgaatatctggaaactcaattccatagtgaaaaaatttatagtagct

SEQ ID NO: 241481 - DNA, 59 bp, Artificial
  Synthetic oligonucleotide
caatacatttacaggcattgaagaatcattaatgacttttaacgactctgaccttaaga

SEQ ID NO: 241482 - DNA, 50 bp, Artificial
  Synthetic oligonucleotide
atgccgacttaaagaccgaggtggtgtgtctactcataatggccttaagt

SEQ ID NO: 241483 - DNA, 50 bp, Artificial
  Synthetic oligonucleotide
agaacccgcgaggcccgtaaggaaagcaccccaaaggaatatgccgctgg

SEQ ID NO: 241484 - DNA, 50 bp, Artificial
  Synthetic oligonucleotide
atgcctttcggtggggagcgttcagcctcatccccttgcttgggatggat

SEQ ID NO: 241485 - DNA, 50 bp, Artificial
  Synthetic oligonucleotide
atgcgatgccggtagagccgtagccctccgtaccccgtccggtttttgaa

SEQ ID NO: 241486 - DNA, 50 bp, Artificial
  Synthetic oligonucleotide
actttgtcccggcgaggattcaagcggaaacagggtacggcacacggcga

SEQ ID NO: 241487 - DNA, 50 bp, Artificial
  Synthetic oligonucleotide
actttgctaatttagtagttcaacatggcactgtggcgacaataagcgat

SEQ ID NO: 241488 - DNA, 50 bp, Artificial
  Synthetic oligonucleotide
actttagtgacgcagcaacgcgggagcgcgtgttcgcacacatggctcgt

SEQ ID NO: 241489 - DNA, 50 bp, Artificial
  Synthetic oligonucleotide
tcgaggttatagatgaagggcgtaccaaccaagggcatattggcgacgtt

SEQ ID NO: 241490 - DNA, 50 bp, Artificial
  Synthetic oligonucleotide
atcgtctccctcgggcaactgatagccgacctcaagccccatggtcctga

SEQ ID NO: 241491 - DNA, 50 bp, Artificial
  Synthetic oligonucleotide
agagtcgtcgggcctctcataaagtatctctctaagggttttttgaatta

SEQ ID NO: 241492 - DNA, 60 bp, Artificial
  Synthetic oligonucleotide
caagttgcggtaactaatgctccaattggcatgcctgtgctagataatattgccggatta

SEQ ID NO: 241493 - DNA, 50 bp, Artificial
  Synthetic oligonucleotide
agagtagcaccccgggaatggcggatacaacaaagagggcccgccagcct

SEQ ID NO: 241494 - DNA, 50 bp, Artificial
  Synthetic oligonucleotide
agaggctcggaccgggtgtcagacctagcttcagacctagcgtcggaccg

SEQ ID NO: 241495 - DNA, 50 bp, Artificial
  Synthetic oligonucleotide
tcccacttgcggtatgcgggcgctcccaagtctccggtgcaggtatcaac

SEQ ID NO: 241496 - DNA, 50 bp, Artificial
  Synthetic oligonucleotide
taactgctttagcaccattagcatgattaggagtaccagtagccaattct

SEQ ID NO: 241497 - DNA, 50 bp, Artificial
  Synthetic oligonucleotide
agagccgtagccctccgtaccccgtccggtttttgaaagcgcatccgtct

SEQ ID NO: 241498 - DNA, 50 bp, Artificial
  Synthetic oligonucleotide
tccccgctgcgattgtaaacggttggtcggttttgcaaattgagcgcggg

SEQ ID NO: 241499 - DNA, 50 bp, Artificial
  Synthetic oligonucleotide
atcgtgtgcaagttgctcttcgctcccccgccagtggagcggcaccgcag

SEQ ID NO: 241500 - DNA, 50 bp, Artificial
  Synthetic oligonucleotide
taacgggctcacttacgctgcctgactcccttaccgccatcggacactct

SEQ ID NO: 241501 - DNA, 50 bp, Artificial
  Synthetic oligonucleotide
atctgtaggacccagccccgcttggccgatgggacgttctttcgaaccgg

SEQ ID NO: 241502 - DNA, 50 bp, Artificial
  Synthetic oligonucleotide
taacatttaaattgtaagaccaaacagcccaacacaggtggttgtttggt

SEQ ID NO: 241503 - DNA, 56 bp, Artificial
  Synthetic oligonucleotide
cattaattgggtcgggctatgacgcctcatcaacagctaaaagtaaatttaggaaa

SEQ ID NO: 241504 - DNA, 58 bp, Artificial
  Synthetic oligonucleotide
caagtgcgcgtatagtatagatcaaaatgaggcttgttcaaaacgagaaaattattcc

SEQ ID NO: 241505 - DNA, 50 bp, Artificial
  Synthetic oligonucleotide
agagaacagggggaggcttcctgccttcatgctggcagtgggggacaatc

SEQ ID NO: 241506 - DNA, 50 bp, Artificial
  Synthetic oligonucleotide
tccgcacgacgagacgatgttcgcaagccttgtgtacgatgagggctgct

SEQ ID NO: 241507 - DNA, 50 bp, Artificial
  Synthetic oligonucleotide
tccgcactaaacagagattacccggtattaatgggcggattgttagtata

SEQ ID NO: 241508 - DNA, 50 bp, Artificial
  Synthetic oligonucleotide
agacgtcaccttggcggcagagcggcgtcctgtagcgcatttcgcttgct

SEQ ID NO: 241509 - DNA, 50 bp, Artificial
  Synthetic oligonucleotide
taacatcgttagatcgtttggggctgctctagacgacgttattgtctact

SEQ ID NO: 241510 - DNA, 50 bp, Artificial
  Synthetic oligonucleotide
agaccttcctcggcagtgaggaaccaggcgtccctgttggattcacccga

SEQ ID NO: 241511 - DNA, 50 bp, Artificial
  Synthetic oligonucleotide
atgaaaagggaagccgcgcacatggggactttcctccgcatggccaggga

SEQ ID NO: 241512 - DNA, 50 bp, Artificial
  Synthetic oligonucleotide
agtgtctgatttgcttaaatctgagagtattagttccaattttccttatc

SEQ ID NO: 241513 - DNA, 50 bp, Artificial
  Synthetic oligonucleotide
tagtactagaaccaatccatttgggattgttaatgcttagaccatctttg

SEQ ID NO: 241514 - DNA, 50 bp, Artificial
  Synthetic oligonucleotide
agttgctcttcgctcccccgccagtggagcggcaccgcagttacgtgcca

SEQ ID NO: 241515 - DNA, 60 bp, Artificial
  Synthetic oligonucleotide
caagtgcatcaataggggtagtaagtggtgctgacatattacaagctattgctaagtctg

SEQ ID NO: 241516 - DNA, 50 bp, Artificial
  Synthetic oligonucleotide
agggcccatcctgcggctactgtctcaaggcacccgatattgccacacct

SEQ ID NO: 241517 - DNA, 50 bp, Artificial
  Synthetic oligonucleotide
agttttaccccgaacacgttccgctccgaatgagttacaccggcgcccgg

SEQ ID NO: 241518 - DNA, 50 bp, Artificial
  Synthetic oligonucleotide
tacgtaccatgtcgagggcgtgtctggcaggagcatagtgcggatggtcc

SEQ ID NO: 241519 - DNA, 50 bp, Artificial
  Synthetic oligonucleotide
ataagacaaacccttatctcgcaaatgtaattgtcctgtacgacaatgct

SEQ ID NO: 241520 - DNA, 50 bp, Artificial
  Synthetic oligonucleotide
ataagctccaaaacccatataaagtggatcaagaccaacgcttttaaatc

SEQ ID NO: 241521 - DNA, 50 bp, Artificial
  Synthetic oligonucleotide
aggcgtctggaaccatacgggaacaactctggttcacacgcgccgtcggt

SEQ ID NO: 241522 - DNA, 50 bp, Artificial
  Synthetic oligonucleotide
tacgcctaacccttatatataagaagattaaatccacaaaagagtaagga

SEQ ID NO: 241523 - DNA, 50 bp, Artificial
  Synthetic oligonucleotide
ataatccgctggcctgtcgttccccgcttaaagaagcccccgtggcctct

SEQ ID NO: 241524 - DNA, 50 bp, Artificial
  Synthetic oligonucleotide
tataagacatattctgagcgccaagaagaatattgctacccttaatacat

SEQ ID NO: 241525 - DNA, 50 bp, Artificial
  Synthetic oligonucleotide
aggcgatgggacaagggttttccgtgcccaaaatgggggacgccatttgg

SEQ ID NO: 241526 - DNA, 60 bp, Artificial
  Synthetic oligonucleotide
caagtctatttaagaaacgtgaatttaatgcatatgagataaattcagcgtattatagat

SEQ ID NO: 241527 - DNA, 50 bp, Artificial
  Synthetic oligonucleotide
aggccagtccctcggacttgataatacgggtgcaacgctcgcggggcttc

SEQ ID NO: 241528 - DNA, 50 bp, Artificial
  Synthetic oligonucleotide
aggccaatagctgacaatatacgggggaagtcttatattaaagctattgc

SEQ ID NO: 241529 - DNA, 50 bp, Artificial
  Synthetic oligonucleotide
aggcaacgtgtacatgcgccatgctccgcagctgagcagaaagagcggtg

SEQ ID NO: 241530 - DNA, 50 bp, Artificial
  Synthetic oligonucleotide
tacctattaaggcaaaaggatgatctgtaggatatttttcaatattaatg

SEQ ID NO: 241531 - DNA, 50 bp, Artificial
  Synthetic oligonucleotide
aggatggtaccagccgcgagggacccgagaatgaaaacccagcggtctgc

SEQ ID NO: 241532 - DNA, 50 bp, Artificial
  Synthetic oligonucleotide
agtccactcccttcgtattggctggcacggtatgcccttcaggggtcacc

SEQ ID NO: 241533 - DNA, 50 bp, Artificial
  Synthetic oligonucleotide
agtatagttgatgcccaggaataccccggacaaaccggcaagggcgccgg

SEQ ID NO: 241534 - DNA, 50 bp, Artificial
  Synthetic oligonucleotide
agtccgtttatacgcgggcggctcgcttacacagcacgttttacgccgcc

SEQ ID NO: 241535 - DNA, 50 bp, Artificial
  Synthetic oligonucleotide
tagagctttgccatagagtagatctataatcatgtattcgccctcatctt

SEQ ID NO: 241536 - DNA, 50 bp, Artificial
  Synthetic oligonucleotide
agtacgaaggggccagcggaagccgctcaatggtgcggggcgtcgtttat

SEQ ID NO: 241537 - DNA, 55 bp, Artificial
  Synthetic oligonucleotide
caagtattaattataaccagaaaggaggcataacaataatatagcgaccccctta

SEQ ID NO: 241538 - DNA, 50 bp, Artificial
  Synthetic oligonucleotide
agtcgacgccccaagtgtcgaacccgatgctgtcgacgcgtcccgctttt

SEQ ID NO: 241539 - DNA, 50 bp, Artificial
  Synthetic oligonucleotide
agtcgcgtgcttcggcacgagcatggcatggctgcgggggactatgcgta

SEQ ID NO: 241540 - DNA, 50 bp, Artificial
  Synthetic oligonucleotide
aggttatcggcttttgtccgttgattttgtgccgcccggtacgcaggggc

SEQ ID NO: 241541 - DNA, 50 bp, Artificial
  Synthetic oligonucleotide
aggttaggatggccaggctcgccacagctggcccggagttcaccaggacg

SEQ ID NO: 241542 - DNA, 50 bp, Artificial
  Synthetic oligonucleotide
agtcttgccccctgggcagctcgggatccctcatctcttatcccgaccgt

SEQ ID NO: 241543 - DNA, 50 bp, Artificial
  Synthetic oligonucleotide
aggtgctaccgaggctacccgattctacgccgggttgatccacgagggtg

SEQ ID NO: 241544 - DNA, 50 bp, Artificial
  Synthetic oligonucleotide
aggtacgcgctcagcaggaacccatttttgctcgacccgcgacggggacg

SEQ ID NO: 241545 - DNA, 50 bp, Artificial
  Synthetic oligonucleotide
agggttgttgcctgcaacctatgaagccgctgtagtgcgcctgtgcgata

SEQ ID NO: 241546 - DNA, 50 bp, Artificial
  Synthetic oligonucleotide
agggtgggtacgatgtgccggggcagtaaaacgtctgttaccaccgaggg

SEQ ID NO: 241547 - DNA, 50 bp, Artificial
  Synthetic oligonucleotide
agtcttgcgctagtaatatcttgtaaatgcagcgcagtaccgctattttt

SEQ ID NO: 241548 - DNA, 57 bp, Artificial
  Synthetic oligonucleotide
caaggtaacagaggatgtttctagtaaattagagggcgttagagaatcgtctcttga

SEQ ID NO: 241549 - DNA, 50 bp, Artificial
  Synthetic oligonucleotide
agtgaaccttcggggtctgcaagacttgcggcgagcgactgataagcgga

SEQ ID NO: 241550 - DNA, 50 bp, Artificial
  Synthetic oligonucleotide
aggggctctcatggccctggttggtctgctgtaccagagaaccaacagga

SEQ ID NO: 241551 - DNA, 50 bp, Artificial
  Synthetic oligonucleotide
aggggcgggaccgattcgattttacggcgctgcacgtgtcgaccgaaata

SEQ ID NO: 241552 - DNA, 50 bp, Artificial
  Synthetic oligonucleotide
agtgggcttgccggggctctctggactgcccgctatgcttctgccgtcaa

SEQ ID NO: 241553 - DNA, 50 bp, Artificial
  Synthetic oligonucleotide
atatggcggggtcgtttgcaacgggatgagtgactttgcccgggatgggg

SEQ ID NO: 241554 - DNA, 50 bp, Artificial
  Synthetic oligonucleotide
atcaaagtagccagcttcgggtaacgacgcctctccaaggggcatcggcc

SEQ ID NO: 241555 - DNA, 50 bp, Artificial
  Synthetic oligonucleotide
agcgggccatcggtctaccccagctccgctgtggcttatacccaattcac

SEQ ID NO: 241556 - DNA, 50 bp, Artificial
  Synthetic oligonucleotide
agcggctggtgcgggttcgcatcggaaacctcgagctgggtaccctcaaa

SEQ ID NO: 241557 - DNA, 50 bp, Artificial
  Synthetic oligonucleotide
atcaagcgatctagatgtaagataaatattccctttatagtatgtagcaa

SEQ ID NO: 241558 - DNA, 50 bp, Artificial
  Synthetic oligonucleotide
agcggaatcctacggcaagggataccccgcctctcaggttgactcccacg

SEQ ID NO: 241559 - DNA, 59 bp, Artificial
  Synthetic oligonucleotide
caagggtcacttcacggtaatgatataaatcaagtacaacaagcaatttgtttgtgcga

SEQ ID NO: 241560 - DNA, 50 bp, Artificial
  Synthetic oligonucleotide
agcggaatatcggtgagattgccacgaactgcggtttccccactcccggg

SEQ ID NO: 241561 - DNA, 50 bp, Artificial
  Synthetic oligonucleotide
atcagcggagacaactgcagtgccgtccctgtgtacgggaaaggtggcca

SEQ ID NO: 241562 - DNA, 50 bp, Artificial
  Synthetic oligonucleotide
tattaagctattcataagaggctgatagtacatatctaacatcagctgct

SEQ ID NO: 241563 - DNA, 50 bp, Artificial
  Synthetic oligonucleotide
atccaccgggccccgttccacaatacggccggcgtacataacgcagatgg

SEQ ID NO: 241564 - DNA, 50 bp, Artificial
  Synthetic oligonucleotide
agcgccgcccaatcgttgtcgtttgcggaaatggaagtacgcagcgtgat

SEQ ID NO: 241565 - DNA, 50 bp, Artificial
  Synthetic oligonucleotide
agcgatgccgcccaaacgccgatttaccgccccgacggttctttgataac

SEQ ID NO: 241566 - DNA, 50 bp, Artificial
  Synthetic oligonucleotide
atccatgcgcaaacgttcacggcggtacccaaacctcccgtaacgcacga

SEQ ID NO: 241567 - DNA, 50 bp, Artificial
  Synthetic oligonucleotide
agcgacataacaaaaggtgttagaatagatatagcagcgggaaccactac

SEQ ID NO: 241568 - DNA, 50 bp, Artificial
  Synthetic oligonucleotide
agcgaatacggtcctccggaacggcgcacttcccgctgggaaaagtcgac

SEQ ID NO: 241569 - DNA, 50 bp, Artificial
  Synthetic oligonucleotide
agcgaaaagggtgtttctgttaagagcgttggacccgctaaagccattag

SEQ ID NO: 241570 - DNA, 56 bp, Artificial
  Synthetic oligonucleotide
gtgtcgtgggcttttgggttcttgtagagcttgtttacaatctctgctaaattaaa

SEQ ID NO: 241571 - DNA, 50 bp, Artificial
  Synthetic oligonucleotide
tattcggtgcacttacctatggatgctcattctgtttattcgcatagcaa

SEQ ID NO: 241572 - DNA, 50 bp, Artificial
  Synthetic oligonucleotide
agccttccgctgggaaacaaggcgctgcatagcagtaaatacccggccct

SEQ ID NO: 241573 - DNA, 50 bp, Artificial
  Synthetic oligonucleotide
agcctgaagctcgggtatgtggagcgctggtttctgggctctccgctgac

SEQ ID NO: 241574 - DNA, 50 bp, Artificial
  Synthetic oligonucleotide
tacccttcgttgggacggacgcaccgattcgggagaaatagcccccgacg

SEQ ID NO: 241575 - DNA, 50 bp, Artificial
  Synthetic oligonucleotide
aggaggaatatcaccccgacactgggggagcctgtctagcgggcgaacgt

SEQ ID NO: 241576 - DNA, 50 bp, Artificial
  Synthetic oligonucleotide
aggagcagtgaaagccctcgcttcctccctcggcccttacaacgttcggg

SEQ ID NO: 241577 - DNA, 50 bp, Artificial
  Synthetic oligonucleotide
aggactgcacgaggcccctatcatcccaaccgccttatacgcacggcctt

SEQ ID NO: 241578 - DNA, 50 bp, Artificial
  Synthetic oligonucleotide
agcttgcaaccctaaagtgatgccatcgcccgttgcgcctgggtggttag

SEQ ID NO: 241579 - DNA, 50 bp, Artificial
  Synthetic oligonucleotide
atacaagtctgcgtgtggggaacctgtcccgagtgcgagcggaaacggta

SEQ ID NO: 241580 - DNA, 50 bp, Artificial
  Synthetic oligonucleotide
tatagtcggtccaatattcttctagcttccccggcattaacaaggttcat

SEQ ID NO: 241581 - DNA, 60 bp, Artificial
  Synthetic oligonucleotide
caagctaattttcatctatcaagcagggaagctattaagccatgatatttaaacatcgac

SEQ ID NO: 241582 - DNA, 50 bp, Artificial
  Synthetic oligonucleotide
atacggcacgttcaccgacttatcaaccggcgccccgatacacggcagcg

SEQ ID NO: 241583 - DNA, 50 bp, Artificial
  Synthetic oligonucleotide
agctctgggcaaaattcgcgaccgacgggctgtaggccccctcattgaat

SEQ ID NO: 241584 - DNA, 50 bp, Artificial
  Synthetic oligonucleotide
atacgggtctccgaaggtcttctcggcagggtactcgatgcccgcggcat

SEQ ID NO: 241585 - DNA, 50 bp, Artificial
  Synthetic oligonucleotide
atagcatcaccagcagcctttatcatatcctccaaccatgcgctcatctc

SEQ ID NO: 241586 - DNA, 50 bp, Artificial
  Synthetic oligonucleotide
atagcgggcaaggccatgaatgggcgctttgcgcttgacatgctagagcg

SEQ ID NO: 241587 - DNA, 50 bp, Artificial
  Synthetic oligonucleotide
ataggagcggtcccaaggcggacccatggcacagttgcatcccacagctt

SEQ ID NO: 241588 - DNA, 50 bp, Artificial
  Synthetic oligonucleotide
tacaacagagcaggcaatgcgcttgaaggcagcccagctgaaattaaaga

SEQ ID NO: 241589 - DNA, 50 bp, Artificial
  Synthetic oligonucleotide
tacaaatcccagtttagattttactttaacgaatgctcttgtgtgcagta

SEQ ID NO: 241590 - DNA, 50 bp, Artificial
  Synthetic oligonucleotide
agcgtgccaaccaaccctacaaggctgacatagcctcccgaacctccggc

SEQ ID NO: 241591 - DNA, 50 bp, Artificial
  Synthetic oligonucleotide
atatcgatccctgcgcgtgcctgcaccccataggtatcgggaacggaagg

SEQ ID NO: 241592 - DNA, 55 bp, Artificial
  Synthetic oligonucleotide
caagcaaccgctacctgcaattaataccgcagcccccaaatagggggctttaatc

SEQ ID NO: 241593 - DNA, 50 bp, Artificial
  Synthetic oligonucleotide
agcgtcgaggcagagtcggaaactgtcacccggtccatcacccttgtcga

SEQ ID NO: 241594 - DNA, 50 bp, Artificial
  Synthetic oligonucleotide
agcgtcacacccgtctcgcagtcccccgctaaaatcgccgcagggaccgg

SEQ ID NO: 241595 - DNA, 50 bp, Artificial
  Synthetic oligonucleotide
cagtgcaagccgcccgataaggggctgttccgtatatacatcgccgcgcc

SEQ ID NO: 241596 - DNA, 50 bp, Artificial
  Synthetic oligonucleotide
acctccgtcttccgcgtcgggccctcagcatcgacgggagctatctggga

SEQ ID NO: 241597 - DNA, 50 bp, Artificial
  Synthetic oligonucleotide
acctccgggggctggtcacggtacactaccggttcatccctggacatggg

SEQ ID NO: 241598 - DNA, 50 bp, Artificial
  Synthetic oligonucleotide
catacccgcacacggatacaaaccggacggcgttggtattgggagccgga

SEQ ID NO: 241599 - DNA, 50 bp, Artificial
  Synthetic oligonucleotide
accgtgcgccttcagtggcgatagggccgtgtccaccgcaagcaagagga

SEQ ID NO: 241600 - DNA, 50 bp, Artificial
  Synthetic oligonucleotide
accgtccggccgccgcgatacaggaacggtgattcagccgctgcgtaccg

SEQ ID NO: 241601 - DNA, 50 bp, Artificial
  Synthetic oligonucleotide
catccatgtgccccagccgccgagaattgctccctttgtgtccgcaatgg

SEQ ID NO: 241602 - DNA, 50 bp, Artificial
  Synthetic oligonucleotide
accgtcagcgtgttccctcccgttatcgacgatgcatccagcgtcccggc

SEQ ID NO: 241603 - DNA, 60 bp, Artificial
  Synthetic oligonucleotide
caagatgcatttattagattatagtagtcgttctgtatttcgtgatatttattcatataa

SEQ ID NO: 241604 - DNA, 50 bp, Artificial
  Synthetic oligonucleotide
catctattacttcttttatggtgcttattcctaagggatctttagtgtct

SEQ ID NO: 241605 - DNA, 50 bp, Artificial
  Synthetic oligonucleotide
accgggttcgggcatccatcgccagaggcgtatgaacgtctcttgctgga

SEQ ID NO: 241606 - DNA, 50 bp, Artificial
  Synthetic oligonucleotide
accggggctgacggaactgtgtcggtcaagtttggcttgcccgattccct

SEQ ID NO: 241607 - DNA, 50 bp, Artificial
  Synthetic oligonucleotide
catgccatcaggggcgacttgcacgcctccagggtgggttacttcttcct

SEQ ID NO: 241608 - DNA, 50 bp, Artificial
  Synthetic oligonucleotide
accggggcgtcgttttacgccggggaaataggccacaccaagacggagct

SEQ ID NO: 241609 - DNA, 50 bp, Artificial
  Synthetic oligonucleotide
accggggcgcagaggatcatgcagcccacttgggaaccggggataatttc

SEQ ID NO: 241610 - DNA, 50 bp, Artificial
  Synthetic oligonucleotide
accgggacaggcgcaagtccgctatccgtaaggcggagggagccagtatc

SEQ ID NO: 241611 - DNA, 50 bp, Artificial
  Synthetic oligonucleotide
accgctttgactgtggcggacttgcctgtccccctgtcgccgtagaggag

SEQ ID NO: 241612 - DNA, 50 bp, Artificial
  Synthetic oligonucleotide
accgctccgttcccgtttaggggttgccctggcttgtgtataggccgctt

SEQ ID NO: 241613 - DNA, 50 bp, Artificial
  Synthetic oligonucleotide
cagccgcatacatgaagacgctcggagtgcctcgggctgttgcattggta

SEQ ID NO: 241614 - DNA, 60 bp, Artificial
  Synthetic oligonucleotide
cattaagtaatagcaatgcttcaaggcatgagagctactactatgctggctaccaccaat

SEQ ID NO: 241615 - DNA, 60 bp, Artificial
  Synthetic oligonucleotide
gtgtgctaagatctgatgagatgaattcttttggcctgccagttgatttatattgggatc

SEQ ID NO: 241616 - DNA, 50 bp, Artificial
  Synthetic oligonucleotide
acgaggcgggaactgtgggcgattttggcgaagcggcttattgccctgcc

SEQ ID NO: 241617 - DNA, 50 bp, Artificial
  Synthetic oligonucleotide
cagctactcctagtgctagtttagaggctattaaatacgatcttagctac

SEQ ID NO: 241618 - DNA, 50 bp, Artificial
  Synthetic oligonucleotide
cagggaggctcggttcctgcgacccttggctgggaatccccgtatcgtgg

SEQ ID NO: 241619 - DNA, 50 bp, Artificial
  Synthetic oligonucleotide
tgactcttgattacttatccaggtttgttgctcctgaaaatcgaataaca

SEQ ID NO: 241620 - DNA, 50 bp, Artificial
  Synthetic oligonucleotide
gtcctcagtcatgttatcgtacatcaaatctttcaaagaaattcgctgta

SEQ ID NO: 241621 - DNA, 50 bp, Artificial
  Synthetic oligonucleotide
tgagcattttccacgccaaatcggtcgtatcggctgaaagcccgtatacg

SEQ ID NO: 241622 - DNA, 50 bp, Artificial
  Synthetic oligonucleotide
acgacgcagaccaaggcgcgtggcttccgcatggctcacttcacggctga

SEQ ID NO: 241623 - DNA, 50 bp, Artificial
  Synthetic oligonucleotide
acgaccgttccgtgctgaaaaacggccgaaagccgatctgagcagccggt

SEQ ID NO: 241624 - DNA, 50 bp, Artificial
  Synthetic oligonucleotide
caggggaacgggccaccgatggggataccggccaagtaggtcccggcctt

SEQ ID NO: 241625 - DNA, 50 bp, Artificial
  Synthetic oligonucleotide
gtccgatagtaagcataggctccgaattggtcagggtcgtttacatggtc

SEQ ID NO: 241626 - DNA, 57 bp, Artificial
  Synthetic oligonucleotide
gtgtgctagtttcaaggaggtatgttatatgttgaatacttttgataaagtgtttat

SEQ ID NO: 241627 - DNA, 50 bp, Artificial
  Synthetic oligonucleotide
gtccaatttctggactatttcagtctgagtttcggactcaagtccatttt

SEQ ID NO: 241628 - DNA, 50 bp, Artificial
  Synthetic oligonucleotide
cagtagccgccattattccattaatgggagtacgaatatcatgactaaca

SEQ ID NO: 241629 - DNA, 50 bp, Artificial
  Synthetic oligonucleotide
accttccgtcttccggcaggtacgaggggagtctgttgcacggtcttcga

SEQ ID NO: 241630 - DNA, 50 bp, Artificial
  Synthetic oligonucleotide
tgatactcaacaacaattagagcaaaaaggacattatcccaacaatttaa

SEQ ID NO: 241631 - DNA, 50 bp, Artificial
  Synthetic oligonucleotide
acctggacgagccccggagacttgggcggtcggaaagggaagttcaaccc

SEQ ID NO: 241632 - DNA, 50 bp, Artificial
  Synthetic oligonucleotide
acctgaggccctggtccgcccaaacgccgcctttaccgacgctgctcccc

SEQ ID NO: 241633 - DNA, 50 bp, Artificial
  Synthetic oligonucleotide
acctctggtatatggccggaggaacaagccttgcccgcctgaggggagca

SEQ ID NO: 241634 - DNA, 50 bp, Artificial
  Synthetic oligonucleotide
acctcctggcagcggggcttatcctggcggatacccattttcggcctgac

SEQ ID NO: 241635 - DNA, 50 bp, Artificial
  Synthetic oligonucleotide
ccagcgagcgtaacacgccagcggtaatctgtccagcaaggacacacgga

SEQ ID NO: 241636 - DNA, 50 bp, Artificial
  Synthetic oligonucleotide
acccggtagtcatcctgccaggcaacccggaccaggattacttcggcagg

SEQ ID NO: 241637 - DNA, 59 bp, Artificial
  Synthetic oligonucleotide
caagaactttaaaaattcctatagtagcattgtctcagcttacacgaggatgtacaaga

SEQ ID NO: 241638 - DNA, 50 bp, Artificial
  Synthetic oligonucleotide
acccgcctaccgtcagcgtgttccctcccgttatcgacgatgcatccagc

SEQ ID NO: 241639 - DNA, 50 bp, Artificial
  Synthetic oligonucleotide
accccttccgcgggataaccgcgatcggcccagaaccacttacctccggt

SEQ ID NO: 241640 - DNA, 50 bp, Artificial
  Synthetic oligonucleotide
accccttcccggttccaacgaaggaaagatcccgaccactgcccgggagc

SEQ ID NO: 241641 - DNA, 50 bp, Artificial
  Synthetic oligonucleotide
acccctcgctttgtttccggtctcccgggtcggtagcgtgtccctgcagg

SEQ ID NO: 241642 - DNA, 50 bp, Artificial
  Synthetic oligonucleotide
accccctgacattgactatcgggcagcacaggaagcgtggagggtcacga

SEQ ID NO: 241643 - DNA, 50 bp, Artificial
  Synthetic oligonucleotide
tgcttgcatcgggcagtactcggcaacacaggcgggtggaacttggagcg

SEQ ID NO: 241644 - DNA, 50 bp, Artificial
  Synthetic oligonucleotide
acccaggcaacgcctgagaatcattgcggcttccctgatatcgggctggg

SEQ ID NO: 241645 - DNA, 50 bp, Artificial
  Synthetic oligonucleotide
acccaggacttgcaatgcagctttggtgttgggctctcgctgtagggcct

SEQ ID NO: 241646 - DNA, 50 bp, Artificial
  Synthetic oligonucleotide
acccaataggctgctggtaatggctccggtagaccgaaggggacagcccg

SEQ ID NO: 241647 - DNA, 50 bp, Artificial
  Synthetic oligonucleotide
acccaagctcggcccggttggtaagccccgctgtagaaaagaaggcgctg

SEQ ID NO: 241648 - DNA, 53 bp, Artificial
  Synthetic oligonucleotide
caagaacaagttgagaacgcttgtaacttgaaacttacaaagtatttcgggct

SEQ ID NO: 241649 - DNA, 50 bp, Artificial
  Synthetic oligonucleotide
ccatattataataccagttcaagttgaaaggtggtcaatagaaagtttta

SEQ ID NO: 241650 - DNA, 50 bp, Artificial
  Synthetic oligonucleotide
accatcggttacgggagcactaagcggggagctgaagtacagcggggtga

SEQ ID NO: 241651 - DNA, 50 bp, Artificial
  Synthetic oligonucleotide
ccatgtgctgttagcagccgctacgaccacagggcgcagtgttttgccct

SEQ ID NO: 241652 - DNA, 50 bp, Artificial
  Synthetic oligonucleotide
accagggaacggaggcaatcgaccggggccaccttaccattgcacagttc

SEQ ID NO: 241653 - DNA, 50 bp, Artificial
  Synthetic oligonucleotide
accaccgccagaacaataaggccgatcacaaggagccccaccggcggata

SEQ ID NO: 241654 - DNA, 50 bp, Artificial
  Synthetic oligonucleotide
cccagtgcggactgcatgggaaatgcgcgcggaaagggcggtaagtcgaa

SEQ ID NO: 241655 - DNA, 50 bp, Artificial
  Synthetic oligonucleotide
cccatgaggcagaaggagacgtcccgtccgggcaagacacgaagggtccc

SEQ ID NO: 241656 - DNA, 50 bp, Artificial
  Synthetic oligonucleotide
catgcccgccgtctcttaaggcgcgaacgagggctgctttttgacccggg

SEQ ID NO: 241657 - DNA, 50 bp, Artificial
  Synthetic oligonucleotide
accgccttgtttgacagcgtagcgtacatttcccccgctgaaggtgcggc

SEQ ID NO: 241658 - DNA, 50 bp, Artificial
  Synthetic oligonucleotide
catgccgtcaagggaatgcttccccgtggaccgctcggtcgcaagttgtt

SEQ ID NO: 241659 - DNA, 52 bp, Artificial
  Synthetic oligonucleotide
caacttcggcctgtgcttttattcgttcgggctctggtttagaaagtttgtt

SEQ ID NO: 241660 - DNA, 50 bp, Artificial
  Synthetic oligonucleotide
accgccgcccctaccgttccctgatacccctggtagaaatcctgggggaa

SEQ ID NO: 241661 - DNA, 50 bp, Artificial
  Synthetic oligonucleotide
accgatggggataccggccaagtaggtcccggccttgcttcctggctcga

SEQ ID NO: 241662 - DNA, 50 bp, Artificial
  Synthetic oligonucleotide
accgatacccgtagcccctgactgtctcgatccattgggcctcgcccagt

SEQ ID NO: 241663 - DNA, 50 bp, Artificial
  Synthetic oligonucleotide
accgaggcgcgcacctccgattcatcgtacggcgtttcagggttgtccgc

SEQ ID NO: 241664 - DNA, 50 bp, Artificial
  Synthetic oligonucleotide
catttgtttacaaatgcaaggcgtggcacgctgtatcttttaagttgtcg

SEQ ID NO: 241665 - DNA, 50 bp, Artificial
  Synthetic oligonucleotide
ccaaaattataactaggacgatcccaaatctaaacagttaagccactagt

SEQ ID NO: 241666 - DNA, 50 bp, Artificial
  Synthetic oligonucleotide
accgacaagggtcctcgatagcatgcaaggcaagggcctcgggaaggctt

SEQ ID NO: 241667 - DNA, 50 bp, Artificial
  Synthetic oligonucleotide
accgaattccgcggtacggtcgttatcggcaatttgcaggctgcgtcgct

SEQ ID NO: 241668 - DNA, 50 bp, Artificial
  Synthetic oligonucleotide
accgaaagggaaacgccggaagcaacgtagagactaccgggggcagagcc

SEQ ID NO: 241669 - DNA, 50 bp, Artificial
  Synthetic oligonucleotide
accgaaacggacgcagtatggattctgcggggcgaagggatgatgcgcaa

SEQ ID NO: 241670 - DNA, 60 bp, Artificial
  Synthetic oligonucleotide
caactgctagccctaatataatagcattgaagtttgatggtactcagcatttatttgatc

SEQ ID NO: 241671 - DNA, 50 bp, Artificial
  Synthetic oligonucleotide
acccttcccgacagcattggtgagggtcccatggcgggcatctatcaggg

SEQ ID NO: 241672 - DNA, 50 bp, Artificial
  Synthetic oligonucleotide
accctgcatgcccgtacgcgaagccaaggctatgccccgtttgcagactg

SEQ ID NO: 241673 - DNA, 50 bp, Artificial
  Synthetic oligonucleotide
accctcatcgagtcggcctctgacgaaggtgcggccctgaaaccgaggcc

SEQ ID NO: 241674 - DNA, 50 bp, Artificial
  Synthetic oligonucleotide
ccagcccgcgagtggcagagaccggcagattggtcattgcctcgatttta

SEQ ID NO: 241675 - DNA, 50 bp, Artificial
  Synthetic oligonucleotide
actgaggccagccaactacccccagcaaaatccgggacggggcgtaaaat

SEQ ID NO: 241676 - DNA, 50 bp, Artificial
  Synthetic oligonucleotide
gttggaacaccactaagctttattagacaccgtataaaagtgggaaatgc

SEQ ID NO: 241677 - DNA, 50 bp, Artificial
  Synthetic oligonucleotide
attcggggctgcttggatccattgcctcaaggcgtgccatctccctgctt

SEQ ID NO: 241678 - DNA, 50 bp, Artificial
  Synthetic oligonucleotide
actgaatacggaagcgatgccgcccaaacgccgatttaccgccccgacgg

SEQ ID NO: 241679 - DNA, 50 bp, Artificial
  Synthetic oligonucleotide
attgaagcttgggaccacaacaccgagagttgcgacgatgaccgccccct

SEQ ID NO: 241680 - DNA, 50 bp, Artificial
  Synthetic oligonucleotide
gttgcaagattcttgagcgtgtttatttttaatcccacaagcaacacaaa

SEQ ID NO: 241681 - DNA, 60 bp, Artificial
  Synthetic oligonucleotide
gtgttattgccgagcaatatgagcaatatagtgtatgcaaatagtgtccccatgtgaatg

SEQ ID NO: 241682 - DNA, 50 bp, Artificial
  Synthetic oligonucleotide
actctatgttgccagatattggtatttggcttgtaaagggaaaagccgcc

SEQ ID NO: 241683 - DNA, 50 bp, Artificial
  Synthetic oligonucleotide
attgcaggcgggcatacgatcagcgacccgactcccaagtatgggctctg

SEQ ID NO: 241684 - DNA, 50 bp, Artificial
  Synthetic oligonucleotide
tctaatataataggcgctgctagtgcatacagcgcaatccttctagatag

SEQ ID NO: 241685 - DNA, 50 bp, Artificial
  Synthetic oligonucleotide
attgctaggcatgggtctcttttgacggataatggaattatgcgcattag

SEQ ID NO: 241686 - DNA, 50 bp, Artificial
  Synthetic oligonucleotide
attggggcaactggattccactcggaggaactccagcttacggcggtgcc

SEQ ID NO: 241687 - DNA, 50 bp, Artificial
  Synthetic oligonucleotide
attgttctgtacgttgtcggtgcgtccccacaggaagtcagccgtcccgg

SEQ ID NO: 241688 - DNA, 50 bp, Artificial
  Synthetic oligonucleotide
actccccacgggaggcttccaccaaggcaagacgaccgcccatgctgtat

SEQ ID NO: 241689 - DNA, 50 bp, Artificial
  Synthetic oligonucleotide
actcacgggatgcctcggatgccgttccggctctcgccagttcgtggata

SEQ ID NO: 241690 - DNA, 50 bp, Artificial
  Synthetic oligonucleotide
gttcaaacctagtaagtatatgctacctacaccaaatgaacaagttgaca

SEQ ID NO: 241691 - DNA, 50 bp, Artificial
  Synthetic oligonucleotide
caaagccccgcaaacatcaggcaaatgacgccccctaggacgttggcctc

SEQ ID NO: 241692 - DNA, 58 bp, Artificial
  Synthetic oligonucleotide
caactagcattaattttctaaatttcgaattgtgagttcttgacgactatatctagaa

SEQ ID NO: 241693 - DNA, 50 bp, Artificial
  Synthetic oligonucleotide
tctattactataacgaaaatctaaaaagaaatggtctaactcccactaca

SEQ ID NO: 241694 - DNA, 50 bp, Artificial
  Synthetic oligonucleotide
actatcgggcagcacaggaagcgtggagggtcacgaagctgtgggcagaa

SEQ ID NO: 241695 - DNA, 50 bp, Artificial
  Synthetic oligonucleotide
atgcgcacttctcgcgccagcgagcgtaacacgccagcggtaatctgtcc

SEQ ID NO: 241696 - DNA, 50 bp, Artificial
  Synthetic oligonucleotide
atgcgttacgcagttctggtgcgttctcgcggcgtctgaggtggttccag

SEQ ID NO: 241697 - DNA, 50 bp, Artificial
  Synthetic oligonucleotide
atgctcacatggtactcacccttggcgagaagggcgctctttggggacgg

SEQ ID NO: 241698 - DNA, 50 bp, Artificial
  Synthetic oligonucleotide
gttttggaaattataacgaagaggtagattcaaatgccgatcaagacaaa

SEQ ID NO: 241699 - DNA, 50 bp, Artificial
  Synthetic oligonucleotide
atgctctgccgggtctggcaatccccctaaaacggcgcttcggtactacc

SEQ ID NO: 241700 - DNA, 50 bp, Artificial
  Synthetic oligonucleotide
atggaaccgacggtggggttaagcagccgcatccaagccatggctccgac

SEQ ID NO: 241701 - DNA, 50 bp, Artificial
  Synthetic oligonucleotide
tcgcggtttgcatttaacgctccggacaaacctccggtgaaggagctcgg

SEQ ID NO: 241702 - DNA, 50 bp, Artificial
  Synthetic oligonucleotide
atggccccacccgttggtcatatagcggtctgtttcccccatccaggagc

SEQ ID NO: 241703 - DNA, 60 bp, Artificial
  Synthetic oligonucleotide
caactacattaaatcatttacacctctaaagctcaatcaaagcaatctaaatcattatct

SEQ ID NO: 241704 - DNA, 50 bp, Artificial
  Synthetic oligonucleotide
tcggatgctaccgcggtcaaagacacagaaagggtctcccggtacgcgga

SEQ ID NO: 241705 - DNA, 50 bp, Artificial
  Synthetic oligonucleotide
actgctctgccgcgtaggcaaggtccattcccagggttacaacctggccc

SEQ ID NO: 241706 - DNA, 50 bp, Artificial
  Synthetic oligonucleotide
tcggggagaatcggatccctgtccgtcggatgtggctcgagcggggtcag

SEQ ID NO: 241707 - DNA, 50 bp, Artificial
  Synthetic oligonucleotide
tcggggaggatatggtgagaggtgggtcgagttcggatggctccgtgcat

SEQ ID NO: 241708 - DNA, 50 bp, Artificial
  Synthetic oligonucleotide
actgcgatgtgctcaatcggtcccggttcaggcgacccgaataggggcgt

SEQ ID NO: 241709 - DNA, 50 bp, Artificial
  Synthetic oligonucleotide
actgcctgagcttcttgcggacgcaggaggggcccgacccatgctgcttt

SEQ ID NO: 241710 - DNA, 50 bp, Artificial
  Synthetic oligonucleotide
actgccgaaaacgcagccgagtggattaaagcgggagccgcagtgctcgg

SEQ ID NO: 241711 - DNA, 50 bp, Artificial
  Synthetic oligonucleotide
attatccccatcgctttgggtaacgccagcaagtggcccggcgccattac

SEQ ID NO: 241712 - DNA, 50 bp, Artificial
  Synthetic oligonucleotide
attccccatggagcatgccgtcaagggaatgcttccccgtggaccgctcg

SEQ ID NO: 241713 - DNA, 50 bp, Artificial
  Synthetic oligonucleotide
attcgccgcagctgcaatcgggtcaacgcactgggcaataatctggagcg

SEQ ID NO: 241714 - DNA, 57 bp, Artificial
  Synthetic oligonucleotide
gtgtttacccttgatcctaagaaaagggcaatatcagatagattaaggggactgctc

SEQ ID NO: 241715 - DNA, 50 bp, Artificial
  Synthetic oligonucleotide
acggcgtttcaggtggagcgtgtagcaccactgggggatcccgtggaaat

SEQ ID NO: 241716 - DNA, 50 bp, Artificial
  Synthetic oligonucleotide
acggcaggcgagataggttccccagacctgggcccggatcgtggtaaaaa

SEQ ID NO: 241717 - DNA, 50 bp, Artificial
  Synthetic oligonucleotide
acggaattttcggattataccacgagtcgccgcgtttggcgcgagggcgc

SEQ ID NO: 241718 - DNA, 50 bp, Artificial
  Synthetic oligonucleotide
acgctttcccttgctcccgggaccctatccgaggggctgctcttctttcg

SEQ ID NO: 241719 - DNA, 50 bp, Artificial
  Synthetic oligonucleotide
acgcttgcggctccttgccccacacgcacaaagacttccgtggctgcttt

SEQ ID NO: 241720 - DNA, 50 bp, Artificial
  Synthetic oligonucleotide
acgctcgtactgtgcgacacggacacagcggcggcatacgaggaaacggg

SEQ ID NO: 241721 - DNA, 50 bp, Artificial
  Synthetic oligonucleotide
cacggaagtggttgcacgaacgcgggcagttgagttgcatacgcgggagg

SEQ ID NO: 241722 - DNA, 50 bp, Artificial
  Synthetic oligonucleotide
acgcggcgaaaggctgatatcgcttacctgcgggccgtccggaatgcagg

SEQ ID NO: 241723 - DNA, 50 bp, Artificial
  Synthetic oligonucleotide
acgcgcctccatgggaggaacggcggcaagccatgcaagaaccgtactga

SEQ ID NO: 241724 - DNA, 50 bp, Artificial
  Synthetic oligonucleotide
acgcctggccgttcttgaagtctacatctccgcctgccccggttaccgta

SEQ ID NO: 241725 - DNA, 57 bp, Artificial
  Synthetic oligonucleotide
gtagggaatgtattgggattaaaggccgattcgaagaagtcagatgtagggacatat

SEQ ID NO: 241726 - DNA, 55 bp, Artificial
  Synthetic oligonucleotide
caacgcagaccttaaaaaaagactcggcattgcacttgcggggcttgaacccaat

SEQ ID NO: 241727 - DNA, 50 bp, Artificial
  Synthetic oligonucleotide
gtgcagctaaagatactaacgaaagtattctttttaaagtacgaagctag

SEQ ID NO: 241728 - DNA, 50 bp, Artificial
  Synthetic oligonucleotide
acgcccttacggtgataggttcccgcagcgacggttcactggcagtccgg

SEQ ID NO: 241729 - DNA, 50 bp, Artificial
  Synthetic oligonucleotide
gtgaggtgagccacgggagcatctatcacgcgatcaggaacgagctggcg

SEQ ID NO: 241730 - DNA, 50 bp, Artificial
  Synthetic oligonucleotide
acgcaattctttattcaaatatctatcgagatagattctacgaacactta

SEQ ID NO: 241731 - DNA, 50 bp, Artificial
  Synthetic oligonucleotide
cagaatatgcacaagcattgcttaatgaactcaagtctcttaattctaac

SEQ ID NO: 241732 - DNA, 50 bp, Artificial
  Synthetic oligonucleotide
cagacagccgggaagccctttggggcaactaccacggaacgtccagcacc

SEQ ID NO: 241733 - DNA, 50 bp, Artificial
  Synthetic oligonucleotide
gtctcttaccccattgtcgctatattttaaatcgtcagccttgactacag

SEQ ID NO: 241734 - DNA, 50 bp, Artificial
  Synthetic oligonucleotide
tgaatatggtgggggtagaaaagaatcgtccggagaccggacgacatttt

SEQ ID NO: 241735 - DNA, 50 bp, Artificial
  Synthetic oligonucleotide
acgatggcgaattataccgggcaaaacctgggcgcggggaggctggaccg

SEQ ID NO: 241736 - DNA, 50 bp, Artificial
  Synthetic oligonucleotide
tctcaatgctttattggaacttttacttaatattgacggaagtaaattga

SEQ ID NO: 241737 - DNA, 60 bp, Artificial
  Synthetic oligonucleotide
gttgtagcttagtgatgaataaaattgtcttctgattctttgagattctcttaggccgga

SEQ ID NO: 241738 - DNA, 50 bp, Artificial
  Synthetic oligonucleotide
actatcccggggcgaagctgttcgggaaggaggtcgccaccttgtgtgaa

SEQ ID NO: 241739 - DNA, 50 bp, Artificial
  Synthetic oligonucleotide
actactctacattctaagggttttgtgtttgacataacgcctccagcttt

SEQ ID NO: 241740 - DNA, 50 bp, Artificial
  Synthetic oligonucleotide
caaatccgcacagagttcagcacagggtgatgaggcgcgtactcgcgggc

SEQ ID NO: 241741 - DNA, 50 bp, Artificial
  Synthetic oligonucleotide
caaatcggaagaacttgggagagatattacttttaaactggcaaaggccg

SEQ ID NO: 241742 - DNA, 50 bp, Artificial
  Synthetic oligonucleotide
caacacttctcttgcaagttggtatttatatgctccaagggttgcagggg

SEQ ID NO: 241743 - DNA, 50 bp, Artificial
  Synthetic oligonucleotide
caaccgctctgtcagccgctattgcaaccctcgctatggggcttttggct

SEQ ID NO: 241744 - DNA, 50 bp, Artificial
  Synthetic oligonucleotide
acgttcccgggcgcatccagtgattggtatgggacaaggcaacacacccg

SEQ ID NO: 241745 - DNA, 50 bp, Artificial
  Synthetic oligonucleotide
acgtggagaccaaatccatccatgtgccccagccgccgagaattgctccc

SEQ ID NO: 241746 - DNA, 50 bp, Artificial
  Synthetic oligonucleotide
caacgacccccaggatggggactccaagcctccgtgagaaagtgacgctc

SEQ ID NO: 241747 - DNA, 50 bp, Artificial
  Synthetic oligonucleotide
acgtccaggtaactggacatggttgccattttaaatgaaaggagtccata

SEQ ID NO: 241748 - DNA, 56 bp, Artificial
  Synthetic oligonucleotide
attccagtgtaaattttctgtaagaattggggtatcaaatgaatctttatagccag

SEQ ID NO: 241749 - DNA, 50 bp, Artificial
  Synthetic oligonucleotide
caacgggttatgggctttcctcccggattgtaggggcctttggctccggg

SEQ ID NO: 241750 - DNA, 50 bp, Artificial
  Synthetic oligonucleotide
acggtggggttaagcagccgcatccaagccatggctccgacatacggggg

SEQ ID NO: 241751 - DNA, 50 bp, Artificial
  Synthetic oligonucleotide
acggtcgcgcgtacatacggcgttttcggtacttgtgccgtcgctgcaaa

SEQ ID NO: 241752 - DNA, 50 bp, Artificial
  Synthetic oligonucleotide
gtgtgccgatccagaaaggcgggagatgcggtggcgagggggtctctcag

SEQ ID NO: 241753 - DNA, 50 bp, Artificial
  Synthetic oligonucleotide
acggggcacggcatggatcacgtaccgctcggctggtttactgcgcggca

SEQ ID NO: 241754 - DNA, 50 bp, Artificial
  Synthetic oligonucleotide
caatagaatatgctcgaacctcttctctcgcacgaacatcagaaccaact

SEQ ID NO: 241755 - DNA, 50 bp, Artificial
  Synthetic oligonucleotide
acgggccttgcgtacccagaggagggcctcgtcaaattctcccagctcgt

SEQ ID NO: 241756 - DNA, 50 bp, Artificial
  Synthetic oligonucleotide
acgggacgccgcggttccgcctgcatggcaagggataatgcgatctggga

SEQ ID NO: 241757 - DNA, 55 bp, Artificial
  Synthetic oligonucleotide
attcaagctcaggaaaaactttacaggcgttttcccgcctatagggctcgtgtgc

SEQ ID NO: 241758 - DNA, 58 bp, Artificial
  Synthetic oligonucleotide
attatctgttctagattaagttctaaaattgctatgctatttaacaccttgtttgtca

SEQ ID NO: 241759 - DNA, 60 bp, Artificial
  Synthetic oligonucleotide
gttgttgcagggtgctaagagtgcatcgggacagtttggcgagtcattgaaattgctaag

SEQ ID NO: 241760 - DNA, 57 bp, Artificial
  Synthetic oligonucleotide
attatataataccgctagtaatgttgttggtaatacttataacttcgcgactggctg

SEQ ID NO: 241761 - DNA, 54 bp, Artificial
  Synthetic oligonucleotide
attataaatacctacaatcacccctatctttcaaaaattacaactactagtcca

SEQ ID NO: 241762 - DNA, 52 bp, Artificial
  Synthetic oligonucleotide
gtttacgtttagagatacaaaaataggggtgttgttttttatgtctgcgtta

SEQ ID NO: 241763 - DNA, 56 bp, Artificial
  Synthetic oligonucleotide
attactttcctaagtattacatcaagtattcctaacaccttatttactgcacttga

SEQ ID NO: 241764 - DNA, 60 bp, Artificial
  Synthetic oligonucleotide
catggctgtattgggaatggcaagactgagttatggtagttggtttaagtttgtgatgcc

SEQ ID NO: 241765 - DNA, 55 bp, Artificial
  Synthetic oligonucleotide
attacaaatataagccccactttattattgaaaatcataaatatagcgatttaaa

SEQ ID NO: 241766 - DNA, 57 bp, Artificial
  Synthetic oligonucleotide
attaataggcggtgatgataattttttaggccccattcatgaacgtgaagacttgaa

SEQ ID NO: 241767 - DNA, 56 bp, Artificial
  Synthetic oligonucleotide
attaacccctaagtccacttattcaatctcgcctctaaaaaatcctgcggcatgga

SEQ ID NO: 241768 - DNA, 56 bp, Artificial
  Synthetic oligonucleotide
attaacacttgccacttcaccaccttttgctgctgtaccagccttaaccttaacaa

SEQ ID NO: 241769 - DNA, 54 bp, Artificial
  Synthetic oligonucleotide
attaaattcaagtttcttaaatagacttgtataatactgtagacacaaaaagta

SEQ ID NO: 241770 - DNA, 54 bp, Artificial
  Synthetic oligonucleotide
gtttagcattttttttgtaacttcgtctcgaagcttaatgagttttctgtattc

SEQ ID NO: 241771 - DNA, 56 bp, Artificial
  Synthetic oligonucleotide
attaaacctatagccgtgatgatttttgtaacagcactagttcttggaggattaat

SEQ ID NO: 241772 - DNA, 51 bp, Artificial
  Synthetic oligonucleotide
atgttttttctcaggttggtggttttttctggattggtattttttcccaga

SEQ ID NO: 241773 - DNA, 54 bp, Artificial
  Synthetic oligonucleotide
atgttaataatctcaatcaaagccccaactaataaaaagccgcctgtaaatagg

SEQ ID NO: 241774 - DNA, 60 bp, Artificial
  Synthetic oligonucleotide
gtttcatcccatgatagctttttaggttctacaagaacggtcatccactagagcatggtc

SEQ ID NO: 241775 - DNA, 57 bp, Artificial
  Synthetic oligonucleotide
catatcgccaaaactcacaaatacatctaaaatcctttccctaaatttaccatctca

SEQ ID NO: 241776 - DNA, 60 bp, Artificial
  Synthetic oligonucleotide
catggcggatttcctattacaatgtcaaatccttcctgaatatctggaaactcaattcca

SEQ ID NO: 241777 - DNA, 59 bp, Artificial
  Synthetic oligonucleotide
atgtgatataaagtaattaatatgtgatataaagtaattaatatgtgatataaagtaat

SEQ ID NO: 241778 - DNA, 56 bp, Artificial
  Synthetic oligonucleotide
atgtctatagattccagtaatcccgtatttttagaggttatagatccgattacaaa

SEQ ID NO: 241779 - DNA, 58 bp, Artificial
  Synthetic oligonucleotide
atgtatgatacttaattattacggaattagaagtagcgtgagatatgaatctttaaat

SEQ ID NO: 241780 - DNA, 56 bp, Artificial
  Synthetic oligonucleotide
atgtaagctttttaagcaacgaaaacggaggcatttggcccatacactgtgtcaaa

SEQ ID NO: 241781 - DNA, 55 bp, Artificial
  Synthetic oligonucleotide
atgtaaataataggcttgatttattgccaagctatttaagtttacacgagtttag

SEQ ID NO: 241782 - DNA, 59 bp, Artificial
  Synthetic oligonucleotide
atggtttatgaatatttatggcgatatagagcttttagagattaagagtagtaactcta

SEQ ID NO: 241783 - DNA, 60 bp, Artificial
  Synthetic oligonucleotide
atggtatgtcactagctgctaaaccgcttgttgacgacactgtaattggaaagttgcgaa

SEQ ID NO: 241784 - DNA, 53 bp, Artificial
  Synthetic oligonucleotide
atggggtacaggcttttaaggtattgaattgggggccggggactgaagatgta

SEQ ID NO: 241785 - DNA, 52 bp, Artificial
  Synthetic oligonucleotide
attttagttccaaaatttaatcccaatatccaaatccgcagacattttttag

SEQ ID NO: 241786 - DNA, 56 bp, Artificial
  Synthetic oligonucleotide
attttagctctaaagattaacgcaaataacttaacatgtaaatcaggaaacatgga

SEQ ID NO: 241787 - DNA, 60 bp, Artificial
  Synthetic oligonucleotide
catggccgcagcttgtggggtctgcaataacttatttcaaacgttatgtcttagttgcat

SEQ ID NO: 241788 - DNA, 56 bp, Artificial
  Synthetic oligonucleotide
attttaaatgcatcgggaactgagggtgcttataactatcaagacgttaatactac

SEQ ID NO: 241789 - DNA, 60 bp, Artificial
  Synthetic oligonucleotide
atttgcacgcaaaactaaatgtggcttgagctactcatagtagctcaagcttaacacaaa

SEQ ID NO: 241790 - DNA, 55 bp, Artificial
  Synthetic oligonucleotide
atttctgttttaattacaggtaaagcagaggatggtatgacgacagggggaggga

SEQ ID NO: 241791 - DNA, 55 bp, Artificial
  Synthetic oligonucleotide
atttatcttcttgaagactccaaaaggtagtcttttctatgatcctcaatggggt

SEQ ID NO: 241792 - DNA, 58 bp, Artificial
  Synthetic oligonucleotide
atttagatcctgcatatagtagtggtggggataatacttctctttgtgttttagagaa

SEQ ID NO: 241793 - DNA, 58 bp, Artificial
  Synthetic oligonucleotide
atttactacttaacataaaataccctgtgtctctaattacaagaaatgcaatgtctga

SEQ ID NO: 241794 - DNA, 53 bp, Artificial
  Synthetic oligonucleotide
attgttccgattacaaataattttgagggttatttagtagcaaaagattctac

SEQ ID NO: 241795 - DNA, 57 bp, Artificial
  Synthetic oligonucleotide
attgtgaacaccatttattagactctactacctctaagatctcgtaatagtaataat

SEQ ID NO: 241796 - DNA, 60 bp, Artificial
  Synthetic oligonucleotide
attgtactccatccggatgaagatgttagacaacctggtaaactggctatgcatccccaa

SEQ ID NO: 241797 - DNA, 60 bp, Artificial
  Synthetic oligonucleotide
gttcaggctactgcaggtgacgctactaaattggctggtgaagtggctaaggctgatcca

SEQ ID NO: 241798 - DNA, 54 bp, Artificial
  Synthetic oligonucleotide
gtatagtcactgtaaaaaggattattcctaatctttttatatccgtaaaacatc

SEQ ID NO: 241799 - DNA, 60 bp, Artificial
  Synthetic oligonucleotide
attgggctggtgaacacataatcttaagcaatattaatctgcgtaaaaattgaatcagta

SEQ ID NO: 241800 - DNA, 59 bp, Artificial
  Synthetic oligonucleotide
gttctaagacagggattacctgaagtaaaagttatagatcatactctggcatgtggtcg

SEQ ID NO: 241801 - DNA, 54 bp, Artificial
  Synthetic oligonucleotide
attgctttcaatagtctcccccaattcaccactttcaccgctaagggaatttaa

SEQ ID NO: 241802 - DNA, 58 bp, Artificial
  Synthetic oligonucleotide
gttcttttagagcctaaaaagctatcatgggatgaaacaagaagctatttctataatc

SEQ ID NO: 241803 - DNA, 60 bp, Artificial
  Synthetic oligonucleotide
attgctaaatcttcaagtgcaacttcaaatctttgttgaattcgtatgccccctgatata

SEQ ID NO: 241804 - DNA, 55 bp, Artificial
  Synthetic oligonucleotide
gttgaaaagaatttaaatgccaaaatagacaatgttgaaaagaatttaaatgcca

SEQ ID NO: 241805 - DNA, 57 bp, Artificial
  Synthetic oligonucleotide
attgccagtcaaattatatctaagttcccaactagaagatgttgataaaacttctct

SEQ ID NO: 241806 - DNA, 56 bp, Artificial
  Synthetic oligonucleotide
gttgcaactactacaagtccacctagtatcacttaatcttagagccgtatttttaa

SEQ ID NO: 241807 - DNA, 60 bp, Artificial
  Synthetic oligonucleotide
attgagcttgatataacacttggaaggagtgatagtattctgggtaaaacattatatcta

SEQ ID NO: 241808 - DNA, 57 bp, Artificial
  Synthetic oligonucleotide
attgaattggaaattggttggtttggaggtcgttctaatattgccagaatgcacgaa

SEQ ID NO: 241809 - DNA, 60 bp, Artificial
  Synthetic oligonucleotide
catgatagcttttttggctcttaaaagaacggtcatccactagagcatggtccacaagct

SEQ ID NO: 241810 - DNA, 60 bp, Artificial
  Synthetic oligonucleotide
gttgccaaaattgcaatgggcatcaccttaggaaatgtcattagcaatgctataagtaaa

SEQ ID NO: 241811 - DNA, 60 bp, Artificial
  Synthetic oligonucleotide
attcttgatgggacaggaattattaagctagagcctgattacataagaactgtgatgctg

SEQ ID NO: 241812 - DNA, 60 bp, Artificial
  Synthetic oligonucleotide
attcgcgtatcaaatgagtatttgtacacagtgcttgtactgtagaatgtagttctaata

SEQ ID NO: 241813 - DNA, 56 bp, Artificial
  Synthetic oligonucleotide
attcgcatcaccagcattcgtattcgcaaactttccacccttagccaaccccctta

SEQ ID NO: 241814 - DNA, 56 bp, Artificial
  Synthetic oligonucleotide
attcgatcttaggggttcaaaagagctacaaagaaggtctaaattacaacatgcta

SEQ ID NO: 241815 - DNA, 58 bp, Artificial
  Synthetic oligonucleotide
attcctatgcgagttgaagttgtaaggtattcataataagtatactcaccccaagtga

SEQ ID NO: 241816 - DNA, 60 bp, Artificial
  Synthetic oligonucleotide
cttctcattgcatgcgaaatttggagtgtagaatagttgtaaaggatataagtggcaatt

SEQ ID NO: 241817 - DNA, 52 bp, Artificial
  Synthetic oligonucleotide
cttctattatttggaatgcaaaattttggtattccaaaaagcttttaccagg

SEQ ID NO: 241818 - DNA, 57 bp, Artificial
  Synthetic oligonucleotide
gcaggtgttgtcgtaagaaatgtcccaattttttgcaagtcctggcctgtatccacc

SEQ ID NO: 241819 - DNA, 60 bp, Artificial
  Synthetic oligonucleotide
gcagtaaatggtgtagtagcaagtgcagtaagtaaggtattgagtacattgacaatagca

SEQ ID NO: 241820 - DNA, 59 bp, Artificial
  Synthetic oligonucleotide
catgagtgtgcagtaattaaggcgttaggtatattaacgatggcaataagaaatactat

SEQ ID NO: 241821 - DNA, 60 bp, Artificial
  Synthetic oligonucleotide
cttccctccgaaaactttgctacaatcgctgcttcttgttatacagcaacagctctcttg

SEQ ID NO: 241822 - DNA, 58 bp, Artificial
  Synthetic oligonucleotide
gcagtaacaagtcttttaatacattcatagtaaagcttcagttctcttattgaacacc

SEQ ID NO: 241823 - DNA, 56 bp, Artificial
  Synthetic oligonucleotide
cttcccaaacaacttccctgccttttcattattctccccttcagcagcagcaactt

SEQ ID NO: 241824 - DNA, 58 bp, Artificial
  Synthetic oligonucleotide
cttcatatttgtatgtagtttactataagtaagctcaggtgtcaaataaagcgcaaag

SEQ ID NO: 241825 - DNA, 60 bp, Artificial
  Synthetic oligonucleotide
gcagtagcaagtgcggtaaaataaggtattaagtacattgataatagcaatcaggaatag

SEQ ID NO: 241826 - DNA, 60 bp, Artificial
  Synthetic oligonucleotide
gcagtgactagcgcgccaattggcatacctgtgttagatagtattgccgggttaacagct

SEQ ID NO: 241827 - DNA, 52 bp, Artificial
  Synthetic oligonucleotide
cttattgggggttaataatttttactgtgcgtatattttggatgcgtaaaac

SEQ ID NO: 241828 - DNA, 59 bp, Artificial
  Synthetic oligonucleotide
gcataagctcttcaagaccattttttacaagttctaatatatctccgctgtaactacca

SEQ ID NO: 241829 - DNA, 59 bp, Artificial
  Synthetic oligonucleotide
cttattcaacaatgatgaaacaatgggcaggactaagttactgggattacattgtactc

SEQ ID NO: 241830 - DNA, 60 bp, Artificial
  Synthetic oligonucleotide
cttattaagagcatagtaatgatatccaaagtatcaagggactattatccttcatagata

SEQ ID NO: 241831 - DNA, 56 bp, Artificial
  Synthetic oligonucleotide
catgaataaagccaataaacatcgcgtttaaatttatcattccgatcattttttac

SEQ ID NO: 241832 - DNA, 60 bp, Artificial
  Synthetic oligonucleotide
cttagtagcatcacctgcagtagccctaacattatgaaccaatgctttaggtccattttc

SEQ ID NO: 241833 - DNA, 56 bp, Artificial
  Synthetic oligonucleotide
gcataaggcgttcttattcttctagagaaaccaatgtttcaaattcctatagtaaa

SEQ ID NO: 241834 - DNA, 60 bp, Artificial
  Synthetic oligonucleotide
cttagcacaatagcagcagcaatcttatcattcccattcatagcagcaccaaaattagca

SEQ ID NO: 241835 - DNA, 49 bp, Artificial
  Synthetic oligonucleotide
cttactcttaaaaaggataggagaataaaaattagtccttcggtaaaaa

SEQ ID NO: 241836 - DNA, 60 bp, Artificial
  Synthetic oligonucleotide
cttaccacctttagctatcgctcttaacactatacctcctgctatagttgcgtccatcgc

SEQ ID NO: 241837 - DNA, 58 bp, Artificial
  Synthetic oligonucleotide
cttacaagcatgattttagaactccagctgaacaaagcgattcgtcttttagttcaag

SEQ ID NO: 241838 - DNA, 56 bp, Artificial
  Synthetic oligonucleotide
cttaattggtatagactaattgtagtcttatattaaagaacatacaaccagtgtat

SEQ ID NO: 241839 - DNA, 52 bp, Artificial
  Synthetic oligonucleotide
cttaagtcctctcttaaagttcttattacagttggtttatatccctctttat

SEQ ID NO: 241840 - DNA, 56 bp, Artificial
  Synthetic oligonucleotide
cttaagagatcccaaaacgataacttatgttttcaacattgaagtgacactgggta

SEQ ID NO: 241841 - DNA, 60 bp, Artificial
  Synthetic oligonucleotide
gcatataaagcaatagtaacgtcaatcttattaatgagggattctcttaaagaagtgcaa

SEQ ID NO: 241842 - DNA, 60 bp, Artificial
  Synthetic oligonucleotide
catcttttttaaccatgcactaacctcatcaacagcactctccacagcatttttcacact

SEQ ID NO: 241843 - DNA, 57 bp, Artificial
  Synthetic oligonucleotide
cttaaagggaatatttatcttacatctagatcacttgatagaaagaaaagtggggca

SEQ ID NO: 241844 - DNA, 60 bp, Artificial
  Synthetic oligonucleotide
gcatcagtaccatttgaagccccctcagctgtctttacagttgttaccagcttatccaac

SEQ ID NO: 241845 - DNA, 57 bp, Artificial
  Synthetic oligonucleotide
ctgtgttgttttttaatattggtgtatttgttgtggtgtggctatttatcaacaatg

SEQ ID NO: 241846 - DNA, 53 bp, Artificial
  Synthetic oligonucleotide
gaaatcttccggcctcaaatacagtaaaactttctcaatttgggccgtattac

SEQ ID NO: 241847 - DNA, 56 bp, Artificial
  Synthetic oligonucleotide
gaaatcggatgtagggaaatattttaagacagtggcgggtactgtgcaagggataa

SEQ ID NO: 241848 - DNA, 60 bp, Artificial
  Synthetic oligonucleotide
gaaagccagccgatcttatgctgatgcttttgctattgcaacatctagcttatcttgtag

SEQ ID NO: 241849 - DNA, 57 bp, Artificial
  Synthetic oligonucleotide
gaaagacgagagtttaattgctcccgcaaaatccttagcatccacaagacccactac

SEQ ID NO: 241850 - DNA, 52 bp, Artificial
  Synthetic oligonucleotide
gaaactcaaacaggggttgttaccattaaagagtataaaggtttagagatta

SEQ ID NO: 241851 - DNA, 60 bp, Artificial
  Synthetic oligonucleotide
gaaactatatgcaacaggtgaaagagctgagcaacaacgattcaacgtacataaacgccc

SEQ ID NO: 241852 - DNA, 56 bp, Artificial
  Synthetic oligonucleotide
gaaaaacactgctgccgactttgtctgcaaagtcggggtacactacgcctttttga

SEQ ID NO: 241853 - DNA, 59 bp, Artificial
  Synthetic oligonucleotide
catctttcataaggccaagctctagattagcttttacttcgtcttcagttatagttcca

SEQ ID NO: 241854 - DNA, 54 bp, Artificial
  Synthetic oligonucleotide
cttttggtaacaaaacttcattctgaagtgttattgttactaggaatagacaaa

SEQ ID NO: 241855 - DNA, 56 bp, Artificial
  Synthetic oligonucleotide
gcacttacaatactagttgttctaaaagaccagttatcaactattacgatagaaaa

SEQ ID NO: 241856 - DNA, 58 bp, Artificial
  Synthetic oligonucleotide
cttttggacataccaccctttgtatacaggagttctgctagatagtgctttaggtgcg

SEQ ID NO: 241857 - DNA, 52 bp, Artificial
  Synthetic oligonucleotide
cttttcggggcatcttttcgacattaaactaggcaaaacaacttaagcctat

SEQ ID NO: 241858 - DNA, 57 bp, Artificial
  Synthetic oligonucleotide
cttttccgttgcaaatagcaaacaattctttgtcttcgacaacaataggctcgccaa

SEQ ID NO: 241859 - DNA, 53 bp, Artificial
  Synthetic oligonucleotide
ctttggggaactggaattattcttaatcaccgagaaacacaattaaccggata

SEQ ID NO: 241860 - DNA, 59 bp, Artificial
  Synthetic oligonucleotide
gcactttaaaatcaaacttataaacggtagataacgctctataagcatctgcaagataa

SEQ ID NO: 241861 - DNA, 52 bp, Artificial
  Synthetic oligonucleotide
ctttaagaagacaaaatcaccaattttaggagttgtaaaggtactgtctaac

SEQ ID NO: 241862 - DNA, 57 bp, Artificial
  Synthetic oligonucleotide
ctttaacattgctccaaggcctgagattgtaacaattaataaagggattttgtcatc

SEQ ID NO: 241863 - DNA, 56 bp, Artificial
  Synthetic oligonucleotide
gcagagcgattaccctaatagtaaataacagtacaccgacatttaaaaacaacgca

SEQ ID NO: 241864 - DNA, 57 bp, Artificial
  Synthetic oligonucleotide
catctcttctaaaagcataacttaccgtgcggtttgcactgctttacttaatcttaa

SEQ ID NO: 241865 - DNA, 59 bp, Artificial
  Synthetic oligonucleotide
cttgtttctgcttatcaggcaaataacaacccagtaaagctaatgttattatgcaaaca

SEQ ID NO: 241866 - DNA, 54 bp, Artificial
  Synthetic oligonucleotide
cttgggtgctcaagagcgttatcccaaaaaaatattaaggatcgttacaactgt

SEQ ID NO: 241867 - DNA, 60 bp, Artificial
  Synthetic oligonucleotide
cttgctaagaatgacaagcagatattatcaaacaaagcaagtaaacctttgagcataaat

SEQ ID NO: 241868 - DNA, 56 bp, Artificial
  Synthetic oligonucleotide
cttgaccttaaaaactatctttacttaaacatagattctcaaattagagacatata

SEQ ID NO: 241869 - DNA, 57 bp, Artificial
  Synthetic oligonucleotide
gcagcagcattcgtattcgcaaactttccacccttagccaacccccttagaacaata

SEQ ID NO: 241870 - DNA, 60 bp, Artificial
  Synthetic oligonucleotide
gcagcagcattcttattctcccccgtactcccaatagccgcatcaatcggatttgtagca

SEQ ID NO: 241871 - DNA, 60 bp, Artificial
  Synthetic oligonucleotide
cttgaagaataatgcagagaaggctggtgaagtaggtaagttattggagaatggggctgc

SEQ ID NO: 241872 - DNA, 60 bp, Artificial
  Synthetic oligonucleotide
cttgaaaaggcgactggagcaccaaataaagcaactattaatgcaacagcattgactgat

SEQ ID NO: 241873 - DNA, 57 bp, Artificial
  Synthetic oligonucleotide
cttctttgcagcccctaccatcttctttgatgtacaacacttttcaccttagctttc

SEQ ID NO: 241874 - DNA, 58 bp, Artificial
  Synthetic oligonucleotide
cttcttgaagcaatgataagctacagatttaatggagcaggttatattttggtaaaac

SEQ ID NO: 241875 - DNA, 60 bp, Artificial
  Synthetic oligonucleotide
catctcttagatatcaagactttcttgcgccagttagcattatccggggaataaaagagc

SEQ ID NO: 241876 - DNA, 60 bp, Artificial
  Synthetic oligonucleotide
gccccagtagcatcatcatccttcttccccgtgaacaacttccctgcatctttattattc

SEQ ID NO: 241877 - DNA, 57 bp, Artificial
  Synthetic oligonucleotide
gcccccaaaggggcatctttatctgcgatgataaaccctaggagaaagaattgcctc

SEQ ID NO: 241878 - DNA, 57 bp, Artificial
  Synthetic oligonucleotide
gccccctcagctgtctttacagcttttaccagcttatccaacaactcgctaacttcc

SEQ ID NO: 241879 - DNA, 60 bp, Artificial
  Synthetic oligonucleotide
gcccgatagcatatttagatccagcatttagtgttggaggggataacactgcattatgtg

SEQ ID NO: 241880 - DNA, 59 bp, Artificial
  Synthetic oligonucleotide
ctcttctatgttaaattgaataccccatgatatgtgataaagaaagcttccaagtatat

SEQ ID NO: 241881 - DNA, 51 bp, Artificial
  Synthetic oligonucleotide
gccgaaaactccgcgtttcatatgtcccccaattaactttttgacctattt

SEQ ID NO: 241882 - DNA, 60 bp, Artificial
  Synthetic oligonucleotide
ctcttatcagaataattttcaatcaatcgcaccaaggtgctcattttagaagacaaatct

SEQ ID NO: 241883 - DNA, 57 bp, Artificial
  Synthetic oligonucleotide
ctcttaaaagaatcactttgttcatgccctaagcttcttgtaccgtcagaatcggtg

SEQ ID NO: 241884 - DNA, 56 bp, Artificial
  Synthetic oligonucleotide
gccgaacatcgtttgttgattaatataaaagagactttaatcagtttaaaggatgc

SEQ ID NO: 241885 - DNA, 60 bp, Artificial
  Synthetic oligonucleotide
ctctctactatctattaatggtattacacacgcaaatatcaaaagtactgctggtacagc

SEQ ID NO: 241886 - DNA, 60 bp, Artificial
  Synthetic oligonucleotide
catatattatgaatatgatcaagaccgttttagagaattttaatgtacatacactgtatt

SEQ ID NO: 241887 - DNA, 58 bp, Artificial
  Synthetic oligonucleotide
gtatgaaaatattgttttacactgattgtagtatggcacaacttagaattaaaatcca

SEQ ID NO: 241888 - DNA, 59 bp, Artificial
  Synthetic oligonucleotide
gccgccccagcagcattattcttccccgtgaacaacttccctgcatctttgttcttatc

SEQ ID NO: 241889 - DNA, 57 bp, Artificial
  Synthetic oligonucleotide
ctctagatacacttttagagacacatccttaccaacactaaaaaaagtctgaatata

SEQ ID NO: 241890 - DNA, 60 bp, Artificial
  Synthetic oligonucleotide
gccgggcctcattgccctataagcatctggcagataacctgtcgcattcatattcttttc

SEQ ID NO: 241891 - DNA, 58 bp, Artificial
  Synthetic oligonucleotide
ctctacaataagtaggatttttacgggcgccatggatgctcttgagggatttaatgag

SEQ ID NO: 241892 - DNA, 60 bp, Artificial
  Synthetic oligonucleotide
ctctacaagttaatatccaagataatgaagctagtgaagctagaaacattatgccggaaa

SEQ ID NO: 241893 - DNA, 55 bp, Artificial
  Synthetic oligonucleotide
ctctaatagatctcgaacaacccgttaatatagaattacccattggttttgaata

SEQ ID NO: 241894 - DNA, 60 bp, Artificial
  Synthetic oligonucleotide
ctctaagctatattctatgctaattagtagatctttggcttctttatgggttagagtatg

SEQ ID NO: 241895 - DNA, 60 bp, Artificial
  Synthetic oligonucleotide
ctcggcgtgccatccgattatgagtatagtggcacagtttacgacgtgacactttatcca

SEQ ID NO: 241896 - DNA, 60 bp, Artificial
  Synthetic oligonucleotide
gcctatcagctctacccctagctctaggccaaatctttttacgacgacgcccatcatcaa

SEQ ID NO: 241897 - DNA, 57 bp, Artificial
  Synthetic oligonucleotide
ctcgatatgtacaacctatttaacgaccttgggcgttctcttgacatagcaactaat

SEQ ID NO: 241898 - DNA, 60 bp, Artificial
  Synthetic oligonucleotide
catccggcagcaataaaggattctgctctgttatactatggtttctaaatcttgtgtata

SEQ ID NO: 241899 - DNA, 60 bp, Artificial
  Synthetic oligonucleotide
ctccgtgtggagcatgattggcaacacctaaaaaagccgcgataatgcttgatacagctc

SEQ ID NO: 241900 - DNA, 57 bp, Artificial
  Synthetic oligonucleotide
ctccgtagaatctgcggtgtctttaggagaatctaataataggattggtataccaac

SEQ ID NO: 241901 - DNA, 60 bp, Artificial
  Synthetic oligonucleotide
gcctattaattgtgttatagagaggaataatggcgttatagggatagtgatgatttatgt

SEQ ID NO: 241902 - DNA, 60 bp, Artificial
  Synthetic oligonucleotide
gcctcatatcctctttcaaacaatatgaagatcgggataggtagaatatgcttgttagat

SEQ ID NO: 241903 - DNA, 53 bp, Artificial
  Synthetic oligonucleotide
ctcccccaattcaccactttcaccgctaagggaatttaaacttccttgagcca

SEQ ID NO: 241904 - DNA, 56 bp, Artificial
  Synthetic oligonucleotide
ctccccatttttaccatctacagggctttgatccgctggctcaggttgttgtagtt

SEQ ID NO: 241905 - DNA, 60 bp, Artificial
  Synthetic oligonucleotide
ctcccattaaattgcatatgaggtgaaagatacaggattagatatagagaacttacgacg

SEQ ID NO: 241906 - DNA, 60 bp, Artificial
  Synthetic oligonucleotide
ctgtgttagacagtattgctgggttaacagctataatatatgacatactcaaaaaagtag

SEQ ID NO: 241907 - DNA, 59 bp, Artificial
  Synthetic oligonucleotide
ctgtggcgacaattagcgatcctcatgaaatagtaaatgttttccgcatttaaagataa

SEQ ID NO: 241908 - DNA, 60 bp, Artificial
  Synthetic oligonucleotide
ctgtggatgctgaaagttatgttatgtcaaaaagtagctccagtagctacgattcaacta

SEQ ID NO: 241909 - DNA, 60 bp, Artificial
  Synthetic oligonucleotide
catcccgacacagtcttattaacagcactctcaacagtactcttcaaacccgcctttgca

SEQ ID NO: 241910 - DNA, 59 bp, Artificial
  Synthetic oligonucleotide
ctgtgcaactttcaatgtatgcggttacagttgaaactcccattattgccccaacagta

SEQ ID NO: 241911 - DNA, 60 bp, Artificial
  Synthetic oligonucleotide
gcattagacgccgcttcacctacaacattgacatcacctatcccttttaatgattctaaa

SEQ ID NO: 241912 - DNA, 58 bp, Artificial
  Synthetic oligonucleotide
gcattatgctggtttgcttagcaattctttagagtttagagacaaaaacgtgcaattt

SEQ ID NO: 241913 - DNA, 60 bp, Artificial
  Synthetic oligonucleotide
gcattatgtgttatggagcgagttgatgataagtattatgcttttgtatttcaagaccaa

SEQ ID NO: 241914 - DNA, 57 bp, Artificial
  Synthetic oligonucleotide
ctgtaggatggatgtaggaatgagaagtggcaatttttaagggtggtacacaagaaa

SEQ ID NO: 241915 - DNA, 60 bp, Artificial
  Synthetic oligonucleotide
ctgtaataaattcggcagaagataatctagatactataacagcaaaagcattggcataag

SEQ ID NO: 241916 - DNA, 52 bp, Artificial
  Synthetic oligonucleotide
ctgtaaaagaacaggtctctattcgttttaataaagtcttgttagaacattt

SEQ ID NO: 241917 - DNA, 60 bp, Artificial
  Synthetic oligonucleotide
gcattgtctactaattgctttgctactatgttgcaccactattgccaacctaccagaaga

SEQ ID NO: 241918 - DNA, 60 bp, Artificial
  Synthetic oligonucleotide
gcatttaaagcacaccttaatgtcaagtctagactagggtttgtatcaatcactatgtaa

SEQ ID NO: 241919 - DNA, 53 bp, Artificial
  Synthetic oligonucleotide
gccaagtattttttaattgcgcatttttatttggccaatggcggggctttttg

SEQ ID NO: 241920 - DNA, 60 bp, Artificial
  Synthetic oligonucleotide
catcagcagcattagctcgattaccaccaccagcactagtagcaaataacttccccgcat

SEQ ID NO: 241921 - DNA, 58 bp, Artificial
  Synthetic oligonucleotide
gccaatagaatacaagctcaagttccatttagtatatatagcccgacttttggcctta

SEQ ID NO: 241922 - DNA, 60 bp, Artificial
  Synthetic oligonucleotide
gccacacgctaacttcctttatcgcactctcaacagcatttttcacagtccccgtatgag

SEQ ID NO: 241923 - DNA, 58 bp, Artificial
  Synthetic oligonucleotide
gccagcgttataatatctgagaattcttttaagtccttcgtatcaatagcacttaaaa

SEQ ID NO: 241924 - DNA, 60 bp, Artificial
  Synthetic oligonucleotide
ctgcggtattgttggttgctgctgatagtggagcagaacctcagacaaaagagcatttac

SEQ ID NO: 241925 - DNA, 59 bp, Artificial
  Synthetic oligonucleotide
ctgcgcaatgtcaagagtcaccctattaacaccaataggaatcactcccgtataataag

SEQ ID NO: 241926 - DNA, 60 bp, Artificial
  Synthetic oligonucleotide
ctgcgagacttcgatacacaaagaagcgagcacgattgatagtgagatggcaagcaatca

SEQ ID NO: 241927 - DNA, 60 bp, Artificial
  Synthetic oligonucleotide
gccatgttgcactactattgctagcttatcagaagaaccggagcctccaattattcaaac

SEQ ID NO: 241928 - DNA, 59 bp, Artificial
  Synthetic oligonucleotide
ctgcagccttcccagtagcatccttcttccccgtgaacaacttccctgcatctttatta

SEQ ID NO: 241929 - DNA, 60 bp, Artificial
  Synthetic oligonucleotide
ctgcaatctgcccaagctatataatgtaataagctcttgacaaacaccctaacaaaagta

SEQ ID NO: 241930 - DNA, 60 bp, Artificial
  Synthetic oligonucleotide
ctgcaacttagtggggctagagataatgcatatacttcagcaattgagtgtctacttaag

SEQ ID NO: 241931 - DNA, 60 bp, Artificial
  Synthetic oligonucleotide
catcagcaatcccattaacactcgcctggtccgcagcagcaccttgatgatttgcagccc

SEQ ID NO: 241932 - DNA, 60 bp, Artificial
  Synthetic oligonucleotide
gccattaatgatgacacaatgctacttttcaatactacagatagattgcttattgatatt

SEQ ID NO: 241933 - DNA, 60 bp, Artificial
  Synthetic oligonucleotide
gcccaataatgtacattgatcctgcattctcagtgggtggagacaatacagctatttgtg

SEQ ID NO: 241934 - DNA, 60 bp, Artificial
  Synthetic oligonucleotide
ctgatcatccttcgtcatcttacccttaccaaacgccttagcagcatcatccttcgtagt

SEQ ID NO: 241935 - DNA, 60 bp, Artificial
  Synthetic oligonucleotide
ctgatcatccttcgtcatcttaccaaacgccttagcatcatccttcgtagtcccaatagc

SEQ ID NO: 241936 - DNA, 54 bp, Artificial
  Synthetic oligonucleotide
gcccatcctttatcccttgtacagtctcctgaaccttcttaaagtaattcccaa

SEQ ID NO: 241937 - DNA, 56 bp, Artificial
  Synthetic oligonucleotide
gagttcggtgctcacgcccttgaaataggtttccacattggtcataagagttttta

SEQ ID NO: 241938 - DNA, 59 bp, Artificial
  Synthetic oligonucleotide
gagttccctaattagtagtcattatgtaatatctccaatgacggcagaaaaatgggctg

SEQ ID NO: 241939 - DNA, 57 bp, Artificial
  Synthetic oligonucleotide
gagttaattttgtggcgtcttcgggctcgtgttgtaatgcttcaagaactgtattcg

SEQ ID NO: 241940 - DNA, 57 bp, Artificial
  Synthetic oligonucleotide
gagtgttattatgcactgttacccataagtagtaaattgggagagaaaagcggagta

SEQ ID NO: 241941 - DNA, 56 bp, Artificial
  Synthetic oligonucleotide
gattaacttatgtgcaataggcgatactttatatatacatagttttcccttaaatt

SEQ ID NO: 241942 - DNA, 56 bp, Artificial
  Synthetic oligonucleotide
gtatgtttgaatctgcattggaaattaaggccttaagtaaggaggacaatcctaaa

SEQ ID NO: 241943 - DNA, 60 bp, Artificial
  Synthetic oligonucleotide
gattaatccacataatgaggtcgtcaagttcactcatcaggtttactatgcaccacgatt

SEQ ID NO: 241944 - DNA, 58 bp, Artificial
  Synthetic oligonucleotide
gagtatccctatcctagaatatagtccaaaagctttacttaaggcagcgcctgcctta

SEQ ID NO: 241945 - DNA, 52 bp, Artificial
  Synthetic oligonucleotide
gagtataaaacgttaaaaaagcaaagcggaattatacgtcgtactgggcgcg

SEQ ID NO: 241946 - DNA, 60 bp, Artificial
  Synthetic oligonucleotide
gattaatcttaatcacatataaagcatttggcttgctattttcatttgcttcgatgacaa

SEQ ID NO: 241947 - DNA, 57 bp, Artificial
  Synthetic oligonucleotide
gagtaggtggattagatacagttaaatccagtattgcaagtgcttttgataactttt

SEQ ID NO: 241948 - DNA, 59 bp, Artificial
  Synthetic oligonucleotide
gaggttatgtaggatcctgcaattgtgagaccccctattcccagtagtatagatccggc

SEQ ID NO: 241949 - DNA, 55 bp, Artificial
  Synthetic oligonucleotide
gaggtggttaagggggctcttagtggtggtatagataattttgaaactagtgcaa

SEQ ID NO: 241950 - DNA, 56 bp, Artificial
  Synthetic oligonucleotide
gagggtgggttatgcatagttatattgtagaaggcggttttaagataggtggtcaa

SEQ ID NO: 241951 - DNA, 60 bp, Artificial
  Synthetic oligonucleotide
gagggtaagaaggctagtgatgctcaaaacccgattgatgcggctattgggactgctgat

SEQ ID NO: 241952 - DNA, 56 bp, Artificial
  Synthetic oligonucleotide
gagggaatgttttatacagctactcctagtgctagtttagaggttattaaatacga

SEQ ID NO: 241953 - DNA, 60 bp, Artificial
  Synthetic oligonucleotide
gtgactggagcaccaaataaagcaactattaatgcaacagcattgactgatgcgaaacaa

SEQ ID NO: 241954 - DNA, 58 bp, Artificial
  Synthetic oligonucleotide
gattagaggattctcaaagagatgttgttttacaattgttttcggctggatttgacta

SEQ ID NO: 241955 - DNA, 57 bp, Artificial
  Synthetic oligonucleotide
gattagatgcatataaaccattggtgcttcgggagttatatgaggttccccacgttt

SEQ ID NO: 241956 - DNA, 55 bp, Artificial
  Synthetic oligonucleotide
gaggagtaggaagtttaagtgagttaattgcaacttcaagacaagtgtttttgga

SEQ ID NO: 241957 - DNA, 59 bp, Artificial
  Synthetic oligonucleotide
gattatacccactttattggctctttcgttgagtaggctgatggccttgtctagtgtta

SEQ ID NO: 241958 - DNA, 59 bp, Artificial
  Synthetic oligonucleotide
gagcttccatattcttgctttgagtctttagatactaggcctccaaataatttgacaat

SEQ ID NO: 241959 - DNA, 60 bp, Artificial
  Synthetic oligonucleotide
gattcaaagtgatatttatagggtcttaggagatgttaatttaatgctcttgaggtatgc

SEQ ID NO: 241960 - DNA, 60 bp, Artificial
  Synthetic oligonucleotide
gagcgctctaatttagaattaggatttatacgcgcattcaagcaatattctagtattgag

SEQ ID NO: 241961 - DNA, 60 bp, Artificial
  Synthetic oligonucleotide
gagcgagttgatgcatattcatttgcatgttcaagttatacagacaaaatagaggaatac

SEQ ID NO: 241962 - DNA, 60 bp, Artificial
  Synthetic oligonucleotide
gagcgaaactgacaagattgaacatgacatcaaattacttgaactttacgagaaatataa

SEQ ID NO: 241963 - DNA, 56 bp, Artificial
  Synthetic oligonucleotide
gattcacttcgtattaatctatacggaggagataaggcaagtgattttgaaaggtt

SEQ ID NO: 241964 - DNA, 56 bp, Artificial
  Synthetic oligonucleotide
cactcagttataattaatcagacgcccctggggattctaatagccggttagcttta

SEQ ID NO: 241965 - DNA, 59 bp, Artificial
  Synthetic oligonucleotide
gattccttaaggcttgttctcgtgctttcccggtcttattatagatgcccctctgctca

SEQ ID NO: 241966 - DNA, 60 bp, Artificial
  Synthetic oligonucleotide
gattgcatatatccaagctatggcagtgactgagcaaattgcccaaagtatacttcccct

SEQ ID NO: 241967 - DNA, 58 bp, Artificial
  Synthetic oligonucleotide
gatcttagctatttaaaggaggctttagcattaattaaggcaaaaattggtgctgata

SEQ ID NO: 241968 - DNA, 55 bp, Artificial
  Synthetic oligonucleotide
gatcttaatagtgtatatactactacaactctagtaagtataccgtaaaaatgtt

SEQ ID NO: 241969 - DNA, 56 bp, Artificial
  Synthetic oligonucleotide
gatgactcaaggaagtttaaattcccttagcggtgaaagtggtgaattggaggagc

SEQ ID NO: 241970 - DNA, 58 bp, Artificial
  Synthetic oligonucleotide
gatgagagcatattaaataacgacgagtatgtaaacacagtaagggatgttttagtta

SEQ ID NO: 241971 - DNA, 60 bp, Artificial
  Synthetic oligonucleotide
gatgcacatccgagtgacatactacacgggcatattaatgcgatagtagctcgtgcaata

SEQ ID NO: 241972 - DNA, 60 bp, Artificial
  Synthetic oligonucleotide
gatgcacatcctaatgatatactacatggacatattaattcaatagtagcccgtgcgata

SEQ ID NO: 241973 - DNA, 53 bp, Artificial
  Synthetic oligonucleotide
gatggaaaaaatagggttcgaggctccaataagaccctttctagggctactgg

SEQ ID NO: 241974 - DNA, 59 bp, Artificial
  Synthetic oligonucleotide
gatattaagtattctggcgaagaggggagccctgagtattatcgtaatatgcctagacc

SEQ ID NO: 241975 - DNA, 54 bp, Artificial
  Synthetic oligonucleotide
cactattggtttggggcttaatttactatccagcttaactaacatagctaaaac

SEQ ID NO: 241976 - DNA, 60 bp, Artificial
  Synthetic oligonucleotide
gatatgtgattgtaacacaattatcatataaatcagagtgacatggatcctctttataat

SEQ ID NO: 241977 - DNA, 56 bp, Artificial
  Synthetic oligonucleotide
gatatgtcatttcgcatgatcaacgtatttaaggatcctaaacccttaaagtttta

SEQ ID NO: 241978 - DNA, 52 bp, Artificial
  Synthetic oligonucleotide
gatataagttaaaaatattaaccagggccaaaacacatacatacgttttaaa

SEQ ID NO: 241979 - DNA, 58 bp, Artificial
  Synthetic oligonucleotide
gatataaccataaagtcagttaagtcatctggggtataatatgctccgcttttctttc

SEQ ID NO: 241980 - DNA, 57 bp, Artificial
  Synthetic oligonucleotide
gatagtgtttcaagagatgttggttagcattaattaaataggccgcttagtaactaa

SEQ ID NO: 241981 - DNA, 56 bp, Artificial
  Synthetic oligonucleotide
gatagtgttaaaagcgaacttaatgctaagatcgatagtgttaaaaatgaacttac

SEQ ID NO: 241982 - DNA, 56 bp, Artificial
  Synthetic oligonucleotide
gatagattctaacgtaggttaattggccgtattgcccgtcttcaagtttaaatgca

SEQ ID NO: 241983 - DNA, 53 bp, Artificial
  Synthetic oligonucleotide
gatagataaagaaagtatagacaaaaacgaactactgcgggctaaaccggaaa

SEQ ID NO: 241984 - DNA, 56 bp, Artificial
  Synthetic oligonucleotide
gatacttaattactatggaattaaaagtagtgtgagatatgagtcttttgggtact

SEQ ID NO: 241985 - DNA, 60 bp, Artificial
  Synthetic oligonucleotide
gatacatcgggttatagcagtgataataagattacggcgttagaaatggcattgtttgca

SEQ ID NO: 241986 - DNA, 60 bp, Artificial
  Synthetic oligonucleotide
cactacttggctctcaagtgcttggaggaatacttataatggctggatacatgaccgggg

SEQ ID NO: 241987 - DNA, 55 bp, Artificial
  Synthetic oligonucleotide
gatacaaccataaaattagttaggtcatctggggtataatatgctccactttttt

SEQ ID NO: 241988 - DNA, 60 bp, Artificial
  Synthetic oligonucleotide
gataagcagtgggtctaggcataaaacgatcatactcagggctcccctcttcgccagaat

SEQ ID NO: 241989 - DNA, 60 bp, Artificial
  Synthetic oligonucleotide
gataaagtactaatcatagttctttcatttgtgttgcttgcaattgctctataaaatact

SEQ ID NO: 241990 - DNA, 54 bp, Artificial
  Synthetic oligonucleotide
gataaaataaggaaactagtgcaattgcaaaataatttaaagatgggggacgaa

SEQ ID NO: 241991 - DNA, 53 bp, Artificial
  Synthetic oligonucleotide
gagtttttgatcttttccaaatctaaggtgtttaccttatctaagacatcttt

SEQ ID NO: 241992 - DNA, 53 bp, Artificial
  Synthetic oligonucleotide
gagtttagttgtaccgcgtatgtattaccaattactaacaattttgaagggta

SEQ ID NO: 241993 - DNA, 56 bp, Artificial
  Synthetic oligonucleotide
gagtttagtagtactgcgtatgtattgccaattacgaataactttgaagggtatct

SEQ ID NO: 241994 - DNA, 59 bp, Artificial
  Synthetic oligonucleotide
gattaaacaagcagatcagctaactagtaagggtagagatattaaggttggacttgatc

SEQ ID NO: 241995 - DNA, 60 bp, Artificial
  Synthetic oligonucleotide
gagttgaaatagttctcggacatccttaactcaggcggtatgacgacaggcagtatgtat

SEQ ID NO: 241996 - DNA, 60 bp, Artificial
  Synthetic oligonucleotide
gcaagcttacttaaagctgcaccaccagaatacctcaagagcattaaattaacatctcct

SEQ ID NO: 241997 - DNA, 52 bp, Artificial
  Synthetic oligonucleotide
cataccaccttttgttgtaacacttattaaaatacccaaagtatcaaataaa

SEQ ID NO: 241998 - DNA, 60 bp, Artificial
  Synthetic oligonucleotide
cactacatttaatctctaatagctctaatccaccttgattattgataaaccaaccatcta

SEQ ID NO: 241999 - DNA, 54 bp, Artificial
  Synthetic oligonucleotide
gaattgagtaagttaaacaacaaggttacgcttcaaaaattaggtgagactgga

SEQ ID NO: 242000 - DNA, 59 bp, Artificial
  Synthetic oligonucleotide
gaattcgcgtatcaaatgactccctgtacccagtacttgtactgtagaatgtagtccta

SEQ ID NO: 242001 - DNA, 60 bp, Artificial
  Synthetic oligonucleotide
gcaaggcgtttatgtacgtagaatcgttgttacccagctctttcacatgttgcatatcgt

SEQ ID NO: 242002 - DNA, 59 bp, Artificial
  Synthetic oligonucleotide
gcaatattaatagcgttatttttgctttacgccatattggtactgatgagtcgtttaga

SEQ ID NO: 242003 - DNA, 54 bp, Artificial
  Synthetic oligonucleotide
gaatgttttatacggccacccttagtgctagtttagaggttattaaatacgatc

SEQ ID NO: 242004 - DNA, 55 bp, Artificial
  Synthetic oligonucleotide
gaatgtttctaatcgaagttgcttcagggaaaagcttatacacaaaggaaagaac

SEQ ID NO: 242005 - DNA, 60 bp, Artificial
  Synthetic oligonucleotide
gaatgcccatgagcagagtctatgacaagtagatctacgtgtgcttttacaagctcttca

SEQ ID NO: 242006 - DNA, 55 bp, Artificial
  Synthetic oligonucleotide
gaatagattgcaaagcgagctgggattctccatttttcccaactttttaccctta

SEQ ID NO: 242007 - DNA, 60 bp, Artificial
  Synthetic oligonucleotide
gcaatccccttaacactcgcatcattagcctttgtgccagcaccattagcaacgtcccca

SEQ ID NO: 242008 - DNA, 60 bp, Artificial
  Synthetic oligonucleotide
gcaatttattggctccagattttcaatctaatattgctgaagatatcttaaagatagcta

SEQ ID NO: 242009 - DNA, 60 bp, Artificial
  Synthetic oligonucleotide
gtgactggagcaccaccaaataaggcaactattaatgcaatagcgttgtctgatgcaaaa

SEQ ID NO: 242010 - DNA, 60 bp, Artificial
  Synthetic oligonucleotide
gcacaacttacagtgctgttcgcaatgctttacttaatcttgatggtattgagtacacca

SEQ ID NO: 242011 - DNA, 59 bp, Artificial
  Synthetic oligonucleotide
gcacaacttcaataatacttgcaaatctattatcgaaaaagcataaagtacttttgatc

SEQ ID NO: 242012 - DNA, 57 bp, Artificial
  Synthetic oligonucleotide
gaagctttaagagattgcctacctcgataatttccactacattttgacaattctttg

SEQ ID NO: 242013 - DNA, 57 bp, Artificial
  Synthetic oligonucleotide
gcacaatttatgccttgattttaagcaatttccgacttttacagttgtgggggagca

SEQ ID NO: 242014 - DNA, 58 bp, Artificial
  Synthetic oligonucleotide
gaagcgacagaattatcaagtggtattctaatttaacagacatgcccacactaaaggt

SEQ ID NO: 242015 - DNA, 56 bp, Artificial
  Synthetic oligonucleotide
gaagattgtcttaagaacggacttattcttgaaagtattagtagtaatgttagtga

SEQ ID NO: 242016 - DNA, 60 bp, Artificial
  Synthetic oligonucleotide
gaacttttagagattaagagtagcgattctaattatatgagtagcgtcattgaagagtac

SEQ ID NO: 242017 - DNA, 60 bp, Artificial
  Synthetic oligonucleotide
gcaccatcctgaacagcaaactttccattcttagccatccctcttagcacaatagcagca

SEQ ID NO: 242018 - DNA, 57 bp, Artificial
  Synthetic oligonucleotide
gcacccctgcacccacttattgcgagtagatgtagaaaccaaccagaaattgggtcc

SEQ ID NO: 242019 - DNA, 60 bp, Artificial
  Synthetic oligonucleotide
gaactgctatttctaaatcaaagattatagaaatagcttcttgtttcatcccatgatagc

SEQ ID NO: 242020 - DNA, 57 bp, Artificial
  Synthetic oligonucleotide
cacgttttctgatatctctagtgggataacgttctgcaacgtatacccagtaaccta

SEQ ID NO: 242021 - DNA, 54 bp, Artificial
  Synthetic oligonucleotide
gaactcaatttgtacattaaaaaccttgaaagcgggagcataagtaaatgaacc

SEQ ID NO: 242022 - DNA, 57 bp, Artificial
  Synthetic oligonucleotide
gcaccttatgctgtagcgcaccttaaattaagtcagtataaaagaagtttgcaaagt

SEQ ID NO: 242023 - DNA, 60 bp, Artificial
  Synthetic oligonucleotide
gcaccttgattagctgcagccccaacttccccaatctttacttcactaccatcagtagcc

SEQ ID NO: 242024 - DNA, 59 bp, Artificial
  Synthetic oligonucleotide
gaacggctgctttagcaggagtagtcggctttttagttatgcatcaaactataaatgga

SEQ ID NO: 242025 - DNA, 60 bp, Artificial
  Synthetic oligonucleotide
gcactcccatttttctttagactcccattattagtgcatgtttgttgatgatatgagttg

SEQ ID NO: 242026 - DNA, 57 bp, Artificial
  Synthetic oligonucleotide
gcactgtgcagcgggatcttaaactgcttaacgaaattggcttgattaaaactaagt

SEQ ID NO: 242027 - DNA, 57 bp, Artificial
  Synthetic oligonucleotide
gattggaaaggttgtggacaatggcgctaatgataataggggtaataaggcaagtgt

SEQ ID NO: 242028 - DNA, 49 bp, Artificial
  Synthetic oligonucleotide
gattttacgtcaaaagacgttaatttaaattatcagcggtttttaaaat

SEQ ID NO: 242029 - DNA, 58 bp, Artificial
  Synthetic oligonucleotide
gattttcaagctgaaatcttaatgtccttattgatttcccttttgcaatactcttatc

SEQ ID NO: 242030 - DNA, 56 bp, Artificial
  Synthetic oligonucleotide
gagaagtatgcttgtaaattgaaaaacatacctctcttttgaaattggcttaagtc

SEQ ID NO: 242031 - DNA, 57 bp, Artificial
  Synthetic oligonucleotide
gtgagtacgaaaaaacattgacaactttaagctaagcagccaacaagataaagaata

SEQ ID NO: 242032 - DNA, 57 bp, Artificial
  Synthetic oligonucleotide
gattttggttggtgtttgcataataatattagctttattgggttgttatttgcctga

SEQ ID NO: 242033 - DNA, 56 bp, Artificial
  Synthetic oligonucleotide
gagaaaagaaagtccctactcctatgtcttgttttggagaggattgataggagtgt

SEQ ID NO: 242034 - DNA, 60 bp, Artificial
  Synthetic oligonucleotide
gactttacttgaatatgacctaagaattgcagatactactgttcatcgtattcttgaaga

SEQ ID NO: 242035 - DNA, 59 bp, Artificial
  Synthetic oligonucleotide
gactttaaggcaagcagcttagaaggttaggcgaagcatttgatgcttcgctggccttt

SEQ ID NO: 242036 - DNA, 60 bp, Artificial
  Synthetic oligonucleotide
gacttaaaacagtataagtgtgtcttctgtatcttatagatctttcggtattgtcagaca

SEQ ID NO: 242037 - DNA, 56 bp, Artificial
  Synthetic oligonucleotide
gcaaaaaggccctatacaagctattccgtttgcagcaaataaatagggattggaat

SEQ ID NO: 242038 - DNA, 56 bp, Artificial
  Synthetic oligonucleotide
gactgacacgcaatgtgtcgctcttaatataaggacctgttaccttaaagggttta

SEQ ID NO: 242039 - DNA, 59 bp, Artificial
  Synthetic oligonucleotide
gcaaacttcataaacatcgcagattgctgttatttggggaacgccaactcccgcaacga

SEQ ID NO: 242040 - DNA, 55 bp, Artificial
  Synthetic oligonucleotide
gactactatcaaacaatagcaaacaaactaaaactacggctataactaaactatc

SEQ ID NO: 242041 - DNA, 57 bp, Artificial
  Synthetic oligonucleotide
gcaaagctctagatattattaacaaggtaacagaagatgtttctagtaaattagagg

SEQ ID NO: 242042 - DNA, 54 bp, Artificial
  Synthetic oligonucleotide
gtgataataatcgatctttaggttttaatgaatacgtttgttacgacattaaaa

SEQ ID NO: 242043 - DNA, 60 bp, Artificial
  Synthetic oligonucleotide
gcaaatgatgtctcatgcctctgaatgtgatgttatcaaggtatccattgtttgttataa

SEQ ID NO: 242044 - DNA, 60 bp, Artificial
  Synthetic oligonucleotide
gcaaattaggcttattagatagaagttattctactgatactgatactagtgatatgtcaa

SEQ ID NO: 242045 - DNA, 56 bp, Artificial
  Synthetic oligonucleotide
gacggataaatcctagtgccttcagttaattcgcggccataatcaaaatcggacgg

SEQ ID NO: 242046 - DNA, 59 bp, Artificial
  Synthetic oligonucleotide
gcaactaggatttgcagagacttatagtagaattaagaggtttaacatagataagggca

SEQ ID NO: 242047 - DNA, 60 bp, Artificial
  Synthetic oligonucleotide
gaccctacaacttcgctcaaactcgtaaagccatacgcagcaacacagggtgcagcaagt

SEQ ID NO: 242048 - DNA, 60 bp, Artificial
  Synthetic oligonucleotide
gcaagatcaatagacttgtctctttttatgagattacacatacgttcaacttccatatct

SEQ ID NO: 242049 - DNA, 52 bp, Artificial
  Synthetic oligonucleotide
gaccaccgaatttactaagaaagaaacacttacaagaagagccctggtaaaa

SEQ ID NO: 242050 - DNA, 54 bp, Artificial
  Synthetic oligonucleotide
gacatttaactttgtccatactaatttaattagtacgagcactaaaataacatt

SEQ ID NO: 242051 - DNA, 60 bp, Artificial
  Synthetic oligonucleotide
gacattgtcagaattggtcataagctcaatacagtcccctttaagatatgcatgcacctc

SEQ ID NO: 242052 - DNA, 60 bp, Artificial
  Synthetic oligonucleotide
gacagggagcggtcagagactcacagtatggaatcagagacaagcatagcctcgtcagca

SEQ ID NO: 242053 - DNA, 60 bp, Artificial
  Synthetic oligonucleotide
gtgcaggacttagcaataccggagattgttcattatcacttaagctatacgatgtctcta

SEQ ID NO: 242054 - DNA, 53 bp, Artificial
  Synthetic oligonucleotide
gacaagggtttagacgtgaccaccctccccttagaacctgtagtggcgccctc

SEQ ID NO: 242055 - DNA, 57 bp, Artificial
  Synthetic oligonucleotide
gacaaggaggatttaattactctcataggatccttatcgtctacaaggcccgttgta

SEQ ID NO: 242056 - DNA, 58 bp, Artificial
  Synthetic oligonucleotide
gcaagctcttcttcggtacgaatgagataaatcccgtcttaaataatacgatgaacag

SEQ ID NO: 242057 - DNA, 58 bp, Artificial
  Synthetic oligonucleotide
gaattttactatgaatacataaaaagactttctgctgtccatgaagttgagaataaag

SEQ ID NO: 242058 - DNA, 59 bp, Artificial
  Synthetic oligonucleotide
ggagctcaaatattgtgaggaatacttttataactgggattattattcgctgaacagaa

SEQ ID NO: 242059 - DNA, 60 bp, Artificial
  Synthetic oligonucleotide
ggaggtgaatgctaacttcttggttaatactgatgctaagtcacgaaagtgtagggagca

SEQ ID NO: 242060 - DNA, 59 bp, Artificial
  Synthetic oligonucleotide
ggagtccttttgtcctccaagaggattatattggtggtagtgcagtacttggagctcaa

SEQ ID NO: 242061 - DNA, 57 bp, Artificial
  Synthetic oligonucleotide
ggagtcgggctgtctgtacttgaacagtgccggatactgaaacttccacgggcaact

SEQ ID NO: 242062 - DNA, 60 bp, Artificial
  Synthetic oligonucleotide
ggatacgcatatttgttctgatgaggaggaacataattgttttgatggtcctattcccac

SEQ ID NO: 242063 - DNA, 54 bp, Artificial
  Synthetic oligonucleotide
cgccttttagtagcttcactcatctcttaaacttttattccagaactataaaat

SEQ ID NO: 242064 - DNA, 55 bp, Artificial
  Synthetic oligonucleotide
gtgcagttaatattagaactatttattttagcgttatctagaaagggataattac

SEQ ID NO: 242065 - DNA, 57 bp, Artificial
  Synthetic oligonucleotide
ggatatcctaaaataaggattctatttaatctcggtttatgaaagcatcacaacaaa

SEQ ID NO: 242066 - DNA, 60 bp, Artificial
  Synthetic oligonucleotide
cgccttccactatgctaaactccaattaatctacatggcttaatgattcactttacatgg

SEQ ID NO: 242067 - DNA, 60 bp, Artificial
  Synthetic oligonucleotide
cgcctgctgcaagctttaactgtgctttgattaaaattgatgttaatggtagagctaagc

SEQ ID NO: 242068 - DNA, 55 bp, Artificial
  Synthetic oligonucleotide
ggatggtaagagaatggggaagaataggttactgggtatacgttgcagaacgtta

SEQ ID NO: 242069 - DNA, 55 bp, Artificial
  Synthetic oligonucleotide
cgccgggtttactcattaaatccctcaagagcatccatggcgcccgtaaaaatcc

SEQ ID NO: 242070 - DNA, 60 bp, Artificial
  Synthetic oligonucleotide
ggattctgcatctactaatcctgatgagtctgcaaaaggacctaatcttaccgtaataag

SEQ ID NO: 242071 - DNA, 60 bp, Artificial
  Synthetic oligonucleotide
ggatttgctccagttttatcgcatttgtttacaaatgcaaggcgtggcacgctgtatctt

SEQ ID NO: 242072 - DNA, 56 bp, Artificial
  Synthetic oligonucleotide
cgcatcttagcaaccattttaataaagaagtactacttgcaaagggatatacccta

SEQ ID NO: 242073 - DNA, 59 bp, Artificial
  Synthetic oligonucleotide
ggatttgctccggttttatcacacttgtttacaaatgcaaggcgcggcacactatatct

SEQ ID NO: 242074 - DNA, 56 bp, Artificial
  Synthetic oligonucleotide
cgcagttggttattgtaccctatatggggatacttgtgggggattagctttgattg

SEQ ID NO: 242075 - DNA, 60 bp, Artificial
  Synthetic oligonucleotide
gtgcccagaaaatcaaaatatgcagtgtcaattttagctatccccatatattcttgtttg

SEQ ID NO: 242076 - DNA, 60 bp, Artificial
  Synthetic oligonucleotide
cgcaaatatgcggaagaatgctaaggttgcggctgctattgttttgagggggatggctaa

SEQ ID NO: 242077 - DNA, 60 bp, Artificial
  Synthetic oligonucleotide
ggcaagtgaatttgtagagtgtattgagtgtatagagcttgagattaaaaccgaccaggc

SEQ ID NO: 242078 - DNA, 60 bp, Artificial
  Synthetic oligonucleotide
ggcaatagtagtaattcctattgcgatatctattctagttccttatgttgtgtctctgat

SEQ ID NO: 242079 - DNA, 58 bp, Artificial
  Synthetic oligonucleotide
cgattctggtaacaaatctagtattaccgtctgaccaaaaccaattagcatcgcgata

SEQ ID NO: 242080 - DNA, 59 bp, Artificial
  Synthetic oligonucleotide
cgattactgctatgagagttcagtctaacaataaagactcttcgtcaaaggttgtttca

SEQ ID NO: 242081 - DNA, 59 bp, Artificial
  Synthetic oligonucleotide
ggcaccttttgcaacttcggaagcacttttgacacagtgattaatcgcttattatgtct

SEQ ID NO: 242082 - DNA, 60 bp, Artificial
  Synthetic oligonucleotide
ggcagaagattgtctcaagaacggacttgttcttgagagcgttgaccgtaatgttagtga

SEQ ID NO: 242083 - DNA, 58 bp, Artificial
  Synthetic oligonucleotide
cgatagtgttaaacgctcaagattttgacgctaattcacgtatgttagtgctttatag

SEQ ID NO: 242084 - DNA, 60 bp, Artificial
  Synthetic oligonucleotide
cgaggttatataggatgtagtaattgctaggctccctatgcctactagtgttgatccgac

SEQ ID NO: 242085 - DNA, 60 bp, Artificial
  Synthetic oligonucleotide
ggcaggaactgcctgaagtaaagcttgtggaccatgctttagtggatgaccattctttta

SEQ ID NO: 242086 - DNA, 60 bp, Artificial
  Synthetic oligonucleotide
caccaacgacagtcttattaacagcactctcaacagtactcttcaaacccttctctgcat

SEQ ID NO: 242087 - DNA, 56 bp, Artificial
  Synthetic oligonucleotide
cgagcccgaagacgccacaaaattaactccctatttttcagaagccgcgtctgcta

SEQ ID NO: 242088 - DNA, 56 bp, Artificial
  Synthetic oligonucleotide
cgggggcatttggccaaaccattgcgtccaagatacttggggatcagagtttccta

SEQ ID NO: 242089 - DNA, 55 bp, Artificial
  Synthetic oligonucleotide
gcttgatacgtttttaagtaaatcgggctacgtacactaagtgtactcaattgta

SEQ ID NO: 242090 - DNA, 58 bp, Artificial
  Synthetic oligonucleotide
gcttgcaagtagcgagattattaaacttattaatcactttgtactaacaggcactgtt

SEQ ID NO: 242091 - DNA, 60 bp, Artificial
  Synthetic oligonucleotide
gcttgtcgatagctcttatcatcttgtctacctcgtctcctctataattacgagcaaaca

SEQ ID NO: 242092 - DNA, 59 bp, Artificial
  Synthetic oligonucleotide
gctttacttaaaagttcgtcaagttcaagatttgaatatccgtaagatgagagatgaga

SEQ ID NO: 242093 - DNA, 54 bp, Artificial
  Synthetic oligonucleotide
cgggagagcttcaaatatcgctaaaagataccccaaataatggtcttacaaacg

SEQ ID NO: 242094 - DNA, 54 bp, Artificial
  Synthetic oligonucleotide
ggaaaaatccaactgattaaatattggcttaatagattcgaatcttaaaattcc

SEQ ID NO: 242095 - DNA, 60 bp, Artificial
  Synthetic oligonucleotide
ggaaaagatgggaattctgcatctactaatcctgcggatgagtctgctaaggggcccaat

SEQ ID NO: 242096 - DNA, 54 bp, Artificial
  Synthetic oligonucleotide
ggaaacattatatctaacaacccctagtggtactttacttgagggggacataga

SEQ ID NO: 242097 - DNA, 54 bp, Artificial
  Synthetic oligonucleotide
cacatgggtgtaaactgtgggactgaaatttactataaactaaagtatcctaaa

SEQ ID NO: 242098 - DNA, 56 bp, Artificial
  Synthetic oligonucleotide
cggcgcaaatcaaaacggatcattgttagcgggagcctacgtaatatcaaccctaa

SEQ ID NO: 242099 - DNA, 60 bp, Artificial
  Synthetic oligonucleotide
ggaactatttgagcaaactgtggattgacctcaatatgcccaaatcttggccttagatca

SEQ ID NO: 242100 - DNA, 58 bp, Artificial
  Synthetic oligonucleotide
cggcattatttaaacttgctggtgtaattaatgatggtagtccaattggtgatgttaa

SEQ ID NO: 242101 - DNA, 60 bp, Artificial
  Synthetic oligonucleotide
cggcattacctccttttgcaaacgccaccgcacttgtatttgcagttgcctgatctccta

SEQ ID NO: 242102 - DNA, 60 bp, Artificial
  Synthetic oligonucleotide
ggaagatgtattccaatagatttggcgccttctaaattaaatgccgcatatatccaagct

SEQ ID NO: 242103 - DNA, 60 bp, Artificial
  Synthetic oligonucleotide
cggcaggtgtaaatacgcttgaaatggcacttggactagttggtgatatcctgattgatt

SEQ ID NO: 242104 - DNA, 52 bp, Artificial
  Synthetic oligonucleotide
cggcaattcctgtaaaactttcaatgtaggtagtaacagttgaaacccccat

SEQ ID NO: 242105 - DNA, 58 bp, Artificial
  Synthetic oligonucleotide
cggcaataacactttgctacttattggtataagcccttttaatctatctgatattgtc

SEQ ID NO: 242106 - DNA, 58 bp, Artificial
  Synthetic oligonucleotide
ggaatatgtaagctacaatccggtaatgactggtgaaaacatatcattaaacggtgga

SEQ ID NO: 242107 - DNA, 60 bp, Artificial
  Synthetic oligonucleotide
ggacaaatgcaaggcatgtttaacactcttgaagcaattggatacactcttgcaaacttg

SEQ ID NO: 242108 - DNA, 60 bp, Artificial
  Synthetic oligonucleotide
cataatgcaaataacgatgaaaaagcggtacaatcagcaggaataacagcagtaaataaa

SEQ ID NO: 242109 - DNA, 59 bp, Artificial
  Synthetic oligonucleotide
gtgcttcgccccatgtattggatatagaatcttgtccgggttgattattaccgcttcca

SEQ ID NO: 242110 - DNA, 50 bp, Artificial
  Synthetic oligonucleotide
cggaccttaaataccttctcccttacgggttaggataatacttcggagaa

SEQ ID NO: 242111 - DNA, 57 bp, Artificial
  Synthetic oligonucleotide
ggacaagcaactactacctgcggcaatggtggttcctaatagctagtaggcccccaa

SEQ ID NO: 242112 - DNA, 59 bp, Artificial
  Synthetic oligonucleotide
ggacatttctgctcctttgccagtagtattgcttccgctgaactttatagttactccaa

SEQ ID NO: 242113 - DNA, 60 bp, Artificial
  Synthetic oligonucleotide
cgcttctagcaagcttagcatagagcttagtaagattaaaagcactctaaacaatgatgg

SEQ ID NO: 242114 - DNA, 60 bp, Artificial
  Synthetic oligonucleotide
ggagataaagtactaatcatagttctttgatccgcactacatgaaattgatctatagatt

SEQ ID NO: 242115 - DNA, 60 bp, Artificial
  Synthetic oligonucleotide
cgctcagcagtaatattgcttcctttttgcctaacatgatcgcctagtactaattgaagt

SEQ ID NO: 242116 - DNA, 54 bp, Artificial
  Synthetic oligonucleotide
cgctatttctataagattttacactatttaaatcttctcccagttaatggtaaa

SEQ ID NO: 242117 - DNA, 60 bp, Artificial
  Synthetic oligonucleotide
ggctttcatgccattgctaccaggaaaatcagctgaagcctcaactttaacagccgaacg

SEQ ID NO: 242118 - DNA, 59 bp, Artificial
  Synthetic oligonucleotide
cctcactacttcagaactaaatccaatagttgagatagtattaacttcattggcaatag

SEQ ID NO: 242119 - DNA, 57 bp, Artificial
  Synthetic oligonucleotide
cctattagcaagatcaatcccaaaacaaacagtaacgctatccgaaaaaatacatca

SEQ ID NO: 242120 - DNA, 60 bp, Artificial
  Synthetic oligonucleotide
gtggaacttttagaagagatgtgcaacatgaattgcaagattctccatatttgatagatg

SEQ ID NO: 242121 - DNA, 53 bp, Artificial
  Synthetic oligonucleotide
cctattagaaaaactcttgtaacatccgtcgtaccaagtccaaaatacgagcc

SEQ ID NO: 242122 - DNA, 55 bp, Artificial
  Synthetic oligonucleotide
cctattaattagccttaactttagattcagaaccctctccttgcttaatctcgcc

SEQ ID NO: 242123 - DNA, 58 bp, Artificial
  Synthetic oligonucleotide
cctatagagcctataataccttcagaatcaccaaagaataaggctaatataccaaata

SEQ ID NO: 242124 - DNA, 56 bp, Artificial
  Synthetic oligonucleotide
cctagtttggattatactttaacaaatgctctggtcgttagtgattatataatagt

SEQ ID NO: 242125 - DNA, 60 bp, Artificial
  Synthetic oligonucleotide
cctactctagcaaatcacaacataaattaatagtactagtatccacactatcttatgtaa

SEQ ID NO: 242126 - DNA, 59 bp, Artificial
  Synthetic oligonucleotide
cctaataacatgaactataccatatggatcatgtgtaaaagttggaaattgcctaaaca

SEQ ID NO: 242127 - DNA, 56 bp, Artificial
  Synthetic oligonucleotide
cctaagtttacttatttcaatccagcagaacttaaagacgaacatactgttgagaa

SEQ ID NO: 242128 - DNA, 57 bp, Artificial
  Synthetic oligonucleotide
gggaataagagcggcagttgatactgctaagactactttaagcggattaaaagggca

SEQ ID NO: 242129 - DNA, 57 bp, Artificial
  Synthetic oligonucleotide
gggaatctattacggctttgctaagctacctaaaccatttattgtgcattacaaaga

SEQ ID NO: 242130 - DNA, 52 bp, Artificial
  Synthetic oligonucleotide
cctaaagttggggtaatagctggttgctatgtttctcgggggctaataaaac

SEQ ID NO: 242131 - DNA, 60 bp, Artificial
  Synthetic oligonucleotide
gtggagagcagatattaaatgctattgttgagacggctgatggtgataaggagggtaaga

SEQ ID NO: 242132 - DNA, 53 bp, Artificial
  Synthetic oligonucleotide
ccgtttacttacaagaaactttacattgcaaactacagtagttcttctgtatt

SEQ ID NO: 242133 - DNA, 57 bp, Artificial
  Synthetic oligonucleotide
gggagagctagatttagagcgctctaatttagaattaggatttatacgtgcgtttag

SEQ ID NO: 242134 - DNA, 54 bp, Artificial
  Synthetic oligonucleotide
gggagcgagacttaaaaaaactatagcagacgcggcttctgaaaaatagggagt

SEQ ID NO: 242135 - DNA, 57 bp, Artificial
  Synthetic oligonucleotide
ccgttagcaaacttaccacctttagctatcgctcttaacactatacctcctgctata

SEQ ID NO: 242136 - DNA, 58 bp, Artificial
  Synthetic oligonucleotide
gggagctgggatcaaactagcatggatttatgagctactccaaacgacggtttcttta

SEQ ID NO: 242137 - DNA, 56 bp, Artificial
  Synthetic oligonucleotide
gggaggataggatcctttatccaaggggattatattgtattggtggtggggcgcag

SEQ ID NO: 242138 - DNA, 58 bp, Artificial
  Synthetic oligonucleotide
gggagtagtcggctttttagttatgcatcaaactataaatggaatcttgtacatacaa

SEQ ID NO: 242139 - DNA, 55 bp, Artificial
  Synthetic oligonucleotide
gggatattttagtttgtaatgaacttcggttcccatgttaatgcccaaatgtctg

SEQ ID NO: 242140 - DNA, 55 bp, Artificial
  Synthetic oligonucleotide
ccgtatgtagatatagacctcggctacggaggattcgttggacttaaacccaaca

SEQ ID NO: 242141 - DNA, 58 bp, Artificial
  Synthetic oligonucleotide
gggatggttttgaaaatgcaaagagaagagcagttgatgctttaggagaaaccaaaga

SEQ ID NO: 242142 - DNA, 58 bp, Artificial
  Synthetic oligonucleotide
cacaattaaccggatccatactaataggggtaggagcaagcatacttgtaacatccta

SEQ ID NO: 242143 - DNA, 55 bp, Artificial
  Synthetic oligonucleotide
gggcaacttaaagataagtattgaattagaaattggctggttcgggggtcgagca

SEQ ID NO: 242144 - DNA, 60 bp, Artificial
  Synthetic oligonucleotide
gggcaatcagattagacaatacatttacaggcattgaagaatcattaatgactttcaacg

SEQ ID NO: 242145 - DNA, 57 bp, Artificial
  Synthetic oligonucleotide
gggcaccctcaaggtctgtagaacctggggcttataacggatctcagctaagcaaaa

SEQ ID NO: 242146 - DNA, 50 bp, Artificial
  Synthetic oligonucleotide
gggcagttccgtttataacgaacaaataggatgggaaactaaccccccaa

SEQ ID NO: 242147 - DNA, 60 bp, Artificial
  Synthetic oligonucleotide
ggcagtctccaaatttagcagggcgtttatgtatgttgaatcgttgttgctcagctcttt

SEQ ID NO: 242148 - DNA, 60 bp, Artificial
  Synthetic oligonucleotide
cgagcaaacatttttgctcttgcaaactcatctttaaatttgacataagtcatactagaa

SEQ ID NO: 242149 - DNA, 60 bp, Artificial
  Synthetic oligonucleotide
ggcagtgatttataaggacggggtgttaatgacgatattatataggctcaagggccagca

SEQ ID NO: 242150 - DNA, 60 bp, Artificial
  Synthetic oligonucleotide
cgacattttgaatatggagtttgatttatgagcatagttttcgattctgattttggcatt

SEQ ID NO: 242151 - DNA, 60 bp, Artificial
  Synthetic oligonucleotide
cgaatgcaatctttaggaggcttgaatagtcattaaccgtgaatgatacacttttaatgc

SEQ ID NO: 242152 - DNA, 60 bp, Artificial
  Synthetic oligonucleotide
cgaacttgataaaattatgggttgcattgatactgcagaacaagagataagatctgccgc

SEQ ID NO: 242153 - DNA, 56 bp, Artificial
  Synthetic oligonucleotide
gtggccgaagggaatcctcttgaagaaagtatgatattattcaattaggttaggga

SEQ ID NO: 242154 - DNA, 59 bp, Artificial
  Synthetic oligonucleotide
cgaaagcaccgccaacgtgccgccaggaaggatatcaatagtcggatcaacaccagtag

SEQ ID NO: 242155 - DNA, 60 bp, Artificial
  Synthetic oligonucleotide
cgaaaaatggatttgtgttgtctgccttagtatgtgctaggccatgtgctaacatatata

SEQ ID NO: 242156 - DNA, 58 bp, Artificial
  Synthetic oligonucleotide
cgaaaaaggcgctaatccaaatatcagagatagcgacaataaactacccatagattac

SEQ ID NO: 242157 - DNA, 60 bp, Artificial
  Synthetic oligonucleotide
ccttgtaatctagtaatagcctcctcataagagcgtccataaccagaaatatgatattcc

SEQ ID NO: 242158 - DNA, 60 bp, Artificial
  Synthetic oligonucleotide
ccttcaccaggcataaatgttggctttgtagtcataaatcattaacaccaccagcttata

SEQ ID NO: 242159 - DNA, 59 bp, Artificial
  Synthetic oligonucleotide
ccttacttctcacacgatgcacttagttatagtgccctctccctcgtagagatccaaaa

SEQ ID NO: 242160 - DNA, 60 bp, Artificial
  Synthetic oligonucleotide
ccttaagatttagagttgcattcatttatatctctagcatgagtcgtgcctaaactacta

SEQ ID NO: 242161 - DNA, 55 bp, Artificial
  Synthetic oligonucleotide
ccttaaaacacattgaccctatatctggatggtttgtacacctactggtaataag

SEQ ID NO: 242162 - DNA, 60 bp, Artificial
  Synthetic oligonucleotide
cctgtgaagataagacgttgaatgacatataaaatgtatgccagagatttagagattcac

SEQ ID NO: 242163 - DNA, 57 bp, Artificial
  Synthetic oligonucleotide
cctgtaattactaggcagatggtattaaatgagcttgtaaaagcgggtattaataga

SEQ ID NO: 242164 - DNA, 55 bp, Artificial
  Synthetic oligonucleotide
caattttacaatgtagaagaaagtacgcacaaaaaactgctaaaacttgtattca

SEQ ID NO: 242165 - DNA, 54 bp, Artificial
  Synthetic oligonucleotide
cctgtaatcatatcgccaaaactcacaaatacgtccaaaaatcctttccctaaa

SEQ ID NO: 242166 - DNA, 54 bp, Artificial
  Synthetic oligonucleotide
cctggtcttaatatcagtacgttatcttttaggtcaaacccaaccacagttgat

SEQ ID NO: 242167 - DNA, 60 bp, Artificial
  Synthetic oligonucleotide
cctggtccgcagcagcacctttatgagctgcagccccaacttccccaatatctttgcttc

SEQ ID NO: 242168 - DNA, 60 bp, Artificial
  Synthetic oligonucleotide
ggctcaaactcaattgactttgcgtacacaatacatacagatattggggatcaagcactt

SEQ ID NO: 242169 - DNA, 51 bp, Artificial
  Synthetic oligonucleotide
cctgcactgttttcaaaaatccacaaattgaccccttttagtagtagtttt

SEQ ID NO: 242170 - DNA, 58 bp, Artificial
  Synthetic oligonucleotide
ggctgagggggctattaaagaagttagcgagttgttggataagctggtaacagctgta

SEQ ID NO: 242171 - DNA, 56 bp, Artificial
  Synthetic oligonucleotide
cctgcaaaaatttgtataatctgaaattgtacattaatgctaacctaagaaaatta

SEQ ID NO: 242172 - DNA, 57 bp, Artificial
  Synthetic oligonucleotide
cctgaagtaaagcttttgaccatgctctagtagatgaccgttcttgtagaacctaaa

SEQ ID NO: 242173 - DNA, 59 bp, Artificial
  Synthetic oligonucleotide
ggcttctgctgaacaacttcttgatggctcttcagtaaaaattgcgtagttagtaataa

SEQ ID NO: 242174 - DNA, 60 bp, Artificial
  Synthetic oligonucleotide
ggcttgaaagctcatttggcagcgaaaaagcaaatattgtcagcgagggcataacattta

SEQ ID NO: 242175 - DNA, 58 bp, Artificial
  Synthetic oligonucleotide
caattgaaatggttggtataccaatcctattattagattctcctaaagacaccgcaga

SEQ ID NO: 242176 - DNA, 58 bp, Artificial
  Synthetic oligonucleotide
cctcattatagtcacgcactgggggtacagcacgataattaggatcttttaaactgat

SEQ ID NO: 242177 - DNA, 60 bp, Artificial
  Synthetic oligonucleotide
ggctttcaaagaattgttttagtcagacgcagtacatgaatcaatagcaaataataccgc

SEQ ID NO: 242178 - DNA, 57 bp, Artificial
  Synthetic oligonucleotide
gcgcacccttctcaccaaagcttccaagcagccgcaacaatcccctttatccccttc

SEQ ID NO: 242179 - DNA, 59 bp, Artificial
  Synthetic oligonucleotide
ctataaaatagacatcgaccaaagttaaggatgcttatagttaatagcaccacttgcta

SEQ ID NO: 242180 - DNA, 60 bp, Artificial
  Synthetic oligonucleotide
ctagtttatctcgagccacatctagcatatctttagcagacccccaagaattagttgctt

SEQ ID NO: 242181 - DNA, 56 bp, Artificial
  Synthetic oligonucleotide
ctagtcctagcttagggattattttaacaaatgtactagttgtaagccactacata

SEQ ID NO: 242182 - DNA, 60 bp, Artificial
  Synthetic oligonucleotide
gcgctcatagtaagttgcccgtggaagtttcagtatccggcactgttcaagtacagacag

SEQ ID NO: 242183 - DNA, 59 bp, Artificial
  Synthetic oligonucleotide
ctagtaaagatagactgcttgtaattatgtctgggtcttcataggcaaatgcaaaaacc

SEQ ID NO: 242184 - DNA, 59 bp, Artificial
  Synthetic oligonucleotide
ctaggcacagcactctttaacattgtgctaagctgagtgtacttttcgtctagttttaa

SEQ ID NO: 242185 - DNA, 60 bp, Artificial
  Synthetic oligonucleotide
ctaggagtaccatcaaatcttgaatatggtggcacaactagtagtgatacgctttattct

SEQ ID NO: 242186 - DNA, 60 bp, Artificial
  Synthetic oligonucleotide
caattattcaaacactagaatctttggctaaatatgaggcgcaactatcagattatgtta

SEQ ID NO: 242187 - DNA, 57 bp, Artificial
  Synthetic oligonucleotide
ctagccaatagaatacaagcgcaagttccttttagtatatacagtccaacttttggc

SEQ ID NO: 242188 - DNA, 54 bp, Artificial
  Synthetic oligonucleotide
ctagcagtaaagacaaaatagagaattaccctgctaaagggtatccgtataaac

SEQ ID NO: 242189 - DNA, 60 bp, Artificial
  Synthetic oligonucleotide
ctagcaagcccaataacaagagcagcggttagcagactttcagaacctttcacaaacgca

SEQ ID NO: 242190 - DNA, 57 bp, Artificial
  Synthetic oligonucleotide
ctagaccacattagtataaactcaaatattggctactataatataggggctttatac

SEQ ID NO: 242191 - DNA, 59 bp, Artificial
  Synthetic oligonucleotide
ctacttgaatatgacctaagaattgcagatactactgttcatcgtattatttaagacgg

SEQ ID NO: 242192 - DNA, 59 bp, Artificial
  Synthetic oligonucleotide
ctacgatgttcttgatgggacaggaattattaagctggcgcctgattacataagaaccg

SEQ ID NO: 242193 - DNA, 60 bp, Artificial
  Synthetic oligonucleotide
gcggtaactagtgcaccaattggcatgcctgtgttagacagtattgctgggttaacagct

SEQ ID NO: 242194 - DNA, 60 bp, Artificial
  Synthetic oligonucleotide
ctacgagttgaaatagttctcggacatccttaactcaggcggtatgacaggcagtgtgca

SEQ ID NO: 242195 - DNA, 55 bp, Artificial
  Synthetic oligonucleotide
gcgtacgccctactttagaagttcacactaattaggacaaccagaaatagttata

SEQ ID NO: 242196 - DNA, 54 bp, Artificial
  Synthetic oligonucleotide
ctacccctgatcttatttggagaggattaataggggtgttggggactattggta

SEQ ID NO: 242197 - DNA, 54 bp, Artificial
  Synthetic oligonucleotide
gtggggtttaattgctcgggatttgttaaatgggtggcggattcgatttatcaa

SEQ ID NO: 242198 - DNA, 59 bp, Artificial
  Synthetic oligonucleotide
ctaccactagctagctcccaaagccgcttcctttgctcactcctcgatcttacttatct

SEQ ID NO: 242199 - DNA, 60 bp, Artificial
  Synthetic oligonucleotide
ctacagcttagtggagctagagacaatgcatatacttcagcaattgagtgcctgctcaaa

SEQ ID NO: 242200 - DNA, 59 bp, Artificial
  Synthetic oligonucleotide
ctacaccataactcgcaatggactcacttggggtgagtatacttattatgaatacctta

SEQ ID NO: 242201 - DNA, 58 bp, Artificial
  Synthetic oligonucleotide
gcgtcccaaaactctagcggtatctatcatagactcttttgagcccatttgattaccc

SEQ ID NO: 242202 - DNA, 60 bp, Artificial
  Synthetic oligonucleotide
ctacaacttagtggagctaggtacaatgcatatacttctgcaattgagtgtatgctaaaa

SEQ ID NO: 242203 - DNA, 59 bp, Artificial
  Synthetic oligonucleotide
ctacaaatgaaagattctcttaagatagttcaaagctctactgataagaatggtccttg

SEQ ID NO: 242204 - DNA, 56 bp, Artificial
  Synthetic oligonucleotide
ctaattccagttgaatattccttgatgtttcgaggaatttaccagctactcttcgg

SEQ ID NO: 242205 - DNA, 60 bp, Artificial
  Synthetic oligonucleotide
ctaattaatgttaatgctcaaggcagtaaaactgcatcagttgcaaatggacttaatgca

SEQ ID NO: 242206 - DNA, 60 bp, Artificial
  Synthetic oligonucleotide
ctccactcactgctcctattgatgcacttactttagcggcctctgcttcttgggccctat

SEQ ID NO: 242207 - DNA, 60 bp, Artificial
  Synthetic oligonucleotide
gcctgtatatttgttataaatggaatctaggctagattgatatgttttagttgtgctaaa

SEQ ID NO: 242208 - DNA, 60 bp, Artificial
  Synthetic oligonucleotide
caattagaaatagtgataagagcgtacgatcttgctcctcaaggatttatggtacacaga

SEQ ID NO: 242209 - DNA, 60 bp, Artificial
  Synthetic oligonucleotide
gccttatcagcaaccttagcatcattatccacaacttctccaattgcatcagtaccactt

SEQ ID NO: 242210 - DNA, 60 bp, Artificial
  Synthetic oligonucleotide
ctcacaagcaattgttacaacatgttggatcaagaacaggatttttgggatttatccatg

SEQ ID NO: 242211 - DNA, 60 bp, Artificial
  Synthetic oligonucleotide
ctcaagtcaagatcatgatcgtgactcttataagaatcttcttgtgtatgccctaagctt

SEQ ID NO: 242212 - DNA, 60 bp, Artificial
  Synthetic oligonucleotide
gccttctagtaaagacagactgcttgtaatcatgtctgggtcttcataggcaaatgcaaa

SEQ ID NO: 242213 - DNA, 53 bp, Artificial
  Synthetic oligonucleotide
gcctttacttcgtcttcagttatagttccgtacattaggtcttttagagaaat

SEQ ID NO: 242214 - DNA, 59 bp, Artificial
  Synthetic oligonucleotide
ctatttcatctcgtataagattgatatccttttcttcaagtagcaattcgttcttaaga

SEQ ID NO: 242215 - DNA, 60 bp, Artificial
  Synthetic oligonucleotide
ctattggtagtatcactaacaataagggcatcagcaagcatgtaagggctactagtatgc

SEQ ID NO: 242216 - DNA, 60 bp, Artificial
  Synthetic oligonucleotide
ctattggcactaattatgctggtgatgctaattcgtctagtaattgttttgtgtataata

SEQ ID NO: 242217 - DNA, 60 bp, Artificial
  Synthetic oligonucleotide
ctattcctgattgctatcaccaatgtactcaataccttacttactgcacttgctactaca

SEQ ID NO: 242218 - DNA, 60 bp, Artificial
  Synthetic oligonucleotide
gcgaggctatgtgggctgctgaaatcgtgcctattcctatccccattattgtaagtccgg

SEQ ID NO: 242219 - DNA, 58 bp, Artificial
  Synthetic oligonucleotide
cataatattcaattacccacattcttagcattttttgggggcacaagatttgtgccaa

SEQ ID NO: 242220 - DNA, 60 bp, Artificial
  Synthetic oligonucleotide
caattaaggctgctgcggctagtgcagtaaataaggtattaggaatattggatatgatta

SEQ ID NO: 242221 - DNA, 57 bp, Artificial
  Synthetic oligonucleotide
gcgaggttatgtaggatcctgcaatcgtgagaccccctattcccgttagtataaatc

SEQ ID NO: 242222 - DNA, 60 bp, Artificial
  Synthetic oligonucleotide
ctattaatactgcattcagtccttctgctggtacattagcatgagttgccaatttgccat

SEQ ID NO: 242223 - DNA, 54 bp, Artificial
  Synthetic oligonucleotide
gcgatcttaccttctttgtccctatacttatctttacactctcttaactttttc

SEQ ID NO: 242224 - DNA, 54 bp, Artificial
  Synthetic oligonucleotide
ctatggaattacattaaatcccgggctatttgccgaaactattaagctaatatt

SEQ ID NO: 242225 - DNA, 60 bp, Artificial
  Synthetic oligonucleotide
ctatgaatatccactaagagtattgccggtgtatgaatgggataaggtattgggattcaa

SEQ ID NO: 242226 - DNA, 60 bp, Artificial
  Synthetic oligonucleotide
ctatcttcaatatcagtccacttttaagcagcaagttcagatattttcataccggtaaga

SEQ ID NO: 242227 - DNA, 60 bp, Artificial
  Synthetic oligonucleotide
ctatctcctattcaagagttcataatagaatttagagatagcgctgagttcacgcttgtt

SEQ ID NO: 242228 - DNA, 60 bp, Artificial
  Synthetic oligonucleotide
ctatcagcattgttagaactaaacttaccagccttagtcatagccttaagtgcaacagct

SEQ ID NO: 242229 - DNA, 59 bp, Artificial
  Synthetic oligonucleotide
ctatattttgggttcatatacaccatgttatacgcaaagttttctgctaaatgtagctc

SEQ ID NO: 242230 - DNA, 60 bp, Artificial
  Synthetic oligonucleotide
ctatataaatagctatgcttcaattaggtgtgtaaatcgcgtcatggtatgaaaccgcaa

SEQ ID NO: 242231 - DNA, 58 bp, Artificial
  Synthetic oligonucleotide
caatgggcctcaaacaaatattcaatctttccatgaaatttgggcattaaaagatgag

SEQ ID NO: 242232 - DNA, 57 bp, Artificial
  Synthetic oligonucleotide
gcgattatgaaaaatcaaataagtcctacagacaggctactaatcaaattagaaacc

SEQ ID NO: 242233 - DNA, 60 bp, Artificial
  Synthetic oligonucleotide
ctatagtaagatcaatttcattgctttcaataggctcctccaattcaccactttcaccgc

SEQ ID NO: 242234 - DNA, 58 bp, Artificial
  Synthetic oligonucleotide
gcgatttttctatatatgtatctaggatttcttccttattagttgcagtttctctaac

SEQ ID NO: 242235 - DNA, 54 bp, Artificial
  Synthetic oligonucleotide
ctataagttcgttttctataggctttagatctttcggtatttgcggataactgt

SEQ ID NO: 242236 - DNA, 60 bp, Artificial
  Synthetic oligonucleotide
cgttaaacatgtagctgttaccaatgctcctataggcatccccgcatgagagagtatata

SEQ ID NO: 242237 - DNA, 57 bp, Artificial
  Synthetic oligonucleotide
gctattgggcatttgatagtccaaaatggtttaaatgccagtccggctcaaaacgga

SEQ ID NO: 242238 - DNA, 58 bp, Artificial
  Synthetic oligonucleotide
cgtgcaagtagaaaatcttgaggctgttgaggacccacagttagatttaggggcacaa

SEQ ID NO: 242239 - DNA, 57 bp, Artificial
  Synthetic oligonucleotide
gctcatacgactcggttaaaaaattgccttatgacgagcttttagaagtcaatagac

SEQ ID NO: 242240 - DNA, 60 bp, Artificial
  Synthetic oligonucleotide
cgtgagaaaagaggataaaatgcttgatttagcattcaatgatagaattgctaccaaaat

SEQ ID NO: 242241 - DNA, 55 bp, Artificial
  Synthetic oligonucleotide
gctcctactttaggaagtttgcttaataacagtttaataattactgattatctta

SEQ ID NO: 242242 - DNA, 60 bp, Artificial
  Synthetic oligonucleotide
caatgctcctgattcccttagactagcaagattaggctcacgcccttccgtatctcttgt

SEQ ID NO: 242243 - DNA, 57 bp, Artificial
  Synthetic oligonucleotide
cgtctatccattaaatccgaagcttattaagttcaagactagtaagtatatgttgtc

SEQ ID NO: 242244 - DNA, 55 bp, Artificial
  Synthetic oligonucleotide
gctcgttaattaagtaattctgtccccatatttttcgtggagctatatttttgct

SEQ ID NO: 242245 - DNA, 56 bp, Artificial
  Synthetic oligonucleotide
cgtccagtcttcggacgattcttttctaaccccaccatattcaaatgttagctaca

SEQ ID NO: 242246 - DNA, 58 bp, Artificial
  Synthetic oligonucleotide
cgtcatagcaaggagtcaggcattcttatatttaagactttataagaaagtgttgtcg

SEQ ID NO: 242247 - DNA, 60 bp, Artificial
  Synthetic oligonucleotide
cgtcacactatccttatcagcaaccttcgcatcattatccacaacttctccaattgcatc

SEQ ID NO: 242248 - DNA, 60 bp, Artificial
  Synthetic oligonucleotide
gctgaaatgggaacatctcttagatatcaagactttcttgcaccagttagcattatcagg

SEQ ID NO: 242249 - DNA, 57 bp, Artificial
  Synthetic oligonucleotide
cgtagtgagtgtagtcaccccaagtgattccctcgtactcgtagagtttaatatcca

SEQ ID NO: 242250 - DNA, 60 bp, Artificial
  Synthetic oligonucleotide
gctgcgtttgctacgttgaagaaggatgatcagattgctgctgctattgttttgcggggg

SEQ ID NO: 242251 - DNA, 55 bp, Artificial
  Synthetic oligonucleotide
cgtaattggtgacccaaaaactggcggatacaaaccagggctagctgaatcttgg

SEQ ID NO: 242252 - DNA, 59 bp, Artificial
  Synthetic oligonucleotide
cggttattttatcttgcatagacttgtggacttcaacaaaagattgatctagagccatt

SEQ ID NO: 242253 - DNA, 60 bp, Artificial
  Synthetic oligonucleotide
gtccgtcatttaagcactataatagagccaattggcactccttttgtatgtaaattgcca

SEQ ID NO: 242254 - DNA, 56 bp, Artificial
  Synthetic oligonucleotide
cggtggcaacttaacttatttgaccccatacggtttgtggagcgaattcagctcta

SEQ ID NO: 242255 - DNA, 54 bp, Artificial
  Synthetic oligonucleotide
gctgggggagaagaagaacttttggtaacaaaacttcattctgaagtgttattg

SEQ ID NO: 242256 - DNA, 59 bp, Artificial
  Synthetic oligonucleotide
gctgtaagttcttgtactagaaaactgatattgtctatttgcgaatcaaggtctccttc

SEQ ID NO: 242257 - DNA, 60 bp, Artificial
  Synthetic oligonucleotide
gctgtattcatgtataagcgagttatattctccagatattaagtattctggcgaagaggg

SEQ ID NO: 242258 - DNA, 60 bp, Artificial
  Synthetic oligonucleotide
gcttaatataactattaactaccatagacatctaggtattaacatgggcactgaagtcta

SEQ ID NO: 242259 - DNA, 60 bp, Artificial
  Synthetic oligonucleotide
cggtaactaatgctccaattggcatacctgtgctagataatattgccggattaacagcta

SEQ ID NO: 242260 - DNA, 59 bp, Artificial
  Synthetic oligonucleotide
gcttataagggaatcgaattggatataactcaaatcaaaaggctatctcctattcaaga

SEQ ID NO: 242261 - DNA, 58 bp, Artificial
  Synthetic oligonucleotide
gcttatatccagtcctcagggtaataacttgggacagctagaaatagtagtaagagcg

SEQ ID NO: 242262 - DNA, 57 bp, Artificial
  Synthetic oligonucleotide
gcttatctaatgaatcactagaatcaacccattaaaactcctcccttccctctaata

SEQ ID NO: 242263 - DNA, 60 bp, Artificial
  Synthetic oligonucleotide
gcttcaatttgtatatcatgtgcacctattggaaaggtcaatccaaagccaaatagtgat

SEQ ID NO: 242264 - DNA, 58 bp, Artificial
  Synthetic oligonucleotide
cagggactttgggaactcccatgagcactgattatcccggtggagattttagtgtaga

SEQ ID NO: 242265 - DNA, 60 bp, Artificial
  Synthetic oligonucleotide
gcttctctccatcctgctcagcctcaccagcagccttaacaatcgcacttaatatctgct

SEQ ID NO: 242266 - DNA, 56 bp, Artificial
  Synthetic oligonucleotide
gcgttgacaaaaaaagttagtgtatcaagctcttcattactaagtccaagaatact

SEQ ID NO: 242267 - DNA, 57 bp, Artificial
  Synthetic oligonucleotide
ctaatcccagtttagatttcaccctgtcaaatgctttaatgaccagtaattgtataa

SEQ ID NO: 242268 - DNA, 59 bp, Artificial
  Synthetic oligonucleotide
ctaatatcttgtctaacaagcatattctacctatcccgatcactattacataacttaac

SEQ ID NO: 242269 - DNA, 57 bp, Artificial
  Synthetic oligonucleotide
ctaatataatctataacttgaccattttttccctctacagagattggaaattgccta

SEQ ID NO: 242270 - DNA, 57 bp, Artificial
  Synthetic oligonucleotide
ctaatagattaagagacatatttagaaatgaattgccgatgttttatttagtaacta

SEQ ID NO: 242271 - DNA, 58 bp, Artificial
  Synthetic oligonucleotide
ctaagtaattggtgagtagtgctataagaattaataagatgttcactaattagaatta

SEQ ID NO: 242272 - DNA, 60 bp, Artificial
  Synthetic oligonucleotide
ctaaggcaggaactgcctgaagtaaagcttgtggaccatgctctagtggatgaccgttct

SEQ ID NO: 242273 - DNA, 60 bp, Artificial
  Synthetic oligonucleotide
ctaagaatccgattgaggcggctattgggagttcgggtgagcagaatgctgctgcgtttg

SEQ ID NO: 242274 - DNA, 55 bp, Artificial
  Synthetic oligonucleotide
ctaactaattcagttaaagagcttacaagtcctgttgtagcagaaagtccaaaaa

SEQ ID NO: 242275 - DNA, 59 bp, Artificial
  Synthetic oligonucleotide
caggagtagttggatttttggttatgcatcaaactataaatggaatcttatacatacaa

SEQ ID NO: 242276 - DNA, 55 bp, Artificial
  Synthetic oligonucleotide
ctaaccttaaaaaggtatagcacagtgattattaaaagttagcttgtgtgacatt

SEQ ID NO: 242277 - DNA, 60 bp, Artificial
  Synthetic oligonucleotide
gctaaaaggtcttttgatgattatgctgtgtattttagtgagggctcattaagtgatgta

SEQ ID NO: 242278 - DNA, 57 bp, Artificial
  Synthetic oligonucleotide
gctaaggaacttaagataccaataatagcgttgtctcaacttactagaagtgccgag

SEQ ID NO: 242279 - DNA, 60 bp, Artificial
  Synthetic oligonucleotide
ctaaattctattatgaactcttgaataggagatagccttttgatttgagctatatccaat

SEQ ID NO: 242280 - DNA, 52 bp, Artificial
  Synthetic oligonucleotide
gctaagttctatcgctaaagaacttagctaagccccccacttaatttaaaat

SEQ ID NO: 242281 - DNA, 59 bp, Artificial
  Synthetic oligonucleotide
ctaaatcaaagattatagaaatagcttcttgtttcatcccatgatagctttttaggctc

SEQ ID NO: 242282 - DNA, 55 bp, Artificial
  Synthetic oligonucleotide
ctaaatatggtcttaaagtaaagatagtatttagttactaaaatttatgctgata

SEQ ID NO: 242283 - DNA, 60 bp, Artificial
  Synthetic oligonucleotide
gctaataataaatctggagttctggctactgctattgcggctgctaatagtagtactggt

SEQ ID NO: 242284 - DNA, 56 bp, Artificial
  Synthetic oligonucleotide
gctactgattcgttgtaaagcttcgggtttggatgaaactttgatcctaagtccca

SEQ ID NO: 242285 - DNA, 58 bp, Artificial
  Synthetic oligonucleotide
gctactgctattaaagtgcccaaagtatcaaataaatcgttaaacagcaatactaata

SEQ ID NO: 242286 - DNA, 59 bp, Artificial
  Synthetic oligonucleotide
gtcctgcacaatgggatcaacttagaagttatttatagtactgctttaggtggtattga

SEQ ID NO: 242287 - DNA, 58 bp, Artificial
  Synthetic oligonucleotide
gctacttactgttttcctaattatcacatcaagtattcctaataccttatttactgca

SEQ ID NO: 242288 - DNA, 54 bp, Artificial
  Synthetic oligonucleotide
cgtttaggtgggctgaacttggtacggtgtatcgttatgaaaaggtaggtgctc

SEQ ID NO: 242289 - DNA, 55 bp, Artificial
  Synthetic oligonucleotide
cgttgtagggagaggggtatagagcctgtgaaccctcccctgagaacctgtagtg

SEQ ID NO: 242290 - DNA, 57 bp, Artificial
  Synthetic oligonucleotide
cgttatcccactagagatatcagaaaacgtggggaacctcatataactcccgaagca

SEQ ID NO: 242291 - DNA, 59 bp, Artificial
  Synthetic oligonucleotide
gctataagctcgttttctataggctttagatctttcggtatttgcggacaattgctcat

SEQ ID NO: 242292 - DNA, 56 bp, Artificial
  Synthetic oligonucleotide
cgttacattacaaagtacagtagttcttctgtatttaatgatatttattcgtataa

SEQ ID NO: 242293 - DNA, 54 bp, Artificial
  Synthetic oligonucleotide
cgttaataagattcgatatagacgtaagtccgagttcaagataatttttgggta

SEQ ID NO: 242294 - DNA, 55 bp, Artificial
  Synthetic oligonucleotide
gctataagtaaagcatctttgcaatttaatttacttaccaaaagtaacaaagata

SEQ ID NO: 242295 - DNA, 58 bp, Artificial
  Synthetic oligonucleotide
gctatcaataaagctaaatctagattaagaattgtcaatttacataataaagtttcga

SEQ ID NO: 242296 - DNA, 60 bp, Artificial
  Synthetic oligonucleotide
tgtaccagttcacgttattgaaaagcatgggcaagagtggacaaatcctgagaatatggt

SEQ ID NO: 242297 - DNA, 57 bp, Artificial
  Synthetic oligonucleotide
cagctccccctagtgttccaggtagcccatagataaattccaggccgcttaaactgc

SEQ ID NO: 242298 - DNA, 60 bp, Artificial
  Synthetic oligonucleotide
tgtacgcctcatactgcagtctctaatgatgttacaatgagtttctactatggcgtcgac

SEQ ID NO: 242299 - DNA, 60 bp, Artificial
  Synthetic oligonucleotide
tgtatatcatgtgcacctcttgacaacgttaatccaaacaagctaaagagccatactaat

SEQ ID NO: 242300 - DNA, 59 bp, Artificial
  Synthetic oligonucleotide
acagagagtgttcttaatgatagttctatccctacaagaagagcgaccccagattatat

SEQ ID NO: 242301 - DNA, 55 bp, Artificial
  Synthetic oligonucleotide
acagactccctctttacatgatgattaaacgggtcttttttaacagcattacctc

SEQ ID NO: 242302 - DNA, 54 bp, Artificial
  Synthetic oligonucleotide
acacttggtaatgaacccggtaatccaagacaaattggacaaacacgagagttg

SEQ ID NO: 242303 - DNA, 60 bp, Artificial
  Synthetic oligonucleotide
acactaaataaaacgcttgctgatgatatagaagaatctaaaatggctagaagatgtttg

SEQ ID NO: 242304 - DNA, 59 bp, Artificial
  Synthetic oligonucleotide
tgtcacacaatccaacttttaatactcactgcgtatattctattaattaccacttagta

SEQ ID NO: 242305 - DNA, 59 bp, Artificial
  Synthetic oligonucleotide
tgtccaaagttcataatttacacggagtgtagcatgcgtcctactttaggacttgagat

SEQ ID NO: 242306 - DNA, 58 bp, Artificial
  Synthetic oligonucleotide
acacgctcaacccttagagtatctgccagaaaattaatttcgattgcaagacttgaaa

SEQ ID NO: 242307 - DNA, 59 bp, Artificial
  Synthetic oligonucleotide
tgtctacattactatacaagtctatttaagaaacgtgaatttagtgcgtatgagataaa

SEQ ID NO: 242308 - DNA, 60 bp, Artificial
  Synthetic oligonucleotide
cagctatgcttaaatctagtggtgctatgagtagcgaagatgcagtaaaggctgttaaga

SEQ ID NO: 242309 - DNA, 60 bp, Artificial
  Synthetic oligonucleotide
tgtctatcacaatgatagccgggctaatatttgctttcatttctaaatagctactacctc

SEQ ID NO: 242310 - DNA, 60 bp, Artificial
  Synthetic oligonucleotide
acacatgtaagttacaatcctactttcaacgatgagatcataacgctaaataatgctaaa

SEQ ID NO: 242311 - DNA, 55 bp, Artificial
  Synthetic oligonucleotide
acacaattgaattaaaagctagcaataaagatgaaatttacctaatcgaacttaa

SEQ ID NO: 242312 - DNA, 58 bp, Artificial
  Synthetic oligonucleotide
acaatgcgcaaaaccgaaaaatagctcgtacgtttcttgaaacatctagagatattca

SEQ ID NO: 242313 - DNA, 60 bp, Artificial
  Synthetic oligonucleotide
acaatgatggaattttttatacagcatcggagaatgcaagcctagaagtaataaaatatg

SEQ ID NO: 242314 - DNA, 60 bp, Artificial
  Synthetic oligonucleotide
tgtgggatgcgtttgtgaaaggttctgaaagtctgctaaccgctgctcttgttattgggc

SEQ ID NO: 242315 - DNA, 56 bp, Artificial
  Synthetic oligonucleotide
acaatagtgtgtcctttgactcgtagattggttaagaattcaaaaagtcttaatgc

SEQ ID NO: 242316 - DNA, 58 bp, Artificial
  Synthetic oligonucleotide
tgtgtatttgtaaaatcgtgattagctttagataaggatggggagtttgccttgaaga

SEQ ID NO: 242317 - DNA, 57 bp, Artificial
  Synthetic oligonucleotide
acaagagaattaacggcttttaccattcgaccagcattagcgtttctgtcgtcaagc

SEQ ID NO: 242318 - DNA, 59 bp, Artificial
  Synthetic oligonucleotide
tgtgtttactcttgatcctaagaaaagggcaatatcagatagattgaagggactactac

SEQ ID NO: 242319 - DNA, 56 bp, Artificial
  Synthetic oligonucleotide
cagctagacggaacaagtaaacagctatccgcaaataacgaaagatttaaagccta

SEQ ID NO: 242320 - DNA, 56 bp, Artificial
  Synthetic oligonucleotide
acaaccaaacttccagttacctgagcaatatctcttattcgccttaacaatctatt

SEQ ID NO: 242321 - DNA, 57 bp, Artificial
  Synthetic oligonucleotide
acaacagaatatgtagtcttcctcctaacataggtatgtattcgtttgttaagcagt

SEQ ID NO: 242322 - DNA, 60 bp, Artificial
  Synthetic oligonucleotide
tgttagacaggtcgcagtaactaatgcaccaattggcatacctgtgttagatagtattgc

SEQ ID NO: 242323 - DNA, 58 bp, Artificial
  Synthetic oligonucleotide
tgttagacattaatcataagattttgttcaccgggttagaagttgtagtgatggtgat

SEQ ID NO: 242324 - DNA, 55 bp, Artificial
  Synthetic oligonucleotide
acaaagtacagtagttcttctgtatttaatgatatttattcgtataagggggata

SEQ ID NO: 242325 - DNA, 60 bp, Artificial
  Synthetic oligonucleotide
tgcttagcctgcaccaagctattgctaaggttaagagtagtcatgcttcttttatcattt

SEQ ID NO: 242326 - DNA, 53 bp, Artificial
  Synthetic oligonucleotide
tgcttgtagtgtcaacaaaaggggtaagttcaaaaatttgaccctcgtccgtg

SEQ ID NO: 242327 - DNA, 58 bp, Artificial
  Synthetic oligonucleotide
tggaacagcaaaaggaccagcacaagcaataaccggacttacaataatggggatagga

SEQ ID NO: 242328 - DNA, 52 bp, Artificial
  Synthetic oligonucleotide
acccactacgaataccttacaacttcaactaaaataggaataagcgactatt

SEQ ID NO: 242329 - DNA, 58 bp, Artificial
  Synthetic oligonucleotide
tggacgcttactagatcaaataagaaaagagcgacttcgatttgggacattagtggaa

SEQ ID NO: 242330 - DNA, 60 bp, Artificial
  Synthetic oligonucleotide
cataataattgatacgaatcccagcctagattatacactaaccaatgctttagtatgtag

SEQ ID NO: 242331 - DNA, 60 bp, Artificial
  Synthetic oligonucleotide
cagctacatagtggcaagctagagcttacaagcgaacctacaacaagagcagtgattagt

SEQ ID NO: 242332 - DNA, 60 bp, Artificial
  Synthetic oligonucleotide
accatgaattgggctgaattccccatttagcagcatctccaccgtaaggtatccaatctg

SEQ ID NO: 242333 - DNA, 57 bp, Artificial
  Synthetic oligonucleotide
tggaggagttcttgacacagcaagtgaccacttacaccctaaaaaagataagctaaa

SEQ ID NO: 242334 - DNA, 60 bp, Artificial
  Synthetic oligonucleotide
tggagtataatatgccccacttttctttctatcaagtgatctagatgtaagataaatatt

SEQ ID NO: 242335 - DNA, 60 bp, Artificial
  Synthetic oligonucleotide
accatcagtagcccccgcaatcttctttgcagcccctaccatcttctttggtgcacaaca

SEQ ID NO: 242336 - DNA, 60 bp, Artificial
  Synthetic oligonucleotide
tggatcgttaattgcaggagtgcatagtgtaatatcagctgtaaacactaagttaaaagg

SEQ ID NO: 242337 - DNA, 60 bp, Artificial
  Synthetic oligonucleotide
tggcactgatgagagctttattgtgctctttaaagcctttttacacgcaaatgtagaagt

SEQ ID NO: 242338 - DNA, 57 bp, Artificial
  Synthetic oligonucleotide
tggcagcataggtaagaatgtattttgtatccaaaccggagttactattgctatttt

SEQ ID NO: 242339 - DNA, 58 bp, Artificial
  Synthetic oligonucleotide
acattgtagggatttgctccagttttatcgcatttgtttacaaatgcaaggcgtggta

SEQ ID NO: 242340 - DNA, 57 bp, Artificial
  Synthetic oligonucleotide
tggcttaatagattcgaatctcaaaattccgtctggaaaacgtattcccgcagcaac

SEQ ID NO: 242341 - DNA, 60 bp, Artificial
  Synthetic oligonucleotide
acattattgcaacatcacttgcattcatagaatgtgaactaattgatgaagttaacaaac

SEQ ID NO: 242342 - DNA, 55 bp, Artificial
  Synthetic oligonucleotide
gtcgcaaacctttagatcagaggttaacgctaggaaagttagaagcgaattggat

SEQ ID NO: 242343 - DNA, 56 bp, Artificial
  Synthetic oligonucleotide
acattaccaagcaagtcactaccctcgaaaccaacagcctaactaacagtcttagc

SEQ ID NO: 242344 - DNA, 59 bp, Artificial
  Synthetic oligonucleotide
tggggctttgacatgtgaatatgttagtcttcgagacaatatggaaaattactttagaa

SEQ ID NO: 242345 - DNA, 54 bp, Artificial
  Synthetic oligonucleotide
tgggttcaaattacccaacaacataataaccccttcaaatggcataaatttgga

SEQ ID NO: 242346 - DNA, 55 bp, Artificial
  Synthetic oligonucleotide
tggtaaagccaacatatatctaattctaaaggaaactttactagacactagtaaa

SEQ ID NO: 242347 - DNA, 54 bp, Artificial
  Synthetic oligonucleotide
acatacaactaaagcgtaccttttgaaataagtaatagctgaaccaaccagttg

SEQ ID NO: 242348 - DNA, 60 bp, Artificial
  Synthetic oligonucleotide
tggtacaagcaaagatgctggcgatattaacgcggcaactaatgcttttgacatggcgat

SEQ ID NO: 242349 - DNA, 60 bp, Artificial
  Synthetic oligonucleotide
acagtgcttctcattgcatgcggaatttgggatgtagagtggctgtaaagagtagaagtg

SEQ ID NO: 242350 - DNA, 60 bp, Artificial
  Synthetic oligonucleotide
acagtctgctcctacattgattaaatctaatgcggcttctttagttactatgtttccagc

SEQ ID NO: 242351 - DNA, 57 bp, Artificial
  Synthetic oligonucleotide
tggttaggaaggctgttcaatcagggttgaagaaggtaggtgaagcagtgaaatcgg

SEQ ID NO: 242352 - DNA, 60 bp, Artificial
  Synthetic oligonucleotide
tgtaatgctgagaggagaataacagcacaatgttataaaaagtgctgttcgggggctgtt

SEQ ID NO: 242353 - DNA, 60 bp, Artificial
  Synthetic oligonucleotide
gtctctcattgcatgcagaatttgggatgcagagtggctttaataagcggaagtggcaat

SEQ ID NO: 242354 - DNA, 56 bp, Artificial
  Synthetic oligonucleotide
tgtacagtcacaatctttttaacaatactaagtaatcctttaacatatttgcgagt

SEQ ID NO: 242355 - DNA, 58 bp, Artificial
  Synthetic oligonucleotide
aatgtcagcatatcctgctctaacgagcataactcccttaaagttgttaaactagact

SEQ ID NO: 242356 - DNA, 51 bp, Artificial
  Synthetic oligonucleotide
aatgtataagaaagttttaaacctgataaaggtgctttaaaagcaagaaag

SEQ ID NO: 242357 - DNA, 60 bp, Artificial
  Synthetic oligonucleotide
aatgggagagtggcgagatttctgttaatgaggactctagagtaacaattagtgaggata

SEQ ID NO: 242358 - DNA, 60 bp, Artificial
  Synthetic oligonucleotide
aatggagcccgacagtgcttcagaaattatgaatccctattttgcagaggctgtgtccgc

SEQ ID NO: 242359 - DNA, 56 bp, Artificial
  Synthetic oligonucleotide
aatggaacctgtaattactaggcagatggtattaaatgagcttgtaaaagtgggta

SEQ ID NO: 242360 - DNA, 59 bp, Artificial
  Synthetic oligonucleotide
ttaaacgagcaaactacctactatttactttgctattatgctgtactactattgctagc

SEQ ID NO: 242361 - DNA, 56 bp, Artificial
  Synthetic oligonucleotide
aatgcctgaaatactttgggagtctgtatctttaacgtaagcattattttaataga

SEQ ID NO: 242362 - DNA, 59 bp, Artificial
  Synthetic oligonucleotide
ttaaaggaagttgatagtttggctctttgtagcgcatggattgacttaaattctgcgta

SEQ ID NO: 242363 - DNA, 55 bp, Artificial
  Synthetic oligonucleotide
ttaagaaagcattaacacaagtactctcttcttaggcttaccaattaaatttaga

SEQ ID NO: 242364 - DNA, 60 bp, Artificial
  Synthetic oligonucleotide
cagcattagctcgattaccaccttgagtatcaaacaactttcccgcatcctcattactat

SEQ ID NO: 242365 - DNA, 54 bp, Artificial
  Synthetic oligonucleotide
aatgacccgtatattatgaatatggttaagaccgttttagagaattttaatgta

SEQ ID NO: 242366 - DNA, 60 bp, Artificial
  Synthetic oligonucleotide
ttaaggaagctactgatggcgctaatggtaaaatcggaaatgctaatggtactgaggatg

SEQ ID NO: 242367 - DNA, 60 bp, Artificial
  Synthetic oligonucleotide
ttaaggggagcaatgctacctgtagtaagttatataggtccagcatttgctgctataatt

SEQ ID NO: 242368 - DNA, 58 bp, Artificial
  Synthetic oligonucleotide
aatctattagtgtcaatttgaatatgcgcatctttctttaatcttaataccttggccc

SEQ ID NO: 242369 - DNA, 54 bp, Artificial
  Synthetic oligonucleotide
aatctacggttttctgcaccaaacccgttaatgccatgatggttttacttacac

SEQ ID NO: 242370 - DNA, 55 bp, Artificial
  Synthetic oligonucleotide
aatcgccattttcaatacttcctacataagatcgtatttcttctttaacctccat

SEQ ID NO: 242371 - DNA, 55 bp, Artificial
  Synthetic oligonucleotide
ttaattactctcataggatccttatcgtctacaaggcccgttgtagggagagggg

SEQ ID NO: 242372 - DNA, 58 bp, Artificial
  Synthetic oligonucleotide
aatcgattatataaaatagtaaaccaatatctatcctagtatattatggcctataata

SEQ ID NO: 242373 - DNA, 49 bp, Artificial
  Synthetic oligonucleotide
ttacaaataactttacggggtatttaacgtttaagaaacctggaagtga

SEQ ID NO: 242374 - DNA, 59 bp, Artificial
  Synthetic oligonucleotide
aatcctacaacaattgccaatgaggttaatactatctcaactattggatttagttctga

SEQ ID NO: 242375 - DNA, 60 bp, Artificial
  Synthetic oligonucleotide
cagcatcatcatccttagtcccaatagcagcgtcaataggattatcagcctccgcagcct

SEQ ID NO: 242376 - DNA, 59 bp, Artificial
  Synthetic oligonucleotide
ttacaacactagtaaagatattgaaatagccttagacttattaatagattatctcgata

SEQ ID NO: 242377 - DNA, 54 bp, Artificial
  Synthetic oligonucleotide
ttacaacggttttaagctcattgtatttttggttacttttatcaccattgctac

SEQ ID NO: 242378 - DNA, 56 bp, Artificial
  Synthetic oligonucleotide
ttacaagcacaagctgggggagaagaagaacttttagtaacaaaacttcattctga

SEQ ID NO: 242379 - DNA, 58 bp, Artificial
  Synthetic oligonucleotide
ttacagcggactgttcagttttaatcttaaggtctatataatcaacatattctacaaa

SEQ ID NO: 242380 - DNA, 55 bp, Artificial
  Synthetic oligonucleotide
aatattttagagtgagtatgccctttaaaggaattttatatatgcttaaatcaaa

SEQ ID NO: 242381 - DNA, 55 bp, Artificial
  Synthetic oligonucleotide
aatattggcctaatagattcaaattttagaaccccattgggaagatgtattccaa

SEQ ID NO: 242382 - DNA, 56 bp, Artificial
  Synthetic oligonucleotide
ttacctattagttcactaccctctactccaatagcctctcttaactccttctacag

SEQ ID NO: 242383 - DNA, 58 bp, Artificial
  Synthetic oligonucleotide
acaaacgtggaggcaaaagggttattcaagaagcaaaagacaatgaggctcactatga

SEQ ID NO: 242384 - DNA, 56 bp, Artificial
  Synthetic oligonucleotide
acaaaagacgaatcttgaacaagtgtaatgctaaccgggaaaatggtgagctttca

SEQ ID NO: 242385 - DNA, 55 bp, Artificial
  Synthetic oligonucleotide
acaaaaccataacatatgaactataaaagaaatcatcaaagtcccaactaaagta

SEQ ID NO: 242386 - DNA, 59 bp, Artificial
  Synthetic oligonucleotide
cagcatagcaatatgtttaaagcccccaaataagggggccaatatattattggcatgta

SEQ ID NO: 242387 - DNA, 59 bp, Artificial
  Synthetic oligonucleotide
tgttagcagtggagagaatgacacggttaaaattgctgttgaaattggagtcactaaaa

SEQ ID NO: 242388 - DNA, 54 bp, Artificial
  Synthetic oligonucleotide
aattttaggagttgcaaatgtgttatctaacataacggttatttccccagcacg

SEQ ID NO: 242389 - DNA, 60 bp, Artificial
  Synthetic oligonucleotide
tgttcctttgcctactgatcaatgggcgattgagagtttagatttgatcactaatagatt

SEQ ID NO: 242390 - DNA, 58 bp, Artificial
  Synthetic oligonucleotide
tgttgcctttaacgtgtattcctgtataatagcttccattagctctagaaagaatttc

SEQ ID NO: 242391 - DNA, 60 bp, Artificial
  Synthetic oligonucleotide
tgttgctgtatttcttcacaacagattccataatattcaattacccacattcttagcatt

SEQ ID NO: 242392 - DNA, 60 bp, Artificial
  Synthetic oligonucleotide
aattgtgtggcttctcattgcatgcaaaatttggattgtaggatagctgtgataaacaga

SEQ ID NO: 242393 - DNA, 59 bp, Artificial
  Synthetic oligonucleotide
aattgtccaaagtaaagcctgtgcgattattctctgatgaccgttcttgtagggctgaa

SEQ ID NO: 242394 - DNA, 60 bp, Artificial
  Synthetic oligonucleotide
aattgcatcagtaccactcttgaagctccctcagctgtctttacagcttttaccagctta

SEQ ID NO: 242395 - DNA, 55 bp, Artificial
  Synthetic oligonucleotide
tgtttaacaaaacagattccaaaaccacatttaataaccttaaagacgctgcata

SEQ ID NO: 242396 - DNA, 57 bp, Artificial
  Synthetic oligonucleotide
aattgaggctaattatattgatatccttaataaggaaatttatctagctagtataac

SEQ ID NO: 242397 - DNA, 60 bp, Artificial
  Synthetic oligonucleotide
gtcttatctggaagacaagagtttcacacggcctactgatttagtgctttgctcatcata

SEQ ID NO: 242398 - DNA, 56 bp, Artificial
  Synthetic oligonucleotide
aattgaaatatttggtatattagccttattctttggtgattctgaaggtattatag

SEQ ID NO: 242399 - DNA, 60 bp, Artificial
  Synthetic oligonucleotide
aattctccttctattatgccatcagagtcatctataaattctgcctcccctcctcttggc

SEQ ID NO: 242400 - DNA, 60 bp, Artificial
  Synthetic oligonucleotide
aattcggctagaatctctaaatttgcaaatacagttcttagtgcattgcaaatggagccc

SEQ ID NO: 242401 - DNA, 58 bp, Artificial
  Synthetic oligonucleotide
tgtttactagcccaatagcatatttagacccagcatttagtgttggaggggataacac

SEQ ID NO: 242402 - DNA, 58 bp, Artificial
  Synthetic oligonucleotide
aattccagttgctcctagatctaaacgtcaaacaagacaagctgaggacgcacaaggg

SEQ ID NO: 242403 - DNA, 60 bp, Artificial
  Synthetic oligonucleotide
tgtttattgagagttgttagatactgtagttggagattattacaacaatttatctgacca

SEQ ID NO: 242404 - DNA, 60 bp, Artificial
  Synthetic oligonucleotide
ttaaaagattgcattgtctactaattgctttgctgctatgttgcaccactattgccaacc

SEQ ID NO: 242405 - DNA, 58 bp, Artificial
  Synthetic oligonucleotide
aattcaagagatctattaacccacatttatgataaaagcatagggaaatacattaaca

SEQ ID NO: 242406 - DNA, 59 bp, Artificial
  Synthetic oligonucleotide
ttaaacattcatgatcagtgttgatacccaaagatgcataatttagagttaaattgggg

SEQ ID NO: 242407 - DNA, 60 bp, Artificial
  Synthetic oligonucleotide
aattagtgctctacagttacataaaaacgcaatcatagtatcagacgaagctgcaacata

SEQ ID NO: 242408 - DNA, 58 bp, Artificial
  Synthetic oligonucleotide
gtcttggtaaggcgcataattatggaccaaccaacttatatgagatagtaataaatta

SEQ ID NO: 242409 - DNA, 59 bp, Artificial
  Synthetic oligonucleotide
aattaattatatgacttatcttgtattttgacaaaatatagcccatccaagcaccaata

SEQ ID NO: 242410 - DNA, 59 bp, Artificial
  Synthetic oligonucleotide
aattaatgcagggcgatgatcctaataatggcgtaataaatcctccaccagtattgccg

SEQ ID NO: 242411 - DNA, 60 bp, Artificial
  Synthetic oligonucleotide
aattaatcgttcacagcgggtcagtgaaccacctataatctcaaatgagaaagccatagc

SEQ ID NO: 242412 - DNA, 53 bp, Artificial
  Synthetic oligonucleotide
ttaaaccccttatattttgtatgtagtttactataagtaggttaatgtgtcaa

SEQ ID NO: 242413 - DNA, 60 bp, Artificial
  Synthetic oligonucleotide
actaagcttcagaaagatcgttataaagcacatgttaagaggagcaatgctgcctgtagt

SEQ ID NO: 242414 - DNA, 60 bp, Artificial
  Synthetic oligonucleotide
tctcttacagaaatgcttaaatgggtattgggaattatgggggcaatgtctatcacaatg

SEQ ID NO: 242415 - DNA, 57 bp, Artificial
  Synthetic oligonucleotide
acgtttgctgttctctgaaaccaactctcctttagactcaaacctagtatctgtgat

SEQ ID NO: 242416 - DNA, 60 bp, Artificial
  Synthetic oligonucleotide
tctgattagttgcaatgtgtttgaatggtgaatagctagacgagcgcttcaatattttag

SEQ ID NO: 242417 - DNA, 59 bp, Artificial
  Synthetic oligonucleotide
tctggtttagtaaaatacacaggctggattttactgtcaagagtttctaagagatctga

SEQ ID NO: 242418 - DNA, 54 bp, Artificial
  Synthetic oligonucleotide
tctgtcttacttaataaataactagaatcaacttatcaaaagtacttccttacc

SEQ ID NO: 242419 - DNA, 60 bp, Artificial
  Synthetic oligonucleotide
cagcaatcttatcattcccattcatagcagcaaaattaccacctgcctcagcagtcccaa

SEQ ID NO: 242420 - DNA, 52 bp, Artificial
  Synthetic oligonucleotide
acgtatttcaaaagtagtaatagattaactctaagtattttacttataaaca

SEQ ID NO: 242421 - DNA, 60 bp, Artificial
  Synthetic oligonucleotide
tctgttaatgaggactctagagtaacaattagtgaggatacttttgaacaccttgtagca

SEQ ID NO: 242422 - DNA, 58 bp, Artificial
  Synthetic oligonucleotide
acgtaccataactcaatctggatatccccaatacagccattataactccgctggtagg

SEQ ID NO: 242423 - DNA, 55 bp, Artificial
  Synthetic oligonucleotide
acgtacacccaactttggtggtccacacttgggacaattagaaatagtgataaga

SEQ ID NO: 242424 - DNA, 55 bp, Artificial
  Synthetic oligonucleotide
tcttaaatgagcgggacaaatataggaggttatttaaactattttatgagaatag

SEQ ID NO: 242425 - DNA, 59 bp, Artificial
  Synthetic oligonucleotide
tcttaaggcattccttgagttacttagaacctgtttagataattgcaacacacaagatc

SEQ ID NO: 242426 - DNA, 59 bp, Artificial
  Synthetic oligonucleotide
tcttactgatctagagaagttaaaactagacgaaaagtacactcagcttagcacaatgt

SEQ ID NO: 242427 - DNA, 58 bp, Artificial
  Synthetic oligonucleotide
tcttagcattttttgggggcacaagatttgtgccaattgtaactacaatggcaatgtt

SEQ ID NO: 242428 - DNA, 60 bp, Artificial
  Synthetic oligonucleotide
tcttattgttcctttgcctactgatcaatgggcgattgagagtttagatttgatcactaa

SEQ ID NO: 242429 - DNA, 60 bp, Artificial
  Synthetic oligonucleotide
tcttcagagatagccaaataggcaccgctgaggattctatacccttatatgctgcccaat

SEQ ID NO: 242430 - DNA, 60 bp, Artificial
  Synthetic oligonucleotide
cagcaactgcactttctggattaaagatcgcatatatccaggatatggcagttactgagc

SEQ ID NO: 242431 - DNA, 60 bp, Artificial
  Synthetic oligonucleotide
tcttcatcttattaaaagcagcagcagtcttattatcacccgtactcccaatagccgcat

SEQ ID NO: 242432 - DNA, 54 bp, Artificial
  Synthetic oligonucleotide
acggcccccgaaccagccaatttctaactcaattgtaaatttcttctatgccca

SEQ ID NO: 242433 - DNA, 60 bp, Artificial
  Synthetic oligonucleotide
tcttgatatgttagtacagcaaacatttgttcctgtaccaatgcacgttattgaaaagta

SEQ ID NO: 242434 - DNA, 55 bp, Artificial
  Synthetic oligonucleotide
acggattataaagggcatacagaacaaatttccgagtattttatatatattagac

SEQ ID NO: 242435 - DNA, 58 bp, Artificial
  Synthetic oligonucleotide
tctttaactaagcgtcctgataatgtgatgttattaatgtcagacattaaaaccccta

SEQ ID NO: 242436 - DNA, 57 bp, Artificial
  Synthetic oligonucleotide
tctttcggtattggctgatgcatcttcttgcccctttccccaagtacgaatttcaaa

SEQ ID NO: 242437 - DNA, 57 bp, Artificial
  Synthetic oligonucleotide
tctttcggtgttggcagatacatcttcagtccccggcccccaattcgatcctttgaa

SEQ ID NO: 242438 - DNA, 60 bp, Artificial
  Synthetic oligonucleotide
tcttttaatgattatgttgcatactttagagaaggatcgttagatgatagagaaatagcg

SEQ ID NO: 242439 - DNA, 60 bp, Artificial
  Synthetic oligonucleotide
acgctaacatcttcagaatgtgatatagcctgcaagatatcagctccacttatttatcag

SEQ ID NO: 242440 - DNA, 59 bp, Artificial
  Synthetic oligonucleotide
tctttttggtcatatggtagcgtttctagataatcgcgtgttcttgtgcgtaattgatt

SEQ ID NO: 242441 - DNA, 52 bp, Artificial
  Synthetic oligonucleotide
ctattaagggtctcgacaaccacttaactagggcttattgatttaaccccca

SEQ ID NO: 242442 - DNA, 53 bp, Artificial
  Synthetic oligonucleotide
cccccaacacggcggaatatgtagcgagtgtctttggtacccaagaaaccgaa

SEQ ID NO: 242443 - DNA, 55 bp, Artificial
  Synthetic oligonucleotide
gactacgcaatggcggacaaatctattgaattaccccaacgcaaacactcgccaa

SEQ ID NO: 242444 - DNA, 55 bp, Artificial
  Synthetic oligonucleotide
gacagtcattcttctatacacctattaagcggtttgctagaccacttagctaggg

SEQ ID NO: 242445 - DNA, 55 bp, Artificial
  Synthetic oligonucleotide
gacaacctaggctaactccactatcgagttcttaactcccctaccaacaaagcag

SEQ ID NO: 242446 - DNA, 55 bp, Artificial
  Synthetic oligonucleotide
gcgagcattcccgcaccgttgcttgccaacacatcactaactcgtgttaagcgcg

SEQ ID NO: 242447 - DNA, 54 bp, Artificial
  Synthetic oligonucleotide
ttaggttcaatcggaattatcagtaacggagcagaaacaacagctagtactact

SEQ ID NO: 242448 - DNA, 54 bp, Artificial
  Synthetic oligonucleotide
gcggactgatttaaaaccaatggtaaactgtcagcaaccgaaccgttgacaaaa

SEQ ID NO: 242449 - DNA, 53 bp, Artificial
  Synthetic oligonucleotide
ggcacgccaagcaccccaaaccccgcactcccaacgttgttgatagcacgggg

SEQ ID NO: 242450 - DNA, 53 bp, Artificial
  Synthetic oligonucleotide
ttcaatcgggttgcaaaattatactgaattattgacagataacaatatgataa

SEQ ID NO: 242451 - DNA, 53 bp, Artificial
  Synthetic oligonucleotide
aaatggttatgttgtttcacttgcagttgatagtaacgacaacatttattttg

SEQ ID NO: 242452 - DNA, 52 bp, Artificial
  Synthetic oligonucleotide
ttgaaaagatatggtcttagggcgatttataagttatgcctttatgtttata

SEQ ID NO: 242453 - DNA, 49 bp, Artificial
  Synthetic oligonucleotide
gtttaacctagttgatagtacgaaaacgaaaacttgaacccgaaacgac

SEQ ID NO: 242454 - DNA, 51 bp, Artificial
  Synthetic oligonucleotide
cattatccaagacttaaaagaattaaccaccctaaaaccagttaatcaaaa

SEQ ID NO: 242455 - DNA, 52 bp, Artificial
  Synthetic oligonucleotide
gtgcgggtttagaaacatcaatagcggtaatcggaaatacatactttactta

SEQ ID NO: 242456 - DNA, 52 bp, Artificial
  Synthetic oligonucleotide
gatttatccacatctagttattctcgccaacaaacagtagggcattctttaa

SEQ ID NO: 242457 - DNA, 51 bp, Artificial
  Synthetic oligonucleotide
tgattttaatagtatttgggagaacccgtactattggcgacaaaaacaagc

SEQ ID NO: 242458 - DNA, 51 bp, Artificial
  Synthetic oligonucleotide
aacaatttagtatcgtgggaacactagctaccaactagcgtttccacagac

SEQ ID NO: 242459 - DNA, 51 bp, Artificial
  Synthetic oligonucleotide
aaaagaaacgaatacttgtgattgaccttgacccgcaaggaaacttaacgc

SEQ ID NO: 242460 - DNA, 50 bp, Artificial
  Synthetic oligonucleotide
atggtgtctttctgttaaaacacggtgcaacaaccgcaactaaaatcgat

SEQ ID NO: 242461 - DNA, 50 bp, Artificial
  Synthetic oligonucleotide
atgagcacaagcaagtggatatgataatatccgcgggtatagtgctagtc

SEQ ID NO: 242462 - DNA, 50 bp, Artificial
  Synthetic oligonucleotide
agttggtttaacacaagggataagtagtgcaatgaaaggcggtaccccat

SEQ ID NO: 242463 - DNA, 50 bp, Artificial
  Synthetic oligonucleotide
attagacacaatatggactaaccctacatattgacggcaaaaacaagcat

SEQ ID NO: 242464 - DNA, 55 bp, Artificial
  Synthetic oligonucleotide
ccattactcttgctagtgcttgaccatttccgagtaaaccgttaaatgaccccca

SEQ ID NO: 242465 - DNA, 50 bp, Artificial
  Synthetic oligonucleotide
tagcagttcaacctacaacaataaaggaggcgatagtaaattgtgaatta

SEQ ID NO: 242466 - DNA, 50 bp, Artificial
  Synthetic oligonucleotide
ccatagaaaaaaagaaacgaatacttgtgcttgaccttgatccccaagga

SEQ ID NO: 242467 - DNA, 59 bp, Artificial
  Synthetic oligonucleotide
taaacattactgttaaatacaataatgcgacagcagacagttttaccttgcaaatcaaa

SEQ ID NO: 242468 - DNA, 53 bp, Artificial
  Synthetic oligonucleotide
tagacaacttagattaattcccctaccgagttcttaactcccctatcaacaaa

SEQ ID NO: 242469 - DNA, 57 bp, Artificial
  Synthetic oligonucleotide
tagcgacaagcggggtcaatgacttacttaacaaaattttaggtatcgcactgccaa

SEQ ID NO: 242470 - DNA, 54 bp, Artificial
  Synthetic oligonucleotide
catacgaaatgactacgcgaaggggggcaaatttattgaattgcccctacccaa

SEQ ID NO: 242471 - DNA, 54 bp, Artificial
  Synthetic oligonucleotide
tagtaatttatctcggaaataaattactatcgtggaaacactagtaaacaccta

SEQ ID NO: 242472 - DNA, 60 bp, Artificial
  Synthetic oligonucleotide
tatcttactgttaatcaatatccgttgactgttaatgatatgtgattaggtaattttagc

SEQ ID NO: 242473 - DNA, 60 bp, Artificial
  Synthetic oligonucleotide
gatatgctggttaaatgactttgcagtcaaaccgatatcgagaactgccaaacagagcgg

SEQ ID NO: 242474 - DNA, 50 bp, Artificial
  Synthetic oligonucleotide
ctattaagcggtttgctagaccacttaactagggttcttaatttaacccc

SEQ ID NO: 242475 - DNA, 57 bp, Artificial
  Synthetic oligonucleotide
gatactatcgctccaatcacaagttagggggcgtaaatatgttattgcgaaaacgaa

SEQ ID NO: 242476 - DNA, 60 bp, Artificial
  Synthetic oligonucleotide
gcaagatgtcgtctactttattggtgggggagcattaagcgagcaattatttagtgtgaa

SEQ ID NO: 242477 - DNA, 60 bp, Artificial
  Synthetic oligonucleotide
gcaagtgatagtcaacttgcgagtgcggttgctgatcgggttaaaacaagtggcaagtta

SEQ ID NO: 242478 - DNA, 52 bp, Artificial
  Synthetic oligonucleotide
gaccctaacgcttttatttgagaaattggtgggacaactgaatacaacccct

SEQ ID NO: 242479 - DNA, 51 bp, Artificial
  Synthetic oligonucleotide
gccgatactcgcggcgtttttgtaaacaaatttgttttgaccccgccctcc

SEQ ID NO: 242480 - DNA, 55 bp, Artificial
  Synthetic oligonucleotide
gacccgaacacggcggaatatgtagcgagtgtacttggtactcaagaaaccgaaa

SEQ ID NO: 242481 - DNA, 58 bp, Artificial
  Synthetic oligonucleotide
gcctccggtgttgtagaaaacaccgactatgttatcaacataaataatcttgttgctg

SEQ ID NO: 242482 - DNA, 60 bp, Artificial
  Synthetic oligonucleotide
gacaccagcgatatatatttggtcttgtgcaccaaataacaagcactcccctattccaat

SEQ ID NO: 242483 - DNA, 52 bp, Artificial
  Synthetic oligonucleotide
ggaaaatatcaacgctgatatggggtttaaattcgtttaaaaccacagaaag

SEQ ID NO: 242484 - DNA, 54 bp, Artificial
  Synthetic oligonucleotide
ggtggtcaaagattatcttggtcaaattgatacaagtaaaatgacaaaccccgt

SEQ ID NO: 242485 - DNA, 55 bp, Artificial
  Synthetic oligonucleotide
gtaaggacaacatttatttcggtacattagcgggtgcacttgtgttgaaacacgg

SEQ ID NO: 242486 - DNA, 57 bp, Artificial
  Synthetic oligonucleotide
gaattgtagttttacgattcaaaaaatcgatgatgaatgatttactgtcaatacggg

SEQ ID NO: 242487 - DNA, 56 bp, Artificial
  Synthetic oligonucleotide
gtaaattgcctaggaaacaatttactatcgtggaaacactagcttgcaactagcgt

SEQ ID NO: 242488 - DNA, 57 bp, Artificial
  Synthetic oligonucleotide
ctttgcgacaaaagatagtgttgtgttatcggataagattatgtcgttgtttgattt

SEQ ID NO: 242489 - DNA, 55 bp, Artificial
  Synthetic oligonucleotide
ctgttatacaatgtaaatgttagcaattaaattgctaggacaattaaaaacggaa

SEQ ID NO: 242490 - DNA, 60 bp, Artificial
  Synthetic oligonucleotide
ctgttaaatacaataatgcgacatcagaacaatttaccttgcaaatcaaagacagcaaga

SEQ ID NO: 242491 - DNA, 56 bp, Artificial
  Synthetic oligonucleotide
ctcccacgtcattcttctatacacctattaagcggtctcacaaaccacttaactag

SEQ ID NO: 242492 - DNA, 59 bp, Artificial
  Synthetic oligonucleotide
ctattcgtgttcgtcatttagacaatataacagcgtttaaattgctcgaccgtgcaata

SEQ ID NO: 242493 - DNA, 57 bp, Artificial
  Synthetic oligonucleotide
agagaacttgcgtaaaaccaaagagtagcaggacaacgaatataatactaagatatg

SEQ ID NO: 242494 - DNA, 60 bp, Artificial
  Synthetic oligonucleotide
actctcccatcaagatatgctgattaaatgactttgtagtcaaaccgatatcgagcacta

SEQ ID NO: 242495 - DNA, 59 bp, Artificial
  Synthetic oligonucleotide
ttaatcggagtaactgctataacaactagtgggatagcacctttaatggcaatgacacc

SEQ ID NO: 242496 - DNA, 53 bp, Artificial
  Synthetic oligonucleotide
ctaccgagttcttaactcccctaccaacaaagcagagaacttgcgtaaaacca

SEQ ID NO: 242497 - DNA, 55 bp, Artificial
  Synthetic oligonucleotide
accgaactacaacaagttatcatctgacccacacaagaactaaacacctacgaaa

SEQ ID NO: 242498 - DNA, 54 bp, Artificial
  Synthetic oligonucleotide
acaattaattactcgaacaattaattattagtggaattagacaacttagactaa

SEQ ID NO: 242499 - DNA, 58 bp, Artificial
  Synthetic oligonucleotide
aatggaattagacaacctagactaactcccctatcaacaaagcagagaacttgcataa

SEQ ID NO: 242500 - DNA, 53 bp, Artificial
  Synthetic oligonucleotide
aatggaattagacaacctagactaaatcccctatcgagttcttaactccccta

SEQ ID NO: 242501 - DNA, 53 bp, Artificial
  Synthetic oligonucleotide
aatattgacccaacaaacgggataaaacttgatgggtcgcagttaaacacaaa

SEQ ID NO: 242502 - DNA, 59 bp, Artificial
  Synthetic oligonucleotide
aagcaatattgactcaacaaacgggataaaacttgatggttcacaactggcaacaatca

SEQ ID NO: 242503 - DNA, 55 bp, Artificial
  Synthetic oligonucleotide
ttcgccgtcattcttctatacacctattaagcggtacacaaaaccacttaattag

SEQ ID NO: 242504 - DNA, 54 bp, Artificial
  Synthetic oligonucleotide
aacataaaggtttgtcggtgtgaattaataaaaaatgcattcacgggtcgcgta

SEQ ID NO: 242505 - DNA, 56 bp, Artificial
  Synthetic oligonucleotide
aacacgcgatattgggtcaactaccaaagatgtcacaaataattactgaactttta

SEQ ID NO: 242506 - DNA, 53 bp, Artificial
  Synthetic oligonucleotide
ttcgcgtgaaaatcggggaaatttgccgctcgtaatgtagttggtaaaccaat

SEQ ID NO: 242507 - DNA, 54 bp, Artificial
  Synthetic oligonucleotide
cgggttcggttgatataacttataatgttgttcccgcaacgatagttgacttaa

SEQ ID NO: 242508 - DNA, 55 bp, Artificial
  Synthetic oligonucleotide
ttcttaactcccctaccaacaaagcagagaacttgcgtaaaaccaaagagtagca

SEQ ID NO: 242509 - DNA, 54 bp, Artificial
  Synthetic oligonucleotide
ttcttctatacacctattaagcggtctcacaaaccacttaactagggttcttaa

SEQ ID NO: 242510 - DNA, 56 bp, Artificial
  Synthetic oligonucleotide
aaaggagggtaaatatgttgttgaactgtcagacaacttgggacataccaacaata

SEQ ID NO: 242511 - DNA, 59 bp, Artificial
  Synthetic oligonucleotide
ttcttgtaattatcggtacaaaagcgatagcgtgaatgtataataatcgccgccacgaa

SEQ ID NO: 242512 - DNA, 57 bp, Artificial
  Synthetic oligonucleotide
aaaaacgcaaattccaagcgatatcaaaattgataaggtaaataccagcaattatga

SEQ ID NO: 242513 - DNA, 54 bp, Artificial
  Synthetic oligonucleotide
cacccagttattagtggaattagacaacttagactaaatcccctatcgagttct

SEQ ID NO: 242514 - DNA, 54 bp, Artificial
  Synthetic oligonucleotide
caccaaaattatccgaagaagaactcacccaactattagcggaattagacaact

SEQ ID NO: 242515 - DNA, 53 bp, Artificial
  Synthetic oligonucleotide
tcttgctagtgcttgaccatttccgagtaaaccgttaaatgacccccaagggt

SEQ ID NO: 242516 - DNA, 56 bp, Artificial
  Synthetic oligonucleotide
caagtcattcttctatacacctattaagcggtctcacaaaccgcttaactagggct

SEQ ID NO: 242517 - DNA, 56 bp, Artificial
  Synthetic oligonucleotide
caacttagactaactcccctatcgagttcttaactcccctatcaacaaagcagaga

SEQ ID NO: 242518 - DNA, 60 bp, Artificial
  Synthetic oligonucleotide
cgcttcgtgttcgccatttagacaatatgacagcgtttaaattgcttgaccgtgcaatac

SEQ ID NO: 242519 - DNA, 60 bp, Artificial
  Synthetic oligonucleotide
tgacttgtcgcacaaaccgacatcgagcactaccaaacagagcgtgagctcaaaatagaa

SEQ ID NO: 242520 - DNA, 54 bp, Artificial
  Synthetic oligonucleotide
caacaagaccctaacgcttttatttgagaaattggtgggacaactgaatacaac

SEQ ID NO: 242521 - DNA, 57 bp, Artificial
  Synthetic oligonucleotide
caaattataacgagtttaattggcggtaatacagcgatgagcgatagtatcggtaat

SEQ ID NO: 242522 - DNA, 60 bp, Artificial
  Synthetic oligonucleotide
attatgcaaaaatgtcgcttacaaattggcacttgatggggcaaaggtcttattgattga

SEQ ID NO: 242523 - DNA, 57 bp, Artificial
  Synthetic oligonucleotide
tgagaaattggtgggacaactgaatacaacccctttgcgacaaaagatagtgttgtg

SEQ ID NO: 242524 - DNA, 57 bp, Artificial
  Synthetic oligonucleotide
tgtcaacgcaagaagaacgcaataccccgatttatgacttttcaaattatttgcgtg

SEQ ID NO: 242525 - DNA, 60 bp, Artificial
  Synthetic oligonucleotide
atacccaagcaaccttatcagcgatagaaggtagcaagagttatcatggttcggttgctg

SEQ ID NO: 242526 - DNA, 57 bp, Artificial
  Synthetic oligonucleotide
ttaactcccctaccaacaaagcagagaacttgcgtaaaaccacagcgtagcacgaca

SEQ ID NO: 242527 - DNA, 57 bp, Artificial
  Synthetic oligonucleotide
aagcaatattgaccctacaactggtttggagattgataaggggcagtatggttcagt

SEQ ID NO: 242528 - DNA, 58 bp, Artificial
  Synthetic oligonucleotide
gttttttgatgttatctgatttaataatagcaccgttaactgatgatggaggttgtta

SEQ ID NO: 242529 - DNA, 58 bp, Artificial
  Synthetic oligonucleotide
gttagacggacataccaaatgactacgcaatggcggacaaatctattgaattacccca

SEQ ID NO: 242530 - DNA, 57 bp, Artificial
  Synthetic oligonucleotide
ctactaagtctattaactataacaaccttgacagcgagcgttcccgctccgttgcta

SEQ ID NO: 242531 - DNA, 57 bp, Artificial
  Synthetic oligonucleotide
atgcaaaaatgttgcctataaattggcacttgatggggcaaaggttttattaattga

SEQ ID NO: 242532 - DNA, 54 bp, Artificial
  Synthetic oligonucleotide
ttattcgttaaaataactttcgatgcagcacaaacgacatttttttatagaaag

SEQ ID NO: 242533 - DNA, 57 bp, Artificial
  Synthetic oligonucleotide
aacaatagctcgtgaaatgggatacaccgaaatcaccgttcaatcaacaagcgaaag

SEQ ID NO: 242534 - DNA, 58 bp, Artificial
  Synthetic oligonucleotide
gagtgctgttgcggactgatttaaaaccaatggtaaactgtcagcaaccgaactgttg

SEQ ID NO: 242535 - DNA, 58 bp, Artificial
  Synthetic oligonucleotide
atacaatctatagcaatagatagtaaggacaacatttatttcggtacattagcgggtg

SEQ ID NO: 242536 - DNA, 57 bp, Artificial
  Synthetic oligonucleotide
tgggacaaataacggtgcatatttaatacattcagcgttgacatcattggattgaac

SEQ ID NO: 242537 - DNA, 53 bp, Artificial
  Synthetic oligonucleotide
gagtggtgttcgtgattttagttatattcctatttcgtggactttttcgggta

SEQ ID NO: 242538 - DNA, 50 bp, Artificial
  Synthetic oligonucleotide
gaaaaaaccccgccccgtcagtaagacaagagtggttggtaaggagttgg

SEQ ID NO: 242539 - DNA, 56 bp, Artificial
  Synthetic oligonucleotide
gacccgttaaaataacgttcgatgcagcacagaggacaatagagaaacaagcaatg

SEQ ID NO: 242540 - DNA, 56 bp, Artificial
  Synthetic oligonucleotide
gttcattgaattaccccaatacaaagactctctaactgaattgcaacccaaattaa

SEQ ID NO: 242541 - DNA, 54 bp, Artificial
  Synthetic oligonucleotide
caaccaatctttatcttacttggtatctttgcctttgggtttgccgttgcaaaa

SEQ ID NO: 242542 - DNA, 56 bp, Artificial
  Synthetic oligonucleotide
ccacaaacaagtaagcaatgacatatcaatgttaaacccgaaattgcaccgcgcga

SEQ ID NO: 242543 - DNA, 56 bp, Artificial
  Synthetic oligonucleotide
ctagttgatagtacaaaaacgcaaacttgaacacgaaacgacttgcttagtgttga

SEQ ID NO: 242544 - DNA, 53 bp, Artificial
  Synthetic oligonucleotide
aaccaagggagcagacggcaccctatttaatggtgttagtaccttagaaatta

SEQ ID NO: 242545 - DNA, 55 bp, Artificial
  Synthetic oligonucleotide
ccagcaacgctgggagtgcggggtttgggcttaatgtttgtgctccgcagtggtg

SEQ ID NO: 242546 - DNA, 52 bp, Artificial
  Synthetic oligonucleotide
taagtttaacttagttgatagtacgaaagcgaaaacttggactcgccccgac

SEQ ID NO: 242547 - DNA, 54 bp, Artificial
  Synthetic oligonucleotide
taatggtgcgtttgtgttgaaacagggtgaaacaaccccaactaaaattgatgg

SEQ ID NO: 242548 - DNA, 55 bp, Artificial
  Synthetic oligonucleotide
tagacaatataacagcgtttaaattgctcgaccgtgcaatacgaagagcacaaga

SEQ ID NO: 242549 - DNA, 54 bp, Artificial
  Synthetic oligonucleotide
actaaatcccctatcgagttcttaactcccctaccaacaaagcacagaacttgc

SEQ ID NO: 242550 - DNA, 55 bp, Artificial
  Synthetic oligonucleotide
tattttactgttaatcaatttccgttgattgttaatgatatgtggttgagtaatt

SEQ ID NO: 242551 - DNA, 55 bp, Artificial
  Synthetic oligonucleotide
cccgtggttgttgtaatgagtgtcaccgaccaaggacaacaatttcgtaattgaa

SEQ ID NO: 242552 - DNA, 55 bp, Artificial
  Synthetic oligonucleotide
tccttgccagtgcgatagtcttgtcgtttaaagacactatcgcaccaatcacaag

SEQ ID NO: 242553 - DNA, 54 bp, Artificial
  Synthetic oligonucleotide
caatcacaaattagggggcgtaaatatgttattgcgaaaacgaaaacaagataa

SEQ ID NO: 242554 - DNA, 49 bp, Artificial
  Synthetic oligonucleotide
actaactcccctaccgagttcttaactcccctaccgagttcttaactcc

SEQ ID NO: 242555 - DNA, 55 bp, Artificial
  Synthetic oligonucleotide
tgatactcttgtgaaatatgttagaaattgtgttgtgggaatagcacgaccgtgc

SEQ ID NO: 242556 - DNA, 54 bp, Artificial
  Synthetic oligonucleotide
ccgaacacatttcattattagaacaatggtttaaaaatttgtatagtgatttaa

SEQ ID NO: 242557 - DNA, 54 bp, Artificial
  Synthetic oligonucleotide
cgaagaagaactcacccaactattagcggaattagacaacttagactaactccc

SEQ ID NO: 242558 - DNA, 55 bp, Artificial
  Synthetic oligonucleotide
gtgtcaccgaccaaggacaacaatttcgtaattgaaaagatatggtcttagggcg

SEQ ID NO: 242559 - DNA, 52 bp, Artificial
  Synthetic oligonucleotide
tttatatcgaatttgaacgcacccgcaagtcacccaaacggtttagaaaaag

SEQ ID NO: 242560 - DNA, 55 bp, Artificial
  Synthetic oligonucleotide
gtcaacttgcgagtgcggttgctgatcgggttaaaaccaatggtaaactgtcagc

SEQ ID NO: 242561 - DNA, 55 bp, Artificial
  Synthetic oligonucleotide
ggtcttgtgcaccaaataacaagcactcccctattccaataccagactcccctac

SEQ ID NO: 242562 - DNA, 60 bp, Artificial
  Synthetic oligonucleotide
gataaagctacctctaatttgcgaatcaccatgtggtgtacgttcacctgataggtatgg

SEQ ID NO: 242563 - DNA, 57 bp, Artificial
  Synthetic oligonucleotide
gattatgcgtgtaactatcccttaaataaaacattaattgtgcactgatttactaat

SEQ ID NO: 242564 - DNA, 56 bp, Artificial
  Synthetic oligonucleotide
ggaatctttattctatataggtttcttttagattggagtggagttagttgagtgga

SEQ ID NO: 242565 - DNA, 55 bp, Artificial
  Synthetic oligonucleotide
agcgatactaaagacgaaatacgtgaagtgacgaaacaagcgagagaagaaacaa

SEQ ID NO: 242566 - DNA, 55 bp, Artificial
  Synthetic oligonucleotide
acaaagctggaatgaatacgcaaaacgtcaaggtaagtcgctagctgacttcgca

SEQ ID NO: 242567 - DNA, 54 bp, Artificial
  Synthetic oligonucleotide
gtaactagcctcgccggcaatagttacccttattatcaagataagaaagaaaag

SEQ ID NO: 242568 - DNA, 55 bp, Artificial
  Synthetic oligonucleotide
ggggtctaattgatcattagagtaggctttgtcagaagtaggaacgccacccata

SEQ ID NO: 242569 - DNA, 55 bp, Artificial
  Synthetic oligonucleotide
aattgcctcattacctagtaaatcagaggcgtgtgtgccgttatgaggtgacgct

SEQ ID NO: 242570 - DNA, 55 bp, Artificial
  Synthetic oligonucleotide
aatttgaacatatctccattacgtctcgcacgaactttaagagggtaagacgtct

SEQ ID NO: 242571 - DNA, 55 bp, Artificial
  Synthetic oligonucleotide
tcatatcatttataaatccagaaaaaaactcgctgatagcacttccgaaaatatc

SEQ ID NO: 242572 - DNA, 55 bp, Artificial
  Synthetic oligonucleotide
gggttagaattagcagaaaagatagcacctaatcatcaagttgccgtatatacac

SEQ ID NO: 242573 - DNA, 55 bp, Artificial
  Synthetic oligonucleotide
gggttccgaggctcaacgtcaataaagcaattggaataaagcaattatgttattg

SEQ ID NO: 242574 - DNA, 55 bp, Artificial
  Synthetic oligonucleotide
tcacgtcatacacgttggttgcacctggtaaatgtcccactttagaaggatcacc

SEQ ID NO: 242575 - DNA, 55 bp, Artificial
  Synthetic oligonucleotide
ggacacctttttgtctgcattaggacacctttttgtctgcattaggacacctttt

SEQ ID NO: 242576 - DNA, 53 bp, Artificial
  Synthetic oligonucleotide
ggtaaagtaagttgtatcgcgtttcttgacgtatctttcctttacgctaacac

SEQ ID NO: 242577 - DNA, 55 bp, Artificial
  Synthetic oligonucleotide
ggtaatcctaaaactgaacgaaagcctgtaattactggatatagagcgcataatg

SEQ ID NO: 242578 - DNA, 52 bp, Artificial
  Synthetic oligonucleotide
ggtacaacctgggtacaatcgcgatttgtaggggtacaacctgggtacaaaa

SEQ ID NO: 242579 - DNA, 55 bp, Artificial
  Synthetic oligonucleotide
ggtacactaagagccgttttcggcgaggaggtagcgtcagctatcaactcgacgg

SEQ ID NO: 242580 - DNA, 55 bp, Artificial
  Synthetic oligonucleotide
ggtaccagcacatcaaagtaacatggcatcaacgccaaaccggtctataacacca

SEQ ID NO: 242581 - DNA, 55 bp, Artificial
  Synthetic oligonucleotide
ggtagatactgggtctcctgtcggaatacgaatcgtttgaacgtactcacattca

SEQ ID NO: 242582 - DNA, 55 bp, Artificial
  Synthetic oligonucleotide
ggtagcgccaaaattagataaagagacgcgacaatcgattgctaaagatttaggc

SEQ ID NO: 242583 - DNA, 55 bp, Artificial
  Synthetic oligonucleotide
ggtagtataatcgaaaatgtgatgatcgactggcaatgttgtcacgccaatatcc

SEQ ID NO: 242584 - DNA, 53 bp, Artificial
  Synthetic oligonucleotide
ggtatacatgactcccgtttaccgttcttaagcgatggaatccgttaccttac

SEQ ID NO: 242585 - DNA, 55 bp, Artificial
  Synthetic oligonucleotide
ggtcagttgcatggtggtattgctacatacggtaaagaccctgaaactaaagggc

SEQ ID NO: 242586 - DNA, 60 bp, Artificial
  Synthetic oligonucleotide
ggaccgacaacatttctaccatccttgactgtacaggtagcaatggcaggtgccatgttg

SEQ ID NO: 242587 - DNA, 55 bp, Artificial
  Synthetic oligonucleotide
ggtcatatgcgattgtacctgtactaggtcctattgctggaggtatgctaggcgc

SEQ ID NO: 242588 - DNA, 55 bp, Artificial
  Synthetic oligonucleotide
ggtcatcgttcaaaatggtatgcgttttgacacatccactatatatccgtgtcgt

SEQ ID NO: 242589 - DNA, 55 bp, Artificial
  Synthetic oligonucleotide
ggtccatcgaacgaccgaaaagactgccggttaaccatacaagtgcaatgttggc

SEQ ID NO: 242590 - DNA, 55 bp, Artificial
  Synthetic oligonucleotide
ttcgacgacggataattgcggctacacgtaacagtaattctgcacggtccttatg

SEQ ID NO: 242591 - DNA, 55 bp, Artificial
  Synthetic oligonucleotide
ggtcgcctaagtgaatctcatttgcggaagaagatagactgtatcccgagatacc

SEQ ID NO: 242592 - DNA, 54 bp, Artificial
  Synthetic oligonucleotide
gtaggtggtttattatccatacccttacttgatcaaaggttgttacctatggaa

SEQ ID NO: 242593 - DNA, 55 bp, Artificial
  Synthetic oligonucleotide
gtatactgccttatctatctagtggtggcgctggtttagcaatacctatgattgc

SEQ ID NO: 242594 - DNA, 55 bp, Artificial
  Synthetic oligonucleotide
ttatgcttacgctcctgttaactcacctgacactgaaaacgataatggttatctt

SEQ ID NO: 242595 - DNA, 55 bp, Artificial
  Synthetic oligonucleotide
tattaatcacgatatggttgtgtacgtgatccgtatcattgtgtgtatagacagc

SEQ ID NO: 242596 - DNA, 55 bp, Artificial
  Synthetic oligonucleotide
tattaaagccgcaccatcatttgcgaagaaggctgctacaactgaacctaagagc

SEQ ID NO: 242597 - DNA, 59 bp, Artificial
  Synthetic oligonucleotide
ggacttctatcgtgactcccaaaaggcggtcttatatgtcaaacgagcgctgattctta

SEQ ID NO: 242598 - DNA, 55 bp, Artificial
  Synthetic oligonucleotide
tgtctagccgtataattcagtacttcctacaccatcacacaacgatgacgttcgc

SEQ ID NO: 242599 - DNA, 55 bp, Artificial
  Synthetic oligonucleotide
gtatccaatactatgaggagggttatcacacagtcgtagactgtgacttaaaaca

SEQ ID NO: 242600 - DNA, 55 bp, Artificial
  Synthetic oligonucleotide
tatggcaaggtaagtcattggcttgttatcaaggtgcgacctacgcatcaactcc

SEQ ID NO: 242601 - DNA, 55 bp, Artificial
  Synthetic oligonucleotide
gtatgacccaactgaatggtaatgatgcttatcaaactgtaatgagccgcttcga

SEQ ID NO: 242602 - DNA, 55 bp, Artificial
  Synthetic oligonucleotide
tgtgaagacgcctagaggttggcatttatactttgtattagatgtacccttctat

SEQ ID NO: 242603 - DNA, 55 bp, Artificial
  Synthetic oligonucleotide
gtcaacttatgattacgaaacctggtggtatcacaataactgaaggtttcgcccg

SEQ ID NO: 242604 - DNA, 55 bp, Artificial
  Synthetic oligonucleotide
gtcaatttttactatttccttacctgtgattccttttgaaagtacattacaagca

SEQ ID NO: 242605 - DNA, 55 bp, Artificial
  Synthetic oligonucleotide
gtcacccttatccctctatcaccagctgaatctaaacgttcccctgatgtcgctg

SEQ ID NO: 242606 - DNA, 55 bp, Artificial
  Synthetic oligonucleotide
tatgatcttcgttcacatcattgcaccagtcatcagcggctgtgcagttgcgtac

SEQ ID NO: 242607 - DNA, 55 bp, Artificial
  Synthetic oligonucleotide
agactatgatttcatggctgtacctgttatagattaccaagaccatttgctgggg

SEQ ID NO: 242608 - DNA, 54 bp, Artificial
  Synthetic oligonucleotide
ggagcacacccaaaaaagaacgcgaggtcgctctcgataaaagttcgttttatc

SEQ ID NO: 242609 - DNA, 55 bp, Artificial
  Synthetic oligonucleotide
gtcagacaaacttgtactcgttgacgtactcagtgatgttgaaacactctcgctc

SEQ ID NO: 242610 - DNA, 55 bp, Artificial
  Synthetic oligonucleotide
gtcagtagaatagctgatttagtaataatgaaagtcgttgccccgttagtagcag

SEQ ID NO: 242611 - DNA, 55 bp, Artificial
  Synthetic oligonucleotide
tatcgcaatcggagtcactgctatcggctcatttatcggggcacaaagcttaggt

SEQ ID NO: 242612 - DNA, 52 bp, Artificial
  Synthetic oligonucleotide
tatccggtttaaaaggtgtaagtgcccaaattaggagacctacaacgatagg

SEQ ID NO: 242613 - DNA, 55 bp, Artificial
  Synthetic oligonucleotide
gtcatcgctacaggtcttctaactcaaactaatgatgctaaggcgttctttagtt

SEQ ID NO: 242614 - DNA, 55 bp, Artificial
  Synthetic oligonucleotide
tatccacctcattcgaaactttgatcttgagactactgcaagtcgttgatgaagt

SEQ ID NO: 242615 - DNA, 54 bp, Artificial
  Synthetic oligonucleotide
gtccagggttaactaacactagacctagtactaatccaagaatcggactacctc

SEQ ID NO: 242616 - DNA, 55 bp, Artificial
  Synthetic oligonucleotide
gtaactttatttaacgctgcactaatttcgctaggtgtaacgacaacatcaggcg

SEQ ID NO: 242617 - DNA, 55 bp, Artificial
  Synthetic oligonucleotide
acaaatgggcgtttgggctttgattatcttacagataatttagcagatcacaagc

SEQ ID NO: 242618 - DNA, 55 bp, Artificial
  Synthetic oligonucleotide
gtaagtgggtacattatggattaacttccactgatgtagttgacactgccttaag

SEQ ID NO: 242619 - DNA, 59 bp, Artificial
  Synthetic oligonucleotide
ggaggaagtgaaagcgatttggcatacactaaagtagcaccatcaaagagttcaggggc

SEQ ID NO: 242620 - DNA, 55 bp, Artificial
  Synthetic oligonucleotide
agcgacgattggtcaattcgtcccgtggctattaggaattgtaatgttaggcatg

SEQ ID NO: 242621 - DNA, 55 bp, Artificial
  Synthetic oligonucleotide
ttccatatccgcctgtaagatgttcaactgttactgtcataaggcacctccatgc

SEQ ID NO: 242622 - DNA, 55 bp, Artificial
  Synthetic oligonucleotide
aactgtcgactcatcgggttaatagctcacgctatacccgacattcgtcgaaaca

SEQ ID NO: 242623 - DNA, 54 bp, Artificial
  Synthetic oligonucleotide
gtaccaactcaacaacacataaagccctgtaggttccgacgaataaggaaattg

SEQ ID NO: 242624 - DNA, 55 bp, Artificial
  Synthetic oligonucleotide
gtaccaccaccccatactactgtagcaagaactctgacttctttagttccatctg

SEQ ID NO: 242625 - DNA, 55 bp, Artificial
  Synthetic oligonucleotide
gtaccacgatgcgacttgatgtagtgctatgatgtggcgttgcgctgttatggtg

SEQ ID NO: 242626 - DNA, 55 bp, Artificial
  Synthetic oligonucleotide
gtaccatctaccaccacatggcatgaaagtgcattttggccacttgtaatactcc

SEQ ID NO: 242627 - DNA, 55 bp, Artificial
  Synthetic oligonucleotide
tgtccgtacagaccagaaaaggagtgcttgttccatgtccatgattgcggcgaga

SEQ ID NO: 242628 - DNA, 55 bp, Artificial
  Synthetic oligonucleotide
tcaaaaccacactacaaccatgaacatacaaatgggcgtcgtgtacaagccgttt

SEQ ID NO: 242629 - DNA, 55 bp, Artificial
  Synthetic oligonucleotide
aactgctaaatcggtagaagcccaaacgttccacgatgcgatttgtgcccttatc

SEQ ID NO: 242630 - DNA, 56 bp, Artificial
  Synthetic oligonucleotide
ggagtccctacagtttgaaccagtggaatataaatcgaaggaactcattcaattaa

SEQ ID NO: 242631 - DNA, 55 bp, Artificial
  Synthetic oligonucleotide
acaatgctgttatgtgttctcaacccgtattacaagagcaatttgacgttagtcg

SEQ ID NO: 242632 - DNA, 52 bp, Artificial
  Synthetic oligonucleotide
ttcaattttaaaaccagtaattgaacgtccttctttttcatccttataagaa

SEQ ID NO: 242633 - DNA, 55 bp, Artificial
  Synthetic oligonucleotide
ttcaatgatgaggtttgcatggaacatggtttaagcgtgccagaaaagaacacag

SEQ ID NO: 242634 - DNA, 52 bp, Artificial
  Synthetic oligonucleotide
gtacgtaagtcacctggacttaaaggtactgtagttgaaagtggttcgtggt

SEQ ID NO: 242635 - DNA, 55 bp, Artificial
  Synthetic oligonucleotide
gtacgtccaaatcttgccatgcgaccaccattcaaacttcttaatccttgcgggt

SEQ ID NO: 242636 - DNA, 55 bp, Artificial
  Synthetic oligonucleotide
gtaggctacctttctcactttctacgtaagtggcgttacctgtactaccacttgc

SEQ ID NO: 242637 - DNA, 55 bp, Artificial
  Synthetic oligonucleotide
acacaataagcggcgtagccacaaaagttggaacttatccaatcgtggtaacgag

SEQ ID NO: 242638 - DNA, 55 bp, Artificial
  Synthetic oligonucleotide
acacacctgagaaattgaatggttttggtaaggtggactcggatgttgtaccttg

SEQ ID NO: 242639 - DNA, 55 bp, Artificial
  Synthetic oligonucleotide
gtagggccgttagctggatttataacgggatggacatattggttaacatggatta

SEQ ID NO: 242640 - DNA, 55 bp, Artificial
  Synthetic oligonucleotide
cgatgtttaacccatcgtttatagttcgatcatttcacgtaattactacagccgg

SEQ ID NO: 242641 - DNA, 55 bp, Artificial
  Synthetic oligonucleotide
ggagtctctcgaattttagagctacaagggattgagcctcgttataaaaacattt

SEQ ID NO: 242642 - DNA, 55 bp, Artificial
  Synthetic oligonucleotide
atttgcgacacacaatgcaaatatcccagtccttggcgactcagaacaggtaatt

SEQ ID NO: 242643 - DNA, 55 bp, Artificial
  Synthetic oligonucleotide
cgcaacgatacctaatcccgcttccatactctcacgaagcataccgctattccct

SEQ ID NO: 242644 - DNA, 55 bp, Artificial
  Synthetic oligonucleotide
cgcagtaggtattctaacgtgcttaaacttaggcgttgcaccagtatttgcggtc

SEQ ID NO: 242645 - DNA, 55 bp, Artificial
  Synthetic oligonucleotide
cgcagtgcgaggtttaacacaagtagccgcacaagatttagcgtctgaaggtatt

SEQ ID NO: 242646 - DNA, 55 bp, Artificial
  Synthetic oligonucleotide
cgcatacgtcctgtacaagtttcagagcataccgtaggcatacccgcctcgattc

SEQ ID NO: 242647 - DNA, 55 bp, Artificial
  Synthetic oligonucleotide
cgcatctaatacgtcattcatgtgtccgccgacaccaattgaagattgaccatgc

SEQ ID NO: 242648 - DNA, 55 bp, Artificial
  Synthetic oligonucleotide
cgcatgctcaccccaaaatgacaatgcagaaccttgaatattcggttgggcgacg

SEQ ID NO: 242649 - DNA, 55 bp, Artificial
  Synthetic oligonucleotide
cgccaatacttactatctcgtcgcgtgtatcctatgacactcggactaacattcg

SEQ ID NO: 242650 - DNA, 55 bp, Artificial
  Synthetic oligonucleotide
cgccaattaatggtgacttagatggtttaggtcgtattacattaactgttggcac

SEQ ID NO: 242651 - DNA, 55 bp, Artificial
  Synthetic oligonucleotide
cgccacaacagtgacctataaaatggggagcgggacagaactcataatgaattcg

SEQ ID NO: 242652 - DNA, 60 bp, Artificial
  Synthetic oligonucleotide
ggagtggacagaacgacacggatatatagtggatgtgtcaaaacgcataccattttgaac

SEQ ID NO: 242653 - DNA, 55 bp, Artificial
  Synthetic oligonucleotide
cgccattcattatgtttctcgtctgtgtcccaatctctaactcttttattaccaa

SEQ ID NO: 242654 - DNA, 55 bp, Artificial
  Synthetic oligonucleotide
cgccgctcatcaaatgtgaaatgtaaccaagtagcatgaacaacgtcgctacaca

SEQ ID NO: 242655 - DNA, 55 bp, Artificial
  Synthetic oligonucleotide
attgtgcgcgcaacatcagttcacgatctaattcatatattgttcgaggtgtcac

SEQ ID NO: 242656 - DNA, 54 bp, Artificial
  Synthetic oligonucleotide
attgtgagtgttactgccgaaaatcctgcttttgggacaccgttaatcggtttc

SEQ ID NO: 242657 - DNA, 55 bp, Artificial
  Synthetic oligonucleotide
cgcgacgagttatgacgtggggtgctcaaggtatatcggaaaataagccatatga

SEQ ID NO: 242658 - DNA, 55 bp, Artificial
  Synthetic oligonucleotide
cgcgcattggttacagctggaccaactattgaagttatcgatccagtcagatttg

SEQ ID NO: 242659 - DNA, 55 bp, Artificial
  Synthetic oligonucleotide
cgctatcctgttaactggtcctgcatcaatgttagcgatagaatttggttggttc

SEQ ID NO: 242660 - DNA, 55 bp, Artificial
  Synthetic oligonucleotide
cgctggccaaatggacgttatgccaacaattcttcacttagtaggtatcgatagt

SEQ ID NO: 242661 - DNA, 55 bp, Artificial
  Synthetic oligonucleotide
cgcttagatgaacctatattaattgacgggttcgtgcctcacacagtcatttaat

SEQ ID NO: 242662 - DNA, 55 bp, Artificial
  Synthetic oligonucleotide
cgcttgatacgtatgagtgtattagcaagtggtagtacaggtaacgccacttacg

SEQ ID NO: 242663 - DNA, 56 bp, Artificial
  Synthetic oligonucleotide
ccaatattcgaatgtgtcactctccaaatcttcccaagctacttgtaaacctaaaa

SEQ ID NO: 242664 - DNA, 55 bp, Artificial
  Synthetic oligonucleotide
cgcttgcaccaaacttcaagacatatgggttttggaaccgtgttggattaggttc

SEQ ID NO: 242665 - DNA, 55 bp, Artificial
  Synthetic oligonucleotide
cggaacaagtctaagttagaaccgtgtttcaagaacttaggaccgattgctgcaa

SEQ ID NO: 242666 - DNA, 55 bp, Artificial
  Synthetic oligonucleotide
cggacaacaggataaggaggaacaatgccattgccatggcacccagcatagctgg

SEQ ID NO: 242667 - DNA, 55 bp, Artificial
  Synthetic oligonucleotide
cggatatacaatcggcaattgacgaaactgcaaaatatcctgtaaaggatacgga

SEQ ID NO: 242668 - DNA, 54 bp, Artificial
  Synthetic oligonucleotide
cctctattcgaaaaattttcaacgtttcaactagaacgatgaccatcgttccta

SEQ ID NO: 242669 - DNA, 55 bp, Artificial
  Synthetic oligonucleotide
cctcttgagtatgtcgcttgcgccaaattacaaaacatatgggttttggaaccgt

SEQ ID NO: 242670 - DNA, 55 bp, Artificial
  Synthetic oligonucleotide
cctgagacataaaacaatgctctacaaagttatattggcagtagttgactgaacg

SEQ ID NO: 242671 - DNA, 55 bp, Artificial
  Synthetic oligonucleotide
cctgatattgcaaatgattttaataaaccacctgcgagtacaaactgggtgaaca

SEQ ID NO: 242672 - DNA, 55 bp, Artificial
  Synthetic oligonucleotide
cctggcgaagtcacgcccgaacaatgtaaccaattaggcttagcactcgctgaaa

SEQ ID NO: 242673 - DNA, 55 bp, Artificial
  Synthetic oligonucleotide
cctggctttataggtagtcccaaaatgaacaaaggccaaggagactggtttgctg

SEQ ID NO: 242674 - DNA, 53 bp, Artificial
  Synthetic oligonucleotide
gattggaaacactttggacaagctgggtttggttatgtaaaatttgagtttcc

SEQ ID NO: 242675 - DNA, 56 bp, Artificial
  Synthetic oligonucleotide
ccacaaatggcgaatatagataagtcacgacaatatataagtcgggaaaaaacgcc

SEQ ID NO: 242676 - DNA, 55 bp, Artificial
  Synthetic oligonucleotide
cctgtaggacgatacccatacgacttctcatggacgcttttgtcaccgacttcgt

SEQ ID NO: 242677 - DNA, 55 bp, Artificial
  Synthetic oligonucleotide
cctgtctctcagatgtcgatttagacgcggaggatcggtatagtcatgcttgata

SEQ ID NO: 242678 - DNA, 55 bp, Artificial
  Synthetic oligonucleotide
ccttaagcgaagggtcttctatcatttccagagctatctcatccgcacttaacgt

SEQ ID NO: 242679 - DNA, 54 bp, Artificial
  Synthetic oligonucleotide
ccttaattaaactgtttcgacgaatgtcggtatagcgtgagctataaaaccgac

SEQ ID NO: 242680 - DNA, 55 bp, Artificial
  Synthetic oligonucleotide
ccttcgaaatttgtgatggcaacgacatatgcaccatgagatttggctacttccg

SEQ ID NO: 242681 - DNA, 53 bp, Artificial
  Synthetic oligonucleotide
cctttctgatgtagagaaatataatggttcggggaaattgtttcccaaaacac

SEQ ID NO: 242682 - DNA, 55 bp, Artificial
  Synthetic oligonucleotide
cctttgatgaacatttagccccatcatttgatgagacattactcattgcgttaac

SEQ ID NO: 242683 - DNA, 55 bp, Artificial
  Synthetic oligonucleotide
cctttggaagtcgaggcgattcaaggatatatttatgaacgtgcccgttatcatc

SEQ ID NO: 242684 - DNA, 55 bp, Artificial
  Synthetic oligonucleotide
cgaaccacttaactgttctttcatctcagaaagcacatcttctggtagaataccc

SEQ ID NO: 242685 - DNA, 55 bp, Artificial
  Synthetic oligonucleotide
cgaagcgcaacgtaacggcttcattcaaagtcttaaagacgacccaagccaaagc

SEQ ID NO: 242686 - DNA, 51 bp, Artificial
  Synthetic oligonucleotide
ccactttagtacctaattagtcacctatagaaggttttaacggctaattag

SEQ ID NO: 242687 - DNA, 55 bp, Artificial
  Synthetic oligonucleotide
cgacaatttaaatcacgctataaagcgcacagagagcttgtggggcgttttatgg

SEQ ID NO: 242688 - DNA, 55 bp, Artificial
  Synthetic oligonucleotide
cgacgacgaataattgcagaaacacgtagcataagctctgcacgatcgttagctg

SEQ ID NO: 242689 - DNA, 54 bp, Artificial
  Synthetic oligonucleotide
cgacgagtaggctacctttctcactttctacgtaagtggcgttacctgtactac

SEQ ID NO: 242690 - DNA, 55 bp, Artificial
  Synthetic oligonucleotide
cgactgtaatcgattctgatgacaactctgataacggaaataattcaggtgctgg

SEQ ID NO: 242691 - DNA, 55 bp, Artificial
  Synthetic oligonucleotide
cgagcaagacgattcggtttaatcatttcgaatctatatgctgtaggtataggac

SEQ ID NO: 242692 - DNA, 55 bp, Artificial
  Synthetic oligonucleotide
cgagcagtaagtgaagcggatacaggaagtccaactcgcggaggcagacctgcga

SEQ ID NO: 242693 - DNA, 55 bp, Artificial
  Synthetic oligonucleotide
cgagcggatagtgttgcgcacgttgtttaggggtgtctagtcgacttttacaatc

SEQ ID NO: 242694 - DNA, 55 bp, Artificial
  Synthetic oligonucleotide
cgagtactttacactttgtagtcgttgacaaacaaggtcaaatgacgagtacgac

SEQ ID NO: 242695 - DNA, 55 bp, Artificial
  Synthetic oligonucleotide
cgataggttaaaacagcatgttagaaatctcatgagtactgatatggcgagagaa

SEQ ID NO: 242696 - DNA, 55 bp, Artificial
  Synthetic oligonucleotide
cgatattaatcaagtcaatcatgccggttggttaggcgtcccagtgccgtttaga

SEQ ID NO: 242697 - DNA, 54 bp, Artificial
  Synthetic oligonucleotide
cccgatttatcaaccttggggggcttcatgcgataccccagtgcccgctttttc

SEQ ID NO: 242698 - DNA, 55 bp, Artificial
  Synthetic oligonucleotide
cgatgaattggtcgttagaaattgcgcgcgcactaacaggcggtataggtatcgt

SEQ ID NO: 242699 - DNA, 55 bp, Artificial
  Synthetic oligonucleotide
attatgtggcgaagtcacatcagaacttaaatcatcttcaagcgttccctctagg

SEQ ID NO: 242700 - DNA, 55 bp, Artificial
  Synthetic oligonucleotide
cgttagaagatatgtttgatgctattattctatgtacaggttcccaacaggctag

SEQ ID NO: 242701 - DNA, 55 bp, Artificial
  Synthetic oligonucleotide
attatgtgcgcgttgtttatagcaggtacacctatatcagcgattgtactaactg

SEQ ID NO: 242702 - DNA, 55 bp, Artificial
  Synthetic oligonucleotide
attataggtgcttataaactctgtgtggttttcttttgacatagcagggctctct

SEQ ID NO: 242703 - DNA, 55 bp, Artificial
  Synthetic oligonucleotide
ctacagacaatgcaagttggggtgtgggccccaacacagagaaattggatttcca

SEQ ID NO: 242704 - DNA, 55 bp, Artificial
  Synthetic oligonucleotide
ctactccactagttcctaaccttatgatgtacaggtcaaattaaagtcattctcg

SEQ ID NO: 242705 - DNA, 54 bp, Artificial
  Synthetic oligonucleotide
ctacttatatgaaggggtaggtatactggaaacaccgtttggtcctattgtatc

SEQ ID NO: 242706 - DNA, 55 bp, Artificial
  Synthetic oligonucleotide
ctagacttcgacgacgtcatacccagcagtcaggcaatgagaaaagaggtacgat

SEQ ID NO: 242707 - DNA, 55 bp, Artificial
  Synthetic oligonucleotide
ctaggaaggtgtctaatcattggttgcgtttaatgagcgttaatgaggaagggcg

SEQ ID NO: 242708 - DNA, 51 bp, Artificial
  Synthetic oligonucleotide
ccgaactattggccgtagttcgggtttttttggtgaattgacttagtcgtc

SEQ ID NO: 242709 - DNA, 55 bp, Artificial
  Synthetic oligonucleotide
ctataagccaagcagttcaatcaggtttagagcaagattgggtaactatgggaac

SEQ ID NO: 242710 - DNA, 54 bp, Artificial
  Synthetic oligonucleotide
ctcaccaataacgtccccaaataataaaccgaccacacctactggaattgtgcc

SEQ ID NO: 242711 - DNA, 55 bp, Artificial
  Synthetic oligonucleotide
atgtgcagctcgcatagctgacatttgcccgaccacatccgtagcattaggaccc

SEQ ID NO: 242712 - DNA, 55 bp, Artificial
  Synthetic oligonucleotide
ctccgattgagttagctgatgaaatgaagatttctaagagtgctgttagtcagtt

SEQ ID NO: 242713 - DNA, 55 bp, Artificial
  Synthetic oligonucleotide
atgtatgcgataaatcacgttacatcaacgccagtgttacgccctttattaacgc

SEQ ID NO: 242714 - DNA, 55 bp, Artificial
  Synthetic oligonucleotide
ctcctacgtgctgttaacgcgattcaaccctagtaggatatgctaaacactgccg

SEQ ID NO: 242715 - DNA, 55 bp, Artificial
  Synthetic oligonucleotide
atgtaaagccgccaaatggtaatgaagaatggactacacgcatgttgatgcacgc

SEQ ID NO: 242716 - DNA, 55 bp, Artificial
  Synthetic oligonucleotide
ctcgtcagaattaattggacccacataacctaaaaggtgtactgttgcttcgttc

SEQ ID NO: 242717 - DNA, 55 bp, Artificial
  Synthetic oligonucleotide
ctctaccctctaacaaattgactgtggaaggttgtgatcttggagcaccaactat

SEQ ID NO: 242718 - DNA, 55 bp, Artificial
  Synthetic oligonucleotide
ctcttcctcaaacgctttacgtgtcgattgtaatttcgtatcacgataatcattg

SEQ ID NO: 242719 - DNA, 54 bp, Artificial
  Synthetic oligonucleotide
cctaaaacgatacaatagtatgctagaaaaagcaactttttttgtgcttcaaac

SEQ ID NO: 242720 - DNA, 55 bp, Artificial
  Synthetic oligonucleotide
ctctttgagtgccttattatgtgcccgtctgactacagcgaactcatattcagcg

SEQ ID NO: 242721 - DNA, 55 bp, Artificial
  Synthetic oligonucleotide
ctgaagggataatttgtttacgcttagtgtcagcaagttgattcgtaatcgtttg

SEQ ID NO: 242722 - DNA, 55 bp, Artificial
  Synthetic oligonucleotide
ctgacaagagataaggggttcagctttaatggttgtgaaatcgtccattcaatag

SEQ ID NO: 242723 - DNA, 55 bp, Artificial
  Synthetic oligonucleotide
ctgatcttcctttatccgtgcagttacagtgattggttgtgtaaaagtccattcg

SEQ ID NO: 242724 - DNA, 55 bp, Artificial
  Synthetic oligonucleotide
atgcatatatgggtggtcgtaatgaagcgtttacgcatggtttaattactggtcg

SEQ ID NO: 242725 - DNA, 55 bp, Artificial
  Synthetic oligonucleotide
ctgcgggaactatagcgttcaaccggcatggttgaccacttttcatgccaacttt

SEQ ID NO: 242726 - DNA, 55 bp, Artificial
  Synthetic oligonucleotide
ctgcgtattttgtgagaacttcgaatgctaagcacacgattgcaggtgctaaaca

SEQ ID NO: 242727 - DNA, 55 bp, Artificial
  Synthetic oligonucleotide
ctgtaacaattcgtggaccatttggtggtggcgtacacacaccagaattacacgc

SEQ ID NO: 242728 - DNA, 54 bp, Artificial
  Synthetic oligonucleotide
cggcacccttaacgaacccaaaacttatcgactggtcggcttaatagcttatgc

SEQ ID NO: 242729 - DNA, 53 bp, Artificial
  Synthetic oligonucleotide
cggcgaacctttaatctacggggtgacattgccgttaggtcgaccattcttta

SEQ ID NO: 242730 - DNA, 60 bp, Artificial
  Synthetic oligonucleotide
cctaatctgaaaatcatacaattgtttcggcctatgcccactgataatccattgactcat

SEQ ID NO: 242731 - DNA, 55 bp, Artificial
  Synthetic oligonucleotide
cggcggtcgagcgaatataatccagtctttcatcgatatatttatgtgtggtctc

SEQ ID NO: 242732 - DNA, 55 bp, Artificial
  Synthetic oligonucleotide
cggctcatcgcattcatttcttgtctagcaacgttctactctagcggaacgtaag

SEQ ID NO: 242733 - DNA, 55 bp, Artificial
  Synthetic oligonucleotide
attgatatacgtgacacgatgaagttggctcctccgggctctcctttggcttctc

SEQ ID NO: 242734 - DNA, 55 bp, Artificial
  Synthetic oligonucleotide
cggtactgctattatgaactttggtcgtgtgatggctggttcattaggaactgca

SEQ ID NO: 242735 - DNA, 55 bp, Artificial
  Synthetic oligonucleotide
cggtatttcggtagccgtagctggagcaatcgtctttgtgggtcttatcgtaccg

SEQ ID NO: 242736 - DNA, 54 bp, Artificial
  Synthetic oligonucleotide
cggtgttatctcagtagaaaacggttatcaaatttacatcggtggtaatggagg

SEQ ID NO: 242737 - DNA, 54 bp, Artificial
  Synthetic oligonucleotide
cgtaaacccaaccgcaaagagccaaagcaaattagtttcagagtgaacgaaggc

SEQ ID NO: 242738 - DNA, 53 bp, Artificial
  Synthetic oligonucleotide
cgtaaacccgaccgcaaagagccgaaacaaattagttttcgtgtgagcgaatc

SEQ ID NO: 242739 - DNA, 55 bp, Artificial
  Synthetic oligonucleotide
cgtaaagataacgcagatgttgaagttatgtctgaacatctatggcgtgtagaag

SEQ ID NO: 242740 - DNA, 55 bp, Artificial
  Synthetic oligonucleotide
cgtacaataactggtgttatcaacgtacgtaaagatttatctaatgcaggagcac

SEQ ID NO: 242741 - DNA, 59 bp, Artificial
  Synthetic oligonucleotide
cctcagttatacgacaatttaaatcacgctataaagcgcacagagagcttgtggggcgt

SEQ ID NO: 242742 - DNA, 55 bp, Artificial
  Synthetic oligonucleotide
cgtactgcggatatttcatttggcacctggatttgagtcgcaaatgacgtaacca

SEQ ID NO: 242743 - DNA, 55 bp, Artificial
  Synthetic oligonucleotide
cgtagagtgcaaacgcttgactcaataacgaaatatcacctatgtatggcgtgac

SEQ ID NO: 242744 - DNA, 55 bp, Artificial
  Synthetic oligonucleotide
cgtatgagctctttgtcatttgaagtacgatgacttttagccagtgcaagtgtgt

SEQ ID NO: 242745 - DNA, 55 bp, Artificial
  Synthetic oligonucleotide
cgtcaggacgtgttaaattcacacgcaaatgatactgagttaagtgatactgagt

SEQ ID NO: 242746 - DNA, 55 bp, Artificial
  Synthetic oligonucleotide
cgtcagtcgtagttgcccctaatggaaacccgattacagtacacacaagtacatc

SEQ ID NO: 242747 - DNA, 55 bp, Artificial
  Synthetic oligonucleotide
attctatgtttacgagattatcgacggttggtgtcgtgtacacggtcctagtgat

SEQ ID NO: 242748 - DNA, 55 bp, Artificial
  Synthetic oligonucleotide
attccatggcgcacctttaattacttgtttcgtatgcacggctttagatttacgc

SEQ ID NO: 242749 - DNA, 55 bp, Artificial
  Synthetic oligonucleotide
cgtcggagttccgctaattgtgttcgtctcactatcaaatgtgacgccagacggc

SEQ ID NO: 242750 - DNA, 55 bp, Artificial
  Synthetic oligonucleotide
cgtctgttcagacaatgttcgaatctcaccggttatatgtacattcgtcgataac

SEQ ID NO: 242751 - DNA, 55 bp, Artificial
  Synthetic oligonucleotide
cgtcttagagttcaagccgactgatgaaggttatttgaagttacataagacatgg

SEQ ID NO: 242752 - DNA, 57 bp, Artificial
  Synthetic oligonucleotide
cctgtatcaacgtttgtaaaagcaactgttatacctgggacaattgtatttgctgaa

SEQ ID NO: 242753 - DNA, 55 bp, Artificial
  Synthetic oligonucleotide
cgtgacgctcgtataagttacgaatggtacaaaatggttgtaagtatcatcggtg

SEQ ID NO: 242754 - DNA, 55 bp, Artificial
  Synthetic oligonucleotide
cgtgatgtcctagtgctggactacgatgatatacctaagttaagaatactacatg

SEQ ID NO: 242755 - DNA, 55 bp, Artificial
  Synthetic oligonucleotide
cgtgccggacaacgtgttatggagagtatcacaaactttatcgaaaaggacctga

SEQ ID NO: 242756 - DNA, 52 bp, Artificial
  Synthetic oligonucleotide
cgtgttactcctcgccaaagtttgtaaacgacttacctaaagaaaagatgtg

SEQ ID NO: 242757 - DNA, 55 bp, Artificial
  Synthetic oligonucleotide
cgttacgctaagattgcacttggtgtgagctaacataaacttgcgttgcctgtag

SEQ ID NO: 242758 - DNA, 55 bp, Artificial
  Synthetic oligonucleotide
cagctcgtgacaggacagcatcttgtagaagtttcagaacatgattatgtgcgcc

SEQ ID NO: 242759 - DNA, 55 bp, Artificial
  Synthetic oligonucleotide
caatgaaccacccgtagaatagcctttcaagttgcctaagttcattgtttcgaag

SEQ ID NO: 242760 - DNA, 54 bp, Artificial
  Synthetic oligonucleotide
caggaaagaatgctacacaatttaccaacgcttctccctctaattatttggggt

SEQ ID NO: 242761 - DNA, 55 bp, Artificial
  Synthetic oligonucleotide
caggatagatttaacgaatatgttaatcaacgtggttatgatctggaacgtgggc

SEQ ID NO: 242762 - DNA, 55 bp, Artificial
  Synthetic oligonucleotide
caggcgcagaaatgcaagcacggagtgcgttaagcatttgggcggagcctgcgac

SEQ ID NO: 242763 - DNA, 54 bp, Artificial
  Synthetic oligonucleotide
cgaaaattgaagaaggtttacaacaagttcagacattcctaactgggcttatcg

SEQ ID NO: 242764 - DNA, 55 bp, Artificial
  Synthetic oligonucleotide
cagggtaataggtaaagagaatgacataccttggagaatcccagaggattgggag

SEQ ID NO: 242765 - DNA, 55 bp, Artificial
  Synthetic oligonucleotide
caggtttgtagatgatctccaaagagtttacgacaaaatgttagatatcagatat

SEQ ID NO: 242766 - DNA, 54 bp, Artificial
  Synthetic oligonucleotide
cagtaacaccaagggttctaaggtgttcaatgccgcttgtaatagttaccctta

SEQ ID NO: 242767 - DNA, 55 bp, Artificial
  Synthetic oligonucleotide
cagtccaacaaatcttgaggagttagtcattggatttctggcttcggaaggtgcc

SEQ ID NO: 242768 - DNA, 55 bp, Artificial
  Synthetic oligonucleotide
cagtgtcaaacctctaaagacagtcattgtagccaaagtcgctataaatggcgcc

SEQ ID NO: 242769 - DNA, 55 bp, Artificial
  Synthetic oligonucleotide
caatcgcgatggtttgtaatcctgatgagcagtagcgattcactgtttgacccgg

SEQ ID NO: 242770 - DNA, 55 bp, Artificial
  Synthetic oligonucleotide
caatccatgcacgtcctgataatgtgttcgcagcattcgttgcgtctgtagttga

SEQ ID NO: 242771 - DNA, 55 bp, Artificial
  Synthetic oligonucleotide
cataattaaaggctctacgtaaaattgacgtatttgcttctttcgctagcctcgt

SEQ ID NO: 242772 - DNA, 55 bp, Artificial
  Synthetic oligonucleotide
catacaattgtttcggcctatgcccactgataatccattgactcatcaactcacc

SEQ ID NO: 242773 - DNA, 55 bp, Artificial
  Synthetic oligonucleotide
catacccatccgcatgtatatgacgttgattgaatagtaaatcagatactgtacc

SEQ ID NO: 242774 - DNA, 51 bp, Artificial
  Synthetic oligonucleotide
cgaaagcactttagaaaacgaccctaaagttgtggcaacagaaaaagggta

SEQ ID NO: 242775 - DNA, 55 bp, Artificial
  Synthetic oligonucleotide
catatgttctttgcgaagagatcaggtatcatgtgtcccgaatttgctatcggca

SEQ ID NO: 242776 - DNA, 55 bp, Artificial
  Synthetic oligonucleotide
catattcgcctaaagtgcccaaacttgcgccgaacgccatacttgtcagtgcgcc

SEQ ID NO: 242777 - DNA, 55 bp, Artificial
  Synthetic oligonucleotide
caaggtaaaagcagatacttgggatagacgtaatatgcgtgttgaatttaatccc

SEQ ID NO: 242778 - DNA, 55 bp, Artificial
  Synthetic oligonucleotide
catcacgttgatttagcgtaactaacgattgattaacaacccaccaattatggcc

SEQ ID NO: 242779 - DNA, 55 bp, Artificial
  Synthetic oligonucleotide
catcattcttattagaatggaagactattttcatcgaggctttctcactgtcctg

SEQ ID NO: 242780 - DNA, 55 bp, Artificial
  Synthetic oligonucleotide
catcccactaagtggcgcaaatttaacgaacggttgtgtcatcgtgtcacgtgct

SEQ ID NO: 242781 - DNA, 55 bp, Artificial
  Synthetic oligonucleotide
catcgaggagaagcttagcaaacttgaaagatacttcacgaacgtgccggaagcg

SEQ ID NO: 242782 - DNA, 55 bp, Artificial
  Synthetic oligonucleotide
catcgccgctctaccacctacaatagcagtgacgacagcaataatgaacgaagta

SEQ ID NO: 242783 - DNA, 55 bp, Artificial
  Synthetic oligonucleotide
catcgcctcagttttcggataaccgcctagcgcaggtgtgggatgcagtgcacgt

SEQ ID NO: 242784 - DNA, 55 bp, Artificial
  Synthetic oligonucleotide
catgaagttggtatgagtacagtacatcgtatcgctcatgaaattgaggaggata

SEQ ID NO: 242785 - DNA, 60 bp, Artificial
  Synthetic oligonucleotide
gattgtattcagagacactgagatgttccagttgaatcttccgaataagattgtcaccaa

SEQ ID NO: 242786 - DNA, 56 bp, Artificial
  Synthetic oligonucleotide
cgaatggcattgttaatgtgatccccaatcctataaataaagcctatttaaagggc

SEQ ID NO: 242787 - DNA, 55 bp, Artificial
  Synthetic oligonucleotide
catttaaaggcattgggacagttaagcgaatgcttaagcaacgacttatgtcgac

SEQ ID NO: 242788 - DNA, 55 bp, Artificial
  Synthetic oligonucleotide
catttgtatgggcatctacaatatcacgacattgtttagcagcttctacagggtc

SEQ ID NO: 242789 - DNA, 55 bp, Artificial
  Synthetic oligonucleotide
cacacctaaagttacaccgatctgtcacagataaccgtaagtcacggatgggacg

SEQ ID NO: 242790 - DNA, 55 bp, Artificial
  Synthetic oligonucleotide
cacattttgaaacctgcatgggctactttggaaagtttaaaagaacaagcaatgg

SEQ ID NO: 242791 - DNA, 55 bp, Artificial
  Synthetic oligonucleotide
caccacatatgcattatggtgtcgttccaataactgatgacggtcgtttaagtgc

SEQ ID NO: 242792 - DNA, 55 bp, Artificial
  Synthetic oligonucleotide
caccgcgttgctttaaggcttgtgcaagtgcataacccatcttgccagatgaccg

SEQ ID NO: 242793 - DNA, 55 bp, Artificial
  Synthetic oligonucleotide
caccttctgggtttgcttgggtaattgatccatcatcatttagatttataggatg

SEQ ID NO: 242794 - DNA, 55 bp, Artificial
  Synthetic oligonucleotide
cacgaacgattactaagccgataaccgatatgcgtaaccaaaccgtcgagatgtc

SEQ ID NO: 242795 - DNA, 55 bp, Artificial
  Synthetic oligonucleotide
cacacaagtaataatcacacttgtcgttgtttcgtctactttcgctacttgccct

SEQ ID NO: 242796 - DNA, 55 bp, Artificial
  Synthetic oligonucleotide
cacgtatgatatgtagttcaggtaacgttgactcaaaccgattaagaacgggtac

SEQ ID NO: 242797 - DNA, 60 bp, Artificial
  Synthetic oligonucleotide
cgacagctattaactttcggttgcaaagctctaggatttttaatggacgcagcgcatcac

SEQ ID NO: 242798 - DNA, 55 bp, Artificial
  Synthetic oligonucleotide
cacgttcatcatgggtagctagcgtcgacatgaataaatgcgtctcttgaagtag

SEQ ID NO: 242799 - DNA, 55 bp, Artificial
  Synthetic oligonucleotide
cacgttttggctaaacaatcgtaacaaataataaggcgacatagctgcaccaaaa

SEQ ID NO: 242800 - DNA, 55 bp, Artificial
  Synthetic oligonucleotide
cactagcgtactgagtcctttaggatgcccgaagaatcccgtacgtggcgtacta

SEQ ID NO: 242801 - DNA, 55 bp, Artificial
  Synthetic oligonucleotide
cactattttcggtccaaatcgcgccgctaatccgggtgcaattggtgcaaacacc

SEQ ID NO: 242802 - DNA, 55 bp, Artificial
  Synthetic oligonucleotide
cactcaacatccaacatatcgagagtctaagcggacaaattgcgttaatgacagg

SEQ ID NO: 242803 - DNA, 55 bp, Artificial
  Synthetic oligonucleotide
cactggtatgcctagtactcttatggccataccataaatacccacttctgtattg

SEQ ID NO: 242804 - DNA, 55 bp, Artificial
  Synthetic oligonucleotide
cacttcgtttccagacttttgaccacttatgtatacgactgcctgatatttgcga

SEQ ID NO: 242805 - DNA, 55 bp, Artificial
  Synthetic oligonucleotide
cacttttaagatgacaaggatcgaagcgattcaactctgttttatgtatcgatcc

SEQ ID NO: 242806 - DNA, 55 bp, Artificial
  Synthetic oligonucleotide
cacaaccatttggtataccagcgcaatttggtggtccgcattgtggtttctttgc

SEQ ID NO: 242807 - DNA, 55 bp, Artificial
  Synthetic oligonucleotide
caattaccttccgaacatgatttagttgccacttataatgcctctcgtgagaccg

SEQ ID NO: 242808 - DNA, 56 bp, Artificial
  Synthetic oligonucleotide
cgactgatgaaggttatttgaagttacataagacatggttttgtaaatcaaaatta

SEQ ID NO: 242809 - DNA, 55 bp, Artificial
  Synthetic oligonucleotide
cagaaataccaccgatatttacgaatgtttggcttccgatataactagctatccc

SEQ ID NO: 242810 - DNA, 55 bp, Artificial
  Synthetic oligonucleotide
cagaaggtgtttcttgaaaatgatactatattgatggccacacaacgcggctcgt

SEQ ID NO: 242811 - DNA, 55 bp, Artificial
  Synthetic oligonucleotide
caatgtggtaacgtcttagagttcaagccgactgatgaaggttatttgaagttac

SEQ ID NO: 242812 - DNA, 55 bp, Artificial
  Synthetic oligonucleotide
cagatactacatccctgattatgtaacgcgtcacgtcggtcaagttcaagccaaa

SEQ ID NO: 242813 - DNA, 55 bp, Artificial
  Synthetic oligonucleotide
cagatcttccttcaggttatgaccatctgtgccagttcgtaatgtctggtcaact

SEQ ID NO: 242814 - DNA, 55 bp, Artificial
  Synthetic oligonucleotide
cagcaaagcgagatactataacctcaatacgcctcacctaaacactgtttatgcc

SEQ ID NO: 242815 - DNA, 55 bp, Artificial
  Synthetic oligonucleotide
cagcacgctaaatctgataacagcactttcaaacctcatcaaagagtattggtat

SEQ ID NO: 242816 - DNA, 55 bp, Artificial
  Synthetic oligonucleotide
cagcatgactttatcgtaatatggcagacgattgaatcgtgttcttgggcacgtt

SEQ ID NO: 242817 - DNA, 55 bp, Artificial
  Synthetic oligonucleotide
caatgcgtaccttaagtattagcctacgcctatagtgatgacattcttatcgaat

SEQ ID NO: 242818 - DNA, 55 bp, Artificial
  Synthetic oligonucleotide
ccccttatattcagttattctcccctcgtcaatttcccatatagtagtacataag

SEQ ID NO: 242819 - DNA, 58 bp, Artificial
  Synthetic oligonucleotide
cgagaaaagaaaatggcaaatgtagattattttgaactcttgcatattcttgaattta

SEQ ID NO: 242820 - DNA, 55 bp, Artificial
  Synthetic oligonucleotide
caacgagtacatcattgtcactaagtgcctcaatgaatcaaagcggagtagactc

SEQ ID NO: 242821 - DNA, 55 bp, Artificial
  Synthetic oligonucleotide
ccctagcaacacattgatgtagaatggattcagtcgaataggctcctcagaccct

SEQ ID NO: 242822 - DNA, 55 bp, Artificial
  Synthetic oligonucleotide
ccctcacatgcatttaggtgttgtgcctatgcgtgatggaaaactgcaaggaaaa

SEQ ID NO: 242823 - DNA, 55 bp, Artificial
  Synthetic oligonucleotide
ccgaacgcgtttgaattctacttgaacgtcggcttgtttgttgacgttgaggcat

SEQ ID NO: 242824 - DNA, 55 bp, Artificial
  Synthetic oligonucleotide
ccgaagggaaattaagtgcgaaacgagtgttcaatcgtcaaacgttgcgtgacat

SEQ ID NO: 242825 - DNA, 55 bp, Artificial
  Synthetic oligonucleotide
ccgaccccagttcctaaactcacaatactgtccgataaattatctaatgacgagg

SEQ ID NO: 242826 - DNA, 55 bp, Artificial
  Synthetic oligonucleotide
ccgatgtctctcctggtgtatacttgttcgttattgtcgtaccgttgatgtctgt

SEQ ID NO: 242827 - DNA, 55 bp, Artificial
  Synthetic oligonucleotide
ccgcccttgatgattaacaggtataaagtgaaggtgcatatgaggcgctgattca

SEQ ID NO: 242828 - DNA, 55 bp, Artificial
  Synthetic oligonucleotide
ccgctaataaatatcgtcattttgcaggtagttacgcggttcagtggactatgat

SEQ ID NO: 242829 - DNA, 55 bp, Artificial
  Synthetic oligonucleotide
ccgctaatttagcatttcgttgattcataggggaactcctttctattcgttatcg

SEQ ID NO: 242830 - DNA, 58 bp, Artificial
  Synthetic oligonucleotide
cgagctgttagaagtgacgccgttttggtaaacgaatggattatcacaagtgatcgaa

SEQ ID NO: 242831 - DNA, 55 bp, Artificial
  Synthetic oligonucleotide
ccgctatctttacaggtacatcattctgtttgtgatggttatcatgcaggattgt

SEQ ID NO: 242832 - DNA, 55 bp, Artificial
  Synthetic oligonucleotide
ccgctatgaaccccgtgcgttatgctggatgctcgttcctgagacgttcaccggc

SEQ ID NO: 242833 - DNA, 55 bp, Artificial
  Synthetic oligonucleotide
ccgctttgattcattgaggcacttagtgacaatgatgtactcgttgagtcagaca

SEQ ID NO: 242834 - DNA, 55 bp, Artificial
  Synthetic oligonucleotide
ccggaaggagtaacgtttaatccgacaacaaacacaataagcggcatagccacaa

SEQ ID NO: 242835 - DNA, 55 bp, Artificial
  Synthetic oligonucleotide
ccggcaaccctactaaaggtagtaatacgctgtttagatcatggaatggcactag

SEQ ID NO: 242836 - DNA, 48 bp, Artificial
  Synthetic oligonucleotide
ccggttaagtggtcaaactttgggaaaatctcaacccgaattaagttt

SEQ ID NO: 242837 - DNA, 55 bp, Artificial
  Synthetic oligonucleotide
ccgtatttaagattacattgtacatccttcgaaaccatagtagctgcgattccag

SEQ ID NO: 242838 - DNA, 55 bp, Artificial
  Synthetic oligonucleotide
ccgtgtagtattcccagtcctcggctcccatcatttcagggctaagactgatagg

SEQ ID NO: 242839 - DNA, 55 bp, Artificial
  Synthetic oligonucleotide
caaagtggttgataaatcgaatacagcgctaaaagtgatgacaaaaggcgttaca

SEQ ID NO: 242840 - DNA, 55 bp, Artificial
  Synthetic oligonucleotide
cctaccacgagttgtacagtatacacttcgcctgattttgcgctagacggtatta

SEQ ID NO: 242841 - DNA, 60 bp, Artificial
  Synthetic oligonucleotide
cgaggaatataaaaagcagttcaaccatgaattccaatacaatcaagtcagtatcgctga

SEQ ID NO: 242842 - DNA, 55 bp, Artificial
  Synthetic oligonucleotide
cctatatgtgcatggcgaaaagcgagaaaagatgcgttaggtttatcattgatga

SEQ ID NO: 242843 - DNA, 55 bp, Artificial
  Synthetic oligonucleotide
cctattgaaaatgtggactacatgcgtcgcctataagtctctaatatagtcatgc

SEQ ID NO: 242844 - DNA, 55 bp, Artificial
  Synthetic oligonucleotide
cctcattcgcttctacgtatgaagtacttccaaaaccaaatagtaaagcaacgct

SEQ ID NO: 242845 - DNA, 55 bp, Artificial
  Synthetic oligonucleotide
cctcgtttgcaagctgttttatccccgtagctttagctacttcgacagcgcccac

SEQ ID NO: 242846 - DNA, 55 bp, Artificial
  Synthetic oligonucleotide
ccaaatcattagtacacccattgcaccaacaattacagatatcggcaaccaatgt

SEQ ID NO: 242847 - DNA, 55 bp, Artificial
  Synthetic oligonucleotide
ccaacaattatagttggaccagactactatatgggaattggtagccctggtggaa

SEQ ID NO: 242848 - DNA, 55 bp, Artificial
  Synthetic oligonucleotide
ccaacagtttaaagtatcgcaacttggcagcgtatggggcatgacattacgtatg

SEQ ID NO: 242849 - DNA, 55 bp, Artificial
  Synthetic oligonucleotide
ccaacgctaggaaaaggtgaagcaatcgtaagcatacaaggtgcaaacaatacgc

SEQ ID NO: 242850 - DNA, 55 bp, Artificial
  Synthetic oligonucleotide
caacttagtcgaagtatctcaataaagcgtaagacactcgagttccccacacccc

SEQ ID NO: 242851 - DNA, 55 bp, Artificial
  Synthetic oligonucleotide
ccaagtgctataaaccaacgtcgtatgaattttgaagagcgtcgttcattcagtc

SEQ ID NO: 242852 - DNA, 58 bp, Artificial
  Synthetic oligonucleotide
cgatccattgatgttactttcagcttttgcctgaggggcatgtaaacccgataataaa

SEQ ID NO: 242853 - DNA, 55 bp, Artificial
  Synthetic oligonucleotide
ccaataactacatggtgttatcgggaggtcagctgttagcacttatattttgtta

SEQ ID NO: 242854 - DNA, 55 bp, Artificial
  Synthetic oligonucleotide
ccaatgtgcaactggaggagagcaatgaagcatggtattcagtcacaaaaggttg

SEQ ID NO: 242855 - DNA, 55 bp, Artificial
  Synthetic oligonucleotide
caactgcattaaaagctggttctgctatggcacatagtgttaatacgctaaatgc

SEQ ID NO: 242856 - DNA, 54 bp, Artificial
  Synthetic oligonucleotide
ccaccgattgcccacggtacaattttcttaagccgaattgttgcctcgtttgaa

SEQ ID NO: 242857 - DNA, 55 bp, Artificial
  Synthetic oligonucleotide
ccacttcgtttaatcaaaactgggacagctccaatcaattcaaaaggcaaattcg

SEQ ID NO: 242858 - DNA, 55 bp, Artificial
  Synthetic oligonucleotide
caactcgcaatacagttgccggggatgattgtagtagcgattgctatttacgtgt

SEQ ID NO: 242859 - DNA, 55 bp, Artificial
  Synthetic oligonucleotide
ccagcaggtacaaaacacgatgctactgggtctgatcaaccgttaggtagtttgt

SEQ ID NO: 242860 - DNA, 55 bp, Artificial
  Synthetic oligonucleotide
ccaggtgtacatattggaagtggtacgcaaatcggagaagatacagtcattggcc

SEQ ID NO: 242861 - DNA, 53 bp, Artificial
  Synthetic oligonucleotide
ccagttataccaatgaattgaaagggttatacatcgccgggaatagttaccct

SEQ ID NO: 242862 - DNA, 55 bp, Artificial
  Synthetic oligonucleotide
ccataaatgcctaaattcgctagtattggattaccacgatactcagtccacatag

SEQ ID NO: 242863 - DNA, 50 bp, Artificial
  Synthetic oligonucleotide
cgattccttaaaacgaatataaaaaatcgacgaaggtcgattatggtttt

SEQ ID NO: 242864 - DNA, 55 bp, Artificial
  Synthetic oligonucleotide
ccatccttgactgtacaggtagcaatggcaggtgccatgttgattggtctgcatc

SEQ ID NO: 242865 - DNA, 55 bp, Artificial
  Synthetic oligonucleotide
ccattaagagtgcgcctacccataccgacagtgcagtatagaatggtgtcatacc

SEQ ID NO: 242866 - DNA, 55 bp, Artificial
  Synthetic oligonucleotide
ccatttacaaagttaaaacctgtatcgactagatctttagcgatactactaggcg

SEQ ID NO: 242867 - DNA, 55 bp, Artificial
  Synthetic oligonucleotide
ccatttgaatgatgcactaaccgcaccacccatagattctacgttacctacttgg

SEQ ID NO: 242868 - DNA, 55 bp, Artificial
  Synthetic oligonucleotide
cccaactcgcattgcctgtagaatttctttccgaaattctctgtgttggggcccc

SEQ ID NO: 242869 - DNA, 54 bp, Artificial
  Synthetic oligonucleotide
cccaagaaagtaccaactcaacacacacagaaattgtaggttccgaccaataag

SEQ ID NO: 242870 - DNA, 55 bp, Artificial
  Synthetic oligonucleotide
cccacgatactctagcaaataagcctctgcgatcacctctaacactcttaggtgc

SEQ ID NO: 242871 - DNA, 55 bp, Artificial
  Synthetic oligonucleotide
cccatcaagtacggcgtgctagaacgaagtggatagcaaagccagtgcttgccaa

SEQ ID NO: 242872 - DNA, 55 bp, Artificial
  Synthetic oligonucleotide
cccattaaccgtatcgctagccacaaatatgttttgttcgctcatacatcccacc

SEQ ID NO: 242873 - DNA, 55 bp, Artificial
  Synthetic oligonucleotide
ccccaattatcgccttctatttgttccagatcctggcccataaacttcgcgtgtc

SEQ ID NO: 242874 - DNA, 56 bp, Artificial
  Synthetic oligonucleotide
cgattttattggggtttagtgaaacatgaagatcgctttactgaacgtcataacca

SEQ ID NO: 242875 - DNA, 54 bp, Artificial
  Synthetic oligonucleotide
cccctgtaagaggaattgtagctgatatacctcctaaatttacgaacgtttgac

SEQ ID NO: 242876 - DNA, 55 bp, Artificial
  Synthetic oligonucleotide
gacacctcagctatgctgagtgacacggagtggcattgtgtccccttatgctctt

SEQ ID NO: 242877 - DNA, 55 bp, Artificial
  Synthetic oligonucleotide
gacatagctaagcgactgaaagttcgaagttttactggtgcagtgctagttgacg

SEQ ID NO: 242878 - DNA, 55 bp, Artificial
  Synthetic oligonucleotide
gacatagttcgtgctacctttcgtgcgtccttcattgccagtgatttcttgtgac

SEQ ID NO: 242879 - DNA, 55 bp, Artificial
  Synthetic oligonucleotide
gacatatccgcctgtaagtcacgataatccgtagcattacttgcttcggtacctg

SEQ ID NO: 242880 - DNA, 55 bp, Artificial
  Synthetic oligonucleotide
gaccaccccttgcttataaagcgtacgtaaatgatgagatgcatttgctatcgta

SEQ ID NO: 242881 - DNA, 55 bp, Artificial
  Synthetic oligonucleotide
gacccaatggttttggaacagcactagacattttgatgtcacaagaaggcacatt

SEQ ID NO: 242882 - DNA, 55 bp, Artificial
  Synthetic oligonucleotide
gaccctttccgtcaccttgaacgtcccacagaatctcttgctgtcgctgtttaga

SEQ ID NO: 242883 - DNA, 55 bp, Artificial
  Synthetic oligonucleotide
gaccgcctacgtgagcgttaggatcgttccaaactttagcactagctttgcgtgc

SEQ ID NO: 242884 - DNA, 55 bp, Artificial
  Synthetic oligonucleotide
gacgatcctgtaatgcaaattgaaagccatatcggcaatgaagttattgcagcaa

SEQ ID NO: 242885 - DNA, 60 bp, Artificial
  Synthetic oligonucleotide
cgcaaaatggcccgatttaagcacaccctttattccgttaatgcgccatgacagccatga

SEQ ID NO: 242886 - DNA, 55 bp, Artificial
  Synthetic oligonucleotide
gacgccataatcgctaagataccataaggtgttaggcgtaaaacgaatgtaacga

SEQ ID NO: 242887 - DNA, 55 bp, Artificial
  Synthetic oligonucleotide
gacggaaacctatacctaccgcactcactaataataatgcgccaaacactggata

SEQ ID NO: 242888 - DNA, 55 bp, Artificial
  Synthetic oligonucleotide
gacggacggtcattccccagtagatcaagggcaagaaaagacagccggcttcggc

SEQ ID NO: 242889 - DNA, 55 bp, Artificial
  Synthetic oligonucleotide
gacggtatggcgcaaaatcctcgtgtaacacgtgatgacgtgaacgttgcagacc

SEQ ID NO: 242890 - DNA, 55 bp, Artificial
  Synthetic oligonucleotide
gacgtccaatcggcataccaccgaatactgtcgcaacttggacacgttgtccacg

SEQ ID NO: 242891 - DNA, 55 bp, Artificial
  Synthetic oligonucleotide
gacgtgcttttaggtctaaagcgcgtatttgaacagtgtctatcacaccagatac

SEQ ID NO: 242892 - DNA, 53 bp, Artificial
  Synthetic oligonucleotide
gacgttgagcctcggaacccttaacaatcccaaaacttgtcgaatggtcggct

SEQ ID NO: 242893 - DNA, 55 bp, Artificial
  Synthetic oligonucleotide
gactctttaatagacatttcttggggaataggaacaatccactctccaggcactt

SEQ ID NO: 242894 - DNA, 55 bp, Artificial
  Synthetic oligonucleotide
gactgatgacgaagaaagaaatttgcagcgtttagctgatttggaggaaggactt

SEQ ID NO: 242895 - DNA, 55 bp, Artificial
  Synthetic oligonucleotide
gacttggcggatttatggcagagttttcacatcgcttaccattctatttcgcagg

SEQ ID NO: 242896 - DNA, 57 bp, Artificial
  Synthetic oligonucleotide
gattgtccttcttcagtattggtatttatgcctaaattaagtacttctaaatggata

SEQ ID NO: 242897 - DNA, 57 bp, Artificial
  Synthetic oligonucleotide
cgcaagttgaatgggtcgatttatggcaaaaagcattacaagttaattatcgaccag

SEQ ID NO: 242898 - DNA, 55 bp, Artificial
  Synthetic oligonucleotide
gagagaaataggatcaccaattccaacagacaatgcaagttggcggggccccaac

SEQ ID NO: 242899 - DNA, 55 bp, Artificial
  Synthetic oligonucleotide
gagaggttcaagtgcagtctaacgattcaatcagacgtaacatggccgtattctc

SEQ ID NO: 242900 - DNA, 55 bp, Artificial
  Synthetic oligonucleotide
gagcaaactttggcgtactcgtgttggaagtcatttatcgaaccaacgacatgtg

SEQ ID NO: 242901 - DNA, 55 bp, Artificial
  Synthetic oligonucleotide
gagcaactcaatcgctcatttgaaggagggcagtcgtaaatgaatgaattaacgg

SEQ ID NO: 242902 - DNA, 55 bp, Artificial
  Synthetic oligonucleotide
gagcattacaagttgactatcgacctgttgctaatgttaaagcgatcaaaccgaa

SEQ ID NO: 242903 - DNA, 55 bp, Artificial
  Synthetic oligonucleotide
atgacacacgtggtaaagaaacggcacgtgaattgaacggagacttcattgagtt

SEQ ID NO: 242904 - DNA, 55 bp, Artificial
  Synthetic oligonucleotide
gaaaagggcctaacttccaattgaatccccaaacaagtgcacgatcgatgtcttg

SEQ ID NO: 242905 - DNA, 55 bp, Artificial
  Synthetic oligonucleotide
gaaactgagcatatcgcaactgctttagaaacacaaggtagtaaattccaacctt

SEQ ID NO: 242906 - DNA, 55 bp, Artificial
  Synthetic oligonucleotide
gaaacttcgtgaagatgtatatggaactgtttggagaaatgttgggattaatgaa

SEQ ID NO: 242907 - DNA, 55 bp, Artificial
  Synthetic oligonucleotide
gaaatttgggtatctagattctccaatagtactgttgttgacgcctgacgattta

SEQ ID NO: 242908 - DNA, 56 bp, Artificial
  Synthetic oligonucleotide
cgcagaacatacggtttaatgacttattgtaaaataagtctagtatgttagactta

SEQ ID NO: 242909 - DNA, 55 bp, Artificial
  Synthetic oligonucleotide
gaacaagcaagacagagagaacttgaacaggcaagacgagagaaaatcaagcgag

SEQ ID NO: 242910 - DNA, 55 bp, Artificial
  Synthetic oligonucleotide
atgaaggcatggtcttgtacttagatagaaacacacgcacagctaaggggtacta

SEQ ID NO: 242911 - DNA, 55 bp, Artificial
  Synthetic oligonucleotide
gaacctctcccttatgtttacacctaaatcggttaaatgcgctctaaagcgctct

SEQ ID NO: 242912 - DNA, 55 bp, Artificial
  Synthetic oligonucleotide
atgaacgttgcaataccacatgctaaatctcatgcagttaaacgtcctatcgtcg

SEQ ID NO: 242913 - DNA, 55 bp, Artificial
  Synthetic oligonucleotide
gaacgtaaagaaaatgcagatgttgatgtaagtgctgaacatctatggcgtgttg

SEQ ID NO: 242914 - DNA, 55 bp, Artificial
  Synthetic oligonucleotide
gaacgtagacccaaatccctgacgtatgtcatcacatcctctcgggtatgaagat

SEQ ID NO: 242915 - DNA, 55 bp, Artificial
  Synthetic oligonucleotide
gaactggttacaatagcgacggagagttaggttattgggataagttagagccact

SEQ ID NO: 242916 - DNA, 55 bp, Artificial
  Synthetic oligonucleotide
gaagcatttagacgacagttaaatgaactttggggagaataattagctatccagc

SEQ ID NO: 242917 - DNA, 55 bp, Artificial
  Synthetic oligonucleotide
gaagcgatctgcgtccgttctgcaatcgggccatattgttgaggaaagtaaacac

SEQ ID NO: 242918 - DNA, 55 bp, Artificial
  Synthetic oligonucleotide
atgaaaagttaaggtcatctgccgaaactttgaatatgagtgtgccgagtttcgt

SEQ ID NO: 242919 - DNA, 60 bp, Artificial
  Synthetic oligonucleotide
cgccagcttctatgttggggccccgccaacttgcattgtctgttggaattggtgatccaa

SEQ ID NO: 242920 - DNA, 55 bp, Artificial
  Synthetic oligonucleotide
gaaggacgcacttcatctgctttgtttatgaaactagtagaagaaattggcgagg

SEQ ID NO: 242921 - DNA, 55 bp, Artificial
  Synthetic oligonucleotide
gaagggcaaatggatttgataagggagtgcaatacattcttgagttttgtggcag

SEQ ID NO: 242922 - DNA, 55 bp, Artificial
  Synthetic oligonucleotide
gaaggtaagctttcatcttgatcgagtgtccctgataatacaactggtacactgg

SEQ ID NO: 242923 - DNA, 55 bp, Artificial
  Synthetic oligonucleotide
gaagttaacaaacagacagatacatcattagatgtgaaaaccccagcatgccgac

SEQ ID NO: 242924 - DNA, 55 bp, Artificial
  Synthetic oligonucleotide
atcgggaggcaactacgcattaagcgcaggacgtgcattgaagcgccatgcatcg

SEQ ID NO: 242925 - DNA, 55 bp, Artificial
  Synthetic oligonucleotide
gaatatacttgctgggatcgttgtagcactagcattaataccagaagcaattgcg

SEQ ID NO: 242926 - DNA, 55 bp, Artificial
  Synthetic oligonucleotide
gaattcttggaacgctctagctcaaaggattagaactgttggtacagtcatatcc

SEQ ID NO: 242927 - DNA, 55 bp, Artificial
  Synthetic oligonucleotide
gacaacaccaatcatcttacctcgattcttaggtgaagttaacatggcagtcaac

SEQ ID NO: 242928 - DNA, 55 bp, Artificial
  Synthetic oligonucleotide
atccattacgctgttgccattgcaagcataaatcatattgatctaacaaaggcca

SEQ ID NO: 242929 - DNA, 55 bp, Artificial
  Synthetic oligonucleotide
gacacatgaaaagtgttgaagtgccaacgggtgaaaagtccatgtttggtttggg

SEQ ID NO: 242930 - DNA, 57 bp, Artificial
  Synthetic oligonucleotide
cgccgttattggactaggctctagtgtaggggttattggattgctcacatacgtatt

SEQ ID NO: 242931 - DNA, 55 bp, Artificial
  Synthetic oligonucleotide
gcaagacccttctgagattcgacctgtgctgcatcgaaatatcatttcatgaccg

SEQ ID NO: 242932 - DNA, 53 bp, Artificial
  Synthetic oligonucleotide
ataccccgtataaaaggggacgagaactggtaaatcttctacactgtcgactg

SEQ ID NO: 242933 - DNA, 55 bp, Artificial
  Synthetic oligonucleotide
gcaatgtggtctacacgtttagctgacttttggatttgtgcaaaatagtgaatcg

SEQ ID NO: 242934 - DNA, 55 bp, Artificial
  Synthetic oligonucleotide
gcacctattttctatctagaggcttttctcggaagtgtgaaatcaacgactcgaa

SEQ ID NO: 242935 - DNA, 55 bp, Artificial
  Synthetic oligonucleotide
gcaccttcactttatacctgttaatcatcaagggcggttatcagcacgtacagct

SEQ ID NO: 242936 - DNA, 55 bp, Artificial
  Synthetic oligonucleotide
gcactgtgtcggtcttcttgcctgaagtcgcagtaacggttgcgttaccttccgc

SEQ ID NO: 242937 - DNA, 55 bp, Artificial
  Synthetic oligonucleotide
gcagactacactacttcatacaaccaaggttcagatgtacaatcagtaagctaca

SEQ ID NO: 242938 - DNA, 55 bp, Artificial
  Synthetic oligonucleotide
gcagatatagtacttagaggtcatgaagtcggactaagaccaacattagttctac

SEQ ID NO: 242939 - DNA, 55 bp, Artificial
  Synthetic oligonucleotide
gcagatggtgtgttcatctatatcggtatgaaaccattaacaacaccattcttag

SEQ ID NO: 242940 - DNA, 55 bp, Artificial
  Synthetic oligonucleotide
gcagctagaatgttagactggttagatggctcagagttaaccactacacaaggcg

SEQ ID NO: 242941 - DNA, 60 bp, Artificial
  Synthetic oligonucleotide
cgcgacaatcgattgccaaagatttaagtaagttaggtgcaaatgtgaatcaaatagcta

SEQ ID NO: 242942 - DNA, 55 bp, Artificial
  Synthetic oligonucleotide
gcaggttcgcacttttatgtcagacctgcctacggtggagaagtaaggcttacta

SEQ ID NO: 242943 - DNA, 55 bp, Artificial
  Synthetic oligonucleotide
gcatcatcaaagataaacccaatgcatcttttctagcttttctccaagcacagac

SEQ ID NO: 242944 - DNA, 55 bp, Artificial
  Synthetic oligonucleotide
ataagcgccttgaaatatgtcagatggtctagctctatagacgtctgctagttgg

SEQ ID NO: 242945 - DNA, 55 bp, Artificial
  Synthetic oligonucleotide
gcatcgtctacaattttagctgtaagtaagctctcaactaaacctacaatagcca

SEQ ID NO: 242946 - DNA, 55 bp, Artificial
  Synthetic oligonucleotide
gcatgcttgccgcagtcttacatccactctattttgttaatagagactattctac

SEQ ID NO: 242947 - DNA, 55 bp, Artificial
  Synthetic oligonucleotide
gcatgtgccacccagttacaagtaatagggttaacgttgtcgagacaataatcgc

SEQ ID NO: 242948 - DNA, 55 bp, Artificial
  Synthetic oligonucleotide
gcattgtctgtagaaattgggattcaatttctctgtgttggggccccaccccaac

SEQ ID NO: 242949 - DNA, 55 bp, Artificial
  Synthetic oligonucleotide
gcatttggcgttgcacatgttcaggaagactcgtagacaacccttgaacatatac

SEQ ID NO: 242950 - DNA, 55 bp, Artificial
  Synthetic oligonucleotide
gccaaaacgaccaacttcaaaccgtgatgaaccaactcaacgagatacaggcgtc

SEQ ID NO: 242951 - DNA, 54 bp, Artificial
  Synthetic oligonucleotide
gccaagattgtttaagcaaaacaagacaagttaaggggtgcagtttacgcaccc

SEQ ID NO: 242952 - DNA, 60 bp, Artificial; identical to SEQ ID NO: 4716
  Synthetic oligonucleotide

SEQ ID NO: 242953 - DNA, 55 bp, Artificial
  Synthetic oligonucleotide
gccatgctataatagatacacgtcttctcttagcgtttcatagtattatcctcgt

SEQ ID NO: 242954 - DNA, 55 bp, Artificial
  Synthetic oligonucleotide
gcccacggtttgaatggcttgccaacagatacgattgtagctgaaacgcacgggc

SEQ ID NO: 242955 - DNA, 55 bp, Artificial
  Synthetic oligonucleotide
gccctcttttacgaataacgcaaactgctgatagttttcacccttagtatagtca

SEQ ID NO: 242956 - DNA, 55 bp, Artificial
  Synthetic oligonucleotide
gccgagttaagaaccaaccgcaacttatcataggcacaccaactcgaattaacga

SEQ ID NO: 242957 - DNA, 54 bp, Artificial
  Synthetic oligonucleotide
atatttgtaaggggagcgtataacatttatacacgtgtcctatttaaaggagcc

SEQ ID NO: 242958 - DNA, 55 bp, Artificial
  Synthetic oligonucleotide
gagcctaatcacatgattggtacaatggttcgcccataccaagttgggttgagat

SEQ ID NO: 242959 - DNA, 55 bp, Artificial
  Synthetic oligonucleotide
gagcgcataatgtgtttgatgtggcagatacgaaaggcaagcctttaataacagc

SEQ ID NO: 242960 - DNA, 55 bp, Artificial
  Synthetic oligonucleotide
gagctgttgaaaaggcaggcaaatatgtgcatcactctttaggtgaaggacgctt

SEQ ID NO: 242961 - DNA, 55 bp, Artificial
  Synthetic oligonucleotide
gagtcgttaagtgctagtgagtcaataagtgagagcgaatctttaagcgagtccg

SEQ ID NO: 242962 - DNA, 55 bp, Artificial
  Synthetic oligonucleotide
gagtggctaggtttcgcaactaacatcatggtcgtatcgtcttggttacgtagtt

SEQ ID NO: 242963 - DNA, 59 bp, Artificial
  Synthetic oligonucleotide
caccaatccccacactattgcagtagtgtggggatttttcgatgctggcttataaagtc

SEQ ID NO: 242964 - DNA, 55 bp, Artificial
  Synthetic oligonucleotide
gagttggaatgctgtgggctgacgggaacctgatgggtctacaatcatttccgca

SEQ ID NO: 242965 - DNA, 55 bp, Artificial
  Synthetic oligonucleotide
gataacgaaacattaaaagatatgacgaaaagtgggaagcaacgcccatggagag

SEQ ID NO: 242966 - DNA, 55 bp, Artificial
  Synthetic oligonucleotide
gataagacacgacggtgcgtagagcttacaattggtaagtcgataatgataaggg

SEQ ID NO: 242967 - DNA, 55 bp, Artificial
  Synthetic oligonucleotide
gatacaggcactgtaaatcgtaatgatctgagatgatctatctgacttgaaagcc

SEQ ID NO: 242968 - DNA, 55 bp, Artificial
  Synthetic oligonucleotide
gatacgacggcaccagacgcaccaaaagttaaggatacagagtcaggcagcaaga

SEQ ID NO: 242969 - DNA, 55 bp, Artificial
  Synthetic oligonucleotide
gatacgtataggtacgatggttcgctttaactgccatcgttactagtggataaag

SEQ ID NO: 242970 - DNA, 55 bp, Artificial
  Synthetic oligonucleotide
gatatcgtgtcggttacagattgttttccagttggagaactccttaccacaatcg

SEQ ID NO: 242971 - DNA, 55 bp, Artificial
  Synthetic oligonucleotide
gatcgtgaccgcatgtttgagttagttagggactttgaaacggatagtctaatgc

SEQ ID NO: 242972 - DNA, 55 bp, Artificial
  Synthetic oligonucleotide
gatgcctttcagaagcaaatagaagcagcacaattggtaacagaagattatgagt

SEQ ID NO: 242973 - DNA, 55 bp, Artificial
  Synthetic oligonucleotide
gatgtgcctaacaagttatggcctattcaaccattaagagatttctggggtatta

SEQ ID NO: 242974 - DNA, 59 bp, Artificial
  Synthetic oligonucleotide
cacgccataaatctaaccattcttgttggctaatataatatcttttatctgtgaaatac

SEQ ID NO: 242975 - DNA, 55 bp, Artificial
  Synthetic oligonucleotide
gattaacatatattttgggacgctgtgagaaacgctcatttgcaatgacaatcca

SEQ ID NO: 242976 - DNA, 55 bp, Artificial
  Synthetic oligonucleotide
gattaggctattactcaattgtacgtgaagtaaggggacaagtgctcaagcctac

SEQ ID NO: 242977 - DNA, 55 bp, Artificial
  Synthetic oligonucleotide
atagacgtgagggacatatctacacagaagtatcagacagtgtagtgcatggctc

SEQ ID NO: 242978 - DNA, 55 bp, Artificial
  Synthetic oligonucleotide
gatttaagggactttaatgacaacgtatgtcgcgaacatggcttaagcgtgccag

SEQ ID NO: 242979 - DNA, 55 bp, Artificial
  Synthetic oligonucleotide
gcaaagagctgatatcaacttaccattcgaacgtggggctgctatagatttagcg

SEQ ID NO: 242980 - DNA, 55 bp, Artificial
  Synthetic oligonucleotide
gcaacacgtgaaatgtatggcaaaacagatggcaacgaagggcatgtagttattc

SEQ ID NO: 242981 - DNA, 55 bp, Artificial
  Synthetic oligonucleotide
gcaacgaataaataaaaccgcttatggatacctgagtgcatcttctgagccttcg

SEQ ID NO: 242982 - DNA, 55 bp, Artificial
  Synthetic oligonucleotide
gcaacgcgacaatcggtagcgaaagatttgagtatgttaggcgcaaatgcgaatc

SEQ ID NO: 242983 - DNA, 55 bp, Artificial
  Synthetic oligonucleotide
gcaagacaggaacgagagaacaaacatactcatgaaaagactagaggcttcgacc

SEQ ID NO: 242984 - DNA, 54 bp, Artificial
  Synthetic oligonucleotide
cttctttattccaattgctttattgacgttgagcctcggaacccttaacaatcc

SEQ ID NO: 242985 - DNA, 60 bp, Artificial
  Synthetic oligonucleotide
cacttcaactttgacaacatgtatcctaaagtcagctggcttaatcgtgcataatcacgc

SEQ ID NO: 242986 - DNA, 55 bp, Artificial
  Synthetic oligonucleotide
ctgttacatcggagaaggtatttcctaaatacgaacctacagccatacaaattac

SEQ ID NO: 242987 - DNA, 55 bp, Artificial
  Synthetic oligonucleotide
cttctgccattaaaagtaacgccaatgagcgctttgtattcaataaccttttagc

SEQ ID NO: 242988 - DNA, 55 bp, Artificial
  Synthetic oligonucleotide
ctttcgttgtgcttccgttagaagttacttgactcaacgagtctactgctgatac

SEQ ID NO: 242989 - DNA, 55 bp, Artificial
  Synthetic oligonucleotide
cttaactgggcttattgtggcagttggtatttgtgctggtgtttggatagttctt

SEQ ID NO: 242990 - DNA, 55 bp, Artificial
  Synthetic oligonucleotide
ctgtaggcgctccggattgttcataagcatcgaatacgcagacaacttcatccgc

SEQ ID NO: 242991 - DNA, 55 bp, Artificial
  Synthetic oligonucleotide
ctttcgtccgcatactaataaaagaagctacaaccaccataaaaggtgctacgca

SEQ ID NO: 242992 - DNA, 55 bp, Artificial
  Synthetic oligonucleotide
cttcattggttcagatgtagggatagaaccatttgcatcgccatttacggcagag

SEQ ID NO: 242993 - DNA, 55 bp, Artificial
  Synthetic oligonucleotide
cttcataagctctcacttctttcctatccgttgtacatccggccagcaaaagagt

SEQ ID NO: 242994 - DNA, 55 bp, Artificial
  Synthetic oligonucleotide
cttgtgttatttctgaaatgcccgttacatcacgccataaatctaaccattcttg

SEQ ID NO: 242995 - DNA, 55 bp, Artificial
  Synthetic oligonucleotide
ctttgaacgacggcacaccaacaggtctttggctcggtgaggctgcagagcctta

SEQ ID NO: 242996 - DNA, 56 bp, Artificial
  Synthetic oligonucleotide
cactttttctcactactaccgcattgaacatttactagccttctttcacaattgtt

SEQ ID NO: 242997 - DNA, 55 bp, Artificial
  Synthetic oligonucleotide
ctgtaccggaacaaatcttgagtgccgtacaattaccaatggtaggtcatcgttc

SEQ ID NO: 242998 - DNA, 55 bp, Artificial
  Synthetic oligonucleotide
atgacttctggcgtaatatgcggatacaactgttgcatcatgcgcgttaactgtg

SEQ ID NO: 242999 - DNA, 55 bp, Artificial
  Synthetic oligonucleotide
cttagccttcccgtgcgattttgaatgccccaactccataaattaattggcgttg

SEQ ID NO: 243000 - DNA, 55 bp, Artificial
  Synthetic oligonucleotide
cttagtgactgctgcgagagataacgataagttaaaacagcatgttagaaatctc

SEQ ID NO: 243001 - DNA, 55 bp, Artificial
  Synthetic oligonucleotide
cttacgctatgcatgttgccccactttgcataaagtaccgattcctcactcaacg

SEQ ID NO: 243002 - DNA, 55 bp, Artificial
  Synthetic oligonucleotide
cttataacagcatacggtaaagctggaggtgaaatatggccacgaatgaaagagc

SEQ ID NO: 243003 - DNA, 55 bp, Artificial
  Synthetic oligonucleotide
ctttcaattgtgccatccaaatacgttggtcaccacgaactaattcacctgcgtg

SEQ ID NO: 243004 - DNA, 54 bp, Artificial
  Synthetic oligonucleotide
cataagattttaaatttagatgatgccgaagatggtaatttgattaatacaagt

SEQ ID NO: 243005 - DNA, 54 bp, Artificial
  Synthetic oligonucleotide
ttaaacaaaatagcaataaagaattatacgaaatggctaaatattctggtaagg

SEQ ID NO: 243006 - DNA, 54 bp, Artificial
  Synthetic oligonucleotide
tgttttagcctcgcaggacatacggtttaatgacttattgtaaaataagtctag

SEQ ID NO: 243007 - DNA, 58 bp, Artificial
  Synthetic oligonucleotide
gattgtcgtggctattttttaagatgaggagtaatttaatactatgaatcaatcaaaa

SEQ ID NO: 243008 - DNA, 52 bp, Artificial
  Synthetic oligonucleotide
cagaaacgtatatagcacctcaaaacgaatacaaacgtaaaaaaaaccagtc

SEQ ID NO: 243009 - DNA, 54 bp, Artificial
  Synthetic oligonucleotide
gcactttcaaacctcatcaaagagtattggtatattataatacagaacacgcct

SEQ ID NO: 243010 - DNA, 54 bp, Artificial
  Synthetic oligonucleotide
agtgccctccatcttccacgattcgcaagttcccctctaatgcattcattaacc

SEQ ID NO: 243011 - DNA, 54 bp, Artificial
  Synthetic oligonucleotide
attatgcttaggagtgatttttatatgtcttattccattgttagagtttcaaaa

SEQ ID NO: 243012 - DNA, 54 bp, Artificial
  Synthetic oligonucleotide
cattttgcaaatcatgtcacttataatatcgagaggagttttgtatgtctggtg

SEQ ID NO: 243013 - DNA, 54 bp, Artificial
  Synthetic oligonucleotide
acagcgcaaacactagaaaatcgtgttaacgtattaggggtttctgagcctaaa

SEQ ID NO: 243014 - DNA, 54 bp, Artificial
  Synthetic oligonucleotide
caagaacaaaaacatgatattaagaaagatagaggtcatgaaagataaaaaact

SEQ ID NO: 243015 - DNA, 54 bp, Artificial
  Synthetic oligonucleotide
acttgcacattaatgtaagctgacttttccgtcagcttctatgttgggggcccc

SEQ ID NO: 243016 - DNA, 54 bp, Artificial
  Synthetic oligonucleotide
tatggtggcgtgaattattagcaattagtattcaattaccattacaagtgttta

SEQ ID NO: 243017 - DNA, 54 bp, Artificial
  Synthetic oligonucleotide
gcagaaaacagaatatcataaacaagaatatgagcgtgagagccaaaaaacaga

SEQ ID NO: 243018 - DNA, 49 bp, Artificial
  Synthetic oligonucleotide
atttagaagagtttttagaagaagaaattaaagtaaattaacataaaaa

SEQ ID NO: 243019 - DNA, 54 bp, Artificial
  Synthetic oligonucleotide
cagaaattgatattagtgttttataccgaaacataaaacaagaaggatataaat

SEQ ID NO: 243020 - DNA, 48 bp, Artificial
  Synthetic oligonucleotide
aacgttagcaaaaaagctagcgtttttttgttgaaaatacgttaaaaa

SEQ ID NO: 243021 - DNA, 54 bp, Artificial
  Synthetic oligonucleotide
catgatacaggccccctttattacgaacctaaaggagtatcgtttgaatataca

SEQ ID NO: 243022 - DNA, 54 bp, Artificial
  Synthetic oligonucleotide
aacgtaaaacaatgtggtaacgtcttagagttcaagccgactgatgaaggttat

SEQ ID NO: 243023 - DNA, 51 bp, Artificial
  Synthetic oligonucleotide
aacacgcctttttttaagtaaacttattggttggaataatgaagtctgtta

SEQ ID NO: 243024 - DNA, 54 bp, Artificial
  Synthetic oligonucleotide
tatccaattatattaggaaggaagaatcttgaatcaatcggaagagcattacct

SEQ ID NO: 243025 - DNA, 54 bp, Artificial
  Synthetic oligonucleotide
atggtcgcatggcttgatcaacgtcctctatcgtctgttcaaagcgcaactcat

SEQ ID NO: 243026 - DNA, 54 bp, Artificial
  Synthetic oligonucleotide
cgattgtcgcttcagtgtgcccccgacgttcgaggaccccatgctttttagcga

SEQ ID NO: 243027 - DNA, 54 bp, Artificial
  Synthetic oligonucleotide
gcaatcaaagagacctcgaaatattcggttaagtcatcagattatttaactgga

SEQ ID NO: 243028 - DNA, 54 bp, Artificial
  Synthetic oligonucleotide
gaattcaaaaaagttatgggctataaatctacatcactttttcaagaatgtagt

SEQ ID NO: 243029 - DNA, 54 bp, Artificial
  Synthetic oligonucleotide
cgcaagtgtacctgcaggaggagcgttagctgtagatagacatgaattcagtgg

SEQ ID NO: 243030 - DNA, 60 bp, Artificial
  Synthetic oligonucleotide
cagataatgacagcccttcgtacatggtatacaacaatgatattacagcatttattcagt

SEQ ID NO: 243031 - DNA, 54 bp, Artificial
  Synthetic oligonucleotide
ttaagcggtgctaaaatgactgaatataaaaatcgactgacgattacattagct

SEQ ID NO: 243032 - DNA, 54 bp, Artificial
  Synthetic oligonucleotide
atttaggataggtatagtacttttgattatttatgtattgctttggataggaat

SEQ ID NO: 243033 - DNA, 54 bp, Artificial
  Synthetic oligonucleotide
accactcgcgatggaggtgtgatgcatttcggagtcgtggtgttgggcgtgtgc

SEQ ID NO: 243034 - DNA, 54 bp, Artificial
  Synthetic oligonucleotide
aacgaagatatagaccatagtaaaacacatttaaattatgctttagtaaatgac

SEQ ID NO: 243035 - DNA, 54 bp, Artificial
  Synthetic oligonucleotide
gcaccatacaaacctccgcctgcatgtaccatttgagtgcgtgcaccgtcatgt

SEQ ID NO: 243036 - DNA, 54 bp, Artificial
  Synthetic oligonucleotide
catatctcgcaatccagcataaaagcttgcatacaaaccagacggaccgccacc

SEQ ID NO: 243037 - DNA, 54 bp, Artificial
  Synthetic oligonucleotide
tccgtgcacaaaggaggtgtgcatatggtgttaatgatactctcacttgttgga

SEQ ID NO: 243038 - DNA, 54 bp, Artificial
  Synthetic oligonucleotide
tcttttttgttcattataaccctctttaatgcggttataatgaattttgcttat

SEQ ID NO: 243039 - DNA, 54 bp, Artificial
  Synthetic oligonucleotide
gtaaatgacaataaacgaaactttaataacttgattgatgaaaaaatagaacag

SEQ ID NO: 243040 - DNA, 54 bp, Artificial
  Synthetic oligonucleotide
aattcgttatttaactaacggggcagaagagttcaaataatgacagctttgtta

SEQ ID NO: 243041 - DNA, 60 bp, Artificial
  Synthetic oligonucleotide
cagcgaaagccaaattgctctatgcattaatttctgagcgtcaaagcttatcgaaagcta

SEQ ID NO: 243042 - DNA, 54 bp, Artificial
  Synthetic oligonucleotide
agtagaagaaattggcgaggtagcagaggtactaaaccagttagaagggcgaaa

SEQ ID NO: 243043 - DNA, 54 bp, Artificial
  Synthetic oligonucleotide
aatacaagtgacgaagataaaacaacagacgaagaagaaaaagcacattcgatt

SEQ ID NO: 243044 - DNA, 54 bp, Artificial
  Synthetic oligonucleotide
aattcatataatgggcatgtcacaacgttatccacaccatcacttcgtgcacca

SEQ ID NO: 243045 - DNA, 53 bp, Artificial
  Synthetic oligonucleotide
attactacttctttaacaaagagaaacgtcagtacgatttatgataaaacaaa

SEQ ID NO: 243046 - DNA, 54 bp, Artificial
  Synthetic oligonucleotide
gacgtattaagggggatagataagcagataaatccagaaaactatcaagaacaa

SEQ ID NO: 243047 - DNA, 54 bp, Artificial
  Synthetic oligonucleotide
cttgttgatgttatccattacgctgttgccattgcaagcataaatcatattgat

SEQ ID NO: 243048 - DNA, 54 bp, Artificial
  Synthetic oligonucleotide
ctagaagccttatatatatccattatttttttataatcaatgtcgtaaccatat

SEQ ID NO: 243049 - DNA, 54 bp, Artificial
  Synthetic oligonucleotide
aattatgatttgcaaaacgatgaaaacataaattataacgaacgtgtaaaagac

SEQ ID NO: 243050 - DNA, 50 bp, Artificial
  Synthetic oligonucleotide
tcttaacatttttagttacttttttaattgaatcgccgtatcctttttgg

SEQ ID NO: 243051 - DNA, 54 bp, Artificial
  Synthetic oligonucleotide
tcttaacagagtttcaggatagatttaacgaatatgttaatcaacgtggttatg

SEQ ID NO: 243052 - DNA, 57 bp, Artificial
  Synthetic oligonucleotide
cagctttctgaattaagttactcgctttttcgctagtaataccaatagattcgctag

SEQ ID NO: 243053 - DNA, 54 bp, Artificial
  Synthetic oligonucleotide
tcgcttcggcttagttcgatataacgttaacaattgcgagttggataaaccgct

SEQ ID NO: 243054 - DNA, 54 bp, Artificial
  Synthetic oligonucleotide
aatctgcaattcttacaattgcattcgaagaatataaaaaagggcagaaagata

SEQ ID NO: 243055 - DNA, 54 bp, Artificial
  Synthetic oligonucleotide
aggttgttatattcgttttaacagcgctgatctgtcctattatcacaggtttag

SEQ ID NO: 243056 - DNA, 54 bp, Artificial
  Synthetic oligonucleotide
tctagatattaaacgatataagtttattcttcaagatatatatttcgggtgaat

SEQ ID NO: 243057 - DNA, 53 bp, Artificial
  Synthetic oligonucleotide
agaaaaagcaactttttttgtgcttcaaaccagttataccaatgaattgaaag

SEQ ID NO: 243058 - DNA, 54 bp, Artificial
  Synthetic oligonucleotide
tcgtttgaaaccgaaaaattggaagaaaaagaaagggagtagtgatgatgaata

SEQ ID NO: 243059 - DNA, 54 bp, Artificial
  Synthetic oligonucleotide
aactgggggctttttatatgcaatataatactactaaatatattgacgaaaatc

SEQ ID NO: 243060 - DNA, 54 bp, Artificial
  Synthetic oligonucleotide
atagaacagaattatacaggtaaaagaaaaataagaacagacgcagttaaacat

SEQ ID NO: 243061 - DNA, 54 bp, Artificial
  Synthetic oligonucleotide
tattttaagaataaagctaattatataactcaagaagaatgggttagtttatgg

SEQ ID NO: 243062 - DNA, 54 bp, Artificial
  Synthetic oligonucleotide
tgtataaaactaagttgttttgttgtgttataacatggataagtatactgagaa

SEQ ID NO: 243063 - DNA, 55 bp, Artificial
  Synthetic oligonucleotide
cataaatgcgtggtctaatttttatttttaataaccttgatagcaaaaaatgcca

SEQ ID NO: 243064 - DNA, 54 bp, Artificial
  Synthetic oligonucleotide
aagagatttataaaatgcgtcgaacactttctgattaattaaatagtcactatc

SEQ ID NO: 243065 - DNA, 54 bp, Artificial
  Synthetic oligonucleotide
gattatctcagtaggtctattgcttcctggtgtgcaatctaacgctatagcaag

SEQ ID NO: 243066 - DNA, 54 bp, Artificial
  Synthetic oligonucleotide
gtaacagaagattatgagtatattaagtcagaaaaagctttaaatgaccttaaa

SEQ ID NO: 243067 - DNA, 54 bp, Artificial
  Synthetic oligonucleotide
tcaacaaaaaatgctatagatggggatactttagaacaaagtttgaaacactta

SEQ ID NO: 243068 - DNA, 54 bp, Artificial
  Synthetic oligonucleotide
cgacgaaggtcgattatggtttttacacgcgttcttttagaacgcataagtgcg

SEQ ID NO: 243069 - DNA, 54 bp, Artificial
  Synthetic oligonucleotide
gatgaaagaaatcaagaaatcgtgaatgatttagaaaaaggtttataccgaaag

SEQ ID NO: 243070 - DNA, 53 bp, Artificial
  Synthetic oligonucleotide
gataggaattattgttactccttttttacctgtatcaacgtttgtaaaagcaa

SEQ ID NO: 243071 - DNA, 54 bp, Artificial
  Synthetic oligonucleotide
cgtttgcagacaaataggtctgaacgataagagcgaatggacgtattaggcctt

SEQ ID NO: 243072 - DNA, 54 bp, Artificial
  Synthetic oligonucleotide
gtctgtggttaggctagagtatagctcttttcgtggcatagcactgctggtgtc

SEQ ID NO: 243073 - DNA, 54 bp, Artificial
  Synthetic oligonucleotide
tcagtaaggttagttgttacttaaataggtcgtaaatatagtttgcagctattc

SEQ ID NO: 243074 - DNA, 58 bp, Artificial
  Synthetic oligonucleotide
cataagacatggttttgtaaatcaaaattatgtccagtttgtaattggaggcgtgcta

SEQ ID NO: 243075 - DNA, 54 bp, Artificial
  Synthetic oligonucleotide
ccctagtgatcatgtaatgggtttattccctagagtgcctactgatcgttatag

SEQ ID NO: 243076 - DNA, 54 bp, Artificial
  Synthetic oligonucleotide
gagtttcttaagaaactcgaacaagccattggcagaaaatcatatataacttta

SEQ ID NO: 243077 - DNA, 53 bp, Artificial
  Synthetic oligonucleotide
gtggtcgggagtctttaatttctttttgaatttaaggtctttgataatgtatg

SEQ ID NO: 243078 - DNA, 53 bp, Artificial
  Synthetic oligonucleotide
aatttagagccaatttaaaatttggtgcttttttgaaagaaattgtccttgca

SEQ ID NO: 243079 - DNA, 54 bp, Artificial
  Synthetic oligonucleotide
tccaatcattgcacaaaatctaacattggttaaaggaagtcaaaaactgctaac

SEQ ID NO: 243080 - DNA, 54 bp, Artificial
  Synthetic oligonucleotide
tgactatgacatcaaatcgtttcgcaagctctaaatcatgcgttacgacaatca

SEQ ID NO: 243081 - DNA, 54 bp, Artificial
  Synthetic oligonucleotide
tccgaagcaattaacattttatgagttacagagctacctagcactaaaatacaa

SEQ ID NO: 243082 - DNA, 54 bp, Artificial
  Synthetic oligonucleotide
gaaagtagaacgaatgaagatattgacagagagcgaacgcatgaaaattatgat

SEQ ID NO: 243083 - DNA, 54 bp, Artificial
  Synthetic oligonucleotide
aaaacgaggaaagatgctgttcttgtaaatgagttgctagtaacatctgaccga

SEQ ID NO: 243084 - DNA, 54 bp, Artificial
  Synthetic oligonucleotide
ataaaccaaagtacttatcgagccataagcgaaaatcactcggatttctcagca

SEQ ID NO: 243085 - DNA, 60 bp, Artificial
  Synthetic oligonucleotide
catacactaaagtagcaccatcaaagagttcaggggcttcaatcgtctacgcacgtgatg

SEQ ID NO: 243086 - DNA, 54 bp, Artificial
  Synthetic oligonucleotide
tttcatacaactattcgcagcggtaacggtcccacctttgatcacgggcttaaa

SEQ ID NO: 243087 - DNA, 54 bp, Artificial
  Synthetic oligonucleotide
tttaattattgctgcggcttttgttgggaaagagcttgtaagtaagtataaaga

SEQ ID NO: 243088 - DNA, 54 bp, Artificial
  Synthetic oligonucleotide
aaaatacaaagaaggacgcacttcatctgctttgtttatgaaactagtagaaga

SEQ ID NO: 243089 - DNA, 51 bp, Artificial
  Synthetic oligonucleotide
gaacacgtctaaaattttccctaattgttggtttagtagcgtttatcttaa

SEQ ID NO: 243090 - DNA, 54 bp, Artificial
  Synthetic oligonucleotide
taagtctagtatgttaagcttaaaatattaaatgcacgtgaaatcattatgctt

SEQ ID NO: 243091 - DNA, 54 bp, Artificial
  Synthetic oligonucleotide
taagttaccacacaaaaacaatttacatagggggtttctgtattcattatgtgc

SEQ ID NO: 243092 - DNA, 54 bp, Artificial
  Synthetic oligonucleotide
cgtcggcatttcattgtattgggtaatgcagcgtaaacaaattattgtgcgaac

SEQ ID NO: 243093 - DNA, 54 bp, Artificial
  Synthetic oligonucleotide
acgggtctggttgcgacaagtgagattacccatgcaacccctgccgcatttggg

SEQ ID NO: 243094 - DNA, 52 bp, Artificial
  Synthetic oligonucleotide
aaaatacgacctgtcccttgtcttttttaaacgagccacgagagcaaatccc

SEQ ID NO: 243095 - DNA, 54 bp, Artificial
  Synthetic oligonucleotide
ataactttaatgaacgatgttactaaagataataatcaaatgaaagacgtatta

SEQ ID NO: 243096 - DNA, 60 bp, Artificial
  Synthetic oligonucleotide
catacgtacaaaaattctatacgtacactatacgtatgcatacactatacgtatgcatat

SEQ ID NO: 243097 - DNA, 54 bp, Artificial
  Synthetic oligonucleotide
cggataagcattggcttcgcaaagtagactgggtattagtagccactatagctg

SEQ ID NO: 243098 - DNA, 54 bp, Artificial
  Synthetic oligonucleotide
aaaccacaagtgcagtacgtacagtgtctagtgtgacaacggtagatgggccta

SEQ ID NO: 243099 - DNA, 54 bp, Artificial
  Synthetic oligonucleotide
ttgtactacgcgtcgtaccttcatcatttgtcggcaataaaccactgtcgctgc

SEQ ID NO: 243100 - DNA, 54 bp, Artificial
  Synthetic oligonucleotide
agttataatcaacatatgcatgttttgttatgtgttgaaaatagttattttaag

SEQ ID NO: 243101 - DNA, 54 bp, Artificial
  Synthetic oligonucleotide
ataagaatatttggagtaattggaagcattatttggttccaattatcagtagcg

SEQ ID NO: 243102 - DNA, 54 bp, Artificial
  Synthetic oligonucleotide
aaaaacagactatataaagcaaaaaaacgataaattgatgcaagagtatcaaaa

SEQ ID NO: 243103 - DNA, 52 bp, Artificial
  Synthetic oligonucleotide
aaaaacctataacttatcatgaaaaacgctgcatacggtttaaattagttta

SEQ ID NO: 243104 - DNA, 54 bp, Artificial
  Synthetic oligonucleotide
actccgagaggtaagaaaacgacagctcatagaacttatagatgacgcactcgt

SEQ ID NO: 243105 - DNA, 54 bp, Artificial
  Synthetic oligonucleotide
cgtagtttaattgataggcgtctcgtgctgtcgtatctacaccaatatgcgttg

SEQ ID NO: 243106 - DNA, 54 bp, Artificial
  Synthetic oligonucleotide
gaaacgcgtctgaaatgcatgtagacgacgctcctaaaacgcaagagcacgcag

SEQ ID NO: 243107 - DNA, 60 bp, Artificial
  Synthetic oligonucleotide
catagcatgtcctgcatgaataccgtctgttgattctacacgacttcctaaaatagcaat

SEQ ID NO: 243108 - DNA, 54 bp, Artificial
  Synthetic oligonucleotide
gttgttccccaatgcttgtgctcttgcactcttatagttgtgagaacgtgcatt

SEQ ID NO: 243109 - DNA, 51 bp, Artificial
  Synthetic oligonucleotide
gaaacgttagcttaaaagctagcgtttttttatgtatttttgcccctgcgg

SEQ ID NO: 243110 - DNA, 54 bp, Artificial
  Synthetic oligonucleotide
gtttcacatatacatgggactgtactggaacccaatagagtcagtcgtgatgta

SEQ ID NO: 243111 - DNA, 54 bp, Artificial
  Synthetic oligonucleotide
ttttcgtcagcttctgtgttggggcccacaccccaactcgcattgcctgtagaa

SEQ ID NO: 243112 - DNA, 52 bp, Artificial
  Synthetic oligonucleotide
aaaacaaaagtattaaacaatagggtgcgttagtgaaagataatcaattcgt

SEQ ID NO: 243113 - DNA, 54 bp, Artificial
  Synthetic oligonucleotide
ttttaggtgtggctatagtcgcctatttatcgttgcgattacgtagccaatgcg

SEQ ID NO: 243114 - DNA, 54 bp, Artificial
  Synthetic oligonucleotide
agtttatggcaaaaagcattacaagttgattatcgacccgtagcaaatattaaa

SEQ ID NO: 243115 - DNA, 54 bp, Artificial
  Synthetic oligonucleotide
agctgaactagaagaaatacatacgttgaatatgcgccgtcaaaatatgccgaa

SEQ ID NO: 243116 - DNA, 48 bp, Artificial
  Synthetic oligonucleotide
aaaaccataaacccaaccgtaaggagccgaaacaaattagttttcgtg

SEQ ID NO: 243117 - DNA, 53 bp, Artificial
  Synthetic oligonucleotide
gtacttgtggttcaacaacgtagagactaagccgggcgtagggtatccgaaac

SEQ ID NO: 243118 - DNA, 54 bp, Artificial
  Synthetic oligonucleotide
gattttctgttgagcgactgaaaaatgacgatgggttacatgtttttttacggt

SEQ ID NO: 243119 - DNA, 55 bp, Artificial
  Synthetic oligonucleotide
catagttactataattccccttatattcagttattctcccctcgtcaatttccca

SEQ ID NO: 243120 - DNA, 54 bp, Artificial
  Synthetic oligonucleotide
caccgatagacgcattgccgtgaagtcgtgcctcgccaccacctgataatcgct

SEQ ID NO: 243121 - DNA, 53 bp, Artificial
  Synthetic oligonucleotide
tttgggcaagtctggttgtaggatttttaatatttgaaattagttattactac

SEQ ID NO: 243122 - DNA, 54 bp, Artificial
  Synthetic oligonucleotide
tttgagctatcacgttatttactaaaaaaattcctgatcacttttgtggtcggg

SEQ ID NO: 243123 - DNA, 53 bp, Artificial
  Synthetic oligonucleotide
cagcttgcgttgtccgtcggctttcttttcgaaagcctttttgctggggcccc

SEQ ID NO: 243124 - DNA, 54 bp, Artificial
  Synthetic oligonucleotide
cagctattcctatgattaaagctattaatatttgcttaatcattattattctcc

SEQ ID NO: 243125 - DNA, 54 bp, Artificial
  Synthetic oligonucleotide
ataagtgcgcccttacgggaattaactagattataacgatgaaaaatagatctg

SEQ ID NO: 243126 - DNA, 54 bp, Artificial
  Synthetic oligonucleotide
cagctaataacattggcatagcatagtgtaacgactgagtcgtattgattagtg

SEQ ID NO: 243127 - DNA, 54 bp, Artificial
  Synthetic oligonucleotide
cagcgaggtgacatgaccaaatggacgaaactagctgaaattagtgaccaagtc

SEQ ID NO: 243128 - DNA, 54 bp, Artificial
  Synthetic oligonucleotide
gtatgaagagcaacgcaatagtgattaaacaatatgatcaagtcatacatcgtt

SEQ ID NO: 243129 - DNA, 54 bp, Artificial
  Synthetic oligonucleotide
gtatgaacctcgaaacatacatggtggattctggactaaaggcattcgtcgtag

SEQ ID NO: 243130 - DNA, 59 bp, Artificial
  Synthetic oligonucleotide
catatgaccgtcctctaaccaattaggcgtctttttcacgcctcacatattgtcttgat

SEQ ID NO: 243131 - DNA, 54 bp, Artificial
  Synthetic oligonucleotide
ttattctcctctcatgagtattttcaagcctaatataataaaacttttgagcta

SEQ ID NO: 243132 - DNA, 54 bp, Artificial
  Synthetic oligonucleotide
gttaaacatattgatggcttgataacgtcagatagtgagttttttgataatcaa

SEQ ID NO: 243133 - DNA, 54 bp, Artificial
  Synthetic oligonucleotide
tactgactccacaaagcgtctcatggaagaacaactcgaggtaagcgatgtgct

SEQ ID NO: 243134 - DNA, 54 bp, Artificial
  Synthetic oligonucleotide
cgtgacgctgtctgttcgatcactcctagcattaagctatgaccctcttccgtc

SEQ ID NO: 243135 - DNA, 54 bp, Artificial
  Synthetic oligonucleotide
acctctaaatattcggttaagtcatctgattttttaactgatgatgatgaaaga

SEQ ID NO: 243136 - DNA, 54 bp, Artificial
  Synthetic oligonucleotide
gaagattttgatgcctttcagaagcaaatagaagcagcacaattggtaacagaa

SEQ ID NO: 243137 - DNA, 54 bp, Artificial
  Synthetic oligonucleotide
aaatggctgggtacaaactgggtacagacacaatatataggggtacaacctggg

SEQ ID NO: 243138 - DNA, 54 bp, Artificial
  Synthetic oligonucleotide
cgcaggaattggtagatctttaccttcacgatttctcaaacgatacattgctaa

SEQ ID NO: 243139 - DNA, 52 bp, Artificial
  Synthetic oligonucleotide
aaagacaagggtttaaggtggagatttttcagcgcagcgttttgaaaaatac

SEQ ID NO: 243140 - DNA, 54 bp, Artificial
  Synthetic oligonucleotide
gaatgtagtagcaatattcaagacaaattaatttttataactgctcggaatatc

SEQ ID NO: 243141 - DNA, 56 bp, Artificial
  Synthetic oligonucleotide
catcacaaagtaatgtaataacgtcgtatttagaccactcattctactaaacgttg

SEQ ID NO: 243142 - DNA, 54 bp, Artificial
  Synthetic oligonucleotide
taccgaaagcgtatgttgagttatggtggattacttaaacaaaaacataagatt

SEQ ID NO: 243143 - DNA, 54 bp, Artificial
  Synthetic oligonucleotide
agcgttgcccttgaggcgtcatcgccaatactctcacggcatggacgtcttcgg

SEQ ID NO: 243144 - DNA, 54 bp, Artificial
  Synthetic oligonucleotide
tacgcgagatgtgtatgctttacacacaccaattactttagaaacgaaggttgg

SEQ ID NO: 243145 - DNA, 50 bp, Artificial
  Synthetic oligonucleotide
cttaacaaggaataggaatttaaacggtaaaatagttaaggaaggctgtg

SEQ ID NO: 243146 - DNA, 51 bp, Artificial
  Synthetic oligonucleotide
tagcgaagaggaaattttcattttcgggggagaacaaatttataatttgtt

SEQ ID NO: 243147 - DNA, 54 bp, Artificial
  Synthetic oligonucleotide
gcattacctggaagaaggaatattattctgacaagagataaggggttcagcttt

SEQ ID NO: 243148 - DNA, 53 bp, Artificial
  Synthetic oligonucleotide
attaaggttcttgaaatcactggataataagaagaaagcgatgcgaccagaac

SEQ ID NO: 243149 - DNA, 53 bp, Artificial
  Synthetic oligonucleotide
ttttctggaatgtcaggcattatatggagcctttatactgctggaaagatcac

SEQ ID NO: 243150 - DNA, 53 bp, Artificial
  Synthetic oligonucleotide
cacattaatttaccaacgataaatgctagtgactttcttatgtactatgcgaa

SEQ ID NO: 243151 - DNA, 53 bp, Artificial
  Synthetic oligonucleotide
cttattacgtgcagccgttaacttcgcattgtatgcatttatagagtcttgcg

SEQ ID NO: 243152 - DNA, 60 bp, Artificial
  Synthetic oligonucleotide
catgattgagtatcttgctgataggagtaaaggtgatttacaagttctatctaaacaagc

SEQ ID NO: 243153 - DNA, 53 bp, Artificial
  Synthetic oligonucleotide
gcgttgcaaccttagactgtttgaatcgcgctgcgctttcctaggggcggccc

SEQ ID NO: 243154 - DNA, 53 bp, Artificial
  Synthetic oligonucleotide
ttttgcccctgcgggaactatagcgttcaaccggcatggttgaccacttttca

SEQ ID NO: 243155 - DNA, 53 bp, Artificial
  Synthetic oligonucleotide
aaaaatacttatgaaagaagaggaacattccttattgcactatagggtgcgtt

SEQ ID NO: 243156 - DNA, 53 bp, Artificial
  Synthetic oligonucleotide
ccgtatgaatcacgttgtagtcaggtgaacttctatcttaacactcgaagcat

SEQ ID NO: 243157 - DNA, 53 bp, Artificial
  Synthetic oligonucleotide
ttttcgttcaacatcatagcaccagtcatcagtggctgtgctgttgcgtatta

SEQ ID NO: 243158 - DNA, 53 bp, Artificial
  Synthetic oligonucleotide
attaactagattataacgatgaaaaatagacctgtaaagcgataactactgtg

SEQ ID NO: 243159 - DNA, 53 bp, Artificial
  Synthetic oligonucleotide
atgagcgcatcccgttgttccgttgaccattgcggtccgagcacacacggcac

SEQ ID NO: 243160 - DNA, 53 bp, Artificial
  Synthetic oligonucleotide
tctgcaccaattggcacccaactatccaatgcggaatgggcaccgcgtgtgtc

SEQ ID NO: 243161 - DNA, 53 bp, Artificial
  Synthetic oligonucleotide
ccaaagggcccaatggttctacagtaacagcttgtgctacggggactaactca

SEQ ID NO: 243162 - DNA, 53 bp, Artificial
  Synthetic oligonucleotide
aaagaatgccgctgatgagatatccccagggacgtggaaatcctttgctttaa

SEQ ID NO: 243163 - DNA, 60 bp, Artificial
  Synthetic oligonucleotide
catggattcatacaatgctgttatgtgttctcaacccgtattacaagagcaatttgacgt

SEQ ID NO: 243164 - DNA, 53 bp, Artificial
  Synthetic oligonucleotide
ttgtattgggcctccgtactgctggggcactcggttgcgggatttttgcactt

SEQ ID NO: 243165 - DNA, 53 bp, Artificial
  Synthetic oligonucleotide
atagaattattcatcaagctgcagcacgacttggaatgcgacatattggattg

SEQ ID NO: 243166 - DNA, 53 bp, Artificial
  Synthetic oligonucleotide
tgtgccgtgtgtgctcggaccgcaatggtcaacggaacaacgggatgcgctca

SEQ ID NO: 243167 - DNA, 53 bp, Artificial
  Synthetic oligonucleotide
ctcggccgacgcgcatgcctgaatgaaacagttcgcgttcggataatgagggg

SEQ ID NO: 243168 - DNA, 53 bp, Artificial
  Synthetic oligonucleotide
cattaatgtaagctggcctgccgtcagcttctgtgttggggcccccgccaact

SEQ ID NO: 243169 - DNA, 53 bp, Artificial
  Synthetic oligonucleotide
ccaccgtagcttagcatacgttttctgtataaaccttgttctaagtctttgac

SEQ ID NO: 243170 - DNA, 53 bp, Artificial
  Synthetic oligonucleotide
ccatcccgtctcccgccatacgcacgtagccacctaccggcaacaaacgaata

SEQ ID NO: 243171 - DNA, 53 bp, Artificial
  Synthetic oligonucleotide
tgcttctctaagtactaatgctgttctaatagtatcaggcgctccgaattcta

SEQ ID NO: 243172 - DNA, 53 bp, Artificial
  Synthetic oligonucleotide
gccacggtgcttgagcaatgagtccaccaatcccgtcttccatcatggcacgg

SEQ ID NO: 243173 - DNA, 53 bp, Artificial
  Synthetic oligonucleotide
gtctatcgtatccttatagataattactacaacgagagggtgacccaactaca

SEQ ID NO: 243174 - DNA, 59 bp, Artificial
  Synthetic oligonucleotide
catggcttaagcgtgccagaaaaagatacagcacgcttacgttatacacaaacagaaaa

SEQ ID NO: 243175 - DNA, 53 bp, Artificial
  Synthetic oligonucleotide
ttgtttctgcttcgtatttcgcacgtttaagtgcaacttcgacacgttgcgct

SEQ ID NO: 243176 - DNA, 53 bp, Artificial
  Synthetic oligonucleotide
atgcgacgagtaaagtggcggatgaagcaaccatttataaattgctcgaacat

SEQ ID NO: 243177 - DNA, 53 bp, Artificial
  Synthetic oligonucleotide
gcccgggagattgttgtgtaataacttatagaaggagcaaaacactatgtatc

SEQ ID NO: 243178 - DNA, 53 bp, Artificial
  Synthetic oligonucleotide
ttcgttgcggtcgcacatgctgtaactgttgcaccgtttggccctttcgcacc

SEQ ID NO: 243179 - DNA, 53 bp, Artificial
  Synthetic oligonucleotide
ccctccaatacttcaaaagaacacacagcgcctttaaaagagcatacagaact

SEQ ID NO: 243180 - DNA, 53 bp, Artificial
  Synthetic oligonucleotide
tgataacatcttttacaatcgtttgggctccgaaacctacagctaatcccacc

SEQ ID NO: 243181 - DNA, 53 bp, Artificial
  Synthetic oligonucleotide
tgaatgtcttccgcatgacccatacacatagccgtgttattgtaaggataagc

SEQ ID NO: 243182 - DNA, 53 bp, Artificial
  Synthetic oligonucleotide
ccgcccaaatgcttaacgcactccgtgcttgcatttctgcgcctgcatacgct

SEQ ID NO: 243183 - DNA, 53 bp, Artificial
  Synthetic oligonucleotide
gcgctaccttataatggtacggcacttgctatcagtgatcagcgacgtgaaat

SEQ ID NO: 243184 - DNA, 53 bp, Artificial
  Synthetic oligonucleotide
gttattacagctagctgtaaatgttggtgagtgattgaatggggattagacca

SEQ ID NO: 243185 - DNA, 54 bp, Artificial
  Synthetic oligonucleotide
catggttatatcgttcaaaatggacggggcgtttataaatgggcagtcggtaac

SEQ ID NO: 243186 - DNA, 53 bp, Artificial
  Synthetic oligonucleotide
tccaatttgttagtaggatagctgatttagtaataatgaaagttgttgccccg

SEQ ID NO: 243187 - DNA, 53 bp, Artificial
  Synthetic oligonucleotide
ggtcgacacgtccatgaccattagttgtacgattgaccttttcgtcatgcata

SEQ ID NO: 243188 - DNA, 53 bp, Artificial
  Synthetic oligonucleotide
acggtccttatccattaggtataaatggcggtatgcactacggagttgatttt

SEQ ID NO: 243189 - DNA, 53 bp, Artificial
  Synthetic oligonucleotide
attgcccgtgaagttatacattcaaaaggttacaaggctacttctatcagcga

SEQ ID NO: 243190 - DNA, 53 bp, Artificial
  Synthetic oligonucleotide
tcacaccccagattgcaagaaagcccgagactcccgagggatcaaccgcagtc

SEQ ID NO: 243191 - DNA, 53 bp, Artificial
  Synthetic oligonucleotide
cggagcctgcgacaaatacgcgttaagaaagcaagaacggtcatgtatcaaat

SEQ ID NO: 243192 - DNA, 53 bp, Artificial
  Synthetic oligonucleotide
taatctgaccagacttatcacttccatcagtagacgttgcagtgacaattgaa

SEQ ID NO: 243193 - DNA, 51 bp, Artificial
  Synthetic oligonucleotide
agcgtgagctataaaaccgacgagtcgacagtttaagggtttattaagggt

SEQ ID NO: 243194 - DNA, 53 bp, Artificial
  Synthetic oligonucleotide
tcaaacgaattgcacgctgcctatcgttttcgttatttatattcacgtattgg

SEQ ID NO: 243195 - DNA, 53 bp, Artificial
  Synthetic oligonucleotide
gttagtttatatggtttagccatatcttgatgaggcgtgtctcccccatcccc

SEQ ID NO: 243196 - DNA, 57 bp, Artificial
  Synthetic oligonucleotide
catgtagccattttggcgttttttctcgactgatatattgtttgggttggcctacat

SEQ ID NO: 243197 - DNA, 53 bp, Artificial
  Synthetic oligonucleotide
tacacgagcagcctttagcgttgcggcccacgacttaggtgttcaagtagatt

SEQ ID NO: 243198 - DNA, 53 bp, Artificial
  Synthetic oligonucleotide
gtgtccgcctacaccgatagacgcattgccgtgaagtcgtgcctcgccaccac

SEQ ID NO: 243199 - DNA, 53 bp, Artificial
  Synthetic oligonucleotide
acgattgggaaggcatccatagagtttcgagttaattccggatctcccactcc

SEQ ID NO: 243200 - DNA, 53 bp, Artificial
  Synthetic oligonucleotide
tacgcaatcagatccaaactctcaatcaacaccgtccacagataaacagtggg

SEQ ID NO: 243201 - DNA, 53 bp, Artificial
  Synthetic oligonucleotide
ggttatgttgcggaaaatgaacgagcgtacatcaaagagcgtcagcgtgatgg

SEQ ID NO: 243202 - DNA, 53 bp, Artificial
  Synthetic oligonucleotide
acaggtgcgaaagggccaaacggtgcaacagttacagcatgtgcgaccgcaac

SEQ ID NO: 243203 - DNA, 53 bp, Artificial
  Synthetic oligonucleotide
ctttcctatgccagacgtagtgaaacgtgcatatatcgatgccataaacaata

SEQ ID NO: 243204 - DNA, 53 bp, Artificial
  Synthetic oligonucleotide
tatcctcagcaggtttcaataacactatattacctgccacaactggtgctaaa

SEQ ID NO: 243205 - DNA, 53 bp, Artificial
  Synthetic oligonucleotide
atgagaacgttactattcctagcggtattaggagttgttgtaacaggtgtgac

SEQ ID NO: 243206 - DNA, 53 bp, Artificial
  Synthetic oligonucleotide
ggggcccccaacatagaagctgacggaaaagtcagcttacattaatgtgcaag

SEQ ID NO: 243207 - DNA, 60 bp, Artificial
  Synthetic oligonucleotide
catgtagctgaagaatctgtagtgggcgctgtcgaagtagctaaagctacggggataaaa

SEQ ID NO: 243208 - DNA, 53 bp, Artificial
  Synthetic oligonucleotide
tagcagttacacaatcagcgttgaacgaacatttaggttcagcaggaggtatt

SEQ ID NO: 243209 - DNA, 53 bp, Artificial
  Synthetic oligonucleotide
taggggcaacgatattcagtgcaccctcgaaccgtgccatgatggaagacggg

SEQ ID NO: 243210 - DNA, 53 bp, Artificial
  Synthetic oligonucleotide
acccctcattatccgaacgcgaactgtttcattcaggcatgcgcgtcggccga

SEQ ID NO: 243211 - DNA, 53 bp, Artificial
  Synthetic oligonucleotide
cgcactaaatcaaatatccaagcgacttgttgatctaaacctaacggaccaaa

SEQ ID NO: 243212 - DNA, 53 bp, Artificial
  Synthetic oligonucleotide
gactattagcgcccgtaactatcttcactttaaaatcgtctggataacgttcc

SEQ ID NO: 243213 - DNA, 51 bp, Artificial
  Synthetic oligonucleotide
actcgcgttgttcgttggctttcgttttgaaagcctccgtgttggggcccc

SEQ ID NO: 243214 - DNA, 53 bp, Artificial
  Synthetic oligonucleotide
gactacagcgaactcatattcagcgttagaggggtcgcagtttaaaccagaca

SEQ ID NO: 243215 - DNA, 53 bp, Artificial
  Synthetic oligonucleotide
cgtcacgtgcaatattccgtgggtggcgcatcacctgttgaccccactggctc

SEQ ID NO: 243216 - DNA, 53 bp, Artificial
  Synthetic oligonucleotide
atgacaatgaattcgacgaattcagacatcaccgtggtgcaacttcgtaccat

SEQ ID NO: 243217 - DNA, 53 bp, Artificial
  Synthetic oligonucleotide
tcgaacaagatatcaaattaattgcttgcacgatgagcatggatgttatgggc

SEQ ID NO: 243218 - DNA, 59 bp, Artificial
  Synthetic oligonucleotide
ccaaagaatacgagttttaagacgatgagagacgcgtttatttgcatcgagaatcagat

SEQ ID NO: 243219 - DNA, 53 bp, Artificial
  Synthetic oligonucleotide
tcctaccaatataggtactggtatgagagcaagcgtgatgctacatttgccag

SEQ ID NO: 243220 - DNA, 52 bp, Artificial
  Synthetic oligonucleotide
aacgttgaagtgcgaattataatcgagtaaatataaatgatagcttagctta

SEQ ID NO: 243221 - DNA, 52 bp, Artificial
  Synthetic oligonucleotide
ggggtcctcgaacgtcgggggcacactgaagcgacaatcgatttggcgaagt

SEQ ID NO: 243222 - DNA, 52 bp, Artificial
  Synthetic oligonucleotide
ggttccatttgtacttgtagcgataagtgagaatggtaatagtagtggagaa

SEQ ID NO: 243223 - DNA, 52 bp, Artificial
  Synthetic oligonucleotide
gtttagaagcgggtgttttgaggttatacgctgctttcaatacgagatgact

SEQ ID NO: 243224 - DNA, 52 bp, Artificial
  Synthetic oligonucleotide
tgtgccactaatcgtatttgtgacactatcgaaacttacgccagctggtaaa

SEQ ID NO: 243225 - DNA, 52 bp, Artificial
  Synthetic oligonucleotide
actagcagccataacatcactcgcgctatgaccttccatcattaaggggatc

SEQ ID NO: 243226 - DNA, 52 bp, Artificial
  Synthetic oligonucleotide
attttggggcttcataagtatattttggggcttcataagtatattttggggc

SEQ ID NO: 243227 - DNA, 52 bp, Artificial
  Synthetic oligonucleotide
ggtgttttactagcatgtttagtgggcatacctcttggtatcatcattgcac

SEQ ID NO: 243228 - DNA, 52 bp, Artificial
  Synthetic oligonucleotide
cgagcctctgacacgctgacgctcccccagacccccaagagcccatgttccg

SEQ ID NO: 243229 - DNA, 51 bp, Artificial
  Synthetic oligonucleotide
gattttttaggtggttttcctaaaaaatactacccgacccttgcatgtaga

SEQ ID NO: 243230 - DNA, 56 bp, Artificial
  Synthetic oligonucleotide
ccaacttgattcgctttttcaggtgtaacctcgtcaggtttgaatgactgtataac

SEQ ID NO: 243231 - DNA, 52 bp, Artificial
  Synthetic oligonucleotide
agcgttagactttgaaaccgcaaatggtaagcgtacgagtatttgttcagtt

SEQ ID NO: 243232 - DNA, 52 bp, Artificial
  Synthetic oligonucleotide
cacagacgattacgacggcttttacaacgggcagtgtaaacaacatgcatga

SEQ ID NO: 243233 - DNA, 52 bp, Artificial
  Synthetic oligonucleotide
cagaacatgggctcttgggggtctgggggagcgtcagcgtgtcagaggctcg

SEQ ID NO: 243234 - DNA, 52 bp, Artificial
  Synthetic oligonucleotide
caatgttatgccaagttacaatgtttttatccgtaaagacgagttagattat

SEQ ID NO: 243235 - DNA, 52 bp, Artificial
  Synthetic oligonucleotide
gcattagaatataatatccataaattacgagaaaggttggatgacatatggc

SEQ ID NO: 243236 - DNA, 52 bp, Artificial
  Synthetic oligonucleotide
gtcatgcgagatgtgccctcactttcgtactgatgtaatcaatgacgacgac

SEQ ID NO: 243237 - DNA, 51 bp, Artificial
  Synthetic oligonucleotide
aagacttcggtttgtgtaacgttagacttcggtttctctaagtcccctgcc

SEQ ID NO: 243238 - DNA, 52 bp, Artificial
  Synthetic oligonucleotide
cgtcgtatcacattttggtgatacgacgttgttatatatagggaggtccttt

SEQ ID NO: 243239 - DNA, 52 bp, Artificial
  Synthetic oligonucleotide
gtttgtttagggccatctaataattcaagcaagccattataacgacctccgc

SEQ ID NO: 243240 - DNA, 52 bp, Artificial
  Synthetic oligonucleotide
caaaacgtttgttatgagtgacagtataacgtgccaattcagctaattgata

SEQ ID NO: 243241 - DNA, 58 bp, Artificial
  Synthetic oligonucleotide
ccaacttgcacattattgtaagctgacttttcgtcagcttctgtgttggggcccccgc

SEQ ID NO: 243242 - DNA, 52 bp, Artificial
  Synthetic oligonucleotide
ggaaatcaaggtgaggggtagggaagttatgagggactggatccttatatac

SEQ ID NO: 243243 - DNA, 52 bp, Artificial
  Synthetic oligonucleotide
aacactctcaaaggctcgggatactttccatagtattagtgaactaccagaa

SEQ ID NO: 243244 - DNA, 52 bp, Artificial
  Synthetic oligonucleotide
accgaagagaagcctcaaatagaaagcccaggtaatgaggtgccattaaatc

SEQ ID NO: 243245 - DNA, 52 bp, Artificial
  Synthetic oligonucleotide
ttactttgtgataactcaacgtttatcatgagtaattacataaaatcaattc

SEQ ID NO: 243246 - DNA, 52 bp, Artificial
  Synthetic oligonucleotide
attcgtttgttgccggtaggtggctacgtgcgtatggcgggagacgggatgg

SEQ ID NO: 243247 - DNA, 52 bp, Artificial
  Synthetic oligonucleotide
caagtcctgcacgctctgctaccgcacgatcacttagcacacctgtatcgac

SEQ ID NO: 243248 - DNA, 52 bp, Artificial
  Synthetic oligonucleotide
tagtgcaagctcacaaaatgtgggtcatgcaccaaaacaggtaacagaggcg

SEQ ID NO: 243249 - DNA, 52 bp, Artificial
  Synthetic oligonucleotide
aataacaattgtccaggtcctctaagacctgccgtccaaactgtcactgcta

SEQ ID NO: 243250 - DNA, 52 bp, Artificial
  Synthetic oligonucleotide
agagccagtggggtcaacaggtgatgcgccacccacggaatattgcacgtga

SEQ ID NO: 243251 - DNA, 52 bp, Artificial
  Synthetic oligonucleotide
atcctcttacctggtgccgttcttaattgactagcctgtgccataactgtta

SEQ ID NO: 243252 - DNA, 59 bp, Artificial
  Synthetic oligonucleotide
ctcaggagaagtaatacagtttgataagctatatagagcacaaacaggtggaaacttcg

SEQ ID NO: 243253 - DNA, 52 bp, Artificial
  Synthetic oligonucleotide
atggatagtatgagatatggaccaaactcaaacggcgactttgcatcagtca

SEQ ID NO: 243254 - DNA, 52 bp, Artificial
  Synthetic oligonucleotide
tatactaaatgtgcgactgcataagagcccctaatcgctaaactataagggg

SEQ ID NO: 243255 - DNA, 52 bp, Artificial
  Synthetic oligonucleotide
cacacgattgttgtaaatccaaatgactcactattcgctcgtatttgagatt

SEQ ID NO: 243256 - DNA, 52 bp, Artificial
  Synthetic oligonucleotide
caggtggagaagcattatcaacattatggatatttatattagctccccttct

SEQ ID NO: 243257 - DNA, 52 bp, Artificial
  Synthetic oligonucleotide
gtcaggaccttgacctaattcactaagtatgtctgtcactgtcatacggcca

SEQ ID NO: 243258 - DNA, 52 bp, Artificial
  Synthetic oligonucleotide
cgatgatgacgtttggtcaactatcgaagaagctggaatggcgcgtgacggt

SEQ ID NO: 243259 - DNA, 52 bp, Artificial
  Synthetic oligonucleotide
gttggggcccacaccccaacttgcattgtctgtagaaattggaaatccaatt

SEQ ID NO: 243260 - DNA, 52 bp, Artificial
  Synthetic oligonucleotide
gttaaagttacaagtggaatgattccacaaccaatagcttgaaataatctag

SEQ ID NO: 243261 - DNA, 52 bp, Artificial
  Synthetic oligonucleotide
atttggaatcattatatcaaaactggttgatagaaataacataatgaatccc

SEQ ID NO: 243262 - DNA, 52 bp, Artificial
  Synthetic oligonucleotide
ggggctggccctctacaagtttacccttcaattgaagaaggacttgataaag

SEQ ID NO: 243263 - DNA, 54 bp, Artificial
  Synthetic oligonucleotide
ctcattttgtgttggtttttcatatgtgcgttcttccaaccattttggcgtttt

SEQ ID NO: 243264 - DNA, 52 bp, Artificial
  Synthetic oligonucleotide
gaccccagtttctattaccactggcagctaccgctctgagatatgaatgatt

SEQ ID NO: 243265 - DNA, 52 bp, Artificial
  Synthetic oligonucleotide
ggctacaagtgcaaaaatcccgcaaccgagtgccccagcagtacggaggccc

SEQ ID NO: 243266 - DNA, 52 bp, Artificial
  Synthetic oligonucleotide
tcaggtggtggcgaggcacgacttcacggcaatgcgtctatcggtgtaggcg

SEQ ID NO: 243267 - DNA, 52 bp, Artificial
  Synthetic oligonucleotide
tgacaatcaattttctcggcataaatggtcactactcaactaaaaagtaaag

SEQ ID NO: 243268 - DNA, 52 bp, Artificial
  Synthetic oligonucleotide
gatacctcatctatagatggggtcatattttccttatgctcttacggagttc

SEQ ID NO: 243269 - DNA, 52 bp, Artificial
  Synthetic oligonucleotide
aaaagtttcctggcatcgtcagaacttgtattcagattctttacaagtcact

SEQ ID NO: 243270 - DNA, 52 bp, Artificial
  Synthetic oligonucleotide
gtgtactcattgatttgggactaataatcggtaaagatgcaagacaccgtag

SEQ ID NO: 243271 - DNA, 52 bp, Artificial
  Synthetic oligonucleotide
cgtttgtgtataggtcctaaatgtaccgttccgttgccacgcgccttaacag

SEQ ID NO: 243272 - DNA, 52 bp, Artificial
  Synthetic oligonucleotide
cgtcggatgtgcatcacgttcaggttgcgtggtgtctggtgtgacgtcacga

SEQ ID NO: 243273 - DNA, 52 bp, Artificial
  Synthetic oligonucleotide
ctatgtacacacccgaaccaaaattaagctttgacgctatgactattgttgg

SEQ ID NO: 243274 - DNA, 60 bp, Artificial
  Synthetic oligonucleotide
ctccgtaagagcataaggagaatttgctatcattcaaaaatgataggtctggcaaagcca

SEQ ID NO: 243275 - DNA, 52 bp, Artificial
  Synthetic oligonucleotide
ctatgcgttgagcgtagtgccctgcaataaatcgcatttgacgtgttgcaat

SEQ ID NO: 243276 - DNA, 52 bp, Artificial
  Synthetic oligonucleotide
gagtatcagacaccgacgtccaacccaaacgacgaacttcaagtcgtgatga

SEQ ID NO: 243277 - DNA, 52 bp, Artificial
  Synthetic oligonucleotide
aggtccaaataagaattgcccaagtgcgagtcctatcattgcaaaggatagt

SEQ ID NO: 243278 - DNA, 52 bp, Artificial
  Synthetic oligonucleotide
aaaacctcctaacatgctgtaagtactgatatgacagtgttagttgaggtcg

SEQ ID NO: 243279 - DNA, 52 bp, Artificial
  Synthetic oligonucleotide
taaatcattcgaaccatcagttgctgcgtatatgacacaagacgaacaactg

SEQ ID NO: 243280 - DNA, 52 bp, Artificial
  Synthetic oligonucleotide
cacctaatggtggccgtagtctaaatggttcacatgcgtcacttgttgtacc

SEQ ID NO: 243281 - DNA, 52 bp, Artificial
  Synthetic oligonucleotide
ttgatgtttgaacaagtactgattaatgtgttgatataccatttgtttcacc

SEQ ID NO: 243282 - DNA, 52 bp, Artificial
  Synthetic oligonucleotide
gcatttgctcgccttgtcagctgattgacgttgttcccaatcgctcgcaact

SEQ ID NO: 243283 - DNA, 52 bp, Artificial
  Synthetic oligonucleotide
ggatgctcggtgcacgacaatgggccgaaagctatgctgatgagacaggtgc

SEQ ID NO: 243284 - DNA, 52 bp, Artificial
  Synthetic oligonucleotide
gtataatgcccctcaatacttcttataagcccctctgtgtgcttgggagtag

SEQ ID NO: 243285 - DNA, 58 bp, Artificial
  Synthetic oligonucleotide
ctccttcatcttcaatttaaaacgccaggcgttttattcccctcatcataccactgca

SEQ ID NO: 243286 - DNA, 52 bp, Artificial
  Synthetic oligonucleotide
ctcatcgtcagttagatatatatttcgtgaactgcgtgcaagtccatctgct

SEQ ID NO: 243287 - DNA, 52 bp, Artificial
  Synthetic oligonucleotide
aaacgtccaatcgttttcaaaccgtctttgcattagatgatcatggttcaag

SEQ ID NO: 243288 - DNA, 52 bp, Artificial
  Synthetic oligonucleotide
tggaaatcagatgacgataaaccaagtagcaataatgcatttgcgggtggtg

SEQ ID NO: 243289 - DNA, 52 bp, Artificial
  Synthetic oligonucleotide
gtggacctctttgaccagctgtcatactgttttctctatctgaaacggggtg

SEQ ID NO: 243290 - DNA, 52 bp, Artificial
  Synthetic oligonucleotide
ttttactagacgaatggccaaatatcggcgcaataccagactatgaagaaac

SEQ ID NO: 243291 - DNA, 51 bp, Artificial
  Synthetic oligonucleotide
gccactaagaccatgagaaaccgcttctcgcctaattagttggtatcgatt

SEQ ID NO: 243292 - DNA, 51 bp, Artificial
  Synthetic oligonucleotide
aaaagtaaccaagctgaaacgtctaccgtattggaggtcaaaaggggatgc

SEQ ID NO: 243293 - DNA, 51 bp, Artificial
  Synthetic oligonucleotide
ttctcattcgaatcatacaaatcatcaacaaaccgaatttaataatgatgc

SEQ ID NO: 243294 - DNA, 51 bp, Artificial
  Synthetic oligonucleotide
cactgtaatcggtaatgggaaggactatgcgataagtgagttaccaatagg

SEQ ID NO: 243295 - DNA, 51 bp, Artificial
  Synthetic oligonucleotide
ttatggtcgtaatggcaagccagaaacaaaatattttggcgttcgtgatag

SEQ ID NO: 243296 - DNA, 60 bp, Artificial
  Synthetic oligonucleotide
ctcgatcaagtggcagatctccaatgatagtcatacggtcaaaattgatttttggtaggg

SEQ ID NO: 243297 - DNA, 51 bp, Artificial
  Synthetic oligonucleotide
tttagatcttgcgaaacgatttgatgtcatagtcaatatttctgagcttag

SEQ ID NO: 243298 - DNA, 51 bp, Artificial
  Synthetic oligonucleotide
actagagacatccacagacctttacccttagatgaactccaattgcgatta

SEQ ID NO: 243299 - DNA, 51 bp, Artificial
  Synthetic oligonucleotide
gtatgcttgtccagttataagaccatgaatcttagtaggaccaacataagc

SEQ ID NO: 243300 - DNA, 51 bp, Artificial
  Synthetic oligonucleotide
cagtggacgagggaagttatcaacctagcagagcgatggcgttaccagtaa

SEQ ID NO: 243301 - DNA, 51 bp, Artificial
  Synthetic oligonucleotide
ttgacaccacgttctcttagtatttcagatataccacgataactcagcgcg

SEQ ID NO: 243302 - DNA, 51 bp, Artificial
  Synthetic oligonucleotide
tttcaccagcgtgatcaattccctttccgattatgtaatcacgtacgaaat

SEQ ID NO: 243303 - DNA, 51 bp, Artificial
  Synthetic oligonucleotide
tagggttcactctaattgaacgataattacgtgttgtataatcaatcttct

SEQ ID NO: 243304 - DNA, 51 bp, Artificial
  Synthetic oligonucleotide
cggaacaactggtaaggcagaaacaaaatattttggctcacgtgatagtaa

SEQ ID NO: 243305 - DNA, 51 bp, Artificial
  Synthetic oligonucleotide
agatgactttgtcatactaactatattgtgttaagttagggctcggcacca

SEQ ID NO: 243306 - DNA, 51 bp, Artificial
  Synthetic oligonucleotide
cacacaaaacgtagttaaggaagttcaaaacaaccaatccgaactgcgaca

SEQ ID NO: 243307 - DNA, 59 bp, Artificial
  Synthetic oligonucleotide
ctcgggacaaatagcaatgggatttacagagttctttggcgctaggtatgacgaaagca

SEQ ID NO: 243308 - DNA, 51 bp, Artificial
  Synthetic oligonucleotide
cagcacctatgcgctgtactttccataagcttacaggttctctctcccgca

SEQ ID NO: 243309 - DNA, 51 bp, Artificial
  Synthetic oligonucleotide
cactttggcgtacttatgttagaagtcatttgtcgaaccaacgacatgtga

SEQ ID NO: 243310 - DNA, 51 bp, Artificial
  Synthetic oligonucleotide
taaaacacgatacagtggtgatagatcaaccgaaacaaacgacagtacatt

SEQ ID NO: 243311 - DNA, 51 bp, Artificial
  Synthetic oligonucleotide
ttcggataaccgcctagcgcaggtgtgggatgcagtgcacgtgtgacacgt

SEQ ID NO: 243312 - DNA, 51 bp, Artificial
  Synthetic oligonucleotide
aaacaggtcattcaccatggcgatatctgatcgtgatgttttattttgtgc

SEQ ID NO: 243313 - DNA, 51 bp, Artificial
  Synthetic oligonucleotide
acgctagcaggttatgttggtgctatgataggatctatgcaattagttagt

SEQ ID NO: 243314 - DNA, 51 bp, Artificial
  Synthetic oligonucleotide
tactttaccagaggatttagacttcatacgctgatccatatgtgcttgcgt

SEQ ID NO: 243315 - DNA, 51 bp, Artificial
  Synthetic oligonucleotide
cgtaccagaagtaccaatactgcataatgtatcgttggatttgataacacc

SEQ ID NO: 243316 - DNA, 51 bp, Artificial
  Synthetic oligonucleotide
gaacatcttgcccatcgcatctttcgttgacacattcatatctataatatg

SEQ ID NO: 243317 - DNA, 51 bp, Artificial
  Synthetic oligonucleotide
tttgtcccactctcagcaccacccatcatgacgcaactcgtgcatctatat

SEQ ID NO: 243318 - DNA, 56 bp, Artificial
  Synthetic oligonucleotide
ctcgttaatacaaaagatagcggtagtgagaagacagttgaacgtaatttggataa

SEQ ID NO: 243319 - DNA, 51 bp, Artificial
  Synthetic oligonucleotide
ttcctgtgaacacgtagataatacgtatcgaacattaacacagagatgagg

SEQ ID NO: 243320 - DNA, 51 bp, Artificial
  Synthetic oligonucleotide
acgtggtgtagtgacctcggcaaatctagctttcgcacgatcattatatgc

SEQ ID NO: 243321 - DNA, 51 bp, Artificial
  Synthetic oligonucleotide
gcagttgctgattgaggatcaccagatggtggagatacaaagtggctgatt

SEQ ID NO: 243322 - DNA, 51 bp, Artificial
  Synthetic oligonucleotide
gcaggtttcgatgttgaatcgtttaacgtgtcacatgatgcgatagatccg

SEQ ID NO: 243323 - DNA, 51 bp, Artificial
  Synthetic oligonucleotide
atctcttcagatctacaggttttcgccatgccgtgtaattagcatcatgct

SEQ ID NO: 243324 - DNA, 51 bp, Artificial
  Synthetic oligonucleotide
taatttgagatcattacgtaggtaacgatagatgttttgaaagagttgttg

SEQ ID NO: 243325 - DNA, 51 bp, Artificial
  Synthetic oligonucleotide
actctattttagtttgctacttgatgacaaagggcatgtgataacctatat

SEQ ID NO: 243326 - DNA, 51 bp, Artificial
  Synthetic oligonucleotide
tttggggagatgcgcgcaattgggcaggtcaagcttcaggtgacggcttta

SEQ ID NO: 243327 - DNA, 51 bp, Artificial
  Synthetic oligonucleotide
ttcggttctgctttacctgtaaccgttgtatcatcactagttaccgggtta

SEQ ID NO: 243328 - DNA, 51 bp, Artificial
  Synthetic oligonucleotide
tttgtttctaccatatgttgagaaaatgtacattacaaaaattcattacga

SEQ ID NO: 243329 - DNA, 57 bp, Artificial
  Synthetic oligonucleotide
ctctacactcataaatttagaaagggcttgagcgttgtctcggttgagatttccaac

SEQ ID NO: 243330 - DNA, 51 bp, Artificial
  Synthetic oligonucleotide
ggtcagtttactggtaatgggcgtataaaagtatatgttgccttccgcatg

SEQ ID NO: 243331 - DNA, 51 bp, Artificial
  Synthetic oligonucleotide
atatcgtctattggtagtattgctggtctattagtaccatggtttacaggg

SEQ ID NO: 243332 - DNA, 51 bp, Artificial
  Synthetic oligonucleotide
cgacacgcaacgttctgaaatcaactcaatggtaacacgagtgattagtcg

SEQ ID NO: 243333 - DNA, 51 bp, Artificial
  Synthetic oligonucleotide
agacgtccatgccgtgagagtattggcgatgacgcctcaagggcaacgcta

SEQ ID NO: 243334 - DNA, 51 bp, Artificial
  Synthetic oligonucleotide
tgctacttctgtttgcccatttgcttttaaagattgagcatagtcataatc

SEQ ID NO: 243335 - DNA, 51 bp, Artificial
  Synthetic oligonucleotide
gatgaggttacgccgaaacaatgtaatcaacttggattggaattggcacag

SEQ ID NO: 243336 - DNA, 51 bp, Artificial
  Synthetic oligonucleotide
aagccacacgtgaactttatggtaaaacagggggcaatgaaggccatgtca

SEQ ID NO: 243337 - DNA, 51 bp, Artificial
  Synthetic oligonucleotide
tggaggtgtgatgcatttcggagtcgtggtgttgggcgtgtgcacgcgtta

SEQ ID NO: 243338 - DNA, 51 bp, Artificial
  Synthetic oligonucleotide
agacgttcgccaccccaataattactatctcctaaaccaggtccattatca

SEQ ID NO: 243339 - DNA, 51 bp, Artificial
  Synthetic oligonucleotide
tggctttaatcgtctatattattttttatcacgtttatggagctaataacc

SEQ ID NO: 243340 - DNA, 60 bp, Artificial
  Synthetic oligonucleotide
gcaatcaactatgcggaaaagcgtgcagaagaaaaaagcggtctgaattgtgatgtggaa

SEQ ID NO: 243341 - DNA, 60 bp, Artificial
  Synthetic oligonucleotide
ctctagcgattccagaagtttctcagagtcggaaagttgaccagacattacgaactggca

SEQ ID NO: 243342 - DNA, 51 bp, Artificial
  Synthetic oligonucleotide
tgggcttaggcaagatattgaaccgtcgagtaagtaactgtgtgagaggac

SEQ ID NO: 243343 - DNA, 51 bp, Artificial
  Synthetic oligonucleotide
gtaacgatgaattttggacttgtaaagcaataacaattgggtttaccaggt

SEQ ID NO: 243344 - DNA, 51 bp, Artificial
  Synthetic oligonucleotide
gtgtcctcgcctcatagcaacggttacacggcacgtccgcgttgggaacaa

SEQ ID NO: 243345 - DNA, 51 bp, Artificial
  Synthetic oligonucleotide
gcttgtttttgctgtcgcaaaaatgccccctaacccccatttacatggggg

SEQ ID NO: 243346 - DNA, 51 bp, Artificial
  Synthetic oligonucleotide
cgagcatacgaaagttgattcttcggaaacagaacgaggtaacgtcacacg

SEQ ID NO: 243347 - DNA, 51 bp, Artificial
  Synthetic oligonucleotide
aacttacgggtgaagagattgcgaaacaaacaggagttagtcgatctacag

SEQ ID NO: 243348 - DNA, 51 bp, Artificial
  Synthetic oligonucleotide
aactgctcctaagtattgaattgttacccatagtcatgtcgttcaaggcga

SEQ ID NO: 243349 - DNA, 51 bp, Artificial
  Synthetic oligonucleotide
atacgttacggatttatgtattcttgcagattctacgaaacatttagtaga

SEQ ID NO: 243350 - DNA, 51 bp, Artificial
  Synthetic oligonucleotide
tctcaaactcaccctcttaaagtgagtgtaccaatagttgtatggtttagc

SEQ ID NO: 243351 - DNA, 51 bp, Artificial
  Synthetic oligonucleotide
gagacgttctgacagcgtctgaaatctcataatatttgcctgttatgagat

SEQ ID NO: 243352 - DNA, 60 bp, Artificial
  Synthetic oligonucleotide
ctgatgatatcttacttgtcgattgtagcgctctatcataagaacccaattccttcagtt

SEQ ID NO: 243353 - DNA, 51 bp, Artificial
  Synthetic oligonucleotide
agcgtcagctatcaattcgaccgatggacagctttaggattattaaggagc

SEQ ID NO: 243354 - DNA, 51 bp, Artificial
  Synthetic oligonucleotide
ggcatacttcccatatcactacatccttgaacattattatgtccacgcaat

SEQ ID NO: 243355 - DNA, 51 bp, Artificial
  Synthetic oligonucleotide
attacgattgcacctggtgcgaaccaaacagtcaatacacatgccggtaac

SEQ ID NO: 243356 - DNA, 51 bp, Artificial
  Synthetic oligonucleotide
tcgccaaatcgattgtcgcttcagtgtgcccccgacgttcgaggaccccat

SEQ ID NO: 243357 - DNA, 51 bp, Artificial
  Synthetic oligonucleotide
attagtttacataatcgatgattaccagaagttctcactatataaaaggca

SEQ ID NO: 243358 - DNA, 51 bp, Artificial
  Synthetic oligonucleotide
ccttaatcgaaatgagtgttgacttaatttcgactcagcctgagacaaact

SEQ ID NO: 243359 - DNA, 51 bp, Artificial
  Synthetic oligonucleotide
tccactggaaagttgtcaaaaatcatatgcagaacaatcatatcagcaagc

SEQ ID NO: 243360 - DNA, 51 bp, Artificial
  Synthetic oligonucleotide
gtgcaagttggcggggccccaacatagaagcaggcggaaagtcagctaaca

SEQ ID NO: 243361 - DNA, 51 bp, Artificial
  Synthetic oligonucleotide
gaggtatagaccataatgaagtaaaggcgagtagagttcgtaaatctgttg

SEQ ID NO: 243362 - DNA, 51 bp, Artificial
  Synthetic oligonucleotide
ccgaataatataagccagctcattctcagttaaacgttcgcctccaatacc

SEQ ID NO: 243363 - DNA, 55 bp, Artificial
  Synthetic oligonucleotide
ctgattgacgttgttgccaattcgcccgatttgacctgttaaccttgttaaatcg

SEQ ID NO: 243364 - DNA, 51 bp, Artificial
  Synthetic oligonucleotide
cgttttgtaccccgattgtacccctacaaattgcgattgtacccaggttgt

SEQ ID NO: 243365 - DNA, 51 bp, Artificial
  Synthetic oligonucleotide
tcagtcaaaggtttcgcgacgatgttattacttgcgattctgatgagtttc

SEQ ID NO: 243366 - DNA, 51 bp, Artificial
  Synthetic oligonucleotide
agaattcgagcaacaattatcagaatacgaaccgagagaaagtgagtacag

SEQ ID NO: 243367 - DNA, 51 bp, Artificial
  Synthetic oligonucleotide
caagctacgatagttacctttaatctgttggtatatctggtttcgagcaca

SEQ ID NO: 243368 - DNA, 51 bp, Artificial
  Synthetic oligonucleotide
cgttagtcactaactagttcttattgccaatgattactacccctagtctgc

SEQ ID NO: 243369 - DNA, 51 bp, Artificial
  Synthetic oligonucleotide
cgcaaatcaaacggtagaggtatctagcatagatgacgtgacggcgacctt

SEQ ID NO: 243370 - DNA, 51 bp, Artificial
  Synthetic oligonucleotide
tagtttccctagtcatgaacgagagatactggtaaatagcgcaagtttctt

SEQ ID NO: 243371 - DNA, 51 bp, Artificial
  Synthetic oligonucleotide
cgcacctcctctctacgccaagttgacgtctgagaggtaggcgactctaac

SEQ ID NO: 243372 - DNA, 51 bp, Artificial
  Synthetic oligonucleotide
tatcgttctaagagagtgattgcagttggagatcctattcaaatagagcca

SEQ ID NO: 243373 - DNA, 51 bp, Artificial
  Synthetic oligonucleotide
caagaagaaaaggccgttagaataataaatgatagtacatatgggtttggt

SEQ ID NO: 243374 - DNA, 56 bp, Artificial
  Synthetic oligonucleotide
ctgcaggggcaaaaaagcataaaaaaacgctagctttgatgagctaacgttagtta

SEQ ID NO: 243375 - DNA, 51 bp, Artificial
  Synthetic oligonucleotide
tatctattacggtacgagatgatttctctccgcgttcaacgtcacttggct

SEQ ID NO: 243376 - DNA, 51 bp, Artificial
  Synthetic oligonucleotide
cgttcaaagtaaaccagccaacacaaacattgggtgtggacgcattacaac

SEQ ID NO: 243377 - DNA, 51 bp, Artificial
  Synthetic oligonucleotide
gcgttgtttgcagctttatttcctagactagaattttttggtcgtgttact

SEQ ID NO: 243378 - DNA, 51 bp, Artificial
  Synthetic oligonucleotide
catttggcgagcacaatcaatttaccccaagtcattttctgaaaatcttag

SEQ ID NO: 243379 - DNA, 51 bp, Artificial
  Synthetic oligonucleotide
cgatatagcctagtaccatactccaacttaacgcgccgtccatagcaaacg

SEQ ID NO: 243380 - DNA, 51 bp, Artificial
  Synthetic oligonucleotide
cgcacctcctctctacgccgaattgacatctgagagatagacgaccttcac

SEQ ID NO: 243381 - DNA, 51 bp, Artificial
  Synthetic oligonucleotide
accatttcttgaccttgcatatattctggacgattcggtttcacattgtgt

SEQ ID NO: 243382 - DNA, 51 bp, Artificial
  Synthetic oligonucleotide
cgatagaaagcgtgagaaacagcgtacagacgatttagagatgtagaggta

SEQ ID NO: 243383 - DNA, 51 bp, Artificial
  Synthetic oligonucleotide
agagattttacagtttttcgtaacttcttttgcttacttgcaaagtatggc

SEQ ID NO: 243384 - DNA, 51 bp, Artificial
  Synthetic oligonucleotide
cgataatacacaaaaacaacttagttttctcaaaaactatgcataaaaaag

SEQ ID NO: 243385 - DNA, 60 bp, Artificial
  Synthetic oligonucleotide
ctgccccattaatagctataattgttttaacagcattgtatatgtatacaggatctgacg

SEQ ID NO: 243386 - DNA, 51 bp, Artificial
  Synthetic oligonucleotide
acacgaaatgattatgaagccgataatagctacactagttgcgccgtatcc

SEQ ID NO: 243387 - DNA, 50 bp, Artificial
  Synthetic oligonucleotide
aggtatcgagttgttgtgtattttgatataaacgtagatgattgagttgc

SEQ ID NO: 243388 - DNA, 50 bp, Artificial
  Synthetic oligonucleotide
tctacgtatagacctgctaatagcggactgattaatgcacctatattacc

SEQ ID NO: 243389 - DNA, 50 bp, Artificial
  Synthetic oligonucleotide
atgacaggtattcaagttacagaacgtgtgcccgaccaattcattacgtc

SEQ ID NO: 243390 - DNA, 50 bp, Artificial
  Synthetic oligonucleotide
ttattcaaaccacctattccaacggcagccccttctttacctatctgtcc

SEQ ID NO: 243391 - DNA, 50 bp, Artificial
  Synthetic oligonucleotide
attgagaagcattcagtaactcaagtggttggtacgtatagtcaggctag

SEQ ID NO: 243392 - DNA, 50 bp, Artificial
  Synthetic oligonucleotide
ttattcagttcttgttggtagctatccatctcagattttaagtcacgttt

SEQ ID NO: 243393 - DNA, 50 bp, Artificial
  Synthetic oligonucleotide
aggtacagaaagtccatgtcaaaatggtctaagtatccgacactgatgag

SEQ ID NO: 243394 - DNA, 50 bp, Artificial
  Synthetic oligonucleotide
cgggaatataataccttgtctggagagaatgaccgcttaaagagccgtat

SEQ ID NO: 243395 - DNA, 50 bp, Artificial
  Synthetic oligonucleotide
tgataacttcttatgttcagcaagacacctctcatttaaaggggatgcta

SEQ ID NO: 243396 - DNA, 54 bp, Artificial
  Synthetic oligonucleotide
ctgctcggaatatctcaagccgtttctttaattttgaaataaaaaaatcgacga

SEQ ID NO: 243397 - DNA, 50 bp, Artificial
  Synthetic oligonucleotide
tttatcgaattgatgactgaagcctatacgagaatatagttgggggtatc

SEQ ID NO: 243398 - DNA, 50 bp, Artificial
  Synthetic oligonucleotide
ttttgggcgcaaccgtttcagattcgctttcttcctcctgtgaggacgat

SEQ ID NO: 243399 - DNA, 50 bp, Artificial
  Synthetic oligonucleotide
tcgtggtaccagcacatcaaagtaacatgacatgacaccaagctcccaca

SEQ ID NO: 243400 - DNA, 50 bp, Artificial
  Synthetic oligonucleotide
tctttaatctctgcattgtcattggtgccctcaataacccaatagggagg

SEQ ID NO: 243401 - DNA, 50 bp, Artificial
  Synthetic oligonucleotide
tagctaggtgtagggtgattcatttgattacaccaatctactgttttacg

SEQ ID NO: 243402 - DNA, 50 bp, Artificial
  Synthetic oligonucleotide
ctacgcttaaagaaagtaaaggtttaggtacaccagcaactagagccgac

SEQ ID NO: 243403 - DNA, 50 bp, Artificial
  Synthetic oligonucleotide
ttacaatttccaaacaaggtacacgagtgcctctgaatttatcggcacgc

SEQ ID NO: 243404 - DNA, 50 bp, Artificial
  Synthetic oligonucleotide
aatatctggaatattagataagatgtccaaaaaggatctaataacacgtc

SEQ ID NO: 243405 - DNA, 50 bp, Artificial
  Synthetic oligonucleotide
ccggagtattgacatctaatgagatatattccgtcgtcataataccgccg

SEQ ID NO: 243406 - DNA, 50 bp, Artificial
  Synthetic oligonucleotide
gacgttgataatgcgtgtagtcggccaaattattatccactttaccacct

SEQ ID NO: 243407 - DNA, 54 bp, Artificial
  Synthetic oligonucleotide
ctggcccataaacttcgcgtgtcttttttgggcgcaaccgtttcagattcgctt

SEQ ID NO: 243408 - DNA, 50 bp, Artificial
  Synthetic oligonucleotide
acgaagcaaccatcagcacaaacgactcagcgtgaccatgatcaaaagca

SEQ ID NO: 243409 - DNA, 50 bp, Artificial
  Synthetic oligonucleotide
gattgtgtgcggtactgtaggaagtattatcgtacttagaggcctgtctc

SEQ ID NO: 243410 - DNA, 50 bp, Artificial
  Synthetic oligonucleotide
gcatgtacggtaatcaccatgtaccctcatctagatggcgtattatcact

SEQ ID NO: 243411 - DNA, 50 bp, Artificial
  Synthetic oligonucleotide
ttctgcgcaaatgccccctactttactaaacgggagaacaattgtatact

SEQ ID NO: 243412 - DNA, 50 bp, Artificial
  Synthetic oligonucleotide
acagcagttccttctaatgcgcaatcagaaccctctgtaccgctactaac

SEQ ID NO: 243413 - DNA, 50 bp, Artificial
  Synthetic oligonucleotide
ttcttccctgttgccgtattcttagtttgggctattcattcgttcttgga

SEQ ID NO: 243414 - DNA, 50 bp, Artificial
  Synthetic oligonucleotide
tgtatgccctgtaattagtaaaggagagggtagtatggttttactagagg

SEQ ID NO: 243415 - DNA, 50 bp, Artificial
  Synthetic oligonucleotide
gtgtctacagtggatggcttgcatatagtacgttcgaccatgactgggtg

SEQ ID NO: 243416 - DNA, 50 bp, Artificial
  Synthetic oligonucleotide
gcatatggtattttacaaataagtaggtgctctatgacaagatatacaag

SEQ ID NO: 243417 - DNA, 50 bp, Artificial
  Synthetic oligonucleotide
acgcaagcatatcccctccttatttactgttgaccaatgaatgctaacat

SEQ ID NO: 243418 - DNA, 60 bp, Artificial
  Synthetic oligonucleotide
ctggtcaaacaaaatgtcattgaagatgaaacaataggaatgattaaacaaggtcatcat

SEQ ID NO: 243419 - DNA, 50 bp, Artificial
  Synthetic oligonucleotide
agtctagctggcattactcgcgtatcgttaagcactaatgtatcaccagg

SEQ ID NO: 243420 - DNA, 50 bp, Artificial
  Synthetic oligonucleotide
ccacatctaaagttctaggaccccatcgttcctttctaacacggtgtaaa

SEQ ID NO: 243421 - DNA, 50 bp, Artificial
  Synthetic oligonucleotide
ccaccaccttttgaagtttgtaaaatagctcctgctaaaggtgttttacc

SEQ ID NO: 243422 - DNA, 50 bp, Artificial
  Synthetic oligonucleotide
cggaagatgtaggaacaaaagcgcttctctcaagagcattagcgggaact

SEQ ID NO: 243423 - DNA, 50 bp, Artificial
  Synthetic oligonucleotide
ccactttggagtcatattcgacgtggtctcgtactacctgctattttccc

SEQ ID NO: 243424 - DNA, 50 bp, Artificial
  Synthetic oligonucleotide
ctcaacgttgagtaagtctagagaagctttcgcgattggtaatactttcg

SEQ ID NO: 243425 - DNA, 50 bp, Artificial
  Synthetic oligonucleotide
aaaagctaaaaccacccttgaacttctgtcaggagtggttggaatctaac

SEQ ID NO: 243426 - DNA, 50 bp, Artificial
  Synthetic oligonucleotide
acatcggcggtttcattcgtcacctcttcaacgtcgcctttcattgcacc

SEQ ID NO: 243427 - DNA, 50 bp, Artificial
  Synthetic oligonucleotide
atattagcgttactcaaatattggataccacggcttaaacctgaccatgc

SEQ ID NO: 243428 - DNA, 50 bp, Artificial
  Synthetic oligonucleotide
gtaaatggacagcacaatatatcggcatgcgcgcacttggttatactgat

SEQ ID NO: 243429 - DNA, 60 bp, Artificial
  Synthetic oligonucleotide
ctgtcgtgaacatggtttgagtgttacagaacgtggcattgccaaaatgagatacacaca

SEQ ID NO: 243430 - DNA, 50 bp, Artificial
  Synthetic oligonucleotide
gacaacaactgtttcttgataaggagatggttgaacaactagaacgttcg

SEQ ID NO: 243431 - DNA, 50 bp, Artificial
  Synthetic oligonucleotide
cccattcaggcgttaattcttggccattggctatactcttataaagtacg

SEQ ID NO: 243432 - DNA, 50 bp, Artificial
  Synthetic oligonucleotide
taagtagctatgctgataaagaatgtgaagccttgttaaaggtggggttc

SEQ ID NO: 243433 - DNA, 50 bp, Artificial
  Synthetic oligonucleotide
atgttgcgtggttttggcacacatcgtttagccatactactgaaacacct

SEQ ID NO: 243434 - DNA, 50 bp, Artificial
  Synthetic oligonucleotide
tgcccgaaaaccatatcgcagatattaagccgatagtcattcagaactat

SEQ ID NO: 243435 - DNA, 50 bp, Artificial
  Synthetic oligonucleotide
tatcgtagcattgttgagatgtggatatcgctgcatggttggttttcgtt

SEQ ID NO: 243436 - DNA, 50 bp, Artificial
  Synthetic oligonucleotide
caagataactcaatgatgagtggcactatacgagataatattttatacgg

SEQ ID NO: 243437 - DNA, 50 bp, Artificial
  Synthetic oligonucleotide
gatgcgactcaaataaacctgtgctattatatgcaccgacatgggtttca

SEQ ID NO: 243438 - DNA, 50 bp, Artificial
  Synthetic oligonucleotide
tggatgttggtattattgcacatgaacgttgatttcgctttattttcgtc

SEQ ID NO: 243439 - DNA, 49 bp, Artificial
  Synthetic oligonucleotide
actagctatttatcaaattttcatgttgtttgaataaaaattcggggag

SEQ ID NO: 243440 - DNA, 57 bp, Artificial
  Synthetic oligonucleotide
ctgtgctgttgcgtattatacttattgggcttagtaaacgcaacaaataattaatag

SEQ ID NO: 243441 - DNA, 45 bp, Artificial
  Synthetic oligonucleotide
cgccagcttctatgttggggccccgccccaactcgcattgcctgt

SEQ ID NO: 243442 - DNA, 44 bp, Artificial
  Synthetic oligonucleotide
ccagcttctgtgttggggcccgccccaacttgcattgtctgtag

SEQ ID NO: 243443 - DNA, 58 bp, Artificial
  Synthetic oligonucleotide
gcacaactaatttgaaatttgggtatctagattctccaatagtactgttgttgacgcc

SEQ ID NO: 243444 - DNA, 60 bp, Artificial
  Synthetic oligonucleotide
cttcaggcaagttgtacgtgaacaggggggcaagatgatatcactggatggatcacaagg

SEQ ID NO: 243445 - DNA, 60 bp, Artificial
  Synthetic oligonucleotide
cttgtttcgccttaatcgcagcacgaacaatccaatcaacatgcttctcactagctagtc

SEQ ID NO: 243446 - DNA, 58 bp, Artificial
  Synthetic oligonucleotide
ctttcaaacaagcgagtatggctatgtgggaaaaagcaggtctgtttgatgacgaagg

SEQ ID NO: 243447 - DNA, 56 bp, Artificial
  Synthetic oligonucleotide
ctttcaaccctatatgtataggtgttatacaccctttatacttgctatataagcgt

SEQ ID NO: 243448 - DNA, 58 bp, Artificial
  Synthetic oligonucleotide
cttttcctgataacaatgatatttatggccatcttctaaatttacagcgttaaacaca

SEQ ID NO: 243449 - DNA, 53 bp, Artificial
  Synthetic oligonucleotide
cttttggaaaggctgtcattacgttgttttagagtcttataatgataaaaacg

SEQ ID NO: 243450 - DNA, 60 bp, Artificial
  Synthetic oligonucleotide
ctttttctatcgctcttttttccgcataattgcataattgactcgctgagccagtcgttc

SEQ ID NO: 243451 - DNA, 58 bp, Artificial
  Synthetic oligonucleotide
ctttttgtctgcattaggacacctttttgtctgcattaggacacctttttgtctgcat

SEQ ID NO: 243452 - DNA, 59 bp, Artificial
  Synthetic oligonucleotide
gaaaagagcaaaaatgcctcacatttgtgccacctaaaaaggagcgatttacatatgag

SEQ ID NO: 243453 - DNA, 60 bp, Artificial
  Synthetic oligonucleotide
cggcattgtatgttcttgaatagtgacttgcccaccatcaattttctccatgcctaaaat

SEQ ID NO: 243454 - DNA, 58 bp, Artificial
  Synthetic oligonucleotide
gcatatcaaatgaactttaataaaattgatttagacaattggaagagaaaagagatat

SEQ ID NO: 243455 - DNA, 59 bp, Artificial
  Synthetic oligonucleotide
cggctgtgccatataccatagactctttaatagacatttcttggggaataggaacaatc

SEQ ID NO: 243456 - DNA, 54 bp, Artificial
  Synthetic oligonucleotide
cgggatttttctaaagatttaggatactgggttgacatggactccccctatata

SEQ ID NO: 243457 - DNA, 52 bp, Artificial
  Synthetic oligonucleotide
cgtaaacatattgagacagctaaatttaaaaaacaaactttggaaaaagaga

SEQ ID NO: 243458 - DNA, 54 bp, Artificial
  Synthetic oligonucleotide
cgtccagaagttcgaaaatcgaacgtccagaagttcgaaaatcgaacgtccaga

SEQ ID NO: 243459 - DNA, 58 bp, Artificial
  Synthetic oligonucleotide
cgtcgattctagttcgtgcagtattaatttttatatctgcgccacaacgccgattcct

SEQ ID NO: 243460 - DNA, 56 bp, Artificial
  Synthetic oligonucleotide
cgtcggagtcccgctaattgtgtttgtggcgctatcaaaacttacgccgtccggca

SEQ ID NO: 243461 - DNA, 59 bp, Artificial
  Synthetic oligonucleotide
cgtcttaaaaacaggtcattcagcatggcgttatctaattgtgacgctttatcttgccc

SEQ ID NO: 243462 - DNA, 60 bp, Artificial
  Synthetic oligonucleotide
cgtgacacatacaggtggattttcagaatatgcacaagtgcctggagagtggattgttcc

SEQ ID NO: 243463 - DNA, 60 bp, Artificial
  Synthetic oligonucleotide
cgtgatatttgacgaatacatgagccttcaaaaaagtattcaaagtgtgcaaagtataca

SEQ ID NO: 243464 - DNA, 60 bp, Artificial
  Synthetic oligonucleotide
cgtgcctgtatgtcttccccctctttgagtgccttattatgtgcccgtctgactacagcg

SEQ ID NO: 243465 - DNA, 57 bp, Artificial
  Synthetic oligonucleotide
gataaatatattcagtcgggtcaatatctttaagataatctaaatcgccatttttta

SEQ ID NO: 243466 - DNA, 56 bp, Artificial
  Synthetic oligonucleotide
gcatatcattttgaaacgattaagagactcttttttcaataaagtagtctcgttta

SEQ ID NO: 243467 - DNA, 60 bp, Artificial
  Synthetic oligonucleotide
cgttacgtaatgtcagaaatttcaatgatgaggtttgcatggaacatggtttaagcgtgc

SEQ ID NO: 243468 - DNA, 58 bp, Artificial
  Synthetic oligonucleotide
cgttatgcttttcacgtccacgagttggatttaaatcaatgtagagtatgtcaaattg

SEQ ID NO: 243469 - DNA, 55 bp, Artificial
  Synthetic oligonucleotide
cgttcgttattgagacaaaatttaatagtactactacacaaaaagagagtgcgaa

SEQ ID NO: 243470 - DNA, 54 bp, Artificial
  Synthetic oligonucleotide
cgttgaggagaacccttaactaaactgaaccgacgaatgtcggggatagcgtga

SEQ ID NO: 243471 - DNA, 55 bp, Artificial
  Synthetic oligonucleotide
ctaaaaattacccttccttagacattttgattgctatgagtgacttatttggaat

SEQ ID NO: 243472 - DNA, 56 bp, Artificial
  Synthetic oligonucleotide
ctaaatgccctaatagaaatatatttgtggtaggagggccaggttcctataagtca

SEQ ID NO: 243473 - DNA, 56 bp, Artificial
  Synthetic oligonucleotide
ctaacgcctgttggttccaaccaataggaaattggaataagcaattagtataatga

SEQ ID NO: 243474 - DNA, 52 bp, Artificial
  Synthetic oligonucleotide
ctaatttagcacctaattagccgttaaaaccttctataggtggctaattagg

SEQ ID NO: 243475 - DNA, 58 bp, Artificial
  Synthetic oligonucleotide
ctacaactatattatgagttaggatatccaacaacgagtaaagaacttattcatcgat

SEQ ID NO: 243476 - DNA, 60 bp, Artificial
  Synthetic oligonucleotide
ctaccgcccacgcagagcacatagcgatagaacgggcgtcagaagttgtcggcagttgga

SEQ ID NO: 243477 - DNA, 60 bp, Artificial
  Synthetic oligonucleotide
gcatatgttgactggttacattgagccgaatttgattgatagtggcaagacgtttagaaa

SEQ ID NO: 243478 - DNA, 55 bp, Artificial
  Synthetic oligonucleotide
ctactttgtacactttgtctacctggtagacccgattgttattgctttacaggtc

SEQ ID NO: 243479 - DNA, 59 bp, Artificial
  Synthetic oligonucleotide
ctacttttgcactaatcaaaataaaaacctcctaacatgctgtaagtactgatatgaca

SEQ ID NO: 243480 - DNA, 52 bp, Artificial
  Synthetic oligonucleotide
ctagcgatgaaactgttgggaaaaaccataaacccaaccgtaaggagccgaa

SEQ ID NO: 243481 - DNA, 60 bp, Artificial
  Synthetic oligonucleotide
ctatacctgccccattaatagctataattgttttaacagcattgtatatgtatacaggat

SEQ ID NO: 243482 - DNA, 60 bp, Artificial
  Synthetic oligonucleotide
ctcagcatagctgaggtttccttaccgctcgcttcgctcacttgctccaactacgttgag

SEQ ID NO: 243483 - DNA, 57 bp, Artificial
  Synthetic oligonucleotide
ctcagcctcaatagtaaatgtatccttggaaggattacttaaatttctatactggga

SEQ ID NO: 243484 - DNA, 60 bp, Artificial
  Synthetic oligonucleotide
tgcgtgtgacagtccttaaaatatacttagagcgtaagcgaaagtagtagcgacagctat

SEQ ID NO: 243485 - DNA, 53 bp, Artificial
  Synthetic oligonucleotide
tggaaaacataagggtaaagtaagttgtatcgcgtttcttgacgtatctttcc

SEQ ID NO: 243486 - DNA, 60 bp, Artificial
  Synthetic oligonucleotide
tggatggacagactttaaataaagcagtttctgagatgacgaaagcattcgatcgtttga

SEQ ID NO: 243487 - DNA, 60 bp, Artificial
  Synthetic oligonucleotide
tggtgtacccgttgccaatatctttccttgattcattaatacgagcttatcacagcgtgt

SEQ ID NO: 243488 - DNA, 60 bp, Artificial
  Synthetic oligonucleotide
gcatccagctgcaaatgcagttccgcaaactgcttcacatacaccgccggctattggatt

SEQ ID NO: 243489 - DNA, 59 bp, Artificial
  Synthetic oligonucleotide
tggtgtcactatttctccgtctgttaagatcggttactttagtcagaatctaatgacgc

SEQ ID NO: 243490 - DNA, 60 bp, Artificial
  Synthetic oligonucleotide
tggttcattaagtgagaatgacagagacatcctaagaaatgttctaacacagacatctaa

SEQ ID NO: 243491 - DNA, 57 bp, Artificial
  Synthetic oligonucleotide
tggtttagaaggcactccagtctttttaagaactggcgaggggcttgtgtctgcacc

SEQ ID NO: 243492 - DNA, 60 bp, Artificial
  Synthetic oligonucleotide
tgtaaatctcgattatgtccaatgtgcaactggaggagagcaatgaagcatggtattcag

SEQ ID NO: 243493 - DNA, 52 bp, Artificial
  Synthetic oligonucleotide
tgtaagttatgcagacatactggaaattttaaaaattaaaaaggcttttaac

SEQ ID NO: 243494 - DNA, 58 bp, Artificial
  Synthetic oligonucleotide
tgtaatatgttaagttatggaattggtggaaaatgtcaattttatctggagattacta

SEQ ID NO: 243495 - DNA, 57 bp, Artificial
  Synthetic oligonucleotide
tgtacgtatgagataaagaacatggtggcactatttttaagggtaaataactcggca

SEQ ID NO: 243496 - DNA, 59 bp, Artificial
  Synthetic oligonucleotide
tgtatttcctagcttagtcgttgccatacctcattcacttctcttctcaaacgttctaa

SEQ ID NO: 243497 - DNA, 57 bp, Artificial
  Synthetic oligonucleotide
tgtcattaaagtcagtatcattagtgttcgattttcgaacttctggacgttcgattt

SEQ ID NO: 243498 - DNA, 55 bp, Artificial
  Synthetic oligonucleotide
tgtcattaagggaatgtataaaagatgaataaacgataattataaggaaaagtct

SEQ ID NO: 243499 - DNA, 55 bp, Artificial
  Synthetic oligonucleotide
gcatttgatagggtgagtagatataaaaaggttaaacaaaatcttgttggattta

SEQ ID NO: 243500 - DNA, 60 bp, Artificial
  Synthetic oligonucleotide
tgtccggcacgacttgcgtatgcgtgaacacttgcctctgcgccacgagtatcattacca

SEQ ID NO: 243501 - DNA, 57 bp, Artificial
  Synthetic oligonucleotide
tgtccttaatcgcttcttttggttctctaatatttactgcatcaaattttcctggga

SEQ ID NO: 243502 - DNA, 60 bp, Artificial
  Synthetic oligonucleotide
tgtcgttgcaatcaagtgacttgtacgacatcacaggtgcagttaagaaaggtttaacag

SEQ ID NO: 243503 - DNA, 60 bp, Artificial
  Synthetic oligonucleotide
tgtctgcttcatttgcgactttgcataatctatatcgagattataaccgtctttttctat

SEQ ID NO: 243504 - DNA, 59 bp, Artificial
  Synthetic oligonucleotide
tgtgcattgagaagaacccttaattaaactgtttcgacgaatgtcggtatagcgtgagc

SEQ ID NO: 243505 - DNA, 60 bp, Artificial
  Synthetic oligonucleotide
tgtgtaagcggccaatctgattccacctgagatgcataatctagtagaatctcttcgcta

SEQ ID NO: 243506 - DNA, 54 bp, Artificial
  Synthetic oligonucleotide
tgttcattataaccctcttttttgttcattataaccctctttaatgcggttata

SEQ ID NO: 243507 - DNA, 57 bp, Artificial
  Synthetic oligonucleotide
tgttgaattttttagacactggcccatctacatgcaaatttaaaaattggcataaaa

SEQ ID NO: 243508 - DNA, 60 bp, Artificial
  Synthetic oligonucleotide
tgttgctattcacaacgcttgctgatatgccatttttagaacatgcgtatcaattcatcg

SEQ ID NO: 243509 - DNA, 60 bp, Artificial
  Synthetic oligonucleotide
ttaaaacagcatgttagaaatctcatgagtactgatatggcgagagaatataaaaaatta

SEQ ID NO: 243510 - DNA, 57 bp, Artificial
  Synthetic oligonucleotide
gccaatgttctgggttggtgtcgtaacgggtgtagcgtacatgttacacaagtggta

SEQ ID NO: 243511 - DNA, 60 bp, Artificial
  Synthetic oligonucleotide
ttaaagggcaatggaattatttatatcgcgctattgatgcagatggccatacactagata

SEQ ID NO: 243512 - DNA, 57 bp, Artificial
  Synthetic oligonucleotide
ttaaatgatgttacagcctcgtttgcaagctgttttatccccgtagctttagctact

SEQ ID NO: 243513 - DNA, 57 bp, Artificial
  Synthetic oligonucleotide
tcgtctttatagttgtattgacgtgcttttaggtctaaagcgcgtatttgaacagtg

SEQ ID NO: 243514 - DNA, 56 bp, Artificial
  Synthetic oligonucleotide
tcgtgtgagcgaatccgaatatttaaagttaaggcaatctgcggaaactttaaata

SEQ ID NO: 243515 - DNA, 55 bp, Artificial
  Synthetic oligonucleotide
tcgtttatcatttgatgatttattttttctttttcttgttcagttaaatcataaa

SEQ ID NO: 243516 - DNA, 60 bp, Artificial
  Synthetic oligonucleotide
tctattattataccatctgtgaatatacaagcatatctacttccgataagtcgtcttatg

SEQ ID NO: 243517 - DNA, 60 bp, Artificial
  Synthetic oligonucleotide
tctcataatacatgattaacatatattttgggacgctgtgagaaacgctcatttgcaatg

SEQ ID NO: 243518 - DNA, 60 bp, Artificial
  Synthetic oligonucleotide
tctgacgaccccaaactcatattcagcgttactcggatcacagttgatgccagacatcgc

SEQ ID NO: 243519 - DNA, 50 bp, Artificial
  Synthetic oligonucleotide
tctgttggataacgtaaaccccgagttgttatgggtaaaacccaaacaaa

SEQ ID NO: 243520 - DNA, 55 bp, Artificial
  Synthetic oligonucleotide
tcttacataacctttagtgatcgcatttacttttttgcgtttaaacatcttttga

SEQ ID NO: 243521 - DNA, 60 bp, Artificial
  Synthetic oligonucleotide
gccattgccaattttgataatatacctaaagccatatttatccatctctagtctaagtta

SEQ ID NO: 243522 - DNA, 59 bp, Artificial
  Synthetic oligonucleotide
tcttagatgttcctaagagttactcaaaaggaatgattgaccgacagataattaatcca

SEQ ID NO: 243523 - DNA, 58 bp, Artificial
  Synthetic oligonucleotide
tcttcaggttgttttgtgttaccaatcccttggggatgaatggcaaatgcttctcgtg

SEQ ID NO: 243524 - DNA, 60 bp, Artificial
  Synthetic oligonucleotide
tcttcgtacaaagcaaacaatggaacaattcaaatggtctttgatgagaattgaggataa

SEQ ID NO: 243525 - DNA, 57 bp, Artificial
  Synthetic oligonucleotide
tcttcgttttctaaggtcttctgaattttctgcgactgcgtcccagtcaacttcgaa

SEQ ID NO: 243526 - DNA, 56 bp, Artificial
  Synthetic oligonucleotide
tctttaccagaatacttagccatttcatataattctttattattattttgtcttat

SEQ ID NO: 243527 - DNA, 55 bp, Artificial
  Synthetic oligonucleotide
tgaaaacataaattataacgaacgtgtaaaagacataatcgattcacaaaaaaca

SEQ ID NO: 243528 - DNA, 60 bp, Artificial
  Synthetic oligonucleotide
tgaaagtggaggtaagatactctgaatatcctctgacttcattaatggtcgatgtatctt

SEQ ID NO: 243529 - DNA, 56 bp, Artificial
  Synthetic oligonucleotide
tgagaaaaccaagatccttcaatacttggtgacaaacctgtaaatttaagcactag

SEQ ID NO: 243530 - DNA, 57 bp, Artificial
  Synthetic oligonucleotide
tgagaaaagtggcttaaattgtgacgtggactatgccaaatctagttttaaagccgc

SEQ ID NO: 243531 - DNA, 60 bp, Artificial
  Synthetic oligonucleotide
tgagtgatttggatttattgagttggagaaaaaatctaggatatgtaatgcaagataact

SEQ ID NO: 243532 - DNA, 60 bp, Artificial
  Synthetic oligonucleotide
gcccaacaataattggacatacgatatacttcataacaaacagaacgacaatcattagat

SEQ ID NO: 243533 - DNA, 60 bp, Artificial
  Synthetic oligonucleotide
tgataactatttctatgcctatgatgttgacgaattttatcgtcttcctcatgctttatt

SEQ ID NO: 243534 - DNA, 60 bp, Artificial
  Synthetic oligonucleotide
tgatatgaatatcctttcatacttaatactaaatccacaaaagtgttagtataccaatca

SEQ ID NO: 243535 - DNA, 60 bp, Artificial
  Synthetic oligonucleotide
tgatgaccctgtagaagcagctaaacaatgtcgtgacgctattgaaggtaaataatgatg

SEQ ID NO: 243536 - DNA, 60 bp, Artificial
  Synthetic oligonucleotide
tgatgatttaggcgatgtaacgaatgtgatcattcccttttctaaagtcattgggagtaa

SEQ ID NO: 243537 - DNA, 60 bp, Artificial
  Synthetic oligonucleotide
tgatggatttactgtaacagaattagataatatgcttgaattaataaagaaaagtagaga

SEQ ID NO: 243538 - DNA, 60 bp, Artificial
  Synthetic oligonucleotide
tgcaaccaacatcaacacgaagcaccgaactacgaagcattagaacgtaacattagtgaa

SEQ ID NO: 243539 - DNA, 59 bp, Artificial
  Synthetic oligonucleotide
tgccattccaatacaaaaccacatacctataatcgataaccacataacagtcataaaac

SEQ ID NO: 243540 - DNA, 51 bp, Artificial
  Synthetic oligonucleotide
tgcctgtcgggaaaaaccgtaaacccgaccgcaaagagccgaaacaaatta

SEQ ID NO: 243541 - DNA, 60 bp, Artificial
  Synthetic oligonucleotide
ttgacgagatatgagatgtgttgatcttgatgcatcacgtctcctaatttgacgtgtgtt

SEQ ID NO: 243542 - DNA, 55 bp, Artificial
  Synthetic oligonucleotide
ttgacgggtgttgctatgaaacccccgttagaaaacatgagtgattattctaagg

SEQ ID NO: 243543 - DNA, 57 bp, Artificial
  Synthetic oligonucleotide
gcccgataactatgtcagtagttatcgggctctttttaggtgtattggttatgtcgc

SEQ ID NO: 243544 - DNA, 60 bp, Artificial
  Synthetic oligonucleotide
ttgcagcaacctaccgcccacgcagagcacatagcgatagaacgggcttcagaagttgtc

SEQ ID NO: 243545 - DNA, 55 bp, Artificial
  Synthetic oligonucleotide
ttgggagtaacttatttgggaatattggctacaagtagtttgacttagtgaaatg

SEQ ID NO: 243546 - DNA, 58 bp, Artificial
  Synthetic oligonucleotide
ttgtaaagttagaaaaagtatagctaatcatcattttatcatgtcagtgttcgtttaa

SEQ ID NO: 243547 - DNA, 56 bp, Artificial
  Synthetic oligonucleotide
ttgtatgttatttacactagtgcttaaatttacaggtttgtcaccaagtattgaag

SEQ ID NO: 243548 - DNA, 60 bp, Artificial
  Synthetic oligonucleotide
ttgtcaccaatacgctgttcatagatggctaaatactcgctatgtttattcatgagtgat

SEQ ID NO: 243549 - DNA, 59 bp, Artificial
  Synthetic oligonucleotide
ttgtggcgcagatataaaaattaatactgcacggaaagaaacaactatagagatcaaaa

SEQ ID NO: 243550 - DNA, 54 bp, Artificial
  Synthetic oligonucleotide
ttgtgtgcctttttaattgcaattagttaccaaataaacgactccaaaatctct

SEQ ID NO: 243551 - DNA, 53 bp, Artificial
  Synthetic oligonucleotide
ttgtgttttatcccgaccataatttttctgaacgtttaaaattaggtcatatg

SEQ ID NO: 243552 - DNA, 50 bp, Artificial
  Synthetic oligonucleotide
tttaaaattaaaaataaaggcactcaaaatttttgtaagggttatgataa

SEQ ID NO: 243553 - DNA, 54 bp, Artificial
  Synthetic oligonucleotide
tttaatctatgaaagcactaaggaattccttaaggaacgtacagacggcttaaa

SEQ ID NO: 243554 - DNA, 56 bp, Artificial
  Synthetic oligonucleotide
gaaacgttttaaagcgatgttgctacaaaagaatgaaaccgttgaagctatgcaag

SEQ ID NO: 243555 - DNA, 58 bp, Artificial
  Synthetic oligonucleotide
tttagagcattctatcgttgtccaaaaagtcaatagtgcttacagtggtaaatataaa

SEQ ID NO: 243556 - DNA, 53 bp, Artificial
  Synthetic oligonucleotide
tttaggaagaaatacctttgcgggaagagttagtaagttaacagaagatgaac

SEQ ID NO: 243557 - DNA, 60 bp, Artificial
  Synthetic oligonucleotide
tttatcagagtatcaactctcatagtcgaacttttagccattggcttataattttctgta

SEQ ID NO: 243558 - DNA, 60 bp, Artificial
  Synthetic oligonucleotide
tttcgcaaaagctggcacactcatatgaaaattgttcgctgtttgctccaattcttcata

SEQ ID NO: 243559 - DNA, 58 bp, Artificial
  Synthetic oligonucleotide
tttctatagaattctattgttatttcatgacggctttcttgtttttccatctgactat

SEQ ID NO: 243560 - DNA, 58 bp, Artificial
  Synthetic oligonucleotide
tttgaaaggcatgattataattcttaatttcactttctaaatgctcatctgtaacgtt

SEQ ID NO: 243561 - DNA, 55 bp, Artificial
  Synthetic oligonucleotide
tttggtatcccgatcatcattaaaacgttcgtcaaccactaaatccacaatccgt

SEQ ID NO: 243562 - DNA, 58 bp, Artificial
  Synthetic oligonucleotide
ttttaactcaagtagtaaaagccaatgggaaataataacacaatggatcaatgaatca

SEQ ID NO: 243563 - DNA, 56 bp, Artificial
  Synthetic oligonucleotide
ttttagccactcatagttcaaacgaaaaggcacaaacaccgatatgacggtgtttg

SEQ ID NO: 243564 - DNA, 56 bp, Artificial
  Synthetic oligonucleotide
ttttcaaagaacaaataaatctaataactatagtatctatagttttaatcatagtc

SEQ ID NO: 243565 - DNA, 53 bp, Artificial
  Synthetic oligonucleotide
gaaagcttaatactatctataaaagccaaacctaatagagttaaacttcccca

SEQ ID NO: 243566 - DNA, 51 bp, Artificial
  Synthetic oligonucleotide
ttttcatgattttttatagttcctaacagggttaaaatttgtataacgaaa

SEQ ID NO: 243567 - DNA, 57 bp, Artificial
  Synthetic oligonucleotide
ttttgataatcgtttatcgtcgtcatcacaataacttttaaaatactcgtgcataat

SEQ ID NO: 243568 - DNA, 56 bp, Artificial
  Synthetic oligonucleotide
ttttgtgtagctattcggtatcttttgtgtagccgttcgggagtcatataacaatt

SEQ ID NO: 243569 - DNA, 57 bp, Artificial
  Synthetic oligonucleotide
tttttctaaagttttatcagctacaaaagacagaaatgtattgcaatcttcaactaa

SEQ ID NO: 243570 - DNA, 57 bp, Artificial
  Synthetic oligonucleotide
ttttttcacgacttatgtattgtcgtgacttacctatattcgccatttgtggttgtc

SEQ ID NO: 243571 - DNA, 59 bp, Artificial
  Synthetic oligonucleotide
ttaacaactgcttttttttcagcgtatgaaattgatcgagcagctactcttgtatttcc

SEQ ID NO: 243572 - DNA, 55 bp, Artificial
  Synthetic oligonucleotide
ttaactaaactgaaccgacgaatgtcggggatagcgtgagctattaccccgacga

SEQ ID NO: 243573 - DNA, 55 bp, Artificial
  Synthetic oligonucleotide
ttaagacgttttacaagcactgaagtagatttattctttactctatgtaataaac

SEQ ID NO: 243574 - DNA, 58 bp, Artificial
  Synthetic oligonucleotide
ttaataggcgactttataagccagcatcggaaaaaatccccacactattgcagtagtg

SEQ ID NO: 243575 - DNA, 55 bp, Artificial
  Synthetic oligonucleotide
ttacaaagagggcagggctagagaattaagtgattggttagtaggaattaactta

SEQ ID NO: 243576 - DNA, 60 bp, Artificial
  Synthetic oligonucleotide
gatatcataaaaagctgtagtgtcacacttttgtgacacaatatattgcgtttgtcacag

SEQ ID NO: 243577 - DNA, 60 bp, Artificial
  Synthetic oligonucleotide
gaacagtacgcagataaatacaaggtcgactgggacggattcgaaaacattgcagatgaa

SEQ ID NO: 243578 - DNA, 58 bp, Artificial
  Synthetic oligonucleotide
ttacacttatctatcaagtgaacttaagaggtctgaaagaggttggtcgagtgaaata

SEQ ID NO: 243579 - DNA, 52 bp, Artificial
  Synthetic oligonucleotide
ttaccacaggttctacccgtcttttaggtttctctggtgccactttaagatt

SEQ ID NO: 243580 - DNA, 54 bp, Artificial
  Synthetic oligonucleotide
ttacctcaaccctaaatttatgtgaagaggtatttactatgactaaacaacgat

SEQ ID NO: 243581 - DNA, 60 bp, Artificial
  Synthetic oligonucleotide
ttactggatatagagcgcataatgtgtttgatgtggcagatacgaaaggcaagcctttaa

SEQ ID NO: 243582 - DNA, 54 bp, Artificial
  Synthetic oligonucleotide
ttagaggcttgcgaaagcaagacctcctttttttatatcttgggaatcttttgg

SEQ ID NO: 243583 - DNA, 58 bp, Artificial
  Synthetic oligonucleotide
ttaggcgtgattaatgtaactataacaggacaccaattaatattaatcagtattatta

SEQ ID NO: 243584 - DNA, 57 bp, Artificial
  Synthetic oligonucleotide
ttagtgaggtgtattaaaatgtatgtggttaatccagaactacccgagcgatataaa

SEQ ID NO: 243585 - DNA, 57 bp, Artificial
  Synthetic oligonucleotide
ttataacgttttatttcattttctaattcatcactcattacattaggtgtagtcaaa

SEQ ID NO: 243586 - DNA, 50 bp, Artificial
  Synthetic oligonucleotide
ttatataatttctttttttcaaattttttatccgtcacaaaagacaaaaa

SEQ ID NO: 243587 - DNA, 57 bp, Artificial
  Synthetic oligonucleotide
ttatattcgatagaaaagcgtcatatgtaaatggcggttataaaatgtatgttaagt

SEQ ID NO: 243588 - DNA, 54 bp, Artificial
  Synthetic oligonucleotide
gaacgattccagtgataatagggaggtagaaccacctaaaaagagattttggag

SEQ ID NO: 243589 - DNA, 57 bp, Artificial
  Synthetic oligonucleotide
ttatcctcgtttattatacttataattataggggaaggcttagagctatcattttga

SEQ ID NO: 243590 - DNA, 57 bp, Artificial
  Synthetic oligonucleotide
ttattctgaaattaataaagatttcgtttatggtctgagtagtttattgatttcata

SEQ ID NO: 243591 - DNA, 60 bp, Artificial
  Synthetic oligonucleotide
ttcagtcattaatgaatctggtacatcgtgaaccccaactgttacgccattcgtattatc

SEQ ID NO: 243592 - DNA, 58 bp, Artificial
  Synthetic oligonucleotide
ttccttaccgctcgcttcgctcacttgctccaactacgttgagcttagagccccaagg

SEQ ID NO: 243593 - DNA, 57 bp, Artificial
  Synthetic oligonucleotide
ttcgataagggggcattagaaaatgagtttgcggtcgcaaatgaacggagagaattc

SEQ ID NO: 243594 - DNA, 60 bp, Artificial
  Synthetic oligonucleotide
ttcggctgtccaagataaatcgcgctgaaagattggcataataacttgacctgaatccac

SEQ ID NO: 243595 - DNA, 60 bp, Artificial
  Synthetic oligonucleotide
ttctcgtgagttatatggcaaaaccgatgggaatcaagggcatgtgattatccaatcgtt

SEQ ID NO: 243596 - DNA, 58 bp, Artificial
  Synthetic oligonucleotide
ttctgtagtcttgcataatttatggtctatttcaatagcagttacgaaattacacctt

SEQ ID NO: 243597 - DNA, 60 bp, Artificial
  Synthetic oligonucleotide
ttctttccgtgcagtattaatttttatatctgcgccacaacgccgattctagttcgtgca

SEQ ID NO: 243598 - DNA, 58 bp, Artificial
  Synthetic oligonucleotide
ttgaacgcttttatattgtatacgcagtaaactatgtatacaccgtttacagagtata

SEQ ID NO: 243599 - DNA, 55 bp, Artificial
  Synthetic oligonucleotide
gaagcctagacagccgaaaaatttctacatgcaagggggaaaggtgtggagattt

SEQ ID NO: 243600 - DNA, 51 bp, Artificial
  Synthetic oligonucleotide
ttgaagaagtggttaaggaaaaaccgaaagcacgttggttatttctaacac

SEQ ID NO: 243601 - DNA, 60 bp, Artificial
  Synthetic oligonucleotide
ttgaatggcccctgtcgcaatagtacctgcaagcggtaatgccgttccaacaaagatagc

SEQ ID NO: 243602 - DNA, 53 bp, Artificial
  Synthetic oligonucleotide
gttatataggttaggggacgaaaacggtgctagacttccagtcccagtagact

SEQ ID NO: 243603 - DNA, 53 bp, Artificial
  Synthetic oligonucleotide
gttatccgcagtctttcttaaaacaccgaaaatcttttcgtaagcctctagac

SEQ ID NO: 243604 - DNA, 59 bp, Artificial
  Synthetic oligonucleotide
gttcattcttctcaacttttacaatatcgtctgcaactataattaaatgacttgtcatt

SEQ ID NO: 243605 - DNA, 56 bp, Artificial
  Synthetic oligonucleotide
gttctgcttatgtagtagctaattattacggtttagacactagcggttattcttta

SEQ ID NO: 243606 - DNA, 60 bp, Artificial
  Synthetic oligonucleotide
gttgaaattgatatcccaaagatatgttctatttgagacataaaaatcatgattcctaga

SEQ ID NO: 243607 - DNA, 59 bp, Artificial
  Synthetic oligonucleotide
gttgagcgtgcctgagaaagacacagcacgcttacgttacacccaaacagaaaaagcga

SEQ ID NO: 243608 - DNA, 53 bp, Artificial
  Synthetic oligonucleotide
gtttcatatgtataccccttaatgaaactttgtgttaaactttagctacaggg

SEQ ID NO: 243609 - DNA, 54 bp, Artificial
  Synthetic oligonucleotide
gtttgtttaatagtgttattagactggaaattgacagtactaattttacttata

SEQ ID NO: 243610 - DNA, 60 bp, Artificial
  Synthetic oligonucleotide
gaagcgcgttctgccggattcagcggatgtgttgctgtaatgagttggacattcgggccg

SEQ ID NO: 243611 - DNA, 60 bp, Artificial
  Synthetic oligonucleotide
taaaaaatagctcatgtccattcgtcattttttacgccactccgtgccgaagtgatgtga

SEQ ID NO: 243612 - DNA, 53 bp, Artificial
  Synthetic oligonucleotide
taaacaaaatcttgttggatttatgcgttcaacagaagttaccgttaataaaa

SEQ ID NO: 243613 - DNA, 60 bp, Artificial
  Synthetic oligonucleotide
taaatcaaaagtgttagatgccattgaatcaggcgccaaagatcaaaatatacagataat

SEQ ID NO: 243614 - DNA, 60 bp, Artificial
  Synthetic oligonucleotide
taaattgattcatccatagaagttgagtaccaaatctgggatctaagctctgttctataa

SEQ ID NO: 243615 - DNA, 60 bp, Artificial
  Synthetic oligonucleotide
taacaggccagacagcttgggtttcaggactcagaagagagcagtcgcctactcgagcta

SEQ ID NO: 243616 - DNA, 54 bp, Artificial
  Synthetic oligonucleotide
taacctcctttttgtgctttcgtgtaattctatttaattacacaataccacatt

SEQ ID NO: 243617 - DNA, 60 bp, Artificial
  Synthetic oligonucleotide
taacgaaatatctagtgtatggccatctgcatcaatagcgcgatataaataattccattg

SEQ ID NO: 243618 - DNA, 54 bp, Artificial
  Synthetic oligonucleotide
taacgatcgatatccacctttagatgataaagggggatttgtttctgtttacgg

SEQ ID NO: 243619 - DNA, 59 bp, Artificial
  Synthetic oligonucleotide
taataagaccatacgtaatgttttccaataccatggctccaaacaccaccagctacatg

SEQ ID NO: 243620 - DNA, 60 bp, Artificial
  Synthetic oligonucleotide
taatacagtttgataagctatacagagcacaaacaggtggaaacttcgtaaagatgtaca

SEQ ID NO: 243621 - DNA, 53 bp, Artificial
  Synthetic oligonucleotide
gaaggacgttcgattttcgaacgtccagaagttcgaaaatcgaacgtccagaa

SEQ ID NO: 243622 - DNA, 60 bp, Artificial
  Synthetic oligonucleotide
taataggcgctataagtgctacaaatagagtgtttaacatggtgtcacctccttccatgt

SEQ ID NO: 243623 - DNA, 59 bp, Artificial
  Synthetic oligonucleotide
taatcaccatggtctttcggttgaccataacgaattaaatcaggttgattgccgtgctg

SEQ ID NO: 243624 - DNA, 60 bp, Artificial
  Synthetic oligonucleotide
taatcgatgccgtcgcacttttagacgaagctactttagtttgtgccatatctgatgcac

SEQ ID NO: 243625 - DNA, 52 bp, Artificial
  Synthetic oligonucleotide
taatctaacaggaaatagtcacgaaaaataccgggttttatatccttaatta

SEQ ID NO: 243626 - DNA, 60 bp, Artificial
  Synthetic oligonucleotide
taccgaatgtcacagcgacaagcgctgttaatattgccgttaatagtacgaaccatatcg

SEQ ID NO: 243627 - DNA, 51 bp, Artificial
  Synthetic oligonucleotide
tacctaattagtcacctatagaaggttttaacggctaattaggtactaaag

SEQ ID NO: 243628 - DNA, 60 bp, Artificial
  Synthetic oligonucleotide
tacgccgatgatcgttatgcgtttaactacaatcgtcgcaatggccattggactgcgact

SEQ ID NO: 243629 - DNA, 60 bp, Artificial
  Synthetic oligonucleotide
tacggtaaggaaaatatgctgtatgcgactgtccatctggatgaaagagtcccacatatg

SEQ ID NO: 243630 - DNA, 55 bp, Artificial
  Synthetic oligonucleotide
tactcttagtaaaaaaataacatgggtaaatccagagttaatcgtttcactcatc

SEQ ID NO: 243631 - DNA, 59 bp, Artificial
  Synthetic oligonucleotide
gtacgaaatcattccaacgctaggaaaaggtgaagcaatcgtaagcatacaaggtgcaa

SEQ ID NO: 243632 - DNA, 56 bp, Artificial
  Synthetic oligonucleotide
gaagttcgaaaatcgaacgtccagaagttcgaaaatcgaacactaatgatactgac

SEQ ID NO: 243633 - DNA, 60 bp, Artificial
  Synthetic oligonucleotide
gtagcccctagccaacctggccctaatactgcaaacaacgctcccatcgctgactgcgta

SEQ ID NO: 243634 - DNA, 60 bp, Artificial
  Synthetic oligonucleotide
gtatattatatcatctccgaatatacgatgatagataacttccgataagtcgcctcatgt

SEQ ID NO: 243635 - DNA, 60 bp, Artificial
  Synthetic oligonucleotide
gtatcaagcacaacgacacagctatgaaacaatatgatcaagcgtttaatcgtttaacca

SEQ ID NO: 243636 - DNA, 60 bp, Artificial
  Synthetic oligonucleotide
gtatgcatatactgtatgtatacgtattatatgcataactatacgtatagtgtacgtatg

SEQ ID NO: 243637 - DNA, 60 bp, Artificial
  Synthetic oligonucleotide
gtatgtagtgtcacaaaactgtgacaaacgcaatatattgtgtcacaaaagtgtgacatt

SEQ ID NO: 243638 - DNA, 58 bp, Artificial
  Synthetic oligonucleotide
gtatgtagtgtcacaaaagtgtgacatttcgtctttttatgcccccatgcaaaaagac

SEQ ID NO: 243639 - DNA, 57 bp, Artificial
  Synthetic oligonucleotide
gtcacgacaatacataagtcgtgaaaaaacgccaaaatggttggaagaacgcacata

SEQ ID NO: 243640 - DNA, 59 bp, Artificial
  Synthetic oligonucleotide
gtcagaacccacatgcccatattatgctcacagtgcgttcttttaaagaaaacggagaa

SEQ ID NO: 243641 - DNA, 54 bp, Artificial
  Synthetic oligonucleotide
gtccccttaacaaacccaaaaactgtcgactcatcgggttaatagctcacgcta

SEQ ID NO: 243642 - DNA, 49 bp, Artificial
  Synthetic oligonucleotide
gtctaatatacggcttgtcgggggagaccccgaacccctaaaaaccaaa

SEQ ID NO: 243643 - DNA, 51 bp, Artificial
  Synthetic oligonucleotide
gaagttcgtttctcttttcgaccctttcaagtttttctagtctggtttcta

SEQ ID NO: 243644 - DNA, 56 bp, Artificial
  Synthetic oligonucleotide
gtgaaagataatcaattcgttatttaactaacggggcagaagagttcaaataatga

SEQ ID NO: 243645 - DNA, 56 bp, Artificial
  Synthetic oligonucleotide
gtgaaattaagatatatttatttggctcatatttgcgttttaagagggtatataag

SEQ ID NO: 243646 - DNA, 60 bp, Artificial
  Synthetic oligonucleotide
gtgatagataattaacgacgacatagtcaatacaccaaaagagcccgataactattcaca

SEQ ID NO: 243647 - DNA, 54 bp, Artificial
  Synthetic oligonucleotide
gtgatttaattttatttctcaatacattcgtatttatacttgtttctactgttt

SEQ ID NO: 243648 - DNA, 60 bp, Artificial
  Synthetic oligonucleotide
gtgcatgaaaggaggtgtgatgtacaaatgactattgcacttttcgtcgtaacaattatc

SEQ ID NO: 243649 - DNA, 56 bp, Artificial
  Synthetic oligonucleotide
gtgcgtctcggtaacaatcaaccgaatcgtttatatcccaaaaagccctatgataa

SEQ ID NO: 243650 - DNA, 58 bp, Artificial
  Synthetic oligonucleotide
gaggccggggccccaacacagaagctgacgaaaagtcagcttacaataatgtgcaagt

SEQ ID NO: 243651 - DNA, 55 bp, Artificial
  Synthetic oligonucleotide
gtggggtttatgaatttgcccattaaccgtatcgctagccacaaatatgttttgt

SEQ ID NO: 243652 - DNA, 60 bp, Artificial
  Synthetic oligonucleotide
gtgtagcaagggcttagcattgcccgaggtgtatgcaggcaattattctgaagtagctga

SEQ ID NO: 243653 - DNA, 54 bp, Artificial
  Synthetic oligonucleotide
gtgtgattggctttataaggttaatgaacctttaaaaatccttgcacagaaaaa

SEQ ID NO: 243654 - DNA, 60 bp, Artificial
  Synthetic oligonucleotide
gaatatgtatcaccgaatgagcgaaaagcacgcaaaaacggtatgacattagccaaagac

SEQ ID NO: 243655 - DNA, 53 bp, Artificial
  Synthetic oligonucleotide
gtgttaagaaaacgagtactttacactttgtagtcgttgacaaacaaggtcaa

SEQ ID NO: 243656 - DNA, 58 bp, Artificial
  Synthetic oligonucleotide
gtgttcctttatcagctcttgtcgcatagattagtcctttaagtccttgttctttata

SEQ ID NO: 243657 - DNA, 57 bp, Artificial
  Synthetic oligonucleotide
gtgttggtttgtgtagaaagcacttatttttataacactgaaaactatgtgaatcaa

SEQ ID NO: 243658 - DNA, 59 bp, Artificial
  Synthetic oligonucleotide
gttaatttatggcaaagagcattacaagttgactatcgacctgttgctaatgttaaagc

SEQ ID NO: 243659 - DNA, 55 bp, Artificial
  Synthetic oligonucleotide
gttacacttacgtttcttatgtttttgcattcctctactaaccagtgttataata

SEQ ID NO: 243660 - DNA, 52 bp, Artificial
  Synthetic oligonucleotide
gttaggggacgaaaacggtgctagacttccagtcccagtagactttttacta

SEQ ID NO: 243661 - DNA, 56 bp, Artificial
  Synthetic oligonucleotide
tatgcatgaggttcattatttacttataacaaaacgtctttataagttggattagg

SEQ ID NO: 243662 - DNA, 60 bp, Artificial
  Synthetic oligonucleotide
tatgcgccttcacttggatctgtagcgatgacctcatgtccgtgggcaagcattcgagta

SEQ ID NO: 243663 - DNA, 60 bp, Artificial
  Synthetic oligonucleotide
tatggaaaggaggtgctggtgtcatgcatgaggttgttatattcgttttaacagcgctga

SEQ ID NO: 243664 - DNA, 59 bp, Artificial
  Synthetic oligonucleotide
tatgtcgaaatctacgctttgtccatcttctaaagatttatagccttctccaacaatgt

SEQ ID NO: 243665 - DNA, 58 bp, Artificial
  Synthetic oligonucleotide
gaatcctaaatatgttaatttgtctaacgatgcaaaaataacatggtcaatattaaga

SEQ ID NO: 243666 - DNA, 57 bp, Artificial
  Synthetic oligonucleotide
tattgaacaaatcagttatgacgtcgttgaggttatcttattgtttgaaaaagtcga

SEQ ID NO: 243667 - DNA, 60 bp, Artificial
  Synthetic oligonucleotide
tatttgtcgatgagagcccttaattagactaaaagcgccagcggtcagatagcgtcagct

SEQ ID NO: 243668 - DNA, 54 bp, Artificial
  Synthetic oligonucleotide
tattttttaagtaaaacaatgcaacacctaccactaaatataacttatgcaact

SEQ ID NO: 243669 - DNA, 58 bp, Artificial
  Synthetic oligonucleotide
tcaaaatatatttatttggctctcatttgcgttttaagcgcttatatagaattttgga

SEQ ID NO: 243670 - DNA, 59 bp, Artificial
  Synthetic oligonucleotide
tcaaacgattctaatgcaactttatgatattcgaaaatggcattacgttggccattttg

SEQ ID NO: 243671 - DNA, 60 bp, Artificial
  Synthetic oligonucleotide
tcaacaacaactgcgcttgtacgaagtgtgttgggcttgattatgaattacatcgaccgt

SEQ ID NO: 243672 - DNA, 56 bp, Artificial
  Synthetic oligonucleotide
tcaagatgatgaacgtcgtctagaggcttacgaaaagattttcggtgttttaagaa

SEQ ID NO: 243673 - DNA, 60 bp, Artificial
  Synthetic oligonucleotide
tcaatcagcctagaaagaatatacttgctgggatcgttgtagcactagcattaataccag

SEQ ID NO: 243674 - DNA, 59 bp, Artificial
  Synthetic oligonucleotide
tcacacagcaaacgggggacatcggttagaaggctcacacgtgtcactcgtcgttccat

SEQ ID NO: 243675 - DNA, 57 bp, Artificial
  Synthetic oligonucleotide
tcatactcataaactactcctcaactaaaaaaatgaacacgaaaaattgccgacaga

SEQ ID NO: 243676 - DNA, 57 bp, Artificial
  Synthetic oligonucleotide
gaatcgagtttattgcttttaaacaaataatcttcatcctccaggaactgaatataa

SEQ ID NO: 243677 - DNA, 60 bp, Artificial
  Synthetic oligonucleotide
tcatcaattatgtgtgtatagcaatggtagtatttgtgatgctaatagaaataaattgcc

SEQ ID NO: 243678 - DNA, 60 bp, Artificial
  Synthetic oligonucleotide
tcatcatctaatcccttaggtggcggattaatgctacaaggtttaaaattagatgagatg

SEQ ID NO: 243679 - DNA, 54 bp, Artificial
  Synthetic oligonucleotide
tccaatcgtttaaacctggcgaagtcacgcccgaacaatgtaaccaattaggct

SEQ ID NO: 243680 - DNA, 59 bp, Artificial
  Synthetic oligonucleotide
tccgcataaaagaatcgccttttcgactgtttacatatatcgtttgaataatgccagaa

SEQ ID NO: 243681 - DNA, 60 bp, Artificial
  Synthetic oligonucleotide
tccgtttttcagcgtctatattagtcgcagtccaatgtccattgcgacgattgtagttaa

SEQ ID NO: 243682 - DNA, 55 bp, Artificial
  Synthetic oligonucleotide
tcctcattaagtacccttgcatcgaaatgatcgtttccttttggcctttaacacc

SEQ ID NO: 243683 - DNA, 60 bp, Artificial
  Synthetic oligonucleotide
tcgaaggctttgtctattctgtctcgtaaatcatctttccatatatactcgcctttatcc

SEQ ID NO: 243684 - DNA, 54 bp, Artificial
  Synthetic oligonucleotide
tcgacgcgtattatcgttctttaaaaggtaagcaggtattagtgtattcgggat

SEQ ID NO: 243685 - DNA, 58 bp, Artificial
  Synthetic oligonucleotide
tcgataatagcacattatacactaaatcttgttttaacaacgttcatcacctcttatt

SEQ ID NO: 243686 - DNA, 53 bp, Artificial
  Synthetic oligonucleotide
tcgattttcgaacttctggacgttcgattttcgaacttctggacgttcgattt

SEQ ID NO: 243687 - DNA, 53 bp, Artificial
  Synthetic oligonucleotide
gatatgtccctaaactaatcgtgagtaaaaagtttccggtactatcttctaaa

SEQ ID NO: 243688 - DNA, 55 bp, Artificial
  Synthetic oligonucleotide
gaattagcccttttacaagtaagtataacgaatcctacataagaaagattattca

SEQ ID NO: 243689 - DNA, 60 bp, Artificial
  Synthetic oligonucleotide
tcggcgttgtggcgcagatataaaaattaatactgcacgaactagaatcggcgttgtggc

SEQ ID NO: 243690 - DNA, 58 bp, Artificial
  Synthetic oligonucleotide
tcgggaaagtcagtggaaaatagatttatatttcaagaagctctcaattttgtcagaa

SEQ ID NO: 243691 - DNA, 53 bp, Artificial
  Synthetic oligonucleotide
tcgtaaacactttaaatctatagctaaaggttacgtaagaaaattagaaatca

SEQ ID NO: 243692 - DNA, 59 bp, Artificial
  Synthetic oligonucleotide
tactcttcaaaaccgtgaataccgtcagcgccacctaagcctgattcacgccaacctgc

SEQ ID NO: 243693 - DNA, 58 bp, Artificial
  Synthetic oligonucleotide
tacttaaaacccttggaatgtctggctttgccagacctattatttttgaatgatagca

SEQ ID NO: 243694 - DNA, 60 bp, Artificial
  Synthetic oligonucleotide
tacttatatctagtcatttattatctgaaattgaacatatggctaatacagtaggtatca

SEQ ID NO: 243695 - DNA, 60 bp, Artificial
  Synthetic oligonucleotide
tacttgatattatcataccaatgtagtatacttaaatggaacaataatgaatgttgttgt

SEQ ID NO: 243696 - DNA, 60 bp, Artificial
  Synthetic oligonucleotide
tactttgctaatcatttttcgttcaacatcatagcaccagtcatcagtggctgtgctgtt

SEQ ID NO: 243697 - DNA, 58 bp, Artificial
  Synthetic oligonucleotide
tagaaaacctcaccgaatggattggattaagctgactcctttcgtcatcctaatccaa

SEQ ID NO: 243698 - DNA, 60 bp, Artificial
  Synthetic oligonucleotide
tagaaatccttgttcacatcacgaccacagtcatcagtggttgtattattgcgttattta

SEQ ID NO: 243699 - DNA, 56 bp, Artificial
  Synthetic oligonucleotide
gaattcatttgtccgaataataaacggctaggttttaaaagatatgcctatcgtca

SEQ ID NO: 243700 - DNA, 52 bp, Artificial
  Synthetic oligonucleotide
tagaacatattaaagattttaggcaaaatcctagtttagttaagttggattt

SEQ ID NO: 243701 - DNA, 56 bp, Artificial
  Synthetic oligonucleotide
tagcaaaaacaggtttaagcctcgcagagcacacgtattaacgacttattgtaaaa

SEQ ID NO: 243702 - DNA, 60 bp, Artificial
  Synthetic oligonucleotide
tagccaatgcgtaaataacgcaataatacaaccactgatgactgtggtcgtgatgtgaac

SEQ ID NO: 243703 - DNA, 60 bp, Artificial
  Synthetic oligonucleotide
tagcgcatgcataaaagtccctaacaacctgaggtcactacgcttccgttcgcctgcgct

SEQ ID NO: 243704 - DNA, 59 bp, Artificial
  Synthetic oligonucleotide
tagcgtcagctatcaactcgacggaatacgaggtcttgggggtctgggggagcgtcagc

SEQ ID NO: 243705 - DNA, 51 bp, Artificial
  Synthetic oligonucleotide
tagtacgtgataataacggtaatcctaaaactgaacgaaaacccgtaatta

SEQ ID NO: 243706 - DNA, 55 bp, Artificial
  Synthetic oligonucleotide
tagtatctaaagtaacccgtatttaagattacattgtacatccttcgaaaccata

SEQ ID NO: 243707 - DNA, 60 bp, Artificial
  Synthetic oligonucleotide
tagtcacgtaagtcatgaggattgagcgcaacagcggttaactctaaacctaatttgaga

SEQ ID NO: 243708 - DNA, 60 bp, Artificial
  Synthetic oligonucleotide
tagtggtcatcaagttatttttgcatctgcgagaccgattagagatatgcttcccgttat

SEQ ID NO: 243709 - DNA, 60 bp, Artificial
  Synthetic oligonucleotide
tagtgtggcacgtaatgcaccagccataccacccgtagccatatatgcgacacctgctcg

SEQ ID NO: 243710 - DNA, 56 bp, Artificial
  Synthetic oligonucleotide
gacaactcccgagaaaatcgggccaaaatacgcaccagtaggcgctagtaatgacc

SEQ ID NO: 243711 - DNA, 55 bp, Artificial
  Synthetic oligonucleotide
tagttataaaattcagtaatatgcttttgtaattcaatagattctctttcttttt

SEQ ID NO: 243712 - DNA, 55 bp, Artificial
  Synthetic oligonucleotide
tataaagtcgcctattaattatttgttgcgtttactaagccaataagtataatac

SEQ ID NO: 243713 - DNA, 60 bp, Artificial
  Synthetic oligonucleotide
tatactactactgattgaagacgagataattatagggtttagtggcatgtgcagaatgat

SEQ ID NO: 243714 - DNA, 57 bp, Artificial
  Synthetic oligonucleotide
tatcattcaaaaatgataggtctggcaaagccagacattccaagggttttaagtaat

SEQ ID NO: 243715 - DNA, 60 bp, Artificial
  Synthetic oligonucleotide
tatccggaggtgtagcatgtctcattcaattttgagggttgccagagttaaaggatcaag

SEQ ID NO: 243716 - DNA, 58 bp, Artificial
  Synthetic oligonucleotide
tatctctgttacctataactgtattaaggcttatttgagcctcttttatgcgtttctc

SEQ ID NO: 243717 - DNA, 60 bp, Artificial
  Synthetic oligonucleotide
tatgaccatctgtgccagttcgtaatgtctggtcaactttccgactctgagaaacttctg

SEQ ID NO: 243718 - DNA, 55 bp, Artificial
  Synthetic oligonucleotide
tatgcaaatttcccttatgctcttacaaagaatttagagccaatttaaaatttgg

SEQ ID NO: 243719 - DNA, 54 bp, Artificial
  Synthetic oligonucleotide
atttatgcgttcaacagaagttaccgttaataaaaatgacggtagttataatca

SEQ ID NO: 243720 - DNA, 60 bp, Artificial
  Synthetic oligonucleotide
acatgaagcaccgaactatgaagcattagagcgtaatatcagcgaattacgtgaaaggtt

SEQ ID NO: 243721 - DNA, 58 bp, Artificial
  Synthetic oligonucleotide
gacacattcgacagtgttttttcgaatgcacgattaaatctgtcctttaagtcatctt

SEQ ID NO: 243722 - DNA, 56 bp, Artificial
  Synthetic oligonucleotide
accaactagcaatacagtgagtacaatccacgagatgttaaaaagctttttgtcct

SEQ ID NO: 243723 - DNA, 54 bp, Artificial
  Synthetic oligonucleotide
accaattgcacccggattagcggcgcgatttggaccgaaaatagtgttaccttc

SEQ ID NO: 243724 - DNA, 58 bp, Artificial
  Synthetic oligonucleotide
acctatatcgagcattttagttttattgatgatagctattgtcttggggtttggaggc

SEQ ID NO: 243725 - DNA, 56 bp, Artificial
  Synthetic oligonucleotide
acctcgtaacttccatgttatttgtaggttcgattgtaattggcggatattcacta

SEQ ID NO: 243726 - DNA, 59 bp, Artificial
  Synthetic oligonucleotide
acctgtgcatgtgctaagcggtggtgaaagagtaaaagttgcactgacaaaactattag

SEQ ID NO: 243727 - DNA, 59 bp, Artificial
  Synthetic oligonucleotide
acctgtttcaagattaatactattaatcacgatatggttgtgtacgtgatccgtatcat

SEQ ID NO: 243728 - DNA, 56 bp, Artificial
  Synthetic oligonucleotide
acctttcaaaaaccatcaatccacaaaaataccacgcgaatgacactcaaaataca

SEQ ID NO: 243729 - DNA, 56 bp, Artificial
  Synthetic oligonucleotide
acgaacgttcaaaaaatgcggtcgaaatcaaaagtgagtagctatatgactaaata

SEQ ID NO: 243730 - DNA, 48 bp, Artificial
  Synthetic oligonucleotide
attgtcgggttcggaacttaaaaattgtcggtactggaactaaaaaat

SEQ ID NO: 243731 - DNA, 54 bp, Artificial
  Synthetic oligonucleotide
acgacgaattttagacctgtaaagcaataacaattaggtctaccaggtagataa

SEQ ID NO: 243732 - DNA, 55 bp, Artificial
  Synthetic oligonucleotide
gacatctaaatttactacctatttcactactttagtacctaattagtcacttata

SEQ ID NO: 243733 - DNA, 54 bp, Artificial
  Synthetic oligonucleotide
acgatgaccatcgttctagttgaaacgttgaaattttttcgaatagaggtgaaa

SEQ ID NO: 243734 - DNA, 53 bp, Artificial
  Synthetic oligonucleotide
acgctcctttagtttaaatgattttcatttagttggcttaactctgaaacaac

SEQ ID NO: 243735 - DNA, 55 bp, Artificial
  Synthetic oligonucleotide
acgctttagttatgctagctatttttttaccgggttataaagcaatgcctggcaa

SEQ ID NO: 243736 - DNA, 60 bp, Artificial
  Synthetic oligonucleotide
acgtgcgtagacgattgaagcccctgaactctttgatggtgctactttagtgtatgccaa

SEQ ID NO: 243737 - DNA, 59 bp, Artificial
  Synthetic oligonucleotide
attcttcatattcgtggtcgctcacacgaaatttaatctgtcgattatctttcctgttc

SEQ ID NO: 243738 - DNA, 56 bp, Artificial
  Synthetic oligonucleotide
acgtttcgcgttgtcggtacactcgtcgatagttcggcaagatattgagggccacc

SEQ ID NO: 243739 - DNA, 58 bp, Artificial
  Synthetic oligonucleotide
actaatgatatgtctatgaagttgttagataaggttagttccggtgaaattgatgtta

SEQ ID NO: 243740 - DNA, 58 bp, Artificial
  Synthetic oligonucleotide
attcaaaatgaactaacgcgcttatatgcgtttaaaatgccacgtataagaagccaca

SEQ ID NO: 243741 - DNA, 60 bp, Artificial
  Synthetic oligonucleotide
attatttgttgcgtttactaagccaataagtataatacgcaacagcacagccactgatga

SEQ ID NO: 243742 - DNA, 57 bp, Artificial
  Synthetic oligonucleotide
attatttacgtgaaggcgacactttagttatttacaagctagatagattaggcagga

SEQ ID NO: 243743 - DNA, 60 bp, Artificial
  Synthetic oligonucleotide
gaccggtaacatatgcaggattcaaatggaacggcaaagcattcgcttgtagtatggctg

SEQ ID NO: 243744 - DNA, 60 bp, Artificial
  Synthetic oligonucleotide
actggtaatgatactcgtggcgcagaggcaagtgttcacgcatacgcaagtcgtgccgga

SEQ ID NO: 243745 - DNA, 60 bp, Artificial
  Synthetic oligonucleotide
attattgagatcagcaatcacagaaacacttcgtttcaattcaccagtacaattaatacc

SEQ ID NO: 243746 - DNA, 50 bp, Artificial
  Synthetic oligonucleotide
acttacaacgtttttactcaggtatccaaaaatcgctttgtaccctaaaa

SEQ ID NO: 243747 - DNA, 54 bp, Artificial
  Synthetic oligonucleotide
agaaaaaagcggcttaaactgcgacatagactatgccaaaagtagttttaaagc

SEQ ID NO: 243748 - DNA, 51 bp, Artificial
  Synthetic oligonucleotide
agaaaaaccgacttcacgttggttgtttttaacactttcaacacgaaatgc

SEQ ID NO: 243749 - DNA, 60 bp, Artificial
  Synthetic oligonucleotide
attagtgccatcaatactcatctgattatttatcactaagcagggccttacgttatgctt

SEQ ID NO: 243750 - DNA, 53 bp, Artificial
  Synthetic oligonucleotide
agaaaaacctacttctcgttggttattcctaactttgtcgactagaaatgcaa

SEQ ID NO: 243751 - DNA, 60 bp, Artificial
  Synthetic oligonucleotide
attacctatggcaataggagatatggtgtttgcaccaattgcacccggattagcggcgcg

SEQ ID NO: 243752 - DNA, 60 bp, Artificial
  Synthetic oligonucleotide
attacaatttatgcacacaactatacacactattaaatttgtgttatgctatagctgcct

SEQ ID NO: 243753 - DNA, 60 bp, Artificial
  Synthetic oligonucleotide
atgttttctacttaatggtttaatgatccaagatatagcagttccaccatgtctcaaaga

SEQ ID NO: 243754 - DNA, 59 bp, Artificial
  Synthetic oligonucleotide
gacctctacacatctacggattggcaacgctacgcctctgtctgtcgccccctacccat

SEQ ID NO: 243755 - DNA, 54 bp, Artificial
  Synthetic oligonucleotide
aaggaacaactgctaaagaacttgtaaaaactttcatgagagaagacgttgtta

SEQ ID NO: 243756 - DNA, 54 bp, Artificial
  Synthetic oligonucleotide
aagggattgcgttaagcaccctttataggtggaataagtcatataaagaacaag

SEQ ID NO: 243757 - DNA, 60 bp, Artificial
  Synthetic oligonucleotide
aagtatgtatatgttgtgttgctggtactagctatttatcaaattttcatgttgtttgaa

SEQ ID NO: 243758 - DNA, 59 bp, Artificial
  Synthetic oligonucleotide
aagtctacaggaatgaaaaacttatgtgcttgtggaggtagatttgatggtggaggatc

SEQ ID NO: 243759 - DNA, 60 bp, Artificial
  Synthetic oligonucleotide
aagtgtaaacgtatatgtgcttgcgaggcgctgacggagtccatgcgctagtggaacgtt

SEQ ID NO: 243760 - DNA, 56 bp, Artificial
  Synthetic oligonucleotide
aataaacggtaatatattagcgttaagtgaatttcctgctacatttccacatacag

SEQ ID NO: 243761 - DNA, 54 bp, Artificial
  Synthetic oligonucleotide
aataaatgcttgaaaccattaacagaaggaacaagcaaaaaggcagatttaaac

SEQ ID NO: 243762 - DNA, 55 bp, Artificial
  Synthetic oligonucleotide
aataacggcaacggtcatcagggttttcatgtcgaaatcaaagcgtatcaaattt

SEQ ID NO: 243763 - DNA, 54 bp, Artificial
  Synthetic oligonucleotide
aatacactacaattaaattcacgagcttttattacgttagattaagtatacgct

SEQ ID NO: 243764 - DNA, 55 bp, Artificial
  Synthetic oligonucleotide
aatacttgatttctttgttttttctcagtatacttttccatgttataacacataa

SEQ ID NO: 243765 - DNA, 59 bp, Artificial
  Synthetic oligonucleotide
gacgaggggacaatcacgccgtatgcccagagtgagatattgccacagttaaaaaagac

SEQ ID NO: 243766 - DNA, 55 bp, Artificial
  Synthetic oligonucleotide
aatatacgcctccttaaaacaatataatgtgttttgatctctatagttgtttctt

SEQ ID NO: 243767 - DNA, 59 bp, Artificial
  Synthetic oligonucleotide
caaattggatcaagcaacgcgacaatcggtagctaaagatttaagtatgttgggtgcaa

SEQ ID NO: 243768 - DNA, 57 bp, Artificial
  Synthetic oligonucleotide
aatatgagccaaataaatatattctaattctacaaacaaaaatttgagcaaattcag

SEQ ID NO: 243769 - DNA, 59 bp, Artificial
  Synthetic oligonucleotide
caaaggaacgagaggaacaagagcgagagcgagaacaggaacgcagacaagaacagtac

SEQ ID NO: 243770 - DNA, 54 bp, Artificial
  Synthetic oligonucleotide
aattatgtcctgaaaaggtaatagtttatcagcttttttgagatgtataagggt

SEQ ID NO: 243771 - DNA, 60 bp, Artificial
  Synthetic oligonucleotide
caaagctaattgattcatttatcatatcttgacgtataccaatatatcttaatgttactg

SEQ ID NO: 243772 - DNA, 57 bp, Artificial
  Synthetic oligonucleotide
atttattgatgttgagaagaacccttaactaaacttgaagacgaatgtcggcatagc

SEQ ID NO: 243773 - DNA, 60 bp, Artificial
  Synthetic oligonucleotide
acatccattggtgcacgtttgtatccgggttggctttgcattgcgccagtgctgttagga

SEQ ID NO: 243774 - DNA, 52 bp, Artificial
  Synthetic oligonucleotide
acagtggggagtaatgtaacattatacggtttaaaacgtctaaattatcaag

SEQ ID NO: 243775 - DNA, 54 bp, Artificial
  Synthetic oligonucleotide
acaggcggggattctgccgtttttcgtgcctgttcacgtcgaaccttttcagcc

SEQ ID NO: 243776 - DNA, 60 bp, Artificial
  Synthetic oligonucleotide
gactgcgactaatatagacgctgaaaaacggaatcgtcgtgcagagatgggcaatggtgc

SEQ ID NO: 243777 - DNA, 58 bp, Artificial
  Synthetic oligonucleotide
acagcatatggtttggaatctatattaatcccaaataacgtttctgacggaggagtca

SEQ ID NO: 243778 - DNA, 60 bp, Artificial
  Synthetic oligonucleotide
attttctgtatacttcactgctgaagtgtctatgtcatctaaaaatcctcttttctgttg

SEQ ID NO: 243779 - DNA, 54 bp, Artificial
  Synthetic oligonucleotide
attttgtgattaatttctcttttttcttgttctgttaagtcataaagttcacta

SEQ ID NO: 243780 - DNA, 59 bp, Artificial
  Synthetic oligonucleotide
acaagtgtactattaatcatcatacttagtctgttattggttagaaacgagcatttaga

SEQ ID NO: 243781 - DNA, 57 bp, Artificial
  Synthetic oligonucleotide
acaaggtgaatattaacagtcaaaatccagttatgtcggttaatgaatcgatgaaaa

SEQ ID NO: 243782 - DNA, 55 bp, Artificial
  Synthetic oligonucleotide
acaaccaaaattactcaaagcgtctatttgtaaatctaaactttgatctctggta

SEQ ID NO: 243783 - DNA, 49 bp, Artificial
  Synthetic oligonucleotide
caaaagccccccaactactggtaatagtcgggggggctggtaataaaac

SEQ ID NO: 243784 - DNA, 55 bp, Artificial
  Synthetic oligonucleotide
acaaaacgtgcatatgctgattataactaccgtcatttttattaacggtaacttc

SEQ ID NO: 243785 - DNA, 56 bp, Artificial
  Synthetic oligonucleotide
caaaagctccggtagaaaatacagctgaagtagagacttcaaaagctccggtagaa

SEQ ID NO: 243786 - DNA, 47 bp, Artificial
  Synthetic oligonucleotide
aattttgaaaaacaaaattattatttaaaaaatttgaaacgttagct

SEQ ID NO: 243787 - DNA, 59 bp, Artificial
  Synthetic oligonucleotide
gagaaacgcattcacaataaacgacaaccacaaatggcgaatataggtaagtcacgaca

SEQ ID NO: 243788 - DNA, 60 bp, Artificial
  Synthetic oligonucleotide
caaacttctgataatcatcgattatgttaattactgtcagatagtagttgaataaacttc

SEQ ID NO: 243789 - DNA, 52 bp, Artificial
  Synthetic oligonucleotide
aattgagatagcttttttctttcgtacggtctatttatttttctttcgacgc

SEQ ID NO: 243790 - DNA, 57 bp, Artificial
  Synthetic oligonucleotide
aattctcgttggttgtttcttacattatcaatacgaaatgcaataggtggagatacg

SEQ ID NO: 243791 - DNA, 60 bp, Artificial
  Synthetic oligonucleotide
atcaattcggttgtgaattgcgcaaagagcgtgtctggtgatactaaacgtaatgcatga

SEQ ID NO: 243792 - DNA, 60 bp, Artificial
  Synthetic oligonucleotide
atcaacctacagagcatccagctgcaaatgcagttccgcaaactgcttcacatacaccgc

SEQ ID NO: 243793 - DNA, 50 bp, Artificial
  Synthetic oligonucleotide
atcaacacaccgaacccccaacctatgtccgtaggttgggggttcttttg

SEQ ID NO: 243794 - DNA, 57 bp, Artificial
  Synthetic oligonucleotide
agtagagacttcaaaagctccggtagaaaatacagctgaagtagagacttcaaaagc

SEQ ID NO: 243795 - DNA, 59 bp, Artificial
  Synthetic oligonucleotide
atattggttatgctcgtgtatctaccagagatcaaagtttagatttacaaatagacgct

SEQ ID NO: 243796 - DNA, 60 bp, Artificial
  Synthetic oligonucleotide
agtataatacgatcgtgtctattcttcgaattcagaaagatgaatcaaattagcggtata

SEQ ID NO: 243797 - DNA, 59 bp, Artificial
  Synthetic oligonucleotide
atattcaaacgcttgaccatctataacatccattggtgcacgtttgtatccgggttggc

SEQ ID NO: 243798 - DNA, 60 bp, Artificial
  Synthetic oligonucleotide
gatattcatatcatgtagaaccaaatagagaatctgttattgaggattcacatatcataa

SEQ ID NO: 243799 - DNA, 56 bp, Artificial
  Synthetic oligonucleotide
gagaggtaacatctctttagatgttggtaaaccttacacaaacccttatacaagca

SEQ ID NO: 243800 - DNA, 58 bp, Artificial
  Synthetic oligonucleotide
agtatcaagtcgacttaaccgatgtagatatgattattaatacgacgttaactcctga

SEQ ID NO: 243801 - DNA, 60 bp, Artificial
  Synthetic oligonucleotide
agtatgcagggttttgttggcagagccaatagcctcgcagagcacacactttatggatat

SEQ ID NO: 243802 - DNA, 55 bp, Artificial
  Synthetic oligonucleotide
atatgaaaaaacagggttttgagttgaagcgtggtgaacgtggctctgaccgtaa

SEQ ID NO: 243803 - DNA, 53 bp, Artificial
  Synthetic oligonucleotide
agtcatacaattaggtatcacccctccgaaaggtcttttaccttgttgagttc

SEQ ID NO: 243804 - DNA, 60 bp, Artificial
  Synthetic oligonucleotide
atatcgacgaatgtcggtatagcgtgagctatgataccgatcattcgataaaattcggga

SEQ ID NO: 243805 - DNA, 55 bp, Artificial
  Synthetic oligonucleotide
atatatccattatttttttataatcaatgtcgtaaccatatttttgtaactcttc

SEQ ID NO: 243806 - DNA, 60 bp, Artificial
  Synthetic oligonucleotide
atataacataagacgacttatcggaagtagatatgcttgtatattcacagatggtataat

SEQ ID NO: 243807 - DNA, 54 bp, Artificial
  Synthetic oligonucleotide
atagtcggcgtagtttcgttaaacattttcggaacatcgcattaattgctttat

SEQ ID NO: 243808 - DNA, 56 bp, Artificial
  Synthetic oligonucleotide
agtcggtttgtgacacctattgcgtcaaatgctgttggtacaatagggacttttaa

SEQ ID NO: 243809 - DNA, 59 bp, Artificial
  Synthetic oligonucleotide
agttttcgtgtgagcgaatccgaatatgaaaagttgaagcgttcagctgaaaatttgca

SEQ ID NO: 243810 - DNA, 59 bp, Artificial
  Synthetic oligonucleotide
gagagtgcgaattcgcactctctttttgtgtagtagtactattaaattttgtctcaata

SEQ ID NO: 243811 - DNA, 54 bp, Artificial
  Synthetic oligonucleotide
ataaatttcacttgctaagtattctttttgattccaaatataaaaaatttgata

SEQ ID NO: 243812 - DNA, 60 bp, Artificial
  Synthetic oligonucleotide
ataacagatgcgatgatgcagaccaatcaacatggcacctgccattgctacctgtacagt

SEQ ID NO: 243813 - DNA, 58 bp, Artificial
  Synthetic oligonucleotide
agttcgtgcagtattaatttttatatctgcgccacaacgccgattctagttcgtgtag

SEQ ID NO: 243814 - DNA, 55 bp, Artificial
  Synthetic oligonucleotide
agttacataagacatggttttgtaagtcaaaattatgcccagtttgtaattggag

SEQ ID NO: 243815 - DNA, 56 bp, Artificial
  Synthetic oligonucleotide
agtgtcacaaaagtgtgacatttcgtctttttatgcccccatgcaaaaagaccgac

SEQ ID NO: 243816 - DNA, 60 bp, Artificial
  Synthetic oligonucleotide
ataagcttctagattagtattactgtatcgaaaaccttgaaaatgaatgccatctgaatg

SEQ ID NO: 243817 - DNA, 56 bp, Artificial
  Synthetic oligonucleotide
ataagttacattcaaatcccccaattatcgccttctatttgttccagatcctggcc

SEQ ID NO: 243818 - DNA, 58 bp, Artificial
  Synthetic oligonucleotide
agtggtacactgattgagaggtggtacaatgttaacgattaagcaactcgccgataaa

SEQ ID NO: 243819 - DNA, 55 bp, Artificial
  Synthetic oligonucleotide
agtgcttttcacgagttggatatcaactcttaatcctgcactacccctttttaac

SEQ ID NO: 243820 - DNA, 54 bp, Artificial
  Synthetic oligonucleotide
atacagtagcaacaccttgataatttagacgttttaaaccgtataatgttacat

SEQ ID NO: 243821 - DNA, 57 bp, Artificial
  Synthetic oligonucleotide
gagcctaagcaaattagttttagagtgagcgaatccgaatatgaaaagttgaagcgt

SEQ ID NO: 243822 - DNA, 57 bp, Artificial
  Synthetic oligonucleotide
atactactaaatatattgacgaaaatcaagataacgaaacattaaaagatatgacga

SEQ ID NO: 243823 - DNA, 60 bp, Artificial
  Synthetic oligonucleotide
agtgatgtgatgtatcggttcagactgctccctattcggtcacagccattcacacgattg

SEQ ID NO: 243824 - DNA, 56 bp, Artificial
  Synthetic oligonucleotide
atagattattccaccattcaaagttatcttgtttaagtaattgatcgctttcttta

SEQ ID NO: 243825 - DNA, 57 bp, Artificial
  Synthetic oligonucleotide
agtctacattgtttgtacagtgagattaagatataaaaaacgatgattaaggagtta

SEQ ID NO: 243826 - DNA, 60 bp, Artificial
  Synthetic oligonucleotide
ataggtcataataatcaccacgtcgtcaacttcaactaatcgagatgctgcaccattaag

SEQ ID NO: 243827 - DNA, 56 bp, Artificial
  Synthetic oligonucleotide
atagtacttaatactcattaaaggcgtgatgaacttgaaagataaaatactaggtg

SEQ ID NO: 243828 - DNA, 56 bp, Artificial
  Synthetic oligonucleotide
agaaacgcattcatagtaagcgacaacccaaaatggcgaatgtagcccaacccaaa

SEQ ID NO: 243829 - DNA, 60 bp, Artificial
  Synthetic oligonucleotide
agaatatgcacaagtgcctggagagtggattgttcctattccccaagaaatgtctattaa

SEQ ID NO: 243830 - DNA, 54 bp, Artificial
  Synthetic oligonucleotide
atgtggaggagaccccccaggtacactaagagccgttttcggcgaggaggtagc

SEQ ID NO: 243831 - DNA, 60 bp, Artificial
  Synthetic oligonucleotide
atgtgagatacgttaaaccatgcaaggctgaactaacaatggtggcattagatagtgatg

SEQ ID NO: 243832 - DNA, 60 bp, Artificial
  Synthetic oligonucleotide
gagcgtgtgggacagtttatggatgttgtacaggataatgtccagaaggtcgatagaaag

SEQ ID NO: 243833 - DNA, 60 bp, Artificial
  Synthetic oligonucleotide
atgtactggtggttgaaatcatctaaaacatgcttaaaatcgaaatctcagcacataaag

SEQ ID NO: 243834 - DNA, 57 bp, Artificial
  Synthetic oligonucleotide
agagaaagtgtatcaaactgctaaatcggtagaagcccaaacgttccacgatgcgat

SEQ ID NO: 243835 - DNA, 60 bp, Artificial
  Synthetic oligonucleotide
atggattgcattaaataaccttgcatagcttcaacggtttcattcttttgtagcaacatc

SEQ ID NO: 243836 - DNA, 55 bp, Artificial
  Synthetic oligonucleotide
agaggcaggtgaagaagttagtagcgaaacacttaaaaatatttcgaatgtgtta

SEQ ID NO: 243837 - DNA, 60 bp, Artificial
  Synthetic oligonucleotide
atgcatctttttgcattcctctattaaccagtgttataatatgattaacaagaattctag

SEQ ID NO: 243838 - DNA, 59 bp, Artificial
  Synthetic oligonucleotide
agataagtctaagcgatctcttagtatcgaccaagttattttggcatcattagacaaat

SEQ ID NO: 243839 - DNA, 57 bp, Artificial
  Synthetic oligonucleotide
agatacgggcgttggagggcaacatccaacagcctaaagtatcttcagaagatttaa

SEQ ID NO: 243840 - DNA, 60 bp, Artificial
  Synthetic oligonucleotide
atgatcgaatagtaaactatccaatatcatttttcgatgaatataatagtggagacttat

SEQ ID NO: 243841 - DNA, 60 bp, Artificial
  Synthetic oligonucleotide
atgatactggattatttcaagtagatgacgattttcgtatactgccttatctatctagtg

SEQ ID NO: 243842 - DNA, 60 bp, Artificial
  Synthetic oligonucleotide
atgagttcgctgtagtcagacgggcacataataaggcactcaaagagggggaagacatac

SEQ ID NO: 243843 - DNA, 58 bp, Artificial
  Synthetic oligonucleotide
gaggaataaggtgataaactatgtatactctgtaaacggtgtatacatagtttactgc

SEQ ID NO: 243844 - DNA, 56 bp, Artificial
  Synthetic oligonucleotide
atgaggactttgcatttctccactcaccgatgttataatttagttaacaaggaaac

SEQ ID NO: 243845 - DNA, 55 bp, Artificial
  Synthetic oligonucleotide
atcaggacttaggattctttgatactactaaaaaagggaatcatggagaaccact

SEQ ID NO: 243846 - DNA, 59 bp, Artificial
  Synthetic oligonucleotide
atcagttgcttagtagtcctgcctaatctatctagcttgtaaataactaaagtgtcgcc

SEQ ID NO: 243847 - DNA, 60 bp, Artificial
  Synthetic oligonucleotide
aggcaactataatcactgtgacactcgttacataacaagctagtaatctccagataaaat

SEQ ID NO: 243848 - DNA, 56 bp, Artificial
  Synthetic oligonucleotide
atcatctctttttttattatatgtaatctctaacttacgaacatatccctttataa

SEQ ID NO: 243849 - DNA, 54 bp, Artificial
  Synthetic oligonucleotide
atccaacttgtacacgaaatgggtttagaaaaagcacggcgcatttacggtgaa

SEQ ID NO: 243850 - DNA, 54 bp, Artificial
  Synthetic oligonucleotide
atccgttccttagtttcaataaatcttaattctcgacgttatatctttactgaa

SEQ ID NO: 243851 - DNA, 53 bp, Artificial
  Synthetic oligonucleotide
atcggagattcgagaggacgattttgggaacaaggaatttctaacgataaaaa

SEQ ID NO: 243852 - DNA, 60 bp, Artificial
  Synthetic oligonucleotide
atgaaagatatactgaagttaacaaacagacagatacatcattagatgtgaaaaccccag

SEQ ID NO: 243853 - DNA, 56 bp, Artificial
  Synthetic oligonucleotide
agcttctttttagtttcttccaattgttgactgttcaagtctgcacctttaatgaa

SEQ ID NO: 243854 - DNA, 57 bp, Artificial
  Synthetic oligonucleotide
ggatactgaattaggtatattgttaccaaacatttagtttggaagaaggtgatgaca

SEQ ID NO: 243855 - DNA, 60 bp, Artificial
  Synthetic oligonucleotide
atgaatatgcagacacgttcgaagttgactgggacgcattcgcagaaaattcagaagacc

SEQ ID NO: 243856 - DNA, 58 bp, Artificial
  Synthetic oligonucleotide
agctagtacagtgactttatatcgtgctgcgagggcgaatttccctgggtttgagaaa

SEQ ID NO: 243857 - DNA, 60 bp, Artificial
  Synthetic oligonucleotide
atgacgattttcgtatactgccttatctatctagtggtggcgctggtttagcaataccta

SEQ ID NO: 243858 - DNA, 60 bp, Artificial
  Synthetic oligonucleotide
atgagccgaattccccgtgtagtatatggcgcttctgatccaaaagggggatgcagcgga

SEQ ID NO: 243859 - DNA, 58 bp, Artificial
  Synthetic oligonucleotide
atgaggactttgcattactctactaatcaatgttataattaagttaacaagagcttcg

SEQ ID NO: 243860 - DNA, 58 bp, Artificial
  Synthetic oligonucleotide
agcacgaaatgcaatagacggtgaacatttagaacaaagtttaaagcatatgtctaag

SEQ ID NO: 243861 - DNA, 60 bp, Artificial
  Synthetic oligonucleotide
agcaaaatattgcttacgcaacagtccataatgatgagcaaacccctcacatgcatttag

SEQ ID NO: 243862 - DNA, 52 bp, Artificial
  Synthetic oligonucleotide
aaaatttaattggttttatgcgttcaacagaagtaacagttaataaaaatga

SEQ ID NO: 243863 - DNA, 60 bp, Artificial
  Synthetic oligonucleotide
caaggtcatatatatctccaacaattatagttggaccagactactatatgggaattggta

SEQ ID NO: 243864 - DNA, 58 bp, Artificial
  Synthetic oligonucleotide
caagccttacgtgatttaagagactttaatgacaacgtatgtcgcgaacatggcttaa

SEQ ID NO: 243865 - DNA, 55 bp, Artificial
  Synthetic oligonucleotide
ggatatatagcaaccaccatttttggttgctgggggtttaatggtcttgaactta

SEQ ID NO: 243866 - DNA, 56 bp, Artificial
  Synthetic oligonucleotide
aaagaatatcgagatatcgtgtcggttacagattgttttccagttggagaactcct

SEQ ID NO: 243867 - DNA, 53 bp, Artificial
  Synthetic oligonucleotide
aaagaccacattttttaatgtggtctttattcttcaactaaagcacccattag

SEQ ID NO: 243868 - DNA, 57 bp, Artificial
  Synthetic oligonucleotide
aaagcaagtctctgtagttgtcccccagaaaaattatcaccatcagcttctaaagta

SEQ ID NO: 243869 - DNA, 59 bp, Artificial
  Synthetic oligonucleotide
aagcaatgcataagaattggttatttaaatagactcttacttctgaaatgtcatttgga

SEQ ID NO: 243870 - DNA, 60 bp, Artificial
  Synthetic oligonucleotide
aaagctggcttatacctattacctatggcaataggagatatggtgtttgcaccaattgca

SEQ ID NO: 243871 - DNA, 57 bp, Artificial
  Synthetic oligonucleotide
caagatgacgaaggatcggttgaattagataatcgctttaatgaattacctaaagac

SEQ ID NO: 243872 - DNA, 55 bp, Artificial
  Synthetic oligonucleotide
aaagtccgacgtattacatggcaagcaaggtaagagccttactaacgaaagagaa

SEQ ID NO: 243873 - DNA, 56 bp, Artificial
  Synthetic oligonucleotide
aagataatcatctagagttagaaatcacgaaagaaaatataaagtgttgggataaa

SEQ ID NO: 243874 - DNA, 52 bp, Artificial
  Synthetic oligonucleotide
caataaaatttttaaatacttgatttctttgctttttctcagtatacttttc

SEQ ID NO: 243875 - DNA, 56 bp, Artificial
  Synthetic oligonucleotide
aacgttataccaacattatactctcattatactaattgcttattccaatttcctat

SEQ ID NO: 243876 - DNA, 59 bp, Artificial
  Synthetic oligonucleotide
ggattggaaaatatcatgacctaggcctaatggtaatgctcctaaagaggaaccaatca

SEQ ID NO: 243877 - DNA, 58 bp, Artificial
  Synthetic oligonucleotide
aaatagcaatgggatttacagagttctttggcgctaggtatgacgaaagcactttaga

SEQ ID NO: 243878 - DNA, 60 bp, Artificial
  Synthetic oligonucleotide
aagagcataagggacaacgatgccaccttcggtgtcactcagcatagctgaggtttcctt

SEQ ID NO: 243879 - DNA, 60 bp, Artificial
  Synthetic oligonucleotide
aacagcctcatgagaaagctcacaagactgccgtcatcgcttgtattaatcgtctcttaa

SEQ ID NO: 243880 - DNA, 51 bp, Artificial
  Synthetic oligonucleotide
aacttgggcgggactaggtttagtcttaacaaccgtagtctcaataattat

SEQ ID NO: 243881 - DNA, 60 bp, Artificial
  Synthetic oligonucleotide
aaatagctaaatattgcaaccaacatcaacatgaagcaccgaattatgaagcattagaat

SEQ ID NO: 243882 - DNA, 56 bp, Artificial
  Synthetic oligonucleotide
aacaattcatctttttaacacttacgacgccaaatgtaacagttgagcatttggaa

SEQ ID NO: 243883 - DNA, 60 bp, Artificial
  Synthetic oligonucleotide
aactggtacctctgtaaatccagcacgaagtattggacctgcattattcacaggtggaga

SEQ ID NO: 243884 - DNA, 58 bp, Artificial
  Synthetic oligonucleotide
aaatctcctgttaaatcgtcaagtgtcaacaacattactattggagaatctagatacc

SEQ ID NO: 243885 - DNA, 52 bp, Artificial
  Synthetic oligonucleotide
aaattttgattttgctgagtacggctttcggtacgaaaaacataacggacaa

SEQ ID NO: 243886 - DNA, 60 bp, Artificial
  Synthetic oligonucleotide
aaatgcatatggggctacaatacttggtggtaaccaaactccatgctcggggatcatata

SEQ ID NO: 243887 - DNA, 55 bp, Artificial
  Synthetic oligonucleotide
ggcacctgttcagacttagagccacaagggttacagaaccattaggacacctttt

SEQ ID NO: 243888 - DNA, 60 bp, Artificial
  Synthetic oligonucleotide
aactagaacctaacaataatatcactgcatctgattcattgatccattgtgttattattt

SEQ ID NO: 243889 - DNA, 58 bp, Artificial
  Synthetic oligonucleotide
aaattatgcccagtttgtaattggaggcgtgctatgaaaaatagttatcaagctcaaa

SEQ ID NO: 243890 - DNA, 60 bp, Artificial
  Synthetic oligonucleotide
aactgaagcagttaagcaatcagatcttccttcaggttatgaccatctgtgccagttcgt

SEQ ID NO: 243891 - DNA, 60 bp, Artificial
  Synthetic oligonucleotide
caatcgtaaatccaatagccggcggtgtatgtgaagcagtttgcggaactgcatttgcag

SEQ ID NO: 243892 - DNA, 56 bp, Artificial
  Synthetic oligonucleotide
aaattgaacgtgtcacacccaaaagcattacctatcgacacttagccgaagataaa

SEQ ID NO: 243893 - DNA, 54 bp, Artificial
  Synthetic oligonucleotide
aactctacctgtaacttattaattacataattaaattcctcagtaactttgaca

SEQ ID NO: 243894 - DNA, 60 bp, Artificial
  Synthetic oligonucleotide
aacgctgctacttcaactgtacacgaaccacttaactgttctttcatctcagaaagcaca

SEQ ID NO: 243895 - DNA, 50 bp, Artificial
  Synthetic oligonucleotide
aaaaaaagttgctttttcgtacctagtaatgtatcgtttaaggtgtctaa

SEQ ID NO: 243896 - DNA, 55 bp, Artificial
  Synthetic oligonucleotide
aacgcaacaaataattaataggcgactttataagccagcatcgaaaaaatcccca

SEQ ID NO: 243897 - DNA, 51 bp, Artificial
  Synthetic oligonucleotide
aaaacagcacaattccaagaaaaacacgatttagaacctaaaaagaacgaa

SEQ ID NO: 243898 - DNA, 60 bp, Artificial
  Synthetic oligonucleotide
ggccgttcatagtgatgtcactgtcaaacttcggtgagtttatcattaatggcgtgataa

SEQ ID NO: 243899 - DNA, 54 bp, Artificial
  Synthetic oligonucleotide
aaaaccactaggtttatttggagaaataactttgtgactaactgctattgcatt

SEQ ID NO: 243900 - DNA, 53 bp, Artificial
  Synthetic oligonucleotide
aacggtatataaagggaaagaagaattcataaataaagactcaggagaagtaa

SEQ ID NO: 243901 - DNA, 60 bp, Artificial
  Synthetic oligonucleotide
aagccgctcgtgaattgtatggcaaaacagacggtaatcaagggcatgtcattatccaat

SEQ ID NO: 243902 - DNA, 52 bp, Artificial
  Synthetic oligonucleotide
aacccaaccgtaaggcgccgaaacaaattagttttcgtgtgagcgaatccga

SEQ ID NO: 243903 - DNA, 57 bp, Artificial
  Synthetic oligonucleotide
aaaagagtggctcaatttatggcgagatgtaacggggatttctgaaatcacacaagt

SEQ ID NO: 243904 - DNA, 59 bp, Artificial
  Synthetic oligonucleotide
aaaacttgtcgaatggtcggcttaatagctcacgctatgccgacattcgtctgcaagtt

SEQ ID NO: 243905 - DNA, 59 bp, Artificial
  Synthetic oligonucleotide
tccaatcaccgggcagtatgaatgctccccatccgatacacgagccataagcaatcgcc

SEQ ID NO: 243906 - DNA, 59 bp, Artificial
  Synthetic oligonucleotide
aaccccagtcgctctgccgattgaatggctgcaagcgtacgttgtcccgcattaggtga

SEQ ID NO: 243907 - DNA, 59 bp, Artificial
  Synthetic oligonucleotide
aggacgcagtgtcttcccccacatgttctgtttgcactgtatcctcactatcgccccaa

SEQ ID NO: 243908 - DNA, 55 bp, Artificial
  Synthetic oligonucleotide
cataccattatcttttgtaagactggttatcacagtttagcccttcgttctaaac

SEQ ID NO: 243909 - DNA, 57 bp, Artificial
  Synthetic oligonucleotide
gatattgtagcttttggaagctggtacgatttagaccagtcaaccgtaatagaccta

SEQ ID NO: 243910 - DNA, 58 bp, Artificial
  Synthetic oligonucleotide
ggcgaacggaagcgtagtgacctcaggttgttagggacttttatgcatgcgctaaagc

SEQ ID NO: 243911 - DNA, 56 bp, Artificial
  Synthetic oligonucleotide
tgattatccaatcgtttaaacctggcgaagtcacgcccgaacaatgtaaccaatta

SEQ ID NO: 243912 - DNA, 59 bp, Artificial
  Synthetic oligonucleotide
atagcgataaaactatagtactcataagtcaccatctagatgttttatcatatgtcgac

SEQ ID NO: 243913 - DNA, 59 bp, Artificial
  Synthetic oligonucleotide
gaacattatggttaatgagataccagaagcagttggtcaattatcactatttacagctc

SEQ ID NO: 243914 - DNA, 55 bp, Artificial
  Synthetic oligonucleotide
atgtttgaaggattatttaacaagcccttattatactttagaaatagcacaatag

SEQ ID NO: 243915 - DNA, 58 bp, Artificial
  Synthetic oligonucleotide
ttcctcacacgttttaatacgtgatagcgaatattcgttgcacttaacttatcttgcc

SEQ ID NO: 243916 - DNA, 57 bp, Artificial
  Synthetic oligonucleotide
agcgggtggccctcaatatcttgccgaactatcgacgagtgtaccgacaacacgaaa

SEQ ID NO: 243917 - DNA, 58 bp, Artificial
  Synthetic oligonucleotide
gcatgggagatcgtttaattatagaatcgcttgaccgattagggagaaattacgacga

SEQ ID NO: 243918 - DNA, 59 bp, Artificial
  Synthetic oligonucleotide
cttgtaatgcttgtgacaggtccgatagtcatttctttggtattgaacatttatatagc

SEQ ID NO: 243919 - DNA, 52 bp, Artificial
  Synthetic oligonucleotide
cttctaagattttaagcgttgtatttacggttttcgtgcttgtatttgttcc

SEQ ID NO: 243920 - DNA, 59 bp, Artificial
  Synthetic oligonucleotide
gtacaatgatatattgattttagcacattcttggttgtgctaagctacgtgttgaatgg

SEQ ID NO: 243921 - DNA, 58 bp, Artificial
  Synthetic oligonucleotide
ggcgagattggtagcaccgaaatttgacgcagaaacgtcaaaagaattggtgcaacaa

SEQ ID NO: 243922 - DNA, 57 bp, Artificial
  Synthetic oligonucleotide
gttatgaacttgaaagaggcacgtccaaagaggttacagaacgagaacataaagcga

SEQ ID NO: 243923 - DNA, 56 bp, Artificial
  Synthetic oligonucleotide
agatgtatagacgaaaatcaagataacgaaacacttaaagatatgacgaaaagtgg

SEQ ID NO: 243924 - DNA, 59 bp, Artificial
  Synthetic oligonucleotide
ttatgtattagcgataggtctatttattggcttgtacgaatggattagagcaaagttcc

SEQ ID NO: 243925 - DNA, 56 bp, Artificial
  Synthetic oligonucleotide
actgttatataaggaagtacaagctacacgttgcgattctatttttgaggcgttaa

SEQ ID NO: 243926 - DNA, 59 bp, Artificial
  Synthetic oligonucleotide
gtatcggattcatcgctcgccgtacttctcacaaagcttaatacgttgacagagcgata

SEQ ID NO: 243927 - DNA, 57 bp, Artificial
  Synthetic oligonucleotide
atgtaggaagcggggctgcacaatttaagaacggtgcctgggtaattgccggcatcg

SEQ ID NO: 243928 - DNA, 59 bp, Artificial
  Synthetic oligonucleotide
taaccatgtatcaggttccataatactaactatcttagttaaattatcatgttgaaata

SEQ ID NO: 243929 - DNA, 59 bp, Artificial
  Synthetic oligonucleotide
gagaccatggagagaaaagaaaatcgctaatgttgattactttgaacttctgcatattc

SEQ ID NO: 243930 - DNA, 58 bp, Artificial
  Synthetic oligonucleotide
tgttgtcatttagagaggttaaacaaagcaatttaaaatctatcaccaaggcttatga

SEQ ID NO: 243931 - DNA, 54 bp, Artificial
  Synthetic oligonucleotide
aataaaaaggtacctatacggtacctaagtgatatcacgatcataactttggaa

SEQ ID NO: 243932 - DNA, 56 bp, Artificial
  Synthetic oligonucleotide
ggcgatccaatacagtatacaggcacgttaaatacgggttctaacctgataacttc

SEQ ID NO: 243933 - DNA, 59 bp, Artificial
  Synthetic oligonucleotide
ggcgattgcttatggctcgtgtatcggatggggagcattcatactgcccggtgattgga

SEQ ID NO: 243934 - DNA, 59 bp, Artificial
  Synthetic oligonucleotide
caagtagtaaaagccaatgggaaataataacacaatggatcaatgaatcagatgcagtg

SEQ ID NO: 243935 - DNA, 54 bp, Artificial
  Synthetic oligonucleotide
aatctattctaccttttcttacactccctaacttttcgtcacagtttggacagc

SEQ ID NO: 243936 - DNA, 58 bp, Artificial
  Synthetic oligonucleotide
cgccttgcgcttatgaataaaagaaatagtatagccacaattcataggaaaaccacta

SEQ ID NO: 243937 - DNA, 52 bp, Artificial
  Synthetic oligonucleotide
ctaagggtaactatttcgattttgaatagttacccttagagcgttggtatac

SEQ ID NO: 243938 - DNA, 55 bp, Artificial
  Synthetic oligonucleotide
cgttaatacttatttctcgaatcgaatgttccatagacaccctccattttataag

SEQ ID NO: 243939 - DNA, 59 bp, Artificial
  Synthetic oligonucleotide
tgatctgagtctcacactatttttattaaggcaatcgtttatgtcgtaattatgatgaa

SEQ ID NO: 243940 - DNA, 59 bp, Artificial
  Synthetic oligonucleotide
ttggggcgatagtgaggatacagtgcaaacagaacatgtgggggaagacactgcgtcct

SEQ ID NO: 243941 - DNA, 57 bp, Artificial
  Synthetic oligonucleotide
aggcaaaagcgccaggaaaactgtatatagcgggcgaatatgctgtaaccgagccgg

SEQ ID NO: 243942 - DNA, 59 bp, Artificial
  Synthetic oligonucleotide
tctgatgaaattgtaatctctgatgatttgtcatatgatatgcgctttaaaactttaat

SEQ ID NO: 243943 - DNA, 59 bp, Artificial
  Synthetic oligonucleotide
ggcgatgaacctaaagattatgatctgttagttatgattggaggtaattcttgggataa

SEQ ID NO: 243944 - DNA, 57 bp, Artificial
  Synthetic oligonucleotide
gaatattacggtaataaaattctcccgacatatcgacattcagaatcaaacgttcat

SEQ ID NO: 243945 - DNA, 56 bp, Artificial
  Synthetic oligonucleotide
gaaggatcggttgaattagataatcgctttaatgaattacctaaagaccacccagc

SEQ ID NO: 243946 - DNA, 58 bp, Artificial
  Synthetic oligonucleotide
taccgtagtcacacaaactcaatcctcactgcaacacaggacatttcttagcgttttg

SEQ ID NO: 243947 - DNA, 58 bp, Artificial
  Synthetic oligonucleotide
tagagcaccttctttatactgcgcactcactggcgcatgactcacgcctcccatagga

SEQ ID NO: 243948 - DNA, 56 bp, Artificial
  Synthetic oligonucleotide
atttactcattccagttaatgagtcctataagttcaataagtagttttataggaga

SEQ ID NO: 243949 - DNA, 58 bp, Artificial
  Synthetic oligonucleotide
gtgtgttgagcgtcaaaatctatatctatatctctgtgttctctttgttgttttccag

SEQ ID NO: 243950 - DNA, 53 bp, Artificial
  Synthetic oligonucleotide
caagcggtgttgaaataacacgtaaaaccaaaaagacgattacttacaagcac

SEQ ID NO: 243951 - DNA, 56 bp, Artificial
  Synthetic oligonucleotide
gtcatctttccacacatattgaccgttttcgcgtaattttcgctctccgttcgtcg

SEQ ID NO: 243952 - DNA, 58 bp, Artificial
  Synthetic oligonucleotide
cgcttccgggaaccccagtcgctctgccgattgaatggctgcaagcgtacgttgtccc

SEQ ID NO: 243953 - DNA, 58 bp, Artificial
  Synthetic oligonucleotide
tatcagaagtaactgaagcatcacgcatatttattgcaggtaaggggcgttctggatt

SEQ ID NO: 243954 - DNA, 60 bp, Artificial
  Synthetic oligonucleotide
ggctctatcaccttctttgagacatggtggaactgctatatcttggatcattaaaccatt

SEQ ID NO: 243955 - DNA, 58 bp, Artificial
  Synthetic oligonucleotide
gtcctaatctatcaattgattcaaccactaaacggtcacccattctcacgaaattcaa

SEQ ID NO: 243956 - DNA, 58 bp, Artificial
  Synthetic oligonucleotide
cgtcctaaacgatcaatagattccacaacgaatcgatctcccattctgacaaaattga

SEQ ID NO: 243957 - DNA, 57 bp, Artificial
  Synthetic oligonucleotide
cgtggccaattaatagctggtcgtatattgtttcttcaagaaaagctagcaaaaggc

SEQ ID NO: 243958 - DNA, 58 bp, Artificial
  Synthetic oligonucleotide
cgcaggcgaaccgaaacgaagtgacctcaggttgttaggggcttttatgcatgcgcta

SEQ ID NO: 243959 - DNA, 58 bp, Artificial
  Synthetic oligonucleotide
cgcaggcatacacaagctattcatcggtaaagatcattgtattaaagatgatttaacg

SEQ ID NO: 243960 - DNA, 58 bp, Artificial
  Synthetic oligonucleotide
tagcacgtccaaccggatgactcggcattctgacagcaatagacgataaaccgcccga

SEQ ID NO: 243961 - DNA, 58 bp, Artificial
  Synthetic oligonucleotide
caatcaatcgggtgttcacctctgccaataatggtgtcaggtgtccagccatcggcta

SEQ ID NO: 243962 - DNA, 58 bp, Artificial
  Synthetic oligonucleotide
catatgactgatttcgtagcatggcgaaaatccatagatctgaagagacctacggttc

SEQ ID NO: 243963 - DNA, 58 bp, Artificial
  Synthetic oligonucleotide
gtgccttgtatgacaaatccaaatcaacgattagaaccatttgatgagacatttcaac

SEQ ID NO: 243964 - DNA, 54 bp, Artificial
  Synthetic oligonucleotide
gctaattattacggtttagacactagcgattattctttaggttatttaagtggc

SEQ ID NO: 243965 - DNA, 60 bp, Artificial
  Synthetic oligonucleotide
ggcttagcactcgctgaaaaactcgtaccgaatcatcaagcggcggcctatacgcataat

SEQ ID NO: 243966 - DNA, 58 bp, Artificial
  Synthetic oligonucleotide
gcaattaacattttatgagttacagagctacctagcactaaaatacaaagaaggacgc

SEQ ID NO: 243967 - DNA, 58 bp, Artificial
  Synthetic oligonucleotide
tgcttgttcaagattgattgcatgttgctcatgactttgtccgattgcgattggattt

SEQ ID NO: 243968 - DNA, 58 bp, Artificial
  Synthetic oligonucleotide
ggaacaatccacatccacctgtatgtgtcacgccaacatcataaccagtaactaatac

SEQ ID NO: 243969 - DNA, 56 bp, Artificial
  Synthetic oligonucleotide
gatatttgtaaaacatatcaggaaagtaacagatccttttgttgatcccggattag

SEQ ID NO: 243970 - DNA, 58 bp, Artificial
  Synthetic oligonucleotide
aatagagagggtttgctgacttgaagctcatcgaccttcttagaagccgtcagcgcat

SEQ ID NO: 243971 - DNA, 58 bp, Artificial
  Synthetic oligonucleotide
tctgccgattgaatggctgcaagcgtacgttgtcccgcattaggtgaagccaatccta

SEQ ID NO: 243972 - DNA, 58 bp, Artificial
  Synthetic oligonucleotide
gagtggacgaaacaatatgatatttggttcagtatatacagtacacctagtgaatcac

SEQ ID NO: 243973 - DNA, 58 bp, Artificial
  Synthetic oligonucleotide
ggataatacacgtaaagatttagaagattacgataatgtagacactgtatctagcccg

SEQ ID NO: 243974 - DNA, 58 bp, Artificial
  Synthetic oligonucleotide
ccatgattgaagtatcattcaccgtatatactaatctatgttcctgattaatccgacg

SEQ ID NO: 243975 - DNA, 58 bp, Artificial
  Synthetic oligonucleotide
tgattcaatcgttcaagcctggcgaggtaacgccagagcaatgtaatcaattgggtct

SEQ ID NO: 243976 - DNA, 56 bp, Artificial
  Synthetic oligonucleotide
ggggcacttattacagcatatggtttggaatctatattaatcccaaataacgtttc

SEQ ID NO: 243977 - DNA, 52 bp, Artificial
  Synthetic oligonucleotide
gacccgaaaaccgtttgtatacgttagtgaggtaacgtttcaagcgctagaa

SEQ ID NO: 243978 - DNA, 54 bp, Artificial
  Synthetic oligonucleotide
aattcacgagcttttattacgttagattaagtatacgcttatttattggataag

SEQ ID NO: 243979 - DNA, 58 bp, Artificial
  Synthetic oligonucleotide
gcgatctacaattacagatataatcatactgagagctataaacacatatgtatgaagt

SEQ ID NO: 243980 - DNA, 53 bp, Artificial
  Synthetic oligonucleotide
ttatatacaagtaaaaaactatacactaaagattctaaggtcggttttagtga

SEQ ID NO: 243981 - DNA, 57 bp, Artificial
  Synthetic oligonucleotide
ctgcaagtttagttaagggttcttctcaacatcaataaattttctcggcataaatgc

SEQ ID NO: 243982 - DNA, 58 bp, Artificial
  Synthetic oligonucleotide
ctgtgtgatatatgaaagtttctttaattgctgcgatggataagaacagggtaatagg

SEQ ID NO: 243983 - DNA, 56 bp, Artificial
  Synthetic oligonucleotide
tcaaaacatctatcgttacctacgtgatgatctcaaattgggtttagagttaaccg

SEQ ID NO: 243984 - DNA, 58 bp, Artificial
  Synthetic oligonucleotide
aagcgctcctgtagaatcatagtattggcctctatcttcaatgcctaaagtttccgat

SEQ ID NO: 243985 - DNA, 58 bp, Artificial
  Synthetic oligonucleotide
caactgttatacctgggacaattgtatttgctgaaatacttttaattattgctgcggc

SEQ ID NO: 243986 - DNA, 58 bp, Artificial
  Synthetic oligonucleotide
atgactagccaaaggctatccatttttaaagtgcagtgaatagccatacgctatccat

SEQ ID NO: 243987 - DNA, 57 bp, Artificial
  Synthetic oligonucleotide
ggggctttcaagctgtcgtttatacacacgggaatactaaaaatcttcacaatcaca

SEQ ID NO: 243988 - DNA, 55 bp, Artificial
  Synthetic oligonucleotide
gcctaattacttttacgataaacttgcaaagcatctaactacagaattaaacggc

SEQ ID NO: 243989 - DNA, 58 bp, Artificial
  Synthetic oligonucleotide
caaacatagagagtaataaatttcgaagaaacgtggtgggattgaatgagtgaacatg

SEQ ID NO: 243990 - DNA, 49 bp, Artificial
  Synthetic oligonucleotide
ccccgaactacggcgaataggtcggggttttgtgcgtttacaaacgaaa

SEQ ID NO: 243991 - DNA, 57 bp, Artificial
  Synthetic oligonucleotide
actgaagttaacaagtgaagtattattcgccatatgcgaaaaccccactgccgtcca

SEQ ID NO: 243992 - DNA, 57 bp, Artificial
  Synthetic oligonucleotide
cgtcttccccattcaatccaacgcacacgtctccctggcttccaacaaggtctgcgc

SEQ ID NO: 243993 - DNA, 54 bp, Artificial
  Synthetic oligonucleotide
gccttagtgatggtcgcctttttagttataagtcccttaggtgactggttaggc

SEQ ID NO: 243994 - DNA, 57 bp, Artificial
  Synthetic oligonucleotide
cacatggagtttacagttatcgacggtgtgaactacatcgatgaaacactagaacaa

SEQ ID NO: 243995 - DNA, 54 bp, Artificial
  Synthetic oligonucleotide
ttaattgggtttatgcgaacaacagaagtaacagttaattcaaatgacggaagt

SEQ ID NO: 243996 - DNA, 56 bp, Artificial
  Synthetic oligonucleotide
cggattttatgaccgatgatgaagaaaagaatttgaaacgtttgtctgatttggag

SEQ ID NO: 243997 - DNA, 57 bp, Artificial
  Synthetic oligonucleotide
gccgatgtttcggccagcaagcgcccatctcctcattgaaatgtgcggcgtacgctg

SEQ ID NO: 243998 - DNA, 55 bp, Artificial
  Synthetic oligonucleotide
ggggttgatcgtcctggacggacggtcattccccagtagatcaagggcaagaaaa

SEQ ID NO: 243999 - DNA, 57 bp, Artificial
  Synthetic oligonucleotide
cagttatatactaatggatagacattcgaattatgccattgtcgaagttacacctcg

SEQ ID NO: 244000 - DNA, 57 bp, Artificial
  Synthetic oligonucleotide
gtattgtttggtagtgttaatgcgattataggattgacatctgagagaccagatatc

SEQ ID NO: 244001 - DNA, 57 bp, Artificial
  Synthetic oligonucleotide
ctgcagcaagatgatgataacattaaagaggactcaaatactcaagaagaatcaacg

SEQ ID NO: 244002 - DNA, 55 bp, Artificial
  Synthetic oligonucleotide
cttaacggtttttcggctacactggacaagcgaacgagcgaatactcaatatccc

SEQ ID NO: 244003 - DNA, 57 bp, Artificial
  Synthetic oligonucleotide
cagcgtacgccgcacatttcaatgaggagatgggcgcttgctggccgaaacatcggc

SEQ ID NO: 244004 - DNA, 57 bp, Artificial
  Synthetic oligonucleotide
ctactacgacattaactcataattgtgttgttgcaagtgactatgtaatcgttcctg

SEQ ID NO: 244005 - DNA, 55 bp, Artificial
  Synthetic oligonucleotide
gggttccgaggctcaacgtcaataaagcaattggaataaatattaacagtaagat

SEQ ID NO: 244006 - DNA, 56 bp, Artificial
  Synthetic oligonucleotide
gaaggatacgtaaattgatgtgttgtatattgacaaatggtaagtaattcgggacc

SEQ ID NO: 244007 - DNA, 57 bp, Artificial
  Synthetic oligonucleotide
ttctcctagtattagtaattatcatggctgtcatggcgcattaacggaataaagggt

SEQ ID NO: 244008 - DNA, 57 bp, Artificial
  Synthetic oligonucleotide
gggaccaattcgcccaagacacaaatgagcttgagcgtagccgacaagctgcagagt

SEQ ID NO: 244009 - DNA, 54 bp, Artificial
  Synthetic oligonucleotide
ggtaaacttattagtactcttttcgaaccttctagtggcagcattttatatggg

SEQ ID NO: 244010 - DNA, 57 bp, Artificial
  Synthetic oligonucleotide
atcagtttgcagactttgatataccttcgcttcatagaaagttaaagctatccgact

SEQ ID NO: 244011 - DNA, 57 bp, Artificial
  Synthetic oligonucleotide
aggtattaagcaagtcaaagttgctagagctattgaaatggacccaccattgttaag

SEQ ID NO: 244012 - DNA, 57 bp, Artificial
  Synthetic oligonucleotide
cgttgctaaaagaatacgatgtcctttattagataatgctgtagctaattgcgttgc

SEQ ID NO: 244013 - DNA, 55 bp, Artificial
  Synthetic oligonucleotide
gactattttacaataacaacgggaatttctgaacgttttgctactttgtgactga

SEQ ID NO: 244014 - DNA, 57 bp, Artificial
  Synthetic oligonucleotide
tttagaattggatgttacacatgaattactccgtataagtcgttataatctatcaaa

SEQ ID NO: 244015 - DNA, 55 bp, Artificial
  Synthetic oligonucleotide
gttaaagacttagaacatgtatacgataagatgttaactttaacttatactgaac

SEQ ID NO: 244016 - DNA, 57 bp, Artificial
  Synthetic oligonucleotide
aaaacgatctaaatgctcatttctaaccaataacagactaagtatgatgattaatag

SEQ ID NO: 244017 - DNA, 57 bp, Artificial
  Synthetic oligonucleotide
cacctgccatagcgcctgtcgccatgtatgcaacgcctgcacgtgttgagtaaagta

SEQ ID NO: 244018 - DNA, 56 bp, Artificial
  Synthetic oligonucleotide
gctgaaatacttttaattattgctgcggcttttgttgggaaagagcttgtaagtaa

SEQ ID NO: 244019 - DNA, 57 bp, Artificial
  Synthetic oligonucleotide
ccgccagcataaagtgctgccattccagtaccgacaccccagccaatagaaccacta

SEQ ID NO: 244020 - DNA, 50 bp, Artificial
  Synthetic oligonucleotide
gatcaatttcttttaagtaatctaaatccccattttttaatttcttttta

SEQ ID NO: 244021 - DNA, 53 bp, Artificial
  Synthetic oligonucleotide
ggtctaaaatttgggattctggagtcccaaattttgagtttctggagtcccaa

SEQ ID NO: 244022 - DNA, 57 bp, Artificial
  Synthetic oligonucleotide
cgaatgaagatattgacagagagcgaacgcatgaaaattatgatttgcaaaacgatg

SEQ ID NO: 244023 - DNA, 56 bp, Artificial
  Synthetic oligonucleotide
caactgctcgttggttatttcttactttatcgactaaaaatgcaatagacggcgac

SEQ ID NO: 244024 - DNA, 54 bp, Artificial
  Synthetic oligonucleotide
gtggcctaaccgaaagtaagctttactatcattttgattcacttaagaagaaag

SEQ ID NO: 244025 - DNA, 56 bp, Artificial
  Synthetic oligonucleotide
ctaagtctcacagattaatcgcacacttagataaccgtcaaatagaattttacggc

SEQ ID NO: 244026 - DNA, 56 bp, Artificial
  Synthetic oligonucleotide
taggcagctcaggtccgcaactgtgcgtacctattccgctttgcactgcatcgata

SEQ ID NO: 244027 - DNA, 56 bp, Artificial
  Synthetic oligonucleotide
ggtttaaaacgtctaaattatcaaggtgttgctactgtatgtggaaatgtagcagg

SEQ ID NO: 244028 - DNA, 56 bp, Artificial
  Synthetic oligonucleotide
gcacaaacacaagtgatataaggttttaacgttgagagataatcaaggtttgcgtc

SEQ ID NO: 244029 - DNA, 56 bp, Artificial
  Synthetic oligonucleotide
gcgttaaatagtctaaacgcattggttccttcaatgtgatagtaataatcacgctc

SEQ ID NO: 244030 - DNA, 56 bp, Artificial
  Synthetic oligonucleotide
gcgtaaatggtgtcgatatacattatcgtgatccactaactcatctaaattgtacg

SEQ ID NO: 244031 - DNA, 56 bp, Artificial
  Synthetic oligonucleotide
cgtggacgaacactaggctcagaatatgagaaaggggcaattgatcatgagcatga

SEQ ID NO: 244032 - DNA, 55 bp, Artificial
  Synthetic oligonucleotide
ggtctatcggttcttggggcggtagtggtatctgttcactcttcggtggggcagt

SEQ ID NO: 244033 - DNA, 56 bp, Artificial
  Synthetic oligonucleotide
cgtgcttcccggcaaggtgattgacgctctatgcatggaggtgcccgttgtaacca

SEQ ID NO: 244034 - DNA, 56 bp, Artificial
  Synthetic oligonucleotide
gcggggaaggtgacggagtatcagcgttcattaatgtgcgagttggaggggccccg

SEQ ID NO: 244035 - DNA, 56 bp, Artificial
  Synthetic oligonucleotide
gttagatgccattgaatcaggcgccaaagatcaaaatatacagataattaagtccg

SEQ ID NO: 244036 - DNA, 56 bp, Artificial
  Synthetic oligonucleotide
gcatcaaacgtattatcttgcaggtcttcttgatcgaacaagtcaatactatcttg

SEQ ID NO: 244037 - DNA, 56 bp, Artificial
  Synthetic oligonucleotide
cccttgaaaatgcaatagcatacctagcattaaagttagcaaccatgcaataacag

SEQ ID NO: 244038 - DNA, 56 bp, Artificial
  Synthetic oligonucleotide
atcacagttgtttatacctccagctaaacacccaataagcactattatcggttttg

SEQ ID NO: 244039 - DNA, 56 bp, Artificial
  Synthetic oligonucleotide
ttcatgctgtcactaattttttctagattgatattaaatctctcgattttaattat

SEQ ID NO: 244040 - DNA, 54 bp, Artificial
  Synthetic oligonucleotide
ggaaattggaataaagcaacgaaaggagttgaggtaaaatgagtgagaaaacga

SEQ ID NO: 244041 - DNA, 54 bp, Artificial
  Synthetic oligonucleotide
gtaccgaccggtaggtatttcatattaggaactataataatctaccgaggagaa

SEQ ID NO: 244042 - DNA, 56 bp, Artificial
  Synthetic oligonucleotide
gattaaaattcgtgccaaatacgctaaacaatacggtaagaagtctgttcaagcac

SEQ ID NO: 244043 - DNA, 56 bp, Artificial
  Synthetic oligonucleotide
ggtgggttgtgattggataacataacatttcgtaaacgtattgaagaatatcgaaa

SEQ ID NO: 244044 - DNA, 56 bp, Artificial
  Synthetic oligonucleotide
tggatttgtgtcatattcatttcattgcgtttattctttataaattcacctatatt

SEQ ID NO: 244045 - DNA, 56 bp, Artificial
  Synthetic oligonucleotide
cattgacgaggttggtaatggcacaattacgagtgacaatttaaacaaactaatcg

SEQ ID NO: 244046 - DNA, 56 bp, Artificial
  Synthetic oligonucleotide
ctatgaccaacttgatgagtatcacaatcgacaaaagcaattacaatataacacca

SEQ ID NO: 244047 - DNA, 56 bp, Artificial
  Synthetic oligonucleotide
ctattcgtaacggatgttgcctttgatacataagacaccgtgttcatttagttaag

SEQ ID NO: 244048 - DNA, 56 bp, Artificial
  Synthetic oligonucleotide
gatgactttaagaaggagttgcatgagatatggcaacaactaaaataagctcaacg

SEQ ID NO: 244049 - DNA, 56 bp, Artificial
  Synthetic oligonucleotide
ctgctttcgtaggtgacggtttgccgctcgtattagcagacggtgccgcgagcaac

SEQ ID NO: 244050 - DNA, 56 bp, Artificial
  Synthetic oligonucleotide
atgcagtaagatttttagaatcgatataggcagctttagtaccttttggtaattgt

SEQ ID NO: 244051 - DNA, 56 bp, Artificial
  Synthetic oligonucleotide
cagtcattaaatggtacgaatcgattatatacgcaattatcgttgattggcacacg

SEQ ID NO: 244052 - DNA, 56 bp, Artificial
  Synthetic oligonucleotide
tatgacgattggtagtgactttatgagttttctacatgttgatacattacagaatg

SEQ ID NO: 244053 - DNA, 56 bp, Artificial
  Synthetic oligonucleotide
cgagtctcttcttgtcttgatactataggtaactattacaagctacgatagttacc

SEQ ID NO: 244054 - DNA, 60 bp, Artificial
  Synthetic oligonucleotide
ggtgtgtactcgctagagagttaagagagagcgcagcgtctctcttacaagctcccaaat

SEQ ID NO: 244055 - DNA, 56 bp, Artificial
  Synthetic oligonucleotide
catccacacttgctattattaacgaatattatattggtacaagacgacaacgtgcc

SEQ ID NO: 244056 - DNA, 56 bp, Artificial
  Synthetic oligonucleotide
gcgaatgttgctttatcttgcgtaatcttcaacaatgtaggaataaactcactacc

SEQ ID NO: 244057 - DNA, 55 bp, Artificial
  Synthetic oligonucleotide
cgaaaatcaagataacgaaacattaaaagatatgacgaaaagtgggaagcaacgc

SEQ ID NO: 244058 - DNA, 56 bp, Artificial
  Synthetic oligonucleotide
cggctataactttaactgaacttgtacctatatctatgcctaacactgcttcattc

SEQ ID NO: 244059 - DNA, 54 bp, Artificial
  Synthetic oligonucleotide
atctaaatagattttgaacgaccttttgacatattcgcctgtttaactttagtg

SEQ ID NO: 244060 - DNA, 53 bp, Artificial
  Synthetic oligonucleotide
gccgttaaaaccttctataggtggctaattaggtgctaaattagtgaaatagg

SEQ ID NO: 244061 - DNA, 56 bp, Artificial
  Synthetic oligonucleotide
gggcttgttcagccctagagcaacaagggatttcaatgcctaaaggagtgtttttg

SEQ ID NO: 244062 - DNA, 56 bp, Artificial
  Synthetic oligonucleotide
aagtagctgatgttttgccgctatacgatgaaaatgggcagttaaacccgacgcat

SEQ ID NO: 244063 - DNA, 56 bp, Artificial
  Synthetic oligonucleotide
gttgattaatagttgagatagtaagtgcctgtgcgatgggctgattatcgaagccc

SEQ ID NO: 244064 - DNA, 55 bp, Artificial
  Synthetic oligonucleotide
gaaggggcttggtctgtaattatcatttgaggtttgccaaattgtttaataagac

SEQ ID NO: 244065 - DNA, 55 bp, Artificial
  Synthetic oligonucleotide
ggttctactttgtacactttatctacctggtagacctaattgttattgctttaca

SEQ ID NO: 244066 - DNA, 56 bp, Artificial
  Synthetic oligonucleotide
gccgatcattatggttattgcggcgctcgttgcagtcgttccacctttattctttg

SEQ ID NO: 244067 - DNA, 56 bp, Artificial
  Synthetic oligonucleotide
gaagggcatgtagttattcaatcttttaagcctaacgaagtaacaccagaacaatg

SEQ ID NO: 244068 - DNA, 56 bp, Artificial
  Synthetic oligonucleotide
gggacgtaatatggaagatttaatcacattagtcaatgaacttaatgagagaggcg

SEQ ID NO: 244069 - DNA, 55 bp, Artificial
  Synthetic oligonucleotide
tctagtgcaataaatgcgtatcgcaatgcacaacaatctagtcagcgtgctgccc

SEQ ID NO: 244070 - DNA, 55 bp, Artificial
  Synthetic oligonucleotide
tctctagcgatcgattgtcgtgtcactttatctaatttaggtgccactaatcgag

SEQ ID NO: 244071 - DNA, 55 bp, Artificial
  Synthetic oligonucleotide
ttggccagcccaaaaggacactgacaggtcagtcaactgcactactttcccatca

SEQ ID NO: 244072 - DNA, 53 bp, Artificial
  Synthetic oligonucleotide
ggacggaacatggaggatttaatcacgttagttaatgaacttaacgaacgagg

SEQ ID NO: 244073 - DNA, 55 bp, Artificial
  Synthetic oligonucleotide
ggatgttgtacaggataatgtccagaaggtcgatagaaagcgtgagaaacagcgt

SEQ ID NO: 244074 - DNA, 55 bp, Artificial
  Synthetic oligonucleotide
ggggcccacaccccaacttgcacattattgtaagctgacttttcgtcagcttctg

SEQ ID NO: 244075 - DNA, 55 bp, Artificial
  Synthetic oligonucleotide
ggattaggacgtgcacctggaacagatatgatgaccgcaagtgcattaagacgag

SEQ ID NO: 244076 - DNA, 55 bp, Artificial
  Synthetic oligonucleotide
ggtttcaccttttgtataattgtaagcatattaaaggacatggagaacaaattgg

SEQ ID NO: 244077 - DNA, 55 bp, Artificial
  Synthetic oligonucleotide
ttcggatttaccgctaaacatactacctgtaatacattctatccaaccggaatgg

SEQ ID NO: 244078 - DNA, 55 bp, Artificial
  Synthetic oligonucleotide
tctaatcatgtccaagcactaataagcgcactcgtcataaacgactatgagtgag

SEQ ID NO: 244079 - DNA, 55 bp, Artificial
  Synthetic oligonucleotide
tctaacgctaacattgcttcttgcacgaattgatcttgcaccgtcgaagtagcgt

SEQ ID NO: 244080 - DNA, 52 bp, Artificial
  Synthetic oligonucleotide
ggattcgctcacacgaaaactaatttgtttcggctccttacggttgggttta

SEQ ID NO: 244081 - DNA, 54 bp, Artificial
  Synthetic oligonucleotide
tccttagtatgacttgaacaacccgctagtagtaacgtcgttgtagttaccacc

SEQ ID NO: 244082 - DNA, 55 bp, Artificial
  Synthetic oligonucleotide
tgggctgcgacatgtgttacctgtacaaacgaatagaatcttcatagttcacacc

SEQ ID NO: 244083 - DNA, 55 bp, Artificial
  Synthetic oligonucleotide
aggatttacgccatgcgtttcgataactgctgagtaaacattccattcttcgccg

SEQ ID NO: 244084 - DNA, 55 bp, Artificial
  Synthetic oligonucleotide
ttgatcttgatgcatcacgtcacctaatttaacgtgtgtttgattggctgcttgg

SEQ ID NO: 244085 - DNA, 55 bp, Artificial
  Synthetic oligonucleotide
tctcagagtcggaaagttgaccagacattacgaactggcacagatggtcataacc

SEQ ID NO: 244086 - DNA, 55 bp, Artificial
  Synthetic oligonucleotide
agtaggtctgtttgatgacgaaggtatgccctactaatgaatctgagtaatttgc

SEQ ID NO: 244087 - DNA, 51 bp, Artificial
  Synthetic oligonucleotide
gtaaaactaaaagaacggaacttgataagtgtttagattatttacgtgaag

SEQ ID NO: 244088 - DNA, 55 bp, Artificial
  Synthetic oligonucleotide
ggggcttcatatgcagagcattcgtgtgacagaccgcttaatgcaaatttgtcgc

SEQ ID NO: 244089 - DNA, 55 bp, Artificial
  Synthetic oligonucleotide
ggagcgctagaagctggttgacctttgtactcagctggagctactgaatcccatg

SEQ ID NO: 244090 - DNA, 55 bp, Artificial
  Synthetic oligonucleotide
aaagaccttaaagctctacgtgaagaagcccaatttactcgcatgggacctgctg

SEQ ID NO: 244091 - DNA, 55 bp, Artificial
  Synthetic oligonucleotide
ggagttgatgcgatgtgcgtaatcgattgaaagagttacgagcacgagatggctt

SEQ ID NO: 244092 - DNA, 55 bp, Artificial
  Synthetic oligonucleotide
tgggttgtcaacatgaccgccactataaccagatacgactgacctgatgcctgga

SEQ ID NO: 244093 - DNA, 55 bp, Artificial
  Synthetic oligonucleotide
ggatacgtagggttcggtccgcaagttgtacaagtagaatcaaacattcggctga

SEQ ID NO: 244094 - DNA, 55 bp, Artificial
  Synthetic oligonucleotide
agtaagtagtgtcagagcacgcgagaaagccatacatcatgctatagaacgcttt

SEQ ID NO: 244095 - DNA, 55 bp, Artificial
  Synthetic oligonucleotide
ttgcatctgcgagaccgattagagatatgcttcccgttataagcaaggattttca

SEQ ID NO: 244096 - DNA, 55 bp, Artificial
  Synthetic oligonucleotide
ggggccccgcagtcaactactgccaatataactttgtagtgccttgaacattgat

SEQ ID NO: 244097 - DNA, 55 bp, Artificial
  Synthetic oligonucleotide
ttgaacgtcctttagacacacgcgcaataaatacacctacgaatgggctccagct

SEQ ID NO: 244098 - DNA, 55 bp, Artificial
  Synthetic oligonucleotide
gtaaacaccgagcccgataactatgtcagtagttatcgggctctttttaggtgta

SEQ ID NO: 244099 - DNA, 55 bp, Artificial
  Synthetic oligonucleotide
ggagcaacaatgagtcgagatatgatgcctggattgtataattgggttagtcata

SEQ ID NO: 244100 - DNA, 55 bp, Artificial
  Synthetic oligonucleotide
agtaaaagcgtaacggcaaaagagaactcgcacgaaaacgccccatcaactgctc

SEQ ID NO: 244101 - DNA, 50 bp, Artificial
  Synthetic oligonucleotide
aaagtaacaagaatttcgtttgtaaacgcaccaaaccccgaactattggc

SEQ ID NO: 244102 - DNA, 54 bp, Artificial
  Synthetic oligonucleotide
ttctgaaaaccagtcattttggaaaacataattaccaccttctgggtttgcttg

SEQ ID NO: 244103 - DNA, 55 bp, Artificial
  Synthetic oligonucleotide
gggcgtgacttcgccaggtttaaacgattggataatgacatgcccttgattgcca

SEQ ID NO: 244104 - DNA, 55 bp, Artificial
  Synthetic oligonucleotide
gggcggggccccaacatagaagctgactttctgtcagcttacaataatgtgcaag

SEQ ID NO: 244105 - DNA, 55 bp, Artificial
  Synthetic oligonucleotide
aatcccaaaacttgtcgaatggtcggcttaatagctcacgctatgccgacattcg

SEQ ID NO: 244106 - DNA, 55 bp, Artificial
  Synthetic oligonucleotide
ggcggggccccaacatagagaaattggatcaccaattccaacagacaatgcaagt

SEQ ID NO: 244107 - DNA, 55 bp, Artificial
  Synthetic oligonucleotide
gggccccaccccaacttgcacattattgtaagctgacagaaagtcagcttctatg

SEQ ID NO: 244108 - DNA, 52 bp, Artificial
  Synthetic oligonucleotide
ggcggtttaccttgtttcggcttgcttaccgttttggccactttcggtgctg

SEQ ID NO: 244109 - DNA, 60 bp, Artificial
  Synthetic oligonucleotide
gtaaatgaccttccagtgtattcatcagacacactgttcataatcgcggtattcatataa

SEQ ID NO: 244110 - DNA, 55 bp, Artificial
  Synthetic oligonucleotide
aatcctaatacgagtgcgccgataataatcgttagccagcctttaatatgactga

SEQ ID NO: 244111 - DNA, 55 bp, Artificial
  Synthetic oligonucleotide
aggcacgttaaatacgggttctaacctgataacttcttatgttcagcaagacacc

SEQ ID NO: 244112 - DNA, 55 bp, Artificial
  Synthetic oligonucleotide
ttctctggagttctcttcatgccccttcgaatacaaagatccatccatttcgaaa

SEQ ID NO: 244113 - DNA, 55 bp, Artificial
  Synthetic oligonucleotide
gggaacatcgtctgctgaacgtctccctttaccgacttctaatagatatgccata

SEQ ID NO: 244114 - DNA, 55 bp, Artificial
  Synthetic oligonucleotide
gggcaattgtcatatcaaatacacgaacaatgcctgttcctaaaatccctttatg

SEQ ID NO: 244115 - DNA, 55 bp, Artificial
  Synthetic oligonucleotide
tcgccaaatgagattgcccggttaattacattagaatggctcgaccataagcaaa

SEQ ID NO: 244116 - DNA, 55 bp, Artificial
  Synthetic oligonucleotide
gggaagcaacgcccatggagagaaaagaaaattgataatgtaagttatgcagaca

SEQ ID NO: 244117 - DNA, 55 bp, Artificial
  Synthetic oligonucleotide
gggagcgtgctaaacatcatcgtaacaatcgaaaacaacacagaccgcgctaaac

SEQ ID NO: 244118 - DNA, 55 bp, Artificial
  Synthetic oligonucleotide
gggacattatactcttctgatatcgtgcgacccgcttttgcgaaatttagtcccc

SEQ ID NO: 244119 - DNA, 55 bp, Artificial
  Synthetic oligonucleotide
aagaggtattctcgcttccgggaaccccagtcgctctgccgattgaatggctgca

SEQ ID NO: 244120 - DNA, 57 bp, Artificial
  Synthetic oligonucleotide
gtaataaactcaaagaacaagatactaatacactccatttgtcttttgacgaactca

SEQ ID NO: 244121 - DNA, 55 bp, Artificial
  Synthetic oligonucleotide
tcgacgattcttaaatcgtttacgcttcgacgtcggctggtgtagtttgcctagc

SEQ ID NO: 244122 - DNA, 55 bp, Artificial
  Synthetic oligonucleotide
ggatttcgatggcttaaaagcactattaccagcgattactgagacatttgacggt

SEQ ID NO: 244123 - DNA, 55 bp, Artificial
  Synthetic oligonucleotide
ggcaaaaccgatgggaatcaagggcatgtgattatccaatcgtttaaacctggcg

SEQ ID NO: 244124 - DNA, 55 bp, Artificial
  Synthetic oligonucleotide
ggggcaaacgtaaatcagattgcgaaatggtttaatcaacataaagaacaagcag

SEQ ID NO: 244125 - DNA, 55 bp, Artificial
  Synthetic oligonucleotide
ggggagtagaacacgcatttatgccgagaaaatttattgatgttgagaagaaccc

SEQ ID NO: 244126 - DNA, 55 bp, Artificial
  Synthetic oligonucleotide
aatcaaagagagcgagaaagtagaacgaatgaagatattgacagagagcgaacgc

SEQ ID NO: 244127 - DNA, 55 bp, Artificial
  Synthetic oligonucleotide
tcgacaacggtgccttgtaacccttctgtcaatgtcagttgttcaactgtacgtt

SEQ ID NO: 244128 - DNA, 55 bp, Artificial
  Synthetic oligonucleotide
ggcaccaaatgttatagcagtagctagtacatcaattctcttgtctacgccctca

SEQ ID NO: 244129 - DNA, 55 bp, Artificial
  Synthetic oligonucleotide
aggtgtcacgatagagatgggttaaagcgtataacaggcacatgctatcaacacc

SEQ ID NO: 244130 - DNA, 55 bp, Artificial
  Synthetic oligonucleotide
ggcagctagcggtaatcgaaattggggactaaatttcgcaaaagcgggtcgcacg

SEQ ID NO: 244131 - DNA, 60 bp, Artificial
  Synthetic oligonucleotide
gatgtatcttaccccctaatgcgcgcgcctttaaatatgatgtgatgttcaagttggcac

SEQ ID NO: 244132 - DNA, 58 bp, Artificial
  Synthetic oligonucleotide
gtaccccatggcgataaaccaagcaccattgcccatctctgcacgacgattccgtttt

SEQ ID NO: 244133 - DNA, 55 bp, Artificial
  Synthetic oligonucleotide
ggcatgccatagatcaatcgcaagcagcgtcttatgaagaactgggtaatgattt

SEQ ID NO: 244134 - DNA, 55 bp, Artificial
  Synthetic oligonucleotide
ggccaacaattactgacggagaaataaatgatctaggcgccttgtgaggttcacc

SEQ ID NO: 244135 - DNA, 53 bp, Artificial
  Synthetic oligonucleotide
ggccgatttaagcccgtaatcaaaggtgggaccgttaccgctgcgaatagttg

SEQ ID NO: 244136 - DNA, 55 bp, Artificial
  Synthetic oligonucleotide
ggcctaaagccgatagcgctcagattgcaaagtacggccacggactgctgaaaac

SEQ ID NO: 244137 - DNA, 54 bp, Artificial
  Synthetic oligonucleotide
ggccttttacatcctacatctttcttgggctaggtttgttatcgattttaaaca

SEQ ID NO: 244138 - DNA, 55 bp, Artificial
  Synthetic oligonucleotide
tcgttattgtcgtaccgttgatgtctgttgtgtagcttttacgtgatcttcggtc

SEQ ID NO: 244139 - DNA, 55 bp, Artificial
  Synthetic oligonucleotide
aggcatagttttgtaattgttatgcctttaattctatgttattgtataaacaagc

SEQ ID NO: 244140 - DNA, 55 bp, Artificial
  Synthetic oligonucleotide
ttcgtatcccattgcatcccataattggaatggaccaagtttccaggtgaacccc

SEQ ID NO: 244141 - DNA, 55 bp, Artificial
  Synthetic oligonucleotide
aatcatcgattatgttaattactgtcagatagtagttgaataaacttcaggggat

SEQ ID NO: 244142 - DNA, 55 bp, Artificial
  Synthetic oligonucleotide
ggcgcaatcgctttaggtttaggttctcgaattactgcgccacacggcggtatta

SEQ ID NO: 244143 - DNA, 60 bp, Artificial
  Synthetic oligonucleotide
gtacccgaaagtgcgcgtactgaggcattgccagaaggaaagacggcattgagacacggc

SEQ ID NO: 244144 - DNA, 55 bp, Artificial
  Synthetic oligonucleotide
ttttacttggacgcttattaagtgatagtttcggcgctctgatgaatggcattca

SEQ ID NO: 244145 - DNA, 55 bp, Artificial
  Synthetic oligonucleotide
tgattgcccagcttccgtcgtccgttctgagctaaagttaagacatgtttaatag

SEQ ID NO: 244146 - DNA, 55 bp, Artificial
  Synthetic oligonucleotide
gcgcctaattctttctccgttggtgtgagaatagaaccataattgtacgcatcag

SEQ ID NO: 244147 - DNA, 55 bp, Artificial
  Synthetic oligonucleotide
gcgcctctgcgaaccgctttaccatggtgaatcatgtcatctagcgtcacttgtg

SEQ ID NO: 244148 - DNA, 55 bp, Artificial
  Synthetic oligonucleotide
gcgcgtttctagtgccattccatgatctaaacagcgtattactacctttagtagg

SEQ ID NO: 244149 - DNA, 53 bp, Artificial
  Synthetic oligonucleotide
aagtctgttagttactttcttaacgcgttggttgggcttgattgggattaatc

SEQ ID NO: 244150 - DNA, 55 bp, Artificial
  Synthetic oligonucleotide
aagtgtactaaactggaggcaataatatgtggaacatgactgacaatccccgtta

SEQ ID NO: 244151 - DNA, 55 bp, Artificial
  Synthetic oligonucleotide
gcgctcaatatgcgccgtcaaaacatgcctaaatacaatatctttaatgagtagt

SEQ ID NO: 244152 - DNA, 55 bp, Artificial
  Synthetic oligonucleotide
tttggttacgcatatctgtaatcggtcgcgtaatcgttcgcgcaataaagaaacc

SEQ ID NO: 244153 - DNA, 55 bp, Artificial
  Synthetic oligonucleotide
gcgcttatatgcgtttaaaatgccacgtataagaagccacaataagatatagggg

SEQ ID NO: 244154 - DNA, 60 bp, Artificial
  Synthetic oligonucleotide
gccctacgcgatgtgagagcgttcaacgacgaggtttgtcgagcacaggggttgagcgtg

SEQ ID NO: 244155 - DNA, 55 bp, Artificial
  Synthetic oligonucleotide
gcgcttgtagcatctcgaacaagtgcgacacgagttccaggtactttatctgcac

SEQ ID NO: 244156 - DNA, 55 bp, Artificial
  Synthetic oligonucleotide
gcggattctaaggctaaaccgacgaaaccagaaggctgtaaagcgcaacttatag

SEQ ID NO: 244157 - DNA, 51 bp, Artificial
  Synthetic oligonucleotide
tttggtcgtaacataaaattttggcaccgtaacggtttcggtcaaattcaa

SEQ ID NO: 244158 - DNA, 55 bp, Artificial
  Synthetic oligonucleotide
gcgggatgactggacaattctcatcagcatcactacaaagtgtaacaactaggtc

SEQ ID NO: 244159 - DNA, 55 bp, Artificial
  Synthetic oligonucleotide
gcggttgacttgtactactacattaaaggaggtcgcgtagactacggtgcagctc

SEQ ID NO: 244160 - DNA, 55 bp, Artificial
  Synthetic oligonucleotide
gcggttgttatggtgttatagaccggtttggcgttgatgccatgttactttgatg

SEQ ID NO: 244161 - DNA, 52 bp, Artificial
  Synthetic oligonucleotide
gcgtaccaaagcggcaaaactctttccctacacaacttttaactgaacgtgt

SEQ ID NO: 244162 - DNA, 53 bp, Artificial
  Synthetic oligonucleotide
tttggtaggggggtggtcgtagtttgcacacctaaccggctattagatagggc

SEQ ID NO: 244163 - DNA, 55 bp, Artificial
  Synthetic oligonucleotide
gcgtgtctttgttgaacatgtgctgaacgaccaacagaaacttgacgatactaaa

SEQ ID NO: 244164 - DNA, 55 bp, Artificial
  Synthetic oligonucleotide
tttgccacgaggggcacttgttagaggtgaagacgttagttctgacctttacatt

SEQ ID NO: 244165 - DNA, 53 bp, Artificial
  Synthetic oligonucleotide
gccgaataaaaataattgcttttcacaaacaaaaatttgagcaaaaccagtgt

SEQ ID NO: 244166 - DNA, 54 bp, Artificial
  Synthetic oligonucleotide
aagttgttcgaataaagtcgctacttgggtttcggtaatgtgcggtccagccgc

SEQ ID NO: 244167 - DNA, 55 bp, Artificial
  Synthetic oligonucleotide
tgcggtagcgcatgctgaacaaatcattagtggtacaccaaatgcaaacgtggat

SEQ ID NO: 244168 - DNA, 55 bp, Artificial
  Synthetic oligonucleotide
gccggttagacgcacatttcgtgtgcacttctaatccgaaattgagctttgacgc

SEQ ID NO: 244169 - DNA, 55 bp, Artificial
  Synthetic oligonucleotide
gccgtagagcaaagtgcgactcattggacacgtgagacctatgagttatggagac

SEQ ID NO: 244170 - DNA, 55 bp, Artificial
  Synthetic oligonucleotide
tgcgagtctattcgttttatacaccatgacacaatcgatatgaccttcgttcgca

SEQ ID NO: 244171 - DNA, 55 bp, Artificial
  Synthetic oligonucleotide
agttggcacttgaagctgttccagcgatcacatcatattcatctgcgttcactcg

SEQ ID NO: 244172 - DNA, 55 bp, Artificial
  Synthetic oligonucleotide
tgccgagaaaacttattggttggaatgggctatgtgttagctaacttgttagcga

SEQ ID NO: 244173 - DNA, 55 bp, Artificial
  Synthetic oligonucleotide
gcctctcacagcgtctgtcaatcaagttagatacacaaaacaaagtccatcacca

SEQ ID NO: 244174 - DNA, 55 bp, Artificial
  Synthetic oligonucleotide
tgcgtttattaagcgccttattaaacaattcggtaaacctcaaatgataattaca

SEQ ID NO: 244175 - DNA, 55 bp, Artificial
  Synthetic oligonucleotide
ttttgtacctacaccccaagaatctacacatgcaccttgggatttcaagctcata

SEQ ID NO: 244176 - DNA, 60 bp, Artificial
  Synthetic oligonucleotide
gccgagtgccatgaaaattgctcaagtaaagctcctccgataattggtccaaaaacagca

SEQ ID NO: 244177 - DNA, 55 bp, Artificial
  Synthetic oligonucleotide
tgccaccttcggtgtcactcagcatagctgaggtttccttaccgctcgcttcgct

SEQ ID NO: 244178 - DNA, 55 bp, Artificial
  Synthetic oligonucleotide
tgcatctcacgtatctgtccagacgcatgcgttctcgtaattgaaggaaccagac

SEQ ID NO: 244179 - DNA, 55 bp, Artificial
  Synthetic oligonucleotide
gcgaaaagctagagaacttgaagaacagaatagaagagctagagaagagcgagca

SEQ ID NO: 244180 - DNA, 55 bp, Artificial
  Synthetic oligonucleotide
gcgaacatagccgactttattttctacgctgcctttctcgttaccactgcgtgga

SEQ ID NO: 244181 - DNA, 55 bp, Artificial
  Synthetic oligonucleotide
gcgaaggttatggcccaaataaatacgcctttcaaaatgcttacgatgaaggcgt

SEQ ID NO: 244182 - DNA, 55 bp, Artificial
  Synthetic oligonucleotide
gcgaatcaccatgtggtgtacgttcacctgataggtatggggcaaataacaaccc

SEQ ID NO: 244183 - DNA, 55 bp, Artificial
  Synthetic oligonucleotide
gcgacaacccaaaatggcgaatgtagcccaacccaaacaatatatcagtcgtgag

SEQ ID NO: 244184 - DNA, 55 bp, Artificial
  Synthetic oligonucleotide
gcgagataaagagcgagagaaagagtgggctcgatttaatagaagtacgcaagca

SEQ ID NO: 244185 - DNA, 55 bp, Artificial
  Synthetic oligonucleotide
gcgagtgtcggcgttaaaccaaacgaactgaagcaatttgactataaaatggtgg

SEQ ID NO: 244186 - DNA, 55 bp, Artificial
  Synthetic oligonucleotide
tgcacctgtgatttcaggatgcattgttgcgattttcacgttttggctaaacaat

SEQ ID NO: 244187 - DNA, 56 bp, Artificial
  Synthetic oligonucleotide
gccgtatcgtcgatggaattcaaaaaagttatgggctataaatctacatcactttt

SEQ ID NO: 244188 - DNA, 55 bp, Artificial
  Synthetic oligonucleotide
gcgatgcctcacctctcgaaacaggtgtgttacatcgcttttattatggttcttc

SEQ ID NO: 244189 - DNA, 55 bp, Artificial
  Synthetic oligonucleotide
gcgcattaagacgtgatcaacatgatggcgtatataaatttcccgaagaagtgtc

SEQ ID NO: 244190 - DNA, 55 bp, Artificial
  Synthetic oligonucleotide
ggaacgtgggcaatcaagacaagttacaaatgcaaagcatgagcaaataagtcag

SEQ ID NO: 244191 - DNA, 55 bp, Artificial
  Synthetic oligonucleotide
ggaagaaggaatattattctgacaagagataaggggttcagctttaatggttgtg

SEQ ID NO: 244192 - DNA, 55 bp, Artificial
  Synthetic oligonucleotide
ttgttcgtgtcggatgacaagtgcatcacagccaatgctttgtaatgttcggcat

SEQ ID NO: 244193 - DNA, 55 bp, Artificial
  Synthetic oligonucleotide
aatactcgtgcataattcaacagctgacctcccaataactacatggtgttatcgg

SEQ ID NO: 244194 - DNA, 55 bp, Artificial
  Synthetic oligonucleotide
tggctgttagtcctgtaaaccaagacatcgtttcaatgggcgctaacgctgctaa

SEQ ID NO: 244195 - DNA, 55 bp, Artificial
  Synthetic oligonucleotide
ttgtgtatctccatgcggaacaatcgactcattattacggataatacgcacgaag

SEQ ID NO: 244196 - DNA, 50 bp, Artificial
  Synthetic oligonucleotide
aaacggcccgtggtaagtcaaaatttctggtaaggtatctaaacctaagc

SEQ ID NO: 244197 - DNA, 55 bp, Artificial
  Synthetic oligonucleotide
aatagcttattagccaatcttaaagcgcagtacttatatagtgagtgtactgcgc

SEQ ID NO: 244198 - DNA, 57 bp, Artificial
  Synthetic oligonucleotide
gcctttactacgcatcttactattctcaaattgcatacgtttcacttcgttatcttt

SEQ ID NO: 244199 - DNA, 55 bp, Artificial
  Synthetic oligonucleotide
ggaaggggcgccacgttcaacatcactatcttcgagaatatttccagagatatag

SEQ ID NO: 244200 - DNA, 55 bp, Artificial
  Synthetic oligonucleotide
agtccaccatcgccttgtatcgtttcaataacaatacatgctacttcgtcagcag

SEQ ID NO: 244201 - DNA, 55 bp, Artificial
  Synthetic oligonucleotide
ggaatgcagctacaaagcccatacccataatgctgctaaataagccataacttga

SEQ ID NO: 244202 - DNA, 55 bp, Artificial
  Synthetic oligonucleotide
ggaattttgaacatccgaaagaacgggccgaaatacttacagcggcatttgttga

SEQ ID NO: 244203 - DNA, 55 bp, Artificial
  Synthetic oligonucleotide
aaacgtgtggtaatagagaacagttggtttcacctattacacctatgggaggcag

SEQ ID NO: 244204 - DNA, 55 bp, Artificial
  Synthetic oligonucleotide
ggacagtacctaagttagacgattctcgtgtcttacttgcacaaggtgttatttc

SEQ ID NO: 244205 - DNA, 55 bp, Artificial
  Synthetic oligonucleotide
ggacagtactggaactcaatagagtcagtcgtgatgtaacgtcatccaatacgtc

SEQ ID NO: 244206 - DNA, 55 bp, Artificial
  Synthetic oligonucleotide
ggacagtattccaagacgttttccaataaccgaaatggtgattcgaacaggctta

SEQ ID NO: 244207 - DNA, 55 bp, Artificial
  Synthetic oligonucleotide
ggacatgcaactgggtttatagcgacatatgattcggatcttgacggtccagcta

SEQ ID NO: 244208 - DNA, 54 bp, Artificial
  Synthetic oligonucleotide
ttggcgaggtagcagaggtactaaaccagttagaagggcgaaaggcaaacacgg

SEQ ID NO: 244209 - DNA, 57 bp, Artificial
  Synthetic oligonucleotide
gcgacaatcgattgccaaagatttaagtatgttgggttcaaacgcaaaccaaatagc

SEQ ID NO: 244210 - DNA, 52 bp, Artificial
  Synthetic oligonucleotide
ggaccaaacggtgtttccagtatacctaccccttcatataagtaggaaatgg

SEQ ID NO: 244211 - DNA, 55 bp, Artificial
  Synthetic oligonucleotide
agtcactaggaattgcttctagtactaacgcaactgcgcctgcttcctgtaccgc

SEQ ID NO: 244212 - DNA, 55 bp, Artificial
  Synthetic oligonucleotide
gctaattacgagacaacaacctattgccaaagatttacgtatgatgatggcagca

SEQ ID NO: 244213 - DNA, 55 bp, Artificial
  Synthetic oligonucleotide
tgagtatctctaccctgtgatttcccatacttcatcatttcttgaggtgttaaac

SEQ ID NO: 244214 - DNA, 55 bp, Artificial
  Synthetic oligonucleotide
gctacgtctaccgtttcagccaatttcaatgtgaataatccgcccaatgataccc

SEQ ID NO: 244215 - DNA, 55 bp, Artificial
  Synthetic oligonucleotide
gctcaaagagaagcagctgttcgcagtttaatcaaaaccacataaagcttttaac

SEQ ID NO: 244216 - DNA, 55 bp, Artificial
  Synthetic oligonucleotide
gctcacgctatgccgacattcgtctgcaagtttagttaagggttcttctcaacgc

SEQ ID NO: 244217 - DNA, 55 bp, Artificial
  Synthetic oligonucleotide
gctgaaagtcaaatcagccgtataccgcttatagtattgactagcgatcgtccac

SEQ ID NO: 244218 - DNA, 55 bp, Artificial
  Synthetic oligonucleotide
tgagccacatccgggatagcatccgccgatctattcgatcactatcctcctcgtc

SEQ ID NO: 244219 - DNA, 55 bp, Artificial
  Synthetic oligonucleotide
gcttacaagtgctaataattcacctgtttgagggtggatagcagtacctgagcca

SEQ ID NO: 244220 - DNA, 57 bp, Artificial
  Synthetic oligonucleotide
gcgatcaaaccaaatcaaaaaggcgataaagatattcaagcagctattaaagaaacc

SEQ ID NO: 244221 - DNA, 55 bp, Artificial
  Synthetic oligonucleotide
gcttacgcaacagtccataatgatgagcaaacccctcacatgcatttaggtgttg

SEQ ID NO: 244222 - DNA, 55 bp, Artificial
  Synthetic oligonucleotide
gcttagctttattgtcaaaaggcgcatagtactcggagaatgtacgcacataact

SEQ ID NO: 244223 - DNA, 55 bp, Artificial
  Synthetic oligonucleotide
tgctttcttaacgcgtatttgtcgcaggctccgcccaaatgcttaacgcactccg

SEQ ID NO: 244224 - DNA, 55 bp, Artificial
  Synthetic oligonucleotide
gcttccgatcgctggcgatcacgttatcgaccatatcgtcaaatcgcttttcatg

SEQ ID NO: 244225 - DNA, 55 bp, Artificial
  Synthetic oligonucleotide
gcttgcatcaacctttctactgactgcaacactgtccctcgttatcgctagtgcg

SEQ ID NO: 244226 - DNA, 55 bp, Artificial
  Synthetic oligonucleotide
gcttggtgtcatgccatgttactttgatgtgctggtactacgatgcgacttgatg

SEQ ID NO: 244227 - DNA, 55 bp, Artificial
  Synthetic oligonucleotide
agtgaaattttagccattacaggagacccttcaaaagtaggtcatctaccaggcg

SEQ ID NO: 244228 - DNA, 55 bp, Artificial
  Synthetic oligonucleotide
tttctaaccaaacatgtccaacaactgcttgtacacgcgcttgctaggaagggag

SEQ ID NO: 244229 - DNA, 55 bp, Artificial
  Synthetic oligonucleotide
tgaatcaagcgagttagaagacgctttccatcgtgcgaaatcagaagccgaaaag

SEQ ID NO: 244230 - DNA, 55 bp, Artificial
  Synthetic oligonucleotide
tggaacttaatggcatgtgtcataggacggtcagatacaccactttgtcgaggta

SEQ ID NO: 244231 - DNA, 53 bp, Artificial
  Synthetic oligonucleotide
gcgccagtagtggcaatagagttccgttggtcccccgaaaaaacagggacatt

SEQ ID NO: 244232 - DNA, 55 bp, Artificial
  Synthetic oligonucleotide
aagccaagaagattttgatgcctttcagaagcaaatagaagcagcacaattggta

SEQ ID NO: 244233 - DNA, 55 bp, Artificial
  Synthetic oligonucleotide
aataacggtaatcctaaaactgaacgaaagcctgtaattactggatatagagcgc

SEQ ID NO: 244234 - DNA, 55 bp, Artificial
  Synthetic oligonucleotide
ggaacattacaggaacagacgaccgaaacggtgtaatgaaagagactaacgaagc

SEQ ID NO: 244235 - DNA, 55 bp, Artificial
  Synthetic oligonucleotide
ggaaccgatagtagggtttactccttcttgtgcatagtgtgcgaattcgtaaatt

SEQ ID NO: 244236 - DNA, 55 bp, Artificial
  Synthetic oligonucleotide
gtgcttgcgaggcgctgacggagtccatgcgctagtggaacgtttagcaagcaca

SEQ ID NO: 244237 - DNA, 55 bp, Artificial
  Synthetic oligonucleotide
accatgatgcagttggacaacctattcatgctaacaaccaagcaatgataagtcg

SEQ ID NO: 244238 - DNA, 55 bp, Artificial
  Synthetic oligonucleotide
taggtgtcgccgtgtatgcatgtgaaatgggctcggcagtcgtccagaaaacgag

SEQ ID NO: 244239 - DNA, 55 bp, Artificial
  Synthetic oligonucleotide
gtgggaaatactagatagaattctctttcgcgctgtttgagactttattgactgg

SEQ ID NO: 244240 - DNA, 55 bp, Artificial
  Synthetic oligonucleotide
ttactggacgagacataataggggacgcccacgtgaaattatgtgcttgcacacg

SEQ ID NO: 244241 - DNA, 55 bp, Artificial
  Synthetic oligonucleotide
gtggtagaacgctagacgagtacaacagtctagtagaagattatcagaacgctac

SEQ ID NO: 244242 - DNA, 60 bp, Artificial
  Synthetic oligonucleotide
gattaaagacaatccggaacattcttacaatttgattgtgagtgataagcattgcatgta

SEQ ID NO: 244243 - DNA, 54 bp, Artificial
  Synthetic oligonucleotide
gcgctaaagcgcaggcgaaccgaaacgaagtgacctcaggttgttagggacttt

SEQ ID NO: 244244 - DNA, 55 bp, Artificial
  Synthetic oligonucleotide
gtggtgatagatcaaccgaaacaaacgacagtacattagtacaacagttgttgca

SEQ ID NO: 244245 - DNA, 55 bp, Artificial
  Synthetic oligonucleotide
ttacgcgccgctgcagttggacaagaaggcgtagataaaaggattgatgtcttgt

SEQ ID NO: 244246 - DNA, 55 bp, Artificial
  Synthetic oligonucleotide
tagcgcgttcaccgtatccgagccaagcgatacgtgatggtagtccctggaatgc

SEQ ID NO: 244247 - DNA, 55 bp, Artificial
  Synthetic oligonucleotide
gtgtcactcgcttaaacgaaacatttatgagtagcactgactgtagtgaccctag

SEQ ID NO: 244248 - DNA, 55 bp, Artificial
  Synthetic oligonucleotide
tagccgtttcaacttcactcgctaaaatttcatctcgcaaccatctcaagacgac

SEQ ID NO: 244249 - DNA, 55 bp, Artificial
  Synthetic oligonucleotide
tagattaacagccaatgccgaaagtaaggaacgatgtcaactgcttattaagcct

SEQ ID NO: 244250 - DNA, 55 bp, Artificial
  Synthetic oligonucleotide
acttaattcgtcgacatatgaatacgtgtttaatacgccgcttacagacgcacgt

SEQ ID NO: 244251 - DNA, 55 bp, Artificial
  Synthetic oligonucleotide
tagatgtagtgcgttgcggttgttgacgtaatgattgcgtttgttctctgaacgt

SEQ ID NO: 244252 - DNA, 55 bp, Artificial
  Synthetic oligonucleotide
tagaatatgctagtttaattggctgtataaagcgtagtcaaacacttgctggggc

SEQ ID NO: 244253 - DNA, 55 bp, Artificial
  Synthetic oligonucleotide
gttaaatcgaccaccaccgaacacattgcgttgtttagatagttgaagtagtctt

SEQ ID NO: 244254 - DNA, 60 bp, Artificial
  Synthetic oligonucleotide
gcggcacctagcattccaccagcgataggtccaagaaccggaacaattgcatacgcccaa

SEQ ID NO: 244255 - DNA, 55 bp, Artificial
  Synthetic oligonucleotide
gttaaatgggcgccgttcgctacgctacccgaacaattcgaaactatccatcaat

SEQ ID NO: 244256 - DNA, 55 bp, Artificial
  Synthetic oligonucleotide
accttggtatacgacatctactttaaaattcggatgcacaagtgctaacttaggg

SEQ ID NO: 244257 - DNA, 55 bp, Artificial
  Synthetic oligonucleotide
gttaacgcgattcaaccctagtaggatatgctaaacactgccgtttgaagtctgt

SEQ ID NO: 244258 - DNA, 52 bp, Artificial
  Synthetic oligonucleotide
acgaaatgttagaacaaacgtccaatcgttttcaaaccgtctttgcattagg

SEQ ID NO: 244259 - DNA, 55 bp, Artificial
  Synthetic oligonucleotide
ttaaactgtttcgacgaatgtcgggatagtgtgagctatgaaaccgacgagtcga

SEQ ID NO: 244260 - DNA, 55 bp, Artificial
  Synthetic oligonucleotide
tatatcacgtatggccgattttgttttaggggctgtcacttcaccgtgatagtcc

SEQ ID NO: 244261 - DNA, 55 bp, Artificial
  Synthetic oligonucleotide
tgtgtgaagttatccagacgcttcaccttaatcgaccacctttattgcgagtacc

SEQ ID NO: 244262 - DNA, 55 bp, Artificial
  Synthetic oligonucleotide
gtcgtttaatggctccatctaattttcgtacgttaggatcaaacgcaccagcgat

SEQ ID NO: 244263 - DNA, 55 bp, Artificial
  Synthetic oligonucleotide
tgttacgagtacgcctagtccgttcatacgtgcgtaaccatcagcggtataagca

SEQ ID NO: 244264 - DNA, 55 bp, Artificial
  Synthetic oligonucleotide
ttaggtcaagtcgatggcgcatactgtgttgcgagtgaaacatgtgcctttacag

SEQ ID NO: 244265 - DNA, 58 bp, Artificial
  Synthetic oligonucleotide
gcgtctgaaggctttatgacatttgtttggtatattgcttatggtttaccttatgtat

SEQ ID NO: 244266 - DNA, 55 bp, Artificial
  Synthetic oligonucleotide
gtgaagagtgaccgccttgcataacccagtatgttccgattacgaaacaaagtgt

SEQ ID NO: 244267 - DNA, 55 bp, Artificial
  Synthetic oligonucleotide
gtgacgtggactatgccaaatctagttttaaagccgctcgtgaattgtatggcaa

SEQ ID NO: 244268 - DNA, 55 bp, Artificial
  Synthetic oligonucleotide
gtgagaatgacagagacatcctaagaaatgttctaacacagacatctaatgcagg

SEQ ID NO: 244269 - DNA, 55 bp, Artificial
  Synthetic oligonucleotide
ttaggaaggaagaatcttgaatcaatcggaagagcattacctggaagaaggaata

SEQ ID NO: 244270 - DNA, 55 bp, Artificial
  Synthetic oligonucleotide
agaagtcgctcactccctcgccaaagtttgtgatagcgacttaccttaaagaaaa

SEQ ID NO: 244271 - DNA, 55 bp, Artificial
  Synthetic oligonucleotide
gtgcaagttggggtgtgggccccaacacagaagctgacgaaaagtcagcttacga

SEQ ID NO: 244272 - DNA, 55 bp, Artificial
  Synthetic oligonucleotide
ttagacagaatagagagcgtagcgaacgagaagaacgagaacgagagcgaaaagc

SEQ ID NO: 244273 - DNA, 55 bp, Artificial
  Synthetic oligonucleotide
aactaacggggcagaagagttcaaataatgacagctttgttagggatgatggtta

SEQ ID NO: 244274 - DNA, 54 bp, Artificial
  Synthetic oligonucleotide
gtgccaacgggtgaaaagtccatgtttggtttaggaaaagaaataatgaagaca

SEQ ID NO: 244275 - DNA, 55 bp, Artificial
  Synthetic oligonucleotide
gtgccttcgataggatctacggaaccaaagtgtttccaacgaccttctcgtgtcg

SEQ ID NO: 244276 - DNA, 60 bp, Artificial
  Synthetic oligonucleotide
gctgtagtgtcacacttttgtgacacaatatattgcgtttgtcacagttttgtgacacta

SEQ ID NO: 244277 - DNA, 55 bp, Artificial
  Synthetic oligonucleotide
tgttgcgcaatccataacgatgcaagcgtacatatcacatgaatgctcgaaagcc

SEQ ID NO: 244278 - DNA, 55 bp, Artificial
  Synthetic oligonucleotide
gtgcgacgatagaaagcgacccatacgctttagtacctacactagcgttcaggcg

SEQ ID NO: 244279 - DNA, 55 bp, Artificial
  Synthetic oligonucleotide
gtgcgataggtaatggtttagtcgcaacacctggacttacgattgcaattttcag

SEQ ID NO: 244280 - DNA, 55 bp, Artificial
  Synthetic oligonucleotide
gtgcgtcacgccattcgagcccctctaaaatagacggacccttacaaccacgtgt

SEQ ID NO: 244281 - DNA, 55 bp, Artificial
  Synthetic oligonucleotide
tatacagccgtagctatcccacgtacaatggaagatggctctcaagagtggtttg

SEQ ID NO: 244282 - DNA, 55 bp, Artificial
  Synthetic oligonucleotide
gtgcgtccaggtaccgcctcaatttcacccttcgaccaatctttcactacgccgt

SEQ ID NO: 244283 - DNA, 55 bp, Artificial
  Synthetic oligonucleotide
accatgatatctattggaccatcaccggtaattcggtgaacgattatttcagggg

SEQ ID NO: 244284 - DNA, 55 bp, Artificial
  Synthetic oligonucleotide
gttgttgcgttaccttccgcatctgttgttgtcacggtaattgggtagcttccca

SEQ ID NO: 244285 - DNA, 55 bp, Artificial
  Synthetic oligonucleotide
gttttgagttgaagcgtggtgaacgtggctctgaccgtaaacatattgagacagc

SEQ ID NO: 244286 - DNA, 55 bp, Artificial
  Synthetic oligonucleotide
actacatcccacctttgtacttcaggcatcagttaccaaatatccccgcaatatc

SEQ ID NO: 244287 - DNA, 56 bp, Artificial
  Synthetic oligonucleotide
gcttcatggtatttaccaaaatggttagaccgcattttacctaaaattgatgttga

SEQ ID NO: 244288 - DNA, 55 bp, Artificial
  Synthetic oligonucleotide
ttaacatacaaatatcgtcgttttgttacacccgtcacgatgcgtgtaaaagcgt

SEQ ID NO: 244289 - DNA, 55 bp, Artificial
  Synthetic oligonucleotide
aacgacgacatagtcaatacaccaaaagagcccgataactattcacagtagttat

SEQ ID NO: 244290 - DNA, 55 bp, Artificial
  Synthetic oligonucleotide
taaatgatatgcgcagtggcactacctaatacagcaataccgccgcccttttccc

SEQ ID NO: 244291 - DNA, 55 bp, Artificial
  Synthetic oligonucleotide
taacaccgtccgttaatgttcctccaatgaatgcgtcaagttgatcagataatgg

SEQ ID NO: 244292 - DNA, 55 bp, Artificial
  Synthetic oligonucleotide
taacagcgaaaatcgacatacctttgtaatcgaatggatgacgatggctaggttg

SEQ ID NO: 244293 - DNA, 55 bp, Artificial
  Synthetic oligonucleotide
tacgacaacatcgaggttcgaagactcccttaagacagacctgtataattacgcg

SEQ ID NO: 244294 - DNA, 55 bp, Artificial
  Synthetic oligonucleotide
tacccatattcttcatgcttaagttccatacgtgaaggcatccaatcaacttcta

SEQ ID NO: 244295 - DNA, 55 bp, Artificial
  Synthetic oligonucleotide
taccactatgctatcgccggcagtagagctttcgaccatagcagtatctaagcct

SEQ ID NO: 244296 - DNA, 55 bp, Artificial
  Synthetic oligonucleotide
acggtaacgttcgatttggttgaatgcttgagagattgcgataccgcttcgcttc

SEQ ID NO: 244297 - DNA, 55 bp, Artificial
  Synthetic oligonucleotide
acgggtgaatcatggcattctactaacaaatgtgctaatgaactaggtgttactg

SEQ ID NO: 244298 - DNA, 60 bp, Artificial
  Synthetic oligonucleotide
gctttattaatggttttattgatgaccacgaaagtgcatggcgatatttgatgttgatac

SEQ ID NO: 244299 - DNA, 55 bp, Artificial
  Synthetic oligonucleotide
taacgtagccattgtttcacccagagtagatgtagtagtcgaaatcagtatacgg

SEQ ID NO: 244300 - DNA, 55 bp, Artificial
  Synthetic oligonucleotide
taagcgttaccagtccttgtttaggcgtccatatacatttaaagtagtcgagtag

SEQ ID NO: 244301 - DNA, 55 bp, Artificial
  Synthetic oligonucleotide
taagtagtctcaacatattcgctatatacggtcttgatttgcctaaccgtgccgc

SEQ ID NO: 244302 - DNA, 55 bp, Artificial
  Synthetic oligonucleotide
taagtatttagctagtgcgttggtatgtgaacctacttgtgcacttcctactacg

SEQ ID NO: 244303 - DNA, 55 bp, Artificial
  Synthetic oligonucleotide
taagtttaaagatagtgctgcccattataccaccactgaattgtctgaggtattc

SEQ ID NO: 244304 - DNA, 55 bp, Artificial
  Synthetic oligonucleotide
tacagagcacaaacaggtggaaacttcgtaaagatgtacatggaactgtttggac

SEQ ID NO: 244305 - DNA, 55 bp, Artificial
  Synthetic oligonucleotide
taatggctatgacgagtggggcaataggtgtggcctttgctgccgtttcgccaat

SEQ ID NO: 244306 - DNA, 55 bp, Artificial
  Synthetic oligonucleotide
ttaacgataatcctaatgcatcttttcttgctttacgccacgcacataccggaca

SEQ ID NO: 244307 - DNA, 55 bp, Artificial
  Synthetic oligonucleotide
acgcagctttcgcctgcaaacgttggactcgcggagtcggcgttcctaccgctca

SEQ ID NO: 244308 - DNA, 55 bp, Artificial
  Synthetic oligonucleotide
gttaatcaaacgtacaggatatggctacgcaagctttagaaatttcagagccaga

SEQ ID NO: 244309 - DNA, 54 bp, Artificial
  Synthetic oligonucleotide
gctttcttcctcctgtgaggacgattctggcgcttttaactccggttcttccgg

SEQ ID NO: 244310 - DNA, 54 bp, Artificial
  Synthetic oligonucleotide
aaccatgaccttcgaaataagtttcgtacgtgctgcattggtattacctaaacg

SEQ ID NO: 244311 - DNA, 55 bp, Artificial
  Synthetic oligonucleotide
ttaaataccgttccttctgcgacatttgcacgctgcgcaatttctttagtactcg

SEQ ID NO: 244312 - DNA, 55 bp, Artificial
  Synthetic oligonucleotide
tactgtttgcgacagaaaactatggagggttactgtggttgttgagctttaacac

SEQ ID NO: 244313 - DNA, 55 bp, Artificial
  Synthetic oligonucleotide
gttactacaattagagacgatgtggacgtctaagacaatgacgacaattaagacg

SEQ ID NO: 244314 - DNA, 55 bp, Artificial
  Synthetic oligonucleotide
tactggtgcaacacctaagtttaagcacgttagaatacctactgcgataccgctt

SEQ ID NO: 244315 - DNA, 55 bp, Artificial
  Synthetic oligonucleotide
acgatatacttcataacaaacagaacgacaatcattagatgtggcacctcctttc

SEQ ID NO: 244316 - DNA, 54 bp, Artificial
  Synthetic oligonucleotide
ttacacgcgttcttttagaacgcataagtgcgcccttacgggaattaactagat

SEQ ID NO: 244317 - DNA, 54 bp, Artificial
  Synthetic oligonucleotide
gttaggccgtttagtgggaagactactgaaattttcctatgaagatacggtcag

SEQ ID NO: 244318 - DNA, 55 bp, Artificial
  Synthetic oligonucleotide
actctcaccgctacgcctcaaacatgtgaggctgattccgcaatgagagtatagc

SEQ ID NO: 244319 - DNA, 55 bp, Artificial
  Synthetic oligonucleotide
actctcaaatctcgttaatggctacaagtggctcatttagtgaccgtatgtctcg

SEQ ID NO: 244320 - DNA, 58 bp, Artificial
  Synthetic oligonucleotide
gcttttataatatgagataatgccgactgtactttttacagtcggttttctaatgtca

SEQ ID NO: 244321 - DNA, 55 bp, Artificial
  Synthetic oligonucleotide
acgatctttccatgacacaacgcgtaatgcacgatataataggttgagatatgag

SEQ ID NO: 244322 - DNA, 55 bp, Artificial
  Synthetic oligonucleotide
gttattccattaacgggcgcgattgctgaataaaagatacgagagacctctcttg

SEQ ID NO: 244323 - DNA, 55 bp, Artificial
  Synthetic oligonucleotide
gttcaaccatgaattccaatacaatcaagtcagtatcgctgaatcaacttttggc

SEQ ID NO: 244324 - DNA, 55 bp, Artificial
  Synthetic oligonucleotide
gttcaagtgccatggagatattaagacgacattgtttcgataaagcttttatcgg

SEQ ID NO: 244325 - DNA, 55 bp, Artificial
  Synthetic oligonucleotide
tacgcttgcgtaatccttctgtcacttgaagttatccaatcccattgctatcccg

SEQ ID NO: 244326 - DNA, 55 bp, Artificial
  Synthetic oligonucleotide
gttcatcgagaaagataattgtactgcttgtaaagtcgactccaattccaaccac

SEQ ID NO: 244327 - DNA, 55 bp, Artificial
  Synthetic oligonucleotide
actctattctgagaagtactcaacaaataatttatacaattatctaattccacaa

SEQ ID NO: 244328 - DNA, 55 bp, Artificial
  Synthetic oligonucleotide
gttgagcctgattaatagacgttctccaatctagacctaatacatcaatcggcaa

SEQ ID NO: 244329 - DNA, 55 bp, Artificial
  Synthetic oligonucleotide
gttgcatcactaaagtatgtcacatcaatggtttgtaatccagcactacgtgtag

SEQ ID NO: 244330 - DNA, 55 bp, Artificial
  Synthetic oligonucleotide
gttggatgctaaggtacaactgcataagagcccctaatcgctaaagctcaagggg

SEQ ID NO: 244331 - DNA, 60 bp, Artificial
  Synthetic oligonucleotide
ggaaggatagatttgttataatgttagagtcgtctatctctcagacgtcaacttggcgta

SEQ ID NO: 244332 - DNA, 55 bp, Artificial
  Synthetic oligonucleotide
gttggggccccgccaacttgcattgtctgtagaaattacggacccaatttctcta

SEQ ID NO: 244333 - DNA, 55 bp, Artificial
  Synthetic oligonucleotide
ggtcggcttaatagctcacgctatgccgacattcgtctgcaagtttagttaaggg

SEQ ID NO: 244334 - DNA, 55 bp, Artificial
  Synthetic oligonucleotide
ggtcgggcacacgttctgtaacttgaatacctgtcattaacgcaatttgtccgct

SEQ ID NO: 244335 - DNA, 55 bp, Artificial
  Synthetic oligonucleotide
ttcgaatgcacgattaaatctgtcctttaagtcatctttccacacatattgaccg

SEQ ID NO: 244336 - DNA, 55 bp, Artificial
  Synthetic oligonucleotide
ggtcttgtacttagatagaaacacacgcacagctaaggggtactactttgtcagg

SEQ ID NO: 244337 - DNA, 55 bp, Artificial
  Synthetic oligonucleotide
ggtgaaatcatacgtgcggcgtaatagtgcttgaatcttagtaattgtaacagtc

SEQ ID NO: 244338 - DNA, 55 bp, Artificial
  Synthetic oligonucleotide
ggtgaccaaatgcttacagacgtacttggtggcaataataacggtctatatacta

SEQ ID NO: 244339 - DNA, 55 bp, Artificial
  Synthetic oligonucleotide
ggtgcatagccacttgcacctctatgagcgatagtcgtaaaacgttcgccagtta

SEQ ID NO: 244340 - DNA, 55 bp, Artificial
  Synthetic oligonucleotide
ggtgcgttacaagatgcagcgacctatgcattgaatcactatgatgatttcttgg

SEQ ID NO: 244341 - DNA, 55 bp, Artificial
  Synthetic oligonucleotide
aaatcccgctgcttagcacattcagccttgctaacacgaacttacttggctttgc

SEQ ID NO: 244342 - DNA, 51 bp, Artificial
  Synthetic oligonucleotide
ggaatatatactaaaagtaacaagaatttcgtttgtaaacgcaccaaaccc

SEQ ID NO: 244343 - DNA, 55 bp, Artificial
  Synthetic oligonucleotide
aacttagctatcggtgtagttgtaggtgttgttttcagtgctatattctttgcga

SEQ ID NO: 244344 - DNA, 55 bp, Artificial
  Synthetic oligonucleotide
ggtggattttcagaatatgcacaagtgcctggagagtggattgttcctattcccc

SEQ ID NO: 244345 - DNA, 55 bp, Artificial
  Synthetic oligonucleotide
ggtggccatggctaaagtaattcaagcgtttaaattgaactctaactgtcattgt

SEQ ID NO: 244346 - DNA, 55 bp, Artificial
  Synthetic oligonucleotide
ggtgtgagtgtagcgacattcactcttgcagtaaatcgtacgttcacgaatgctc

SEQ ID NO: 244347 - DNA, 55 bp, Artificial
  Synthetic oligonucleotide
ggtgttgacggaagattgcaatcacgcagctacgataatcaacaaggacagcgtg

SEQ ID NO: 244348 - DNA, 55 bp, Artificial
  Synthetic oligonucleotide
agcgtgagctatgataccgatcattcgataaaattcgggattgttaagggttcgg

SEQ ID NO: 244349 - DNA, 55 bp, Artificial
  Synthetic oligonucleotide
ggttggaacccctgtaatgacggcattaaacgcgtgttatactattacacctatc

SEQ ID NO: 244350 - DNA, 55 bp, Artificial
  Synthetic oligonucleotide
tgtatagttctagggccaaaaggtaccacaacgcgaacgccaatttgaatcacac

SEQ ID NO: 244351 - DNA, 55 bp, Artificial
  Synthetic oligonucleotide
tcacaaagtatgtcgctttcaacaagtacatcaacaagtgtgagtgactcaacgt

SEQ ID NO: 244352 - DNA, 55 bp, Artificial
  Synthetic oligonucleotide
gtaaagagtcacgaaaactgcgagtagtgtcagaacaatagaggctataaagccg

SEQ ID NO: 244353 - DNA, 52 bp, Artificial
  Synthetic oligonucleotide
cacgaaaaaacgaggaaaccttggttcaaagtcaaatggtactgatgaccgg

SEQ ID NO: 244354 - DNA, 60 bp, Artificial
  Synthetic oligonucleotide
gttaatacgtctgtattttgatgctgtctatcaagaacgtaagtatggcagtaatatccc

SEQ ID NO: 244355 - DNA, 57 bp, Artificial
  Synthetic oligonucleotide
cattatcaattttttgtgctaggtcagtacaaccttgacccgtgaatacgtaattgc

SEQ ID NO: 244356 - DNA, 55 bp, Artificial
  Synthetic oligonucleotide
tagattggtctcttggagcaatcgatccctgagcataaactagacgtggcatggt

SEQ ID NO: 244357 - DNA, 55 bp, Artificial
  Synthetic oligonucleotide
tagccatggcatcttggacgactttcggagcttctgacaaacttgcgtaggtgct

SEQ ID NO: 244358 - DNA, 55 bp, Artificial
  Synthetic oligonucleotide
gccttgccttttcgagtatacagggtaaagcgttgagagctaacaactagagggt

SEQ ID NO: 244359 - DNA, 55 bp, Artificial
  Synthetic oligonucleotide
gcggacgaagcatatttgacaactcacgcaaaatacgtgccatttcatgacgttc

SEQ ID NO: 244360 - DNA, 51 bp, Artificial
  Synthetic oligonucleotide
gccttctacgtgccccaaattacgaaaagttaaccctttatagctactccc

SEQ ID NO: 244361 - DNA, 55 bp, Artificial
  Synthetic oligonucleotide
gcggacgtggcgttgttctgacttccgaagaagcgattcacgaaaatcaagatac

SEQ ID NO: 244362 - DNA, 55 bp, Artificial
  Synthetic oligonucleotide
tagcctaacttgatcttcgtagctaaagccttcgtgtgtataagaagtaaaggcg

SEQ ID NO: 244363 - DNA, 55 bp, Artificial
  Synthetic oligonucleotide
tctgatagattcgattcagacggggaatatgacgattattgtcgatgtgttgtca

SEQ ID NO: 244364 - DNA, 55 bp, Artificial
  Synthetic oligonucleotide
tagaatctagacgccaactccgtaaatgcgcttttcaagctctcatgagccttga

SEQ ID NO: 244365 - DNA, 55 bp, Artificial
  Synthetic oligonucleotide
gcggcaatgtctaaagtagtcagtcaaacaacttctaaccttacggctgtctcac

SEQ ID NO: 244366 - DNA, 58 bp, Artificial
  Synthetic oligonucleotide
gtcaatgcaggacttacggacagcgcgattaaatttctcgttgatgggattaaaaatg

SEQ ID NO: 244367 - DNA, 55 bp, Artificial
  Synthetic oligonucleotide
gccttaaccgtcaaatcactcgtcacaatcgtatctgctgtgacagtttcatgcg

SEQ ID NO: 244368 - DNA, 55 bp, Artificial
  Synthetic oligonucleotide
gcctgttgaggtggactttagtcccaagacccacttgctttataagttgccgacc

SEQ ID NO: 244369 - DNA, 55 bp, Artificial
  Synthetic oligonucleotide
gcctgaagtgctgcaccgagcagtccaagactactagcttgccagcttgattagc

SEQ ID NO: 244370 - DNA, 55 bp, Artificial
  Synthetic oligonucleotide
gcgatcgactttatgacaggtatctatggtggcggtcaaaacaatactggagcac

SEQ ID NO: 244371 - DNA, 55 bp, Artificial
  Synthetic oligonucleotide
gcgataggcaaaagggagtttgagtagttaaggaagattagtatttcggattgag

SEQ ID NO: 244372 - DNA, 55 bp, Artificial
  Synthetic oligonucleotide
tctgtcacacgaggttcacttgggaaacgaggggtgtcctcagattggccccaat

SEQ ID NO: 244373 - DNA, 55 bp, Artificial
  Synthetic oligonucleotide
tctgtgagaactgtcggacgtgattctaagccgtgttctggcatttgaatcacaa

SEQ ID NO: 244374 - DNA, 55 bp, Artificial
  Synthetic oligonucleotide
tctgccccatacggctatatgggctctctctgaaagattaacctctaacccctct

SEQ ID NO: 244375 - DNA, 55 bp, Artificial
  Synthetic oligonucleotide
gcgagctaggcggacagcatcgccctctcgaagaaagcttagctgacgtggtaga

SEQ ID NO: 244376 - DNA, 55 bp, Artificial
  Synthetic oligonucleotide
gcgatgctcgattgaacggtttgattcggattgagttagtcaatgacttttcgga

SEQ ID NO: 244377 - DNA, 60 bp, Artificial
  Synthetic oligonucleotide
cattcttgctacgagataactcatccttcagttccttcccaggtggtcattcgaatagcg

SEQ ID NO: 244378 - DNA, 55 bp, Artificial
  Synthetic oligonucleotide
gcgagatacttcttgtcacccatttctagaacttgggccgaaatgagaccacggt

SEQ ID NO: 244379 - DNA, 55 bp, Artificial
  Synthetic oligonucleotide
gcgactgttagtctgtccggatctgcaaggtatgtgaccaataactgatcgcttg

SEQ ID NO: 244380 - DNA, 55 bp, Artificial
  Synthetic oligonucleotide
tagatggggcccataacccccacgccgttgcgcctttaatcgcaagtcttcggga

SEQ ID NO: 244381 - DNA, 55 bp, Artificial
  Synthetic oligonucleotide
ttgaggcagattccgtgaatagattcaactggcttgctaaatctgtaaccagacg

SEQ ID NO: 244382 - DNA, 55 bp, Artificial
  Synthetic oligonucleotide
gcgacgttacgcagaacaagctttcagagcaatcggtgcttgtggcttgtcacga

SEQ ID NO: 244383 - DNA, 55 bp, Artificial
  Synthetic oligonucleotide
ttgacccagctacacactggactcgattaccaacgacaacagcgaattgttgagt

SEQ ID NO: 244384 - DNA, 55 bp, Artificial
  Synthetic oligonucleotide
gcgcaaggtataggcactgggctagcaatcgcttttagaggtttaggagctgcaa

SEQ ID NO: 244385 - DNA, 55 bp, Artificial
  Synthetic oligonucleotide
ttgaagtaacagccacgcttactgccctcagtacggtggtcatagtaaaccagcg

SEQ ID NO: 244386 - DNA, 55 bp, Artificial
  Synthetic oligonucleotide
gcgcattagagtagtcattcctagaaacggtaaccgactcagctaaagtgctcaa

SEQ ID NO: 244387 - DNA, 55 bp, Artificial
  Synthetic oligonucleotide
gcgcattgactacccatccaccagcattaccaagccagtttggaatccaaggtgc

SEQ ID NO: 244388 - DNA, 56 bp, Artificial
  Synthetic oligonucleotide
cattttagggtaattagaaaaggcttggatagaaataagagatctaaatgattata

SEQ ID NO: 244389 - DNA, 55 bp, Artificial
  Synthetic oligonucleotide
gcgaccgcttgggacaccgtcacaatcttgtctgcatatcgtcccatgagcatat

SEQ ID NO: 244390 - DNA, 55 bp, Artificial
  Synthetic oligonucleotide
gcgccatcgtttgtccaacactctccatctagtcacctccttggtctaatttcgc

SEQ ID NO: 244391 - DNA, 55 bp, Artificial
  Synthetic oligonucleotide
gcgcgaattgactaaggaagctgatgttttggtggttgctattggccgtgaccgg

SEQ ID NO: 244392 - DNA, 55 bp, Artificial
  Synthetic oligonucleotide
gcgacagaatggggtctctcatatgcttacggtacagagccaatgccagtacttg

SEQ ID NO: 244393 - DNA, 55 bp, Artificial
  Synthetic oligonucleotide
gccgccttgactgtaaaggtcgagataaagagctggtcaatccctataccacgct

SEQ ID NO: 244394 - DNA, 55 bp, Artificial
  Synthetic oligonucleotide
taggagtacatcccgaatagtagtggtatctgtcaagagcatgcagaggcggtcg

SEQ ID NO: 244395 - DNA, 55 bp, Artificial
  Synthetic oligonucleotide
gccgcacgactatatgggacagtccgttgcaacattggcgttccaccatttgaaa

SEQ ID NO: 244396 - DNA, 55 bp, Artificial
  Synthetic oligonucleotide
gccgacattatcgaccgcaactggacacctgcggttacccgaggagttaggcttg

SEQ ID NO: 244397 - DNA, 55 bp, Artificial
  Synthetic oligonucleotide
gccgaagatacggaatcttcttacttaaccgaattagctagctttggtgtgccag

SEQ ID NO: 244398 - DNA, 55 bp, Artificial
  Synthetic oligonucleotide
gcggttaaattgttccatagagaagtctaatttcttgatgagtggttgacgcatc

SEQ ID NO: 244399 - DNA, 56 bp, Artificial
  Synthetic oligonucleotide
gtattctaaaggaaatattgcaaagtatcttaaaaaagccattgagcaatacctac

SEQ ID NO: 244400 - DNA, 55 bp, Artificial
  Synthetic oligonucleotide
gccctgctatcgaccaggggttaatgggaagcgctagcgttctatctaactaccc

SEQ ID NO: 244401 - DNA, 55 bp, Artificial
  Synthetic oligonucleotide
gcccggaatcatcatctagtacagagacgtcaagtagtacggaagcaggtaaagg

SEQ ID NO: 244402 - DNA, 55 bp, Artificial
  Synthetic oligonucleotide
gcggttcaagcgattagcatcgtcttgaagtccatcagtcttaatataagtcatg

SEQ ID NO: 244403 - DNA, 55 bp, Artificial
  Synthetic oligonucleotide
gcccgatttcaaatctaagagcaagaggtgtgccataaaagaatgggcccactag

SEQ ID NO: 244404 - DNA, 55 bp, Artificial
  Synthetic oligonucleotide
gcgtaagctgcaccatgataaggtgaccactccgcaatataaggattgaatccct

SEQ ID NO: 244405 - DNA, 55 bp, Artificial
  Synthetic oligonucleotide
gcccgatggcgcaagaaacctacgttaatagacaccggcaacttggtctcgaaga

SEQ ID NO: 244406 - DNA, 54 bp, Artificial
  Synthetic oligonucleotide
gcccctttcaacggttgaggaagcgactaagctagcccaagtttaccaagacat

SEQ ID NO: 244407 - DNA, 55 bp, Artificial
  Synthetic oligonucleotide
gcccctctaggtcaaggctagatgtcaccaccttatagggagcgacagtcacgcc

SEQ ID NO: 244408 - DNA, 55 bp, Artificial
  Synthetic oligonucleotide
taggcaatcgcattccaacccgtgctatctttgaaacctaaacctacacttgcag

SEQ ID NO: 244409 - DNA, 55 bp, Artificial
  Synthetic oligonucleotide
gcccaggcatgttaatatggactaattgactggacagctctgccatctcagggct

SEQ ID NO: 244410 - DNA, 58 bp, Artificial
  Synthetic oligonucleotide
gtataatagcaatattctggcactaagccttcgaaaggaggtgtttagcttgttagaa

SEQ ID NO: 244411 - DNA, 55 bp, Artificial
  Synthetic oligonucleotide
gcccagcttgtggaggccagctccatttgcgtcaaggaccaagtgtacggacgca

SEQ ID NO: 244412 - DNA, 55 bp, Artificial
  Synthetic oligonucleotide
ttgaaagccatctatagactccgatttgaacacacgacagttatgctctgtcgtg

SEQ ID NO: 244413 - DNA, 55 bp, Artificial
  Synthetic oligonucleotide
tctccgctcagaagagggaagactcgacctatccaatggggcggtgattaccagt

SEQ ID NO: 244414 - DNA, 55 bp, Artificial
  Synthetic oligonucleotide
gcgtagcgccccttatttcggtcggaggaggctcaagggagtttgagggaatgaa

SEQ ID NO: 244415 - DNA, 55 bp, Artificial
  Synthetic oligonucleotide
gccatgcgaacagctagtgagcacactaaagaattgctgcataccttatcagaag

SEQ ID NO: 244416 - DNA, 55 bp, Artificial
  Synthetic oligonucleotide
gcggctctaggcgaaggcgagggatgcctgtctgttgatcgtgtagttccgggct

SEQ ID NO: 244417 - DNA, 55 bp, Artificial
  Synthetic oligonucleotide
gcggctgaacgagttaagcgagtgattgaggcggagcatttccgtgtggatcgcg

SEQ ID NO: 244418 - DNA, 55 bp, Artificial
  Synthetic oligonucleotide
gcgggaaccaagctgactcggatgagcagtttgagctaagtgtccatcagttgtc

SEQ ID NO: 244419 - DNA, 55 bp, Artificial
  Synthetic oligonucleotide
gcctctgtcatggcgcaaggattcaacccttatgtagcagaatggtctccatatc

SEQ ID NO: 244420 - DNA, 55 bp, Artificial
  Synthetic oligonucleotide
gcctccaggccgcaactgcgccttaatattagctaagatagcctctgtattgtgg

SEQ ID NO: 244421 - DNA, 59 bp, Artificial
  Synthetic oligonucleotide
ccaagggtcgtggtgtggctattcaccgtgtggactgtatgaacctgcgtgcccaagaa

SEQ ID NO: 244422 - DNA, 55 bp, Artificial
  Synthetic oligonucleotide
gcctattcagaaaactatcaaggggctaatagggaatacattaccattctttgca

SEQ ID NO: 244423 - DNA, 55 bp, Artificial
  Synthetic oligonucleotide
gcctataacgtagtacctgccaaggcaagctattccggtcatttattagccggag

SEQ ID NO: 244424 - DNA, 55 bp, Artificial
  Synthetic oligonucleotide
gcctaggcatcttgcagccaagatttggtaaggtaaccatctcaaagacaaacac

SEQ ID NO: 244425 - DNA, 55 bp, Artificial
  Synthetic oligonucleotide
gcctaggagaaaatacgatacagacgattttggagcgtttgacagggcgagcggt

SEQ ID NO: 244426 - DNA, 55 bp, Artificial
  Synthetic oligonucleotide
gcctagcccacagtactagttcgttgtcaaaacatactgatctactgatctcgtc

SEQ ID NO: 244427 - DNA, 55 bp, Artificial
  Synthetic oligonucleotide
gcctacttgcaagtggctactgtctatgattaatggttgacgaagtaagagtgga

SEQ ID NO: 244428 - DNA, 55 bp, Artificial
  Synthetic oligonucleotide
gcctacgataggacaatagaagttatcgcagacgctttagaaatcccagactaca

SEQ ID NO: 244429 - DNA, 55 bp, Artificial
  Synthetic oligonucleotide
gcgggtatgccaaacacatctacataacagaaggcataggagacttaggggtgca

SEQ ID NO: 244430 - DNA, 55 bp, Artificial
  Synthetic oligonucleotide
gccgtttaggagtgatttatgccaatcaaagtttaggcggtcatagtcacctgta

SEQ ID NO: 244431 - DNA, 55 bp, Artificial
  Synthetic oligonucleotide
gcggtctaattctgtcaccacgacaatatcaccctcacgtaaataagtcagcatg

SEQ ID NO: 244432 - DNA, 56 bp, Artificial
  Synthetic oligonucleotide
ccaatagagggcgctttatccgtgacaattactcttggttgaccaaactgtttatg

SEQ ID NO: 244433 - DNA, 53 bp, Artificial
  Synthetic oligonucleotide
gccgttaccatggcccctaaaaggctaaaacgcttgtagcccaaggtatagtg

SEQ ID NO: 244434 - DNA, 55 bp, Artificial
  Synthetic oligonucleotide
gccgtctcgaggattaattgttgacttgtgctctggtaatggggctgttggactt

SEQ ID NO: 244435 - DNA, 55 bp, Artificial
  Synthetic oligonucleotide
tagctgacaatcataggtgccatggcttcaaaggtcatcgcaccacctgagtttg

SEQ ID NO: 244436 - DNA, 55 bp, Artificial
  Synthetic oligonucleotide
gccgtcgacgttgggactaaccagttggtatggaaactcagacaagatccacgag

SEQ ID NO: 244437 - DNA, 55 bp, Artificial
  Synthetic oligonucleotide
tcttcgataaagtgggataggtaccattccagagtcagtttacgggctaccgttc

SEQ ID NO: 244438 - DNA, 53 bp, Artificial
  Synthetic oligonucleotide
gccgcgactctaaaagtaaaagcgagtcaacttaagggaactgaaatatcggg

SEQ ID NO: 244439 - DNA, 55 bp, Artificial
  Synthetic oligonucleotide
gcggtcttggaagttctcataccttctatcgctatatctggccaatcgccctttc

SEQ ID NO: 244440 - DNA, 55 bp, Artificial
  Synthetic oligonucleotide
tccatgggagctgctacggtgatgatggctagtggtgagaaactaccagaacaag

SEQ ID NO: 244441 - DNA, 55 bp, Artificial
  Synthetic oligonucleotide
gactgttaagaatgttgaggggcaagcattgaatagcacgattagtcagctcaca

SEQ ID NO: 244442 - DNA, 55 bp, Artificial
  Synthetic oligonucleotide
gactggtgagtgatcatatattgttcaaaccgatttctccatgcagtaaggtgac

SEQ ID NO: 244443 - DNA, 60 bp, Artificial
  Synthetic oligonucleotide
gtaatatggaacagcgtttcacgctcactaccttccgtctgcgcgttcaataagcagtaa

SEQ ID NO: 244444 - DNA, 55 bp, Artificial
  Synthetic oligonucleotide
tcccgcagggagcagacctagcgacagtggataagactgtgcaattggtcttcac

SEQ ID NO: 244445 - DNA, 55 bp, Artificial
  Synthetic oligonucleotide
gactctcagaagccatattttggccgttaacagaatccttgagtattcacagtag

SEQ ID NO: 244446 - DNA, 55 bp, Artificial
  Synthetic oligonucleotide
gactcaggctgctacagagtttatccaacctttgacactacaggtactctcacag

SEQ ID NO: 244447 - DNA, 55 bp, Artificial
  Synthetic oligonucleotide
gactagacgtcgttacacctactacactgagaccttcctcctttattcgacgacc

SEQ ID NO: 244448 - DNA, 55 bp, Artificial
  Synthetic oligonucleotide
gactagaacaatacgctcaacccatcttatttgtggcatcagacgattagatttg

SEQ ID NO: 244449 - DNA, 55 bp, Artificial
  Synthetic oligonucleotide
gactacgtggtcgtatttgatatatgtagggtgtaaaattttccacgacctagca

SEQ ID NO: 244450 - DNA, 55 bp, Artificial
  Synthetic oligonucleotide
tttctggcacacgaggttcacttggaggggtgtcctcagattggccccaatcaga

SEQ ID NO: 244451 - DNA, 55 bp, Artificial
  Synthetic oligonucleotide
gacgtgtgagtaaatgctaagagttgtcttatagtcggtgtgccccactcgatcc

SEQ ID NO: 244452 - DNA, 55 bp, Artificial
  Synthetic oligonucleotide
gacgtgggtgtagatggaattagtgacttcagagtcgggatgaccaaccctgtcc

SEQ ID NO: 244453 - DNA, 55 bp, Artificial
  Synthetic oligonucleotide
gacgtcggagtattatgacacggaaagaggagttaaatacgattcagctagcttt

SEQ ID NO: 244454 - DNA, 57 bp, Artificial
  Synthetic oligonucleotide
ataaattactgtaacaaccgcagaaaagattgaatagatgagcagacaccaacgttt

SEQ ID NO: 244455 - DNA, 54 bp, Artificial
  Synthetic oligonucleotide
gacgtcaaacggttttaccgctgtaaccatccgctctccgttcttgtaatcgac

SEQ ID NO: 244456 - DNA, 55 bp, Artificial
  Synthetic oligonucleotide
tttgaccatcataaagcatgttgcctagcgttccgccgttttggtcagtagactg

SEQ ID NO: 244457 - DNA, 55 bp, Artificial
  Synthetic oligonucleotide
tcccggtagcagccacataacctcgtagctctggcggaaccaccaaagtagcata

SEQ ID NO: 244458 - DNA, 55 bp, Artificial
  Synthetic oligonucleotide
gacggcccaggattttgcagagaggctgagtcggacaaaacatgcctcagtgatc

SEQ ID NO: 244459 - DNA, 55 bp, Artificial
  Synthetic oligonucleotide
gacggcagattcaaggatacgagcacacctacctcatgcttcataaaccaaacgg

SEQ ID NO: 244460 - DNA, 55 bp, Artificial
  Synthetic oligonucleotide
tttgacttgaacgcatccattctactaactctgctttgacaactggtcgattcat

SEQ ID NO: 244461 - DNA, 55 bp, Artificial
  Synthetic oligonucleotide
tttgattgcgagcatcattgtaacgaggtacataagcagggtccccactcatacg

SEQ ID NO: 244462 - DNA, 55 bp, Artificial
  Synthetic oligonucleotide
tttgcttacgccgctgatagcttcctggaatattttgtcaacatcttggagctgc

SEQ ID NO: 244463 - DNA, 55 bp, Artificial
  Synthetic oligonucleotide
tccctgtcgagattccgcgcagggctcctaacaagtagaattgccaaagctggct

SEQ ID NO: 244464 - DNA, 55 bp, Artificial
  Synthetic oligonucleotide
tccgaacttggcgcacctaagaatgcaacgtcgatatgcacatccccagctgcga

SEQ ID NO: 244465 - DNA, 57 bp, Artificial
  Synthetic oligonucleotide
gtgtggagcccaagttaagtatttagcaacaacctctgaacttgtccaattctcaaa

SEQ ID NO: 244466 - DNA, 58 bp, Artificial
  Synthetic oligonucleotide
tcacggcatctgtcaccgatacacgtgggcaaacaggaaccgttagtgaacgacctac

SEQ ID NO: 244467 - DNA, 55 bp, Artificial
  Synthetic oligonucleotide
gacgctcctttattcgctccctttctgattgtacttggtatttatagagttccag

SEQ ID NO: 244468 - DNA, 55 bp, Artificial
  Synthetic oligonucleotide
gacgctatagaaggcgttgtcagttgggaatatagcaacagtaaaggtatacctt

SEQ ID NO: 244469 - DNA, 55 bp, Artificial
  Synthetic oligonucleotide
gacgagcaataggcttgccggctcgtctgtcattcgctactcgaatgacccacct

SEQ ID NO: 244470 - DNA, 55 bp, Artificial
  Synthetic oligonucleotide
gacgaagtcagtaaccatacgtacggcaaggcgacgttgacgtggtttgaagagt

SEQ ID NO: 244471 - DNA, 55 bp, Artificial
  Synthetic oligonucleotide
tcatccttcagttccttcccaggtggtcattcgaatagcgaatgacaggcaagcc

SEQ ID NO: 244472 - DNA, 55 bp, Artificial
  Synthetic oligonucleotide
tccaaaagtcgacctataatcagctagtctttgctagggttgatttggaccaacc

SEQ ID NO: 244473 - DNA, 55 bp, Artificial
  Synthetic oligonucleotide
tccaaccaatcctgagccaccagcagccaataacgaccaaccgataaccgccaaa

SEQ ID NO: 244474 - DNA, 55 bp, Artificial
  Synthetic oligonucleotide
gagcttggacttattggtcgtgttacaactgctagccagtcatctgctcatgttg

SEQ ID NO: 244475 - DNA, 55 bp, Artificial
  Synthetic oligonucleotide
gagctagatactccacggtacgagctgtttcgtaggccaccgccttattgagcga

SEQ ID NO: 244476 - DNA, 55 bp, Artificial
  Synthetic oligonucleotide
gagcgtcactttgccagctctaagaatggcgatgagacttggcaggccaagcgag

SEQ ID NO: 244477 - DNA, 56 bp, Artificial
  Synthetic oligonucleotide
ataattgcataaattaaagagggataaatttcatatcctttcttttttatcatatc

SEQ ID NO: 244478 - DNA, 55 bp, Artificial
  Synthetic oligonucleotide
tccaactctggctaaagaatggttatacgacctttgggatgtatgactgtagggc

SEQ ID NO: 244479 - DNA, 55 bp, Artificial
  Synthetic oligonucleotide
tccaaggactttatcctcgctctgattgcccgatatggtgtggctgcaggtgttg

SEQ ID NO: 244480 - DNA, 55 bp, Artificial
  Synthetic oligonucleotide
gagcctactgaaaccgatcaatctgttggaacaccgactcctggtattcctggta

SEQ ID NO: 244481 - DNA, 55 bp, Artificial
  Synthetic oligonucleotide
gagccacagcacatttatactaaacgactcttatctgctatcccttcgattgatg

SEQ ID NO: 244482 - DNA, 55 bp, Artificial
  Synthetic oligonucleotide
gagcatagctttgccctgattcggagtttcttaggctttatgacaggactaggcc

SEQ ID NO: 244483 - DNA, 55 bp, Artificial
  Synthetic oligonucleotide
gagcagttactacgtgtaattgaacctggtggatacgcaggtgaagacgccttgt

SEQ ID NO: 244484 - DNA, 55 bp, Artificial
  Synthetic oligonucleotide
tccacaagttatcgtttcaaactacctaggggcagaattaccatctgttgttgga

SEQ ID NO: 244485 - DNA, 55 bp, Artificial
  Synthetic oligonucleotide
tcgcatcatgtttcccctgacaaatgaccagggaaaggttattgccttctcaggt

SEQ ID NO: 244486 - DNA, 55 bp, Artificial
  Synthetic oligonucleotide
gagatggctggaaccacgccaccgttagcacttagcgataagattccatgcgcaa

SEQ ID NO: 244487 - DNA, 55 bp, Artificial
  Synthetic oligonucleotide
gagataaactggtcacaagcggtcaagtatctattcaaggtttaccaatgacgag

SEQ ID NO: 244488 - DNA, 57 bp, Artificial
  Synthetic oligonucleotide
tcaccatatccaagcatttacggaccagctaacacgtggaacctaatgccggaccgg

SEQ ID NO: 244489 - DNA, 55 bp, Artificial
  Synthetic oligonucleotide
gagagggaaaatgggataggcaatcgcggagattagcaaaattgagagcctatcg

SEQ ID NO: 244490 - DNA, 55 bp, Artificial
  Synthetic oligonucleotide
gagagcttgtatattgactcccttgatcagtatggacaatcaagccaggctgagg

SEQ ID NO: 244491 - DNA, 55 bp, Artificial
  Synthetic oligonucleotide
gagagatgacagatacgattaatgagtataagctaatgcaccaatttacagagcg

SEQ ID NO: 244492 - DNA, 55 bp, Artificial
  Synthetic oligonucleotide
gagacttggcaggccaagcgggttatggagcgaattaagtttctggctcaggagg

SEQ ID NO: 244493 - DNA, 55 bp, Artificial
  Synthetic oligonucleotide
gagactgatggactagtttgcacaaccttatcctctgccctgactgttacgagtg

SEQ ID NO: 244494 - DNA, 55 bp, Artificial
  Synthetic oligonucleotide
gagactatgagggaacgatcagtccagactatcctctagctggctatcctttgtt

SEQ ID NO: 244495 - DNA, 55 bp, Artificial
  Synthetic oligonucleotide
gagaccatcaccagggtttaccacttgacctgggctaacatgaatagcactaacg

SEQ ID NO: 244496 - DNA, 55 bp, Artificial
  Synthetic oligonucleotide
tttcggctattattatttgccgtgaacttgcagtgacaggtctccgactactttt

SEQ ID NO: 244497 - DNA, 55 bp, Artificial
  Synthetic oligonucleotide
tccactatgacagctcacgatataatcctgcgacttgtctaactctcctaaacgc

SEQ ID NO: 244498 - DNA, 55 bp, Artificial
  Synthetic oligonucleotide
tttcgtgaatcgcttcttcggaagttagaacaacgccacgtccgccaatcatgct

SEQ ID NO: 244499 - DNA, 60 bp, Artificial
  Synthetic oligonucleotide
atacgatttcgccagaaatcgcatcgcaccaatgtgggactgtctatacacgcttttcgc

SEQ ID NO: 244500 - DNA, 55 bp, Artificial
  Synthetic oligonucleotide
gagacaagccagtacgcatctgggtcacacactgcttgtccaacaaggaactcct

SEQ ID NO: 244501 - DNA, 55 bp, Artificial
  Synthetic oligonucleotide
tcgacaataaccgctactgagtgaggaacctcttgttgcgttaaatgaagtacct

SEQ ID NO: 244502 - DNA, 55 bp, Artificial
  Synthetic oligonucleotide
tccgatcagtatcggtatgctgattctcttgagtctgatgaacattgccggtctg

SEQ ID NO: 244503 - DNA, 51 bp, Artificial
  Synthetic oligonucleotide
ttttacaaacggggttttacacttacccactgagaaaacatacttatgacc

SEQ ID NO: 244504 - DNA, 55 bp, Artificial
  Synthetic oligonucleotide
tccttttggataagtcgttgctgcggcgtaatttggttggaaagagacggcaggc

SEQ ID NO: 244505 - DNA, 55 bp, Artificial
  Synthetic oligonucleotide
tcctttatgtgggcagcagggagcaactcaggtctttggacgacagaaaggcctg

SEQ ID NO: 244506 - DNA, 55 bp, Artificial
  Synthetic oligonucleotide
gaatagggcagtgtacagataagtgcagctactaggctaatcggtgaaaatcctc

SEQ ID NO: 244507 - DNA, 55 bp, Artificial
  Synthetic oligonucleotide
gaataagagggttaagcgtaagacactaacaagtgcagaagagcaggcgaaactt

SEQ ID NO: 244508 - DNA, 55 bp, Artificial
  Synthetic oligonucleotide
gaagtgttagcgtttatggcattttacaatcgtaagtatattgttgggctgacgc

SEQ ID NO: 244509 - DNA, 55 bp, Artificial
  Synthetic oligonucleotide
gaagtgcgtacgcctattttcgagcattacgaggttatcagtcgctctgtcggag

SEQ ID NO: 244510 - DNA, 60 bp, Artificial
  Synthetic oligonucleotide
tcaaggacgcgagtgccacctgcaacttcagcgatatagaagcttggagcgtatccaact

SEQ ID NO: 244511 - DNA, 55 bp, Artificial
  Synthetic oligonucleotide
gaaggtgttccagtcttggatttacctggagaactgccaaatcttgcggctagtg

SEQ ID NO: 244512 - DNA, 55 bp, Artificial
  Synthetic oligonucleotide
gaaggactagcagcagacactaaattccaactaactttgttggcttgtgtagccg

SEQ ID NO: 244513 - DNA, 55 bp, Artificial
  Synthetic oligonucleotide
gaagcacatagcaatttgagagcggaagcccgatttaccagtcttttagagctta

SEQ ID NO: 244514 - DNA, 55 bp, Artificial
  Synthetic oligonucleotide
ttttggatacgatgagccaagtgaactccacgagttttaattcccgccaagacta

SEQ ID NO: 244515 - DNA, 55 bp, Artificial
  Synthetic oligonucleotide
ttttgtgctaggtcagtacaaccttgacccgtgaatacgtaattgcgactgtttg

SEQ ID NO: 244516 - DNA, 55 bp, Artificial
  Synthetic oligonucleotide
tcctagaggagaacgcaagccgtcttgtgaatagcccgactggcctcgaacgtcc

SEQ ID NO: 244517 - DNA, 55 bp, Artificial
  Synthetic oligonucleotide
gaactaggcaaaccgccatagcgaatgccgtcttgttattaggtcctttaggacc

SEQ ID NO: 244518 - DNA, 55 bp, Artificial
  Synthetic oligonucleotide
gaactagcgcagtatatgggcaaatctcgtccgtatattagtaatagtctaaggc

SEQ ID NO: 244519 - DNA, 55 bp, Artificial
  Synthetic oligonucleotide
gaacgttggcttcaagaagggctctcaaaccgtgaaatcgctaggagattagcta

SEQ ID NO: 244520 - DNA, 54 bp, Artificial
  Synthetic oligonucleotide
tcctataattatcaacgtcttagaagagcgggagtccccagtaaaagtagtcgg

SEQ ID NO: 244521 - DNA, 60 bp, Artificial
  Synthetic oligonucleotide
tcaagcgcttggcaaaaattccctgaaggcttgctggcagagattactcagcaacggaaa

SEQ ID NO: 244522 - DNA, 55 bp, Artificial
  Synthetic oligonucleotide
tcctctctgacaaatctttggcaactaatactagggcaagggaattcggcagaaa

SEQ ID NO: 244523 - DNA, 55 bp, Artificial
  Synthetic oligonucleotide
gaacgcgttgagacttgtggagatactcttcgatttattcgtcgagaagatggga

SEQ ID NO: 244524 - DNA, 55 bp, Artificial
  Synthetic oligonucleotide
gaacgcacaaatgacacgctgctaggtctgcggtaatccacgtaaacatcttctg

SEQ ID NO: 244525 - DNA, 55 bp, Artificial
  Synthetic oligonucleotide
gaacgatttcatgtcaacgaaagctatatcagactgaggttctcttgagtaatcg

SEQ ID NO: 244526 - DNA, 55 bp, Artificial
  Synthetic oligonucleotide
gaacgactgcactggtaatgagtactgtcgcaatgacttcgatgagtgagttagt

SEQ ID NO: 244527 - DNA, 55 bp, Artificial
  Synthetic oligonucleotide
tcctccgttgctacgttttcaactgacgttgctggtaccgtagcagttgcatcag

SEQ ID NO: 244528 - DNA, 55 bp, Artificial
  Synthetic oligonucleotide
tcctcacgtttgctggcaacgtaagacaagtggtctttcacgccttttaatcctc

SEQ ID NO: 244529 - DNA, 55 bp, Artificial
  Synthetic oligonucleotide
tccgaagaggtggacccgcattatgtcttcgatataacagaagagggcgcaagtc

SEQ ID NO: 244530 - DNA, 55 bp, Artificial
  Synthetic oligonucleotide
gacctcctcagcgcaaaaggctcctaagagccaatcgactcatcgcatgtttcta

SEQ ID NO: 244531 - DNA, 55 bp, Artificial
  Synthetic oligonucleotide
gacctaatcgatgacgcaatggtaccaatctacggtgtctgcgacgttgagcctg

SEQ ID NO: 244532 - DNA, 58 bp, Artificial
  Synthetic oligonucleotide
tcaagaaaactcttggtgagaaaagtcttgcattggttcaagttgttttgaatgtcga

SEQ ID NO: 244533 - DNA, 55 bp, Artificial
  Synthetic oligonucleotide
tttggcagaaagctatgaagctagactatactcccatggttgatattagagctgt

SEQ ID NO: 244534 - DNA, 55 bp, Artificial
  Synthetic oligonucleotide
gacccacgactagacaattggttatctttggcaaagctagcattcggaaaagcat

SEQ ID NO: 244535 - DNA, 55 bp, Artificial
  Synthetic oligonucleotide
gaccatagcgctaaagggaatagaaaagcctatgtttgcccactttgtggtagcg

SEQ ID NO: 244536 - DNA, 55 bp, Artificial
  Synthetic oligonucleotide
gaccagccattcctcttttgggcaattgtttcccctgacattgtaagtgatgaga

SEQ ID NO: 244537 - DNA, 55 bp, Artificial
  Synthetic oligonucleotide
gaccaataaatcacgcgaacggacagtagacgatgtcttgacagaagctcttcgc

SEQ ID NO: 244538 - DNA, 55 bp, Artificial
  Synthetic oligonucleotide
tccgactgtattgcgcatgactggattagccagaggtgtaaagcctaattctacc

SEQ ID NO: 244539 - DNA, 55 bp, Artificial
  Synthetic oligonucleotide
gaccaacaaaggtatcacacgaccaactaagtcatcaggaactcctacgaccaac

SEQ ID NO: 244540 - DNA, 55 bp, Artificial
  Synthetic oligonucleotide
tccgataccaatggagataagaccgtctactaaatttgccttgctttcagcatgt

SEQ ID NO: 244541 - DNA, 55 bp, Artificial
  Synthetic oligonucleotide
gacatctgtggcactaacttcaagttccgctaggtatagtcgattgggctcgttt

SEQ ID NO: 244542 - DNA, 55 bp, Artificial
  Synthetic oligonucleotide
gacagtgtaattatgttcggtcaagttattgttaagaacatgacgcacgcattgc

SEQ ID NO: 244543 - DNA, 54 bp, Artificial
  Synthetic oligonucleotide
atacttataattcaaaacaacggaggaaggatagaaaaattgaagactactaca

SEQ ID NO: 244544 - DNA, 55 bp, Artificial
  Synthetic oligonucleotide
gacaggcttgcgcccgggtgataagattagttgtcgtagctttcaatcaactcac

SEQ ID NO: 244545 - DNA, 55 bp, Artificial
  Synthetic oligonucleotide
gacagcgcacagcctacgccacacagctataacactagctttacttgcagggcga

SEQ ID NO: 244546 - DNA, 55 bp, Artificial
  Synthetic oligonucleotide
gacacttagctcaaactgcccatccgagtcagctgggttcccgcaatttccaccc

SEQ ID NO: 244547 - DNA, 55 bp, Artificial
  Synthetic oligonucleotide
gacacgtcccaaagtttccttacctactggtacagagattggacgacctgtgtcc

SEQ ID NO: 244548 - DNA, 55 bp, Artificial
  Synthetic oligonucleotide
gacaaggggagcattgacctttatcgaaatggacgtagtcctcgtaatcttgagc

SEQ ID NO: 244549 - DNA, 54 bp, Artificial
  Synthetic oligonucleotide
gacaacttagggaaaatagttaactcatgttgttctttacgtgccttagaagga

SEQ ID NO: 244550 - DNA, 55 bp, Artificial
  Synthetic oligonucleotide
gacaaaatcagcttatgaccttgttccaagtcaggagtggtcaagcgacccttgg

SEQ ID NO: 244551 - DNA, 55 bp, Artificial
  Synthetic oligonucleotide
gaatttgcacttccgcttgtagcaatgggttgagcgaagttatgcggatgtgcag

SEQ ID NO: 244552 - DNA, 55 bp, Artificial
  Synthetic oligonucleotide
gaattgctattttgaccctcccgacaaaggatagcctacaggttgtcgcactacg

SEQ ID NO: 244553 - DNA, 55 bp, Artificial
  Synthetic oligonucleotide
gaatggttcccacgtctgatttcaaatcaagagcgactgtatattggttatcacc

SEQ ID NO: 244554 - DNA, 60 bp, Artificial
  Synthetic oligonucleotide
tcaacggtacatgcttatagacttgttgcctattactttgtaataatggacatctgaatt

SEQ ID NO: 244555 - DNA, 55 bp, Artificial
  Synthetic oligonucleotide
gaatgctccgtcgcaataccattccaactatgaaactgtctatcgcccagttagg

SEQ ID NO: 244556 - DNA, 55 bp, Artificial
  Synthetic oligonucleotide
gaatgcacgcctaattactcttttggcccagctattcgagatacctatgtactcc

SEQ ID NO: 244557 - DNA, 55 bp, Artificial
  Synthetic oligonucleotide
tattcgaccattcctatacgaaaacactgaacgtgaaccaatcatcatcccgatg

SEQ ID NO: 244558 - DNA, 54 bp, Artificial
  Synthetic oligonucleotide
ttgggactatacggtgttactgtacgtgcaactggtagggtatttaaggcgaac

SEQ ID NO: 244559 - DNA, 55 bp, Artificial
  Synthetic oligonucleotide
gcaagtggagttttaggaaacttacaacaagaaagtcaacttgatccgaagtcta

SEQ ID NO: 244560 - DNA, 55 bp, Artificial
  Synthetic oligonucleotide
tattctccgactcaaagcggctgtcctgagccagataggacagggacaggtctcg

SEQ ID NO: 244561 - DNA, 55 bp, Artificial
  Synthetic oligonucleotide
gcaagtctgcgcagcgattgcctttagcgtccttgcgatcacgaatggtcgcctc

SEQ ID NO: 244562 - DNA, 55 bp, Artificial
  Synthetic oligonucleotide
gcaagtagtcacacgcgaagcggatgctttctgggaactgttagtacaggcaggc

SEQ ID NO: 244563 - DNA, 55 bp, Artificial
  Synthetic oligonucleotide
gcaagggtttgaggctcgtcaaatctcggcgacttttcggcgacttttcggcgac

SEQ ID NO: 244564 - DNA, 55 bp, Artificial
  Synthetic oligonucleotide
gcaaggcaatatgctggatctgtcacaggctggatcgtttgatgtggtgacctgc

SEQ ID NO: 244565 - DNA, 60 bp, Artificial
  Synthetic oligonucleotide
atagagtgatgagcgaacgttttgaattgagatagtcttgataaaacctagtatagagcc

SEQ ID NO: 244566 - DNA, 55 bp, Artificial
  Synthetic oligonucleotide
gcaagctacgctaatgtgtccgtctagccaccttagaagagattaatagactcgc

SEQ ID NO: 244567 - DNA, 55 bp, Artificial
  Synthetic oligonucleotide
gcaagcgtgttcaagcgacctcagctgtaaaagctaagtctaatcaccaaaagcc

SEQ ID NO: 244568 - DNA, 55 bp, Artificial
  Synthetic oligonucleotide
gcaagcgcataacagaaaacatatgcttggcagtgtccttatccttaatctggag

SEQ ID NO: 244569 - DNA, 54 bp, Artificial
  Synthetic oligonucleotide
ttgggattggggttaggaaacgtcagtacctctgcagtacttttgttataggtg

SEQ ID NO: 244570 - DNA, 55 bp, Artificial
  Synthetic oligonucleotide
gcaacgaccttatcgagagattcaaaggattatcgtgagctttcttcactagaga

SEQ ID NO: 244571 - DNA, 55 bp, Artificial
  Synthetic oligonucleotide
gcaacctacattacaacggttgacggtaacttccaacgtcaattggcttcggctc

SEQ ID NO: 244572 - DNA, 55 bp, Artificial
  Synthetic oligonucleotide
tattgatatcgtctgccaacacattgaccttagccaacaattcattggtctgatg

SEQ ID NO: 244573 - DNA, 55 bp, Artificial
  Synthetic oligonucleotide
gcaaatagctcctgtggagttgagacagactcaacacgcccattgttcatcacca

SEQ ID NO: 244574 - DNA, 55 bp, Artificial
  Synthetic oligonucleotide
gcaaagcttgggtatcaagtgatttaaccagtaaagatttatttgtccgtcaagg

SEQ ID NO: 244575 - DNA, 53 bp, Artificial
  Synthetic oligonucleotide
ttggtcgaacaaagttctgaccaaaccgcccgccctaagtctaccttgcccca

SEQ ID NO: 244576 - DNA, 52 bp, Artificial
  Synthetic oligonucleotide
cacgttcaactttttcccagttcacgtagtattcgggagttctattagttac

SEQ ID NO: 244577 - DNA, 60 bp, Artificial
  Synthetic oligonucleotide
tcaaacattgtttaagcggcaccagagtatagcctgatgtccacttcatgcttaagatat

SEQ ID NO: 244578 - DNA, 55 bp, Artificial
  Synthetic oligonucleotide
gattttcatctcccacgtcactcgtctcatgatcaagtgtattgcgggcaaatag

SEQ ID NO: 244579 - DNA, 55 bp, Artificial
  Synthetic oligonucleotide
gatttgccacagtattatccgtcttaacaaccagctctacactacttagtgccgc

SEQ ID NO: 244580 - DNA, 55 bp, Artificial
  Synthetic oligonucleotide
gatttcgctcgaagatcaggctcttagcgttcaaagttataacggagaagctgtc

SEQ ID NO: 244581 - DNA, 55 bp, Artificial
  Synthetic oligonucleotide
gatttactgaccaattcactggctacggaacttcaacaaccagtggtagctcacc

SEQ ID NO: 244582 - DNA, 55 bp, Artificial
  Synthetic oligonucleotide
gattgattagctagtgctataagcttctcggctaagtaagccacacgcttgtcag

SEQ ID NO: 244583 - DNA, 55 bp, Artificial
  Synthetic oligonucleotide
gattgatgagttgccgattattaccttaatagcgaatcaagcacatgggacaacg

SEQ ID NO: 244584 - DNA, 55 bp, Artificial
  Synthetic oligonucleotide
gattctggttctgttggctcatttgggattaaatccactactagcgttgagttag

SEQ ID NO: 244585 - DNA, 55 bp, Artificial
  Synthetic oligonucleotide
tattgggcatagtcatccattcggtactggttaatataaaccacgcgcttgcaac

SEQ ID NO: 244586 - DNA, 55 bp, Artificial
  Synthetic oligonucleotide
ttgctcgtagttttcttgagcgcgcaggttcatacagtccacacggtgaatagcc

SEQ ID NO: 244587 - DNA, 55 bp, Artificial
  Synthetic oligonucleotide
gcagacttacgagccaactcatcactagcctctacaggacccgcaaccaggacct

SEQ ID NO: 244588 - DNA, 57 bp, Artificial
  Synthetic oligonucleotide
tatttggcgctgggacgagtttgtatccgccagtacgcgtgattttggacgaaacag

SEQ ID NO: 244589 - DNA, 55 bp, Artificial
  Synthetic oligonucleotide
ttggaaattgaccaggttccgatgttcaatgaaacaaatgatcagacagaaagcg

SEQ ID NO: 244590 - DNA, 55 bp, Artificial
  Synthetic oligonucleotide
gcactgatgacaactgtgctgtcgaccaattcagacctgctctcagcggttctgg

SEQ ID NO: 244591 - DNA, 55 bp, Artificial
  Synthetic oligonucleotide
gcacggcagagcctccgcatgaaatgctctcaatgaaattgccggcggagctttt

SEQ ID NO: 244592 - DNA, 55 bp, Artificial
  Synthetic oligonucleotide
gcacgactggtttccatcataaatggctcaatcaagtgagctacgacacgaaggc

SEQ ID NO: 244593 - DNA, 53 bp, Artificial
  Synthetic oligonucleotide
gcacgaaacgaaattttcaggagaaaagggtttagtagggcgcaatagcgtta

SEQ ID NO: 244594 - DNA, 55 bp, Artificial
  Synthetic oligonucleotide
ttggaattacatcaaaggggttctgcgtaactggaaattgagtggtattacgacg

SEQ ID NO: 244595 - DNA, 55 bp, Artificial
  Synthetic oligonucleotide
ttggacgattaactacaatgcgggcgataagaagctaccagctgggactgtatta

SEQ ID NO: 244596 - DNA, 55 bp, Artificial
  Synthetic oligonucleotide
ttggataggtcccaccagctgagcggcggcaatatacatagcaactagacttgga

SEQ ID NO: 244597 - DNA, 55 bp, Artificial
  Synthetic oligonucleotide
gcacctgatgccggaacaagcgtgaataagaacggattgcctacagggactgctt

SEQ ID NO: 244598 - DNA, 54 bp, Artificial
  Synthetic oligonucleotide
ttggattcgctatcttgcttcgttaccttccagttaaacgtaaccttcactacc

SEQ ID NO: 244599 - DNA, 60 bp, Artificial
  Synthetic oligonucleotide
tatttctgacattgactgttaaaaatgttgaggggcaagccttgaatagcacgattagtc

SEQ ID NO: 244600 - DNA, 55 bp, Artificial
  Synthetic oligonucleotide
gcaccgcctggtgtcttaatccagataccacagtttcctaaccaccacatcgcaa

SEQ ID NO: 244601 - DNA, 55 bp, Artificial
  Synthetic oligonucleotide
gcacccaggtatccttaaagaccctaaacgagtgagagattcttggaatgccgtt

SEQ ID NO: 244602 - DNA, 55 bp, Artificial
  Synthetic oligonucleotide
tatgattgtggccatgagctggcatagcttgctgagacttaggcatctcacgtgt

SEQ ID NO: 244603 - DNA, 55 bp, Artificial
  Synthetic oligonucleotide
gcaccatgtgactctaagccgtcaaactgcgccacaatcttatctgtgcgctctt

SEQ ID NO: 244604 - DNA, 55 bp, Artificial
  Synthetic oligonucleotide
tatgggagtatgaccgacctaagtctagtaaagaccacccaaccatgaagccgat

SEQ ID NO: 244605 - DNA, 55 bp, Artificial
  Synthetic oligonucleotide
tatgtatcgtcaggacagaaggtctatcgagaaggggaagaatacggttctgcac

SEQ ID NO: 244606 - DNA, 55 bp, Artificial
  Synthetic oligonucleotide
gcaccaagacactccctgcaacaggagaagctacttctatgcttagtctgctcgg

SEQ ID NO: 244607 - DNA, 55 bp, Artificial
  Synthetic oligonucleotide
tcgtcatgctaacttgtctcaacgagagcgatgaggttagagatttgatgacggc

SEQ ID NO: 244608 - DNA, 55 bp, Artificial
  Synthetic oligonucleotide
tcgtagctgaaattgctgcttactaccgttcacgtggtctaactcttgcagatgg

SEQ ID NO: 244609 - DNA, 55 bp, Artificial
  Synthetic oligonucleotide
gcaccaaagccaagaggctagacataccaaccaactcaatgttcagagtatgagc

SEQ ID NO: 244610 - DNA, 58 bp, Artificial
  Synthetic oligonucleotide
atagttcggtaataatcctagacaatagatttccagttggaatgccatgtgtttcgtc

SEQ ID NO: 244611 - DNA, 55 bp, Artificial
  Synthetic oligonucleotide
gcacaccgtacattccaggctgtattaccctcacagagatcacgactgcacttga

SEQ ID NO: 244612 - DNA, 55 bp, Artificial
  Synthetic oligonucleotide
gcaatgctctattaaacccagaagggactttagactgagattcatctgtcacacc

SEQ ID NO: 244613 - DNA, 55 bp, Artificial
  Synthetic oligonucleotide
gcaatgaaaagcaagtacaccacgctattgctagaaaatatgttgctaagtccgt

SEQ ID NO: 244614 - DNA, 55 bp, Artificial
  Synthetic oligonucleotide
gcaatctgataacgtccagaatccacccctgtcaagatggaatcaaaaggcgtcg

SEQ ID NO: 244615 - DNA, 55 bp, Artificial
  Synthetic oligonucleotide
tcgtaacctgtccggtaagttagtctagtatgaacttagaaattcgagagcagac

SEQ ID NO: 244616 - DNA, 55 bp, Artificial
  Synthetic oligonucleotide
tttacggaactcagcaccaaggagtctttagacctgtttgctcaggctcctaaaa

SEQ ID NO: 244617 - DNA, 55 bp, Artificial
  Synthetic oligonucleotide
tcgctagaactagctgtactttcgaccaaggaatgtgacgacggtagccgccaca

SEQ ID NO: 244618 - DNA, 55 bp, Artificial
  Synthetic oligonucleotide
gatagaggagcttttgaagcgcgtgtagaaaaggctataaatgacgctagggacg

SEQ ID NO: 244619 - DNA, 55 bp, Artificial
  Synthetic oligonucleotide
gatacatagctggcatggtgatcatagacgagaccatctggtgtcacgatctgga

SEQ ID NO: 244620 - DNA, 55 bp, Artificial
  Synthetic oligonucleotide
gataagtgcagctactaggctaatcggtgaaaatcctcgaatagaagaagcggac

SEQ ID NO: 244621 - DNA, 59 bp, Artificial
  Synthetic oligonucleotide
atatatggggagagactatcttcgccttcgttataaatctgaggagtagaaatgactaa

SEQ ID NO: 244622 - DNA, 55 bp, Artificial
  Synthetic oligonucleotide
tcacgggaccagggaggtaaatgcgtggcgatctaagagtctgcccctttccgat

SEQ ID NO: 244623 - DNA, 55 bp, Artificial
  Synthetic oligonucleotide
gataacagctgatttgaggtctgctactactcccttgatgctttctatcgttgca

SEQ ID NO: 244624 - DNA, 55 bp, Artificial
  Synthetic oligonucleotide
gataaagaactgatcgaggctttacgctatacatacggagtactcgctcaagctc

SEQ ID NO: 244625 - DNA, 55 bp, Artificial
  Synthetic oligonucleotide
gagtttgtcaaggacagtcacatgcacgtctggatggttgttgtagacatagtgt

SEQ ID NO: 244626 - DNA, 55 bp, Artificial
  Synthetic oligonucleotide
gagttgcaacaaccaaatcctgagcagatttccctacaaattgagttgcggctaa

SEQ ID NO: 244627 - DNA, 55 bp, Artificial
  Synthetic oligonucleotide
gagttcaaatatggcttgacgccgcattatttcctcttgcaatagtggggcaaat

SEQ ID NO: 244628 - DNA, 55 bp, Artificial
  Synthetic oligonucleotide
gagttagacaagtcgcaggattatatcgtgagctgtcatagtggacttcgtagct

SEQ ID NO: 244629 - DNA, 55 bp, Artificial
  Synthetic oligonucleotide
tcagtcctagcttctgtcgacccttgtgttacacgcttatctgaaccaagaacta

SEQ ID NO: 244630 - DNA, 55 bp, Artificial
  Synthetic oligonucleotide
gagtggcttgatgcctagctgttctccctcaagaccgatcaagcgaacttcacgt

SEQ ID NO: 244631 - DNA, 55 bp, Artificial
  Synthetic oligonucleotide
gagtgacttctaaacgataatagacaggatcagtgaaaagtagctgacgtaaagg

SEQ ID NO: 244632 - DNA, 60 bp, Artificial
  Synthetic oligonucleotide
tattgaactctatcatctatgggtattaacacgttatcaaattctctcccaataacattg

SEQ ID NO: 244633 - DNA, 55 bp, Artificial
  Synthetic oligonucleotide
gagtcgttgttgctacctataaaccatgcagtgctggttcccaatccagcgaaga

SEQ ID NO: 244634 - DNA, 55 bp, Artificial
  Synthetic oligonucleotide
tcagtttgattctgtggtcatgaaccctccttattctgcgaaatggtcagcggca

SEQ ID NO: 244635 - DNA, 55 bp, Artificial
  Synthetic oligonucleotide
gagtcgataggtagtcttcggtctactattgagcataaggaggtcataacgcagg

SEQ ID NO: 244636 - DNA, 55 bp, Artificial
  Synthetic oligonucleotide
tcatacgaggcaagacgagttagtactgcgtctagctcagcaccctagtgctgag

SEQ ID NO: 244637 - DNA, 55 bp, Artificial
  Synthetic oligonucleotide
gagtaaggctgcaaatcaacagccctattaatgaaagctagaagtatggttgagg

SEQ ID NO: 244638 - DNA, 55 bp, Artificial
  Synthetic oligonucleotide
gagtaagcccatcagttgattccatagcgattgttcgaaccattccgtccccaag

SEQ ID NO: 244639 - DNA, 55 bp, Artificial
  Synthetic oligonucleotide
gaggtgaacacacctgatggttatgtggctgaagtaaatagtgaagatcaaggta

SEQ ID NO: 244640 - DNA, 55 bp, Artificial
  Synthetic oligonucleotide
gaggtccattcttttcgcttctctggatctagcttgccattgcgactggttcccc

SEQ ID NO: 244641 - DNA, 55 bp, Artificial
  Synthetic oligonucleotide
tcatatcagcttgttctaacagctctgccatggttgccgtaacatccctcgtagc

SEQ ID NO: 244642 - DNA, 55 bp, Artificial
  Synthetic oligonucleotide
gagggcaactttgagtgttccctcatagccgtcattagattctgtcgtgtaaaag

SEQ ID NO: 244643 - DNA, 52 bp, Artificial
  Synthetic oligonucleotide
tattcccacgaaaaaaggtagcctcatggaagggactacctctttttatttg

SEQ ID NO: 244644 - DNA, 55 bp, Artificial
  Synthetic oligonucleotide
gaggcaggtagtccgtgttcaattactaagattaactagcctagaagtgccaact

SEQ ID NO: 244645 - DNA, 55 bp, Artificial
  Synthetic oligonucleotide
tcatatccctcacacatggctactaactctacctcatcgtaatctccgtctatcg

SEQ ID NO: 244646 - DNA, 55 bp, Artificial
  Synthetic oligonucleotide
ttggtgcgtgacgtgagaaaataccttgtggtggctctcctaagcacgagaatgg

SEQ ID NO: 244647 - DNA, 55 bp, Artificial
  Synthetic oligonucleotide
gattcgtgcacggtcccgtaaattgtcacaagaagtagagggtggtctcggtctc

SEQ ID NO: 244648 - DNA, 55 bp, Artificial
  Synthetic oligonucleotide
tcggtttaacatcgcctccagaggcaactgcccaagcatttggcaatgacccaga

SEQ ID NO: 244649 - DNA, 55 bp, Artificial
  Synthetic oligonucleotide
tattgtaacctatgcaatgagtgcctttggtcagggaatttcagttacgcaagta

SEQ ID NO: 244650 - DNA, 55 bp, Artificial
  Synthetic oligonucleotide
gattatgaaagccgataactgaatgaaataataagcgtagcgccccttatttcgg

SEQ ID NO: 244651 - DNA, 55 bp, Artificial
  Synthetic oligonucleotide
gatgttgtgggacattataaatcccaccctgaaatgactttaacctttgccggcc

SEQ ID NO: 244652 - DNA, 55 bp, Artificial
  Synthetic oligonucleotide
gatgttgtcaagaacaagacgtgatttacgaggtgaaacacgcactgtacgagcc

SEQ ID NO: 244653 - DNA, 55 bp, Artificial
  Synthetic oligonucleotide
gatgtgcgcttggaaaacacgactgattgggaaactttgagaggctttgcggtgc

SEQ ID NO: 244654 - DNA, 52 bp, Artificial
  Synthetic oligonucleotide
atatttctaacgaaaagcgtgcgccaaaaaacccccttcgtcaattttgaca

SEQ ID NO: 244655 - DNA, 55 bp, Artificial
  Synthetic oligonucleotide
tcggtgctgggatctatggcagttttcgattaatgtataccgcttcaacatggtt

SEQ ID NO: 244656 - DNA, 55 bp, Artificial
  Synthetic oligonucleotide
gatggtttatgcggcgcgtgtcttaaatgaccaaacaccgactattgaagaaccg

SEQ ID NO: 244657 - DNA, 55 bp, Artificial
  Synthetic oligonucleotide
gatggtcgcaatttcattgtcctccacagtcgaaaggaggtatttagccaaacgg

SEQ ID NO: 244658 - DNA, 55 bp, Artificial
  Synthetic oligonucleotide
tcggcgttgaataacgtgtcatgaccaactcttgctcgttgcatttgagcatcac

SEQ ID NO: 244659 - DNA, 55 bp, Artificial
  Synthetic oligonucleotide
gatggcctagttttgatccggcacaaataacaagtcgtaacgccagaggtgtagc

SEQ ID NO: 244660 - DNA, 55 bp, Artificial
  Synthetic oligonucleotide
gatgaggcccgtcagcttttaagacaaatgggcgcaaaatcacttattggccgaa

SEQ ID NO: 244661 - DNA, 55 bp, Artificial
  Synthetic oligonucleotide
tcaacgagattgttcaataactgatcacgtgaaatttcttgacctggcctaaggc

SEQ ID NO: 244662 - DNA, 55 bp, Artificial
  Synthetic oligonucleotide
tcggcctcgtttagctgtgtcaagatactgaggttctagtcctaaggcgagtgcc

SEQ ID NO: 244663 - DNA, 55 bp, Artificial
  Synthetic oligonucleotide
gatctgttggaggataatccttcccttaagcatagcttgaagtcacgcttgccgt

SEQ ID NO: 244664 - DNA, 55 bp, Artificial
  Synthetic oligonucleotide
gatctagataaactcgggtttcttctgggatttctacatcacggtcgtactgacc

SEQ ID NO: 244665 - DNA, 60 bp, Artificial
  Synthetic oligonucleotide
tattcaccggctcatcagcatcccgtaactgaatgtgccccaaagttgcacggcccaagc

SEQ ID NO: 244666 - DNA, 55 bp, Artificial
  Synthetic oligonucleotide
tcaactgctagggatgggtcagaccagcccgtacgcattttgacagtgaggggga

SEQ ID NO: 244667 - DNA, 54 bp, Artificial
  Synthetic oligonucleotide
ttgtggtaaccttgtattaatggagggagttggtattctcaaatgtacccctcg

SEQ ID NO: 244668 - DNA, 55 bp, Artificial
  Synthetic oligonucleotide
tcgcttcgttccgcttatcgcagacgctatggtcaatcagacagcgtagctattg

SEQ ID NO: 244669 - DNA, 54 bp, Artificial
  Synthetic oligonucleotide
gatccaaatacaggtgacaagtgggttaatcgctcacttaccttaaacggtacg

SEQ ID NO: 244670 - DNA, 55 bp, Artificial
  Synthetic oligonucleotide
gatcacgcagatagtcattacttagcgaaacgaataaagggaaccgtttatagca

SEQ ID NO: 244671 - DNA, 55 bp, Artificial
  Synthetic oligonucleotide
gatatgggagtcgcttagccaatagggagtttagctcagctaaggggaacgtaag

SEQ ID NO: 244672 - DNA, 55 bp, Artificial
  Synthetic oligonucleotide
gatatcgtccaggccaatctcaatgggtgcattggtatcaatggtcgcaagagtc

SEQ ID NO: 244673 - DNA, 55 bp, Artificial
  Synthetic oligonucleotide
tcgctgaagttgcaggtggcactcgcgttttagactaggagagaagtaaatggac

SEQ ID NO: 244674 - DNA, 55 bp, Artificial
  Synthetic oligonucleotide
tcaatcttacggtgtccctatagaagctgtggaatttgctaacgaacctaatatg

SEQ ID NO: 244675 - DNA, 55 bp, Artificial
  Synthetic oligonucleotide
gtgtaaatgtcggagcagtcaagtaagagttgaccataccttttgaaatcgcctt

SEQ ID NO: 244676 - DNA, 60 bp, Artificial
  Synthetic oligonucleotide
tatgtgatagatacttatacagttcactagcgttctttaaagctcgtgggatagactaca

SEQ ID NO: 244677 - DNA, 55 bp, Artificial
  Synthetic oligonucleotide
ggtgagccttcatctagtcaatacgtgacagtccagttctatcagacctctcgtt

SEQ ID NO: 244678 - DNA, 55 bp, Artificial
  Synthetic oligonucleotide
tggaacggctccgtttgagttatcgtcctgcgtccagttgaaaggtgcataggca

SEQ ID NO: 244679 - DNA, 55 bp, Artificial
  Synthetic oligonucleotide
ggtgaatttaaacctagtcctaatcctgtgaatcaagctcaggtccaggaagggc

SEQ ID NO: 244680 - DNA, 55 bp, Artificial
  Synthetic oligonucleotide
ggtgaagcacaatcattgatggggctacccagagtataagaacgcttatgcacac

SEQ ID NO: 244681 - DNA, 55 bp, Artificial
  Synthetic oligonucleotide
tgtctattcttcgacgcaggaacgtgcttgtgatactgctgaattagcaacgggg

SEQ ID NO: 244682 - DNA, 55 bp, Artificial
  Synthetic oligonucleotide
ggtctgggagaccttttgagccacctgcggttcgtgcgatgcctcgggtctttcg

SEQ ID NO: 244683 - DNA, 55 bp, Artificial
  Synthetic oligonucleotide
ggtctacgggattgcctttatttggattgaggaccgcaatcgacgtgtagatcct

SEQ ID NO: 244684 - DNA, 55 bp, Artificial
  Synthetic oligonucleotide
ggtcgtactgacttacctaccagtaactttgaggacctcattactggtattcgcc

SEQ ID NO: 244685 - DNA, 55 bp, Artificial
  Synthetic oligonucleotide
ggtcgatataatgtaagggagcttgagttgttaaaggaggcttagtccttggaca

SEQ ID NO: 244686 - DNA, 55 bp, Artificial
  Synthetic oligonucleotide
ggtcgagttcaattacgctgaacatgctagactttcgtccgagttcggttgcaat

SEQ ID NO: 244687 - DNA, 53 bp, Artificial
  Synthetic oligonucleotide
cacgttttttagaggaactcattttggacgatgacccccgaaccctctatatc

SEQ ID NO: 244688 - DNA, 60 bp, Artificial
  Synthetic oligonucleotide
atcagctgagcagctccatcgggccgttaagcggcgtcttgaggagatattgcgaaggct

SEQ ID NO: 244689 - DNA, 55 bp, Artificial
  Synthetic oligonucleotide
gtgtagtggtgccattggtctagctcggattccccaggtgatttacggggcgacc

SEQ ID NO: 244690 - DNA, 55 bp, Artificial
  Synthetic oligonucleotide
tgtcttgagtgacgctgataagttagagaatgaactgactgttatccgtcgtggg

SEQ ID NO: 244691 - DNA, 55 bp, Artificial
  Synthetic oligonucleotide
ggtcccttgattgggccgtctgccaatatctcaggtcaggcgagtggagtgacct

SEQ ID NO: 244692 - DNA, 55 bp, Artificial
  Synthetic oligonucleotide
gtgtcaatttgatatggcagcagtcattgttatcatgccttcgatcttagctatc

SEQ ID NO: 244693 - DNA, 55 bp, Artificial
  Synthetic oligonucleotide
ggtcccagctttatcaattgcgcttcaatcctatactcaggaaggggatgctgta

SEQ ID NO: 244694 - DNA, 53 bp, Artificial
  Synthetic oligonucleotide
ggtccaatgaaaccagttggtttggagtatcctgaaggactacaaagggaacc

SEQ ID NO: 244695 - DNA, 55 bp, Artificial
  Synthetic oligonucleotide
ggtccaaggcctgggcgatgtcttctgattgacgaatatctttaaggctggcgtc

SEQ ID NO: 244696 - DNA, 51 bp, Artificial
  Synthetic oligonucleotide
ggtcagggttacaccctaacaacctaaaggcgggttggaatagccctagaa

SEQ ID NO: 244697 - DNA, 55 bp, Artificial
  Synthetic oligonucleotide
ggtcagccactttactaccacgggcatgaccaaataaccaagttaatcgatcgct

SEQ ID NO: 244698 - DNA, 55 bp, Artificial
  Synthetic oligonucleotide
ggtcagccactcgtcttaatgcatttccgataaagataatagcaagcaccacaat

SEQ ID NO: 244699 - DNA, 56 bp, Artificial
  Synthetic oligonucleotide
atcatctgaataaggttttaggcaccctaacaagtcgtttaagcgatttgtgtata

SEQ ID NO: 244700 - DNA, 53 bp, Artificial
  Synthetic oligonucleotide
ggtcagaaaaccttagtcaggaagtgggacaaactaaactctatttgtcttgg

SEQ ID NO: 244701 - DNA, 55 bp, Artificial
  Synthetic oligonucleotide
ggtcacagtagagctctaatatctgagccgtaggcagggtctgtatagcttgagg

SEQ ID NO: 244702 - DNA, 55 bp, Artificial
  Synthetic oligonucleotide
gtgtcaggccagaagacgtggtcagaccatgataaccaagacggtctacggccag

SEQ ID NO: 244703 - DNA, 55 bp, Artificial
  Synthetic oligonucleotide
ggtcacaacaagtcggcagttacctactcacaagaactttacgaaaacacagcta

SEQ ID NO: 244704 - DNA, 53 bp, Artificial
  Synthetic oligonucleotide
ggtcaaatgggtaaggtacttttggacggtctgtttctggtacatttggaatc

SEQ ID NO: 244705 - DNA, 55 bp, Artificial
  Synthetic oligonucleotide
ggtattggtgtctggttagcttataaggaagcgccttatcgtcatctaacaggcg

SEQ ID NO: 244706 - DNA, 55 bp, Artificial
  Synthetic oligonucleotide
ggttgctctaccctaagacttgtccctttgatagaggtgcgatcatttgtggatg

SEQ ID NO: 244707 - DNA, 55 bp, Artificial
  Synthetic oligonucleotide
ggttgatggaggatacgtcaactcaaattatgtttcagcgatgcttgatagagat

SEQ ID NO: 244708 - DNA, 55 bp, Artificial
  Synthetic oligonucleotide
gtggcgcacggtactttgaagatatatcagctttctagcgctggtaaagagcagt

SEQ ID NO: 244709 - DNA, 55 bp, Artificial
  Synthetic oligonucleotide
gtggcgcagaattatgagacaaacgaactcataaccatccttgataatcgccgcc

SEQ ID NO: 244710 - DNA, 60 bp, Artificial
  Synthetic oligonucleotide
atcatgcaatttccgctagaattactatctattagtgaacgcaatccaaacgcctatcca

SEQ ID NO: 244711 - DNA, 55 bp, Artificial
  Synthetic oligonucleotide
ggttctaaaagaaatctatgacgttccagattatctctttcgcaagcgtatggcc

SEQ ID NO: 244712 - DNA, 55 bp, Artificial
  Synthetic oligonucleotide
ggttcgtcgttcgattgctgagccgcgtgagattttacattatgcctgtcatctg

SEQ ID NO: 244713 - DNA, 55 bp, Artificial
  Synthetic oligonucleotide
gtggctcaaactaaattgccacaacctaacttgactgttcgttaccacaaaggcc

SEQ ID NO: 244714 - DNA, 55 bp, Artificial
  Synthetic oligonucleotide
gtggctctcctatggctcatacatgggcggggtgtaatttaaacggtctttgggg

SEQ ID NO: 244715 - DNA, 55 bp, Artificial
  Synthetic oligonucleotide
gtgggatgtttactggacgtacgataccgtgagcaccaacgatagccggctgacc

SEQ ID NO: 244716 - DNA, 55 bp, Artificial
  Synthetic oligonucleotide
ggttaatcaacctagccaggctttgatagcgagtgagaacgggcataatcagcca

SEQ ID NO: 244717 - DNA, 55 bp, Artificial
  Synthetic oligonucleotide
tgtaacgttctgtgcatagtctgaaatcaaacgaccaagactaggcgtcgtaacg

SEQ ID NO: 244718 - DNA, 55 bp, Artificial
  Synthetic oligonucleotide
ggtgttgtttccatggatgtgcggggccagtcaggttactcacaagacggcttgc

SEQ ID NO: 244719 - DNA, 54 bp, Artificial
  Synthetic oligonucleotide
tgtaatttctccgtcaagtccgtcagcaccgtcaatttgggacggtttaggaaa

SEQ ID NO: 244720 - DNA, 55 bp, Artificial
  Synthetic oligonucleotide
tgtagagtcgctcaatacgtttcaactcaatctctaaaacttttcgacccaagtc

SEQ ID NO: 244721 - DNA, 59 bp, Artificial
  Synthetic oligonucleotide
tatctaaacgtagttaaaaatggccgaaaggtcataggctatgaaatgcagattactga

SEQ ID NO: 244722 - DNA, 55 bp, Artificial
  Synthetic oligonucleotide
gtggtccagccttaaacagctggttcaaaggttccataatcttagcacgtagggg

SEQ ID NO: 244723 - DNA, 55 bp, Artificial
  Synthetic oligonucleotide
ggtgtgacctttggcttgggccttccgggagtctgggctgggacactcttggaca

SEQ ID NO: 244724 - DNA, 55 bp, Artificial
  Synthetic oligonucleotide
ggtgtagcgtccctgtgaacgtgccaaggctaccgcaccatcgtttgctgaagtc

SEQ ID NO: 244725 - DNA, 55 bp, Artificial
  Synthetic oligonucleotide
ggtggttaacagaatcgattaaaatcatgctcattccgctagttgcgaacttgcc

SEQ ID NO: 244726 - DNA, 55 bp, Artificial
  Synthetic oligonucleotide
gtggtctgttgcaccgttcttagtccgctgattttagactcgagttctgtccgca

SEQ ID NO: 244727 - DNA, 55 bp, Artificial
  Synthetic oligonucleotide
gtggttatcgtccaggagacagtggagatcacggaaaaggtttggctatcgactt

SEQ ID NO: 244728 - DNA, 55 bp, Artificial
  Synthetic oligonucleotide
ggtgggagtttgacacaaagctcgattatcggggagcagatgaattctgaatacg

SEQ ID NO: 244729 - DNA, 55 bp, Artificial
  Synthetic oligonucleotide
ggtggcgacagacgctattgataaggcgtcaactccaaccgaagttgacacagcg

SEQ ID NO: 244730 - DNA, 55 bp, Artificial
  Synthetic oligonucleotide
tgtaggggaagtatcagagtgagagtttaagctgagtatcttaatgtgatagcgt

SEQ ID NO: 244731 - DNA, 55 bp, Artificial
  Synthetic oligonucleotide
ggtggcaagctattgagggagtaatcagcaatttccaaagtataccggcgtgggt

SEQ ID NO: 244732 - DNA, 53 bp, Artificial
  Synthetic oligonucleotide
tatcggaaaccaaaaatcggaaactgaaaatatagtttccgatattccgtcaa

SEQ ID NO: 244733 - DNA, 55 bp, Artificial
  Synthetic oligonucleotide
gtggttgctcgggtgttagatcaaggaggggctgtctgtatagctagtcctcgga

SEQ ID NO: 244734 - DNA, 55 bp, Artificial
  Synthetic oligonucleotide
tgtcaacctttctaatcagacacaagatttcgaaggcctacctgcccactatcag

SEQ ID NO: 244735 - DNA, 55 bp, Artificial
  Synthetic oligonucleotide
ggtgaggcacggaaactagctattgatatgcgtttattggactctagctatagtc

SEQ ID NO: 244736 - DNA, 55 bp, Artificial
  Synthetic oligonucleotide
gggtgatgtcaaacaaacgaccgaggccagtattgggaatgtagctttggaacag

SEQ ID NO: 244737 - DNA, 55 bp, Artificial
  Synthetic oligonucleotide
gggtgatagattcccgccttgaggtgtcccgactaaagtcttatgtcgctgtccg

SEQ ID NO: 244738 - DNA, 55 bp, Artificial
  Synthetic oligonucleotide
gggtctcaccagggagcccgttaattaagtgcgaaacaatctcaatcttaggata

SEQ ID NO: 244739 - DNA, 55 bp, Artificial
  Synthetic oligonucleotide
gggtctaccacggagcctagaagtaagtatcagttgcgcgtggtaaataagggca

SEQ ID NO: 244740 - DNA, 55 bp, Artificial
  Synthetic oligonucleotide
gggtctacagatacgagaataggggtgttagaatgggtagaaacccttacgcatc

SEQ ID NO: 244741 - DNA, 55 bp, Artificial
  Synthetic oligonucleotide
gggtctaattgagaatcggcatctcagtccaatcgatgacacacagtcattgccc

SEQ ID NO: 244742 - DNA, 55 bp, Artificial
  Synthetic oligonucleotide
gttaatctgactagggacaacctgaaaggtatctgccaactgactacgttgcaac

SEQ ID NO: 244743 - DNA, 56 bp, Artificial
  Synthetic oligonucleotide
tatccatgaaaacagacccaatagtttgaccgttttcagtcattaaatcaacgatt

SEQ ID NO: 244744 - DNA, 55 bp, Artificial
  Synthetic oligonucleotide
gggtcataccaagggtcgcttgaccactcttgacttggaacaaggtcataagctg

SEQ ID NO: 244745 - DNA, 55 bp, Artificial
  Synthetic oligonucleotide
gttactacctttgtggattctggtcttatgcggagattgggcggttttatctggg

SEQ ID NO: 244746 - DNA, 55 bp, Artificial
  Synthetic oligonucleotide
gttacttgcccatggagcgacttccttaacaccccatgtacattgaccaactgga

SEQ ID NO: 244747 - DNA, 55 bp, Artificial
  Synthetic oligonucleotide
ggggttctctgtcgcaccaactgagatactctcaatgttgacctgacgacgagat

SEQ ID NO: 244748 - DNA, 52 bp, Artificial
  Synthetic oligonucleotide
ggggttcatgaaagtcgatgtccctagtgggaaaggtaaagttgttctaacc

SEQ ID NO: 244749 - DNA, 55 bp, Artificial
  Synthetic oligonucleotide
ggggtagccccaaaattagccttgcatttgcataaagctttcgggaaccgctagc

SEQ ID NO: 244750 - DNA, 53 bp, Artificial
  Synthetic oligonucleotide
ggggcgttttaccagtgacgtggaaactgtttcgaacgctctacaacaatcct

SEQ ID NO: 244751 - DNA, 55 bp, Artificial
  Synthetic oligonucleotide
ggggcgttaaaccacatccagtagcagtgttgacaatcaagagaactttgccacg

SEQ ID NO: 244752 - DNA, 55 bp, Artificial
  Synthetic oligonucleotide
ggggcggcgctatgggcgattttactgataaatatggcgtacgatggatgttgca

SEQ ID NO: 244753 - DNA, 55 bp, Artificial
  Synthetic oligonucleotide
ggggcggagccaccaagttatcttatggttagctgtcaaaactagaaggttttga

SEQ ID NO: 244754 - DNA, 58 bp, Artificial
  Synthetic oligonucleotide
aggggctttctacttggtccattgatggcgagcacttggtcggctccatcaccctacc

SEQ ID NO: 244755 - DNA, 54 bp, Artificial
  Synthetic oligonucleotide
gttatagttaacggtccccaattgtggcgctacatatttaggattcgctttagt

SEQ ID NO: 244756 - DNA, 55 bp, Artificial
  Synthetic oligonucleotide
ggggatcgtgaagcgcgggagatgcgcagccaatttgcgaaacccgaccaacgta

SEQ ID NO: 244757 - DNA, 53 bp, Artificial
  Synthetic oligonucleotide
ggggaaagattctcaagacgacctaaaatttatcacccaagcaaccttaatcg

SEQ ID NO: 244758 - DNA, 55 bp, Artificial
  Synthetic oligonucleotide
gggcttcgtttgtaagttagaaaggttccagcaaatgaggttgcaatagacagag

SEQ ID NO: 244759 - DNA, 55 bp, Artificial
  Synthetic oligonucleotide
gggctgcaatagctgtcatcatgccaattctatgatctccacaggtactgacagc

SEQ ID NO: 244760 - DNA, 55 bp, Artificial
  Synthetic oligonucleotide
gggctctttgctatgaatctcatgcaggttgtgagggtttacggctatgatagtg

SEQ ID NO: 244761 - DNA, 55 bp, Artificial
  Synthetic oligonucleotide
gggctaatacgattccgaacgctactagcacaccagcgacaatttacgttgacac

SEQ ID NO: 244762 - DNA, 55 bp, Artificial
  Synthetic oligonucleotide
gggcgcgtgacctttgatgggatagggcgtcgcttgcttccacaacgggaaactc

SEQ ID NO: 244763 - DNA, 55 bp, Artificial
  Synthetic oligonucleotide
tgccgaccgatccagacctagctccctacatggagcaaatccaattagtcgacgg

SEQ ID NO: 244764 - DNA, 55 bp, Artificial
  Synthetic oligonucleotide
gggcgactggaaacggatagctcaaagggcgcgtttgagtgtcgggtgtgggact

SEQ ID NO: 244765 - DNA, 60 bp, Artificial
  Synthetic oligonucleotide
agggggacaagctgaggatgtcgatgccctcatttcgtggttgatgggctattctgcaga

SEQ ID NO: 244766 - DNA, 55 bp, Artificial
  Synthetic oligonucleotide
ggtattcctatgtggcaggcgatctccattggtgttattggaaatatgctccctg

SEQ ID NO: 244767 - DNA, 55 bp, Artificial
  Synthetic oligonucleotide
ggtattacttgactcagatggttcatatgctcgcaatgcatggcaaggaaactac

SEQ ID NO: 244768 - DNA, 55 bp, Artificial
  Synthetic oligonucleotide
gtgtcctagacctcctcgagaaagcagcaaccgttctaccaaaagagcgtctcct

SEQ ID NO: 244769 - DNA, 55 bp, Artificial
  Synthetic oligonucleotide
ggtatgtgatgggatacacagttgctgtggtgggggctacaggtgccgttggagc

SEQ ID NO: 244770 - DNA, 55 bp, Artificial
  Synthetic oligonucleotide
gtgtcgtatggtgtgccttctggagaagttggtgtatctgttacaggttccttga

SEQ ID NO: 244771 - DNA, 55 bp, Artificial
  Synthetic oligonucleotide
ggtatagtagccatttcgttcatagtcgccagactggtactcacgagctgacaag

SEQ ID NO: 244772 - DNA, 55 bp, Artificial
  Synthetic oligonucleotide
tgcttggtgttcgcttgccaaacccagcaactatcgacgaagagtcaatcgttat

SEQ ID NO: 244773 - DNA, 52 bp, Artificial
  Synthetic oligonucleotide
ggtataagtccccttacgtgtgtaaatagtcgtttccttaccctgaacctca

SEQ ID NO: 244774 - DNA, 55 bp, Artificial
  Synthetic oligonucleotide
ggtagtgtggtattatcctccagagctgggtgtgaacagattacttatgcttgcg

SEQ ID NO: 244775 - DNA, 55 bp, Artificial
  Synthetic oligonucleotide
ggtagtaagacacataccttgaccattgatgagatgccgtctcactcacacgctc

SEQ ID NO: 244776 - DNA, 50 bp, Artificial
  Synthetic oligonucleotide
aggtaaattctgaggtaaatagtcgtcaggaggaaataaaggggttaaaa

SEQ ID NO: 244777 - DNA, 55 bp, Artificial
  Synthetic oligonucleotide
ggtagatagcgaagctggttatacagttttagtagacgagaagggcttgtttgag

SEQ ID NO: 244778 - DNA, 55 bp, Artificial
  Synthetic oligonucleotide
ggtacggccatttgttaatgtaatacgaactcctccagagaattgataagagctt

SEQ ID NO: 244779 - DNA, 55 bp, Artificial
  Synthetic oligonucleotide
ggtacgctataaatcggacttatggggcagtatggggctacatttagtgtggaac

SEQ ID NO: 244780 - DNA, 55 bp, Artificial
  Synthetic oligonucleotide
gtgtgatgagccacttggcagctagccttcgtgtcgtagcccacttgattgagcc

SEQ ID NO: 244781 - DNA, 55 bp, Artificial
  Synthetic oligonucleotide
ggtaagacgcttgcggcacgcaaggttgaagctattccatgcatgttggagtttg

SEQ ID NO: 244782 - DNA, 55 bp, Artificial
  Synthetic oligonucleotide
ggtaactggagtttggagcggtgacttgaatggggttgccttgactcagtcagct

SEQ ID NO: 244783 - DNA, 54 bp, Artificial
  Synthetic oligonucleotide
ggtaaccatcgtggtggttatttcaatcctactacgacttctgagggagcggtt

SEQ ID NO: 244784 - DNA, 55 bp, Artificial
  Synthetic oligonucleotide
gttaagcacacgatagactggttgaaaagcggtaatatgatttataatctcgctc

SEQ ID NO: 244785 - DNA, 55 bp, Artificial
  Synthetic oligonucleotide
gggttcccaactgctaatctagctcctattaatcgcacttacttacctgcagacg

SEQ ID NO: 244786 - DNA, 53 bp, Artificial
  Synthetic oligonucleotide
gggttatttgccgttttaccgtctctctagtaaatgtaccgctagattattta

SEQ ID NO: 244787 - DNA, 60 bp, Artificial
  Synthetic oligonucleotide
tccgtggtctggcaccacactatcttcgtggaacagcaggagcggctaaggttcgtggcg

SEQ ID NO: 244788 - DNA, 55 bp, Artificial
  Synthetic oligonucleotide
gggttattgcagaactgggtacacctaaggaagccacacatgaagtcattagtcg

SEQ ID NO: 244789 - DNA, 55 bp, Artificial
  Synthetic oligonucleotide
gggttaaagagctttctcgtttgaagcagtttccagtcatggtcactacttacga

SEQ ID NO: 244790 - DNA, 55 bp, Artificial
  Synthetic oligonucleotide
gggtggaataaactggattggtcgagctaaggtatctgcctatgtgaccgattcg

SEQ ID NO: 244791 - DNA, 55 bp, Artificial
  Synthetic oligonucleotide
gggtgctgagctagacgcagtactaactcgtcttgcctcgtataatcgacgaggc

SEQ ID NO: 244792 - DNA, 55 bp, Artificial
  Synthetic oligonucleotide
gttaagcgattgaccaagcaagtcaacgtcatttgtcacacgagaaagggtgtcc

SEQ ID NO: 244793 - DNA, 54 bp, Artificial
  Synthetic oligonucleotide
gggtgcggaactgttgacggtacttacttaggcattgtagacggaaaaggggca

SEQ ID NO: 244794 - DNA, 55 bp, Artificial
  Synthetic oligonucleotide
gggtgccacctaaaggtgtctattccaaggactttatcctcgctctgattgcccg

SEQ ID NO: 244795 - DNA, 51 bp, Artificial
  Synthetic oligonucleotide
gtcgaccaacaaaatctgccgtaaagttaaaactaccaccaaacaatttag

SEQ ID NO: 244796 - DNA, 55 bp, Artificial
  Synthetic oligonucleotide
tggattgtcgcatcgttttaggcagtgtgctttgtcgataactggtacataggcc

SEQ ID NO: 244797 - DNA, 55 bp, Artificial
  Synthetic oligonucleotide
gtcgaagatagagctggtaatgtgtcttttgctaccttgcgtgacctaaaagtgg

SEQ ID NO: 244798 - DNA, 60 bp, Artificial
  Synthetic oligonucleotide
cactagatgacgccgaaaatggtgacttggtgcatacgtatgacgataaagagaatatct

SEQ ID NO: 244799 - DNA, 57 bp, Artificial
  Synthetic oligonucleotide
tccgtctataattctgaccgtttttagttaagccaaagtgcttcataatgtcaagac

SEQ ID NO: 244800 - DNA, 55 bp, Artificial
  Synthetic oligonucleotide
gtcgaaaagtgactggatatgacatgaccattcgagaacctcagcattttagccc

SEQ ID NO: 244801 - DNA, 55 bp, Artificial
  Synthetic oligonucleotide
tggccgttagagctgtaaacacgagtcttgatggtccgctcaccttgaacacccg

SEQ ID NO: 244802 - DNA, 55 bp, Artificial
  Synthetic oligonucleotide
gtcctcatgagaccaacctgccgttacaccatctgaataaatcaagtgggcagac

SEQ ID NO: 244803 - DNA, 55 bp, Artificial
  Synthetic oligonucleotide
gtcctagattctgcccattgacaaaggcaactcccttaccaaactcagacaagtc

SEQ ID NO: 244804 - DNA, 55 bp, Artificial
  Synthetic oligonucleotide
gtgagcaattgggtatcaaaccacttagcgaagcgcaagcacttgcggacgacgc

SEQ ID NO: 244805 - DNA, 55 bp, Artificial
  Synthetic oligonucleotide
gtgagcccaagcaaaggccttggcagctgacaaaccaactagcaaggctccgacc

SEQ ID NO: 244806 - DNA, 55 bp, Artificial
  Synthetic oligonucleotide
gtgatataatcaaattgaggcgcctcagcgatacggtcggtggcgtgaatctctt

SEQ ID NO: 244807 - DNA, 55 bp, Artificial
  Synthetic oligonucleotide
gtccgttttacgcttaagaccgtcttttcttgtgtctctagatagtcattccacc

SEQ ID NO: 244808 - DNA, 52 bp, Artificial
  Synthetic oligonucleotide
gtccggtttgaccgagttttacagaaaccaatacagttatttcctccgctac

SEQ ID NO: 244809 - DNA, 55 bp, Artificial
  Synthetic oligonucleotide
gtgatcgcaacagaacgaatggtcgatgcttatcttaagagcacgttggtgaact

SEQ ID NO: 244810 - DNA, 53 bp, Artificial
  Synthetic oligonucleotide
aggtctgtttatttagacgttcctccaggaaacaatgttgtagtaaaatctgt

SEQ ID NO: 244811 - DNA, 55 bp, Artificial
  Synthetic oligonucleotide
gtccgctttaactacgatcctaccaatggcctctataacgttaaacaaactgcag

SEQ ID NO: 244812 - DNA, 55 bp, Artificial
  Synthetic oligonucleotide
gtccgcatcggtgagtgcgagtgagtcagcgtcagtgagcgcaagtgagtcagca

SEQ ID NO: 244813 - DNA, 55 bp, Artificial
  Synthetic oligonucleotide
gtccctttataattgaggtggcaccgcgttaccaacgccctcacacagaagtata

SEQ ID NO: 244814 - DNA, 55 bp, Artificial
  Synthetic oligonucleotide
gtccccattgtggcaaagagttcacaattgatgaagctagttatgctgatatctt

SEQ ID NO: 244815 - DNA, 55 bp, Artificial
  Synthetic oligonucleotide
gtccatgaaccatctgttccttttacctcgacttgaccgtctgctgtgacacgga

SEQ ID NO: 244816 - DNA, 55 bp, Artificial
  Synthetic oligonucleotide
gtccagcgtgtggctgacgctttcatgataatctgctggcaggtagcccaaggtt

SEQ ID NO: 244817 - DNA, 55 bp, Artificial
  Synthetic oligonucleotide
tggctggccctaccgctgtggggaaaacggcacttggaattgagttagcccagcg

SEQ ID NO: 244818 - DNA, 55 bp, Artificial
  Synthetic oligonucleotide
gtccaatgatctaaaagactatttgataacggtttatgatgagcgtaatcgtgcg

SEQ ID NO: 244819 - DNA, 55 bp, Artificial
  Synthetic oligonucleotide
gtccaaatccaccattactgcacgaacatttagtgcttttagacgtttcggatcc

SEQ ID NO: 244820 - DNA, 55 bp, Artificial
  Synthetic oligonucleotide
gtcattgaaaccgaatattcaaacttatgatccggtgtcgagaaaatctcctgtc

SEQ ID NO: 244821 - DNA, 56 bp, Artificial
  Synthetic oligonucleotide
aggtcttctaaagaatagcttccgcttgctaggggtgagccgggagaagcgaccgc

SEQ ID NO: 244822 - DNA, 55 bp, Artificial
  Synthetic oligonucleotide
tggcttgcacagctttcttgctggcatatacaccaatcaggatttccgacacccg

SEQ ID NO: 244823 - DNA, 55 bp, Artificial
  Synthetic oligonucleotide
gtcatggacttccacccagtcatctgctaatatgtcacaaggcgtcggactccac

SEQ ID NO: 244824 - DNA, 55 bp, Artificial
  Synthetic oligonucleotide
gtcatacgccatgaccaattgccaccgatagttgatgggtaattcatgcgagctg

SEQ ID NO: 244825 - DNA, 55 bp, Artificial
  Synthetic oligonucleotide
gtcagggctccaaccaaagtattcacagatacctgcaatcgtacccgtcaacatt

SEQ ID NO: 244826 - DNA, 55 bp, Artificial
  Synthetic oligonucleotide
gtctttgcggaagctccaatcgatctgatgtcttactacgaactacacaaagacg

SEQ ID NO: 244827 - DNA, 55 bp, Artificial
  Synthetic oligonucleotide
gtcttactttctcaatagtaggggcttaattgtcaacactcaatcagtttccggc

SEQ ID NO: 244828 - DNA, 53 bp, Artificial
  Synthetic oligonucleotide
tggccccttagcctcaactactgtttgtaacgttatcgtaatccctaaaacca

SEQ ID NO: 244829 - DNA, 55 bp, Artificial
  Synthetic oligonucleotide
gtctgccaagaccggaatccgcatgtcaatccgaatctcagagcggtcagaggtt

SEQ ID NO: 244830 - DNA, 55 bp, Artificial
  Synthetic oligonucleotide
gtctgcatatcggtccctacaatgacgagcctgcaacagttgaacgcatgcatgc

SEQ ID NO: 244831 - DNA, 55 bp, Artificial
  Synthetic oligonucleotide
gtgaatcttaccataagtcaagtcttgaggtccgagtttggctggatctacaaag

SEQ ID NO: 244832 - DNA, 55 bp, Artificial
  Synthetic oligonucleotide
aggtggaaaatcaagaaaactcttggtgagaaaagtcttgcattggttcaagttg

SEQ ID NO: 244833 - DNA, 55 bp, Artificial
  Synthetic oligonucleotide
gtctgatggtgcaactctctatatcacacgtgacttggctgcagtccctctaacg

SEQ ID NO: 244834 - DNA, 55 bp, Artificial
  Synthetic oligonucleotide
gtctgacactatcaatcagcgctttaatagctttgacaacgggccattgaaagaa

SEQ ID NO: 244835 - DNA, 55 bp, Artificial
  Synthetic oligonucleotide
gtctgaagcatttctgtaagtgccagcttgacagctcttgttgtgacctctggtg

SEQ ID NO: 244836 - DNA, 55 bp, Artificial
  Synthetic oligonucleotide
gtctcggttgcgccccttataaacaactgcctgacgaaaagtgccctcgtaggta

SEQ ID NO: 244837 - DNA, 55 bp, Artificial
  Synthetic oligonucleotide
gtctatcttacggtcttcggattacaccgtcggtcgctttacctcaccgtctatc

SEQ ID NO: 244838 - DNA, 55 bp, Artificial
  Synthetic oligonucleotide
gtctacttctcgcatcgtagccgtaataaagggctcttgtggaggatagtctcgc

SEQ ID NO: 244839 - DNA, 55 bp, Artificial
  Synthetic oligonucleotide
gtctaaagacattggcactgtatcgaagtagcctttcatgagccaagcattcatc

SEQ ID NO: 244840 - DNA, 55 bp, Artificial
  Synthetic oligonucleotide
gtcgttccaccctgctttatcttagtgtacatggcttcgttggagtcaaaagtct

SEQ ID NO: 244841 - DNA, 55 bp, Artificial
  Synthetic oligonucleotide
gtcggtctataaggaccaggcaaccatgcttaatggtgctcgtaaggagactatt

SEQ ID NO: 244842 - DNA, 55 bp, Artificial
  Synthetic oligonucleotide
gtcggctcgtctgtcagtcgctattcgactgacgctgataaggaggggtaagaac

SEQ ID NO: 244843 - DNA, 59 bp, Artificial
  Synthetic oligonucleotide
aggtgggaattacatttcacaaatagagtggagtggaatatggtcgcagtcactcaagg

SEQ ID NO: 244844 - DNA, 55 bp, Artificial
  Synthetic oligonucleotide
gtcgctgtattaactaaacgcgttacttagttgattcatcccaagtccactcggc

SEQ ID NO: 244845 - DNA, 55 bp, Artificial
  Synthetic oligonucleotide
gtcgcgtgcatcaacgcgagatacaaactctgtgctacctactttagagtagagc

SEQ ID NO: 244846 - DNA, 55 bp, Artificial
  Synthetic oligonucleotide
gtgacacatcccgacttgtcagctagtgataacgcaactcagacttctgaaatgg

SEQ ID NO: 244847 - DNA, 55 bp, Artificial
  Synthetic oligonucleotide
gtgacatctcatctagatttctcgttttaggacgaccagtggacttagtgcctcg

SEQ ID NO: 244848 - DNA, 55 bp, Artificial
  Synthetic oligonucleotide
gtgacctatgtcgtcttgcctggtccaccaagtgaactcaaatctatggtgaacc

SEQ ID NO: 244849 - DNA, 55 bp, Artificial
  Synthetic oligonucleotide
gtcgcctatgcgacagccaaagatggtactaagttggcggttgggattatgtacc

SEQ ID NO: 244850 - DNA, 55 bp, Artificial
  Synthetic oligonucleotide
gtcgccccaacacttaccgtatccatgtatatactagctccgtggagatgtttac

SEQ ID NO: 244851 - DNA, 55 bp, Artificial
  Synthetic oligonucleotide
tggccgaaaggtcataggctatgaaatgcagattactgataatcgacaagtacca

SEQ ID NO: 244852 - DNA, 55 bp, Artificial
  Synthetic oligonucleotide
gtcgatagttgcagctcgaaatgaaggaaaatggcaagaccaattgtggttaacc

SEQ ID NO: 244853 - DNA, 55 bp, Artificial
  Synthetic oligonucleotide
gtgactgggaagagcgatttgcaccagaaccacacattaaacgtgagctagatcg

SEQ ID NO: 244854 - DNA, 53 bp, Artificial
  Synthetic oligonucleotide
agtaaaagcgaaccagtcaaccttgtaaaccattgatgcgtaagggtttctac

SEQ ID NO: 244855 - DNA, 55 bp, Artificial
  Synthetic oligonucleotide
tggccgatctgagagcccaaaccgcctgtgggaccataaacaagaacactgccgc

SEQ ID NO: 244856 - DNA, 55 bp, Artificial
  Synthetic oligonucleotide
gtagcgaggtacatacgcaggatcaccactaagcacgtatcctacgatttggttg

SEQ ID NO: 244857 - DNA, 55 bp, Artificial
  Synthetic oligonucleotide
gtagccggtcgtatactgcatagcaacttcgactgaaataccatccatctcacca

SEQ ID NO: 244858 - DNA, 55 bp, Artificial
  Synthetic oligonucleotide
gtagagattcttttcttgagcctgataccagtccagaacagactggacgtcctga

SEQ ID NO: 244859 - DNA, 55 bp, Artificial
  Synthetic oligonucleotide
gtacttggagtagtagtagagtgttcatcagaacgcgtattgaccttaacgtagg

SEQ ID NO: 244860 - DNA, 55 bp, Artificial
  Synthetic oligonucleotide
gtacttgctgagcgacgcactgtcgatgcgattcagacgctgagatacttgctga

SEQ ID NO: 244861 - DNA, 55 bp, Artificial
  Synthetic oligonucleotide
gtacttatcgttaggacactgtgacaccatcggacactcagagtagtgtctaggg

SEQ ID NO: 244862 - DNA, 55 bp, Artificial
  Synthetic oligonucleotide
gtacgtggattcgatgatagttttatggcgccacattcacgttataccgaagtgc

SEQ ID NO: 244863 - DNA, 54 bp, Artificial
  Synthetic oligonucleotide
gtacgacggttagaacaattgggcgagaactggtcagaggtttaatgggtagct

SEQ ID NO: 244864 - DNA, 55 bp, Artificial
  Synthetic oligonucleotide
gtacctcatcaatctcacggcgaccgtttaaaacaatgttggcacctagactcgc

SEQ ID NO: 244865 - DNA, 49 bp, Artificial
  Synthetic oligonucleotide
tccggtttaaaaggccctgtaactaatggtttcgttgtcgtttttggac

SEQ ID NO: 244866 - DNA, 55 bp, Artificial
  Synthetic oligonucleotide
gtacctaaaatagtccctaggaagaaggcaccgaccagactagcaaagacacgga

SEQ ID NO: 244867 - DNA, 50 bp, Artificial
  Synthetic oligonucleotide
gtaccctaagttgtggcattttgtaccccataaaacgtgaaaacccttgg

SEQ ID NO: 244868 - DNA, 55 bp, Artificial
  Synthetic oligonucleotide
gtaccccacacatgcacttagggattgtgccaatgagaaatggtaagctgtcatc

SEQ ID NO: 244869 - DNA, 55 bp, Artificial
  Synthetic oligonucleotide
gtaatgatgggacaggtaattggcgaaccgataaaatggagtttcgtgtcaaagc

SEQ ID NO: 244870 - DNA, 55 bp, Artificial
  Synthetic oligonucleotide
gtgcctacgtgttgggctcctgtcatacggatatcatggacatagtatggatttg

SEQ ID NO: 244871 - DNA, 55 bp, Artificial
  Synthetic oligonucleotide
gtaatcgaagcaacagctcgtttggttgctactggtgcaaactggtctaaggctc

SEQ ID NO: 244872 - DNA, 55 bp, Artificial
  Synthetic oligonucleotide
tggtgtcagcaggcacgctatctgtagtacctggagcatgattgtgattcatcgg

SEQ ID NO: 244873 - DNA, 55 bp, Artificial
  Synthetic oligonucleotide
gtgctaggcattcctgaacggacattagataaattgctgaaggtactgaaggcga

SEQ ID NO: 244874 - DNA, 52 bp, Artificial
  Synthetic oligonucleotide
gtaagtacaagacctacacccaattctacgactcttacggtttccaagttaa

SEQ ID NO: 244875 - DNA, 55 bp, Artificial
  Synthetic oligonucleotide
gtaagggctttccatcaataagactagttaccagacgttggtactgatcactacg

SEQ ID NO: 244876 - DNA, 56 bp, Artificial
  Synthetic oligonucleotide
agtaatccataaattctgaaaacgtggacttatatagtagtccataaattctgaaa

SEQ ID NO: 244877 - DNA, 55 bp, Artificial
  Synthetic oligonucleotide
gtgcttgctattatctttatcggaaatgcactaagacgagtggctgaccaaagac

SEQ ID NO: 244878 - DNA, 55 bp, Artificial
  Synthetic oligonucleotide
gtaactagactaatagcgtatccccatgcttcttctagacatctttgaatccaag

SEQ ID NO: 244879 - DNA, 55 bp, Artificial
  Synthetic oligonucleotide
gtgctttcccacgtgatacaatgagtttacgaaaatgtagtgcacaagcacaccg

SEQ ID NO: 244880 - DNA, 55 bp, Artificial
  Synthetic oligonucleotide
ggttttcctacgatgtcagctattcttaccactcactcgattgcccaagccaaac

SEQ ID NO: 244881 - DNA, 55 bp, Artificial
  Synthetic oligonucleotide
ggtttgtcagctgccaaggcctttgcttgggctcacggacttccactgattcctg

SEQ ID NO: 244882 - DNA, 55 bp, Artificial
  Synthetic oligonucleotide
ggtttggcggtgacatggagcttagcgtagtttaaggctgctgtcgcactgtagc

SEQ ID NO: 244883 - DNA, 54 bp, Artificial
  Synthetic oligonucleotide
ggtttcttgagggtaagggaattcaagcatccatttcacgtaagggtaacagcc

SEQ ID NO: 244884 - DNA, 55 bp, Artificial
  Synthetic oligonucleotide
ggtttctcgcaatattgaagcaactcaaaacacaaaggaattgcaagacctcgca

SEQ ID NO: 244885 - DNA, 55 bp, Artificial
  Synthetic oligonucleotide
gtcagctgcctaagcaaggttcaaaatattaaattttaccggtcatcagtaccat

SEQ ID NO: 244886 - DNA, 55 bp, Artificial
  Synthetic oligonucleotide
gtcagaccattgttgaagggcggcttttgtagcatgataataagccccaagtggc

SEQ ID NO: 244887 - DNA, 58 bp, Artificial
  Synthetic oligonucleotide
agtaccaatgcttcctcccatagccaagccgtaaatcgctggacgccccaaggcaaca

SEQ ID NO: 244888 - DNA, 55 bp, Artificial
  Synthetic oligonucleotide
gtgatgctaaggctggtgtgattagtcttgagaaatggcgtcaggagctatatcg

SEQ ID NO: 244889 - DNA, 53 bp, Artificial
  Synthetic oligonucleotide
tgggtaccggattcaagactagaacaaccaagtctacaaccgactccggaacc

SEQ ID NO: 244890 - DNA, 55 bp, Artificial
  Synthetic oligonucleotide
gtcaatatgggtgtatcaagtgcaggagttgctgttcaaagaagtgcgagtcgtg

SEQ ID NO: 244891 - DNA, 55 bp, Artificial
  Synthetic oligonucleotide
gtcaagcattagtattactcctgttccaagatttacgagagggcgtctcgcttag

SEQ ID NO: 244892 - DNA, 55 bp, Artificial
  Synthetic oligonucleotide
gtcaaacgggttcagctagcctcagccatgacgattctcatgcaagggatttact

SEQ ID NO: 244893 - DNA, 55 bp, Artificial
  Synthetic oligonucleotide
tggtataatgtagtcaattagaaggaggcttgatatgtcgcgtactttaatcagc

SEQ ID NO: 244894 - DNA, 55 bp, Artificial
  Synthetic oligonucleotide
gtattgacaacggtggcatctttgattccccattccaagagtttggcccgcatca

SEQ ID NO: 244895 - DNA, 55 bp, Artificial
  Synthetic oligonucleotide
gtgcaacagtttgattgaacacatccagatcgattcaatgatgcttagctggtat

SEQ ID NO: 244896 - DNA, 55 bp, Artificial
  Synthetic oligonucleotide
gtatctccgacactaaggtcattagcgtcagctaaatctgaagaaatcaccgcag

SEQ ID NO: 244897 - DNA, 55 bp, Artificial
  Synthetic oligonucleotide
gtatcgggaaattattagtccgaatagcctccgtataattgctcaccatccagtt

SEQ ID NO: 244898 - DNA, 59 bp, Artificial
  Synthetic oligonucleotide
agtactatgaagacagtgtaattatgttcggtcaagttattgttaagaacatgacgcac

SEQ ID NO: 244899 - DNA, 55 bp, Artificial
  Synthetic oligonucleotide
tggataagtctgcccacttgatttattcagatggtgtaacggcaggttggtctca

SEQ ID NO: 244900 - DNA, 55 bp, Artificial
  Synthetic oligonucleotide
gtataccttgggttacaaacgatttagtcttctaggagctttgataacggctgtg

SEQ ID NO: 244901 - DNA, 55 bp, Artificial
  Synthetic oligonucleotide
gtatacagtcagaaaaaactgtgtatacagtcagaaaaaactgtgtatacagtca

SEQ ID NO: 244902 - DNA, 55 bp, Artificial
  Synthetic oligonucleotide
tggtctgcgttaagtgtgtatggatgggatgttgccatacaacgaaacatttgtg

SEQ ID NO: 244903 - DNA, 55 bp, Artificial
  Synthetic oligonucleotide
gtagtgactgttggaggttggaaatggagcgaactctaagatgtaactctggact

SEQ ID NO: 244904 - DNA, 55 bp, Artificial
  Synthetic oligonucleotide
gtgccaactgtacccgtcttctcagaccacctgacaattccccaacaggagtaga

SEQ ID NO: 244905 - DNA, 55 bp, Artificial
  Synthetic oligonucleotide
gtagtcgtgccacaagctgtcaatggcttacaggaggcgcccattcgtcatagcc

SEQ ID NO: 244906 - DNA, 55 bp, Artificial
  Synthetic oligonucleotide
gtagtcgctcaagatgatgacttggagggaattagaaccctaaaagagtctgtga

SEQ ID NO: 244907 - DNA, 55 bp, Artificial
  Synthetic oligonucleotide
gtagtatgcaccttgccaagcattatgcgcataagatccatctgatttgaggtaa

SEQ ID NO: 244908 - DNA, 55 bp, Artificial
  Synthetic oligonucleotide
gtaggtatgcgtaatgaacctctgctagtgacagattttgcatgggttactaata

SEQ ID NO: 244909 - DNA, 53 bp, Artificial
  Synthetic oligonucleotide
gtgtacacacttgctaagttcactaaagacactaaccccctattttgggcttt

SEQ ID NO: 244910 - DNA, 60 bp, Artificial
  Synthetic oligonucleotide
agtatggactgccgaatatgaaagttatcaattctgttctacgttctcatactggattga

SEQ ID NO: 244911 - DNA, 55 bp, Artificial
  Synthetic oligonucleotide
gtaggggagctcgactcataagtatcctaccgaggacaaaacgtatcatgtaaaa

SEQ ID NO: 244912 - DNA, 55 bp, Artificial
  Synthetic oligonucleotide
gtagggcgcaatagcgttatgtttaccctctctttagcctactttagttcaggct

SEQ ID NO: 244913 - DNA, 55 bp, Artificial
  Synthetic oligonucleotide
gtgccattttgtaccctaagttgtgccattttgtaccctaagttgtgccattttg

SEQ ID NO: 244914 - DNA, 55 bp, Artificial
  Synthetic oligonucleotide
gtagggatcgtgccgattctgactagttacatcgcccaccgaagagagattattc

SEQ ID NO: 244915 - DNA, 55 bp, Artificial
  Synthetic oligonucleotide
gtagctattaggacgttctgctagtttccacttgattcgttcacggtcctccaga

SEQ ID NO: 244916 - DNA, 55 bp, Artificial
  Synthetic oligonucleotide
tggtggcgattattatatctcgcaagatgaatggacgagtatgtggcaacaatcg

SEQ ID NO: 244917 - DNA, 55 bp, Artificial
  Synthetic oligonucleotide
taaacaggatttgctgaagcggttgacgacccattgtaaggcgctcgtttaccgt

SEQ ID NO: 244918 - DNA, 55 bp, Artificial
  Synthetic oligonucleotide
ggaccgtgacgaatagtagatgggagtatagagcagtgatattcccaaccaccag

SEQ ID NO: 244919 - DNA, 55 bp, Artificial
  Synthetic oligonucleotide
taaagagtgagagaccccatatacccaatgataactgctaggatcatcagtgcgc

SEQ ID NO: 244920 - DNA, 55 bp, Artificial
  Synthetic oligonucleotide
taaagttacaatctctgctagagggagagcctcgtctaagcgtaagcccgctaac

SEQ ID NO: 244921 - DNA, 60 bp, Artificial
  Synthetic oligonucleotide
agtatggactgcgatatgaagtatgcaagctcagtctacgttctcatactggattgattc

SEQ ID NO: 244922 - DNA, 55 bp, Artificial
  Synthetic oligonucleotide
ggaccacgcttgcgaactttcttcttagtggacaatctttaccacttgatgcgag

SEQ ID NO: 244923 - DNA, 55 bp, Artificial
  Synthetic oligonucleotide
taagacacagtccgtatccgttaatggtatggtaacgggtggagcagttatggcc

SEQ ID NO: 244924 - DNA, 55 bp, Artificial
  Synthetic oligonucleotide
ggacatgcctttatcatagtaggctaactctgggctagcaacacttggttgagcc

SEQ ID NO: 244925 - DNA, 55 bp, Artificial
  Synthetic oligonucleotide
tgagctgacttcgtcagttctatctacaacctcctgttttgagctgacttcgtca

SEQ ID NO: 244926 - DNA, 55 bp, Artificial
  Synthetic oligonucleotide
ggacagaaattggtaattcgttagaattcgatttcgtcgtctcacctccgcacag

SEQ ID NO: 244927 - DNA, 55 bp, Artificial
  Synthetic oligonucleotide
ggacacggcacttatggcaggtttgcaaaagaacgtctatccgttgtatgacgag

SEQ ID NO: 244928 - DNA, 55 bp, Artificial
  Synthetic oligonucleotide
ggacaagataaatcaaggcgactatacgctggacagtagcttcaagtatatcccc

SEQ ID NO: 244929 - DNA, 55 bp, Artificial
  Synthetic oligonucleotide
taatactaatagctcgaggacttatccaaagtaactgaggatacgaagcgcgagg

SEQ ID NO: 244930 - DNA, 55 bp, Artificial
  Synthetic oligonucleotide
ggaattgtccatagtttattagggacatcttcataacggattagggctctcatat

SEQ ID NO: 244931 - DNA, 55 bp, Artificial
  Synthetic oligonucleotide
ggaattggggcagtgaccttttagaagccagtatgaaaattgccaataagacgac

SEQ ID NO: 244932 - DNA, 57 bp, Artificial
  Synthetic oligonucleotide
agtatggcaattcataatattaaaccaaaacagaaccgatacaaagccttagatgaa

SEQ ID NO: 244933 - DNA, 55 bp, Artificial
  Synthetic oligonucleotide
ggaattgaccgcagaggctaaagcaatgctaagtgaacgtgacttacctgttgag

SEQ ID NO: 244934 - DNA, 55 bp, Artificial
  Synthetic oligonucleotide
tgagaactatctgtaacgaaagtcaaagcacgtaccatagctcggatagaacgac

SEQ ID NO: 244935 - DNA, 55 bp, Artificial
  Synthetic oligonucleotide
taatagtggagatgtatcgctattccagtagataccttgagttaggtatactccg

SEQ ID NO: 244936 - DNA, 55 bp, Artificial
  Synthetic oligonucleotide
ggaagctagctaaggaagtccgtggcaacaaagcacacgtgacagatatcactct

SEQ ID NO: 244937 - DNA, 55 bp, Artificial
  Synthetic oligonucleotide
taatcaggcgttgggtgatggaaccttgagcaactccgatcgttttaccgtttag

SEQ ID NO: 244938 - DNA, 55 bp, Artificial
  Synthetic oligonucleotide
taatcgtctcgtccgcttgagctaatcaaactccaaaggactgcccacttcctag

SEQ ID NO: 244939 - DNA, 55 bp, Artificial
  Synthetic oligonucleotide
ggaagcagtccgtggacagggagcaaagctcaggggtggtcagcttgggtagacc

SEQ ID NO: 244940 - DNA, 55 bp, Artificial
  Synthetic oligonucleotide
ggaagacttggcggtatctcgtacaacctttacatggggagtgcctgtcccatca

SEQ ID NO: 244941 - DNA, 55 bp, Artificial
  Synthetic oligonucleotide
tgactcactgtttaaccttagatgcgattagggtgattgtggatagtgacaaggc

SEQ ID NO: 244942 - DNA, 55 bp, Artificial
  Synthetic oligonucleotide
ggaagaacaaatcttcatgtgcccagtgaatcaatagagattgaaccgtaacatc

SEQ ID NO: 244943 - DNA, 60 bp, Artificial
  Synthetic oligonucleotide
agtcaacaccgtattatcttcaagacgcacttgagagtactgcttaatccattttgcaag

SEQ ID NO: 244944 - DNA, 55 bp, Artificial
  Synthetic oligonucleotide
ttcatccttgttaacatggtcagcgctctctcaactaaaaggtgactagctttcc

SEQ ID NO: 244945 - DNA, 55 bp, Artificial
  Synthetic oligonucleotide
taattctttgacggtgattgagggattgcggtaactttctacttggttgactcgc

SEQ ID NO: 244946 - DNA, 55 bp, Artificial
  Synthetic oligonucleotide
ggaacaccacgccattatccaacaaaacaagtacctaccgaatctgcattagcga

SEQ ID NO: 244947 - DNA, 55 bp, Artificial
  Synthetic oligonucleotide
ggagcactttcatcaatttaaggacctagtagagcggagcctcttttatggggcg

SEQ ID NO: 244948 - DNA, 55 bp, Artificial
  Synthetic oligonucleotide
gtttctcgcgattccacatgataaaggtacccgtatagcccgtatggtcgagcca

SEQ ID NO: 244949 - DNA, 55 bp, Artificial
  Synthetic oligonucleotide
ggagagctgattgtgcttgacggcaaggcctatcaagccaaggggataggagcaa

SEQ ID NO: 244950 - DNA, 55 bp, Artificial
  Synthetic oligonucleotide
ggagacgttgctcgtagttttcttgggcacgcaggttcatacagtccacacggtg

SEQ ID NO: 244951 - DNA, 55 bp, Artificial
  Synthetic oligonucleotide
ggagacattacggagttggacctcttggatgcagcagatattgggaactgtgaca

SEQ ID NO: 244952 - DNA, 55 bp, Artificial
  Synthetic oligonucleotide
ggagaagctatcaagtacttcgctactgataaaggactaggcttcggggtcgcta

SEQ ID NO: 244953 - DNA, 51 bp, Artificial
  Synthetic oligonucleotide
ggagaaaagggtttagtagggcgtaatagcgttatgtttaccctctcttta

SEQ ID NO: 244954 - DNA, 57 bp, Artificial
  Synthetic oligonucleotide
agtcactgattcgtaagtacctccattcgggagttgttattaacggacagcgacata

SEQ ID NO: 244955 - DNA, 55 bp, Artificial
  Synthetic oligonucleotide
ggactttaagggacaactgcctatccatgtcagaagttacctagatgagtttgcg

SEQ ID NO: 244956 - DNA, 55 bp, Artificial
  Synthetic oligonucleotide
ttatccgctaatactggcaaaccagactgtcccattaattgtgctaaaccgagtg

SEQ ID NO: 244957 - DNA, 55 bp, Artificial
  Synthetic oligonucleotide
gtttgagctagtcgaagtgagcgaccatggtttgactctttacacagaaagaaca

SEQ ID NO: 244958 - DNA, 55 bp, Artificial
  Synthetic oligonucleotide
ggactgtgaccttacaatatgccattaacggctttggacctcttattatcagtgc

SEQ ID NO: 244959 - DNA, 55 bp, Artificial
  Synthetic oligonucleotide
gtttgcactttaatcattctatcacaacccatttacggcgtcaagaatttgacgc

SEQ ID NO: 244960 - DNA, 55 bp, Artificial
  Synthetic oligonucleotide
gtttgctaggtagatgtgattgcggtcaaaagctgtcttttgcccaagcgacccg

SEQ ID NO: 244961 - DNA, 55 bp, Artificial
  Synthetic oligonucleotide
ggactccttgattagccagataagctgctagttgagtggattttccacctggtgc

SEQ ID NO: 244962 - DNA, 55 bp, Artificial
  Synthetic oligonucleotide
ggactattagcttggggtgcgtataatggttatcagtcggcatcacgaggtggat

SEQ ID NO: 244963 - DNA, 55 bp, Artificial
  Synthetic oligonucleotide
gtttggtatcctgaaaactatatcgtataggtgtcgtcatggatccttttagctg

SEQ ID NO: 244964 - DNA, 55 bp, Artificial
  Synthetic oligonucleotide
ggacgttcgcttggggtccatctaattcttgctacacaaaagccatcaggtgtcg

SEQ ID NO: 244965 - DNA, 60 bp, Artificial
  Synthetic oligonucleotide
agtcgccatcttcaaattgcgatagaacacgaaagaaaatcattgccagaccaacatcat

SEQ ID NO: 244966 - DNA, 55 bp, Artificial
  Synthetic oligonucleotide
tgagtgagtcagtcaagactagcgtttctcgcagtgaatctgcgtcaacgagtgc

SEQ ID NO: 244967 - DNA, 55 bp, Artificial
  Synthetic oligonucleotide
ggacggtatagcctgcatagttacgccatactgtaagatacgtttgtttagagcg

SEQ ID NO: 244968 - DNA, 55 bp, Artificial
  Synthetic oligonucleotide
ggacggactcctaatttcctactgcctcagccagtcttagactatatcgagaaag

SEQ ID NO: 244969 - DNA, 55 bp, Artificial
  Synthetic oligonucleotide
ttatcgggaggttgatgaacgttatctcttaaagagtgcttggagtcattcgacc

SEQ ID NO: 244970 - DNA, 55 bp, Artificial
  Synthetic oligonucleotide
ggacgcggcaagcatttgaaagagggcggagctgtctatgactatatttccggtc

SEQ ID NO: 244971 - DNA, 55 bp, Artificial
  Synthetic oligonucleotide
ggacgccctgtcatctatggtttggctctcggtggtagtgtcggtgtgcgtcaag

SEQ ID NO: 244972 - DNA, 55 bp, Artificial
  Synthetic oligonucleotide
ggacgcaaggttattcgtgaatccaacaaaccttattcaggaacggctgttatcg

SEQ ID NO: 244973 - DNA, 55 bp, Artificial
  Synthetic oligonucleotide
gttttactaccttggtgctcacttaccaatcttccgctcatatttgggtggcgga

SEQ ID NO: 244974 - DNA, 54 bp, Artificial
  Synthetic oligonucleotide
ggacgactaacgttaaagaagaaattgggaagctcgatcgtattcgtattagtg

SEQ ID NO: 244975 - DNA, 55 bp, Artificial
  Synthetic oligonucleotide
ggacgaagtccgtgctgaatcgtactgacgtacataaagcaaaagctagcgacgc

SEQ ID NO: 244976 - DNA, 57 bp, Artificial
  Synthetic oligonucleotide
tccattgggaggggaattctggggacaagctcattgaacaccaaaccagcgcaacgg

SEQ ID NO: 244977 - DNA, 55 bp, Artificial
  Synthetic oligonucleotide
gctgtctgcaagacccttcggagaacgcacatttacgtagtaaagtgtagtgcgt

SEQ ID NO: 244978 - DNA, 55 bp, Artificial
  Synthetic oligonucleotide
gctgtctcggcattattagcccgattgaggtcgttacgggtttctcgcaaaatct

SEQ ID NO: 244979 - DNA, 55 bp, Artificial
  Synthetic oligonucleotide
gctgtcacttcggtcaattgtaaatctagctgagctgttgagcttgactgtgttc

SEQ ID NO: 244980 - DNA, 55 bp, Artificial
  Synthetic oligonucleotide
gctgtaataacgagaccattccggaatccaagcatactgatggtcgtgatagttg

SEQ ID NO: 244981 - DNA, 54 bp, Artificial
  Synthetic oligonucleotide
gctgtaaaagtacgaaaataggtgtcaagccttcgttaggattataagtccaac

SEQ ID NO: 244982 - DNA, 55 bp, Artificial
  Synthetic oligonucleotide
gctggtctagaacctaagatggcctttactatcatggaacgggtacgtaagggct

SEQ ID NO: 244983 - DNA, 55 bp, Artificial
  Synthetic oligonucleotide
gctggggttgtaacaggagctatcggagtgagtgtgcctcgtctcagttactatt

SEQ ID NO: 244984 - DNA, 55 bp, Artificial
  Synthetic oligonucleotide
gctggctatcccgaactggcataaaggctagatagtcgtagtctgaacgaggttc

SEQ ID NO: 244985 - DNA, 55 bp, Artificial
  Synthetic oligonucleotide
gctgcttcagtccgaagaattctacgactattggcaagtgctgactgacacggat

SEQ ID NO: 244986 - DNA, 55 bp, Artificial
  Synthetic oligonucleotide
gctgctcttcgcgacgaggggaccagttaccactatcttccagctagtgatgaag

SEQ ID NO: 244987 - DNA, 56 bp, Artificial
  Synthetic oligonucleotide
agtgcggttagctttagcggtggtcaaacagtaggcggtcaatggaacgcagaccc

SEQ ID NO: 244988 - DNA, 55 bp, Artificial
  Synthetic oligonucleotide
gctgcctttgtagatccagctaaactcggacctcaagacttgacttatggtaaga

SEQ ID NO: 244989 - DNA, 55 bp, Artificial
  Synthetic oligonucleotide
gctgcacttgctacgtctagcactttaccactgtttactgatactaatttgtagt

SEQ ID NO: 244990 - DNA, 55 bp, Artificial
  Synthetic oligonucleotide
gctgatagcatagacgagttaggcttattacaacccgttcttgttaaacaacgtg

SEQ ID NO: 244991 - DNA, 55 bp, Artificial
  Synthetic oligonucleotide
gctgagtaggctccacggaaatagccaaaataaggttgcccttcaatctgatagg

SEQ ID NO: 244992 - DNA, 55 bp, Artificial
  Synthetic oligonucleotide
gctgactgcttagttttcgttcaatcaatcgcttatcaagttgaatcggaagccc

SEQ ID NO: 244993 - DNA, 55 bp, Artificial
  Synthetic oligonucleotide
gctgaatacgtatttaatggtgtgctgtcagagtggaccaagcaactgagacgac

SEQ ID NO: 244994 - DNA, 55 bp, Artificial
  Synthetic oligonucleotide
gctctggtcttacttttgcgtcgttatatttagggtgaccaatggcagcgagcaa

SEQ ID NO: 244995 - DNA, 55 bp, Artificial
  Synthetic oligonucleotide
gctctgctattgaaggaggaattccgctctttacggccctagatacagcagaagc

SEQ ID NO: 244996 - DNA, 55 bp, Artificial
  Synthetic oligonucleotide
tacgcaaggaatgccgctcagtatcgccaatccgttggtacgattgacaatcggt

SEQ ID NO: 244997 - DNA, 55 bp, Artificial
  Synthetic oligonucleotide
gctctgacgtttgatagtgatttgcggtaatacgtttcatgattgtccctccaac

SEQ ID NO: 244998 - DNA, 60 bp, Artificial
  Synthetic oligonucleotide
tccaccaggatatctgatgggagttatccccaatcatgtccccaatgacccacgagctta

SEQ ID NO: 244999 - DNA, 55 bp, Artificial
  Synthetic oligonucleotide
gctctccgtggtagcgtccgaatcactcaagaactctattgatgaggaataaagg

SEQ ID NO: 245000 - DNA, 55 bp, Artificial
  Synthetic oligonucleotide
gctctatgtgatgacttcgagctaatacttactcaaccagcccacatgaaggcta

SEQ ID NO: 245001 - DNA, 55 bp, Artificial
  Synthetic oligonucleotide
gctctacagttgctctaggtagaacgcttatcgccaatcaaatcctagctgccaa

SEQ ID NO: 245002 - DNA, 55 bp, Artificial
  Synthetic oligonucleotide
tacgtagcggttttggatcggtctgcatttgcggaggaagaccaagtcttttcgc

SEQ ID NO: 245003 - DNA, 55 bp, Artificial
  Synthetic oligonucleotide
gctcgaatcattcgtaacaacctccattgacctggttgtagttgaatcagttaag

SEQ ID NO: 245004 - DNA, 55 bp, Artificial
  Synthetic oligonucleotide
ttctagacatctttgaatccaagaaaaatctgctgatctttttactctggtattg

SEQ ID NO: 245005 - DNA, 55 bp, Artificial
  Synthetic oligonucleotide
tgaatggtcagttttcccaagaggctccgcaagtcatactctcagcctgtcagac

SEQ ID NO: 245006 - DNA, 55 bp, Artificial
  Synthetic oligonucleotide
gctccgttacaactgttcataaaagagcgggactctctatggagtaaggcagttg

SEQ ID NO: 245007 - DNA, 55 bp, Artificial
  Synthetic oligonucleotide
ggaaatgattgctctgacgcgccgtgagtatgatcttttggctactcttatgggg

SEQ ID NO: 245008 - DNA, 55 bp, Artificial
  Synthetic oligonucleotide
ttccagatccgtaacagcaagtaagaacaccccaaatgacttgaacgatagtcgg

SEQ ID NO: 245009 - DNA, 53 bp, Artificial
  Synthetic oligonucleotide
agttcacctaaagacactaacccactattttgggcttttagagttgacagtag

SEQ ID NO: 245010 - DNA, 55 bp, Artificial
  Synthetic oligonucleotide
ttccattcgggagttgttattaacggacagcgacataagactttagtcgggacac

SEQ ID NO: 245011 - DNA, 55 bp, Artificial
  Synthetic oligonucleotide
ggaaaatgacgcaaatttcaagttctgtggagcgctttgtttctattcatgatgg

SEQ ID NO: 245012 - DNA, 55 bp, Artificial
  Synthetic oligonucleotide
ttccgccaggagagtcagaactagtcgtacacttgtctagctgggtcgcagcgct

SEQ ID NO: 245013 - DNA, 54 bp, Artificial
  Synthetic oligonucleotide
ttcgaactattttactggacgaaactagagagtgtctcaaccacggtcttttcg

SEQ ID NO: 245014 - DNA, 55 bp, Artificial
  Synthetic oligonucleotide
tacaaactatctttgatagctctgttggtcgttcaacggttaaccatccgattgg

SEQ ID NO: 245015 - DNA, 55 bp, Artificial
  Synthetic oligonucleotide
ttcgcaaactaggcatcaacgtaacctttgacccttactaccaatacgatcgctt

SEQ ID NO: 245016 - DNA, 55 bp, Artificial
  Synthetic oligonucleotide
gcttgttatctaggggtcagggaggaagatcataactcttaaccctaactcggat

SEQ ID NO: 245017 - DNA, 55 bp, Artificial
  Synthetic oligonucleotide
tacaacctatatagcgagtgtccttgaccctgctactggaaaacgtgtaaacaag

SEQ ID NO: 245018 - DNA, 55 bp, Artificial
  Synthetic oligonucleotide
gcttgatccttgtgacaccatatgatggtcgctatgccaacgatcagtccagtga

SEQ ID NO: 245019 - DNA, 55 bp, Artificial
  Synthetic oligonucleotide
gcttgacaactccaacaggcatctgttctaagagtgaacttaaactatcttccgc

SEQ ID NO: 245020 - DNA, 60 bp, Artificial
  Synthetic oligonucleotide
gtggtcatgaaccctccttactctgcgaaatggtcagcggcagataagtttctctctgat

SEQ ID NO: 245021 - DNA, 51 bp, Artificial
  Synthetic oligonucleotide
agtttaaaatgacatacggtaacatctataaaccccttaactacaatgttt

SEQ ID NO: 245022 - DNA, 55 bp, Artificial
  Synthetic oligonucleotide
tgacgacagtagagctagaatatctagcggacctcttgcaagctaagttgctggc

SEQ ID NO: 245023 - DNA, 55 bp, Artificial
  Synthetic oligonucleotide
tgacagagaaggcacagaccctggaatcacatataaatcatccgaaactgtttcg

SEQ ID NO: 245024 - DNA, 55 bp, Artificial
  Synthetic oligonucleotide
gcttctatatcgctgaagttgcaggtggcactcgcgtccttgactagttaaaagg

SEQ ID NO: 245025 - DNA, 55 bp, Artificial
  Synthetic oligonucleotide
gcttcgcaacagaaccagctacttctacagaacttccgtgtggatattgaagttc

SEQ ID NO: 245026 - DNA, 55 bp, Artificial
  Synthetic oligonucleotide
ttcgctgaacaaacctcaacagtccgctctaggaatatgagtcttgtgcctattc

SEQ ID NO: 245027 - DNA, 55 bp, Artificial
  Synthetic oligonucleotide
tgacagactccagttgtttagaaactatctcaaaggaagcctgtaagcgtgtctg

SEQ ID NO: 245028 - DNA, 55 bp, Artificial
  Synthetic oligonucleotide
gcttcatccgctgagaatctgacctatgttacctgggatccccattctaatgtcg

SEQ ID NO: 245029 - DNA, 55 bp, Artificial
  Synthetic oligonucleotide
gcttatgcgagtgtccacttagacgaaagcacccctcacatgcacatgggagtag

SEQ ID NO: 245030 - DNA, 55 bp, Artificial
  Synthetic oligonucleotide
gcttataggtgagtcgtgtcacacggtcaatcaaggacttctcacgaccatccat

SEQ ID NO: 245031 - DNA, 55 bp, Artificial
  Synthetic oligonucleotide
gcttagaaccctgtttgagcgatactttgcgaccgactgtattgcgcatcaaggg

SEQ ID NO: 245032 - DNA, 60 bp, Artificial
  Synthetic oligonucleotide
tcaggcagtcggagactgggagaaaagcggtcaactgttggcagatgttgctcagcgctt

SEQ ID NO: 245033 - DNA, 55 bp, Artificial
  Synthetic oligonucleotide
gcttacttcttattctaaacctggatatccttatgataatgccgtgactgaggtc

SEQ ID NO: 245034 - DNA, 55 bp, Artificial
  Synthetic oligonucleotide
gcttaatgccacaggagtcacacagacggcaaatgatgaaacgataggacaactt

SEQ ID NO: 245035 - DNA, 55 bp, Artificial
  Synthetic oligonucleotide
ttcggattgctcgtgttcgatgaccggtcttaataatagcgagatacgattaagc

SEQ ID NO: 245036 - DNA, 55 bp, Artificial
  Synthetic oligonucleotide
tacagcgctaaagggggacggagagccgaccaagtagaaagctaccgcaatccct

SEQ ID NO: 245037 - DNA, 55 bp, Artificial
  Synthetic oligonucleotide
gctgtctgccatctaccctaccggacatgccctgccctggtagctcggtaatctg

SEQ ID NO: 245038 - DNA, 55 bp, Artificial
  Synthetic oligonucleotide
taccccgatctctttgatggcattagctacgctaccagagtaggcacgaataagc

SEQ ID NO: 245039 - DNA, 55 bp, Artificial
  Synthetic oligonucleotide
ggctatgagggaacactgaaagttgccctcttatcgcaggagtttctgactcgtg

SEQ ID NO: 245040 - DNA, 55 bp, Artificial
  Synthetic oligonucleotide
ggctatcatcttgcgacagtgactagtagcgcctcgaattctgaagatatgcggc

SEQ ID NO: 245041 - DNA, 55 bp, Artificial
  Synthetic oligonucleotide
ggctagatggtgcatagcttgaaggtctgaatactgggcattaactcgaccacga

SEQ ID NO: 245042 - DNA, 55 bp, Artificial
  Synthetic oligonucleotide
gttcggtcggtcgttcaacggtcaatcacccacttggtggtcgctaccaactcac

SEQ ID NO: 245043 - DNA, 55 bp, Artificial
  Synthetic oligonucleotide
agttttcacaactaaaacgactctcagaagccatattttggccgttaacagaatc

SEQ ID NO: 245044 - DNA, 55 bp, Artificial
  Synthetic oligonucleotide
ggctacagaaattgatccgggtccagctaatattattcgcagatgaaaattaagc

SEQ ID NO: 245045 - DNA, 55 bp, Artificial
  Synthetic oligonucleotide
ggctaatccagccttgggagtgacgagtttcaatccgagattggtctacttcagc

SEQ ID NO: 245046 - DNA, 55 bp, Artificial
  Synthetic oligonucleotide
ggctaacccataagcacatcacccaaaacacagacaaggttctcacaccttagca

SEQ ID NO: 245047 - DNA, 55 bp, Artificial
  Synthetic oligonucleotide
ggctaacaattaccatcattaacagcggagctacaacaaaacgtcctaaaaggac

SEQ ID NO: 245048 - DNA, 55 bp, Artificial
  Synthetic oligonucleotide
gttgacatgtatacccacgactaaccaagccgaggagagctgtcgctcccttctc

SEQ ID NO: 245049 - DNA, 55 bp, Artificial
  Synthetic oligonucleotide
ggcgttatcgtagcggaaaagcccttgagcgtagcgtggctttgcagtgaagatg

SEQ ID NO: 245050 - DNA, 55 bp, Artificial
  Synthetic oligonucleotide
ggcgtccttcattgatcgctttaaaggactgacgagacatgtaagcctctcctcg

SEQ ID NO: 245051 - DNA, 55 bp, Artificial
  Synthetic oligonucleotide
ggcgtacctcctgagccagaaacttaattcgctccataacccgcttggcctgcca

SEQ ID NO: 245052 - DNA, 54 bp, Artificial
  Synthetic oligonucleotide
ggcggtttggttgaggtcctcaatccgagtcaagttttcctagaagagcgtttg

SEQ ID NO: 245053 - DNA, 55 bp, Artificial
  Synthetic oligonucleotide
ttacgagtatcctcgtggtcagaaggcagtcattacctatactgaagacggtagc

SEQ ID NO: 245054 - DNA, 60 bp, Artificial
  Synthetic oligonucleotide
attacttcatgagttgaatacgagtttgattgagagtacggctgaggtgttggacgatat

SEQ ID NO: 245055 - DNA, 55 bp, Artificial
  Synthetic oligonucleotide
ggcggtcaattatcatacgagcaagtccagtgagatttacggggataagacagag

SEQ ID NO: 245056 - DNA, 55 bp, Artificial
  Synthetic oligonucleotide
gttgactagctgtttcgtgaatcaggtgggctagtaagatactttgccttgtcgt

SEQ ID NO: 245057 - DNA, 53 bp, Artificial
  Synthetic oligonucleotide
ttagaacatggggttcaaacaaagattttgacgggagacaacgagaaagttac

SEQ ID NO: 245058 - DNA, 55 bp, Artificial
  Synthetic oligonucleotide
ggcggaccgtgtcaatatggggtattcaggttcattagtaaacagcgggagtggt

SEQ ID NO: 245059 - DNA, 55 bp, Artificial
  Synthetic oligonucleotide
ggcgctcctcaatttgccaaaccgtcgtaattccatcacgggtccagcgtcgcag

SEQ ID NO: 245060 - DNA, 55 bp, Artificial
  Synthetic oligonucleotide
ttagaccactcgccttagactggtaggcttgtggcactgtcccatgcttgctatc

SEQ ID NO: 245061 - DNA, 55 bp, Artificial
  Synthetic oligonucleotide
ggcgattggccagatatagcgatagaaggtgtgagaacttccgagaccgctagcg

SEQ ID NO: 245062 - DNA, 55 bp, Artificial
  Synthetic oligonucleotide
ggcgataggccaagcgtgcattgcgggaaaggataggaccgtggaagtaagtacc

SEQ ID NO: 245063 - DNA, 55 bp, Artificial
  Synthetic oligonucleotide
gttgcttggagctggtcagtcacatggtccatactatctccaacatgagtcaagg

SEQ ID NO: 245064 - DNA, 53 bp, Artificial
  Synthetic oligonucleotide
gttggaattcccggggatccgtcgggcgagaacgttggtagcgttgctcgtct

SEQ ID NO: 245065 - DNA, 56 bp, Artificial
  Synthetic oligonucleotide
attagcagaaaacctttatcctaaccatcaaagcgctgtttatacgcatttagacg

SEQ ID NO: 245066 - DNA, 55 bp, Artificial
  Synthetic oligonucleotide
ggcgagataatctgtagtcgagtaggaaatggttcctctgcggctaatagtttgc

SEQ ID NO: 245067 - DNA, 55 bp, Artificial
  Synthetic oligonucleotide
ggcgactgcccttgagtttgcctggaaggctatcaagtatgttaagtctaacggg

SEQ ID NO: 245068 - DNA, 55 bp, Artificial
  Synthetic oligonucleotide
tgatttcttccatgtcatatctctttcatatgcccctaattctcaaatttcgggg

SEQ ID NO: 245069 - DNA, 55 bp, Artificial
  Synthetic oligonucleotide
gttatcctgagtcacgtaagcaatctgccgactataatagtctagcggaagctga

SEQ ID NO: 245070 - DNA, 55 bp, Artificial
  Synthetic oligonucleotide
gggccagtagttgtattaccgcttgtcccaatgtatgtatttccattcgttgaag

SEQ ID NO: 245071 - DNA, 55 bp, Artificial
  Synthetic oligonucleotide
gggcatgaggtacgaggaagcagagttagagctcgataattatattgatcaggcc

SEQ ID NO: 245072 - DNA, 55 bp, Artificial
  Synthetic oligonucleotide
tgccaagtgttgtcttcttaattgagttttggatggccgtcgattgattctctca

SEQ ID NO: 245073 - DNA, 55 bp, Artificial
  Synthetic oligonucleotide
gggcagcaacattggtctttacacctgtgctcgtttgagttttattagaagactg

SEQ ID NO: 245074 - DNA, 54 bp, Artificial
  Synthetic oligonucleotide
gggatatctagtttctcttcagaaatccgtttggactctaccacacgtaaaacg

SEQ ID NO: 245075 - DNA, 55 bp, Artificial
  Synthetic oligonucleotide
gggatagctctgggaactcccaaccagaaccatgcagtcaagccacgtctgcctt

SEQ ID NO: 245076 - DNA, 59 bp, Artificial
  Synthetic oligonucleotide
attaggtggatttggattaatcggtgctgggatctatggcagttttcgattaatgtata

SEQ ID NO: 245077 - DNA, 55 bp, Artificial
  Synthetic oligonucleotide
gggataatcgtataacctgcttcttgcatcaccttagaaacaccgtaagctggac

SEQ ID NO: 245078 - DNA, 55 bp, Artificial
  Synthetic oligonucleotide
gggagtcgaaagccgatcattctcccacgcctcaaagaatctttaaacgagctgg

SEQ ID NO: 245079 - DNA, 55 bp, Artificial
  Synthetic oligonucleotide
gggaggggagccaaatatacacgagcacgcttgccagtcaaacttatctatgctc

SEQ ID NO: 245080 - DNA, 55 bp, Artificial
  Synthetic oligonucleotide
gggaggcagccaagttgccacagctgatgacttgaccgctccagaaagccatacc

SEQ ID NO: 245081 - DNA, 55 bp, Artificial
  Synthetic oligonucleotide
gggagccagaacttgaatatcacgggcaggaataccacttctgagggcagcgcct

SEQ ID NO: 245082 - DNA, 55 bp, Artificial
  Synthetic oligonucleotide
gggagagcgcacattgcctacattccagatggtcgtgtggcaggcttgtccaagc

SEQ ID NO: 245083 - DNA, 55 bp, Artificial
  Synthetic oligonucleotide
gggagacacttaccgatcgcttgcatccagtctggaaataaagagataggcatcc

SEQ ID NO: 245084 - DNA, 55 bp, Artificial
  Synthetic oligonucleotide
gggacttggagcccttatgcaaggcgaaaccagttatacgaacagttttgacact

SEQ ID NO: 245085 - DNA, 55 bp, Artificial
  Synthetic oligonucleotide
gttcgctagctaccaggcactcctaccatttgttcgtatgcaagtcgtgggtgag

SEQ ID NO: 245086 - DNA, 55 bp, Artificial
  Synthetic oligonucleotide
gggacgataatatcacgggcaggattgaaagggataacttgcaaggatacggcgt

SEQ ID NO: 245087 - DNA, 60 bp, Artificial
  Synthetic oligonucleotide
attcaaggacagtctcttagaatgtttgtagctcagcaatatctcatattctatattgta

SEQ ID NO: 245088 - DNA, 55 bp, Artificial
  Synthetic oligonucleotide
ttaagagctttacggacctctgtacctgcgaaaataacatctggcatcttgcccc

SEQ ID NO: 245089 - DNA, 55 bp, Artificial
  Synthetic oligonucleotide
gggaaggaataagcccattccaaccccaagagcactcagcgctattccaaacaag

SEQ ID NO: 245090 - DNA, 55 bp, Artificial
  Synthetic oligonucleotide
gggaacaggtacgattgttaatggcttggcatctattatccttgctgaagtcatc

SEQ ID NO: 245091 - DNA, 55 bp, Artificial
  Synthetic oligonucleotide
gggaaaggcgtttgtggagagtctgcggctagttgtcaaacggttatcgttggtg

SEQ ID NO: 245092 - DNA, 55 bp, Artificial
  Synthetic oligonucleotide
ggctttggtagggcaagatttgactgctaagatagcgtcttgatctgtagggtcg

SEQ ID NO: 245093 - DNA, 55 bp, Artificial
  Synthetic oligonucleotide
ggcttggatgtgaaagtccttcaatgtcgctacaaaggcatttgtggacgtttcg

SEQ ID NO: 245094 - DNA, 54 bp, Artificial
  Synthetic oligonucleotide
ggcttaatccaaagccgaagcacaaaccaaatccctattagacaaacacccaaa

SEQ ID NO: 245095 - DNA, 55 bp, Artificial
  Synthetic oligonucleotide
ggctgctttgacagatttaaattctgattttgaagtcacatagactggcgtttct

SEQ ID NO: 245096 - DNA, 55 bp, Artificial
  Synthetic oligonucleotide
ggctgagccttacttgctaaaacgaaactggtctagcagtctcataagctactgc

SEQ ID NO: 245097 - DNA, 55 bp, Artificial
  Synthetic oligonucleotide
ggctcataaattcagctagtagagctgtccgatatgtgcttggccgtcggtacaa

SEQ ID NO: 245098 - DNA, 60 bp, Artificial
  Synthetic oligonucleotide
tagaactctattgcaccacaaagatattgaactggagcaagcaaaacgtcaagtatctct

SEQ ID NO: 245099 - DNA, 55 bp, Artificial
  Synthetic oligonucleotide
ggcaagggtgacgacatgattatggaacgccttaaacaggccaaggttccagtca

SEQ ID NO: 245100 - DNA, 55 bp, Artificial
  Synthetic oligonucleotide
ttagcatctgctcatagcctgctactaactgtcctgagaaaatttcactcactgc

SEQ ID NO: 245101 - DNA, 55 bp, Artificial
  Synthetic oligonucleotide
ttagcgatcgtttgacttggctctttggtcatgcacgtggcagtaaagttgcaga

SEQ ID NO: 245102 - DNA, 55 bp, Artificial
  Synthetic oligonucleotide
ggcaacactcaggacttatctttgcggataccaattcaacagtcactaaggtcta

SEQ ID NO: 245103 - DNA, 55 bp, Artificial
  Synthetic oligonucleotide
ggattgctgtattgtatgcagttaggaatgtctgtagaactcatctcgccaacag

SEQ ID NO: 245104 - DNA, 55 bp, Artificial
  Synthetic oligonucleotide
ggattccggcattttactattcgcttgctttactggggcggagtacgactcgatc

SEQ ID NO: 245105 - DNA, 55 bp, Artificial
  Synthetic oligonucleotide
ttagcggcgttcttgagcaaccacttacttggtccaggttcggtcaccagattcc

SEQ ID NO: 245106 - DNA, 55 bp, Artificial
  Synthetic oligonucleotide
gttggtggagcaacataagatccagataatctaactccattctgccaagagattc

SEQ ID NO: 245107 - DNA, 55 bp, Artificial
  Synthetic oligonucleotide
gttgtatggcaacatcccatccatacacacttaacgcagaccacttactctgtgc

SEQ ID NO: 245108 - DNA, 55 bp, Artificial
  Synthetic oligonucleotide
ggatcatctttcccatagctagctacttcacgagagtcagcctgactaggtgact

SEQ ID NO: 245109 - DNA, 54 bp, Artificial
  Synthetic oligonucleotide
attcgatttttttactcactgacgttcgtatgattccatatttttgttggaaag

SEQ ID NO: 245110 - DNA, 55 bp, Artificial
  Synthetic oligonucleotide
tgatgaaccttcttagcttccttcgctaaatctgttccaaagcgagtgcccgtcc

SEQ ID NO: 245111 - DNA, 55 bp, Artificial
  Synthetic oligonucleotide
gtttaccctctctttagcctactttagttcaggctattcaatcgaaacgtgcgaa

SEQ ID NO: 245112 - DNA, 55 bp, Artificial
  Synthetic oligonucleotide
ggagttgcaggaaaatcacacgatagcttagaggacgcccgcatgacagcccttg

SEQ ID NO: 245113 - DNA, 55 bp, Artificial
  Synthetic oligonucleotide
ggagttccaggataccgttattctcttagtaagcttaactagctagggtggagtc

SEQ ID NO: 245114 - DNA, 55 bp, Artificial
  Synthetic oligonucleotide
ggagttaatggctagggttttgatcccttgtgattcgaaatagtcctgccattct

SEQ ID NO: 245115 - DNA, 55 bp, Artificial
  Synthetic oligonucleotide
ggagtggatgtctgtgtgattcgccatccagaggtcgactactatagagaattga

SEQ ID NO: 245116 - DNA, 55 bp, Artificial
  Synthetic oligonucleotide
ggagtgcccaactcatcactatcagcggctatgggctttgctgaagaatcagggt

SEQ ID NO: 245117 - DNA, 55 bp, Artificial
  Synthetic oligonucleotide
ggagtatttatccaacaatgattcaaggccattccattaagtatagcgctgggga

SEQ ID NO: 245118 - DNA, 55 bp, Artificial
  Synthetic oligonucleotide
ggaggtggcatcacttgggatagtacttgggagtcagaataccgtgaagtccagc

SEQ ID NO: 245119 - DNA, 55 bp, Artificial
  Synthetic oligonucleotide
ggaggtctctcatgtcaatacgaacaccaatttgtgattacaaaagacggtcctg

SEQ ID NO: 245120 - DNA, 54 bp, Artificial
  Synthetic oligonucleotide
attctagcgtttataaatcgccctcaaaagacctattcactttccgcatttttg

SEQ ID NO: 245121 - DNA, 55 bp, Artificial
  Synthetic oligonucleotide
ggaggtattacaaacaggcggagatatgaagaacgctaaaacagccagaggcatc

SEQ ID NO: 245122 - DNA, 54 bp, Artificial
  Synthetic oligonucleotide
gtttcctcctcacggataggactaagtttaataatcgtgggtcttagctcgtcc

SEQ ID NO: 245123 - DNA, 55 bp, Artificial
  Synthetic oligonucleotide
ggaggacactctgcaggtggattggagggcttgaattgagtcgtgttgacaggtc

SEQ ID NO: 245124 - DNA, 55 bp, Artificial
  Synthetic oligonucleotide
ggaggaacttcttcttatgaggtggttcaccaagtggtcccagattcctctagac

SEQ ID NO: 245125 - DNA, 55 bp, Artificial
  Synthetic oligonucleotide
ggagcaggattagcaagccaaacagaagttagggcggactctgtagttagggaag

SEQ ID NO: 245126 - DNA, 55 bp, Artificial
  Synthetic oligonucleotide
ggcgacagtacaatggccgaggaagtattgtctcaatttggcacacccatagtcc

SEQ ID NO: 245127 - DNA, 55 bp, Artificial
  Synthetic oligonucleotide
ggcgaagattattctcactatgcccctttgtaatacgagggttcttttgcgaata

SEQ ID NO: 245128 - DNA, 55 bp, Artificial
  Synthetic oligonucleotide
ggcgaaattatcttagaccgggatatttagaagccgaggaggacttagaagagtc

SEQ ID NO: 245129 - DNA, 55 bp, Artificial
  Synthetic oligonucleotide
ggcctttggagtaccataactattagcacgtgttgctgttacaacttcttgtcct

SEQ ID NO: 245130 - DNA, 55 bp, Artificial
  Synthetic oligonucleotide
ggcctcttgtatcttcgttttgatggttgcgatctgttctagcgttagctgggtc

SEQ ID NO: 245131 - DNA, 57 bp, Artificial
  Synthetic oligonucleotide
cactttataaacgacaacatagtgcggatacttttgttcacttatcacgtgggcaat

SEQ ID NO: 245132 - DNA, 60 bp, Artificial
  Synthetic oligonucleotide
tacttgccattgagcaggaaatgggacgtgttcgtgaggtcaagtgggggccacgtgtga

SEQ ID NO: 245133 - DNA, 55 bp, Artificial
  Synthetic oligonucleotide
gttggctaagaaattctatccacagggcgtttcagtcttgccgactacagctggg

SEQ ID NO: 245134 - DNA, 55 bp, Artificial
  Synthetic oligonucleotide
ggccgttaggaagtaaagccttgggctgtaatattagtaaagagcggcgcagcat

SEQ ID NO: 245135 - DNA, 55 bp, Artificial
  Synthetic oligonucleotide
gttggtacgtgccaacataatacgtcaacctatttcaatagtcctaaaacgctcg

SEQ ID NO: 245136 - DNA, 55 bp, Artificial
  Synthetic oligonucleotide
ggccgctatcaatactggcttgaatagtttcctagaaggcttatctggtagttca

SEQ ID NO: 245137 - DNA, 55 bp, Artificial
  Synthetic oligonucleotide
ggccctatcggagctccactcgtttcttacggagccctcatttcaatcgccggtc

SEQ ID NO: 245138 - DNA, 55 bp, Artificial
  Synthetic oligonucleotide
ggcccgtttgacccaaaaggtcctacccttcatgcgtcaacaaagagatggcctc

SEQ ID NO: 245139 - DNA, 55 bp, Artificial
  Synthetic oligonucleotide
ggccattgacatagacttgagagtccatgtagacaccatcaaaggtcacacgaac

SEQ ID NO: 245140 - DNA, 55 bp, Artificial
  Synthetic oligonucleotide
ggccattcaactttcaaatagtgctacagcgacaattttacaatatacagcaccc

SEQ ID NO: 245141 - DNA, 55 bp, Artificial
  Synthetic oligonucleotide
ggccagccgttaggcatgacgctcctacctaggtttattgtttgacctagcacaa

SEQ ID NO: 245142 - DNA, 55 bp, Artificial
  Synthetic oligonucleotide
ggccagaacaagccaatcgtttccgaccacttcggattagaagtgaccttggaga

SEQ ID NO: 245143 - DNA, 47 bp, Artificial
  Synthetic oligonucleotide
tacttaaattcagggtttatagaaactttaagggtgtttgttttttt

SEQ ID NO: 245144 - DNA, 55 bp, Artificial
  Synthetic oligonucleotide
ggccaccagtcgaggtaaacgtaaggtgtggcaatgtaacaatcgttatagggtc

SEQ ID NO: 245145 - DNA, 55 bp, Artificial
  Synthetic oligonucleotide
ggcatttcaacgcaaaggtaaagaagttgttctagttgacatcgctgaaacatgt

SEQ ID NO: 245146 - DNA, 55 bp, Artificial
  Synthetic oligonucleotide
ggcatcttcccttaggtcagaagagactccttgcgcaatataggccgctaacaca

SEQ ID NO: 245147 - DNA, 55 bp, Artificial
  Synthetic oligonucleotide
ggcatctgttggtagtccagaaatgcttgcacggtaatagttaaattttcgtgtg

SEQ ID NO: 245148 - DNA, 55 bp, Artificial
  Synthetic oligonucleotide
ggcatctaatggtgagattcgaattaatggttcgccaaacagtaatattttcgtc

SEQ ID NO: 245149 - DNA, 55 bp, Artificial
  Synthetic oligonucleotide
ggcagtggaatcgctccttctacaatttgaacttgtctttcgttattcggtgttc

SEQ ID NO: 245150 - DNA, 55 bp, Artificial
  Synthetic oligonucleotide
ggcagtaggctcaggcttacagcacttaggagacattagagcatgagaagcacta

SEQ ID NO: 245151 - DNA, 55 bp, Artificial
  Synthetic oligonucleotide
ggcagtacggtcgttagcaaagtcaaggtcgccaactgcttgccagtttgtgtag

SEQ ID NO: 245152 - DNA, 55 bp, Artificial
  Synthetic oligonucleotide
ggcaggatctagctcctcacccttggcttcatagtagacttgaactgtatccttg

SEQ ID NO: 245153 - DNA, 55 bp, Artificial
  Synthetic oligonucleotide
ggcagctcacttgaacgcgagagcgatggtttgattactttagcgggtggtaaaa

SEQ ID NO: 245154 - DNA, 60 bp, Artificial
  Synthetic oligonucleotide
attgctcggtattgtgtttcagctgttatccatttatgctccgcaagtccaaacatttct

SEQ ID NO: 245155 - DNA, 55 bp, Artificial
  Synthetic oligonucleotide
ggcagcgggtctgtcctcaagttctagtggtttgtccgccctggtcaaggcttgt

SEQ ID NO: 245156 - DNA, 55 bp, Artificial
  Synthetic oligonucleotide
ggcaccgtcaaaccagcatccgtataccaacctccccaagtgtaatcagcatcaa

SEQ ID NO: 245157 - DNA, 55 bp, Artificial
  Synthetic oligonucleotide
gttggtcagttgacgggctctatcaagagtggcggtctgcgtgctaaattgggag

SEQ ID NO: 245158 - DNA, 55 bp, Artificial
  Synthetic oligonucleotide
attgctcgctaagattaaatacaagggtggcaatatatgggtaaatggcgttgcg

SEQ ID NO: 245159 - DNA, 55 bp, Artificial
  Synthetic oligonucleotide
cgactgatatcactatcgtctgcaaactcgcgcatacgggccaacagccaagctg

SEQ ID NO: 245160 - DNA, 55 bp, Artificial
  Synthetic oligonucleotide
cgactgaccttggcggttcctgcttagagaatactgcctactcgaacaggatacg

SEQ ID NO: 245161 - DNA, 55 bp, Artificial
  Synthetic oligonucleotide
cgactctagttacattgcgatcgactttatgacgggtatctatggtggcggtcaa

SEQ ID NO: 245162 - DNA, 53 bp, Artificial
  Synthetic oligonucleotide
cgactagcatggtcaccgttaaactattcgtcggttccttaaaggtcttccca

SEQ ID NO: 245163 - DNA, 55 bp, Artificial
  Synthetic oligonucleotide
cgactaagactctgacggtcttactgccagagaaaccaactgtcaagagcacagt

SEQ ID NO: 245164 - DNA, 55 bp, Artificial
  Synthetic oligonucleotide
cgacggccatccaaaacgcaattaagaagacaacacttggcactgaagattgacc

SEQ ID NO: 245165 - DNA, 60 bp, Artificial
  Synthetic oligonucleotide
tactcgcgaatctgttcagcaggtctaggaccgtacggcgctctagccgaatctccaata

SEQ ID NO: 245166 - DNA, 55 bp, Artificial
  Synthetic oligonucleotide
cgacgcggcgcaattgatggggaacaatgtaaaccgtacgattagctttaccttc

SEQ ID NO: 245167 - DNA, 55 bp, Artificial
  Synthetic oligonucleotide
cgacgattattggactggatcgtgtttcctaaagcgattctaagcgcatgtttaa

SEQ ID NO: 245168 - DNA, 55 bp, Artificial
  Synthetic oligonucleotide
cagttggagaattgccatcagcaagcgaaggaacacttggtcttttcaactcagg

SEQ ID NO: 245169 - DNA, 54 bp, Artificial
  Synthetic oligonucleotide
attctttgctaccccacgtactactacaacagcttacgaagtagggattagccc

SEQ ID NO: 245170 - DNA, 55 bp, Artificial
  Synthetic oligonucleotide
cgaccacttctattctctccccaccaagcaaaatcaaatggcagtctacacgatc

SEQ ID NO: 245171 - DNA, 55 bp, Artificial
  Synthetic oligonucleotide
cgacattcgtaccgaactcaaggctcatgagagcttgaaaagcgcatttacggag

SEQ ID NO: 245172 - DNA, 55 bp, Artificial
  Synthetic oligonucleotide
cgacatcaagctaagccagttacagaaagtgctttaaagaatgaggtgttaattg

SEQ ID NO: 245173 - DNA, 55 bp, Artificial
  Synthetic oligonucleotide
attctagcagcacgttcaacttcgctcatcttatcaattcttccatctctatcag

SEQ ID NO: 245174 - DNA, 55 bp, Artificial
  Synthetic oligonucleotide
cgacagatagacgacaaaagaacgacaatctaccgacacaaaggtaaaacaacag

SEQ ID NO: 245175 - DNA, 55 bp, Artificial
  Synthetic oligonucleotide
cgacagagacaatacgagaagcattgtgatgcctgacagcgtacgcgaaatgtac

SEQ ID NO: 245176 - DNA, 59 bp, Artificial
  Synthetic oligonucleotide
attgggatacggagcgcctgcttgaaagtctagcgtatggatataacgaacgctattta

SEQ ID NO: 245177 - DNA, 55 bp, Artificial
  Synthetic oligonucleotide
attcctccggcgttttagctcgaccacctttgtaatcagcatacatctctgtccg

SEQ ID NO: 245178 - DNA, 55 bp, Artificial
  Synthetic oligonucleotide
agctaggatggcaatagtagtgccaagtgaggtaagagcatcagaaagattgtcc

SEQ ID NO: 245179 - DNA, 55 bp, Artificial
  Synthetic oligonucleotide
cgaatcatgcagcacccagtcaagaattagcacagagtgttttgacagagtccgt

SEQ ID NO: 245180 - DNA, 55 bp, Artificial
  Synthetic oligonucleotide
agctatactggcagcagtcatcactcggtcggaaagctgaccaggtcatacctgt

SEQ ID NO: 245181 - DNA, 55 bp, Artificial
  Synthetic oligonucleotide
attacaccggaagtcccttccaatagatagaaggtaaattcgtcagcagttagga

SEQ ID NO: 245182 - DNA, 55 bp, Artificial
  Synthetic oligonucleotide
agctcttcatattcagtagccggccttaaaggtgaaaattcaggatacttgaagt

SEQ ID NO: 245183 - DNA, 55 bp, Artificial
  Synthetic oligonucleotide
cgaagggagattgttgataggaatgacttccctgttcctaaggaaaatgttagcg

SEQ ID NO: 245184 - DNA, 55 bp, Artificial
  Synthetic oligonucleotide
cgaagcggtaacctggaatatccttcttcggttgttcaccgtcttcgcttggata

SEQ ID NO: 245185 - DNA, 55 bp, Artificial
  Synthetic oligonucleotide
cgatgaagtcttgcgggtctaacgtgaattaatctcaacggtacagtgtggttac

SEQ ID NO: 245186 - DNA, 55 bp, Artificial
  Synthetic oligonucleotide
cgatagttgagttatgggttgccattataatggtagtcccttgcaagttaatacg

SEQ ID NO: 245187 - DNA, 60 bp, Artificial
  Synthetic oligonucleotide
tactcactagaaaaaatggtcgaaaagtgactggatatgacatgaccattcgagaacctc

SEQ ID NO: 245188 - DNA, 55 bp, Artificial
  Synthetic oligonucleotide
agccgtcaactgactagcatcgtagtctgataagccaagttgagatacgtagcga

SEQ ID NO: 245189 - DNA, 55 bp, Artificial
  Synthetic oligonucleotide
agccttactacgcacaaataaactctccataatagccactgctctgtcggagcca

SEQ ID NO: 245190 - DNA, 55 bp, Artificial
  Synthetic oligonucleotide
cgagtgatatcgccttgccacaggtagagattgggccgaatcggagtcaagtctt

SEQ ID NO: 245191 - DNA, 55 bp, Artificial
  Synthetic oligonucleotide
cgagtcatagcttcgatagagtacttcacaccctgagttccggcaccagatcctt

SEQ ID NO: 245192 - DNA, 55 bp, Artificial
  Synthetic oligonucleotide
cgagtcaatcggcttcagcgagtgctagccaatccgcatcagtaagctcaagcca

SEQ ID NO: 245193 - DNA, 55 bp, Artificial
  Synthetic oligonucleotide
agcgaccaatgcggctctctttgccctccgtctcctgtcagtagaggatcaggct

SEQ ID NO: 245194 - DNA, 55 bp, Artificial
  Synthetic oligonucleotide
cgagggaaggcgtgtgctacttcgtcattgagcgaacagcaggttgcatatggat

SEQ ID NO: 245195 - DNA, 55 bp, Artificial
  Synthetic oligonucleotide
cgaggaagtagttggatacgctccaagcttctatatcgctgaagttgcaggtggc

SEQ ID NO: 245196 - DNA, 55 bp, Artificial
  Synthetic oligonucleotide
cgagcttatctggaagttagcccgaggtcttttcttgcctataatgtagacttac

SEQ ID NO: 245197 - DNA, 55 bp, Artificial
  Synthetic oligonucleotide
cgagctgatggtccccttatcattttacacggcaacttagccccagatggtgctg

SEQ ID NO: 245198 - DNA, 59 bp, Artificial
  Synthetic oligonucleotide
tactagcaccttataacgaacgggcgacagataagcaaaacacggacaaggcagtcatg

SEQ ID NO: 245199 - DNA, 55 bp, Artificial
  Synthetic oligonucleotide
cagttagtttagactcgaccacagtctctgccaagggatataatttccctctagc

SEQ ID NO: 245200 - DNA, 55 bp, Artificial
  Synthetic oligonucleotide
cgagcattacagcaataagggcggacggagagcggaacaagtcgaagcctaccaa

SEQ ID NO: 245201 - DNA, 55 bp, Artificial
  Synthetic oligonucleotide
cgagcagaatgaatctcgtcattcataacaacaagtacgccacggtcacttgaat

SEQ ID NO: 245202 - DNA, 55 bp, Artificial
  Synthetic oligonucleotide
cgagattcgatatttagggcaaggttacgacccattacggccatacctacgacac

SEQ ID NO: 245203 - DNA, 55 bp, Artificial
  Synthetic oligonucleotide
cagttattgaaacagtggttaaaagattatgctcaggtggtggccttgattacgc

SEQ ID NO: 245204 - DNA, 55 bp, Artificial
  Synthetic oligonucleotide
cgagacaccagtcttggcaataactgatcatagtagcgaccaactgcctcgatat

SEQ ID NO: 245205 - DNA, 55 bp, Artificial
  Synthetic oligonucleotide
cgagaatagtctggcgcttagctgcaacctcaccgcagacaccctttccaagggc

SEQ ID NO: 245206 - DNA, 55 bp, Artificial
  Synthetic oligonucleotide
cagttccaaggaccgccagaataattgacaaggcttccgcgactgaagggagacg

SEQ ID NO: 245207 - DNA, 55 bp, Artificial
  Synthetic oligonucleotide
cgagaacccctttatctaacgactctccgtcaattaggtgtggacttagtcaaga

SEQ ID NO: 245208 - DNA, 55 bp, Artificial
  Synthetic oligonucleotide
cgacttggggcccatctgggaggtggcaatgcaagcgggattatatgggacaccc

SEQ ID NO: 245209 - DNA, 59 bp, Artificial
  Synthetic oligonucleotide
tactagagcagcggaagagttagaaaccaaattgcacgttgaaatagaattactcacta

SEQ ID NO: 245210 - DNA, 55 bp, Artificial
  Synthetic oligonucleotide
agcgccgattgcggtaatgcttccctcacgctcgtcactccctaaggttttaacc

SEQ ID NO: 245211 - DNA, 55 bp, Artificial
  Synthetic oligonucleotide
agcggaagcaatgtcgtcagtggcacttgtctcgtcagagcaacggctgtgggtc

SEQ ID NO: 245212 - DNA, 55 bp, Artificial
  Synthetic oligonucleotide
cgacttattaggcaagctcaatcgtacctatgatagctttgtcaaacgctacggg

SEQ ID NO: 245213 - DNA, 55 bp, Artificial
  Synthetic oligonucleotide
cgactgctgagagctacgagcaggcatgtgagctcctagaacttggcgtagatcg

SEQ ID NO: 245214 - DNA, 55 bp, Artificial
  Synthetic oligonucleotide
cctgccagtgtcaaacgcatagaggtaatccagcccgaagacacctgataatgag

SEQ ID NO: 245215 - DNA, 55 bp, Artificial
  Synthetic oligonucleotide
aggcaatgcgattgacctcgtcgctagggaaatgatccaacaaccgctcacggta

SEQ ID NO: 245216 - DNA, 54 bp, Artificial
  Synthetic oligonucleotide
cctgcagttttaccttgggttgtattgggtatagttgcttgtgttgtgttgggt

SEQ ID NO: 245217 - DNA, 55 bp, Artificial
  Synthetic oligonucleotide
cctgataccagaccaaggacgattcccacaagggacagcaaaatcgtctcacgat

SEQ ID NO: 245218 - DNA, 55 bp, Artificial
  Synthetic oligonucleotide
aggcagacccgaaatcatgcagagccctatcgccagaaggacacccacctgttgc

SEQ ID NO: 245219 - DNA, 55 bp, Artificial
  Synthetic oligonucleotide
cctgagtcgaggcaatcacacgaccaatctgacttgtaatatctggacgaagagt

SEQ ID NO: 245220 - DNA, 60 bp, Artificial
  Synthetic oligonucleotide
tactaaaagttctgtgatagaggcagtgattgcatctactactttttttgattcataaat

SEQ ID NO: 245221 - DNA, 55 bp, Artificial
  Synthetic oligonucleotide
cctgagggagcaatgtctgttgacccaaatatggtaacgattgaccctacaactg

SEQ ID NO: 245222 - DNA, 55 bp, Artificial
  Synthetic oligonucleotide
aggccttggcagctgacaaaccaactagcaaggctccgaccaagcctggtccgta

SEQ ID NO: 245223 - DNA, 55 bp, Artificial
  Synthetic oligonucleotide
aggcgccttactatgcagctcgtatcttggacaatgtgaccatcgcaccaagtcc

SEQ ID NO: 245224 - DNA, 55 bp, Artificial
  Synthetic oligonucleotide
catactgggctcgtaagtcctgacgcaaagccgaatctagaaagaatggctgacc

SEQ ID NO: 245225 - DNA, 55 bp, Artificial
  Synthetic oligonucleotide
cctgactaaggctagcttcaacaatcatgagttccttttgacgttctgtttcacg

SEQ ID NO: 245226 - DNA, 55 bp, Artificial
  Synthetic oligonucleotide
aggctcagttgacggatagaaggcaggcgactacccgtcggaaatcgttcagact

SEQ ID NO: 245227 - DNA, 55 bp, Artificial
  Synthetic oligonucleotide
aggctcttaattctcgaatcatggcttggcggcctttgaaccgttcatcggctag

SEQ ID NO: 245228 - DNA, 55 bp, Artificial
  Synthetic oligonucleotide
cctgacgaatgaactcttgaatttccaaaccatcgtatcgttcacgcttggtaca

SEQ ID NO: 245229 - DNA, 55 bp, Artificial
  Synthetic oligonucleotide
cctcttcctttaattgcccacgtgataagtgaacaaaagtatccgcactatgttg

SEQ ID NO: 245230 - DNA, 55 bp, Artificial
  Synthetic oligonucleotide
catagaagctgttaaacagtatggtgattaggtttacggcgtgtgtaaacctagt

SEQ ID NO: 245231 - DNA, 60 bp, Artificial
  Synthetic oligonucleotide
tacgtttagcgacagcacctactgccacacgcatagttgtctcacgcgcactagaacgct

SEQ ID NO: 245232 - DNA, 55 bp, Artificial
  Synthetic oligonucleotide
atgtcctaggacgttgaaacagtccagggagtgactatttcaatcgggagaagga

SEQ ID NO: 245233 - DNA, 55 bp, Artificial
  Synthetic oligonucleotide
atgtaagataacaggcacactagacaaaactagcaagtagagccactgacctagg

SEQ ID NO: 245234 - DNA, 55 bp, Artificial
  Synthetic oligonucleotide
cctctcgtcgcttacaacttgctggtcacaagccttatgcactgtgggaggcgca

SEQ ID NO: 245235 - DNA, 55 bp, Artificial
  Synthetic oligonucleotide
cctctatccgtcaactgagccaagacttccactgtagcaaggacactatccaacg

SEQ ID NO: 245236 - DNA, 55 bp, Artificial
  Synthetic oligonucleotide
cctcgtaaatcacgtcttgttcttgacaacatccgtggtaaaagcgtagccgatg

SEQ ID NO: 245237 - DNA, 55 bp, Artificial
  Synthetic oligonucleotide
cctcgcgacctgtttcaacgccgtctgtgtaagtcactgtataaacaatggtgcg

SEQ ID NO: 245238 - DNA, 55 bp, Artificial
  Synthetic oligonucleotide
catcaaacaaacacctatctttctaaatagcctaactgaaaggcttcgttggtct

SEQ ID NO: 245239 - DNA, 55 bp, Artificial
  Synthetic oligonucleotide
catcatatctggcagccacaatctaggcatcgaggactacaatcgcgtgactgcg

SEQ ID NO: 245240 - DNA, 55 bp, Artificial
  Synthetic oligonucleotide
aggtaggaagataggacagtctgatgcgattccgaagataggctaatgacgtatt

SEQ ID NO: 245241 - DNA, 55 bp, Artificial
  Synthetic oligonucleotide
cctcacgacggcggtttcgggatacagagtaactttgtgtatgaagactggttag

SEQ ID NO: 245242 - DNA, 59 bp, Artificial
  Synthetic oligonucleotide
cagaaatctgtcatcttaggaattgtccatagtttattagggacatcttcataacggat

SEQ ID NO: 245243 - DNA, 60 bp, Artificial
  Synthetic oligonucleotide
caaaagatgtatcacaccttgaaagatcaactcgtcaatactactgaagagatcgatgtg

SEQ ID NO: 245244 - DNA, 55 bp, Artificial
  Synthetic oligonucleotide
cgaactagacggacctattggtgacggggatcatggtgcaaatatggctcgtggg

SEQ ID NO: 245245 - DNA, 55 bp, Artificial
  Synthetic oligonucleotide
agctgatcaggaatgtactcgtccaatattccttggagatagtatgatccgacaa

SEQ ID NO: 245246 - DNA, 55 bp, Artificial
  Synthetic oligonucleotide
cgaacctaatcctgacggacaagccattcatttcgaccctatcagcaatcaggcc

SEQ ID NO: 245247 - DNA, 55 bp, Artificial
  Synthetic oligonucleotide
cgaacaacaatcggttcggaagaatggcaacgcgcagcctctatctatgtccgct

SEQ ID NO: 245248 - DNA, 55 bp, Artificial
  Synthetic oligonucleotide
agctggtccgagcggataaggctacaggcgagattgactttgaatacctgcctag

SEQ ID NO: 245249 - DNA, 55 bp, Artificial
  Synthetic oligonucleotide
cgaaagcgtaaagaggatgatagccatgagcacgatagtgggcgttataagcaac

SEQ ID NO: 245250 - DNA, 55 bp, Artificial
  Synthetic oligonucleotide
cgaaacgacaagcagtttcgacatccgtaccgaattcaaggctcatgagagcttg

SEQ ID NO: 245251 - DNA, 55 bp, Artificial
  Synthetic oligonucleotide
atgtgattggcacgcaagcaaccgacttcgtcgtttcattgctaaaattggagcc

SEQ ID NO: 245252 - DNA, 55 bp, Artificial
  Synthetic oligonucleotide
cgaaaacctatagtgtgatgtatcgagttcacatgcaagattatggttggcagga

SEQ ID NO: 245253 - DNA, 55 bp, Artificial
  Synthetic oligonucleotide
cagttttccgctcaatcatcttgtaagtcattccttgctgttttaactcataagc

SEQ ID NO: 245254 - DNA, 55 bp, Artificial
  Synthetic oligonucleotide
tacgcgttacacaggtaacacccctctaattatcgtagactatttacaaatacta

SEQ ID NO: 245255 - DNA, 55 bp, Artificial
  Synthetic oligonucleotide
agctttgaggatacgaacagagccgttgattggtagagaaatgaccttgccaggc

SEQ ID NO: 245256 - DNA, 55 bp, Artificial
  Synthetic oligonucleotide
cctttcgactgtggaggacaatgaaattgcgaccatcgctagtctttatggtcag

SEQ ID NO: 245257 - DNA, 55 bp, Artificial
  Synthetic oligonucleotide
aggaacagctaacataataagcgttgcaaaactattagaggtagccccagaaata

SEQ ID NO: 245258 - DNA, 55 bp, Artificial
  Synthetic oligonucleotide
ccttgattgagtaagaggtgatgaatcttaggtgccccatagattccccgattcg

SEQ ID NO: 245259 - DNA, 55 bp, Artificial
  Synthetic oligonucleotide
aggaacatctgcgacacgtattttggaggcttctcgtaagcaagttgcggacctc

SEQ ID NO: 245260 - DNA, 55 bp, Artificial
  Synthetic oligonucleotide
ccttcgatagactgtttaagcgagctaaggtacaaaagaatttgatcggctatct

SEQ ID NO: 245261 - DNA, 55 bp, Artificial
  Synthetic oligonucleotide
ccttcctaccatcctattgggcctactttctagtctaggcgcgatttgggcaatg

SEQ ID NO: 245262 - DNA, 55 bp, Artificial
  Synthetic oligonucleotide
ccttattataccacaaaactgcaagcatatctgacccaaaacaagtaaggagctc

SEQ ID NO: 245263 - DNA, 55 bp, Artificial
  Synthetic oligonucleotide
cataaatggctcaatcaagtgagctacgacacgaaggctagctgccaagtggctc

SEQ ID NO: 245264 - DNA, 55 bp, Artificial
  Synthetic oligonucleotide
ccttatcaatattcttagatattgggatggttattctagtagggacaacccttgc

SEQ ID NO: 245265 - DNA, 60 bp, Artificial
  Synthetic oligonucleotide
tacgcgggtgacccctcatcttgacccctgggtacatttactatacgcacattctgcaga

SEQ ID NO: 245266 - DNA, 55 bp, Artificial
  Synthetic oligonucleotide
ccttacatgatttccgtatctctacttgtcgctgctttatcagccaacgttatct

SEQ ID NO: 245267 - DNA, 54 bp, Artificial
  Synthetic oligonucleotide
ccttaaagttggcgtagtgaagttgttagacattttagcggttgaactcactaa

SEQ ID NO: 245268 - DNA, 55 bp, Artificial
  Synthetic oligonucleotide
cctgtacggttgagaccgtagatatcgatatgggccagatactccttatttgagc

SEQ ID NO: 245269 - DNA, 54 bp, Artificial
  Synthetic oligonucleotide
cctgggacaaagacattggttaccgttcccaaggaatcaggcgtcaagtctccc

SEQ ID NO: 245270 - DNA, 55 bp, Artificial
  Synthetic oligonucleotide
cctgctccacagaacttgttaccgagccagtactgctagtaggtgtctctgattg

SEQ ID NO: 245271 - DNA, 55 bp, Artificial
  Synthetic oligonucleotide
aggagtccaacctcttgccgcggtgttcttagtcaggtactctatctagttgatg

SEQ ID NO: 245272 - DNA, 55 bp, Artificial
  Synthetic oligonucleotide
cgcttgctctttccgaggaggaagtcatgctgacaagcacggcagagcctccgca

SEQ ID NO: 245273 - DNA, 55 bp, Artificial
  Synthetic oligonucleotide
agactcaaccatgttaatagcgtgtttggtaccagctactgtcaattcaagaagc

SEQ ID NO: 245274 - DNA, 55 bp, Artificial
  Synthetic oligonucleotide
cgcttctaggtagtccgagcgaaaatcatagcccgcagcctgtaaggccatagcc

SEQ ID NO: 245275 - DNA, 55 bp, Artificial
  Synthetic oligonucleotide
cgctgtctgactgaccatagcgtctgcgataagcggaacgaagcgactctactac

SEQ ID NO: 245276 - DNA, 57 bp, Artificial
  Synthetic oligonucleotide
tacgatgtttgcgtttggaaataaatccttaatcatagctctgtaaggggtgaataa

SEQ ID NO: 245277 - DNA, 55 bp, Artificial
  Synthetic oligonucleotide
cgctgagaaatatgcgcgtgctaagtattactattcacgtgaaggagagtctatc

SEQ ID NO: 245278 - DNA, 54 bp, Artificial
  Synthetic oligonucleotide
agactgggggctactttcctagtacgggggttgaggaatgcggcggatttgcaa

SEQ ID NO: 245279 - DNA, 55 bp, Artificial
  Synthetic oligonucleotide
cgctcttacctgaaaatcgacatttatgggtaattcttttagcattaggaactgg

SEQ ID NO: 245280 - DNA, 55 bp, Artificial
  Synthetic oligonucleotide
cgctcgcatgacgtcggcagctgccaaggcgtagccctcaaaagttgctactttg

SEQ ID NO: 245281 - DNA, 55 bp, Artificial
  Synthetic oligonucleotide
cgctccctatcgtttgtgggcctatctaggcttttgccttgggacggcttatcaa

SEQ ID NO: 245282 - DNA, 55 bp, Artificial
  Synthetic oligonucleotide
agacttcctgcgttgacaattggttgtgcatcatgattgccacagagaacgacta

SEQ ID NO: 245283 - DNA, 55 bp, Artificial
  Synthetic oligonucleotide
cagcttctgcaaaggtgcgtgctggataataaggcacccgttcacaaatggctgc

SEQ ID NO: 245284 - DNA, 55 bp, Artificial
  Synthetic oligonucleotide
cgctccagcaagcacagactaatttgaatcggacacatactgtaactgctgggga

SEQ ID NO: 245285 - DNA, 55 bp, Artificial
  Synthetic oligonucleotide
cgctcattgctaagcctgtaccaaatgacctttatttcggtagtcagttgacggc

SEQ ID NO: 245286 - DNA, 55 bp, Artificial
  Synthetic oligonucleotide
cgctcaaggctatcacccttatatagccgaatggtcaccttatcatggtgccgct

SEQ ID NO: 245287 - DNA, 60 bp, Artificial
  Synthetic oligonucleotide
taccgagctaccagggcagggcatgtccggtagggtagatggcagacagctctatcttgg

SEQ ID NO: 245288 - DNA, 55 bp, Artificial
  Synthetic oligonucleotide
cgctatgtggtagtcagtcttcaacgttagatcctaaaagatctttggtagttag

SEQ ID NO: 245289 - DNA, 55 bp, Artificial
  Synthetic oligonucleotide
agagccacggcgaatggctctagtatatttacggttaggaatattatagcatatg

SEQ ID NO: 245290 - DNA, 55 bp, Artificial
  Synthetic oligonucleotide
cgctacgccttgaggtcaatgctagcaggggcttatttgacaatcctgatcctct

SEQ ID NO: 245291 - DNA, 54 bp, Artificial
  Synthetic oligonucleotide
cgctaaactcactttgggactaatttgaagagtggctgaaaccaagtaagtctt

SEQ ID NO: 245292 - DNA, 55 bp, Artificial
  Synthetic oligonucleotide
caggctccgattgaaatcgggctagatgatttggtttataagggtccgcaggtag

SEQ ID NO: 245293 - DNA, 55 bp, Artificial
  Synthetic oligonucleotide
cgcgtttgttagcagttcctctgagtatttgtcttgagttggctcgtagatattg

SEQ ID NO: 245294 - DNA, 55 bp, Artificial
  Synthetic oligonucleotide
cgcgtgtatacacgtcggacatttccaggagcggacgagtacacaacaactggca

SEQ ID NO: 245295 - DNA, 55 bp, Artificial
  Synthetic oligonucleotide
cgcgggatctagtgcggtgacaccaagcatcgccttggttagcagttcaactggc

SEQ ID NO: 245296 - DNA, 55 bp, Artificial
  Synthetic oligonucleotide
cagtaaagagatccaaatgttcagtcaagatacgcgctgaaagaccaagtgcgtc

SEQ ID NO: 245297 - DNA, 55 bp, Artificial
  Synthetic oligonucleotide
cgcgctgaagataagtatgctttagccgaagaaatgcgtgattactaccatcacg

SEQ ID NO: 245298 - DNA, 60 bp, Artificial
  Synthetic oligonucleotide
caacacgtagcatatacataattctagcagcacgttcaacttcgctcatcttatcaattc

SEQ ID NO: 245299 - DNA, 55 bp, Artificial
  Synthetic oligonucleotide
cgcgcataatgctgaacttcgagcgaacttcgagaatagaaggttactactccca

SEQ ID NO: 245300 - DNA, 55 bp, Artificial
  Synthetic oligonucleotide
cggcatgatgatcataaaccagtccatccggtgtaacgatttggacgttcatttg

SEQ ID NO: 245301 - DNA, 55 bp, Artificial
  Synthetic oligonucleotide
cagctactgtcgggaaccagtcaagaaaacgctcatagtaaggaatcaccgtatc

SEQ ID NO: 245302 - DNA, 55 bp, Artificial
  Synthetic oligonucleotide
actggagttatagcacctaattcaactaaattgatggttggtggcggaccttcag

SEQ ID NO: 245303 - DNA, 55 bp, Artificial
  Synthetic oligonucleotide
cggatgtagaacaaacgaatgcttacaatcctttcatgggcttatctgcgacgca

SEQ ID NO: 245304 - DNA, 55 bp, Artificial
  Synthetic oligonucleotide
actggcacggtcatctataacggacacaatatctacagtcctcggacagatacgg

SEQ ID NO: 245305 - DNA, 55 bp, Artificial
  Synthetic oligonucleotide
cggatccccgtacggttccaagtgaggaagctgtcttatgaaatccatcatcggt

SEQ ID NO: 245306 - DNA, 51 bp, Artificial
  Synthetic oligonucleotide
cggataagcagggactttaaaacaccagttatcggaatttctagttttaac

SEQ ID NO: 245307 - DNA, 55 bp, Artificial
  Synthetic oligonucleotide
actggcttagacactttctttggcacgctatagagcctaagagatttctggttgc

SEQ ID NO: 245308 - DNA, 55 bp, Artificial
  Synthetic oligonucleotide
acttgatcgaagtagtggggaaccttgctgaggtcgtggtgaacgatgagaaccg

SEQ ID NO: 245309 - DNA, 59 bp, Artificial
  Synthetic oligonucleotide
tacacaagatacaaaagtggagcaagtgagtagcaaacaaccacaggaagtagaaagcg

SEQ ID NO: 245310 - DNA, 55 bp, Artificial
  Synthetic oligonucleotide
cggagtagcattgcttattgcagtagtagctctgtttgcgacaagcattagtgcg

SEQ ID NO: 245311 - DNA, 53 bp, Artificial
  Synthetic oligonucleotide
cggaggacttggtagtttcactaccggcggagggattctcggcgtactcttag

SEQ ID NO: 245312 - DNA, 55 bp, Artificial
  Synthetic oligonucleotide
cagctagtgctaatgtatagtctaccatactatggataattgtgccaaatccaac

SEQ ID NO: 245313 - DNA, 55 bp, Artificial
  Synthetic oligonucleotide
cagctggttttaagagtgatcccagaaggtgctgttaccgatattgcaaagacgg

SEQ ID NO: 245314 - DNA, 55 bp, Artificial
  Synthetic oligonucleotide
attgggtgcgttcacgttgcgtctcgtgtgttttaagatagcatgctcgcccatg

SEQ ID NO: 245315 - DNA, 52 bp, Artificial
  Synthetic oligonucleotide
agacactaacccactattttgggcttttagagttgacagtagtttgaaaggt

SEQ ID NO: 245316 - DNA, 55 bp, Artificial
  Synthetic oligonucleotide
cggaccctgtcatgagaatcactgccgttaccatggcccctaaaaggctaaagcg

SEQ ID NO: 245317 - DNA, 55 bp, Artificial
  Synthetic oligonucleotide
agaccactcttctacacgacgtttcatatcgcgaatgatgtctagcgtgaattcc

SEQ ID NO: 245318 - DNA, 55 bp, Artificial
  Synthetic oligonucleotide
cggaccattgctctcttggacgaatttgcggaagccctcaatcaggctgactcag

SEQ ID NO: 245319 - DNA, 55 bp, Artificial
  Synthetic oligonucleotide
cggacaagaatctcgagcgccttttcatatttacgatcctgcgatgggttcgggt

SEQ ID NO: 245320 - DNA, 60 bp, Artificial
  Synthetic oligonucleotide
tacaacgaaaaggtcaatcagattattgatgagcaaagagtcggaacacgagcaatcaga

SEQ ID NO: 245321 - DNA, 55 bp, Artificial
  Synthetic oligonucleotide
agaccagggattgcgccctactgctcctccgattgcttgggcagaagctacttgc

SEQ ID NO: 245322 - DNA, 54 bp, Artificial
  Synthetic oligonucleotide
cggaagaaggcttaagaaactacgctatactttctttaatggtcacaggcgggc

SEQ ID NO: 245323 - DNA, 55 bp, Artificial
  Synthetic oligonucleotide
cggaaccacccgtcgtacactactgtcatccagagttcgcatacgctctcaagaa

SEQ ID NO: 245324 - DNA, 55 bp, Artificial
  Synthetic oligonucleotide
cgctttatatgttttgggcacttatgagacctattccgccttatttacgggtcag

SEQ ID NO: 245325 - DNA, 52 bp, Artificial
  Synthetic oligonucleotide
agaccgttattagccctaaaagtaagcctgttaggcgaactagcaaccaaaa

SEQ ID NO: 245326 - DNA, 55 bp, Artificial
  Synthetic oligonucleotide
cgctttaaaggtgctaataaagcttcgacagctgaggccaaacttaagggcatgg

SEQ ID NO: 245327 - DNA, 55 bp, Artificial
  Synthetic oligonucleotide
agacgattgggatttgaggatactaggggaactttgttcttcgagattgctcgag

SEQ ID NO: 245328 - DNA, 55 bp, Artificial
  Synthetic oligonucleotide
cgcagacttctctgaggcgctcatgttcccctgttagtggtgtagctatccaaga

SEQ ID NO: 245329 - DNA, 55 bp, Artificial
  Synthetic oligonucleotide
agcaccctagtgctgagcgtggggcagtccgactgtaaggaggtctctgccactg

SEQ ID NO: 245330 - DNA, 55 bp, Artificial
  Synthetic oligonucleotide
cgcacccagagcataagcttctttgacgattaagtgagccaactcacgttgctcc

SEQ ID NO: 245331 - DNA, 59 bp, Artificial
  Synthetic oligonucleotide
caacgaggagcagaaaaggcggttactaagagcttgctggctacaatgtcagttaatcg

SEQ ID NO: 245332 - DNA, 55 bp, Artificial
  Synthetic oligonucleotide
cgcacccaacaatgaacttcgttcaagtaccatgaagattaaccgtgcctttccg

SEQ ID NO: 245333 - DNA, 55 bp, Artificial
  Synthetic oligonucleotide
agcaccgatgagaacattgtcaccgacacggacaggctccgcactagctggttcg

SEQ ID NO: 245334 - DNA, 55 bp, Artificial
  Synthetic oligonucleotide
cgcaccacggttacagccaagaaccgtaaaacgtgcgagaataaagctcaccaag

SEQ ID NO: 245335 - DNA, 55 bp, Artificial
  Synthetic oligonucleotide
agcacgcgtggaaggctcattattgactcaggctttgcttgcggctagcggtgca

SEQ ID NO: 245336 - DNA, 55 bp, Artificial
  Synthetic oligonucleotide
cgcacattgcctacattccagatggtcgtgtggcaggcttgtctaagctagcccg

SEQ ID NO: 245337 - DNA, 55 bp, Artificial
  Synthetic oligonucleotide
cgcacagaccaggatggtgctattcggtttaagggatggttcaaactatcaagtg

SEQ ID NO: 245338 - DNA, 55 bp, Artificial
  Synthetic oligonucleotide
cgcacactcgatatactcgagacggttaagaggctgacggagatagactacatca

SEQ ID NO: 245339 - DNA, 55 bp, Artificial
  Synthetic oligonucleotide
cgcaatccagccaccctgagtgccactaagacccaagtctgtcataatggaagac

SEQ ID NO: 245340 - DNA, 55 bp, Artificial
  Synthetic oligonucleotide
agcagagggctaagcgactatcacgttctgagttgtcgtcaagaatgcgagtgtg

SEQ ID NO: 245341 - DNA, 55 bp, Artificial
  Synthetic oligonucleotide
cgcaagtcctgacgcaaagccgaatctagaaagaatggctgaccaatagagccgg

SEQ ID NO: 245342 - DNA, 56 bp, Artificial
  Synthetic oligonucleotide
tacaaaagaatttgatcggctatcttcgttctgttgaggtaacacataacgaaaaa

SEQ ID NO: 245343 - DNA, 55 bp, Artificial
  Synthetic oligonucleotide
attgggcacctgattacggagatcgtaagattcacccaactgctgggataactgc

SEQ ID NO: 245344 - DNA, 55 bp, Artificial
  Synthetic oligonucleotide
cgattggggttatggaactatggaatggcgctcaatcagtcgtaacggcaaccta

SEQ ID NO: 245345 - DNA, 55 bp, Artificial
  Synthetic oligonucleotide
cgattgacttccgtcattgttcttgcccgaatcagacgcgttgtccctatccaac

SEQ ID NO: 245346 - DNA, 55 bp, Artificial
  Synthetic oligonucleotide
agcataaacgtcacgtccttcatccaatgcatgttgacaggttatcaaacttcca

SEQ ID NO: 245347 - DNA, 55 bp, Artificial
  Synthetic oligonucleotide
agcatatttcccattctattgatcgccccacgagcaattaattggactgcatgtc

SEQ ID NO: 245348 - DNA, 55 bp, Artificial
  Synthetic oligonucleotide
cgatgtcataaccctcttttagcttagcgtacataactggcaaaagttcgggtgg

SEQ ID NO: 245349 - DNA, 55 bp, Artificial
  Synthetic oligonucleotide
cgatggtcatttcccaaaatttgtctagtaatatggccactaacgagacctaaaa

SEQ ID NO: 245350 - DNA, 55 bp, Artificial
  Synthetic oligonucleotide
agccaacatttgcggtcgctctggtagcgcaaactccttatccctgatcatccag

SEQ ID NO: 245351 - DNA, 55 bp, Artificial
  Synthetic oligonucleotide
cgatgggaagcgacacatcaccttagacactgttgaaaattccttgcagcgcagc

SEQ ID NO: 245352 - DNA, 55 bp, Artificial
  Synthetic oligonucleotide
cgatgcagtgattatggacggtaaatcgccaatccgtacccaagagcaagattct

SEQ ID NO: 245353 - DNA, 54 bp, Artificial
  Synthetic oligonucleotide
gtggctctcctaagcacgagaatgggcggggggcgttttaaatagtatcaaggg

SEQ ID NO: 245354 - DNA, 60 bp, Artificial
  Synthetic oligonucleotide
tatccaacaagctttgaaattagccattcaactcataagcagtgcccttatcctttggct

SEQ ID NO: 245355 - DNA, 55 bp, Artificial
  Synthetic oligonucleotide
cgatgatttcgaattcacgagcaggagatgttgttccgatagaacgaggtgcgac

SEQ ID NO: 245356 - DNA, 55 bp, Artificial
  Synthetic oligonucleotide
cgatgatttatttcgggagttgactagaaatgaggaatatccctaccagagtata

SEQ ID NO: 245357 - DNA, 55 bp, Artificial
  Synthetic oligonucleotide
cagttagaaactggagttgggttgtttatccagagtctgctcctgaaaattggag

SEQ ID NO: 245358 - DNA, 55 bp, Artificial
  Synthetic oligonucleotide
agccaggaggcttgccatccaatatcgtcattaaatgtttgacgctaagagcccc

SEQ ID NO: 245359 - DNA, 55 bp, Artificial
  Synthetic oligonucleotide
cagtattcgttgaagcagcgcttgtagtagtatctgactgagacttttcagctgc

SEQ ID NO: 245360 - DNA, 55 bp, Artificial
  Synthetic oligonucleotide
agatccctgagatgcgtccgttgaggaatcctcttttgacgggttagctggctcc

SEQ ID NO: 245361 - DNA, 55 bp, Artificial
  Synthetic oligonucleotide
cgccttacttgatacctgatgactctatgataacagcgcttgtagcagcggcgaa

SEQ ID NO: 245362 - DNA, 54 bp, Artificial
  Synthetic oligonucleotide
cagtcaaccttgtaaaccattgatgcgtaagggtttctacccattctaacaccc

SEQ ID NO: 245363 - DNA, 55 bp, Artificial
  Synthetic oligonucleotide
cgcctaagaagactgtatttgtaccattcttaggagacgggattggacacggttc

SEQ ID NO: 245364 - DNA, 55 bp, Artificial
  Synthetic oligonucleotide
cgcctaaatcgtgaacctcgagagttgcttacaaacgattttcgtgcggttgcac

SEQ ID NO: 245365 - DNA, 56 bp, Artificial
  Synthetic oligonucleotide
atcgtatcagttatttctcgtaattctttgacggtgattgagggattgcggtaact

SEQ ID NO: 245366 - DNA, 55 bp, Artificial
  Synthetic oligonucleotide
cagtcaccattcgtgtgcatgatggacagactccaacggttggacagaacctctt

SEQ ID NO: 245367 - DNA, 55 bp, Artificial
  Synthetic oligonucleotide
agatctgccatagctctcgcttcacgctgaaaacgagctacagctatcgggtccg

SEQ ID NO: 245368 - DNA, 55 bp, Artificial
  Synthetic oligonucleotide
cagtcactgctaaggcctacgatattccagaaacgtatgtggctgagctcaacct

SEQ ID NO: 245369 - DNA, 55 bp, Artificial
  Synthetic oligonucleotide
cgccgtgatgcaaaggtgacgtctcgtagtttagcagagctcttgcaatacagtc

SEQ ID NO: 245370 - DNA, 55 bp, Artificial
  Synthetic oligonucleotide
agatgagtgactagcactcacagcgtctgcaaatagcaccttgggtttatccgcc

SEQ ID NO: 245371 - DNA, 55 bp, Artificial
  Synthetic oligonucleotide
cgccctaccaaaggcaaactcgatagttgtataggagacttcgaataagatcgta

SEQ ID NO: 245372 - DNA, 55 bp, Artificial
  Synthetic oligonucleotide
cagtcatggaggggacatcacatctaacattagacaaggttcaaggcttggagca

SEQ ID NO: 245373 - DNA, 55 bp, Artificial
  Synthetic oligonucleotide
cgccccataagcttggtaaagttgggctaatttatcccataacgcaggatctttc

SEQ ID NO: 245374 - DNA, 55 bp, Artificial
  Synthetic oligonucleotide
cgcccaaggaatacgctgatagtgtcgttagtctccgtcctggtctagagatttc

SEQ ID NO: 245375 - DNA, 55 bp, Artificial
  Synthetic oligonucleotide
cgccactattctgacatcggttttccacgtgtaatggccggtgagtggacaaccg

SEQ ID NO: 245376 - DNA, 53 bp, Artificial
  Synthetic oligonucleotide
tatagcatttctttagagtgggaagaaaagagcggggacaaggttaaaaacta

SEQ ID NO: 245377 - DNA, 55 bp, Artificial
  Synthetic oligonucleotide
cgccactagccaaccctaataatatcttagtagcgaactggcttctaatatcgct

SEQ ID NO: 245378 - DNA, 55 bp, Artificial
  Synthetic oligonucleotide
cgccaaatcaacaattaaatcacgagtggtgtcttctgtaatatctccacatatc

SEQ ID NO: 245379 - DNA, 55 bp, Artificial
  Synthetic oligonucleotide
agattgatttccccgaataatcttggcacgatcagctagtttataagagggcgtt

SEQ ID NO: 245380 - DNA, 55 bp, Artificial
  Synthetic oligonucleotide
cgcatcttacaaatgtgcttgactctctcccgagagctactctgccctcgctctc

SEQ ID NO: 245381 - DNA, 55 bp, Artificial
  Synthetic oligonucleotide
cgcatccattcgactaactcggctttgacaactggtcgattcatcatggggttac

SEQ ID NO: 245382 - DNA, 55 bp, Artificial
  Synthetic oligonucleotide
agcacaattgcggagctgccgatagggatttggacctcaacaccgtcctttgccg

SEQ ID NO: 245383 - DNA, 55 bp, Artificial
  Synthetic oligonucleotide
cagtccaacatacgatagaacccacgcgcggttgtgtccctactgtataatcagc

SEQ ID NO: 245384 - DNA, 52 bp, Artificial
  Synthetic oligonucleotide
cgcagtacgtcaattgttgtaaccgatccaaaaggggaaatttacgagttaa

SEQ ID NO: 245385 - DNA, 55 bp, Artificial
  Synthetic oligonucleotide
cgcagtaactggggtgccattcttatccacacgtttcactgtaactggatctggg

SEQ ID NO: 245386 - DNA, 55 bp, Artificial
  Synthetic oligonucleotide
cgcagctaacgacgtttacaaagccgctgctacgcaaagctcaggcctaagtcat

SEQ ID NO: 245387 - DNA, 58 bp, Artificial
  Synthetic oligonucleotide
tataagtcagaaatcaatgacttaaaagctcttaaaatgcctacacaggaaacagaat

SEQ ID NO: 245388 - DNA, 55 bp, Artificial
  Synthetic oligonucleotide
cagtggcaacacccttagctttgtcaagcggctatccctttatctagcagacaat

SEQ ID NO: 245389 - DNA, 55 bp, Artificial
  Synthetic oligonucleotide
atagactggttcatcgtgagttgtcacacggtcagctgtcgctataacaccacct

SEQ ID NO: 245390 - DNA, 55 bp, Artificial
  Synthetic oligonucleotide
ccaaatggagccttactatcacccgcactataaatctcacgtgtctttgtcttag

SEQ ID NO: 245391 - DNA, 55 bp, Artificial
  Synthetic oligonucleotide
ccccgattaccttcccgtttacagctcaaccaagggctataatgcctatgattat

SEQ ID NO: 245392 - DNA, 55 bp, Artificial
  Synthetic oligonucleotide
ccccatttaggtacatgtagtgccccatttaggtacatgtagtgccccatttagg

SEQ ID NO: 245393 - DNA, 55 bp, Artificial
  Synthetic oligonucleotide
ccaaattgatggcccactaccaactgctgtaaagatagcatgaggatgcgactcg

SEQ ID NO: 245394 - DNA, 55 bp, Artificial
  Synthetic oligonucleotide
ccccagccagataccttatctgctatccatttaggaactaacttaagcaatcccc

SEQ ID NO: 245395 - DNA, 55 bp, Artificial
  Synthetic oligonucleotide
ccccagaccgttcaaagcacggcttaaatcgcctgctatgagctcctgtgtcttt

SEQ ID NO: 245396 - DNA, 55 bp, Artificial
  Synthetic oligonucleotide
ccccaccaaggtggtaaccttctagcaagctctggatatacagtccagtcccacc

SEQ ID NO: 245397 - DNA, 55 bp, Artificial
  Synthetic oligonucleotide
ccccacagatgttcaaggcaaagttacgcaagatgtcataaccgtgaacagagtg

SEQ ID NO: 245398 - DNA, 55 bp, Artificial
  Synthetic oligonucleotide
tagtaacacaattacctttctaggtataagcattgttttttctaggtataagcat

SEQ ID NO: 245399 - DNA, 55 bp, Artificial
  Synthetic oligonucleotide
ccccaagtcacgacgacgactgacccatcctttcaatgtgattgtcgttccaatg

SEQ ID NO: 245400 - DNA, 55 bp, Artificial
  Synthetic oligonucleotide
ccaacacgtttaagagcatgtgtccattcgctctgggtgctagaaccaaagaccg

SEQ ID NO: 245401 - DNA, 54 bp, Artificial
  Synthetic oligonucleotide
atagtaaaattcgctcaatcactaccaagccaggtaaaagcaaaggggctattt

SEQ ID NO: 245402 - DNA, 55 bp, Artificial
  Synthetic oligonucleotide
ccccaaaagagcaattacggctggaagaacgaacatagtcgcccagacttgtgta

SEQ ID NO: 245403 - DNA, 55 bp, Artificial
  Synthetic oligonucleotide
cccattctgttctagtcgtgcaattaaagactaacagcctgtactcatcaaggta

SEQ ID NO: 245404 - DNA, 55 bp, Artificial
  Synthetic oligonucleotide
atagtaagcatctgtcacgctctgctcattgacacggtactgagtcgctacattc

SEQ ID NO: 245405 - DNA, 53 bp, Artificial
  Synthetic oligonucleotide
ccaaccgtcctctaaatagctttctaggtcgtctgtggcggttacagttaccg

SEQ ID NO: 245406 - DNA, 55 bp, Artificial
  Synthetic oligonucleotide
atgaatgggttggagtatatgcaagaccgcaagacaagccgacagcgttagaccc

SEQ ID NO: 245407 - DNA, 54 bp, Artificial
  Synthetic oligonucleotide
cccatagcgtcttcctttaatcacagactcttttagggttctaattccctccaa

SEQ ID NO: 245408 - DNA, 55 bp, Artificial
  Synthetic oligonucleotide
ccaactccccataagccttgcgaatagcttgagcagtaggattggtgtcctcact

SEQ ID NO: 245409 - DNA, 59 bp, Artificial
  Synthetic oligonucleotide
taggtcaatctcccctgctgcttcggaaaagactggtcctgccgcaaaaacacgatgag

SEQ ID NO: 245410 - DNA, 55 bp, Artificial
  Synthetic oligonucleotide
cccactttggggagagttttgctctcgcgggcatagcaagtgggtgcccaaatcc

SEQ ID NO: 245411 - DNA, 55 bp, Artificial
  Synthetic oligonucleotide
ccaacttttcaaggcgaatcggggaatctatggggcacctaagattcatcacctc

SEQ ID NO: 245412 - DNA, 52 bp, Artificial
  Synthetic oligonucleotide
ccaagccgccgactaaagggcgtcccaaagtatagttaccaattgttgtacc

SEQ ID NO: 245413 - DNA, 55 bp, Artificial
  Synthetic oligonucleotide
cccacgatgcttatgtagcccaacaatgtcatcggattattgaattgggcgaggg

SEQ ID NO: 245414 - DNA, 54 bp, Artificial
  Synthetic oligonucleotide
ccaaggattttaccaagtatcgcatggaactagtccccttacgacaggacgggc

SEQ ID NO: 245415 - DNA, 55 bp, Artificial
  Synthetic oligonucleotide
atcttcgtaaggaccgtggatatttgtgatcaagtcttcgttttcatatagacgc

SEQ ID NO: 245416 - DNA, 55 bp, Artificial
  Synthetic oligonucleotide
atgcaatcattaagttcaaatggctaaaatagctcataagctcatataagagcta

SEQ ID NO: 245417 - DNA, 55 bp, Artificial
  Synthetic oligonucleotide
cccgtcaccaagagaaccttttctttcggctcagatgcataattgttagttgttg

SEQ ID NO: 245418 - DNA, 55 bp, Artificial
  Synthetic oligonucleotide
ataataaggcaccgttcctgtaagcaccaatgtcacaataacataaaagactacc

SEQ ID NO: 245419 - DNA, 55 bp, Artificial
  Synthetic oligonucleotide
ccaaacatgaagtccttagccaagatgccaacacttacactcgctgaggcgtaca

SEQ ID NO: 245420 - DNA, 60 bp, Artificial
  Synthetic oligonucleotide
atgagcgaccacggttttgagttggaacgtggcaagctgaatagtgaagctaagcataag

SEQ ID NO: 245421 - DNA, 55 bp, Artificial
  Synthetic oligonucleotide
ataatgctgtgaccaacttcgccagcagagacaatcatttgatccaagtctaggg

SEQ ID NO: 245422 - DNA, 55 bp, Artificial
  Synthetic oligonucleotide
atacgaggtatctaatcgatattcatttgtcgttatgactatggacactgcagag

SEQ ID NO: 245423 - DNA, 55 bp, Artificial
  Synthetic oligonucleotide
cccgcctgcacatagtcctcaatagatcgttctagatgctcagtatcagcaaaat

SEQ ID NO: 245424 - DNA, 55 bp, Artificial
  Synthetic oligonucleotide
cccgcacaaaataagcaggtgggtaactcgcacctctttaagtggcttccgcgtg

SEQ ID NO: 245425 - DNA, 55 bp, Artificial
  Synthetic oligonucleotide
cccgcaatacctgagccaatcattccggctacaaaaggataaacgtatttaacat

SEQ ID NO: 245426 - DNA, 55 bp, Artificial
  Synthetic oligonucleotide
cccgatagcccagactttccctaaaatactagctgcggcataatcccatggttgc

SEQ ID NO: 245427 - DNA, 55 bp, Artificial
  Synthetic oligonucleotide
cccgagtttatggtctcaaatatagaacagtcccgttccttctactgcgatttac

SEQ ID NO: 245428 - DNA, 55 bp, Artificial
  Synthetic oligonucleotide
ccaaacgggataatggcccttggggtcgcatgaccaacatttagattagccacta

SEQ ID NO: 245429 - DNA, 55 bp, Artificial
  Synthetic oligonucleotide
atacggtaaggcgctggatacttagcctacaacgcaatggtaggttaattcgtca

SEQ ID NO: 245430 - DNA, 55 bp, Artificial
  Synthetic oligonucleotide
ccaaagtgcttcataatgtcaagactatgaaccgtaaagacatcaccaactctac

SEQ ID NO: 245431 - DNA, 60 bp, Artificial
  Synthetic oligonucleotide
atgataatgtataaaattgtacgctgattacccactaacatgccacaaaataatagggca

SEQ ID NO: 245432 - DNA, 55 bp, Artificial
  Synthetic oligonucleotide
cccctctaattatcgtagactatttacaaatactagcaccttacaacgaacgcgc

SEQ ID NO: 245433 - DNA, 55 bp, Artificial
  Synthetic oligonucleotide
ccccttgggatccgagtagagcttggcaatctctggcgttgctccccatgtttcc

SEQ ID NO: 245434 - DNA, 55 bp, Artificial
  Synthetic oligonucleotide
cccctctatccgagataactccagcaggagtgtggagcacatcacgtcagagaag

SEQ ID NO: 245435 - DNA, 54 bp, Artificial
  Synthetic oligonucleotide
atgaccgctctgggtaaaacactttctaacgtaggtagattagtaggttggata

SEQ ID NO: 245436 - DNA, 55 bp, Artificial
  Synthetic oligonucleotide
cccctccagtcagcgcttagagctagtagaagccatgtttgagcagagtctatcc

SEQ ID NO: 245437 - DNA, 55 bp, Artificial
  Synthetic oligonucleotide
cccctcaatcgtgtaaactataagtaaccacactaacaagaacacgagaggaatc

SEQ ID NO: 245438 - DNA, 55 bp, Artificial
  Synthetic oligonucleotide
ccccgttgtccctgcaatcagcccatgcggaccgtgagcccgttcatgcaagttg

SEQ ID NO: 245439 - DNA, 55 bp, Artificial
  Synthetic oligonucleotide
ccccgttatcatcttgggccaactgggtcaagcgtttggcagcatccttagcgac

SEQ ID NO: 245440 - DNA, 55 bp, Artificial
  Synthetic oligonucleotide
ccccggtatattcaatggggtctggctctaggattgtcatgtactataatggagg

SEQ ID NO: 245441 - DNA, 54 bp, Artificial
  Synthetic oligonucleotide
ccccggactgtttcaacgtcccaagacataatcttaggcagatttctaaaatta

SEQ ID NO: 245442 - DNA, 58 bp, Artificial
  Synthetic oligonucleotide
atgatctaaccaatgatcgactagggtggttactagcgccacaaaaagtggggcgaca

SEQ ID NO: 245443 - DNA, 55 bp, Artificial
  Synthetic oligonucleotide
ccaaatcgtgcagaaccgtattcttccccttctcgatagaccttctgtcctgtcg

SEQ ID NO: 245444 - DNA, 55 bp, Artificial
  Synthetic oligonucleotide
atacttgaagagttgactatgcacgatcctgtgcaaccgcacaaacatcgttgct

SEQ ID NO: 245445 - DNA, 53 bp, Artificial
  Synthetic oligonucleotide
ccaggtggtgttttggagcacccaggtatccttaaagaccctaaacgagtgag

SEQ ID NO: 245446 - DNA, 55 bp, Artificial
  Synthetic oligonucleotide
atccggttacactggacttgattcgcaagtacggtcccttgattggtccatccgc

SEQ ID NO: 245447 - DNA, 53 bp, Artificial
  Synthetic oligonucleotide
ccaggtcttggattcgctatcttgcttcgttaccttccagttaaacgtaacct

SEQ ID NO: 245448 - DNA, 55 bp, Artificial
  Synthetic oligonucleotide
atcgacggctacagcagagatagcgtcaatagacgaaaggctagagcgcttgcgt

SEQ ID NO: 245449 - DNA, 55 bp, Artificial
  Synthetic oligonucleotide
ccaggaggctagacttgactggccctatcatactggctcccttaagaaaggctgt

SEQ ID NO: 245450 - DNA, 55 bp, Artificial
  Synthetic oligonucleotide
ccagctctcgatttcacgtcctttgatactgagaactccctgatctttcttggtt

SEQ ID NO: 245451 - DNA, 55 bp, Artificial
  Synthetic oligonucleotide
ccagcgcaaatcccaagtcgaaccgccagaggcctataagggcctcatggtaacc

SEQ ID NO: 245452 - DNA, 55 bp, Artificial
  Synthetic oligonucleotide
atctggactaccgatgctttctgggtgatattgcaaaccataaattggtagctcc

SEQ ID NO: 245453 - DNA, 58 bp, Artificial
  Synthetic oligonucleotide
atgatgctgtggtggcagtaatagccttgggtctttttatttacgggattaataatga

SEQ ID NO: 245454 - DNA, 55 bp, Artificial
  Synthetic oligonucleotide
ccacaaaggtattttgagcgtctacgtcaagccatttgctgtcgccagcttccgc

SEQ ID NO: 245455 - DNA, 55 bp, Artificial
  Synthetic oligonucleotide
ccacaccaactcgttttcttctgaatccgcaggattgccattcaagctcacactg

SEQ ID NO: 245456 - DNA, 55 bp, Artificial
  Synthetic oligonucleotide
ccagcagtagctaatcgatgataattccctccacccatgttgattccaaagtttg

SEQ ID NO: 245457 - DNA, 55 bp, Artificial
  Synthetic oligonucleotide
ccagcaaatattacctatcgtgcaggaacaggtgaccttggagactatggtacgt

SEQ ID NO: 245458 - DNA, 55 bp, Artificial
  Synthetic oligonucleotide
atcgcaggcccttccaaaggcgctaacaactgcacgcaggtaatctttagagtga

SEQ ID NO: 245459 - DNA, 55 bp, Artificial
  Synthetic oligonucleotide
ccagagccaaattgtaatgtagtaagacctgctatcagctctggactcttattgt

SEQ ID NO: 245460 - DNA, 55 bp, Artificial
  Synthetic oligonucleotide
atcggggctttgtctgggttgtcacaagctgcggggattttaatcggacgcaggc

SEQ ID NO: 245461 - DNA, 55 bp, Artificial
  Synthetic oligonucleotide
ccagaaacatcacaatctctactctcaagctcggtccccaaggcaccgtgtagga

SEQ ID NO: 245462 - DNA, 55 bp, Artificial
  Synthetic oligonucleotide
ccacagacgtacacaccacgggcaagcggtcagaggtctatcactatgagggtta

SEQ ID NO: 245463 - DNA, 54 bp, Artificial
  Synthetic oligonucleotide
atcggtaaaatctttgccgatcgttatcggattatcaaagaaatcggacgtggg

SEQ ID NO: 245464 - DNA, 60 bp, Artificial
  Synthetic oligonucleotide
cacgaagagcatgcggttaaattgttccatagagaagtctaatttcttgatgagtggttg

SEQ ID NO: 245465 - DNA, 60 bp, Artificial
  Synthetic oligonucleotide
gtggcgtaccttaccaatgcagaaatgccttagggagggggtgagataatgcttctgcaa

SEQ ID NO: 245466 - DNA, 57 bp, Artificial
  Synthetic oligonucleotide
atgccaattcagacttccgcctcatgaaccgcacaccgactaaccaaacggggacac

SEQ ID NO: 245467 - DNA, 55 bp, Artificial
  Synthetic oligonucleotide
ccactaactcatctctatacgactgattctctagcggtggaggctagtgttctag

SEQ ID NO: 245468 - DNA, 55 bp, Artificial
  Synthetic oligonucleotide
ccacgttgagaatatctttcaagccgtccaaaccagctgcgcttttagatgtagc

SEQ ID NO: 245469 - DNA, 55 bp, Artificial
  Synthetic oligonucleotide
ccacgctaggagtaacggacagatttagcagatggacggtgtgaaattttccacg

SEQ ID NO: 245470 - DNA, 54 bp, Artificial
  Synthetic oligonucleotide
ccacctctggaattggttacgataaatcgtgtttggaatttcgagaaaagatcc

SEQ ID NO: 245471 - DNA, 55 bp, Artificial
  Synthetic oligonucleotide
ccaccctgtgtagagcttctgcgtaaattattccacacagctccgaaaatccgat

SEQ ID NO: 245472 - DNA, 55 bp, Artificial
  Synthetic oligonucleotide
ccaccagagcttctacggcttcttggtcaatatcctgcggtatcaagacctccga

SEQ ID NO: 245473 - DNA, 55 bp, Artificial
  Synthetic oligonucleotide
atcgtaaacaaagagttggcttctggctaccaacacgtctacactccaccgcttg

SEQ ID NO: 245474 - DNA, 55 bp, Artificial
  Synthetic oligonucleotide
ccacatctcatagagacccttgaaagagacgctaacctaatgagtcggtcgctcg

SEQ ID NO: 245475 - DNA, 55 bp, Artificial
  Synthetic oligonucleotide
cccaatcaccaaaagctgagtccacttcgtcgtagtcaactggtgcaaatccacg

SEQ ID NO: 245476 - DNA, 55 bp, Artificial
  Synthetic oligonucleotide
cccaaggttgaaccaagagcgaagcaaggaactactgagcgttataaacctagag

SEQ ID NO: 245477 - DNA, 59 bp, Artificial
  Synthetic oligonucleotide
taggtaaaccgaatgaaccactaactgattgacctcctttgccagatttgctgacagga

SEQ ID NO: 245478 - DNA, 54 bp, Artificial
  Synthetic oligonucleotide
atatccgcaaacaagttctaagccaaacgctaggtttaaccgatgttgtcggac

SEQ ID NO: 245479 - DNA, 55 bp, Artificial
  Synthetic oligonucleotide
cccaagacctgacaagacgtcaatcgagttgagggacaagttggtaatacctgac

SEQ ID NO: 245480 - DNA, 55 bp, Artificial
  Synthetic oligonucleotide
atatgccccttggatgacagatgttggaaccacgcctgaaactgccagtgtcggc

SEQ ID NO: 245481 - DNA, 55 bp, Artificial
  Synthetic oligonucleotide
ccattgttcttgaaagactttgcctagggagttggaccactggcatacaaattga

SEQ ID NO: 245482 - DNA, 55 bp, Artificial
  Synthetic oligonucleotide
ccattgtacgtgctgtcaaacctgacggacgtctcaaattggaccgtatcggtgg

SEQ ID NO: 245483 - DNA, 55 bp, Artificial
  Synthetic oligonucleotide
ccaaggctacctacacggtcgtatggagccatcataacatcagggacattaccag

SEQ ID NO: 245484 - DNA, 55 bp, Artificial
  Synthetic oligonucleotide
ccattcgtgctgaagcactttcaatacccgaatttgcacgattagctgatgcgct

SEQ ID NO: 245485 - DNA, 55 bp, Artificial
  Synthetic oligonucleotide
ccaatcaagcaaactgcacaggagttgggagcctatgcaacctacttatcaggtg

SEQ ID NO: 245486 - DNA, 55 bp, Artificial
  Synthetic oligonucleotide
ccatgacgatccttaatttcacggacaatcttaatcaagtcgagacgaccttctg

SEQ ID NO: 245487 - DNA, 55 bp, Artificial
  Synthetic oligonucleotide
ccatgaccaaaggaagagcgcgactagcttggtggggaataatatagtctacagc

SEQ ID NO: 245488 - DNA, 60 bp, Artificial
  Synthetic oligonucleotide
atgcgacacaatctcagcctttggcgcacgctcacgcacacgcttaaccgtctccacata

SEQ ID NO: 245489 - DNA, 55 bp, Artificial
  Synthetic oligonucleotide
atcttatctgtcagtcaggtgctcgttcagctagggcctgtcagtatctttcgac

SEQ ID NO: 245490 - DNA, 55 bp, Artificial
  Synthetic oligonucleotide
ccatcttgcgattgaaaacagctgagctatttcccgtactaatcattagggctgg

SEQ ID NO: 245491 - DNA, 55 bp, Artificial
  Synthetic oligonucleotide
ccatcaggtccctcgacctcctcagttaaatacttatagagacaagatagagctg

SEQ ID NO: 245492 - DNA, 55 bp, Artificial
  Synthetic oligonucleotide
ccatagactagctcggtcactaagcccttgtctgctgcgatgactccccttgagg

SEQ ID NO: 245493 - DNA, 55 bp, Artificial
  Synthetic oligonucleotide
atcaagtcaacaggtgtgagtcttaaaactctcaatcctttagaggcagacccac

SEQ ID NO: 245494 - DNA, 55 bp, Artificial
  Synthetic oligonucleotide
ccatacagcaactatggttcgtttagcagatgcgattggtgatgtttatccgcag

SEQ ID NO: 245495 - DNA, 55 bp, Artificial
  Synthetic oligonucleotide
atcaggacctgccaagactggcaagatgtcataagtatcgttcatacctgtaatg

SEQ ID NO: 245496 - DNA, 55 bp, Artificial
  Synthetic oligonucleotide
ccataagcggtgtctgtataccaacctaggtctgtcgaaggcataacgactatca

SEQ ID NO: 245497 - DNA, 55 bp, Artificial
  Synthetic oligonucleotide
ccataagcctagggacgagaaatcgttacggcagtcgaaatggctaagtcttcgg

SEQ ID NO: 245498 - DNA, 55 bp, Artificial
  Synthetic oligonucleotide
ccagttgatctaacgtgcaatcattttgggattgctcgtataccaagaacggaca

SEQ ID NO: 245499 - DNA, 54 bp, Artificial
  Synthetic oligonucleotide
atggacaagagttaaatacgacgacctttaacttagcacgtatgaacttaattc

SEQ ID NO: 245500 - DNA, 55 bp, Artificial
  Synthetic oligonucleotide
ccagtcacaccagcgtctgcgtaagagccgccgagaacaaagcgtcctgtttgtt

SEQ ID NO: 245501 - DNA, 55 bp, Artificial
  Synthetic oligonucleotide
ccagtcaatctcgactatcagcgagtggtcagccaggttaatgtgattaatcgtg

SEQ ID NO: 245502 - DNA, 55 bp, Artificial
  Synthetic oligonucleotide
ccagtaagacccagtatgaagcggacgaactctttgcgactctggacgcgacgac

SEQ ID NO: 245503 - DNA, 55 bp, Artificial
  Synthetic oligonucleotide
ccagtaacagaggaagtaccggccagtgtcttgcaacatcatccagatgtgactc

SEQ ID NO: 245504 - DNA, 55 bp, Artificial
  Synthetic oligonucleotide
ccagtaaaacactgcgtgaaggggcgattatctactggtatggaaaagcctcaac

SEQ ID NO: 245505 - DNA, 55 bp, Artificial
  Synthetic oligonucleotide
ccgtaaaatggatggtcgtgaaaagtccttgattgaccgtgtgacacgactcacc

SEQ ID NO: 245506 - DNA, 55 bp, Artificial
  Synthetic oligonucleotide
catctcccaagggaagcagactcgcagtcagatctgggttgtccaaagttgcatc

SEQ ID NO: 245507 - DNA, 55 bp, Artificial
  Synthetic oligonucleotide
catctctatacgactgactctctagcggtggaggctagtgttctagtgacactgt

SEQ ID NO: 245508 - DNA, 55 bp, Artificial
  Synthetic oligonucleotide
ccggtctaagaaggttcacagctgaagcatcgacacccacataggtccggtaggt

SEQ ID NO: 245509 - DNA, 53 bp, Artificial
  Synthetic oligonucleotide
ccggtattatggtaggggttgcccttcaagtcgtttatatcgccttggtaaca

SEQ ID NO: 245510 - DNA, 58 bp, Artificial
  Synthetic oligonucleotide
atggcgttaatatttctgaaggccgtatcttaagacttctcaagtctatgacactccc

SEQ ID NO: 245511 - DNA, 55 bp, Artificial
  Synthetic oligonucleotide
agtcctgtgactacaatgttagctaacaaggcacaaataccagctactggacgag

SEQ ID NO: 245512 - DNA, 55 bp, Artificial
  Synthetic oligonucleotide
agtcgattatgcagtatcagaacgtttcgatgattggtttcctacagtcagaagt

SEQ ID NO: 245513 - DNA, 55 bp, Artificial
  Synthetic oligonucleotide
catctgccaagtccttgtcatttgctaaggcacgatcaatcatggcgatgaagcg

SEQ ID NO: 245514 - DNA, 55 bp, Artificial
  Synthetic oligonucleotide
ccggcataagcataggccttactagatttagaggtccaacgactaactacagttg

SEQ ID NO: 245515 - DNA, 55 bp, Artificial
  Synthetic oligonucleotide
catctgttgccaatgctggacacgagccaatgttcgctagctaccatgcactcct

SEQ ID NO: 245516 - DNA, 55 bp, Artificial
  Synthetic oligonucleotide
ccggactaagaatgaactgtctggcgtgaagtcagcgcaagcgacgtatgaggag

SEQ ID NO: 245517 - DNA, 55 bp, Artificial
  Synthetic oligonucleotide
ccggaacgaaccattggttggcgaacagatattgatggcctgcctatcgtcgaac

SEQ ID NO: 245518 - DNA, 55 bp, Artificial
  Synthetic oligonucleotide
ccggaacctgaacactatcgtgctaaattacaatttcaagtgcgttcgtttggag

SEQ ID NO: 245519 - DNA, 55 bp, Artificial
  Synthetic oligonucleotide
ccgctgctactgcaacagggataattccgccttccatatccatcaattcccgatc

SEQ ID NO: 245520 - DNA, 55 bp, Artificial
  Synthetic oligonucleotide
ccgctcccgtgtccagagactgagtaagagcgatagggcaccggctccagtcact

SEQ ID NO: 245521 - DNA, 57 bp, Artificial
  Synthetic oligonucleotide
atggctttaagaccttaccaaattcatgcgattcgtaagattcgtcaaaaagcggca

SEQ ID NO: 245522 - DNA, 55 bp, Artificial
  Synthetic oligonucleotide
ccgctcatttcataaagcgtctcttctttgacactgttcctttgccttaccgctg

SEQ ID NO: 245523 - DNA, 55 bp, Artificial
  Synthetic oligonucleotide
ccgctcaaacagtaatgataagccgataaacattggcgctacagcaattgaccaa

SEQ ID NO: 245524 - DNA, 55 bp, Artificial
  Synthetic oligonucleotide
ccgctatatggattcctggacgttgagtagagctaactgttccttcgagagtcgg

SEQ ID NO: 245525 - DNA, 55 bp, Artificial
  Synthetic oligonucleotide
catgacgtataggtttagattgatttccccgaataatcttagcacgatcagctag

SEQ ID NO: 245526 - DNA, 55 bp, Artificial
  Synthetic oligonucleotide
ccgctaatagtcttgtgagtgacagtatattgacttggtttcttgcgtgtcgtgt

SEQ ID NO: 245527 - DNA, 55 bp, Artificial
  Synthetic oligonucleotide
ccgcctcttatttgttgatggctagtctggatatttcgcgtcgcaacttggctct

SEQ ID NO: 245528 - DNA, 55 bp, Artificial
  Synthetic oligonucleotide
ccgcctagtgattcagcacgtattttgtcagtcagaagtggctacacaggtgggc

SEQ ID NO: 245529 - DNA, 54 bp, Artificial
  Synthetic oligonucleotide
ccgccctcctctaggattgtctcaaaccttaggggttgttcgttgataaaatca

SEQ ID NO: 245530 - DNA, 55 bp, Artificial
  Synthetic oligonucleotide
ccgcatctttccgaatagctcgcttagagctcttcttttcattcacgtaatcctt

SEQ ID NO: 245531 - DNA, 55 bp, Artificial
  Synthetic oligonucleotide
agtgacgataagtccctgacagccaagtgctttcataatacgaattgggaaggtt

SEQ ID NO: 245532 - DNA, 53 bp, Artificial
  Synthetic oligonucleotide
atggtaggggaggcatacgacgtaatacccgtagagggaaccgacttagtgga

SEQ ID NO: 245533 - DNA, 55 bp, Artificial
  Synthetic oligonucleotide
cctcaacggccttggtatcgactatccaagcatacactatgctaacgccatttca

SEQ ID NO: 245534 - DNA, 55 bp, Artificial
  Synthetic oligonucleotide
cctatttccagtcttggatgcaaagtacggataaaatcctctctgatctagccag

SEQ ID NO: 245535 - DNA, 55 bp, Artificial
  Synthetic oligonucleotide
catccattcgcagtcactgtcttgccaaccaggttgaaattggagtgtgtccatg

SEQ ID NO: 245536 - DNA, 55 bp, Artificial
  Synthetic oligonucleotide
agtatcaaatactctacgggcgtatgtcacgcggtgccaccgtaatttaagagtc

SEQ ID NO: 245537 - DNA, 54 bp, Artificial
  Synthetic oligonucleotide
cctattatgttcctaaagagcaaacctacgaagtatgggccataaccttaacca

SEQ ID NO: 245538 - DNA, 55 bp, Artificial
  Synthetic oligonucleotide
cctatgcgatgccagatagtaacctctatatgatggaaattaacgacagtagcct

SEQ ID NO: 245539 - DNA, 55 bp, Artificial
  Synthetic oligonucleotide
cctatcacggcgtatctcactaaattgctcgacaaataagaaagtcccacctcgg

SEQ ID NO: 245540 - DNA, 55 bp, Artificial
  Synthetic oligonucleotide
cctatcaactagatcaaccagttgagtgtgaatgttgaaacaccctagcctcagc

SEQ ID NO: 245541 - DNA, 55 bp, Artificial
  Synthetic oligonucleotide
cctatacggttgtctttggcctaggattctcatggcaagaagctttggctatggt

SEQ ID NO: 245542 - DNA, 54 bp, Artificial
  Synthetic oligonucleotide
cctataactcagatactggggttgtatcaggaacaatctttaaggggaaggtta

SEQ ID NO: 245543 - DNA, 57 bp, Artificial
  Synthetic oligonucleotide
tagcgtaaataacctaatccacgctaggagtaacggacagatttagcagatggacgg

SEQ ID NO: 245544 - DNA, 55 bp, Artificial
  Synthetic oligonucleotide
cctaggtggtaaccttctagcaagctctggatataaagtccagtcccaccggcga

SEQ ID NO: 245545 - DNA, 55 bp, Artificial
  Synthetic oligonucleotide
atgtaacgattgtatgagatgggttaccattttgtccctcaacacgtagtagatc

SEQ ID NO: 245546 - DNA, 55 bp, Artificial
  Synthetic oligonucleotide
cctacatagtcttctggagtgaaggttccgtctgaaccgactggaaggctacgca

SEQ ID NO: 245547 - DNA, 55 bp, Artificial
  Synthetic oligonucleotide
cctacagtcttagtaacggtcacctggaacttagccaccatgttatcataaacca

SEQ ID NO: 245548 - DNA, 55 bp, Artificial
  Synthetic oligonucleotide
cctaagactgctagagataaggttgagacaaacattgtggccattcgtttggtaa

SEQ ID NO: 245549 - DNA, 55 bp, Artificial
  Synthetic oligonucleotide
cctaactgctggttatcttatggtaatgacagcacaaacagcgttcgctgcggac

SEQ ID NO: 245550 - DNA, 55 bp, Artificial
  Synthetic oligonucleotide
caccctagcgagcgctacgcagagccacgtttagggcaagtcttagatgcgcgtg

SEQ ID NO: 245551 - DNA, 55 bp, Artificial
  Synthetic oligonucleotide
catctaagcgctgtttagctctttcacacagtcgttagggcgtgttcaccttcgt

SEQ ID NO: 245552 - DNA, 55 bp, Artificial
  Synthetic oligonucleotide
ccgttggcgagactgacttccaacagacgataaactgccaagtgctggatatccc

SEQ ID NO: 245553 - DNA, 54 bp, Artificial
  Synthetic oligonucleotide
ccgtgccctagctcccgcactttaccgtaaacgcacttacgactttgctaaatc

SEQ ID NO: 245554 - DNA, 60 bp, Artificial
  Synthetic oligonucleotide
atggttatcgatgaactacaaccaatacgagcattacagcaataagggcggacggagagc

SEQ ID NO: 245555 - DNA, 55 bp, Artificial
  Synthetic oligonucleotide
agtcatagacagctccgccctctttcaaatgcttaccgcgtccgatacagtcatc

SEQ ID NO: 245556 - DNA, 55 bp, Artificial
  Synthetic oligonucleotide
ccgtcacacctaactccagaaggcgctcataaacacctcggatacttttggcatg

SEQ ID NO: 245557 - DNA, 55 bp, Artificial
  Synthetic oligonucleotide
ccgtatagagacgggcaatggttgacaattcattgtcttcaacggttgagagcag

SEQ ID NO: 245558 - DNA, 55 bp, Artificial
  Synthetic oligonucleotide
ccgtaatgaacgtatcagctactacagccgtctaattgaaggtacttatcctgat

SEQ ID NO: 245559 - DNA, 55 bp, Artificial
  Synthetic oligonucleotide
ccgtaacgttcgtctcctctttcatacgaccttaatgtatgcgttaggaggaggc

SEQ ID NO: 245560 - DNA, 55 bp, Artificial
  Synthetic oligonucleotide
catgtacttatcaactgaacgaagtttatcgtaagcgactacatcttgagctggg

SEQ ID NO: 245561 - DNA, 55 bp, Artificial
  Synthetic oligonucleotide
catgttaacagaaccccaaatcagaaacaagggtaaatatactcgcaagctcgcc

SEQ ID NO: 245562 - DNA, 55 bp, Artificial
  Synthetic oligonucleotide
ccgaataacgacagtagcggcgttggtcattcgttactaaatcggcgttggtcat

SEQ ID NO: 245563 - DNA, 55 bp, Artificial
  Synthetic oligonucleotide
ccgaagaagcgattcacgaaaatcaagatacatttacgcattggacaccaaacgt

SEQ ID NO: 245564 - DNA, 55 bp, Artificial
  Synthetic oligonucleotide
agttgcttagaaagcagaataggagcttttaggattggtctatgttgttttgctg

SEQ ID NO: 245565 - DNA, 60 bp, Artificial
  Synthetic oligonucleotide
tagccgtgcttgcggtaccaatctaccacgtcagctaagctttcttcgagagggcgatgc

SEQ ID NO: 245566 - DNA, 55 bp, Artificial
  Synthetic oligonucleotide
ccctttcccaagaggcatagggatgtgcataatagatgtgctcctcagaaaatac

SEQ ID NO: 245567 - DNA, 55 bp, Artificial
  Synthetic oligonucleotide
cccttgccaacctctataggatgaaggtccaactggtatacgtcctcgactcggt

SEQ ID NO: 245568 - DNA, 51 bp, Artificial
  Synthetic oligonucleotide
cccttacgtacccgttccataatggtaaaagccatcttaggttccagaccc

SEQ ID NO: 245569 - DNA, 55 bp, Artificial
  Synthetic oligonucleotide
ccctgtcgtcttgaccggtgccatgcgaagctccaacgaactaggaagtgacgga

SEQ ID NO: 245570 - DNA, 51 bp, Artificial
  Synthetic oligonucleotide
ccctggtttaatctcttattgcacgaaacgaaattttcaggagaaaagggt

SEQ ID NO: 245571 - DNA, 55 bp, Artificial
  Synthetic oligonucleotide
cattattgcttacctagggtttgctagtggtatagtgcctctaacaacaggtgct

SEQ ID NO: 245572 - DNA, 55 bp, Artificial
  Synthetic oligonucleotide
cattccgatacgtgtgatattaatacctgtccaaactcgaccaatcagggctcca

SEQ ID NO: 245573 - DNA, 55 bp, Artificial
  Synthetic oligonucleotide
ccctgaggctagtttgaggttgctgataggattgtgggcgatagcgacttgcgaa

SEQ ID NO: 245574 - DNA, 55 bp, Artificial
  Synthetic oligonucleotide
ccctgaaggcttgctggcagagattactcagcaacggaaacagcgtattaaaatt

SEQ ID NO: 245575 - DNA, 55 bp, Artificial
  Synthetic oligonucleotide
ccctcttgcttacttgcaacgtatgatagatgtgtttctaccccttttaatcccc

SEQ ID NO: 245576 - DNA, 56 bp, Artificial
  Synthetic oligonucleotide
gtggataaggagcgggacagtgccctagtcggactgtttaccttgcataggggctt

SEQ ID NO: 245577 - DNA, 60 bp, Artificial
  Synthetic oligonucleotide
tagataaagaacgcatgaacctgaataacggagacactttagatgccgattggccgtcag

SEQ ID NO: 245578 - DNA, 54 bp, Artificial
  Synthetic oligonucleotide
ccctctcttttgaggtacataaatgaaggtggaaccacgttgcgacgtcctttc

SEQ ID NO: 245579 - DNA, 55 bp, Artificial
  Synthetic oligonucleotide
cattctcgataatagttttagcttcggtacggctacctgctaactcagcttcgcg

SEQ ID NO: 245580 - DNA, 55 bp, Artificial
  Synthetic oligonucleotide
ccctatctatcacaaatgtctaagggctgctgtcagctcgaaagccttctcttag

SEQ ID NO: 245581 - DNA, 55 bp, Artificial
  Synthetic oligonucleotide
catttcaaagggcatcaatgaaagaccgagacgaatccttggttatcagtccgca

SEQ ID NO: 245582 - DNA, 55 bp, Artificial
  Synthetic oligonucleotide
ccctagaaaatcattcgaagagcttagaagcgaaaatagagtgtttagagagtga

SEQ ID NO: 245583 - DNA, 53 bp, Artificial
  Synthetic oligonucleotide
ccctactggtattacacagtttattgataccgtcctagaaacaccggaaggac

SEQ ID NO: 245584 - DNA, 55 bp, Artificial
  Synthetic oligonucleotide
ccctaagtcttggcggacagggtgcttttcgtttagcgtgatgaactcactactc

SEQ ID NO: 245585 - DNA, 55 bp, Artificial
  Synthetic oligonucleotide
ccctaacaaatcagctaatgaactatgtttacgggcattggcgtacaaccaacct

SEQ ID NO: 245586 - DNA, 55 bp, Artificial
  Synthetic oligonucleotide
atgctaagggtcaactattgcgtacaggaacaacggatgataagggacaaatcag

SEQ ID NO: 245587 - DNA, 52 bp, Artificial
  Synthetic oligonucleotide
cccgtttcccttctgcccggactggggtaatccaccaatattcaaatggacc

SEQ ID NO: 245588 - DNA, 59 bp, Artificial
  Synthetic oligonucleotide
tagagtatacctatttgtcctaatatgattttagcagtataattgacttggtgaatagg

SEQ ID NO: 245589 - DNA, 55 bp, Artificial
  Synthetic oligonucleotide
atgccgagaaaactcttgctaggaagctatgcgaaatagactagtaggggtcgag

SEQ ID NO: 245590 - DNA, 55 bp, Artificial
  Synthetic oligonucleotide
ataacaagattactcgtgcagatggtgttatcgctactcctgagcacaaccacac

SEQ ID NO: 245591 - DNA, 55 bp, Artificial
  Synthetic oligonucleotide
catgactaacggctgcttagaacctgaattattacccttaggtgactgctgctcc

SEQ ID NO: 245592 - DNA, 55 bp, Artificial
  Synthetic oligonucleotide
atggtcgctagcgttaccaaagccattatcctaatggcggacgttcgtttggatg

SEQ ID NO: 245593 - DNA, 55 bp, Artificial
  Synthetic oligonucleotide
agtgcggatacttttgttcacttatcacgtgggcaattaaaggaagaggtaagtc

SEQ ID NO: 245594 - DNA, 55 bp, Artificial
  Synthetic oligonucleotide
agtgcgtaaagcggagctgtttctgtccgcaggatacgtgggcctagccctgtaa

SEQ ID NO: 245595 - DNA, 55 bp, Artificial
  Synthetic oligonucleotide
ccgatttgaagcactataatcgcctaaagcacaccaaggtcaccggggtgcgaaa

SEQ ID NO: 245596 - DNA, 55 bp, Artificial
  Synthetic oligonucleotide
ccgattggccctcagaagagccttatcagtttgattctgtggtcatgaatcctcc

SEQ ID NO: 245597 - DNA, 55 bp, Artificial
  Synthetic oligonucleotide
ccgattagttcggtgtcgcgttcagatgtcaatatcctgatgactgtcaatcgag

SEQ ID NO: 245598 - DNA, 55 bp, Artificial
  Synthetic oligonucleotide
ccgatgtgcgtgactatatcgtgactccagcagtcgcagggaatggttctgccac

SEQ ID NO: 245599 - DNA, 55 bp, Artificial
  Synthetic oligonucleotide
attaacgtccttgacaaaatccttcgatagactgtttaagcgagctaaggtacaa

SEQ ID NO: 245600 - DNA, 55 bp, Artificial
  Synthetic oligonucleotide
agtggactttatgaaccggtagaggagactgatcgtgaacaatagtcaacaaatg

SEQ ID NO: 245601 - DNA, 55 bp, Artificial
  Synthetic oligonucleotide
ccgatctaattgggaatcttttaccagactttcagtgacgttactgatatggtgg

SEQ ID NO: 245602 - DNA, 55 bp, Artificial
  Synthetic oligonucleotide
ccgatcgcagccgtagtggacacagataaccaaagttttaattccggtgtcttat

SEQ ID NO: 245603 - DNA, 55 bp, Artificial
  Synthetic oligonucleotide
ccgataaggacaactgacagccattgggacactcgaaggccgaagaacatgagac

SEQ ID NO: 245604 - DNA, 55 bp, Artificial
  Synthetic oligonucleotide
ccgagtctctggataggccaaggtcacacggttgtctgtgtaaataggtgacttg

SEQ ID NO: 245605 - DNA, 55 bp, Artificial
  Synthetic oligonucleotide
agtggatatgattacctccctgcgtttgttggtatcgggattctttctcgttggc

SEQ ID NO: 245606 - DNA, 55 bp, Artificial
  Synthetic oligonucleotide
ccgagtagcaacatctgctagactttcaagtgtattggttgtaacgctggtaatt

SEQ ID NO: 245607 - DNA, 54 bp, Artificial
  Synthetic oligonucleotide
ccgagggcgtcaaagagtgttaagagacttacgtattgtgtttaaagagtttga

SEQ ID NO: 245608 - DNA, 55 bp, Artificial
  Synthetic oligonucleotide
ccgagctagccttgactggaggaccagatccagattgtcgtcgttgtatgccttg

SEQ ID NO: 245609 - DNA, 55 bp, Artificial
  Synthetic oligonucleotide
catgcgatgagtcgattggctcttaggagccttttgcgctgaggaggtctacatt

SEQ ID NO: 245610 - DNA, 56 bp, Artificial
  Synthetic oligonucleotide
attaagaccattaagagagggaaaatgggataggcaatcgcggagattagcaaaat

SEQ ID NO: 245611 - DNA, 55 bp, Artificial
  Synthetic oligonucleotide
agttacttcctgagcatctctttaattacctacgcactgtaccacctagtcatcc

SEQ ID NO: 245612 - DNA, 55 bp, Artificial
  Synthetic oligonucleotide
ccgagcggacaggactcccaactttccgtttgcttcatcgccctaatcgacagag

SEQ ID NO: 245613 - DNA, 55 bp, Artificial
  Synthetic oligonucleotide
catgcttacgacaatagtccactgtttcagcctgatagacaccaggcgccagacg

SEQ ID NO: 245614 - DNA, 55 bp, Artificial
  Synthetic oligonucleotide
catggatatgggattagcgcgtcacacaaaagtttacctacgaaaagttgctccg

SEQ ID NO: 245615 - DNA, 55 bp, Artificial
  Synthetic oligonucleotide
ccgagcctcaaacgaagtgaaccacttttcaggcagactgtccgactctcggacg

SEQ ID NO: 245616 - DNA, 55 bp, Artificial
  Synthetic oligonucleotide
catgggttaaacccgtctgagactgtcatggttggaaatgacttgacgactgata

SEQ ID NO: 245617 - DNA, 55 bp, Artificial
  Synthetic oligonucleotide
catggtcttggtgaaccgtgggatgaccgttggtacgccagatgtagtgacggct

SEQ ID NO: 245618 - DNA, 55 bp, Artificial
  Synthetic oligonucleotide
ccgacgacaggccatatttctttaggtccagatgagcgactgtctgttttgcgtc

SEQ ID NO: 245619 - DNA, 55 bp, Artificial
  Synthetic oligonucleotide
aagtctgctcaagccgtcaataaagctcttacggggattctaagagactacaccg

SEQ ID NO: 245620 - DNA, 55 bp, Artificial
  Synthetic oligonucleotide
ctgcctaccagctattcaacggtctaatgtaccgcaacatcaggcgtgataacct

SEQ ID NO: 245621 - DNA, 54 bp, Artificial
  Synthetic oligonucleotide
attaagattgtacttccacaacgtgtaaacgtgcaactaatgggggcttataag

SEQ ID NO: 245622 - DNA, 55 bp, Artificial
  Synthetic oligonucleotide
ctgccgtccctcggtacataggagccagaacttggatatcgcgggcaggaatacc

SEQ ID NO: 245623 - DNA, 55 bp, Artificial
  Synthetic oligonucleotide
ctgcccttgatcagatggctggacctgttcaaatcaacgttccattgcgcgaccc

SEQ ID NO: 245624 - DNA, 54 bp, Artificial
  Synthetic oligonucleotide
cttttatgggtaagggacagtttgtcgttatcacagattacggaaccggcagtc

SEQ ID NO: 245625 - DNA, 55 bp, Artificial
  Synthetic oligonucleotide
ctgccagattaacaagactccgagaaagcccaatagactaatgtgtcgtctcagt

SEQ ID NO: 245626 - DNA, 55 bp, Artificial
  Synthetic oligonucleotide
aagtgacaagagcatataagcagttaactctccactagtcttcaaacatgctacg

SEQ ID NO: 245627 - DNA, 55 bp, Artificial
  Synthetic oligonucleotide
cacgagctagaaccttaataaaggttaagtcctgctcacttgtctccgactcacc

SEQ ID NO: 245628 - DNA, 55 bp, Artificial
  Synthetic oligonucleotide
aatagtggagctcatgcagctgactttgcaattcaatttggtagagggtttagtc

SEQ ID NO: 245629 - DNA, 55 bp, Artificial
  Synthetic oligonucleotide
cacgaggatcattgtccatcttaaacataccacctcgcatcgtattttgatccat

SEQ ID NO: 245630 - DNA, 55 bp, Artificial
  Synthetic oligonucleotide
ctgcacctggaacgctcatagcaatcccactgtaaccctgttctgacaagcgttg

SEQ ID NO: 245631 - DNA, 55 bp, Artificial
  Synthetic oligonucleotide
aatcggctctctgtaaccccaaatcattcatacctctctcaactagatgtaactt

SEQ ID NO: 245632 - DNA, 53 bp, Artificial
  Synthetic oligonucleotide
attaatcttcgttccataaaacttaaccacttagaatgtttaaattcgtcatc

SEQ ID NO: 245633 - DNA, 55 bp, Artificial
  Synthetic oligonucleotide
cacgagtctgccccgtcgattatacgaggcaagacgagttagtactgcgtctagc

SEQ ID NO: 245634 - DNA, 55 bp, Artificial
  Synthetic oligonucleotide
ctgcaaagatgagcactaaacttatacttagctcgtttatgtagggagtaaccca

SEQ ID NO: 245635 - DNA, 54 bp, Artificial
  Synthetic oligonucleotide
ctgattgtcctgccctaccttgaccgcttaccgggtaatataaggtacggccat

SEQ ID NO: 245636 - DNA, 55 bp, Artificial
  Synthetic oligonucleotide
ctgatgaccggtaaaatttaatattttgaaccttgcttaggcagctgacttcaca

SEQ ID NO: 245637 - DNA, 55 bp, Artificial
  Synthetic oligonucleotide
ctgatagttgctggcctttcaattgtggggctctatttagggagctcgtaaaacg

SEQ ID NO: 245638 - DNA, 55 bp, Artificial
  Synthetic oligonucleotide
ctgagtccacgtctgagtctctaagtgagtcgatttccgagtctacatcagaatc

SEQ ID NO: 245639 - DNA, 55 bp, Artificial
  Synthetic oligonucleotide
cacgataagtcgcagctgttgcttctaattgagagatttgcccatctaactgagc

SEQ ID NO: 245640 - DNA, 55 bp, Artificial
  Synthetic oligonucleotide
ctgacttgatggctaacattagacgtgacaattccccacctgatgcgactttaac

SEQ ID NO: 245641 - DNA, 55 bp, Artificial
  Synthetic oligonucleotide
ctgaccatggaggcgtgacacgtgcgcgtaaattagcccaatttcttcaaactcc

SEQ ID NO: 245642 - DNA, 55 bp, Artificial
  Synthetic oligonucleotide
ctgaccaaaagcttgaataatacgaataccttcgatactttctgccagcttcgta

SEQ ID NO: 245643 - DNA, 58 bp, Artificial
  Synthetic oligonucleotide
tagaccggcgattgaaatgagggctccgtaagaaacgagtggagctccgatagggcca

SEQ ID NO: 245644 - DNA, 55 bp, Artificial
  Synthetic oligonucleotide
ctgaatgaatatcccttttgttgtagaaactgtgcttcatgacggcttgttaaag

SEQ ID NO: 245645 - DNA, 55 bp, Artificial
  Synthetic oligonucleotide
ctgaagtaaaatactctcatccaatcctggcaccaaatcacacggcatataagtg

SEQ ID NO: 245646 - DNA, 55 bp, Artificial
  Synthetic oligonucleotide
aatgctgactacttatgttttgaccattgtgatgtttcgccttaaccaccaaatc

SEQ ID NO: 245647 - DNA, 52 bp, Artificial
  Synthetic oligonucleotide
ctggggaatcggaaaacgaactgagaaacgattaaacaaacttggaatcact

SEQ ID NO: 245648 - DNA, 54 bp, Artificial
  Synthetic oligonucleotide
aactcgggatagttacggttggggcgatgttgttgatgttcgacgtgatttggg

SEQ ID NO: 245649 - DNA, 55 bp, Artificial
  Synthetic oligonucleotide
aactctgaaaatctcatcaacgctatgggtcttgcagtatcaaaccgtagccttc

SEQ ID NO: 245650 - DNA, 55 bp, Artificial
  Synthetic oligonucleotide
ctggctcagttagatccatccgaagagtacattgaaacagtttggggcttaggtg

SEQ ID NO: 245651 - DNA, 55 bp, Artificial
  Synthetic oligonucleotide
ctggcgataggtttcggtcaaaggaaataatcggcgctgtcacacgattgtagtc

SEQ ID NO: 245652 - DNA, 55 bp, Artificial
  Synthetic oligonucleotide
aactgcgagataatccaaagccacatttccgatagactctacaatggtttgaggg

SEQ ID NO: 245653 - DNA, 55 bp, Artificial
  Synthetic oligonucleotide
aagaacctaccgagtgtaattgcgagagctgccgttttgatggttgcgactccac

SEQ ID NO: 245654 - DNA, 60 bp, Artificial
  Synthetic oligonucleotide
attacggagaaaccaacgttgcttatgccagtgtacatcttgatgagagtaccccacaca

SEQ ID NO: 245655 - DNA, 55 bp, Artificial
  Synthetic oligonucleotide
caacggcaaaaggagccatttctgttgcgtcttacaatagcgattataccagagg

SEQ ID NO: 245656 - DNA, 55 bp, Artificial
  Synthetic oligonucleotide
aagacaataggatagttgctaaagtatgcctcaatagctggggtatagtgtgccg

SEQ ID NO: 245657 - DNA, 55 bp, Artificial
  Synthetic oligonucleotide
ctggagtgaaggttccgtctgaaccaactggaaggctacgcatgaggtagtaacg

SEQ ID NO: 245658 - DNA, 54 bp, Artificial
  Synthetic oligonucleotide
caccgacaactttaagatcgctagcgactacttttactccgccccaggtactac

SEQ ID NO: 245659 - DNA, 55 bp, Artificial
  Synthetic oligonucleotide
caccgtaatccgtaacgaactgaggattcatggcaagattctcaccagtcgaacc

SEQ ID NO: 245660 - DNA, 55 bp, Artificial
  Synthetic oligonucleotide
ctttgtcaacgccgctaacaaggaagacaagctctatgtggactatgccaaagga

SEQ ID NO: 245661 - DNA, 55 bp, Artificial
  Synthetic oligonucleotide
ctgcttttgacagccgtttggctaaatacctcctttcgactgtggaggacaatga

SEQ ID NO: 245662 - DNA, 55 bp, Artificial
  Synthetic oligonucleotide
ctgcttgcaagaattgaccgtaaatgtcattatcgacccaacgcaaacctaagtc

SEQ ID NO: 245663 - DNA, 55 bp, Artificial
  Synthetic oligonucleotide
caacgcgctatattgccttagtcttggcgtttgttcaatctatcggtattacagc

SEQ ID NO: 245664 - DNA, 55 bp, Artificial
  Synthetic oligonucleotide
aagcctcccattggattaataaagagtgaatctgagtcgatagtgtaggacctga

SEQ ID NO: 245665 - DNA, 54 bp, Artificial
  Synthetic oligonucleotide
ctactttttatgtttcgcttttcggtacgaaatgtataaattggcttatacatc

SEQ ID NO: 245666 - DNA, 55 bp, Artificial
  Synthetic oligonucleotide
ctgcttcgcatgcaactccaagtcgcataaatcttaaatgtgcttcactagccac

SEQ ID NO: 245667 - DNA, 55 bp, Artificial
  Synthetic oligonucleotide
ctgctgcatagagcgaagaagcatcatggacaatacatctgcataaggttctccc

SEQ ID NO: 245668 - DNA, 53 bp, Artificial
  Synthetic oligonucleotide
cttttaacgcatgccgttcaaggtaataatccaaacacgaaaccagtccacgt

SEQ ID NO: 245669 - DNA, 55 bp, Artificial
  Synthetic oligonucleotide
ctgctctggttcatgtcaagacagttccagctggagcttgcatgggctatggagc

SEQ ID NO: 245670 - DNA, 55 bp, Artificial
  Synthetic oligonucleotide
caaccttatatgagcgggctggtcgtttagtgggaaaagcaggttcggtcacaca

SEQ ID NO: 245671 - DNA, 55 bp, Artificial
  Synthetic oligonucleotide
cacgacttatcttgactgtgatggagactatgagagagccagagaacgcttaaac

SEQ ID NO: 245672 - DNA, 55 bp, Artificial
  Synthetic oligonucleotide
ctgctaggattggttcattagggacatatgctgctaggattggttcattagggac

SEQ ID NO: 245673 - DNA, 54 bp, Artificial
  Synthetic oligonucleotide
cacgagagctgtcctttcttaaaagcctctaagacccacgattcgtttgcgggt

SEQ ID NO: 245674 - DNA, 55 bp, Artificial
  Synthetic oligonucleotide
aagtaagtcagtcattatttcaacgggcgctcgttggcgagatttgggaattcca

SEQ ID NO: 245675 - DNA, 55 bp, Artificial
  Synthetic oligonucleotide
acaagacggtgtccttgcaaaactaggtcgaaacttgacagcagaagcgcgtgag

SEQ ID NO: 245676 - DNA, 60 bp, Artificial
  Synthetic oligonucleotide
gcagagcggaatgaatgcgttcaactcttgttcttgctgaagggtacgggcagagcgttt

SEQ ID NO: 245677 - DNA, 55 bp, Artificial
  Synthetic oligonucleotide
ctcggctaagtacgccacacgcttgtcagaaatccgttttgaggtggactgacga

SEQ ID NO: 245678 - DNA, 55 bp, Artificial
  Synthetic oligonucleotide
acaagtcatctctaaaacggcggcgcacggctattcgtcatacgggaaccaaata

SEQ ID NO: 245679 - DNA, 53 bp, Artificial
  Synthetic oligonucleotide
cacgcttattagaaggtacctaccctgataccgaccggttaattccaactgag

SEQ ID NO: 245680 - DNA, 55 bp, Artificial
  Synthetic oligonucleotide
ctcgctaataataagacctgtcattgaacacgagcaatccaaatcgggtcacgcc

SEQ ID NO: 245681 - DNA, 55 bp, Artificial
  Synthetic oligonucleotide
caacaacctcgcgacggtaaacactcaatggccctgaacatactaggatattccc

SEQ ID NO: 245682 - DNA, 55 bp, Artificial
  Synthetic oligonucleotide
caaggtccgctcctgcgttaatgacctcctttgcgcaattgtagctctcgctaca

SEQ ID NO: 245683 - DNA, 55 bp, Artificial
  Synthetic oligonucleotide
gaaaccgcactgggtctgcgatagtccacatagacatcctctgtccgaaaggttg

SEQ ID NO: 245684 - DNA, 53 bp, Artificial
  Synthetic oligonucleotide
acacacaaggtcgccgtggggttgcaggaactattttggttcataaaatttta

SEQ ID NO: 245685 - DNA, 55 bp, Artificial
  Synthetic oligonucleotide
caaggtaccgaaagcaggagcgattatttcctttgcgggaggaggtcatggatcg

SEQ ID NO: 245686 - DNA, 55 bp, Artificial
  Synthetic oligonucleotide
ctcgagctttatcgttgtcaatcctgccagcaaaggtatcagcgcaagcgtagga

SEQ ID NO: 245687 - DNA, 56 bp, Artificial
  Synthetic oligonucleotide
cagagaacaacaaaatcatgctaggaaaaaccgttgcgaaaaatctacaaaatcaa

SEQ ID NO: 245688 - DNA, 60 bp, Artificial
  Synthetic oligonucleotide
gcagaatggcctccctacattccgaagaggtggacccgcattatgtcttcgatataacag

SEQ ID NO: 245689 - DNA, 55 bp, Artificial
  Synthetic oligonucleotide
ctcgaccacatgaccaacacctgcagccacaccatatcgggcaatcagagcgagg

SEQ ID NO: 245690 - DNA, 54 bp, Artificial
  Synthetic oligonucleotide
ctcctcgtaacgatagtaaagcttacgaacccgagccaagtgtatgaggggttg

SEQ ID NO: 245691 - DNA, 55 bp, Artificial
  Synthetic oligonucleotide
ctcctcagaaacgcggcaaggaattctttgaagtataagcaagaggttgcgctaa

SEQ ID NO: 245692 - DNA, 55 bp, Artificial
  Synthetic oligonucleotide
cacggtatgcttgagttacaacgtgaaatctgtcggctacgatgtttgcgtttgg

SEQ ID NO: 245693 - DNA, 55 bp, Artificial
  Synthetic oligonucleotide
caaatctgccgaacagtccaaggataccacaagttccaaaggtgccaaatcagcc

SEQ ID NO: 245694 - DNA, 55 bp, Artificial
  Synthetic oligonucleotide
ctcccctggatagctatcgtggcaaggttctcttgattgtcaacactgctactgg

SEQ ID NO: 245695 - DNA, 55 bp, Artificial
  Synthetic oligonucleotide
ctcccagtctctaacggaaccacccgtcgtacactactgtcatccagagtttgca

SEQ ID NO: 245696 - DNA, 55 bp, Artificial
  Synthetic oligonucleotide
ctccatgtaagcatgcatgcgttcaactgttgcaggctcgtcattgtaggaaccg

SEQ ID NO: 245697 - DNA, 55 bp, Artificial
  Synthetic oligonucleotide
ctccaaaaggttatattatgtcaacggcgctttatagtcaccaattttgtgcacg

SEQ ID NO: 245698 - DNA, 53 bp, Artificial
  Synthetic oligonucleotide
caaagtggttttggcgtaagacagacaaacgttcaccaggacctaaagaaaca

SEQ ID NO: 245699 - DNA, 60 bp, Artificial
  Synthetic oligonucleotide
gcacgcttcctatttctgacattgactgttaagaatgttgagggtgaagccttgaatagt

SEQ ID NO: 245700 - DNA, 55 bp, Artificial
  Synthetic oligonucleotide
ctcatcgttcaccacgacctcagcaagattccccactacttcgatcaagtcttac

SEQ ID NO: 245701 - DNA, 55 bp, Artificial
  Synthetic oligonucleotide
ctcatcgtgaccagtctcatcctgtgccaacatccaaatagccggccagattccc

SEQ ID NO: 245702 - DNA, 55 bp, Artificial
  Synthetic oligonucleotide
ctcttaaataagaagcacatagcaatttgagagcggaagcccgatttaccagtct

SEQ ID NO: 245703 - DNA, 54 bp, Artificial
  Synthetic oligonucleotide
aatgggagaaaagcgatttgtttataataacggtgagaaccccgtatccactca

SEQ ID NO: 245704 - DNA, 55 bp, Artificial
  Synthetic oligonucleotide
caacccttgataactgggaggatcttgctcttaaacgatatcagaccccgatgga

SEQ ID NO: 245705 - DNA, 55 bp, Artificial
  Synthetic oligonucleotide
aatgtcacacgcttgccattgtacgtcgcattcttctgatcataacctttgaagg

SEQ ID NO: 245706 - DNA, 55 bp, Artificial
  Synthetic oligonucleotide
aatgttggagaagttgctattgctatcggcagcccactaggaacacaatacgcta

SEQ ID NO: 245707 - DNA, 55 bp, Artificial
  Synthetic oligonucleotide
ctctggatgcctgtctctttatttccagactggatgcaagcaatcgggaagcgcc

SEQ ID NO: 245708 - DNA, 55 bp, Artificial
  Synthetic oligonucleotide
ctctgctaccatacgtaacagtaccaagagtagcaaataatacgaaatactgtgt

SEQ ID NO: 245709 - DNA, 55 bp, Artificial
  Synthetic oligonucleotide
ctctgcaatggccatctgggctagctttcctgcgagggtagaatcctgacctccc

SEQ ID NO: 245710 - DNA, 60 bp, Artificial
  Synthetic oligonucleotide
ctatagtcatcaacagtatctgttaattctcttaagtcactaattattatcctaggactc

SEQ ID NO: 245711 - DNA, 55 bp, Artificial
  Synthetic oligonucleotide
ctctctgctggcggtgtttacgaaaatacaatcgacagaagtcagcgctattgga

SEQ ID NO: 245712 - DNA, 55 bp, Artificial
  Synthetic oligonucleotide
ctctcggctggtatcggtctgtttgctgataagacccctattagcttaatggcac

SEQ ID NO: 245713 - DNA, 55 bp, Artificial
  Synthetic oligonucleotide
ctctccttagctttggacatgctactaacatgtgaaccaaatagaacatcggata

SEQ ID NO: 245714 - DNA, 55 bp, Artificial
  Synthetic oligonucleotide
ctctcatactatttagcccataaatagacccatacttccttacaaatttacctaa

SEQ ID NO: 245715 - DNA, 55 bp, Artificial
  Synthetic oligonucleotide
aatttcgatttgatgtcctctgagtgcagaggtaacaattataagccagactagc

SEQ ID NO: 245716 - DNA, 55 bp, Artificial
  Synthetic oligonucleotide
ctctatatccgtgcaaaacgtgaaaacaacagaacgatttcaacaggcgaatggg

SEQ ID NO: 245717 - DNA, 55 bp, Artificial
  Synthetic oligonucleotide
ctctaccggtctggtcaaagctagtcggcagatttcctgcgacaacaactccgtg

SEQ ID NO: 245718 - DNA, 55 bp, Artificial
  Synthetic oligonucleotide
ctcgtgtgactaatgacgttgaccttttgggacaatcgcttagtcaaggtctggg

SEQ ID NO: 245719 - DNA, 55 bp, Artificial
  Synthetic oligonucleotide
cacgcaacaatctctgtatcagagttgcttggttcagagtcgcacttgtactgcc

SEQ ID NO: 245720 - DNA, 55 bp, Artificial
  Synthetic oligonucleotide
ctcgtctgacttgtccaataaagaagccatcagtctggtattgttctggtgtgat

SEQ ID NO: 245721 - DNA, 59 bp, Artificial
  Synthetic oligonucleotide
ctatattatcaatcaaacggatgtagaacaaacgaatgcttacaatcctttcatgggct

SEQ ID NO: 245722 - DNA, 55 bp, Artificial
  Synthetic oligonucleotide
gaaacacctgaagtttgcgtaattgcgtattgaccaaaggccagaatacctgtcg

SEQ ID NO: 245723 - DNA, 55 bp, Artificial
  Synthetic oligonucleotide
ctcgtattgctaatattatcggtgtaaccgtaattgctggtttggcagcgacatc

SEQ ID NO: 245724 - DNA, 52 bp, Artificial
  Synthetic oligonucleotide
aatttggtttaggaagtttaggacaaggtccttctataggagtagggatggc

SEQ ID NO: 245725 - DNA, 55 bp, Artificial
  Synthetic oligonucleotide
caacacagctgttacaatgacagcacttaaaggctggttaagacggacagcatgc

SEQ ID NO: 245726 - DNA, 55 bp, Artificial
  Synthetic oligonucleotide
acaacactaccaacagctgggctattacgtggtgggctatctcagttacgaagca

SEQ ID NO: 245727 - DNA, 55 bp, Artificial
  Synthetic oligonucleotide
ctcggtgttttacgtttggatatcggctataacagtctcaaagcctatctggatc

SEQ ID NO: 245728 - DNA, 55 bp, Artificial
  Synthetic oligonucleotide
cttggaccgccttaattccagctagatgcctaagccgactgccacgtaagatacg

SEQ ID NO: 245729 - DNA, 55 bp, Artificial
  Synthetic oligonucleotide
caatgcggataattgaactttcgtgattctataagaaaaggtaaatcgctggcac

SEQ ID NO: 245730 - DNA, 55 bp, Artificial
  Synthetic oligonucleotide
ctttcttgtaccccatctgagaaggcagtacacctcggctttcaaccgtacgcag

SEQ ID NO: 245731 - DNA, 55 bp, Artificial
  Synthetic oligonucleotide
aaatccgagtggcacgcctcaagcctttgctctatcccttgcggatgtggtacgc

SEQ ID NO: 245732 - DNA, 57 bp, Artificial
  Synthetic oligonucleotide
ctatccaaaatagacagcatttagacagcgaattagacacccaaaatacaaagttaa

SEQ ID NO: 245733 - DNA, 55 bp, Artificial
  Synthetic oligonucleotide
cttgctcaagaacacgtgcataaggtactggtacgtcctcactagcaagacgcac

SEQ ID NO: 245734 - DNA, 55 bp, Artificial
  Synthetic oligonucleotide
cttgcgcttcaggagctacaccatacattaattgttcagcgactggttgtgtcgg

SEQ ID NO: 245735 - DNA, 55 bp, Artificial
  Synthetic oligonucleotide
caatgtccttggagaagagcatacctatggccaattgaaggctgattcagatagc

SEQ ID NO: 245736 - DNA, 54 bp, Artificial
  Synthetic oligonucleotide
caagcgcttagccacttgatttggttggagggtaaatttaccaacactttccaa

SEQ ID NO: 245737 - DNA, 55 bp, Artificial
  Synthetic oligonucleotide
aaattctcgcgccaattgtgctcccattctcttacgtgccgtatggacattgaca

SEQ ID NO: 245738 - DNA, 55 bp, Artificial
  Synthetic oligonucleotide
caagcgattggataactctcatactggcacttgaagtcaccatattacgaagtcg

SEQ ID NO: 245739 - DNA, 55 bp, Artificial
  Synthetic oligonucleotide
ctttgaaattagccattcaactcataagcagtgcccttatcctttggctagggtc

SEQ ID NO: 245740 - DNA, 55 bp, Artificial
  Synthetic oligonucleotide
caattcttcaaaggtaccagacatcgagtctttcccaccgatagatggcaaacca

SEQ ID NO: 245741 - DNA, 55 bp, Artificial
  Synthetic oligonucleotide
cttgcatggaatggtgtgaagtacggtagtttcttgagcgctgttattaacttcc

SEQ ID NO: 245742 - DNA, 55 bp, Artificial
  Synthetic oligonucleotide
cttgcatgctatcttaccagaccgttggtttgatgccctcatgaaacgtgcttcg

SEQ ID NO: 245743 - DNA, 58 bp, Artificial
  Synthetic oligonucleotide
ctattcgtttgcagaaattagctcgttatggctatattaagcgtgaaagaatagttac

SEQ ID NO: 245744 - DNA, 55 bp, Artificial
  Synthetic oligonucleotide
aacactggtcatgcgatacactgataatggcaccggagtattctcttagtagctg

SEQ ID NO: 245745 - DNA, 55 bp, Artificial
  Synthetic oligonucleotide
caagagacctacacggttttgaaagagatctatgatgtaccggactcgcttttcc

SEQ ID NO: 245746 - DNA, 55 bp, Artificial
  Synthetic oligonucleotide
aacaggctctacaggtacgactgagggtatgatgggtacaaatcaccatatgtca

SEQ ID NO: 245747 - DNA, 55 bp, Artificial
  Synthetic oligonucleotide
cacaaacaggtaacggttattgcaggtgtatttcttatctatgggtttaacatgg

SEQ ID NO: 245748 - DNA, 55 bp, Artificial
  Synthetic oligonucleotide
cacaaatagagtggagtggaatatggtcgcagtcactcaaggtctcttacacgcc

SEQ ID NO: 245749 - DNA, 55 bp, Artificial
  Synthetic oligonucleotide
cttgacagccgcgctcctaaagttgtaccgccagaaagtatcttgagacgttggg

SEQ ID NO: 245750 - DNA, 53 bp, Artificial
  Synthetic oligonucleotide
aaaagtggttggtccacttgtagcttggttaaccgacgtgatgggacatgggg

SEQ ID NO: 245751 - DNA, 53 bp, Artificial
  Synthetic oligonucleotide
cttgaaacgaaatcttccgcaaattcctgttttgttcgaccaaaagttgtgtc

SEQ ID NO: 245752 - DNA, 55 bp, Artificial
  Synthetic oligonucleotide
cttcttccatttctaaatccaatgttacttgttctgattctggttctgttggctc

SEQ ID NO: 245753 - DNA, 55 bp, Artificial
  Synthetic oligonucleotide
ctttcgcctaaacagctaaggttactttatcctaagacacctgttgacgagctcc

SEQ ID NO: 245754 - DNA, 56 bp, Artificial
  Synthetic oligonucleotide
ctattgggatggttcaaatcagtaaaattgccgaactcaaaggtcttatgcccaaa

SEQ ID NO: 245755 - DNA, 55 bp, Artificial
  Synthetic oligonucleotide
caagctaaaataggcaatcaagagggcagaatcactgacgtgcaaaccaaagaga

SEQ ID NO: 245756 - DNA, 55 bp, Artificial
  Synthetic oligonucleotide
ctttatttgcgacaccatcgataacctcttcccaacgttgctgatgtctgtcagc

SEQ ID NO: 245757 - DNA, 55 bp, Artificial
  Synthetic oligonucleotide
ctttattcaattggataatgggcgcagtgtctttgtacgaggtaaggttgaccgg

SEQ ID NO: 245758 - DNA, 55 bp, Artificial
  Synthetic oligonucleotide
ctttagctgggattcttttacaaacgctgactaggaatgccctagctgactcagg

SEQ ID NO: 245759 - DNA, 55 bp, Artificial
  Synthetic oligonucleotide
ctttagcaccaatgaaccactgctgattggaggttcggatctgggacgctgtctc

SEQ ID NO: 245760 - DNA, 55 bp, Artificial
  Synthetic oligonucleotide
caatcaagattttacaagaagttgaggggattggaacagaagcgacaagagcaag

SEQ ID NO: 245761 - DNA, 53 bp, Artificial
  Synthetic oligonucleotide
ctttaccctagaaaagggtcaagaagcaagctagtcctaactttaaaccagca

SEQ ID NO: 245762 - DNA, 55 bp, Artificial
  Synthetic oligonucleotide
caatcctttagcccatggattcctgggtaacttcaagaaagtgggaagcaaggta

SEQ ID NO: 245763 - DNA, 55 bp, Artificial
  Synthetic oligonucleotide
ctttaagcagcgtgctgattcactcgacgctggtgtaagccgtctgactgaaggg

SEQ ID NO: 245764 - DNA, 55 bp, Artificial
  Synthetic oligonucleotide
aaaatgttcgtgttgctcataaaattggtgccgccgatgcttacaatcatgatgc

SEQ ID NO: 245765 - DNA, 57 bp, Artificial
  Synthetic oligonucleotide
ctatttcagcaagcgatattttaacaacagctattgatttaggttttatgcctacgt

SEQ ID NO: 245766 - DNA, 55 bp, Artificial
  Synthetic oligonucleotide
cttgtctgctactaacaaacaaactaagcaatagcgcattttgctacaaccgcgc

SEQ ID NO: 245767 - DNA, 55 bp, Artificial
  Synthetic oligonucleotide
caaggcagacttatgatgtttatgatcgcaaggcaaatatcgtaaggcaaagact

SEQ ID NO: 245768 - DNA, 55 bp, Artificial
  Synthetic oligonucleotide
cttgtcacccatttctagaacttgggccgaaatgagaccacggtttgtgctagac

SEQ ID NO: 245769 - DNA, 55 bp, Artificial
  Synthetic oligonucleotide
caatcttcgttacacggggatcactttctagtttattgccattggcatgataggc

SEQ ID NO: 245770 - DNA, 54 bp, Artificial
  Synthetic oligonucleotide
cttggttggctttacagccctcattcccgttatcggaccctatattggcctttc

SEQ ID NO: 245771 - DNA, 55 bp, Artificial
  Synthetic oligonucleotide
caatgattgtacacgttgaactttattcgttgccgtttggtcaactggcatgtca

SEQ ID NO: 245772 - DNA, 55 bp, Artificial
  Synthetic oligonucleotide
cttggtgtacttgagactgtttgagatgatttgctcaataaccactagcagccac

SEQ ID NO: 245773 - DNA, 55 bp, Artificial
  Synthetic oligonucleotide
cttggggtaattcaccttacgtgacctacaatgaccagacactcacaccgctcat

SEQ ID NO: 245774 - DNA, 55 bp, Artificial
  Synthetic oligonucleotide
cttgggaatcgaagactacaatcgtgtgacagcgccgattatttcctttgaccga

SEQ ID NO: 245775 - DNA, 55 bp, Artificial
  Synthetic oligonucleotide
caagcggaatgtagtcaagtaccttaaaacagccattgaaggctatttagcgacc

SEQ ID NO: 245776 - DNA, 58 bp, Artificial
  Synthetic oligonucleotide
ctcaaaacattacgaggacttgagggggtcaaaaagcatctctcatacgttcgtgaga

SEQ ID NO: 245777 - DNA, 55 bp, Artificial
  Synthetic oligonucleotide
cttggcaactacacgaaactccatcttgtctgttcgccagtcaccgtttccgtca

SEQ ID NO: 245778 - DNA, 55 bp, Artificial
  Synthetic oligonucleotide
cttggatagtaccaatgtctgccagcctattctaacaggcatcacgactattgga

SEQ ID NO: 245779 - DNA, 55 bp, Artificial
  Synthetic oligonucleotide
cttggaggactggtatgttatcataggcaaattcgctaatctcatagacaagctc

SEQ ID NO: 245780 - DNA, 55 bp, Artificial
  Synthetic oligonucleotide
aaagcgcctatccatcctttataagcaccacctaaagcagcagcccaatttgtcg

SEQ ID NO: 245781 - DNA, 55 bp, Artificial
  Synthetic oligonucleotide
cttggagcaagtgattgcgactgcagaccaagaattgacgagccgcaaggttagc

SEQ ID NO: 245782 - DNA, 53 bp, Artificial
  Synthetic oligonucleotide
aacggggacacttacttttactatcatcctctcgccttaatttcaggagggaa

SEQ ID NO: 245783 - DNA, 55 bp, Artificial
  Synthetic oligonucleotide
ctgtttgtgctttgcgttcatgagcaacggagaggggcatagctttatccgttgg

SEQ ID NO: 245784 - DNA, 55 bp, Artificial
  Synthetic oligonucleotide
caaggctgtgatagacgcatccacggctgacatgacacccccaccagccaaacgg

SEQ ID NO: 245785 - DNA, 55 bp, Artificial
  Synthetic oligonucleotide
cacagcgtaagccgttctggtattctgatcgtgtgtgatccttgtgtcctagttc

SEQ ID NO: 245786 - DNA, 55 bp, Artificial
  Synthetic oligonucleotide
aacgtcccttgaccacactggtcagatgcatgacgtacggaagagctccacctcc

SEQ ID NO: 245787 - DNA, 60 bp, Artificial
  Synthetic oligonucleotide
ctcaactcgcaattgtggcgcacggtactttgaagatatatcagctttctagcgctggta

SEQ ID NO: 245788 - DNA, 55 bp, Artificial
  Synthetic oligonucleotide
ctgttatagttgatccgagtgattaccctcttgtcttggcagaattgactgaaac

SEQ ID NO: 245789 - DNA, 55 bp, Artificial
  Synthetic oligonucleotide
ctgttagccgcagcaaacatgaaccccatgtatttcccaagattcacagcaccgg

SEQ ID NO: 245790 - DNA, 55 bp, Artificial
  Synthetic oligonucleotide
ctgtcttgggatagttttctagcgcctgacattattgagggacgtcctgctgaga

SEQ ID NO: 245791 - DNA, 55 bp, Artificial
  Synthetic oligonucleotide
ctgtctatgcgatagcagtccaaggcttaggagcaaggcgacgctaagcttggta

SEQ ID NO: 245792 - DNA, 55 bp, Artificial
  Synthetic oligonucleotide
ctgtcgatgtagtgctaagtgtttgactctcttgaccatctgataatgactgact

SEQ ID NO: 245793 - DNA, 55 bp, Artificial
  Synthetic oligonucleotide
ctgtcactcgtacagtgacctcagcaacaagatcactaccaaggacacggcctcg

SEQ ID NO: 245794 - DNA, 55 bp, Artificial
  Synthetic oligonucleotide
cacagcgtaggcgagcgttttggtactctgagcgtgtatggtctttgtgtccgag

SEQ ID NO: 245795 - DNA, 55 bp, Artificial
  Synthetic oligonucleotide
caagacacgactaacattgattcctttcccaccagcaaacttatcatcactgtcc

SEQ ID NO: 245796 - DNA, 55 bp, Artificial
  Synthetic oligonucleotide
ctgtataggccgcgttagctacagaactcgtttcatgaccatacttcagggcacc

SEQ ID NO: 245797 - DNA, 55 bp, Artificial
  Synthetic oligonucleotide
ctgtaggctgattgccacggtagaaaattactaagacgaagttcaccacttgttc

SEQ ID NO: 245798 - DNA, 55 bp, Artificial
  Synthetic oligonucleotide
gtgctaaccttgaatgaacttgaaaaacgtaaagtagtcgagcataacgctttaa

SEQ ID NO: 245799 - DNA, 58 bp, Artificial
  Synthetic oligonucleotide
ctcaagacgagttcccataccacgtgaagcaggtacgcgcacaagtggcgaacggtta

SEQ ID NO: 245800 - DNA, 55 bp, Artificial
  Synthetic oligonucleotide
cacaggaaagtcggttagcaaaagatcagaatcagttgaccaaagcacccctgga

SEQ ID NO: 245801 - DNA, 55 bp, Artificial
  Synthetic oligonucleotide
ctgtaacgccgtagtcagtaaaactagcaataagctcctcagagatagcagaacg

SEQ ID NO: 245802 - DNA, 55 bp, Artificial
  Synthetic oligonucleotide
ctgtaaacataggcgcacggtggaggttgttttggataatctcatgactggtacc

SEQ ID NO: 245803 - DNA, 55 bp, Artificial
  Synthetic oligonucleotide
ctggtttcgagccattaatcgtgttaattgaatatccttagggacatagaccaac

SEQ ID NO: 245804 - DNA, 55 bp, Artificial
  Synthetic oligonucleotide
cacagtccccgctaaagatggggaatcaaacggcaaggattgccattaaagtcgc

SEQ ID NO: 245805 - DNA, 55 bp, Artificial
  Synthetic oligonucleotide
cacattctcgctcagtgattactggggaaataacggggcttggtgtacactcact

SEQ ID NO: 245806 - DNA, 55 bp, Artificial
  Synthetic oligonucleotide
caccactacaaatgatggtcagttgacaacaagtgctacttatcaagtcactgtc

SEQ ID NO: 245807 - DNA, 55 bp, Artificial
  Synthetic oligonucleotide
aactccgtgtgcccaccactgaccaagagggctagcaagggaaactccaaaggct

SEQ ID NO: 245808 - DNA, 55 bp, Artificial
  Synthetic oligonucleotide
ctggtctcaatttgccaatgcttatccaagcctatactgagcgtatgatggacgc

SEQ ID NO: 245809 - DNA, 55 bp, Artificial
  Synthetic oligonucleotide
cacccaaccatcaactcgggcaaacaatggcctttgtgatactaacccttgcttc

SEQ ID NO: 245810 - DNA, 60 bp, Artificial
  Synthetic oligonucleotide
ctcacaatggtgcgttagctccgattgcagaccgcgtgattcgtatgcatgatgcacgga

SEQ ID NO: 245811 - DNA, 55 bp, Artificial
  Synthetic oligonucleotide
caacgggagtgacctactcacgtgagcagattcaggcctttgcggatgtcttgcg

SEQ ID NO: 245812 - DNA, 55 bp, Artificial
  Synthetic oligonucleotide
cttcccttgcgacttttcatagtgtttctgacgttctttaagcatccgttccacg

SEQ ID NO: 245813 - DNA, 55 bp, Artificial
  Synthetic oligonucleotide
cttcccaggctatccccagtttgaggcagtttcccactagtatccgccgctaatg

SEQ ID NO: 245814 - DNA, 55 bp, Artificial
  Synthetic oligonucleotide
cttcccagaacgctccactctgtatgcagggttcatggagtggtacgaagaagac

SEQ ID NO: 245815 - DNA, 54 bp, Artificial
  Synthetic oligonucleotide
cacaagcctcgtttacagtaggcgtagagggtttgaacggataaagccttatcg

SEQ ID NO: 245816 - DNA, 55 bp, Artificial
  Synthetic oligonucleotide
cttcaggattgttgaacattgtggcgcgtgggttagtctataccccaaagtaacg

SEQ ID NO: 245817 - DNA, 55 bp, Artificial
  Synthetic oligonucleotide
cttcaggagcagctcgtgttgaaggttctgttctgacgaaaacgcttctagctgc

SEQ ID NO: 245818 - DNA, 55 bp, Artificial
  Synthetic oligonucleotide
cttcactttgctcaagtagctcatccttagatactggaacgcacccaagagggga

SEQ ID NO: 245819 - DNA, 55 bp, Artificial
  Synthetic oligonucleotide
cttcacggtattctgactcccaagtactatcccaagtgatgccacctccgacacc

SEQ ID NO: 245820 - DNA, 55 bp, Artificial
  Synthetic oligonucleotide
cttcaaccgctacaggattggtcgtatatagatgagtcagtggtatccctaaggc

SEQ ID NO: 245821 - DNA, 60 bp, Artificial
  Synthetic oligonucleotide
gcaatagacttgtcggctcgtctgtcagtcgctattcgactgacgctgataaggaggggt

SEQ ID NO: 245822 - DNA, 55 bp, Artificial
  Synthetic oligonucleotide
cttatttgacagaagaatcctatcaggctatggatttcgttagaagtctgcgtga

SEQ ID NO: 245823 - DNA, 55 bp, Artificial
  Synthetic oligonucleotide
cttatctggcagcctataagtctttgatgaacggtgaagcgaaggctatggtgct

SEQ ID NO: 245824 - DNA, 55 bp, Artificial
  Synthetic oligonucleotide
aacgaaattacatgggcttgtctcggatagtatgcaaggcagccaaaccttacgg

SEQ ID NO: 245825 - DNA, 55 bp, Artificial
  Synthetic oligonucleotide
aacgaactacgggaacgcttggatgaactagacaagaaccaagcctacatcgtta

SEQ ID NO: 245826 - DNA, 55 bp, Artificial
  Synthetic oligonucleotide
cttatcgatacaaattcctcgtaggcgctcgggaccccaacatgaggaaatgttt

SEQ ID NO: 245827 - DNA, 55 bp, Artificial
  Synthetic oligonucleotide
aacgcgtaacattttccaaaacgctacctgtcagtccacaaatgattacgtctca

SEQ ID NO: 245828 - DNA, 55 bp, Artificial
  Synthetic oligonucleotide
cttagtgtgggagcaacccttaccatctgatcgttcctcgataatgggtataagc

SEQ ID NO: 245829 - DNA, 55 bp, Artificial
  Synthetic oligonucleotide
cacaatgaaatctccttaatcgataagaaaaggagccgaggaaacgatcagcaca

SEQ ID NO: 245830 - DNA, 55 bp, Artificial
  Synthetic oligonucleotide
aacggaaggaggtctcttgattattggagaccgcacccgtattcagttattagcc

SEQ ID NO: 245831 - DNA, 55 bp, Artificial
  Synthetic oligonucleotide
cttagccatttcgactgccgtaacgatttctcgtccctaggcttatggattcgcc

SEQ ID NO: 245832 - DNA, 56 bp, Artificial
  Synthetic oligonucleotide
ctcatttacgtagggcgactggaaacggatagctcaaagggcgcgtttgagtgtcg

SEQ ID NO: 245833 - DNA, 55 bp, Artificial
  Synthetic oligonucleotide
caagagacaggcgagattttaagtgaggatagcgatgactgatagaaatgagctg

SEQ ID NO: 245834 - DNA, 55 bp, Artificial
  Synthetic oligonucleotide
cttactgtctaatatcgatcagcgagttcataataagtgcggacgacacgtcctt

SEQ ID NO: 245835 - DNA, 55 bp, Artificial
  Synthetic oligonucleotide
cacagcagtcaattactcctatggtaacatgacgctcatgtccccgcttggcatg

SEQ ID NO: 245836 - DNA, 55 bp, Artificial
  Synthetic oligonucleotide
cttacgaatttggttgcgagcatcattgtaacgaggaacataagctgggtccccg

SEQ ID NO: 245837 - DNA, 55 bp, Artificial
  Synthetic oligonucleotide
ctttgatcggcttgtcccggatcattttagcgaagcacataatattcacgacacc

SEQ ID NO: 245838 - DNA, 55 bp, Artificial
  Synthetic oligonucleotide
aacggcttcatgagttgaatacgtgtctgattaagagcacggctcatgtgctgca

SEQ ID NO: 245839 - DNA, 55 bp, Artificial
  Synthetic oligonucleotide
cttaatccgattgttgatatctcgggttggcagctgcctagcgaaattgactatg

SEQ ID NO: 245840 - DNA, 55 bp, Artificial
  Synthetic oligonucleotide
cagacgggaagaaaggattttggtagaaggcatccgagtcgtcaggcaatactaa

SEQ ID NO: 245841 - DNA, 55 bp, Artificial
  Synthetic oligonucleotide
accgttcgaccatccttagtcaccagaacagctgcttgtaaatcggaattggtcg

SEQ ID NO: 245842 - DNA, 55 bp, Artificial
  Synthetic oligonucleotide
cgtatcctcagttactttggataagtcctcgagctattagtattagtccgctaca

SEQ ID NO: 245843 - DNA, 56 bp, Artificial
  Synthetic oligonucleotide
ctccaccatttccagttgcagtagaatatggggtgatttggtttgcttttggagtt

SEQ ID NO: 245844 - DNA, 55 bp, Artificial
  Synthetic oligonucleotide
cgtatcaacgaccttacagatccaaacatgcttgcacacttgttgaaatacgata

SEQ ID NO: 245845 - DNA, 55 bp, Artificial
  Synthetic oligonucleotide
cgtagtcttcacaacatctcccgttaccttatctttcgtcaccgtccgtgtccaa

SEQ ID NO: 245846 - DNA, 55 bp, Artificial
  Synthetic oligonucleotide
acctcagtcgaacgaagagtgcgtttgccttggctatctacttctacaaagcgac

SEQ ID NO: 245847 - DNA, 55 bp, Artificial
  Synthetic oligonucleotide
accttattgacatgactagcgaatggcatgataaggtaccatttgcggagcagtc

SEQ ID NO: 245848 - DNA, 55 bp, Artificial
  Synthetic oligonucleotide
cgtacttggcgcgatactatggtactaaagacaactgagaatgctgttattggcg

SEQ ID NO: 245849 - DNA, 55 bp, Artificial
  Synthetic oligonucleotide
cgtactcttccccttctcgatagaccttctgtcctgtcgatacataaagatagac

SEQ ID NO: 245850 - DNA, 55 bp, Artificial
  Synthetic oligonucleotide
cgtacggctgccacctgattttaggaagtcaagccattcttttgccccatctggg

SEQ ID NO: 245851 - DNA, 55 bp, Artificial
  Synthetic oligonucleotide
cgtaccattggcgaaaactttgccaaaacaactgctcgcgactatgcgactacgc

SEQ ID NO: 245852 - DNA, 55 bp, Artificial
  Synthetic oligonucleotide
cgtaccaagaactagacctagtggagctggagttgtccaaggtagattagcagta

SEQ ID NO: 245853 - DNA, 55 bp, Artificial
  Synthetic oligonucleotide
acgaagctgtgctttcagctattaaccttggggtaaaaccaccaacagcatcact

SEQ ID NO: 245854 - DNA, 59 bp, Artificial
  Synthetic oligonucleotide
ctcctgttaacaaacgtgtagttggaatgacgcttgattatggtgcaatgaatacttgg

SEQ ID NO: 245855 - DNA, 55 bp, Artificial
  Synthetic oligonucleotide
cgtacagataagattgtggcgcagtttgacggcttagagtcacatggtgctaagg

SEQ ID NO: 245856 - DNA, 55 bp, Artificial
  Synthetic oligonucleotide
acgaatcgatattattcgtctgacgtagttagtgagacggctagctagacacaag

SEQ ID NO: 245857 - DNA, 55 bp, Artificial
  Synthetic oligonucleotide
cgtaatccttaatctgcttttcatacgacacagagcggtcgcgatccgtcaactc

SEQ ID NO: 245858 - DNA, 55 bp, Artificial
  Synthetic oligonucleotide
cgtaagacaatagaccccttaccagtatcataagcacggtgaatacctgagcgtc

SEQ ID NO: 245859 - DNA, 55 bp, Artificial
  Synthetic oligonucleotide
cagactgcatgagttcacgaatgaacttgtcccctaactccatcccataatctcg

SEQ ID NO: 245860 - DNA, 54 bp, Artificial
  Synthetic oligonucleotide
cgtaacgatagtcggtgctttaaccacatcaaaacgacttgttaacgcttgtcc

SEQ ID NO: 245861 - DNA, 55 bp, Artificial
  Synthetic oligonucleotide
cagagacaaactgttgtgtcacataagctctgcgatggtattcgtccttagggtg

SEQ ID NO: 245862 - DNA, 55 bp, Artificial
  Synthetic oligonucleotide
cggttttcgtctgcatacgtaccataacgataaacgtttggtgtccaatgcgtaa

SEQ ID NO: 245863 - DNA, 52 bp, Artificial
  Synthetic oligonucleotide
caaacagataataagggctttactcgttcaagtctaacggttttaagcggta

SEQ ID NO: 245864 - DNA, 55 bp, Artificial
  Synthetic oligonucleotide
acgcagaccaaagggcttgcactgcttatcttcgtagtccactagtagaagaacc

SEQ ID NO: 245865 - DNA, 60 bp, Artificial
  Synthetic oligonucleotide
gcaagcagttggcgaccttgactttgctaacgaccgtactgcctacatgatggaatgccc

SEQ ID NO: 245866 - DNA, 55 bp, Artificial
  Synthetic oligonucleotide
cggttggggagctagtgcgtggttggaccaatgataactcaacttggtactatct

SEQ ID NO: 245867 - DNA, 55 bp, Artificial
  Synthetic oligonucleotide
cgtgaggctagaccaatagcgtcattcttcgaagctgtatggcaagtcttaacag

SEQ ID NO: 245868 - DNA, 55 bp, Artificial
  Synthetic oligonucleotide
cgtgagaatgactttccagacttagatgaggtcaccaaagaagagtatcttaacc

SEQ ID NO: 245869 - DNA, 55 bp, Artificial
  Synthetic oligonucleotide
cgtgacttcgctaccgtcaaaatctaagattaattcgtcttgtttagattcggtg

SEQ ID NO: 245870 - DNA, 55 bp, Artificial
  Synthetic oligonucleotide
cgtgacccacgtggcatgatgggggttcgccttgaaatgcgtggtttgctttata

SEQ ID NO: 245871 - DNA, 55 bp, Artificial
  Synthetic oligonucleotide
cgtgaccaactcacccctagatgtcccatccggtattctaacacctgctggtacg

SEQ ID NO: 245872 - DNA, 55 bp, Artificial
  Synthetic oligonucleotide
caaacttcggtttgtcctcgagcactctacatttatctcccgagtcgctatggct

SEQ ID NO: 245873 - DNA, 55 bp, Artificial
  Synthetic oligonucleotide
cgtgacaccagatggtctcgtctatgatcaccatgccagctatgtatcggttcga

SEQ ID NO: 245874 - DNA, 55 bp, Artificial
  Synthetic oligonucleotide
caaacgaacgggtaagcgacagcgtgtatatttggcgcctttaccagcattgtgc

SEQ ID NO: 245875 - DNA, 54 bp, Artificial
  Synthetic oligonucleotide
accgagccagctaaatgtagtccgttttggtccagacgaagatattttcctaac

SEQ ID NO: 245876 - DNA, 57 bp, Artificial
  Synthetic oligonucleotide
ctcgccttctggaatacatggaagaggcggggaaagtatacgaaggcgaagtgacaa

SEQ ID NO: 245877 - DNA, 55 bp, Artificial
  Synthetic oligonucleotide
cgtgaaagctacttgaccgtaagctagatcaaagtacgctagtcagggacgagcc

SEQ ID NO: 245878 - DNA, 55 bp, Artificial
  Synthetic oligonucleotide
cagaacgcaacaagttaaccgtatgtccaaatgtatttccataggtgaagtctgt

SEQ ID NO: 245879 - DNA, 55 bp, Artificial
  Synthetic oligonucleotide
accgcctggataaaacagcgcaagtggctatggatttaggttttgactacttcgg

SEQ ID NO: 245880 - DNA, 55 bp, Artificial
  Synthetic oligonucleotide
cgtctggttggggaatgctcaggagattaagcaaggaatagcggacctatcgacg

SEQ ID NO: 245881 - DNA, 55 bp, Artificial
  Synthetic oligonucleotide
accgtggacacggaactgataaagcactcgttgctggtatcctaggaatggatac

SEQ ID NO: 245882 - DNA, 55 bp, Artificial
  Synthetic oligonucleotide
cgtcgaaataccattccaactatgaaactgtctatcgcccagttaggcattctcc

SEQ ID NO: 245883 - DNA, 55 bp, Artificial
  Synthetic oligonucleotide
cagaacgtgctcctacaacgacttttgcttgaccagacctaaccttacgccactc

SEQ ID NO: 245884 - DNA, 55 bp, Artificial
  Synthetic oligonucleotide
cagaagaatgcgacgtacaatggcaagcgtgtgacatttacaggtatctgggaag

SEQ ID NO: 245885 - DNA, 55 bp, Artificial
  Synthetic oligonucleotide
cgtcccttcgcttgtctgaatggctagatccgttccttccgatagagggaatgat

SEQ ID NO: 245886 - DNA, 55 bp, Artificial
  Synthetic oligonucleotide
accgttcaccgttggtgcgcgttcctgctactcgtggaatgggaactcgacttga

SEQ ID NO: 245887 - DNA, 58 bp, Artificial
  Synthetic oligonucleotide
gcaaacaagagggatattccaagcggaatgtagtcaagtaccttaaaacagccattga

SEQ ID NO: 245888 - DNA, 55 bp, Artificial
  Synthetic oligonucleotide
cgtccaaatcgttacaccggatggactggtttatgatcatcatgccgcatttgta

SEQ ID NO: 245889 - DNA, 55 bp, Artificial
  Synthetic oligonucleotide
cagaatttgctgcttggatagcatcaatagaaagcgtgcggactgtattaaccgc

SEQ ID NO: 245890 - DNA, 55 bp, Artificial
  Synthetic oligonucleotide
cgtcattctcagccaccacggtttgctcgagtatggtagtcctgttcgcccacgt

SEQ ID NO: 245891 - DNA, 55 bp, Artificial
  Synthetic oligonucleotide
cgtcatctgtagacggcacaactattaccaatacgcacacccaagaaactaccga

SEQ ID NO: 245892 - DNA, 55 bp, Artificial
  Synthetic oligonucleotide
cgtcagagccaccctagaggactaggggacgctgtcctccaagccaaggcctttg

SEQ ID NO: 245893 - DNA, 55 bp, Artificial
  Synthetic oligonucleotide
caaaccgctgtagctatcactgccatcctttgaaacaagaagagatacactcacc

SEQ ID NO: 245894 - DNA, 52 bp, Artificial
  Synthetic oligonucleotide
cgtcacgccagaattaacaaactctaggtttacccctatgttaaacggtaca

SEQ ID NO: 245895 - DNA, 55 bp, Artificial
  Synthetic oligonucleotide
acgttacatcagctgcagatgcaagcggtactgaaattacgattaaacaagaaag

SEQ ID NO: 245896 - DNA, 55 bp, Artificial
  Synthetic oligonucleotide
cgggttgtccctatgcaatcgatcataatctctggccttagcatagttaagtcca

SEQ ID NO: 245897 - DNA, 55 bp, Artificial
  Synthetic oligonucleotide
acgttcaggctgccatcgtaaaaggacagcgggtgagatgcccatgcacgattta

SEQ ID NO: 245898 - DNA, 52 bp, Artificial
  Synthetic oligonucleotide
ctcgttcctcaaataactgttaaggttgagttagaaccgacggactctaaag

SEQ ID NO: 245899 - DNA, 55 bp, Artificial
  Synthetic oligonucleotide
cgggtggatacggtgattccttactatgagcgttttcttgactggtttccgactg

SEQ ID NO: 245900 - DNA, 55 bp, Artificial
  Synthetic oligonucleotide
cggggtcaaggcatctctgccaacagccttaggctatgttagtatcggacttgcc

SEQ ID NO: 245901 - DNA, 55 bp, Artificial
  Synthetic oligonucleotide
cagcaggctgacgtgtcagacgcctaattttcagtcgctttctggtcgctcttgg

SEQ ID NO: 245902 - DNA, 55 bp, Artificial
  Synthetic oligonucleotide
attgtggtcagtctacttgccctcctaggcgtgattgccttctggctaattcgcc

SEQ ID NO: 245903 - DNA, 54 bp, Artificial
  Synthetic oligonucleotide
cgggcttcaacagctaactcggttagacgaatcaccttataaatggtttcaacg

SEQ ID NO: 245904 - DNA, 52 bp, Artificial
  Synthetic oligonucleotide
cgggctggttatataacggggagtttcataaaggacaagcaaacggcaaagg

SEQ ID NO: 245905 - DNA, 55 bp, Artificial
  Synthetic oligonucleotide
cagcatctctgatagcttgagcgtagttacgagcatagtctgctagtccatttac

SEQ ID NO: 245906 - DNA, 55 bp, Artificial
  Synthetic oligonucleotide
cgggatctctcaatactgcgcctgtagctctatactttcggttagccaatacatt

SEQ ID NO: 245907 - DNA, 55 bp, Artificial
  Synthetic oligonucleotide
actattacttgaagtagtgaagagtgaaatagctgagttggtaattcaactcagc

SEQ ID NO: 245908 - DNA, 55 bp, Artificial
  Synthetic oligonucleotide
actccaagtttgagacgaccagcattaagagggtataaacgttccatgaacgatt

SEQ ID NO: 245909 - DNA, 57 bp, Artificial
  Synthetic oligonucleotide
cagcgacaataggcgccttagtccgtgtactggcaaaaagccccacggcaccattac

SEQ ID NO: 245910 - DNA, 52 bp, Artificial
  Synthetic oligonucleotide
ctctaaaaacacgaataatactggtgttgttctcaaaaacgtagtaggcttt

SEQ ID NO: 245911 - DNA, 55 bp, Artificial
  Synthetic oligonucleotide
cgggacgagcgaagcaattgatagcgttcgttcgatcaccaatcattccaccggg

SEQ ID NO: 245912 - DNA, 55 bp, Artificial
  Synthetic oligonucleotide
actccactcgttcactagagttttcaaccgttgcgtattctcgttcgtactgggc

SEQ ID NO: 245913 - DNA, 55 bp, Artificial
  Synthetic oligonucleotide
cgggaagcaagggacgcccgattcatgacccaagtaaggcagcacgtgacaatct

SEQ ID NO: 245914 - DNA, 55 bp, Artificial
  Synthetic oligonucleotide
cagcgggagtactcaccagagttagttgaagaggtaacctttgacagcaatccgc

SEQ ID NO: 245915 - DNA, 55 bp, Artificial
  Synthetic oligonucleotide
actgcctatgtcacttggcaggttctgctagcggcaagtgtccttgtctggctaa

SEQ ID NO: 245916 - DNA, 55 bp, Artificial
  Synthetic oligonucleotide
cggcttcaagtgcagtcgttatctctgtgagggtaatacagcctggaatgtacgg

SEQ ID NO: 245917 - DNA, 55 bp, Artificial
  Synthetic oligonucleotide
cggctggtttggctcatagaaatcaggcagctatcttctctcaacttgctccagc

SEQ ID NO: 245918 - DNA, 55 bp, Artificial
  Synthetic oligonucleotide
cagcggtcataaacgtcgaaatcataaggtgcccgtgcgtaataatggcaagtcc

SEQ ID NO: 245919 - DNA, 55 bp, Artificial
  Synthetic oligonucleotide
cggccttgaccacaacctaaatccaaggctcttcctggtttcaccgtttgcatag

SEQ ID NO: 245920 - DNA, 55 bp, Artificial
  Synthetic oligonucleotide
actgcttcgatagataaaccaccactacctgcataaaggtccaagactcgtccca

SEQ ID NO: 245921 - DNA, 60 bp, Artificial
  Synthetic oligonucleotide
gattcgatcagttcatatgctagaaaaatactcttccaagaggataatacaagcgactac

SEQ ID NO: 245922 - DNA, 55 bp, Artificial
  Synthetic oligonucleotide
cagcgtatccatttaacacatcgaataaacctagtccgatagctgctactagcgc

SEQ ID NO: 245923 - DNA, 55 bp, Artificial
  Synthetic oligonucleotide
cggccaacaagaaatgactaactggtctgctgaagataccattccaaatggttta

SEQ ID NO: 245924 - DNA, 55 bp, Artificial
  Synthetic oligonucleotide
cggttggacggtctttaaagtcacgaatgacacggatagccgcatcagcatcgcg

SEQ ID NO: 245925 - DNA, 55 bp, Artificial
  Synthetic oligonucleotide
acgcttaatcttgggaaaactgcgttcccaatgcgtgctggactcccaaacaaag

SEQ ID NO: 245926 - DNA, 55 bp, Artificial
  Synthetic oligonucleotide
gaacaagataaaacacgtgttgaacaagggaatgctgcgttggctgctagtcata

SEQ ID NO: 245927 - DNA, 55 bp, Artificial
  Synthetic oligonucleotide
cggttaggactcctgttaagactactgtattaacaccacgttctcgcagccgaat

SEQ ID NO: 245928 - DNA, 55 bp, Artificial
  Synthetic oligonucleotide
acgcttggagtgccgatagcggttagtccgcttcacgataaggacaagagtgatg

SEQ ID NO: 245929 - DNA, 55 bp, Artificial
  Synthetic oligonucleotide
cagagtattggatattccctttcccacacgtcccctacgtttggttgagtctgga

SEQ ID NO: 245930 - DNA, 53 bp, Artificial
  Synthetic oligonucleotide
cggttaagaggaccgtaggttgtccgctcgtagacatacctaaggcggttgac

SEQ ID NO: 245931 - DNA, 55 bp, Artificial
  Synthetic oligonucleotide
caaaagccatttataagataccaagagcgaccagaaagcgactgaaaattagtcg

SEQ ID NO: 245932 - DNA, 51 bp, Artificial
  Synthetic oligonucleotide
ctctcaaatttgagttggttcccacgtttcaaaatttcgttaggttatatt

SEQ ID NO: 245933 - DNA, 55 bp, Artificial
  Synthetic oligonucleotide
cggtggcaaatctcgatgtctattctttggcttcggaacaaattcgaacgaattg

SEQ ID NO: 245934 - DNA, 55 bp, Artificial
  Synthetic oligonucleotide
gaacaccaccctttagttaacagagaaaatgtctatattacaccacacgcggcat

SEQ ID NO: 245935 - DNA, 55 bp, Artificial
  Synthetic oligonucleotide
cggtggaccctcgagatcagacagtggaagcgattgagtctatcgacgagcatcg

SEQ ID NO: 245936 - DNA, 55 bp, Artificial
  Synthetic oligonucleotide
cggtgcctatattgtcttactcaggtatcaaactcgttgcaggacagctctttca

SEQ ID NO: 245937 - DNA, 55 bp, Artificial
  Synthetic oligonucleotide
cggtcttgatataatgactgggctgctggaattggacttttcgtgccatcaagga

SEQ ID NO: 245938 - DNA, 55 bp, Artificial
  Synthetic oligonucleotide
cagagtcttatggtaaggctatccactctatcgcaaccgttgatgggataacagg

SEQ ID NO: 245939 - DNA, 55 bp, Artificial
  Synthetic oligonucleotide
cggtcgcaatcagtaaggcagcggacaccatgcttgctatgtcggggatcgaagc

SEQ ID NO: 245940 - DNA, 55 bp, Artificial
  Synthetic oligonucleotide
cagattattgatgagcaaagagtcggaacacgagcaatcagaaaagatgccgtca

SEQ ID NO: 245941 - DNA, 55 bp, Artificial
  Synthetic oligonucleotide
attttccgacagcaagacccaaatgtccacactatccgagcttttggacactttc

SEQ ID NO: 245942 - DNA, 55 bp, Artificial
  Synthetic oligonucleotide
cagcaaactttgcagatccttacgcttgtccaaatatcatcgatcgtttgccaga

SEQ ID NO: 245943 - DNA, 60 bp, Artificial
  Synthetic oligonucleotide
gattcctctagagtagatcgtggagatgtgagcttgctgattaatggactccccatcatt

SEQ ID NO: 245944 - DNA, 55 bp, Artificial
  Synthetic oligonucleotide
cagcaatattatctctgaacgggcggacttacatgggacaatccgtaccttaacg

SEQ ID NO: 245945 - DNA, 55 bp, Artificial
  Synthetic oligonucleotide
cggtcagccgattaagcaatccatttcagttttaacggaagatgatacggcaagg

SEQ ID NO: 245946 - DNA, 55 bp, Artificial
  Synthetic oligonucleotide
cggtcacatagttggtctgaccattcttctcaaacttacgggtacggagctcccc

SEQ ID NO: 245947 - DNA, 55 bp, Artificial
  Synthetic oligonucleotide
cggtagtgtcaatcgtatggacagtgatgataagtttgctggtgggaaaggaatc

SEQ ID NO: 245948 - DNA, 55 bp, Artificial
  Synthetic oligonucleotide
cggtaagccaagacaaatgagtcaggctttcctttgttttcaatccgtccattta

SEQ ID NO: 245949 - DNA, 55 bp, Artificial
  Synthetic oligonucleotide
cggtaagcatagagtgatacggctaactcaggataagatccgagttgaacatagt

SEQ ID NO: 245950 - DNA, 55 bp, Artificial
  Synthetic oligonucleotide
cggtaacggttcatcacttagcagtctgtcagcatggtctaatagttctaactcg

SEQ ID NO: 245951 - DNA, 55 bp, Artificial
  Synthetic oligonucleotide
acgtgctggctatatcgctcgcatccgtaacttggcgcgtgttgtagctaagacc

SEQ ID NO: 245952 - DNA, 55 bp, Artificial
  Synthetic oligonucleotide
ctagcaaaacggctatcagaagcgatcccagttactgctatgtactacgagtagc

SEQ ID NO: 245953 - DNA, 55 bp, Artificial
  Synthetic oligonucleotide
ctagacaatagatttccagttggaatgccatgtgtttcgtcgtattgacaagctg

SEQ ID NO: 245954 - DNA, 58 bp, Artificial
  Synthetic oligonucleotide
gatgtatctaggcaaatacaatcttttactgagttagtctctataattaactaactaa

SEQ ID NO: 245955 - DNA, 55 bp, Artificial
  Synthetic oligonucleotide
cactagctgactgagatagacctgtttgtcttagatggtcatgaaccaaacccca

SEQ ID NO: 245956 - DNA, 55 bp, Artificial
  Synthetic oligonucleotide
acagtaggtatagatacagctttagagtacgctcaagtatctatgccggtgattc

SEQ ID NO: 245957 - DNA, 55 bp, Artificial
  Synthetic oligonucleotide
acagtgggtagcaattgccgttacgagcttggcattggtagacttgggagtaagt

SEQ ID NO: 245958 - DNA, 55 bp, Artificial
  Synthetic oligonucleotide
ctactcattcatcgaagttcaagctccaacaggttatgtattaaacacagaccct

SEQ ID NO: 245959 - DNA, 55 bp, Artificial
  Synthetic oligonucleotide
gaaagcaaggcaaatttagttgacggtcttatctccattggtatcggaataaccg

SEQ ID NO: 245960 - DNA, 55 bp, Artificial
  Synthetic oligonucleotide
ctactagataagatattgcgtatttagacgagcattagacttgtcggctcgtctg

SEQ ID NO: 245961 - DNA, 55 bp, Artificial
  Synthetic oligonucleotide
acataatccaccgtcgcatgccttctgccccagccattaccacgtagggcgcaac

SEQ ID NO: 245962 - DNA, 55 bp, Artificial
  Synthetic oligonucleotide
ctacgagatttctgaacggactcaggcaccgattttagaggtttgtccagtcgtg

SEQ ID NO: 245963 - DNA, 55 bp, Artificial
  Synthetic oligonucleotide
gaaagccaggcaagtgcagaaggcgttcaaaacaattctaataatactggcgttg

SEQ ID NO: 245964 - DNA, 55 bp, Artificial
  Synthetic oligonucleotide
ctaccttctatctcaaattaaatctaagcgtgacaatcgctcgtttaagaggtgt

SEQ ID NO: 245965 - DNA, 60 bp, Artificial
  Synthetic oligonucleotide
gcgaggctggggtcaatcctaataccattcagcgcgccttgtctgacctcgaacgtgaag

SEQ ID NO: 245966 - DNA, 55 bp, Artificial
  Synthetic oligonucleotide
ctaccatggttggtgttgtcgacccaatctgagcactggtataggttccaacctt

SEQ ID NO: 245967 - DNA, 55 bp, Artificial
  Synthetic oligonucleotide
ctacataatgcgcttgatgaatcataagaggttgaaactctccagaaggttcaag

SEQ ID NO: 245968 - DNA, 55 bp, Artificial
  Synthetic oligonucleotide
ctacagtagcttctggatctagttctaagatttgacctacagtgatgacgtcaac

SEQ ID NO: 245969 - DNA, 55 bp, Artificial
  Synthetic oligonucleotide
ctaatctgacttagttccgtcaattcagtttgaacccactcttttccaagatctg

SEQ ID NO: 245970 - DNA, 55 bp, Artificial
  Synthetic oligonucleotide
ctaatcgcacctaagtcatacaaaggctgactaatcgtagtcaaattcggacggg

SEQ ID NO: 245971 - DNA, 55 bp, Artificial
  Synthetic oligonucleotide
ctaagcgctcgggaccccttgtaggaaaatgtcctaaagtgtgggcacaatattg

SEQ ID NO: 245972 - DNA, 55 bp, Artificial
  Synthetic oligonucleotide
ctaagagggagaggtaggattgcccgagctgttggagatagggattgcgtgaagc

SEQ ID NO: 245973 - DNA, 55 bp, Artificial
  Synthetic oligonucleotide
ctaactccgcttgcggttgattgcccgcttgttccgcttgactgccttctgcggg

SEQ ID NO: 245974 - DNA, 55 bp, Artificial
  Synthetic oligonucleotide
ctaaagtttctaatggcgtatgataagctctagcagactttcagttgatggctag

SEQ ID NO: 245975 - DNA, 55 bp, Artificial
  Synthetic oligonucleotide
cactattagaatctagacgccaactccgtaaatgcgcttttcaagctctcatgag

SEQ ID NO: 245976 - DNA, 56 bp, Artificial
  Synthetic oligonucleotide
cgtaggcaactaggcttccaacagctgaaccgcgccccattcccatgtagtaccct

SEQ ID NO: 245977 - DNA, 55 bp, Artificial
  Synthetic oligonucleotide
caaaggcggacggcgagccgaacaagtggaagcataccgcaatccgtctatttca

SEQ ID NO: 245978 - DNA, 54 bp, Artificial
  Synthetic oligonucleotide
ctaaacaagacgaattaatcttagattttgacggtagcgaagtcacgtacccta

SEQ ID NO: 245979 - DNA, 55 bp, Artificial
  Synthetic oligonucleotide
ctcatcgcttgttaaaggaagagtctatgcttctacttatctagaatcgaacaag

SEQ ID NO: 245980 - DNA, 55 bp, Artificial
  Synthetic oligonucleotide
ctcagttactttggataagtcctcgagctattagtattagtccgctccattgctc

SEQ ID NO: 245981 - DNA, 55 bp, Artificial
  Synthetic oligonucleotide
acacgagtcttaatggtacgctcaccttggacacctggagttgcaatctgacgac

SEQ ID NO: 245982 - DNA, 55 bp, Artificial
  Synthetic oligonucleotide
ctcaatagcctcgctaaagtgctccagagacatctcgatttcggctaagccaaag

SEQ ID NO: 245983 - DNA, 55 bp, Artificial
  Synthetic oligonucleotide
ctcaaccaaattatcagcgatgcctgttggggataacaagactgcgacgtcaaca

SEQ ID NO: 245984 - DNA, 55 bp, Artificial
  Synthetic oligonucleotide
cactaccatgacctacgtcctagtaactaaaagcttccatcgctaatatcgtctc

SEQ ID NO: 245985 - DNA, 55 bp, Artificial
  Synthetic oligonucleotide
caaagggacaaccaagctatcagggttttctcggcaagtagaagccgctagggca

SEQ ID NO: 245986 - DNA, 55 bp, Artificial
  Synthetic oligonucleotide
ctattctagcttggcttagttcaggcgctagtcagtttctaatccctggtttagc

SEQ ID NO: 245987 - DNA, 56 bp, Artificial
  Synthetic oligonucleotide
cgtcattatacgtatcatgggtttagccatactttcgtgtatgttcgtacccccta

SEQ ID NO: 245988 - DNA, 55 bp, Artificial
  Synthetic oligonucleotide
ctattaaccgcagaggaaccatttcctagtcgactacagattatctcgcccaatg

SEQ ID NO: 245989 - DNA, 55 bp, Artificial
  Synthetic oligonucleotide
ctatcggacatattgagtcagtttatgcttgttcgagtagcataaaggctactga

SEQ ID NO: 245990 - DNA, 55 bp, Artificial
  Synthetic oligonucleotide
gaaactacggtcgtgataaaggcataggaaacactgacgcgcaagcccgcataga

SEQ ID NO: 245991 - DNA, 55 bp, Artificial
  Synthetic oligonucleotide
ctatagtactgactttgaacatacggttcgtgataatcgtaaagtgacttacgag

SEQ ID NO: 245992 - DNA, 55 bp, Artificial
  Synthetic oligonucleotide
ctataaggtaagctaacataatctccggtcgtccctattacccatccgaggatgg

SEQ ID NO: 245993 - DNA, 55 bp, Artificial
  Synthetic oligonucleotide
ctataaaggtcgtatgatgcaccatggttgcttgctctttgacgttgatatgtcc

SEQ ID NO: 245994 - DNA, 55 bp, Artificial
  Synthetic oligonucleotide
cactacgagcgagacgacaaagtcatagctcgtaagggagtgagaaacgtgtccg

SEQ ID NO: 245995 - DNA, 55 bp, Artificial
  Synthetic oligonucleotide
ctagtagcacagaactatataagattatgcaaacggactaacgaggtgctttatg

SEQ ID NO: 245996 - DNA, 55 bp, Artificial
  Synthetic oligonucleotide
ctaggctaggagattgatctctcaaagtcagccgaacctgacttcctgtgcgatg

SEQ ID NO: 245997 - DNA, 55 bp, Artificial
  Synthetic oligonucleotide
ctaggcgtaatgttagggatgaatggaaccgctgccttgctacgtgctggtggta

SEQ ID NO: 245998 - DNA, 57 bp, Artificial
  Synthetic oligonucleotide
gcctttagccttagagctgcaagggtttgaggctcgtcaaatctcggcgacttttcg

SEQ ID NO: 245999 - DNA, 55 bp, Artificial
  Synthetic oligonucleotide
ctaggattgtcatgtactataatggaggtggtgacaattatattggttctggtac

SEQ ID NO: 246000 - DNA, 55 bp, Artificial
  Synthetic oligonucleotide
acagcccctatgaagtcatccgtgcttatcacgatagagggatgatgaaatgggg

SEQ ID NO: 246001 - DNA, 55 bp, Artificial
  Synthetic oligonucleotide
ctagctcagaaagttagtgacgaggctctggtttacgttcccactaagggagaag

SEQ ID NO: 246002 - DNA, 55 bp, Artificial
  Synthetic oligonucleotide
ctagcgggaaccgtgccataactagtgagttcggggacttcgtgcacgggagcgc

SEQ ID NO: 246003 - DNA, 55 bp, Artificial
  Synthetic oligonucleotide
ctagcaagcttgagctaatttcattgagaaaacgagttggacgattgtagttggt

SEQ ID NO: 246004 - DNA, 55 bp, Artificial
  Synthetic oligonucleotide
cacttagttccattgctgcggtttgtttaaccttatcgatgatatggttgtttgg

SEQ ID NO: 246005 - DNA, 55 bp, Artificial
  Synthetic oligonucleotide
cgtgtgccacgccttgaaagtgatacccttgatactttcgaaactcgtatccacg

SEQ ID NO: 246006 - DNA, 55 bp, Artificial
  Synthetic oligonucleotide
cgtgtgaaactttacgttccaaaccaagtaggtatccgcaatcctgcatttgctc

SEQ ID NO: 246007 - DNA, 55 bp, Artificial
  Synthetic oligonucleotide
accaacgtgctgagaaggccctagaaagtgcggtctcgaggtcagacggtcttca

SEQ ID NO: 246008 - DNA, 55 bp, Artificial
  Synthetic oligonucleotide
cgtgtcttgtattgatactgaaaatctacctaaagacaacaccatttatttgtct

SEQ ID NO: 246009 - DNA, 57 bp, Artificial
  Synthetic oligonucleotide
gccttatcctgacggaaactcttttcctggccatcaatttcaaccaaatcattatcc

SEQ ID NO: 246010 - DNA, 55 bp, Artificial
  Synthetic oligonucleotide
accaactcctgacgttattgatgcaggtcaccgtaacggggttcctgtatatggt

SEQ ID NO: 246011 - DNA, 55 bp, Artificial
  Synthetic oligonucleotide
cgtgtaggatctgggaactcagatgggttagacacttcaagcatctcaccgtcag

SEQ ID NO: 246012 - DNA, 55 bp, Artificial
  Synthetic oligonucleotide
cgtgtaggaacggctggttcgttgaataaagacgttcatgtacgtgaattggtat

SEQ ID NO: 246013 - DNA, 55 bp, Artificial
  Synthetic oligonucleotide
cgtgtactcgggaacctagttcaaccagtccaatcagttggtccggtattgcata

SEQ ID NO: 246014 - DNA, 55 bp, Artificial
  Synthetic oligonucleotide
cgtggggttcgtctggggtgaattgttgttcacagcagattctctagcggacttg

SEQ ID NO: 246015 - DNA, 55 bp, Artificial
  Synthetic oligonucleotide
accactcagggctggtcaaaagctcataagcccaagtgattgcttcgtcacggaa

SEQ ID NO: 246016 - DNA, 55 bp, Artificial
  Synthetic oligonucleotide
cgtgggatgatgagggctggctcacacttaatggtccaactatatacaatggacg

SEQ ID NO: 246017 - DNA, 55 bp, Artificial
  Synthetic oligonucleotide
cgtgggaaatgttgacgtcgcagtcttgttatccccaacaggcatcgctgataat

SEQ ID NO: 246018 - DNA, 55 bp, Artificial
  Synthetic oligonucleotide
cgtggctttatgattgagtcctacttggaagatggccgtcaggacaagccagagg

SEQ ID NO: 246019 - DNA, 55 bp, Artificial
  Synthetic oligonucleotide
cacttcaatcagtgggtgttgggacaccttctcagttacccgactagcaaagccc

SEQ ID NO: 246020 - DNA, 60 bp, Artificial
  Synthetic oligonucleotide
cagctcattaaatccatgactgtataaatcacaaacatagaatttcaagggctggttagt

SEQ ID NO: 246021 - DNA, 57 bp, Artificial
  Synthetic oligonucleotide
cgtcggaaacactagctcaatcattcataacaaccgcaaaactaaaaatcacacgaa

SEQ ID NO: 246022 - DNA, 52 bp, Artificial
  Synthetic oligonucleotide
accctaacttagggaaatggctgacatgcacttcctttaaccttactcgttt

SEQ ID NO: 246023 - DNA, 55 bp, Artificial
  Synthetic oligonucleotide
cgtggcgtacaagctttcggtttcttaggtcgttatcgcctaattgactttgctc

SEQ ID NO: 246024 - DNA, 55 bp, Artificial
  Synthetic oligonucleotide
cgtggagatgtgagtttgctgattaatgggctcccaatcataaggtttgaaggtt

SEQ ID NO: 246025 - DNA, 55 bp, Artificial
  Synthetic oligonucleotide
cgtgcgtgtaacgccctcttataaactagctgatcgtgctaagattattcgggga

SEQ ID NO: 246026 - DNA, 55 bp, Artificial
  Synthetic oligonucleotide
cgtgcctcgcatcttttcttgaacccgtgtactggcgacataagtaccggaacca

SEQ ID NO: 246027 - DNA, 55 bp, Artificial
  Synthetic oligonucleotide
cgtgccagggatcaagtctaaattatcagtcaaatgaacaatagaagaagccaag

SEQ ID NO: 246028 - DNA, 55 bp, Artificial
  Synthetic oligonucleotide
cgtgccagctgacaactttgcgatgtggtggttaggaaactgtggtatctggatt

SEQ ID NO: 246029 - DNA, 55 bp, Artificial
  Synthetic oligonucleotide
cacttgtgcttcgtcctgttgtgggtttactacatgacgggcattcgagtaaacg

SEQ ID NO: 246030 - DNA, 55 bp, Artificial
  Synthetic oligonucleotide
cgtgccaatagcgacggtcaagtttacaagtcttcagcagcccttgattcgcaag

SEQ ID NO: 246031 - DNA, 55 bp, Artificial
  Synthetic oligonucleotide
cgtgcatggtataataaccaagtcgcattcactaaacagcgaaagttgggaggtg

SEQ ID NO: 246032 - DNA, 60 bp, Artificial
  Synthetic oligonucleotide
cgtctatcttgccagttggtgccgctgtgttaggagcgagccttgctgttcgctttgcag

SEQ ID NO: 246033 - DNA, 55 bp, Artificial
  Synthetic oligonucleotide
cgtgatttcgatgctgggtcgctacttccttgatgcgcgcgttaaatcgttcatc

SEQ ID NO: 246034 - DNA, 55 bp, Artificial
  Synthetic oligonucleotide
cactattttgaggttgcagatagagctgacgtggtttgaagagattctcgaatag

SEQ ID NO: 246035 - DNA, 55 bp, Artificial
  Synthetic oligonucleotide
caaggggctaatagggaatacattaccattctttgcaaagcttgggtatcaagtg

SEQ ID NO: 246036 - DNA, 55 bp, Artificial
  Synthetic oligonucleotide
cgttttcctcgctagatttctcaaaagggcagactcctccttggttcgtcacacg

SEQ ID NO: 246037 - DNA, 55 bp, Artificial
  Synthetic oligonucleotide
cgtttgccaaatgagcccattactgagactgtactacgtaccttgtatgccaccg

SEQ ID NO: 246038 - DNA, 55 bp, Artificial
  Synthetic oligonucleotide
cgtttccgtagaggaagtttcctcactagagctagatgttttacctgattgcaag

SEQ ID NO: 246039 - DNA, 53 bp, Artificial
  Synthetic oligonucleotide
cgtttatttcgtttagttatcggcataatcgttaaaacaggcgttatcgtagc

SEQ ID NO: 246040 - DNA, 55 bp, Artificial
  Synthetic oligonucleotide
cgttgtgtcaaccactccttgtgttaatggtgttacggtatctagttgttcagtc

SEQ ID NO: 246041 - DNA, 55 bp, Artificial
  Synthetic oligonucleotide
cgttgtcgggattttgaaagggtcaatcatgtttacagttgacttgctcaaggaa

SEQ ID NO: 246042 - DNA, 55 bp, Artificial
  Synthetic oligonucleotide
cgttggatgtaggaaggttggttgtggctagcaacgagaacggtctctgtatagg

SEQ ID NO: 246043 - DNA, 59 bp, Artificial
  Synthetic oligonucleotide
gcctaaaaggggttatatttgccatcgatgagatacaaaatgaatataactcaagcgct

SEQ ID NO: 246044 - DNA, 54 bp, Artificial
  Synthetic oligonucleotide
aaaacacactcgttccgttcgtacttagctggggtttcagagaatggtgagtac

SEQ ID NO: 246045 - DNA, 55 bp, Artificial
  Synthetic oligonucleotide
acatttacaggtatctgggaagtaacgcctagaccgcatcatgtaagctatactt

SEQ ID NO: 246046 - DNA, 55 bp, Artificial
  Synthetic oligonucleotide
cgttctgtgcatagtctgaaatcaaacgaccaagactaggcgtagtaacaggaag

SEQ ID NO: 246047 - DNA, 55 bp, Artificial
  Synthetic oligonucleotide
accaacagcgtcagcccattccttatacctgacaacaatttcgtctggaattggc

SEQ ID NO: 246048 - DNA, 55 bp, Artificial
  Synthetic oligonucleotide
cactggataatattagtgctaagtactggagagtaaccgtagatactaagggagg

SEQ ID NO: 246049 - DNA, 55 bp, Artificial
  Synthetic oligonucleotide
cgtgtgctaggaagctactctgggaaattatcggctgatgccttaaccatgtcta

SEQ ID NO: 246050 - DNA, 51 bp, Artificial
  Synthetic oligonucleotide
cgttaaagacgcgaccgagtgtttctttcccaacggggacagaaattggac

SEQ ID NO: 246051 - DNA, 55 bp, Artificial
  Synthetic oligonucleotide
cgttaacgccaataacagcattctcagttgtctttagtaccatagtatcgcgcca

SEQ ID NO: 246052 - DNA, 55 bp, Artificial
  Synthetic oligonucleotide
caaagcctcattgataactggcgaagtgagctcaatcgcttgaataatgaccagc

SEQ ID NO: 246053 - DNA, 55 bp, Artificial
  Synthetic oligonucleotide
cgttatgccttcgacagacctaggttggtatacagacacggcttatggacttaac

SEQ ID NO: 246054 - DNA, 56 bp, Artificial
  Synthetic oligonucleotide
cgtgcccattttttgacacgtgctttcccacgtgatacaatgagtttacgaaaatg

SEQ ID NO: 246055 - DNA, 55 bp, Artificial
  Synthetic oligonucleotide
cgttatggtacgtatgcagacgaaaaccgttcatacactaaaggacattctgaaa

SEQ ID NO: 246056 - DNA, 55 bp, Artificial
  Synthetic oligonucleotide
cgttcaagcgttgcaacatggacgttgacaaggtgtgtcaaggcagttgacagcg

SEQ ID NO: 246057 - DNA, 55 bp, Artificial
  Synthetic oligonucleotide
cgttcacggaatgcaggaactgattacattgcatctacacaacttactgtacaaa

SEQ ID NO: 246058 - DNA, 55 bp, Artificial
  Synthetic oligonucleotide
cactcaagtctcgattcagcaattgcttaagctgccagcggaatgctttcatcct

SEQ ID NO: 246059 - DNA, 55 bp, Artificial
  Synthetic oligonucleotide
cgttcccggattgataacaacacttgccttgacaccagctgcccgaatcttttgc

SEQ ID NO: 246060 - DNA, 54 bp, Artificial
  Synthetic oligonucleotide
tataagcaagtattaaaaatttctgaaatgttaaatgcaccagagcctgtaaaa

SEQ ID NO: 246061 - DNA, 54 bp, Artificial
  Synthetic oligonucleotide
caagttagtgatctaggtattcatctacttagctggagacagaactccgtagtt

SEQ ID NO: 246062 - DNA, 54 bp, Artificial
  Synthetic oligonucleotide
gtagcactgggaacggtgctggctcgtttgatcggtgtggtcattctctggcga

SEQ ID NO: 246063 - DNA, 54 bp, Artificial
  Synthetic oligonucleotide
taacccacttccttatacttcagtaccggacgcattgggaaaagatggtatatg

SEQ ID NO: 246064 - DNA, 54 bp, Artificial
  Synthetic oligonucleotide
caaggtctcctctatgaacaggtttgtaacggtatcaaagaagctggttatgat

SEQ ID NO: 246065 - DNA, 58 bp, Artificial
  Synthetic oligonucleotide
gcccaaaaaaaacatgaaattgtgttgtgttgtgatataataaaagcatagagaaatc

SEQ ID NO: 246066 - DNA, 54 bp, Artificial
  Synthetic oligonucleotide
atcggtttgatgataggctatgctgttttaggagagggcaaggatccgataagc

SEQ ID NO: 246067 - DNA, 54 bp, Artificial
  Synthetic oligonucleotide
tactatgaccatgcctttggtaaatcctacggtgtgctcatgcgggaggggaat

SEQ ID NO: 246068 - DNA, 54 bp, Artificial
  Synthetic oligonucleotide
cagctagtgcggtgggtgttcagcctattccatgtacagctgctttgatccatg

SEQ ID NO: 246069 - DNA, 54 bp, Artificial
  Synthetic oligonucleotide
gtgctcacttgggtcatgttttctacagatggaccgcgggagttaggcggcctc

SEQ ID NO: 246070 - DNA, 54 bp, Artificial
  Synthetic oligonucleotide
caggggtacacgaatagggacagaagctcagtatctcctagctcgctatgtttt

SEQ ID NO: 246071 - DNA, 54 bp, Artificial
  Synthetic oligonucleotide
caaaccagaacccctaaaagaccgtggattagctggtgttcgcaaagacagtgc

SEQ ID NO: 246072 - DNA, 54 bp, Artificial
  Synthetic oligonucleotide
tacgaccacgagcattaccatgaaccaccatacctcttgatggaagcggtgccc

SEQ ID NO: 246073 - DNA, 54 bp, Artificial
  Synthetic oligonucleotide
cactcaactgagccaatgtaagtgttcagacgtatctgatcatacatgattggt

SEQ ID NO: 246074 - DNA, 54 bp, Artificial
  Synthetic oligonucleotide
gtcgtcagtcaggcgaccacagatggagcaataggttagctctctcttagcaga

SEQ ID NO: 246075 - DNA, 54 bp, Artificial
  Synthetic oligonucleotide
gtcgtatagcattccaagttataagggacacttggctattcacgaggatggcgg

SEQ ID NO: 246076 - DNA, 60 bp, Artificial
  Synthetic oligonucleotide
gccattgaaggctatttagcgaccattgccttgcaagacgtagaacaacctgaacgagcc

SEQ ID NO: 246077 - DNA, 54 bp, Artificial
  Synthetic oligonucleotide
atgtgcggggccagtcgggttactcacaagacggcttgcgttctcctctaggaa

SEQ ID NO: 246078 - DNA, 54 bp, Artificial
  Synthetic oligonucleotide
tacccacaatggcgcgtgagctaaatgtatcaacttcacagattacgtgggtgg

SEQ ID NO: 246079 - DNA, 54 bp, Artificial
  Synthetic oligonucleotide
tacagtcgcgaggatcgttagcatcatctgaaggacaaataaggttactccgac

SEQ ID NO: 246080 - DNA, 54 bp, Artificial
  Synthetic oligonucleotide
tagcccaccccagccgctgtgtccatagcctccgtcaaagttgctacgttgatg

SEQ ID NO: 246081 - DNA, 54 bp, Artificial
  Synthetic oligonucleotide
cacggcgccaccaaaacgagttggtcgtccggaatttgaccgcgaagcctgtgg

SEQ ID NO: 246082 - DNA, 54 bp, Artificial
  Synthetic oligonucleotide
tacagcagctcttgagcgcgatatgggaacagcggcactgtcagcttgggcaat

SEQ ID NO: 246083 - DNA, 54 bp, Artificial
  Synthetic oligonucleotide
atggttcattatgtttaagacgaaatttgggcttcgtttgcgctccgtagggga

SEQ ID NO: 246084 - DNA, 54 bp, Artificial
  Synthetic oligonucleotide
caacatattcgttgcggttgatatgcagaggaacgttgcttttattagtctgaa

SEQ ID NO: 246085 - DNA, 54 bp, Artificial
  Synthetic oligonucleotide
tacaactgcccgttccctatacggcgcaccaactcattgggctcatagcttcac

SEQ ID NO: 246086 - DNA, 54 bp, Artificial
  Synthetic oligonucleotide
gttcctgcccgtaaggtgcctcgccaaggcccgtccgatgtaaagagcggacaa

SEQ ID NO: 246087 - DNA, 60 bp, Artificial
  Synthetic oligonucleotide
gccagcattctcaatcaagggggtgcggttgcacttgctagtcctcgcattgatgtctgc

SEQ ID NO: 246088 - DNA, 54 bp, Artificial
  Synthetic oligonucleotide
cacctaagcgcttatcccgatgttcccacattccaactgattccaaactaatcc

SEQ ID NO: 246089 - DNA, 54 bp, Artificial
  Synthetic oligonucleotide
atggattacagacggttaaaggcatggctcagatgttagctttaacttaccgag

SEQ ID NO: 246090 - DNA, 54 bp, Artificial
  Synthetic oligonucleotide
cattttgcgaagagacaaattaaagttaaagcgtagtcatccagatattgagtg

SEQ ID NO: 246091 - DNA, 54 bp, Artificial
  Synthetic oligonucleotide
gtattccattgggcttgccgacaggagactatctgtcaacggttattcctgcta

SEQ ID NO: 246092 - DNA, 54 bp, Artificial
  Synthetic oligonucleotide
cacaacggacggggtgtattcgtcccgttctaataggctaatggtctgtctaga

SEQ ID NO: 246093 - DNA, 54 bp, Artificial
  Synthetic oligonucleotide
caagcctttgctctatcccttgcggatgtggtacgcttgtctacgccggagggg

SEQ ID NO: 246094 - DNA, 54 bp, Artificial
  Synthetic oligonucleotide
caagcgagtctatgacgagtcagactacattgaagacccacatacggctgttgc

SEQ ID NO: 246095 - DNA, 54 bp, Artificial
  Synthetic oligonucleotide
gtaggaagcctgtcaaaccaagaagcggctgagttgctagcaagtgacggcatg

SEQ ID NO: 246096 - DNA, 54 bp, Artificial
  Synthetic oligonucleotide
agaggatgcgaacttgagtgaggagagctggcgcttgctggattgcacactttt

SEQ ID NO: 246097 - DNA, 54 bp, Artificial
  Synthetic oligonucleotide
tgaatcggcaacatggaatcaatcggatacgttccatctgaaattctagctcga

SEQ ID NO: 246098 - DNA, 60 bp, Artificial
  Synthetic oligonucleotide
gccagagctatacgctgggcttgtcctccactaagtggacgcgctccattaccaatacgc

SEQ ID NO: 246099 - DNA, 53 bp, Artificial
  Synthetic oligonucleotide
aacggtggttggggaccagactaccaagacccatcaacttacctcgatactct

SEQ ID NO: 246100 - DNA, 54 bp, Artificial
  Synthetic oligonucleotide
agagaaaaaaagagttttgctaactttgtcgttggacaaagcagaagaattaga

SEQ ID NO: 246101 - DNA, 54 bp, Artificial
  Synthetic oligonucleotide
ttgctacaagccgccaagagcagaccggcacttagggcaagtcctgctagcgtc

SEQ ID NO: 246102 - DNA, 54 bp, Artificial
  Synthetic oligonucleotide
agaattagaaactatatcaaaagaaatgggaattagtaaatctgctcttgttag

SEQ ID NO: 246103 - DNA, 54 bp, Artificial
  Synthetic oligonucleotide
tgatacagcctccaagcccaccaccgctcatcttagcacccagagcaccatggc

SEQ ID NO: 246104 - DNA, 54 bp, Artificial
  Synthetic oligonucleotide
gctaggaggcggtacagcagctcttgagcgcgatatgggaacagcggcactgtc

SEQ ID NO: 246105 - DNA, 54 bp, Artificial
  Synthetic oligonucleotide
ctggtgtttctgccactcgtggcgtcggattgccaaaacgagggtactgcgtgg

SEQ ID NO: 246106 - DNA, 54 bp, Artificial
  Synthetic oligonucleotide
cggccaagtacctatcggtttgatgaatagccggattatggctctaaatatggc

SEQ ID NO: 246107 - DNA, 54 bp, Artificial
  Synthetic oligonucleotide
gagcgtgcagggaagtaatcaattctggataggaaccaagttcgacgaatttaa

SEQ ID NO: 246108 - DNA, 54 bp, Artificial
  Synthetic oligonucleotide
ctggtgtcttgtactcaaatgttgtgccatttggtaaatctgaaacgttgccaa

SEQ ID NO: 246109 - DNA, 55 bp, Artificial
  Synthetic oligonucleotide
cgtttcgctgaaaattgccagttctcccgaaccccatcgggttcattagctaata

SEQ ID NO: 246110 - DNA, 54 bp, Artificial
  Synthetic oligonucleotide
ctggtacgctaatattacgagcttccaagaccgctttagcttgctcaagcatat

SEQ ID NO: 246111 - DNA, 54 bp, Artificial
  Synthetic oligonucleotide
gaggagttggataaaatcgagctacgagcctctgagagcctctcagagctatct

SEQ ID NO: 246112 - DNA, 54 bp, Artificial
  Synthetic oligonucleotide
gcggtgacttacggaccgggtcttgttggagccctcttagtagggatggcagcg

SEQ ID NO: 246113 - DNA, 54 bp, Artificial
  Synthetic oligonucleotide
acgtgataatccactcatcacataaaaccgcatctttccgaatagctcgcttag

SEQ ID NO: 246114 - DNA, 54 bp, Artificial
  Synthetic oligonucleotide
gcgctttatctcagactacaatcaagctatcagtacccatatgaccggcgctaa

SEQ ID NO: 246115 - DNA, 54 bp, Artificial
  Synthetic oligonucleotide
acggagattctcactaactccacttaagcccaacatcatgaaaagggaactagc

SEQ ID NO: 246116 - DNA, 54 bp, Artificial
  Synthetic oligonucleotide
cttgaatagtacgattagtcagctgacaaaatcatttgaccgtttatttagacg

SEQ ID NO: 246117 - DNA, 54 bp, Artificial
  Synthetic oligonucleotide
cgacatggaaaagcctagtcatggtcagcatgtacgactggataaaggcctttt

SEQ ID NO: 246118 - DNA, 54 bp, Artificial
  Synthetic oligonucleotide
tcgtcatattaacttgacgttgaatctcgctgactgaaagattagtcagattgg

SEQ ID NO: 246119 - DNA, 53 bp, Artificial
  Synthetic oligonucleotide
ggagacaggcgcaggaagacttaaagaaacttttacaggccaagaaaatccct

SEQ ID NO: 246120 - DNA, 58 bp, Artificial
  Synthetic oligonucleotide
gcatttacggaccagctaacacgtggaacctaatgccggaccggggcagtgtcacaga

SEQ ID NO: 246121 - DNA, 54 bp, Artificial
  Synthetic oligonucleotide
ggactatactaccgggctagacactggtctaacagggctaacacttggtcttag

SEQ ID NO: 246122 - DNA, 54 bp, Artificial
  Synthetic oligonucleotide
tcgtgtttcttaacaaccgccccatagcgctcaccgatggttcccgtgtctccc

SEQ ID NO: 246123 - DNA, 54 bp, Artificial
  Synthetic oligonucleotide
cttagtacagtgggaagcaagtaaccctatcaagaggtaaaacgtgagccaact

SEQ ID NO: 246124 - DNA, 54 bp, Artificial
  Synthetic oligonucleotide
tcgttgacttggatactgactaaaatagcgaggaaggatagcctccaactcttt

SEQ ID NO: 246125 - DNA, 54 bp, Artificial
  Synthetic oligonucleotide
cttacttgtggagaggaaactgtattaacctgcgcttcactcgattctttggat

SEQ ID NO: 246126 - DNA, 54 bp, Artificial
  Synthetic oligonucleotide
cgatgattctcgacacactccgataatagaatggggatactagcagcactagtg

SEQ ID NO: 246127 - DNA, 54 bp, Artificial
  Synthetic oligonucleotide
cgcaagcgtcatcgttagttttctgcgtcgtaggcgtctgctgctaaagcacct

SEQ ID NO: 246128 - DNA, 54 bp, Artificial
  Synthetic oligonucleotide
gcttgtgcgacaacactactgccttgattacggcgtgtaataaggattgtgtgg

SEQ ID NO: 246129 - DNA, 54 bp, Artificial
  Synthetic oligonucleotide
cgcagttagacggattggggttagtgccaataatctgatagacgaaccttatca

SEQ ID NO: 246130 - DNA, 54 bp, Artificial
  Synthetic oligonucleotide
gcttacttagggagtcgtattgccgaatattatgaacggtctggtcgtgttcgg

SEQ ID NO: 246131 - DNA, 60 bp, Artificial
  Synthetic oligonucleotide
cagctgctgttaacatgccgtcgccaataaagccgatatgtgctggttcatgccccgagc

SEQ ID NO: 246132 - DNA, 59 bp, Artificial
  Synthetic oligonucleotide
ctaaaactgatactacgttatcaagcgatattagaagccagttcgctactaagatatta

SEQ ID NO: 246133 - DNA, 54 bp, Artificial
  Synthetic oligonucleotide
gctgtgtcgtcagccttgcttgcgatagtgtttaacagtcttttgtgatacctt

SEQ ID NO: 246134 - DNA, 53 bp, Artificial
  Synthetic oligonucleotide
tcttgttagtttatggattgcggaaaattctagaaaataaaaaaagagccacg

SEQ ID NO: 246135 - DNA, 54 bp, Artificial
  Synthetic oligonucleotide
ttggccgcgtggaacaggtaggaacgcctcaggaactttataaccggcctgcta

SEQ ID NO: 246136 - DNA, 54 bp, Artificial
  Synthetic oligonucleotide
tcttttctacggaacagcaaccctgaaccttgtttggcaacatattggttggcg

SEQ ID NO: 246137 - DNA, 54 bp, Artificial
  Synthetic oligonucleotide
tgaaaaagacctcagtgacggcattatcataaggatatccaggcttggagtaag

SEQ ID NO: 246138 - DNA, 52 bp, Artificial
  Synthetic oligonucleotide
cgttcaggttgttcgaggtcttgtaaagcaacggttggtaaataaccctcaa

SEQ ID NO: 246139 - DNA, 51 bp, Artificial
  Synthetic oligonucleotide
ttacgaagtttgcctcggaataccataccggacaaacgaccgaaaattcgg

SEQ ID NO: 246140 - DNA, 52 bp, Artificial
  Synthetic oligonucleotide
cgttttttcgaactattttactggacgaaactagagagtgtctcaaccacgg

SEQ ID NO: 246141 - DNA, 54 bp, Artificial
  Synthetic oligonucleotide
aagtgggcgctattgcatgctggactgatggtgggtacggacatgtcggtgtcg

SEQ ID NO: 246142 - DNA, 54 bp, Artificial
  Synthetic oligonucleotide
gcacttgaatcgacgctttctaaggagaattctagtgggcataccagtcgtttc

SEQ ID NO: 246143 - DNA, 58 bp, Artificial
  Synthetic oligonucleotide
ctaacaatatcgtcttactttctcaatagtaggggcttaattgtcaacactcaatcag

SEQ ID NO: 246144 - DNA, 54 bp, Artificial
  Synthetic oligonucleotide
ctattctgactatcatccaagaccttcggattcctggttggcagcaggttctgt

SEQ ID NO: 246145 - DNA, 53 bp, Artificial
  Synthetic oligonucleotide
ttagtcgaagtacgaggcgacaggttccgaagcctacctaagtaggtgagggt

SEQ ID NO: 246146 - DNA, 54 bp, Artificial
  Synthetic oligonucleotide
ctcccgcctttacaccgcgaaccgttggcaccgcttgtgcaacaggtccaaacg

SEQ ID NO: 246147 - DNA, 54 bp, Artificial
  Synthetic oligonucleotide
ctcctattcctaaagcccctttagcgcataactttggctcagcttctattatcg

SEQ ID NO: 246148 - DNA, 54 bp, Artificial
  Synthetic oligonucleotide
acacagtttgggacttctcctatcgtcttttggcttaatggtttagtctttgat

SEQ ID NO: 246149 - DNA, 54 bp, Artificial
  Synthetic oligonucleotide
ctcgccagtcttagttctggcctatgttagccttaaggggcggaccctgccgac

SEQ ID NO: 246150 - DNA, 54 bp, Artificial
  Synthetic oligonucleotide
ctcgccgtggtgcttccttacatgccagccagacacctagggcagcccccgtca

SEQ ID NO: 246151 - DNA, 54 bp, Artificial
  Synthetic oligonucleotide
gcaaagggcacggccacaaggccccacaccaccgtacactttagcttcttcacg

SEQ ID NO: 246152 - DNA, 54 bp, Artificial
  Synthetic oligonucleotide
gcaaaccgaatttctgacacatctctgtgatagattgggtaatgccagctggca

SEQ ID NO: 246153 - DNA, 54 bp, Artificial
  Synthetic oligonucleotide
gatggacagtttgagttggacttggtcttgcgagacaatcagacttcagcagag

SEQ ID NO: 246154 - DNA, 57 bp, Artificial
  Synthetic oligonucleotide
ctaagttattgcttgaaaattttcttttatcgccttatgaaatgacagatcggtcaa

SEQ ID NO: 246155 - DNA, 54 bp, Artificial
  Synthetic oligonucleotide
ctcgtagggtgccccgccagggtccatctgacgtaaagagcggacaagtcacac

SEQ ID NO: 246156 - DNA, 54 bp, Artificial
  Synthetic oligonucleotide
gattcttagcttcgatttgagcttgggcacgtttaacagcctcagcgatagttg

SEQ ID NO: 246157 - DNA, 54 bp, Artificial
  Synthetic oligonucleotide
ttcaactatccgaaagttagtggattcacccaagattggagctaatttgtcagc

SEQ ID NO: 246158 - DNA, 54 bp, Artificial
  Synthetic oligonucleotide
gagtatttcaggcacttacaatgggaagtcagtagagctaagtaaggcttatga

SEQ ID NO: 246159 - DNA, 54 bp, Artificial
  Synthetic oligonucleotide
aagagataatggccagcattcatcttaaccactgctgctactttgacttgccgc

SEQ ID NO: 246160 - DNA, 54 bp, Artificial
  Synthetic oligonucleotide
gcgcctgcttgaaagtctagcgtatggatataacgaacgctatttatcaaacgg

SEQ ID NO: 246161 - DNA, 54 bp, Artificial
  Synthetic oligonucleotide
tggtacaggaggcttcactgtctttaacgacggaatcgcccactacaacagttc

SEQ ID NO: 246162 - DNA, 54 bp, Artificial
  Synthetic oligonucleotide
ttgatacaaagattagacggtactatctatcttaacaacgctgctataaaagtg

SEQ ID NO: 246163 - DNA, 54 bp, Artificial
  Synthetic oligonucleotide
gagtctattcacgtagcaagcaggtgatcctatagagtcaccgccgttatttga

SEQ ID NO: 246164 - DNA, 54 bp, Artificial
  Synthetic oligonucleotide
acgaccggtaaaatttgccctacaaaatcagagtacgtgtagtcaggatgaaaa

SEQ ID NO: 246165 - DNA, 55 bp, Artificial
  Synthetic oligonucleotide
gcatcctcaccacgaccaatcggacggttaatcggtgccccttgccctaaactac

SEQ ID NO: 246166 - DNA, 54 bp, Artificial
  Synthetic oligonucleotide
cgtagacgacaaggggacgctttaataatctatggaagccaacgtgcatttatg

SEQ ID NO: 246167 - DNA, 54 bp, Artificial
  Synthetic oligonucleotide
tgtcctttaccctctaaagtcttgcggggaccgtagacagaatcaccggctaga

SEQ ID NO: 246168 - DNA, 54 bp, Artificial
  Synthetic oligonucleotide
cgtcacggcttttaccaacttcgtgttctgtttgaaaagctagtttagttgcta

SEQ ID NO: 246169 - DNA, 54 bp, Artificial
  Synthetic oligonucleotide
cgtcctgtggctaggacgttagaaaaaaatgcggtatcgcaaatcttatatcaa

SEQ ID NO: 246170 - DNA, 52 bp, Artificial
  Synthetic oligonucleotide
cgtcctgttctagcgttaaattcgtgtctgttaacccctttaaagacaattc

SEQ ID NO: 246171 - DNA, 54 bp, Artificial
  Synthetic oligonucleotide
ctgctctctagatctctgcatttgacaaggcaccatggtcagataacggtgacg

SEQ ID NO: 246172 - DNA, 54 bp, Artificial
  Synthetic oligonucleotide
gcctcgccaaggcccgtccgatgtaaagagcggacaagtcacacctcgctctag

SEQ ID NO: 246173 - DNA, 54 bp, Artificial
  Synthetic oligonucleotide
cgtgccagaactattcacagctgttctatccgctctgacagcgtcaaatcgagt

SEQ ID NO: 246174 - DNA, 54 bp, Artificial
  Synthetic oligonucleotide
accaggcacttcgcggtcaactgacaagcagccctccccttcagctagtgcggc

SEQ ID NO: 246175 - DNA, 54 bp, Artificial
  Synthetic oligonucleotide
gcccacgtaactgccctcgctagtcgtccaaaactgattggaggggcgcgtgcc

SEQ ID NO: 246176 - DNA, 51 bp, Artificial
  Synthetic oligonucleotide
ctaattctcaaatttcgggggttatttgccgttttaccgtctctctagtaa

SEQ ID NO: 246177 - DNA, 54 bp, Artificial
  Synthetic oligonucleotide
ttaccactacataagaaggcacctcccatgctgactaagcgaggacaatgtttt

SEQ ID NO: 246178 - DNA, 54 bp, Artificial
  Synthetic oligonucleotide
atagcctgcgcgatacatgttgtaaagaacatcttgttgacgagaaagaccata

SEQ ID NO: 246179 - DNA, 53 bp, Artificial
  Synthetic oligonucleotide
ttttgccgaataggtttgactagtgagtttgatttcacccgttccgtttgaaa

SEQ ID NO: 246180 - DNA, 54 bp, Artificial
  Synthetic oligonucleotide
ccccgctaattgcacaggcgtcaagttggcggttggcgtaacaactccagtccg

SEQ ID NO: 246181 - DNA, 54 bp, Artificial
  Synthetic oligonucleotide
tcaacttcttacgaatgacaaaactcgagccatctcgaagctgaatctcaaaac

SEQ ID NO: 246182 - DNA, 54 bp, Artificial
  Synthetic oligonucleotide
atactcattctagaccaattgtgggcttgttgccgctaggttagcctgcaagtc

SEQ ID NO: 246183 - DNA, 54 bp, Artificial
  Synthetic oligonucleotide
atactatgttccgtactcaaatgcgtgctctgttacgtgcgtcagtacatggac

SEQ ID NO: 246184 - DNA, 51 bp, Artificial
  Synthetic oligonucleotide
cccgaagatttaactaagtataggagactcttaccaaaaaccttatttcta

SEQ ID NO: 246185 - DNA, 54 bp, Artificial
  Synthetic oligonucleotide
gaaggggactggtcgtatggatcttccttcttacgccatgccagatagtaacct

SEQ ID NO: 246186 - DNA, 54 bp, Artificial
  Synthetic oligonucleotide
ggtaatcattgctaaatagagaatcaatttaattagcatggttaacgcttcgga

SEQ ID NO: 246187 - DNA, 57 bp, Artificial
  Synthetic oligonucleotide
gcatatcttgttgagttacgatgggccggtcaatttggttgctgttaaaaagcttac

SEQ ID NO: 246188 - DNA, 54 bp, Artificial
  Synthetic oligonucleotide
ttttatcgaactccaaccgaagtccagcctcactcataccttggcacggtggtg

SEQ ID NO: 246189 - DNA, 54 bp, Artificial
  Synthetic oligonucleotide
tcactctgacagatacattgtcaagttggaatcgagaattccaatggttagatc

SEQ ID NO: 246190 - DNA, 54 bp, Artificial
  Synthetic oligonucleotide
gggttggtcgctagtcatcaagctaccctgtccaatcggacacctttgatcagt

SEQ ID NO: 246191 - DNA, 54 bp, Artificial
  Synthetic oligonucleotide
tcagcccacaagaaattcaaattcttgcccccatgtaccgcggagcagctggga

SEQ ID NO: 246192 - DNA, 54 bp, Artificial
  Synthetic oligonucleotide
tttgtgattctgcctcacctgtcgcactcaccgtaccatcattcatctctgtcg

SEQ ID NO: 246193 - DNA, 54 bp, Artificial
  Synthetic oligonucleotide
aaaatactactgttattatcgctacgcatgattcacatgtgtacaatcgtgtag

SEQ ID NO: 246194 - DNA, 54 bp, Artificial
  Synthetic oligonucleotide
agtttagctggaattaaaacgcacgagtattgcacgaataaccaaccaaacacc

SEQ ID NO: 246195 - DNA, 54 bp, Artificial
  Synthetic oligonucleotide
ctttcaaaatacgattggccatggatagaaccgactcagacctagtccccgttc

SEQ ID NO: 246196 - DNA, 54 bp, Artificial
  Synthetic oligonucleotide
ccgaatgagccatttcatgaatcagcgttgacaaggttcgttcataagacatcc

SEQ ID NO: 246197 - DNA, 54 bp, Artificial
  Synthetic oligonucleotide
gtacgtggaatggtagacgaaacccatccgacaacctttgcggaattacttcag

SEQ ID NO: 246198 - DNA, 55 bp, Artificial
  Synthetic oligonucleotide
gcatacagttgcagattataagaattttattaaacctaaagacagggaacaattt

SEQ ID NO: 246199 - DNA, 54 bp, Artificial
  Synthetic oligonucleotide
ccacattgcggcagggaaagatgcgccgagacttgcctacggggcagattatca

SEQ ID NO: 246200 - DNA, 54 bp, Artificial
  Synthetic oligonucleotide
tatcctctatgacgtagtaacgtctgataagcgctttaatacgcttgacaagca

SEQ ID NO: 246201 - DNA, 54 bp, Artificial
  Synthetic oligonucleotide
tatcttaacctctctcttcgcttttcgtacgattatcctggccttagataccat

SEQ ID NO: 246202 - DNA, 54 bp, Artificial
  Synthetic oligonucleotide
atcgatttttttataccctagatagccatataagactttctagggcatttaaat

SEQ ID NO: 246203 - DNA, 54 bp, Artificial
  Synthetic oligonucleotide
gtaaaccagttgcctccattattccaggagcgatacctaccacacgaacgccat

SEQ ID NO: 246204 - DNA, 54 bp, Artificial
  Synthetic oligonucleotide
ggtttgcaaaagaacgtatatccgttgtatgacgagttaaaggaattaagagga

SEQ ID NO: 246205 - DNA, 54 bp, Artificial
  Synthetic oligonucleotide
ccatgaacaaggtatcccgaagcggattgctagccactgtgagtccatcgccct

SEQ ID NO: 246206 - DNA, 54 bp, Artificial
  Synthetic oligonucleotide
ttttggtggtcagttacgacttgcaagagcttgtctaggctgtcaccattgtga

SEQ ID NO: 246207 - DNA, 54 bp, Artificial
  Synthetic oligonucleotide
ggtgtcgcatccagtgtgaccccaaacggacttggtcgcatgcactatgtggga

SEQ ID NO: 246208 - DNA, 54 bp, Artificial
  Synthetic oligonucleotide
atatcagtataataaaagcgatgttgttgctcataatgggtttaaatatagaca

SEQ ID NO: 246209 - DNA, 59 bp, Artificial
  Synthetic oligonucleotide
ctacctcgaagtgaacagtctcacatattgctacatcgagtaattgtaaaacttcccat

SEQ ID NO: 246210 - DNA, 54 bp, Artificial
  Synthetic oligonucleotide
ggtggacatcaacgtttgacggttcttaaagacctcaagtatgaaacggctaag

SEQ ID NO: 246211 - DNA, 54 bp, Artificial
  Synthetic oligonucleotide
ggtgctggaatgttgcttttagtcaggataccagaagtcgcttcacagggcgaa

SEQ ID NO: 246212 - DNA, 54 bp, Artificial
  Synthetic oligonucleotide
cccacgcaaaataacttgcgtgaggacgaaattcgcggtgccacctcaattata

SEQ ID NO: 246213 - DNA, 54 bp, Artificial
  Synthetic oligonucleotide
atatagagatttagtcgattatgcagtatcagaacgtttcgatgattggtttcc

SEQ ID NO: 246214 - DNA, 54 bp, Artificial
  Synthetic oligonucleotide
ggtgagcacctagcgaaaacgcttcaattagctaggcttatttgagtgcgtctt

SEQ ID NO: 246215 - DNA, 54 bp, Artificial
  Synthetic oligonucleotide
atatagacaatatttaacagatattggagttgatactgattctattttacaaga

SEQ ID NO: 246216 - DNA, 54 bp, Artificial
  Synthetic oligonucleotide
gaagcttaacactcatcatcccaagctccaagggcctctagctctcggggtttt

SEQ ID NO: 246217 - DNA, 54 bp, Artificial
  Synthetic oligonucleotide
ggtctcgctcaacagtttgataacatttgctggattcactctatttgcgacatc

SEQ ID NO: 246218 - DNA, 54 bp, Artificial
  Synthetic oligonucleotide
tccgaaatcattaggatcacgaacatctcacccctatatccaaaccgattttag

SEQ ID NO: 246219 - DNA, 54 bp, Artificial
  Synthetic oligonucleotide
tccgaccccttgactagccccctcaatcagccccggtagatctgctactgcaaa

SEQ ID NO: 246220 - DNA, 59 bp, Artificial
  Synthetic oligonucleotide
gcagttggtagcgtatgtcagaaggagattccaagtaattggagcggttccgttgagat

SEQ ID NO: 246221 - DNA, 54 bp, Artificial
  Synthetic oligonucleotide
gaccgtgaacagacgcacgaagaagagcacggatttgtgtgcggaacatagcgt

SEQ ID NO: 246222 - DNA, 54 bp, Artificial
  Synthetic oligonucleotide
agtatttacacagtaaccagagatacgaacgataacgtcttcgccagacataat

SEQ ID NO: 246223 - DNA, 54 bp, Artificial
  Synthetic oligonucleotide
aaattgcaccacagttattatgggccaagcgtcttggtaacggagatatgatga

SEQ ID NO: 246224 - DNA, 54 bp, Artificial
  Synthetic oligonucleotide
ttgttgtccgaagcgttaaccatgctaattaaattgattctctatttagcaatg

SEQ ID NO: 246225 - DNA, 54 bp, Artificial
  Synthetic oligonucleotide
cctcaccacgattatggacgtgggggccgcggatggcgtgacttatggcaagat

SEQ ID NO: 246226 - DNA, 54 bp, Artificial
  Synthetic oligonucleotide
ttgtcatgttgagggtattcgtcgtcgcggtttcaaggcatacctcaaatcttt

SEQ ID NO: 246227 - DNA, 54 bp, Artificial
  Synthetic oligonucleotide
aggggcactacgacaccccctatgtgtccactgtccgttatccatggattgaac

SEQ ID NO: 246228 - DNA, 54 bp, Artificial
  Synthetic oligonucleotide
ggccgacatgtgggcatgagctacaggggtctcgatgacagatccagtatggct

SEQ ID NO: 246229 - DNA, 54 bp, Artificial
  Synthetic oligonucleotide
tcgagcacgcaaacaggattcaagccaggtaacagttatcccgattgataagat

SEQ ID NO: 246230 - DNA, 54 bp, Artificial
  Synthetic oligonucleotide
tcgcacctgcagtcttgacggctcagttgattaagagtcaccagtatttggtaa

SEQ ID NO: 246231 - DNA, 55 bp, Artificial
  Synthetic oligonucleotide
ctacgtctatccaaatcttgaaacgaaatcttccgcaaattcctgttttgttcga

SEQ ID NO: 246232 - DNA, 54 bp, Artificial
  Synthetic oligonucleotide
ggattatttctgtctttggcagactatatgaaatatgataagataactggttct

SEQ ID NO: 246233 - DNA, 54 bp, Artificial
  Synthetic oligonucleotide
ggatgtcacacgcttatcgggcccaggcttaggcttccctaaccatgcacagcg

SEQ ID NO: 246234 - DNA, 54 bp, Artificial
  Synthetic oligonucleotide
agcttaggcagcgaggttactatgtatgaggctgcacctgctattttagggcgc

SEQ ID NO: 246235 - DNA, 53 bp, Artificial
  Synthetic oligonucleotide
aaccaaagttaggaacgtcttgttttacaccaacattgagtgtccctcgctta

SEQ ID NO: 246236 - DNA, 54 bp, Artificial
  Synthetic oligonucleotide
agctgacgcgaccaatgtggctggagtcatcattcctaaacaccgtgcggtcgg

SEQ ID NO: 246237 - DNA, 54 bp, Artificial
  Synthetic oligonucleotide
cgaaggtatgaaggttacgaactcaagcaacgcttaacccaagttttagcacga

SEQ ID NO: 246238 - DNA, 54 bp, Artificial
  Synthetic oligonucleotide
ccgacccccaaggtgtctgcgtttgaacagctagaacattaaccccacgcgcct

SEQ ID NO: 246239 - DNA, 54 bp, Artificial
  Synthetic oligonucleotide
gacaaggccacaaccattagagaaacggcaatcatataaggtgccataccaatc

SEQ ID NO: 246240 - DNA, 54 bp, Artificial
  Synthetic oligonucleotide
agttacttcttctgagaataagagcgaacgcagtgatgaaaatagtgttcgcga

SEQ ID NO: 246241 - DNA, 54 bp, Artificial
  Synthetic oligonucleotide
aaaatgttgaggggcaagccttgaatagcacgattagtcagctcacaaaatcct

SEQ ID NO: 246242 - DNA, 55 bp, Artificial
  Synthetic oligonucleotide
caggacgaaacgcaacaacagaacgaaacgcaacaacagaacgaaaccgtcagta

SEQ ID NO: 246243 - DNA, 58 bp, Artificial
  Synthetic oligonucleotide
gcagtcagtccctttgttagtggatacagtctgtcttgtttttaaggcgaacagtcga

SEQ ID NO: 246244 - DNA, 54 bp, Artificial
  Synthetic oligonucleotide
ggggaccccgatgctcatcggcataagagccgcgatatagagggctagggtgcg

SEQ ID NO: 246245 - DNA, 54 bp, Artificial
  Synthetic oligonucleotide
ggggacaagaatagaccagggattgcgccctactgctcctccgattgcttgggc

SEQ ID NO: 246246 - DNA, 54 bp, Artificial
  Synthetic oligonucleotide
gacactccccaagaatccgcaatcgacttaatcggcgtaccactttctaccaag

SEQ ID NO: 246247 - DNA, 54 bp, Artificial
  Synthetic oligonucleotide
gggcaaggtctggacgacagacggcatttatcgtgagactcctgctaagctccg

SEQ ID NO: 246248 - DNA, 54 bp, Artificial
  Synthetic oligonucleotide
agtccgactaacatgtaaaacatacgaccgctaccacccgtatgaggtagtgcc

SEQ ID NO: 246249 - DNA, 54 bp, Artificial
  Synthetic oligonucleotide
tttacaagaagttatagaatggataaaagaaactggatgttctgaatatagaga

SEQ ID NO: 246250 - DNA, 54 bp, Artificial
  Synthetic oligonucleotide
tcccacccgctgcattagtcacaagcacactgtggcaagccaatgctctcatga

SEQ ID NO: 246251 - DNA, 54 bp, Artificial
  Synthetic oligonucleotide
tttagctatacgtccccagctttcaacattaccatagcctctaggcaggctgaa

SEQ ID NO: 246252 - DNA, 53 bp, Artificial
  Synthetic oligonucleotide
aaccgcagtataaagtgcttgttctgccggtgtaagttggtgccctggtgcca

SEQ ID NO: 246253 - DNA, 53 bp, Artificial
  Synthetic oligonucleotide
aagaattgggcatcgcagccttaccacaaccgtggttgccaccattagctagc

SEQ ID NO: 246254 - DNA, 59 bp, Artificial
  Synthetic oligonucleotide
ctacttccgccataatagcaagtaagacgtcaaaaatgtaatgcaataagctcacctcc

SEQ ID NO: 246255 - DNA, 53 bp, Artificial
  Synthetic oligonucleotide
aaaatgggctgccatagcgattgtttccacatcggtagctggattgctagagt

SEQ ID NO: 246256 - DNA, 49 bp, Artificial
  Synthetic oligonucleotide
aaaaaaaacaggccttagccttagagccccaagggtttagcggttacga

SEQ ID NO: 246257 - DNA, 53 bp, Artificial
  Synthetic oligonucleotide
caacgcggagctgccgattcatgtgacggttgcttctggctttcccaagggag

SEQ ID NO: 246258 - DNA, 53 bp, Artificial
  Synthetic oligonucleotide
aatgcagtatcgaatatactatatgaggcatcgccatttgtgccttttagaga

SEQ ID NO: 246259 - DNA, 53 bp, Artificial
  Synthetic oligonucleotide
aaaatgctatggatgatggggctgtgttaggctttcaagtcgagtatcattca

SEQ ID NO: 246260 - DNA, 53 bp, Artificial
  Synthetic oligonucleotide
aaggcagcactacacaatgctgacgatatggctagaagtatcggacgcctggc

SEQ ID NO: 246261 - DNA, 53 bp, Artificial
  Synthetic oligonucleotide
aaggggttaccaagtccatgaggtcagcaccgagaatctcacgcgcagcctga

SEQ ID NO: 246262 - DNA, 53 bp, Artificial
  Synthetic oligonucleotide
ttcgaattatccgggacctcatcaaccactattaaaggcatagagatcattcg

SEQ ID NO: 246263 - DNA, 53 bp, Artificial
  Synthetic oligonucleotide
ttgcctcgcttggtcggacaggggattatgcttagccgtcaggctgggggaat

SEQ ID NO: 246264 - DNA, 53 bp, Artificial
  Synthetic oligonucleotide
ttggtgggccggcaacagcgggaaccttgatatttacggcagcttggcaaggg

SEQ ID NO: 246265 - DNA, 60 bp, Artificial
  Synthetic oligonucleotide
cttagggctctaagcgatttatgccgagaaaactcttgctaggaagctatgcgaaataga

SEQ ID NO: 246266 - DNA, 53 bp, Artificial
  Synthetic oligonucleotide
aatcgctcctgcgaaacagccattgttcagctacttgagtatttaaacgatgg

SEQ ID NO: 246267 - DNA, 53 bp, Artificial
  Synthetic oligonucleotide
aaaaccaagccaggcattagcctacgcaagtgctttaaaacaaagcaccaaaa

SEQ ID NO: 246268 - DNA, 53 bp, Artificial
  Synthetic oligonucleotide
ttctcgctcttctgcaatattcaccgacaaggtacctagaccaaccggtcccc

SEQ ID NO: 246269 - DNA, 53 bp, Artificial
  Synthetic oligonucleotide
tttctcatagtggacctctagcaacagttttgttgttattcgtcataccttta

SEQ ID NO: 246270 - DNA, 53 bp, Artificial
  Synthetic oligonucleotide
ttgttaccgagtggaagatgaatactttttaacctatgtgtatacacacatag

SEQ ID NO: 246271 - DNA, 52 bp, Artificial
  Synthetic oligonucleotide
aaagctcataatttaagttttaagcacgatcaacccttaatcggataaaaat

SEQ ID NO: 246272 - DNA, 53 bp, Artificial
  Synthetic oligonucleotide
agcgtacagactgcagcaagcaatgcgcaggcgacagcgaacacagccgtctc

SEQ ID NO: 246273 - DNA, 53 bp, Artificial
  Synthetic oligonucleotide
agcgtggcgagctgaatagcgaagccaagcataagacggttgctgaatttaag

SEQ ID NO: 246274 - DNA, 53 bp, Artificial
  Synthetic oligonucleotide
tcgcttcgttccaacttataagaacgctcaagttcttcgcgctgtgccttacg

SEQ ID NO: 246275 - DNA, 53 bp, Artificial
  Synthetic oligonucleotide
aggggcttatgagaaaattcgctttaagggtttggactatgaatctgcccatg

SEQ ID NO: 246276 - DNA, 60 bp, Artificial
  Synthetic oligonucleotide
gactgcaagcacgtgggttagtcagcaactgctttttagttgtcgtctcgatgatctaac

SEQ ID NO: 246277 - DNA, 53 bp, Artificial
  Synthetic oligonucleotide
agggtacgactgctcgttccctctatggcgcaccgacccactgggctcatagc

SEQ ID NO: 246278 - DNA, 53 bp, Artificial
  Synthetic oligonucleotide
tcctagtcaaggcgtttaccgcgacttagtcttaaaccctcaaaaccgctctg

SEQ ID NO: 246279 - DNA, 53 bp, Artificial
  Synthetic oligonucleotide
agtaaaggccaactggaggctcccccaactcgcagccacctggataatcggct

SEQ ID NO: 246280 - DNA, 53 bp, Artificial
  Synthetic oligonucleotide
agtattattccagggacaagtcgttcaggtgctacaattctaggggcaattat

SEQ ID NO: 246281 - DNA, 50 bp, Artificial
  Synthetic oligonucleotide
tagcgagcctaaagaggtaaaccatagtaaaccccttaaaacggataaaa

SEQ ID NO: 246282 - DNA, 53 bp, Artificial
  Synthetic oligonucleotide
tcccgtatgacgaatagccgtgcgccgccgttttagagatgacttgttgcggc

SEQ ID NO: 246283 - DNA, 53 bp, Artificial
  Synthetic oligonucleotide
tagcggttgctgaaactcctcttgtcaagaagaaccactaaatctctgtcgcg

SEQ ID NO: 246284 - DNA, 53 bp, Artificial
  Synthetic oligonucleotide
tcccacatagcgatccaacgaatgctgggtcaagtccagcgtcacagtggcta

SEQ ID NO: 246285 - DNA, 53 bp, Artificial
  Synthetic oligonucleotide
tccattcaatcctcgtaagtctttcagttcgtcataaagagggtaaacatggg

SEQ ID NO: 246286 - DNA, 53 bp, Artificial
  Synthetic oligonucleotide
agttaatagctcgttaattgtattaaaaagacacccttcaaaaatatcactca

SEQ ID NO: 246287 - DNA, 56 bp, Artificial
  Synthetic oligonucleotide
cttcaagtgaaacagtccgagatatcgaggaagctgttttttacaaagagggtctg

SEQ ID NO: 246288 - DNA, 53 bp, Artificial
  Synthetic oligonucleotide
tcatttgaatctccgaccttctatcgtttagatactcagtctcttactgaggc

SEQ ID NO: 246289 - DNA, 53 bp, Artificial
  Synthetic oligonucleotide
agttattaataagcacaaacaaatgtttgctggtactaatggaggagtccttg

SEQ ID NO: 246290 - DNA, 53 bp, Artificial
  Synthetic oligonucleotide
agttgggtgaaagtgccctgcatctaacaaaatcatcttaccacgagtcaagc

SEQ ID NO: 246291 - DNA, 53 bp, Artificial
  Synthetic oligonucleotide
tcagttagactcgttggttcaagagtcagtttctgcgagccaatccgagtcgt

SEQ ID NO: 246292 - DNA, 53 bp, Artificial
  Synthetic oligonucleotide
atgctggataagctactaaggcaccagtggttactataactttaggcttctct

SEQ ID NO: 246293 - DNA, 53 bp, Artificial
  Synthetic oligonucleotide
atgctcgtctgggggatatgacggcccaggattttgcagagaggctgagtcgg

SEQ ID NO: 246294 - DNA, 53 bp, Artificial
  Synthetic oligonucleotide
ataaaggcagctgccaaacgtcctagacctccattgcctagagccatgtcgtg

SEQ ID NO: 246295 - DNA, 53 bp, Artificial
  Synthetic oligonucleotide
ataagcttgaccaactccataaccataattccatgtcccaccggctacactaa

SEQ ID NO: 246296 - DNA, 53 bp, Artificial
  Synthetic oligonucleotide
tcaatgcgactccaagctggacggtgctctatgtggggatagcagtagcggcc

SEQ ID NO: 246297 - DNA, 53 bp, Artificial
  Synthetic oligonucleotide
taggttcttcgccctgttgaatctggatagggttttgtcagcgtcaatctttt

SEQ ID NO: 246298 - DNA, 60 bp, Artificial
  Synthetic oligonucleotide
cttcatgacatctagaatgcggtggttaacagaatcgattaaaatcatgctcattccgct

SEQ ID NO: 246299 - DNA, 53 bp, Artificial
  Synthetic oligonucleotide
atagtccgtccatgacggtacgatggtcaggtcatgagtgatgcgtgccggtt

SEQ ID NO: 246300 - DNA, 53 bp, Artificial
  Synthetic oligonucleotide
tagtcagatgtgaaaacggatggcgaggattatcgtatagaatctcttgacgc

SEQ ID NO: 246301 - DNA, 53 bp, Artificial
  Synthetic oligonucleotide
atatgttactgacttcggtcatcttatccggcaacctcaaaacggtgttttga

SEQ ID NO: 246302 - DNA, 53 bp, Artificial
  Synthetic oligonucleotide
atcgatagagggattggccgtgtagagtccatcgacatctgtcaagagcacta

SEQ ID NO: 246303 - DNA, 53 bp, Artificial
  Synthetic oligonucleotide
acaagccaagctatgttgccgctcaaatgcaattttgtcatacgtcaaacggt

SEQ ID NO: 246304 - DNA, 53 bp, Artificial
  Synthetic oligonucleotide
acaatatgaccgaagacgcgaacagtacgaattgcaggcggataggaatatga

SEQ ID NO: 246305 - DNA, 53 bp, Artificial
  Synthetic oligonucleotide
acagataagatgtatcgtgcaccagaaaatcgtcttaaaatttggtaatcatt

SEQ ID NO: 246306 - DNA, 53 bp, Artificial
  Synthetic oligonucleotide
ttagatgatgtctgacattgcaaataccaatcattcgcttatcggactgacga

SEQ ID NO: 246307 - DNA, 53 bp, Artificial
  Synthetic oligonucleotide
ttacttggcgacgcatcataccaagaggagtttgcgtatcaacattaatcact

SEQ ID NO: 246308 - DNA, 53 bp, Artificial
  Synthetic oligonucleotide
ttactcctttgtgagtgattttaaggtggcatagagaaagtcatttcgcgctg

SEQ ID NO: 246309 - DNA, 59 bp, Artificial
  Synthetic oligonucleotide
gacgtacgaaagcaacactacgcttgtttgaggaattgcaaaagggctatcgctctcta

SEQ ID NO: 246310 - DNA, 53 bp, Artificial
  Synthetic oligonucleotide
acatccaaaacggagtggttacaagcattacctcgtcaggtttacgtgataag

SEQ ID NO: 246311 - DNA, 53 bp, Artificial
  Synthetic oligonucleotide
ttaatagtgagaatttgtcatgagtgaagatttaaagaccattcgagagcttg

SEQ ID NO: 246312 - DNA, 53 bp, Artificial
  Synthetic oligonucleotide
tgtcgtatatctgaggttaaatcctcggtgggcacctactactggtgaaccca

SEQ ID NO: 246313 - DNA, 53 bp, Artificial
  Synthetic oligonucleotide
acgattggcgctaaggccttaatcagattgccagcgtgagctcttttgtcctt

SEQ ID NO: 246314 - DNA, 53 bp, Artificial
  Synthetic oligonucleotide
tggttgctccactgaaagggcgcgtggttcttggttttgacccagcctttcgt

SEQ ID NO: 246315 - DNA, 53 bp, Artificial
  Synthetic oligonucleotide
acgcttggttcgcccggcgatttgcacccccatttgacgaagaggaatcgtta

SEQ ID NO: 246316 - DNA, 53 bp, Artificial
  Synthetic oligonucleotide
acggaaagtgttgccataaaagcatttaatctatcgtcagattctaaaccgat

SEQ ID NO: 246317 - DNA, 53 bp, Artificial
  Synthetic oligonucleotide
attttgtatgcgactaatagtccatctcgctccggaatgtacgaaggtaaata

SEQ ID NO: 246318 - DNA, 53 bp, Artificial
  Synthetic oligonucleotide
acggcctcaatcatacgtttgaaattatcgctttgaaagagagccgttggatt

SEQ ID NO: 246319 - DNA, 53 bp, Artificial
  Synthetic oligonucleotide
actaattgccatggatacaccacaagccgtgttttctcgaccagatctagaaa

SEQ ID NO: 246320 - DNA, 51 bp, Artificial
  Synthetic oligonucleotide
cttccgccaaagtagcccgtaattacccctaagatatttcctacaactaaa

SEQ ID NO: 246321 - DNA, 53 bp, Artificial
  Synthetic oligonucleotide
actacagtaggcgtacaggattcgtggctgtctgtcccattacacacggccaa

SEQ ID NO: 246322 - DNA, 53 bp, Artificial
  Synthetic oligonucleotide
actgagggttgccgcaatggtcaactggagattggtataaggagcgcgcttca

SEQ ID NO: 246323 - DNA, 53 bp, Artificial
  Synthetic oligonucleotide
actggaatgctgaaatttcggcgcgtgtgattgtcatcgatgtccttcaagca

SEQ ID NO: 246324 - DNA, 53 bp, Artificial
  Synthetic oligonucleotide
tgagtgacatacttgcaatctcacgcgcctggtccacccctggaaaggcacga

SEQ ID NO: 246325 - DNA, 53 bp, Artificial
  Synthetic oligonucleotide
tactccaagcaagcgaagggcctctttgagaacgactgcggttgcgtagctga

SEQ ID NO: 246326 - DNA, 53 bp, Artificial
  Synthetic oligonucleotide
tactccaggtcgtgatccgcggggctggacggttactatcgcccatttggtgt

SEQ ID NO: 246327 - DNA, 53 bp, Artificial
  Synthetic oligonucleotide
tctttgccagattcggcctgcctctactgcagcgatgacagcacattgcggtt

SEQ ID NO: 246328 - DNA, 53 bp, Artificial
  Synthetic oligonucleotide
agcgcccgccagaaaaagcatagccccacctagccaggggttaagcgtcagtg

SEQ ID NO: 246329 - DNA, 53 bp, Artificial
  Synthetic oligonucleotide
attggctgcccaaatatgacgagttgatgacctaccaatgattttccctattt

SEQ ID NO: 246330 - DNA, 53 bp, Artificial
  Synthetic oligonucleotide
ctgtttgtttcaacggtaggcttgtttgctctggtttcggaagcccacgtgtg

SEQ ID NO: 246331 - DNA, 60 bp, Artificial
  Synthetic oligonucleotide
cttctagtaccttttatgatgggacatctttgatgttacagcgaagtagtcaatcttcat

SEQ ID NO: 246332 - DNA, 53 bp, Artificial
  Synthetic oligonucleotide
gggttgatgcctggtcctgtagatagtcctagtctgtcggcaatagaagcggt

SEQ ID NO: 246333 - DNA, 53 bp, Artificial
  Synthetic oligonucleotide
catgggttttaattgactaacatcaagggttaagaccttgtcataaaccgcgt

SEQ ID NO: 246334 - DNA, 53 bp, Artificial
  Synthetic oligonucleotide
gactagcctccattgaggctctgaaggcgactcttccagctgggaccgtttcg

SEQ ID NO: 246335 - DNA, 53 bp, Artificial
  Synthetic oligonucleotide
gcggtacgatagccgcatttggaccaatgcttgttcctacgattagatgagag

SEQ ID NO: 246336 - DNA, 53 bp, Artificial
  Synthetic oligonucleotide
gcggtggtaaggtgacgggcgctcgcttcctcttctataaaggcctcggcgct

SEQ ID NO: 246337 - DNA, 53 bp, Artificial
  Synthetic oligonucleotide
cccgctccattgacaccagctgagaaccaggcgatgcttcctacggcaggatt

SEQ ID NO: 246338 - DNA, 53 bp, Artificial
  Synthetic oligonucleotide
cagattcaggcttttgcggatgtcttgcgtaactatcctgtctttgtcctatc

SEQ ID NO: 246339 - DNA, 53 bp, Artificial
  Synthetic oligonucleotide
gacgatcctcagttgaaccatgaacaactttttcagccaagaaagttgccgca

SEQ ID NO: 246340 - DNA, 53 bp, Artificial
  Synthetic oligonucleotide
gtggcatgaggtttcgaatgtcccctaccatctcagtaacaagtatcatagcg

SEQ ID NO: 246341 - DNA, 53 bp, Artificial
  Synthetic oligonucleotide
gtgggacttgctcgtgaggggatcgctatggaagcgcaaaccctgcctgatgc

SEQ ID NO: 246342 - DNA, 58 bp, Artificial
  Synthetic oligonucleotide
cttctgattggtcgccccgtaaatcacctggggaatccgagctagaccaatggcacca

SEQ ID NO: 246343 - DNA, 53 bp, Artificial
  Synthetic oligonucleotide
ctgcccttcttggcgttacagcgtggcgaatgtccgctgcgtcaggtgtttca

SEQ ID NO: 246344 - DNA, 53 bp, Artificial
  Synthetic oligonucleotide
cggcaacactcctgccgtaatttcacgcggaaccccatggcgagctgctgtca

SEQ ID NO: 246345 - DNA, 53 bp, Artificial
  Synthetic oligonucleotide
cgttatctagtcctaagccacgcggagtagttggatcgattaaccacaagaaa

SEQ ID NO: 246346 - DNA, 53 bp, Artificial
  Synthetic oligonucleotide
gtgtatctgccgtgtatccaagagatctaaattcgttattatattacttacct

SEQ ID NO: 246347 - DNA, 53 bp, Artificial
  Synthetic oligonucleotide
cggatgtaattcccataaggttgagcaattgaatcgttctgaaatcgtttccc

SEQ ID NO: 246348 - DNA, 53 bp, Artificial
  Synthetic oligonucleotide
ggtccaaaccaaactgtacaagagctgtctccgttggatccccaatcagcttg

SEQ ID NO: 246349 - DNA, 53 bp, Artificial
  Synthetic oligonucleotide
cttgattgcaaagcaatctaagtaactaacgccaaatcctattcggactttgg

SEQ ID NO: 246350 - DNA, 53 bp, Artificial
  Synthetic oligonucleotide
cttgcgataaggacacgaagtctagaaaatcagcgaaaggttacttgctgaca

SEQ ID NO: 246351 - DNA, 53 bp, Artificial
  Synthetic oligonucleotide
cacgggtaaagacagctttagacgacaattttccgtccaccataggtactact

SEQ ID NO: 246352 - DNA, 53 bp, Artificial
  Synthetic oligonucleotide
gagtcctttcatttggagctcgcttattggatagaatctccttagattccctc

SEQ ID NO: 246353 - DNA, 59 bp, Artificial
  Synthetic oligonucleotide
taatgtatcggttgaagggtcttgggtactagcaatcacagagacaccgaccgagcgcc

SEQ ID NO: 246354 - DNA, 60 bp, Artificial
  Synthetic oligonucleotide
gacggatactacctatcccaacagttgaatggacggactatgacgataaagtcatgatac

SEQ ID NO: 246355 - DNA, 53 bp, Artificial
  Synthetic oligonucleotide
gggctggtcagccctctaaagcccgcaacgtttcaagtctcgccctgaaactt

SEQ ID NO: 246356 - DNA, 53 bp, Artificial
  Synthetic oligonucleotide
cgtcttggacaaagggtaggcttctttgatataggactcgattcctgggttgt

SEQ ID NO: 246357 - DNA, 53 bp, Artificial
  Synthetic oligonucleotide
cgtgaaaggcggacggagagcggaacaagtggaaagctaccggaatccgtcaa

SEQ ID NO: 246358 - DNA, 53 bp, Artificial
  Synthetic oligonucleotide
ccctgctaccagtcaagcacaacaagcttatgctgttactgagacaacttata

SEQ ID NO: 246359 - DNA, 53 bp, Artificial
  Synthetic oligonucleotide
cgtatgaaccttcagttgaagtaactgcaaaaggttggttgataacgagacga

SEQ ID NO: 246360 - DNA, 53 bp, Artificial
  Synthetic oligonucleotide
cagtttctctatacctaattcaaaaacactcacaaaggagcgtatttacatgc

SEQ ID NO: 246361 - DNA, 53 bp, Artificial
  Synthetic oligonucleotide
gagtggtcaagttagtggtactgttggtcagagtaaacctattgaagcactaa

SEQ ID NO: 246362 - DNA, 53 bp, Artificial
  Synthetic oligonucleotide
gcgattagctccacctgcataagaaccacctgtacgcaactctgttccatcaa

SEQ ID NO: 246363 - DNA, 53 bp, Artificial
  Synthetic oligonucleotide
ctgctcgtgtccgccagattgtcaacgttaagcaccccgataatgtgatcttc

SEQ ID NO: 246364 - DNA, 53 bp, Artificial
  Synthetic oligonucleotide
gagcttcaaaggctactgttgtacctttcggaagatctgataagttaccaata

SEQ ID NO: 246365 - DNA, 53 bp, Artificial
  Synthetic oligonucleotide
cttcttggaggtctaaatcctgcagttttaccttgggttgtattgggtatagt

SEQ ID NO: 246366 - DNA, 53 bp, Artificial
  Synthetic oligonucleotide
gcgattggcaccacccgcgtaggaaccacctgtgcgcaactctgtcccatcca

SEQ ID NO: 246367 - DNA, 53 bp, Artificial
  Synthetic oligonucleotide
gccgagtaggcagtcctgctgacaagcaccctgcggagcagtctgcatgaaat

SEQ ID NO: 246368 - DNA, 53 bp, Artificial
  Synthetic oligonucleotide
gcgcccaaagctaagctatcatccaattggataggacccattgaaatcctttg

SEQ ID NO: 246369 - DNA, 53 bp, Artificial
  Synthetic oligonucleotide
ccggccgttgtgactgcaacaaccgctttgtctggaaaggagctggcttattc

SEQ ID NO: 246370 - DNA, 53 bp, Artificial
  Synthetic oligonucleotide
gggttatctcaacttgggctgagaacacaccatgtaatatccacttgcacggt

SEQ ID NO: 246371 - DNA, 53 bp, Artificial
  Synthetic oligonucleotide
gcgctacgcagagccacgtttggggcaagtcttagatgcgcgtgtcattgggt

SEQ ID NO: 246372 - DNA, 53 bp, Artificial
  Synthetic oligonucleotide
ctgttcaaaaatctaagtatggttcaaatggttgtaactgtcatggaaaacac

SEQ ID NO: 246373 - DNA, 53 bp, Artificial
  Synthetic oligonucleotide
ctattgtcgtcgggattgtagctggagccgtggggtgtttcattattctacgc

SEQ ID NO: 246374 - DNA, 53 bp, Artificial
  Synthetic oligonucleotide
ctcgtacctatgacttttcagctggagatgtaggctatgtacccaatgtagcg

SEQ ID NO: 246375 - DNA, 53 bp, Artificial
  Synthetic oligonucleotide
gaatgataccttggaataccttgcaggacagttcgactccaatgtccgcgact

SEQ ID NO: 246376 - DNA, 57 bp, Artificial
  Synthetic oligonucleotide
gacgaaatggtagaaagtgttgatttaacagaaaccagaaatagagacatgtataac

SEQ ID NO: 246377 - DNA, 53 bp, Artificial
  Synthetic oligonucleotide
ccaggtggaggtttatggattggtagtcctggcatggaaaccaggaagataag

SEQ ID NO: 246378 - DNA, 53 bp, Artificial
  Synthetic oligonucleotide
ctcgggtgaagggtcacaatactagggctctgtcggtcaattgtaatggcgtc

SEQ ID NO: 246379 - DNA, 53 bp, Artificial
  Synthetic oligonucleotide
ccaatttgccacttgggattggacttacggacaatcaccagaatataccatta

SEQ ID NO: 246380 - DNA, 53 bp, Artificial
  Synthetic oligonucleotide
ccaggtccaagcacaatcatgtcgctattcataatagcattgacgactttacg

SEQ ID NO: 246381 - DNA, 53 bp, Artificial
  Synthetic oligonucleotide
cgagtagcaggaacgcgcaccaacggtgaacggttacgaccagcccaagcgat

SEQ ID NO: 246382 - DNA, 53 bp, Artificial
  Synthetic oligonucleotide
cgatagtaaccgcccagccccgcggatcacgacctggggtagacactgtcatc

SEQ ID NO: 246383 - DNA, 53 bp, Artificial
  Synthetic oligonucleotide
gctcgcttattgcatgctcctatccctgagagagttaactctttaactggttc

SEQ ID NO: 246384 - DNA, 53 bp, Artificial
  Synthetic oligonucleotide
gcttctcatcactatgaacgatggaattgatcccgcatctggcaagcgttttg

SEQ ID NO: 246385 - DNA, 53 bp, Artificial
  Synthetic oligonucleotide
cttgcttgggggacagcggcccgtaatcgctacgtttcttgccatggtggctt

SEQ ID NO: 246386 - DNA, 53 bp, Artificial
  Synthetic oligonucleotide
gctcctatctgccaaaggacaactcacgtgactttgctagcgatgagtctatc

SEQ ID NO: 246387 - DNA, 59 bp, Artificial
  Synthetic oligonucleotide
cttgcgattaggacacgaagtcgagaaatcagcgaaaggttacttgctgacaagaggaa

SEQ ID NO: 246388 - DNA, 53 bp, Artificial
  Synthetic oligonucleotide
cgaaattgtaaatggactagcagactatgctcgtaactacgctcaagctatca

SEQ ID NO: 246389 - DNA, 53 bp, Artificial
  Synthetic oligonucleotide
gaccgatggtggacacggctgatggagctaaatgtttcgggattgacacggtt

SEQ ID NO: 246390 - DNA, 53 bp, Artificial
  Synthetic oligonucleotide
cggagactttgggacgtacgattccagctggtcaggtgacggggatgtcggct

SEQ ID NO: 246391 - DNA, 53 bp, Artificial
  Synthetic oligonucleotide
gcttttcgtacgacacagagcagtcacgacccgtcaactcatagttgaggtgc

SEQ ID NO: 246392 - DNA, 53 bp, Artificial
  Synthetic oligonucleotide
ccagcatagcctttacgggcaggctcttgggaagagcgccacgtgttttcgta

SEQ ID NO: 246393 - DNA, 53 bp, Artificial
  Synthetic oligonucleotide
cacgcagtaccctcgttttggcaatccgacgccacgagtggcagaaacaccag

SEQ ID NO: 246394 - DNA, 53 bp, Artificial
  Synthetic oligonucleotide
ccagacgcagcagctattggtcgtctcggtttagacctgccagcccagtccat

SEQ ID NO: 246395 - DNA, 53 bp, Artificial
  Synthetic oligonucleotide
ctcacctcctttcacgaaccataggaacgcaatcggtaaccgagagcgatact

SEQ ID NO: 246396 - DNA, 53 bp, Artificial
  Synthetic oligonucleotide
ctgagctgtgtcactcatggcacggataaccaagaatggcttacctgtattga

SEQ ID NO: 246397 - DNA, 53 bp, Artificial
  Synthetic oligonucleotide
gaccgttgtccccgctaattgcacaggcgtcaagttggcggttggcgtaacaa

SEQ ID NO: 246398 - DNA, 56 bp, Artificial
  Synthetic oligonucleotide
cttgcgcgtcgctttccttcttgatcacccccgtgaagaagagggtcgattggttg

SEQ ID NO: 246399 - DNA, 53 bp, Artificial
  Synthetic oligonucleotide
gtatccatttgattcgtttgctctaatcggctttcagtagtggtcggtgtcac

SEQ ID NO: 246400 - DNA, 53 bp, Artificial
  Synthetic oligonucleotide
cgttttgtgacagaaaagcgcgaaacgtctttgcggatgatggggaatattct

SEQ ID NO: 246401 - DNA, 53 bp, Artificial
  Synthetic oligonucleotide
cctgcccagtttgtggctttactgttccagagttagagccacgtctcttctca

SEQ ID NO: 246402 - DNA, 53 bp, Artificial
  Synthetic oligonucleotide
cgattatagcgatattatttcgataacttttaccaagtcgataatgccttatt

SEQ ID NO: 246403 - DNA, 52 bp, Artificial
  Synthetic oligonucleotide
gtaacgggtgaagtctttgactatactagttctctcagacaaggtcgcttcc

SEQ ID NO: 246404 - DNA, 52 bp, Artificial
  Synthetic oligonucleotide
agttctccacctgctcataaaatgtttaagtcccttgccaaactgcctcaaa

SEQ ID NO: 246405 - DNA, 52 bp, Artificial
  Synthetic oligonucleotide
agttgcacttatatcgttttaatcttctagcactattcttttagcatatata

SEQ ID NO: 246406 - DNA, 52 bp, Artificial
  Synthetic oligonucleotide
tatgattctatattctcaaaacgatctatatcttgaaagaggtagtctatcg

SEQ ID NO: 246407 - DNA, 52 bp, Artificial
  Synthetic oligonucleotide
tatgaatcggattaccatgttcccaagacgaagttgcacgactctcgacttg

SEQ ID NO: 246408 - DNA, 52 bp, Artificial
  Synthetic oligonucleotide
tgttgcagtgttatcagctccagtttgttggcctggtaaaacttggtcagct

SEQ ID NO: 246409 - DNA, 56 bp, Artificial
  Synthetic oligonucleotide
gaccaactaaggcggcgaatgcctctgagaagctctaaaaacggttttgaggcgag

SEQ ID NO: 246410 - DNA, 52 bp, Artificial
  Synthetic oligonucleotide
gtaacatgggtcgttcagctaccggcgtccgtggtgttaaattacgggacga

SEQ ID NO: 246411 - DNA, 52 bp, Artificial
  Synthetic oligonucleotide
tatttgaagtaccagccacgttaattaagtagttttctgagttgctatttgg

SEQ ID NO: 246412 - DNA, 52 bp, Artificial
  Synthetic oligonucleotide
ggtcttcatctgttaatcgtccacaaatagagcaataggtcaattctcgctt

SEQ ID NO: 246413 - DNA, 52 bp, Artificial
  Synthetic oligonucleotide
gccacactcaggagcgaatgctggagcttttatcgaatggacataatctctt

SEQ ID NO: 246414 - DNA, 52 bp, Artificial
  Synthetic oligonucleotide
tcaaacgtaatgatggttcaagagatgatattatattagcattacctgtaag

SEQ ID NO: 246415 - DNA, 52 bp, Artificial
  Synthetic oligonucleotide
atagtcgtccagatacttgagacagtagctagaatgctattccacaatccag

SEQ ID NO: 246416 - DNA, 52 bp, Artificial
  Synthetic oligonucleotide
cccatcgcttcctataaaggctgaggttgggtaagatcggacaccataggcc

SEQ ID NO: 246417 - DNA, 52 bp, Artificial
  Synthetic oligonucleotide
ccccggaattaccaaactacctgtttgcgttccaccggttacactatcatca

SEQ ID NO: 246418 - DNA, 52 bp, Artificial
  Synthetic oligonucleotide
ggtatcctttaaagcacgcttgagtaggaacgttaaagggcgtcctgtcacc

SEQ ID NO: 246419 - DNA, 52 bp, Artificial
  Synthetic oligonucleotide
ggtgaggccaagtaagagacatagtcggcaacatcagccggagtctgtacac

SEQ ID NO: 246420 - DNA, 60 bp, Artificial
  Synthetic oligonucleotide
gacatcttcgtaagattttatgatatccaagatattaagagaattatctgaagttattgt

SEQ ID NO: 246421 - DNA, 52 bp, Artificial
  Synthetic oligonucleotide
tcaaggactggtatactaagtatatcaagtagtccgtatatatctttgtcag

SEQ ID NO: 246422 - DNA, 52 bp, Artificial
  Synthetic oligonucleotide
atacggagtactcgctcaagctcaaaagggatataaagagttatggcaacaa

SEQ ID NO: 246423 - DNA, 52 bp, Artificial
  Synthetic oligonucleotide
ttaagggagtaactttggtatcgtcagggactaatagggtactggtgcaacc

SEQ ID NO: 246424 - DNA, 52 bp, Artificial
  Synthetic oligonucleotide
cccgctttgccagtccgacccagcgcgtgcaatattcaggcagtccggtcgc

SEQ ID NO: 246425 - DNA, 52 bp, Artificial
  Synthetic oligonucleotide
cccgtctattatcctttcgcacgtacaatcagactaaacgaccgtcggttgg

SEQ ID NO: 246426 - DNA, 52 bp, Artificial
  Synthetic oligonucleotide
ccatgcttaagtgggctggcctcggtattgcaatggctaacgcgacgtccca

SEQ ID NO: 246427 - DNA, 52 bp, Artificial
  Synthetic oligonucleotide
ttagaaatcaaagcaacacgtggtttattgatgccgcgaacattttcagcgt

SEQ ID NO: 246428 - DNA, 52 bp, Artificial
  Synthetic oligonucleotide
tattatctaatatctacgctttgttcgtgttacagtcaatgggagcgagggg

SEQ ID NO: 246429 - DNA, 52 bp, Artificial
  Synthetic oligonucleotide
acttccagagtacacaggcgcagtagcaacggtaggcgaccaagccgctcca

SEQ ID NO: 246430 - DNA, 52 bp, Artificial
  Synthetic oligonucleotide
tcgagccttcgttgggggcttggtcccctctagtggatagggtctgcccaac

SEQ ID NO: 246431 - DNA, 60 bp, Artificial
  Synthetic oligonucleotide
cttgtgggaaagaacatcctcagcctggcttgattgtccatactgatcaagggagtcaat

SEQ ID NO: 246432 - DNA, 52 bp, Artificial
  Synthetic oligonucleotide
tgatgtttatttgcaaggcgcaggccaattctatgctttgagccagcatctt

SEQ ID NO: 246433 - DNA, 52 bp, Artificial
  Synthetic oligonucleotide
gctagcacagcaaagggcacggccacaaggccccacaccaccgtacacttta

SEQ ID NO: 246434 - DNA, 52 bp, Artificial
  Synthetic oligonucleotide
gctagctgcgtcactgcttgcccagaaaagaccggaaagagggcttgggcaa

SEQ ID NO: 246435 - DNA, 52 bp, Artificial
  Synthetic oligonucleotide
cctttattgcttctttaaaacgggtatgtttcccattatccgatacatcaaa

SEQ ID NO: 246436 - DNA, 52 bp, Artificial
  Synthetic oligonucleotide
tcgcggtagctttgagccaccgttcctagtgaatagtgagccgctagggcga

SEQ ID NO: 246437 - DNA, 52 bp, Artificial
  Synthetic oligonucleotide
tgagccgaccactttgataccgtctagcacagtcttcacgatactgaggtcc

SEQ ID NO: 246438 - DNA, 52 bp, Artificial
  Synthetic oligonucleotide
tcggcttggatccactccgttattacctcatgcgtagtctgccagtcggctc

SEQ ID NO: 246439 - DNA, 52 bp, Artificial
  Synthetic oligonucleotide
tgactagcaacaatcgttttaccattgacagatagttgacttgagccaccac

SEQ ID NO: 246440 - DNA, 52 bp, Artificial
  Synthetic oligonucleotide
cgaatgacttctacccttgtaatcagtccaccacgcatcttatcaatcctaa

SEQ ID NO: 246441 - DNA, 52 bp, Artificial
  Synthetic oligonucleotide
gctcttttccgcccttaggacggataggaaacaggatttattgattaaccga

SEQ ID NO: 246442 - DNA, 60 bp, Artificial
  Synthetic oligonucleotide
ctttcattagacttagaatagaggtcgatccatttataaatcgttgcaggagccatgccg

SEQ ID NO: 246443 - DNA, 52 bp, Artificial
  Synthetic oligonucleotide
agagcaggctcaagatgagattcgtcagctggtggctagggcgacgaacgag

SEQ ID NO: 246444 - DNA, 52 bp, Artificial
  Synthetic oligonucleotide
cgacctaggattagaaaaccgccacgagatggttgttgataattggctatgg

SEQ ID NO: 246445 - DNA, 52 bp, Artificial
  Synthetic oligonucleotide
gctggagcggagaattatcttgtacaatatggttgggatagaaatattgctc

SEQ ID NO: 246446 - DNA, 52 bp, Artificial
  Synthetic oligonucleotide
cgccttcgaaccacgcgcctgctcaggtgacaagtaatgaactgagcccagc

SEQ ID NO: 246447 - DNA, 52 bp, Artificial
  Synthetic oligonucleotide
cgccgatgccattccacactttcacgatccaagcggtccgcaccacgctctt

SEQ ID NO: 246448 - DNA, 52 bp, Artificial
  Synthetic oligonucleotide
tctaatactcttcaaaccacgtcaacgtcgccttgccgtacgtatggttact

SEQ ID NO: 246449 - DNA, 52 bp, Artificial
  Synthetic oligonucleotide
agcgacattttctcacctaagagcttgaacctgcggtattcctcaatctgac

SEQ ID NO: 246450 - DNA, 52 bp, Artificial
  Synthetic oligonucleotide
agccgacctaccaccgaatgaaccgcctcttggtcgctcagggattggccta

SEQ ID NO: 246451 - DNA, 52 bp, Artificial
  Synthetic oligonucleotide
cgatgacaaccgaccactagccaaaggagcaggccactaccgcaatgccaac

SEQ ID NO: 246452 - DNA, 52 bp, Artificial
  Synthetic oligonucleotide
agccagatccttggtaaatacgaccatcaacaggaatttgacgtccggtttt

SEQ ID NO: 246453 - DNA, 59 bp, Artificial
  Synthetic oligonucleotide
ctttcccaaaagcatatcctccactcgcagcagctaaaaataatgttcctaagcctata

SEQ ID NO: 246454 - DNA, 52 bp, Artificial
  Synthetic oligonucleotide
tctcgctcatggaaagtaaggagcgtaaggtacgaaaggcagcttatcaagc

SEQ ID NO: 246455 - DNA, 52 bp, Artificial
  Synthetic oligonucleotide
agcagaaacaggggccaaagacgctggtctgttggagagcagctatgccgta

SEQ ID NO: 246456 - DNA, 52 bp, Artificial
  Synthetic oligonucleotide
agccaaacaagagtccaaacattaatagtaagccaccaattctgcttgagac

SEQ ID NO: 246457 - DNA, 52 bp, Artificial
  Synthetic oligonucleotide
tctgataatgtgatacccgatttcctatttctgcgaacgaagtaagccaaga

SEQ ID NO: 246458 - DNA, 52 bp, Artificial
  Synthetic oligonucleotide
ccgactgtattgctgagagagtcagtaattgagttaacctgtgtaaatgtac

SEQ ID NO: 246459 - DNA, 52 bp, Artificial
  Synthetic oligonucleotide
ggggccgcggatggcgtgacttatggcaagattgcctctctctacttctcat

SEQ ID NO: 246460 - DNA, 52 bp, Artificial
  Synthetic oligonucleotide
agttaatttgatgtattgagcgccttctgtcttcgctagtttaataccgagc

SEQ ID NO: 246461 - DNA, 52 bp, Artificial
  Synthetic oligonucleotide
gggcggactgcccctctcgactccatccaaagctgaggttggaatagcggtt

SEQ ID NO: 246462 - DNA, 52 bp, Artificial
  Synthetic oligonucleotide
gcctttaattatctgatcagaatgatttatgccactaactatgacagggatg

SEQ ID NO: 246463 - DNA, 52 bp, Artificial
  Synthetic oligonucleotide
gggcaagtcctagtgcttgcgctacgtggagacgagaatccatacatgtgac

SEQ ID NO: 246464 - DNA, 60 bp, Artificial
  Synthetic oligonucleotide
taatcgctaaaggtgtgtttgagtctgccatacgtgctatctttccatttgacggaagag

SEQ ID NO: 246465 - DNA, 56 bp, Artificial
  Synthetic oligonucleotide
gaatgattgggcggagtagcgcctgaagtaatagttttcccaagtcagtacttaat

SEQ ID NO: 246466 - DNA, 52 bp, Artificial
  Synthetic oligonucleotide
tgtagagcggatgcaaacctctatccacacattctaccgaagcgtagaagga

SEQ ID NO: 246467 - DNA, 52 bp, Artificial
  Synthetic oligonucleotide
agtctaagaacaaaggtcggtcgctcggagtagagcacgcttcatttgagga

SEQ ID NO: 246468 - DNA, 52 bp, Artificial
  Synthetic oligonucleotide
agtcgggatatcggcctgtagaacccctgtaaaaggaagagcgaccaaacct

SEQ ID NO: 246469 - DNA, 52 bp, Artificial
  Synthetic oligonucleotide
tcccttgggaaagccagaagcaaccgtcacatgaatcggcagctccgcgttg

SEQ ID NO: 246470 - DNA, 52 bp, Artificial
  Synthetic oligonucleotide
acggatagacaaaggcccagctggtaactcgacctccaaatcaagacctagg

SEQ ID NO: 246471 - DNA, 52 bp, Artificial
  Synthetic oligonucleotide
gcgggagcaaggggtgcggatgaaactgtctgctgtttcgggcgttgtcaaa

SEQ ID NO: 246472 - DNA, 52 bp, Artificial
  Synthetic oligonucleotide
cctacacgtatcgtttcaccaatagagacattacccgaatccggctgtaaat

SEQ ID NO: 246473 - DNA, 52 bp, Artificial
  Synthetic oligonucleotide
acgtggtcaaacggtccaacgtcaacggtcctcgggctcgcttggaccttcg

SEQ ID NO: 246474 - DNA, 52 bp, Artificial
  Synthetic oligonucleotide
actaaggctcgtagctgttataaaactggctattgccgttatgtaagcgggt

SEQ ID NO: 246475 - DNA, 52 bp, Artificial
  Synthetic oligonucleotide
aggtgaactggaatggtcacgcgcacttgtcgagcaatacgagcttggcgga

SEQ ID NO: 246476 - DNA, 60 bp, Artificial
  Synthetic oligonucleotide
gaatgaactacaatatagaatatgaggtattgctgagctacaaacattttaagagattgt

SEQ ID NO: 246477 - DNA, 52 bp, Artificial
  Synthetic oligonucleotide
tccgtcgttctgctcgctctccacaatgttgccatgggtggcagtctctggg

SEQ ID NO: 246478 - DNA, 52 bp, Artificial
  Synthetic oligonucleotide
actagtctcctttatcgggactattcttttgaccagttccgtctatgcaaca

SEQ ID NO: 246479 - DNA, 52 bp, Artificial
  Synthetic oligonucleotide
ggcgagccaaatggcggatgcgagcaatataccccgcgcgctcagtgacaga

SEQ ID NO: 246480 - DNA, 52 bp, Artificial
  Synthetic oligonucleotide
cctcataggtcattttagtccctcctttgtaactgttaaggtaggagaaggc

SEQ ID NO: 246481 - DNA, 52 bp, Artificial
  Synthetic oligonucleotide
actgcgtaaagggccgcaagggatggccccttgtcatcttgtaccccacgtc

SEQ ID NO: 246482 - DNA, 52 bp, Artificial
  Synthetic oligonucleotide
cctgacttgaccgctagagacattagtaagctcatgccgcagagcatgataa

SEQ ID NO: 246483 - DNA, 52 bp, Artificial
  Synthetic oligonucleotide
tgccaatgaaagacggaaaactatccagtaagacggtatttactcgtgagaa

SEQ ID NO: 246484 - DNA, 52 bp, Artificial
  Synthetic oligonucleotide
aggcagccactattctcgaagcgcgcccttacgtagcggggacactagacga

SEQ ID NO: 246485 - DNA, 52 bp, Artificial
  Synthetic oligonucleotide
ggccatatcaggtcgagtcttaccacgaaacttacagtaacgtttgaatgct

SEQ ID NO: 246486 - DNA, 52 bp, Artificial
  Synthetic oligonucleotide
actggttccaaatcgtgcagaaccgtattcttccccttctcgatagaccttc

SEQ ID NO: 246487 - DNA, 55 bp, Artificial
  Synthetic oligonucleotide
cttttggtggaacaatcaagtaacttatcgaaaatttcgtatagagatttagata

SEQ ID NO: 246488 - DNA, 52 bp, Artificial
  Synthetic oligonucleotide
cacgtcccatcgtagccagcacgacaggcatcacactccccacaaccatggg

SEQ ID NO: 246489 - DNA, 52 bp, Artificial
  Synthetic oligonucleotide
taccgtttgagctttcagcttgcaccttggctggtgttaccgcgccagtgta

SEQ ID NO: 246490 - DNA, 52 bp, Artificial
  Synthetic oligonucleotide
cactcaaggtctcttacacgcctatggtagatattcgaacagtcaaagagac

SEQ ID NO: 246491 - DNA, 52 bp, Artificial
  Synthetic oligonucleotide
tacgataaacaccgatgagaagtccgataaagagaccgacaactgtaccaat

SEQ ID NO: 246492 - DNA, 52 bp, Artificial
  Synthetic oligonucleotide
gtgccgcccttggaaggtttgtggacaagccagacagctccaaaggccaatg

SEQ ID NO: 246493 - DNA, 52 bp, Artificial
  Synthetic oligonucleotide
atttgacgaagttgcagctgagctcgagatgaaccaagggttccgtaagaag

SEQ ID NO: 246494 - DNA, 52 bp, Artificial
  Synthetic oligonucleotide
atttcactagtatctggttcagctgtcgttccttcttttatcggagcaacta

SEQ ID NO: 246495 - DNA, 52 bp, Artificial
  Synthetic oligonucleotide
gtgcatggcgcacgacataaccaggcacttcgcggtcaactgacaagcagcc

SEQ ID NO: 246496 - DNA, 52 bp, Artificial
  Synthetic oligonucleotide
gtgactagtcgtacttttgatgtggctagttacttgcggactcgtggtagcg

SEQ ID NO: 246497 - DNA, 52 bp, Artificial
  Synthetic oligonucleotide
gactgggagctgaaacttgaaacgcttggagtgccgatggcaattagtccat

SEQ ID NO: 246498 - DNA, 56 bp, Artificial
  Synthetic oligonucleotide
gaaacgactacataaacagtttggtcaaccaagagtaattgtcacggataaagcgc

SEQ ID NO: 246499 - DNA, 52 bp, Artificial
  Synthetic oligonucleotide
aacggtgttagggctcgaggataaattcagtgtgctagtgctagttggatcg

SEQ ID NO: 246500 - DNA, 52 bp, Artificial
  Synthetic oligonucleotide
tagaaagctaccgcaatccctcaatatcggttaaagaattaagaataatgac

SEQ ID NO: 246501 - DNA, 52 bp, Artificial
  Synthetic oligonucleotide
ctgtcaaactacgcgatgagaaaatcgttcaagcccttctagaccaaggcaa

SEQ ID NO: 246502 - DNA, 52 bp, Artificial
  Synthetic oligonucleotide
attagcataataagagggttcttcaatgagagagccgacatttgagagcagt

SEQ ID NO: 246503 - DNA, 52 bp, Artificial
  Synthetic oligonucleotide
cagttgttgataaatcttgttgcaggagtagtcgcatatctgctttaacgcc

SEQ ID NO: 246504 - DNA, 51 bp, Artificial
  Synthetic oligonucleotide
gagtaagtttacctattttttgggtcttatcactactttcaggttttagta

SEQ ID NO: 246505 - DNA, 52 bp, Artificial
  Synthetic oligonucleotide
tagatgtcccatacaaacgtaaggccatcataggttctgtcacttgttcgtc

SEQ ID NO: 246506 - DNA, 52 bp, Artificial
  Synthetic oligonucleotide
gagtaggagaaggatcgcacggacctcttgaccgatagctacggtgattcca

SEQ ID NO: 246507 - DNA, 52 bp, Artificial
  Synthetic oligonucleotide
tagcaaagccacttagttcctttagttcatcagaattgaaaataactaagcg

SEQ ID NO: 246508 - DNA, 52 bp, Artificial
  Synthetic oligonucleotide
catccgagatttccttaccaatcctttcagcaatctggcttggtgacatttc

SEQ ID NO: 246509 - DNA, 57 bp, Artificial
  Synthetic oligonucleotide
gaagcaagcctactttaaaatcaagtccaataaagcattaggtattgagtatgaaag

SEQ ID NO: 246510 - DNA, 52 bp, Artificial
  Synthetic oligonucleotide
gtcctcacctgccaagagcatgacaaaacggtccaacccgatagccaatcca

SEQ ID NO: 246511 - DNA, 52 bp, Artificial
  Synthetic oligonucleotide
catgatatcttacattggtgaaccttcctctagtcaatacgtaaccgcatct

SEQ ID NO: 246512 - DNA, 52 bp, Artificial
  Synthetic oligonucleotide
tagcgtaaggagtgagcgtgtgattgcacggctgacggcttgcctgaccccc

SEQ ID NO: 246513 - DNA, 52 bp, Artificial
  Synthetic oligonucleotide
gaaccaagagcagaccttgcgctacagagatatggaacgctatagtcggcat

SEQ ID NO: 246514 - DNA, 52 bp, Artificial
  Synthetic oligonucleotide
ttttgtgcggttattcgcacgaaagttctctgcaagagttcctcggaagagc

SEQ ID NO: 246515 - DNA, 52 bp, Artificial
  Synthetic oligonucleotide
taagaatagtaattcgattataaagtattgtggtgaacttagcacttgggta

SEQ ID NO: 246516 - DNA, 52 bp, Artificial
  Synthetic oligonucleotide
aaaagaggctagcgatttcaggagtcggatagagaagattaagtcgagtgat

SEQ ID NO: 246517 - DNA, 52 bp, Artificial
  Synthetic oligonucleotide
caatcaagatggtaaggaagcagcggatcgctactcagcacgcccaggttat

SEQ ID NO: 246518 - DNA, 52 bp, Artificial
  Synthetic oligonucleotide
taagcataagactgtagctgaattcaagagggcaatggctgatatggaactc

SEQ ID NO: 246519 - DNA, 52 bp, Artificial
  Synthetic oligonucleotide
gtttcactgcgaggggtgttataatgtagcgacctggtccttcaatgcaggc

SEQ ID NO: 246520 - DNA, 58 bp, Artificial
  Synthetic oligonucleotide
gaacttaatcagtctatgacggatattttaagagggttcaataggttgatgaagtata

SEQ ID NO: 246521 - DNA, 52 bp, Artificial
  Synthetic oligonucleotide
taaggcgaccacgcagtaccctcgttttggcaatccgacgccacgagtggca

SEQ ID NO: 246522 - DNA, 52 bp, Artificial
  Synthetic oligonucleotide
caagcgacgtatgaggagacgacgactcgtagactgtcagaactgaccaact

SEQ ID NO: 246523 - DNA, 52 bp, Artificial
  Synthetic oligonucleotide
caatgtggctatacgtttcgtatttcagcttttgaacgcctcaatttaacgg

SEQ ID NO: 246524 - DNA, 52 bp, Artificial
  Synthetic oligonucleotide
aaaatcgtcctacgtgatggagtgattaccgaagatagtcgaagggagggag

SEQ ID NO: 246525 - DNA, 52 bp, Artificial
  Synthetic oligonucleotide
gaattttgataccgtctgattcatcaaagcggggaacaaggtggacgtgtgc

SEQ ID NO: 246526 - DNA, 52 bp, Artificial
  Synthetic oligonucleotide
aaagttacttatgaacgattttcgtgcggttgcacaggatgtgcatttagtc

SEQ ID NO: 246527 - DNA, 52 bp, Artificial
  Synthetic oligonucleotide
taatgactgaaaaaatggacgacctcctaaaagcgacaactttgagtaggtc

SEQ ID NO: 246528 - DNA, 52 bp, Artificial
  Synthetic oligonucleotide
caactatagccggagccggactaatggcaacgtatgtagcggcagcctcttt

SEQ ID NO: 246529 - DNA, 52 bp, Artificial
  Synthetic oligonucleotide
gttcttactggactgccatacatgtattgtaccaccttgtaacgggttagtg

SEQ ID NO: 246530 - DNA, 52 bp, Artificial
  Synthetic oligonucleotide
cacgaatagtggcttttgcgatagatgctgcatggtcacccatacgttcaac

SEQ ID NO: 246531 - DNA, 56 bp, Artificial
  Synthetic oligonucleotide
gaaatctaggcgggattcagaaacacaaccagcgtgaatttgaaaaccactcgaac

SEQ ID NO: 246532 - DNA, 52 bp, Artificial
  Synthetic oligonucleotide
gttataaggagacttttctggattctcagcgtgtgtgaaataatcgtacatt

SEQ ID NO: 246533 - DNA, 52 bp, Artificial
  Synthetic oligonucleotide
ttgttcaaactggagaggataaggacggcacttcttcaggtcgtgaaattgt

SEQ ID NO: 246534 - DNA, 52 bp, Artificial
  Synthetic oligonucleotide
tacagattctatttaaaatacgaggctcttactctctttggctgaccttccc

SEQ ID NO: 246535 - DNA, 52 bp, Artificial
  Synthetic oligonucleotide
cacggacaaagtacgtcgacctaggttacttgcggtcaagtagaccatggaa

SEQ ID NO: 246536 - DNA, 52 bp, Artificial
  Synthetic oligonucleotide
tacaggaaaacgattcacatcaactatcggaactctatgggttagacgactg

SEQ ID NO: 246537 - DNA, 52 bp, Artificial
  Synthetic oligonucleotide
gtgttagctctggcatattgtgtacgagaactagataccgctaactccctta

SEQ ID NO: 246538 - DNA, 52 bp, Artificial
  Synthetic oligonucleotide
ttagctaacgatactaggggtgagcgtgacgattatgctcaagctttacagg

SEQ ID NO: 246539 - DNA, 52 bp, Artificial
  Synthetic oligonucleotide
ccactatcatagcgtgacccaggcacacctaaacttctatccgttgcggtag

SEQ ID NO: 246540 - DNA, 52 bp, Artificial
  Synthetic oligonucleotide
gcaacggaaacagcgtattaaaattgtcggtacaagtcaggtctttacacgt

SEQ ID NO: 246541 - DNA, 52 bp, Artificial
  Synthetic oligonucleotide
gtagcagggcgaagagacgtgtaaacaaacgaataacccactgtggcaacct

SEQ ID NO: 246542 - DNA, 58 bp, Artificial
  Synthetic oligonucleotide
gaaatcttattttagaacgttctgccgctggtagagaagccgcacgtgcaagagggcg

SEQ ID NO: 246543 - DNA, 52 bp, Artificial
  Synthetic oligonucleotide
gtagctgcatcctggggcgaactacagctagccttcacaggcgctagccgta

SEQ ID NO: 246544 - DNA, 52 bp, Artificial
  Synthetic oligonucleotide
aattactatagtatactacgcgcctggcaaaatacccatggaaatgcactag

SEQ ID NO: 246545 - DNA, 52 bp, Artificial
  Synthetic oligonucleotide
aatggcacatccgcttgggatgagttggggttatcaactaatggggtacttt

SEQ ID NO: 246546 - DNA, 52 bp, Artificial
  Synthetic oligonucleotide
atgaaccacacttcccataacaagactggcaacaactacactagctactcca

SEQ ID NO: 246547 - DNA, 52 bp, Artificial
  Synthetic oligonucleotide
ttcgctaatccataagagacggtcaagcaagataggagggtagcgatttgtg

SEQ ID NO: 246548 - DNA, 52 bp, Artificial
  Synthetic oligonucleotide
ctgcactcatgtacttgtcgctccccgctgtggcaattgtccctatcacttg

SEQ ID NO: 246549 - DNA, 52 bp, Artificial
  Synthetic oligonucleotide
taggggaagtcgcttactactaggtctagtcgatgacaagagaagcactaga

SEQ ID NO: 246550 - DNA, 52 bp, Artificial
  Synthetic oligonucleotide
gataatctggcaaaagccctttatcgaaaacgacaaattggttatggtggaa

SEQ ID NO: 246551 - DNA, 52 bp, Artificial
  Synthetic oligonucleotide
taggcgctattttgcttaagtaaggtgtatcggggatagagacaagcgttcg

SEQ ID NO: 246552 - DNA, 52 bp, Artificial
  Synthetic oligonucleotide
cattggagaacacgcgctaataggtaagcttgatcgttattgccgagggcag

SEQ ID NO: 246553 - DNA, 58 bp, Artificial
  Synthetic oligonucleotide
gaacagaacttgataaagcccattctcatatagaaaagttaagcaatcttttagacca

SEQ ID NO: 246554 - DNA, 52 bp, Artificial
  Synthetic oligonucleotide
gataaacggttcttcaatagtcggtgtttggtcatttaagacacgcgccgca

SEQ ID NO: 246555 - DNA, 52 bp, Artificial
  Synthetic oligonucleotide
gtcacttcaactgaacgcaaatatcccaacagattcctttgaactttagcac

SEQ ID NO: 246556 - DNA, 52 bp, Artificial
  Synthetic oligonucleotide
aagtaagctccttccgggttcatttcctgcggtggacgttgcagcgtcatat

SEQ ID NO: 246557 - DNA, 52 bp, Artificial
  Synthetic oligonucleotide
atggataataagcggcctccaatggtcaagtcgtgtatcaagacttccgcaa

SEQ ID NO: 246558 - DNA, 51 bp, Artificial
  Synthetic oligonucleotide
agactttgctagtgtattccgtttcatataggacggttgagctgttatagt

SEQ ID NO: 246559 - DNA, 51 bp, Artificial
  Synthetic oligonucleotide
gacaatgaagacgggtaattactcgatctgttctctatacgctggataaga

SEQ ID NO: 246560 - DNA, 51 bp, Artificial
  Synthetic oligonucleotide
tgaccattatttagaacacgcgcacccaaaggaccatcgtaggcgtacagt

SEQ ID NO: 246561 - DNA, 51 bp, Artificial
  Synthetic oligonucleotide
gctctcgcttcacgctgaaaacgagctacagctatcgggtccgtctggtag

SEQ ID NO: 246562 - DNA, 51 bp, Artificial
  Synthetic oligonucleotide
aaagcgccaggttcacgtggtcaaacggtccaacgtcaacggtcctcgggc

SEQ ID NO: 246563 - DNA, 51 bp, Artificial
  Synthetic oligonucleotide
ctctcacgagacagtctacaaagtacaaaacctccttagggagcttgaatt

SEQ ID NO: 246564 - DNA, 56 bp, Artificial
  Synthetic oligonucleotide
ctgaaaacgtggacttatatagtaatccataaattctgaaaacgtggacttatata

SEQ ID NO: 246565 - DNA, 51 bp, Artificial
  Synthetic oligonucleotide
gctcgtgcgcttaagtcaggtcaagttgaacgtgtatagttgaaataagcc

SEQ ID NO: 246566 - DNA, 51 bp, Artificial
  Synthetic oligonucleotide
gcctccaaggcttggaatgcgaccacgagtgccttcaaccatgcggccaac

SEQ ID NO: 246567 - DNA, 51 bp, Artificial
  Synthetic oligonucleotide
gatggggagttgaagccagtgtccctgcctctgtcacgcgcagggattctc

SEQ ID NO: 246568 - DNA, 46 bp, Artificial
  Synthetic oligonucleotide
cggaagtgtaaaaaagaccccgttttaggggtcttaaaccgcactt

SEQ ID NO: 246569 - DNA, 51 bp, Artificial
  Synthetic oligonucleotide
gctcaaacggcctgtccagctcatgaggacataagggtgcacgcgatatga

SEQ ID NO: 246570 - DNA, 51 bp, Artificial
  Synthetic oligonucleotide
gcatggcagaagttagaagatgaatttgtcgctttatatggaaagcaagag

SEQ ID NO: 246571 - DNA, 51 bp, Artificial
  Synthetic oligonucleotide
gaccagccgccgcttacagttagctggtcacaaaccttacgccctcgtcgg

SEQ ID NO: 246572 - DNA, 51 bp, Artificial
  Synthetic oligonucleotide
gctatcaataggatgggtgatctaaatcccgaggtgacagttacaggttcg

SEQ ID NO: 246573 - DNA, 51 bp, Artificial
  Synthetic oligonucleotide
cggagaaaagggcgatgagacagagtaggagattactcattcgggaagaaa

SEQ ID NO: 246574 - DNA, 51 bp, Artificial
  Synthetic oligonucleotide
accaggcttcacgtctgctacacgcgctgcatggtagcccgtcggcatgac

SEQ ID NO: 246575 - DNA, 60 bp, Artificial
  Synthetic oligonucleotide
gttcgacacacacattctgggtgtgcttggtcagccgctaccagctatccacttgcacgc

SEQ ID NO: 246576 - DNA, 55 bp, Artificial
  Synthetic oligonucleotide
taatagtcgttattcaatcatgttaacagaaccccaaatcagaaacaagggtaaa

SEQ ID NO: 246577 - DNA, 55 bp, Artificial
  Synthetic oligonucleotide
gatcgtcttattagaaacgtggtattcttctgcgagtttggtagcttcgccccgt

SEQ ID NO: 246578 - DNA, 51 bp, Artificial
  Synthetic oligonucleotide
aaattaacatacaggcgaactcgaccatttggcaattctgctgtcggtttt

SEQ ID NO: 246579 - DNA, 51 bp, Artificial
  Synthetic oligonucleotide
gaccgcaagggatttttcctaaaggcagaacgtccgattttttcaattgag

SEQ ID NO: 246580 - DNA, 51 bp, Artificial
  Synthetic oligonucleotide
gctagtcagtcgaacgttgacatatgttggagttctccatacactaacgat

SEQ ID NO: 246581 - DNA, 51 bp, Artificial
  Synthetic oligonucleotide
aaggcacgagctaaaaccaatgtcaccttaaccaacctgctctacaatatc

SEQ ID NO: 246582 - DNA, 51 bp, Artificial
  Synthetic oligonucleotide
gaccgcatgacgcccattttcgagcttaatagcttctctagcgacctttga

SEQ ID NO: 246583 - DNA, 51 bp, Artificial
  Synthetic oligonucleotide
acttgtttgaacagccatggtaatcaaggcgataatcaaagtgttgaggta

SEQ ID NO: 246584 - DNA, 51 bp, Artificial
  Synthetic oligonucleotide
gacctaaccgcatagcaatactagctggtaaaaccataatagttgacacca

SEQ ID NO: 246585 - DNA, 51 bp, Artificial
  Synthetic oligonucleotide
ctgaaacaatttcgtgatcatgaaattgataggattcaatactttatgaaa

SEQ ID NO: 246586 - DNA, 51 bp, Artificial
  Synthetic oligonucleotide
ttccctaccagatgtggaagtgacagtcgctcagtctgaccaagcctctat

SEQ ID NO: 246587 - DNA, 51 bp, Artificial
  Synthetic oligonucleotide
aatgcccggacaccgccggtttttggatccaaggcaacactgcccgactca

SEQ ID NO: 246588 - DNA, 60 bp, Artificial
  Synthetic oligonucleotide
gatcggatggacaaccaagataaagaactgatcgaggctttacgctatacatacggagta

SEQ ID NO: 246589 - DNA, 51 bp, Artificial
  Synthetic oligonucleotide
ctcatgtcagactattttgatgcatgcggggtcagaaagttatcatagagc

SEQ ID NO: 246590 - DNA, 51 bp, Artificial
  Synthetic oligonucleotide
gaaatagtagtctggtttacacctttacaagtggtctagggctaaacttct

SEQ ID NO: 246591 - DNA, 51 bp, Artificial
  Synthetic oligonucleotide
acaccttggacaatgcgctcaccaactgccagtgtaaccggctggtccgta

SEQ ID NO: 246592 - DNA, 51 bp, Artificial
  Synthetic oligonucleotide
acccgaccatcttgacgaatcatggcgtagccacgggccacgatgcgactg

SEQ ID NO: 246593 - DNA, 51 bp, Artificial
  Synthetic oligonucleotide
aaaaccatacggccgtcatttaaccctgtgtcaacatagacaggttgagac

SEQ ID NO: 246594 - DNA, 51 bp, Artificial
  Synthetic oligonucleotide
aaaagaccattcactccgtctcgatagttcggcattcctttcaacatatag

SEQ ID NO: 246595 - DNA, 51 bp, Artificial
  Synthetic oligonucleotide
accataaagcggttgtgaccgttagacagcaggtccagcattcgctcttgg

SEQ ID NO: 246596 - DNA, 51 bp, Artificial
  Synthetic oligonucleotide
tcttagatggattgcgtttaccgctttcccattgcgagtatgtctgttgtg

SEQ ID NO: 246597 - DNA, 51 bp, Artificial
  Synthetic oligonucleotide
gcaaccatggcaggcttacaaaagaatgtctacccacgctatgacgagttg

SEQ ID NO: 246598 - DNA, 51 bp, Artificial
  Synthetic oligonucleotide
ctcggcagagcgttttagttttgtacgttgcgcagcaatgtcaaaactaca

SEQ ID NO: 246599 - DNA, 60 bp, Artificial
  Synthetic oligonucleotide
gatcgacattcgaacagtcaaagagactggcaaaggattgcgaggggcagtcttagagac

SEQ ID NO: 246600 - DNA, 51 bp, Artificial
  Synthetic oligonucleotide
tcttcaacattacgggtcatttgaggaagattaaagaccgtcaaagcaaga

SEQ ID NO: 246601 - DNA, 51 bp, Artificial
  Synthetic oligonucleotide
aaaagtctgattcgagcagcggtgacagtcagtcaggctctagttcaggtt

SEQ ID NO: 246602 - DNA, 51 bp, Artificial
  Synthetic oligonucleotide
aaggctttatcatgcggacccggacagggcgcgtggcgacccgtaaggctt

SEQ ID NO: 246603 - DNA, 51 bp, Artificial
  Synthetic oligonucleotide
gaatagagcttttgacgagaactgcgaacaatcagcgttccaacactatta

SEQ ID NO: 246604 - DNA, 51 bp, Artificial
  Synthetic oligonucleotide
gcagcaatcatttgaagcccaatacttaggacgggttatgggaatagtctc

SEQ ID NO: 246605 - DNA, 51 bp, Artificial
  Synthetic oligonucleotide
tttggtactgctagcaagcatgccttctctaggggaaataccctgccatac

SEQ ID NO: 246606 - DNA, 51 bp, Artificial
  Synthetic oligonucleotide
agatgaagctacacgtgtactaaaaacagaggggctattaataatattaga

SEQ ID NO: 246607 - DNA, 51 bp, Artificial
  Synthetic oligonucleotide
tcttggggcggttggtgaggcctttcgaagcgcagatgcgaatatggctca

SEQ ID NO: 246608 - DNA, 51 bp, Artificial
  Synthetic oligonucleotide
gctgtcagccgagcggacaggactcccaactttccgtttgcttcatcgccc

SEQ ID NO: 246609 - DNA, 51 bp, Artificial
  Synthetic oligonucleotide
gaatagtacggtaactattttgtgagaaaccaacgtgcttgatagactcga

SEQ ID NO: 246610 - DNA, 56 bp, Artificial
  Synthetic oligonucleotide
ctgagcgcgataggcagtttctttgggtttacttttgtcagataaaaactctccca

SEQ ID NO: 246611 - DNA, 51 bp, Artificial
  Synthetic oligonucleotide
agaggcaaatatctgcatcctcttgttgcgcccaaagatctaacttgtccc

SEQ ID NO: 246612 - DNA, 51 bp, Artificial
  Synthetic oligonucleotide
gctgcggctgtctttgtgcatggcttgctgggcatccagccctttgctcgt

SEQ ID NO: 246613 - DNA, 51 bp, Artificial
  Synthetic oligonucleotide
ctagaacgtcatattttgcgttttaagcaattttgactaactaggcgggga

SEQ ID NO: 246614 - DNA, 51 bp, Artificial
  Synthetic oligonucleotide
cgctagaccaatgcgaccagttcctattatagccacagtcatgttacctag

SEQ ID NO: 246615 - DNA, 51 bp, Artificial
  Synthetic oligonucleotide
gcaggtgccaaaactaatggcgaatattcagcgcttaaagacccctactct

SEQ ID NO: 246616 - DNA, 51 bp, Artificial
  Synthetic oligonucleotide
ctacgcaaggcatgtcagttgtaaccagcttttacccaatgtatgcgatga

SEQ ID NO: 246617 - DNA, 51 bp, Artificial
  Synthetic oligonucleotide
aacggctactgtagcagccagcgccaatcgtggaccacaacccctcagcaa

SEQ ID NO: 246618 - DNA, 51 bp, Artificial
  Synthetic oligonucleotide
aagccagtgtccctgcctctgtcacgcgcagggattctctctccagtccaa

SEQ ID NO: 246619 - DNA, 51 bp, Artificial
  Synthetic oligonucleotide
ttgctggggtgcaagtgggctatgcggatggtcagtttatcatcaacccag

SEQ ID NO: 246620 - DNA, 51 bp, Artificial
  Synthetic oligonucleotide
tgtggtaacgggtgaagtctttgactatacaagtgctatcagacaaggtcg

SEQ ID NO: 246621 - DNA, 60 bp, Artificial
  Synthetic oligonucleotide
gatataacagaagagggcgcaagtctcacggttcatatccctgacgatgcaaagtcaggc

SEQ ID NO: 246622 - DNA, 51 bp, Artificial
  Synthetic oligonucleotide
gcgcgctaagagggctcggtaggtcccgatatcatcactcgaagcttgggc

SEQ ID NO: 246623 - DNA, 51 bp, Artificial
  Synthetic oligonucleotide
aacgttccaggacacggactcgggccatgatgacagccatctccgaccgaa

SEQ ID NO: 246624 - DNA, 51 bp, Artificial
  Synthetic oligonucleotide
gcgccccaagaggaccgccaatcagcagtggttcattggtgctaaagcacc

SEQ ID NO: 246625 - DNA, 51 bp, Artificial
  Synthetic oligonucleotide
gagcagtatccttgctgcaacggtagcggtctgccagcttgcggacggagg

SEQ ID NO: 246626 - DNA, 51 bp, Artificial
  Synthetic oligonucleotide
gcgccaaatagagggcgtgcaaagcctcgctcagagccttcgtctggccaa

SEQ ID NO: 246627 - DNA, 51 bp, Artificial
  Synthetic oligonucleotide
aagagggtggtgcaaaccagtcacagtaatgtgaacaaggcggtacctccc

SEQ ID NO: 246628 - DNA, 51 bp, Artificial
  Synthetic oligonucleotide
cggtttgctttctcttaatcgaattcgtatcttaccaactactagcgatga

SEQ ID NO: 246629 - DNA, 51 bp, Artificial
  Synthetic oligonucleotide
gagtatttccagcgaatggacaaacaggcagagcgttttggtcagccagta

SEQ ID NO: 246630 - DNA, 51 bp, Artificial
  Synthetic oligonucleotide
acgattgacgatactaaacatgccctggttaatacctgcttccaaactatc

SEQ ID NO: 246631 - DNA, 51 bp, Artificial
  Synthetic oligonucleotide
gccgaggtcacaatgcgcgtgaggagctcaaccaagccatcatgcacgccg

SEQ ID NO: 246632 - DNA, 58 bp, Artificial
  Synthetic oligonucleotide
gatataaacccgagcaggtcacacctcaactacgagttgacggatcgtgaccgctcgg

SEQ ID NO: 246633 - DNA, 51 bp, Artificial
  Synthetic oligonucleotide
ctgggacagctatcgttgtcttagcaggtttgatgaatgcagccaagttag

SEQ ID NO: 246634 - DNA, 51 bp, Artificial
  Synthetic oligonucleotide
ctggccgcccagtggacatcccgacctatgactatacggagcacacgcgca

SEQ ID NO: 246635 - DNA, 51 bp, Artificial
  Synthetic oligonucleotide
gcgatcaggtacttctatgttttttatacacgaaagacactttggtgtact

SEQ ID NO: 246636 - DNA, 51 bp, Artificial
  Synthetic oligonucleotide
ctggcaggtagcccaaggtttggtagtcgctagccccttgtcggccgtaac

SEQ ID NO: 246637 - DNA, 51 bp, Artificial
  Synthetic oligonucleotide
tgtatgcgcgtctacaggaatataggctctacctgtaagtgaaacaccgag

SEQ ID NO: 246638 - DNA, 51 bp, Artificial
  Synthetic oligonucleotide
gcccatgcttggagtaagtggaaccagccggtagaccgcagtgagtggcac

SEQ ID NO: 246639 - DNA, 51 bp, Artificial
  Synthetic oligonucleotide
acctaaaattcaaagtggagagcttaagattatattttctgaccgtcccct

SEQ ID NO: 246640 - DNA, 51 bp, Artificial
  Synthetic oligonucleotide
aagtccttgtctgagaggtcggcggcttcttggccctcctgcggaatcagg

SEQ ID NO: 246641 - DNA, 51 bp, Artificial
  Synthetic oligonucleotide
gcgaaacaagtcactttcgtagagtacggcaagccgaaagtgacgacaaag

SEQ ID NO: 246642 - DNA, 51 bp, Artificial
  Synthetic oligonucleotide
ttaactgctgagagcttccgcttctgaacagccgccttaaaatccttgata

SEQ ID NO: 246643 - DNA, 57 bp, Artificial
  Synthetic oligonucleotide
gatagggacaactcgtttaattcgggcaagaacaatgaccgaagtcaatcgagatta

SEQ ID NO: 246644 - DNA, 51 bp, Artificial
  Synthetic oligonucleotide
cgtctatcttgcaatcgcctgtggtttcggagcactcgtacggtatttctt

SEQ ID NO: 246645 - DNA, 51 bp, Artificial
  Synthetic oligonucleotide
accggccgtgactcgtggtgtgcgccttgtctccactctggacgacattac

SEQ ID NO: 246646 - DNA, 51 bp, Artificial
  Synthetic oligonucleotide
gcccggccactcttggggcagcgtctccctaattttcaagactgaggaggc

SEQ ID NO: 246647 - DNA, 51 bp, Artificial
  Synthetic oligonucleotide
ctgcaacggtagcggtctgccagcttgcggacggagggaatcttttgtccc

SEQ ID NO: 246648 - DNA, 51 bp, Artificial
  Synthetic oligonucleotide
aagcttctcgtgtcgcccgaactgtgctcaaaatccctccgccttgggcga

SEQ ID NO: 246649 - DNA, 51 bp, Artificial
  Synthetic oligonucleotide
gcctgaccatgcaaacgatagtcacggagcttactctggatcagcttatgc

SEQ ID NO: 246650 - DNA, 51 bp, Artificial
  Synthetic oligonucleotide
ttgtgcgcccttttctcttctgttagcggccctggttcgtgtgggtggagc

SEQ ID NO: 246651 - DNA, 51 bp, Artificial
  Synthetic oligonucleotide
cttgagggagtgaccgatatgtcaagtaaagccaatcatgcaaagacagcg

SEQ ID NO: 246652 - DNA, 51 bp, Artificial
  Synthetic oligonucleotide
aatcgaatcggtggtgccttgattctggttgttgctggaattttagtcaca

SEQ ID NO: 246653 - DNA, 51 bp, Artificial
  Synthetic oligonucleotide
cggatgtttccgtctatcatcgtgtggttatgactgcacaatcgcttcctc

SEQ ID NO: 246654 - DNA, 59 bp, Artificial
  Synthetic oligonucleotide
ctgcaattccttaggggcttcggtgtgcttgcgcactacattttcgtaaactcattata

SEQ ID NO: 246655 - DNA, 51 bp, Artificial
  Synthetic oligonucleotide
actggactattgttttagctatgtgaccaaagaaagcactgcaacagatac

SEQ ID NO: 246656 - DNA, 51 bp, Artificial
  Synthetic oligonucleotide
gatagaggaacgaatgtgcatcaattccagacttgcattatcgtaaagact

SEQ ID NO: 246657 - DNA, 51 bp, Artificial
  Synthetic oligonucleotide
cggcggagtgcccttttagaggaggcctatgtcgcggaaatgcgttcgggt

SEQ ID NO: 246658 - DNA, 51 bp, Artificial
  Synthetic oligonucleotide
aacaggacgatctgtgtaagctggcttcccatcattaacaggacaatcgac

SEQ ID NO: 246659 - DNA, 51 bp, Artificial
  Synthetic oligonucleotide
tgcttcccgccactctttaccagtcagaggcttataaacgcgtctatcccc

SEQ ID NO: 246660 - DNA, 51 bp, Artificial
  Synthetic oligonucleotide
cggcttggggcagagattcgatatttagtagtgaagtaccccaggattagg

SEQ ID NO: 246661 - DNA, 51 bp, Artificial
  Synthetic oligonucleotide
cgttcctaattcctcggctaatcgataagtgtaagtcgtcttacctacccc

SEQ ID NO: 246662 - DNA, 51 bp, Artificial
  Synthetic oligonucleotide
cgggaacttcgtgcacaggagcgctagtggggaccgtgccatagacagtta

SEQ ID NO: 246663 - DNA, 51 bp, Artificial
  Synthetic oligonucleotide
gcgtccacttcacgacggatagcgtcttcttgatcaggtgtcaagtctttt

SEQ ID NO: 246664 - DNA, 51 bp, Artificial
  Synthetic oligonucleotide
cttgacgcgcctcaatcaaggaacccctgttaccgttcatggagcggggcg

SEQ ID NO: 246665 - DNA, 57 bp, Artificial
  Synthetic oligonucleotide
gataagcagtattgaggaaacagtgaaacttacatactatgctaacccttcccaagt

SEQ ID NO: 246666 - DNA, 51 bp, Artificial
  Synthetic oligonucleotide
gacgataaggggcgcgcacaagtgacccgttatcacgagaagcactctaaa

SEQ ID NO: 246667 - DNA, 51 bp, Artificial
  Synthetic oligonucleotide
ttggtagcctgcatggtaatggcgccttgctggttaagggtgccgccaaaa

SEQ ID NO: 246668 - DNA, 51 bp, Artificial
  Synthetic oligonucleotide
gagtctctcggaatgatctgttcacttggtgaattggggatttctgactca

SEQ ID NO: 246669 - DNA, 51 bp, Artificial
  Synthetic oligonucleotide
aataagaggctactctgcctactgctagctcgtgttctagtgttccaattc

SEQ ID NO: 246670 - DNA, 51 bp, Artificial
  Synthetic oligonucleotide
aagttcggccaaaatccgcttggccacagctccgatagctacccgcatggt

SEQ ID NO: 246671 - DNA, 50 bp, Artificial
  Synthetic oligonucleotide
actaaaaagaactccctaagggtcgtggctactttgtttagtctaaacgc

SEQ ID NO: 246672 - DNA, 51 bp, Artificial
  Synthetic oligonucleotide
ttaccaaaaccagttgcttatgtgccggacaaccctgatgataatcgcaaa

SEQ ID NO: 246673 - DNA, 51 bp, Artificial
  Synthetic oligonucleotide
aaccagtggttcgaaattgtttgattaatcgatagagctcttgtccatagc

SEQ ID NO: 246674 - DNA, 51 bp, Artificial
  Synthetic oligonucleotide
ttacacgcgttggttggcccattgcatgacgctcctctgcgaatgcggtcc

SEQ ID NO: 246675 - DNA, 51 bp, Artificial
  Synthetic oligonucleotide
ttaagtcggtctataaagaccaagccactatgcttaatggtgctcgtaagg

SEQ ID NO: 246676 - DNA, 56 bp, Artificial
  Synthetic oligonucleotide
gataagcagggacaaggtagacttagcggaggcggtttggtcagaactttgttcga

SEQ ID NO: 246677 - DNA, 51 bp, Artificial
  Synthetic oligonucleotide
cggtcctgccaaggagcgctttacaaaactgctacctagccaccagcgcga

SEQ ID NO: 246678 - DNA, 51 bp, Artificial
  Synthetic oligonucleotide
ccggtttgcggaacaccctgaggaccggtgctagtcgctgtggtgccagtt

SEQ ID NO: 246679 - DNA, 51 bp, Artificial
  Synthetic oligonucleotide
ccccgctacctcacgatagtcaagcttgggagtcgctattgtgttcaccgg

SEQ ID NO: 246680 - DNA, 51 bp, Artificial
  Synthetic oligonucleotide
ccccattatctgacgcgtcagttctgggctaatttggtctatatcagccgt

SEQ ID NO: 246681 - DNA, 51 bp, Artificial
  Synthetic oligonucleotide
catatccatagtaataaattttgacgcgacatcggacaactctatcgtagc

SEQ ID NO: 246682 - DNA, 51 bp, Artificial
  Synthetic oligonucleotide
ggtcttgtgctcttagtctagctctggtctaccgctaggacttatgtccta

SEQ ID NO: 246683 - DNA, 51 bp, Artificial
  Synthetic oligonucleotide
cccaaggcctctacgctcgcttgggcagcgacctaacagactatggtcggc

SEQ ID NO: 246684 - DNA, 51 bp, Artificial
  Synthetic oligonucleotide
ccgtttggggcagaacttgaccacttatatgagccggcggggacgcttgga

SEQ ID NO: 246685 - DNA, 51 bp, Artificial
  Synthetic oligonucleotide
cctaactgaaaggcttcgttggtctgcttgacgacagaagcagttcgcttg

SEQ ID NO: 246686 - DNA, 51 bp, Artificial
  Synthetic oligonucleotide
agtatcttccagttgaccagtttcgtgattgacgactaaaaggcgggaagc

SEQ ID NO: 246687 - DNA, 60 bp, Artificial
  Synthetic oligonucleotide
taagtattgtcgcaatttcattgatcagtgcaacgcttggaaagttgtttggattgtatc

SEQ ID NO: 246688 - DNA, 56 bp, Artificial
  Synthetic oligonucleotide
gagttgtttaacagaactatcagaaagttgatttccgcttatccctatttgtctta

SEQ ID NO: 246689 - DNA, 51 bp, Artificial
  Synthetic oligonucleotide
cccaaatcgccataatcggtcccctggtcacgacctgcagccccatggtaa

SEQ ID NO: 246690 - DNA, 51 bp, Artificial
  Synthetic oligonucleotide
ggcgcctcagcaacaaatacaatgagtgcaaaagccgttgcaacactcagt

SEQ ID NO: 246691 - DNA, 51 bp, Artificial
  Synthetic oligonucleotide
agtaagctcgggaacttcgtgcacaggagcgctagtggggaccgtgccata

SEQ ID NO: 246692 - DNA, 51 bp, Artificial
  Synthetic oligonucleotide
catccagcagctgacaccgccgggtgacttgcgaaatgttttggtcgccat

SEQ ID NO: 246693 - DNA, 51 bp, Artificial
  Synthetic oligonucleotide
tccgtagtagtaatacgacggtgagtcagaagagtctaccccatgcaaaac

SEQ ID NO: 246694 - DNA, 51 bp, Artificial
  Synthetic oligonucleotide
atcactggtcgtttctgactttgatatgcgtcgttttctaatgccagtccg

SEQ ID NO: 246695 - DNA, 51 bp, Artificial
  Synthetic oligonucleotide
cagagtatacaacacgagagggattagagtattaagaacgggaatataccc

SEQ ID NO: 246696 - DNA, 51 bp, Artificial
  Synthetic oligonucleotide
cagaccgcccccacggataggcgactctcccttgcccgtcttaaccggagt

SEQ ID NO: 246697 - DNA, 51 bp, Artificial
  Synthetic oligonucleotide
ggttatggcgagtgcttcacacatggtattgggcatggcattggactagac

SEQ ID NO: 246698 - DNA, 51 bp, Artificial
  Synthetic oligonucleotide
atcctgtccttgtcattagtcagtgatttatagttaaaacgctcactgcca

SEQ ID NO: 246699 - DNA, 55 bp, Artificial
  Synthetic oligonucleotide
gagttaagtcctgaacaatttgaagggttgaaggcagaagtttatcgtagtagaa

SEQ ID NO: 246700 - DNA, 51 bp, Artificial
  Synthetic oligonucleotide
tatgcagtaacgtctggaatgataacgacggacggactgacttataaattt

SEQ ID NO: 246701 - DNA, 51 bp, Artificial
  Synthetic oligonucleotide
ggccttgatatttgctccttcgcccaagactgcgatatagacatctagggc

SEQ ID NO: 246702 - DNA, 51 bp, Artificial
  Synthetic oligonucleotide
agggcgcttttgtgcttcatcgcttccaaggtgggttgcgtgaaaacatgg

SEQ ID NO: 246703 - DNA, 51 bp, Artificial
  Synthetic oligonucleotide
ggccgttaccgaagtaacctgcgactgcacgcctggtcagtgtcgctgtca

SEQ ID NO: 246704 - DNA, 51 bp, Artificial
  Synthetic oligonucleotide
atcgcaaacgtgagattgtcgaacgttacggtattctgattgcgaatattg

SEQ ID NO: 246705 - DNA, 51 bp, Artificial
  Synthetic oligonucleotide
cctgacggtcgtgcactcgctgtcagctggctaggcttgcctgatgtggag

SEQ ID NO: 246706 - DNA, 51 bp, Artificial
  Synthetic oligonucleotide
tccttgcagaccaggacaggatccagcactactggtatatccccatgctgc

SEQ ID NO: 246707 - DNA, 51 bp, Artificial
  Synthetic oligonucleotide
aggcgccgcttggtcgctcgtagtaccgatagggccagtgtattcagggat

SEQ ID NO: 246708 - DNA, 51 bp, Artificial
  Synthetic oligonucleotide
tatcgacacatcaagaaaggctacctatccatcacaccaatcgacctaccc

SEQ ID NO: 246709 - DNA, 51 bp, Artificial
  Synthetic oligonucleotide
agtttgagcagagcgttaatcataccttgtgggttacgtgtcaattcgacg

SEQ ID NO: 246710 - DNA, 60 bp, Artificial
  Synthetic oligonucleotide
ctgctttcaagttaatcagataaggcatgatatgctcgctaaactgaatcgttacttcat

SEQ ID NO: 246711 - DNA, 51 bp, Artificial
  Synthetic oligonucleotide
ccctctagtgtaacgttaccagtaatcttactacctgtcagttgtgggtta

SEQ ID NO: 246712 - DNA, 51 bp, Artificial
  Synthetic oligonucleotide
ccctggtcatatccacttgcagcagatcaacaggcatgcccagttctaaac

SEQ ID NO: 246713 - DNA, 51 bp, Artificial
  Synthetic oligonucleotide
tagagggcgtgcaaagcctcgctcagagccttcgtctggccaactgctgtc

SEQ ID NO: 246714 - DNA, 51 bp, Artificial
  Synthetic oligonucleotide
ccgacgtgcagccgaaataaatagtacgagggataataatttatcggatca

SEQ ID NO: 246715 - DNA, 51 bp, Artificial
  Synthetic oligonucleotide
gggctggtcgtaaccgttcaccgttggtgcgcgttcctgctactcgtggaa

SEQ ID NO: 246716 - DNA, 51 bp, Artificial
  Synthetic oligonucleotide
agttaaccgaactcggacacgatgttgaagttgacgagtgcacattagttg

SEQ ID NO: 246717 - DNA, 51 bp, Artificial
  Synthetic oligonucleotide
gggccgctcccatggcaaaacagagggctaatggtaattcgaccggaagta

SEQ ID NO: 246718 - DNA, 51 bp, Artificial
  Synthetic oligonucleotide
gtcgtccatctaaatactgaccgcttcctcccttaacataggcgctgctaa

SEQ ID NO: 246719 - DNA, 51 bp, Artificial
  Synthetic oligonucleotide
ggtaaatgagtaagggagccgttgaaattaatcataggagtgtttaagcct

SEQ ID NO: 246720 - DNA, 51 bp, Artificial
  Synthetic oligonucleotide
tccagactaccagtcatgtccttccgataacgcgcgatgaagggaattgtc

SEQ ID NO: 246721 - DNA, 60 bp, Artificial
  Synthetic oligonucleotide
gagtatggcgataataatgaatgggttggagtatatgcaagaccgcaagacaagccgaca

SEQ ID NO: 246722 - DNA, 51 bp, Artificial
  Synthetic oligonucleotide
gggcacctgaagataggaatgcgccccaagaggaccgccaatcagcagtgg

SEQ ID NO: 246723 - DNA, 51 bp, Artificial
  Synthetic oligonucleotide
cagttgttctcatgtttctacaagcagaccgtattccagctattatccata

SEQ ID NO: 246724 - DNA, 51 bp, Artificial
  Synthetic oligonucleotide
agtgagttcggggacttcgtgcacgggagcgctatctgggactgtgccata

SEQ ID NO: 246725 - DNA, 51 bp, Artificial
  Synthetic oligonucleotide
tcacgtattaacaaactcgtccgtcgtggatttgtacaagggatgactcac

SEQ ID NO: 246726 - DNA, 51 bp, Artificial
  Synthetic oligonucleotide
tcacgggataagccgtacatctttcctcgtgtatacaagatatgaggacgt

SEQ ID NO: 246727 - DNA, 51 bp, Artificial
  Synthetic oligonucleotide
tacttgctgagcaactttattttgggcatactgatgttagtctaacaagtc

SEQ ID NO: 246728 - DNA, 51 bp, Artificial
  Synthetic oligonucleotide
cccgtaaacccaaaccacgctatctagttggacaaggagcacacctcttag

SEQ ID NO: 246729 - DNA, 51 bp, Artificial
  Synthetic oligonucleotide
ccgcacgaatggccgctatgctgatagcagctgacgaacccattccccgtt

SEQ ID NO: 246730 - DNA, 51 bp, Artificial
  Synthetic oligonucleotide
attgaagtcccatcaaatagagccgcttcaagggcaacacttgttgtttcg

SEQ ID NO: 246731 - DNA, 51 bp, Artificial
  Synthetic oligonucleotide
atgtcgcggaaatgcgttcgggtttggctgctggccagtcattttcccaga

SEQ ID NO: 246732 - DNA, 59 bp, Artificial
  Synthetic oligonucleotide
gagggcttaaaaggcaaaacattgttcgtgtcgctaacatttcatcacaagtcgattga

SEQ ID NO: 246733 - DNA, 51 bp, Artificial
  Synthetic oligonucleotide
ataccgaaattgtgctaaactaccagttaagatgttgctgattaagacgag

SEQ ID NO: 246734 - DNA, 51 bp, Artificial
  Synthetic oligonucleotide
agtcgggctagcgccgccaatcaagcttcgtctcaagtgacgactgcctct

SEQ ID NO: 246735 - DNA, 51 bp, Artificial
  Synthetic oligonucleotide
cataggggttcatgagacattcggtagcgtaatacctcgaacgaaagtagg

SEQ ID NO: 246736 - DNA, 51 bp, Artificial
  Synthetic oligonucleotide
tagccagcacgacaggcatcacactccccacaaccatgggtgaaaggcgcg

SEQ ID NO: 246737 - DNA, 51 bp, Artificial
  Synthetic oligonucleotide
agtcgcaccatcaatccttgctgcctatgtaatctcagttggaatagattg

SEQ ID NO: 246738 - DNA, 51 bp, Artificial
  Synthetic oligonucleotide
ccggccaatcagcctccaccactaagctttcacgcccgggtgccgctacaa

SEQ ID NO: 246739 - DNA, 51 bp, Artificial
  Synthetic oligonucleotide
ggctgggcacattgttcgccggctgctgggagggcaacatcaaaccatcct

SEQ ID NO: 246740 - DNA, 51 bp, Artificial
  Synthetic oligonucleotide
cgacagtgccaatctgatgccttgtaattgtggcaagcatttgtgcgttgt

SEQ ID NO: 246741 - DNA, 51 bp, Artificial
  Synthetic oligonucleotide
agcgggcatgttgctccgggctgaccagtgaagctactacggcaagccctc

SEQ ID NO: 246742 - DNA, 51 bp, Artificial
  Synthetic oligonucleotide
agcggcggtattaagactaaaattggagccagtctacttaaaagtagtctt

SEQ ID NO: 246743 - DNA, 54 bp, Artificial
  Synthetic oligonucleotide
ctggggttactatgacacgctttttaaattttatcacaggaaagattactctaa

SEQ ID NO: 246744 - DNA, 51 bp, Artificial
  Synthetic oligonucleotide
caagagtgtgaatcatctaggataatcgttccgactggagtgaatttattg

SEQ ID NO: 246745 - DNA, 51 bp, Artificial
  Synthetic oligonucleotide
atcttgacttcggtttggataagtcctcgagctattagtattagtccgcta

SEQ ID NO: 246746 - DNA, 51 bp, Artificial
  Synthetic oligonucleotide
agcggagcttctaccgctggactcggagccactgtcgcctgctggttttta

SEQ ID NO: 246747 - DNA, 51 bp, Artificial
  Synthetic oligonucleotide
cgacttctatcattctggacaatccgtcgtacagctttctggactaatgtc

SEQ ID NO: 246748 - DNA, 51 bp, Artificial
  Synthetic oligonucleotide
ggacgtgggggccgcggatggcgtgacttatggcaagattgcctctctcta

SEQ ID NO: 246749 - DNA, 51 bp, Artificial
  Synthetic oligonucleotide
gtttacttgaagcggaatcaactagtaaccccggtctcttcatcgttagaa

SEQ ID NO: 246750 - DNA, 51 bp, Artificial
  Synthetic oligonucleotide
taagggcacgaccagcttgtaagggacgatcctcccagcctggtccatgga

SEQ ID NO: 246751 - DNA, 51 bp, Artificial
  Synthetic oligonucleotide
gtttattcttggctgcgactgaaaaagtgataagtgatatgcaaagcaatt

SEQ ID NO: 246752 - DNA, 51 bp, Artificial
  Synthetic oligonucleotide
cgagactaggcagttggaagaagacaatactggagtatgtcgaggataact

SEQ ID NO: 246753 - DNA, 51 bp, Artificial
  Synthetic oligonucleotide
taagatctcgtcttcctgtataatcgtcgcattcataaagcgacaatcccc

SEQ ID NO: 246754 - DNA, 58 bp, Artificial
  Synthetic oligonucleotide
gaggagcttttaagcataatgaacgtgtttttgagacgcactcaaataaagatataaa

SEQ ID NO: 246755 - DNA, 51 bp, Artificial
  Synthetic oligonucleotide
tcgttgtctagaagggggccgcgggtttgtgctgtaaccggcacatagcga

SEQ ID NO: 246756 - DNA, 51 bp, Artificial
  Synthetic oligonucleotide
tctaaagattgcagataggaggctgctccgccatctgccacaattggaatc

SEQ ID NO: 246757 - DNA, 51 bp, Artificial
  Synthetic oligonucleotide
cgagcgttaactcattaccgtcgtctgacgatttattcttgtaaattgaca

SEQ ID NO: 246758 - DNA, 51 bp, Artificial
  Synthetic oligonucleotide
ggacaatcacaatgaatagatacctttcttgtgaggaacctagccctgtaa

SEQ ID NO: 246759 - DNA, 51 bp, Artificial
  Synthetic oligonucleotide
tagtcgctggtccaattcccttaagcgccaaaagctctgcctctgtccatt

SEQ ID NO: 246760 - DNA, 51 bp, Artificial
  Synthetic oligonucleotide
ccaagcttccccgttcttaatttgagcatagccatcttttagctggatacg

SEQ ID NO: 246761 - DNA, 51 bp, Artificial
  Synthetic oligonucleotide
atgaaggcggtgtttccggtgcatccttggtggaaccgtcccttccctctt

SEQ ID NO: 246762 - DNA, 51 bp, Artificial
  Synthetic oligonucleotide
agccagctcactcagactttccccaagtggccaagagcgctcagtcgctta

SEQ ID NO: 246763 - DNA, 51 bp, Artificial
  Synthetic oligonucleotide
ggaagctgctttagatctagccggtgtcactaaacatgttacagtcctaga

SEQ ID NO: 246764 - DNA, 51 bp, Artificial
  Synthetic oligonucleotide
atgcgccaccgtaccatcccgattgggacagtcaaagcccgcatcaatggg

SEQ ID NO: 246765 - DNA, 60 bp, Artificial
  Synthetic oligonucleotide
ctggtcccttgagcatccctgctagagtggccgcctgatcaagcgttagttgtgaagccg

SEQ ID NO: 246766 - DNA, 51 bp, Artificial
  Synthetic oligonucleotide
gtatttgggccgcttctatactttctaacagtgctgttgaatagttcatct

SEQ ID NO: 246767 - DNA, 51 bp, Artificial
  Synthetic oligonucleotide
taacaggaatcagtggaagtccgtgagcccaagcaaaggccttggcagctg

SEQ ID NO: 246768 - DNA, 51 bp, Artificial
  Synthetic oligonucleotide
cgattaccattaaccttttgacccttgttgcagttaacactcttggaattc

SEQ ID NO: 246769 - DNA, 51 bp, Artificial
  Synthetic oligonucleotide
ccaaatgggctgtactggctagagaacctttggcctcctcccgcgctccta

SEQ ID NO: 246770 - DNA, 51 bp, Artificial
  Synthetic oligonucleotide
atgactgagggctacacgagggttgagaccgatagagccacccttggtcgc

SEQ ID NO: 246771 - DNA, 51 bp, Artificial
  Synthetic oligonucleotide
tatccgttttaaaggaaagctgcgccttaatcatggaaatcccagactgcg

SEQ ID NO: 246772 - DNA, 51 bp, Artificial
  Synthetic oligonucleotide
gttagttatttaggggataaggagaattggtggataggtctatccaggaaa

SEQ ID NO: 246773 - DNA, 51 bp, Artificial
  Synthetic oligonucleotide
gttatcggcataatcggttaaacagataacacctgctctgcaaggccttta

SEQ ID NO: 246774 - DNA, 51 bp, Artificial
  Synthetic oligonucleotide
ggccaagttatcggccgaggtcacaatgcgcgtgaggagctcaaccaagcc

SEQ ID NO: 246775 - DNA, 51 bp, Artificial
  Synthetic oligonucleotide
cacgaatcatggcctcagcaccgtcttcgttagaaaggtgaccgagatccg

SEQ ID NO: 246776 - DNA, 60 bp, Artificial
  Synthetic oligonucleotide
gagcgagtgcactacattttcgacgtcttacttgctattgtggcagaagtaacggcacat

SEQ ID NO: 246777 - DNA, 51 bp, Artificial
  Synthetic oligonucleotide
caccccaggcaatactagctgcaatgtagcgtgtgatcccaacatagaatc

SEQ ID NO: 246778 - DNA, 51 bp, Artificial
  Synthetic oligonucleotide
aggacttgcgacaggtagcagtccacttgagttctacagagaaatcgtaga

SEQ ID NO: 246779 - DNA, 51 bp, Artificial
  Synthetic oligonucleotide
ccttatggacaaaaagatattggcaggcttacagaaaaacgtttatccgct

SEQ ID NO: 246780 - DNA, 51 bp, Artificial
  Synthetic oligonucleotide
aggactcacccgcttcccatcattcgctaccgttgccgcatactgggccaa

SEQ ID NO: 246781 - DNA, 51 bp, Artificial
  Synthetic oligonucleotide
gtccgactaaatacgaaaccgttgtgatgtgtggtaatttatagggatcta

SEQ ID NO: 246782 - DNA, 51 bp, Artificial
  Synthetic oligonucleotide
caacttcctcgttgtagaaagcgagaggataagttcgaaaccttggcttgg

SEQ ID NO: 246783 - DNA, 51 bp, Artificial
  Synthetic oligonucleotide
gtactaccagatttctgtacgtaataattttggaggaattacgttacgggg

SEQ ID NO: 246784 - DNA, 51 bp, Artificial
  Synthetic oligonucleotide
gtactactaaaagcagtgaggatatttattctgcacaagaggcggcgaaaa

SEQ ID NO: 246785 - DNA, 51 bp, Artificial
  Synthetic oligonucleotide
cctttcgaggtcggcttttttgggtcggacaatagcgaagcgtccgactgt

SEQ ID NO: 246786 - DNA, 51 bp, Artificial
  Synthetic oligonucleotide
gttgttcgtgctattgtcctattcggttatcaatttcactttaccattcac

SEQ ID NO: 246787 - DNA, 58 bp, Artificial
  Synthetic oligonucleotide
gagcaggttgtgcatcctcaccacgaccaatcggacggttaatcggtgccccttgccc

SEQ ID NO: 246788 - DNA, 51 bp, Artificial
  Synthetic oligonucleotide
tcgggtctcctaccctacggaaactttgaagttgctaacagtactagccca

SEQ ID NO: 246789 - DNA, 51 bp, Artificial
  Synthetic oligonucleotide
cacacgttacgcaatctatcatcgactaattaaaaccatggacacaatgct

SEQ ID NO: 246790 - DNA, 51 bp, Artificial
  Synthetic oligonucleotide
tagtttgcttttactacattcgggctacaatgagctttcggaacgtgagta

SEQ ID NO: 246791 - DNA, 51 bp, Artificial
  Synthetic oligonucleotide
ggagtccccgcttagcccggctggtcactggaatatcgtcctgggacatcc

SEQ ID NO: 246792 - DNA, 51 bp, Artificial
  Synthetic oligonucleotide
cgaaaggctgtagcgtttcggagcggcacggacaaagtacgtcgacctagg

SEQ ID NO: 246793 - DNA, 51 bp, Artificial
  Synthetic oligonucleotide
agctgggccggatgttgcccactgacctgacttagcttggcagcgcctaag

SEQ ID NO: 246794 - DNA, 50 bp, Artificial
  Synthetic oligonucleotide
tagcccaaattcggtctttcttgtctacactcaggcgtacatagagctta

SEQ ID NO: 246795 - DNA, 50 bp, Artificial
  Synthetic oligonucleotide
cattttaagggcgcgaagagtcgctacaatgactactgcacttggagctg

SEQ ID NO: 246796 - DNA, 50 bp, Artificial
  Synthetic oligonucleotide
tagcctttgcgggccggctcttgggaggagcgccaagtgttttcatagtc

SEQ ID NO: 246797 - DNA, 50 bp, Artificial
  Synthetic oligonucleotide
catcgtctacgagaatagtctggcgcttagctgcaacctcaccgcagaca

SEQ ID NO: 246798 - DNA, 55 bp, Artificial
  Synthetic oligonucleotide
taagtaagaagaggggtgtgctttgaattgcaagggttgtccctactagaataac

SEQ ID NO: 246799 - DNA, 59 bp, Artificial
  Synthetic oligonucleotide
ctgtccaatctggttatatttaatggattcactacacaagaacgatgtgcctggtaaag

SEQ ID NO: 246800 - DNA, 50 bp, Artificial
  Synthetic oligonucleotide
atggccatatcccccattgtcccaacaggcgatggcaccgacctctggag

SEQ ID NO: 246801 - DNA, 50 bp, Artificial
  Synthetic oligonucleotide
aaggcgacatggccatatcccccattgtcccaacaggcgatggcaccgac

SEQ ID NO: 246802 - DNA, 50 bp, Artificial
  Synthetic oligonucleotide
ttcgtaagctttcgttccaccgagttcacaacccatattgagtgtgacag

SEQ ID NO: 246803 - DNA, 50 bp, Artificial
  Synthetic oligonucleotide
ctgccactccagtcgctccgcaaaccttgaagtgctcccgagcaatgtgc

SEQ ID NO: 246804 - DNA, 50 bp, Artificial
  Synthetic oligonucleotide
atgtgataccaaaatatgttgttacgacagcttcaggatttattaatggc

SEQ ID NO: 246805 - DNA, 50 bp, Artificial
  Synthetic oligonucleotide
tagccaagcagataagaagcgtaagttatacaacggaaccttgaaagtgg

SEQ ID NO: 246806 - DNA, 50 bp, Artificial
  Synthetic oligonucleotide
aaggcctattgtcccataagcccaacctttatcagggacgcattgcctaa

SEQ ID NO: 246807 - DNA, 50 bp, Artificial
  Synthetic oligonucleotide
tagccagggtgggacaccgcatttggaccgtcgacatactgtgtttggcc

SEQ ID NO: 246808 - DNA, 50 bp, Artificial
  Synthetic oligonucleotide
taggggaacctttattcttttctcctcctagaaaaggacttgcatatgca

SEQ ID NO: 246809 - DNA, 50 bp, Artificial
  Synthetic oligonucleotide
taggagtaaagacatctggtgttaccgtaataggttctggaacgggttca

SEQ ID NO: 246810 - DNA, 60 bp, Artificial
  Synthetic oligonucleotide
gagacagtgccttaacggcagcaggctccaccatttccaaatcagtacccgcagacggta

SEQ ID NO: 246811 - DNA, 50 bp, Artificial
  Synthetic oligonucleotide
ctgcggctagcccatgaagcgggctcacagtttaacggcgttctgtgtgg

SEQ ID NO: 246812 - DNA, 50 bp, Artificial
  Synthetic oligonucleotide
atgcgctggcatgggtgtgataatagctgctgttttggtgctcatctatt

SEQ ID NO: 246813 - DNA, 50 bp, Artificial
  Synthetic oligonucleotide
ttgatactgcgcatatttatcatatgctcttagcatgtatgaaccagttg

SEQ ID NO: 246814 - DNA, 50 bp, Artificial
  Synthetic oligonucleotide
tacccctcacgcacgcgccgatgccattccacactttcacgatccaagcg

SEQ ID NO: 246815 - DNA, 50 bp, Artificial
  Synthetic oligonucleotide
taccaagccacctttcgcgactacatcagccaagcaggcagtcttaaggc

SEQ ID NO: 246816 - DNA, 50 bp, Artificial
  Synthetic oligonucleotide
tacagagggctcggtctagcggttcctttagatcagcccgggaccaaccc

SEQ ID NO: 246817 - DNA, 50 bp, Artificial
  Synthetic oligonucleotide
tacactcataaccaaagcagggtcgacgatagcaatatccggagtcaaag

SEQ ID NO: 246818 - DNA, 50 bp, Artificial
  Synthetic oligonucleotide
cacgcaactcctttaacttctgggccgggtcagcagccgtcatcagggct

SEQ ID NO: 246819 - DNA, 50 bp, Artificial
  Synthetic oligonucleotide
tttaacaaatggcgatgcagtcggttcctgtgtttatcgtgggactatca

SEQ ID NO: 246820 - DNA, 50 bp, Artificial
  Synthetic oligonucleotide
gttctgagaagcggacatctccttggtagaatccacggatatcgttgatt

SEQ ID NO: 246821 - DNA, 55 bp, Artificial
  Synthetic oligonucleotide
cttaattcttcatggggtggataaagaacgcatgaacctgaataacggggacact

SEQ ID NO: 246822 - DNA, 50 bp, Artificial
  Synthetic oligonucleotide
gttgcgttgacatgtgttttgttcgccttagctcatcatccaggtaccat

SEQ ID NO: 246823 - DNA, 50 bp, Artificial
  Synthetic oligonucleotide
aaaggatttactgttcttgtagatgaggtgggaccaaatcgtccgaatgg

SEQ ID NO: 246824 - DNA, 50 bp, Artificial
  Synthetic oligonucleotide
gaccacaaggctagtcgcttgggtgtgcgctcgtctgatccaggtgcctt

SEQ ID NO: 246825 - DNA, 50 bp, Artificial
  Synthetic oligonucleotide
cttggagcgccttaccctgactgaccgtagtctcttgcgcctggggcttt

SEQ ID NO: 246826 - DNA, 50 bp, Artificial
  Synthetic oligonucleotide
caagacactttatgatggcgtaggatggactgaagaagttatgacctttt

SEQ ID NO: 246827 - DNA, 50 bp, Artificial
  Synthetic oligonucleotide
gacagtggaatagagctatagtaaactgtgggtaagaagtcaactggaaa

SEQ ID NO: 246828 - DNA, 50 bp, Artificial
  Synthetic oligonucleotide
aaaattgggattggccgtccaaaacatgggatgacagttgtgaatcatgt

SEQ ID NO: 246829 - DNA, 50 bp, Artificial
  Synthetic oligonucleotide
gacaaccattgcaagtaatagcagtgcagtggaggctgaaacggccagtt

SEQ ID NO: 246830 - DNA, 50 bp, Artificial
  Synthetic oligonucleotide
gaatttagagagcaacctctaaagccttgaggctctaagcctgaacccta

SEQ ID NO: 246831 - DNA, 50 bp, Artificial
  Synthetic oligonucleotide
caagcccatcataattgtcagccctgcaccaatttgcggaacagcaacga

SEQ ID NO: 246832 - DNA, 56 bp, Artificial
  Synthetic oligonucleotide
gagacaccctaaagcgcctgaaagcgtccctacaagcccacgtctaattattcctg

SEQ ID NO: 246833 - DNA, 50 bp, Artificial
  Synthetic oligonucleotide
caatgcctcgccaggcaaaggtcgatagggccttgtaaagtgcccctggc

SEQ ID NO: 246834 - DNA, 50 bp, Artificial
  Synthetic oligonucleotide
tttgtttagtgatgcgccggatagcgtgattgagtttggggagtaagaca

SEQ ID NO: 246835 - DNA, 50 bp, Artificial
  Synthetic oligonucleotide
taagagctctgcaccgccacctaatgcacgaccttgagcagccgtaacga

SEQ ID NO: 246836 - DNA, 50 bp, Artificial
  Synthetic oligonucleotide
aaaacgcacctctcatatattgcaagcaaacaagagggatattccaagcg

SEQ ID NO: 246837 - DNA, 50 bp, Artificial
  Synthetic oligonucleotide
cttttccgactgtaacgactgcctgggctggtcgcataggccatgccgct

SEQ ID NO: 246838 - DNA, 50 bp, Artificial
  Synthetic oligonucleotide
caatcaaccacaagaggaagtcgaagctttgcaggaacagctaaaggaac

SEQ ID NO: 246839 - DNA, 50 bp, Artificial
  Synthetic oligonucleotide
gaaacagagtgtttattcacggctttaacagacctaacaaggagcatcga

SEQ ID NO: 246840 - DNA, 50 bp, Artificial
  Synthetic oligonucleotide
taaacaaaaaggtcacagatagagaacgaaaagtttggttttcgaaaata

SEQ ID NO: 246841 - DNA, 50 bp, Artificial
  Synthetic oligonucleotide
taacctgctcaggcccgtaggcaattgacgacagggcatcgctggatagc

SEQ ID NO: 246842 - DNA, 50 bp, Artificial
  Synthetic oligonucleotide
gaaattaagtcttagctgccgatactgattgccactagcgataacgaact

SEQ ID NO: 246843 - DNA, 60 bp, Artificial
  Synthetic oligonucleotide
gacttttagacaatgttattccaaatcaagccaaatcaactctaaatatgatatccattg

SEQ ID NO: 246844 - DNA, 50 bp, Artificial
  Synthetic oligonucleotide
taaccagaccgaagaaacgttcttgcatgagcgggttaagtccagatgtc

SEQ ID NO: 246845 - DNA, 50 bp, Artificial
  Synthetic oligonucleotide
tagaggacggtattttagttggctttgacgcggtatctgctacctacagg

SEQ ID NO: 246846 - DNA, 50 bp, Artificial
  Synthetic oligonucleotide
ctgggaactgagccgactgaacactttccgaaaattctagatagtaacgg

SEQ ID NO: 246847 - DNA, 50 bp, Artificial
  Synthetic oligonucleotide
attccgaaaaggtcagtcagatgtttgggtgcccaaacaccaagcatcgt

SEQ ID NO: 246848 - DNA, 50 bp, Artificial
  Synthetic oligonucleotide
aactaattgcggagtggttaattcgcatgtggcaaaacaaaggcgacaaa

SEQ ID NO: 246849 - DNA, 50 bp, Artificial
  Synthetic oligonucleotide
gtcgttcggaagctgacacgcaagtgacacttggcgattatacctttaaa

SEQ ID NO: 246850 - DNA, 50 bp, Artificial
  Synthetic oligonucleotide
gtctacctcccgcgctgaaccatagatttgtgccagataaacactgtctg

SEQ ID NO: 246851 - DNA, 50 bp, Artificial
  Synthetic oligonucleotide
ctgttatgcgagctatgcgagccattgaccgttccgatgtagtactcatg

SEQ ID NO: 246852 - DNA, 50 bp, Artificial
  Synthetic oligonucleotide
aacgtagatttctttcaacgtgaattgccagacggtaaaactgaattgtt

SEQ ID NO: 246853 - DNA, 50 bp, Artificial
  Synthetic oligonucleotide
gtctagccattttccaagctcggtccccttcaatatccagtctgaagggg

SEQ ID NO: 246854 - DNA, 59 bp, Artificial
  Synthetic oligonucleotide
gacttagctgtgaactactcgcatagttcgttttgaaggtcttgcgatgtctcttaacc

SEQ ID NO: 246855 - DNA, 50 bp, Artificial
  Synthetic oligonucleotide
ttggaggatttttctatgattacagctgaccttttagcacctgttaagga

SEQ ID NO: 246856 - DNA, 50 bp, Artificial
  Synthetic oligonucleotide
attggacacccccggacctgaggttgcaataacgactcccggctcacctg

SEQ ID NO: 246857 - DNA, 50 bp, Artificial
  Synthetic oligonucleotide
gtctcagccgtaccagtcttggcactgattggcacgctctctccctggga

SEQ ID NO: 246858 - DNA, 50 bp, Artificial
  Synthetic oligonucleotide
aacgggctagtgcgtttgaaatcatagattgtcacatggcgttcaggtcg

SEQ ID NO: 246859 - DNA, 50 bp, Artificial
  Synthetic oligonucleotide
cttacaaatcaagcgaattctacgctcgtgaagctatcaaaccattggtt

SEQ ID NO: 246860 - DNA, 50 bp, Artificial
  Synthetic oligonucleotide
cagtggccaacatccggcccagctcaaagatcaggtctgcagtccagccg

SEQ ID NO: 246861 - DNA, 50 bp, Artificial
  Synthetic oligonucleotide
cttactatggcctttgcaacccttggtttgattcaactattccatgccta

SEQ ID NO: 246862 - DNA, 50 bp, Artificial
  Synthetic oligonucleotide
caggattagcaatcgtttcataggtaaattcataatctttagccgttact

SEQ ID NO: 246863 - DNA, 50 bp, Artificial
  Synthetic oligonucleotide
gactccatgccgcgagacaccgcctcaatccccagactaccgctgcctgc

SEQ ID NO: 246864 - DNA, 50 bp, Artificial
  Synthetic oligonucleotide
gactcacaggggcgaaccaacgcagagcgattgcaaagtggattactacc

SEQ ID NO: 246865 - DNA, 58 bp, Artificial
  Synthetic oligonucleotide
cctcttgaaatgacggacacggcacttatggcaggtttgcaaaagaacgtctatccgc

SEQ ID NO: 246866 - DNA, 50 bp, Artificial
  Synthetic oligonucleotide
gtgacgatggcgaacctagcgggacggctggggtgcctatgctgacgatt

SEQ ID NO: 246867 - DNA, 50 bp, Artificial
  Synthetic oligonucleotide
cttccaaatggcagcaagcgtcaggccaatctatacgcacttggtctgcg

SEQ ID NO: 246868 - DNA, 50 bp, Artificial
  Synthetic oligonucleotide
gtgaggagcgtgttattgccagtcctgttgccggtacgacgcgtgacgct

SEQ ID NO: 246869 - DNA, 50 bp, Artificial
  Synthetic oligonucleotide
gtgctgttgggctaaggctacaatcgcttgctccggctgcagtccctccg

SEQ ID NO: 246870 - DNA, 50 bp, Artificial
  Synthetic oligonucleotide
aaccagagcaactgtgatgttatccagccctccagcattgttggcaaagc

SEQ ID NO: 246871 - DNA, 50 bp, Artificial
  Synthetic oligonucleotide
cagaacaaccaagtccacaatcgactccggaacctagtccaagtctgcaa

SEQ ID NO: 246872 - DNA, 50 bp, Artificial
  Synthetic oligonucleotide
cactgcgttatatctgccaatcgttgagaatggcgttaaagggatattga

SEQ ID NO: 246873 - DNA, 50 bp, Artificial
  Synthetic oligonucleotide
gtgtcgaactcttggtagaactaataggtgttctgggtccacagaggacg

SEQ ID NO: 246874 - DNA, 50 bp, Artificial
  Synthetic oligonucleotide
gtgtctaattactacgagccactcgatacttatttatcttacccagcagt

SEQ ID NO: 246875 - DNA, 50 bp, Artificial
  Synthetic oligonucleotide
ggatgacggttaccatggcggatggtcgagtggtaacagctcgcgccctc

SEQ ID NO: 246876 - DNA, 60 bp, Artificial
  Synthetic oligonucleotide
ggccggttacacaagcttggcacatcggatttcctgatgctaagctaccggatagtcagg

SEQ ID NO: 246877 - DNA, 50 bp, Artificial
  Synthetic oligonucleotide
agaagtagtagcgaaagattttctaccagactatcaggacgaaaccagtg

SEQ ID NO: 246878 - DNA, 50 bp, Artificial
  Synthetic oligonucleotide
tcgcccaactaatgcccgcacaccgccggtttttggatccaaggcaacac

SEQ ID NO: 246879 - DNA, 50 bp, Artificial
  Synthetic oligonucleotide
agaacttgaccacttatatgagccggcggggacgcttggagcgcgatgct

SEQ ID NO: 246880 - DNA, 50 bp, Artificial
  Synthetic oligonucleotide
ccttcttgcccccgttcaggcacgacatcggtcgccccaaactctagagc

SEQ ID NO: 246881 - DNA, 50 bp, Artificial
  Synthetic oligonucleotide
cggataaatcacgtaatcgaacaagtacccaggctgtattagggattggc

SEQ ID NO: 246882 - DNA, 50 bp, Artificial
  Synthetic oligonucleotide
acttccagcggggacaccatctttgggaacaatgataaatgaagcgacta

SEQ ID NO: 246883 - DNA, 50 bp, Artificial
  Synthetic oligonucleotide
ggccactacaatcaagagaatgactgtcgcacccgcattacggctacgca

SEQ ID NO: 246884 - DNA, 50 bp, Artificial
  Synthetic oligonucleotide
gctacttggcgctcccgtcccttcaccgaaaccgtaatcggatgccctcc

SEQ ID NO: 246885 - DNA, 50 bp, Artificial
  Synthetic oligonucleotide
cctgaggaccggtgctagtcgctgtggtgccagttggagttaccttggcg

SEQ ID NO: 246886 - DNA, 50 bp, Artificial
  Synthetic oligonucleotide
tgccaggggcactttacaaggccctatcgacctttgcctggcgaggcatt

SEQ ID NO: 246887 - DNA, 54 bp, Artificial
  Synthetic oligonucleotide
cctggtgaacctgtagtgacgaccggtgaacccttatctgtggaattgggtccg

SEQ ID NO: 246888 - DNA, 50 bp, Artificial
  Synthetic oligonucleotide
tgcggatagcctagattggacatcctttacgcagcgagctaacttgacgg

SEQ ID NO: 246889 - DNA, 50 bp, Artificial
  Synthetic oligonucleotide
aggctcctagcggctaccctagttggggcagccatgtctcaggctggtgc

SEQ ID NO: 246890 - DNA, 50 bp, Artificial
  Synthetic oligonucleotide
cggccttaggcactgccatgatttgcggtgagaatccggccgcttgactc

SEQ ID NO: 246891 - DNA, 50 bp, Artificial
  Synthetic oligonucleotide
tgcttatcctgaaactttacgctaatatagccctctggggtcggagcagg

SEQ ID NO: 246892 - DNA, 50 bp, Artificial
  Synthetic oligonucleotide
cctcttacgaaaaggcaaggacttctactacgaatgtgcaggcagatgta

SEQ ID NO: 246893 - DNA, 50 bp, Artificial
  Synthetic oligonucleotide
aggtaacaaattcagaatccacacgctgataaactaccgcctctccatta

SEQ ID NO: 246894 - DNA, 50 bp, Artificial
  Synthetic oligonucleotide
cgggagatacagccccagtagagcctgcgcttccagcatacacaagctca

SEQ ID NO: 246895 - DNA, 50 bp, Artificial
  Synthetic oligonucleotide
gcgtactgctggatttgccacaatttcttacaatgattcgctagcgccaa

SEQ ID NO: 246896 - DNA, 50 bp, Artificial
  Synthetic oligonucleotide
aggtcacctcatactaccatagacactactattagtgtcaaagatgtgtc

SEQ ID NO: 246897 - DNA, 50 bp, Artificial
  Synthetic oligonucleotide
gcgtaccagctactgcataagcgttaagtaactgaggagacaccagacag

SEQ ID NO: 246898 - DNA, 55 bp, Artificial
  Synthetic oligonucleotide
ggcagtttgtcttggaataggcaagaagtaagtcgcttgaacgaaaagttggaaa

SEQ ID NO: 246899 - DNA, 50 bp, Artificial
  Synthetic oligonucleotide
cctattcaccattcctatattatacctagctatgggtcacatggtgggct

SEQ ID NO: 246900 - DNA, 50 bp, Artificial
  Synthetic oligonucleotide
gcggggcgcctcatcgctagcttcggagctgctattctcctacctgtcgg

SEQ ID NO: 246901 - DNA, 50 bp, Artificial
  Synthetic oligonucleotide
tggccgtttgttaaggttgccattatactttcttattgtgggcaaggggc

SEQ ID NO: 246902 - DNA, 50 bp, Artificial
  Synthetic oligonucleotide
tctgagagttgtctgctttaatccctcggtattggtccaagtcccatgaa

SEQ ID NO: 246903 - DNA, 50 bp, Artificial
  Synthetic oligonucleotide
tctgataccgttaaggtcttgcgattgttgccggctaaaactaactgggt

SEQ ID NO: 246904 - DNA, 50 bp, Artificial
  Synthetic oligonucleotide
tctgcaacgccaagcattgagagccgtgcgcgtgctagccgtaatgttta

SEQ ID NO: 246905 - DNA, 50 bp, Artificial
  Synthetic oligonucleotide
ggaacaaggaatcgatccattcggtaagcgtttcgaacgcactgctaatt

SEQ ID NO: 246906 - DNA, 50 bp, Artificial
  Synthetic oligonucleotide
tctggcctgtctagtcggcggtggttccctagccctaggaggtgtccttt

SEQ ID NO: 246907 - DNA, 50 bp, Artificial
  Synthetic oligonucleotide
ggaaaactcggttagtaagaaatggttttatgtagttgtttcagtagccg

SEQ ID NO: 246908 - DNA, 50 bp, Artificial
  Synthetic oligonucleotide
cgcactcagcggttcggacttaccgtatcatcgcgtcggtgcccctcctc

SEQ ID NO: 246909 - DNA, 60 bp, Artificial
  Synthetic oligonucleotide
taaggatctcatctgccaaagactttgggtctctaccaaaatagaactcggcagattctc

SEQ ID NO: 246910 - DNA, 59 bp, Artificial
  Synthetic oligonucleotide
ggcaatcattcaaaagttcttgctcaggggtttcataggaagcaggcattacaacggac

SEQ ID NO: 246911 - DNA, 50 bp, Artificial
  Synthetic oligonucleotide
agcccgcggacgaaactctgagccgtaataaaccgcaccgtaggtcccca

SEQ ID NO: 246912 - DNA, 50 bp, Artificial
  Synthetic oligonucleotide
tctattttagtttacgaactgttttataattagggcgttttataccaaca

SEQ ID NO: 246913 - DNA, 50 bp, Artificial
  Synthetic oligonucleotide
cgcatgccttctgccccagccattaccacgtagggcgcaacattcccgat

SEQ ID NO: 246914 - DNA, 50 bp, Artificial
  Synthetic oligonucleotide
cgccgttacagcatcgttggcctgtcccgtgtggctgtaagcatgcagcc

SEQ ID NO: 246915 - DNA, 50 bp, Artificial
  Synthetic oligonucleotide
cgccttagtgcgggcctacctgacagcctactatgcgcgtgaatggggca

SEQ ID NO: 246916 - DNA, 50 bp, Artificial
  Synthetic oligonucleotide
ggacgctatgtcccgggaaactctctggtacaccgcctagacccccgcag

SEQ ID NO: 246917 - DNA, 50 bp, Artificial
  Synthetic oligonucleotide
gctgggatattggcaggggcactagccaccgtcaccaaaccagctccgct

SEQ ID NO: 246918 - DNA, 50 bp, Artificial
  Synthetic oligonucleotide
agagggaactgcagcatttgaagaacgaagtcgcaaacatgtccgaagag

SEQ ID NO: 246919 - DNA, 50 bp, Artificial
  Synthetic oligonucleotide
agagctcggtctagcagttcctttagatcagcccgggaccaacccgagtc

SEQ ID NO: 246920 - DNA, 50 bp, Artificial
  Synthetic oligonucleotide
agagccatcaagtgacgagcacttttcaggttacaccagtagatgtaggc

SEQ ID NO: 246921 - DNA, 59 bp, Artificial
  Synthetic oligonucleotide
ccttgattgtatccgttattgctcgtaactctttcactgtgatagaggggttgcagtat

SEQ ID NO: 246922 - DNA, 50 bp, Artificial
  Synthetic oligonucleotide
tcggtttctttcgctaagttggtcaaggagttaactgcaatctaccctga

SEQ ID NO: 246923 - DNA, 50 bp, Artificial
  Synthetic oligonucleotide
ggaggcctatgtcgcggaaatgcgttcgggtttggctgctggccagtcat

SEQ ID NO: 246924 - DNA, 50 bp, Artificial
  Synthetic oligonucleotide
gctctttactgcggcacaagaatacggcttagaaactgtgggcgttactc

SEQ ID NO: 246925 - DNA, 50 bp, Artificial
  Synthetic oligonucleotide
tcgggacctgtgacaacaatggcccgcttgcgacctagggccttcatagc

SEQ ID NO: 246926 - DNA, 50 bp, Artificial
  Synthetic oligonucleotide
cgaatcaaaaaattgagtctgccattcaagaacaactccgtcgtttagag

SEQ ID NO: 246927 - DNA, 50 bp, Artificial
  Synthetic oligonucleotide
ggagtatgctgagtttgtcatggaggtggtcaagcttttatcaagcacca

SEQ ID NO: 246928 - DNA, 50 bp, Artificial
  Synthetic oligonucleotide
agctgaggcgaacattctcaggtgctccgaatccggcaccagtcaccaga

SEQ ID NO: 246929 - DNA, 50 bp, Artificial
  Synthetic oligonucleotide
cgaacgctataaggttgccattgaattgccaagtttacggactccaagtc

SEQ ID NO: 246930 - DNA, 50 bp, Artificial
  Synthetic oligonucleotide
cccgctgctcgagccgcctgcaaatcgatttctcggtcaccaatcgccag

SEQ ID NO: 246931 - DNA, 50 bp, Artificial
  Synthetic oligonucleotide
tcaagcgttctagtgacgatggcgaacctagcgggacggctggggtgcct

SEQ ID NO: 246932 - DNA, 59 bp, Artificial
  Synthetic oligonucleotide
ccttgcgagcgcaaccttatcaatattcttagatattgggatggttattctagtaggga

SEQ ID NO: 246933 - DNA, 50 bp, Artificial
  Synthetic oligonucleotide
gcccaactgggcagtcaactggtttgttggtgacctggctcgtcttccta

SEQ ID NO: 246934 - DNA, 50 bp, Artificial
  Synthetic oligonucleotide
cccctttgtttttgttacgccgtaagagaaacgcgtaattagtgttagat

SEQ ID NO: 246935 - DNA, 50 bp, Artificial
  Synthetic oligonucleotide
cccctcgcatagagagggcgtcggcccgattgggggtaattgctagctcg

SEQ ID NO: 246936 - DNA, 50 bp, Artificial
  Synthetic oligonucleotide
ggtctcgtcaaagccagttcgaataataccaccttcggtaatcacgtgag

SEQ ID NO: 246937 - DNA, 50 bp, Artificial
  Synthetic oligonucleotide
gccaagtcaggcgagtcagctgcccgtttgttggagcgcttaggagcgat

SEQ ID NO: 246938 - DNA, 50 bp, Artificial
  Synthetic oligonucleotide
ggttagtgaagcaaaatgtccgaggctgcgtaaccaattgataagaccaa

SEQ ID NO: 246939 - DNA, 50 bp, Artificial
  Synthetic oligonucleotide
ctagaaccaacaacgcttttagccatcatacgtgcatctaaactattagg

SEQ ID NO: 246940 - DNA, 50 bp, Artificial
  Synthetic oligonucleotide
gtaagaaattccgcctccgtggcaagggagcaccaagcttgcgtggtggc

SEQ ID NO: 246941 - DNA, 50 bp, Artificial
  Synthetic oligonucleotide
atcggaaggaacggatctagccattcagacaagcgaagggacgacaagcc

SEQ ID NO: 246942 - DNA, 50 bp, Artificial
  Synthetic oligonucleotide
gtaatcacttaccccgattgtggctagacgcgcagccaatttatcagtcg

SEQ ID NO: 246943 - DNA, 60 bp, Artificial
  Synthetic oligonucleotide
ccttggaatttaactcagatagctttgagagcctctcagaggcctcagaatcgattctag

SEQ ID NO: 246944 - DNA, 50 bp, Artificial
  Synthetic oligonucleotide
atctggtgtcgacaaattgactcgtgcagcttaccacttgctaggtcttg

SEQ ID NO: 246945 - DNA, 50 bp, Artificial
  Synthetic oligonucleotide
gatttgtcagcactaaaacgtccaaatccattagcctgccaatcggtaaa

SEQ ID NO: 246946 - DNA, 50 bp, Artificial
  Synthetic oligonucleotide
ccaatctgttgcaccgttatcaatcattggggctaaacaaggttctggtt

SEQ ID NO: 246947 - DNA, 50 bp, Artificial
  Synthetic oligonucleotide
gattggacatatacaaattgactctgctgaattaaggacatatgtcaagg

SEQ ID NO: 246948 - DNA, 50 bp, Artificial
  Synthetic oligonucleotide
gatgtgacggacttagaggattataagcaggttacagctaaggggacacc

SEQ ID NO: 246949 - DNA, 50 bp, Artificial
  Synthetic oligonucleotide
tagttggcaggaccaaatcagaccaggtagtcccggcaagcgagcccata

SEQ ID NO: 246950 - DNA, 50 bp, Artificial
  Synthetic oligonucleotide
ctctggctgaggcttaacttctggttgaggcttaacttctggttgaggtg

SEQ ID NO: 246951 - DNA, 50 bp, Artificial
  Synthetic oligonucleotide
ctctggtgatgcaccagtttctactttaggagtgactactttaacacttg

SEQ ID NO: 246952 - DNA, 50 bp, Artificial
  Synthetic oligonucleotide
tagttcaatttagaaagagcaacacaagataacgcgaccgcggttaaaag

SEQ ID NO: 246953 - DNA, 50 bp, Artificial
  Synthetic oligonucleotide
ccaacctcgagcgaatcaacgaatgtcgaaactgaaactgtggtcactcc

SEQ ID NO: 246954 - DNA, 59 bp, Artificial
  Synthetic oligonucleotide
cctttgccagaacgacgagccagcaatacgggccactccttcactcctatacaatcaaa

SEQ ID NO: 246955 - DNA, 50 bp, Artificial
  Synthetic oligonucleotide
gatagtccgcaaattgtttgactgacctatcttctccagtagttgtcgaa

SEQ ID NO: 246956 - DNA, 50 bp, Artificial
  Synthetic oligonucleotide
aatgaggtcctcaaagttactggtaggtaagtcagtacgaccgatagttt

SEQ ID NO: 246957 - DNA, 50 bp, Artificial
  Synthetic oligonucleotide
gtattggtgcgtcatcaggcgtggcaatcatgaatggagcacaggcggat

SEQ ID NO: 246958 - DNA, 50 bp, Artificial
  Synthetic oligonucleotide
tggcggatggtcgagtggtaacagctcgcgccctcaacgaagccagcctg

SEQ ID NO: 246959 - DNA, 50 bp, Artificial
  Synthetic oligonucleotide
gcgctttctgatacttcgcttggtcggtgctgcactagtagccattacac

SEQ ID NO: 246960 - DNA, 50 bp, Artificial
  Synthetic oligonucleotide
agtcaagcccaggtcaacccggggcaagctcaggtcgcccaagaaccttc

SEQ ID NO: 246961 - DNA, 50 bp, Artificial
  Synthetic oligonucleotide
ccgtctggtatgactggcttagaaacatctctttccctcggattgactta

SEQ ID NO: 246962 - DNA, 50 bp, Artificial
  Synthetic oligonucleotide
tggtagccccgtcagctcactcatccgccgactagcccgaccagtagggg

SEQ ID NO: 246963 - DNA, 50 bp, Artificial
  Synthetic oligonucleotide
acgcgcattaggacccattaatagtgaagccattacccagtatgaagaag

SEQ ID NO: 246964 - DNA, 50 bp, Artificial
  Synthetic oligonucleotide
acgcccacacgcatacatgcgtaaattcggcgttagccgaatcaacttcc

SEQ ID NO: 246965 - DNA, 55 bp, Artificial
  Synthetic oligonucleotide
ggatctagaaaggaggagttttggcaactggaaagaaaataatactcattatcct

SEQ ID NO: 246966 - DNA, 50 bp, Artificial
  Synthetic oligonucleotide
acgcatggtagtgctataacccaatccaaggcttcgactcgcttccattt

SEQ ID NO: 246967 - DNA, 50 bp, Artificial
  Synthetic oligonucleotide
gcgcatgcttccgcagacttcggctatgataaggttaagtaagttagtga

SEQ ID NO: 246968 - DNA, 50 bp, Artificial
  Synthetic oligonucleotide
tcccccattgtcccaacaggcgatggcaccgacctctggagtgtctcctg

SEQ ID NO: 246969 - DNA, 50 bp, Artificial
  Synthetic oligonucleotide
tccccaaaccattcaagcgcttctccatccgacgcccaatcccccagaag

SEQ ID NO: 246970 - DNA, 50 bp, Artificial
  Synthetic oligonucleotide
tcccacgcgaaccgcagcgtctaattcaactagtttaaacaattgataca

SEQ ID NO: 246971 - DNA, 50 bp, Artificial
  Synthetic oligonucleotide
ccgctaggaatcgtcagacagaccgaaataatgtgatacgtatggtccaa

SEQ ID NO: 246972 - DNA, 50 bp, Artificial
  Synthetic oligonucleotide
gcgagtttggtagcttcgccccgttttacaatgcgtcttaagaagctcgc

SEQ ID NO: 246973 - DNA, 50 bp, Artificial
  Synthetic oligonucleotide
gcgagagatccctgttgtggcagttcctggtccgagcgccgggattacgg

SEQ ID NO: 246974 - DNA, 50 bp, Artificial
  Synthetic oligonucleotide
agtgagaggctctctcaaccgcctccgtccaggtgcccttgagggacgaa

SEQ ID NO: 246975 - DNA, 50 bp, Artificial
  Synthetic oligonucleotide
gcgacttggattgttgttcaggagctaagttgtggtcaatagcgagtacg

SEQ ID NO: 246976 - DNA, 58 bp, Artificial
  Synthetic oligonucleotide
cgaaatatgtatcacaactttaatacgtgctatccaactttaagagaagaacatggat

SEQ ID NO: 246977 - DNA, 50 bp, Artificial
  Synthetic oligonucleotide
gcgacatacggcgataacgttacttacaaccaaactggtagctaccttaa

SEQ ID NO: 246978 - DNA, 50 bp, Artificial
  Synthetic oligonucleotide
tccagacaagactttgattgatccgacctgtggttcggggactttctgta

SEQ ID NO: 246979 - DNA, 50 bp, Artificial
  Synthetic oligonucleotide
gggcactagccaccgtcaccaaaccagctccgctattgaccgtcgctagg

SEQ ID NO: 246980 - DNA, 50 bp, Artificial
  Synthetic oligonucleotide
ccgaaaagctaatgagggggtgtacaagtgatacaactttaactatccta

SEQ ID NO: 246981 - DNA, 50 bp, Artificial
  Synthetic oligonucleotide
tcagtaccagactgctttggaaattgcgctgggggcaagcagccagcata

SEQ ID NO: 246982 - DNA, 50 bp, Artificial
  Synthetic oligonucleotide
accatcccgaatagatagagtgaacggatcatctgtccaaatttgatcac

SEQ ID NO: 246983 - DNA, 50 bp, Artificial
  Synthetic oligonucleotide
ggtaatcatctacagctggaacccaaagtggattgcggtgaacgtgtgtt

SEQ ID NO: 246984 - DNA, 50 bp, Artificial
  Synthetic oligonucleotide
cgtgtcaagaggaagagtccacctgcgtctggtgccaagccaaccccgac

SEQ ID NO: 246985 - DNA, 52 bp, Artificial
  Synthetic oligonucleotide
ggagttgcggcgaagttcgaccttaacccctttggctaagacggagtcggga

SEQ ID NO: 246986 - DNA, 60 bp, Artificial
  Synthetic oligonucleotide
cgaagagatatttttgatgagccacagcacatttatactaaacgactcttatctgctatc

SEQ ID NO: 246987 - DNA, 60 bp, Artificial
  Synthetic oligonucleotide
cgaatgaagtaggatagaatcggttagaacttgtctacgatgataaacatatgttagagc

SEQ ID NO: 246988 - DNA, 60 bp, Artificial
  Synthetic oligonucleotide
taagctagctattgaagcaatgaaaagcaagtacaccacgctattgctagaaaatatgtt

SEQ ID NO: 246989 - DNA, 60 bp, Artificial
  Synthetic oligonucleotide
ggagatactttaatcattacaaagctagaatccttcgcaagaaatcctagagaagcatta

SEQ ID NO: 246990 - DNA, 59 bp, Artificial
  Synthetic oligonucleotide
cgacgctacagacgtttggtcgagaaggcgcaaagagctagtgacagtgcggcacgttt

SEQ ID NO: 246991 - DNA, 56 bp, Artificial
  Synthetic oligonucleotide
ggacttaaaagtttattatcctattcgatctggtttctttaatcgagtgacagata

SEQ ID NO: 246992 - DNA, 60 bp, Artificial
  Synthetic oligonucleotide
cgactcatgacacaaagagaagtggtcagaggatttaaatttcgctgaacgcattcaatt

SEQ ID NO: 246993 - DNA, 60 bp, Artificial
  Synthetic oligonucleotide
ggactggtgtcggtaacgtggctggggcaataacgtcagctggaatggatgctggctggg

SEQ ID NO: 246994 - DNA, 55 bp, Artificial
  Synthetic oligonucleotide
ggactaatgtcaaataattagacacgaaaatggaaattaagggactataattaga

SEQ ID NO: 246995 - DNA, 57 bp, Artificial
  Synthetic oligonucleotide
ggacgtgttgcgttgataccggaagatgataggtttgttcttaatcaacgtgttgct

SEQ ID NO: 246996 - DNA, 57 bp, Artificial
  Synthetic oligonucleotide
cgagaacctcagcattttagccctatcgttcaagaagacattccctttgacttcgga

SEQ ID NO: 246997 - DNA, 55 bp, Artificial
  Synthetic oligonucleotide
ggacgagtgttattggcgggcttgctactgacggtcacttctttaaattgaccgg

SEQ ID NO: 246998 - DNA, 60 bp, Artificial
  Synthetic oligonucleotide
cgagcattgctatcaagccctgcttcaacaccatacacatagtctaccagagaacgtttt

SEQ ID NO: 246999 - DNA, 60 bp, Artificial
  Synthetic oligonucleotide
taagatggcacacttcaagcgtgaaagatcgctgacaaaagtgcccgcaccctgtttcga

SEQ ID NO: 247000 - DNA, 60 bp, Artificial
  Synthetic oligonucleotide
ggacgaacaggcgtggtcacacctacagcgaatctaactcctgtgcaactagcggggaca

SEQ ID NO: 247001 - DNA, 60 bp, Artificial
  Synthetic oligonucleotide
cgaggacaatatcgcttatgcgagtgtccacttagacgaaagcacccctcacatgcacat

SEQ ID NO: 247002 - DNA, 60 bp, Artificial
  Synthetic oligonucleotide
ggaccgtatgccctggattattgcggcttatcttatcattggcttgagcatcggtggttc

SEQ ID NO: 247003 - DNA, 53 bp, Artificial
  Synthetic oligonucleotide
ccccttaaaattctagaaaattggtgcgtgacgtgagaaaataccttgtggtg

SEQ ID NO: 247004 - DNA, 60 bp, Artificial
  Synthetic oligonucleotide
ggtatcttgcagacgattaactgacattgtagccagcaagctcttagtaaccgccttttc

SEQ ID NO: 247005 - DNA, 60 bp, Artificial
  Synthetic oligonucleotide
cccgacacaagtgctcccagattagacgtgatagttgagctgccgtctgccagcttcgta

SEQ ID NO: 247006 - DNA, 58 bp, Artificial
  Synthetic oligonucleotide
ggtaatttgggaggagcttataagcataatgaacgtgtttttgagacgcactcaaaca

SEQ ID NO: 247007 - DNA, 58 bp, Artificial
  Synthetic oligonucleotide
gggttgcacgactcacggttgtccccgctagttgcacaggagttagattcgctgtagg

SEQ ID NO: 247008 - DNA, 54 bp, Artificial
  Synthetic oligonucleotide
gggttgatacttataccgtatccaaatactttgggtacccagagtggagagttg

SEQ ID NO: 247009 - DNA, 60 bp, Artificial
  Synthetic oligonucleotide
gggtcgaccatatgacgactcctccaggagcaaatgactgggatatcactgacggttctt

SEQ ID NO: 247010 - DNA, 57 bp, Artificial
  Synthetic oligonucleotide
caagctgaccttttggggtcagctttttttgtcagacaatagcgaagcggtctgact

SEQ ID NO: 247011 - DNA, 58 bp, Artificial
  Synthetic oligonucleotide
gggtaccttacttacgctctagtgatctatcctcagaacacattaaagatggattatt

SEQ ID NO: 247012 - DNA, 51 bp, Artificial
  Synthetic oligonucleotide
ccgaacgtttacttaaaacttagaacgtgatattattgattcaaccggaac

SEQ ID NO: 247013 - DNA, 49 bp, Artificial
  Synthetic oligonucleotide
ccgacttttatcatagacggaaaaaaaacaaacacccttaaagtttcta

SEQ ID NO: 247014 - DNA, 58 bp, Artificial
  Synthetic oligonucleotide
gggcgaagtcaccacattttcttatcatcagttgataaacctgtaaggttgaggaaca

SEQ ID NO: 247015 - DNA, 60 bp, Artificial
  Synthetic oligonucleotide
ggcagtctaagcggcacgattggaacaggcattgcgacctctgtaacgtggacgccttcg

SEQ ID NO: 247016 - DNA, 55 bp, Artificial
  Synthetic oligonucleotide
gggacggagagcggagcaggtagaatcctaccgtaatccctcaattagtattaaa

SEQ ID NO: 247017 - DNA, 57 bp, Artificial
  Synthetic oligonucleotide
gggaccggacatggacttgtactgataaagttcgcctctaaaatatcaagtgaagga

SEQ ID NO: 247018 - DNA, 56 bp, Artificial
  Synthetic oligonucleotide
ccggtgtttacaagggaggacagatttttatagatactaaaatcgatgtatataga

SEQ ID NO: 247019 - DNA, 57 bp, Artificial
  Synthetic oligonucleotide
ccgtatcttgtattgatacggacaatccacccaaagaccatacgattttattatcaa

SEQ ID NO: 247020 - DNA, 60 bp, Artificial
  Synthetic oligonucleotide
ccgtcagcgattgcagtatcatctagctgactaggattaggtaaaatcatattgttatca

SEQ ID NO: 247021 - DNA, 60 bp, Artificial
  Synthetic oligonucleotide
taaactcgatcaccttagggccatcagccgtcaggataagtcccgcatagaggacgccta

SEQ ID NO: 247022 - DNA, 57 bp, Artificial
  Synthetic oligonucleotide
ccgttatataaatcatctaccacttgcttattctctacatcgaacttaatcggttta

SEQ ID NO: 247023 - DNA, 56 bp, Artificial
  Synthetic oligonucleotide
ggctaagaaactacgctatactttctttaatggtgacaggcgggctacgtactata

SEQ ID NO: 247024 - DNA, 56 bp, Artificial
  Synthetic oligonucleotide
ggcgttggatccgcaggaattttgtctaagctattcccaacagttatcctcgggaa

SEQ ID NO: 247025 - DNA, 60 bp, Artificial
  Synthetic oligonucleotide
cctaattcgtcagcaagctctcgaatggtctttaaatcttcactcatgacaaattctcac

SEQ ID NO: 247026 - DNA, 58 bp, Artificial
  Synthetic oligonucleotide
cctaggttccttgttgtcaaatagaccatggaataaagcaagcggacatggtataata

SEQ ID NO: 247027 - DNA, 60 bp, Artificial
  Synthetic oligonucleotide
ggcggcacgattgtccacgcgggttgggttgaagttctatttgctgctgcgatgctgatt

SEQ ID NO: 247028 - DNA, 59 bp, Artificial
  Synthetic oligonucleotide
ggcgcacacgcgcctttgtgtagcgtttcgtggcaactttatccactaactcgtccaca

SEQ ID NO: 247029 - DNA, 58 bp, Artificial
  Synthetic oligonucleotide
ggcgatactctttgctgtctgacccgaattgtttcataacactgatacgaaccttgtt

SEQ ID NO: 247030 - DNA, 54 bp, Artificial
  Synthetic oligonucleotide
ggcgataataaacgttgtcatttgttaaaggtgtcggttgaaaacctgcttgga

SEQ ID NO: 247031 - DNA, 60 bp, Artificial
  Synthetic oligonucleotide
gctgcatgacctccaatgagtttgttccgataaatgacacgtgaaccctcggataaacta

SEQ ID NO: 247032 - DNA, 60 bp, Artificial
  Synthetic oligonucleotide
caagtggagtaattcatagtaaagggcaactctcacgagcgctgaattatattgtcaatc

SEQ ID NO: 247033 - DNA, 58 bp, Artificial
  Synthetic oligonucleotide
gctcggattaagaaacacgtggcgcgtacggagcgtcttgggattatgggagctctcg

SEQ ID NO: 247034 - DNA, 51 bp, Artificial
  Synthetic oligonucleotide
cgctttacagagcttttaaggagttttaaaacgaatcaggtaaacttatta

SEQ ID NO: 247035 - DNA, 53 bp, Artificial
  Synthetic oligonucleotide
gctcctaggcctctaagaagggcggggtcgtttttaatagcgtctaggataat

SEQ ID NO: 247036 - DNA, 55 bp, Artificial
  Synthetic oligonucleotide
cggacaaccaatcgaccctcttcttcacgggggtgatcaagaaggaaagcgacgc

SEQ ID NO: 247037 - DNA, 54 bp, Artificial
  Synthetic oligonucleotide
gctcacaactgttaagttatgatctacttttggttccgttgcaaattttaaaaa

SEQ ID NO: 247038 - DNA, 56 bp, Artificial
  Synthetic oligonucleotide
cggagcttacatggtaaaaaccacttataaagttaatagtgagaatttgtcatgag

SEQ ID NO: 247039 - DNA, 60 bp, Artificial
  Synthetic oligonucleotide
cggaggaatgtcatggtggcaagctattgagggagtaatcagcaatttccaaagtatacc

SEQ ID NO: 247040 - DNA, 55 bp, Artificial
  Synthetic oligonucleotide
gctagcgcaaaaaagcaccctaagtcttggcggacagggtgcttttcgtttagcg

SEQ ID NO: 247041 - DNA, 60 bp, Artificial
  Synthetic oligonucleotide
gctagaatgttatcacaatagacgagcaataggcttgccggctcgtctgtcattcgctac

SEQ ID NO: 247042 - DNA, 60 bp, Artificial
  Synthetic oligonucleotide
gctacattgcctgcgatagtctacttcccgacctcaaattcaatctcgtattgaacgtcc

SEQ ID NO: 247043 - DNA, 59 bp, Artificial
  Synthetic oligonucleotide
caagttatctcccaagttcacgcaagagcggttgggacaaccagtgtatctgccgtgta

SEQ ID NO: 247044 - DNA, 56 bp, Artificial
  Synthetic oligonucleotide
gctaagttcactaaagacactaaccccctattttgagcttttagagttgacagata

SEQ ID NO: 247045 - DNA, 54 bp, Artificial
  Synthetic oligonucleotide
cggcgaagacctagctttctacctaaccgaaagccagcaaacaccttccgcagt

SEQ ID NO: 247046 - DNA, 60 bp, Artificial
  Synthetic oligonucleotide
cggctcgagcgtaggcgctggttggcttgacgtccaatgccatgaatacttgaggggtta

SEQ ID NO: 247047 - DNA, 60 bp, Artificial
  Synthetic oligonucleotide
cggctgctaaaatactgagcaggcgactatttcgttctaatttagcttgcttttgattca

SEQ ID NO: 247048 - DNA, 56 bp, Artificial
  Synthetic oligonucleotide
gcgttctcaagaaccaaccgtatttatacaggaaaagattctgggttgattgtctc

SEQ ID NO: 247049 - DNA, 59 bp, Artificial
  Synthetic oligonucleotide
gcgttaggaacaagattaagcgaaaattggggaatagttcagttgctcatgttgagata

SEQ ID NO: 247050 - DNA, 59 bp, Artificial
  Synthetic oligonucleotide
gcgtacgagttggggaaagcctatgggatgaagtggattgaaaagcgcttcgatgacaa

SEQ ID NO: 247051 - DNA, 54 bp, Artificial
  Synthetic oligonucleotide
cggggttggtaccttcggtggtgcttctcgtatcgacgcaacttctggtgcggt

SEQ ID NO: 247052 - DNA, 57 bp, Artificial
  Synthetic oligonucleotide
cggtatcatgtattaataccgaggctcctcctaaagatcatacggtttacctctcaa

SEQ ID NO: 247053 - DNA, 56 bp, Artificial
  Synthetic oligonucleotide
cggtttagttggatattttgcggtctctaagactgcccctcgcagtcctttgccag

SEQ ID NO: 247054 - DNA, 56 bp, Artificial
  Synthetic oligonucleotide
gttcattgagtagaaactattcttgaatgagataagaatacgtagacgaaagtttt

SEQ ID NO: 247055 - DNA, 55 bp, Artificial
  Synthetic oligonucleotide
gttttgtgagtgaaagatgaatactttttactgtacttgggtacccaagtgcgaa

SEQ ID NO: 247056 - DNA, 60 bp, Artificial
  Synthetic oligonucleotide
gcgcaacgatcatgactttaatggttgaagactacacactcgatgaattagcttcactcc

SEQ ID NO: 247057 - DNA, 53 bp, Artificial
  Synthetic oligonucleotide
cggttttgaggcgagtttgcaacgggctaaggataaaactaaaggagaaagca

SEQ ID NO: 247058 - DNA, 60 bp, Artificial
  Synthetic oligonucleotide
gcgattgcaattgaggttacattatcgtagtttagtttcaggttctccatgatagggata

SEQ ID NO: 247059 - DNA, 60 bp, Artificial
  Synthetic oligonucleotide
cgtaagatacaaatagacactctcaattgattcgtaaataatctgcactttcgctaccgc

SEQ ID NO: 247060 - DNA, 55 bp, Artificial
  Synthetic oligonucleotide
gcgagtttgcaatgggttaaggataaaactaaaggagaaagcatagaccgcctta

SEQ ID NO: 247061 - DNA, 54 bp, Artificial
  Synthetic oligonucleotide
gcgaggggcagtcttggaaaccgcaaaatatccaacgaaaccgataaagcttgt

SEQ ID NO: 247062 - DNA, 57 bp, Artificial
  Synthetic oligonucleotide
cgagggatatataaataccctagaaaatcattcgaagagcttagaagcgaaaataga

SEQ ID NO: 247063 - DNA, 60 bp, Artificial
  Synthetic oligonucleotide
ggaccaatatctggcaccgctgacgaatggacatttactgggaactgataatggtggacg

SEQ ID NO: 247064 - DNA, 60 bp, Artificial
  Synthetic oligonucleotide
ggacagaggatgtctatgtggactatcgcagacccagtgcggtttcctttgtgcgctcgc

SEQ ID NO: 247065 - DNA, 58 bp, Artificial
  Synthetic oligonucleotide
ggaatttgggtggcgcatataagcacaatgaacggatttttgaaaagcactcaaacaa

SEQ ID NO: 247066 - DNA, 58 bp, Artificial
  Synthetic oligonucleotide
caatcagtatgaacattacagcgctaaagggggacggagagccgaccaagtagaaagc

SEQ ID NO: 247067 - DNA, 52 bp, Artificial
  Synthetic oligonucleotide
ggaatttccaactttgttggttcgatttttttaggaattatcactttagtga

SEQ ID NO: 247068 - DNA, 60 bp, Artificial
  Synthetic oligonucleotide
cgatgacaacgagaaatagtgtcacttttcacgaacgctagtgtgttgtagctagcgcaa

SEQ ID NO: 247069 - DNA, 60 bp, Artificial
  Synthetic oligonucleotide
ggaatgagcgctggggcattttatctttgaggaggctatttatggatcagaaagaagtat

SEQ ID NO: 247070 - DNA, 54 bp, Artificial
  Synthetic oligonucleotide
ggaagtggcaacaaaggcggtaaccgctaaggatgactggaagtacgagtttaa

SEQ ID NO: 247071 - DNA, 60 bp, Artificial
  Synthetic oligonucleotide
cgatgtatcaaagcaagagagttgaacttcttgaatggagtgataagttctgcgattaat

SEQ ID NO: 247072 - DNA, 60 bp, Artificial
  Synthetic oligonucleotide
ggaagccagtcgggatcctcgtattccctacctagcaggtctcgtatctgcgcgtgagga

SEQ ID NO: 247073 - DNA, 60 bp, Artificial
  Synthetic oligonucleotide
cgattgacatgtaaaacacgacagagcataactgtcgtgtgttcaaatcggagtctataa

SEQ ID NO: 247074 - DNA, 60 bp, Artificial
  Synthetic oligonucleotide
ggaactgccagcaagcatgccttttctcggggaaataccctgccatacacaggcgtgcct

SEQ ID NO: 247075 - DNA, 60 bp, Artificial
  Synthetic oligonucleotide
cgattgtcttcgctttgatcactgactttgtcagcgaatacgctcgccaaatcgtcaaaa

SEQ ID NO: 247076 - DNA, 52 bp, Artificial
  Synthetic oligonucleotide
ggaaagtggtcaggaattgccaaactccgaaaaaaaataccaagcgccggga

SEQ ID NO: 247077 - DNA, 60 bp, Artificial
  Synthetic oligonucleotide
caatcttcatgttgttttttcatgcttagtcaccgacaactttaagatcgctagcgacta

SEQ ID NO: 247078 - DNA, 58 bp, Artificial
  Synthetic oligonucleotide
ggaaaccttgatagaacgcgttgagacttgtggagatactcttcgatttattcgtcga

SEQ ID NO: 247079 - DNA, 53 bp, Artificial
  Synthetic oligonucleotide
gcttttgactaacgttttcacttagttccattgctgcggtttgtttaacctta

SEQ ID NO: 247080 - DNA, 57 bp, Artificial
  Synthetic oligonucleotide
gctttcggattctatagttttgaaacttgaatgcgatacgtggccctttatgagtaa

SEQ ID NO: 247081 - DNA, 55 bp, Artificial
  Synthetic oligonucleotide
gctttcatcaatacttagattttctgcttcgaagtacttttcaaataaagcccct

SEQ ID NO: 247082 - DNA, 56 bp, Artificial
  Synthetic oligonucleotide
gctttatccctactttttccccttgattgagtaagaggtgatgaatcttaggtgcc

SEQ ID NO: 247083 - DNA, 60 bp, Artificial
  Synthetic oligonucleotide
gcttgaacataatctcgattgacttccgtcattgttcttgcccgaatcagacgcgttgtc

SEQ ID NO: 247084 - DNA, 60 bp, Artificial
  Synthetic oligonucleotide
cgcatatctgaggagactttgaccaagttgcgcatttgaggcgtcgttgcccaagccacg

SEQ ID NO: 247085 - DNA, 57 bp, Artificial
  Synthetic oligonucleotide
cgcatggttatgattataagaaatagaagccgcactaaccttctttggagaaaatcc

SEQ ID NO: 247086 - DNA, 57 bp, Artificial
  Synthetic oligonucleotide
cgcattcaagtcatatagggacgactaacgttaaagaagaaattgggaagctcgatc

SEQ ID NO: 247087 - DNA, 60 bp, Artificial
  Synthetic oligonucleotide
cgccaataaagccgatatgtgctggttcatgccccgagcctcctccagacagaatgggaa

SEQ ID NO: 247088 - DNA, 60 bp, Artificial
  Synthetic oligonucleotide
caatcttgctttataaattgatgcgtgaagctgatagagacaacgggaaatcaatcacta

SEQ ID NO: 247089 - DNA, 60 bp, Artificial
  Synthetic oligonucleotide
gcttaatatagccataacgagctaatttctgcaaacgaatagcagcataagactcacttg

SEQ ID NO: 247090 - DNA, 54 bp, Artificial
  Synthetic oligonucleotide
gctgttatggaacttaaacggataagcagggactttaaaacaccagttatcgga

SEQ ID NO: 247091 - DNA, 57 bp, Artificial
  Synthetic oligonucleotide
cgccgttatatttagaaaggtaatttaccaatcactcaaatctatatgagtaataca

SEQ ID NO: 247092 - DNA, 59 bp, Artificial
  Synthetic oligonucleotide
gctggttctcttgggattggtgaaatacctggtactggttcgctaactggagcaggtga

SEQ ID NO: 247093 - DNA, 55 bp, Artificial
  Synthetic oligonucleotide
tgagcaatacctaccaacggttaaaaggcggggattataatgagtgataatttaa

SEQ ID NO: 247094 - DNA, 59 bp, Artificial
  Synthetic oligonucleotide
agaccgaaaatatgctaaactactagataagatattgcgtatttagacgagcaatagac

SEQ ID NO: 247095 - DNA, 56 bp, Artificial
  Synthetic oligonucleotide
aattgtgcgccattgttttaacaaacgataagcagttttagcataagttgaccgaa

SEQ ID NO: 247096 - DNA, 55 bp, Artificial
  Synthetic oligonucleotide
aattggcatgattggttattatgaactctcgaaaaaagtagcgaaaatcggtttc

SEQ ID NO: 247097 - DNA, 57 bp, Artificial
  Synthetic oligonucleotide
ttcaatatcgcttttgcagttacactcattactttagttgtaggaaatatcttaggg

SEQ ID NO: 247098 - DNA, 60 bp, Artificial
  Synthetic oligonucleotide
agacctctccgaatttcacatagagggctgttgcttttgattgatactcctgatatttag

SEQ ID NO: 247099 - DNA, 60 bp, Artificial
  Synthetic oligonucleotide
gtttcttgttgtcaaggagaccatggaataaagcaagcgtgcatgatataataaccaagt

SEQ ID NO: 247100 - DNA, 57 bp, Artificial
  Synthetic oligonucleotide
ttcagttagggtatttagaaagataggtgtttgtttgatgttttgtactcaatgaca

SEQ ID NO: 247101 - DNA, 60 bp, Artificial
  Synthetic oligonucleotide
aatgtcttcacggatgcaagataaactggtgagggattgcttcttacaagcttgtgggaa

SEQ ID NO: 247102 - DNA, 57 bp, Artificial
  Synthetic oligonucleotide
ttccaacaagagaaagcagtcttggaagtcgcaaaatattcggccaaagactttgaa

SEQ ID NO: 247103 - DNA, 54 bp, Artificial
  Synthetic oligonucleotide
aatgacctagccaaagcctttgggaatttaaaagcctttgaacataagctactg

SEQ ID NO: 247104 - DNA, 60 bp, Artificial
  Synthetic oligonucleotide
tgaccatttatgacactcaaatataaagacttgactagagagtattcattgacctaagaa

SEQ ID NO: 247105 - DNA, 52 bp, Artificial
  Synthetic oligonucleotide
ttcgccataaataacgttttttcgaactattttactggacgaaactagagag

SEQ ID NO: 247106 - DNA, 57 bp, Artificial
  Synthetic oligonucleotide
aatcgctcagatactccgacctttagaacgtttaggttcatatcctctcttagaagc

SEQ ID NO: 247107 - DNA, 59 bp, Artificial
  Synthetic oligonucleotide
aatcgaggagtacaagcggagcgacaaaagcaaacaggggatcttgaacttgtcgctca

SEQ ID NO: 247108 - DNA, 58 bp, Artificial
  Synthetic oligonucleotide
aatatccatgtttcgaaaattatcaaatcttggtagtcttttacagtatcagtgatta

SEQ ID NO: 247109 - DNA, 56 bp, Artificial
  Synthetic oligonucleotide
agagacagacacggaagaaggcttaagaaactacgctatactttctttaatggtca

SEQ ID NO: 247110 - DNA, 54 bp, Artificial
  Synthetic oligonucleotide
gtttacttcctccaccgccgtagtaatttgtttctatgagccaaaccttattga

SEQ ID NO: 247111 - DNA, 56 bp, Artificial
  Synthetic oligonucleotide
ttcggtaaccttgccgacccaacctgtccaagaatttttgctaagcgggcatgtgc

SEQ ID NO: 247112 - DNA, 60 bp, Artificial
  Synthetic oligonucleotide
aatagcttccgcttgctaggggtgagccgggagaagcgaccgcgatgaaagattctgtgc

SEQ ID NO: 247113 - DNA, 57 bp, Artificial
  Synthetic oligonucleotide
ttagtttccgatagtgacgtaaagtcactattatcaatacttaagaacaatatcgga

SEQ ID NO: 247114 - DNA, 60 bp, Artificial
  Synthetic oligonucleotide
ttataatgatgaagtaacgattcagtttagcgagcatatcatgccttatctgattaactt

SEQ ID NO: 247115 - DNA, 53 bp, Artificial
  Synthetic oligonucleotide
agaacgttttgctttattctgtagaaaatctagtaaacctgcctggttaataa

SEQ ID NO: 247116 - DNA, 60 bp, Artificial
  Synthetic oligonucleotide
tgatatcctctgtgagtttatcgacttcatacataccagctaatttctcaacttctacgc

SEQ ID NO: 247117 - DNA, 60 bp, Artificial
  Synthetic oligonucleotide
ttatcctgagttatgcgacgattacttggctgattatgcccgttctcactcgctatcaaa

SEQ ID NO: 247118 - DNA, 58 bp, Artificial
  Synthetic oligonucleotide
agaagcacggggattaaatgggctaaaaacgcacctctcatatattgcaagcaaacaa

SEQ ID NO: 247119 - DNA, 57 bp, Artificial
  Synthetic oligonucleotide
acaagctgtcctcctcttacaattccgagaacagctttttattatggctagaacaag

SEQ ID NO: 247120 - DNA, 60 bp, Artificial
  Synthetic oligonucleotide
ttatcgatgatatggttgtttggttgaatgtcagtgaggtgcgcaatggacgtgtgtcca

SEQ ID NO: 247121 - DNA, 60 bp, Artificial
  Synthetic oligonucleotide
caatttattttgctatgttcagctttatgatgtggtcggtcatatcttgcagatctccaa

SEQ ID NO: 247122 - DNA, 59 bp, Artificial
  Synthetic oligonucleotide
acaagcatataaatcgtgcattgtcccacgaaaatataacgattattaaacgtgacata

SEQ ID NO: 247123 - DNA, 54 bp, Artificial
  Synthetic oligonucleotide
agaatacggtctaaccttgtattgtggtcgtcagggtggcggaaaaacaatggc

SEQ ID NO: 247124 - DNA, 57 bp, Artificial
  Synthetic oligonucleotide
tgagtaaccattttgataccattgtgaaccatcggagttccgaatttttcgcagttg

SEQ ID NO: 247125 - DNA, 57 bp, Artificial
  Synthetic oligonucleotide
acaaacgagttagtaactgaaataactaaaggcgtacagcaaggcgcagacatatac

SEQ ID NO: 247126 - DNA, 60 bp, Artificial
  Synthetic oligonucleotide
agacacagcagtaagtggtaagtcagacacagtggtaagtggtaagtcagacacagtggt

SEQ ID NO: 247127 - DNA, 55 bp, Artificial
  Synthetic oligonucleotide
aatttttggttaatatctatcaatggagttgcgattgaaaaagtctattcatttt

SEQ ID NO: 247128 - DNA, 60 bp, Artificial
  Synthetic oligonucleotide
aatttttgagtgatgtgatttcttccatgtcatatctctttcatatgcccctaattctca

SEQ ID NO: 247129 - DNA, 59 bp, Artificial
  Synthetic oligonucleotide
aatttctgagcgatttatgccgtgaaagctacttgaccgtaagctagatcaaagtacgc

SEQ ID NO: 247130 - DNA, 60 bp, Artificial
  Synthetic oligonucleotide
agacatcaatgcgaggactagcaagtgcaaccgcacccccttgattgagaatgctggcca

SEQ ID NO: 247131 - DNA, 60 bp, Artificial
  Synthetic oligonucleotide
tgagcaggaaatgggacgtgttcgtgaggtcaagtgggggccacgtgtgatcgatctaga

SEQ ID NO: 247132 - DNA, 58 bp, Artificial
  Synthetic oligonucleotide
cacaacccctatatgagcctaggaggcgctactatattcgacaacgttgtctaattta

SEQ ID NO: 247133 - DNA, 56 bp, Artificial
  Synthetic oligonucleotide
aaggcggtttgttgactaatactggagttatagcacctaattcaactaaattgatg

SEQ ID NO: 247134 - DNA, 60 bp, Artificial
  Synthetic oligonucleotide
agattaaatatagcgtgattgatgactatatcctgttttacgaaattgaatctgataccg

SEQ ID NO: 247135 - DNA, 56 bp, Artificial
  Synthetic oligonucleotide
agattagggcaggtacaggggttgctaatccagcggttcctgaggttggagctggt

SEQ ID NO: 247136 - DNA, 49 bp, Artificial
  Synthetic oligonucleotide
agcaacgggtttgtgtacacaaaccccaaaaacgtagtttttgacttgt

SEQ ID NO: 247137 - DNA, 59 bp, Artificial
  Synthetic oligonucleotide
tcttaccctcaatcacataaattgaccctagccaaaggataagggcactgcttatgagt

SEQ ID NO: 247138 - DNA, 51 bp, Artificial
  Synthetic oligonucleotide
ttgaggggttgaccgaaaaccaagaatcgcaaaccgaaaacctagaacaaa

SEQ ID NO: 247139 - DNA, 57 bp, Artificial
  Synthetic oligonucleotide
tctgtctttcggtaatcgaaagacaagtcttaaggagggaaatctatgagttacatg

SEQ ID NO: 247140 - DNA, 58 bp, Artificial
  Synthetic oligonucleotide
aaggcaataactcccgtccgcttggacaggtcctgactgccataaatggtcaagcctg

SEQ ID NO: 247141 - DNA, 59 bp, Artificial
  Synthetic oligonucleotide
aaggaactgttaatttacaaactgctgatcaagtccaagcctatatgacacaaattgac

SEQ ID NO: 247142 - DNA, 58 bp, Artificial
  Synthetic oligonucleotide
aaggaaacccagatgtataaggcgcagaaatttgaagataatcagacaataggttatg

SEQ ID NO: 247143 - DNA, 57 bp, Artificial
  Synthetic oligonucleotide
gttggcaaccgtgcgtttacttaaaccatatgcgtggacaagttcatcaaaactaga

SEQ ID NO: 247144 - DNA, 52 bp, Artificial
  Synthetic oligonucleotide
aagcttgtcctaagtagggaaaggtgtcaactcaaaaaattgtttaacctga

SEQ ID NO: 247145 - DNA, 60 bp, Artificial
  Synthetic oligonucleotide
aagctacccattgactacgatagccaaatgtcattaatatttgccccactattgcaagag

SEQ ID NO: 247146 - DNA, 55 bp, Artificial
  Synthetic oligonucleotide
aagccttgtggaacaagcgcctgaggaccactggaggtcgtttcttccccaagga

SEQ ID NO: 247147 - DNA, 59 bp, Artificial
  Synthetic oligonucleotide
tctctttccgccctctctttagcttgcttcatgccttctaacgctttcctcaacacttc

SEQ ID NO: 247148 - DNA, 60 bp, Artificial
  Synthetic oligonucleotide
tctctataagtagtgtgaagatagtcatcggtaattgtaaattcagatataaaacggcaa

SEQ ID NO: 247149 - DNA, 60 bp, Artificial
  Synthetic oligonucleotide
ttgatagtgcagccggctctaatcaaaaagctttaactatggtaaagatgcgtgaaataa

SEQ ID NO: 247150 - DNA, 53 bp, Artificial
  Synthetic oligonucleotide
aagcaccctctaaaaagggtgctttttgtgcggttattcgcacgaaagttctc

SEQ ID NO: 247151 - DNA, 54 bp, Artificial
  Synthetic oligonucleotide
tctcgaaagcgaatacgactataaccaacccgttttttgtctggagttagcttc

SEQ ID NO: 247152 - DNA, 60 bp, Artificial
  Synthetic oligonucleotide
tgacacgattagaagcaggcgacacgttgattgtaaccaaacttgaccgtttcgcacgca

SEQ ID NO: 247153 - DNA, 58 bp, Artificial
  Synthetic oligonucleotide
aatactagttctgagaagaaaagtgaacaaattaaacttgattcagatgtattaatga

SEQ ID NO: 247154 - DNA, 60 bp, Artificial
  Synthetic oligonucleotide
cacagagcggtcgcgatccgtcaactcatagttgaggtgcgacctgctcgtgtctatatc

SEQ ID NO: 247155 - DNA, 55 bp, Artificial
  Synthetic oligonucleotide
aagttgtgccattttgtaccctaagttgtgccattttgtaccctaagttgtgcca

SEQ ID NO: 247156 - DNA, 55 bp, Artificial
  Synthetic oligonucleotide
ttctatattgataacgctaccttttttctgttatttgagaattcgtccaaaataa

SEQ ID NO: 247157 - DNA, 57 bp, Artificial
  Synthetic oligonucleotide
ttctcattaagtctcgaaaaagcttctgcaatccgtctataattctgaccgttttta

SEQ ID NO: 247158 - DNA, 60 bp, Artificial
  Synthetic oligonucleotide
tgaatatccgcaaccaataccacatctctttaatagtggtatgacttgggaagcattcgg

SEQ ID NO: 247159 - DNA, 60 bp, Artificial
  Synthetic oligonucleotide
aagtccatgcgtccgccgtagagaagcaagccctcatctgtcatggttcccacatcgcct

SEQ ID NO: 247160 - DNA, 57 bp, Artificial
  Synthetic oligonucleotide
agagttgaacttcttgaatggagtgataagttctgcgattaatttctcgttgtttaa

SEQ ID NO: 247161 - DNA, 58 bp, Artificial
  Synthetic oligonucleotide
aagtatctctgagagcctctaaaaactattttacagctagtttagagcgagctaagga

SEQ ID NO: 247162 - DNA, 54 bp, Artificial
  Synthetic oligonucleotide
agataacaaaaacgccctcgaaccacaaggacatttttgtcatgtttggacgac

SEQ ID NO: 247163 - DNA, 60 bp, Artificial
  Synthetic oligonucleotide
tcttttcattcacgtaatccttaatctgcttttcatacgacacagagcggtcgcgatccg

SEQ ID NO: 247164 - DNA, 59 bp, Artificial
  Synthetic oligonucleotide
agatcgtaaaacgccattgcaagaccaaaatgttcgtcaagccattggttatgctcgaa

SEQ ID NO: 247165 - DNA, 60 bp, Artificial
  Synthetic oligonucleotide
cacgacagagcataactgtcgtgtgttcaaatcggagtctataaatggctctcaatctta

SEQ ID NO: 247166 - DNA, 57 bp, Artificial
  Synthetic oligonucleotide
gttggaacccactggttgtcagctctcaacgctttaccctacacactcgtgacggcc

SEQ ID NO: 247167 - DNA, 58 bp, Artificial
  Synthetic oligonucleotide
ttcttttataggtattactgcttattgaacgcgcagacggaaggtagtgagcgtgaaa

SEQ ID NO: 247168 - DNA, 59 bp, Artificial
  Synthetic oligonucleotide
aaggtccttctcaaactcttagagtggtcagccagacacgccctagcacaagactcggc

SEQ ID NO: 247169 - DNA, 51 bp, Artificial
  Synthetic oligonucleotide
agatctaaatgttagatcttaggggctattttaacgggatttttcaggggt

SEQ ID NO: 247170 - DNA, 52 bp, Artificial
  Synthetic oligonucleotide
agatctccaagggtggtacatttttgggtcatccttaaatagtcctcgtttt

SEQ ID NO: 247171 - DNA, 57 bp, Artificial
  Synthetic oligonucleotide
ttgaaagcagaaattgataaaaagttacgtggcgagggcttataatgagtgataatt

SEQ ID NO: 247172 - DNA, 53 bp, Artificial
  Synthetic oligonucleotide
aaggctttagcgtttcggacggacacggacaaaggacggcagtcactggttac

SEQ ID NO: 247173 - DNA, 60 bp, Artificial
  Synthetic oligonucleotide
actcgtacagttttgcggatacccgatgcccatgaattgattagccaatataccattctc

SEQ ID NO: 247174 - DNA, 57 bp, Artificial
  Synthetic oligonucleotide
acgaggtcctgtataaagcaaaccacgcatttcaaggcgaacccccatcatgccacg

SEQ ID NO: 247175 - DNA, 60 bp, Artificial
  Synthetic oligonucleotide
acgacggccaacactgggctcgactgacaaatgacgcagagcacctagcaaaccttggta

SEQ ID NO: 247176 - DNA, 56 bp, Artificial
  Synthetic oligonucleotide
actgacacgcctaaaccagtctaacttgacctagcttattgtcaaataactttcac

SEQ ID NO: 247177 - DNA, 56 bp, Artificial
  Synthetic oligonucleotide
gttgagtgtcgaacgattgccggacggtggacttttaccagggctttcgatgcgga

SEQ ID NO: 247178 - DNA, 59 bp, Artificial
  Synthetic oligonucleotide
acgaacccactcacgcgcatccaactgactcgggttaaagcgctcaggatcctcctgtc

SEQ ID NO: 247179 - DNA, 59 bp, Artificial
  Synthetic oligonucleotide
accttttagagtagacaatatttatgctatgttttcaacaatatctagttttatgctga

SEQ ID NO: 247180 - DNA, 57 bp, Artificial
  Synthetic oligonucleotide
accttgtttagttcacggtatgcttgagttacaacgtgaaatctgtcggctacgatg

SEQ ID NO: 247181 - DNA, 58 bp, Artificial
  Synthetic oligonucleotide
tgtcaacagctccgacacgtaaggccaaagagcgtaccaaaggggtcgtcacgatggc

SEQ ID NO: 247182 - DNA, 50 bp, Artificial
  Synthetic oligonucleotide
acctaccaacggttaaaaggcggggattataatgagtgataatttaaaaa

SEQ ID NO: 247183 - DNA, 60 bp, Artificial
  Synthetic oligonucleotide
tgtcagaaattacgtcgatcggacaagaatctcgagcgccttttcatatttacgatcctg

SEQ ID NO: 247184 - DNA, 60 bp, Artificial
  Synthetic oligonucleotide
tgtctatatctttgttcgagtgattctcaaaaacacgttcattgtgcctataagctccgc

SEQ ID NO: 247185 - DNA, 57 bp, Artificial
  Synthetic oligonucleotide
accgtcacgctgggaacggagatataaggggtatcttgtagccgattaactgacata

SEQ ID NO: 247186 - DNA, 60 bp, Artificial
  Synthetic oligonucleotide
accgctgatggtcagtgtagttgcagaactaattgcggaatggttaatccgtatgtggca

SEQ ID NO: 247187 - DNA, 59 bp, Artificial
  Synthetic oligonucleotide
accgatgctccttacttagcacctgttccaaagcgtgggcgggagaatcgcacagccta

SEQ ID NO: 247188 - DNA, 60 bp, Artificial
  Synthetic oligonucleotide
gttgacaagccctcaacgaatcaagtattggacaagagtgatgttgttgcttatggaaca

SEQ ID NO: 247189 - DNA, 57 bp, Artificial
  Synthetic oligonucleotide
tgtgtttactgaacgcaagtttctaatttcggttatgtgtcgatagaggaaagtgtc

SEQ ID NO: 247190 - DNA, 55 bp, Artificial
  Synthetic oligonucleotide
tgttaaacggtacagctactaacgcctttgctagtatagggcgtaacgcagaacc

SEQ ID NO: 247191 - DNA, 58 bp, Artificial
  Synthetic oligonucleotide
tgttagaactcattactcttcttgttgttgtccgagtagtgttgcccttagcgtacga

SEQ ID NO: 247192 - DNA, 60 bp, Artificial
  Synthetic oligonucleotide
tggcagcccattaatcagatgcgacacaatctcagcctttggcgcacgctcacgcacacg

SEQ ID NO: 247193 - DNA, 54 bp, Artificial
  Synthetic oligonucleotide
tggcaattcctgaccactttccctcaacgtggggtaatcccccttatgagggaa

SEQ ID NO: 247194 - DNA, 56 bp, Artificial
  Synthetic oligonucleotide
actaacgaatattgggttaggagtatttatccaacaatgattcaaggccattccat

SEQ ID NO: 247195 - DNA, 58 bp, Artificial
  Synthetic oligonucleotide
actacttcgcggagaattacggagaaaccaacgttgcttatgccagtgtacatcttga

SEQ ID NO: 247196 - DNA, 56 bp, Artificial
  Synthetic oligonucleotide
tggccgacaaggtaaggatacacaacgtgccggtgtttgggcaaaagctactgttg

SEQ ID NO: 247197 - DNA, 56 bp, Artificial
  Synthetic oligonucleotide
actagaggtttcagacactttcctctatcgacacataaccgaaattagaaacttgc

SEQ ID NO: 247198 - DNA, 60 bp, Artificial
  Synthetic oligonucleotide
tggccgtcagaagagccttatcagtttgattctgtggtcatgaaccctccttattctgcg

SEQ ID NO: 247199 - DNA, 56 bp, Artificial
  Synthetic oligonucleotide
gttgaacgttgatttactacgaatatagactaacaaatcttcatagtatcgtttgt

SEQ ID NO: 247200 - DNA, 57 bp, Artificial
  Synthetic oligonucleotide
acgtctacgttcggctacaaaggtcttggcagccacacgcgctaaattgcgaatccg

SEQ ID NO: 247201 - DNA, 58 bp, Artificial
  Synthetic oligonucleotide
acggttgtccccgctagttgcacaggagttagattcgctgtaggtgtgaccacgcctg

SEQ ID NO: 247202 - DNA, 53 bp, Artificial
  Synthetic oligonucleotide
acggggtcgtagtaacccgttagtccatataccaagcagacgggcgctaggtg

SEQ ID NO: 247203 - DNA, 59 bp, Artificial
  Synthetic oligonucleotide
tgggggtcgtagtaaccccattacacgatgattgtattactcatatagatttgagtgat

SEQ ID NO: 247204 - DNA, 60 bp, Artificial
  Synthetic oligonucleotide
tggtggtaaagtccgtctgtcatcacagcatcgcggagcttagcccaatcctcaccgctt

SEQ ID NO: 247205 - DNA, 55 bp, Artificial
  Synthetic oligonucleotide
acgattttacgagcctttttctttgtaaacgatatttcatatcgttgccaaatgc

SEQ ID NO: 247206 - DNA, 54 bp, Artificial
  Synthetic oligonucleotide
tggtttcacagaattatagcggtacaaaaaactgtgtatagcggtacaaaaaac

SEQ ID NO: 247207 - DNA, 56 bp, Artificial
  Synthetic oligonucleotide
acgattagtcagctcacaaaatcctttgaccgtttatttaagcgtgctaaagttca

SEQ ID NO: 247208 - DNA, 58 bp, Artificial
  Synthetic oligonucleotide
actccatcaacggctaaaacattatctgtcactcgattaaagaaaccagatcgaatag

SEQ ID NO: 247209 - DNA, 56 bp, Artificial
  Synthetic oligonucleotide
acgatgactggtggggccggaatgttccaacatggtttcgattttggctcggtgcc

SEQ ID NO: 247210 - DNA, 60 bp, Artificial
  Synthetic oligonucleotide
gttcgtgagtgcccggctccaagcctttagaagcgtgcatgacaacggctttgtgatcaa

SEQ ID NO: 247211 - DNA, 56 bp, Artificial
  Synthetic oligonucleotide
actcgctttttcagtctcatcctgtaaaatccgaaactgcggagaaataccaaggc

SEQ ID NO: 247212 - DNA, 56 bp, Artificial
  Synthetic oligonucleotide
accaagtttgcgacgttctgccacgaaagttttagccaccacacgcgccaaattgc

SEQ ID NO: 247213 - DNA, 60 bp, Artificial
  Synthetic oligonucleotide
ttaagaggtcacttggagataatagcgttgctctagttcagataattagaactagcattg

SEQ ID NO: 247214 - DNA, 55 bp, Artificial
  Synthetic oligonucleotide
acattacagcgtgaaagggggacggagagccgaccaagtggaagcctaccgcacc

SEQ ID NO: 247215 - DNA, 57 bp, Artificial
  Synthetic oligonucleotide
acatggacagttgtggctaattataatcaacgagaattaaagaacgctaaattggta

SEQ ID NO: 247216 - DNA, 60 bp, Artificial
  Synthetic oligonucleotide
tgcacggattcgcaatttagcgcgtgtggctgccaagacctttgtagccgaacgtagacg

SEQ ID NO: 247217 - DNA, 55 bp, Artificial
  Synthetic oligonucleotide
tgcaaaagatgaccccaaacgaacgaaaaatgtacagaaatcgcccacttaaaga

SEQ ID NO: 247218 - DNA, 60 bp, Artificial
  Synthetic oligonucleotide
acatgcacatgggagtagtgcctttccaagatgggaaattgtcttctaaggcaatgtttg

SEQ ID NO: 247219 - DNA, 60 bp, Artificial
  Synthetic oligonucleotide
acttctacgcttatatgtgacggtctgctatcgcacaccgtcacgctgggaacggagata

SEQ ID NO: 247220 - DNA, 58 bp, Artificial
  Synthetic oligonucleotide
acagtgatggaaatacagcctaaacatccttatggggcagtcgttcttggattaggtg

SEQ ID NO: 247221 - DNA, 60 bp, Artificial
  Synthetic oligonucleotide
ccactcatcacataaaaccgcatctttccgaatagctcgcttagagctcttcttttcatt

SEQ ID NO: 247222 - DNA, 60 bp, Artificial
  Synthetic oligonucleotide
acttctatgtcccattgagacttgataaaagaagcggttgcctgtggcttccaatcaagc

SEQ ID NO: 247223 - DNA, 56 bp, Artificial
  Synthetic oligonucleotide
acagtcgttttatgccgtgaaagttatttgacaataagctaggtcaagttagactg

SEQ ID NO: 247224 - DNA, 60 bp, Artificial
  Synthetic oligonucleotide
acttgattttctgagtcaccgtgataggcgatgccatcaatgattgtcacctcgccattt

SEQ ID NO: 247225 - DNA, 51 bp, Artificial
  Synthetic oligonucleotide
acagtcgatactgttcggtcagggttacaccctaacaacctaaaggcgggt

SEQ ID NO: 247226 - DNA, 54 bp, Artificial
  Synthetic oligonucleotide
ttagagtcggtcataaatggtagtcaaaactgtttctaacagtactaaaatcgg

SEQ ID NO: 247227 - DNA, 60 bp, Artificial
  Synthetic oligonucleotide
acagccattttggttgcaacgaatgtgataccaaaatatgttgttacgacagcttcagga

SEQ ID NO: 247228 - DNA, 60 bp, Artificial
  Synthetic oligonucleotide
acactttagatgccgattggccctcagaagagccttatcagtttgattctgtggtcatga

SEQ ID NO: 247229 - DNA, 58 bp, Artificial
  Synthetic oligonucleotide
ttagtgaattattcttcgtatagaatttcagggttcggtatgctcatccctgaaccac

SEQ ID NO: 247230 - DNA, 56 bp, Artificial
  Synthetic oligonucleotide
tgatatgtccattataccaattaacaacgattttaacgagaaaaaggtggtatgta

SEQ ID NO: 247231 - DNA, 59 bp, Artificial
  Synthetic oligonucleotide
tgctgcgccttacgtatttgctttacgtagccagttcttctcgttcaaattggcagagt

SEQ ID NO: 247232 - DNA, 60 bp, Artificial
  Synthetic oligonucleotide
gtaatatccctaatgttaatcaagagacaggcgagattttaagtgaggatagcgatgact

SEQ ID NO: 247233 - DNA, 54 bp, Artificial
  Synthetic oligonucleotide
tgtttaaaatcgcttaaaaggcaaactatgagcttgtaggactattaaaagtgt

SEQ ID NO: 247234 - DNA, 60 bp, Artificial
  Synthetic oligonucleotide
tgctaagagtgtagctgttatggctagtttttcaagtgagtcttatgctgctattcgttt

SEQ ID NO: 247235 - DNA, 60 bp, Artificial
  Synthetic oligonucleotide
tgtttaagatacttgaaaaagacctcagtgacggcattatcataaggatatccaggcttg

SEQ ID NO: 247236 - DNA, 53 bp, Artificial
  Synthetic oligonucleotide
acccaatacaatcgtcacgccagaattaacaaactctaggtttacccctatgt

SEQ ID NO: 247237 - DNA, 60 bp, Artificial
  Synthetic oligonucleotide
tgtttgaccgtgaggagctaaaacatatccaagaggacttgcctagatacatgagcgacc

SEQ ID NO: 247238 - DNA, 59 bp, Artificial
  Synthetic oligonucleotide
tgctaaccttgaatgaacttgaaaaacgcaaagtcgtggagcataacagcttgataacc

SEQ ID NO: 247239 - DNA, 59 bp, Artificial
  Synthetic oligonucleotide
ttaaaagttgtgattcaggaatggaaatcagattatgctgatttaagggaggattataa

SEQ ID NO: 247240 - DNA, 60 bp, Artificial
  Synthetic oligonucleotide
ttaaagagttgcgagagatgacagatacgattaatgagtataagctaatgcaccaattta

SEQ ID NO: 247241 - DNA, 60 bp, Artificial
  Synthetic oligonucleotide
tgcggtaccaatctaccacgtcagctaagctttcttcgagagggcgatgctgtccgccta

SEQ ID NO: 247242 - DNA, 55 bp, Artificial
  Synthetic oligonucleotide
ttaaccccactcgaattactagggattgttatggtcatcgtgtctgttattcttt

SEQ ID NO: 247243 - DNA, 51 bp, Artificial
  Synthetic oligonucleotide
gtaacggaaaaacaggtgataaagtgccgtttgagttttaccctatgttta

SEQ ID NO: 247244 - DNA, 56 bp, Artificial
  Synthetic oligonucleotide
ttaactgaccaccaaacttctcgaccaccaccatataattcgatttttgtatatcc

SEQ ID NO: 247245 - DNA, 58 bp, Artificial
  Synthetic oligonucleotide
actggtgaaggtcgacaattaacagagggaactgattatactgtatcagataacggta

SEQ ID NO: 247246 - DNA, 57 bp, Artificial
  Synthetic oligonucleotide
tgccaaaggcggacggcgagtcaaccaaatagaaagttaccgcaatccctcaatcac

SEQ ID NO: 247247 - DNA, 57 bp, Artificial
  Synthetic oligonucleotide
actgtaccaattagtataaaatcgattcaaggaaagattcatatttcactcccagaa

SEQ ID NO: 247248 - DNA, 54 bp, Artificial
  Synthetic oligonucleotide
actgtttataagcacagaaaaaactgtttataagcacagaaaaaactgtttata

SEQ ID NO: 247249 - DNA, 55 bp, Artificial
  Synthetic oligonucleotide
actgtttggaatgacgataaattagtagggcttattagggctattggagacggat

SEQ ID NO: 247250 - DNA, 55 bp, Artificial
  Synthetic oligonucleotide
tcgattacttaaccgacctgtggcccttaatgtcccctgcggaccgccattccta

SEQ ID NO: 247251 - DNA, 56 bp, Artificial
  Synthetic oligonucleotide
aacattgccaagtatcttaaaaaggcgattgatcaatacttgccaactgtaaaacg

SEQ ID NO: 247252 - DNA, 54 bp, Artificial
  Synthetic oligonucleotide
aaccaatattgagggattgcggtagctttccacttgctccgttctccgcccccc

SEQ ID NO: 247253 - DNA, 57 bp, Artificial
  Synthetic oligonucleotide
aaagccacgtgaccataaacagggtctgcgttccattgaccgcctactgtttgacca

SEQ ID NO: 247254 - DNA, 56 bp, Artificial
  Synthetic oligonucleotide
ggttgagcgtcccatacgaaaggttaccatcaaatcatttacgcggacaagtccag

SEQ ID NO: 247255 - DNA, 57 bp, Artificial
  Synthetic oligonucleotide
tcgtaaccgttcgccacttgtgcgcgtacctgcttcacgtggtatgggaactcgtct

SEQ ID NO: 247256 - DNA, 49 bp, Artificial
  Synthetic oligonucleotide
aaacagtacgttctaaaatcccctccatggttgtaccgcttcgggtttt

SEQ ID NO: 247257 - DNA, 52 bp, Artificial
  Synthetic oligonucleotide
aaacacccctaacatttctacaggtttccctattctagataaatgtttagac

SEQ ID NO: 247258 - DNA, 57 bp, Artificial
  Synthetic oligonucleotide
aaacaatctcttagcctaacttgatcttcgtagctaaagccttcgtgtgtataagaa

SEQ ID NO: 247259 - DNA, 54 bp, Artificial
  Synthetic oligonucleotide
aaaatttaccgatactgtccaagaccggctcttgaccaatataagttgccttag

SEQ ID NO: 247260 - DNA, 60 bp, Artificial
  Synthetic oligonucleotide
tcgagttcctacaagaatgcatgaactgatgatggggtgcggttcgtatctagaatttat

SEQ ID NO: 247261 - DNA, 50 bp, Artificial
  Synthetic oligonucleotide
tttgacgctttacagaccttttaaggagttttaaaacgaatcaggtaaac

SEQ ID NO: 247262 - DNA, 59 bp, Artificial
  Synthetic oligonucleotide
aaaatatgttgctaagtccgtttgaaatgcaagatacaaaaatcatggcaggattacaa

SEQ ID NO: 247263 - DNA, 60 bp, Artificial
  Synthetic oligonucleotide
aaaatagaatagcaatcatttagtcgagcgtagcgacaaattcagatgacatcatctgaa

SEQ ID NO: 247264 - DNA, 60 bp, Artificial
  Synthetic oligonucleotide
aacgagttaagcgagtgattgaggcggagcatttccgtgtggatcgcgtgattggccact

SEQ ID NO: 247265 - DNA, 58 bp, Artificial
  Synthetic oligonucleotide
ggttgacattttagggagtgtcatagacttgagaagccttaagatacggccttcagaa

SEQ ID NO: 247266 - DNA, 60 bp, Artificial
  Synthetic oligonucleotide
ttgggaattatggattttcagatattggagctgtcattggagcaacatatcccgaagatt

SEQ ID NO: 247267 - DNA, 60 bp, Artificial
  Synthetic oligonucleotide
agcggcaggtatcagtagcgctggagatgtttaccagaccatattagcaggcgcggacgg

SEQ ID NO: 247268 - DNA, 56 bp, Artificial
  Synthetic oligonucleotide
aacggagatataaggggtatcttgtagccgattaactgacatagtcgccaataaac

SEQ ID NO: 247269 - DNA, 58 bp, Artificial
  Synthetic oligonucleotide
ttggcaagcaacccacaagctagccacttcgtggcagttgtggtacttgtaaggggga

SEQ ID NO: 247270 - DNA, 58 bp, Artificial
  Synthetic oligonucleotide
aggagttagattcgctgtaggtgtgaccacgcctgttcgtcccactgtccagtcaacc

SEQ ID NO: 247271 - DNA, 59 bp, Artificial
  Synthetic oligonucleotide
agcggagcaagcgcattatagcaatggttaggggtgtttatcttatgtttgtatttcta

SEQ ID NO: 247272 - DNA, 57 bp, Artificial
  Synthetic oligonucleotide
tcgtcttatgcgtcaaacggtaggacctgatgttggagtaaaggcggcaggaggaac

SEQ ID NO: 247273 - DNA, 56 bp, Artificial
  Synthetic oligonucleotide
ttggcaagaaacagacttacctcttcctttaattgcccacgtgataagtgaacaaa

SEQ ID NO: 247274 - DNA, 52 bp, Artificial
  Synthetic oligonucleotide
aaaagtcttgagtcgaccaacaaaatctgccgtaaagttaaaactaccacca

SEQ ID NO: 247275 - DNA, 60 bp, Artificial
  Synthetic oligonucleotide
tttgtggtcacaatgaatggcctctcaaaatcacaccgcattgcgggattccgcgtgggg

SEQ ID NO: 247276 - DNA, 58 bp, Artificial
  Synthetic oligonucleotide
gttcaaaagccattagtcctgacctcctttcattcgttccatccaatcttgacgcttg

SEQ ID NO: 247277 - DNA, 52 bp, Artificial
  Synthetic oligonucleotide
ggttcaaagtcaaatggtactgatgaccggtaaaatttaatattttgaacct

SEQ ID NO: 247278 - DNA, 56 bp, Artificial
  Synthetic oligonucleotide
aaaaggagcgcgtagtatgaacgagttacaacaggtacagcgccaaaacaacagct

SEQ ID NO: 247279 - DNA, 55 bp, Artificial
  Synthetic oligonucleotide
ttttaacacacgatttacaatttgctaatgatgttcgaaaacgaatttatgaccc

SEQ ID NO: 247280 - DNA, 60 bp, Artificial
  Synthetic oligonucleotide
tcgaatagcgaatgacaggcaagccgcccaggctattgcttgcctaaatacctaacatct

SEQ ID NO: 247281 - DNA, 57 bp, Artificial
  Synthetic oligonucleotide
ttggcaaagcccctatgcaaggtaaacagtccgactagggcactgtcccgctcctta

SEQ ID NO: 247282 - DNA, 56 bp, Artificial
  Synthetic oligonucleotide
tcgccagttgattacgttcaacggtgtgttcaagactacaaaaagaaatttgagtc

SEQ ID NO: 247283 - DNA, 60 bp, Artificial
  Synthetic oligonucleotide
tcgcgatccgtcaactcatagttgaggtgcgacctgctcgtgtctatatctttgttcgag

SEQ ID NO: 247284 - DNA, 56 bp, Artificial
  Synthetic oligonucleotide
aggacaagaaccgtcgctaggatagcccccataaaggcacccaagcctaccacagc

SEQ ID NO: 247285 - DNA, 55 bp, Artificial
  Synthetic oligonucleotide
aaagttcaaggtaaagaatggttttcctacgatgtcagctattcttaccactcac

SEQ ID NO: 247286 - DNA, 58 bp, Artificial
  Synthetic oligonucleotide
aaataaccgatacaaacagactgatcaaattctatattgattagtctgtttgcttacg

SEQ ID NO: 247287 - DNA, 58 bp, Artificial
  Synthetic oligonucleotide
aggaccaggcgtggtagacagaaaaagattgacgctgacaaaaccctatccagattca

SEQ ID NO: 247288 - DNA, 57 bp, Artificial
  Synthetic oligonucleotide
ccatacgttgattttcgccactagccaaccctaataatatcttagtagcgaactggc

SEQ ID NO: 247289 - DNA, 57 bp, Artificial
  Synthetic oligonucleotide
agcttttgagataacgttcgggtatgactcaagaagatatagccattaggttgggta

SEQ ID NO: 247290 - DNA, 60 bp, Artificial
  Synthetic oligonucleotide
tttagtatatctaaagatgtatctctactagcaatcaaactaggaatagctttaagcaat

SEQ ID NO: 247291 - DNA, 58 bp, Artificial
  Synthetic oligonucleotide
tcgcgttcctcctgccgcctttactccaacatcaggtcctaccgtttgacgcataaga

SEQ ID NO: 247292 - DNA, 58 bp, Artificial
  Synthetic oligonucleotide
tttataaagaataatgctgtacttactgtttaaatctataaggtcagataaggcatat

SEQ ID NO: 247293 - DNA, 60 bp, Artificial
  Synthetic oligonucleotide
aaagtgaccactataagacattatcagctcgatactggcaggttatggtcgatgtgatgc

SEQ ID NO: 247294 - DNA, 58 bp, Artificial
  Synthetic oligonucleotide
agcttaacaacagttgtgcgtggagcaagccctagaccaattcaggatccaaaatggt

SEQ ID NO: 247295 - DNA, 56 bp, Artificial
  Synthetic oligonucleotide
ttgttttttcatgcttagtcaccgacaactttaagatcgctagcgactacttttac

SEQ ID NO: 247296 - DNA, 57 bp, Artificial
  Synthetic oligonucleotide
aaattgtgatcttgagagtggcttagccactctttttttgacacgaagtgtcaattt

SEQ ID NO: 247297 - DNA, 58 bp, Artificial
  Synthetic oligonucleotide
aacacctccatacttatattcgttaattgccataattggttacgatgatttcagtgat

SEQ ID NO: 247298 - DNA, 60 bp, Artificial
  Synthetic oligonucleotide
aaagtcaggcgataccttccatatcattactgaggtgcaaaatgtgaccgagactccatt

SEQ ID NO: 247299 - DNA, 56 bp, Artificial
  Synthetic oligonucleotide
ggttagcaatggataaattgttcctttaggaatatcagcaaacccatactttgaaa

SEQ ID NO: 247300 - DNA, 55 bp, Artificial
  Synthetic oligonucleotide
aacactaatcagggggtctacagatacgagaataggggtgttagaatgggtagaa

SEQ ID NO: 247301 - DNA, 57 bp, Artificial
  Synthetic oligonucleotide
aaagtattccaacaaaaatatggaatggcaatcatttagtcgagcgtagcgacaaat

SEQ ID NO: 247302 - DNA, 51 bp, Artificial
  Synthetic oligonucleotide
aggactaggaacaaatctactctttacgattttacgaggggaaagcgaacc

SEQ ID NO: 247303 - DNA, 50 bp, Artificial
  Synthetic oligonucleotide
aaagtataccggcgtgggttaaaggtaacgtaaaaccaagtggatatgtc

SEQ ID NO: 247304 - DNA, 57 bp, Artificial
  Synthetic oligonucleotide
ttgtcatggcatcaaaacttaatgcgggttgagattttcccaaagtttgaccactta

SEQ ID NO: 247305 - DNA, 60 bp, Artificial
  Synthetic oligonucleotide
ttgtcaaggagaccatggaataaagcaagcgtgcatgatataataaccaagtcgcattca

SEQ ID NO: 247306 - DNA, 56 bp, Artificial
  Synthetic oligonucleotide
aaagtacgctagtcagggacgagccgaaaggctgtagcgtttcggagcggcacgga

SEQ ID NO: 247307 - DNA, 53 bp, Artificial
  Synthetic oligonucleotide
aaagggatacggggtaaatcttttttaagatcaggtgcatatttatgtttata

SEQ ID NO: 247308 - DNA, 60 bp, Artificial
  Synthetic oligonucleotide
tttcacggcataaaacgactgtacttatcgttaggacactgtgacaccatcggacactca

SEQ ID NO: 247309 - DNA, 58 bp, Artificial
  Synthetic oligonucleotide
tttccatcatttctacttcagaaagtgctacaaaattagtcttgtcaattacttcaaa

SEQ ID NO: 247310 - DNA, 57 bp, Artificial
  Synthetic oligonucleotide
ggttaaaataccgacgtaagcgccattaatccacattcgctcagtttcgcagaactg

SEQ ID NO: 247311 - DNA, 55 bp, Artificial
  Synthetic oligonucleotide
aacagggtctgcgttccattgaccgcctactgtttgaccaccgctaaagctaacc

SEQ ID NO: 247312 - DNA, 57 bp, Artificial
  Synthetic oligonucleotide
aacagtaggcggtcaatggaacgcagaccctgtttatggtcacgtggctttcgtgga

SEQ ID NO: 247313 - DNA, 55 bp, Artificial
  Synthetic oligonucleotide
aagaaccgcaccagaagttgcgtcgatacgagaagcaccaccgaaggtaccaacc

SEQ ID NO: 247314 - DNA, 53 bp, Artificial
  Synthetic oligonucleotide
ttttgacgttaaataatgaaccaatggaagagaggtaactattctttcccgct

SEQ ID NO: 247315 - DNA, 60 bp, Artificial
  Synthetic oligonucleotide
ttgatggttggtggcggaccttcagcatcattgtatattggaacggaaaagccggcatat

SEQ ID NO: 247316 - DNA, 57 bp, Artificial
  Synthetic oligonucleotide
agcgacaggtcgcagtgagtttgcgcgtggtagggctaaggttgtccaaacggaagc

SEQ ID NO: 247317 - DNA, 60 bp, Artificial
  Synthetic oligonucleotide
aggctcgaacgctgtttaagcgaatcgaggcttggcaagctcaaagccttatagagtgat

SEQ ID NO: 247318 - DNA, 59 bp, Artificial
  Synthetic oligonucleotide
tctagccaaaccttattccccgaagcatttaatgttctatatactccatcatcagaaaa

SEQ ID NO: 247319 - DNA, 53 bp, Artificial
  Synthetic oligonucleotide
tcctcttaattcctttaactcgtcataaagcggataaacgtttttctgtaagc

SEQ ID NO: 247320 - DNA, 60 bp, Artificial
  Synthetic oligonucleotide
aggctttggaggcatattagctgcagctctattatattgtacgccctcagttcggaacta

SEQ ID NO: 247321 - DNA, 59 bp, Artificial
  Synthetic oligonucleotide
ggtgttcctactccagatgttacagtgtttttagatgttcctccagagcgtgctttaga

SEQ ID NO: 247322 - DNA, 56 bp, Artificial
  Synthetic oligonucleotide
tctataaaacttaaatcgctcaacagtgcggttttcgcttactataagtgtacgaa

SEQ ID NO: 247323 - DNA, 55 bp, Artificial
  Synthetic oligonucleotide
tctcaaaaacttcggcggagtcagaaatagtcatctttcttagttgtaaacggga

SEQ ID NO: 247324 - DNA, 51 bp, Artificial
  Synthetic oligonucleotide
aagactacggtagtgttgcaggggaaggacttaaacttttccaacgcttaa

SEQ ID NO: 247325 - DNA, 58 bp, Artificial
  Synthetic oligonucleotide
agccataacgttcagcaaagtaatttttggcagtctcaaaaaatgccctggtctgctc

SEQ ID NO: 247326 - DNA, 57 bp, Artificial
  Synthetic oligonucleotide
aagagcgagggctatttaataaccgtgaacgtgttgtgattgttcctgagaatgagt

SEQ ID NO: 247327 - DNA, 60 bp, Artificial
  Synthetic oligonucleotide
aagataagcatattggaaacatatcctaattcaacggtacatgcttatagacttgttgcc

SEQ ID NO: 247328 - DNA, 53 bp, Artificial
  Synthetic oligonucleotide
agggcatataaaaattttcgccccatttaggtacatgtagtgccccatttagg

SEQ ID NO: 247329 - DNA, 51 bp, Artificial
  Synthetic oligonucleotide
aaaaataagaaagggtaggcaggataaaacggaaagcccgcatttgcgggc

SEQ ID NO: 247330 - DNA, 60 bp, Artificial
  Synthetic oligonucleotide
agggcattgtaagtgatgagctgacccaggctaatcttaccctcaatcacataaattgac

SEQ ID NO: 247331 - DNA, 59 bp, Artificial
  Synthetic oligonucleotide
aagattctcattcactactccaaacaaggcgtcttcacctgcgtatccaccaggttcaa

SEQ ID NO: 247332 - DNA, 54 bp, Artificial
  Synthetic oligonucleotide
ggtgtgagccaacaaattgaaaactaggaaaaagtgtttgactggtcactaaag

SEQ ID NO: 247333 - DNA, 58 bp, Artificial
  Synthetic oligonucleotide
aaaaagagtggagcgatatgtggtctcaatcattgaaagttgattatacccctatggt

SEQ ID NO: 247334 - DNA, 60 bp, Artificial
  Synthetic oligonucleotide
ttttttgacgtttctgcacctcattagccattatctgctgacgttccttgatgatagcta

SEQ ID NO: 247335 - DNA, 55 bp, Artificial
  Synthetic oligonucleotide
aggggctggattaggttcaactgctactgttcctagtacattagtttataaaggc

SEQ ID NO: 247336 - DNA, 60 bp, Artificial
  Synthetic oligonucleotide
tcctttggctagggtcaatttatgtgattgagggtaagattagcctgggtcagctcatca

SEQ ID NO: 247337 - DNA, 60 bp, Artificial
  Synthetic oligonucleotide
agcgcaggcctaacacgcgctagtgttagactcttacacctagattggcaaggagcctgg

SEQ ID NO: 247338 - DNA, 60 bp, Artificial
  Synthetic oligonucleotide
tctaactcagcattataatcactgagttcttccatacagtcactataagcaactcctgaa

SEQ ID NO: 247339 - DNA, 60 bp, Artificial
  Synthetic oligonucleotide
agcgatgactgatagaaatgagctgattaacgatattgcagagttgaaagcaaaaagaga

SEQ ID NO: 247340 - DNA, 59 bp, Artificial
  Synthetic oligonucleotide
ttgattattccttttagagtaactagactaatagcgtatccccatgcttcttctagaca

SEQ ID NO: 247341 - DNA, 59 bp, Artificial
  Synthetic oligonucleotide
tctacaagtgttttaagtagctctatatctttctcagagaatttctcaggtcgaccacc

SEQ ID NO: 247342 - DNA, 55 bp, Artificial
  Synthetic oligonucleotide
aactatagctacgaaaagttctactaacaccatatcctcaagtacattaccaaaa

SEQ ID NO: 247343 - DNA, 60 bp, Artificial
  Synthetic oligonucleotide
ccatggaataaagtaagcgtgcatggtataataaccaagtcgcattcactaaacagcgaa

SEQ ID NO: 247344 - DNA, 60 bp, Artificial
  Synthetic oligonucleotide
tctagcaccattcaagccaaataatggaataagtaattcttgtgcaatgacacaaacgat

SEQ ID NO: 247345 - DNA, 59 bp, Artificial
  Synthetic oligonucleotide
aaaacgaagagcagatgataatagctacaagttagaagataaagtatatcaaaaagcga

SEQ ID NO: 247346 - DNA, 60 bp, Artificial
  Synthetic oligonucleotide
tcgtggagctgcccttacagaagggtcaatccagcctaagcacctccttgaggttcgtga

SEQ ID NO: 247347 - DNA, 60 bp, Artificial
  Synthetic oligonucleotide
aggcatgcttaaaattgattcgatttttgctggtcatgtaatcgagtgcattttcgtgct

SEQ ID NO: 247348 - DNA, 58 bp, Artificial
  Synthetic oligonucleotide
aagaacaattctggggcggcgctatgggcgattttactgataaatatggcgtacgatg

SEQ ID NO: 247349 - DNA, 59 bp, Artificial
  Synthetic oligonucleotide
agcgctggtaaagagcagttactacgtgtaattgaacctggtggatacgcaggtgaaga

SEQ ID NO: 247350 - DNA, 53 bp, Artificial
  Synthetic oligonucleotide
aaaacggacccacaactcgatttgtttagctacgatacaggctgaaaataaaa

SEQ ID NO: 247351 - DNA, 59 bp, Artificial
  Synthetic oligonucleotide
aagaaatcaatgcccatacgcattttaatgtgttctatgacaaaatcaaagcagggcgt

SEQ ID NO: 247352 - DNA, 59 bp, Artificial
  Synthetic oligonucleotide
ccaaggactttgtcagtgaaaaggatggtcagctggacgcagaggtccaagcgggtggc

SEQ ID NO: 247353 - DNA, 59 bp, Artificial
  Synthetic oligonucleotide
tttggcaaaaccatatagctagatgttcgaacctgctcaaatttgagcgtattgaaatc

SEQ ID NO: 247354 - DNA, 58 bp, Artificial
  Synthetic oligonucleotide
ccattcacgcgcatccaacttggtcgggttaaagcgttcaggatcctcctgacctgtc

SEQ ID NO: 247355 - DNA, 59 bp, Artificial
  Synthetic oligonucleotide
gtgcataagccagggcctcacgattctctcggccaggatactcactctgtaagcgacgc

SEQ ID NO: 247356 - DNA, 55 bp, Artificial
  Synthetic oligonucleotide
gtatagagccaaaatattttcacgtgtaaaacattaaatcaaaagtttcgcaaga

SEQ ID NO: 247357 - DNA, 59 bp, Artificial
  Synthetic oligonucleotide
tggtcacaggcgggctaagaactatagaagtatctagggcagacgtaggagacttaaga

SEQ ID NO: 247358 - DNA, 59 bp, Artificial
  Synthetic oligonucleotide
cacagaaccacccggcaaataagtcaattctccacgtccgccctcattcatgcgagcga

SEQ ID NO: 247359 - DNA, 59 bp, Artificial
  Synthetic oligonucleotide
cctcgctttagttggcattggaggagagcccaacagccgtgaggaaagtcagtggcgtg

SEQ ID NO: 247360 - DNA, 59 bp, Artificial
  Synthetic oligonucleotide
ggcggcagggagcgatcctaatcaggccgaccaagagggaacgactattcagtacttga

SEQ ID NO: 247361 - DNA, 53 bp, Artificial
  Synthetic oligonucleotide
cccaaacaaggttactttatccaacccgatcacttgttttatcactaccgcat

SEQ ID NO: 247362 - DNA, 59 bp, Artificial
  Synthetic oligonucleotide
catactagccaagaaagtgtagtgttatagccagatgctaattcattaatttcaacacc

SEQ ID NO: 247363 - DNA, 58 bp, Artificial
  Synthetic oligonucleotide
agggtgtgcttgcaacgggggccgtactaggtgggactgttgcgactcaagtgactca

SEQ ID NO: 247364 - DNA, 59 bp, Artificial
  Synthetic oligonucleotide
agggcgcccgtctactgacgcgacattaactgctcgtctcatagaccgtccgattcgtc

SEQ ID NO: 247365 - DNA, 55 bp, Artificial
  Synthetic oligonucleotide
cccaaacggaagcgccaatctgcagtcctaccattcggctctaactaccccgaac

SEQ ID NO: 247366 - DNA, 59 bp, Artificial
  Synthetic oligonucleotide
actctatgttatcttcacgaggaatacgtgcgataccaaagtgattgcacgtcatatca

SEQ ID NO: 247367 - DNA, 56 bp, Artificial
  Synthetic oligonucleotide
aggcgccttagtccgtgtactggcaaaaagccccacggcaccattaccagaacaga

SEQ ID NO: 247368 - DNA, 57 bp, Artificial
  Synthetic oligonucleotide
acgagtgggcctggtgtatcaaaccttgcgactccgcttttaaccgcgacatcagaa

SEQ ID NO: 247369 - DNA, 59 bp, Artificial
  Synthetic oligonucleotide
tcctgtgcaaccgcgcgaaaatcgttgtcaagtagaccaagtctcacgattccaggcga

SEQ ID NO: 247370 - DNA, 58 bp, Artificial
  Synthetic oligonucleotide
aggagagcccaacagccgtgaggaaagtcagtggcgtgacttgttaaccgatgccgat

SEQ ID NO: 247371 - DNA, 59 bp, Artificial
  Synthetic oligonucleotide
tccctgtgataccaaatgccgttggcttggtgagaatcccacccttggcatacctctga

SEQ ID NO: 247372 - DNA, 56 bp, Artificial
  Synthetic oligonucleotide
ccagtccgtaagattggccaagggcgactcaccagttcccgaagggcgaatatcac

SEQ ID NO: 247373 - DNA, 58 bp, Artificial
  Synthetic oligonucleotide
tccagaggcacgcggatttatcgtcggttgccctgttgcctttgaactcggaattggc

SEQ ID NO: 247374 - DNA, 59 bp, Artificial
  Synthetic oligonucleotide
gaaacagttagttcttgaatatggggcgcctgagtatgttaatcatcaagaagagtttg

SEQ ID NO: 247375 - DNA, 58 bp, Artificial
  Synthetic oligonucleotide
gggcgccaactctggctttgggaggaacgctgttcgcccttccaagtgctattacgca

SEQ ID NO: 247376 - DNA, 59 bp, Artificial
  Synthetic oligonucleotide
ggtggcatttctacacccataaggtggcatttctacacccataaggtggcatttctaca

SEQ ID NO: 247377 - DNA, 59 bp, Artificial
  Synthetic oligonucleotide
tcctggctacattgcgacaccacaaacagctccgttgagagagcgacaagcagatggta

SEQ ID NO: 247378 - DNA, 56 bp, Artificial
  Synthetic oligonucleotide
gtaaagtcaaaaagagaacactcaatgggagtgtagaactccttattcctcttcaa

SEQ ID NO: 247379 - DNA, 57 bp, Artificial
  Synthetic oligonucleotide
gggcataaacatgttaagagctttgcctatgccccgcaaaatgccggtgggtcgggc

SEQ ID NO: 247380 - DNA, 52 bp, Artificial
  Synthetic oligonucleotide
gtaacgtttcgaagtttggaagcttctcgaaagagaggcttttttcaatcgg

SEQ ID NO: 247381 - DNA, 59 bp, Artificial
  Synthetic oligonucleotide
tccgtatggagttgcttggtgccaaggtatttagcgtcacagatggttcgcgcgtgctt

SEQ ID NO: 247382 - DNA, 59 bp, Artificial
  Synthetic oligonucleotide
ctggtccacgactgccaataccacctgcttggcgactgagcataatcccttgtccgact

SEQ ID NO: 247383 - DNA, 59 bp, Artificial
  Synthetic oligonucleotide
ccacgttttgtctcgcccgatgtggagtgtttccctgttgactgctgttcgccaagtga

SEQ ID NO: 247384 - DNA, 59 bp, Artificial
  Synthetic oligonucleotide
tcattggtgtggatagtcgagagaacgacgtgaccagtgatagcggcccgaaccgcgat

SEQ ID NO: 247385 - DNA, 59 bp, Artificial
  Synthetic oligonucleotide
ggctatgcggaatgctaatgccgccccaatccaacaaggtcagccaggttacagtgcac

SEQ ID NO: 247386 - DNA, 55 bp, Artificial
  Synthetic oligonucleotide
cagaaatatggaaaggttataataaactagacacaaagttaagagaaatcgtgga

SEQ ID NO: 247387 - DNA, 60 bp, Artificial
  Synthetic oligonucleotide
gttatatcattattttctcaggctttagcacaaggagattctgctgtcctttatactgtt

SEQ ID NO: 247388 - DNA, 57 bp, Artificial
  Synthetic oligonucleotide
ggtggacggagagccgaccaagtagaaagctatcgcaatccctcaatatcggttaaa

SEQ ID NO: 247389 - DNA, 52 bp, Artificial
  Synthetic oligonucleotide
cgggacgaagaaatatgtttattcgtatcaaaacggtttcgcttaaagatac

SEQ ID NO: 247390 - DNA, 59 bp, Artificial
  Synthetic oligonucleotide
attcggcctgcctctactgcagcgatgacagcacattgcggttcgtgacgatggctaca

SEQ ID NO: 247391 - DNA, 53 bp, Artificial
  Synthetic oligonucleotide
aagggtacggagtactcgtagtagtctgagaagggtaacgccctttacatggc

SEQ ID NO: 247392 - DNA, 58 bp, Artificial
  Synthetic oligonucleotide
ttgctaaaacagtctgccctcttcaagccgtcagccttgtcgttcgcttaaatcggga

SEQ ID NO: 247393 - DNA, 59 bp, Artificial
  Synthetic oligonucleotide
ctatctttctaaatagcctaactgaaaggcttcgttggtctgcttgacgacagaagcag

SEQ ID NO: 247394 - DNA, 59 bp, Artificial
  Synthetic oligonucleotide
tgacacggcaccacgaatcttagctgcacctgccgtaccacgtaaataatgcggcgcta

SEQ ID NO: 247395 - DNA, 59 bp, Artificial
  Synthetic oligonucleotide
cgctctgtgtcgtatgaacggcaaattaaggactatgtgaacgagaacaagagttctaa

SEQ ID NO: 247396 - DNA, 56 bp, Artificial
  Synthetic oligonucleotide
tatgcgtccccgtgtaattgttgactacgagcgggaaccgtgggtttacgatgcag

SEQ ID NO: 247397 - DNA, 59 bp, Artificial
  Synthetic oligonucleotide
tacgatcctgcgatgggttcgggttctttgatgcttaatatccgtcgctatctcatcaa

SEQ ID NO: 247398 - DNA, 54 bp, Artificial
  Synthetic oligonucleotide
cgcgctctgtccgccccaaaatttggactcccatttgacgaagaggaaccgtta

SEQ ID NO: 247399 - DNA, 55 bp, Artificial
  Synthetic oligonucleotide
cccaattttagccttgtaatcagctacactaaggtgtttcttatcacttcctaat

SEQ ID NO: 247400 - DNA, 58 bp, Artificial
  Synthetic oligonucleotide
taccctatagactatctaaaattgatacccgccccttatatgggcgtatggagagcca

SEQ ID NO: 247401 - DNA, 59 bp, Artificial
  Synthetic oligonucleotide
aatccctagctcactaccaggaatagcagggactaccggtttggcgccagttgcgatga

SEQ ID NO: 247402 - DNA, 59 bp, Artificial
  Synthetic oligonucleotide
tacacccgagtgagcgttatcaggagccacgtcttggacaggttctagatgctcgcgtt

SEQ ID NO: 247403 - DNA, 59 bp, Artificial
  Synthetic oligonucleotide
gcttgggccgtgcaactttggggcacattcagttacgggatgctgatgagccggtgaat

SEQ ID NO: 247404 - DNA, 56 bp, Artificial
  Synthetic oligonucleotide
tacaaacatagtcctaagagagtgttaactgtcaataaaatgacgaaaattacttg

SEQ ID NO: 247405 - DNA, 58 bp, Artificial
  Synthetic oligonucleotide
agcgggtttaatagggaaacagatttagatggggccttcagttcaagcatatctgata

SEQ ID NO: 247406 - DNA, 59 bp, Artificial
  Synthetic oligonucleotide
gcaagttgaatgccaccatttcttcctgatttaatcttaaagaagatttcttgattcgc

SEQ ID NO: 247407 - DNA, 59 bp, Artificial
  Synthetic oligonucleotide
cgtggatagccgagggacagccatgatggatctccgtgaggccctcaatacctcatgga

SEQ ID NO: 247408 - DNA, 59 bp, Artificial
  Synthetic oligonucleotide
gccccaagtaagcagccggtacctgtcactaatggcatcagggggctaccatttgcgag

SEQ ID NO: 247409 - DNA, 59 bp, Artificial
  Synthetic oligonucleotide
cgtgcgcgtgtgtcgtgctctgcttgagacaagaggtcagctgccacataggttggatt

SEQ ID NO: 247410 - DNA, 57 bp, Artificial
  Synthetic oligonucleotide
ggtgccccatagattccccgattcgccttgaaaagttggtcaatcttcagtgccaag

SEQ ID NO: 247411 - DNA, 59 bp, Artificial
  Synthetic oligonucleotide
taggcggacagcatcgccctctcgaagaaagcttagctgacgtggtagattggtaccgc

SEQ ID NO: 247412 - DNA, 59 bp, Artificial
  Synthetic oligonucleotide
tctcgtgtgcaagacccttacaccttgcgctgcatgcctcaaattcatggggctagcaa

SEQ ID NO: 247413 - DNA, 59 bp, Artificial
  Synthetic oligonucleotide
tagggattgctagcgatgctcctgagcgtttacgagccgccctaattcactgtctgcta

SEQ ID NO: 247414 - DNA, 52 bp, Artificial
  Synthetic oligonucleotide
tagggtaacggttcctcttcgtcaaatgggagtccaaattttggggcggaca

SEQ ID NO: 247415 - DNA, 59 bp, Artificial
  Synthetic oligonucleotide
cgtctacgtggaagctttcgtgcatgacacctgttccaccatcgcaggcaaccaactga

SEQ ID NO: 247416 - DNA, 59 bp, Artificial
  Synthetic oligonucleotide
tagcagagctgatagctgatggcatcccagtccgttcaagctctagcagcccagcgata

SEQ ID NO: 247417 - DNA, 59 bp, Artificial
  Synthetic oligonucleotide
taggtaaacctgttagctcattcatccgtctagcagcacgaccagtcggggcagccaga

SEQ ID NO: 247418 - DNA, 59 bp, Artificial
  Synthetic oligonucleotide
atgagcgcgtgggtccccacaatcatatccaccgacccatctgcaatggccgctaaagc

SEQ ID NO: 247419 - DNA, 59 bp, Artificial
  Synthetic oligonucleotide
agcctaggatttcagggccgacattaagcactgacatagcgcgtgctgtaggaccaccc

SEQ ID NO: 247420 - DNA, 57 bp, Artificial
  Synthetic oligonucleotide
tcttatccccttggcatgataaagatgtaaaccgcacgaccggcgagttcaaaaagc

SEQ ID NO: 247421 - DNA, 60 bp, Artificial
  Synthetic oligonucleotide
ggtgagtcagattaccgagctaccagggcagggcatgtccggtagggtagatggcagaca

SEQ ID NO: 247422 - DNA, 57 bp, Artificial
  Synthetic oligonucleotide
tagaccccatccgtcagagcaatacgcccccttgaaattcttcccgccactcgtcca

SEQ ID NO: 247423 - DNA, 59 bp, Artificial
  Synthetic oligonucleotide
attcaaattaaggtacattagcgcttcacataattttctgctagatggatagggcaatg

SEQ ID NO: 247424 - DNA, 49 bp, Artificial
  Synthetic oligonucleotide
attcaacgagaaaaaggggggtattcaacgaggtaaaggggggtattca

SEQ ID NO: 247425 - DNA, 58 bp, Artificial
  Synthetic oligonucleotide
cggtcatatcttgcagatctccaagggtggtacatttttgggtcatccttaaatagtc

SEQ ID NO: 247426 - DNA, 59 bp, Artificial
  Synthetic oligonucleotide
ctaaggctgtcaggcgacctagtttgctgtagctcttgacggcatccatgcgtctggcc

SEQ ID NO: 247427 - DNA, 55 bp, Artificial
  Synthetic oligonucleotide
agttttccgcaacggttgctgaaatgtccgcaaaatggcctactggcaaaacacc

SEQ ID NO: 247428 - DNA, 59 bp, Artificial
  Synthetic oligonucleotide
tcagctcctaacgggcgtgacttcaatgattgtccagtatgcgattatttggtatttga

SEQ ID NO: 247429 - DNA, 59 bp, Artificial
  Synthetic oligonucleotide
tcacttgtttcctcccgtaactctgcaatggccatctgggctagctttcctgcgagggt

SEQ ID NO: 247430 - DNA, 59 bp, Artificial
  Synthetic oligonucleotide
tttagtcgagcatagcgacaaattcaggtgacatcatctgaataaggtcttaggaaccc

SEQ ID NO: 247431 - DNA, 57 bp, Artificial
  Synthetic oligonucleotide
cgactaccccgtattttagctgccatctttggcggtgccagtttagccatctcgggc

SEQ ID NO: 247432 - DNA, 60 bp, Artificial
  Synthetic oligonucleotide
cccagattcctctagagtagatcgtggagatgtgagcttgctgattaatgggctcccaat

SEQ ID NO: 247433 - DNA, 58 bp, Artificial
  Synthetic oligonucleotide
acaacagggactgggatcgcgtttgttaagctgggcaattgatgattttcgtaagcaa

SEQ ID NO: 247434 - DNA, 59 bp, Artificial
  Synthetic oligonucleotide
ttatgaggacataggttctttgtttgcagattcagacgtgacatttaacatccgagaag

SEQ ID NO: 247435 - DNA, 59 bp, Artificial
  Synthetic oligonucleotide
cgagcgacctcaagttgggagcagggcaatcctattcatccgggcacgcaatccatttt

SEQ ID NO: 247436 - DNA, 59 bp, Artificial
  Synthetic oligonucleotide
tcggaacctgcacaagtgcagaaccacgattccctaccttacgttgtccgctctcgcta

SEQ ID NO: 247437 - DNA, 52 bp, Artificial
  Synthetic oligonucleotide
cgaggaaaccttggttcaaagtcaaatggtactgatgaccggtaaaatttaa

SEQ ID NO: 247438 - DNA, 59 bp, Artificial
  Synthetic oligonucleotide
taaagcaacagctcctaataaagtatggctgggagacatgacctatatccctaccaaag

SEQ ID NO: 247439 - DNA, 59 bp, Artificial
  Synthetic oligonucleotide
gatgaaagcccagaacgcgacagccgtctagccctcagctacgcaaccgcagtcgttct

SEQ ID NO: 247440 - DNA, 59 bp, Artificial
  Synthetic oligonucleotide
taacgtggcgcattaacactaccgcctgttgtcacatcagtcgcaacaagtccgcgacc

SEQ ID NO: 247441 - DNA, 55 bp, Artificial
  Synthetic oligonucleotide
ttgggattggggttagaaattgcttcagtaccttctgcaagtacttttgttatag

SEQ ID NO: 247442 - DNA, 58 bp, Artificial
  Synthetic oligonucleotide
agcggtgcaagcagagtggggactacggcttaaccacgaaataccaatctgtgccgat

SEQ ID NO: 247443 - DNA, 60 bp, Artificial
  Synthetic oligonucleotide
cccatagacaaaggataaagcgcctatccatcctttataagcaccacctaaagcagcagc

SEQ ID NO: 247444 - DNA, 59 bp, Artificial
  Synthetic oligonucleotide
taatcatccgtgtcaccaggttaatagcctgaggcaacaagcgacgcaggacttgcgga

SEQ ID NO: 247445 - DNA, 51 bp, Artificial
  Synthetic oligonucleotide
gcaaccacattttccggtttaaaaggccctgtaactaatggtttcgttgtc

SEQ ID NO: 247446 - DNA, 59 bp, Artificial
  Synthetic oligonucleotide
agaccgttatataacgcttgacgtcgaagagaaagacgatatgctcaatgaggtttgtg

SEQ ID NO: 247447 - DNA, 58 bp, Artificial
  Synthetic oligonucleotide
aatgagtttgatagaatagccatgaaggctaactatagcccattgtcgaatttgttga

SEQ ID NO: 247448 - DNA, 58 bp, Artificial
  Synthetic oligonucleotide
tttaagctatgtagccagcaaacaagaagcttattcaaaacgcaatgtagccaagtac

SEQ ID NO: 247449 - DNA, 55 bp, Artificial
  Synthetic oligonucleotide
ccaacagctgaaccgcgccccattcccatgtagtacccttggctacgtccaaaac

SEQ ID NO: 247450 - DNA, 58 bp, Artificial
  Synthetic oligonucleotide
gatagccttccaggcaaactcaagggcagtcgcctcttgttctgttggttggcggtct

SEQ ID NO: 247451 - DNA, 58 bp, Artificial
  Synthetic oligonucleotide
cgtccaatcgattatgaccgactgctcgcataacatcggcagctgctaaggcgtagcc

SEQ ID NO: 247452 - DNA, 58 bp, Artificial
  Synthetic oligonucleotide
gccttgccagttgaactgctaaccaaggcgatgcttggtgtcaccgcactagatcccg

SEQ ID NO: 247453 - DNA, 55 bp, Artificial
  Synthetic oligonucleotide
aattccaactgactttcaccaggtcctctactcccgatcccgcccgcttgacgac

SEQ ID NO: 247454 - DNA, 55 bp, Artificial
  Synthetic oligonucleotide
ggtctgggagtttatccggaaaatgtcgtaaagttcaagcaagctgtcgtttcaa

SEQ ID NO: 247455 - DNA, 53 bp, Artificial
  Synthetic oligonucleotide
ttgataactaaacgctttgaaataccaaccttccaagggaagaacaagcctcg

SEQ ID NO: 247456 - DNA, 58 bp, Artificial
  Synthetic oligonucleotide
acggtctactcgatagactgtcttggaagtggctggacggctagggactggcgccact

SEQ ID NO: 247457 - DNA, 58 bp, Artificial
  Synthetic oligonucleotide
ggaacatggcaacatggatatggtgttagttcggcatattcaaattatcatcatggta

SEQ ID NO: 247458 - DNA, 58 bp, Artificial
  Synthetic oligonucleotide
gaaactggatgttctgaatatagagatttagtcgattatgcagtatcagaacgtttcg

SEQ ID NO: 247459 - DNA, 58 bp, Artificial
  Synthetic oligonucleotide
acacgaaacgtgttgggaaactgatgcacttgatgagactttatgccaagggaagccg

SEQ ID NO: 247460 - DNA, 58 bp, Artificial
  Synthetic oligonucleotide
acacgaatcctgatattgatgtttcacggtctggcgataatattacgtcgttcaagaa

SEQ ID NO: 247461 - DNA, 58 bp, Artificial
  Synthetic oligonucleotide
gaacgtcaacgtgttcatttgtcagaatggaaagaagatttaatggcttatattagcg

SEQ ID NO: 247462 - DNA, 54 bp, Artificial
  Synthetic oligonucleotide
cctttggcagccaaaagttcgtacgcaatcctacgtcccataaggtcccctggc

SEQ ID NO: 247463 - DNA, 58 bp, Artificial
  Synthetic oligonucleotide
gtcgcggcagctttggccacaaagaaaatgcgacaactcatcccgggcagtcacatgg

SEQ ID NO: 247464 - DNA, 57 bp, Artificial
  Synthetic oligonucleotide
cataatattaaaccaaaacagaaccgatacaaagccttagatgaagctacacgtgta

SEQ ID NO: 247465 - DNA, 60 bp, Artificial
  Synthetic oligonucleotide
ccccatcattcatattgagctcaaaaaagagtccgctaaagacggtttcatgcaagctta

SEQ ID NO: 247466 - DNA, 55 bp, Artificial
  Synthetic oligonucleotide
acgtttaaagagcgtttatccgataatggtgtaattctatcagaaagaggccaaa

SEQ ID NO: 247467 - DNA, 57 bp, Artificial
  Synthetic oligonucleotide
cagtctatgacggatattttaagagggttcaataggttgatgaagtataagaaagtc

SEQ ID NO: 247468 - DNA, 58 bp, Artificial
  Synthetic oligonucleotide
gaaccaaccgcgataactgcgggagtcgctgctacaccaactgttgttgccgtatcca

SEQ ID NO: 247469 - DNA, 57 bp, Artificial
  Synthetic oligonucleotide
ttcaaacgatccacttacggattgtcctccgctaccagatttgctaacagggtatat

SEQ ID NO: 247470 - DNA, 56 bp, Artificial
  Synthetic oligonucleotide
cttaatgcctatatggcttatttaggcataaagaacattgataaccccaacacccg

SEQ ID NO: 247471 - DNA, 58 bp, Artificial
  Synthetic oligonucleotide
gatgggtatttctcgccgaaccaaccgcgataactgcgggagtcgctgctacaccaac

SEQ ID NO: 247472 - DNA, 58 bp, Artificial
  Synthetic oligonucleotide
ctagcgactacttttactccgccccaggtactacgtgctatgttccacatgacggata

SEQ ID NO: 247473 - DNA, 51 bp, Artificial
  Synthetic oligonucleotide
aatttaatcctaaaacgaaacaaccatataaacgtggaagaaactgggcaa

SEQ ID NO: 247474 - DNA, 55 bp, Artificial
  Synthetic oligonucleotide
aagtctttttcatgttagagaatacctttcttcgtatagtaagttgggcataaca

SEQ ID NO: 247475 - DNA, 58 bp, Artificial
  Synthetic oligonucleotide
gaatatggagaaagtgcttttccaggcaatgggacagccctagctaatgcccaacata

SEQ ID NO: 247476 - DNA, 60 bp, Artificial
  Synthetic oligonucleotide
ccccatgcttcttctagacatctttgaatccaagaaaaatctgctgatctttttactctg

SEQ ID NO: 247477 - DNA, 58 bp, Artificial
  Synthetic oligonucleotide
gcatagtttctttatattctcgcatatccttaatatcgttcgtttgacctaacttgcg

SEQ ID NO: 247478 - DNA, 58 bp, Artificial
  Synthetic oligonucleotide
cggccagactcacgccaaagatccgcactgagaagggctggagtcaacatctcaaccg

SEQ ID NO: 247479 - DNA, 58 bp, Artificial
  Synthetic oligonucleotide
gagccttatacttctgagtataaagtagacatgatggatactgactttattgttcgtg

SEQ ID NO: 247480 - DNA, 56 bp, Artificial
  Synthetic oligonucleotide
ctttgagacgtgtttggttttactgaccaccatacttctcgaccattaccatataa

SEQ ID NO: 247481 - DNA, 55 bp, Artificial
  Synthetic oligonucleotide
ttattattgtttaactcatcgttcaaactatctttcatgagataaacccctttta

SEQ ID NO: 247482 - DNA, 58 bp, Artificial
  Synthetic oligonucleotide
aacatgccgtcgccaataaagccgatatgtgctggttcatgccccgagcctcctccag

SEQ ID NO: 247483 - DNA, 58 bp, Artificial
  Synthetic oligonucleotide
ggttatgaatatgtgccgaattatattccgccagttgtttattatgtgccaacttatg

SEQ ID NO: 247484 - DNA, 56 bp, Artificial
  Synthetic oligonucleotide
ccgagcaaagcgtaaggagtgagcgttgggaatgcacgaacaccccgaaaagctaa

SEQ ID NO: 247485 - DNA, 56 bp, Artificial
  Synthetic oligonucleotide
gatctaaaatgttgtttgcgagttcagcggagtacccgcctttgcgtttattatat

SEQ ID NO: 247486 - DNA, 55 bp, Artificial
  Synthetic oligonucleotide
ttacccgcccatgggtctgtacgttcaacgttccccgtatccacacccatcagta

SEQ ID NO: 247487 - DNA, 52 bp, Artificial
  Synthetic oligonucleotide
ccccatttaaggcatgtaaacagaaaagaccgtattaaagggctttaaagca

SEQ ID NO: 247488 - DNA, 58 bp, Artificial
  Synthetic oligonucleotide
gcattgtcccacgaaaatataacgattattaaacgtgacataagagaagtctatcacg

SEQ ID NO: 247489 - DNA, 58 bp, Artificial
  Synthetic oligonucleotide
cggtccaaattgctgctaaaagcgagcccaactgggcagtcaactggtttgttggcga

SEQ ID NO: 247490 - DNA, 58 bp, Artificial
  Synthetic oligonucleotide
gcgcggcatgttaagcgggcttatgatggctcgctagataagagcaatggtcgctgga

SEQ ID NO: 247491 - DNA, 58 bp, Artificial
  Synthetic oligonucleotide
ccagataaaggaacagtgggcctctatcaggctggacatagccctcgggatctggccc

SEQ ID NO: 247492 - DNA, 58 bp, Artificial
  Synthetic oligonucleotide
accaggcgatgctccctacggcaggattcatgtcaacacggtagccattcgcacgtgc

SEQ ID NO: 247493 - DNA, 56 bp, Artificial
  Synthetic oligonucleotide
cttactactaattctaatataaccaatcctactcatatttatgcctaaccctactg

SEQ ID NO: 247494 - DNA, 58 bp, Artificial
  Synthetic oligonucleotide
gcgcccttaggaaaataatttgaatatatttcagattttcaatctgactgctcctgtc

SEQ ID NO: 247495 - DNA, 58 bp, Artificial
  Synthetic oligonucleotide
tgcgaggcccagtctcttcaggagctacgacaaccttcaagagccgtttggcagcaat

SEQ ID NO: 247496 - DNA, 58 bp, Artificial
  Synthetic oligonucleotide
tacgaccagcggctgtgaaaccaaggatgtgaacgtcctgcggtaggctagtttcacg

SEQ ID NO: 247497 - DNA, 58 bp, Artificial
  Synthetic oligonucleotide
tactgagcccacacggttagtttggccaggaccaacaccaagcgtctggtggtcattg

SEQ ID NO: 247498 - DNA, 57 bp, Artificial
  Synthetic oligonucleotide
gttatagggaaaccttgatagaacgcgttgagacttgtggagatactcttcgattta

SEQ ID NO: 247499 - DNA, 58 bp, Artificial
  Synthetic oligonucleotide
ggtcactgtgttcgaacccttcacgccgaggttaatgccatcttgcaaggagccgaac

SEQ ID NO: 247500 - DNA, 58 bp, Artificial
  Synthetic oligonucleotide
taccgccacaggttacttgctgtcaaggagaccatggaataaagtaagcggacatgat

SEQ ID NO: 247501 - DNA, 56 bp, Artificial
  Synthetic oligonucleotide
tgactattaagttaagaataggagttatcaaacctatatttatgggagataagtcc

SEQ ID NO: 247502 - DNA, 58 bp, Artificial
  Synthetic oligonucleotide
taaaatgcaatctatgagcttctaggggtattctagtttaactccgccacttgtctaa

SEQ ID NO: 247503 - DNA, 58 bp, Artificial
  Synthetic oligonucleotide
tcgcttctcttaggctctttattactttatcggcagataattttgaaagttcagtctc

SEQ ID NO: 247504 - DNA, 58 bp, Artificial
  Synthetic oligonucleotide
aggtattgtgcgtaactcaacgaggtattgtgcgtaactcaacgaggtattgtgcgta

SEQ ID NO: 247505 - DNA, 58 bp, Artificial
  Synthetic oligonucleotide
gtgcccaatctatgcgggctctggcttcgatcaatgcggagatccatcgtcgtgaacg

SEQ ID NO: 247506 - DNA, 58 bp, Artificial
  Synthetic oligonucleotide
caggctgaaaataaaacccgcactatgccattacatttatatctatgatacgtgtttg

SEQ ID NO: 247507 - DNA, 58 bp, Artificial
  Synthetic oligonucleotide
tatgagtgcttgggtcaaactgtacttgtgcgcctgattgtgtgccgtgagtggggta

SEQ ID NO: 247508 - DNA, 57 bp, Artificial
  Synthetic oligonucleotide
tcggacaaggggttatgttgagccgacaagctggtggtatcggtagtcgtggtcctg

SEQ ID NO: 247509 - DNA, 58 bp, Artificial
  Synthetic oligonucleotide
taacccgttagtccatataccaagcagacgggcgctaggtggcgcttacttcgtgcgc

SEQ ID NO: 247510 - DNA, 55 bp, Artificial
  Synthetic oligonucleotide
cccctatcagtggtggggatttgtaggaaagacaccatttattgactttttgcac

SEQ ID NO: 247511 - DNA, 58 bp, Artificial
  Synthetic oligonucleotide
taggcagagccctccaatggcaaggttagtcttccatccgcctcctgttactgaggct

SEQ ID NO: 247512 - DNA, 58 bp, Artificial
  Synthetic oligonucleotide
tcccgcaacttgccctctcacatataagggaacaacgatagcggcagccaagggacag

SEQ ID NO: 247513 - DNA, 58 bp, Artificial
  Synthetic oligonucleotide
tggagcaacagcaactaaattggcttcgccaattaagatggtgtttagagccttagct

SEQ ID NO: 247514 - DNA, 58 bp, Artificial
  Synthetic oligonucleotide
taagctatgtcctatgtgcaactggagacgttcaatgaaatattcttatcagacatca

SEQ ID NO: 247515 - DNA, 57 bp, Artificial
  Synthetic oligonucleotide
gttcggggtagttagagccgaatggtaggactgcagattggcgcttccgtttgggca

SEQ ID NO: 247516 - DNA, 57 bp, Artificial
  Synthetic oligonucleotide
tcttgattaaaccgtatcatgaccttatcgtcatagtccgtccattcaactgttgga

SEQ ID NO: 247517 - DNA, 54 bp, Artificial
  Synthetic oligonucleotide
gccttacgcctaccgtaataaggcgcaagtgcccgttcgccgtgttaaaggtca

SEQ ID NO: 247518 - DNA, 52 bp, Artificial
  Synthetic oligonucleotide
gtggttttgtaagcgggttttcattgcgtttacagattttaattcccagaaa

SEQ ID NO: 247519 - DNA, 57 bp, Artificial
  Synthetic oligonucleotide
tggctagacactcatagaaacgatttaagggcagatttaggacgtttagagggtgtc

SEQ ID NO: 247520 - DNA, 57 bp, Artificial
  Synthetic oligonucleotide
gcgtagaaacgcacctctcatacgtcgcaagcaaacaagaggggtattctaaacgaa

SEQ ID NO: 247521 - DNA, 60 bp, Artificial
  Synthetic oligonucleotide
caggttcaattacacgtagtaactgctctttaccagcgctagaaagctgatatatcttca

SEQ ID NO: 247522 - DNA, 56 bp, Artificial
  Synthetic oligonucleotide
ataaccaagtcgcattcactaaacagcgaaagttgggaggtgaaactttatgctaa

SEQ ID NO: 247523 - DNA, 57 bp, Artificial
  Synthetic oligonucleotide
tagctccagcaaaagaattcatttaagcgattatgtaacggaaggcatcccgtttta

SEQ ID NO: 247524 - DNA, 57 bp, Artificial
  Synthetic oligonucleotide
tcaccgtcaaggcctgatggaccttggtcaaacgcgcttgattttcgacccctagca

SEQ ID NO: 247525 - DNA, 57 bp, Artificial
  Synthetic oligonucleotide
tcgagaatcgagatgattggtttgacgttgctataaacagcaatacgatcgctataa

SEQ ID NO: 247526 - DNA, 57 bp, Artificial
  Synthetic oligonucleotide
tacacgcggaagcaacttcaagaagaggcgcgttacccacctgcttatgttgtgcgg

SEQ ID NO: 247527 - DNA, 56 bp, Artificial
  Synthetic oligonucleotide
gcttcccgccataagtctcttgtcgtgtgaagtaggccttgtccccttggccctcg

SEQ ID NO: 247528 - DNA, 57 bp, Artificial
  Synthetic oligonucleotide
agtgccatactggctgagtagttgccctaagcgtaaaacaccctcacgcgccgacct

SEQ ID NO: 247529 - DNA, 57 bp, Artificial
  Synthetic oligonucleotide
tcccaagtcggccaagccacatggctcaatgaggcttctgacccagtcactacctgc

SEQ ID NO: 247530 - DNA, 54 bp, Artificial
  Synthetic oligonucleotide
cttaagatataaaaaaggctctgttgaacgagcataatgaaaaacgaattcgtt

SEQ ID NO: 247531 - DNA, 57 bp, Artificial
  Synthetic oligonucleotide
aattgtagacgtgcgaaaagtaaaaccaaatcagcgtaaagctaagagtgacatgga

SEQ ID NO: 247532 - DNA, 58 bp, Artificial
  Synthetic oligonucleotide
cagtaaaatacacacgactgaacagtaaaatacacacgactgaacagtaaaatacaca

SEQ ID NO: 247533 - DNA, 57 bp, Artificial
  Synthetic oligonucleotide
tgtaaacctctatcacacaaatcccctaataatattagctgttgtctattcgaatcc

SEQ ID NO: 247534 - DNA, 51 bp, Artificial
  Synthetic oligonucleotide
ggacgaaaaatcgtccacttttttgttcggagctcggaagtttttgaccac

SEQ ID NO: 247535 - DNA, 57 bp, Artificial
  Synthetic oligonucleotide
gcgacctagtttgctgtagctcttgacggcatccatgcgtctggccccaaattcgta

SEQ ID NO: 247536 - DNA, 57 bp, Artificial
  Synthetic oligonucleotide
caataatacatccagttacagtttacaagacaatctcctaccatagctctttagtgg

SEQ ID NO: 247537 - DNA, 57 bp, Artificial
  Synthetic oligonucleotide
agcaccgagtcaaataagtctaaggagatctttcatgatagattataacacacgtat

SEQ ID NO: 247538 - DNA, 57 bp, Artificial
  Synthetic oligonucleotide
cggtggtcaaacagtaggcggtcaatggaacgcagaccctgtttatggtcacgtggc

SEQ ID NO: 247539 - DNA, 57 bp, Artificial
  Synthetic oligonucleotide
agcaagctgaaggctggtaaacggtgtctgcaaggctttggcacgacgataggctga

SEQ ID NO: 247540 - DNA, 57 bp, Artificial
  Synthetic oligonucleotide
ggttaatctcatcaagaaaaggagttagaaacagttgcgaaaatatatgatctacct

SEQ ID NO: 247541 - DNA, 57 bp, Artificial
  Synthetic oligonucleotide
gacggattttgataccagtttatacgactaataatgtatctcacttaaatggctcgc

SEQ ID NO: 247542 - DNA, 57 bp, Artificial
  Synthetic oligonucleotide
tccctaccttacgttgtccgctctcgctatgtcgttgaagcgacaagtcgagccgca

SEQ ID NO: 247543 - DNA, 60 bp, Artificial
  Synthetic oligonucleotide
gtgaacgaaaataaggtttctaatcgagcaatccgaaaagatgcagttctatgtgatgag

SEQ ID NO: 247544 - DNA, 57 bp, Artificial
  Synthetic oligonucleotide
cttgaaaattttcttttatcgccttatgaaatgacagatcggtcaatcatggttggc

SEQ ID NO: 247545 - DNA, 57 bp, Artificial
  Synthetic oligonucleotide
attcattactaattgtactaagacaaagtttttcgttgaatgagcatactctagttc

SEQ ID NO: 247546 - DNA, 53 bp, Artificial
  Synthetic oligonucleotide
aagcgggaaaccaagtttgcgacgttctgccacgaaagttttagccaccacac

SEQ ID NO: 247547 - DNA, 52 bp, Artificial
  Synthetic oligonucleotide
ggcggaaacgtaaaagaagttatggaaataagacttagaagcaaacttaaga

SEQ ID NO: 247548 - DNA, 57 bp, Artificial
  Synthetic oligonucleotide
cgctagccttgccatgtatggagcctacacggcaggattgcagtctgccctcatggt

SEQ ID NO: 247549 - DNA, 57 bp, Artificial
  Synthetic oligonucleotide
ttgggaccagttagacctcgctttagttggcattggaggagagcccaacagccgtga

SEQ ID NO: 247550 - DNA, 56 bp, Artificial
  Synthetic oligonucleotide
gaatacttgcacgttcgatttatactagatgagttcgcaaacttaggtaaaatacc

SEQ ID NO: 247551 - DNA, 57 bp, Artificial
  Synthetic oligonucleotide
aaccgtcatagcaatagccgctacaggtgcttgaaccgcaatcagggccaacatggc

SEQ ID NO: 247552 - DNA, 57 bp, Artificial
  Synthetic oligonucleotide
atcggatgtcgacgggctttgaggctgtcatgggctatctccatatgacgggggagc

SEQ ID NO: 247553 - DNA, 53 bp, Artificial
  Synthetic oligonucleotide
ctcgagacaaaacctacctcttaatagtaacacctattcttaccaaagtcaaa

SEQ ID NO: 247554 - DNA, 59 bp, Artificial
  Synthetic oligonucleotide
cagtattcttagaacagaacttgataaagcccattctcatatagaaaagttaagcaatc

SEQ ID NO: 247555 - DNA, 57 bp, Artificial
  Synthetic oligonucleotide
gcacctagttgaatacttggaccttcacgcccgagcatgagtccgctcgcaatggcc

SEQ ID NO: 247556 - DNA, 57 bp, Artificial
  Synthetic oligonucleotide
gtctctgataatgattggagatttcaaggaattactgcattacttgacactcggatg

SEQ ID NO: 247557 - DNA, 57 bp, Artificial
  Synthetic oligonucleotide
gcaagagccgactcctgcgcagccaattgcgctttcgcgctatcaaccttttcctga

SEQ ID NO: 247558 - DNA, 57 bp, Artificial
  Synthetic oligonucleotide
taggtcctgaagctaggcagagccctccaatggcaaggttagtcttccatccgcctc

SEQ ID NO: 247559 - DNA, 55 bp, Artificial
  Synthetic oligonucleotide
acatttataaagttgtttgttaagtttgatatgaaaggcgcaccagacccaacta

SEQ ID NO: 247560 - DNA, 57 bp, Artificial
  Synthetic oligonucleotide
agcgtggtctgaccaatcgtcacgtgcaggttatggccattgctgggacaatcggaa

SEQ ID NO: 247561 - DNA, 57 bp, Artificial
  Synthetic oligonucleotide
ccctaaataccttatattgtcattttctatactgaatgctttattaatagacagtgg

SEQ ID NO: 247562 - DNA, 52 bp, Artificial
  Synthetic oligonucleotide
ttaccactagtaacacaactggtaacgacaaggtaaccaatactagtaaccc

SEQ ID NO: 247563 - DNA, 56 bp, Artificial
  Synthetic oligonucleotide
attgccacagttggtagcggtggttctgcaattggggaccaatcgccaaaagggac

SEQ ID NO: 247564 - DNA, 55 bp, Artificial
  Synthetic oligonucleotide
aaaaaatagcaacagggttgcctttagctgattcaataaaaggcgagaaagacca

SEQ ID NO: 247565 - DNA, 60 bp, Artificial
  Synthetic oligonucleotide
gtctgctcctggtctaacctctcaaaaaagtctttatcagacgtgataatccactcatca

SEQ ID NO: 247566 - DNA, 56 bp, Artificial
  Synthetic oligonucleotide
acttatatatcgtgcaaggagattgggaactagcaaaacttgatagatacgctcgt

SEQ ID NO: 247567 - DNA, 56 bp, Artificial
  Synthetic oligonucleotide
cagaagagcaagacttttgtattaaatgcggaactaagatttcatctggtttcagg

SEQ ID NO: 247568 - DNA, 56 bp, Artificial
  Synthetic oligonucleotide
ggctatcaagtatgttaagtctaacgggattattattactaacgatcacatgacgc

SEQ ID NO: 247569 - DNA, 56 bp, Artificial
  Synthetic oligonucleotide
caccgtgttctccagcacggttcatggtcgcaattcctccactaccgcccccaata

SEQ ID NO: 247570 - DNA, 56 bp, Artificial
  Synthetic oligonucleotide
gttcaagagaaaactagaagctcaactcacaactataaagaatgaatcagaaaggc

SEQ ID NO: 247571 - DNA, 56 bp, Artificial
  Synthetic oligonucleotide
ccgcgtgcgaatggggtcaaaccaaatcaatctctataacagggacagcgggcgcg

SEQ ID NO: 247572 - DNA, 56 bp, Artificial
  Synthetic oligonucleotide
ccagtctgggcgaatcattcttgacggggaggaaaatcccaaggggcgcgtgagct

SEQ ID NO: 247573 - DNA, 56 bp, Artificial
  Synthetic oligonucleotide
ggctacgaaaacacgtggcgctcttcccaagagcctgcccgtaaaggctatgctgg

SEQ ID NO: 247574 - DNA, 56 bp, Artificial
  Synthetic oligonucleotide
ctcaaacctcccaagattgtagaaaattcgcttatctcaaaacaactcttcttagc

SEQ ID NO: 247575 - DNA, 56 bp, Artificial
  Synthetic oligonucleotide
cctataagcaacgattatctgttagcggagaattacactagaaataatttaaaatc

SEQ ID NO: 247576 - DNA, 54 bp, Artificial
  Synthetic oligonucleotide
cagttcagggtacggtcttcgacatatccgaaacacaaataaaaagaggtagtc

SEQ ID NO: 247577 - DNA, 56 bp, Artificial
  Synthetic oligonucleotide
ctgtgtatatagcataaaaaaactgtgtatatagcataaaaaaactgtgtatatag

SEQ ID NO: 247578 - DNA, 56 bp, Artificial
  Synthetic oligonucleotide
agaattgaacgcgacaattagccagctaactcagtcctttgaccgtctttttagac

SEQ ID NO: 247579 - DNA, 56 bp, Artificial
  Synthetic oligonucleotide
atgtgcacgcagcaggaggccttgaaatgatgtcagctgcccgagagggcttgggt

SEQ ID NO: 247580 - DNA, 56 bp, Artificial
  Synthetic oligonucleotide
ccgtatcaagttcaaatagcgagcttgtctgaggcgttgtgagccctataatcgct

SEQ ID NO: 247581 - DNA, 52 bp, Artificial
  Synthetic oligonucleotide
aacgtcactattttagttcgtccaactgttggacaattaggacgttttatac

SEQ ID NO: 247582 - DNA, 56 bp, Artificial
  Synthetic oligonucleotide
cacccagccagtacagagggcagaagtgatgttaaagccacccgtgtgggcgttga

SEQ ID NO: 247583 - DNA, 56 bp, Artificial
  Synthetic oligonucleotide
ggttgctcatgtaatagccaaccccgcggcgtgttgaaacgtattgtggacggctt

SEQ ID NO: 247584 - DNA, 56 bp, Artificial
  Synthetic oligonucleotide
gccatcataacatgttcaagagcaattgattatgcttataaagatacaggtttatc

SEQ ID NO: 247585 - DNA, 55 bp, Artificial
  Synthetic oligonucleotide
acttggccactcgcatatctcccagggggcaacccccaagtacttccgccgtaga

SEQ ID NO: 247586 - DNA, 55 bp, Artificial
  Synthetic oligonucleotide
gttaagagaaatcgtggaaaggtttattatggcaagaagattcgaaaagatctgg

SEQ ID NO: 247587 - DNA, 60 bp, Artificial
  Synthetic oligonucleotide
gtcgcaaatgcgccccatttcatcatccctctatcgtgataagcacggatgacttcatag

SEQ ID NO: 247588 - DNA, 56 bp, Artificial
  Synthetic oligonucleotide
gattcgaattagtgaagatggaggaagtacatattccaatgattcgtataccctta

SEQ ID NO: 247589 - DNA, 56 bp, Artificial
  Synthetic oligonucleotide
ggtattactgcttattgaacgcgcagacggaaggtagtgagcgtgaaacgctgttc

SEQ ID NO: 247590 - DNA, 56 bp, Artificial
  Synthetic oligonucleotide
ccctcatatccatgttttgatgatggttaagtctagctattttagtggggctggag

SEQ ID NO: 247591 - DNA, 56 bp, Artificial
  Synthetic oligonucleotide
ttagcaaacgaacagggtgaagtggcgactgcgcgtggtgtgcatgagtttgggtc

SEQ ID NO: 247592 - DNA, 56 bp, Artificial
  Synthetic oligonucleotide
tgtgatgatttcgaatagcattacaacacgaacgcccaacctatgtcgagtaggtt

SEQ ID NO: 247593 - DNA, 56 bp, Artificial
  Synthetic oligonucleotide
acaccgcgaaccgttggcaccgcttgtgcaacaggtccaaacgctgtttctttcat

SEQ ID NO: 247594 - DNA, 56 bp, Artificial
  Synthetic oligonucleotide
tcacacccaagcgtattgccgtagaccatgtgatgcactttgtacgcgggcgtgta

SEQ ID NO: 247595 - DNA, 56 bp, Artificial
  Synthetic oligonucleotide
tagctgagttgctacaagccgccaatagcagaccggcacttagggcaacgcctgct

SEQ ID NO: 247596 - DNA, 56 bp, Artificial
  Synthetic oligonucleotide
acagcggtggatggtgcaagtcacgggacaaagttagtggctcgtgggggtcaagt

SEQ ID NO: 247597 - DNA, 56 bp, Artificial
  Synthetic oligonucleotide
ttgatcccgcacaacataagcaggtgggtaacgcgccccttcttggaagttgcgtc

SEQ ID NO: 247598 - DNA, 54 bp, Artificial
  Synthetic oligonucleotide
catattcgtaccatgttacaaaaaatctttaatcggagaagtgtggtcaaaaag

SEQ ID NO: 247599 - DNA, 56 bp, Artificial
  Synthetic oligonucleotide
ggtcggatggaagtaagtccggaccgcctcctcattatcctccatgacccagcccc

SEQ ID NO: 247600 - DNA, 56 bp, Artificial
  Synthetic oligonucleotide
acaattagggtgtctggcggtatcacagtgtcttaaccataagtacagtcgtttta

SEQ ID NO: 247601 - DNA, 56 bp, Artificial
  Synthetic oligonucleotide
acctaagagttttgcagcttggccgatctgagagcccaaaccgcctgtgggaccat

SEQ ID NO: 247602 - DNA, 56 bp, Artificial
  Synthetic oligonucleotide
agcatatctttaacttgcgtcgcagataagcccatgaaaggattgtaagcattcgt

SEQ ID NO: 247603 - DNA, 56 bp, Artificial
  Synthetic oligonucleotide
ctccgctgaaatcaatcgtttgtttacctcataatacaatcataacgattaagccg

SEQ ID NO: 247604 - DNA, 56 bp, Artificial
  Synthetic oligonucleotide
agcaggaggccttgaaatgatgtcagctgcccgagagggcttgggtcgggattcca

SEQ ID NO: 247605 - DNA, 50 bp, Artificial
  Synthetic oligonucleotide
tataaccgtccgaagtttcggaacgtttatcctttccattttcgtcctta

SEQ ID NO: 247606 - DNA, 56 bp, Artificial
  Synthetic oligonucleotide
tggacaatttctaagacttctcgagtatttcttgccaatcgatctaactttgtcac

SEQ ID NO: 247607 - DNA, 56 bp, Artificial
  Synthetic oligonucleotide
tatcgcccgagctaggcttgattgctggaggtagcctgctggttgactacatgcta

SEQ ID NO: 247608 - DNA, 52 bp, Artificial
  Synthetic oligonucleotide
ttgagttggttttgaaaggtagtatactgggcggtaatttcagtagggaaat

SEQ ID NO: 247609 - DNA, 59 bp, Artificial
  Synthetic oligonucleotide
gttaggtcagacgaacgatattaaggatatgcgagaatataaagaaactatgcgacaaa

SEQ ID NO: 247610 - DNA, 57 bp, Artificial
  Synthetic oligonucleotide
catattcgtttccgttaagcataacacctactcctttctaacttgatatatttatga

SEQ ID NO: 247611 - DNA, 56 bp, Artificial
  Synthetic oligonucleotide
gggcaagaattagtgattacaatacaagctgacccttactcaattattgaaacgag

SEQ ID NO: 247612 - DNA, 56 bp, Artificial
  Synthetic oligonucleotide
gcgaaatagactagtaggggtcgagtcgacaggctgaaagcttgccgaccgaacac

SEQ ID NO: 247613 - DNA, 54 bp, Artificial
  Synthetic oligonucleotide
acggaccgggtcttgttggagccctcttagtagggatggcagcggctaaggcct

SEQ ID NO: 247614 - DNA, 56 bp, Artificial
  Synthetic oligonucleotide
aggtttgggacgagagtcccatttgggcagacgatcgtcgcccaagccaactgcaa

SEQ ID NO: 247615 - DNA, 56 bp, Artificial
  Synthetic oligonucleotide
catggtttaataaagccgagagcaacgccaataaaatcgttagagtggtcatcgtg

SEQ ID NO: 247616 - DNA, 56 bp, Artificial
  Synthetic oligonucleotide
gacgggtttgaaacaggggccactggtgtggactgaggtctttttgcgcgaggtca

SEQ ID NO: 247617 - DNA, 56 bp, Artificial
  Synthetic oligonucleotide
tcttcgacgcaggaacgtgcttgtgatactgctgaattagcaacggggcgcacaga

SEQ ID NO: 247618 - DNA, 56 bp, Artificial
  Synthetic oligonucleotide
gaatgtcccctgactggatggcttggtagcgaagagctggctccatggttgccaca

SEQ ID NO: 247619 - DNA, 56 bp, Artificial
  Synthetic oligonucleotide
tccgccgcataaccgccagaatccttgccactattggcagcaaagtccacccagcg

SEQ ID NO: 247620 - DNA, 56 bp, Artificial
  Synthetic oligonucleotide
catcaattagtctttctataacgatagaaacacaaatgatgactattatgttagtt

SEQ ID NO: 247621 - DNA, 60 bp, Artificial
  Synthetic oligonucleotide
catcagttcatcacacaaagatttggtattattgaagaaagcaaccaataaatggaaatc

SEQ ID NO: 247622 - DNA, 56 bp, Artificial
  Synthetic oligonucleotide
agagcaactaatttggcaacaccatggacagtcagtgtagctcaaacttcaccaat

SEQ ID NO: 247623 - DNA, 56 bp, Artificial
  Synthetic oligonucleotide
cattcgctactcgaatgacccacctgaggaggtaaaagttatgagctacatggttg

SEQ ID NO: 247624 - DNA, 56 bp, Artificial
  Synthetic oligonucleotide
gtgaataagtagaatatttcgaagttgccaactatatgatatagcctctcggagac

SEQ ID NO: 247625 - DNA, 56 bp, Artificial
  Synthetic oligonucleotide
tcccattgatccccaaaatagtggtgttgtatttgcaaaagtaggggcagccatat

SEQ ID NO: 247626 - DNA, 56 bp, Artificial
  Synthetic oligonucleotide
gcgtgattgatgactatatcctgttttacgaaattgaatctgataccgttaaggtc

SEQ ID NO: 247627 - DNA, 56 bp, Artificial
  Synthetic oligonucleotide
cttgccgtccaactgccagatagcgctcctttgagcgtccgtatttcatggcgcgg

SEQ ID NO: 247628 - DNA, 56 bp, Artificial
  Synthetic oligonucleotide
aaggcagacgctgaccgtcatacccaaatcaaggacttgaacgcccaagcagccac

SEQ ID NO: 247629 - DNA, 56 bp, Artificial
  Synthetic oligonucleotide
tcttgggcacgcaggttcatacagtccacacggtgaatagccacaccacgaccctt

SEQ ID NO: 247630 - DNA, 55 bp, Artificial
  Synthetic oligonucleotide
gctaagcgggcagctaacaggcgatgattggtccaagctaagcattgttgctccc

SEQ ID NO: 247631 - DNA, 55 bp, Artificial
  Synthetic oligonucleotide
gcattatggaagtaggcggggtagctgtagggctaggcagtataagtaacgctga

SEQ ID NO: 247632 - DNA, 55 bp, Artificial
  Synthetic oligonucleotide
gtcctttttcatcacactttttgggattatcagctcgtattattttcaaggactt

SEQ ID NO: 247633 - DNA, 55 bp, Artificial
  Synthetic oligonucleotide
ttgatggggtataacgcaattcagcgtcacgtgtcatacgccctacaagtacaac

SEQ ID NO: 247634 - DNA, 55 bp, Artificial
  Synthetic oligonucleotide
tactcctagttctccgatggcagattatactgacgcttggtcagttgctggacgt

SEQ ID NO: 247635 - DNA, 55 bp, Artificial
  Synthetic oligonucleotide
gcatgtctatattaattgttgccagtagggtcttacatcccatacgtgcagcggc

SEQ ID NO: 247636 - DNA, 55 bp, Artificial
  Synthetic oligonucleotide
gctaaaggcgctgcactccttacggttgtatcagcagtatctaggcggtacctga

SEQ ID NO: 247637 - DNA, 55 bp, Artificial
  Synthetic oligonucleotide
gctaataaatcagtgtccacaatagccttagccacctctggacgtaaatctcctg

SEQ ID NO: 247638 - DNA, 55 bp, Artificial
  Synthetic oligonucleotide
gcatggatgggcactagcttatagtatcgatgctggcaatgtgcatgacagtcag

SEQ ID NO: 247639 - DNA, 55 bp, Artificial
  Synthetic oligonucleotide
gcatgcagtctggtgatattgctctcttttgcacctgccgactgtggagtttgag

SEQ ID NO: 247640 - DNA, 55 bp, Artificial
  Synthetic oligonucleotide
gcgtttacttatcgccaatgatttaccgggacttggcaaggtcgctttagccagc

SEQ ID NO: 247641 - DNA, 55 bp, Artificial
  Synthetic oligonucleotide
gcattgggagactcgttgggtctaacttactttgagacaagttgatgcgcttaac

SEQ ID NO: 247642 - DNA, 55 bp, Artificial
  Synthetic oligonucleotide
ttcttgatccatgcgcacttttattcctgtataacctaactacgttcatccaact

SEQ ID NO: 247643 - DNA, 60 bp, Artificial
  Synthetic oligonucleotide
catcgattttagtatctatatacatcgattttagtatctatatacatcgattttagtatc

SEQ ID NO: 247644 - DNA, 55 bp, Artificial
  Synthetic oligonucleotide
gccatctggcaagagtacttagagcactagcatttattcactgggtttgggctag

SEQ ID NO: 247645 - DNA, 55 bp, Artificial
  Synthetic oligonucleotide
gcgtcgttcacacacaaaccttgggacattatcctgatgagtgtcctacatgtgg

SEQ ID NO: 247646 - DNA, 55 bp, Artificial
  Synthetic oligonucleotide
gccatagcaagtgcgccacgaatgttgtagaggaatggtgtaggctcaacagcga

SEQ ID NO: 247647 - DNA, 55 bp, Artificial
  Synthetic oligonucleotide
gccagcggaaatcttggtctacggcgcctctgttattcaccattctaaacgaacc

SEQ ID NO: 247648 - DNA, 55 bp, Artificial
  Synthetic oligonucleotide
tacttgtcctaaaagcacaaattatttcttccgtgacgagtgatactggtatgtc

SEQ ID NO: 247649 - DNA, 55 bp, Artificial
  Synthetic oligonucleotide
gccagccagcgcatacagctccactgttagtacacgtcattgagttggtctgagg

SEQ ID NO: 247650 - DNA, 55 bp, Artificial
  Synthetic oligonucleotide
ttgatagtgtgaatgatggtacctggactatcaagggttatgacgctgcaagtgc

SEQ ID NO: 247651 - DNA, 55 bp, Artificial
  Synthetic oligonucleotide
gccagcagggttcctgtgactatgattatggtagcggagagatttcacttcgctt

SEQ ID NO: 247652 - DNA, 55 bp, Artificial
  Synthetic oligonucleotide
tctccacggagctagtatatacatggatacagtcagtgttggggcgaccattaac

SEQ ID NO: 247653 - DNA, 55 bp, Artificial
  Synthetic oligonucleotide
tactgctagtcaagacaaccaaacagttagactagccagcaactgcttaggcaca

SEQ ID NO: 247654 - DNA, 57 bp, Artificial
  Synthetic oligonucleotide
gtcctaatgggacacgtgttttactaccttggtgctcacttaccaatcttccgctca

SEQ ID NO: 247655 - DNA, 55 bp, Artificial
  Synthetic oligonucleotide
gccagacgttacttcttatagagcgtctcttcatttagtacgtcattcctatggc

SEQ ID NO: 247656 - DNA, 55 bp, Artificial
  Synthetic oligonucleotide
gcgtttaagttgcagactacgagcgcacaaacggctctgtcaggtgacttggatg

SEQ ID NO: 247657 - DNA, 55 bp, Artificial
  Synthetic oligonucleotide
gccaagggaaagagctactgataacccgaggctttacagtctatcagaacaagcg

SEQ ID NO: 247658 - DNA, 55 bp, Artificial
  Synthetic oligonucleotide
gccaaccaccgataatatctgtcgggtagtgaaccccaatatagatacgggatac

SEQ ID NO: 247659 - DNA, 55 bp, Artificial
  Synthetic oligonucleotide
gccaaatgccagcaaaaccttacatgagggagcgctggcaccttggaatcctatc

SEQ ID NO: 247660 - DNA, 55 bp, Artificial
  Synthetic oligonucleotide
gccaaaggttacttactggtggttctaagtcagcgtcttgttattgatgttatcc

SEQ ID NO: 247661 - DNA, 55 bp, Artificial
  Synthetic oligonucleotide
gccaaacttgcttcgcggtagtgacgaggtactgcacgcaaactatcaaccgtca

SEQ ID NO: 247662 - DNA, 55 bp, Artificial
  Synthetic oligonucleotide
ttgatcacagggtagtaggtcaatggagctatctgtacatcatactgcgtctgac

SEQ ID NO: 247663 - DNA, 55 bp, Artificial
  Synthetic oligonucleotide
gcatttcagcagctctcttcaaggattggtacttgaacttcctaaggaccaacac

SEQ ID NO: 247664 - DNA, 55 bp, Artificial
  Synthetic oligonucleotide
tctccaatacaactcgatcagtatgcccaaggtcgtctgctaatttagcgagatg

SEQ ID NO: 247665 - DNA, 58 bp, Artificial
  Synthetic oligonucleotide
gtcctaactgattctatcttgattaatgcattactattccgaatttaagaacttgact

SEQ ID NO: 247666 - DNA, 55 bp, Artificial
  Synthetic oligonucleotide
ttgctagctctaagaatggcgatgagacttggcaggccaagcgagttatggagcg

SEQ ID NO: 247667 - DNA, 55 bp, Artificial
  Synthetic oligonucleotide
gcaggttcgtcaagtcatgcaggctcttttggtcctcgttaatcgtggcatgacc

SEQ ID NO: 247668 - DNA, 55 bp, Artificial
  Synthetic oligonucleotide
gcaggtcgtagagaagaggtgagtcctgatgcgtcttaaagcgattcgctccctc

SEQ ID NO: 247669 - DNA, 55 bp, Artificial
  Synthetic oligonucleotide
ttctctgggtgtcttatgctggttgccggatattactgcctggggacgcgttgtg

SEQ ID NO: 247670 - DNA, 55 bp, Artificial
  Synthetic oligonucleotide
tgaagggttgaaggcagaagtttatcgtagtagaactctattgcaccacaaagat

SEQ ID NO: 247671 - DNA, 55 bp, Artificial
  Synthetic oligonucleotide
gcaggcgacacgttgattgtaaccaaacttgaccgtttcgcacgcaacactaaag

SEQ ID NO: 247672 - DNA, 55 bp, Artificial
  Synthetic oligonucleotide
gcaggacttttagctacaaaaggacgagcttcttatcttggggaacgctcaattg

SEQ ID NO: 247673 - DNA, 55 bp, Artificial
  Synthetic oligonucleotide
tgaatgctactgtagtagctgacgcgggtattggtgaccgcgtcaatatgggtta

SEQ ID NO: 247674 - DNA, 55 bp, Artificial
  Synthetic oligonucleotide
gcaggaaatgtgaaacgttctgtttacccgcgttatgaagaataccgtgcccaac

SEQ ID NO: 247675 - DNA, 55 bp, Artificial
  Synthetic oligonucleotide
tatgacggtcacacgtcccatcgtagccagcacgacaggcatcacactccccaca

SEQ ID NO: 247676 - DNA, 60 bp, Artificial
  Synthetic oligonucleotide
catctctgtctccaaccaaaaatatgggtacactgaattggcaaacgatgattttagata

SEQ ID NO: 247677 - DNA, 55 bp, Artificial
  Synthetic oligonucleotide
gctagtcctgtaatccatcacggcaaagcatctctggtgggcagagcgaactgtt

SEQ ID NO: 247678 - DNA, 55 bp, Artificial
  Synthetic oligonucleotide
gctagtgctataagcttctcggctaagtaagccacacgcttgtcagaaatccgtt

SEQ ID NO: 247679 - DNA, 55 bp, Artificial
  Synthetic oligonucleotide
gctatttccccattgatttaatcaagggctattccccttctcgaaaactgacaga

SEQ ID NO: 247680 - DNA, 55 bp, Artificial
  Synthetic oligonucleotide
gcagcctcagcctacttatatgcttctagctctccgttctggtggactcttgcaa

SEQ ID NO: 247681 - DNA, 55 bp, Artificial
  Synthetic oligonucleotide
gcagcatcgcagctaccatgcctaacaagggaacaaccataacggtcaatatcac

SEQ ID NO: 247682 - DNA, 55 bp, Artificial
  Synthetic oligonucleotide
gctcaataaagtagacaagccccactcacgacctgaacgaatatggtcaaagacc

SEQ ID NO: 247683 - DNA, 55 bp, Artificial
  Synthetic oligonucleotide
gcagcaaaggagcttttgcgaaacacggtgaccactattaccgcgttaccattcc

SEQ ID NO: 247684 - DNA, 55 bp, Artificial
  Synthetic oligonucleotide
ttctcaagtgatggcattcgtccagacagagggtttcgacacccctttccttgag

SEQ ID NO: 247685 - DNA, 55 bp, Artificial
  Synthetic oligonucleotide
tacgtgccaaaccaagtaggtatccgcaatcctgcatttgcgcatgtgattagtt

SEQ ID NO: 247686 - DNA, 55 bp, Artificial
  Synthetic oligonucleotide
gctcactgagcatacaatgtgctgttggatgagtctggaccgttctggctaatat

SEQ ID NO: 247687 - DNA, 59 bp, Artificial
  Synthetic oligonucleotide
gtccagtgacttttgaaaagggctgcgcacgatttacgtttcgtgtagcttgtagcaga

SEQ ID NO: 247688 - DNA, 55 bp, Artificial
  Synthetic oligonucleotide
gctccgtcgttcgatttcctattcctttgagttgcttgacggcttggtatcttga

SEQ ID NO: 247689 - DNA, 55 bp, Artificial
  Synthetic oligonucleotide
gcatgaacctgaataacggggacactttagacgccgattggccgtcagaagagcc

SEQ ID NO: 247690 - DNA, 55 bp, Artificial
  Synthetic oligonucleotide
tagtatggtagactatacattagcactagctgtctataaagtgcttcgaaaacgc

SEQ ID NO: 247691 - DNA, 55 bp, Artificial
  Synthetic oligonucleotide
tagtcgttccctcttggtcggcctgattaggatcgctccctgccgccagtggaaa

SEQ ID NO: 247692 - DNA, 55 bp, Artificial
  Synthetic oligonucleotide
tagttgattgaggaacatgggatagctctgaaagttggcgttgtgttagacctgc

SEQ ID NO: 247693 - DNA, 55 bp, Artificial
  Synthetic oligonucleotide
gcatcacttttaaagtctatcagagctgtatctaaatccttagtagtcctctgac

SEQ ID NO: 247694 - DNA, 55 bp, Artificial
  Synthetic oligonucleotide
gctaattggctacgcgaccccagacaaattggtgcctatctgtcaactgacggcc

SEQ ID NO: 247695 - DNA, 55 bp, Artificial
  Synthetic oligonucleotide
tataacttgtttcggaaacatcttgtgccaactgatgcaagtccttgtagagtga

SEQ ID NO: 247696 - DNA, 55 bp, Artificial
  Synthetic oligonucleotide
tatatagtaatccataaattctgaaaagatggtcttgtatagtgttctataaatt

SEQ ID NO: 247697 - DNA, 55 bp, Artificial
  Synthetic oligonucleotide
gctacacacgtccaaacctttctagtataaaccatcctctctatgatttaggggc

SEQ ID NO: 247698 - DNA, 60 bp, Artificial
  Synthetic oligonucleotide
catggacggactatgacgataaagtgctgattcgttttgaccaagcgattatgccctatt

SEQ ID NO: 247699 - DNA, 55 bp, Artificial
  Synthetic oligonucleotide
ttgcaaaagcgggacattccctatctctttgtgaccaacaatacaacccgcactc

SEQ ID NO: 247700 - DNA, 55 bp, Artificial
  Synthetic oligonucleotide
gcagtttcagtgagctgtttatctgggctgtaagaagcaactgtcaatgttgagt

SEQ ID NO: 247701 - DNA, 55 bp, Artificial
  Synthetic oligonucleotide
ttgccaagagcgatataggtctgttttgcagtccaatcaaagagcgctctagggt

SEQ ID NO: 247702 - DNA, 55 bp, Artificial
  Synthetic oligonucleotide
gctacagtgacagcctttatccgtatgacgactcaagggattccgcctttagctc

SEQ ID NO: 247703 - DNA, 54 bp, Artificial
  Synthetic oligonucleotide
gcagttacactcattactttagttgtaggaaatatcttaggggtaattacgggc

SEQ ID NO: 247704 - DNA, 55 bp, Artificial
  Synthetic oligonucleotide
ttgccacaggggatcacctgcataccctcgttcgttgccaatccagcgaacgctg

SEQ ID NO: 247705 - DNA, 55 bp, Artificial
  Synthetic oligonucleotide
tgaacgaagcgagcttaaccgtatctttccgccgtattggtatttgggagtcatt

SEQ ID NO: 247706 - DNA, 55 bp, Artificial
  Synthetic oligonucleotide
gctaccccaagaatcgatgtctgtatcgaactgtacggaaggatgaaggacgatt

SEQ ID NO: 247707 - DNA, 55 bp, Artificial
  Synthetic oligonucleotide
gctactaactttagcaggagggattatccttggtctagcgccggctagtgccacc

SEQ ID NO: 247708 - DNA, 55 bp, Artificial
  Synthetic oligonucleotide
ttcttcgagtcgcatgtcttgctcttagagtgatcagtgtcccatcttctaagag

SEQ ID NO: 247709 - DNA, 60 bp, Artificial
  Synthetic oligonucleotide
catggtacttatatcttgcatatcagcaacattaattagccatttttcgcctaataactt

SEQ ID NO: 247710 - DNA, 55 bp, Artificial
  Synthetic oligonucleotide
gctagcaaagataagacgacagttagagggactggctatggttttggtggtacgc

SEQ ID NO: 247711 - DNA, 55 bp, Artificial
  Synthetic oligonucleotide
tatcttcaagacgcacttgagagtactgcttaatccattttgcaagtgcagagga

SEQ ID NO: 247712 - DNA, 55 bp, Artificial
  Synthetic oligonucleotide
gcgcggcgtgttattcgctgaccgcaaagacttaggccttcgctggacggacaac

SEQ ID NO: 247713 - DNA, 55 bp, Artificial
  Synthetic oligonucleotide
gcgaatcgaggcttggcaagctcaaagccttatagagtgatgagcgaacgttttg

SEQ ID NO: 247714 - DNA, 55 bp, Artificial
  Synthetic oligonucleotide
gcgaatccaagacctggaagcatacgacctgcaagagtcaaaccgtctgcaaccc

SEQ ID NO: 247715 - DNA, 55 bp, Artificial
  Synthetic oligonucleotide
gcgcggtttagatgatcagccaagttttgaacaggttagccgcattatctcacaa

SEQ ID NO: 247716 - DNA, 55 bp, Artificial
  Synthetic oligonucleotide
gcgctagcaactctccttttcgtatgccagtgaacgctagtaatctaaacagagc

SEQ ID NO: 247717 - DNA, 55 bp, Artificial
  Synthetic oligonucleotide
gcgaaataagtagcgcctaccattgcactggctgagggaatctttacaggtttgt

SEQ ID NO: 247718 - DNA, 55 bp, Artificial
  Synthetic oligonucleotide
gcggaatgagacttgcagaaagactcggattgtccagtgtagcttcaaacagttg

SEQ ID NO: 247719 - DNA, 55 bp, Artificial
  Synthetic oligonucleotide
gcgaaagtgcttcgtctaagttagaattggggattcctaggaaactcggtgtctc

SEQ ID NO: 247720 - DNA, 56 bp, Artificial
  Synthetic oligonucleotide
gctcgtgacccgctgacggcagggtccggcacgactgaggccccgcccgactccgg

SEQ ID NO: 247721 - DNA, 54 bp, Artificial
  Synthetic oligonucleotide
ggacgaagtggtagccgtctgccgggagttcgcccaccttatcccggacctgcc

SEQ ID NO: 247722 - DNA, 57 bp, Artificial
  Synthetic oligonucleotide
agaggagcaatcctagtgaccgtcacgacactgaccgaatgggcctaccccctggcc

SEQ ID NO: 247723 - DNA, 55 bp, Artificial
  Synthetic oligonucleotide
aaagctagacctctgctgggaccttcccggtctctgcgtctgttgcgtccgcctg

SEQ ID NO: 247724 - DNA, 55 bp, Artificial
  Synthetic oligonucleotide
cgaccccgtgcgcaggagtcgtgggcagagagtcatcaggcagtcattcgactgt

SEQ ID NO: 247725 - DNA, 55 bp, Artificial
  Synthetic oligonucleotide
agcacttgttcgcagcacggacggctttgttgagttccggctcacctccgctcgc

SEQ ID NO: 247726 - DNA, 55 bp, Artificial
  Synthetic oligonucleotide
aactctccgacgcctggtccacggacagcgaactagggttcgtcgcctgctctgg

SEQ ID NO: 247727 - DNA, 55 bp, Artificial
  Synthetic oligonucleotide
ccgcctgtcgccacaccctgtcaccgcgatgtcactgtgcacgtagcagaaacgt

SEQ ID NO: 247728 - DNA, 52 bp, Artificial
  Synthetic oligonucleotide
aggcttcgggtaaccgcccgcggtgggacagccggacgggtgtccacgacga

SEQ ID NO: 247729 - DNA, 55 bp, Artificial
  Synthetic oligonucleotide
ccgcagactcaccaaatgagatgagttctaattcgagttgccgaatccgcacgac

SEQ ID NO: 247730 - DNA, 55 bp, Artificial
  Synthetic oligonucleotide
ccgatcccaggtgcaccttcacaaagtcccctcgatgttcggacgcctcattccc

SEQ ID NO: 247731 - DNA, 55 bp, Artificial
  Synthetic oligonucleotide
agggagtgcccgcggaaggcatcccgaaaggcttgaaacgccatgcgcttcgcct

SEQ ID NO: 247732 - DNA, 55 bp, Artificial
  Synthetic oligonucleotide
aagcgggatggcgttgtcccacctgcgcgttagggtccatgaagaggaagggtcg

SEQ ID NO: 247733 - DNA, 59 bp, Artificial
  Synthetic oligonucleotide
gggcccgtgatgcggcaggatctacctgtacaagtccagaaaatgccgagaggccaggg

SEQ ID NO: 247734 - DNA, 55 bp, Artificial
  Synthetic oligonucleotide
aagcgtcacggagtgcggaagtggcacaacgtgccagctaggcgtaccgtgcaca

SEQ ID NO: 247735 - DNA, 55 bp, Artificial
  Synthetic oligonucleotide
agggccgtcggtcacatgcggtaacgatgctagtggccgtcaccgacacccgacc

SEQ ID NO: 247736 - DNA, 55 bp, Artificial
  Synthetic oligonucleotide
agaacgacatatccctgtgcaatgccgaggagagcactcacctatgccatttaag

SEQ ID NO: 247737 - DNA, 48 bp, Artificial
  Synthetic oligonucleotide
aagggaggggtactcccttccgacggtaccggaacggcggcctcggta

SEQ ID NO: 247738 - DNA, 55 bp, Artificial
  Synthetic oligonucleotide
ccgaccgtacgaaatgcccgttacacctgtgtcaccccagccgatcatgggccgt

SEQ ID NO: 247739 - DNA, 52 bp, Artificial
  Synthetic oligonucleotide
ccgacccttgcggactgaaagtgatccggtacggagggtagtccggtggttc

SEQ ID NO: 247740 - DNA, 50 bp, Artificial
  Synthetic oligonucleotide
ccgaaggggttggggaagtgtttaccgaaaggtgatcggcggggcgaggc

SEQ ID NO: 247741 - DNA, 54 bp, Artificial
  Synthetic oligonucleotide
ccgaacctccttgagggccgacggacgaaatccggtgaacagttgtgagtacaa

SEQ ID NO: 247742 - DNA, 54 bp, Artificial
  Synthetic oligonucleotide
ccctgttccacgagcgacgaacaacgctccttacaccacgaacgttgttttcac

SEQ ID NO: 247743 - DNA, 53 bp, Artificial
  Synthetic oligonucleotide
aagggccgaccgccaggttccctgacgaggtcctgtgagttgaagaggggttc

SEQ ID NO: 247744 - DNA, 54 bp, Artificial
  Synthetic oligonucleotide
gggctccaggagggcggaactggcgtctgctccaacggtatcggccgcccccgg

SEQ ID NO: 247745 - DNA, 55 bp, Artificial
  Synthetic oligonucleotide
ccctctcaccactcggacgccagcgactgtataggctctcctgccctccgaatct

SEQ ID NO: 247746 - DNA, 55 bp, Artificial
  Synthetic oligonucleotide
ccctcgctccagcggaacccgacgtgtgtcctacggctgggcagggtagtgcgga

SEQ ID NO: 247747 - DNA, 53 bp, Artificial
  Synthetic oligonucleotide
aagtcaactgccggtcataactccccggttggacacccagccgcacccaaccc

SEQ ID NO: 247748 - DNA, 55 bp, Artificial
  Synthetic oligonucleotide
ccctcacagaccacgtagcgtccgaaagtgacctctcctaggctcgtaattacac

SEQ ID NO: 247749 - DNA, 55 bp, Artificial
  Synthetic oligonucleotide
cccgtttgcagtcattgaacgcgctggatcggatgaatcttcttagcgtgggttc

SEQ ID NO: 247750 - DNA, 55 bp, Artificial
  Synthetic oligonucleotide
cccgttctggtggacaggggagcgggtcagcctcggacacgacgcggacgaggtg

SEQ ID NO: 247751 - DNA, 55 bp, Artificial
  Synthetic oligonucleotide
cccgtgctggtcagtatgtgtcgttattaataaggaaaacgggatctgcctaggc

SEQ ID NO: 247752 - DNA, 55 bp, Artificial
  Synthetic oligonucleotide
aagtggatcttgggatgtgaatgatctcggttcatgggtcggagagatctcacgg

SEQ ID NO: 247753 - DNA, 55 bp, Artificial
  Synthetic oligonucleotide
cccgtcgactcgaatactctccgtaatcacggtagcccgagggagtcaccatccg

SEQ ID NO: 247754 - DNA, 52 bp, Artificial
  Synthetic oligonucleotide
cccgtacccttgctgtacctggctttacccgtcgggcgtcaaatagtgggcg

SEQ ID NO: 247755 - DNA, 60 bp, Artificial
  Synthetic oligonucleotide
gggcttgatgaggtagagaaacctgtaacagctccgctgtcgcctggtcaggctgaaggt

SEQ ID NO: 247756 - DNA, 55 bp, Artificial
  Synthetic oligonucleotide
aagttacgctgctgtggggcaccccggcagtgctttcgtgtgacgatcgtaggcc

SEQ ID NO: 247757 - DNA, 55 bp, Artificial
  Synthetic oligonucleotide
aagtttgaccaaataggtcggcgggtctatcttcggctcactagtcaagcttgac

SEQ ID NO: 247758 - DNA, 55 bp, Artificial
  Synthetic oligonucleotide
aactcgctgtgagtcatcccaccccgcgctcctcttcccggcgtggcacactggt

SEQ ID NO: 247759 - DNA, 55 bp, Artificial
  Synthetic oligonucleotide
ccgcgtgatgcctgtcgcattgatacgactgtcagtgcgtgcctgtggacaaccg

SEQ ID NO: 247760 - DNA, 54 bp, Artificial
  Synthetic oligonucleotide
ccggacaaccccgaatacctctcgaaggagaagcacatgaccaccgtttcgtac

SEQ ID NO: 247761 - DNA, 55 bp, Artificial
  Synthetic oligonucleotide
ccgctatttggggcatagctcgcttgtcagcgtgtgttcgcgtcggggattcacc

SEQ ID NO: 247762 - DNA, 55 bp, Artificial
  Synthetic oligonucleotide
ccgctccgctcgtgtcgccaacctcatcatcttctcgcggtatgccgagagccta

SEQ ID NO: 247763 - DNA, 55 bp, Artificial
  Synthetic oligonucleotide
aggctagcgcacacctcgtcctggcagcaccctcagcaaccgcgtgtcgaacatt

SEQ ID NO: 247764 - DNA, 55 bp, Artificial
  Synthetic oligonucleotide
ccggacagtcggttcaaggcattagtagggcactgcatatgtcgcatgtcaataa

SEQ ID NO: 247765 - DNA, 55 bp, Artificial
  Synthetic oligonucleotide
aactccgttgtcacaacgccctcttgaggctccggcgtaccgctcctaggctgct

SEQ ID NO: 247766 - DNA, 60 bp, Artificial
  Synthetic oligonucleotide
agaccggcactgcacgcacggaagcacggagtctccgtgcccccctgagcacgacccgca

SEQ ID NO: 247767 - DNA, 55 bp, Artificial
  Synthetic oligonucleotide
ccgcttatgtgtatggtttccggagtcgggttcatcttacggcgaggagactccc

SEQ ID NO: 247768 - DNA, 55 bp, Artificial
  Synthetic oligonucleotide
ccgcttcctcgggtcacgcaggttgacgttgatgtgttccgccaggaacgcgtac

SEQ ID NO: 247769 - DNA, 55 bp, Artificial
  Synthetic oligonucleotide
ccggacgtacatcaggggcatgtcggaagcgaagcggaattgtgatgagagcgtg

SEQ ID NO: 247770 - DNA, 54 bp, Artificial
  Synthetic oligonucleotide
cacaatgagacaaagctcgaatacccccactgtgagggacccgtgacgcaggaa

SEQ ID NO: 247771 - DNA, 54 bp, Artificial
  Synthetic oligonucleotide
gtcctctcaggcaaacccgtacgcgctgccttacgccgaatggagggcgcctat

SEQ ID NO: 247772 - DNA, 54 bp, Artificial
  Synthetic oligonucleotide
aaagtttgtcaaccacctgcggcgacaggtcatttacggcagggtatcgcaacg

SEQ ID NO: 247773 - DNA, 54 bp, Artificial
  Synthetic oligonucleotide
tgtcagtggggtgtcgtagcctccccaccgatgactcgacacggagacacgacc

SEQ ID NO: 247774 - DNA, 54 bp, Artificial
  Synthetic oligonucleotide
cgaaactcagcgacatccgaaacgcatgtgagtcgatctctgcgcgaccagtag

SEQ ID NO: 247775 - DNA, 54 bp, Artificial
  Synthetic oligonucleotide
aaagttccggcaaggggattgacgcccttactgacacggagtctcatagtggtg

SEQ ID NO: 247776 - DNA, 53 bp, Artificial
  Synthetic oligonucleotide
cgaagaaccgccgctcactaaaaaggggaccctcatgggccgcaaaatcctcg

SEQ ID NO: 247777 - DNA, 57 bp, Artificial
  Synthetic oligonucleotide
ggggagtgtcagtgccgcgggttaccgtcctgctgtcctgacggactgtttcggctc

SEQ ID NO: 247778 - DNA, 54 bp, Artificial
  Synthetic oligonucleotide
catctgggacgagcccgtaccgctcaacccgcgcgggcagctcccggtgtttcc

SEQ ID NO: 247779 - DNA, 54 bp, Artificial
  Synthetic oligonucleotide
ctgtgggcacaattgtcttggctcggagtaggcgcaacggatggggaggcagga

SEQ ID NO: 247780 - DNA, 54 bp, Artificial
  Synthetic oligonucleotide
acttcgatcaaccggataccgacagccgatgacagaccctcaggacacgacgtc

SEQ ID NO: 247781 - DNA, 54 bp, Artificial
  Synthetic oligonucleotide
ggcctgagacctaaccgcctgcctgaacaggggttgatcctgtgtcgaatcgta

SEQ ID NO: 247782 - DNA, 54 bp, Artificial
  Synthetic oligonucleotide
acaagggggtgggggtcgctcgttcgtgtgggtttcagtatagcgcgtgcctca

SEQ ID NO: 247783 - DNA, 54 bp, Artificial
  Synthetic oligonucleotide
tcgtgtgtatccgagtgctcgacgtccacaaagggacgcggatcatggatgttg

SEQ ID NO: 247784 - DNA, 54 bp, Artificial
  Synthetic oligonucleotide
tctggtgtacgagcagactagttcgggtggacggactgtcggaggcctcgcgta

SEQ ID NO: 247785 - DNA, 54 bp, Artificial
  Synthetic oligonucleotide
tccccaacaggagtgcggcgggcataagttggatcccgcaggtgatcatcattc

SEQ ID NO: 247786 - DNA, 54 bp, Artificial
  Synthetic oligonucleotide
agccccggcactcactgtccaggcggggaccggggctcgctcacctcaccaggg

SEQ ID NO: 247787 - DNA, 54 bp, Artificial
  Synthetic oligonucleotide
agtgggggcctccgctctctttgttgcaggagtcggggcgcatatggcgatagc

SEQ ID NO: 247788 - DNA, 59 bp, Artificial
  Synthetic oligonucleotide
ggggccaccacgcaccgaagcgaggtgatcactcaacgcccggagggacagcactgacg

SEQ ID NO: 247789 - DNA, 54 bp, Artificial
  Synthetic oligonucleotide
agcgtcttcctcacctcgcaaacgaaccatgtcgacccttggctgtcgaaccga

SEQ ID NO: 247790 - DNA, 54 bp, Artificial
  Synthetic oligonucleotide
atctgttgacgtgcttagtgtgctagtgcactatctactcactcgctgttactc

SEQ ID NO: 247791 - DNA, 54 bp, Artificial
  Synthetic oligonucleotide
aggtagccttgcaaggtatcctgtcgaatggctaggctggtcccgctgacggca

SEQ ID NO: 247792 - DNA, 54 bp, Artificial
  Synthetic oligonucleotide
tctctgaacttcccgccgtcacccgaccgtcggtcctgtcccgacgaagaccag

SEQ ID NO: 247793 - DNA, 54 bp, Artificial
  Synthetic oligonucleotide
cgacggcttgttccactcgcctggggcggacacagctacagatgatcagcggca

SEQ ID NO: 247794 - DNA, 54 bp, Artificial
  Synthetic oligonucleotide
ggtctggtcaggtataggaccgtgtccgggatcactcgaaagagtgccggggca

SEQ ID NO: 247795 - DNA, 54 bp, Artificial
  Synthetic oligonucleotide
cccgcatcaaagagagacgtccgcacaggagattcactccctacccgttgaggc

SEQ ID NO: 247796 - DNA, 54 bp, Artificial
  Synthetic oligonucleotide
gaccggctcacgccaccctgttcactcccgcaaccggggcagtctcgcacgggg

SEQ ID NO: 247797 - DNA, 54 bp, Artificial
  Synthetic oligonucleotide
ccaaccaagccaagaatcagtcccgctggaactccgaagaccaaccaagcgatc

SEQ ID NO: 247798 - DNA, 51 bp, Artificial
  Synthetic oligonucleotide
accccactgaccgtccctacgacccgaccgtccctgtgagtctcccgggtc

SEQ ID NO: 247799 - DNA, 58 bp, Artificial
  Synthetic oligonucleotide
ggggtgtgatgtgcgtcacaatcccgcaaggggggacaccacaacctgcgggaatcac

SEQ ID NO: 247800 - DNA, 54 bp, Artificial
  Synthetic oligonucleotide
ttggcccgtccctcgatccacctaggaacggacttgaagatcgtgcgtcgaatc

SEQ ID NO: 247801 - DNA, 54 bp, Artificial
  Synthetic oligonucleotide
cgcgcagacaggagcactgcatccgtgcacagcatccaactgatctccttcggc

SEQ ID NO: 247802 - DNA, 54 bp, Artificial
  Synthetic oligonucleotide
tcacgaagtgacggtttgtggcgactttaacctttgatcacagtagagcccttc

SEQ ID NO: 247803 - DNA, 54 bp, Artificial
  Synthetic oligonucleotide
cccgaaagcgatagagggcaagatcacttcacccggatgtctgaaaccgtgtga

SEQ ID NO: 247804 - DNA, 52 bp, Artificial
  Synthetic oligonucleotide
aacacggttccgtacggcgaaacttccccgaaatgagcgcccttccatcagg

SEQ ID NO: 247805 - DNA, 54 bp, Artificial
  Synthetic oligonucleotide
tggcccgggccatcggtatccatctggagatctgcgggcagcgctttggctccg

SEQ ID NO: 247806 - DNA, 54 bp, Artificial
  Synthetic oligonucleotide
actactgggatcgtatgcagatatgcggaccaatgcacccggaccggacgtaaa

SEQ ID NO: 247807 - DNA, 54 bp, Artificial
  Synthetic oligonucleotide
tggcgcaatagcgcaaggggctcttgcacaaagatgctacccgaggaaggaccg

SEQ ID NO: 247808 - DNA, 54 bp, Artificial
  Synthetic oligonucleotide
gaagacacgtccggatgattttcagccgtccaaccgggacttgatcatgagttg

SEQ ID NO: 247809 - DNA, 54 bp, Artificial
  Synthetic oligonucleotide
cactccaaagacttcagatgcacgtacggtgaatctcggcggaaccgagaggaa

SEQ ID NO: 247810 - DNA, 58 bp, Artificial
  Synthetic oligonucleotide
gggttctggcagtcggcatcgaggcggacccagaggacgcgtcgggccatgtccccgc

SEQ ID NO: 247811 - DNA, 54 bp, Artificial
  Synthetic oligonucleotide
cactcctgggtgccatgctcactcctctctcacgatgtgcgggcagtctgcaca

SEQ ID NO: 247812 - DNA, 54 bp, Artificial
  Synthetic oligonucleotide
ccccatactgcggagacctcggcgtttctaccgtgaagtacatgatccttatcg

SEQ ID NO: 247813 - DNA, 53 bp, Artificial
  Synthetic oligonucleotide
ggggcctccggatttactgaccccgaacggatctaccgaatgatcggtcgtcc

SEQ ID NO: 247814 - DNA, 54 bp, Artificial
  Synthetic oligonucleotide
gaatatcgccctatattcatgcgctatgggagcaattgcggggcacggaacatc

SEQ ID NO: 247815 - DNA, 54 bp, Artificial
  Synthetic oligonucleotide
cccaggttctcggctgatttgacactaacggccggtcacgtgcggagcgagtat

SEQ ID NO: 247816 - DNA, 52 bp, Artificial
  Synthetic oligonucleotide
gctgttgaaccgtgcggcctttaaggcgtggttggggaaccccaaacggcaa

SEQ ID NO: 247817 - DNA, 54 bp, Artificial
  Synthetic oligonucleotide
aaccgcgacatcgcacgcgaggaactacccgctctgctcgacctggaaggagct

SEQ ID NO: 247818 - DNA, 54 bp, Artificial
  Synthetic oligonucleotide
gctgatatggatgataagctactcatgacatacgcgcggtctgagaacccaggt

SEQ ID NO: 247819 - DNA, 54 bp, Artificial
  Synthetic oligonucleotide
atagtgagcatgctgtaccgagacgcagaatccgagagcacgcatagtgtctgg

SEQ ID NO: 247820 - DNA, 54 bp, Artificial
  Synthetic oligonucleotide
gaggtccgtgaaaacccccttgagtgtctagcgctgaacatgtatagtggtgca

SEQ ID NO: 247821 - DNA, 58 bp, Artificial
  Synthetic oligonucleotide
ggtacatccttgcttcgaatcggtgcttgatgtaccttcgtggcgtcggcaaggtacg

SEQ ID NO: 247822 - DNA, 54 bp, Artificial
  Synthetic oligonucleotide
actgttcgcgttgggacgcctgggctgtctggtcactgcgaggccgctggaatg

SEQ ID NO: 247823 - DNA, 51 bp, Artificial
  Synthetic oligonucleotide
caccgtgacaccgtcaaggcccgtaacacccaaacccttaggcgaacgcgg

SEQ ID NO: 247824 - DNA, 54 bp, Artificial
  Synthetic oligonucleotide
cggcgcacgcctgcatcaactcgttcactatcacggggtactgacactcaacgt

SEQ ID NO: 247825 - DNA, 54 bp, Artificial
  Synthetic oligonucleotide
ggggctagggatgctcatgtggccgaacattactaggccatctctccattgagg

SEQ ID NO: 247826 - DNA, 54 bp, Artificial
  Synthetic oligonucleotide
tccgctcacgtcaagcccccaggttctcggctgatttgacactaacggccggtc

SEQ ID NO: 247827 - DNA, 54 bp, Artificial
  Synthetic oligonucleotide
ggcacttgccccacttacgtaccgtgtgcgagtcaatgcatactgcacataaat

SEQ ID NO: 247828 - DNA, 54 bp, Artificial
  Synthetic oligonucleotide
aaggaagggacctgactcatgggagcccagctccgggtctacaagcgtcgcatc

SEQ ID NO: 247829 - DNA, 54 bp, Artificial
  Synthetic oligonucleotide
ttgacgtgtgcttgccctccggcagactgggcgcgacatgcgctcagccagacg

SEQ ID NO: 247830 - DNA, 54 bp, Artificial
  Synthetic oligonucleotide
ttctcgcagaatagagcgaggatagcgagcgaatagacggcccgcagaaaatga

SEQ ID NO: 247831 - DNA, 54 bp, Artificial
  Synthetic oligonucleotide
ccggtgtccgcccacccctggacgtaagacaaaggagtcgcgggtgtccagctc

SEQ ID NO: 247832 - DNA, 60 bp, Artificial
  Synthetic oligonucleotide
agtcatgcgagcaccctacagaggaactcggctttggtacacaacttagcgatctattcc

SEQ ID NO: 247833 - DNA, 56 bp, Artificial
  Synthetic oligonucleotide
actggtcaccgtacgcaagacggacctttcgaccagaggcggagagaaccgacatg

SEQ ID NO: 247834 - DNA, 53 bp, Artificial
  Synthetic oligonucleotide
gtcctatgaccgccccgtcgacagcaggctatgtctttgtgaacgcgtgcaca

SEQ ID NO: 247835 - DNA, 53 bp, Artificial
  Synthetic oligonucleotide
atagtcccttttctcgaggcactcatattcgcgcacgtctcagtaagagccag

SEQ ID NO: 247836 - DNA, 53 bp, Artificial
  Synthetic oligonucleotide
ggccattgtgtcctacccaacctggaaggacgttggctgcttgaatgaatgga

SEQ ID NO: 247837 - DNA, 53 bp, Artificial
  Synthetic oligonucleotide
agaaccgtgtcgaccaagatcactgttcagtaggagctccattggacgccaag

SEQ ID NO: 247838 - DNA, 53 bp, Artificial
  Synthetic oligonucleotide
gtccccgtgaccaaacactctccgtaagatgctcggacgtggttcgctacagc

SEQ ID NO: 247839 - DNA, 53 bp, Artificial
  Synthetic oligonucleotide
acggaaggtgggcacagcgcaacacccccttcgggcccaatcttggatggccc

SEQ ID NO: 247840 - DNA, 53 bp, Artificial
  Synthetic oligonucleotide
ggtgtcgattgaaacccctagatcacaaagactgtcggggtgtgtccgatctt

SEQ ID NO: 247841 - DNA, 53 bp, Artificial
  Synthetic oligonucleotide
atccggccgcgcctccgtgttcgcggagccattcgagcgtcgcccactccgct

SEQ ID NO: 247842 - DNA, 53 bp, Artificial
  Synthetic oligonucleotide
gggcgcgtcgtctgttgaccctgccggttctggacgcataggtttcggggatc

SEQ ID NO: 247843 - DNA, 53 bp, Artificial
  Synthetic oligonucleotide
gtcatcacgatccgaggatcagggaggtgcacccgatggctacgtttcctgtg

SEQ ID NO: 247844 - DNA, 54 bp, Artificial
  Synthetic oligonucleotide
ggtagcccccgccggagcgctgaagcgcagtagcccgtctccacccccgttggg

SEQ ID NO: 247845 - DNA, 53 bp, Artificial
  Synthetic oligonucleotide
aggagaggtcgtggtctaccgctgcagtcgtcatatcgccgttccgtcaccga

SEQ ID NO: 247846 - DNA, 53 bp, Artificial
  Synthetic oligonucleotide
gcttgagtgtgtggggcgtgcgaggaacacggggtgtgcgggaggaagcctgt

SEQ ID NO: 247847 - DNA, 53 bp, Artificial
  Synthetic oligonucleotide
ggtacgcgctcattacgcggatctcgccaacgtcgcagcaacgctcagtatgc

SEQ ID NO: 247848 - DNA, 53 bp, Artificial
  Synthetic oligonucleotide
ggggtccccgtggatcgtgtccgtcgggaacagttgctggtcacagcactggt

SEQ ID NO: 247849 - DNA, 53 bp, Artificial
  Synthetic oligonucleotide
gctcacccgtattccgcagatttccgcacaacgggcgaacacgtaccgcacaa

SEQ ID NO: 247850 - DNA, 53 bp, Artificial
  Synthetic oligonucleotide
ggtgaggtgatggctgcctgtccatccccgccggtggctactttgggtgatta

SEQ ID NO: 247851 - DNA, 53 bp, Artificial
  Synthetic oligonucleotide
aggatgcctggtactaccggcagaactcctacccgcacatgcccaactgcgtg

SEQ ID NO: 247852 - DNA, 53 bp, Artificial
  Synthetic oligonucleotide
ggggcggaagttaccggcgggccgccccgtgcgacagctctcttccgtaaaga

SEQ ID NO: 247853 - DNA, 53 bp, Artificial
  Synthetic oligonucleotide
tgcactcgcgactcaaggcggtgacgtcgttcgtgttgctcttgcgcaatgcc

SEQ ID NO: 247854 - DNA, 53 bp, Artificial
  Synthetic oligonucleotide
cccttcggtgccggtactagacctgacgcccaagacgccatgcccgctaagga

SEQ ID NO: 247855 - DNA, 60 bp, Artificial
  Synthetic oligonucleotide
ggtaggcggcacagcaagacggcccccggaccatgagagtcgctaagaccatggtgcgag

SEQ ID NO: 247856 - DNA, 53 bp, Artificial
  Synthetic oligonucleotide
ctctcctcgcgttacctgaccccgaagtggggttccctgcactggttcacccc

SEQ ID NO: 247857 - DNA, 53 bp, Artificial
  Synthetic oligonucleotide
tctctgttcgctggactcttccgaacaggacactaagtcgacaagtggcgcac

SEQ ID NO: 247858 - DNA, 53 bp, Artificial
  Synthetic oligonucleotide
ccccgattgccaaccggaccgtcagtccgtatcgtcaaagcggaccgaaagtc

SEQ ID NO: 247859 - DNA, 53 bp, Artificial
  Synthetic oligonucleotide
gaacaggtcggcgttcacgcccttgcaggccggagcctgatccggtccgtccg

SEQ ID NO: 247860 - DNA, 53 bp, Artificial
  Synthetic oligonucleotide
gaacccggggcagcgaggtgggggatcgcatgaggtggacgcggaccggaatc

SEQ ID NO: 247861 - DNA, 53 bp, Artificial
  Synthetic oligonucleotide
tcctttgtactcacccgagagactctctcaggctttcctccgggcgcttccct

SEQ ID NO: 247862 - DNA, 53 bp, Artificial
  Synthetic oligonucleotide
gacccgacgtgtctagcgaggagatccgacgtgtcgattgtggcggagcgtcg

SEQ ID NO: 247863 - DNA, 52 bp, Artificial
  Synthetic oligonucleotide
gaccggttacttaggcccgcaagtcacgtcctccaccccttaggcggggctc

SEQ ID NO: 247864 - DNA, 53 bp, Artificial
  Synthetic oligonucleotide
ccaccgtcagtgctgtccctccgggcgttgagtgatcacctcgcttcggtgcg

SEQ ID NO: 247865 - DNA, 53 bp, Artificial
  Synthetic oligonucleotide
tcatgactccccgatcccgaattgcccggtacgccttttatgtcactttcgca

SEQ ID NO: 247866 - DNA, 54 bp, Artificial
  Synthetic oligonucleotide
ggtcgatgggcatgggtgtcctcctggtggtcgagaaaaagtcctcccgccccg

SEQ ID NO: 247867 - DNA, 53 bp, Artificial
  Synthetic oligonucleotide
tcatattcgagggttgccctgtccctaacttcagggcatgacgcgacgacgtt

SEQ ID NO: 247868 - DNA, 53 bp, Artificial
  Synthetic oligonucleotide
catgtgtctccccaggacagaggtcggaagcatattagagagttctctccaat

SEQ ID NO: 247869 - DNA, 53 bp, Artificial
  Synthetic oligonucleotide
gagatgtcgatgtaccgggactccgccttgtggagcgtgccgtaagcctcagg

SEQ ID NO: 247870 - DNA, 53 bp, Artificial
  Synthetic oligonucleotide
catcggtttccgtcacttgcgagcctacgtgacgtcactgacaacgacagtgc

SEQ ID NO: 247871 - DNA, 53 bp, Artificial
  Synthetic oligonucleotide
tttctttccgataaggcgtcaattgcgacggagtgagcgatcaccctttcgtg

SEQ ID NO: 247872 - DNA, 53 bp, Artificial
  Synthetic oligonucleotide
tttcccactccgacaacgcgtcatctcccttgtgtgagcgtggggtcgctgcg

SEQ ID NO: 247873 - DNA, 53 bp, Artificial
  Synthetic oligonucleotide
ttgtcatgcgagctgttccgatatatcgttgaggcatcgcgaccgatcaacga

SEQ ID NO: 247874 - DNA, 53 bp, Artificial
  Synthetic oligonucleotide
ttgggacaaagcgttacagaactggaccgcgtcccaccacgaaacactctcaa

SEQ ID NO: 247875 - DNA, 52 bp, Artificial
  Synthetic oligonucleotide
aaacgcgcgagggagatgggccggggcccgccagcggtagtcaacgggtggg

SEQ ID NO: 247876 - DNA, 53 bp, Artificial
  Synthetic oligonucleotide
ttgctgtcacctaggcccgacgctctgagcactcggaccgcatgacatgggga

SEQ ID NO: 247877 - DNA, 58 bp, Artificial
  Synthetic oligonucleotide
actgaggccccgcccgactccgggcggggcctcagtgctttcagtgcgtgcagtgcct

SEQ ID NO: 247878 - DNA, 53 bp, Artificial
  Synthetic oligonucleotide
ttgacggattcgtcttttggagtccgctgacgtagactgactcgtcggctctc

SEQ ID NO: 247879 - DNA, 53 bp, Artificial
  Synthetic oligonucleotide
ttccgccctctcagtgcgcccacagcgtgacgtgcgcctcacctaatggacgc

SEQ ID NO: 247880 - DNA, 53 bp, Artificial
  Synthetic oligonucleotide
ttccgcatacgcgaaggaactggtcatcgagattttcggcgtcggccggaaat

SEQ ID NO: 247881 - DNA, 53 bp, Artificial
  Synthetic oligonucleotide
tgttcctattccggggcatcccaaataatttgcacgtaccagtcagttgccct

SEQ ID NO: 247882 - DNA, 53 bp, Artificial
  Synthetic oligonucleotide
cggtcgcgcgggagatgccccactcctgggcgatgtttcggtcggacgggatg

SEQ ID NO: 247883 - DNA, 53 bp, Artificial
  Synthetic oligonucleotide
tgtggagatcctcgactgcgacgtacgcgacttccacgccgtcatcagcagaa

SEQ ID NO: 247884 - DNA, 53 bp, Artificial
  Synthetic oligonucleotide
ccgtaagggctccgtcgagccgcttccaacagcttgcctcgcgtgcattgaga

SEQ ID NO: 247885 - DNA, 53 bp, Artificial
  Synthetic oligonucleotide
ccgcagaatccctttctggagggaaaccagcgtacgtacattgcactttccct

SEQ ID NO: 247886 - DNA, 53 bp, Artificial
  Synthetic oligonucleotide
tggacgccatcggcgcagatcacagtcatgccgtcgtgaggggacacccatgc

SEQ ID NO: 247887 - DNA, 53 bp, Artificial
  Synthetic oligonucleotide
ccgagagactctctcaggctttcctccgggcgcttcccttcggtcttgcgttt

SEQ ID NO: 247888 - DNA, 60 bp, Artificial
  Synthetic oligonucleotide
ggtgagagcgaaatactgcgcccggtcgctctgctgcacccagggaaaatcggtcgtcat

SEQ ID NO: 247889 - DNA, 53 bp, Artificial
  Synthetic oligonucleotide
gcgcgctatgaagcgaccttccactcacagagctgcatccccgaagtcggctg

SEQ ID NO: 247890 - DNA, 53 bp, Artificial
  Synthetic oligonucleotide
cacgcgcgacatcactcgtcagcataagtagttgcgctctcgccgtacagtgc

SEQ ID NO: 247891 - DNA, 53 bp, Artificial
  Synthetic oligonucleotide
atggccccacgcactacgttatggaggacactggcgtgaccaacacccccacg

SEQ ID NO: 247892 - DNA, 53 bp, Artificial
  Synthetic oligonucleotide
tatggatggctgtgcgacgcagtccaccccagcttcggttccgccacaaccca

SEQ ID NO: 247893 - DNA, 53 bp, Artificial
  Synthetic oligonucleotide
cacgccgtgtcgcagcttgtgtccccacatgtgaactcgtgaaatgcgggctg

SEQ ID NO: 247894 - DNA, 53 bp, Artificial
  Synthetic oligonucleotide
caggctttcctccgggcgcttcccttcggtcttgcgtttccgactctatcaga

SEQ ID NO: 247895 - DNA, 53 bp, Artificial
  Synthetic oligonucleotide
cacccctacgcgcggtagggacaccacttcttcagtcgccagtgacctcgtac

SEQ ID NO: 247896 - DNA, 53 bp, Artificial
  Synthetic oligonucleotide
gttttacgtcacactcacagaccgctctgtccggcaaatgatcacttacctga

SEQ ID NO: 247897 - DNA, 53 bp, Artificial
  Synthetic oligonucleotide
gcccaaggacttcatggactggtgcgaccggaacaagctctcccggccgtggg

SEQ ID NO: 247898 - DNA, 53 bp, Artificial
  Synthetic oligonucleotide
gagtccggggcgacgactttccgttggcacgtacacaacatccatatggcggt

SEQ ID NO: 247899 - DNA, 60 bp, Artificial
  Synthetic oligonucleotide
ggtgcacggcccgggtccttgagcgagtcgctgcggtgaagcgtcagccgatgtagggag

SEQ ID NO: 247900 - DNA, 53 bp, Artificial
  Synthetic oligonucleotide
gattctacagctcggacgccacgcaccggccaccggtcacggctgagggctga

SEQ ID NO: 247901 - DNA, 53 bp, Artificial
  Synthetic oligonucleotide
gcaattccgtgcattggacgcatcaaaaggggccacatacggtcgagacatgc

SEQ ID NO: 247902 - DNA, 53 bp, Artificial
  Synthetic oligonucleotide
gatagagtcggaaacgcaagaccgaagggaagcgcccggaggaaagcctgaga

SEQ ID NO: 247903 - DNA, 53 bp, Artificial
  Synthetic oligonucleotide
gttgccgcccacaccacaggtgtcgggcctcgttcctgcggtttgactgcatc

SEQ ID NO: 247904 - DNA, 52 bp, Artificial
  Synthetic oligonucleotide
ttcggtcccgcccctgtgcacacggggaaacgcaggggacagtctgccttgt

SEQ ID NO: 247905 - DNA, 52 bp, Artificial
  Synthetic oligonucleotide
ttccgatcatggaccggggttgcacgatgtggacccttgtcgacttccgtac

SEQ ID NO: 247906 - DNA, 52 bp, Artificial
  Synthetic oligonucleotide
accggggccatgtaggcaccgatgccgaacacgtgcgtgttcaccaacatct

SEQ ID NO: 247907 - DNA, 52 bp, Artificial
  Synthetic oligonucleotide
taaaggggcatattcgaggcggcgtgacacttttccgggggagcgtgacggg

SEQ ID NO: 247908 - DNA, 52 bp, Artificial
  Synthetic oligonucleotide
gtatcagtgtcggggcttgcagccggatcagcgcacgttagatgcgacgaca

SEQ ID NO: 247909 - DNA, 52 bp, Artificial
  Synthetic oligonucleotide
tggtcatttggcttcgcacatgatcgcccggacaagtcctagccgcctggca

SEQ ID NO: 247910 - DNA, 54 bp, Artificial
  Synthetic oligonucleotide
actccttactcctgtaccccgacgaggtctgcggtcagtcgagttccctgggtc

SEQ ID NO: 247911 - DNA, 52 bp, Artificial
  Synthetic oligonucleotide
gggcgtccccttcggcatgtcaggcccccatccactcgtcaacggtcacgtt

SEQ ID NO: 247912 - DNA, 52 bp, Artificial
  Synthetic oligonucleotide
gttgactccgaagtctagagcgataccgcgaagtccggacgcgtacccctgt

SEQ ID NO: 247913 - DNA, 52 bp, Artificial
  Synthetic oligonucleotide
ttgactccgggtaggagtcgatttgactccgggtaggagtcagaatgacgtg

SEQ ID NO: 247914 - DNA, 52 bp, Artificial
  Synthetic oligonucleotide
agactcgaagaaagcagaactcctatgaacctggccatttctggtacgtact

SEQ ID NO: 247915 - DNA, 52 bp, Artificial
  Synthetic oligonucleotide
aaaggggtaccaggccgagtgtcgtttggtatggtgacctcagcttggtaag

SEQ ID NO: 247916 - DNA, 52 bp, Artificial
  Synthetic oligonucleotide
accgtccgcaagggaatgcggcacggcctggtcgcggtcttgcacgacggct

SEQ ID NO: 247917 - DNA, 52 bp, Artificial
  Synthetic oligonucleotide
gttcaagtgctacggtagggatctgtcacttgaatggtcaagtgaggaggtc

SEQ ID NO: 247918 - DNA, 52 bp, Artificial
  Synthetic oligonucleotide
aaaatgcacaccacctccgaccaggggagaccccatgtctgactgcacctgc

SEQ ID NO: 247919 - DNA, 52 bp, Artificial
  Synthetic oligonucleotide
gtgtgtgcgaagccacactctttcgaccaggtcacaccgttccgctgcctag

SEQ ID NO: 247920 - DNA, 52 bp, Artificial
  Synthetic oligonucleotide
gtgagtcgctgaccagactggagggtcccgttcgccatccggacacaagggg

SEQ ID NO: 247921 - DNA, 50 bp, Artificial
  Synthetic oligonucleotide
ggtgtcgtttccgcgcccccgggaggtgtcgtttccgcaaccttcggagg

SEQ ID NO: 247922 - DNA, 52 bp, Artificial
  Synthetic oligonucleotide
gtctgctacggataagccgatggtagagcggttacggcacagcgtgacaggg

SEQ ID NO: 247923 - DNA, 52 bp, Artificial
  Synthetic oligonucleotide
tattcgaactgttcggacggctgaaggagctgaactcgtagagcgcgttcag

SEQ ID NO: 247924 - DNA, 52 bp, Artificial
  Synthetic oligonucleotide
tatgggcctacaacttggaacacctggacctgatcagacgattcgtgcaggc

SEQ ID NO: 247925 - DNA, 52 bp, Artificial
  Synthetic oligonucleotide
tatgcctattccgtcgggtgtgcataccgcctggacctccagcggagttcgt

SEQ ID NO: 247926 - DNA, 52 bp, Artificial
  Synthetic oligonucleotide
tagaccagtcttgtctagaccagtttcccacatcttgaagcaagccgggacg

SEQ ID NO: 247927 - DNA, 52 bp, Artificial
  Synthetic oligonucleotide
tccacgcgggcgggtagccttcatcccgcgagcacctcccatcaaggtgtgt

SEQ ID NO: 247928 - DNA, 51 bp, Artificial
  Synthetic oligonucleotide
accgaccacagttcctgcccggacaactgacacccgcggaaaggaccccgg

SEQ ID NO: 247929 - DNA, 52 bp, Artificial
  Synthetic oligonucleotide
actccaatggcgagctccatctgtcgaaagccgatctgacagaggatgcccc

SEQ ID NO: 247930 - DNA, 52 bp, Artificial
  Synthetic oligonucleotide
tacgtgcctcgttcacgagctgtacaggggacacctcgattctcagcgtcag

SEQ ID NO: 247931 - DNA, 52 bp, Artificial
  Synthetic oligonucleotide
tacgtgagcgtgtgcgcacgcagcgtaggcgaggtgtcggtcgggtaccaaa

SEQ ID NO: 247932 - DNA, 60 bp, Artificial
  Synthetic oligonucleotide
cgtgtcaaggttataggaacttgcgaggtcgctgaatgcgtgataagcggcgagtgcttc

SEQ ID NO: 247933 - DNA, 52 bp, Artificial
  Synthetic oligonucleotide
acacccgtcacataccagtcggcttgtcgagtctgcggcatatgcgctagag

SEQ ID NO: 247934 - DNA, 52 bp, Artificial
  Synthetic oligonucleotide
tcggtgcagcggggccacagacacagccgcgaaacgcggagtggcccgggat

SEQ ID NO: 247935 - DNA, 52 bp, Artificial
  Synthetic oligonucleotide
tctcggttacgtcatggtccgagccccaaggagcgtgcgcgtggaggggaac

SEQ ID NO: 247936 - DNA, 52 bp, Artificial
  Synthetic oligonucleotide
gtaaagctgagcccctgatcaccagagaccgcgtagaccgccctgtccctcg

SEQ ID NO: 247937 - DNA, 52 bp, Artificial
  Synthetic oligonucleotide
tctgtttaccgtgacagacacgccggattgagtacataacgagtaatcggcc

SEQ ID NO: 247938 - DNA, 52 bp, Artificial
  Synthetic oligonucleotide
tgaccacctactgacccgagaggcaccacatgattgacgagcacagcagcag

SEQ ID NO: 247939 - DNA, 52 bp, Artificial
  Synthetic oligonucleotide
tacggaaggttcccctccgatccgaggttcataccgtcgtgggaatgtcccc

SEQ ID NO: 247940 - DNA, 52 bp, Artificial
  Synthetic oligonucleotide
tgcgaaggtgcgagccccgcgcgtgtactggtcgctggtcgggatgccggtc

SEQ ID NO: 247941 - DNA, 52 bp, Artificial
  Synthetic oligonucleotide
aagcgcacgcggggaaagggaccctgagacgtctggaacggccggcctaagc

SEQ ID NO: 247942 - DNA, 51 bp, Artificial
  Synthetic oligonucleotide
tacgagacccacccccgcatcacccccgccgcctgaaaccccccaccccgc

SEQ ID NO: 247943 - DNA, 57 bp, Artificial
  Synthetic oligonucleotide
ggactttcgaaacggttcggggtgacactcgcattacggtcaatgatcaccgcgtga

SEQ ID NO: 247944 - DNA, 60 bp, Artificial
  Synthetic oligonucleotide
ccgcctgtgtcgccgtgccgctgggctgtgtccccgtgtctcacgccgtgtcgcagcttg

SEQ ID NO: 247945 - DNA, 52 bp, Artificial
  Synthetic oligonucleotide
taagtgcgcttcggtggcacaaaatcgcgtccgtcaaggttcattggcaaac

SEQ ID NO: 247946 - DNA, 51 bp, Artificial
  Synthetic oligonucleotide
ggggccctccgcacgatcccaggtaaaagatcggaaaggcgcccccccgtg

SEQ ID NO: 247947 - DNA, 52 bp, Artificial
  Synthetic oligonucleotide
tgggaacggcagccggcgaggaggtatcccgactggtcagagaccggctccg

SEQ ID NO: 247948 - DNA, 52 bp, Artificial
  Synthetic oligonucleotide
aggcaaccttgtagtagcagccgcctgagaacgaaccgagctcggggtcact

SEQ ID NO: 247949 - DNA, 52 bp, Artificial
  Synthetic oligonucleotide
cccggtgagtcagacccgtcatgcgcgttcgaagctccatcgaccgggacgc

SEQ ID NO: 247950 - DNA, 52 bp, Artificial
  Synthetic oligonucleotide
cgtgttcgctctccctaagggcgccaaggtccgtgacgtcccccttccggac

SEQ ID NO: 247951 - DNA, 52 bp, Artificial
  Synthetic oligonucleotide
atccggatgatgcgaaaggaacaggggcgctagcgtgcgcgtatggatcttg

SEQ ID NO: 247952 - DNA, 52 bp, Artificial
  Synthetic oligonucleotide
cgcggcgcacaaaggcgccgcggtgtgtaacacgcgtagatacggggcgtca

SEQ ID NO: 247953 - DNA, 52 bp, Artificial
  Synthetic oligonucleotide
ctcgactactccagcgccccgtagcacggcacacgggcaatccaagtccccc

SEQ ID NO: 247954 - DNA, 52 bp, Artificial
  Synthetic oligonucleotide
ctgtgcaagggccgttggggcgtgccgacagatcgttgctctcaccgacggc

SEQ ID NO: 247955 - DNA, 51 bp, Artificial
  Synthetic oligonucleotide
ccgccgctacacccccgcacaccaaaacgagagggccgacccggttgcccc

SEQ ID NO: 247956 - DNA, 52 bp, Artificial
  Synthetic oligonucleotide
agggacaaccaccgtattgcccgtgcgctcaggtctgcccatattccgctat

SEQ ID NO: 247957 - DNA, 52 bp, Artificial
  Synthetic oligonucleotide
ggatagtcgccgggttggacagttcacccgatttcactcgtatcgtcgtctg

SEQ ID NO: 247958 - DNA, 52 bp, Artificial
  Synthetic oligonucleotide
ggagagaataccttgatgtcaagacagttcgcgagacgagcatcgatccagg

SEQ ID NO: 247959 - DNA, 51 bp, Artificial
  Synthetic oligonucleotide
gcctccgaccggcggaaccattacgaaccaacgactgtttcttcggttccc

SEQ ID NO: 247960 - DNA, 52 bp, Artificial
  Synthetic oligonucleotide
ggactccactgagtgggctccactgagtgggctccaccgggtgggctccact

SEQ ID NO: 247961 - DNA, 52 bp, Artificial
  Synthetic oligonucleotide
aggttgagggtatacgcctggggagggttgcactggacggtctgcatacaga

SEQ ID NO: 247962 - DNA, 52 bp, Artificial
  Synthetic oligonucleotide
atgctcgccccagaggttcctttttcatacgagatggacgccacccgcgtga

SEQ ID NO: 247963 - DNA, 52 bp, Artificial
  Synthetic oligonucleotide
cataacgacgggatagcggcgcacgcgaacaagggaggatcatgaccacagc

SEQ ID NO: 247964 - DNA, 52 bp, Artificial
  Synthetic oligonucleotide
cgttggaatgcgtgagcttgtcgggacgggcgttccagaagcaggcatgcgt

SEQ ID NO: 247965 - DNA, 52 bp, Artificial
  Synthetic oligonucleotide
cagcggcctccttgccccggtccctcttcatcggcaggcccaggcgcctcgc

SEQ ID NO: 247966 - DNA, 58 bp, Artificial
  Synthetic oligonucleotide
ccgccgaagatccgccggatacgcggtacctcgacagggctgcgggtgacactgcgac

SEQ ID NO: 247967 - DNA, 52 bp, Artificial
  Synthetic oligonucleotide
cggctcagatgccccgatcggccccgttccgcccacccgattcgccccactt

SEQ ID NO: 247968 - DNA, 52 bp, Artificial
  Synthetic oligonucleotide
gcgcgttatttcccgttcccacggcggacgttggtcggccaacttggactgc

SEQ ID NO: 247969 - DNA, 52 bp, Artificial
  Synthetic oligonucleotide
cgggacgcccattccgctggacgcgtggcggcatcggatgtggctcgacacc

SEQ ID NO: 247970 - DNA, 52 bp, Artificial
  Synthetic oligonucleotide
cccctccccacacaggggacgcgatgatccggaacttcggttgccacccgta

SEQ ID NO: 247971 - DNA, 52 bp, Artificial
  Synthetic oligonucleotide
atcgccacgatgaggaacagtacgttccagggagagtccacgagccattgcc

SEQ ID NO: 247972 - DNA, 52 bp, Artificial
  Synthetic oligonucleotide
ccgaccgtacgtcgcagccagggactttcgaaacggttcggggtgacactcg

SEQ ID NO: 247973 - DNA, 52 bp, Artificial
  Synthetic oligonucleotide
gcaggaaaaccaactactcggtctgtgttcgactcgttcaagcgtctttcaa

SEQ ID NO: 247974 - DNA, 52 bp, Artificial
  Synthetic oligonucleotide
caccccgtgagtgcggtggtaggtcgcgggatgccgctaggtgtattgatca

SEQ ID NO: 247975 - DNA, 52 bp, Artificial
  Synthetic oligonucleotide
gcattgccgtacgggttcggacaacatgtttgtggcgcctgtcacggtaggg

SEQ ID NO: 247976 - DNA, 52 bp, Artificial
  Synthetic oligonucleotide
gactcatgaggatgtccgttctcgcgtggaccgctctgtccagcggtcgggg

SEQ ID NO: 247977 - DNA, 55 bp, Artificial
  Synthetic oligonucleotide
cgttcactgcaccgttcacccgccgaaaacgcgcgcccacctgcggaaaccttga

SEQ ID NO: 247978 - DNA, 52 bp, Artificial
  Synthetic oligonucleotide
cacaccctggtaccggtttggctgcatcggtcctacctctcgtcgttggtcg

SEQ ID NO: 247979 - DNA, 52 bp, Artificial
  Synthetic oligonucleotide
atattcgaggcggcgtgacacttttccgggggagcgtgacgggcggtgtcac

SEQ ID NO: 247980 - DNA, 52 bp, Artificial
  Synthetic oligonucleotide
ggccctgtggccacgtgttcgtgtgtctcgtggagaaggtcccgagtcccta

SEQ ID NO: 247981 - DNA, 52 bp, Artificial
  Synthetic oligonucleotide
attacgcactcttcagacactccccgatcttcgcaccgccccgtaacgtgtg

SEQ ID NO: 247982 - DNA, 52 bp, Artificial
  Synthetic oligonucleotide
attgctagcgactgctacttgacgggcactcacggctcgcgtgagcgctgtc

SEQ ID NO: 247983 - DNA, 52 bp, Artificial
  Synthetic oligonucleotide
gagactcagtcgggagtgacatgcatcgccggtccttcatttgcagctcgac

SEQ ID NO: 247984 - DNA, 52 bp, Artificial
  Synthetic oligonucleotide
ctagccggtcggcaggtaaggactagcgagcatcttacgggaccttacttgc

SEQ ID NO: 247985 - DNA, 51 bp, Artificial
  Synthetic oligonucleotide
atccctcgattctggtcacgggtgtatcggatgccgaccttcgtgccacgg

SEQ ID NO: 247986 - DNA, 51 bp, Artificial
  Synthetic oligonucleotide
ctgatcggaagtggtgaggctccgtgagcagctcttacgtccccagccctc

SEQ ID NO: 247987 - DNA, 51 bp, Artificial
  Synthetic oligonucleotide
cgtcgcagccagggactttcgaaacggttcggggtgacactcgcattacgg

SEQ ID NO: 247988 - DNA, 55 bp, Artificial
  Synthetic oligonucleotide
cgttgataaccgcagatcagggaccacgccggtaacccgtggaccgccagccttc

SEQ ID NO: 247989 - DNA, 51 bp, Artificial
  Synthetic oligonucleotide
aatcaggtgaatccccgacgcgaacacacgctgacaagcgagctatgcccc

SEQ ID NO: 247990 - DNA, 51 bp, Artificial
  Synthetic oligonucleotide
gtctcccggcacgatctgacgcagttcaccttgcattcgaaggtgccactg

SEQ ID NO: 247991 - DNA, 51 bp, Artificial
  Synthetic oligonucleotide
gtcacgtcctccatgcatgtgcgccgtacgccgggccccgtcgctggggtg

SEQ ID NO: 247992 - DNA, 51 bp, Artificial
  Synthetic oligonucleotide
tgtccttcgcctatcgcaatggtttctaacttgcccagtcgccggcagacg

SEQ ID NO: 247993 - DNA, 51 bp, Artificial
  Synthetic oligonucleotide
ctgggttgcgctgccgcccaagacgcgggttgtccagaccacgggatggct

SEQ ID NO: 247994 - DNA, 51 bp, Artificial
  Synthetic oligonucleotide
ctgggcctgtaggaatcgctcccggggcgcgtgtcccggcatcgagcgggc

SEQ ID NO: 247995 - DNA, 51 bp, Artificial
  Synthetic oligonucleotide
gtcccgtaacgcgcccagattctgagggcgggttctgaaggcaggttctga

SEQ ID NO: 247996 - DNA, 51 bp, Artificial
  Synthetic oligonucleotide
accccgcaaagaggagactaccggccccctgatggaagggcgctcatttcg

SEQ ID NO: 247997 - DNA, 51 bp, Artificial
  Synthetic oligonucleotide
tggggccggttgtcagtcgaccccgataacctcgtaggtgtgtcgtccctt

SEQ ID NO: 247998 - DNA, 51 bp, Artificial
  Synthetic oligonucleotide
tatttactttgcctggacggaggggaatccgttcaagtttctggtccggta

SEQ ID NO: 247999 - DNA, 60 bp, Artificial
  Synthetic oligonucleotide
cgtttcgggccgttcctgtctgagaggaacacacccaatgaagtccatcgctgcacttca

SEQ ID NO: 248000 - DNA, 51 bp, Artificial
  Synthetic oligonucleotide
gtcgggtagggacagcagaacaactgggggcacggggtggatcgggaacgt

SEQ ID NO: 248001 - DNA, 51 bp, Artificial
  Synthetic oligonucleotide
gcggcaggctagctttgcctcatcatctagcgatgctaggtcccaggaggg

SEQ ID NO: 248002 - DNA, 51 bp, Artificial
  Synthetic oligonucleotide
taccccgggccccggaagcgacaaggtgtgtcgttccccgtcagtccccgc

SEQ ID NO: 248003 - DNA, 51 bp, Artificial
  Synthetic oligonucleotide
gcacgtctcgaacgattggtggggccagctctgaccggatcactggggccg

SEQ ID NO: 248004 - DNA, 51 bp, Artificial
  Synthetic oligonucleotide
gatgtgactactcaggaggtacacatcgcagacgttgtgtacctcctgggg

SEQ ID NO: 248005 - DNA, 51 bp, Artificial
  Synthetic oligonucleotide
cagataggggaagggatatgagagtcatacccactgatttcatccggtcgt

SEQ ID NO: 248006 - DNA, 51 bp, Artificial
  Synthetic oligonucleotide
accgatggggctgccgctctactggaggcgtgagcatttacccaaagccag

SEQ ID NO: 248007 - DNA, 51 bp, Artificial
  Synthetic oligonucleotide
gccccggtgcgggaacaccggggcctcgtttcgggccgttcctgtctgaga

SEQ ID NO: 248008 - DNA, 51 bp, Artificial
  Synthetic oligonucleotide
gagtcccgtaagttcacgcaaactgaagggttctcggtgggaactcaaagg

SEQ ID NO: 248009 - DNA, 51 bp, Artificial
  Synthetic oligonucleotide
tgccggtacatgaggagtcccgtgttactcatgccgcaccactcacgcggc

SEQ ID NO: 248010 - DNA, 57 bp, Artificial
  Synthetic oligonucleotide
ctacgcgcgcgcggaccggtgtaacgcctgggcccgccactccgtccatacagcgcc

SEQ ID NO: 248011 - DNA, 51 bp, Artificial
  Synthetic oligonucleotide
tgcgctgaacgtcactgattgactgcaccaacattcttgcacgcgcggaca

SEQ ID NO: 248012 - DNA, 51 bp, Artificial
  Synthetic oligonucleotide
tagctgtcacatccggtgccgccggttcgttccctcctcatcgaacggagg

SEQ ID NO: 248013 - DNA, 51 bp, Artificial
  Synthetic oligonucleotide
aagccatcaggtgagagtgccggaaagccacgtgcaccagacatgtcgggt

SEQ ID NO: 248014 - DNA, 51 bp, Artificial
  Synthetic oligonucleotide
acccgtacatcccaattcccgcaagggctgtagcgccctcagagggccgct

SEQ ID NO: 248015 - DNA, 51 bp, Artificial
  Synthetic oligonucleotide
ctaccgagtaccaggctgtactgtccggatccacgtactagggaggtggcg

SEQ ID NO: 248016 - DNA, 51 bp, Artificial
  Synthetic oligonucleotide
acgatccgaacacggaaggtgaatcgccgtgagggcctacgttgacagctt

SEQ ID NO: 248017 - DNA, 51 bp, Artificial
  Synthetic oligonucleotide
atggccacaccaccgggccgctcgtgaccgatgaagtcaggacgcctcgga

SEQ ID NO: 248018 - DNA, 51 bp, Artificial
  Synthetic oligonucleotide
acgatgtgcaccctcggcagtcgcgggcgtacgcttcgtacggtgagcacc

SEQ ID NO: 248019 - DNA, 51 bp, Artificial
  Synthetic oligonucleotide
cccggttcctaggaacgccctagattgacgtggagtacatgaggagagccc

SEQ ID NO: 248020 - DNA, 51 bp, Artificial
  Synthetic oligonucleotide
atctctactgcatagttggcgtccaggagtcccgctggggcgagtcgtgct

SEQ ID NO: 248021 - DNA, 55 bp, Artificial
  Synthetic oligonucleotide
ctatgcaatacgtttcgggtgacggcatgagagagcccccacccccggggaatcg

SEQ ID NO: 248022 - DNA, 51 bp, Artificial
  Synthetic oligonucleotide
gtcttgcgatccatcaggatctacttgtgcaggctttgacaggctacgact

SEQ ID NO: 248023 - DNA, 51 bp, Artificial
  Synthetic oligonucleotide
agacctcgctccgtgaccagcctcgctgccgaatacgacccgtacatcctg

SEQ ID NO: 248024 - DNA, 51 bp, Artificial
  Synthetic oligonucleotide
gggctttgccgcggttttaccagcgtagacgatacccgaacgcttctcgga

SEQ ID NO: 248025 - DNA, 51 bp, Artificial
  Synthetic oligonucleotide
aaagattgaccgatccatggcgaactcacaagggtgccttggcgtgtgcca

SEQ ID NO: 248026 - DNA, 51 bp, Artificial
  Synthetic oligonucleotide
ggggacagcactgtggacaaactcataggggccacccaaagaccgccctga

SEQ ID NO: 248027 - DNA, 51 bp, Artificial
  Synthetic oligonucleotide
acagatcgtagtcggtgcacaggacccaggagcggtcatcggcccacagat

SEQ ID NO: 248028 - DNA, 51 bp, Artificial
  Synthetic oligonucleotide
cgctctgtggagcaaggccagtcgacctcaatacaccttaacccgaggcgg

SEQ ID NO: 248029 - DNA, 51 bp, Artificial
  Synthetic oligonucleotide
cgctgtttggcccggctgtactgggtgttgagagcggttggcgggtggtaa

SEQ ID NO: 248030 - DNA, 51 bp, Artificial
  Synthetic oligonucleotide
ggattgatgcagcatgtatcattgacggaaacacggggacaccctccaacc

SEQ ID NO: 248031 - DNA, 51 bp, Artificial
  Synthetic oligonucleotide
tcggagtccgagacatctgctccaccgccactcgtacgagctgacggttcg

SEQ ID NO: 248032 - DNA, 59 bp, Artificial
  Synthetic oligonucleotide
ctcacgcgaggaatcctagattgggaagtcgctggcccgagccacagaacggaacctca

SEQ ID NO: 248033 - DNA, 51 bp, Artificial
  Synthetic oligonucleotide
aggggtaacttagccgtattattgccagaatgctagcttatcccaaaccgt

SEQ ID NO: 248034 - DNA, 51 bp, Artificial
  Synthetic oligonucleotide
cttggtgattgggtatctttgaccgcacggaggggagtactccctgtctgt

SEQ ID NO: 248035 - DNA, 51 bp, Artificial
  Synthetic oligonucleotide
tccgttatgggtgaattgcgcattgtgttccgtgaagtcaataaagggaac

SEQ ID NO: 248036 - DNA, 51 bp, Artificial
  Synthetic oligonucleotide
ggggtggagtacctctcgtgcgagtactgcggcgagccggtgagtcagctc

SEQ ID NO: 248037 - DNA, 51 bp, Artificial
  Synthetic oligonucleotide
tccggtacccgttgtgaagtaggcacctgtcgggtatataggtacctgatg

SEQ ID NO: 248038 - DNA, 51 bp, Artificial
  Synthetic oligonucleotide
acacacaccgatccgcgggcagctcactcgtcgtcatggcgcccgaccgta

SEQ ID NO: 248039 - DNA, 51 bp, Artificial
  Synthetic oligonucleotide
ggacgggcgagagggatgcgcgaggggtggatatcgccctacagggcataa

SEQ ID NO: 248040 - DNA, 51 bp, Artificial
  Synthetic oligonucleotide
tccggaattgccgtgcccctgacaatcgctgaccggagtatcgaggggccc

SEQ ID NO: 248041 - DNA, 51 bp, Artificial
  Synthetic oligonucleotide
cttgcgtaccggcaacggttagcccatgcgtcagctaagtagcgagcccca

SEQ ID NO: 248042 - DNA, 51 bp, Artificial
  Synthetic oligonucleotide
aaaatcccgacaacacgccaatggacccgtagagaattatctccatcagga

SEQ ID NO: 248043 - DNA, 55 bp, Artificial
  Synthetic oligonucleotide
ctcagggaagctccgggggccactgccgccacgtggggcggaggatccagtttcc

SEQ ID NO: 248044 - DNA, 51 bp, Artificial
  Synthetic oligonucleotide
agcgaaggaggcatgcgccaactcccttgtcaatcagcctcgtctggctga

SEQ ID NO: 248045 - DNA, 51 bp, Artificial
  Synthetic oligonucleotide
ggcgtttgaactggggtttcttccttgaaacggctggacaggccggtgaga

SEQ ID NO: 248046 - DNA, 51 bp, Artificial
  Synthetic oligonucleotide
cgcaagtaaccgatgagcgttggtcatgctgattccacttgccaaagcacg

SEQ ID NO: 248047 - DNA, 51 bp, Artificial
  Synthetic oligonucleotide
ggcgtattcggggcagcctatgtgcggcaacagatgagcctccccgggaat

SEQ ID NO: 248048 - DNA, 51 bp, Artificial
  Synthetic oligonucleotide
cgatcaacagtttgagagctgtattgctgcacgtcagcgagggtgggtctc

SEQ ID NO: 248049 - DNA, 51 bp, Artificial
  Synthetic oligonucleotide
gggaggtcctctccgctgctcggctgttcactcagtcctgagaaacacgta

SEQ ID NO: 248050 - DNA, 51 bp, Artificial
  Synthetic oligonucleotide
ctttccgcccaggtcagagtactcgcaggcattccagcatccccaatggtc

SEQ ID NO: 248051 - DNA, 51 bp, Artificial
  Synthetic oligonucleotide
cgacgaacgttcaggtgccggtactccacaacccgttggagaggacgtgcg

SEQ ID NO: 248052 - DNA, 51 bp, Artificial
  Synthetic oligonucleotide
gggattgcgcccccggggcctgtccaggacctgactcggaggacctgatgc

SEQ ID NO: 248053 - DNA, 51 bp, Artificial
  Synthetic oligonucleotide
aggacgaaggtcccgacagagagtgacttcggcccggttgcaccggcgctt

SEQ ID NO: 248054 - DNA, 60 bp, Artificial
  Synthetic oligonucleotide
ggagacgcgttaccacagccgggcaaccgatgcactctgcatcaccatgcatgactatcg

SEQ ID NO: 248055 - DNA, 60 bp, Artificial
  Synthetic oligonucleotide
ctccaacgcaatcgactcaaggagagcttcatgccgtcgttcaagatcgacacttcgacc

SEQ ID NO: 248056 - DNA, 51 bp, Artificial
  Synthetic oligonucleotide
cgcgaggcgcgtccgacttcgagcggaacctgatccgcttccggttcgagg

SEQ ID NO: 248057 - DNA, 51 bp, Artificial
  Synthetic oligonucleotide
cgcgcacctatcgcgatgaacacacgggtgccgtgatctcccactcgacct

SEQ ID NO: 248058 - DNA, 51 bp, Artificial
  Synthetic oligonucleotide
cgcgcactgtgtctgagggccgggactactacctcgctgaggaggatcagt

SEQ ID NO: 248059 - DNA, 51 bp, Artificial
  Synthetic oligonucleotide
aggagactaccggccccctgatggaagggcgctcatttcggggaagtttcg

SEQ ID NO: 248060 - DNA, 51 bp, Artificial
  Synthetic oligonucleotide
aggagggtgactcgggcgcgttatttcccgttcccacggcggacgttggtc

SEQ ID NO: 248061 - DNA, 51 bp, Artificial
  Synthetic oligonucleotide
aaacggtgaacacggccatatgaagtcgactcgttcagcctgcacgtaggg

SEQ ID NO: 248062 - DNA, 51 bp, Artificial
  Synthetic oligonucleotide
agacgaggctgtgggccatcacatcgagggtcatctccagctgccgtacgc

SEQ ID NO: 248063 - DNA, 51 bp, Artificial
  Synthetic oligonucleotide
tctacgtcagcaaggacctccccttcaccgagaaggcgaagcgtggcccac

SEQ ID NO: 248064 - DNA, 51 bp, Artificial
  Synthetic oligonucleotide
tgttgaacagggtaagggacgctgaggcgtccgcaagagcactcccggctc

SEQ ID NO: 248065 - DNA, 51 bp, Artificial
  Synthetic oligonucleotide
atagtgcatcaacggagcatctaacccgtaggtcatttctcatgtacccgt

SEQ ID NO: 248066 - DNA, 59 bp, Artificial
  Synthetic oligonucleotide
ccctgattactccgagcatgcgaccgcccatatctccccaccgggacctggagtgacgc

SEQ ID NO: 248067 - DNA, 51 bp, Artificial
  Synthetic oligonucleotide
acgtgtcaactagatgcctgtccgtaccgttctacctgtagcggcagaatt

SEQ ID NO: 248068 - DNA, 51 bp, Artificial
  Synthetic oligonucleotide
tccaatggtctctggggggctttcgcgaacattcggcattcgtcccgtgac

SEQ ID NO: 248069 - DNA, 51 bp, Artificial
  Synthetic oligonucleotide
tcatcagattggtccagaccatcgaatgacgacggcggaagggcaatgggg

SEQ ID NO: 248070 - DNA, 51 bp, Artificial
  Synthetic oligonucleotide
ggtggcacctcacgaggacataccgacgtgggcttcagacgtgggagagtg

SEQ ID NO: 248071 - DNA, 51 bp, Artificial
  Synthetic oligonucleotide
tccagtcggttacccagcccataccggcgccgtcctctcccgaatcgaggc

SEQ ID NO: 248072 - DNA, 51 bp, Artificial
  Synthetic oligonucleotide
cgtcaacgcgatgacgtaccggtgcgggcaggctccgggcctcgtggggtg

SEQ ID NO: 248073 - DNA, 51 bp, Artificial
  Synthetic oligonucleotide
agttggcgtccaggagtcccgctggggcgagtcgtgctacgtgaatgtcgg

SEQ ID NO: 248074 - DNA, 51 bp, Artificial
  Synthetic oligonucleotide
accacagcacaaaatatggtcattacccgtcaaagaggcggaaagacctcg

SEQ ID NO: 248075 - DNA, 51 bp, Artificial
  Synthetic oligonucleotide
gtacgggctctgtacctggtcgacgcccttccgcgcaagccttgccctgag

SEQ ID NO: 248076 - DNA, 51 bp, Artificial
  Synthetic oligonucleotide
gtagagctggccaggaatatccactggattgcgctcgaatggacaatcatc

SEQ ID NO: 248077 - DNA, 60 bp, Artificial
  Synthetic oligonucleotide
ctccgagccagtcaagccgagatctgctattgggccccttattcactctgcggaaccaag

SEQ ID NO: 248078 - DNA, 51 bp, Artificial
  Synthetic oligonucleotide
tcccggcgagaggtgatctacaggcccggcctgtgccgttgatcccacacc

SEQ ID NO: 248079 - DNA, 51 bp, Artificial
  Synthetic oligonucleotide
acattacgcaaagtttcgccatgatcccagtccgttccgaacatgaactgg

SEQ ID NO: 248080 - DNA, 51 bp, Artificial
  Synthetic oligonucleotide
ggtacctcagcatcttctactgcgggtgatacttccttccccccctgagag

SEQ ID NO: 248081 - DNA, 51 bp, Artificial
  Synthetic oligonucleotide
ccccgtcggagcagcgggcggtgtactggctccactccgcgtgaacagcac

SEQ ID NO: 248082 - DNA, 51 bp, Artificial
  Synthetic oligonucleotide
gtagaccagattttaacccgcttacaattttcaacggggcggactcgcgac

SEQ ID NO: 248083 - DNA, 51 bp, Artificial
  Synthetic oligonucleotide
gctaacggcccgggtatgacagacatgcacaagacctccgaaactcacatg

SEQ ID NO: 248084 - DNA, 50 bp, Artificial
  Synthetic oligonucleotide
acacgcccgcacaccctgtcaccagaggaaacgactcggcacacccggga

SEQ ID NO: 248085 - DNA, 50 bp, Artificial
  Synthetic oligonucleotide
aatctgctcataggtcctgcgtcgggtacgtacgtggtgggaggccgggt

SEQ ID NO: 248086 - DNA, 50 bp, Artificial
  Synthetic oligonucleotide
ctgcccgcgtccaccgatcgctcgcatcccccactactcggtgataggtg

SEQ ID NO: 248087 - DNA, 50 bp, Artificial
  Synthetic oligonucleotide
aattacccattacgggccaaaggggagtcgccacgacaggggagccggcg

SEQ ID NO: 248088 - DNA, 58 bp, Artificial
  Synthetic oligonucleotide
ctcctcactcgtgaggtgagaactctacggcgcaggagggtgactcgggcgcgttatt

SEQ ID NO: 248089 - DNA, 50 bp, Artificial
  Synthetic oligonucleotide
aagtaatgcacgcgcgtagacccccgtaaagacccatctgtcggctccgc

SEQ ID NO: 248090 - DNA, 50 bp, Artificial
  Synthetic oligonucleotide
aattccgcagtgaattcggctgtgcgtgcggcattgttgcttcccgctcg

SEQ ID NO: 248091 - DNA, 50 bp, Artificial
  Synthetic oligonucleotide
aaggggcacccggcttacattagatggttcgtggccggcgtacagtcggg

SEQ ID NO: 248092 - DNA, 50 bp, Artificial
  Synthetic oligonucleotide
cccctgatggaagggcgctcatttcggggaagtttcgccgtacggaaccg

SEQ ID NO: 248093 - DNA, 50 bp, Artificial
  Synthetic oligonucleotide
aatgcgggacacccctggccgctacgcctgagacacggaaggcttgagga

SEQ ID NO: 248094 - DNA, 50 bp, Artificial
  Synthetic oligonucleotide
aagggttgtcccgtaactgccggccgtcactggatggcggcgcgtaggtc

SEQ ID NO: 248095 - DNA, 50 bp, Artificial
  Synthetic oligonucleotide
aaggggctcacgttcccgaccgtatcaccgactcgtgactgccgtcacag

SEQ ID NO: 248096 - DNA, 50 bp, Artificial
  Synthetic oligonucleotide
ccccgcacatcctgacgaaacgtccccaattccccgcgcactcgtggtta

SEQ ID NO: 248097 - DNA, 50 bp, Artificial
  Synthetic oligonucleotide
aatgggcggccgagaacgaaacgtgtggtcagatcgtcgggttctaccgg

SEQ ID NO: 248098 - DNA, 50 bp, Artificial
  Synthetic oligonucleotide
ctccgtctggcagccacaccggctgtactgggccacgccgcttcctccct

SEQ ID NO: 248099 - DNA, 60 bp, Artificial
  Synthetic oligonucleotide
ctcctggctggtcgctcgcccggccgtttcctggagtggtgacctgcgctttcattgaga

SEQ ID NO: 248100 - DNA, 50 bp, Artificial
  Synthetic oligonucleotide
cccggtggaatgtggggcgctcggctgaggtgaccgctaatcacctggtt

SEQ ID NO: 248101 - DNA, 50 bp, Artificial
  Synthetic oligonucleotide
aatcacggggcagccgctccgacatccgaccatccgactgtccggttgtc

SEQ ID NO: 248102 - DNA, 50 bp, Artificial
  Synthetic oligonucleotide
cccgtgctgaggcggatgagctgcgacgcatcgtagcgacgtcgtaactc

SEQ ID NO: 248103 - DNA, 50 bp, Artificial
  Synthetic oligonucleotide
acaacgctcccgaccgctgtgcgacgaactccgtgaatccgttgcccgga

SEQ ID NO: 248104 - DNA, 50 bp, Artificial
  Synthetic oligonucleotide
acacagttcacgtgttcaaccacacccccgcggacatgaggacgcccgac

SEQ ID NO: 248105 - DNA, 50 bp, Artificial
  Synthetic oligonucleotide
acaaccgcccgggtctcatacgcggcgactcgtgatctcaggtgaatccc

SEQ ID NO: 248106 - DNA, 50 bp, Artificial
  Synthetic oligonucleotide
acacccccggtccggaggctgaaacaccagggaagcgggaatcatccgga

SEQ ID NO: 248107 - DNA, 50 bp, Artificial
  Synthetic oligonucleotide
aagtgtcagaaagccgttcgctgggcgggtttcgtcggatcagccccggg

SEQ ID NO: 248108 - DNA, 50 bp, Artificial
  Synthetic oligonucleotide
aattggtccacctacaccggcggttgattggtcctcgtggggtgccaccg

SEQ ID NO: 248109 - DNA, 50 bp, Artificial
  Synthetic oligonucleotide
aattggcggtgaggacaccgaagaacggagccaggggcgatgtcagggct

SEQ ID NO: 248110 - DNA, 60 bp, Artificial
  Synthetic oligonucleotide
ctcctgttgggcgcgcacacacctcgtgctgagaggtatctggccggtgagtcgatcccg

SEQ ID NO: 248111 - DNA, 50 bp, Artificial
  Synthetic oligonucleotide
aattgcggctagcctctcggcatgcagcacgtctacgcagcccacggggg

SEQ ID NO: 248112 - DNA, 50 bp, Artificial
  Synthetic oligonucleotide
aattcggttgtgcggtcgagtgtttcgctcgctgcgtccatggggccaga

SEQ ID NO: 248113 - DNA, 50 bp, Artificial
  Synthetic oligonucleotide
ctctacggggacttcgtcacgcggaacccggagttcttcacgctgaccga

SEQ ID NO: 248114 - DNA, 50 bp, Artificial
  Synthetic oligonucleotide
aagtgcgggcactccgccgcaggtcacgtgcactgtcgaggacaaccggc

SEQ ID NO: 248115 - DNA, 50 bp, Artificial
  Synthetic oligonucleotide
aagtgactgcccttgccgtagtgacggaggtgtcccacgtgactcgacgg

SEQ ID NO: 248116 - DNA, 50 bp, Artificial
  Synthetic oligonucleotide
tgaaaatctcttgatgacgcgagatgtcctgaagttcacctttgggtgga

SEQ ID NO: 248117 - DNA, 50 bp, Artificial
  Synthetic oligonucleotide
tcgttcttggggaggagcggaaagccgctcggacagtgcggtaatagacc

SEQ ID NO: 248118 - DNA, 50 bp, Artificial
  Synthetic oligonucleotide
acaccgttcactgactgccgtaccgctcccaccatgctgcgaatggctca

SEQ ID NO: 248119 - DNA, 50 bp, Artificial
  Synthetic oligonucleotide
aagtctgggggagggtgaacgtagcttgatcgcggcggatcattccgctc

SEQ ID NO: 248120 - DNA, 50 bp, Artificial
  Synthetic oligonucleotide
ccctcgcccacgtgtcagctgtttcgcttgtctccggtcgtaccggcttc

SEQ ID NO: 248121 - DNA, 57 bp, Artificial
  Synthetic oligonucleotide
ctcgatcttctttaaccatgcttagaaagtagcaggtcagagggggtgtcgaaaaca

SEQ ID NO: 248122 - DNA, 50 bp, Artificial
  Synthetic oligonucleotide
aattcgaaggctcgattatgagtcgccgggagaatccgctagagtttgag

SEQ ID NO: 248123 - DNA, 50 bp, Artificial
  Synthetic oligonucleotide
ccgtggtgatctgacgaacgcggagtgggatcggctggagtcgttgttgc

SEQ ID NO: 248124 - DNA, 50 bp, Artificial
  Synthetic oligonucleotide
ccgtgcggactcggcggacggaacccaaaactcctgccgcgatgagtttc

SEQ ID NO: 248125 - DNA, 50 bp, Artificial
  Synthetic oligonucleotide
aacccccggacaagactcctgcgacactccgccggaccgcaaagaaatcc

SEQ ID NO: 248126 - DNA, 50 bp, Artificial
  Synthetic oligonucleotide
aaccccctcataggccccttatttgcccggaatccgacaaacgccggtga

SEQ ID NO: 248127 - DNA, 50 bp, Artificial
  Synthetic oligonucleotide
cgggccgtcaactgtcccccgcacggcttattttggcttcgcggccgatt

SEQ ID NO: 248128 - DNA, 50 bp, Artificial
  Synthetic oligonucleotide
aaccgcccaacgagcgaacccaacaaccgtcacggtaagcaccgttgcag

SEQ ID NO: 248129 - DNA, 50 bp, Artificial
  Synthetic oligonucleotide
cggggctggacgcaccccgcaaagaggagactaccggccccctgatggaa

SEQ ID NO: 248130 - DNA, 50 bp, Artificial
  Synthetic oligonucleotide
aaccgcgaccaggctacagggagtgctgaggtgcacgacaccgtatcagc

SEQ ID NO: 248131 - DNA, 50 bp, Artificial
  Synthetic oligonucleotide
aaccggacgggtgttcctaaaacgaaccggacctgcgctgttggcgtgat

SEQ ID NO: 248132 - DNA, 54 bp, Artificial
  Synthetic oligonucleotide
cccggtggccgtcttatcggttgatccgccgttgtgggctcaccggaccttgcg

SEQ ID NO: 248133 - DNA, 50 bp, Artificial
  Synthetic oligonucleotide
aaccggcgagtaacaagagggcaccagcagcctagggggtggaaagccga

SEQ ID NO: 248134 - DNA, 50 bp, Artificial
  Synthetic oligonucleotide
aaccgtccatggtcgagaatcgggcaaatcccctcgctgaagcgggctag

SEQ ID NO: 248135 - DNA, 50 bp, Artificial
  Synthetic oligonucleotide
aaccgtcgcccgaacggtcactgtcacgcatttcagaaacgccggacgga

SEQ ID NO: 248136 - DNA, 50 bp, Artificial
  Synthetic oligonucleotide
ccgtcgagggaacaacgttcagcatcgcaccgcagttccttgtgtggcca

SEQ ID NO: 248137 - DNA, 50 bp, Artificial
  Synthetic oligonucleotide
aacctcaagtacgcacccgacctcagcacggcgaggtgcttcttgtcccc

SEQ ID NO: 248138 - DNA, 50 bp, Artificial
  Synthetic oligonucleotide
aacctcatgacgtgcaggactccccttctcctacttgccggccgattgga

SEQ ID NO: 248139 - DNA, 50 bp, Artificial
  Synthetic oligonucleotide
cggtcgtgagggcggcccccgggaagggaaacgaacgcgattggcgtccg

SEQ ID NO: 248140 - DNA, 50 bp, Artificial
  Synthetic oligonucleotide
cggtgctcagatgataaccaccctgtcgttgcggtcgtgagggcggcccc

SEQ ID NO: 248141 - DNA, 50 bp, Artificial
  Synthetic oligonucleotide
aacgcggcgcaacccgtgccgcttgtgcttatttcgcacttgagaaccac

SEQ ID NO: 248142 - DNA, 50 bp, Artificial
  Synthetic oligonucleotide
aacggaacgctgacgcgccaccgggtcatagctcgggaggatccggcaag

SEQ ID NO: 248143 - DNA, 58 bp, Artificial
  Synthetic oligonucleotide
cccggaccgcaggcatgtctaccggatagtcaccggcgttctggaacaatcgccggca

SEQ ID NO: 248144 - DNA, 49 bp, Artificial
  Synthetic oligonucleotide
aacggccggagcggacaagccgggaacgtttctagggggtttctcttgg

SEQ ID NO: 248145 - DNA, 50 bp, Artificial
  Synthetic oligonucleotide
tttgctctaccagcaccctgtttgcctgtcttgggttccagggcgtgtat

SEQ ID NO: 248146 - DNA, 50 bp, Artificial
  Synthetic oligonucleotide
aaacggacgctgcacactttggagcgctgaccgtccctgtggatacgtcg

SEQ ID NO: 248147 - DNA, 50 bp, Artificial
  Synthetic oligonucleotide
cgcgcggagagcacttgttcgcagcacggacggctttgttgagttccggc

SEQ ID NO: 248148 - DNA, 50 bp, Artificial
  Synthetic oligonucleotide
aaagcgcgcatgtttcacaccagatccacagaaccgaggcgggagcacct

SEQ ID NO: 248149 - DNA, 50 bp, Artificial
  Synthetic oligonucleotide
cgcgctgcactcgcccggcctccaggtgaacgtcacctactcctgcgacc

SEQ ID NO: 248150 - DNA, 50 bp, Artificial
  Synthetic oligonucleotide
cgctagagattggagcgacgctagttggcgtcctcgggaagcgtagggct

SEQ ID NO: 248151 - DNA, 50 bp, Artificial
  Synthetic oligonucleotide
cggaacgtcacgagttgccgaatttccaccatgccccctcgtcacccagg

SEQ ID NO: 248152 - DNA, 50 bp, Artificial
  Synthetic oligonucleotide
cctgctgggatatcgcctcacaagacctaccgctgagacgtgggacggcg

SEQ ID NO: 248153 - DNA, 50 bp, Artificial
  Synthetic oligonucleotide
cctctggaagtcggtaccgtgcggcgagtcggaccatcgggacagctgag

SEQ ID NO: 248154 - DNA, 57 bp, Artificial
  Synthetic oligonucleotide
ctgaggaaatgccgaccacctgagagtccgcagaccataaacggtcggctaccgtcg

SEQ ID NO: 248155 - DNA, 50 bp, Artificial
  Synthetic oligonucleotide
aaatcgagccgacagaccgcaactgtggacaactccactcgagtcgccga

SEQ ID NO: 248156 - DNA, 50 bp, Artificial
  Synthetic oligonucleotide
aacaagagggcaccagcagcctagggggtggaaagccgatccgtaagggg

SEQ ID NO: 248157 - DNA, 50 bp, Artificial
  Synthetic oligonucleotide
cggcgcgcattgcgtctgcctggccgctgatccccgcacagaggagtgct

SEQ ID NO: 248158 - DNA, 50 bp, Artificial
  Synthetic oligonucleotide
aacaccccgaagcacgctgactcagcgcgaccgccgaacccctatcgcag

SEQ ID NO: 248159 - DNA, 50 bp, Artificial
  Synthetic oligonucleotide
aacaccgggagggtgttcgcgcagtcccacgtacaacgtagaagcagtcg

SEQ ID NO: 248160 - DNA, 50 bp, Artificial
  Synthetic oligonucleotide
aacagccggagcggattcacggatcaggcaccctccggttcagcgtgacc

SEQ ID NO: 248161 - DNA, 50 bp, Artificial
  Synthetic oligonucleotide
aacagcctcacggatgaggggcggactccggtcacagcgggggcgcgcac

SEQ ID NO: 248162 - DNA, 50 bp, Artificial
  Synthetic oligonucleotide
aacatggctcgggaagggcgagtggtaggccccggtcaggcagccgctca

SEQ ID NO: 248163 - DNA, 50 bp, Artificial
  Synthetic oligonucleotide
aaccatcgttgacagcggcccgatctgtcaaccttgattgacatgtggat

SEQ ID NO: 248164 - DNA, 50 bp, Artificial
  Synthetic oligonucleotide
aacccacgcgcctcagcttacgccgaatggtgggtgcctatgctcgtcac

SEQ ID NO: 248165 - DNA, 55 bp, Artificial
  Synthetic oligonucleotide
agggtcgcacgcgtgaaaagtgcgtcccttggggcgccaagtgcgtccctaggga

SEQ ID NO: 248166 - DNA, 56 bp, Artificial
  Synthetic oligonucleotide
ctgcaggccggtgactccagagaagggttgaagcggagttgcggggctagcccccc

SEQ ID NO: 248167 - DNA, 50 bp, Artificial
  Synthetic oligonucleotide
aagccgaggtgcgggtcaacaaccagtcggtggtcacccatgagggcggg

SEQ ID NO: 248168 - DNA, 50 bp, Artificial
  Synthetic oligonucleotide
aagccgcaatgcggtccgggggtgcttgtcaaggcatctttcccgccttg

SEQ ID NO: 248169 - DNA, 50 bp, Artificial
  Synthetic oligonucleotide
aagcctcagagtccacctctggcgtcgacagaattgatcgcgctgcgggc

SEQ ID NO: 248170 - DNA, 50 bp, Artificial
  Synthetic oligonucleotide
aagcgacccttgaaccgtacgggaccggcgcaagcgatccttacagcccc

SEQ ID NO: 248171 - DNA, 50 bp, Artificial
  Synthetic oligonucleotide
ctacctacctgatgccagtctgagcacttccttaacgcggccataaggat

SEQ ID NO: 248172 - DNA, 50 bp, Artificial
  Synthetic oligonucleotide
aagcgccgttttaacatctcgcggggatgtcgctaccggtctacccctgg

SEQ ID NO: 248173 - DNA, 50 bp, Artificial
  Synthetic oligonucleotide
aagcggccgtgcctgcttcttcacccccacgagacgacagcccgagaggg

SEQ ID NO: 248174 - DNA, 50 bp, Artificial
  Synthetic oligonucleotide
ctagcagtaaaattagacaagttcactcagggaccaggtctaccatgcgc

SEQ ID NO: 248175 - DNA, 50 bp, Artificial
  Synthetic oligonucleotide
aagcgggtggcgtcccagactccctccgagaggaagcccatgcgtcgcgg

SEQ ID NO: 248176 - DNA, 50 bp, Artificial
  Synthetic oligonucleotide
aagcggtctccattggggttacacacaggggccgacgagagggggccaac

SEQ ID NO: 248177 - DNA, 60 bp, Artificial
  Synthetic oligonucleotide
cccgcgaatgcagcggtactcaagcgtccggtcttgcggacatcccatcggaggtatcca

SEQ ID NO: 248178 - DNA, 50 bp, Artificial
  Synthetic oligonucleotide
aagcgtgacggaacgcactatccacacccttgcgcccttcccctaccctc

SEQ ID NO: 248179 - DNA, 50 bp, Artificial
  Synthetic oligonucleotide
aagcgttgggtatgtaccgtaccgggtatgacgccagctcgtggggacca

SEQ ID NO: 248180 - DNA, 50 bp, Artificial
  Synthetic oligonucleotide
ccgaccttcgtgcgctgttcagctccaatgaccccgtgggcagcaatgag

SEQ ID NO: 248181 - DNA, 50 bp, Artificial
  Synthetic oligonucleotide
ctcaaaccgattggatatgaaccatcgttaccctcactgagcctacggtc

SEQ ID NO: 248182 - DNA, 50 bp, Artificial
  Synthetic oligonucleotide
aaggagcccgcaccctctatctccacgcactcgaacaacaggggcgaatc

SEQ ID NO: 248183 - DNA, 50 bp, Artificial
  Synthetic oligonucleotide
aaggcacttaccgggtccgcccgggctatggaggaacacatggcaagcat

SEQ ID NO: 248184 - DNA, 50 bp, Artificial
  Synthetic oligonucleotide
aaggcatctttcccgccttgacaagcacccccagaccgtcagcacaatga

SEQ ID NO: 248185 - DNA, 50 bp, Artificial
  Synthetic oligonucleotide
aaggcggagggctcgtgatgcgtgtcacacttccgttgtaacgtcctgcg

SEQ ID NO: 248186 - DNA, 50 bp, Artificial
  Synthetic oligonucleotide
aaggcgggaaagatgccttgacaagcaccccagcgccgtgttttggcttc

SEQ ID NO: 248187 - DNA, 50 bp, Artificial
  Synthetic oligonucleotide
aaggctcccggaagcgtcctggtgcccgtatacgaccgagtgcggccacc

SEQ ID NO: 248188 - DNA, 57 bp, Artificial
  Synthetic oligonucleotide
ctgcgtctggtcaggtggtcgctcccgctgttcctcaggaggggaacggatcgggag

SEQ ID NO: 248189 - DNA, 50 bp, Artificial
  Synthetic oligonucleotide
aaggctcgaaggtccggcacctcgatagccattcaccccagaggacgggt

SEQ ID NO: 248190 - DNA, 50 bp, Artificial
  Synthetic oligonucleotide
aaggctgatgcgcggacacccgatgtgacggggttcgctcgatcgtgggc

SEQ ID NO: 248191 - DNA, 50 bp, Artificial
  Synthetic oligonucleotide
aacgtcatccgtactgtaccccgcagtttgatgggcctttgggcgcgtgc

SEQ ID NO: 248192 - DNA, 50 bp, Artificial
  Synthetic oligonucleotide
aacgtgtgcgcagccctgtaagactcgatcaacgcagtgggagcccagga

SEQ ID NO: 248193 - DNA, 50 bp, Artificial
  Synthetic oligonucleotide
ccggggccctccctgttgtcgcggacgcaccgtatagttgaaccgtaaac

SEQ ID NO: 248194 - DNA, 50 bp, Artificial
  Synthetic oligonucleotide
aactaatcgtcgcaccagcgatcggctagggacacgtcgcatagccgcgt

SEQ ID NO: 248195 - DNA, 50 bp, Artificial
  Synthetic oligonucleotide
aactaggtgcagtgcaactgagtgcaatccaggtcacccgcagagggggc

SEQ ID NO: 248196 - DNA, 50 bp, Artificial
  Synthetic oligonucleotide
aactcactcttgcggaggctaaccgggcaaatgccgcgagtccaccgatt

SEQ ID NO: 248197 - DNA, 50 bp, Artificial
  Synthetic oligonucleotide
ccggagcagccagatgcgcaaaatgctcacggtctgcctcggcaactact

SEQ ID NO: 248198 - DNA, 50 bp, Artificial
  Synthetic oligonucleotide
cgtgcactggtcgttaccgacggggtgacgggccaacttcgggaggggtc

SEQ ID NO: 248199 - DNA, 53 bp, Artificial
  Synthetic oligonucleotide
cccgccaacacgacgacagccccggggattgcgcccccggggcctgtccagga

SEQ ID NO: 248200 - DNA, 50 bp, Artificial
  Synthetic oligonucleotide
aactcggtcggaactccggatgccagccgcctgggtatggacacaagcgg

SEQ ID NO: 248201 - DNA, 50 bp, Artificial
  Synthetic oligonucleotide
aactgagggtgatttcgtccctctgcgaccggctgaggggtgtcctagcc

SEQ ID NO: 248202 - DNA, 50 bp, Artificial
  Synthetic oligonucleotide
aagaaggtcaggttcctcgggctcaaccagcgtgagtggtccccgacgta

SEQ ID NO: 248203 - DNA, 50 bp, Artificial
  Synthetic oligonucleotide
cgtgtttccctcatgtacttcgtcaacccctcactcgacaaacccgtcca

SEQ ID NO: 248204 - DNA, 50 bp, Artificial
  Synthetic oligonucleotide
aagacgaggcttcaagtcaaggcaggagcgtaagccctcagtggcctgcg

SEQ ID NO: 248205 - DNA, 50 bp, Artificial
  Synthetic oligonucleotide
aagagccgacgggagccactgggcacaagcctggaagtccctgggcgttc

SEQ ID NO: 248206 - DNA, 50 bp, Artificial
  Synthetic oligonucleotide
aagagcgggccccggcgttccacggagttctacgagattccacggattca

SEQ ID NO: 248207 - DNA, 50 bp, Artificial
  Synthetic oligonucleotide
ccgccctaccttccggccacccggggaccatcacacccactcagggcaac

SEQ ID NO: 248208 - DNA, 50 bp, Artificial
  Synthetic oligonucleotide
ccgatacgaggagtgatcacccatggagtggatgcaccgcgccgcttgca

SEQ ID NO: 248209 - DNA, 50 bp, Artificial
  Synthetic oligonucleotide
aagatcatgcgattcctttcggatgccccgggcaggcaaggcggaaccag

SEQ ID NO: 248210 - DNA, 49 bp, Artificial
  Synthetic oligonucleotide
cccgcaagtgaaaagaccaccgaaggggttggggaagtgtttaccgaaa

SEQ ID NO: 248211 - DNA, 50 bp, Artificial
  Synthetic oligonucleotide
aagatcgtcatgaagcgggacggtagtgcggctggttgccaggagcaacc

SEQ ID NO: 248212 - DNA, 50 bp, Artificial
  Synthetic oligonucleotide
tggatcgctcaaccgttagtcatgtcagcggaatgctgacacctgtgatg

SEQ ID NO: 248213 - DNA, 50 bp, Artificial
  Synthetic oligonucleotide
aagcacgctgactcagcgcgaccgccgaacccctatcgcaggacccgccc

SEQ ID NO: 248214 - DNA, 50 bp, Artificial
  Synthetic oligonucleotide
aagcagcaagaaatcccacgacagggcaactcagttgaggggcgcacgct

SEQ ID NO: 248215 - DNA, 50 bp, Artificial
  Synthetic oligonucleotide
acggtgctccagtgtctttcggggtgctccaggaatcgaggttgctcgga

SEQ ID NO: 248216 - DNA, 50 bp, Artificial
  Synthetic oligonucleotide
acggtgcttaccgtgacggttgttgggttcgctcgttgggcggttcatgg

SEQ ID NO: 248217 - DNA, 50 bp, Artificial
  Synthetic oligonucleotide
gtcccggtcagtgaccacccatcagccgtgccccgatcacctgctaccgg

SEQ ID NO: 248218 - DNA, 50 bp, Artificial
  Synthetic oligonucleotide
acgtacggcacactcacttccgtgacgagcgccggggaatcacacgcacg

SEQ ID NO: 248219 - DNA, 50 bp, Artificial
  Synthetic oligonucleotide
gcgtgtgccgggcacctgcgaaggtccgtgatccgtgcgtcagacgtttg

SEQ ID NO: 248220 - DNA, 50 bp, Artificial
  Synthetic oligonucleotide
acgtcgtgccactctgcctcgggacggcacccctaagctggccccgtcga

SEQ ID NO: 248221 - DNA, 53 bp, Artificial
  Synthetic oligonucleotide
cccgagtgtgaatacagcgaccccgaacgaaaatccgttcggggtcgctgtat

SEQ ID NO: 248222 - DNA, 50 bp, Artificial
  Synthetic oligonucleotide
acgtgagcagtagcggccttatctacgcggtcatcgtaggggcctgggct

SEQ ID NO: 248223 - DNA, 50 bp, Artificial
  Synthetic oligonucleotide
gctcactggcgggtgcgccgaactctgctgtgatgtacgggaattgtgcc

SEQ ID NO: 248224 - DNA, 50 bp, Artificial
  Synthetic oligonucleotide
acgtgcaggcagagttctatcgccccgtgatccacacccgtgtcccccgg

SEQ ID NO: 248225 - DNA, 50 bp, Artificial
  Synthetic oligonucleotide
gctccgcgatcgtagcgctcacaggtgaacacgggactatccctgtgcgc

SEQ ID NO: 248226 - DNA, 50 bp, Artificial
  Synthetic oligonucleotide
atcacgagcgcccaccggccatttacgtcaacgtcggtgatttaccccgg

SEQ ID NO: 248227 - DNA, 50 bp, Artificial
  Synthetic oligonucleotide
actcagccgatgcgagtgccagattccctgagccagtgtacggccgggta

SEQ ID NO: 248228 - DNA, 50 bp, Artificial
  Synthetic oligonucleotide
atagggctacggtatgcacccacgaggtgacatgcagcaacgccgggaga

SEQ ID NO: 248229 - DNA, 50 bp, Artificial
  Synthetic oligonucleotide
actccgccctctcgcagagctatgccttgaatacgcgatccagggctcga

SEQ ID NO: 248230 - DNA, 50 bp, Artificial
  Synthetic oligonucleotide
actccggatgccagccgcctgggtatggacacaagcgggcctcccccgtc

SEQ ID NO: 248231 - DNA, 50 bp, Artificial
  Synthetic oligonucleotide
atagcaacggtggtactaccgaaactagcggtcgagccgggttccggggg

SEQ ID NO: 248232 - DNA, 60 bp, Artificial
  Synthetic oligonucleotide
ctgggatccgccgtcgatcgccgctgtccgtacttgttggtgtcaggcattgatgtcaga

SEQ ID NO: 248233 - DNA, 50 bp, Artificial
  Synthetic oligonucleotide
ggtgcctctgcctggactggcacattgctctctggggtcactcgaccgat

SEQ ID NO: 248234 - DNA, 50 bp, Artificial
  Synthetic oligonucleotide
actcgccccaagggtacggcgccacttctcccgcgttcggaccttgcccg

SEQ ID NO: 248235 - DNA, 50 bp, Artificial
  Synthetic oligonucleotide
gcttctgcatatggcgacgaatgcaggcactcatgaactgagtgatatcc

SEQ ID NO: 248236 - DNA, 50 bp, Artificial
  Synthetic oligonucleotide
acgccccgggcctcagcccgtgtacgccgccagtgccttcgtgaactccc

SEQ ID NO: 248237 - DNA, 50 bp, Artificial
  Synthetic oligonucleotide
acgcccgtatccccggcagggttgtacgagaaacccatgtgaaccgaccc

SEQ ID NO: 248238 - DNA, 50 bp, Artificial
  Synthetic oligonucleotide
atgcgctggttcccatgccctcgacataccgaaagcctgatgggttcccg

SEQ ID NO: 248239 - DNA, 50 bp, Artificial
  Synthetic oligonucleotide
atgacttccgacgtgaacgcccttccgggaaagtacggtaggggctcggc

SEQ ID NO: 248240 - DNA, 50 bp, Artificial
  Synthetic oligonucleotide
acgcgagaggaggatcatccgcgatgggaatgttcaaggacgcacccccg

SEQ ID NO: 248241 - DNA, 50 bp, Artificial
  Synthetic oligonucleotide
gtgaatcccgtgcaccggtagcccttgaacggcgactccccgtgaatcct

SEQ ID NO: 248242 - DNA, 50 bp, Artificial
  Synthetic oligonucleotide
gcgcacgaaatcaggtgaatccccgacgcgaacacacgctgacaagcgag

SEQ ID NO: 248243 - DNA, 60 bp, Artificial
  Synthetic oligonucleotide
cgatggaaccccgacgatctgtctggtcggctgcttgagtcagagggcgacgagtggaca

SEQ ID NO: 248244 - DNA, 50 bp, Artificial
  Synthetic oligonucleotide
acgcgtcctcgaagcaccctgtccagtcggagaccgtgtaccgcaggaaa

SEQ ID NO: 248245 - DNA, 50 bp, Artificial
  Synthetic oligonucleotide
acgcgttgtcaactcccgtaccggccgactggtcactctcctccctcgaa

SEQ ID NO: 248246 - DNA, 50 bp, Artificial
  Synthetic oligonucleotide
acggaacgtcggctcacgctaccgggtgaattccgctccggaccacgtac

SEQ ID NO: 248247 - DNA, 50 bp, Artificial
  Synthetic oligonucleotide
gcgctagggcctccttggggctcgcgtagcagcaatccgcacaacccccg

SEQ ID NO: 248248 - DNA, 50 bp, Artificial
  Synthetic oligonucleotide
acggacataccgaagaccctccttccatcggggtgcagtgtcaggccggg

SEQ ID NO: 248249 - DNA, 50 bp, Artificial
  Synthetic oligonucleotide
acggccggaggatcatcaccgtgcatcgtccacttactctcccgcgcagg

SEQ ID NO: 248250 - DNA, 50 bp, Artificial
  Synthetic oligonucleotide
acggccggtgtacgggcgacgtccatgggtcccgcttatatcgcgtcaaa

SEQ ID NO: 248251 - DNA, 50 bp, Artificial
  Synthetic oligonucleotide
acggcggtccgggggagtcgacgtagtgggtgacagacgtgtgagagcgc

SEQ ID NO: 248252 - DNA, 50 bp, Artificial
  Synthetic oligonucleotide
acgggaccactccaagcagccttcaaccgtacgggaccgccacaagcgac

SEQ ID NO: 248253 - DNA, 50 bp, Artificial
  Synthetic oligonucleotide
acgggaggacctcagtgcccgaagcctgggaagccgatccctcgtcccca

SEQ ID NO: 248254 - DNA, 55 bp, Artificial
  Synthetic oligonucleotide
cgagggcccaggggttagccccgcaaccccctctctgaggagcaagcgagtcgaa

SEQ ID NO: 248255 - DNA, 50 bp, Artificial
  Synthetic oligonucleotide
acgggcctttctggcgctcgcgggaggtcggtccatattcgtcccccaac

SEQ ID NO: 248256 - DNA, 50 bp, Artificial
  Synthetic oligonucleotide
atccccacaagccctcgtcaccactacgctgcctccgtgccttttcacaa

SEQ ID NO: 248257 - DNA, 50 bp, Artificial
  Synthetic oligonucleotide
atccactctgtccgattagtgcccgatggggtgtgactcgggccacgtgg

SEQ ID NO: 248258 - DNA, 50 bp, Artificial
  Synthetic oligonucleotide
acggtcccgggcccttacccgccgcattacctgatcgcaacctcgcaggg

SEQ ID NO: 248259 - DNA, 50 bp, Artificial
  Synthetic oligonucleotide
atcatggagttacggaacaatgccgccggggcctaagggcgctaagggga

SEQ ID NO: 248260 - DNA, 50 bp, Artificial
  Synthetic oligonucleotide
agaagcgtcccgccacggctcaaggtgcgcaatagtttgcgatttggctg

SEQ ID NO: 248261 - DNA, 50 bp, Artificial
  Synthetic oligonucleotide
ggccacgccgcttcctccctacaagtcctgtttcgtcaggcttccacacg

SEQ ID NO: 248262 - DNA, 50 bp, Artificial
  Synthetic oligonucleotide
agaccatcgaatgacgacggcggaagggcaatgggggatatgggaacgga

SEQ ID NO: 248263 - DNA, 50 bp, Artificial
  Synthetic oligonucleotide
agacccaccaggccacgtagttcgggtgccccgtcctttcgaaccagtcg

SEQ ID NO: 248264 - DNA, 50 bp, Artificial
  Synthetic oligonucleotide
agactcctgcgacactccgccggaccgcaaagaaatcccacgcccttcgt

SEQ ID NO: 248265 - DNA, 58 bp, Artificial
  Synthetic oligonucleotide
cgccccttatctcaatgaaagcgcaggtcaccactccaggaaacggccgggcgagcga

SEQ ID NO: 248266 - DNA, 50 bp, Artificial
  Synthetic oligonucleotide
gggctattcacccgtcccggtcagtgaccacccatcagccgtgccccgat

SEQ ID NO: 248267 - DNA, 50 bp, Artificial
  Synthetic oligonucleotide
agagctatgacggcttcaggctagcccgtcctgttacggcccgctgtctc

SEQ ID NO: 248268 - DNA, 50 bp, Artificial
  Synthetic oligonucleotide
agatgataaccaccctgtcgttgcggtcgtgagggcggcccccgggaagg

SEQ ID NO: 248269 - DNA, 50 bp, Artificial
  Synthetic oligonucleotide
gggcaattcgggcggattaggctatctaggtgccatattatgacagacgt

SEQ ID NO: 248270 - DNA, 50 bp, Artificial
  Synthetic oligonucleotide
agcagagagagcgtaaccgatggggctgccgctctactggaggcgtgagc

SEQ ID NO: 248271 - DNA, 50 bp, Artificial
  Synthetic oligonucleotide
agcagccttcaaccgtacgggaccgccacaagcgacccttgaaccgtacg

SEQ ID NO: 248272 - DNA, 50 bp, Artificial
  Synthetic oligonucleotide
aggaatctgagacgaaaaacgcatcggcgcggggttgcccacggatggtg

SEQ ID NO: 248273 - DNA, 50 bp, Artificial
  Synthetic oligonucleotide
agccacaccggctgtactgggccacgccgcttcctccctacaagtcctgt

SEQ ID NO: 248274 - DNA, 50 bp, Artificial
  Synthetic oligonucleotide
agcggtcatcggcccacagattggaggggctgaagtctgcttcggactgg

SEQ ID NO: 248275 - DNA, 50 bp, Artificial
  Synthetic oligonucleotide
agcccttggctgaccgaccgccgaaccgagacccgatccaccgggggagt

SEQ ID NO: 248276 - DNA, 52 bp, Artificial
  Synthetic oligonucleotide
agggattagggcccctgaccgcttctgacgtccgcccggataccaaccaagg

SEQ ID NO: 248277 - DNA, 53 bp, Artificial
  Synthetic oligonucleotide
cgactttggttcgggcgaaccgaaatcgggtgccagtagggaatgtgcccacg

SEQ ID NO: 248278 - DNA, 50 bp, Artificial
  Synthetic oligonucleotide
agcgcgcactcatcttgcacccgccgacctgtagtccggtaggggacgtt

SEQ ID NO: 248279 - DNA, 50 bp, Artificial
  Synthetic oligonucleotide
agcgcttgaactgcacgcgtcagatgggtgagggtcatctcggtcccccg

SEQ ID NO: 248280 - DNA, 50 bp, Artificial
  Synthetic oligonucleotide
actctgtgcgcctccggggtttctcgttacggggcaaggctcgaacgggg

SEQ ID NO: 248281 - DNA, 50 bp, Artificial
  Synthetic oligonucleotide
agttcgggcagtctgtcgatcggagggtggggatgactcgttcagtcggg

SEQ ID NO: 248282 - DNA, 50 bp, Artificial
  Synthetic oligonucleotide
actgaacctgggcacggcacatccgatgggtcgacgcgagtcctggggcc

SEQ ID NO: 248283 - DNA, 50 bp, Artificial
  Synthetic oligonucleotide
actgccggtcgcggacgcccggatagctcagtacatccagtggtaccggt

SEQ ID NO: 248284 - DNA, 50 bp, Artificial
  Synthetic oligonucleotide
actgcgacccaaaggaggcgggcacgggggctgaaaccgctacgatcggt

SEQ ID NO: 248285 - DNA, 50 bp, Artificial
  Synthetic oligonucleotide
agttcctgacgtcgtgtcgagtggtcgtagacgcgggccctgagtgggtt

SEQ ID NO: 248286 - DNA, 50 bp, Artificial
  Synthetic oligonucleotide
actgctgaaccgaccgacacgagaggagagcgccgctgtgcctcccaccg

SEQ ID NO: 248287 - DNA, 50 bp, Artificial
  Synthetic oligonucleotide
actggccaccctgcgtcccttgcgatcttgggtctccgacacagcgccgg

SEQ ID NO: 248288 - DNA, 60 bp, Artificial
  Synthetic oligonucleotide
cgactccacccaggtgcgcgtctcgcctcggccctgaggcttcatggcgtaggtctcgac

SEQ ID NO: 248289 - DNA, 50 bp, Artificial
  Synthetic oligonucleotide
actggcgtgctagggatactcgacctgagcgacccacccgtacagcgcgg

SEQ ID NO: 248290 - DNA, 50 bp, Artificial
  Synthetic oligonucleotide
actggtaccaaaggctgatgcgcggacacccgatgtgacggggttcgctc

SEQ ID NO: 248291 - DNA, 50 bp, Artificial
  Synthetic oligonucleotide
agtgctgcccgccaacagcccactcactgactcccgtactaccggagtcc

SEQ ID NO: 248292 - DNA, 50 bp, Artificial
  Synthetic oligonucleotide
actggtaccctgggtcaccactgcgtgtccgcacgcatgcgcttcccccg

SEQ ID NO: 248293 - DNA, 50 bp, Artificial
  Synthetic oligonucleotide
actgtccagcccggcgactatgcccataggacgattctgccgcacgcgga

SEQ ID NO: 248294 - DNA, 50 bp, Artificial
  Synthetic oligonucleotide
actgtcccccgcacggcttattttggcttcgcggccgattatccgtacga

SEQ ID NO: 248295 - DNA, 50 bp, Artificial
  Synthetic oligonucleotide
agtgcccttgcggacatctgagtacgcccacacgctctaccgaacggact

SEQ ID NO: 248296 - DNA, 50 bp, Artificial
  Synthetic oligonucleotide
agtccgcaccaggggagctacagttcgggcagtctgtcgatcggagggtg

SEQ ID NO: 248297 - DNA, 50 bp, Artificial
  Synthetic oligonucleotide
acttcgccccatcgcagatgctgtcacggctcttgacggagcagccaaga

SEQ ID NO: 248298 - DNA, 50 bp, Artificial
  Synthetic oligonucleotide
aggtcacccgacctagaaatggtccacggcccaaccaccgcactgcgggc

SEQ ID NO: 248299 - DNA, 56 bp, Artificial
  Synthetic oligonucleotide
cgccggaccagtacctccggtacgcgctcaacacctaccgcgtcctcgcaactaga

SEQ ID NO: 248300 - DNA, 50 bp, Artificial
  Synthetic oligonucleotide
agaaccatgatcgttccccatgcgtcccccagtaggccaacctgccgata

SEQ ID NO: 248301 - DNA, 50 bp, Artificial
  Synthetic oligonucleotide
aggtacgcgtcatcgcggagcttgaacagaagccgatccgcacgtttgca

SEQ ID NO: 248302 - DNA, 50 bp, Artificial
  Synthetic oligonucleotide
agggtcggtccggcagtctggttcctgcgggcggtgaatgctgctcgggc

SEQ ID NO: 248303 - DNA, 50 bp, Artificial
  Synthetic oligonucleotide
ggggcgcctgacttcgcgactgccaatcacttcagttacatgctataact

SEQ ID NO: 248304 - DNA, 50 bp, Artificial
  Synthetic oligonucleotide
gacgtgaacgcccttccgggaaagtacggtaggggctcggcgacgttcgc

SEQ ID NO: 248305 - DNA, 50 bp, Artificial
  Synthetic oligonucleotide
accaggtaaccccgtaagcccgtacaagagagcggcccggcacacctcac

SEQ ID NO: 248306 - DNA, 50 bp, Artificial
  Synthetic oligonucleotide
acccagcaaccggagcgcaaccgtggcggatacgcggagcgaggagtcac

SEQ ID NO: 248307 - DNA, 50 bp, Artificial
  Synthetic oligonucleotide
gagaaccgatgtgttccgcgctcctcatcccccggaacaggcccgatcgt

SEQ ID NO: 248308 - DNA, 50 bp, Artificial
  Synthetic oligonucleotide
acccccacagagagaaaccctcagcggcgcggaagcagatgttcgggtac

SEQ ID NO: 248309 - DNA, 50 bp, Artificial
  Synthetic oligonucleotide
tcagacccgcagtcgtcacgctgagtacatgttgaacacggattcatgta

SEQ ID NO: 248310 - DNA, 60 bp, Artificial
  Synthetic oligonucleotide
cgcgaccggtagtgctcagcgacgtctgcgtatcccgcgccctgtgccctgtatgccatg

SEQ ID NO: 248311 - DNA, 50 bp, Artificial
  Synthetic oligonucleotide
acccccagaccgtcagcacaatgaaacttcggggtgccccacgcaaccac

SEQ ID NO: 248312 - DNA, 50 bp, Artificial
  Synthetic oligonucleotide
acccccgattcctccgatgtatgccgagcaccggagaggtcgtcacggca

SEQ ID NO: 248313 - DNA, 50 bp, Artificial
  Synthetic oligonucleotide
acccccttgtggcgaagcgtcggacggaacggctcagacgttgtacagat

SEQ ID NO: 248314 - DNA, 50 bp, Artificial
  Synthetic oligonucleotide
gagaagggccctctcgcgacggagttgggcgccgcgcactacatcgacag

SEQ ID NO: 248315 - DNA, 50 bp, Artificial
  Synthetic oligonucleotide
accccgaagctggatcgtgacgacggtctgggggtgcttgtcaaggcggg

SEQ ID NO: 248316 - DNA, 50 bp, Artificial
  Synthetic oligonucleotide
tcacaccagtgtcaaccgggctattcacccgtcccggtcagtgaccaccc

SEQ ID NO: 248317 - DNA, 50 bp, Artificial
  Synthetic oligonucleotide
accccgggattaccgtctctttacacttggtgggcacggggccctgaggg

SEQ ID NO: 248318 - DNA, 50 bp, Artificial
  Synthetic oligonucleotide
accccgtgcgagtgaagggaattggtgtggaccactggagggtccgttgg

SEQ ID NO: 248319 - DNA, 50 bp, Artificial
  Synthetic oligonucleotide
acccgccgccccacctcaggacaaagggcccatctactaccggatgtcgt

SEQ ID NO: 248320 - DNA, 50 bp, Artificial
  Synthetic oligonucleotide
acccgctaccctgggcaacttccgtaggccgaatttcgcgtgggggcgcc

SEQ ID NO: 248321 - DNA, 58 bp, Artificial
  Synthetic oligonucleotide
cgcgcttggcctgcttcttgcacgcctcggaacagaagaccttgggacgcttgccggg

SEQ ID NO: 248322 - DNA, 50 bp, Artificial
  Synthetic oligonucleotide
acccgggttagcgtggaggtatgaggcgagccgtagtccgccagtccata

SEQ ID NO: 248323 - DNA, 50 bp, Artificial
  Synthetic oligonucleotide
acccggtcaacacaggcgagttgagcgctgacccacgcactgtctcggtc

SEQ ID NO: 248324 - DNA, 50 bp, Artificial
  Synthetic oligonucleotide
acccggtgtctctcgacacgcgcctcctgaggcattgggcgactgcgaca

SEQ ID NO: 248325 - DNA, 50 bp, Artificial
  Synthetic oligonucleotide
cagcggaacctggcccgtgcggactcggcggacggaacccaaaactcctg

SEQ ID NO: 248326 - DNA, 50 bp, Artificial
  Synthetic oligonucleotide
acacgctctagggccccaagcgccgtcgaaccccagatgtagtggttgga

SEQ ID NO: 248327 - DNA, 50 bp, Artificial
  Synthetic oligonucleotide
acacgtccttgactctccttgggatcagacgtcgggggtagcggggccca

SEQ ID NO: 248328 - DNA, 50 bp, Artificial
  Synthetic oligonucleotide
acactcgcttcccgaccagttcagacgttcccctgaccggttcggttccc

SEQ ID NO: 248329 - DNA, 50 bp, Artificial
  Synthetic oligonucleotide
acactgcaccgagtgaccatcacggaagcggctcgaccgaccgcgcactg

SEQ ID NO: 248330 - DNA, 50 bp, Artificial
  Synthetic oligonucleotide
acagcccgctgtggtgtgggccacgaggtgagagactgtgccggactcaa

SEQ ID NO: 248331 - DNA, 50 bp, Artificial
  Synthetic oligonucleotide
acagcgctaccgaagcaagatccgccaactactgcgctcgtccgccaagt

SEQ ID NO: 248332 - DNA, 51 bp, Artificial
  Synthetic oligonucleotide
cgaaactgcccggaggcttcgggtaaccgcccgcggtgggacagccggacg

SEQ ID NO: 248333 - DNA, 50 bp, Artificial
  Synthetic oligonucleotide
gaccattggccgggtggaatcgatcatgaatcggcggacgtgggctacgc

SEQ ID NO: 248334 - DNA, 50 bp, Artificial
  Synthetic oligonucleotide
acaggctggttgccaagtcggcggggccacatacgctcccgtgctgtgtt

SEQ ID NO: 248335 - DNA, 50 bp, Artificial
  Synthetic oligonucleotide
acagggtcggcctgcccacatggcaccccgtgtgcgacctcagtcagctg

SEQ ID NO: 248336 - DNA, 50 bp, Artificial
  Synthetic oligonucleotide
acaggtagtcgtgcgctgctctacccaagggaccgtctccgtcgcgcttc

SEQ ID NO: 248337 - DNA, 50 bp, Artificial
  Synthetic oligonucleotide
acagtagcacgctacgctcgcccctgcacggtcggtaattacactccggc

SEQ ID NO: 248338 - DNA, 50 bp, Artificial
  Synthetic oligonucleotide
acagtggcacgaaccgcgaaacagggccagccgttagtacgctggaccca

SEQ ID NO: 248339 - DNA, 50 bp, Artificial
  Synthetic oligonucleotide
acatcccgtaggacgacgttgccccggtaccccgcccagaccttccgtgc

SEQ ID NO: 248340 - DNA, 50 bp, Artificial
  Synthetic oligonucleotide
gacccctcgcacaccgactggttcaagtccacctacagcaccggggcgga

SEQ ID NO: 248341 - DNA, 50 bp, Artificial
  Synthetic oligonucleotide
accacacctcgagcgaggcttggccggaggagaagctacggactttggtg

SEQ ID NO: 248342 - DNA, 50 bp, Artificial
  Synthetic oligonucleotide
tccccgacgcgaacacacgctgacaagcgagctatgccccaaatagcggt

SEQ ID NO: 248343 - DNA, 59 bp, Artificial
  Synthetic oligonucleotide
ccttgcggtgtgagtgtgcgtcgacgcagcggcaggactctcccgtggggtttcgagag

SEQ ID NO: 248344 - DNA, 50 bp, Artificial
  Synthetic oligonucleotide
ccacaacgagcccgggggtgggacggtgttggaagaacgcaacgagcagg

SEQ ID NO: 248345 - DNA, 50 bp, Artificial
  Synthetic oligonucleotide
accaccttgtcttcggttgcgaagcctgggctcgggagtcgggggtcagg

SEQ ID NO: 248346 - DNA, 50 bp, Artificial
  Synthetic oligonucleotide
accacggcacggaagcccgcaccccattaggtgcacctgcacattgactt

SEQ ID NO: 248347 - DNA, 50 bp, Artificial
  Synthetic oligonucleotide
gacgctagttggcgtcctcgggaagcgtagggctagcagcgctcggatgt

SEQ ID NO: 248348 - DNA, 50 bp, Artificial
  Synthetic oligonucleotide
accgtacgaggcatccccacaagccctcgtcaccactacgctgcctccgt

SEQ ID NO: 248349 - DNA, 50 bp, Artificial
  Synthetic oligonucleotide
accgtgccgtgacgcggtgcgtactctgttcgccatgcataccgacggga

SEQ ID NO: 248350 - DNA, 50 bp, Artificial
  Synthetic oligonucleotide
acctatcgcgccgcgtgtggcacgtactggtcggggatgtccgcattacc

SEQ ID NO: 248351 - DNA, 50 bp, Artificial
  Synthetic oligonucleotide
acctcacaaggggtgccacgagggctcttcgtccccctccgggcgtacca

SEQ ID NO: 248352 - DNA, 50 bp, Artificial
  Synthetic oligonucleotide
acctcccgccacccccagaggtcgtacctgacgtccggtagtgggcacaa

SEQ ID NO: 248353 - DNA, 50 bp, Artificial
  Synthetic oligonucleotide
acctcgcatgccgtggcatcccgctgattccagcacacctcgccatctcc

SEQ ID NO: 248354 - DNA, 56 bp, Artificial
  Synthetic oligonucleotide
ccttgacctgctacttcaagcctcggtcgtgcttcggcttaggagtccgggaccga

SEQ ID NO: 248355 - DNA, 50 bp, Artificial
  Synthetic oligonucleotide
acctcgctgtcctcagacgtggccagtaaacggaccactgaacgcgtccg

SEQ ID NO: 248356 - DNA, 50 bp, Artificial
  Synthetic oligonucleotide
acctcgttgcaggggcggttgggggacccgctagagtagtcgcatcgcag

SEQ ID NO: 248357 - DNA, 50 bp, Artificial
  Synthetic oligonucleotide
acctgcaactgacatcgacagtagcacgctacgctcgcccctgcacggtc

SEQ ID NO: 248358 - DNA, 50 bp, Artificial
  Synthetic oligonucleotide
atggggtccctctgtctcgtgggggtctggaggatcgggcgtgctactcg

SEQ ID NO: 248359 - DNA, 50 bp, Artificial
  Synthetic oligonucleotide
gcctcagcccgtgtacgccgccagtgccttcgtgaactcccagtcgctct

SEQ ID NO: 248360 - DNA, 50 bp, Artificial
  Synthetic oligonucleotide
accttacgcgatgccctcccgcacccgcagtcgcgatccgcctactgacc

SEQ ID NO: 248361 - DNA, 50 bp, Artificial
  Synthetic oligonucleotide
accttgcatgtgtggaagcccctacggatggagcacggatgcctcgccgc

SEQ ID NO: 248362 - DNA, 50 bp, Artificial
  Synthetic oligonucleotide
accttggtaacccgccgccccacctcaggacaaagggcccatctactacc

SEQ ID NO: 248363 - DNA, 50 bp, Artificial
  Synthetic oligonucleotide
acgacatgggtcgtccccagcgtcccgaaggatgtgagcaaccgcaaagt

SEQ ID NO: 248364 - DNA, 50 bp, Artificial
  Synthetic oligonucleotide
acgaccgccaaagcactccgtcggaaggggcccggttcgtggccacacag

SEQ ID NO: 248365 - DNA, 53 bp, Artificial
  Synthetic oligonucleotide
ccttcaagtttcccgatcggcccgtcgccccaacgctccgcccacttaccaca

SEQ ID NO: 248366 - DNA, 50 bp, Artificial
  Synthetic oligonucleotide
acgaccgtgcgaagatcatcggcgctaaggtgaaccgccaactgggcagc

SEQ ID NO: 248367 - DNA, 50 bp, Artificial
  Synthetic oligonucleotide
acgagggctctcgccgacgatccagactttgcgacacgactggaaaccgc

SEQ ID NO: 248368 - DNA, 50 bp, Artificial
  Synthetic oligonucleotide
accctcccgctacccgtacgccccctcataaggtgtgggacaagggggtc

SEQ ID NO: 248369 - DNA, 50 bp, Artificial
  Synthetic oligonucleotide
acccttgtgccacgacttgtcccgacataagagggggaatttgcgcccgg

SEQ ID NO: 248370 - DNA, 50 bp, Artificial
  Synthetic oligonucleotide
accgaccgccgaaccgagacccgatccaccgggggagttggaagtacgtg

SEQ ID NO: 248371 - DNA, 50 bp, Artificial
  Synthetic oligonucleotide
accgccacgcgctcttgtagtgcgccggactgtcgtcgtacatgatcacg

SEQ ID NO: 248372 - DNA, 50 bp, Artificial
  Synthetic oligonucleotide
gatcgcatcttgaccgtttcgtaacctcggcctagcctcacactcagtgg

SEQ ID NO: 248373 - DNA, 50 bp, Artificial
  Synthetic oligonucleotide
accgcgccaagaatgctttgccctgcgggcatcacgcctagtaccttggg

SEQ ID NO: 248374 - DNA, 50 bp, Artificial
  Synthetic oligonucleotide
accggacgaccctggtagcggttgtcccatgtcccactccgctcccatac

SEQ ID NO: 248375 - DNA, 50 bp, Artificial
  Synthetic oligonucleotide
accggactacaggcgtcgttcctcagctacctcaggacctgccgagccca

SEQ ID NO: 248376 - DNA, 58 bp, Artificial
  Synthetic oligonucleotide
cctggacgaagcaggagcttcgcgacttccttgctggatggggcgtcccggtctcgga

SEQ ID NO: 248377 - DNA, 50 bp, Artificial
  Synthetic oligonucleotide
accggagtgtcccccggcgggctcttgacgaatgaaagtgttctaccgcg

SEQ ID NO: 248378 - DNA, 50 bp, Artificial
  Synthetic oligonucleotide
gcacctcatttacccgcccccgagacgctgttgaccttcactcgtcccac

SEQ ID NO: 248379 - DNA, 50 bp, Artificial
  Synthetic oligonucleotide
accggcccacctatcccgcagataaggagccgccacctcaaccaaacccg

SEQ ID NO: 248380 - DNA, 50 bp, Artificial
  Synthetic oligonucleotide
accggcggttgattggtcctcgtggggtgccaccgcgtcaccttagcttc

SEQ ID NO: 248381 - DNA, 50 bp, Artificial
  Synthetic oligonucleotide
accgggcatcactggatcgctcctgccgtgtacgacaacgtctgcaacgc

SEQ ID NO: 248382 - DNA, 50 bp, Artificial
  Synthetic oligonucleotide
gcagacgcgctgcgtttggttaccgtcggccgtgtgagtcaacgtcgcac

SEQ ID NO: 248383 - DNA, 50 bp, Artificial
  Synthetic oligonucleotide
accgggctagcgaactcaacgaacccagccgcacgccctgcgagtgcagg

SEQ ID NO: 248384 - DNA, 50 bp, Artificial
  Synthetic oligonucleotide
accggggcaacccccgcaacggcccacacagtcgcacctccgcttctggg

SEQ ID NO: 248385 - DNA, 50 bp, Artificial
  Synthetic oligonucleotide
accggtgggtacggggagcgtagtcacaacgaacgcgcaggtctacgggt

SEQ ID NO: 248386 - DNA, 60 bp, Artificial
  Synthetic oligonucleotide
ggatcgctggatcatcaggacacggccctgcccgtcctggacgaatgccacgacggacgg

SEQ ID NO: 248387 - DNA, 57 bp, Artificial
  Synthetic oligonucleotide
cggcaaaattggctactcaacagtgacgggggtcaacgatgaatcagtacaaccgag

SEQ ID NO: 248388 - DNA, 60 bp, Artificial
  Synthetic oligonucleotide
cctctccgctgcgctgcgaggggcactcttccgctgtgcttcagagtgctggcctggatg

SEQ ID NO: 248389 - DNA, 60 bp, Artificial
  Synthetic oligonucleotide
cctcagcgctagtactagcgcaaggtctttcggtcgactaccctcagatgaaccgctgca

SEQ ID NO: 248390 - DNA, 58 bp, Artificial
  Synthetic oligonucleotide
ccgtttccctccatgatcacgagggtgcacactccccccatgaccacacgccgaccgc

SEQ ID NO: 248391 - DNA, 58 bp, Artificial
  Synthetic oligonucleotide
ccgtttatgctgacgccgtattcaacggcgacactgtttgcgtcccggagaatggtgc

SEQ ID NO: 248392 - DNA, 60 bp, Artificial
  Synthetic oligonucleotide
cgggagccatggtgagccctccttctgggtctgttctaggccactgcgcctacaggacta

SEQ ID NO: 248393 - DNA, 53 bp, Artificial
  Synthetic oligonucleotide
ccggggagcggacataaaggggcatattcgaggcggcgtgacacttttccggg

SEQ ID NO: 248394 - DNA, 58 bp, Artificial
  Synthetic oligonucleotide
cgtctcggcttgcgcggcctattcgcttgccgaccgtacgtcgcagccagggactttc

SEQ ID NO: 248395 - DNA, 53 bp, Artificial
  Synthetic oligonucleotide
ccggccttctacggccgccctgaggcccgccgcacccggaaggacggaacgca

SEQ ID NO: 248396 - DNA, 60 bp, Artificial
  Synthetic oligonucleotide
cgtgagtgacggcgcgcgccttctagtgaagaaggggcgcatgctcttgacctggtaaaa

SEQ ID NO: 248397 - DNA, 59 bp, Artificial
  Synthetic oligonucleotide
agggactgagtttcccttatagcagagagagcgtaaccgatggggctgccgctctactg

SEQ ID NO: 248398 - DNA, 55 bp, Artificial
  Synthetic oligonucleotide
cgtgatcgggcgtcagacggccgctgagggaccgcgaccacccctcccttcccgc

SEQ ID NO: 248399 - DNA, 56 bp, Artificial
  Synthetic oligonucleotide
cgtgccacagtcggggtgtgcaaaaaatgcacaccacctccgaccaggggagaccc

SEQ ID NO: 248400 - DNA, 53 bp, Artificial
  Synthetic oligonucleotide
ccggaaggcccttaaccggctggtcaagctcgggcttgtggtcaagccgggcc

SEQ ID NO: 248401 - DNA, 60 bp, Artificial
  Synthetic oligonucleotide
cgtgcggcttgtgcgttcgtgaatgcaagaggtgtgaccgttcttcgcgtgcacgcgtgt

SEQ ID NO: 248402 - DNA, 58 bp, Artificial
  Synthetic oligonucleotide
ccgctcgcggtatacggcgacgatctacattcacgggaatagggtgtgccaccactcg

SEQ ID NO: 248403 - DNA, 60 bp, Artificial
  Synthetic oligonucleotide
gagagacagagttgaccagcccgatcgacgcatcggatacatgagggaccgaaacggata

SEQ ID NO: 248404 - DNA, 60 bp, Artificial
  Synthetic oligonucleotide
catgagcgtggaggcagacgacacgtccctcaggcggacttgattgacgtctcgttcatg

SEQ ID NO: 248405 - DNA, 60 bp, Artificial
  Synthetic oligonucleotide
gagatagactctggactcagatagcagcaccactaagggcgctggaccggttttcgatcg

SEQ ID NO: 248406 - DNA, 60 bp, Artificial
  Synthetic oligonucleotide
gagccatccggcgatatcactgttcgcggtctcccgtgacacggagacgtgctgctcggg

SEQ ID NO: 248407 - DNA, 56 bp, Artificial
  Synthetic oligonucleotide
gagccggatcgcgggcccggcttgaccacaagcccgagcttgaccagccggttaag

SEQ ID NO: 248408 - DNA, 54 bp, Artificial
  Synthetic oligonucleotide
aggctcaagagggaaaggtcggaaacgaaatcgcccgaggcgacatgaaggccg

SEQ ID NO: 248409 - DNA, 57 bp, Artificial
  Synthetic oligonucleotide
gagcgtcctgctcggtagccattcgggcggaaattcgatcctgcccgtaaacggctg

SEQ ID NO: 248410 - DNA, 60 bp, Artificial
  Synthetic oligonucleotide
gagctgccgacgcagcgggtggcgggggtggagtacctctcgtgcgagtactgcggcgag

SEQ ID NO: 248411 - DNA, 56 bp, Artificial
  Synthetic oligonucleotide
caggggacgagacccctccgtatacgctgtgtgacaaccgttcaactgtaggtgtc

SEQ ID NO: 248412 - DNA, 55 bp, Artificial
  Synthetic oligonucleotide
cagggattaggccccctgggccgttgcctttttcagctgttgtgtggggtgatcc

SEQ ID NO: 248413 - DNA, 59 bp, Artificial
  Synthetic oligonucleotide
gaggggaacggatcgggaggcacccgatgacgagcgacatcatgatgtacccgtcggaa

SEQ ID NO: 248414 - DNA, 59 bp, Artificial
  Synthetic oligonucleotide
gagtaacagaccttgatgtgaggcaaaatctccgcctcaggtcgggcacaagtccggcc

SEQ ID NO: 248415 - DNA, 56 bp, Artificial
  Synthetic oligonucleotide
cagcgagttgtgggtcactgggcccagtgacccgagcctggacacccccggccgcc

SEQ ID NO: 248416 - DNA, 54 bp, Artificial
  Synthetic oligonucleotide
gagtaaccgtctgggtctgctcgttccggcggtacccccgtccggatgccacac

SEQ ID NO: 248417 - DNA, 60 bp, Artificial
  Synthetic oligonucleotide
gagtgtagtgcttgcgattccttaagtgtagtgctctacttaagcccagaggggccacca

SEQ ID NO: 248418 - DNA, 58 bp, Artificial
  Synthetic oligonucleotide
gagttcgcatcccccgcgcagatccgggtctactgcaacaccctccgcgcggccgccg

SEQ ID NO: 248419 - DNA, 60 bp, Artificial
  Synthetic oligonucleotide
aggcgccttagtgcgcagtccagttgctgcgacgcacgccgtcgggctgcgaacccctct

SEQ ID NO: 248420 - DNA, 59 bp, Artificial
  Synthetic oligonucleotide
cagagctccgacgcaccaagcccctcttcgcgggcctcatcgacacgtacgacacgtac

SEQ ID NO: 248421 - DNA, 58 bp, Artificial
  Synthetic oligonucleotide
gatcctggcactacgtgggctggtgtgtctcaccgacccgccagaacgcccctggggc

SEQ ID NO: 248422 - DNA, 59 bp, Artificial
  Synthetic oligonucleotide
gatgtaggtcgtgtgggctcggacgccccgcaccgagtgaatcgaagtgagcgagggta

SEQ ID NO: 248423 - DNA, 60 bp, Artificial
  Synthetic oligonucleotide
gattcgctctgttttgaggagcttgggggctgctgctgcgaggttgccgtcataccagct

SEQ ID NO: 248424 - DNA, 60 bp, Artificial
  Synthetic oligonucleotide
cacgtcacacggcgtgtgaagagggccgcacaccgcctcgcacaccgtgcgcacagccgg

SEQ ID NO: 248425 - DNA, 53 bp, Artificial
  Synthetic oligonucleotide
gcaacgaacgcccccttcgccccagttcgcccggggggaccgtcacagatctg

SEQ ID NO: 248426 - DNA, 55 bp, Artificial
  Synthetic oligonucleotide
cacgggaccgtgcccgccgcatacgggcacggcccctccggtccgcagaccagaa

SEQ ID NO: 248427 - DNA, 60 bp, Artificial
  Synthetic oligonucleotide
cacgaggctgctctccactcagctgatcttggacgccagcagtatgtcaaccacgccgac

SEQ ID NO: 248428 - DNA, 57 bp, Artificial
  Synthetic oligonucleotide
gcacgggacggcggtggggtggcaagatcgcaccccacaaatgcaacgagccagggt

SEQ ID NO: 248429 - DNA, 60 bp, Artificial
  Synthetic oligonucleotide
cacctcccgcacagccgcacatcccccgcacacccgcacagcgcggtatccccacatcag

SEQ ID NO: 248430 - DNA, 60 bp, Artificial
  Synthetic oligonucleotide
gctctatcagtcagcgatgggcgagcacaagcgatcaacacgaatagagctatcgctatt

SEQ ID NO: 248431 - DNA, 56 bp, Artificial
  Synthetic oligonucleotide
aggccagggggcttaatccctgacctctccggtgagcccgcccaatccgctgctta

SEQ ID NO: 248432 - DNA, 59 bp, Artificial
  Synthetic oligonucleotide
gcagtcctctggacgatcaccacgcttccccgcgtccgcaagtgcggtcggacgaccaa

SEQ ID NO: 248433 - DNA, 60 bp, Artificial
  Synthetic oligonucleotide
gcatccatgaggtcgctcagccggtccgcggccgtgtgccgggcagtgaacgtcaccagg

SEQ ID NO: 248434 - DNA, 54 bp, Artificial
  Synthetic oligonucleotide
caccccgtgacccaatcccggaagccctcggaagtcgtctatctcttaggagcc

SEQ ID NO: 248435 - DNA, 54 bp, Artificial
  Synthetic oligonucleotide
cacccccgctgaacgcaaggcccggcctcccgcctggcagctacgggccgggcc

SEQ ID NO: 248436 - DNA, 60 bp, Artificial
  Synthetic oligonucleotide
gcatccggagctggccgtcacatcggctgctgacgtccccataacgtcacgatgtccact

SEQ ID NO: 248437 - DNA, 56 bp, Artificial
  Synthetic oligonucleotide
ctgtccgcggggcgggccttcgtggtggatggtcagaccgtgtactcgtaaatgga

SEQ ID NO: 248438 - DNA, 60 bp, Artificial
  Synthetic oligonucleotide
ctgttcttccggcgcacggacctgagcaggttcttcttgacgagcttgcgcttggtcctc

SEQ ID NO: 248439 - DNA, 54 bp, Artificial
  Synthetic oligonucleotide
cttccgttgcgatcgggggttccggcccgctttcgttctgtggtgctagatccg

SEQ ID NO: 248440 - DNA, 58 bp, Artificial
  Synthetic oligonucleotide
cttcctgatcccagacaccccatacaccgcaggtcacgaccccctacaggggcatcac

SEQ ID NO: 248441 - DNA, 60 bp, Artificial
  Synthetic oligonucleotide
ccccgtcactccgtccatacagcgccgagagaggagaccgcacacatggcacagaaggcc

SEQ ID NO: 248442 - DNA, 60 bp, Artificial
  Synthetic oligonucleotide
ggccctctgaaaagaccacacgaattcagcgctcggggagacacggaatgtcagcgattc

SEQ ID NO: 248443 - DNA, 56 bp, Artificial
  Synthetic oligonucleotide
cttcgcacatacgaacggaactcgttgggggtcacgactctcgttgctaacgagag

SEQ ID NO: 248444 - DNA, 54 bp, Artificial
  Synthetic oligonucleotide
ccccggggaacaccccaatcggtacgtcgatcggtacatgggtcgatgcgtcga

SEQ ID NO: 248445 - DNA, 55 bp, Artificial
  Synthetic oligonucleotide
cttggtcctctggaccgtactgcgggaggtcccacagtcgtccacgagccggtcc

SEQ ID NO: 248446 - DNA, 60 bp, Artificial
  Synthetic oligonucleotide
cccccggaagtgcacatgatgcattactgatgcaatatgcgcatgtttcggttagggtgt

SEQ ID NO: 248447 - DNA, 60 bp, Artificial
  Synthetic oligonucleotide
ccccatgatggcacgtattcgtcccgtgttgaacagaacgtgctaagtgatcaacgcgct

SEQ ID NO: 248448 - DNA, 57 bp, Artificial
  Synthetic oligonucleotide
gaagccgaaggaggccgactcgaacttgctgggcacgggatcgcacctcaccttcct

SEQ ID NO: 248449 - DNA, 60 bp, Artificial
  Synthetic oligonucleotide
gaagtcgcgtcacctatgcgtgtgacacgcggactaagcggctgtttttcggagtggtga

SEQ ID NO: 248450 - DNA, 56 bp, Artificial
  Synthetic oligonucleotide
ccccactcgcgtgaaaggccttctcttagagcgtccgccagtaggcgttgcgttgg

SEQ ID NO: 248451 - DNA, 55 bp, Artificial
  Synthetic oligonucleotide
ccccaaaatcttgggggcgagccctccgcaaggagtaccggcactgaattgtggc

SEQ ID NO: 248452 - DNA, 60 bp, Artificial
  Synthetic oligonucleotide
cccattccagagttcatccaggccagcactctgaagcacagcggaagagtgcccctcgca

SEQ ID NO: 248453 - DNA, 60 bp, Artificial
  Synthetic oligonucleotide
ggccggacttgtgcccgacctgaggcggagattttgcctcacatcaaggtctgttactca

SEQ ID NO: 248454 - DNA, 52 bp, Artificial
  Synthetic oligonucleotide
cccagggcggcgtggcactgggggaaccgagtactcgggaaccgtggccgcc

SEQ ID NO: 248455 - DNA, 60 bp, Artificial
  Synthetic oligonucleotide
gaattcctccctgcggtttgcagttggggctcagccactcgggtggcgtatcctgctcgc

SEQ ID NO: 248456 - DNA, 60 bp, Artificial
  Synthetic oligonucleotide
gacataggggaggggcgcgaccagttcccagcgggcgtcatcgccacggctgagcaggta

SEQ ID NO: 248457 - DNA, 60 bp, Artificial
  Synthetic oligonucleotide
ccatcgcgacaccgtacaagcaagcggccgatcacttctatgaggaggcgagtaagcacg

SEQ ID NO: 248458 - DNA, 58 bp, Artificial
  Synthetic oligonucleotide
ccatccgcccctaattcgcgaggcttcatctatttctggccgctgtataccgggacgc

SEQ ID NO: 248459 - DNA, 59 bp, Artificial
  Synthetic oligonucleotide
ccagtcacgcagcgtagcaagcacgactacagcgggtaatccggacgcgggctttagta

SEQ ID NO: 248460 - DNA, 59 bp, Artificial
  Synthetic oligonucleotide
ccaggtccgggggtgtgtcggaccctgatagccgtcactgtgacagctatccggcgcga

SEQ ID NO: 248461 - DNA, 60 bp, Artificial
  Synthetic oligonucleotide
gacgccctgcgcttgagcaacagcggccatacctcctcaacgagcaacgacctacgcggt

SEQ ID NO: 248462 - DNA, 58 bp, Artificial
  Synthetic oligonucleotide
gacgcgggctttagtagtaagggaaaatctccgtccactgcaggtcagagcgctgtaa

SEQ ID NO: 248463 - DNA, 54 bp, Artificial
  Synthetic oligonucleotide
gactcgcggaggcgggctgctcccccgacgtagccgagctctcggtaccgggtt

SEQ ID NO: 248464 - DNA, 52 bp, Artificial
  Synthetic oligonucleotide
aggactggttcgggggtctctgagtccccccgtgccggactcagagaccccc

SEQ ID NO: 248465 - DNA, 58 bp, Artificial
  Synthetic oligonucleotide
ccaagacctggcgcaagcctccgcaccgtctcactcacgacggccaccgggtcaccaa

SEQ ID NO: 248466 - DNA, 55 bp, Artificial
  Synthetic oligonucleotide
ccaaccaagggactcgtctgtgtccagcgtaagggacgctttggcgtccgcaacc

SEQ ID NO: 248467 - DNA, 60 bp, Artificial
  Synthetic oligonucleotide
gacttggtgggagccgccaccttgcggaatgctgcgatgtagtccacgagattcccttcg

SEQ ID NO: 248468 - DNA, 60 bp, Artificial
  Synthetic oligonucleotide
gagaagtgatcgcccggcgtgttcctagcacgccggacgaccaccggacagaggatcgca

SEQ ID NO: 248469 - DNA, 59 bp, Artificial
  Synthetic oligonucleotide
catgttcagttctgccgggccaactgaacgcacggcgaggaccgaactgaacgtgagcc

SEQ ID NO: 248470 - DNA, 60 bp, Artificial
  Synthetic oligonucleotide
tagcgtgtgcgggctgcgtcagaccttctccagtccgtcctcgtagacggaccagatgcc

SEQ ID NO: 248471 - DNA, 60 bp, Artificial
  Synthetic oligonucleotide
tcggctcggacccacccgcaacgtcatcgctctcactcatgccgtgcacaacgagccgac

SEQ ID NO: 248472 - DNA, 60 bp, Artificial
  Synthetic oligonucleotide
acacagcgcccccgctccgatctcccacggagcgggggcgctgatctatgtgccagacgg

SEQ ID NO: 248473 - DNA, 60 bp, Artificial
  Synthetic oligonucleotide
tgggcatgagaggcctcccgtgagttgggatcgacacgatggagggcgcgagggttagcg

SEQ ID NO: 248474 - DNA, 58 bp, Artificial
  Synthetic oligonucleotide
tagccaaccgatttcgcaatagccgactcgcgcggcaattcacgaggggaaccaacaa

SEQ ID NO: 248475 - DNA, 52 bp, Artificial
  Synthetic oligonucleotide
ggcgactaaaccgctttagtcatacggtttcgaaaaaagacgcggcgctacg

SEQ ID NO: 248476 - DNA, 60 bp, Artificial
  Synthetic oligonucleotide
tgggatcagctcgactgccttagccacatcgcggtagcagctgctccccctcagcccgag

SEQ ID NO: 248477 - DNA, 60 bp, Artificial
  Synthetic oligonucleotide
tgggacgtcatgaatataccggcgggccttcggttcaagtagcagattccgtcagctgct

SEQ ID NO: 248478 - DNA, 57 bp, Artificial
  Synthetic oligonucleotide
tcggtgcttgatgtaccttcgtggcgtcggcaaggtacgttaagtacctcccgctga

SEQ ID NO: 248479 - DNA, 60 bp, Artificial
  Synthetic oligonucleotide
ttgagcgctatctagcgaccgtgaggcacccggattggtacggagcagcccggagcagcc

SEQ ID NO: 248480 - DNA, 56 bp, Artificial
  Synthetic oligonucleotide
tggcctatcgcgcaacgaacgcacccttcgccccagttcgtccgggcgcggcgtaa

SEQ ID NO: 248481 - DNA, 56 bp, Artificial
  Synthetic oligonucleotide
acaacttagcgatctattccggccacaccaacacccgtttggtacacaactcttga

SEQ ID NO: 248482 - DNA, 59 bp, Artificial
  Synthetic oligonucleotide
tcggtggagtgtcacaccgttgactttcgccgcacctctagcaagtgacggggattcca

SEQ ID NO: 248483 - DNA, 60 bp, Artificial
  Synthetic oligonucleotide
ttgcagtcggctacccactgcctcgcggggcgtcggccaagtggcctgtcacaccagcga

SEQ ID NO: 248484 - DNA, 57 bp, Artificial
  Synthetic oligonucleotide
tacttccgggcgatcgtccgcagcgtctcaatgacgtcctggtagtccccctcgccc

SEQ ID NO: 248485 - DNA, 60 bp, Artificial
  Synthetic oligonucleotide
ttgcgctacacaaaccgtcacccgatcggtagccaactcgaagaagctcactgctaggag

SEQ ID NO: 248486 - DNA, 60 bp, Artificial
  Synthetic oligonucleotide
agcttccgtttggccatcagaggctagcgcacacctcgtcctggcagcaccctcagcaac

SEQ ID NO: 248487 - DNA, 50 bp, Artificial
  Synthetic oligonucleotide
tggcccgcccgggaggtgtcgtttccgcgcccccgggaggtgtcgtttcc

SEQ ID NO: 248488 - DNA, 60 bp, Artificial
  Synthetic oligonucleotide
aagcaacggctgtcagagtcagaacccgcctcgcgtacgcgatatgtaactaagcgtgcg

SEQ ID NO: 248489 - DNA, 60 bp, Artificial
  Synthetic oligonucleotide
ttgcggaccagtcacgcagcgtagcaagcacgactacagcgggtaatccggacgcgggct

SEQ ID NO: 248490 - DNA, 59 bp, Artificial
  Synthetic oligonucleotide
tgcgttgtgccctgggtcgcgtcctggattccggcctgagtcacgtcctgggtcgcacc

SEQ ID NO: 248491 - DNA, 57 bp, Artificial
  Synthetic oligonucleotide
acaaacggcggggacatttcaatatcaccagcgttcgtcactttcggcacttcgcgc

SEQ ID NO: 248492 - DNA, 58 bp, Artificial
  Synthetic oligonucleotide
aaagcggacacccccctgagcagccgaaacgctcgattcctgatccacgcgacgagac

SEQ ID NO: 248493 - DNA, 60 bp, Artificial
  Synthetic oligonucleotide
ttgcggagtgccacgatgggctcctgtctctgcggagatggagcgcgggacgaccgaacc

SEQ ID NO: 248494 - DNA, 60 bp, Artificial
  Synthetic oligonucleotide
aagcccgcggttggtccgccagcagtcgagccgcacccatcgcctgccctcggctgtcgc

SEQ ID NO: 248495 - DNA, 55 bp, Artificial
  Synthetic oligonucleotide
tcgtccggctaagcgtaccggggctggacgactgtgttgcggtccgtctacggcc

SEQ ID NO: 248496 - DNA, 55 bp, Artificial
  Synthetic oligonucleotide
tcgtgaaatgcgggctgctgttcccccggggaacaccccaatcggtacgtcgatc

SEQ ID NO: 248497 - DNA, 59 bp, Artificial
  Synthetic oligonucleotide
agctgctccctctcagcccaggacgggcggtgcggtcgccttacgcgcccgtctgtgtc

SEQ ID NO: 248498 - DNA, 57 bp, Artificial
  Synthetic oligonucleotide
tctagggagtcgaatgcctgggtgctccagggatcgttggtaagacgaccacgggtc

SEQ ID NO: 248499 - DNA, 55 bp, Artificial
  Synthetic oligonucleotide
tgcgtaggacccacgaagcaacgtcgtccgagacggacccttgcgaggtctcccg

SEQ ID NO: 248500 - DNA, 60 bp, Artificial
  Synthetic oligonucleotide
accggccaacgagacaaatataccgcactagtgccacattctgaaggggtgacgcgatca

SEQ ID NO: 248501 - DNA, 60 bp, Artificial
  Synthetic oligonucleotide
aaagccaccgttcagacatgcgtgatccacttgatccgtgcctcgctgagattcgcctcc

SEQ ID NO: 248502 - DNA, 60 bp, Artificial
  Synthetic oligonucleotide
aatggtgcgtgcctccttgattgccgcaggcaattcgatcccaaggagctgagcgtcctg

SEQ ID NO: 248503 - DNA, 57 bp, Artificial
  Synthetic oligonucleotide
tcccgccacttgggcgccattgagtgtccccttcctaacggaatcaactttcgcata

SEQ ID NO: 248504 - DNA, 54 bp, Artificial
  Synthetic oligonucleotide
tcccggtgccactgcggaacccccatcgaacgcatcccgggcaagcgtccccgg

SEQ ID NO: 248505 - DNA, 60 bp, Artificial
  Synthetic oligonucleotide
tccattgagaggagcacgacccatgaacgtcatcgttgctggtcagaggatcgttacccg

SEQ ID NO: 248506 - DNA, 60 bp, Artificial
  Synthetic oligonucleotide
ttaagtacctagtggcggactgatgtgtaccttcgtccgagaggtgagtcatggcaacca

SEQ ID NO: 248507 - DNA, 51 bp, Artificial
  Synthetic oligonucleotide
tgttttacgtgacagctacgttcggaacccgttcgtcttgacgggaggggt

SEQ ID NO: 248508 - DNA, 53 bp, Artificial
  Synthetic oligonucleotide
ggcggtagacctcggtaggtcataccaaaacggacataaagcgtccacgaggg

SEQ ID NO: 248509 - DNA, 60 bp, Artificial
  Synthetic oligonucleotide
ttcactctccggacctatacgcacctcatgccgagcagcgaggggcgcacacggaaggcc

SEQ ID NO: 248510 - DNA, 58 bp, Artificial
  Synthetic oligonucleotide
tccatagcgataggggtggcgaaaacggtcgtgtgcgcccccgcacgccaatccaagc

SEQ ID NO: 248511 - DNA, 60 bp, Artificial
  Synthetic oligonucleotide
ttcagagtgggaacagtgggaaccaacctctactcatgcgcatagggatgccagctttta

SEQ ID NO: 248512 - DNA, 57 bp, Artificial
  Synthetic oligonucleotide
tccaagtacggaccgaacccgcgatcagacaccacgttccgcgccgttatgaggctg

SEQ ID NO: 248513 - DNA, 54 bp, Artificial
  Synthetic oligonucleotide
tgtgggcactcggccccctttcttggtctcggaggggtccccgccgatcagctt

SEQ ID NO: 248514 - DNA, 60 bp, Artificial
  Synthetic oligonucleotide
tcatgaccccggcttgaggagcgttgcggagatggccaccacagcgacggcgatcgtgag

SEQ ID NO: 248515 - DNA, 56 bp, Artificial
  Synthetic oligonucleotide
ttcattgagataaggggcggttcctcggagctaagcggcggaaaagagcctcttag

SEQ ID NO: 248516 - DNA, 58 bp, Artificial
  Synthetic oligonucleotide
ttccgacctatcaaatcccaccagcaccgggcgtatcggacgtctatcggcgcgtcag

SEQ ID NO: 248517 - DNA, 60 bp, Artificial
  Synthetic oligonucleotide
tcagcttcggctgacaccccctgacctgcactaacacccctgacacccacacacgtcaac

SEQ ID NO: 248518 - DNA, 51 bp, Artificial
  Synthetic oligonucleotide
aacgcgtccgggctccgtccgggccgccgcactcccccaaaccggtatata

SEQ ID NO: 248519 - DNA, 57 bp, Artificial
  Synthetic oligonucleotide
agcgttctccgccgggtagggcacgcccggcatccacgtgctcaccgtgtcccgcag

SEQ ID NO: 248520 - DNA, 58 bp, Artificial
  Synthetic oligonucleotide
ttcctccggtggctcaccggctgcatgacgctcgccctcaacgtgggggactccgccc

SEQ ID NO: 248521 - DNA, 52 bp, Artificial
  Synthetic oligonucleotide
tcctccgcccgtccggctcttcagggtcgtacgggcggggtcgaggggagcc

SEQ ID NO: 248522 - DNA, 60 bp, Artificial
  Synthetic oligonucleotide
tcaccaaggccgctgactcgctgcacctggctctcgacacgcacctcaaccccgacgact

SEQ ID NO: 248523 - DNA, 60 bp, Artificial
  Synthetic oligonucleotide
tgtcgtagtcgctgtcgtcgcaccagtctcgctcagtcatgacacccccgctccgagaat

SEQ ID NO: 248524 - DNA, 55 bp, Artificial
  Synthetic oligonucleotide
ttcgcacgggatttcccctgtagggacgactagatgttcacggttccggatccgc

SEQ ID NO: 248525 - DNA, 60 bp, Artificial
  Synthetic oligonucleotide
ttcgcgctccggagcaccgtgagcactcaaccggcagtcctgggaggcgcgttgtgctgg

SEQ ID NO: 248526 - DNA, 58 bp, Artificial
  Synthetic oligonucleotide
tcaactccggcggcacgggaatgggtgcctggctgtggcaccgggccaagccgtacac

SEQ ID NO: 248527 - DNA, 55 bp, Artificial
  Synthetic oligonucleotide
tcaacaacccgtctaaccgtgccatcatgagtcgtccggaaccacccggaaactc

SEQ ID NO: 248528 - DNA, 56 bp, Artificial
  Synthetic oligonucleotide
tgtcaggaagaggcgttaggacccccgtcagggggcgataggggcgctgatagaac

SEQ ID NO: 248529 - DNA, 60 bp, Artificial
  Synthetic oligonucleotide
tccttgaagtcctgctgtcacgtacaggctaggccattgccttgacattggcctaccgct

SEQ ID NO: 248530 - DNA, 55 bp, Artificial
  Synthetic oligonucleotide
agcgtccgcaaggccccctcggacgtccggctgcccctcaccatggagcggtacg

SEQ ID NO: 248531 - DNA, 60 bp, Artificial
  Synthetic oligonucleotide
tatcgctattgactcggcgttgccgcatggtctctacttggcgatagcgatagccctaac

SEQ ID NO: 248532 - DNA, 60 bp, Artificial
  Synthetic oligonucleotide
tgtaacacctggccccgtcactccgtccatacagcgccgagagaggagaccgcacacatg

SEQ ID NO: 248533 - DNA, 60 bp, Artificial
  Synthetic oligonucleotide
tagcttctctcgctcccctcgggggctagggatgctcatgtggccgaacattactaggcc

SEQ ID NO: 248534 - DNA, 60 bp, Artificial
  Synthetic oligonucleotide
tcgcagcttgtgtccccacatgtgaactcgtgaaatgcgggctgctgttcccccggggaa

SEQ ID NO: 248535 - DNA, 60 bp, Artificial
  Synthetic oligonucleotide
tcgcatactcccaggactattgacattcccaggactgcatgtcacagtctcctcaagccg

SEQ ID NO: 248536 - DNA, 60 bp, Artificial
  Synthetic oligonucleotide
aaggacgcgtactgcgttgcacctgggcgagtagcagtcccccttgcagggtggcgagca

SEQ ID NO: 248537 - DNA, 59 bp, Artificial
  Synthetic oligonucleotide
gttgccgtgtgaaccgcaatggtagggactgccagcgtgtacacgctgtccaaccggac

SEQ ID NO: 248538 - DNA, 53 bp, Artificial
  Synthetic oligonucleotide
aaacggccaggggtcctaatccctgaccgcttctgacgtccacccggctacca

SEQ ID NO: 248539 - DNA, 60 bp, Artificial
  Synthetic oligonucleotide
gttgatccgactcgcgcagatggcccgggccatcggtatccatctggagatctgcgggca

SEQ ID NO: 248540 - DNA, 51 bp, Artificial
  Synthetic oligonucleotide
accgtcggccagtggtcagtcgaaggtatacccgccccccttccgaaccga

SEQ ID NO: 248541 - DNA, 60 bp, Artificial
  Synthetic oligonucleotide
atatcctcgtgttgcagcgtcgttctgatcggaagtggtgaggctccgtgagcagctctt

SEQ ID NO: 248542 - DNA, 56 bp, Artificial
  Synthetic oligonucleotide
gcccctgaccgcttctgacgtccgcccggataccaaccaagggactcgtctgttga

SEQ ID NO: 248543 - DNA, 60 bp, Artificial
  Synthetic oligonucleotide
aaaatgcgtcatcctcatgagaccacagagggttctgagctacagagcccacggcgaacg

SEQ ID NO: 248544 - DNA, 54 bp, Artificial
  Synthetic oligonucleotide
tgcacggtcgggcacaccgtccgtagggcccgaagagggctcaccaacgggtta

SEQ ID NO: 248545 - DNA, 52 bp, Artificial
  Synthetic oligonucleotide
aaaccgccctcgcaaaagacctctttggtcaaccgccattccggaggtactg

SEQ ID NO: 248546 - DNA, 60 bp, Artificial
  Synthetic oligonucleotide
tcttgaagctcagccccattgaagggagttgtcgccctctgacgctagccactctccgcc

SEQ ID NO: 248547 - DNA, 56 bp, Artificial
  Synthetic oligonucleotide
aagcgtaagcgggtcataaggcagaggacggtccccgcccgctacatctgggatta

SEQ ID NO: 248548 - DNA, 54 bp, Artificial
  Synthetic oligonucleotide
tgccgcgggggatgcggtcctggtcctcaacgaggggtcggagagccggttacc

SEQ ID NO: 248549 - DNA, 56 bp, Artificial
  Synthetic oligonucleotide
tcttaggacgaaggccgtgtgcggcccgtagagaaccccgcacggatctgactacc

SEQ ID NO: 248550 - DNA, 60 bp, Artificial
  Synthetic oligonucleotide
aagcgggcatgtagtgctcgattgacccgtgtctcatgagacacaccggaatgcatgtag

SEQ ID NO: 248551 - DNA, 48 bp, Artificial
  Synthetic oligonucleotide
tctgttcggggtgttcgcccccggccgggggcgaacccggagaggggg

SEQ ID NO: 248552 - DNA, 60 bp, Artificial
  Synthetic oligonucleotide
tctgtgtcgaagtcatgcgagcaccctacagaggaactcggctttggtacacaacttagc

SEQ ID NO: 248553 - DNA, 55 bp, Artificial
  Synthetic oligonucleotide
gcccgcgatccggctcttaccagctgaaccccctccgatactgggagggagccgg

SEQ ID NO: 248554 - DNA, 56 bp, Artificial
  Synthetic oligonucleotide
aatagaatgacacgggctcctgacacggcactgccgtgttaaagaccgggcgaggt

SEQ ID NO: 248555 - DNA, 53 bp, Artificial
  Synthetic oligonucleotide
gttcgcattcgtacgctacgtgggccgacaggcgtaccggtccgcgcgggggg

SEQ ID NO: 248556 - DNA, 60 bp, Artificial
  Synthetic oligonucleotide
aagttatcgcgagagcaatgctctcgcgggcgctcgttggggcgagcaagttatccgctt

SEQ ID NO: 248557 - DNA, 60 bp, Artificial
  Synthetic oligonucleotide
tctgtgtgagtgctcgaacgcttggcgtgaccggagaaacctaacgttgcacacgctttg

SEQ ID NO: 248558 - DNA, 60 bp, Artificial
  Synthetic oligonucleotide
gtgtccccgtgtctcacgccgtgtcgcagcttgtgtccccacatgtgaactcgtgaaatg

SEQ ID NO: 248559 - DNA, 60 bp, Artificial
  Synthetic oligonucleotide
tgagtggagccacgatgttctgcattcagcggcgatgtatgccatcgggtggactccact

SEQ ID NO: 248560 - DNA, 55 bp, Artificial
  Synthetic oligonucleotide
taactggtaccagttacctataactcgcttccgctccctactgcgagaagccccg

SEQ ID NO: 248561 - DNA, 55 bp, Artificial
  Synthetic oligonucleotide
ttgcgggtaacccacctggccctatgccaggcgggtgcctgtggttttgggttgc

SEQ ID NO: 248562 - DNA, 58 bp, Artificial
  Synthetic oligonucleotide
accggctccccgggctccatgcagatccatctcgacccgatcctcaccccgcccctgc

SEQ ID NO: 248563 - DNA, 56 bp, Artificial
  Synthetic oligonucleotide
aaactgacgccctgactgccccgtacgactccaatagagcagggcgacaaccccaa

SEQ ID NO: 248564 - DNA, 60 bp, Artificial
  Synthetic oligonucleotide
gcccgtctgatcgaatatcttgctccgccctctgcgccggtagatgccgacagcgagttg

SEQ ID NO: 248565 - DNA, 56 bp, Artificial
  Synthetic oligonucleotide
tgacctgcggacaaaccggatagagagtgactaaccgtcaaccacaaaggcccggc

SEQ ID NO: 248566 - DNA, 50 bp, Artificial
  Synthetic oligonucleotide
taaccccacgaagggacccccacggtgggtactgtcctccctgacggtcc

SEQ ID NO: 248567 - DNA, 60 bp, Artificial
  Synthetic oligonucleotide
tgacccatctggtggtagtcccacacgcgtcgggcgtctgcccaatcctgtgtcgagatc

SEQ ID NO: 248568 - DNA, 59 bp, Artificial
  Synthetic oligonucleotide
aatgaacacagatggaactcgtgagaccgctctacgcgcgcgcggaccggtgtaacacc

SEQ ID NO: 248569 - DNA, 60 bp, Artificial
  Synthetic oligonucleotide
ttgtgcttaggagctatttccacagctgcggtcagccgtgccctccgattctggaggtgc

SEQ ID NO: 248570 - DNA, 55 bp, Artificial
  Synthetic oligonucleotide
tctctgccgacccccggggcgcggtgtccgtgaggttcccgcgactgctggaaac

SEQ ID NO: 248571 - DNA, 57 bp, Artificial
  Synthetic oligonucleotide
ttgggctcggaagccctgagggtgtgatgaagggtggcgcgtggggggtgttgctgg

SEQ ID NO: 248572 - DNA, 52 bp, Artificial
  Synthetic oligonucleotide
gtttgtcggagcgcggtacacccccgaaggtacatcaatgacccccccaagg

SEQ ID NO: 248573 - DNA, 60 bp, Artificial
  Synthetic oligonucleotide
aatctgcggtgcgttctgtactgctcatgagtgcgcgcgaggcatgattcaaaagtgtca

SEQ ID NO: 248574 - DNA, 55 bp, Artificial
  Synthetic oligonucleotide
aaggtacgttaagtacctcccgctgactgatgcgtaccttcggcaagagagggtc

SEQ ID NO: 248575 - DNA, 57 bp, Artificial
  Synthetic oligonucleotide
caacccgtcatgtcgaaggtacatcaatgaccctccgaaggtacatccttgccgttg

SEQ ID NO: 248576 - DNA, 55 bp, Artificial
  Synthetic oligonucleotide
tgacccgaagggagaaccacccgtgcctgcctaccgccgcttccgtgacgtggtc

SEQ ID NO: 248577 - DNA, 55 bp, Artificial
  Synthetic oligonucleotide
tcacgtgacgaaacggtgcgcctcccggatcccccagctagtcggccggtggtgg

SEQ ID NO: 248578 - DNA, 56 bp, Artificial
  Synthetic oligonucleotide
tgtagcggcccgttacaggccctagacggccgtctgagggcctgtcacggcctccg

SEQ ID NO: 248579 - DNA, 57 bp, Artificial
  Synthetic oligonucleotide
acgactcccccacgactgaccgaaactccccacgtcaggacccacgatgagcgctca

SEQ ID NO: 248580 - DNA, 59 bp, Artificial
  Synthetic oligonucleotide
tcgagtacagtcccgggtatgacgacgcctcaccccgaacgcctgagactcgtgatgta

SEQ ID NO: 248581 - DNA, 52 bp, Artificial
  Synthetic oligonucleotide
aggggttgcgtatacggggttgtgggatctctcttttacggtctgccggccg

SEQ ID NO: 248582 - DNA, 55 bp, Artificial
  Synthetic oligonucleotide
gtgtaactaagccgtgtagatcggcgtaacgttctcggtcgacgtaatttcgcgc

SEQ ID NO: 248583 - DNA, 55 bp, Artificial
  Synthetic oligonucleotide
agggttctaccaagtcctgggttgtgttcgccttggtagcgctcctagttggcga

SEQ ID NO: 248584 - DNA, 59 bp, Artificial
  Synthetic oligonucleotide
acaagacgactcacgctcgtgcactatggcgataccgaccttccatatggatcaacgca

SEQ ID NO: 248585 - DNA, 54 bp, Artificial
  Synthetic oligonucleotide
acggccgaagcatgaccacatcacaagtaaagcgttggtaaaacgttcggggtg

SEQ ID NO: 248586 - DNA, 60 bp, Artificial
  Synthetic oligonucleotide
caaccaatggcaaaagacgcgggctcgtcatgaccacgagattagtcctattcaggcgga

SEQ ID NO: 248587 - DNA, 55 bp, Artificial
  Synthetic oligonucleotide
tctcacggccggcagaccgtaaaagagagatcccacaaccccgtatacgcaaccc

SEQ ID NO: 248588 - DNA, 59 bp, Artificial
  Synthetic oligonucleotide
acgcgtgagaggccggacttgtgcccgacctgaggcggagattttgcctcacatcaagg

SEQ ID NO: 248589 - DNA, 59 bp, Artificial
  Synthetic oligonucleotide
ccttgatgtgaggcaaaatctccgcctcaggtcgggcacaagtccggcctctcacgcgt

SEQ ID NO: 248590 - DNA, 54 bp, Artificial
  Synthetic oligonucleotide
cggagtaccggagtgccgaattcacgcactccggtacttccggagtctgttagt

SEQ ID NO: 248591 - DNA, 59 bp, Artificial
  Synthetic oligonucleotide
cggaggaggtctcgccgggcgcgtagcgcatcccgttcttctccatgcgcttcaagcgg

SEQ ID NO: 248592 - DNA, 58 bp, Artificial
  Synthetic oligonucleotide
ggatctccaaggcatcgcaccaggaattgatagaacgccacagatcagcactggtgga

SEQ ID NO: 248593 - DNA, 57 bp, Artificial
  Synthetic oligonucleotide
ccatggtcttgacatgggctagcggctaggccactttgttcccacggtcagtttacc

SEQ ID NO: 248594 - DNA, 58 bp, Artificial
  Synthetic oligonucleotide
cactcgccacgccacgagacgtgccgcgtacggtcgtcggtcatgagcacagagacac

SEQ ID NO: 248595 - DNA, 58 bp, Artificial
  Synthetic oligonucleotide
cggctgtcgccacccggcatgaccagtccaggacgaggctgccgagccccttcccggc

SEQ ID NO: 248596 - DNA, 56 bp, Artificial
  Synthetic oligonucleotide
gaccacggcagacagagagaggaccccccgaccatgacgacccccgttcagctccc

SEQ ID NO: 248597 - DNA, 60 bp, Artificial
  Synthetic oligonucleotide
gcccgtggaagtcgtcagcggtggcgagcatggctccgtggatggcgatcacagcgtcct

SEQ ID NO: 248598 - DNA, 54 bp, Artificial
  Synthetic oligonucleotide
agtccggggcaacatccgctcactcgaagtcacttacggaactcgtaacggttg

SEQ ID NO: 248599 - DNA, 55 bp, Artificial
  Synthetic oligonucleotide
accgacgaactgcacgtgtccggaaactggcaggcagtgtttcccgaaggccgcg

SEQ ID NO: 248600 - DNA, 58 bp, Artificial
  Synthetic oligonucleotide
tcctcgtacacacagccgtacagcactatgtgcaccgccgagcccacagagcccctca

SEQ ID NO: 248601 - DNA, 52 bp, Artificial
  Synthetic oligonucleotide
ggtagggcggtagaaaccgcaggtcagcccgcgccctaccgccctccctacc

SEQ ID NO: 248602 - DNA, 55 bp, Artificial
  Synthetic oligonucleotide
gctagcggctaggccactttgttcccacggtcagtttaccggccgtgacggggca

SEQ ID NO: 248603 - DNA, 58 bp, Artificial
  Synthetic oligonucleotide
tcgggacgtgtcgttacccccctgccctagcacattgtgtgctagggtcagcgaagca

SEQ ID NO: 248604 - DNA, 55 bp, Artificial
  Synthetic oligonucleotide
gctgtttcccaaatttgggaaacaggggaccgctacgctgcctcccgtacgcgca

SEQ ID NO: 248605 - DNA, 57 bp, Artificial
  Synthetic oligonucleotide
gtgatcggcggggcgaggccatgaaagggggccattacacttgtaccaatggagagg

SEQ ID NO: 248606 - DNA, 56 bp, Artificial
  Synthetic oligonucleotide
ctgcacttcaggccgttgttacggccttcccgtctgacgccgagccgtcggacgcg

SEQ ID NO: 248607 - DNA, 58 bp, Artificial
  Synthetic oligonucleotide
tatttctgttgggcggcgttcgggcgacctcctgactgcgccgatgggtgtctgatgg

SEQ ID NO: 248608 - DNA, 55 bp, Artificial
  Synthetic oligonucleotide
gcccgtgtcacaaccgggccccacaccccattgggggacacgcagtcggctctaa

SEQ ID NO: 248609 - DNA, 58 bp, Artificial
  Synthetic oligonucleotide
agttcgccgctgatgatccaccggtggatcgtcttggtggagacgcggaagtgcgtgg

SEQ ID NO: 248610 - DNA, 57 bp, Artificial
  Synthetic oligonucleotide
cgatcggtacatgggtcgatgcgtcgatcggtatatgggtcggtctgttccccaggg

SEQ ID NO: 248611 - DNA, 57 bp, Artificial
  Synthetic oligonucleotide
tgcggtactgcacggtgggtcagacctccagctcgtacacgagggtgtggcggtcac

SEQ ID NO: 248612 - DNA, 57 bp, Artificial
  Synthetic oligonucleotide
cacccgcacagcgcggtatccccacatcaggcggggtgtgaattagggccgcacacc

SEQ ID NO: 248613 - DNA, 57 bp, Artificial
  Synthetic oligonucleotide
acgcatcgattcactcgaacgtatccacagactctagtgtatccagtagatctactg

SEQ ID NO: 248614 - DNA, 57 bp, Artificial
  Synthetic oligonucleotide
ctggcgagttgtacgccactgatgtacaggtggccagtctccccgcatggaaccgaa

SEQ ID NO: 248615 - DNA, 57 bp, Artificial
  Synthetic oligonucleotide
catccgcagtcctggatgatgtgcgtccagtcagggcgtgtcgggctgaggacgaag

SEQ ID NO: 248616 - DNA, 57 bp, Artificial
  Synthetic oligonucleotide
cggccctcgcttgccgagtgcggctcacggcgcggcagacgcccgcacaggacccgg

SEQ ID NO: 248617 - DNA, 57 bp, Artificial
  Synthetic oligonucleotide
atgcggcaggatctacctgtacaagtccagaaaatgccgagaggccagggggcttaa

SEQ ID NO: 248618 - DNA, 57 bp, Artificial
  Synthetic oligonucleotide
cgtgaggtgacgagtcccacgcgcttgagcacagccagagcacggctcacggtcttg

SEQ ID NO: 248619 - DNA, 54 bp, Artificial
  Synthetic oligonucleotide
caaaaagtgccaggatcacccccagcaaagcgaaacggccagggattagggccc

SEQ ID NO: 248620 - DNA, 57 bp, Artificial
  Synthetic oligonucleotide
tagaaccgcaggtcacagcggtgataggccggtctatcgggcttcttgggccgaccc

SEQ ID NO: 248621 - DNA, 57 bp, Artificial
  Synthetic oligonucleotide
agttccgcaccacgcacccggtggatctcccgccacgacctgccgcagcccagatcg

SEQ ID NO: 248622 - DNA, 53 bp, Artificial
  Synthetic oligonucleotide
agcccggtggactggtcgaaccctggaacctggcagagcgttccgtccggccg

SEQ ID NO: 248623 - DNA, 52 bp, Artificial
  Synthetic oligonucleotide
cgaaaggctccgcaatgaccacgaataaccccgagattcccgtaccggtttc

SEQ ID NO: 248624 - DNA, 57 bp, Artificial
  Synthetic oligonucleotide
ttccgttggtgaggggcgagcgtatccacctataccggcccataccagcaaatacca

SEQ ID NO: 248625 - DNA, 52 bp, Artificial
  Synthetic oligonucleotide
ggtctcggacgggggctcaatggggaggtagggcgggggcctggggtcactc

SEQ ID NO: 248626 - DNA, 56 bp, Artificial
  Synthetic oligonucleotide
atacgctagatgtggcgtaagcaagacttggcgtacacgttaaatgcccggggagc

SEQ ID NO: 248627 - DNA, 56 bp, Artificial
  Synthetic oligonucleotide
ccaggaggccagccagtgagtccggagccggaagagaaggaacccggcgtcagcgt

SEQ ID NO: 248628 - DNA, 56 bp, Artificial
  Synthetic oligonucleotide
tgctacctcaacgctggcggtgacgaactactcctgggtgacgtcagtgcgcccgg

SEQ ID NO: 248629 - DNA, 56 bp, Artificial
  Synthetic oligonucleotide
cacccccagtacagcacgtttcccctgatcagaccccgcttccggcatgcctgggc

SEQ ID NO: 248630 - DNA, 59 bp, Artificial
  Synthetic oligonucleotide
gccctggtcaacatggacaccggagaggcggtgtccgccaggccgcggactccgcacca

SEQ ID NO: 248631 - DNA, 56 bp, Artificial
  Synthetic oligonucleotide
gccgtttcacggtcaatcagaccagattaagcacggctgaggctcacccatcggac

SEQ ID NO: 248632 - DNA, 56 bp, Artificial
  Synthetic oligonucleotide
ggagatgtgggcgggcgccctcaagcgggctgaccccaagttcgagccctcgaccg

SEQ ID NO: 248633 - DNA, 56 bp, Artificial
  Synthetic oligonucleotide
tctgcttactgtcgcccatgtagtacaggggcttttggtcggccatcgaacccggg

SEQ ID NO: 248634 - DNA, 56 bp, Artificial
  Synthetic oligonucleotide
ccccgggtttcgcggtgtgggcccatcctctcatgtcgtatggcgctgcgcaatac

SEQ ID NO: 248635 - DNA, 56 bp, Artificial
  Synthetic oligonucleotide
tcctctcgtgagacccatctgaccctctgtcacccctccccgcatctcgggggaac

SEQ ID NO: 248636 - DNA, 56 bp, Artificial
  Synthetic oligonucleotide
gaccagcatccccgtagtccttcggtcgcccgcaagcccgctctacgaagtcgctc

SEQ ID NO: 248637 - DNA, 53 bp, Artificial
  Synthetic oligonucleotide
gcgtacgaactcccggcgggcgagtctgaccaacggggacctcggcaaaggcc

SEQ ID NO: 248638 - DNA, 56 bp, Artificial
  Synthetic oligonucleotide
tgcagcagctgtgcatagatctcgcgcggaacatcgcagatctgcgaacttatgca

SEQ ID NO: 248639 - DNA, 55 bp, Artificial
  Synthetic oligonucleotide
tcccgtaccgacgttcacgcattcgaatccgaagaagtagcggttgccgtccgtg

SEQ ID NO: 248640 - DNA, 56 bp, Artificial
  Synthetic oligonucleotide
gaggcggtggggctccgcatgcgctgtacaacccttcagtcgctctgcgagtcagt

SEQ ID NO: 248641 - DNA, 60 bp, Artificial
  Synthetic oligonucleotide
gccgatgtggcgatgcgagcgcatcactccgtactctggacacgagcaacgttccgttct

SEQ ID NO: 248642 - DNA, 56 bp, Artificial
  Synthetic oligonucleotide
cgacgtgcctgacgtcgactttgactccgtgagcttggacgaacgatcgagctcgc

SEQ ID NO: 248643 - DNA, 56 bp, Artificial
  Synthetic oligonucleotide
gggtaaccttcatcccgcgagcacctcccatcaaggtgtgtcgcccaacggagctt

SEQ ID NO: 248644 - DNA, 56 bp, Artificial
  Synthetic oligonucleotide
acgggcacacggaccggctcgcggacctcatggacgccttgcagggcacgcggaag

SEQ ID NO: 248645 - DNA, 56 bp, Artificial
  Synthetic oligonucleotide
cgacttgtcgtcagatatgcagctcatcgcacagccgtgcgggcctgaggtgttgt

SEQ ID NO: 248646 - DNA, 56 bp, Artificial
  Synthetic oligonucleotide
gggggcaatagcttcacgttggagctggctcctgtcctcatcctcgatcaatgagc

SEQ ID NO: 248647 - DNA, 56 bp, Artificial
  Synthetic oligonucleotide
cgagccagggccgctcaggaccgtccctcggacgctgaaccacccgcgtcagcgga

SEQ ID NO: 248648 - DNA, 56 bp, Artificial
  Synthetic oligonucleotide
gtagaagcgagacgtgggtaaaagcggccgaatacggagattggccactatcgctc

SEQ ID NO: 248649 - DNA, 55 bp, Artificial
  Synthetic oligonucleotide
gtcgcttctccggacgttcccgaacgatcgtccctcttcggcgtaccgcgatgac

SEQ ID NO: 248650 - DNA, 52 bp, Artificial
  Synthetic oligonucleotide
acccaacccgtacgagacgagagggagaaccccagtatgaactccgttccgc

SEQ ID NO: 248651 - DNA, 56 bp, Artificial
  Synthetic oligonucleotide
gttctagccgacccaaaacctcgaatcgtattgcttagcaatacgcgagtgggtat

SEQ ID NO: 248652 - DNA, 58 bp, Artificial
  Synthetic oligonucleotide
gctgcctaatctcgccgtcgtcgtacgccatcacgtgtccggggtcggtgtagatccc

SEQ ID NO: 248653 - DNA, 56 bp, Artificial
  Synthetic oligonucleotide
attacatcggggagagcgttctgacggtgcgggaagagcacgaaccgaacacggga

SEQ ID NO: 248654 - DNA, 51 bp, Artificial
  Synthetic oligonucleotide
gggagctggggagaaaatacggagaaacccgacgtatcggtcgggtggttg

SEQ ID NO: 248655 - DNA, 56 bp, Artificial
  Synthetic oligonucleotide
cggatgcgacgcttgtagacccggagctgggctcccatgagtcaggtcccttcctt

SEQ ID NO: 248656 - DNA, 54 bp, Artificial
  Synthetic oligonucleotide
cgttcaccgatccgtccgagccgccaccagacccccgcgcggtcaaactttctc

SEQ ID NO: 248657 - DNA, 56 bp, Artificial
  Synthetic oligonucleotide
cgagtactcgggaaccgtggccgcccacatgatgaccccgacgtgcgaggtgaggt

SEQ ID NO: 248658 - DNA, 49 bp, Artificial
  Synthetic oligonucleotide
cggcaaccggacccccccgacgggcccgtggttgcccggtaggccgatg

SEQ ID NO: 248659 - DNA, 56 bp, Artificial
  Synthetic oligonucleotide
tagacaggggccccgccgttctctagcagccgtcggtcgcctggtgtgctgtcacc

SEQ ID NO: 248660 - DNA, 56 bp, Artificial
  Synthetic oligonucleotide
ggggaccactcggttctctggccgaaggttgagtgatcgttcaggtctggttctct

SEQ ID NO: 248661 - DNA, 55 bp, Artificial
  Synthetic oligonucleotide
gaccccgctcacgtcgccttcacatcggtgcacgttgcgataccggtcctgtatc

SEQ ID NO: 248662 - DNA, 55 bp, Artificial
  Synthetic oligonucleotide
gacatcgttcacagcttttaaccaggtaaacactcgtacgctctaatttgtctga

SEQ ID NO: 248663 - DNA, 55 bp, Artificial
  Synthetic oligonucleotide
cgctctgacacataagcaaacggaacctcgctccggtaaacgatacggaacgccg

SEQ ID NO: 248664 - DNA, 58 bp, Artificial
  Synthetic oligonucleotide
atgtgtcctgttgcggcgagggcgataatcctccctccggagcaggccaactgaattt

SEQ ID NO: 248665 - DNA, 55 bp, Artificial
  Synthetic oligonucleotide
cggactggtttcggcgcatttggacaggatcgtggatcaccctgagcgactagag

SEQ ID NO: 248666 - DNA, 55 bp, Artificial
  Synthetic oligonucleotide
cgctgactgatgcgtaccttcggcaagagagggtctgtcgtggccacgaggaacg

SEQ ID NO: 248667 - DNA, 55 bp, Artificial
  Synthetic oligonucleotide
cgctgactggtttggatcgctcaaccgttagtcatgtcagcggaatgctgacacc

SEQ ID NO: 248668 - DNA, 55 bp, Artificial
  Synthetic oligonucleotide
tgcctacaactggtcaacgtagtcccattcactgatcccgatgatctcaactccg

SEQ ID NO: 248669 - DNA, 55 bp, Artificial
  Synthetic oligonucleotide
gacatgcttggaattctagcagcgctagcgaacatgtcgacgctatgctagcgtc

SEQ ID NO: 248670 - DNA, 55 bp, Artificial
  Synthetic oligonucleotide
tgcgccgacgtgggtgttggagccgagcagccggtcttcccagtagtccttggtg

SEQ ID NO: 248671 - DNA, 55 bp, Artificial
  Synthetic oligonucleotide
cggaaacgcggagaaagagacagtacgaccgttcctcgcaacactccacagggtg

SEQ ID NO: 248672 - DNA, 55 bp, Artificial
  Synthetic oligonucleotide
tgcgaccaggtcgtgcagaactcgcacgacgcatcgaccaaggggatgcacggct

SEQ ID NO: 248673 - DNA, 55 bp, Artificial
  Synthetic oligonucleotide
gaaccgtcctacgcgcgcgcgtgcaacggttcctcgccgtgtgctgtcggctctc

SEQ ID NO: 248674 - DNA, 55 bp, Artificial
  Synthetic oligonucleotide
gaacggcatcgggtcattattcaaacttgaccactcggtcacgctagagcaagga

SEQ ID NO: 248675 - DNA, 57 bp, Artificial
  Synthetic oligonucleotide
atgtggttggaggccacaggggccttagcgggtgccggtggtcttggctatgcgaag

SEQ ID NO: 248676 - DNA, 55 bp, Artificial
  Synthetic oligonucleotide
cggctaccacgccttttgttggttgacgcgatgagttgcactgttttcacggtct

SEQ ID NO: 248677 - DNA, 55 bp, Artificial
  Synthetic oligonucleotide
gaagcaggcccgtgggaacctcgaccgatccgtagcgccggttcgacaagaccaa

SEQ ID NO: 248678 - DNA, 55 bp, Artificial
  Synthetic oligonucleotide
tggatcacggcgactcgcaatcacagtattgcaacgcgcgaggtggattgacagc

SEQ ID NO: 248679 - DNA, 55 bp, Artificial
  Synthetic oligonucleotide
cggcgttgccgcatggtctctacttggcgatagcgatagccctaacgatccgttg

SEQ ID NO: 248680 - DNA, 55 bp, Artificial
  Synthetic oligonucleotide
cggcccgcaaactgatctttggtccagacctcttgacgattggtccagaccttcc

SEQ ID NO: 248681 - DNA, 53 bp, Artificial
  Synthetic oligonucleotide
cggcataccgcagggatcacccaacgtcaccacccgaaggcaacccgaaaagg

SEQ ID NO: 248682 - DNA, 55 bp, Artificial
  Synthetic oligonucleotide
cggatgtggcttatcgggcctcaacccgtggtcaaggcgtccaatagcgtcttcc

SEQ ID NO: 248683 - DNA, 55 bp, Artificial
  Synthetic oligonucleotide
tgcgtcgaagcggggaacggggtagttcctgacgtcgtgtcgagtggtcgtagac

SEQ ID NO: 248684 - DNA, 55 bp, Artificial
  Synthetic oligonucleotide
cggatcggaccgggtgtctcggaatgagaaggagcgtggcagtgttacggggaga

SEQ ID NO: 248685 - DNA, 55 bp, Artificial
  Synthetic oligonucleotide
gaatgcaagaggtgtgaccgttcttcgcgtgcacgcgtgtgctcgtgcacctgtg

SEQ ID NO: 248686 - DNA, 56 bp, Artificial
  Synthetic oligonucleotide
gccgggccaactgaacgcacggcgaggaccgaactgaacgtgagccgaactgaacg

SEQ ID NO: 248687 - DNA, 55 bp, Artificial
  Synthetic oligonucleotide
gaatgcggcgactggcgatgcgcaaacctcctccagggatgcgtcgggcatcggt

SEQ ID NO: 248688 - DNA, 55 bp, Artificial
  Synthetic oligonucleotide
cggatccgatcgaaacccgatcatcattggcggccttccgagtcaggttcctgac

SEQ ID NO: 248689 - DNA, 55 bp, Artificial
  Synthetic oligonucleotide
cggatcatcagacgtaccgtccactcttcgtgtccgtacgctgacttaccgtacg

SEQ ID NO: 248690 - DNA, 55 bp, Artificial
  Synthetic oligonucleotide
gacaaaccttcaatcggcgttcggggacgtgagattcgagactcctgtgcgcccc

SEQ ID NO: 248691 - DNA, 55 bp, Artificial
  Synthetic oligonucleotide
gacacggcccgcctccgtgttcataacatttcgacagagaattccggcgcagtgg

SEQ ID NO: 248692 - DNA, 55 bp, Artificial
  Synthetic oligonucleotide
gacactgacgctgagtcaactagccttgttcaagcggttctccacgagaagaacc

SEQ ID NO: 248693 - DNA, 55 bp, Artificial
  Synthetic oligonucleotide
cggaggcgatcagtgtgtggtcgcttctcgactccaccacgcatgtgaaacaggc

SEQ ID NO: 248694 - DNA, 55 bp, Artificial
  Synthetic oligonucleotide
ttggaagccgtacctgaccgctgctgtccgctccgctgggcacggatggggcacg

SEQ ID NO: 248695 - DNA, 55 bp, Artificial
  Synthetic oligonucleotide
cgccgaccctgtggaaggaaccgccctccgatgtcagagatctacaacccggacc

SEQ ID NO: 248696 - DNA, 55 bp, Artificial
  Synthetic oligonucleotide
gagacatctgtgtaatgggcatttcgtacggtcggtgagatcgattcggctgagg

SEQ ID NO: 248697 - DNA, 51 bp, Artificial
  Synthetic oligonucleotide
gccggtgcctcgatggcggggaccggggcgaccggcccccacaccgggagt

SEQ ID NO: 248698 - DNA, 55 bp, Artificial
  Synthetic oligonucleotide
cgcccgttgtgtcccgatgcgaatctccaccagatcgccgtatgtcgacaacgac

SEQ ID NO: 248699 - DNA, 55 bp, Artificial
  Synthetic oligonucleotide
gagagcagggcattcacaaaacaagccttcgtcagatacatcccttacgcccgta

SEQ ID NO: 248700 - DNA, 55 bp, Artificial
  Synthetic oligonucleotide
tgattagcggtcacctcagccgagcgccccacattccaccgggtgggcttagcag

SEQ ID NO: 248701 - DNA, 55 bp, Artificial
  Synthetic oligonucleotide
gagagcccgctcacattgtgcggtgaacgggtgtcaactacgtctcagtaccgtc

SEQ ID NO: 248702 - DNA, 55 bp, Artificial
  Synthetic oligonucleotide
gagcacacctcgaccaacaagtgattccgttgtttccttttggttacgcgacgga

SEQ ID NO: 248703 - DNA, 55 bp, Artificial
  Synthetic oligonucleotide
gagccactgggcacaagcctggaagtccctgggcgttcgctgggagtcgaatggt

SEQ ID NO: 248704 - DNA, 55 bp, Artificial
  Synthetic oligonucleotide
cgcccgaacgacggtcgcccttttagagtgatgaacgtccaggtgtgaaggcagg

SEQ ID NO: 248705 - DNA, 55 bp, Artificial
  Synthetic oligonucleotide
tgatcgtccgctactcgcggttgtgctcgaacggcgcttgggaccacttgagggg

SEQ ID NO: 248706 - DNA, 55 bp, Artificial
  Synthetic oligonucleotide
gagccgacagaccgcaactgtggacaactccactcgagtcgccgagcgatccaca

SEQ ID NO: 248707 - DNA, 55 bp, Artificial
  Synthetic oligonucleotide
cgcccaggggcggttccctttcgcacctgcgggcggcagacgacatctcgcgtac

SEQ ID NO: 248708 - DNA, 60 bp, Artificial
  Synthetic oligonucleotide
gccgtcatcgatggtggcgcgccacttcgagatggcacgggcgcctgtctcagggtcgga

SEQ ID NO: 248709 - DNA, 55 bp, Artificial
  Synthetic oligonucleotide
cgcatgaccccatgcctagagtgacaattcacaactcgtgtacgggatgggtgcg

SEQ ID NO: 248710 - DNA, 55 bp, Artificial
  Synthetic oligonucleotide
tgatccatgggtgtcaagtgttattggacgctgtggtggcactctccagtgatcg

SEQ ID NO: 248711 - DNA, 55 bp, Artificial
  Synthetic oligonucleotide
tgatcaggtacgaggaagtgctcatgtgttcttccggtcgccttcgtctctgggg

SEQ ID NO: 248712 - DNA, 55 bp, Artificial
  Synthetic oligonucleotide
cgcagagtgaataaggggcccaatagcagatctcggcttgactcgcccggagcag

SEQ ID NO: 248713 - DNA, 55 bp, Artificial
  Synthetic oligonucleotide
cgcaacatgtacttgtccagcctcgttgcgagatggccacacgaccccatgacgt

SEQ ID NO: 248714 - DNA, 55 bp, Artificial
  Synthetic oligonucleotide
gaggaactcggctttggtacacaacttagcgatctattccggccacaccaacacc

SEQ ID NO: 248715 - DNA, 55 bp, Artificial
  Synthetic oligonucleotide
tttggcacgagggtaggggaagggcgcaagggtgtagatagtgcggtccgtcacg

SEQ ID NO: 248716 - DNA, 55 bp, Artificial
  Synthetic oligonucleotide
cgctcattagtgagcttcctccaccgtgactggagagctttcgactggccggagg

SEQ ID NO: 248717 - DNA, 55 bp, Artificial
  Synthetic oligonucleotide
cgcgtgtcacgtcccgccgtccgcgtgtcacgtcccgccgtccgcgtgtcacgtc

SEQ ID NO: 248718 - DNA, 55 bp, Artificial
  Synthetic oligonucleotide
cgcgggctcgtcatgaccacgagattagtcctattcaggcggaccattccaggcg

SEQ ID NO: 248719 - DNA, 60 bp, Artificial
  Synthetic oligonucleotide
gcctccacgcaccccaccagcccagtccgctgaccgcaaccctcacacagcaagaggcgc

SEQ ID NO: 248720 - DNA, 55 bp, Artificial
  Synthetic oligonucleotide
ttggccgggacacgccacacggaggggagcggtgaccgtgcgacgggacttcaag

SEQ ID NO: 248721 - DNA, 55 bp, Artificial
  Synthetic oligonucleotide
gacccttgcggaatcatgacgctcggaagtctggtcgactctgctggagaggcac

SEQ ID NO: 248722 - DNA, 55 bp, Artificial
  Synthetic oligonucleotide
cgcgctcggtagcttcatctggtctatcgctgaccaacttcggggcccctatcgc

SEQ ID NO: 248723 - DNA, 55 bp, Artificial
  Synthetic oligonucleotide
cgcgcctcgtgcgttcacacagagaggtgacaacggttcctcgtagtgacggacc

SEQ ID NO: 248724 - DNA, 55 bp, Artificial
  Synthetic oligonucleotide
gaccgccctccgattcacactagtatttacgttcggaggtgttcgcatggcccca

SEQ ID NO: 248725 - DNA, 55 bp, Artificial
  Synthetic oligonucleotide
gaccgtaatgacgtaatgcgcacatccccttagcgcccttaggccccggcggcat

SEQ ID NO: 248726 - DNA, 55 bp, Artificial
  Synthetic oligonucleotide
gacgattactcagcggagtcgaccgtcactctccgtgccatcgggtcgacttggg

SEQ ID NO: 248727 - DNA, 55 bp, Artificial
  Synthetic oligonucleotide
cgcgaggacttgggcaccgagcgccgagacggggatttgctggtacttaaccgaa

SEQ ID NO: 248728 - DNA, 55 bp, Artificial
  Synthetic oligonucleotide
ttggcgaaggaacgcaacacgatgaagagcgaggctccgtagagccacccgtcgc

SEQ ID NO: 248729 - DNA, 55 bp, Artificial
  Synthetic oligonucleotide
cgcctaattgcttgccattctacgcctagcagggtgtagggttgaggtatgagcg

SEQ ID NO: 248730 - DNA, 60 bp, Artificial
  Synthetic oligonucleotide
atgacgcagcgcccctccacgaatgcaatccccgtcatggtccgagaccagttcctctac

SEQ ID NO: 248731 - DNA, 55 bp, Artificial
  Synthetic oligonucleotide
tgccgacgggctcagctctcacccgcccagtgtgacaccagttaggccgtcgcta

SEQ ID NO: 248732 - DNA, 55 bp, Artificial
  Synthetic oligonucleotide
cgccggactttgcatgaagcgttatggacaagtgttgaattgtgcggtcgggtgc

SEQ ID NO: 248733 - DNA, 55 bp, Artificial
  Synthetic oligonucleotide
gacgcgttacacaccatgatcaatttgtccgttatttactgggcacaatggttca

SEQ ID NO: 248734 - DNA, 55 bp, Artificial
  Synthetic oligonucleotide
gacgtgttgcgccaccccgacatgaatgctttcctaagacacgctgcagaatcag

SEQ ID NO: 248735 - DNA, 55 bp, Artificial
  Synthetic oligonucleotide
tgccccgtcacggccggtaaactgaccgtgggaacaaagtggcctagccgctagc

SEQ ID NO: 248736 - DNA, 55 bp, Artificial
  Synthetic oligonucleotide
tgcccatgaacggtcctcacggtcgtttcggttttcagtcgttgtgcagcgttcc

SEQ ID NO: 248737 - DNA, 55 bp, Artificial
  Synthetic oligonucleotide
ttggcttcgcacatgatcgcccggacaagtcctagctggccttgcgtccgtgtgg

SEQ ID NO: 248738 - DNA, 55 bp, Artificial
  Synthetic oligonucleotide
tgcagcggagcgccgttgcatgtaccgggcgccgagtcgcttcagcttgcgtcgc

SEQ ID NO: 248739 - DNA, 55 bp, Artificial
  Synthetic oligonucleotide
ctcctcatgatgtaacgcgtggaccactatagcgcgcttgcaattaacccgcgca

SEQ ID NO: 248740 - DNA, 55 bp, Artificial
  Synthetic oligonucleotide
tgtgcgtcggagccagggacaacggtgagagcgtcactatttatgccagctgggg

SEQ ID NO: 248741 - DNA, 60 bp, Artificial
  Synthetic oligonucleotide
atgaccggtcagagctggactggccatctcgatacatgtaagaggttcggctaatgatta

SEQ ID NO: 248742 - DNA, 54 bp, Artificial
  Synthetic oligonucleotide
cgtgcgtacggagcggacccttcccgacctgtggcgttagaacggctttgcaag

SEQ ID NO: 248743 - DNA, 54 bp, Artificial
  Synthetic oligonucleotide
ctcgaacactcgtcgcccagagttcaccgaggggtaggagccggttcacttagg

SEQ ID NO: 248744 - DNA, 55 bp, Artificial
  Synthetic oligonucleotide
ctcgaagacgggtatggggcatggagtcggcttgtgtcagatctcgtacaggtgg

SEQ ID NO: 248745 - DNA, 55 bp, Artificial
  Synthetic oligonucleotide
tgtgaagagggccgcacaccgcctcgcacaccgtgcgcacagccggaccgcacac

SEQ ID NO: 248746 - DNA, 55 bp, Artificial
  Synthetic oligonucleotide
ctcgcaccgatagcaacagaccggcacagctgttctacgagcaacgggaggctcc

SEQ ID NO: 248747 - DNA, 55 bp, Artificial
  Synthetic oligonucleotide
cgtgcgaatgattccggaaactctatgtgccccatgaattcacgcactgtgaatc

SEQ ID NO: 248748 - DNA, 55 bp, Artificial
  Synthetic oligonucleotide
ttcctcggagctaagcggcggaaaagagcctcttaggacgaaggccgtgtgcggc

SEQ ID NO: 248749 - DNA, 55 bp, Artificial
  Synthetic oligonucleotide
ctcggacaccagggagcaagtaacccaccggtagatatcagtgggtcaggccacc

SEQ ID NO: 248750 - DNA, 55 bp, Artificial
  Synthetic oligonucleotide
ctcggtccttcctcgggtagcatcttggtgcaagagccccttgcgctattgcgcc

SEQ ID NO: 248751 - DNA, 55 bp, Artificial
  Synthetic oligonucleotide
tgtgaacggtctgatgaaccgttccgtcgccttcggtgctccggtccagcgctct

SEQ ID NO: 248752 - DNA, 60 bp, Artificial
  Synthetic oligonucleotide
gcgatagtcatgcatggtgatgcagagtgcatcggttgcccggctgtggtaacgcgtctc

SEQ ID NO: 248753 - DNA, 55 bp, Artificial
  Synthetic oligonucleotide
ttccttccctgggcaatcctcggacgaggcagcagcattcgtggcccgccttcag

SEQ ID NO: 248754 - DNA, 55 bp, Artificial
  Synthetic oligonucleotide
ctcgttgccactcgatgagaagaggaccgatcgtgtccgcacgcactccgtccgt

SEQ ID NO: 248755 - DNA, 55 bp, Artificial
  Synthetic oligonucleotide
ctctccgtatagtagcgtccgtcaagcggagaacctctccggaatgcatggcctg

SEQ ID NO: 248756 - DNA, 55 bp, Artificial
  Synthetic oligonucleotide
ctgacgggtgtggcccgctgagttgagcgccctccactaaagtttccgtggggaa

SEQ ID NO: 248757 - DNA, 55 bp, Artificial
  Synthetic oligonucleotide
cgtgcacgtcatgaccacgaactgggttctcagcggcgagtatgcgggattcccc

SEQ ID NO: 248758 - DNA, 55 bp, Artificial
  Synthetic oligonucleotide
cgtgatggctgaagcccactgactctacctaggtaacgtgtcaatgcttgattcg

SEQ ID NO: 248759 - DNA, 55 bp, Artificial
  Synthetic oligonucleotide
ttcgcggggttttgacagtcatcccagcctccagcggtgcgtgggtgttgccctt

SEQ ID NO: 248760 - DNA, 55 bp, Artificial
  Synthetic oligonucleotide
cgtgaacgattccgaacggtaggtactgcatatgttggagcggctactccccgag

SEQ ID NO: 248761 - DNA, 55 bp, Artificial
  Synthetic oligonucleotide
ctgcacctggctctcgacacgcacctcaaccccgacgactacccggaggactgat

SEQ ID NO: 248762 - DNA, 55 bp, Artificial
  Synthetic oligonucleotide
ttacgctgtcgtccacgtaaaggcgaggaggaccagtgcggcccgtaccggatca

SEQ ID NO: 248763 - DNA, 60 bp, Artificial
  Synthetic oligonucleotide
gctgtactcgctgaacctgtccgccgctcagcactgcacgctcgcgtgggtggaggacca

SEQ ID NO: 248764 - DNA, 60 bp, Artificial
  Synthetic oligonucleotide
atctagtcgtgtgcagtggtgtctttcgagtgttggtcggagctgcgccgtctactccat

SEQ ID NO: 248765 - DNA, 55 bp, Artificial
  Synthetic oligonucleotide
ctaggggtttcaatcaccagccacccaggtagggtcaggaagcgtccagctcccc

SEQ ID NO: 248766 - DNA, 55 bp, Artificial
  Synthetic oligonucleotide
ttagcgctcacaacgcataccgacccacccttcccacccgtatcgagaggtcccc

SEQ ID NO: 248767 - DNA, 54 bp, Artificial
  Synthetic oligonucleotide
ttacctataactcgcttccgctccctactgcgagaagccccggggcccgagagg

SEQ ID NO: 248768 - DNA, 55 bp, Artificial
  Synthetic oligonucleotide
ttcaccaggtcataggtcgcaccagcgttgacggccatgtaccccagaagcccgg

SEQ ID NO: 248769 - DNA, 55 bp, Artificial
  Synthetic oligonucleotide
ctcaccggggcgggccttcgcgttgagcagatcaggcgtagtggtgctcgacggt

SEQ ID NO: 248770 - DNA, 55 bp, Artificial
  Synthetic oligonucleotide
cgttctagttgttgacacacacgacgtgttctagcactatcagagcgcggccccg

SEQ ID NO: 248771 - DNA, 55 bp, Artificial
  Synthetic oligonucleotide
ttacacctcgagacccttctgagctgcggggacacgccgaatggggcgcgtggtg

SEQ ID NO: 248772 - DNA, 51 bp, Artificial
  Synthetic oligonucleotide
ctcagccgctttcgtcgtcggaaaacgtccccaggatacgtccggggttcc

SEQ ID NO: 248773 - DNA, 55 bp, Artificial
  Synthetic oligonucleotide
cgttcgtctgcaaagtgtcggcggtggtcactggatcgaaactagtgaggacccc

SEQ ID NO: 248774 - DNA, 53 bp, Artificial
  Synthetic oligonucleotide
ttcacccgccgaaaacgcgcgcccacctgcggaaaccttgatccgttcaccgt

SEQ ID NO: 248775 - DNA, 52 bp, Artificial
  Synthetic oligonucleotide
atcgggtgcgtatagcaccacggcccctgtacgggtttcctaggcccggcgg

SEQ ID NO: 248776 - DNA, 55 bp, Artificial
  Synthetic oligonucleotide
ctccgcctcaggtcgggcacaagtccggcctctcacgcgttacgtgcgctgaaga

SEQ ID NO: 248777 - DNA, 55 bp, Artificial
  Synthetic oligonucleotide
ctccggccctgacggtcatacggaacgtggcagaggtagccgggtgcgtgatcac

SEQ ID NO: 248778 - DNA, 55 bp, Artificial
  Synthetic oligonucleotide
tgttcagcgagttcgtgagtgagtggtgcgacaagtcggcacgtaccctctcggg

SEQ ID NO: 248779 - DNA, 55 bp, Artificial
  Synthetic oligonucleotide
cgttcaccctcaggcagttgggaggcgggtcctccacggagtatcacgttggctt

SEQ ID NO: 248780 - DNA, 55 bp, Artificial
  Synthetic oligonucleotide
tgtggccggagtgcgtccctccgtggccgagaagcggcagactatgaagcccgca

SEQ ID NO: 248781 - DNA, 53 bp, Artificial
  Synthetic oligonucleotide
ctccgtcccggtctccgtcttagcccaaaccggtacataaggagtcaggcacc

SEQ ID NO: 248782 - DNA, 55 bp, Artificial
  Synthetic oligonucleotide
tgtgctccgcctatgtgcgatcttcgctgacgggcccacactatcccggtcatcc

SEQ ID NO: 248783 - DNA, 55 bp, Artificial
  Synthetic oligonucleotide
cgtgtcaaggcagtgtcctaaacacccatcactcggttagatgagtgtggacacc

SEQ ID NO: 248784 - DNA, 55 bp, Artificial
  Synthetic oligonucleotide
cgtgcttgtcagcgcgggactctagagtcgccctgtgacacttacatggagacga

SEQ ID NO: 248785 - DNA, 55 bp, Artificial
  Synthetic oligonucleotide
cttcccggaatcaacaatccgtatagtgaagttataagcccgctcgacctgcgtc

SEQ ID NO: 248786 - DNA, 60 bp, Artificial
  Synthetic oligonucleotide
gcgcgtcggtgcacgtctcgttggggctgaggagcgtgtcgttcaggcatcccgtgccgg

SEQ ID NO: 248787 - DNA, 55 bp, Artificial
  Synthetic oligonucleotide
cgtacgaggacacaccgggagatgtagcgcccctatgaaccatacaaaccgtctt

SEQ ID NO: 248788 - DNA, 55 bp, Artificial
  Synthetic oligonucleotide
tgggtcggccaggggcatgagttgttctgctcgataacgaccctttacctcggca

SEQ ID NO: 248789 - DNA, 55 bp, Artificial
  Synthetic oligonucleotide
cgtaccgcagtactacagagttgtcgctcacgtcttccctcaccgacgttgtgcc

SEQ ID NO: 248790 - DNA, 55 bp, Artificial
  Synthetic oligonucleotide
cggtttacctagtgctaccgtgctcatcaactcgttgatcatccttggaggacag

SEQ ID NO: 248791 - DNA, 55 bp, Artificial
  Synthetic oligonucleotide
tggggccgtacgggtgggagcgcggggagccagaagtaccgctccacaacaggag

SEQ ID NO: 248792 - DNA, 55 bp, Artificial
  Synthetic oligonucleotide
cttcgagtccgggtacgaagtcggacatcaggcggctcctcgtgatgtgtgcgac

SEQ ID NO: 248793 - DNA, 55 bp, Artificial
  Synthetic oligonucleotide
cggtggggcgtaatggatgcggctacgcggtccgaggagggagccaccgatgatt

SEQ ID NO: 248794 - DNA, 55 bp, Artificial
  Synthetic oligonucleotide
cggtccttgtgaaattcggcctcatcgttgacagaaaatagcccagtgatgacca

SEQ ID NO: 248795 - DNA, 55 bp, Artificial
  Synthetic oligonucleotide
cggggttgcttcttattaccgacgggtagcatcatcggagctacttgccggtacg

SEQ ID NO: 248796 - DNA, 54 bp, Artificial
  Synthetic oligonucleotide
cgggctttcggcgtagcagtacctacgactctctgtccgtaccggagccctttc

SEQ ID NO: 248797 - DNA, 56 bp, Artificial
  Synthetic oligonucleotide
gcggctcccgccatccgagccctgagtcggacgacgggaaccgccacctagtcgag

SEQ ID NO: 248798 - DNA, 55 bp, Artificial
  Synthetic oligonucleotide
cgggcccgtcgagttccggttacgctgcgttgcgaaggtcacagttcaaagcgct

SEQ ID NO: 248799 - DNA, 54 bp, Artificial
  Synthetic oligonucleotide
cgggaggtttctcgcatctccggtagaggccaccaaaaggggcgagggtcgtga

SEQ ID NO: 248800 - DNA, 55 bp, Artificial
  Synthetic oligonucleotide
cttggttccgcagagtgaataaggggcccaatagcagatctcggcttgactcgcc

SEQ ID NO: 248801 - DNA, 55 bp, Artificial
  Synthetic oligonucleotide
cgggagccgcttgacgcgcttgtacgggagtccgtacagtcttccttgtacgaag

SEQ ID NO: 248802 - DNA, 55 bp, Artificial
  Synthetic oligonucleotide
ttgagtgagtcgcacggggcaagagccagtaggctggccgtgtgaaccgtccgaa

SEQ ID NO: 248803 - DNA, 55 bp, Artificial
  Synthetic oligonucleotide
gaaaacttgatcgagtgagcggggctaggctgcgggcatgaaggtcatgctgggg

SEQ ID NO: 248804 - DNA, 53 bp, Artificial
  Synthetic oligonucleotide
gaaaaggaaccatggcgggaatcaagggttcctctgaacggccctccggcgac

SEQ ID NO: 248805 - DNA, 55 bp, Artificial
  Synthetic oligonucleotide
cgggaacgtctcatggaacctccctttagcaggatctctgccgtatccgtcgtag

SEQ ID NO: 248806 - DNA, 55 bp, Artificial
  Synthetic oligonucleotide
cggctgctacctccggtgacgccacgacgcgagtaaccgtctgggtctgctcgtt

SEQ ID NO: 248807 - DNA, 55 bp, Artificial
  Synthetic oligonucleotide
ttcggcatgctgttatcggtgacgcagcgacaagaggagacggccacgagcgcac

SEQ ID NO: 248808 - DNA, 60 bp, Artificial
  Synthetic oligonucleotide
gcggctgttttgatcgtcgcgatcgtagttggagcggcctgcttcacggtccgccacctg

SEQ ID NO: 248809 - DNA, 53 bp, Artificial
  Synthetic oligonucleotide
ttcgtcttcccggccgttgggccgttccgacgagtgagactttagcggaatcc

SEQ ID NO: 248810 - DNA, 55 bp, Artificial
  Synthetic oligonucleotide
cgtctagctcaaacgacagcagagtggcatacacgacacctccgtgcggcccgaa

SEQ ID NO: 248811 - DNA, 55 bp, Artificial
  Synthetic oligonucleotide
ttctgttgacccagcgacatgaaagccaaccgctctctcagccgtcgtccgttcc

SEQ ID NO: 248812 - DNA, 55 bp, Artificial
  Synthetic oligonucleotide
tggttgttaagaaccggctctcgtggggcctcagacatagtgagggcgtgaacgc

SEQ ID NO: 248813 - DNA, 55 bp, Artificial
  Synthetic oligonucleotide
cgtcccgtgttgaacagaacgtgctaagtgatcaacgcgctgtgtgtgaccgttg

SEQ ID NO: 248814 - DNA, 55 bp, Artificial
  Synthetic oligonucleotide
tggttcaagtccgaggcgtcaagcgcaagcgggggttgcctcgaagtggcgtttc

SEQ ID NO: 248815 - DNA, 55 bp, Artificial
  Synthetic oligonucleotide
ctgcttgacctcgtccggtgtcgcagcacgggcaaacagtcgctccttcatgtga

SEQ ID NO: 248816 - DNA, 55 bp, Artificial
  Synthetic oligonucleotide
tggtggcacggtccggtcacgggtcgtcgccctcccttagatgtcggtcctataa

SEQ ID NO: 248817 - DNA, 55 bp, Artificial
  Synthetic oligonucleotide
cgtcccctcttaggcgcatatttccgcggtgcatgcatcccgcaaggaaagatcc

SEQ ID NO: 248818 - DNA, 55 bp, Artificial
  Synthetic oligonucleotide
tggtgagcccttagcagtccacccactggcttacgtccgtcagtcgcgcggttgg

SEQ ID NO: 248819 - DNA, 56 bp, Artificial
  Synthetic oligonucleotide
atccctgaccgcttctgacgtccacccggctaccaaccaagggactcgtctgtgtc

SEQ ID NO: 248820 - DNA, 55 bp, Artificial
  Synthetic oligonucleotide
cgtcagttagcgaaacgcgaacgatgacacgaggtcagcgccccatgagcagagc

SEQ ID NO: 248821 - DNA, 55 bp, Artificial
  Synthetic oligonucleotide
ctgggctgtgtccccgtgtctcacgccgtgtcgcagcttgtgtccccacatgtga

SEQ ID NO: 248822 - DNA, 55 bp, Artificial
  Synthetic oligonucleotide
ctgtacaacgttgcaaggaacggcagttggcatgagagcacgccctctcgcctac

SEQ ID NO: 248823 - DNA, 55 bp, Artificial
  Synthetic oligonucleotide
tggtcaagctcgggcttgtggtcaagccgggcccgcgatccggctcttaccagct

SEQ ID NO: 248824 - DNA, 55 bp, Artificial
  Synthetic oligonucleotide
cgtcagggtgagtcatttcaacgatcacatgtggaagcctgcgctcgcagccgtg

SEQ ID NO: 248825 - DNA, 55 bp, Artificial
  Synthetic oligonucleotide
cgtcaggaaaggcgtgctcgaacctgacagactccgcttgctggctgctgagacg

SEQ ID NO: 248826 - DNA, 55 bp, Artificial
  Synthetic oligonucleotide
tgggtgtggtcatacggccagcctgccgggaccccgagccgctacagtagtggcc

SEQ ID NO: 248827 - DNA, 55 bp, Artificial
  Synthetic oligonucleotide
cttaagtgtagtgctctacttaagcccagaggggccaccacgcaccgaagcgagg

SEQ ID NO: 248828 - DNA, 55 bp, Artificial
  Synthetic oligonucleotide
cttagctccgatgaaccgccgcttacgagaggaaactaacaggtcaccactccga

SEQ ID NO: 248829 - DNA, 54 bp, Artificial
  Synthetic oligonucleotide
cttaggggttgtaaaagccaactatcggaggagtcgtcgaatgtccgcaggtcc

SEQ ID NO: 248830 - DNA, 53 bp, Artificial
  Synthetic oligonucleotide
gcgggcaagcccaagggggatccctgggtgcccacttcgaagggccctttgga

SEQ ID NO: 248831 - DNA, 55 bp, Artificial
  Synthetic oligonucleotide
tcaacagtgaacggctcaccgatgagccacatttgcccatacacgcaagtgctcg

SEQ ID NO: 248832 - DNA, 55 bp, Artificial
  Synthetic oligonucleotide
tatcttgctccgccctctgcgccggtagatgccgacagcgagttgtgggtcactg

SEQ ID NO: 248833 - DNA, 55 bp, Artificial
  Synthetic oligonucleotide
gggccgcataggcaattccacgggaaatgatctctgttcgcacggcaagtaccga

SEQ ID NO: 248834 - DNA, 55 bp, Artificial
  Synthetic oligonucleotide
tatcggttgatccgccgttgtgggctcaccggaccttgcggtccggtccggcagt

SEQ ID NO: 248835 - DNA, 55 bp, Artificial
  Synthetic oligonucleotide
gggctgaatcacgcccatgcgcggcgtgcgaaacttgccccgtgagtgccaacga

SEQ ID NO: 248836 - DNA, 55 bp, Artificial
  Synthetic oligonucleotide
gggcttggcgtcacgagaagaacgacgacgtcgccctgcagagcctcattcggca

SEQ ID NO: 248837 - DNA, 55 bp, Artificial
  Synthetic oligonucleotide
ggggaaccgagtactcgggaaccgtggccgcccacatgatgaccccgacgtgcga

SEQ ID NO: 248838 - DNA, 55 bp, Artificial
  Synthetic oligonucleotide
ggggacacctacttcgcgttcacgcattccgacctggctctcgaagggacgatga

SEQ ID NO: 248839 - DNA, 55 bp, Artificial
  Synthetic oligonucleotide
tatccagagtttgatgttgcgcgaagtgagagcgataccgccgagtgcgaggacg

SEQ ID NO: 248840 - DNA, 55 bp, Artificial
  Synthetic oligonucleotide
ggggtaacaggccagttgagaggtttaggccacagcgattgtcagtgggtgcccc

SEQ ID NO: 248841 - DNA, 60 bp, Artificial
  Synthetic oligonucleotide
atccccgggccgctacaggttcctgactacgcgcgggctgtgatccatgcagctcgctct

SEQ ID NO: 248842 - DNA, 55 bp, Artificial
  Synthetic oligonucleotide
ggggttagcatatgagcgccgcctagctcgaaagataaatttgtgactgtcaacg

SEQ ID NO: 248843 - DNA, 55 bp, Artificial
  Synthetic oligonucleotide
gggtcctgggaccgtactccccaaggtggagacttgcctacgtgacggatgactg

SEQ ID NO: 248844 - DNA, 53 bp, Artificial
  Synthetic oligonucleotide
gggtggcggagggttcccctccggtcggagattcataccgtcgtgggaatgtc

SEQ ID NO: 248845 - DNA, 55 bp, Artificial
  Synthetic oligonucleotide
gggtgtgactcgggccacgcggattgggcgtaacgctcttgggaacaacacgatg

SEQ ID NO: 248846 - DNA, 55 bp, Artificial
  Synthetic oligonucleotide
gggttcgggtcatggtcatgcgactcgtgtctccttgaggtcgagttgagcgtcg

SEQ ID NO: 248847 - DNA, 55 bp, Artificial
  Synthetic oligonucleotide
gggttggctagcgctatgtatccgtgggtcgtggtttggagtgcggccgtgtcga

SEQ ID NO: 248848 - DNA, 55 bp, Artificial
  Synthetic oligonucleotide
tagcaggtgatcggggcacggctgatgggtggtcactgaccgggacgggtgaata

SEQ ID NO: 248849 - DNA, 55 bp, Artificial
  Synthetic oligonucleotide
tagcaagcttaaataccgtactaaggtgattcagacccatcggcatccacgtctg

SEQ ID NO: 248850 - DNA, 55 bp, Artificial
  Synthetic oligonucleotide
ggtacgccgcaatcaggtggagccgatcgagaaacgtgtacaccccgaagagcgg

SEQ ID NO: 248851 - DNA, 55 bp, Artificial
  Synthetic oligonucleotide
ggtacgctccggtccgacttctgctgctagtgaggcgatcgtcgggtgatcaaag

SEQ ID NO: 248852 - DNA, 60 bp, Artificial
  Synthetic oligonucleotide
atcaggacggagacgtggtctcatacggcccggagtggatccacatcatcactcggggca

SEQ ID NO: 248853 - DNA, 55 bp, Artificial
  Synthetic oligonucleotide
ggtccgaaccaggcgctcaaggtgtgtacttcgacggtaactccgctgtgtacac

SEQ ID NO: 248854 - DNA, 53 bp, Artificial
  Synthetic oligonucleotide
ggtcggctccacggctttagccacctccccggttcgggtcccgcgtcgagcaa

SEQ ID NO: 248855 - DNA, 55 bp, Artificial
  Synthetic oligonucleotide
tacttcgacgtccctgtgccgagcaccccgtacatgcagttcaccgcacggtgtc

SEQ ID NO: 248856 - DNA, 55 bp, Artificial
  Synthetic oligonucleotide
ggtcggtcgttcgtggtcgagtcagctcactggaaactcgtgccacatggtacgt

SEQ ID NO: 248857 - DNA, 55 bp, Artificial
  Synthetic oligonucleotide
ggtgatccacgatcctgtccaaatgcgccgaaaccagtccgaaacaggggtgtgg

SEQ ID NO: 248858 - DNA, 55 bp, Artificial
  Synthetic oligonucleotide
tactgtcatgtccctgctctcacctccgcaccaagggtcccgcagccctgtcgcc

SEQ ID NO: 248859 - DNA, 55 bp, Artificial
  Synthetic oligonucleotide
ggtgcccctgggaaccggacgagatgtgacgagaagggcgtgggcatgcgagtga

SEQ ID NO: 248860 - DNA, 55 bp, Artificial
  Synthetic oligonucleotide
ggcacgtactcttggtagcagtacgaccgctctcacgaaggactgaacgacactg

SEQ ID NO: 248861 - DNA, 55 bp, Artificial
  Synthetic oligonucleotide
ggcacgtatcaagtggatccctcgattctggtcacgggtgtatcggatgccgacc

SEQ ID NO: 248862 - DNA, 52 bp, Artificial
  Synthetic oligonucleotide
ggcagttcgttacagcccgtactacccggtggctacggaaagcaaccctccc

SEQ ID NO: 248863 - DNA, 60 bp, Artificial
  Synthetic oligonucleotide
gctccccctctcgtgcgcatcgtgagggcagcggatctcgctacccggtgcgcacagcat

SEQ ID NO: 248864 - DNA, 55 bp, Artificial
  Synthetic oligonucleotide
ggcccaccggcgtttaggcaggtaacccttacatgagagcaggaatagatactgc

SEQ ID NO: 248865 - DNA, 55 bp, Artificial
  Synthetic oligonucleotide
ggccgaatcgcgctccgatcacccctcggtaagctgacggcatgacaggacaagt

SEQ ID NO: 248866 - DNA, 55 bp, Artificial
  Synthetic oligonucleotide
ggccggacgacctcgcgttgtcgggtacagaacatccacgtgtcggaacgatgag

SEQ ID NO: 248867 - DNA, 55 bp, Artificial
  Synthetic oligonucleotide
tccccaggggagttacgacgtcgctacgatgcgtcgcagctcatccgcctcagca

SEQ ID NO: 248868 - DNA, 55 bp, Artificial
  Synthetic oligonucleotide
ggccggagaaagccgcgacaagatctcgaaagagacaacctcggcccgttggaca

SEQ ID NO: 248869 - DNA, 55 bp, Artificial
  Synthetic oligonucleotide
ggccggcctgacatggtgggcctccgagacataaaggtcccgggcggcttgatag

SEQ ID NO: 248870 - DNA, 55 bp, Artificial
  Synthetic oligonucleotide
ggccgtagaagagtacggaggcttcacttatgccaggtgaccccaagtaccgctt

SEQ ID NO: 248871 - DNA, 55 bp, Artificial
  Synthetic oligonucleotide
tccatccgcctcccgagtcaccgaagcctcccctgagacgaagaccaggggcgct

SEQ ID NO: 248872 - DNA, 55 bp, Artificial
  Synthetic oligonucleotide
ggcgcacctcttggctccgctgggatcacgattgtgatgcagtcgttaaacatcg

SEQ ID NO: 248873 - DNA, 55 bp, Artificial
  Synthetic oligonucleotide
ggcgccaagttgtccgaagtcgttgtcagtaatgagcacgctcctcgtgggcaat

SEQ ID NO: 248874 - DNA, 55 bp, Artificial
  Synthetic oligonucleotide
atacggatcaggtccgccccccggcgacgaggtgtgatcgcgcccccggttgagc

SEQ ID NO: 248875 - DNA, 56 bp, Artificial
  Synthetic oligonucleotide
actaacgcgcgtgatcatctccctcaccgacacgttagttaagcctctttgttacc

SEQ ID NO: 248876 - DNA, 55 bp, Artificial
  Synthetic oligonucleotide
ggcgctagcggtccctgtgtcaacttcgcgcaccgagagtccaccgtgtacgtta

SEQ ID NO: 248877 - DNA, 55 bp, Artificial
  Synthetic oligonucleotide
ggcggagattttgcctcacatcaaggtctgttactcaatcgacacccaaccggac

SEQ ID NO: 248878 - DNA, 55 bp, Artificial
  Synthetic oligonucleotide
ggcggtgattcagcacggaccatctaaaaccctctggcggttgattccgggatgt

SEQ ID NO: 248879 - DNA, 55 bp, Artificial
  Synthetic oligonucleotide
tcatacaagcctccggaagaaggggaaacgccggaggaacccgtgtgcgctccga

SEQ ID NO: 248880 - DNA, 55 bp, Artificial
  Synthetic oligonucleotide
ggcgtcctgtcaagaatatctacccgtttctacgtgttgccaatgtcggacgagg

SEQ ID NO: 248881 - DNA, 55 bp, Artificial
  Synthetic oligonucleotide
tcagtgagcatcagcactcaccgtgcgggcgtggggcctcctctcggagagcgag

SEQ ID NO: 248882 - DNA, 55 bp, Artificial
  Synthetic oligonucleotide
ggctacgacgttagccttcccacctggctcgggcgtgctgtgagagcggacaaaa

SEQ ID NO: 248883 - DNA, 55 bp, Artificial
  Synthetic oligonucleotide
ggctcgatggtgtccaggacgtcccgcacgagcggcgcggtcccctgaccccaca

SEQ ID NO: 248884 - DNA, 55 bp, Artificial
  Synthetic oligonucleotide
tcacggagacccacctctactgcgccaacgagggaaatccggtcacccctgaagg

SEQ ID NO: 248885 - DNA, 55 bp, Artificial
  Synthetic oligonucleotide
ggctgtactgggccacgccgcttcctccctacaagtcctgtttcgtcaggcttcc

SEQ ID NO: 248886 - DNA, 56 bp, Artificial
  Synthetic oligonucleotide
ggttggtcaccagactgcttggccgttgggcgagccatccggactttcggtgcccg

SEQ ID NO: 248887 - DNA, 55 bp, Artificial
  Synthetic oligonucleotide
gggaaccaacctctactcatgcgcatagggatgccagcttttacgtgtgtacggg

SEQ ID NO: 248888 - DNA, 55 bp, Artificial
  Synthetic oligonucleotide
tcacgcggacaagtctccgacgggctcagtcactgtttgatttccctcttacccc

SEQ ID NO: 248889 - DNA, 55 bp, Artificial
  Synthetic oligonucleotide
gggagaacggtctttcccgccagcgcgtactgcggcaacacatccagaagggtct

SEQ ID NO: 248890 - DNA, 55 bp, Artificial
  Synthetic oligonucleotide
gggagttgggtatgtcacagggcagtttgggtccgatgcgttcccgatgccttgg

SEQ ID NO: 248891 - DNA, 55 bp, Artificial
  Synthetic oligonucleotide
tcaaggctgactcacggacagctctgcaggttgacgaccgcggtggcggaagtca

SEQ ID NO: 248892 - DNA, 55 bp, Artificial
  Synthetic oligonucleotide
gggatggtgcaggcgataccgcgtttgcacaggtaggagcggatgttgcgggacg

SEQ ID NO: 248893 - DNA, 55 bp, Artificial
  Synthetic oligonucleotide
gtcgtagcccacagagtctcgcacacttgatatatgtgccattatctatacagac

SEQ ID NO: 248894 - DNA, 55 bp, Artificial
  Synthetic oligonucleotide
gtctacgagagagcactcgacacaaccacaactaccatggctcaagccgcgtaac

SEQ ID NO: 248895 - DNA, 55 bp, Artificial
  Synthetic oligonucleotide
gtctctacaggtcaacttattggagaggcgtaaggcaagttaggcatgtgggtct

SEQ ID NO: 248896 - DNA, 55 bp, Artificial
  Synthetic oligonucleotide
gtctctccacggagagcccgctccgaaccatgaacgcgtgtcagactctggggcc

SEQ ID NO: 248897 - DNA, 60 bp, Artificial
  Synthetic oligonucleotide
acgtgccacaacgccgctaccatgtgccgcatgacgacaccttctgacgacgcaacctcc

SEQ ID NO: 248898 - DNA, 55 bp, Artificial
  Synthetic oligonucleotide
gtctgcaggtacatcgcgcgcatctcgccaaagtcggcctagccaccccgcagtt

SEQ ID NO: 248899 - DNA, 55 bp, Artificial
  Synthetic oligonucleotide
gtctggagtgaccggggacaggtcgtcccagcgtctgcggagatctgacacactg

SEQ ID NO: 248900 - DNA, 55 bp, Artificial
  Synthetic oligonucleotide
gtgaactccccacctcttgacccctctcgattgtcaagctacgttcccacgctat

SEQ ID NO: 248901 - DNA, 55 bp, Artificial
  Synthetic oligonucleotide
gttcgggttacggtcagttgtatggaacttcgtctcgccacctgccgttcagctc

SEQ ID NO: 248902 - DNA, 55 bp, Artificial
  Synthetic oligonucleotide
gtgagtcattttgactctcacttacatgagtcattttgactccgggtaggagtcg

SEQ ID NO: 248903 - DNA, 55 bp, Artificial
  Synthetic oligonucleotide
gtgatgttgcctgtcggacgggtgcatctcaggctgcgttgtcactgatcgccgc

SEQ ID NO: 248904 - DNA, 55 bp, Artificial
  Synthetic oligonucleotide
gttcgatccctcgtcggagtgaagcacatatcacgttcccttcggggcatgaacc

SEQ ID NO: 248905 - DNA, 55 bp, Artificial
  Synthetic oligonucleotide
gtgccagggcttctagcgtcacgtctgctgaaggtactaagcggtcgctcattcc

SEQ ID NO: 248906 - DNA, 55 bp, Artificial
  Synthetic oligonucleotide
gtgccccgggtacttccagggcgctgtcaagcatccatgacaggtcgttgttcac

SEQ ID NO: 248907 - DNA, 55 bp, Artificial
  Synthetic oligonucleotide
gtgccgaccatgacggtctgataggcggtcatgtcaactcccctcccgatacgcg

SEQ ID NO: 248908 - DNA, 58 bp, Artificial
  Synthetic oligonucleotide
gtacctccggctccggcccacgccggagcgctggatctccgccccgcaccacacacac

SEQ ID NO: 248909 - DNA, 55 bp, Artificial
  Synthetic oligonucleotide
gtggcaagatcgcaccccacaaatgcaacgagccagggttcttaggccccggctc

SEQ ID NO: 248910 - DNA, 55 bp, Artificial
  Synthetic oligonucleotide
gtggcagaacagtgcagtgggcgaaacagagcgaacaaaatgtgtactcaaatcg

SEQ ID NO: 248911 - DNA, 55 bp, Artificial
  Synthetic oligonucleotide
gttcctagcacgccggacgaccaccggacagaggatcgcagcagagaacgaccct

SEQ ID NO: 248912 - DNA, 55 bp, Artificial
  Synthetic oligonucleotide
gttccggggtcggaagccgtaccgatgtgctgggagtcaccgtgacctgttacga

SEQ ID NO: 248913 - DNA, 55 bp, Artificial
  Synthetic oligonucleotide
gtggcgtcggcaaggtacgttaagtacctcccgctgactgatgcgtaccttcggc

SEQ ID NO: 248914 - DNA, 55 bp, Artificial
  Synthetic oligonucleotide
gttcagtcacagcaatttggggatcgacccgtttggaacagtgtccgcactagac

SEQ ID NO: 248915 - DNA, 55 bp, Artificial
  Synthetic oligonucleotide
gttaccgtcctgctgtcctgacggactgtttcggctctcgcctggcctccaacag

SEQ ID NO: 248916 - DNA, 55 bp, Artificial
  Synthetic oligonucleotide
gtgtgctgttggcccgtactttccgctcatctgccgacaactcccgtgaggtggc

SEQ ID NO: 248917 - DNA, 55 bp, Artificial
  Synthetic oligonucleotide
gtggtgacgtgcgggaaacgtacagttgtcattcacgcgtcaacaaggtgacgtg

SEQ ID NO: 248918 - DNA, 55 bp, Artificial
  Synthetic oligonucleotide
gtgtctcagcattcgctcactctaggtgcgggacgagtctcttcaaaggaccgat

SEQ ID NO: 248919 - DNA, 55 bp, Artificial
  Synthetic oligonucleotide
acgtctcggatgggagtccggtcggtaggatctcggcagcgtccctaggggtcca

SEQ ID NO: 248920 - DNA, 55 bp, Artificial
  Synthetic oligonucleotide
gtggtgtccagtggagcccctaccatagccacctcgcccgttagctccggataag

SEQ ID NO: 248921 - DNA, 55 bp, Artificial
  Synthetic oligonucleotide
gtgtcgcgcgcatgcgtaccgggaccggaagaaggctgcccaggacttcgtgctt

SEQ ID NO: 248922 - DNA, 55 bp, Artificial
  Synthetic oligonucleotide
gtgtacatgacaagcgcctatgagtcggaccccattttcgagaccgttccgcggc

SEQ ID NO: 248923 - DNA, 55 bp, Artificial
  Synthetic oligonucleotide
gtgtcctgttcggaagagtccacgaagcagacacactggtaaccctaaacttcag

SEQ ID NO: 248924 - DNA, 55 bp, Artificial
  Synthetic oligonucleotide
gtgtccacttggacgagctgttgctcacgtagtcgttgtagttccaccacgtgta

SEQ ID NO: 248925 - DNA, 55 bp, Artificial
  Synthetic oligonucleotide
tactgcgaagggttatcgatggtctccgtgccgtccccgactcacggggctcact

SEQ ID NO: 248926 - DNA, 55 bp, Artificial
  Synthetic oligonucleotide
tacgtatgcgcgggaccgcataagtagtcgttaccaggcggtttcgaacgcttaa

SEQ ID NO: 248927 - DNA, 55 bp, Artificial
  Synthetic oligonucleotide
ggtgtgctgagcagaccagatgtttaccagttgacttgactggtccggtcggtgg

SEQ ID NO: 248928 - DNA, 55 bp, Artificial
  Synthetic oligonucleotide
ggttaattaaacgcggccattgtgtggcgcgcagtggataaggggtcccctggtc

SEQ ID NO: 248929 - DNA, 54 bp, Artificial
  Synthetic oligonucleotide
ggttaccgctgtctacgtcaacaggaacgcacaccgttctccggaacgttccac

SEQ ID NO: 248930 - DNA, 60 bp, Artificial
  Synthetic oligonucleotide
gtccatcgactgcaatcgatgggcccctgacgcttgtcagggggactaggccgctgccga

SEQ ID NO: 248931 - DNA, 55 bp, Artificial
  Synthetic oligonucleotide
ggttccccatgcccactgagcgtaaagagaaggtaatggacgatctccattgttt

SEQ ID NO: 248932 - DNA, 55 bp, Artificial
  Synthetic oligonucleotide
ggttcctctcgccatcgcagtgatcgggttagtggcaaccggcttgggagcggtt

SEQ ID NO: 248933 - DNA, 55 bp, Artificial
  Synthetic oligonucleotide
ggttgcgcgcgatacgccccattcctcagcaagaccgcggtctgtcgggagggcg

SEQ ID NO: 248934 - DNA, 55 bp, Artificial
  Synthetic oligonucleotide
tacgtacaccctgatcggagtctgacggcccacaccccgtgagcggccccgcacg

SEQ ID NO: 248935 - DNA, 55 bp, Artificial
  Synthetic oligonucleotide
tacgaggtctgccccgccgactgcgcgaagtgcgccgaggacggtgagacggcat

SEQ ID NO: 248936 - DNA, 55 bp, Artificial
  Synthetic oligonucleotide
tacgaatcccttgacaccggagggcccgttgtcccgcttcgcgctcatcaaggca

SEQ ID NO: 248937 - DNA, 55 bp, Artificial
  Synthetic oligonucleotide
ggttgtcctgagaggccgcgtgccacagatccttggcatccgtacgtcgatcctc

SEQ ID NO: 248938 - DNA, 55 bp, Artificial
  Synthetic oligonucleotide
gtacaacccttcacctcgttcgagagtctgctctgcgcgtccggaatccagggag

SEQ ID NO: 248939 - DNA, 55 bp, Artificial
  Synthetic oligonucleotide
tacagttcggcacgagcaatgtgcgtgagctcgggaaccccgacgtgtcccgagt

SEQ ID NO: 248940 - DNA, 55 bp, Artificial
  Synthetic oligonucleotide
gtagggctcatgcggtggggtagtgcggacgcatatgcagtcgttgacaggcacg

SEQ ID NO: 248941 - DNA, 55 bp, Artificial
  Synthetic oligonucleotide
gtccgtacattggcacttgtacggactcccgtacaaaccctctatggaggttcca

SEQ ID NO: 248942 - DNA, 55 bp, Artificial
  Synthetic oligonucleotide
gtagtccagatttctcgtccgattgacctgttgcagacggcagttggacagatac

SEQ ID NO: 248943 - DNA, 51 bp, Artificial
  Synthetic oligonucleotide
gtcaaaacccgcctagggccgaacttcaccccaaacaacgcaagtcgaacc

SEQ ID NO: 248944 - DNA, 55 bp, Artificial
  Synthetic oligonucleotide
gtcacgtactgccatgggagcgctcaacacccttggtttccaaagtaattggggc

SEQ ID NO: 248945 - DNA, 55 bp, Artificial
  Synthetic oligonucleotide
tacactcgggagcagaccttgtctggtcgccgcgcgcccttctccgggacttcga

SEQ ID NO: 248946 - DNA, 54 bp, Artificial
  Synthetic oligonucleotide
gtccgttaatcccgccccgaaacaaaccgataggatttgcctcatgcgccgttc

SEQ ID NO: 248947 - DNA, 55 bp, Artificial
  Synthetic oligonucleotide
gtccttggttggatgaacggcaggtgaacaagtcaccgtttgtgagcaggactac

SEQ ID NO: 248948 - DNA, 55 bp, Artificial
  Synthetic oligonucleotide
gtcgacttagtgtcctgttcggaagagtccagaaagcagacacactggtaaccct

SEQ ID NO: 248949 - DNA, 55 bp, Artificial
  Synthetic oligonucleotide
gtcgagatcctaaacattccgaagaattcggtggctgttcgccccatagcccgcc

SEQ ID NO: 248950 - DNA, 55 bp, Artificial
  Synthetic oligonucleotide
gtcgcgtcgcaatttcgctagcggaaaagctcagctcagtgatagccgatctgac

SEQ ID NO: 248951 - DNA, 55 bp, Artificial
  Synthetic oligonucleotide
gtcggaggctggacatgttcagcgtagttaccttcgcctcggctagttcccactt

SEQ ID NO: 248952 - DNA, 59 bp, Artificial
  Synthetic oligonucleotide
gtcctcgcgcgtcctccgcaacgcccttaaccgggccatgcgtgaggagctggtcacgc

SEQ ID NO: 248953 - DNA, 55 bp, Artificial
  Synthetic oligonucleotide
gttgctcgcgtccactgtgttggttctgaaaccacgaacaaccccatgtgccaca

SEQ ID NO: 248954 - DNA, 55 bp, Artificial
  Synthetic oligonucleotide
gttgcacagggtgacgcagttggtcacttagcgttgcgaacaggtaaccgtgcca

SEQ ID NO: 248955 - DNA, 55 bp, Artificial
  Synthetic oligonucleotide
gttctgcattcagcggcgatgtatgccatcgggtggactccactgagtgggctcc

SEQ ID NO: 248956 - DNA, 55 bp, Artificial
  Synthetic oligonucleotide
gtcggttggccaccacggagaaccgacgaaatgcggctaccgaggtgacggaata

SEQ ID NO: 248957 - DNA, 55 bp, Artificial
  Synthetic oligonucleotide
gcatacgggcacggcccctccggtccgcagaccagaacgccaactccttcaaatc

SEQ ID NO: 248958 - DNA, 55 bp, Artificial
  Synthetic oligonucleotide
gcatccgaccccgtagtctcatacctcgtgagtacgggcacagcacaggctacgg

SEQ ID NO: 248959 - DNA, 55 bp, Artificial
  Synthetic oligonucleotide
tctgtggtgacgcacgagtcctccaactcgtaggggagaacgatcactcgtgacc

SEQ ID NO: 248960 - DNA, 55 bp, Artificial
  Synthetic oligonucleotide
gcattactgatgcaatatgcgcatgtttcggttagggtgtgcccatgatgagtac

SEQ ID NO: 248961 - DNA, 55 bp, Artificial
  Synthetic oligonucleotide
gcattcggcatgaaggcgtgtcccctcgggtcgctgttgaaccgtgcggccttta

SEQ ID NO: 248962 - DNA, 53 bp, Artificial
  Synthetic oligonucleotide
gccaagcagaccggccgccccgggcccttccaccccgtacgagacgagacgga

SEQ ID NO: 248963 - DNA, 60 bp, Artificial
  Synthetic oligonucleotide
acgggggtgtcgtcaggtgcctctgcctggactggcacattgctctctggggtcactcga

SEQ ID NO: 248964 - DNA, 55 bp, Artificial
  Synthetic oligonucleotide
gccacacagtcacccgcggtccttgctgtggttgcggactacaaccgactaggac

SEQ ID NO: 248965 - DNA, 55 bp, Artificial
  Synthetic oligonucleotide
gcccaacctgtcagatgtcgaccagtaatcacaagactactggttactccgttcg

SEQ ID NO: 248966 - DNA, 55 bp, Artificial
  Synthetic oligonucleotide
gccccagtaccccccacgacatggctcttaaggtggaggcgtgatgccccgggga

SEQ ID NO: 248967 - DNA, 55 bp, Artificial
  Synthetic oligonucleotide
gccccgagagtatttctgcacctggtatacatttaccccgaggcgagagacgagg

SEQ ID NO: 248968 - DNA, 55 bp, Artificial
  Synthetic oligonucleotide
gcccgaacggaggtaccccacagtagagggtgacgacatccgtccgagcgagata

SEQ ID NO: 248969 - DNA, 55 bp, Artificial
  Synthetic oligonucleotide
tctcggcattgccccgcaaccatccgtgtgcggtttcccagcaccctacgcattc

SEQ ID NO: 248970 - DNA, 55 bp, Artificial
  Synthetic oligonucleotide
tctcgaagaagtctgctgaccgctgcccgtaggctgtaggcgcaccaatcgcggt

SEQ ID NO: 248971 - DNA, 55 bp, Artificial
  Synthetic oligonucleotide
gcccgttcggtttcgcgcatatgaaacacgaagtacatgcgttatccgcggaaac

SEQ ID NO: 248972 - DNA, 55 bp, Artificial
  Synthetic oligonucleotide
gccctcataggcaatcgacacgactcgctccgcgaactgttctcggctgtccgag

SEQ ID NO: 248973 - DNA, 55 bp, Artificial
  Synthetic oligonucleotide
gccctctggggactactcagaggcgtaaggctggtagtcgattccctccggagtg

SEQ ID NO: 248974 - DNA, 60 bp, Artificial
  Synthetic oligonucleotide
gtcgcaggtcaccctcacgaaaggaaccgacctgcatgcctagcatgacagcacccccgg

SEQ ID NO: 248975 - DNA, 55 bp, Artificial
  Synthetic oligonucleotide
tctattaccgcactgtccgagcggctttccgctcctccccaagaacgactggcgc

SEQ ID NO: 248976 - DNA, 55 bp, Artificial
  Synthetic oligonucleotide
gccgacacctcggtccttcctcgggtagcatctttgtgcaagagccccttgcgct

SEQ ID NO: 248977 - DNA, 55 bp, Artificial
  Synthetic oligonucleotide
tctaagcacactgcaagttaattgtgagattggctatcggtgcggctctggcgtg

SEQ ID NO: 248978 - DNA, 55 bp, Artificial
  Synthetic oligonucleotide
tcgtgatcagcctcaatggtaggaaatgcaccgtttgatcgttaccgtcggacca

SEQ ID NO: 248979 - DNA, 55 bp, Artificial
  Synthetic oligonucleotide
gccgggagtggacaggcataggggatcactcctctgtgtagcgaagtggctaccg

SEQ ID NO: 248980 - DNA, 55 bp, Artificial
  Synthetic oligonucleotide
tcgtcccacatgggaggttccggtgacgacacgtggagtcctgtacgttcactcc

SEQ ID NO: 248981 - DNA, 55 bp, Artificial
  Synthetic oligonucleotide
gcctcaggtcgggcacaagtccgacctctcacgcgttacgtgcgctggagacacc

SEQ ID NO: 248982 - DNA, 55 bp, Artificial
  Synthetic oligonucleotide
tcgtcacgcggaacccggagttcttcacgctgaccgagtacagggcggtgaccta

SEQ ID NO: 248983 - DNA, 55 bp, Artificial
  Synthetic oligonucleotide
gcctcgctacaactactttgatctcctgttctgaccctaatcgaacatctttgcg

SEQ ID NO: 248984 - DNA, 55 bp, Artificial
  Synthetic oligonucleotide
gccttgcggctctgccgctcccacaccgaccccttcacgcgcggccagcactcgt

SEQ ID NO: 248985 - DNA, 58 bp, Artificial
  Synthetic oligonucleotide
gctttcttatttctctggttcaaagaatgccgctactcgtttgtacattgccgtccga

SEQ ID NO: 248986 - DNA, 60 bp, Artificial
  Synthetic oligonucleotide
acggctgtcattccggtctgctcttcgagatatgcccaactaccctccttgattcgctct

SEQ ID NO: 248987 - DNA, 55 bp, Artificial
  Synthetic oligonucleotide
gcgaaaagtctgatatgtccccgccatccctaggagcaggcatgaccagcgaccc

SEQ ID NO: 248988 - DNA, 55 bp, Artificial
  Synthetic oligonucleotide
tgaggtaaacgagggcttgactcacacgctactcaccaagggtgagaatttctgg

SEQ ID NO: 248989 - DNA, 55 bp, Artificial
  Synthetic oligonucleotide
tgagaactctacggcgcaggagggtgactcgggcgcgttatttcccgttcccacg

SEQ ID NO: 248990 - DNA, 55 bp, Artificial
  Synthetic oligonucleotide
gaggcgttcgaatacttccgctacctgtgggacgagccctcaacccagctcgcca

SEQ ID NO: 248991 - DNA, 55 bp, Artificial
  Synthetic oligonucleotide
gagggccagatcgtacgcccctccgggccacgctgaaccaccaggcgcgctgaga

SEQ ID NO: 248992 - DNA, 55 bp, Artificial
  Synthetic oligonucleotide
tgaccggtaatcggtgccgatcgtcagacgggcggtgaagtccagcttcgcgtca

SEQ ID NO: 248993 - DNA, 55 bp, Artificial
  Synthetic oligonucleotide
tgacattcccaggactgcatgtcacagtctcctcaagccgctcacagtcctaggg

SEQ ID NO: 248994 - DNA, 55 bp, Artificial
  Synthetic oligonucleotide
tgacatgggctcgcggctaggccactttgttcccacggtcagtttaccggccgtg

SEQ ID NO: 248995 - DNA, 55 bp, Artificial
  Synthetic oligonucleotide
gatacgaaatcagtggctctgttcacgacttccggttctggctcaagttctgtgg

SEQ ID NO: 248996 - DNA, 55 bp, Artificial
  Synthetic oligonucleotide
gatcatttacgggacagcccttaggttggatgaacacctaagcgtggcatacctc

SEQ ID NO: 248997 - DNA, 54 bp, Artificial
  Synthetic oligonucleotide
gtcggcaggccccagcaaagtcacgtgactttccaaaaccccaggtcaaccctg

SEQ ID NO: 248998 - DNA, 55 bp, Artificial
  Synthetic oligonucleotide
tgacacctgacaccgtcacggccccgtgacacccaaacccctaggcaggagcagg

SEQ ID NO: 248999 - DNA, 55 bp, Artificial
  Synthetic oligonucleotide
gatcggggagagggatggcgcaccaggaaaccccggcgagagaggccgaaggcca

SEQ ID NO: 249000 - DNA, 55 bp, Artificial
  Synthetic oligonucleotide
gatcgtgaatgaattcacttaacgtccgcacggcaccaatgtatgtccgcccatg

SEQ ID NO: 249001 - DNA, 55 bp, Artificial
  Synthetic oligonucleotide
gatctatggcttctacgtatgaccagggaacgtacggacgttgcaaggatgcgtc

SEQ ID NO: 249002 - DNA, 55 bp, Artificial
  Synthetic oligonucleotide
gatctgtcacgccgggacgggagtgagggaatcccatgacaggggacatctcgga

SEQ ID NO: 249003 - DNA, 55 bp, Artificial
  Synthetic oligonucleotide
gatgggcttcgaccccgtgctgtcagtgccgccttctacagtgcttccatgtctg

SEQ ID NO: 249004 - DNA, 55 bp, Artificial
  Synthetic oligonucleotide
tgaagtcggtcgggccccgttgtgatcttgctaggcatacgcgccaccgttccga

SEQ ID NO: 249005 - DNA, 55 bp, Artificial
  Synthetic oligonucleotide
tgaacgcacggcgaggaccgaactgaacgtgagccgaactgaacgtacggaccgc

SEQ ID NO: 249006 - DNA, 55 bp, Artificial
  Synthetic oligonucleotide
gattgcctctgtccatcgggcactccatagatgttgttgcttagggcaaccatag

SEQ ID NO: 249007 - DNA, 55 bp, Artificial
  Synthetic oligonucleotide
tcttgacggtccgccacctaagtcgtgtaccttcgttctcgtcgccagaacttag

SEQ ID NO: 249008 - DNA, 54 bp, Artificial
  Synthetic oligonucleotide
acggccgggcctctgggtctccgaaccaccggtatgcgagaacggagaatgtcc

SEQ ID NO: 249009 - DNA, 55 bp, Artificial
  Synthetic oligonucleotide
tcttccggatcggctgtggggataccctcccaggatctcacgaacgcgacggagc

SEQ ID NO: 249010 - DNA, 55 bp, Artificial
  Synthetic oligonucleotide
gcaacgcccttaaccgggccatgcgtgaggagctggtcacgcgcaacgtcgcgct

SEQ ID NO: 249011 - DNA, 55 bp, Artificial
  Synthetic oligonucleotide
gcaagcctccgcaccgtctcactcacgacggccaccgggtcaccaaggctggtca

SEQ ID NO: 249012 - DNA, 55 bp, Artificial
  Synthetic oligonucleotide
gcaatgtcaatttggcgtgtgacggactcccttggcggagagtggttagcgtcgg

SEQ ID NO: 249013 - DNA, 55 bp, Artificial
  Synthetic oligonucleotide
gcaccccgggtgactgcctaccgtcatgtgccaggtcgaggacggaggtcggcgt

SEQ ID NO: 249014 - DNA, 55 bp, Artificial
  Synthetic oligonucleotide
gcaccggacatgaagagccggtaaagacttgcgcgtaccacgccactctagacgt

SEQ ID NO: 249015 - DNA, 55 bp, Artificial
  Synthetic oligonucleotide
gcaggcccacgccctagcactgcacttctactcgacccatgtgttccctgggttg

SEQ ID NO: 249016 - DNA, 55 bp, Artificial
  Synthetic oligonucleotide
gcagggtgaccttcatatcacgttcggttgcgtcgcacaagtcgaggagtcgctg

SEQ ID NO: 249017 - DNA, 55 bp, Artificial
  Synthetic oligonucleotide
tcgaagatgaggcacaacgtcggtgagggaagacgtgagcgacaactctgtagta

SEQ ID NO: 249018 - DNA, 51 bp, Artificial
  Synthetic oligonucleotide
gcttgtgaccgggtacgtcccgagttgtgaacgggaacttcgctttaccgt

SEQ ID NO: 249019 - DNA, 55 bp, Artificial
  Synthetic oligonucleotide
gtcggcccctccgtcgtaggccatgaccgtccgggacatgccaaggacgttggaa

SEQ ID NO: 249020 - DNA, 53 bp, Artificial
  Synthetic oligonucleotide
ggaaacacctcggtcggaagcggtcctgaccaccctgtagactttcccgaaga

SEQ ID NO: 249021 - DNA, 55 bp, Artificial
  Synthetic oligonucleotide
ggaaacactgagaatgccggaccaaacggacacgtggagatgtgcgagcggggcc

SEQ ID NO: 249022 - DNA, 55 bp, Artificial
  Synthetic oligonucleotide
ggaaacgcaagaccgaagggaagcgcccggaggaaagcctgagagagtctctcgg

SEQ ID NO: 249023 - DNA, 55 bp, Artificial
  Synthetic oligonucleotide
ggaaatctaagacatcgtttcttatggcgtgatcgttcgttgcaccgtgcatgac

SEQ ID NO: 249024 - DNA, 55 bp, Artificial
  Synthetic oligonucleotide
ggaaccgcggcacttcccctcagcgcgcatcgttaccatgcgtggacgcacattc

SEQ ID NO: 249025 - DNA, 55 bp, Artificial
  Synthetic oligonucleotide
ggaacctgactcggaaggccgccaatgatgatcgggttgcgatctgatccggaag

SEQ ID NO: 249026 - DNA, 55 bp, Artificial
  Synthetic oligonucleotide
ggaaggccatcgagagcctctaccaggggctccgggaccatgatcacggcccaga

SEQ ID NO: 249027 - DNA, 55 bp, Artificial
  Synthetic oligonucleotide
ggaatcgatccagaggttacggtttcaacacagactcgcgctcctttgacggagg

SEQ ID NO: 249028 - DNA, 55 bp, Artificial
  Synthetic oligonucleotide
ggacatagcaccacacgggagcaaccccgtgttcattaccggctggtatcgggcc

SEQ ID NO: 249029 - DNA, 55 bp, Artificial
  Synthetic oligonucleotide
ggacattcacgatgcgctggttgctctcggagaagagggagaacgccgtaaccgc

SEQ ID NO: 249030 - DNA, 56 bp, Artificial
  Synthetic oligonucleotide
acggcccttggctacgccaggggccgttcttggctgccgagagataacgtatacgc

SEQ ID NO: 249031 - DNA, 55 bp, Artificial
  Synthetic oligonucleotide
ggacgtccacccaagctggtgacgacccactgaccagcgaacttcatacgcaacc

SEQ ID NO: 249032 - DNA, 55 bp, Artificial
  Synthetic oligonucleotide
tcctcaagggcgtgccacgcaagccacacggccctgtcggggtcttgggagtgca

SEQ ID NO: 249033 - DNA, 55 bp, Artificial
  Synthetic oligonucleotide
ggacgtgcgatgggaccagttgctagggtcttcgactgtggactatcggagcatg

SEQ ID NO: 249034 - DNA, 55 bp, Artificial
  Synthetic oligonucleotide
ggacttcaagactccagccagtcccatgtgccagaggggacaccgcgagatggga

SEQ ID NO: 249035 - DNA, 54 bp, Artificial
  Synthetic oligonucleotide
tccgtagggcccgaagagggctcaccaacgggttagggagtcgaatgctcggtc

SEQ ID NO: 249036 - DNA, 55 bp, Artificial
  Synthetic oligonucleotide
tccgggcgttgagtgatcacctcgcttcggtgcgtggtggcccctctgggcttaa

SEQ ID NO: 249037 - DNA, 55 bp, Artificial
  Synthetic oligonucleotide
ggagagaatcacccacccgacaagacccatgaaagttaggtgaggcaaacctaac

SEQ ID NO: 249038 - DNA, 55 bp, Artificial
  Synthetic oligonucleotide
ggagcggagtgcacgtacaggactccacgtgtcgtcaccggaacctccagtgggg

SEQ ID NO: 249039 - DNA, 55 bp, Artificial
  Synthetic oligonucleotide
tccggcccgctttcgttctgtggtgctagatccgggtctgtccctccgcaccctt

SEQ ID NO: 249040 - DNA, 55 bp, Artificial
  Synthetic oligonucleotide
ggagtgttctccttggcgttcatacgaccaccgtacctcttagtgagtcggactc

SEQ ID NO: 249041 - DNA, 60 bp, Artificial
  Synthetic oligonucleotide
gtcggggcgagtctctgtccccaccatagcaatgtcaagcaatgaaagtttcgtcttgac

SEQ ID NO: 249042 - DNA, 55 bp, Artificial
  Synthetic oligonucleotide
ggagttggcctcttttgtgacggacagttatggcgcctaccgtccgtgtccggtc

SEQ ID NO: 249043 - DNA, 55 bp, Artificial
  Synthetic oligonucleotide
tccgatccgcgttccacgccccggagggcagtactagcggtcttcacatgaagga

SEQ ID NO: 249044 - DNA, 55 bp, Artificial
  Synthetic oligonucleotide
tccgagcactgccttgatgagcacgaagcgggacaacgggccctccggtgtcaac

SEQ ID NO: 249045 - DNA, 54 bp, Artificial
  Synthetic oligonucleotide
tccgacaccccgacgaagtacgaacatagttgagtccgggtcaattcagaaggg

SEQ ID NO: 249046 - DNA, 55 bp, Artificial
  Synthetic oligonucleotide
ggcacagccccgcaggtgattaccgtggcgttggacattccgggatctcctgtca

SEQ ID NO: 249047 - DNA, 55 bp, Artificial
  Synthetic oligonucleotide
ggcaccagggctcgtgaacttgatagaccgggttgcaccgttggacaggtcacgc

SEQ ID NO: 249048 - DNA, 55 bp, Artificial
  Synthetic oligonucleotide
gcgagcaagaccattggagatcgtgtcatggccaacatcgacggagtacccgaga

SEQ ID NO: 249049 - DNA, 55 bp, Artificial
  Synthetic oligonucleotide
gcgagcactgttggccgcctgacgaatttactgacgcggagtggcgttgtggagg

SEQ ID NO: 249050 - DNA, 55 bp, Artificial
  Synthetic oligonucleotide
gcgagcgacgttaggtggcgcgaagcagcgttaacaagacgttgacatgcgagca

SEQ ID NO: 249051 - DNA, 54 bp, Artificial
  Synthetic oligonucleotide
gcgaggttaagtgacggaccccggtcgcacaagagtccgtttccagattcctcc

SEQ ID NO: 249052 - DNA, 60 bp, Artificial
  Synthetic oligonucleotide
gtgacttatcgcgtctcgcaacatgtacttgtccagcctcgttgcgagatggccacacga

SEQ ID NO: 249053 - DNA, 55 bp, Artificial
  Synthetic oligonucleotide
tcgtaacaatacttgcaggcgcggcatacttgcaaacgcgggcttttgtgacacg

SEQ ID NO: 249054 - DNA, 55 bp, Artificial
  Synthetic oligonucleotide
gcgcacacacctcgtgctgagaggtatctggccggtgagtcgatcccgacagatg

SEQ ID NO: 249055 - DNA, 55 bp, Artificial
  Synthetic oligonucleotide
gcgcgaggcaatttgtatcaagccgcttcgtcacccgaaaagccgagcgggtgtg

SEQ ID NO: 249056 - DNA, 55 bp, Artificial
  Synthetic oligonucleotide
gcgcgctcaacaggccaggcatagaccaatgttcgccactgttggttcgtgtccg

SEQ ID NO: 249057 - DNA, 55 bp, Artificial
  Synthetic oligonucleotide
gcgcgtacgcacgcgggagggaatctcaagtgaccagtagaccctggacgttcag

SEQ ID NO: 249058 - DNA, 45 bp, Artificial
  Synthetic oligonucleotide
tcgggtttcccgggtccttcgggtttcccgggtccttcgggtttc

SEQ ID NO: 249059 - DNA, 55 bp, Artificial
  Synthetic oligonucleotide
gcgctgggagagatcctgttcatgggtcgtgcggtcaagatgcacgtcctcatgg

SEQ ID NO: 249060 - DNA, 55 bp, Artificial
  Synthetic oligonucleotide
gcggatgtccgaagtcgcggtctctcggaccacatttgcccagacgagagcgatc

SEQ ID NO: 249061 - DNA, 53 bp, Artificial
  Synthetic oligonucleotide
tcgggcactcgtcccggtccgtggccgttcacgtatcaacctcgtaccggtcc

SEQ ID NO: 249062 - DNA, 55 bp, Artificial
  Synthetic oligonucleotide
tcgggaagcgggatggctctgtccgacctgcgcgttagggtccatgaatacgagg

SEQ ID NO: 249063 - DNA, 60 bp, Artificial
  Synthetic oligonucleotide
gtgagccttgaaccgcctggtagaggtacgtcactgacgtgtgtgctggcacggtgatca

SEQ ID NO: 249064 - DNA, 55 bp, Artificial
  Synthetic oligonucleotide
gcgggtaatggatccgcgctttatgtctgattgaggtccattcgggtacgttcga

SEQ ID NO: 249065 - DNA, 55 bp, Artificial
  Synthetic oligonucleotide
gcggtttctttcctgtgaagtgtgggccccaccggaaatatgacgcaacgtcagg

SEQ ID NO: 249066 - DNA, 53 bp, Artificial
  Synthetic oligonucleotide
gcgtccacgaggagcgggcgtggtccctggttccggccgtacggtggcggccg

SEQ ID NO: 249067 - DNA, 55 bp, Artificial
  Synthetic oligonucleotide
tcgctcacttcgattcactcggtgcggggcgtccgagcccacacgacctacatcg

SEQ ID NO: 249068 - DNA, 55 bp, Artificial
  Synthetic oligonucleotide
gcgttcgggcgaacgacggggaaaggtgctcacgaagccttctgacgactcgtga

SEQ ID NO: 249069 - DNA, 55 bp, Artificial
  Synthetic oligonucleotide
gctcgggtacggttggccgtagcggggctcgaccgaaactgagggattcatggga

SEQ ID NO: 249070 - DNA, 54 bp, Artificial
  Synthetic oligonucleotide
tcgatcgtccgtacagcatgtggccggttccgtacccttcgtgaccggacccgg

SEQ ID NO: 249071 - DNA, 55 bp, Artificial
  Synthetic oligonucleotide
gctctcgcgtccttggcatgaagaattcctcggggtagatgagccttgacccgag

SEQ ID NO: 249072 - DNA, 55 bp, Artificial
  Synthetic oligonucleotide
gctgaggccgtgcatccaaggtcaccacatgcgcagaatgcccggttttggcgac

SEQ ID NO: 249073 - DNA, 55 bp, Artificial
  Synthetic oligonucleotide
gctgcaaagcggccgaacgtcccctacggagtcggacattcgcttgtggacggta

SEQ ID NO: 249074 - DNA, 59 bp, Artificial
  Synthetic oligonucleotide
acgccgcagttacggcgtgccgtcgtgacggtgtgacggcagcaagcctgtgaactggg

SEQ ID NO: 249075 - DNA, 55 bp, Artificial
  Synthetic oligonucleotide
tcgagacatgcgggagggcatgcgtgagccgacgtgtcagtctacgtcagggcat

SEQ ID NO: 249076 - DNA, 55 bp, Artificial
  Synthetic oligonucleotide
gctgcgtaatcggccgaccgcgcaaagatttggtatagggatgtgatctgtccgg

SEQ ID NO: 249077 - DNA, 55 bp, Artificial
  Synthetic oligonucleotide
tcgaagcaacacttccgggtgcctgacgacgggtccccggcgtcctactcaatgt

SEQ ID NO: 249078 - DNA, 55 bp, Artificial
  Synthetic oligonucleotide
gctgtcctgatctcgccgtagcgtccttgcatggctatagaacacacctcaacgt

SEQ ID NO: 249079 - DNA, 55 bp, Artificial
  Synthetic oligonucleotide
gcttggtgccacagaaagtctcccatgtttacgcgaacatattgtgtcgcggaag

SEQ ID NO: 249080 - DNA, 55 bp, Artificial
  Synthetic oligonucleotide
actgaaccacggtgctggatcaagcgaccacgccagggtctcgggacgagtcaga

SEQ ID NO: 249081 - DNA, 55 bp, Artificial
  Synthetic oligonucleotide
actgcggcaccccgatcgtccacatccccgggaagcgccccaaaatctactgctc

SEQ ID NO: 249082 - DNA, 48 bp, Artificial
  Synthetic oligonucleotide
accaccggagggacccggggttcgccttcccctggacgaaggacaaag

SEQ ID NO: 249083 - DNA, 48 bp, Artificial
  Synthetic oligonucleotide
ccaccggagggacccggggttcgccttacccctggacgaaggacaaag

SEQ ID NO: 249084 - DNA, 55 bp, Artificial
  Synthetic oligonucleotide
ccacgaatccgatctcgtcgcttcactgtccaacctcgcaggcctctacctagcg

SEQ ID NO: 249085 - DNA, 60 bp, Artificial
  Synthetic oligonucleotide
acgccacagacgcattccgtgatcacccggttacgctgtctgtgtgagcctgactgccga

SEQ ID NO: 249086 - DNA, 55 bp, Artificial
  Synthetic oligonucleotide
agtggatcaggcttcgctcggttcctcgaacacgacgagtaggctcgtaggcatg

SEQ ID NO: 249087 - DNA, 55 bp, Artificial
  Synthetic oligonucleotide
ccacggggtacggcttgcttcattcgtcgtctacgcgacttcttcttctaggtca

SEQ ID NO: 249088 - DNA, 55 bp, Artificial
  Synthetic oligonucleotide
ccagccatctgacctgcgaaaacaagcgccttggcgcctctgacaaaacctccgg

SEQ ID NO: 249089 - DNA, 55 bp, Artificial
  Synthetic oligonucleotide
acatgccgaacgcgcaccctggggtgcggggacgcgtccatcaggtgtcatttgc

SEQ ID NO: 249090 - DNA, 55 bp, Artificial
  Synthetic oligonucleotide
ccagggtgatgcagtgtgcaagatcagcctccggcggccttctgtacatcggatg

SEQ ID NO: 249091 - DNA, 55 bp, Artificial
  Synthetic oligonucleotide
acaggacccaggagcggtcatcggcccacagattggaggggctgaagtctgcttc

SEQ ID NO: 249092 - DNA, 55 bp, Artificial
  Synthetic oligonucleotide
ccagtaatgtgcactctcccggagacacattcggcactcatacgatggtgtctca

SEQ ID NO: 249093 - DNA, 55 bp, Artificial
  Synthetic oligonucleotide
ccagtagtccttggtgagaaggtctgcgagcacaggggacttgagcgtcccaccg

SEQ ID NO: 249094 - DNA, 55 bp, Artificial
  Synthetic oligonucleotide
ccatcaactcaagcgaatccgtgggaagttcgtgttcgctctccctaagggcgcc

SEQ ID NO: 249095 - DNA, 55 bp, Artificial
  Synthetic oligonucleotide
cccaaatttgccgaccctgtgcaggaacaccctcgttgcttgggacgaactcgca

SEQ ID NO: 249096 - DNA, 58 bp, Artificial
  Synthetic oligonucleotide
agttccccgctcttgatcagcgtgcggaagtgggtggccacgtcggcatagcccttcc

SEQ ID NO: 249097 - DNA, 55 bp, Artificial
  Synthetic oligonucleotide
gtggccctgtatggggtgtctggggtccagcagaccccatcgaggggggtcttcc

SEQ ID NO: 249098 - DNA, 55 bp, Artificial
  Synthetic oligonucleotide
cccacccgtttcgctcatctgagttaaacgactctcagacgtggcgtgaatcacg

SEQ ID NO: 249099 - DNA, 55 bp, Artificial
  Synthetic oligonucleotide
cccagacagtacccacccgaagatcacacccgcgaggagccccatgtacaccgag

SEQ ID NO: 249100 - DNA, 55 bp, Artificial
  Synthetic oligonucleotide
cccagatgttttgacgggcatcgatcgggtactgtgcgggccatgtcgagtcctg

SEQ ID NO: 249101 - DNA, 55 bp, Artificial
  Synthetic oligonucleotide
acccgtatcgcgcagtggccaagacgcctctggcagcccctgatcgtttaggttg

SEQ ID NO: 249102 - DNA, 50 bp, Artificial
  Synthetic oligonucleotide
acccggggttcgcctacccctggacgaaggacaaaggagtcgcgggtgtc

SEQ ID NO: 249103 - DNA, 55 bp, Artificial
  Synthetic oligonucleotide
cagggaggcctctcgcggagatgggcactcagacggcagcacttctcctcgagcg

SEQ ID NO: 249104 - DNA, 55 bp, Artificial
  Synthetic oligonucleotide
atagaggtaccgcatcggccggagacggaaccgatcggtagggagcatccgcatg

SEQ ID NO: 249105 - DNA, 54 bp, Artificial
  Synthetic oligonucleotide
atagagaccaccgagccgagaagcacaaaacaccccggacggtacacaggcggg

SEQ ID NO: 249106 - DNA, 55 bp, Artificial
  Synthetic oligonucleotide
atactcgctccgcacgtgaccggccgttagtgtcaaatcagccgagaacctgggg

SEQ ID NO: 249107 - DNA, 55 bp, Artificial
  Synthetic oligonucleotide
catatacccaacaccgccccatagagtccccacgacttggcaatgctctagccgg

SEQ ID NO: 249108 - DNA, 56 bp, Artificial
  Synthetic oligonucleotide
acgagccgaccccacacctaggcattctcaattcgacgggcctccgagacctcgag

SEQ ID NO: 249109 - DNA, 55 bp, Artificial
  Synthetic oligonucleotide
catcaaagctgcatcctggccggactgtgtaaagtctgggattctggcgcacccc

SEQ ID NO: 249110 - DNA, 51 bp, Artificial
  Synthetic oligonucleotide
acccgccgatccaaaaacggacaggcgccttggtactaccggagaaactac

SEQ ID NO: 249111 - DNA, 55 bp, Artificial
  Synthetic oligonucleotide
ataccgggtatgtgcccattaatcgtatgaaacggtatgtgatgggctccctggc

SEQ ID NO: 249112 - DNA, 55 bp, Artificial
  Synthetic oligonucleotide
catctgaacggccccttcacacccctcgcggcccaatggaccgttaactcatgga

SEQ ID NO: 249113 - DNA, 53 bp, Artificial
  Synthetic oligonucleotide
ataccgcaccgctttccctgaaggtgggttctcatcccttccgggcccgacac

SEQ ID NO: 249114 - DNA, 55 bp, Artificial
  Synthetic oligonucleotide
catgaagccctgctccgggtagaccatcaaccgctggagcgcaccgaccaacatg

SEQ ID NO: 249115 - DNA, 55 bp, Artificial
  Synthetic oligonucleotide
catgccgggtctatcgatgtgagggctgatcaggtaaccgggcaagacgcgggct

SEQ ID NO: 249116 - DNA, 55 bp, Artificial
  Synthetic oligonucleotide
catggggaagggctcgaaagcccgttcggagggagtgtcttgtccacgtcacgag

SEQ ID NO: 249117 - DNA, 55 bp, Artificial
  Synthetic oligonucleotide
accccgcctgtcgccacaccctgtcaccgtgatgtcactgtgctcgtagcggaaa

SEQ ID NO: 249118 - DNA, 55 bp, Artificial
  Synthetic oligonucleotide
cattcgggagggcttagaccgaaaggtcacgtctccatacgcctgtaacgggagc

SEQ ID NO: 249119 - DNA, 59 bp, Artificial
  Synthetic oligonucleotide
gtggcggtctcatggcggtcccggcgcgaaagccgagggtctgcctgccgtgaggtggc

SEQ ID NO: 249120 - DNA, 55 bp, Artificial
  Synthetic oligonucleotide
ccaagacgcttctgacatcgccaacttagactcacgaaccccttcggtggttacg

SEQ ID NO: 249121 - DNA, 55 bp, Artificial
  Synthetic oligonucleotide
ccaagatccagtgttccgaagggaatcgacactcagattcacggcacggacttgg

SEQ ID NO: 249122 - DNA, 55 bp, Artificial
  Synthetic oligonucleotide
acaactgcacagcggcacacgaggaatggggcgggcaacggcgatgatgggacca

SEQ ID NO: 249123 - DNA, 53 bp, Artificial
  Synthetic oligonucleotide
cccctcgtaacgaagtctctgatcttttccgggtcaacccgcgaccacgtcag

SEQ ID NO: 249124 - DNA, 55 bp, Artificial
  Synthetic oligonucleotide
aggtggtgtgaactacggtccggacatgcggtcttggcgagcctcgtcacatccg

SEQ ID NO: 249125 - DNA, 55 bp, Artificial
  Synthetic oligonucleotide
aatgctctcgcgggcgctcgttggggcgagcaagttatccgcttggagactccag

SEQ ID NO: 249126 - DNA, 55 bp, Artificial
  Synthetic oligonucleotide
aatgaggacgttttgtacctattcatcccctaatgcgtttagtacgtgacgcacc

SEQ ID NO: 249127 - DNA, 55 bp, Artificial
  Synthetic oligonucleotide
cccgaaccctcgaccgtccaaggagcgtcatgacagcgcgatacgcgggacaggg

SEQ ID NO: 249128 - DNA, 55 bp, Artificial
  Synthetic oligonucleotide
aggtcgtggatttcaagcgttgccatgggtacctcaggactcctgggtgagggag

SEQ ID NO: 249129 - DNA, 53 bp, Artificial
  Synthetic oligonucleotide
cccgacgaacgcgtactttccctggaacacgaggtccgtgttgaagccctgga

SEQ ID NO: 249130 - DNA, 57 bp, Artificial
  Synthetic oligonucleotide
gtgggaaccgtccgaggttcccacttgccgtctgacctgcgcttttgcgcttcagag

SEQ ID NO: 249131 - DNA, 55 bp, Artificial
  Synthetic oligonucleotide
cccgaggtccttcacgctaccgcaattttagatacacgcgcaactagagttcgcg

SEQ ID NO: 249132 - DNA, 55 bp, Artificial
  Synthetic oligonucleotide
cccgccttgcttcttgttgggctgtcaggtcccgatcaacacacccgaagtgccg

SEQ ID NO: 249133 - DNA, 55 bp, Artificial
  Synthetic oligonucleotide
cccgcgttcgcagttctctcgcgtgacgtagcaaagtacatatacgcaggacccg

SEQ ID NO: 249134 - DNA, 55 bp, Artificial
  Synthetic oligonucleotide
cccgctacgtttctgctacgtgcacagtgacatcacggtgacagggtgtggcgac

SEQ ID NO: 249135 - DNA, 55 bp, Artificial
  Synthetic oligonucleotide
cccgcttcgtgtgtgcgcgttcacagccttgtctgggactgtaaaacgttcggtg

SEQ ID NO: 249136 - DNA, 55 bp, Artificial
  Synthetic oligonucleotide
acttcggtcggctggtctgtgcgggttgttcaggtccccgcatgagatggacgtg

SEQ ID NO: 249137 - DNA, 55 bp, Artificial
  Synthetic oligonucleotide
cccggaattctcgtccgattgacctgttgcagacggcagttgggcagatacattc

SEQ ID NO: 249138 - DNA, 55 bp, Artificial
  Synthetic oligonucleotide
cccggattcacctgctcgtgctgcggtgaccaccactctgaactgccgatggact

SEQ ID NO: 249139 - DNA, 54 bp, Artificial
  Synthetic oligonucleotide
aatccgtaggagaagcccggccgaccactccaccctggacagacaccgttccgc

SEQ ID NO: 249140 - DNA, 55 bp, Artificial
  Synthetic oligonucleotide
cccagcaaagcgaaacggccagggattagggcccctgaccgcttctgacgtccgc

SEQ ID NO: 249141 - DNA, 56 bp, Artificial
  Synthetic oligonucleotide
gtggtcccgatttggcaggagtacgagaagggcacgttccgccgtcgggcgatcac

SEQ ID NO: 249142 - DNA, 55 bp, Artificial
  Synthetic oligonucleotide
cccatctgcccgtttactgctgacaggacagatcatgaggtgccgctagggccac

SEQ ID NO: 249143 - DNA, 55 bp, Artificial
  Synthetic oligonucleotide
actgtccctggcgcacccctacgatcccttgtgagcaccaacactcctgcgcgca

SEQ ID NO: 249144 - DNA, 55 bp, Artificial
  Synthetic oligonucleotide
ccccatcgaacgcatcccgggcaagcgtccccgggtcttctgctcggaggcctgc

SEQ ID NO: 249145 - DNA, 55 bp, Artificial
  Synthetic oligonucleotide
ccccattgaagggagttgtcgccctctgacgctagccactctccgccaaaggcgt

SEQ ID NO: 249146 - DNA, 51 bp, Artificial
  Synthetic oligonucleotide
ccccccgagcctccatcgttccgaccgcccggcctgtccgggacgggagga

SEQ ID NO: 249147 - DNA, 55 bp, Artificial
  Synthetic oligonucleotide
agtgcactcgcgtccgttataggaccgacacctaagggagggcgacgacccgtga

SEQ ID NO: 249148 - DNA, 55 bp, Artificial
  Synthetic oligonucleotide
agtcgctcacgtgcgggtcctctcgtcgtatgcggtgcaagggccagtctcgtca

SEQ ID NO: 249149 - DNA, 55 bp, Artificial
  Synthetic oligonucleotide
ccccgacactccgaaatctatgtccgccggagtagacattgtgcggtggcgtggt

SEQ ID NO: 249150 - DNA, 55 bp, Artificial
  Synthetic oligonucleotide
agtccggtcggtaggatctcggcagcgtccctaggggtccatcgactgcaatcga

SEQ ID NO: 249151 - DNA, 55 bp, Artificial
  Synthetic oligonucleotide
acacgaccgggccgggtgactacgctgtgcacagcaccacgtgagcaccggagag

SEQ ID NO: 249152 - DNA, 60 bp, Artificial
  Synthetic oligonucleotide
gtggtcgagctggtgactcaccaccaggagcacgccgacgtctgcgtcctgacgaccggt

SEQ ID NO: 249153 - DNA, 55 bp, Artificial
  Synthetic oligonucleotide
acacctatctggggacgcccggtcatcccacgtgtaccaccgaggtcatagcgag

SEQ ID NO: 249154 - DNA, 55 bp, Artificial
  Synthetic oligonucleotide
acaccggataccgaatcatgcacctgacgctcacacttattgtctacatataact

SEQ ID NO: 249155 - DNA, 55 bp, Artificial
  Synthetic oligonucleotide
actgtctccggtcgtaagtggccggtatatcgtctctagtgtttcgtccgacgcc

SEQ ID NO: 249156 - DNA, 55 bp, Artificial
  Synthetic oligonucleotide
acaatcgcggtacggccagtctaatgaaggacgtcgcgctgtctagccttgcaat

SEQ ID NO: 249157 - DNA, 55 bp, Artificial
  Synthetic oligonucleotide
ccccgttgcgtcaagggctccattgctcgcagacccaagcgaactcgatggagga

SEQ ID NO: 249158 - DNA, 55 bp, Artificial
  Synthetic oligonucleotide
cccctacaggcgacatgcgataccacgtcagctttagtgagctgggacccagcac

SEQ ID NO: 249159 - DNA, 55 bp, Artificial
  Synthetic oligonucleotide
cccctatgtttccggtgaacgcggggagtccatcacttggagcgctctcgaagtc

SEQ ID NO: 249160 - DNA, 55 bp, Artificial
  Synthetic oligonucleotide
cccctcactgtcggtcgtaccggtagactggagagcaaacaccgtcgtgtgcagc

SEQ ID NO: 249161 - DNA, 52 bp, Artificial
  Synthetic oligonucleotide
atgggcaaagcctacggcccggggcacgggtcgcggccggacggtgacaggg

SEQ ID NO: 249162 - DNA, 55 bp, Artificial
  Synthetic oligonucleotide
acctggcagaaggcgtgtcttccaaggtcttctcgggtccttgtggggcgaggct

SEQ ID NO: 249163 - DNA, 58 bp, Artificial
  Synthetic oligonucleotide
accttccggcagcccatgtgcggctgctacctccggtgacgccacgacgcgagtaacc

SEQ ID NO: 249164 - DNA, 55 bp, Artificial
  Synthetic oligonucleotide
atggtcctcaaagctccatcggtcgtctctgcctgcggcaacgcagcggatccct

SEQ ID NO: 249165 - DNA, 55 bp, Artificial
  Synthetic oligonucleotide
atgtgccacgcctctggaagtcggtaccgtgcggcgagtcggaccatcgggacag

SEQ ID NO: 249166 - DNA, 55 bp, Artificial
  Synthetic oligonucleotide
acggcttccgtttgggctttcggcccgtcagaggcaagactgctcctcgtgacgt

SEQ ID NO: 249167 - DNA, 55 bp, Artificial
  Synthetic oligonucleotide
atccgaaggtcatggtcctcccttcgctacgcgcccacggtgcgggcaggatcga

SEQ ID NO: 249168 - DNA, 55 bp, Artificial
  Synthetic oligonucleotide
attcgcacgctcgaatgcgtactgctgacagaccataggtatgcaccaatggggc

SEQ ID NO: 249169 - DNA, 55 bp, Artificial
  Synthetic oligonucleotide
attgaccattccacatgaggctacgatgtgtcgtcatgcaaacacgacgcgtgac

SEQ ID NO: 249170 - DNA, 55 bp, Artificial
  Synthetic oligonucleotide
acggggtcctcggacagccacaggcccgcgtacacgaggacgtccagatgcttct

SEQ ID NO: 249171 - DNA, 53 bp, Artificial
  Synthetic oligonucleotide
attggaccgttccccgaaggacgtgtgagaccacggcgctccagtcccgaaac

SEQ ID NO: 249172 - DNA, 55 bp, Artificial
  Synthetic oligonucleotide
accgttgtccctggcgacgacctaaccttgcagtacgtactgcaaggttgtcaac

SEQ ID NO: 249173 - DNA, 55 bp, Artificial
  Synthetic oligonucleotide
caaagcagcagcacccacaggctgatgtaggtgatgtagcggtagatcgccgtgg

SEQ ID NO: 249174 - DNA, 56 bp, Artificial
  Synthetic oligonucleotide
gtgtaacggaaatcgccagcagacgtagtccttggtgagactccgccccaacgccc

SEQ ID NO: 249175 - DNA, 55 bp, Artificial
  Synthetic oligonucleotide
caagatttccgatgttgtctaggcccaccgtcaagcatcaggcgggaccagaacg

SEQ ID NO: 249176 - DNA, 55 bp, Artificial
  Synthetic oligonucleotide
caagcgatccttcgcgtgattcagccaacgcccttcggacatccaaccgggttgc

SEQ ID NO: 249177 - DNA, 55 bp, Artificial
  Synthetic oligonucleotide
caaggcatctcccggcgttgctgcatgtcacctcgtgggtgcataccgtagccct

SEQ ID NO: 249178 - DNA, 55 bp, Artificial
  Synthetic oligonucleotide
caatatcaccagcgttcgtcactttcggcacttcgcgctccggagcaccgtgagc

SEQ ID NO: 249179 - DNA, 52 bp, Artificial
  Synthetic oligonucleotide
accgtcctcaagtagaagggaaccgcctcgtgttcacgccgaagtacccgcc

SEQ ID NO: 249180 - DNA, 55 bp, Artificial
  Synthetic oligonucleotide
acggtagaagccgaggtgcggaaggggtagcggatttgtgtgctgcccaggtcgg

SEQ ID NO: 249181 - DNA, 55 bp, Artificial
  Synthetic oligonucleotide
acgctatgaggggtatgtccctcccgccaccgcacggaccgtcagctaggccgtc

SEQ ID NO: 249182 - DNA, 55 bp, Artificial
  Synthetic oligonucleotide
atcctcgtgggcatgcgggcctctcacttgtccttcgcgagttcgtacgtccgct

SEQ ID NO: 249183 - DNA, 55 bp, Artificial
  Synthetic oligonucleotide
atcgctgggttgttgcgctacttgcgcaggtctacgcgcacgggcgcgggtacgc

SEQ ID NO: 249184 - DNA, 55 bp, Artificial
  Synthetic oligonucleotide
atccgtcgttccaggacctggtccagccctctgcccagctgtacacgttgtctcc

SEQ ID NO: 249185 - DNA, 54 bp, Artificial
  Synthetic oligonucleotide
acctgcggtgtcctggccgtctggcccgcaacccgggttttctcgtacgctcaa

SEQ ID NO: 249186 - DNA, 55 bp, Artificial
  Synthetic oligonucleotide
atctcagagcagggcgccaaacactgcgccgcttaccggccttggtatgacgcgt

SEQ ID NO: 249187 - DNA, 55 bp, Artificial
  Synthetic oligonucleotide
acgcggctggtctcgcgcggcacgttctatggagaggcgtatttcggtgatgaag

SEQ ID NO: 249188 - DNA, 55 bp, Artificial
  Synthetic oligonucleotide
acgccggagcgctggatctccgccccgcaccacacacaccgatccgcgggcagct

SEQ ID NO: 249189 - DNA, 55 bp, Artificial
  Synthetic oligonucleotide
acgccgaagtcaccgcttccttggaccacgcaggcgtccccgatgtacgagacaa

SEQ ID NO: 249190 - DNA, 55 bp, Artificial
  Synthetic oligonucleotide
atgagaccacagagggttctgagctacagagcccacggcgaacgcccgagctacg

SEQ ID NO: 249191 - DNA, 54 bp, Artificial
  Synthetic oligonucleotide
atgcggtcctggtcctcaacgaggggtcggagagccggttacccggatgcttac

SEQ ID NO: 249192 - DNA, 55 bp, Artificial
  Synthetic oligonucleotide
acgcatgtgtagcgccgtacagaaccagacccaccggtccggggcaaggggcgag

SEQ ID NO: 249193 - DNA, 55 bp, Artificial
  Synthetic oligonucleotide
acgcaggaacggcggtcctggtaccgcgagggccacccatacttgagcgcatgga

SEQ ID NO: 249194 - DNA, 55 bp, Artificial
  Synthetic oligonucleotide
atggaagttcggttgcgacacccctcgaggcacccagccgtcgaaggcacgctaa

SEQ ID NO: 249195 - DNA, 55 bp, Artificial
  Synthetic oligonucleotide
atggaccctaacgcgcaggtgggacaacgccatcccgcttccccaactgttcgct

SEQ ID NO: 249196 - DNA, 58 bp, Artificial
  Synthetic oligonucleotide
agcgggactaccgcaaagctccgatggcactcaccctgggcgcgaaccactcgggcaa

SEQ ID NO: 249197 - DNA, 55 bp, Artificial
  Synthetic oligonucleotide
acgcaacgatcacctcccgcaaacggtgcgccagagcccagcctcgggggtaaca

SEQ ID NO: 249198 - DNA, 55 bp, Artificial
  Synthetic oligonucleotide
acgatggatgtgtgtgggctgacggtgcacccgtcgggtctgcgggcgttcatga

SEQ ID NO: 249199 - DNA, 55 bp, Artificial
  Synthetic oligonucleotide
acgaaacaggacttgtagggaggaagcggcgtggcccagtacagccggtgtggct

SEQ ID NO: 249200 - DNA, 55 bp, Artificial
  Synthetic oligonucleotide
acctggccctatgccaggcgggtgcctgtggttttgggttgccgcccacaccaca

SEQ ID NO: 249201 - DNA, 55 bp, Artificial
  Synthetic oligonucleotide
acggatcggaccggtcacacccatcgcactgcctcccgagtgaacgaacgttaag

SEQ ID NO: 249202 - DNA, 55 bp, Artificial
  Synthetic oligonucleotide
atcacggagccttcggaatcgcgcagaacgttccggccgatagtgactgggctgc

SEQ ID NO: 249203 - DNA, 55 bp, Artificial
  Synthetic oligonucleotide
acgtgccaatcagcttcggcggcccggaacctttcgcatgagcagtcgagccact

SEQ ID NO: 249204 - DNA, 55 bp, Artificial
  Synthetic oligonucleotide
cacggctccgttggcccgcaccatttcaaggatcaattggcgacgttctgcagcg

SEQ ID NO: 249205 - DNA, 55 bp, Artificial
  Synthetic oligonucleotide
cacggggtcattggagctgaacagcgcacgaaggtcggccatgtgatgtgtcccc

SEQ ID NO: 249206 - DNA, 55 bp, Artificial
  Synthetic oligonucleotide
cacgttacgcactatttgccacaccttgcgatgccctttgcacggtccggtcccc

SEQ ID NO: 249207 - DNA, 60 bp, Artificial
  Synthetic oligonucleotide
agtgcgcggcgaggggtgctcatgccgatgagtctgaacttctccggcgaagggttctac

SEQ ID NO: 249208 - DNA, 60 bp, Artificial
  Synthetic oligonucleotide
ggctaaggtggcggacaaagcagcagcacccacaggctgatgtaggtgatgtagcggtag

SEQ ID NO: 249209 - DNA, 55 bp, Artificial
  Synthetic oligonucleotide
cactcaaagggatgagttggccacgggaccttgtggccctgtgaaacagcacctc

SEQ ID NO: 249210 - DNA, 55 bp, Artificial
  Synthetic oligonucleotide
atatggcctgattgtgcggttatgtggggcactcgttcggggagtcccttcgggg

SEQ ID NO: 249211 - DNA, 55 bp, Artificial
  Synthetic oligonucleotide
cactgagaaggagtcacgacccatgaatcacatcgttgctggtcagctcatcgtt

SEQ ID NO: 249212 - DNA, 55 bp, Artificial
  Synthetic oligonucleotide
cactgtattgacccgaggcggcgtatcgcaacagtacggtgggacccatgactgt

SEQ ID NO: 249213 - DNA, 55 bp, Artificial
  Synthetic oligonucleotide
cactgtcacagtggcacgacacagtgaagcccgggccgtcccaaccgcttcaccc

SEQ ID NO: 249214 - DNA, 55 bp, Artificial
  Synthetic oligonucleotide
cagaccttctccagtccgtcctcgtagacggaccagatgccgtcagtccaggcgt

SEQ ID NO: 249215 - DNA, 55 bp, Artificial
  Synthetic oligonucleotide
atatcgcctcacaagacctaccgctgagacgtgggacggcggaagtcggcggtag

SEQ ID NO: 249216 - DNA, 55 bp, Artificial
  Synthetic oligonucleotide
cagactcgagggaaacccgcaacaatcccggatctcgaagcaccatgagctcccg

SEQ ID NO: 249217 - DNA, 55 bp, Artificial
  Synthetic oligonucleotide
cagagcggtcagggcgggtagcgaccaagtggttcgtacacaccgactacgagga

SEQ ID NO: 249218 - DNA, 55 bp, Artificial
  Synthetic oligonucleotide
actagcttgcccaccaccctcaaggggtgccaacatattggacacttggcgtcgg

SEQ ID NO: 249219 - DNA, 60 bp, Artificial
  Synthetic oligonucleotide
ggctgtacctgctgcctcacctcggtaagaagccactggtcaagctcaccccggcacaga

SEQ ID NO: 249220 - DNA, 55 bp, Artificial
  Synthetic oligonucleotide
cagagtgtgcagaacccgaatagggactatggtagccccacgtcgatttacgacc

SEQ ID NO: 249221 - DNA, 55 bp, Artificial
  Synthetic oligonucleotide
accgcactcggcagggctgaacggtccatcaacgcgtggccgtccagagtgagca

SEQ ID NO: 249222 - DNA, 55 bp, Artificial
  Synthetic oligonucleotide
cagccgaaacgctcgattcctgatccacgcgacgagactgcaccgggagccctgt

SEQ ID NO: 249223 - DNA, 55 bp, Artificial
  Synthetic oligonucleotide
accggtgtaacgcctgggcccgccactccgtccatacagcgccgagagaggagac

SEQ ID NO: 249224 - DNA, 55 bp, Artificial
  Synthetic oligonucleotide
cacactcgtgtgcaggagagaggcaccgaattccaccgggtcaacaggtccgtcc

SEQ ID NO: 249225 - DNA, 55 bp, Artificial
  Synthetic oligonucleotide
cacagcgggcgctggtgaaactcgcagcgcttgacggtccagcggtcctatcgtt

SEQ ID NO: 249226 - DNA, 55 bp, Artificial
  Synthetic oligonucleotide
cacatcgatgtcaggggcaagtcgccgtgacccagcgcacacggggagtcgagat

SEQ ID NO: 249227 - DNA, 55 bp, Artificial
  Synthetic oligonucleotide
caccatccccacccctcgtacaaccattcgggccgcacaggagtctccttctcgc

SEQ ID NO: 249228 - DNA, 55 bp, Artificial
  Synthetic oligonucleotide
caccatttcaaggatcaattggcgacgttctgcagcgaacacgaaactgacagta

SEQ ID NO: 249229 - DNA, 55 bp, Artificial
  Synthetic oligonucleotide
accgggtttgcggggcgcagtggagactagcaggtcagcggggccggacgcacat

SEQ ID NO: 249230 - DNA, 58 bp, Artificial
  Synthetic oligonucleotide
agccgtgcagatctcgggatcgtggaccgaccgggtcatcacgcggtggccggaggag

SEQ ID NO: 249231 - DNA, 55 bp, Artificial
  Synthetic oligonucleotide
caccgacgttcaagctgcgagcggtacaagacccaccgcagtccacaccgcaaga

SEQ ID NO: 249232 - DNA, 55 bp, Artificial
  Synthetic oligonucleotide
caccgcctcttcacgcttcccgtacaaccaatccacgactcggctcgtctgtcac

SEQ ID NO: 249233 - DNA, 54 bp, Artificial
  Synthetic oligonucleotide
caccgtgcgaagcgcgaactaaccgacccgtgtgttcgtccttacctggtggga

SEQ ID NO: 249234 - DNA, 55 bp, Artificial
  Synthetic oligonucleotide
atcagtggagccgggttcccttcaagaaacgtggtctgcgccacagttgcccgcg

SEQ ID NO: 249235 - DNA, 53 bp, Artificial
  Synthetic oligonucleotide
acgtaggcaagtctccaccttggggagtacggtcccaggacgcggatcggccc

SEQ ID NO: 249236 - DNA, 55 bp, Artificial
  Synthetic oligonucleotide
acgtatggtcgtcgaccagtagtcccgggtcacagaccgctgcccgtcgtacgta

SEQ ID NO: 249237 - DNA, 54 bp, Artificial
  Synthetic oligonucleotide
acgtcggcgaaaggccggcgcccgtcatggcaccgaggacaccacccacgacct

SEQ ID NO: 249238 - DNA, 52 bp, Artificial
  Synthetic oligonucleotide
accggatagagagtgactaaccgtcaaccacaaaggcccggccggagtcccg

SEQ ID NO: 249239 - DNA, 55 bp, Artificial
  Synthetic oligonucleotide
cacctgggatacgactccgtatcgcatacggtcctataccgtgaggcgagtaacg

SEQ ID NO: 249240 - DNA, 55 bp, Artificial
  Synthetic oligonucleotide
acgtctgacccacgaggagcgaccaggtgagcaaccgaccgagaggccgggaacc

SEQ ID NO: 249241 - DNA, 58 bp, Artificial
  Synthetic oligonucleotide
gggacaggagagtcccccacggctcgatggtgtccaggacgtcccgcacgagcggcgc

SEQ ID NO: 249242 - DNA, 55 bp, Artificial
  Synthetic oligonucleotide
cacgccaatggaccgtcgcattgcggtccttcgactctgtcccgggttctcgtga

SEQ ID NO: 249243 - DNA, 55 bp, Artificial
  Synthetic oligonucleotide
atcactgcgcgttttcagcgttgcccctccagggtgaggtggctacaccggagag

SEQ ID NO: 249244 - DNA, 54 bp, Artificial
  Synthetic oligonucleotide
ccgtgattcggtttccccagacccacgacgcacctcccgcctagacgtggccag

SEQ ID NO: 249245 - DNA, 55 bp, Artificial
  Synthetic oligonucleotide
aaccccggcaagttgtcacgcctggagcatgagacctccctgcgccgctgaaccc

SEQ ID NO: 249246 - DNA, 52 bp, Artificial
  Synthetic oligonucleotide
aggccactttgttcccacggtcagtttaccggccgtgacggggcagctccgg

SEQ ID NO: 249247 - DNA, 55 bp, Artificial
  Synthetic oligonucleotide
agacccctcctggtgcatgcctgatgattcgcactgacattttccgctatgcacg

SEQ ID NO: 249248 - DNA, 55 bp, Artificial
  Synthetic oligonucleotide
ccgttaccggtgtgatcaccgggtcactagggtgcgacgtatcctgctcggacga

SEQ ID NO: 249249 - DNA, 55 bp, Artificial
  Synthetic oligonucleotide
ccgttcgcacgcaccatttcaaggatcaattggcgacgttctgcagcgaacacga

SEQ ID NO: 249250 - DNA, 55 bp, Artificial
  Synthetic oligonucleotide
ccgttcttcggggagcggagtctcgacatgtgcgagagttctgatcttgcccgga

SEQ ID NO: 249251 - DNA, 54 bp, Artificial
  Synthetic oligonucleotide
agacctgacagcccgctacaacttccgcggtacgcaaccggaacgtcgaacctc

SEQ ID NO: 249252 - DNA, 55 bp, Artificial
  Synthetic oligonucleotide
gggagcggtgatgcgtcgaagcggggaacggggtagttcctgacgtcgtgtcgag

SEQ ID NO: 249253 - DNA, 55 bp, Artificial
  Synthetic oligonucleotide
cctagggtcactgctcggtgttaccagtgcatgaccggtcggtcaaacaccaatg

SEQ ID NO: 249254 - DNA, 55 bp, Artificial
  Synthetic oligonucleotide
cctaggtaccggctgttctaggctgaatagccgccaagggcaccctaagggtgca

SEQ ID NO: 249255 - DNA, 53 bp, Artificial
  Synthetic oligonucleotide
cctattcgcttgccgaccgtacgtcgcagccagggactttcgaaacggttcgg

SEQ ID NO: 249256 - DNA, 55 bp, Artificial
  Synthetic oligonucleotide
cctcagagcggtcagaaagatcggggacgatcccctccctgtccttccgcatgct

SEQ ID NO: 249257 - DNA, 55 bp, Artificial
  Synthetic oligonucleotide
cctccgatctttaatgccacaccgctcctcttcccgcctcaatcgcgccttaccc

SEQ ID NO: 249258 - DNA, 55 bp, Artificial
  Synthetic oligonucleotide
cctcgcggggcgtcggccaagtggcctgtcacaccagcgacgtcggactactact

SEQ ID NO: 249259 - DNA, 53 bp, Artificial
  Synthetic oligonucleotide
cctcggctaaggtaaggctcacctaacttacatggaggttcgttccccgtgaa

SEQ ID NO: 249260 - DNA, 55 bp, Artificial
  Synthetic oligonucleotide
cctcggctcgttttccacagatctatttaacgatcgttagagacgctagagtcgg

SEQ ID NO: 249261 - DNA, 55 bp, Artificial
  Synthetic oligonucleotide
cctcgtgctgagaggtatctggccggtgagtcgatcccgacagatgacacgtgct

SEQ ID NO: 249262 - DNA, 55 bp, Artificial
  Synthetic oligonucleotide
cctctgcggctgccacctctttaatcatcgcgctgccccaaagagcgttacgccc

SEQ ID NO: 249263 - DNA, 60 bp, Artificial
  Synthetic oligonucleotide
agcaggctagcccatggtcttgacatgggctcgcggctaggccactttgttcccacggtc

SEQ ID NO: 249264 - DNA, 55 bp, Artificial
  Synthetic oligonucleotide
ccggagcgagaacccagagcgcctatcaggtgagagtggccacgaccccacaacg

SEQ ID NO: 249265 - DNA, 55 bp, Artificial
  Synthetic oligonucleotide
ccggaggggcgtcccatttctagttctgacctgcacgtacgcactcagagcagcc

SEQ ID NO: 249266 - DNA, 55 bp, Artificial
  Synthetic oligonucleotide
ccggctggaacatgccacgaaggaagcctggctcacgtacacggatgacaagaag

SEQ ID NO: 249267 - DNA, 53 bp, Artificial
  Synthetic oligonucleotide
ccgggcacaccgtctccctgcccgaaacgggcacgtccggagcgttttcagaa

SEQ ID NO: 249268 - DNA, 55 bp, Artificial
  Synthetic oligonucleotide
ccgggcgaagctgaacgattgcctacgaaagtcgagggtcggatggccggatcac

SEQ ID NO: 249269 - DNA, 55 bp, Artificial
  Synthetic oligonucleotide
aactcccctattactggcccttgcacaggaccgcacttcgcggacccgggtcaga

SEQ ID NO: 249270 - DNA, 55 bp, Artificial
  Synthetic oligonucleotide
aacgttgtcagactcattgagaggctgagtatgcgacagagacggctcagacgca

SEQ ID NO: 249271 - DNA, 55 bp, Artificial
  Synthetic oligonucleotide
ccgggtggctccggactgatcagtatcccgcatggtggacgatcgcgtctcaaca

SEQ ID NO: 249272 - DNA, 53 bp, Artificial
  Synthetic oligonucleotide
ccgggttgtatgccgaatgtccgttctgtcaagggtcgtaagttttcgggcga

SEQ ID NO: 249273 - DNA, 55 bp, Artificial
  Synthetic oligonucleotide
ccggtattacgagatcatggaccacagccatctgaagtctctggcccggtcagag

SEQ ID NO: 249274 - DNA, 60 bp, Artificial
  Synthetic oligonucleotide
agcagaccgtgtcatcgaggtccaggacatccggatgtccagcgcgctctttgcagtcgg

SEQ ID NO: 249275 - DNA, 55 bp, Artificial
  Synthetic oligonucleotide
aggcgtgtcatcgcgtaccacaggtctcccgaggtgtccctgtcgtgcctgatca

SEQ ID NO: 249276 - DNA, 55 bp, Artificial
  Synthetic oligonucleotide
ccgtcaccagcggaaacgctgaggccggggtcttcgcgtatgtgcaggcgtgtgt

SEQ ID NO: 249277 - DNA, 55 bp, Artificial
  Synthetic oligonucleotide
ccgtccaagagaggaaaccgacccgtggacatcatcgtcgcaggacagcgcatcg

SEQ ID NO: 249278 - DNA, 55 bp, Artificial
  Synthetic oligonucleotide
ccgtccctcctgggttggcgttctagaccactacgcagcacatgctaccggctga

SEQ ID NO: 249279 - DNA, 55 bp, Artificial
  Synthetic oligonucleotide
aggccgactcgaacttgctgggcacgggatcgcacctcaccttccttggtaacgg

SEQ ID NO: 249280 - DNA, 55 bp, Artificial
  Synthetic oligonucleotide
aacctgtaacagctccgctgtcgcctggtcaggctgaaggtgcaccggtggtcag

SEQ ID NO: 249281 - DNA, 55 bp, Artificial
  Synthetic oligonucleotide
aaccggaggggatgttgatcgtccttacctctacccatgtaggtcagtaggatgg

SEQ ID NO: 249282 - DNA, 55 bp, Artificial
  Synthetic oligonucleotide
ccgtgacgtcacctcgctcgttcggggacatcgcccggggtttgcgagactggtg

SEQ ID NO: 249283 - DNA, 55 bp, Artificial
  Synthetic oligonucleotide
cgaccggtcgtgcaccaaacgcgcaggtcgaaaagtttgtgagatccgccacggc

SEQ ID NO: 249284 - DNA, 55 bp, Artificial
  Synthetic oligonucleotide
agcagtcgagccgcacccatcgcctgccctcggctgtcgccacccggcatgacca

SEQ ID NO: 249285 - DNA, 60 bp, Artificial
  Synthetic oligonucleotide
gggcaattccttacgtctagctcaaacgacagcagagtggcatacacgacacctccgtgc

SEQ ID NO: 249286 - DNA, 55 bp, Artificial
  Synthetic oligonucleotide
agccagatgtccttgggctgtccatcgaaggggtgaacaacgcccctgacctgcg

SEQ ID NO: 249287 - DNA, 55 bp, Artificial
  Synthetic oligonucleotide
cgacctgaggcggagattttgcctcacatcaaggtctgttactcaatcgacaccc

SEQ ID NO: 249288 - DNA, 55 bp, Artificial
  Synthetic oligonucleotide
agccatttcttccgcccggacccgccatatcgtaggcttggcactggagctccct

SEQ ID NO: 249289 - DNA, 55 bp, Artificial
  Synthetic oligonucleotide
agctccgatggcactcaccctgggcgcgaaccactcgggcaagtcgatgtatcag

SEQ ID NO: 249290 - DNA, 55 bp, Artificial
  Synthetic oligonucleotide
cgacgactaccaaacacggacggtctcacccgtatgggagtgcagcaaccgcacc

SEQ ID NO: 249291 - DNA, 55 bp, Artificial
  Synthetic oligonucleotide
agctactcgcgtgaccactgacgaaaagtcccgacctccgctacctcggacgtcg

SEQ ID NO: 249292 - DNA, 55 bp, Artificial
  Synthetic oligonucleotide
cgactcgatttaccggctcgattgagagtcctcccatcgccgcgagaattccctc

SEQ ID NO: 249293 - DNA, 55 bp, Artificial
  Synthetic oligonucleotide
cgagcgccgcagcagtgctaatgcgttccaggggacatagtccttccaggccgat

SEQ ID NO: 249294 - DNA, 55 bp, Artificial
  Synthetic oligonucleotide
cgagcgtcaatggacgtttccatcgactttgagacacttattcgagtctcgtcaa

SEQ ID NO: 249295 - DNA, 55 bp, Artificial
  Synthetic oligonucleotide
cgaggacgcagccaccagcgcccattacatgaacacccggacagccgtgcgtgct

SEQ ID NO: 249296 - DNA, 57 bp, Artificial
  Synthetic oligonucleotide
agattgggatacatgggaattggtctagtaacacagagtgcacgaatcgggggaggg

SEQ ID NO: 249297 - DNA, 55 bp, Artificial
  Synthetic oligonucleotide
cgatcaccgcaagactttgtgcaccgccgcacaagctctcctcaggaggtctcct

SEQ ID NO: 249298 - DNA, 55 bp, Artificial
  Synthetic oligonucleotide
cgatccctgtgcgtgatacgaaggattcatagttcgtcctaccctcctgaaggct

SEQ ID NO: 249299 - DNA, 55 bp, Artificial
  Synthetic oligonucleotide
agcccgtttcgtgtttgatttgcggtatatatctgcctaacgtgcgaaaacgcct

SEQ ID NO: 249300 - DNA, 55 bp, Artificial
  Synthetic oligonucleotide
cgatcgccgctgtccgtacttgttggtgtcaggcattgatgtcagaccagcgggg

SEQ ID NO: 249301 - DNA, 55 bp, Artificial
  Synthetic oligonucleotide
agcctgaccggccgaggcatcgtcagtgcagtagcgagggatcgagtcgacgtgg

SEQ ID NO: 249302 - DNA, 55 bp, Artificial
  Synthetic oligonucleotide
cctgagagtccgcagaccataaacggtcggctaccgtcggccagtggtcagtcga

SEQ ID NO: 249303 - DNA, 55 bp, Artificial
  Synthetic oligonucleotide
cctgcgattactggctggtccgttgatccgtcgactactgtgcgcaaagcaaacc

SEQ ID NO: 249304 - DNA, 55 bp, Artificial
  Synthetic oligonucleotide
cctgcgccaggcaagcctcagtaggtgaaccacaccaccgtttgaagacggaccc

SEQ ID NO: 249305 - DNA, 55 bp, Artificial
  Synthetic oligonucleotide
cctggagggcccatgcgtgattgcggggggcgctgatgacccccgagttcctgcg

SEQ ID NO: 249306 - DNA, 55 bp, Artificial
  Synthetic oligonucleotide
cctgtcatcggccccgcacatcttcttcactccacccatcgattacccacagtca

SEQ ID NO: 249307 - DNA, 54 bp, Artificial
  Synthetic oligonucleotide
gggccatttggggcggtggtcgggtgttggaagcacctcgaccgctgtcggacc

SEQ ID NO: 249308 - DNA, 55 bp, Artificial
  Synthetic oligonucleotide
cctgttcctcgttcgcagtaccaacggtcttccgctcgtccacgacatgggtgcg

SEQ ID NO: 249309 - DNA, 55 bp, Artificial
  Synthetic oligonucleotide
ccttgggacgcgactggttcacgtggaacgaacctccatgtaagttaggtgagcc

SEQ ID NO: 249310 - DNA, 55 bp, Artificial
  Synthetic oligonucleotide
cgaaacatgcgatctcctcggctaaggtaaggctcacctaacttacatggaggtc

SEQ ID NO: 249311 - DNA, 55 bp, Artificial
  Synthetic oligonucleotide
aggactagtacttcagccgcgaagctcgacgctatgggtgagggccggtgttgcg

SEQ ID NO: 249312 - DNA, 55 bp, Artificial
  Synthetic oligonucleotide
cgaacacgatccataacgttgatcaactgtggcgcgtcaccccactgtccgggag

SEQ ID NO: 249313 - DNA, 55 bp, Artificial
  Synthetic oligonucleotide
cgaactcacatccaggtctcgccacaactgtggccaatttcagccgtcgaccggc

SEQ ID NO: 249314 - DNA, 55 bp, Artificial
  Synthetic oligonucleotide
aaagtgtgcttgttcgctaagtgccgatatccccgctctgtgtggggactggccg

SEQ ID NO: 249315 - DNA, 55 bp, Artificial
  Synthetic oligonucleotide
cgaagctctgacgcaccgaaccacccgggaaagcacaggagtttcgatgtcacag

SEQ ID NO: 249316 - DNA, 55 bp, Artificial
  Synthetic oligonucleotide
cgacaacaacgctcacgcatcggaggatcccgaatgattacggcacggacgctgg

SEQ ID NO: 249317 - DNA, 55 bp, Artificial
  Synthetic oligonucleotide
cgacatccgcaggtccatcgtgtcctctcggtagcaactgctcccgccacgctat

SEQ ID NO: 249318 - DNA, 52 bp, Artificial
  Synthetic oligonucleotide
cggacaaggggcggggaaccggggaggctccggttatggacacaccgcacga

SEQ ID NO: 249319 - DNA, 55 bp, Artificial
  Synthetic oligonucleotide
gaccggcgcgcacagcccacaaagagggtcccggtcgatcggctgggaccctctt

SEQ ID NO: 249320 - DNA, 50 bp, Artificial
  Synthetic oligonucleotide
acagctcgggggagccgtgaaagcgacatcggggattcgcaagtacgcgg

SEQ ID NO: 249321 - DNA, 50 bp, Artificial
  Synthetic oligonucleotide
acagcgttgtcagttgagttcagccgcacagtggtcacgtcgcccgatgc

SEQ ID NO: 249322 - DNA, 50 bp, Artificial
  Synthetic oligonucleotide
acagcctaggaacggggtacgtgcgggccaagagcccgatcatgcgtgtt

SEQ ID NO: 249323 - DNA, 50 bp, Artificial
  Synthetic oligonucleotide
acagcagtggatccgttcatggccgtggagcttggacccctcccgtcgca

SEQ ID NO: 249324 - DNA, 55 bp, Artificial
  Synthetic oligonucleotide
ctctgcactatgcaagtcgcgtccgtgtgagggttgcagcgtcccacgatcttcc

SEQ ID NO: 249325 - DNA, 55 bp, Artificial
  Synthetic oligonucleotide
ctcggaggagtcaagagaatcgtcgtaggacacttcaggtaccgtggagacatgg

SEQ ID NO: 249326 - DNA, 55 bp, Artificial
  Synthetic oligonucleotide
gacagtccgggtcctgccggagtcaccaatgctgcgtccttgcaggtagatacgc

SEQ ID NO: 249327 - DNA, 55 bp, Artificial
  Synthetic oligonucleotide
gcagcgacctcttccgaggtcagcagtcgttcctctcccaggggaaacacaggca

SEQ ID NO: 249328 - DNA, 55 bp, Artificial
  Synthetic oligonucleotide
gcatggcggatgacagtcatcgcgtaatcccctaaattagacaacgtggttgccg

SEQ ID NO: 249329 - DNA, 55 bp, Artificial
  Synthetic oligonucleotide
cgtgctcacgagaggccgtccttccgagtctggagcgagtggtagccgtgccgtg

SEQ ID NO: 249330 - DNA, 55 bp, Artificial
  Synthetic oligonucleotide
agccaggcgggtgcccagtgaccgcacttaacgaacccctcactctcgcgccggt

SEQ ID NO: 249331 - DNA, 55 bp, Artificial
  Synthetic oligonucleotide
cgacaagtacaagcgccgacaatagttgccaacgccctatagttgcaaacgcggg

SEQ ID NO: 249332 - DNA, 55 bp, Artificial
  Synthetic oligonucleotide
atcacaggaggtcccttacatgtccgtcccatccgttgtcccctcgccaccggca

SEQ ID NO: 249333 - DNA, 58 bp, Artificial
  Synthetic oligonucleotide
cactcacgttaagcaggtaactcggaggagtcaagagaatcgtcgtaggacacttcag

SEQ ID NO: 249334 - DNA, 55 bp, Artificial
  Synthetic oligonucleotide
caccacgaggggacggttcaatccgagcgcgacactcacccggaacactctatgc

SEQ ID NO: 249335 - DNA, 55 bp, Artificial
  Synthetic oligonucleotide
cacccggcctagtctgcccgatatccgatcatgtgtgccatcggttagacgacgc

SEQ ID NO: 249336 - DNA, 55 bp, Artificial
  Synthetic oligonucleotide
ccttgcactctacagagatcaccattcgcccaacagcccctgacaggaaaccgtc

SEQ ID NO: 249337 - DNA, 55 bp, Artificial
  Synthetic oligonucleotide
ccaaagctactgacgttggcgcgccacgacatgcaagagtgcagtgatcctgcgg

SEQ ID NO: 249338 - DNA, 55 bp, Artificial
  Synthetic oligonucleotide
ccccttgtgattgcatgactcgtgctctcatccaatgcagcggccgctctggccg

SEQ ID NO: 249339 - DNA, 50 bp, Artificial
  Synthetic oligonucleotide
cccggcggacaattccccgggcccttcggtcaactttccccatcacgttc

SEQ ID NO: 249340 - DNA, 55 bp, Artificial
  Synthetic oligonucleotide
ccctcatgttctccggaggtcgtagtgccgaccccacgcgacagacaagcacgag

SEQ ID NO: 249341 - DNA, 55 bp, Artificial
  Synthetic oligonucleotide
ccgctacgacatatgttccgagcagacagcaggcgaagacacccacgagccacgg

SEQ ID NO: 249342 - DNA, 55 bp, Artificial
  Synthetic oligonucleotide
ccggagaaatgatcacatggtgtacggtctcgtccgaggtgtattccaggaccga

SEQ ID NO: 249343 - DNA, 55 bp, Artificial
  Synthetic oligonucleotide
ccggttatgggtgggctgctgacgcctctagcatcgtacgggcttggaatcgcac

SEQ ID NO: 249344 - DNA, 56 bp, Artificial
  Synthetic oligonucleotide
gttcatggcaggtggtgcctttccggttgtggtgaaggggggctggcgggtcagac

SEQ ID NO: 249345 - DNA, 51 bp, Artificial
  Synthetic oligonucleotide
tatcgcttcgttcggcggacaaggggcggggaaccggggaggctccggtta

SEQ ID NO: 249346 - DNA, 55 bp, Artificial
  Synthetic oligonucleotide
gtgcagtctcgagatcacgtgccataagcattcattatgtccgatccaacgaatt

SEQ ID NO: 249347 - DNA, 55 bp, Artificial
  Synthetic oligonucleotide
gtgcaggtcaggcatggttggtgatcgtcgtaggttcacatccgatgcgggattc

SEQ ID NO: 249348 - DNA, 55 bp, Artificial
  Synthetic oligonucleotide
aagggaatgttagtcagatttgtcggattttgagagaattgacgggaagtcatcc

SEQ ID NO: 249349 - DNA, 54 bp, Artificial
  Synthetic oligonucleotide
ggtccggacaggtgtaggtgacgagtccccttcgaaagggagcagtgtgggccc

SEQ ID NO: 249350 - DNA, 55 bp, Artificial
  Synthetic oligonucleotide
ggtcagcggggtggttactacttgtggggcgggtcgtcgcgcacggatgccttct

SEQ ID NO: 249351 - DNA, 55 bp, Artificial
  Synthetic oligonucleotide
tcagcaacggcgtccacaccgcatcgccgccccatttggcgtgggcgagcatgat

SEQ ID NO: 249352 - DNA, 54 bp, Artificial
  Synthetic oligonucleotide
ggggcgatccgggtgtattggggtccagccaaggttcgccgaaaagccgcaata

SEQ ID NO: 249353 - DNA, 55 bp, Artificial
  Synthetic oligonucleotide
ggggaagtcccttctcgcgtataaggagacgtgtgcagtcgtccacagccaagtg

SEQ ID NO: 249354 - DNA, 55 bp, Artificial
  Synthetic oligonucleotide
ggggaaggagagccaatcggatgcctaagacgcaggcacgttgctttcacatgtc

SEQ ID NO: 249355 - DNA, 55 bp, Artificial
  Synthetic oligonucleotide
ctactttgcggtccatggcaccgacccgagtggagggccctattcgtgaacaccc

SEQ ID NO: 249356 - DNA, 55 bp, Artificial
  Synthetic oligonucleotide
ggctttcgcctacacggagccgaaagtcgcacaggtcagaaacggacctcgaacc

SEQ ID NO: 249357 - DNA, 55 bp, Artificial
  Synthetic oligonucleotide
tccggtcacgtggttcgaggcaccgcaggcagggtatcccgccctctactttgat

SEQ ID NO: 249358 - DNA, 55 bp, Artificial
  Synthetic oligonucleotide
ggcggatggggttgtcggtacgcgcagggttgacgcgccccggttggcacgtatc

SEQ ID NO: 249359 - DNA, 55 bp, Artificial
  Synthetic oligonucleotide
ggccgaggaggactgacccttgtaaccagattgagcgatgaatcaagagggcgcg

SEQ ID NO: 249360 - DNA, 55 bp, Artificial
  Synthetic oligonucleotide
tgagatgatatccaagagtgatcaaggcgacactcatagtgatcttcccgggagt

SEQ ID NO: 249361 - DNA, 52 bp, Artificial
  Synthetic oligonucleotide
ggcaccgacccgagtggagggccctattcgtgaacacccctaccgacgcccc

SEQ ID NO: 249362 - DNA, 55 bp, Artificial
  Synthetic oligonucleotide
tgcgagctgattgaccggcgcaccttccgcaccaggtcagaagccgaacgggccc

SEQ ID NO: 249363 - DNA, 55 bp, Artificial
  Synthetic oligonucleotide
ggaatccttgtggactccacgctgacccggagggctccgggattcacttatcgcc

SEQ ID NO: 249364 - DNA, 55 bp, Artificial
  Synthetic oligonucleotide
tggctgaccggttactacaagtgcaccgagcacgggcgtcagtggacgagcggat

SEQ ID NO: 249365 - DNA, 55 bp, Artificial
  Synthetic oligonucleotide
tttagcgatatggcatgccctccgacaccgatttgtgccactttcgcggagagcc

SEQ ID NO: 249366 - DNA, 60 bp, Artificial
  Synthetic oligonucleotide
aactgatcggcaaagtcccgacgcaggagccagcgccgtccatcactgcggacgagatgg

SEQ ID NO: 249367 - DNA, 55 bp, Artificial
  Synthetic oligonucleotide
aaatcggggtggtggctgtcagctcacccggcgtgtcgtagccagggcgtggtga

SEQ ID NO: 249368 - DNA, 55 bp, Artificial
  Synthetic oligonucleotide
acccgattcggcgtctggggcccgagcggtacgcacgcagcaagtggcaagtaac

SEQ ID NO: 249369 - DNA, 54 bp, Artificial
  Synthetic oligonucleotide
tcaagtcgaacctcactcaagccgtgttcgacgccatgtgcggcgactatcccg

SEQ ID NO: 249370 - DNA, 54 bp, Artificial
  Synthetic oligonucleotide
agtacccgcctaaatcttcgtcacatggtgagctggacttaaccgctatagcag

SEQ ID NO: 249371 - DNA, 53 bp, Artificial
  Synthetic oligonucleotide
gggtcatcgcagggcactcgagacgtacggcccgtgtccggcccaccgattct

SEQ ID NO: 249372 - DNA, 53 bp, Artificial
  Synthetic oligonucleotide
ctcccttctcgtccgccgaacctgaggtgacttccatgactgtgaccctcgct

SEQ ID NO: 249373 - DNA, 53 bp, Artificial
  Synthetic oligonucleotide
ctgggcaatcgaacctggaaagtcgcctgacagggattggcccaccgaaccga

SEQ ID NO: 249374 - DNA, 52 bp, Artificial
  Synthetic oligonucleotide
ggatccaacggatatgcctttcacctgcgcttatgcagaggtctcaggctga

SEQ ID NO: 249375 - DNA, 52 bp, Artificial
  Synthetic oligonucleotide
gccatttcatctcatacttcagtaaatcatggatgcggtatgtcggatggga

SEQ ID NO: 249376 - DNA, 52 bp, Artificial
  Synthetic oligonucleotide
tttccacgatcaccgggtgcttggggacgctcgtgcccctgttcgcctgggc

SEQ ID NO: 249377 - DNA, 58 bp, Artificial
  Synthetic oligonucleotide
tatgcaggccagaggcatatctgttgcatttccggccgaaactacggggaccccttcc

SEQ ID NO: 249378 - DNA, 52 bp, Artificial
  Synthetic oligonucleotide
cacgagctattccaggagaagggctatacctcgttcacggcttacctccgca

SEQ ID NO: 249379 - DNA, 51 bp, Artificial
  Synthetic oligonucleotide
aggtcacgatccacgcctcatctgaggcgcgcgggtccgggacgtaccggg

SEQ ID NO: 249380 - DNA, 51 bp, Artificial
  Synthetic oligonucleotide
acgggccttcatgaccgactgatcgttcaacgggtacgggcggcattcgcc

SEQ ID NO: 249381 - DNA, 51 bp, Artificial
  Synthetic oligonucleotide
acggagccggcgcattgtgatcatttcgcgagaaccctttccgggatcgag

SEQ ID NO: 249382 - DNA, 51 bp, Artificial
  Synthetic oligonucleotide
tgtcgcgtcgaacccagccgacgcttcctaatagtcgatcccgaaatgaga

SEQ ID NO: 249383 - DNA, 51 bp, Artificial
  Synthetic oligonucleotide
tagtgattcggtgcatcatgggtgttgccttcctgatctgcatggattggt

SEQ ID NO: 249384 - DNA, 50 bp, Artificial
  Synthetic oligonucleotide
acaaccgtggtccctgccgacgttccggatgataagagcgcggatcctga

SEQ ID NO: 249385 - DNA, 50 bp, Artificial
  Synthetic oligonucleotide
aatgtcctctacaagggctggggaacgcctgtccacatcgcagcaccgcc

SEQ ID NO: 249386 - DNA, 50 bp, Artificial
  Synthetic oligonucleotide
aatggtttctccggcacagggggcactcgtaggcccttcgcgatattgcg

SEQ ID NO: 249387 - DNA, 50 bp, Artificial
  Synthetic oligonucleotide
aatcgtggacccatcgaggtaagcacccaccgtcaagaggctgcggttga

SEQ ID NO: 249388 - DNA, 58 bp, Artificial
  Synthetic oligonucleotide
catccgcagccgaaacccctcgacttctacgctcttaggcatcgggtcggccgagcta

SEQ ID NO: 249389 - DNA, 50 bp, Artificial
  Synthetic oligonucleotide
aagttcggtagatccccggtgggagcctcattcgccacacatgcgccacg

SEQ ID NO: 249390 - DNA, 50 bp, Artificial
  Synthetic oligonucleotide
aaggcggacgggccaaacatgagatcgacgtcatcgctctggaccggagg

SEQ ID NO: 249391 - DNA, 50 bp, Artificial
  Synthetic oligonucleotide
aaggaaggcaatgcaggtgacggacgttgcgattgtgcgccgtttccctc

SEQ ID NO: 249392 - DNA, 50 bp, Artificial
  Synthetic oligonucleotide
aagcatctgccgagattccagtcgctgtgcgaaaaacacgggatgcgccc

SEQ ID NO: 249393 - DNA, 50 bp, Artificial
  Synthetic oligonucleotide
aagatccgagggacactccccacggcccttagactgtgggaatccccgaa

SEQ ID NO: 249394 - DNA, 50 bp, Artificial
  Synthetic oligonucleotide
aactctgagtgaaggacgccacaccggcgtgagggagctcacacccccgc

SEQ ID NO: 249395 - DNA, 50 bp, Artificial
  Synthetic oligonucleotide
aactccttagacccgcagttcacagggcgggcgttccctccgtcctacca

SEQ ID NO: 249396 - DNA, 50 bp, Artificial
  Synthetic oligonucleotide
aacgtctcggtgagctagcccgcccctgtcgacataccgcagcacttcga

SEQ ID NO: 249397 - DNA, 50 bp, Artificial
  Synthetic oligonucleotide
aacgtaggcctgtgccgttaccgccccgtgtctcgtctgtttcactcgtg

SEQ ID NO: 249398 - DNA, 50 bp, Artificial
  Synthetic oligonucleotide
aacgacgaccggtatgcggcatcagaggtgtcatgtgtcccgacgccttt

SEQ ID NO: 249399 - DNA, 59 bp, Artificial
  Synthetic oligonucleotide
tcttgcctctgtcggcatggacccttaaagatcttgcaatgcggcttttggccttacct

SEQ ID NO: 249400 - DNA, 50 bp, Artificial
  Synthetic oligonucleotide
aacctctcctcccgcacggagctccccgagggtacgggccgtccgtaatc

SEQ ID NO: 249401 - DNA, 50 bp, Artificial
  Synthetic oligonucleotide
aaccggtgtcccaccgcatgagaaatccctcatcgtcggcggacaagaga

SEQ ID NO: 249402 - DNA, 50 bp, Artificial
  Synthetic oligonucleotide
aaccggaccgattccttctccgcccggggaccgtcatatggccaggaaca

SEQ ID NO: 249403 - DNA, 50 bp, Artificial
  Synthetic oligonucleotide
aaatggcgccccttgagagccgcacagctccatgaactggtaccggccta

SEQ ID NO: 249404 - DNA, 50 bp, Artificial
  Synthetic oligonucleotide
aaacacgcttagtccccgccattccggtacccgggagcagccgagagtat

SEQ ID NO: 249405 - DNA, 50 bp, Artificial
  Synthetic oligonucleotide
agcccactccggggacagctcccttacaaagttaagggcgtcggccttct

SEQ ID NO: 249406 - DNA, 50 bp, Artificial
  Synthetic oligonucleotide
acgccgtgggagacgaacccctcacgacggggccctcaggaggcattcag

SEQ ID NO: 249407 - DNA, 50 bp, Artificial
  Synthetic oligonucleotide
acgccgccagacgagcacggtggttcagcgactgccacgttcaagcatga

SEQ ID NO: 249408 - DNA, 50 bp, Artificial
  Synthetic oligonucleotide
acgatctgacatgtccactgtccgccaggtgcagtcgtagcgtcgccggt

SEQ ID NO: 249409 - DNA, 50 bp, Artificial
  Synthetic oligonucleotide
acctttcgcgggagccatgatttcgcaggggcttgcaggggagagcaggt

SEQ ID NO: 249410 - DNA, 60 bp, Artificial
  Synthetic oligonucleotide
cctcgatggagtcgaacggagagtgactgtgcgccagatgtgcggtggctttccgtggtt

SEQ ID NO: 249411 - DNA, 50 bp, Artificial
  Synthetic oligonucleotide
acctttcccctcgctggataggccatagcattacgggcgtgcgccgtact

SEQ ID NO: 249412 - DNA, 50 bp, Artificial
  Synthetic oligonucleotide
accttggcagacctctcccgcctgagcgcgggattccccgtatcggaagg

SEQ ID NO: 249413 - DNA, 50 bp, Artificial
  Synthetic oligonucleotide
acctcgggaacactgtgagggaggctcatccgcgactcgtcgcacaaaga

SEQ ID NO: 249414 - DNA, 50 bp, Artificial
  Synthetic oligonucleotide
acctacggcgccaggtagagaccacggagcgctgcacttgtgccataacg

SEQ ID NO: 249415 - DNA, 50 bp, Artificial
  Synthetic oligonucleotide
accgctgcttgcaacgaccgaacaacccgtggcgttagagcgtgtcccgt

SEQ ID NO: 249416 - DNA, 50 bp, Artificial
  Synthetic oligonucleotide
acatgtcgcacttcctggagacgtcgcgtccgttccgcaggcccggttat

SEQ ID NO: 249417 - DNA, 50 bp, Artificial
  Synthetic oligonucleotide
gctcagctgagcgcacgcctgacgaactccgtggtgggtcgagttggttt

SEQ ID NO: 249418 - DNA, 50 bp, Artificial
  Synthetic oligonucleotide
acatgcgcagaggacgctgaacgctccaggcatctgcagaccgcgtgttc

SEQ ID NO: 249419 - DNA, 50 bp, Artificial
  Synthetic oligonucleotide
acatcccagaagcctccaagggcccgtcaatgcctcgttgacgcaacccc

SEQ ID NO: 249420 - DNA, 50 bp, Artificial
  Synthetic oligonucleotide
acaggagacgccgaaccctccggcctccaccgagtcccctcatcacgccc

SEQ ID NO: 249421 - DNA, 55 bp, Artificial
  Synthetic oligonucleotide
cgcgagattctgttgcaccaatatacgttgaagttaagattgtcaggtttccgcc

SEQ ID NO: 249422 - DNA, 55 bp, Artificial
  Synthetic oligonucleotide
ccacccgcggtactaagatcaccgtacagcgacttgcagttacgaatcgtcatgt

SEQ ID NO: 249423 - DNA, 55 bp, Artificial
  Synthetic oligonucleotide
gcgggttgtcacttggtatgagacttaccaattggccgcctcctaatttgcgttc

SEQ ID NO: 249424 - DNA, 55 bp, Artificial
  Synthetic oligonucleotide
catatattcttgatcaccgtcggataccaaggcaccgcgaggaccgcatttagtg

SEQ ID NO: 249425 - DNA, 55 bp, Artificial
  Synthetic oligonucleotide
gcgtttaacagagtcggatcggagacatgtatatatgcggtatcgcgcaactctc

SEQ ID NO: 249426 - DNA, 55 bp, Artificial
  Synthetic oligonucleotide
agtatgcagacagtttagcttccgcctctgtagggtatgctttagtgcatcttgc

SEQ ID NO: 249427 - DNA, 55 bp, Artificial
  Synthetic oligonucleotide
gtgcgatgaggtgtattctgagtgggcaactttaaatcaagtgacgacagcaaac

SEQ ID NO: 249428 - DNA, 55 bp, Artificial
  Synthetic oligonucleotide
acataaagcttggtatcaacccaagccgctgaaagggttatatcgcataatccgg

SEQ ID NO: 249429 - DNA, 55 bp, Artificial
  Synthetic oligonucleotide
aagctcgtcaagacgtgatcctgttaagttcttaatggcatcgcctgaaaggacc

SEQ ID NO: 249430 - DNA, 55 bp, Artificial
  Synthetic oligonucleotide
tgtcgtcagtcttaggtccttcaatatgcggaaaacgttcttttagcgcagctac

SEQ ID NO: 249431 - DNA, 54 bp, Artificial
  Synthetic oligonucleotide
gtaccgggaactaaaagacaaggaacgcaatgaaccgacagcagataacgggaa

SEQ ID NO: 249432 - DNA, 54 bp, Artificial
  Synthetic oligonucleotide
cgctcttacgtaagtatgtgtggtcttaatcggtccggttaacttatcggtcaa

SEQ ID NO: 249433 - DNA, 54 bp, Artificial
  Synthetic oligonucleotide
ttttaaccctggcggtcataatcttaaactggacgataataagaagcaccagaa

SEQ ID NO: 249434 - DNA, 54 bp, Artificial
  Synthetic oligonucleotide
ttttcggtaccgctttaggtaatttcggtgttgactgcatgctggacggtctga

SEQ ID NO: 249435 - DNA, 54 bp, Artificial
  Synthetic oligonucleotide
ccttcagttactgtcggtgagttgttaaagagccacaatgctgatgcagtaagc

SEQ ID NO: 249436 - DNA, 54 bp, Artificial
  Synthetic oligonucleotide
aacgatacgcattgccggatctgcaagaagcttacggtataagtgaaggatata

SEQ ID NO: 249437 - DNA, 53 bp, Artificial
  Synthetic oligonucleotide
ttaatttgggctatctgcttaggtctcatgttcagagctgcccacgataatac

SEQ ID NO: 249438 - DNA, 52 bp, Artificial
  Synthetic oligonucleotide
tccccaggatttaggatcgtttactgcaaagagtaagggataaggagcgtct

SEQ ID NO: 249439 - DNA, 52 bp, Artificial
  Synthetic oligonucleotide
ccgtaacactgccgaacgcagtaggcggttttactgtaggaggattaaaccc

SEQ ID NO: 249440 - DNA, 52 bp, Artificial
  Synthetic oligonucleotide
gcttgggcacgagcgctaaaattaaccgataaagaaagccctacaactccga

SEQ ID NO: 249441 - DNA, 51 bp, Artificial
  Synthetic oligonucleotide
aaacgcaacctcgttgtcggtttgcggatccactaccgcccagacgtcacc

SEQ ID NO: 249442 - DNA, 51 bp, Artificial
  Synthetic oligonucleotide
atcgtcgcagcgttaaaccctacctttgctcctttaccacaatgcgttatg

SEQ ID NO: 249443 - DNA, 55 bp, Artificial
  Synthetic oligonucleotide
cggtaccacatagggcttaccgttatcgcacatcccaagatgcagaacatcgcac

SEQ ID NO: 249444 - DNA, 51 bp, Artificial
  Synthetic oligonucleotide
ggttcaagcgcccccattaccgcagtaggagtggagccgacgctttctacg

SEQ ID NO: 249445 - DNA, 51 bp, Artificial
  Synthetic oligonucleotide
ggctccggtataaagtcgcggcagcgcccgttcttgtatcatacggacgga

SEQ ID NO: 249446 - DNA, 51 bp, Artificial
  Synthetic oligonucleotide
ggcgggtttcctctgccgagctcttatgaggttcgcttgacaggccatccg

SEQ ID NO: 249447 - DNA, 51 bp, Artificial
  Synthetic oligonucleotide
ggaagacggctgtaatgctccggggcttgtcgtatatccggttcgtgccga

SEQ ID NO: 249448 - DNA, 51 bp, Artificial
  Synthetic oligonucleotide
cacagacgcgaaacgcaacctcgttgtcggtttgcggatccactaccgccc

SEQ ID NO: 249449 - DNA, 51 bp, Artificial
  Synthetic oligonucleotide
cgcacgcgacaaacagtgtagttccgaaaggcggtgttgcctggcccattg

SEQ ID NO: 249450 - DNA, 51 bp, Artificial
  Synthetic oligonucleotide
cctaataccacttttcgcgtacagcttgaaaacggacatatcgtaatggcc

SEQ ID NO: 249451 - DNA, 51 bp, Artificial
  Synthetic oligonucleotide
cgtgcgcctggtcaattcaggacctgccgatcaggaagtggtgatggacgg

SEQ ID NO: 249452 - DNA, 51 bp, Artificial
  Synthetic oligonucleotide
ctcagatccggttcctgcagtagtggggaccatgacggtaggaacgccgcg

SEQ ID NO: 249453 - DNA, 51 bp, Artificial
  Synthetic oligonucleotide
gacgtgcaatacgtgagtccgttgagggggcgggggccagtgaggtatttt

SEQ ID NO: 249454 - DNA, 55 bp, Artificial
  Synthetic oligonucleotide
cggttgcagtatctttggcgacgccttttaatactttgcttccaccaaacagtgc

SEQ ID NO: 249455 - DNA, 51 bp, Artificial
  Synthetic oligonucleotide
gccgtgattgctttgcagtcagtttacggcataggcccgacccgtgcgcgc

SEQ ID NO: 249456 - DNA, 51 bp, Artificial
  Synthetic oligonucleotide
ccggggcgtacggttttaatgcctgcgtaaagggactcttgcgcgcattcg

SEQ ID NO: 249457 - DNA, 51 bp, Artificial
  Synthetic oligonucleotide
catggtgcaccgggcgtaccgcatctgcagagctgtgtaacaggcctcatc

SEQ ID NO: 249458 - DNA, 51 bp, Artificial
  Synthetic oligonucleotide
gcgtaccgcatctgcagagctgtgtaacaggcctcatcggagaactgcgcg

SEQ ID NO: 249459 - DNA, 50 bp, Artificial
  Synthetic oligonucleotide
gaagggcgcctctgtccttcaaggcatcggcacacttgcacaaggtcccg

SEQ ID NO: 249460 - DNA, 50 bp, Artificial
  Synthetic oligonucleotide
gggacgggttgcaccgcggttggtttgaattacgagcagggtaagggcat

SEQ ID NO: 249461 - DNA, 50 bp, Artificial
  Synthetic oligonucleotide
ggggtgtgcctaaagctccggctttggtaaccaggacgcagttttgcgga

SEQ ID NO: 249462 - DNA, 50 bp, Artificial
  Synthetic oligonucleotide
ccgtggctgcagtttgccgagtcccactctaagggagatcgcgtaaccgg

SEQ ID NO: 249463 - DNA, 50 bp, Artificial
  Synthetic oligonucleotide
gctcttgagtcctggcgcgtcgctcattggttatggcagcaaggtcgcca

SEQ ID NO: 249464 - DNA, 50 bp, Artificial
  Synthetic oligonucleotide
agagtattgccgtttaactcggcataagcctgtgtagtatcacctgctga

SEQ ID NO: 249465 - DNA, 54 bp, Artificial
  Synthetic oligonucleotide
cttcagctagttttgccgtatagattccggaaataaggccttcgaccgtaggcg

SEQ ID NO: 249466 - DNA, 50 bp, Artificial
  Synthetic oligonucleotide
cgttatcgtaagacgcgcgggcgacgttattccgcaggtggcaggggtag

SEQ ID NO: 249467 - DNA, 50 bp, Artificial
  Synthetic oligonucleotide
tccgtttcgtgattgtcggcggagccgctaccgtaactgatttggcggta

SEQ ID NO: 249468 - DNA, 50 bp, Artificial
  Synthetic oligonucleotide
tcgtgctgctttgggggatgttacccagtatgcaggtgcccgccgcttaa

SEQ ID NO: 249469 - DNA, 50 bp, Artificial
  Synthetic oligonucleotide
tgaatcggctcctggatccgtaagtcaggttcgcgagggagcggctgctt

SEQ ID NO: 249470 - DNA, 50 bp, Artificial
  Synthetic oligonucleotide
gcgtgcggaatccgacacagacgcgaaacgcaacctcgttgtcggtttgc

SEQ ID NO: 249471 - DNA, 50 bp, Artificial
  Synthetic oligonucleotide
aacctccgtatgccgaatggggtgatatgttagcccgctcccgcggcttt

SEQ ID NO: 249472 - DNA, 55 bp, Artificial
  Synthetic oligonucleotide
gacatcgccggaccagcccatttgaccgataaagaggcctaaaactacataaccg

SEQ ID NO: 249473 - DNA, 55 bp, Artificial
  Synthetic oligonucleotide
gcctgcctttaaactgcctgagcccgtattaaaactattggtcaacacggtaggc

SEQ ID NO: 249474 - DNA, 55 bp, Artificial
  Synthetic oligonucleotide
ccgcttagtttacttaaaagccgcagcgtggattcacttactgcatttgtatcgc

SEQ ID NO: 249475 - DNA, 55 bp, Artificial
  Synthetic oligonucleotide
ccatgacaagaggcattaggatggcgttagatagtccgtgcggaatgtgatagcg

SEQ ID NO: 249476 - DNA, 55 bp, Artificial
  Synthetic oligonucleotide
gaaagcgtcattgctactctgatctacgcatcgatcgttacctatgttctcttga

SEQ ID NO: 249477 - DNA, 55 bp, Artificial
  Synthetic oligonucleotide
cgactcgacggaattgagaaggctgcgaatcaacgaaggaaacgagttctggtct

SEQ ID NO: 249478 - DNA, 50 bp, Artificial
  Synthetic oligonucleotide
acggatgctttgctgcatgccaatcgccgccccaaggctaagcgtcttta

SEQ ID NO: 249479 - DNA, 50 bp, Artificial
  Synthetic oligonucleotide
acggagcacatagtcggaacgggcagaagggcacctttcggcatggagcg

SEQ ID NO: 249480 - DNA, 50 bp, Artificial
  Synthetic oligonucleotide
acggacgtccccacgtgaggatttcagcctgcatacaagccgcccgacaa

SEQ ID NO: 249481 - DNA, 50 bp, Artificial
  Synthetic oligonucleotide
acgccatgcataccggaaccgtcccgattgccggcatagacacccgcgca

SEQ ID NO: 249482 - DNA, 50 bp, Artificial
  Synthetic oligonucleotide
accggacgctttctcagcgcgagctgcatagagccgcgaagctttgcccg

SEQ ID NO: 249483 - DNA, 50 bp, Artificial
  Synthetic oligonucleotide
accggaaccgtcccgattgccggcatagacacccgcgcatcctgtcccat

SEQ ID NO: 249484 - DNA, 50 bp, Artificial
  Synthetic oligonucleotide
accgctcctacctctcagagcttttaaccatcggccgcagagcgcgggac

SEQ ID NO: 249485 - DNA, 50 bp, Artificial
  Synthetic oligonucleotide
accgccgcggaaaaccatacggctaccgccgaaatgcacccgattccaca

SEQ ID NO: 249486 - DNA, 50 bp, Artificial
  Synthetic oligonucleotide
acccggcacgcacatcgccacaaccttgccgttatggagcgacttaacgc

SEQ ID NO: 249487 - DNA, 50 bp, Artificial
  Synthetic oligonucleotide
acccgccaaggacgcttcgcagagggcaagagcgtacggaaacattcccc

SEQ ID NO: 249488 - DNA, 55 bp, Artificial
  Synthetic oligonucleotide
ccttcggctctaacctctctgttcgctactttaacgggacggtgaacgctattgc

SEQ ID NO: 249489 - DNA, 50 bp, Artificial
  Synthetic oligonucleotide
accacgttacggttcagcccgagtgggaaggcatgggaccgtgctggaat

SEQ ID NO: 249490 - DNA, 50 bp, Artificial
  Synthetic oligonucleotide
accacagaggctacgcagggggcattcctttccggtcgttgtgacgctta

SEQ ID NO: 249491 - DNA, 50 bp, Artificial
  Synthetic oligonucleotide
aatggctcggattccaccaggcggatgggatttccgttttgcggatccgg

SEQ ID NO: 249492 - DNA, 55 bp, Artificial
  Synthetic oligonucleotide
cctcccgtgatcgtcagttggccatcgcggatttgatagccgttgcggccgacat

SEQ ID NO: 249493 - DNA, 55 bp, Artificial
  Synthetic oligonucleotide
ccaggcgatccgaatccaactgcggacacaggctacaaaatccttagtctgcttc

SEQ ID NO: 249494 - DNA, 55 bp, Artificial
  Synthetic oligonucleotide
catgttgacgacgctcccggcaatcattctcgtgtggaatccgtcggagctaaat

SEQ ID NO: 249495 - DNA, 55 bp, Artificial
  Synthetic oligonucleotide
catgtctgacgacaacccgcgaatatccacggatgcttctgagagtcggcccgac

SEQ ID NO: 249496 - DNA, 55 bp, Artificial
  Synthetic oligonucleotide
cagcgacgcgcttggatgcctctgtgacgtctgcaatgtaagcttgagcgacgac

SEQ ID NO: 249497 - DNA, 55 bp, Artificial
  Synthetic oligonucleotide
acgttgtcaagaatgttctccagaggaccggccatatccaggcaagtcgtgacac

SEQ ID NO: 249498 - DNA, 55 bp, Artificial
  Synthetic oligonucleotide
agccttcgacggtagctattgcgtccggtatgagcgttccccgagctcaccgctt

SEQ ID NO: 249499 - DNA, 55 bp, Artificial
  Synthetic oligonucleotide
gaccgcagaaacggtttaggaagggaggagtccgcatgctcgaatggcttgatcg

SEQ ID NO: 249500 - DNA, 55 bp, Artificial
  Synthetic oligonucleotide
ctcgaggataggcttaagttcgttatgacaatgtcgccggccgtgtaagtaaagg

SEQ ID NO: 249501 - DNA, 55 bp, Artificial
  Synthetic oligonucleotide
gcgatatgtgggacgttgtagccggcgtaacacgcagagattctggtgcggctaa

SEQ ID NO: 249502 - DNA, 55 bp, Artificial
  Synthetic oligonucleotide
gcttgggctattctgaggctcaagcgcttttagatagtgctgcgcgccatattgc

SEQ ID NO: 249503 - DNA, 55 bp, Artificial
  Synthetic oligonucleotide
ggcagatacgccctcactggtcgctgaagtgcttgaatccagagcgcttcgccgc

SEQ ID NO: 249504 - DNA, 55 bp, Artificial
  Synthetic oligonucleotide
ggcgcaattttcattgccgaaagttcctgatcggtgtagcgcactgcacagccgg

SEQ ID NO: 249505 - DNA, 55 bp, Artificial
  Synthetic oligonucleotide
ggtatagttaaattcgctctcgttgatatccggcccgagaagtttgacactatgg

SEQ ID NO: 249506 - DNA, 55 bp, Artificial
  Synthetic oligonucleotide
gtccctgggttattgtcggacattcggagagaagacagtatcacggcgagacgaa

SEQ ID NO: 249507 - DNA, 55 bp, Artificial
  Synthetic oligonucleotide
ttgaaacaacagaacgttttcagattttccgtgttgttctgatgacacaacctca

SEQ ID NO: 249508 - DNA, 55 bp, Artificial
  Synthetic oligonucleotide
gtctgccagttaatgagaaatatctcccctcagaactcccgctttctgcacaaat

SEQ ID NO: 249509 - DNA, 55 bp, Artificial
  Synthetic oligonucleotide
gtgcataatgtcattggacaatgtaattctgtggctgacttctgtaatgccgggc

SEQ ID NO: 249510 - DNA, 55 bp, Artificial
  Synthetic oligonucleotide
gtggagcaaccttcggccattgactgagtagaccctggtcgaacgtatgggtgga

SEQ ID NO: 249511 - DNA, 55 bp, Artificial
  Synthetic oligonucleotide
ctccgactatcctgttctctggacattccctgcactcgcggttgtaggcgctctg

SEQ ID NO: 249512 - DNA, 53 bp, Artificial
  Synthetic oligonucleotide
ttacgaattgaagcgcggaccgtacgaaaacctcgggtcatggaatctaaacc

SEQ ID NO: 249513 - DNA, 55 bp, Artificial
  Synthetic oligonucleotide
tgcagccaataacgagcgtcaggcaccgataacggtgtcagtgatccttgagccg

SEQ ID NO: 249514 - DNA, 55 bp, Artificial
  Synthetic oligonucleotide
tatcgagacggaaagcccaagtacttggcagataccccgcgttttattaagtatg

SEQ ID NO: 249515 - DNA, 54 bp, Artificial
  Synthetic oligonucleotide
agaactaggcaaacgcagctcttctgaacgagcggggaaaatcgtcatcgcaac

SEQ ID NO: 249516 - DNA, 54 bp, Artificial
  Synthetic oligonucleotide
tagtcaggtgcgtctgcgtgtattggctcgagacgtgagtattgccgtggaaaa

SEQ ID NO: 249517 - DNA, 54 bp, Artificial
  Synthetic oligonucleotide
aaatcggagaattcaccgacccgaatgaaagcccagaatacgatattttctacg

SEQ ID NO: 249518 - DNA, 54 bp, Artificial
  Synthetic oligonucleotide
cgattgaagtcaataagggcagtctcaatgtcggtacgctcgaattgaataacg

SEQ ID NO: 249519 - DNA, 51 bp, Artificial
  Synthetic oligonucleotide
tcggagcgttcacgataccgttgtagcgagcgtaatagcacgcgtcatgga

SEQ ID NO: 249520 - DNA, 51 bp, Artificial
  Synthetic oligonucleotide
taaaggacggcgttaagcgtgcaactcgactcgtgactcagcttctcacga

SEQ ID NO: 249521 - DNA, 50 bp, Artificial
  Synthetic oligonucleotide
cgggtgtttgaaaccgttgggaatttgacggtgtggacgtttattacgcc

SEQ ID NO: 249522 - DNA, 55 bp, Artificial
  Synthetic oligonucleotide
ctcagccagcggtagtacggtccaaaagctcgggactcacgagtacgaattctca

SEQ ID NO: 249523 - DNA, 50 bp, Artificial
  Synthetic oligonucleotide
agggcagcttctacgctcacgaaccgaccatcctgcctccgagctggggt

SEQ ID NO: 249524 - DNA, 50 bp, Artificial
  Synthetic oligonucleotide
aggctcaacgtgcttcggagcgtcttctctgacgggcaggcctttgatga

SEQ ID NO: 249525 - DNA, 50 bp, Artificial
  Synthetic oligonucleotide
aggaccccgggcgccctagaccgttgtccatgcgccaagtaccttcgccc

SEQ ID NO: 249526 - DNA, 50 bp, Artificial
  Synthetic oligonucleotide
agcttttaaccatcggccgcagagcgcgggactaggatctgcatcccgag

SEQ ID NO: 249527 - DNA, 50 bp, Artificial
  Synthetic oligonucleotide
agcggtccgaccttccgaacaatagtgcggctctggatcgtgtaggcggc

SEQ ID NO: 249528 - DNA, 50 bp, Artificial
  Synthetic oligonucleotide
agcaggggaccgcaccgtattggagttggatccctcagctacccccgaag

SEQ ID NO: 249529 - DNA, 50 bp, Artificial
  Synthetic oligonucleotide
agcaagccacggagtcgccctgatcctcttctctgttgcggttccggttt

SEQ ID NO: 249530 - DNA, 50 bp, Artificial
  Synthetic oligonucleotide
agagttcgctgaatccgcaccagaagggatgcggggcctttgcgctgagg

SEQ ID NO: 249531 - DNA, 50 bp, Artificial
  Synthetic oligonucleotide
agggcgggaacgttgacttccatgaagccggaacgagggccggaacccat

SEQ ID NO: 249532 - DNA, 50 bp, Artificial
  Synthetic oligonucleotide
agtccggagctcctcaaacgctacgcacctgactggatcggtcgtccgac

SEQ ID NO: 249533 - DNA, 55 bp, Artificial
  Synthetic oligonucleotide
cgtctaatgcctttcgtctcttccagggcaattaaacgttctgcgatacgggcgc

SEQ ID NO: 249534 - DNA, 50 bp, Artificial
  Synthetic oligonucleotide
agtcggcgtgaaggcaggtggctttatggttcgagacggcaatcgcccac

SEQ ID NO: 249535 - DNA, 50 bp, Artificial
  Synthetic oligonucleotide
agtggacacgcagtactgcccccgacggcacgcctcgtcttcagtctcag

SEQ ID NO: 249536 - DNA, 50 bp, Artificial
  Synthetic oligonucleotide
atccgggtcccagccttcgttgggcggctgtttgtccaagtgcccgtaga

SEQ ID NO: 249537 - DNA, 50 bp, Artificial
  Synthetic oligonucleotide
atgacgggctcccaggcacttttatccgggtcccagccttcgttgggcgg

SEQ ID NO: 249538 - DNA, 50 bp, Artificial
  Synthetic oligonucleotide
atgcaaaccgccggacattgcgaggagtgtgctcacaagacggccggcat

SEQ ID NO: 249539 - DNA, 50 bp, Artificial
  Synthetic oligonucleotide
atgcagcgactcgttggggccatgtgcgttggagttcggtcctaaggctc

SEQ ID NO: 249540 - DNA, 50 bp, Artificial
  Synthetic oligonucleotide
atgcgctgccgtgtcctctggaaccgaagcacaatcccaattcgccgtct

SEQ ID NO: 249541 - DNA, 50 bp, Artificial
  Synthetic oligonucleotide
taagccgcacaggaacatatctcctgcgatgccggaatggagacgaatcg

SEQ ID NO: 249542 - DNA, 50 bp, Artificial
  Synthetic oligonucleotide
aatgcgggctccgtctttatccaaagtcgtcgccatgcgcgtgtcgttga

SEQ ID NO: 249543 - DNA, 50 bp, Artificial
  Synthetic oligonucleotide
aatgcgcagatgcgctgccgtgtcctctggaaccgaagcacaatcccaat

SEQ ID NO: 249544 - DNA, 55 bp, Artificial
  Synthetic oligonucleotide
cggtagaaacgttcagtgaattggcaagacgcactaaagcgtaaagcgtcggaga

SEQ ID NO: 249545 - DNA, 50 bp, Artificial
  Synthetic oligonucleotide
aatccgatgggcggagcgcttgaatgggcattcggaccggagaacgcgat

SEQ ID NO: 249546 - DNA, 50 bp, Artificial
  Synthetic oligonucleotide
aagtgcctgtgatttcgggtttctcaggcccggcctccgtcgctttcacg

SEQ ID NO: 249547 - DNA, 50 bp, Artificial
  Synthetic oligonucleotide
aagtccctgaagcactcttcttacggcccatgcgggctgccgatcggagc

SEQ ID NO: 249548 - DNA, 50 bp, Artificial
  Synthetic oligonucleotide
aagggccgcaccagtatgcgacgacctggggtgcgcagaactttcgcgaa

SEQ ID NO: 249549 - DNA, 50 bp, Artificial
  Synthetic oligonucleotide
aaggctccttacccgagcgccagtcgtaaccggcaaccggagcatttgtc

SEQ ID NO: 249550 - DNA, 50 bp, Artificial
  Synthetic oligonucleotide
aagcgccgtaggctaaaagacaggcgagaatcggtgtgagccagccgact

SEQ ID NO: 249551 - DNA, 50 bp, Artificial
  Synthetic oligonucleotide
aagccccgttacggtaattgcgccggaggctcgggatgccagcgccatct

SEQ ID NO: 249552 - DNA, 50 bp, Artificial
  Synthetic oligonucleotide
aagcccatggtccgcaagattcgccagcccggcctctgacacgcccactt

SEQ ID NO: 249553 - DNA, 50 bp, Artificial
  Synthetic oligonucleotide
aagccaacgggcggaacatcagcgctgcaaggattacgagcatggcccaa

SEQ ID NO: 249554 - DNA, 50 bp, Artificial
  Synthetic oligonucleotide
aagcagggctgacgacatcaaggcagagcaaggccggccgttctcacgaa

SEQ ID NO: 249555 - DNA, 55 bp, Artificial
  Synthetic oligonucleotide
cgctcgatccgttgtatctcgtctttaacagcacacggacagactccatgcaccg

SEQ ID NO: 249556 - DNA, 50 bp, Artificial
  Synthetic oligonucleotide
aagcactacggggcgagatgtggcgggattgagattagcgcagcgagctc

SEQ ID NO: 249557 - DNA, 50 bp, Artificial
  Synthetic oligonucleotide
aagcacggctccacttggccttagtgttcgggtcgcccaagtaggcccaa

SEQ ID NO: 249558 - DNA, 50 bp, Artificial
  Synthetic oligonucleotide
aacggcggcttcacctcaagccgttggtatgggtgtcatggtgtgcttgg

SEQ ID NO: 249559 - DNA, 50 bp, Artificial
  Synthetic oligonucleotide
aaccagacgcgtgtttgccactcgtcaacggttgcgggtcttggaccgtc

SEQ ID NO: 249560 - DNA, 50 bp, Artificial
  Synthetic oligonucleotide
aaccaattccgcccgtgtggcagcctttcccgcggacttaagctttcctg

SEQ ID NO: 249561 - DNA, 50 bp, Artificial
  Synthetic oligonucleotide
aacattgacgcgggccgggcaacagtctcagcgcaccgcaaataagttcc

SEQ ID NO: 249562 - DNA, 50 bp, Artificial
  Synthetic oligonucleotide
aacatccctctgccttgcggcatcggtagccctcgcgagcatcgacaggg

SEQ ID NO: 249563 - DNA, 50 bp, Artificial
  Synthetic oligonucleotide
aaagggctcccgctgtgcatgagactcttgcgcgaaacgcatcaggtgct

SEQ ID NO: 249564 - DNA, 50 bp, Artificial
  Synthetic oligonucleotide
aaaggcaatgaaggggttcgagtcgaggatcggtcccccggcgggcttaa

SEQ ID NO: 249565 - DNA, 50 bp, Artificial
  Synthetic oligonucleotide
aaagcgccgctctcatcagccccctggatgtgcagaccaatcttcgcggg

SEQ ID NO: 249566 - DNA, 55 bp, Artificial
  Synthetic oligonucleotide
cgcagcgtacgacgcagggcacgttggtttcagaagtaacgctggcgtggttgac

SEQ ID NO: 249567 - DNA, 50 bp, Artificial
  Synthetic oligonucleotide
aaagccgaagtgttcggatacgtcaagccgcccggaaggagtggccttgc

SEQ ID NO: 249568 - DNA, 50 bp, Artificial
  Synthetic oligonucleotide
aaagcacatgggaccgagcgaaattgaagccagcatggctccgacccaga

SEQ ID NO: 249569 - DNA, 50 bp, Artificial
  Synthetic oligonucleotide
aaacgggcggctgctttgacgagcaatacccctgcggtctacgcgagcgg

SEQ ID NO: 249570 - DNA, 50 bp, Artificial
  Synthetic oligonucleotide
aaaatcgtgagctgcactaacggcgcagcagaggtctgaccggcacgtcc

SEQ ID NO: 249571 - DNA, 50 bp, Artificial
  Synthetic oligonucleotide
aaaaccgcgggatgcgtaaaagcgagcggcggtacgacccgaaactccta

SEQ ID NO: 249572 - DNA, 50 bp, Artificial
  Synthetic oligonucleotide
agaggtctggatttcggcggcacaaggccgtttgcttcgctctctgacgc

SEQ ID NO: 249573 - DNA, 50 bp, Artificial
  Synthetic oligonucleotide
agaggccaattcgctccgttatgccaatgcccgggagccgcagtgagaaa

SEQ ID NO: 249574 - DNA, 50 bp, Artificial
  Synthetic oligonucleotide
agagcaaaagattccggcttgcgttgcgcccaagagctgaacggctctgg

SEQ ID NO: 249575 - DNA, 50 bp, Artificial
  Synthetic oligonucleotide
agagaggagttcctggcaccccgtgtgcgacgtgagaatgacgcatcccg

SEQ ID NO: 249576 - DNA, 50 bp, Artificial
  Synthetic oligonucleotide
actgcgagggcatttatcccggctgcaaggacagagccgcacgcgttaaa

SEQ ID NO: 249577 - DNA, 55 bp, Artificial
  Synthetic oligonucleotide
cgcagcctctgaacaacgttgcttgttatgctcacggtctcatgaaagtgttcac

SEQ ID NO: 249578 - DNA, 50 bp, Artificial
  Synthetic oligonucleotide
actcgtcaacggttgcgggtcttggaccgtcgtttggacgcggctcaatg

SEQ ID NO: 249579 - DNA, 50 bp, Artificial
  Synthetic oligonucleotide
actcgctccgatctgcggattgtggcgaatcgtctgaccgtgcgctccga

SEQ ID NO: 249580 - DNA, 50 bp, Artificial
  Synthetic oligonucleotide
actcgaggaagcgtcatgaagccgggcttagcctgtgaggtcctggcctt

SEQ ID NO: 249581 - DNA, 50 bp, Artificial
  Synthetic oligonucleotide
actcatggagcggccccttaagaacggcttggcccccggtggctttgccc

SEQ ID NO: 249582 - DNA, 50 bp, Artificial
  Synthetic oligonucleotide
actcatccagcattgacccgaatagctcacgcagagcgccccatgcacga

SEQ ID NO: 249583 - DNA, 50 bp, Artificial
  Synthetic oligonucleotide
actaggaccctgcgtaaggcggccacaaggaccgtcggacttggaactgc

SEQ ID NO: 249584 - DNA, 50 bp, Artificial
  Synthetic oligonucleotide
acgtggcggggaccggtgattccttctgcgggcaacggattaacgggccc

SEQ ID NO: 249585 - DNA, 50 bp, Artificial
  Synthetic oligonucleotide
acggtgcgcgcaactcggttttcgtccccttcttcggtgtccaagcggcg

SEQ ID NO: 249586 - DNA, 50 bp, Artificial
  Synthetic oligonucleotide
acggtcccggctgtcaagtcgatccgcagggtgcctatcccggctgccag

SEQ ID NO: 249587 - DNA, 50 bp, Artificial
  Synthetic oligonucleotide
acggcagcggactttctcgcaccaccgcagtctccacagacgccttcgtg

SEQ ID NO: 249588 - DNA, 55 bp, Artificial
  Synthetic oligonucleotide
gaacgtctctatacctggcgggaggacctacacttacagttctgtatccgtactc

SEQ ID NO: 249589 - DNA, 55 bp, Artificial
  Synthetic oligonucleotide
ctgagggtcggtgagggtatcatcctgggaacagactccaccaacgggcgagacg

SEQ ID NO: 249590 - DNA, 55 bp, Artificial
  Synthetic oligonucleotide
caccattagtgtctcccgttataaccgccgtgggaggtgcctccccatatccgca

SEQ ID NO: 249591 - DNA, 53 bp, Artificial
  Synthetic oligonucleotide
tgttccgggaagtttcgaatcgcttgtaagttttctagcccgatacaaaatcg

SEQ ID NO: 249592 - DNA, 55 bp, Artificial
  Synthetic oligonucleotide
caggaaccttttcaggttatgccacaggataggattgcacaaatgatcatagccc

SEQ ID NO: 249593 - DNA, 55 bp, Artificial
  Synthetic oligonucleotide
tgcacctttcgcatctcatcactagacccctctattggtaagctaggcccttgag

SEQ ID NO: 249594 - DNA, 55 bp, Artificial
  Synthetic oligonucleotide
tgaaagccccatcgggcagaggagtatggagcctctcgggaatgacatcgtcccc

SEQ ID NO: 249595 - DNA, 55 bp, Artificial
  Synthetic oligonucleotide
aacattgggagcgtgtacgaagccaaagcagtaatactcactacaggaacttacc

SEQ ID NO: 249596 - DNA, 55 bp, Artificial
  Synthetic oligonucleotide
caagtgtctctctctcgccttactatgagtactgacggaaatggaagcatgcctg

SEQ ID NO: 249597 - DNA, 55 bp, Artificial
  Synthetic oligonucleotide
caggatttaccatcaggtcgacgtacctcttgcggtaacggacctcagtatcggt

SEQ ID NO: 249598 - DNA, 54 bp, Artificial
  Synthetic oligonucleotide
tccggtaccgctttggtttacacagcggtgtatggatacgtcctgggtttcgta

SEQ ID NO: 249599 - DNA, 55 bp, Artificial
  Synthetic oligonucleotide
tcccaggcgctagaacgttagggtgattagggtcaagagagaatccttttgccct

SEQ ID NO: 249600 - DNA, 55 bp, Artificial
  Synthetic oligonucleotide
ctgaacgattcgaccggatatatcgaaggagccgaaggctcgtcaaaagtccctt

SEQ ID NO: 249601 - DNA, 55 bp, Artificial
  Synthetic oligonucleotide
tcaggagtcccagcctacgagatactttcccacaggatcatatggtccctggtag

SEQ ID NO: 249602 - DNA, 55 bp, Artificial
  Synthetic oligonucleotide
tcacatgggacaacgatttatcatccgggcacatacacctcttaggacgattgga

SEQ ID NO: 249603 - DNA, 55 bp, Artificial
  Synthetic oligonucleotide
tatctcgcagtttcgctccgctaggtcctcctgtttgcagtcgaaaaggagatat

SEQ ID NO: 249604 - DNA, 55 bp, Artificial
  Synthetic oligonucleotide
ggatacgccgttttctagcatcctggatggatcgataggatctccgaaccggacc

SEQ ID NO: 249605 - DNA, 55 bp, Artificial
  Synthetic oligonucleotide
ggataactttccacaatcgcctcctgtccaccggatcaaggttggtccatcaacg

SEQ ID NO: 249606 - DNA, 55 bp, Artificial
  Synthetic oligonucleotide
ggagtcgagaatcccagaatcgactttgctatattcgacgagtccaaccagatta

SEQ ID NO: 249607 - DNA, 55 bp, Artificial
  Synthetic oligonucleotide
ggagacaccgtgccaaaccatttagcaagagcttttgctgccgtcttatgtcccg

SEQ ID NO: 249608 - DNA, 55 bp, Artificial
  Synthetic oligonucleotide
aattgttttactgccgatgttatatgcgctaatcatgggtattttcctcggtccc

SEQ ID NO: 249609 - DNA, 55 bp, Artificial
  Synthetic oligonucleotide
ggaccgtctcctaccacgtctaaaagccatctgccctccacgtcagctagagctc

SEQ ID NO: 249610 - DNA, 55 bp, Artificial
  Synthetic oligonucleotide
ggaatcttgatgtcggacgtcgttcgccgctacactcggtttatccttcgtgggg

SEQ ID NO: 249611 - DNA, 55 bp, Artificial
  Synthetic oligonucleotide
ctctaagccgtttggctaactccgccgccaaggatgctctcagaagcggacgcac

SEQ ID NO: 249612 - DNA, 55 bp, Artificial
  Synthetic oligonucleotide
ggaagaagcgaatcaagccactcctctgaccccaaggtcgctttgttataagcca

SEQ ID NO: 249613 - DNA, 55 bp, Artificial
  Synthetic oligonucleotide
ggaaaggacgcgacgcggacaatcctcaggaagcctattgggtggggctgatgaa

SEQ ID NO: 249614 - DNA, 55 bp, Artificial
  Synthetic oligonucleotide
acatataagggactatactgcgttccctgcgagacctacgttccggagagcagca

SEQ ID NO: 249615 - DNA, 55 bp, Artificial
  Synthetic oligonucleotide
gctttatgatgcccagacatcaggcggattgcttctctccgttcacaaagatcat

SEQ ID NO: 249616 - DNA, 55 bp, Artificial
  Synthetic oligonucleotide
gcgtcgtcatttagcatcgttctgcggactgctatttcgttcagtttctggtatc

SEQ ID NO: 249617 - DNA, 55 bp, Artificial
  Synthetic oligonucleotide
gcgcagacctccagtggggagtcaagttagtcccgttgtccaattagactcagcc

SEQ ID NO: 249618 - DNA, 55 bp, Artificial
  Synthetic oligonucleotide
gcgagataagcaaaacctgatgtcaacatagcgtctcctccttgtgatataagcg

SEQ ID NO: 249619 - DNA, 55 bp, Artificial
  Synthetic oligonucleotide
gcgacaccgcgtgacgttgtcaagggaacaggcgcagaatacgcaatatcaccta

SEQ ID NO: 249620 - DNA, 55 bp, Artificial
  Synthetic oligonucleotide
attcggtcatagccctttcgctggcattcttccagtttcgcaagaactcgcccgg

SEQ ID NO: 249621 - DNA, 55 bp, Artificial
  Synthetic oligonucleotide
catcttatggcgaacgtactcatccgaacagcggagctcgttgccgcccagaggc

SEQ ID NO: 249622 - DNA, 54 bp, Artificial
  Synthetic oligonucleotide
ctcgtagggatcctctcccggattcactccccaggcgtcctttacgacgtacca

SEQ ID NO: 249623 - DNA, 55 bp, Artificial
  Synthetic oligonucleotide
gccggccccgggatacgacagcacatcgaccaaaatagccagaaccgaccagacc

SEQ ID NO: 249624 - DNA, 55 bp, Artificial
  Synthetic oligonucleotide
gccgagtgtctcaattccccactcagtcaacgttttagtgattgcattgccatcg

SEQ ID NO: 249625 - DNA, 55 bp, Artificial
  Synthetic oligonucleotide
ggcttcggagacgtcctgtgggagaggacctccttcgccaatagggagaccgcta

SEQ ID NO: 249626 - DNA, 55 bp, Artificial
  Synthetic oligonucleotide
ggctctttgactgccggctctctgaccacgacgtttaccgcctctcaaggacttc

SEQ ID NO: 249627 - DNA, 55 bp, Artificial
  Synthetic oligonucleotide
ggctattccataccgcaggacctgccccactatctgagacaccctgtgagccgtc

SEQ ID NO: 249628 - DNA, 55 bp, Artificial
  Synthetic oligonucleotide
ggcgacacctcgacctgttgcgagccaacatacaacgttccgctgagatatcggt

SEQ ID NO: 249629 - DNA, 55 bp, Artificial
  Synthetic oligonucleotide
ggcccagagcctgacgtagtctccctcctctatgggtttagccattctatccccg

SEQ ID NO: 249630 - DNA, 53 bp, Artificial
  Synthetic oligonucleotide
aagtccttcccctacgagggaaagcctggtctcataaacaacatcccgaggta

SEQ ID NO: 249631 - DNA, 55 bp, Artificial
  Synthetic oligonucleotide
ggccaacgctctattcgtttctcggtaagagcgccgacggggcatagctgcacgc

SEQ ID NO: 249632 - DNA, 55 bp, Artificial
  Synthetic oligonucleotide
aatcactgcccctgcggtaatgagcgtaagaatgctaagtccccagtgtcgaaaa

SEQ ID NO: 249633 - DNA, 55 bp, Artificial
  Synthetic oligonucleotide
ccccatatggcgactcggatcatcttacggatcaagagcaatcctccttttcggg

SEQ ID NO: 249634 - DNA, 55 bp, Artificial
  Synthetic oligonucleotide
ggcactataaagcgctccacggtataaccggagatttggcggcggacggagaaag

SEQ ID NO: 249635 - DNA, 55 bp, Artificial
  Synthetic oligonucleotide
ggcacctcaatggcagtgggaatccctggtatagaagcacttacgacacaagtaa

SEQ ID NO: 249636 - DNA, 55 bp, Artificial
  Synthetic oligonucleotide
ggatgtatatctagcctactcggtgctgggtcagaggaccctgtgggtagagtac

SEQ ID NO: 249637 - DNA, 55 bp, Artificial
  Synthetic oligonucleotide
ggatccaggatcttcggccgggactcaaccaactcactaggggtgttcatcttcg

SEQ ID NO: 249638 - DNA, 54 bp, Artificial
  Synthetic oligonucleotide
caggggcacgtcaaggccgtctcttacgacgaaatctgcggctttgcccaattt

SEQ ID NO: 249639 - DNA, 54 bp, Artificial
  Synthetic oligonucleotide
ccgccgcaatcgacgttagggcaggaaacgtttaattccacggctgatatgtcc

SEQ ID NO: 249640 - DNA, 54 bp, Artificial
  Synthetic oligonucleotide
ctccggagggagccagggctcgtagccccgccagatgtaggggatcacgtggag

SEQ ID NO: 249641 - DNA, 54 bp, Artificial
  Synthetic oligonucleotide
ttagacgagttgggacgtcagaaggtcgttcaagcgttagggcaaagcggctgt

SEQ ID NO: 249642 - DNA, 54 bp, Artificial
  Synthetic oligonucleotide
ggaagataaggtcatgcacgctatggcagcaaacagtctcccaaggtatggcct

SEQ ID NO: 249643 - DNA, 54 bp, Artificial
  Synthetic oligonucleotide
agactgcgcagcagtcgagatagttctgagcgactgaactcactcgcagcaccc

SEQ ID NO: 249644 - DNA, 55 bp, Artificial
  Synthetic oligonucleotide
ccccatttgattagccacgcgctggtcctgtgtaacctgagctccacgcaagtgg

SEQ ID NO: 249645 - DNA, 54 bp, Artificial
  Synthetic oligonucleotide
gtagcttctctcgcctgcgacgcctaaatccagaagatacctgccgtcggaagt

SEQ ID NO: 249646 - DNA, 54 bp, Artificial
  Synthetic oligonucleotide
gtctctatggcaagggtgctcacgtttcccataagggatttagtgctcaacctg

SEQ ID NO: 249647 - DNA, 54 bp, Artificial
  Synthetic oligonucleotide
cggaacggggatgagctcgcttttgggtagaagctacgtgggtcagaccatttc

SEQ ID NO: 249648 - DNA, 54 bp, Artificial
  Synthetic oligonucleotide
aacggctttgaacctacaccttaaagtcacggcatagccccactatgtcaataa

SEQ ID NO: 249649 - DNA, 54 bp, Artificial
  Synthetic oligonucleotide
gccgtattctgatctcgttggtcagagcgttcgtagccgttatattacagaaga

SEQ ID NO: 249650 - DNA, 54 bp, Artificial
  Synthetic oligonucleotide
tgccaagagaataccgcaccgtcacgagccttcaggggcctctgctggtcgttg

SEQ ID NO: 249651 - DNA, 53 bp, Artificial
  Synthetic oligonucleotide
aaaccatactcacgcactcctatcgcatgctatacgcttcctaaactatgccg

SEQ ID NO: 249652 - DNA, 53 bp, Artificial
  Synthetic oligonucleotide
ctaaatccctccttgagaagcctctcgtccctctcggccaaactgtctaccac

SEQ ID NO: 249653 - DNA, 53 bp, Artificial
  Synthetic oligonucleotide
gtccgattgattcggacgcgcctcgttcattttggctccgcgccttgaccagc

SEQ ID NO: 249654 - DNA, 53 bp, Artificial
  Synthetic oligonucleotide
gttgataaggcagtcttttgagattcagatgagtaacggtgcttagaggtttt

SEQ ID NO: 249655 - DNA, 55 bp, Artificial
  Synthetic oligonucleotide
ctagccctgacagttctgagacgagcagcgaggggtacactattcactccaatac

SEQ ID NO: 249656 - DNA, 53 bp, Artificial
  Synthetic oligonucleotide
catagggattgtaggaatggcgccatggaaggtttcgcttgtggcagtagaac

SEQ ID NO: 249657 - DNA, 53 bp, Artificial
  Synthetic oligonucleotide
agagaggaacgtcaatcgacgcccgaacctcgtcctcgcagatccactcaact

SEQ ID NO: 249658 - DNA, 53 bp, Artificial
  Synthetic oligonucleotide
cgaatcgggtataagggtcgccgtaggcctgaacaaggcctttcattgcaccg

SEQ ID NO: 249659 - DNA, 50 bp, Artificial
  Synthetic oligonucleotide
ccttctgtcaggtccttcgcgggtttcttaggccggcgggaattaccctt

SEQ ID NO: 249660 - DNA, 53 bp, Artificial
  Synthetic oligonucleotide
cctttcgagttcaggaccattgctacctgcggtgcggttcccatagggacccc

SEQ ID NO: 249661 - DNA, 53 bp, Artificial
  Synthetic oligonucleotide
gagacagctgcccgagacttccaggatggcccgaggggctatactctgagatg

SEQ ID NO: 249662 - DNA, 52 bp, Artificial
  Synthetic oligonucleotide
caggtcattaacagttgctattttgctagtggcataccgagtaatgaccagg

SEQ ID NO: 249663 - DNA, 52 bp, Artificial
  Synthetic oligonucleotide
aggatcgacttgccccggtagtcgttcctcctaacctccaggtagctcctta

SEQ ID NO: 249664 - DNA, 52 bp, Artificial
  Synthetic oligonucleotide
agtaagaatgcttgtgccacaggttaccacataaattgttctcatgagcacg

SEQ ID NO: 249665 - DNA, 52 bp, Artificial
  Synthetic oligonucleotide
gataggcgaaggcttcaaattaaacgtggcttggctgtacaagctttccaaa

SEQ ID NO: 249666 - DNA, 55 bp, Artificial
  Synthetic oligonucleotide
cgtgagagtcgattcatttgcgctccgacggagagaagttctcaggaccttagcg

SEQ ID NO: 249667 - DNA, 52 bp, Artificial
  Synthetic oligonucleotide
tttatccacatgggacgtgtggaggagccgtggtggatagcggagaggtgaa

SEQ ID NO: 249668 - DNA, 52 bp, Artificial
  Synthetic oligonucleotide
gagatcttctgccccaaaagtaagccttctcgtttcagcggccctaaacctg

SEQ ID NO: 249669 - DNA, 52 bp, Artificial
  Synthetic oligonucleotide
aaacgtgtccacttccggtctgccgtcgggctttgcataaactgttgcgaag

SEQ ID NO: 249670 - DNA, 52 bp, Artificial
  Synthetic oligonucleotide
aaagccggagtcgtctgaaaggcctcactctccatcagagcccctccgtacc

SEQ ID NO: 249671 - DNA, 52 bp, Artificial
  Synthetic oligonucleotide
gccgtaaaacgcttggaaggtttaaggcaagagccctacgttcttgaggcag

SEQ ID NO: 249672 - DNA, 52 bp, Artificial
  Synthetic oligonucleotide
ggggagccatcctcgaggttagggacggttcatccctggaggtcctgttccc

SEQ ID NO: 249673 - DNA, 52 bp, Artificial
  Synthetic oligonucleotide
ctagcgtttcccctcctcagaagagtctgtccgcgaagatggttcggagaca

SEQ ID NO: 249674 - DNA, 51 bp, Artificial
  Synthetic oligonucleotide
aggtacggcaaacatttcgggatcacgccagaggttcttgacaaagcggac

SEQ ID NO: 249675 - DNA, 51 bp, Artificial
  Synthetic oligonucleotide
ccccgagagggtggccataaacgtggacgatttcaggataaaggacaacga

SEQ ID NO: 249676 - DNA, 51 bp, Artificial
  Synthetic oligonucleotide
agacgctccgagaccacaaacttaacgtcgtttcgggcaataagtatctgt

SEQ ID NO: 249677 - DNA, 53 bp, Artificial
  Synthetic oligonucleotide
cggttgtcaccgtatttcttgtggtccgtagaccgacctacagaccggtagct

SEQ ID NO: 249678 - DNA, 51 bp, Artificial
  Synthetic oligonucleotide
gacaatcgttcgactcatcgtgagcgacaaatttcttcgaggtcaccattc

SEQ ID NO: 249679 - DNA, 51 bp, Artificial
  Synthetic oligonucleotide
cttaggagttcctacggttggcgtattcggtccgtccaagcccgataggta

SEQ ID NO: 249680 - DNA, 51 bp, Artificial
  Synthetic oligonucleotide
gggcaaacgccaaaagtccccatgacgcggcgaactcaactttaagaaggc

SEQ ID NO: 249681 - DNA, 51 bp, Artificial
  Synthetic oligonucleotide
ggggaatcttattcaggtagagtttgcctcacaagttcctgttggcgacgt

SEQ ID NO: 249682 - DNA, 51 bp, Artificial
  Synthetic oligonucleotide
atatcccttcggaagaacgaacgattcaaccgcgtgcccgatgtctccaac

SEQ ID NO: 249683 - DNA, 51 bp, Artificial
  Synthetic oligonucleotide
tcgccaagacgaagttcatccgaatagtcaagagcttcgtacaaaacttta

SEQ ID NO: 249684 - DNA, 51 bp, Artificial
  Synthetic oligonucleotide
tctgttgtggggccaaggtacgtcgggttagggtctcagactataacagac

SEQ ID NO: 249685 - DNA, 51 bp, Artificial
  Synthetic oligonucleotide
aaaggaggacataggcgatatcctggcccgtaaggtcggaatgaccaaggt

SEQ ID NO: 249686 - DNA, 51 bp, Artificial
  Synthetic oligonucleotide
atattgcctcgtttgtatagttatattatgccctctgcgggcctatttgtc

SEQ ID NO: 249687 - DNA, 50 bp, Artificial
  Synthetic oligonucleotide
gatggaacatcgtctcctcgtctattccgaagttgcgcctcatatgaagg

SEQ ID NO: 249688 - DNA, 54 bp, Artificial
  Synthetic oligonucleotide
cggtgcttggcggggtcaaagtccgagaggttacccagaatgaaccgagcggtg

SEQ ID NO: 249689 - DNA, 50 bp, Artificial
  Synthetic oligonucleotide
ccatcccttgacggccccgtaggccgctgcaacttcttcaaacccttcca

SEQ ID NO: 249690 - DNA, 50 bp, Artificial
  Synthetic oligonucleotide
cccaacgtcacctgaacgatcgtcggcgccagagaattgggcacgatgta

SEQ ID NO: 249691 - DNA, 50 bp, Artificial
  Synthetic oligonucleotide
ccagctcccccactgttttgttcccagccgcccattccctacataggcca

SEQ ID NO: 249692 - DNA, 50 bp, Artificial
  Synthetic oligonucleotide
ccagacgagaggaccgcatttgcctggtacctcaggcgaggtggagaagc

SEQ ID NO: 249693 - DNA, 50 bp, Artificial
  Synthetic oligonucleotide
gattagccacccccgcataccgctgggaaggggtacgaccatgcacacag

SEQ ID NO: 249694 - DNA, 50 bp, Artificial
  Synthetic oligonucleotide
gcatggacggaactccaggcaggtctgcgccaaatagcgttggcaagagg

SEQ ID NO: 249695 - DNA, 50 bp, Artificial
  Synthetic oligonucleotide
gccccaggctgaaaggcagttcgggcaccacaagatactcagctccgctg

SEQ ID NO: 249696 - DNA, 50 bp, Artificial
  Synthetic oligonucleotide
gccttcttgggtggtgcccttgctctcggtgttggtatcggggctcagaa

SEQ ID NO: 249697 - DNA, 50 bp, Artificial
  Synthetic oligonucleotide
gcggtgcttcattcgcggctttaagaagaaccacgccgcttccccgcaca

SEQ ID NO: 249698 - DNA, 50 bp, Artificial
  Synthetic oligonucleotide
cagtccccgccatggctcctaaatggattccctccggagtcgtccctcct

SEQ ID NO: 249699 - DNA, 55 bp, Artificial
  Synthetic oligonucleotide
gaacggctcagctcatggactctctggccggaaggctcagacagcttataagggg

SEQ ID NO: 249700 - DNA, 55 bp, Artificial
  Synthetic oligonucleotide
gccctacaaagtcaacgccacaagcgtagatatctggtgtaaaggccagtccagc

SEQ ID NO: 249701 - DNA, 50 bp, Artificial
  Synthetic oligonucleotide
gtcgcacgcgtcgcaaatggctttgcccttgcgtatcgaatgtacgtgtt

SEQ ID NO: 249702 - DNA, 50 bp, Artificial
  Synthetic oligonucleotide
ttcactgtatagatacgtgcaaaagagcccagccgctgttaatcggctgg

SEQ ID NO: 249703 - DNA, 50 bp, Artificial
  Synthetic oligonucleotide
cagccaggggaaccatgttctctccggcgggccctatacaagaaacgccc

SEQ ID NO: 249704 - DNA, 50 bp, Artificial
  Synthetic oligonucleotide
ccgcttttatcgttcccgcggttccgtcgagcgtcacctgtctggcagga

SEQ ID NO: 249705 - DNA, 50 bp, Artificial
  Synthetic oligonucleotide
ccgctcccgttcagttcctcgaccctcttgaggagtctcgcctcgacgta

SEQ ID NO: 249706 - DNA, 50 bp, Artificial
  Synthetic oligonucleotide
ccggaggggtaatgcagcccagtccagtgttgactcccactatggctgcg

SEQ ID NO: 249707 - DNA, 50 bp, Artificial
  Synthetic oligonucleotide
ccgcgggtttacctgcctcacgggtaatgcgcaagactctggccacagtt

SEQ ID NO: 249708 - DNA, 50 bp, Artificial
  Synthetic oligonucleotide
ccggcacggactccgtgtaccgttcaaaacgcctcgccgtgtttcggaac

SEQ ID NO: 249709 - DNA, 50 bp, Artificial
  Synthetic oligonucleotide
ccggtttggtcgctattcttccgcacagagagggttggcggaaccgcgag

SEQ ID NO: 249710 - DNA, 50 bp, Artificial
  Synthetic oligonucleotide
ccgtgagccgataatcctcgcccacggaactgtcgtacacgtgcacgtcc

SEQ ID NO: 249711 - DNA, 55 bp, Artificial
  Synthetic oligonucleotide
gcccctacatagtttccgaaggcgtatcccgtgcagtatgccagtagttccatgg

SEQ ID NO: 249712 - DNA, 50 bp, Artificial
  Synthetic oligonucleotide
cctccggtgctatgaagccgctccgctgggccctttcagatgagccccgt

SEQ ID NO: 249713 - DNA, 50 bp, Artificial
  Synthetic oligonucleotide
ccgattgggcctccacggcttcgcaatagtccccaacctgcttggcctag

SEQ ID NO: 249714 - DNA, 50 bp, Artificial
  Synthetic oligonucleotide
cctctttgcgtgtgcgatctgtgtgcagtcgtgggcatgagtcagcccgc

SEQ ID NO: 249715 - DNA, 50 bp, Artificial
  Synthetic oligonucleotide
ccgacaggaccatagagcgggcgggcacccttgtcaaaggtggagtcgta

SEQ ID NO: 249716 - DNA, 50 bp, Artificial
  Synthetic oligonucleotide
cctgctgattcaccctcggtggctggaggggacgccgggctccattgacg

SEQ ID NO: 249717 - DNA, 50 bp, Artificial
  Synthetic oligonucleotide
cctgcttggcctagggtgcaacgtgcctggcatcctggcgacgagggttc

SEQ ID NO: 249718 - DNA, 50 bp, Artificial
  Synthetic oligonucleotide
cctggttccctgcctggtgatttagagagtcacccagggcgcccccttaa

SEQ ID NO: 249719 - DNA, 50 bp, Artificial
  Synthetic oligonucleotide
cccgttatcccgcaactcacgaataggcacaccccgacgggaggggtagc

SEQ ID NO: 249720 - DNA, 50 bp, Artificial
  Synthetic oligonucleotide
cccggagaaatttgggaaaggcgccatagaagggttggcggcacccgaag

SEQ ID NO: 249721 - DNA, 50 bp, Artificial
  Synthetic oligonucleotide
cccgatcgacatgttgaccgagtcgccccgaaaccagccctgatgcatcg

SEQ ID NO: 249722 - DNA, 55 bp, Artificial
  Synthetic oligonucleotide
catgcatataggtccaccctccatcgcccacgggaccaatatatacaaagccgca

SEQ ID NO: 249723 - DNA, 50 bp, Artificial
  Synthetic oligonucleotide
cccgatacccgttgcggtacccctgccgctcttcggtacgttcgtatggc

SEQ ID NO: 249724 - DNA, 50 bp, Artificial
  Synthetic oligonucleotide
ccccttggacggcctcgcagccaggttccattgatgtcatagcgtccgat

SEQ ID NO: 249725 - DNA, 50 bp, Artificial
  Synthetic oligonucleotide
ccttcccatacagcagccgccgcacgaatgggaatcaccccttcatgctt

SEQ ID NO: 249726 - DNA, 50 bp, Artificial
  Synthetic oligonucleotide
cgaccgccgggatttgtgctgtctcccactggaatctctgtccagcccca

SEQ ID NO: 249727 - DNA, 50 bp, Artificial
  Synthetic oligonucleotide
cgctatgctttctgcggcccagctttctggaccgtgggattttgcgtcgg

SEQ ID NO: 249728 - DNA, 50 bp, Artificial
  Synthetic oligonucleotide
cggggctatttctctaagtgccgtcagcctgcccatgcgccggggactcg

SEQ ID NO: 249729 - DNA, 50 bp, Artificial
  Synthetic oligonucleotide
ccccggcgattcccaacgtcacctgaacgatcgtcggcgccagagaattg

SEQ ID NO: 249730 - DNA, 50 bp, Artificial
  Synthetic oligonucleotide
cggtgagacaaaaggtgtaccccggagtggagatcgtcatatataacgcc

SEQ ID NO: 249731 - DNA, 50 bp, Artificial
  Synthetic oligonucleotide
ctcgccttatcgagaatgggggcgcaaagggtcgcggagacaacgtcctc

SEQ ID NO: 249732 - DNA, 50 bp, Artificial
  Synthetic oligonucleotide
ctgcggcgtatcccctcaacaaacgggccattcccgtaagcctttcgcaa

SEQ ID NO: 249733 - DNA, 55 bp, Artificial
  Synthetic oligonucleotide
accgaccatgatgccacagacctgggacttctttccgaaggccactatatcgggg

SEQ ID NO: 249734 - DNA, 50 bp, Artificial
  Synthetic oligonucleotide
ctggcagtcgctaactcgtggagcccgggggtatcccggcattgaaccct

SEQ ID NO: 249735 - DNA, 50 bp, Artificial
  Synthetic oligonucleotide
accggatagccttcggagggcgggaggccctgtttctggacatgttcgaa

SEQ ID NO: 249736 - DNA, 50 bp, Artificial
  Synthetic oligonucleotide
accgacgtggccataaacgtggaggggatgcctcccgtctctttggagga

SEQ ID NO: 249737 - DNA, 50 bp, Artificial
  Synthetic oligonucleotide
accgacagaggaacgagacggcgcccctcaaaaaccgtcccaccccggag

SEQ ID NO: 249738 - DNA, 50 bp, Artificial
  Synthetic oligonucleotide
accctgccggtcggaggccaagcggtcatagagggggtcataatgaaggg

SEQ ID NO: 249739 - DNA, 50 bp, Artificial
  Synthetic oligonucleotide
accctcacatcgaagcagttctccacagccaccctgaaggccccgatgcc

SEQ ID NO: 249740 - DNA, 50 bp, Artificial
  Synthetic oligonucleotide
accctacactccaggcgcccgtcccccaccagctggtagatacccatgcc

SEQ ID NO: 249741 - DNA, 50 bp, Artificial
  Synthetic oligonucleotide
acccgggtagacccgcaccgctatcctcccgtcggtccgcttgagtatct

SEQ ID NO: 249742 - DNA, 50 bp, Artificial
  Synthetic oligonucleotide
acccgccagacggatctcgaaacgatcgctcatggtgtcgctaccccctt

SEQ ID NO: 249743 - DNA, 50 bp, Artificial
  Synthetic oligonucleotide
acccgacaagtttgtccatgtcttcgcggctcacaacgcaaccggagggg

SEQ ID NO: 249744 - DNA, 55 bp, Artificial
  Synthetic oligonucleotide
gccccacccttccataagagagacgttcgcaacgcttcccaggatgacgggaagg

SEQ ID NO: 249745 - DNA, 50 bp, Artificial
  Synthetic oligonucleotide
accccgggagccagtcggaacagcacggagacctccgtcttcctttcctc

SEQ ID NO: 249746 - DNA, 50 bp, Artificial
  Synthetic oligonucleotide
accccgctatgacggccaaggtagccgacggcacagaaggaagtaccagg

SEQ ID NO: 249747 - DNA, 50 bp, Artificial
  Synthetic oligonucleotide
accccgccggcataaaacgaaaacatgacggctgcgacgtaaagcggccc

SEQ ID NO: 249748 - DNA, 50 bp, Artificial
  Synthetic oligonucleotide
accccctcccggaacctgtatggcccccagagggatcgggtcggatatta

SEQ ID NO: 249749 - DNA, 50 bp, Artificial
  Synthetic oligonucleotide
accagcgcgagggggcacaggttggactctttttgcagagcctgcctaat

SEQ ID NO: 249750 - DNA, 50 bp, Artificial
  Synthetic oligonucleotide
accaaccatggtgaaggtgatcgggtttaggtggggttcccgcatgggcc

SEQ ID NO: 249751 - DNA, 50 bp, Artificial
  Synthetic oligonucleotide
acatgttgaccgagtcgccccgaaaccagccctgatgcatcgcgttcctt

SEQ ID NO: 249752 - DNA, 50 bp, Artificial
  Synthetic oligonucleotide
acagagcaacgccctggctatagctgagaggctaggcatgcaccgggagg

SEQ ID NO: 249753 - DNA, 50 bp, Artificial
  Synthetic oligonucleotide
acacgccgtcccgtcgcactgctgtattatgtgtctccccctgggcgtca

SEQ ID NO: 249754 - DNA, 50 bp, Artificial
  Synthetic oligonucleotide
acacctgcggggcctacaacgcttccgtccttggagttcccacgctggag

SEQ ID NO: 249755 - DNA, 55 bp, Artificial
  Synthetic oligonucleotide
ccaacagagactcgacgtcccaagtcatacctgtcaaccacgccttctaattaag

SEQ ID NO: 249756 - DNA, 50 bp, Artificial
  Synthetic oligonucleotide
acaccatccatgcagcgacccgggctttgtggggtgagatagcccctcag

SEQ ID NO: 249757 - DNA, 50 bp, Artificial
  Synthetic oligonucleotide
acaacccaatggggatcaatcgggcaggttgaccctacactccaggcgcc

SEQ ID NO: 249758 - DNA, 50 bp, Artificial
  Synthetic oligonucleotide
aattgagaccccgtttgggagggatgcggttgacgcaggatcgggtcagg

SEQ ID NO: 249759 - DNA, 50 bp, Artificial
  Synthetic oligonucleotide
aattcgcactggggaacgcccctggaatagcgctgatgccactccatccc

SEQ ID NO: 249760 - DNA, 50 bp, Artificial
  Synthetic oligonucleotide
aattcacgtgcctgcggcgcgactatgctccccgcttgggcttgttgtac

SEQ ID NO: 249761 - DNA, 50 bp, Artificial
  Synthetic oligonucleotide
acggacaccgcgtcgcaccttgagaccaactctgccagcgaacgggcata

SEQ ID NO: 249762 - DNA, 50 bp, Artificial
  Synthetic oligonucleotide
acgcgctggtcctgtgtaacctgagctccacgcaagtggagatgtccccg

SEQ ID NO: 249763 - DNA, 50 bp, Artificial
  Synthetic oligonucleotide
acgcgcaccactccatcacaggggttcgacgcagccggagaacggactgc

SEQ ID NO: 249764 - DNA, 50 bp, Artificial
  Synthetic oligonucleotide
acgcctcccagtccgaaagccactcctgttaccaaggacgccacaacgct

SEQ ID NO: 249765 - DNA, 50 bp, Artificial
  Synthetic oligonucleotide
acgcccctgcgacaggactttaccgcgcgacctcatgttccactcgacaa

SEQ ID NO: 249766 - DNA, 55 bp, Artificial
  Synthetic oligonucleotide
gcagtggtcagttctggattgatgggatccatatcagggtcctctgtcgcaaacg

SEQ ID NO: 249767 - DNA, 49 bp, Artificial
  Synthetic oligonucleotide
acgccccgctcggaccctttgacggaggtcaaccgggaaacgtactacg

SEQ ID NO: 249768 - DNA, 50 bp, Artificial
  Synthetic oligonucleotide
acgcaagtggagatgtccccgcgcaggtagcagcctgctggaaggagtag

SEQ ID NO: 249769 - DNA, 50 bp, Artificial
  Synthetic oligonucleotide
acgatcctgtctctgccggtgcaacctcgggccagcctaagggccgacat

SEQ ID NO: 249770 - DNA, 50 bp, Artificial
  Synthetic oligonucleotide
acgatcaagtggggcggagccgtggcctcaggcgcctaacctgctgagag

SEQ ID NO: 249771 - DNA, 50 bp, Artificial
  Synthetic oligonucleotide
acgagtccgccacgtccctcaaccggtgcccaaaggactccgcctcggac

SEQ ID NO: 249772 - DNA, 50 bp, Artificial
  Synthetic oligonucleotide
acgagccaggcgtctgtttgaggacctctgtcagcctgtgcccggagtcc

SEQ ID NO: 249773 - DNA, 50 bp, Artificial
  Synthetic oligonucleotide
acgacgttcgggctgtccgtcaaatggcgacagacggggacgctaaggcg

SEQ ID NO: 249774 - DNA, 50 bp, Artificial
  Synthetic oligonucleotide
acgacgccgtcaggcggcagagcccctctctggtccatcgccttaaacaa

SEQ ID NO: 249775 - DNA, 50 bp, Artificial
  Synthetic oligonucleotide
acgaccctgcaccggggagcatagtgcctgtaacgagtacccggggactt

SEQ ID NO: 249776 - DNA, 50 bp, Artificial
  Synthetic oligonucleotide
acgaatgtgcgcatgcggagacccagtgcaggatccgagacgggaaggtc

SEQ ID NO: 249777 - DNA, 55 bp, Artificial
  Synthetic oligonucleotide
gcagtaagactgcagcaaacgctcgaacggccccgtagtgataaccgcttctctt

SEQ ID NO: 249778 - DNA, 50 bp, Artificial
  Synthetic oligonucleotide
acctttggggtccggccttggactatcggtggtgcacggactggtgaccc

SEQ ID NO: 249779 - DNA, 50 bp, Artificial
  Synthetic oligonucleotide
acctttagagccaaacgggccacaccctcgcgaatgctgccgagcatctg

SEQ ID NO: 249780 - DNA, 50 bp, Artificial
  Synthetic oligonucleotide
acctgctccttcgactccgtggaggttaccgagcttctgggggtggagcg

SEQ ID NO: 249781 - DNA, 50 bp, Artificial
  Synthetic oligonucleotide
acctcacgcctcggtgataaacgcaatccacgacgccacgggagcctggg

SEQ ID NO: 249782 - DNA, 50 bp, Artificial
  Synthetic oligonucleotide
accgtctcatcatatcacaccggcccggtcacttgcttccggcgcccaag

SEQ ID NO: 249783 - DNA, 50 bp, Artificial
  Synthetic oligonucleotide
accgtagcttggggccaccccgaacatgcctctacaggccaatttgagcc

SEQ ID NO: 249784 - DNA, 50 bp, Artificial
  Synthetic oligonucleotide
accgtagcgaccgacgagatgcttctcaccaccggatcccaacaggccct

SEQ ID NO: 249785 - DNA, 50 bp, Artificial
  Synthetic oligonucleotide
accggtgtaccaaccccctggactcgtggcctgaccctgaggtctacctc

SEQ ID NO: 249786 - DNA, 50 bp, Artificial
  Synthetic oligonucleotide
accggcgatgggagacgaatggggcctccagagggagcttctgcagagac

SEQ ID NO: 249787 - DNA, 50 bp, Artificial
  Synthetic oligonucleotide
aagacggttcccaccagatcccccttccccacgacggcgggagatgagcc

SEQ ID NO: 249788 - DNA, 55 bp, Artificial
  Synthetic oligonucleotide
gcaccgagccagtgagccttcctgttgtgggtcctggagtgggaaactcgcctct

SEQ ID NO: 249789 - DNA, 50 bp, Artificial
  Synthetic oligonucleotide
aacttcgacgtggacggagagaccaccatggtagccccggcggctggatt

SEQ ID NO: 249790 - DNA, 50 bp, Artificial
  Synthetic oligonucleotide
aactcccacttaagcccagtggggaatccagcgccacctctccctcgcaa

SEQ ID NO: 249791 - DNA, 50 bp, Artificial
  Synthetic oligonucleotide
aacggtacccccataaacgccagttcccaacaggttgtgccgcctgccgt

SEQ ID NO: 249792 - DNA, 50 bp, Artificial
  Synthetic oligonucleotide
aacggaaccgtcggctatagtggcgcccggaggagcgtagggcacgatgt

SEQ ID NO: 249793 - DNA, 50 bp, Artificial
  Synthetic oligonucleotide
aacgctacgaaaggctcgatcggacctggctggaaggggatgtcccttgc

SEQ ID NO: 249794 - DNA, 50 bp, Artificial
  Synthetic oligonucleotide
aacgcggcagccagccctattaaggctttctccaagcggttcccctcctt

SEQ ID NO: 249795 - DNA, 50 bp, Artificial
  Synthetic oligonucleotide
aacgcctgtcctgagaccctgccggtcggaggccaagcggtcatagaggg

SEQ ID NO: 249796 - DNA, 50 bp, Artificial
  Synthetic oligonucleotide
aacgcccctggaatagcgctgatgccactccatcccgtcacgccatatga

SEQ ID NO: 249797 - DNA, 50 bp, Artificial
  Synthetic oligonucleotide
aacgaggcgacctgaacacgtaccccgttagcaatcggtccgcaacgaga

SEQ ID NO: 249798 - DNA, 50 bp, Artificial
  Synthetic oligonucleotide
aacgaggacggatgggaggggcgagtcgtctttcgttgcggagatcgaga

SEQ ID NO: 249799 - DNA, 55 bp, Artificial
  Synthetic oligonucleotide
ccaaggcataggtccttgctgtaatagcctgcgctctcaagacctctgtcggcca

SEQ ID NO: 249800 - DNA, 50 bp, Artificial
  Synthetic oligonucleotide
aacctcgtccatcgcaaaatctgcgctgaacagagagggcgctgcggaca

SEQ ID NO: 249801 - DNA, 50 bp, Artificial
  Synthetic oligonucleotide
aaccgtgcctaggatccctcctcctacgccacttttggcgggtatgccca

SEQ ID NO: 249802 - DNA, 50 bp, Artificial
  Synthetic oligonucleotide
aaccgccgcgatagggggttgtcccggcgtaatgtcccgttccgaccgtg

SEQ ID NO: 249803 - DNA, 50 bp, Artificial
  Synthetic oligonucleotide
aaccgaccagtcgctccgctgaggcccatatctccaccagggggccaccg

SEQ ID NO: 249804 - DNA, 49 bp, Artificial
  Synthetic oligonucleotide
aacccccgaacctgagacccacaagggggtaacgcctaaacggcacgta

SEQ ID NO: 249805 - DNA, 50 bp, Artificial
  Synthetic oligonucleotide
aacatcccattgacggcctttgccttcttgggtggtgcccttgctctcgg

SEQ ID NO: 249806 - DNA, 50 bp, Artificial
  Synthetic oligonucleotide
aaaggggatcttctcagaggcctacctgcgtcgtcctgtagggggcggct

SEQ ID NO: 249807 - DNA, 50 bp, Artificial
  Synthetic oligonucleotide
aaaggcgtcgcagtgacggataaaacggctcgccttgtcggagcagtcga

SEQ ID NO: 249808 - DNA, 50 bp, Artificial
  Synthetic oligonucleotide
aaaggaccacctatcggaagacgccccaccccaaaggataacgggagcga

SEQ ID NO: 249809 - DNA, 50 bp, Artificial
  Synthetic oligonucleotide
aaagcccggtacgtttccgaaggccctccgcgcagtctcgaagagcggca

SEQ ID NO: 249810 - DNA, 55 bp, Artificial
  Synthetic oligonucleotide
gaacgaccactgttatcgatggatagacgagtttctgcattactacaccgaatac

SEQ ID NO: 249811 - DNA, 55 bp, Artificial
  Synthetic oligonucleotide
ccaggccgctgccaaatttataccctcatggaatgtaccgcgatttgaagctccg

SEQ ID NO: 249812 - DNA, 50 bp, Artificial
  Synthetic oligonucleotide
aaaccaccccgcggtgggacggcatagtgtagcggcaagataaaaagcgc

SEQ ID NO: 249813 - DNA, 50 bp, Artificial
  Synthetic oligonucleotide
aaaagctcccgcggagtcgagcaaaacgctctggtcgcaggcgtggctga

SEQ ID NO: 249814 - DNA, 50 bp, Artificial
  Synthetic oligonucleotide
aaaagccggccggagacgagtccaagggtatccaccgcccgtgagcggga

SEQ ID NO: 249815 - DNA, 50 bp, Artificial
  Synthetic oligonucleotide
aatgcctgcaaagcccggaagtactcgacagttggaagggccttgcacga

SEQ ID NO: 249816 - DNA, 50 bp, Artificial
  Synthetic oligonucleotide
aatgcccgaaaggccccaactgtcgttgtcgcagaaccccaacaggtggg

SEQ ID NO: 249817 - DNA, 50 bp, Artificial
  Synthetic oligonucleotide
aatgcatggctaccgggtgataggctccaacgagtcccccgtggaggggt

SEQ ID NO: 249818 - DNA, 50 bp, Artificial
  Synthetic oligonucleotide
aatccacgtggcctttggctccaggggccgcaccatctatcatcccgaga

SEQ ID NO: 249819 - DNA, 50 bp, Artificial
  Synthetic oligonucleotide
aatcagcccgaggggcgcaaagctcgtgtaaatcggcacgaagttggcga

SEQ ID NO: 249820 - DNA, 50 bp, Artificial
  Synthetic oligonucleotide
aagtgttggagttcccgggtaccgagatatgctggaagggcggcggagga

SEQ ID NO: 249821 - DNA, 50 bp, Artificial
  Synthetic oligonucleotide
aagtccgcgttaaagccggttgggttgcggtgcacagaaggacggtcacg

SEQ ID NO: 249822 - DNA, 55 bp, Artificial
  Synthetic oligonucleotide
acctaaaccggcctatctgcctatggattcgttgttgatagacgccatattcacc

SEQ ID NO: 249823 - DNA, 50 bp, Artificial
  Synthetic oligonucleotide
aagggtctctcgccggagtaacgcctctccaacgacgaaaggaccggcat

SEQ ID NO: 249824 - DNA, 50 bp, Artificial
  Synthetic oligonucleotide
aaggctctctcccgcttcgcggatctttgaggcccaccggtctcatgggc

SEQ ID NO: 249825 - DNA, 50 bp, Artificial
  Synthetic oligonucleotide
aaggcggcggtcctcaggggtatgccgtaggtctccgatagctccagggt

SEQ ID NO: 249826 - DNA, 50 bp, Artificial
  Synthetic oligonucleotide
aaggcgagtagagcatatcggaacgaggcccggctatgatccggagggct

SEQ ID NO: 249827 - DNA, 50 bp, Artificial
  Synthetic oligonucleotide
aaggcaaccatgtttgggagggcttttgcgtaagtacccccgcccatcga

SEQ ID NO: 249828 - DNA, 50 bp, Artificial
  Synthetic oligonucleotide
aaggatgtcggctctgtggcacgtcgggaaagggtcggagaacaagcctc

SEQ ID NO: 249829 - DNA, 50 bp, Artificial
  Synthetic oligonucleotide
aagcttcaggcgtcgtccaactttgccggcgctccgattggggtaaacgg

SEQ ID NO: 249830 - DNA, 50 bp, Artificial
  Synthetic oligonucleotide
aagctggcgatagtggaggacataccgggggtcacccgggacaggttgta

SEQ ID NO: 249831 - DNA, 50 bp, Artificial
  Synthetic oligonucleotide
aagctggcaaccccctagatccagcgtggcccttcccgttaccaccccaa

SEQ ID NO: 249832 - DNA, 50 bp, Artificial
  Synthetic oligonucleotide
aagcgtgcccggagcggagatgtcaacaatcccagtctggtggtagctcc

SEQ ID NO: 249833 - DNA, 55 bp, Artificial
  Synthetic oligonucleotide
gatcgggaggaggcccgttgctgtggcatgagcctggcccaatgcaatgccctat

SEQ ID NO: 249834 - DNA, 50 bp, Artificial
  Synthetic oligonucleotide
aagcgcctgtagagggacgggttgggcaacccctgttcgaaaaccacgac

SEQ ID NO: 249835 - DNA, 50 bp, Artificial
  Synthetic oligonucleotide
aagcccggtcttgacgggcatgacagaggggccaaggtcgtagccagggc

SEQ ID NO: 249836 - DNA, 50 bp, Artificial
  Synthetic oligonucleotide
aagccacaccgatccaagccccaatgcctgcgatgccagcaggatgtttt

SEQ ID NO: 249837 - DNA, 50 bp, Artificial
  Synthetic oligonucleotide
aagcagttctccacagccaccctgaaggccccgatgccccgtcggaaacc

SEQ ID NO: 249838 - DNA, 50 bp, Artificial
  Synthetic oligonucleotide
aagcacctacggggctatttctctaagtgccgtcagcctgcccatgcgcc

SEQ ID NO: 249839 - DNA, 50 bp, Artificial
  Synthetic oligonucleotide
aagattgcccggctctttcggacgccggttgtgatatgatgacggcggga

SEQ ID NO: 249840 - DNA, 50 bp, Artificial
  Synthetic oligonucleotide
aagaggacggtgggctttaagcagttcacgccccttctctgccccgttgc

SEQ ID NO: 249841 - DNA, 50 bp, Artificial
  Synthetic oligonucleotide
atacctaggggaagcccgaaattgggccccgtccctgactgaatggtggg

SEQ ID NO: 249842 - DNA, 50 bp, Artificial
  Synthetic oligonucleotide
agtccccaacctgcttggcctagggtgcaacgtgcctggcatcctggcga

SEQ ID NO: 249843 - DNA, 50 bp, Artificial
  Synthetic oligonucleotide
aggtccgttcaaaggcctgccaccgtcgcttgcatgggacccgagggttc

SEQ ID NO: 249844 - DNA, 54 bp, Artificial
  Synthetic oligonucleotide
gatcccctttataggaacgccccttgtctggggacctggcgcaatatacctctt

SEQ ID NO: 249845 - DNA, 50 bp, Artificial
  Synthetic oligonucleotide
aggggcataagcgagatggcccggttctcctatgtcaggcagtcggagcc

SEQ ID NO: 249846 - DNA, 50 bp, Artificial
  Synthetic oligonucleotide
aggggagttattgacgccaagccacaccgatccaagccccaatgcctgcg

SEQ ID NO: 249847 - DNA, 50 bp, Artificial
  Synthetic oligonucleotide
agggctccatcttaccgccgggaaaggcaatttgccctccgtgtttggga

SEQ ID NO: 249848 - DNA, 50 bp, Artificial
  Synthetic oligonucleotide
agggccgctcccccacagagacgcagagactacattttcttcgtgccgga

SEQ ID NO: 249849 - DNA, 50 bp, Artificial
  Synthetic oligonucleotide
agggccaagccatacgaacgtaccgaagagcggcaggggtaccgcaacgg

SEQ ID NO: 249850 - DNA, 50 bp, Artificial
  Synthetic oligonucleotide
agggcaaaagggccgtcgatagtacagcccttgatctggctccggctgtt

SEQ ID NO: 249851 - DNA, 50 bp, Artificial
  Synthetic oligonucleotide
aggcggcagagcccctctctggtccatcgccttaaacaacgccccgctgc

SEQ ID NO: 249852 - DNA, 50 bp, Artificial
  Synthetic oligonucleotide
aggcctcgtggatgggaccctccagagggattacggtcagctggacctct

SEQ ID NO: 249853 - DNA, 50 bp, Artificial
  Synthetic oligonucleotide
aggcccctggtgactgcccctcatgaagccgcctacgtaaggtaccagcg

SEQ ID NO: 249854 - DNA, 50 bp, Artificial
  Synthetic oligonucleotide
aggcccaaagggcgggcctgggatgcgagaaatgcttacggctacttcag

SEQ ID NO: 249855 - DNA, 55 bp, Artificial
  Synthetic oligonucleotide
ccaggctccggcgaacttctgtcccaatccaacaacattctggccataggctaca

SEQ ID NO: 249856 - DNA, 50 bp, Artificial
  Synthetic oligonucleotide
aggcagtcaaggagagtagatttgcctactccgctgggccccacaaggcc

SEQ ID NO: 249857 - DNA, 50 bp, Artificial
  Synthetic oligonucleotide
aggcaaagtttccctcacgtgcaacctgggcagcgctatccaactgggcc

SEQ ID NO: 249858 - DNA, 50 bp, Artificial
  Synthetic oligonucleotide
aggattcagacaggcgacatgggatacaccatccatgcagcgacccgggc

SEQ ID NO: 249859 - DNA, 50 bp, Artificial
  Synthetic oligonucleotide
aggatgcaggcgctccctatacccctggccgcgtatgggaccaccacccg

SEQ ID NO: 249860 - DNA, 50 bp, Artificial
  Synthetic oligonucleotide
aggagagaggtcctagcggtttccaggagtgcgcggtcagaccccatggg

SEQ ID NO: 249861 - DNA, 50 bp, Artificial
  Synthetic oligonucleotide
aggacgggaccttcgcatacgcatcccccagaggacggttgagccgagcc

SEQ ID NO: 249862 - DNA, 50 bp, Artificial
  Synthetic oligonucleotide
aggacccttagggcctccaggagaaccctcacggactggccacgggtgtc

SEQ ID NO: 249863 - DNA, 50 bp, Artificial
  Synthetic oligonucleotide
aggacccacattaccctttccggggtaatcatggccgacgggttccgcgg

SEQ ID NO: 249864 - DNA, 50 bp, Artificial
  Synthetic oligonucleotide
agcttgtcgcagaggcgccccaggctgaaaggcagttcgggcaccacaag

SEQ ID NO: 249865 - DNA, 50 bp, Artificial
  Synthetic oligonucleotide
agctgtagctaaggccggaatccccactgccaacgcggcagccagcccta

SEQ ID NO: 249866 - DNA, 55 bp, Artificial
  Synthetic oligonucleotide
ccataagggccaccttcgttgcggtcataaccataccggtatgcctcatagggac

SEQ ID NO: 249867 - DNA, 50 bp, Artificial
  Synthetic oligonucleotide
agctgctatcgtccctattgtgccgcctggacacaggtgagcgcagaacg

SEQ ID NO: 249868 - DNA, 50 bp, Artificial
  Synthetic oligonucleotide
cagccacaaggactgcgagttcttcccgtgtcacaggggcattcctccgg

SEQ ID NO: 249869 - DNA, 50 bp, Artificial
  Synthetic oligonucleotide
cacggcttcgcaatagtccccaacctgcttggcctagggtgcaacgtgcc

SEQ ID NO: 249870 - DNA, 50 bp, Artificial
  Synthetic oligonucleotide
cacagatctccgctggcccccaccgaaccttgggagggtattagggggtg

SEQ ID NO: 249871 - DNA, 50 bp, Artificial
  Synthetic oligonucleotide
caaggaccgcactttggcccccacaggtctaccactactggcagttcgct

SEQ ID NO: 249872 - DNA, 50 bp, Artificial
  Synthetic oligonucleotide
caaacggcgacgcggggacgcacgagggcgcgttcaaatagatgtccacg

SEQ ID NO: 249873 - DNA, 50 bp, Artificial
  Synthetic oligonucleotide
caaaagcccagggacgagctccggccattcgggcaagaaagaccacaccc

SEQ ID NO: 249874 - DNA, 50 bp, Artificial
  Synthetic oligonucleotide
attggcccgtaccacatgggggattaacagggcgtttgccactccatgcc

SEQ ID NO: 249875 - DNA, 50 bp, Artificial
  Synthetic oligonucleotide
attcgtttctcggtaagagcgccgacggggcatagctgcacgcaaaggcc

SEQ ID NO: 249876 - DNA, 50 bp, Artificial
  Synthetic oligonucleotide
attccgctccgctgtgacggagccgcctggcacaactccaaagcgcttca

SEQ ID NO: 249877 - DNA, 55 bp, Artificial
  Synthetic oligonucleotide
gagagccatcctcgtccaccattcgccgaacccgaacacctctagagccttgtcg

SEQ ID NO: 249878 - DNA, 50 bp, Artificial
  Synthetic oligonucleotide
atgggtcggggatgttcgtgacgacggctcgttatttcacgccgaaggga

SEQ ID NO: 249879 - DNA, 50 bp, Artificial
  Synthetic oligonucleotide
atgggggcgcaaagggtcgcggagacaacgtcctcattctctgtgagagc

SEQ ID NO: 249880 - DNA, 50 bp, Artificial
  Synthetic oligonucleotide
atggcttgcggagaggcaccggctccaacagagtgtttccccagtgcatc

SEQ ID NO: 249881 - DNA, 50 bp, Artificial
  Synthetic oligonucleotide
atggctccaggagttgtggagaaggcggtccaaagggcctctgtgtccag

SEQ ID NO: 249882 - DNA, 50 bp, Artificial
  Synthetic oligonucleotide
atggcgtccctaccccgtggagtacaaacacggccgccccaagacgaaag

SEQ ID NO: 249883 - DNA, 50 bp, Artificial
  Synthetic oligonucleotide
atggcgatacatacatttcctgcctcgcggagtgcccatcgcgtagcccg

SEQ ID NO: 249884 - DNA, 50 bp, Artificial
  Synthetic oligonucleotide
atggacaccctgagaaagagcagctgcctcccggaattcgtcagcccgga

SEQ ID NO: 249885 - DNA, 50 bp, Artificial
  Synthetic oligonucleotide
atgatttcggccgcccttccctctccgaagggagagcccgcttttgcaag

SEQ ID NO: 249886 - DNA, 50 bp, Artificial
  Synthetic oligonucleotide
atgagtggcatgacgcatggtttgcaggaggagtccccggtctggtctgc

SEQ ID NO: 249887 - DNA, 50 bp, Artificial
  Synthetic oligonucleotide
atgacgcctgcccacaccagttgggcagtacattcccggagcagtttggg

SEQ ID NO: 249888 - DNA, 55 bp, Artificial
  Synthetic oligonucleotide
gagacaccgaaggagttggcgtagaatgattcgccgtatccatcgctccacgacg

SEQ ID NO: 249889 - DNA, 50 bp, Artificial
  Synthetic oligonucleotide
atcgtaagaagcattcgcgggtcgctttcccgggtggaacgcctgtggga

SEQ ID NO: 249890 - DNA, 50 bp, Artificial
  Synthetic oligonucleotide
atcgcaaaatctgcgctgaacagagagggcgctgcggacagaatcgcagc

SEQ ID NO: 249891 - DNA, 50 bp, Artificial
  Synthetic oligonucleotide
atccgagaggggttgagccgcttcgaggaagacgcaagagctaggccata

SEQ ID NO: 249892 - DNA, 50 bp, Artificial
  Synthetic oligonucleotide
atagcagggggtgcctcgaatccgcctagtctatgcatgttgccgggcga

SEQ ID NO: 249893 - DNA, 50 bp, Artificial
  Synthetic oligonucleotide
atagcaccacgaaaaccgctggggaagcgcccgttattagggtgccagct

SEQ ID NO: 249894 - DNA, 50 bp, Artificial
  Synthetic oligonucleotide
atacgggcaggcattaccactgcggctgcgcctctgggaacagatggtat

SEQ ID NO: 249895 - DNA, 50 bp, Artificial
  Synthetic oligonucleotide
agaagccgatgctgctccgacgagtagccgggatggccgccgtttatgac

SEQ ID NO: 249896 - DNA, 50 bp, Artificial
  Synthetic oligonucleotide
agaagatgcatcccccttcgcctagggacctcctgttagggcagccggat

SEQ ID NO: 249897 - DNA, 50 bp, Artificial
  Synthetic oligonucleotide
agaacgctctttaccgccgcgtcgcttcactcggctcaccctatgccgga

SEQ ID NO: 249898 - DNA, 50 bp, Artificial
  Synthetic oligonucleotide
acttagggttccccatcatggacggtctgaggacccgggtggcgggactt

SEQ ID NO: 249899 - DNA, 55 bp, Artificial
  Synthetic oligonucleotide
ccatcgtggtagccaaggctttcaccgcatccgagatagttcagatgaacagaga

SEQ ID NO: 249900 - DNA, 50 bp, Artificial
  Synthetic oligonucleotide
actgtactattgcaggcgccgccgctaaggcaaaggctccaacccccagg

SEQ ID NO: 249901 - DNA, 50 bp, Artificial
  Synthetic oligonucleotide
actggctatggccacctcgggcagacgggtcccggaggttatccgcttgg

SEQ ID NO: 249902 - DNA, 50 bp, Artificial
  Synthetic oligonucleotide
actggcgtctctgactgtctgcgtggaatgagcggccggcagggactcgc

SEQ ID NO: 249903 - DNA, 50 bp, Artificial
  Synthetic oligonucleotide
actgccccgcgtcccgaaacgattaccgttccccggctcttcccgtcagc

SEQ ID NO: 249904 - DNA, 50 bp, Artificial
  Synthetic oligonucleotide
actgccatctgggggcgtcaagagcctcctgagggttcatccccctccgg

SEQ ID NO: 249905 - DNA, 50 bp, Artificial
  Synthetic oligonucleotide
actgccaagcacgagtgggacgctcactccgccagtgacgcacaggtatc

SEQ ID NO: 249906 - DNA, 50 bp, Artificial
  Synthetic oligonucleotide
actctccgggccgtcctacgtccctcattagccacacggtttgcccgtct

SEQ ID NO: 249907 - DNA, 50 bp, Artificial
  Synthetic oligonucleotide
actcgaaggagtcctcatgaagggacctgcaaggtgggggcttgcggtcc

SEQ ID NO: 249908 - DNA, 50 bp, Artificial
  Synthetic oligonucleotide
actcctgcctcacgtgtcggttctgtacgacgagcgccctcagaccgacg

SEQ ID NO: 249909 - DNA, 50 bp, Artificial
  Synthetic oligonucleotide
actcaagccactgacgagctgtccgctcaaagccggggacgaacgtcgtg

SEQ ID NO: 249910 - DNA, 55 bp, Artificial
  Synthetic oligonucleotide
acgagaaaaggcttagatatgcgagaccgggagagatgaacgaagctcacgttaa

SEQ ID NO: 249911 - DNA, 50 bp, Artificial
  Synthetic oligonucleotide
acgttggaatccccagggaggacgctaggttcgtacttcccggcgcgata

SEQ ID NO: 249912 - DNA, 50 bp, Artificial
  Synthetic oligonucleotide
acgtgtggcatttcctcgcgtcggtccaaaacgccgtggcgactcccggc

SEQ ID NO: 249913 - DNA, 50 bp, Artificial
  Synthetic oligonucleotide
acgtgctccgactgccaagcacgagtgggacgctcactccgccagtgacg

SEQ ID NO: 249914 - DNA, 50 bp, Artificial
  Synthetic oligonucleotide
acgtctggaccggtgtttttccatgtagttccaggccggactgccccgga

SEQ ID NO: 249915 - DNA, 50 bp, Artificial
  Synthetic oligonucleotide
acgtcccaccagaggggctaggacgcccaacctccggatggatctggtat

SEQ ID NO: 249916 - DNA, 50 bp, Artificial
  Synthetic oligonucleotide
acgtcacaggaagggacatcgcctcaagcctggacggggtgatatcgggg

SEQ ID NO: 249917 - DNA, 50 bp, Artificial
  Synthetic oligonucleotide
acgtaggcccctatccagccccgcttgaaccggacccccttcagctcccg

SEQ ID NO: 249918 - DNA, 50 bp, Artificial
  Synthetic oligonucleotide
acgggatcccataaccctgctggccccgtgcccgtcaaagataaccctgg

SEQ ID NO: 249919 - DNA, 50 bp, Artificial
  Synthetic oligonucleotide
acggcgcttctcttgggcgacaaacgcaagctgaccggtgcaaaccacag

SEQ ID NO: 249920 - DNA, 50 bp, Artificial
  Synthetic oligonucleotide
agcgttcaggtcccagacggcagtcagccgcatgttcacaaagcttccgg

SEQ ID NO: 249921 - DNA, 55 bp, Artificial
  Synthetic oligonucleotide
gaaaatcgtccatacggtctcgggccctgagagctactctacggcatcgctcggg

SEQ ID NO: 249922 - DNA, 55 bp, Artificial
  Synthetic oligonucleotide
cccctatttggtcataggactgggagacatagtcctgtcggtcgcagcgggacgt

SEQ ID NO: 249923 - DNA, 50 bp, Artificial
  Synthetic oligonucleotide
agcgtggttctcgggaggtccctgggtctatccgacatgtcccccatgga

SEQ ID NO: 249924 - DNA, 50 bp, Artificial
  Synthetic oligonucleotide
agcgtcagggcctctccggtattccgcccgtttgcttcgcaggcagtgat

SEQ ID NO: 249925 - DNA, 50 bp, Artificial
  Synthetic oligonucleotide
agcgtcaagtcgccgtcgctccccagagccaactgccccttttgggggaa

SEQ ID NO: 249926 - DNA, 50 bp, Artificial
  Synthetic oligonucleotide
agcggtcccccgaggcctccccacaactcacgaagacggacaaccggaca

SEQ ID NO: 249927 - DNA, 50 bp, Artificial
  Synthetic oligonucleotide
agcggtaacggttcggacttgctccagcagcccgcttccttgggcctccc

SEQ ID NO: 249928 - DNA, 50 bp, Artificial
  Synthetic oligonucleotide
agcgaaccgtctttggcgggctcggaaacccccaaggggcgtcccctgga

SEQ ID NO: 249929 - DNA, 50 bp, Artificial
  Synthetic oligonucleotide
agccttccgactccttccgcttgggaaagctccagacttccgagccctgc

SEQ ID NO: 249930 - DNA, 50 bp, Artificial
  Synthetic oligonucleotide
agccggttgggttgcggtgcacagaaggacggtcacgccgaaatgcttaa

SEQ ID NO: 249931 - DNA, 50 bp, Artificial
  Synthetic oligonucleotide
agcatgcccgaacttaccggcgaacggcgcaaagagctgtgcaagtacgt

SEQ ID NO: 249932 - DNA, 50 bp, Artificial
  Synthetic oligonucleotide
agcacgccagccctgccgcttattcgtctcactggcccgatcgaaacgat

SEQ ID NO: 249933 - DNA, 55 bp, Artificial
  Synthetic oligonucleotide
cccggggagtccaccactaggaagcctctgcccttgtaccatgagactcccttcg

SEQ ID NO: 249934 - DNA, 50 bp, Artificial
  Synthetic oligonucleotide
agataggcccccagagcacatagccaataccccacgacgccaaccggagt

SEQ ID NO: 249935 - DNA, 50 bp, Artificial
  Synthetic oligonucleotide
agaggcgcgtctttcgtgggaagggactcgtacagtctggcgaccggagc

SEQ ID NO: 249936 - DNA, 50 bp, Artificial
  Synthetic oligonucleotide
agagcccgtcggctcggcccttcagggagaatgccgtcagaccttccgtc

SEQ ID NO: 249937 - DNA, 50 bp, Artificial
  Synthetic oligonucleotide
agagcccgagacatgcgttccccctcctccgagaggggcacatcggtcct

SEQ ID NO: 249938 - DNA, 50 bp, Artificial
  Synthetic oligonucleotide
agagaaccatcggcggttccgcgcagtcccacaggcgctcgggatattgg

SEQ ID NO: 249939 - DNA, 50 bp, Artificial
  Synthetic oligonucleotide
agacgctgggccggaaaacttagcgcaggccctctctacccctcagtgtc

SEQ ID NO: 249940 - DNA, 50 bp, Artificial
  Synthetic oligonucleotide
agacgagagataggacacggggcacttgcggagagggcagtcagaccgct

SEQ ID NO: 249941 - DNA, 50 bp, Artificial
  Synthetic oligonucleotide
agaccggcgttttcccgccctcctatggttcggaaacctgtcgccactgt

SEQ ID NO: 249942 - DNA, 50 bp, Artificial
  Synthetic oligonucleotide
agaccccgcttatgccgcagactccgctcttcttgtgaaccacgtcgctt

SEQ ID NO: 249943 - DNA, 50 bp, Artificial
  Synthetic oligonucleotide
agaccacccaccaacaatgccatgggatccttgaaccccgcccctccgga

SEQ ID NO: 249944 - DNA, 55 bp, Artificial
  Synthetic oligonucleotide
cctgtccaccacaaaccaatccttcatggtgcctggaaaatcatcgactcccaag

SEQ ID NO: 249945 - DNA, 50 bp, Artificial
  Synthetic oligonucleotide
agacagaccacctaaatcttgccccgaagggtgcgggctatgcgcggatc

SEQ ID NO: 249946 - DNA, 50 bp, Artificial
  Synthetic oligonucleotide
agacaccatagcagcaatctccacggcatggggtgacgcgggcatctcga

SEQ ID NO: 249947 - DNA, 50 bp, Artificial
  Synthetic oligonucleotide
agaagtttgggatcctggcggttgccgtggctctagtggccctgttcgtg

SEQ ID NO: 249948 - DNA, 50 bp, Artificial
  Synthetic oligonucleotide
agaaggaagtaccagggagagggccgccatgttcagttgccccgtagcca

SEQ ID NO: 249949 - DNA, 55 bp, Artificial
  Synthetic oligonucleotide
ccctctgagtgtgacacgaatccatcttaagtatttggctatggaaggggactcc

SEQ ID NO: 249950 - DNA, 55 bp, Artificial
  Synthetic oligonucleotide
cctggcaaaagtcctgtcagaggtgatatcggaacaccgatcccacccgatggcc

SEQ ID NO: 249951 - DNA, 55 bp, Artificial
  Synthetic oligonucleotide
ccctggccagatatggggtggtctcaggcagaggtaacgttcgaggttcggaagg

SEQ ID NO: 249952 - DNA, 54 bp, Artificial
  Synthetic oligonucleotide
cccttgtaccagggctccttgaaccgggcactcttccacttgggacccgcgatg

SEQ ID NO: 249953 - DNA, 55 bp, Artificial
  Synthetic oligonucleotide
ccgagaaaagatgtactgggcacgcagaattggtcttggtcgaaaaggcttcaca

SEQ ID NO: 249954 - DNA, 54 bp, Artificial
  Synthetic oligonucleotide
cctctcgtagccgtatttagaacgaagtttgagggtaagatccgagtagttgcc

SEQ ID NO: 249955 - DNA, 55 bp, Artificial
  Synthetic oligonucleotide
cctctacgttccattaatttcctccggaaactgccttattggcgttctcagcgca

SEQ ID NO: 249956 - DNA, 55 bp, Artificial
  Synthetic oligonucleotide
cttgcggcaagaccttacaccgaggcagaaagccgcaaatagtctcttgcttatc

SEQ ID NO: 249957 - DNA, 55 bp, Artificial
  Synthetic oligonucleotide
ccgcattctcccgctcgcgatatagtctctgggttcatccgatctacgggatcgg

SEQ ID NO: 249958 - DNA, 55 bp, Artificial
  Synthetic oligonucleotide
cctagcccacctgtcgttgaatggtctggtatgtgtcgctcttgcgcttatgtgg

SEQ ID NO: 249959 - DNA, 53 bp, Artificial
  Synthetic oligonucleotide
ccgttatcccggtctattacgacctgatacccgaaaacatcctctctgttagg

SEQ ID NO: 249960 - DNA, 55 bp, Artificial
  Synthetic oligonucleotide
ccgtgccacagtctttgcggtcagaactgataaatccccttcccaaggacgaaga

SEQ ID NO: 249961 - DNA, 55 bp, Artificial
  Synthetic oligonucleotide
ccgtctcagtgaggtttatgtgggtttcggccaggtcgtctcctatggggatatc

SEQ ID NO: 249962 - DNA, 55 bp, Artificial
  Synthetic oligonucleotide
ccgtccacctctcagtatctccaccgcccgcttgtggagatcgtatatccgctcc

SEQ ID NO: 249963 - DNA, 53 bp, Artificial
  Synthetic oligonucleotide
ccgtaggtaccgtcagacctggtaccgtagacatagtttgagtaccctactcc

SEQ ID NO: 249964 - DNA, 55 bp, Artificial
  Synthetic oligonucleotide
aggagatgtcttcggaaccagttcgggactctccataatcagggagacctgcccg

SEQ ID NO: 249965 - DNA, 55 bp, Artificial
  Synthetic oligonucleotide
ccgcgtccttttgacccgagacccgaaacccatgactcatgaccgccgtgaggac

SEQ ID NO: 249966 - DNA, 54 bp, Artificial
  Synthetic oligonucleotide
actcccttgatatgagatggggcgttgggaaccctggttatggtgggaggaacc

SEQ ID NO: 249967 - DNA, 55 bp, Artificial
  Synthetic oligonucleotide
ccatgcgaagctttacatcaccccaaggccccactaccatagaatttgcgtagga

SEQ ID NO: 249968 - DNA, 55 bp, Artificial
  Synthetic oligonucleotide
cggtgatcaagggaagccgcaggcgaaggatagcccagggatcgggaactaccgt

SEQ ID NO: 249969 - DNA, 55 bp, Artificial
  Synthetic oligonucleotide
agtggccatggacgtgtacggggaggagcccatccggagagatcatcccatgctc

SEQ ID NO: 249970 - DNA, 53 bp, Artificial
  Synthetic oligonucleotide
cgggtataatgagggacgaacaagccctgttttccgcgaaattcaacgtcgct

SEQ ID NO: 249971 - DNA, 55 bp, Artificial
  Synthetic oligonucleotide
cgggccgctcaatggcgctgctgtcaggccgtataagaatttgctgcgccgctag

SEQ ID NO: 249972 - DNA, 46 bp, Artificial
  Synthetic oligonucleotide
cgggaacggaccccgtcttcgttggtagggtaaggaaggaacccct

SEQ ID NO: 249973 - DNA, 54 bp, Artificial
  Synthetic oligonucleotide
cggcccaccttgccacctttcggagactatctcggcggttctgaaggcccttag

SEQ ID NO: 249974 - DNA, 55 bp, Artificial
  Synthetic oligonucleotide
cggagcaacgactagcttttacgggaggtgacccctggtggctgattcgaggggc

SEQ ID NO: 249975 - DNA, 52 bp, Artificial
  Synthetic oligonucleotide
cggaacgcggaataaaacgcggaaactttcgagcggctctttcaatgaccgg

SEQ ID NO: 249976 - DNA, 55 bp, Artificial
  Synthetic oligonucleotide
actttaagcgacaggaatttgactgcctgttcttagataaccgaagagctgcgtt

SEQ ID NO: 249977 - DNA, 55 bp, Artificial
  Synthetic oligonucleotide
agaaacggcttcaattgtagcgatcctgccatacgaaattgcctcccagataaat

SEQ ID NO: 249978 - DNA, 55 bp, Artificial
  Synthetic oligonucleotide
atcccttagaaaccgctaagcgcgaggttgcagaggagacgggtttgaccgatgt

SEQ ID NO: 249979 - DNA, 54 bp, Artificial
  Synthetic oligonucleotide
cgctccgtagttgaaatcggactccgcgggatcggggtgtagatacttaccgga

SEQ ID NO: 249980 - DNA, 55 bp, Artificial
  Synthetic oligonucleotide
cgctccatgagaaatcggtataaaatatggggtgaggggagacgatcatcgttcc

SEQ ID NO: 249981 - DNA, 55 bp, Artificial
  Synthetic oligonucleotide
aggttgtttccgttctgaacgtagatcattaggctgagaggttcctgcggagatc

SEQ ID NO: 249982 - DNA, 55 bp, Artificial
  Synthetic oligonucleotide
cgagaagagggatgcccctcgcaagtgagacagccccatctctaccgagccgttc

SEQ ID NO: 249983 - DNA, 55 bp, Artificial
  Synthetic oligonucleotide
agaagcggggataccgttacacgcacggataagtcccatgataagaaagagatac

SEQ ID NO: 249984 - DNA, 55 bp, Artificial
  Synthetic oligonucleotide
ccccgtcataattggagaccactctcgcctttacattggcgccggatatttcagt

SEQ ID NO: 249985 - DNA, 55 bp, Artificial
  Synthetic oligonucleotide
cgaagccgtatctcaagggctcctctcgacggaaaacagagaggagctcgaggct

SEQ ID NO: 249986 - DNA, 55 bp, Artificial
  Synthetic oligonucleotide
cgaagatcggaagaacgcaacgtcatagcgccgcgaacggagttcccctccaaaa

SEQ ID NO: 249987 - DNA, 53 bp, Artificial
  Synthetic oligonucleotide
ccttcgctgaggcccttttagagccctcggccaaaaggtctcctataccttcc

SEQ ID NO: 249988 - DNA, 55 bp, Artificial
  Synthetic oligonucleotide
tagttagcctgatggcccagcagttccctggaccgcaggcaggcgaccaaatgcc

SEQ ID NO: 249989 - DNA, 55 bp, Artificial
  Synthetic oligonucleotide
ccccaggctctttgcgaagctcctcttgccggtctggacacacttaggcaggttt

SEQ ID NO: 249990 - DNA, 55 bp, Artificial
  Synthetic oligonucleotide
tagtcgtccatatcgtactttccataacgctcgtacgtgctgaatttcgcgcccc

SEQ ID NO: 249991 - DNA, 55 bp, Artificial
  Synthetic oligonucleotide
tagcggacaatgacttatgcgcagatctcatctggaaactttcttttacagatcc

SEQ ID NO: 249992 - DNA, 55 bp, Artificial
  Synthetic oligonucleotide
tagagaacgaaagcgagacatatctatggattatcgtatcgaacacgagttgccc

SEQ ID NO: 249993 - DNA, 55 bp, Artificial
  Synthetic oligonucleotide
gtttgagggcgtttgggtgtaccgaaacactttgagcttcgcgctgattatggcc

SEQ ID NO: 249994 - DNA, 55 bp, Artificial
  Synthetic oligonucleotide
gtgactgaccgtagtgcccggtcccagtaaaagcatcgacacggtctggtaaggg

SEQ ID NO: 249995 - DNA, 55 bp, Artificial
  Synthetic oligonucleotide
gtatgctctgatagacctgatgtgttcatacgatctagaaatccgtctatagcgg

SEQ ID NO: 249996 - DNA, 54 bp, Artificial
  Synthetic oligonucleotide
gtaagtaccagtaaaacaactttgcgttctccaggtgttgtcttagaggaggcc

SEQ ID NO: 249997 - DNA, 55 bp, Artificial
  Synthetic oligonucleotide
ggggtggtacatggagatacccaaagacgaatatgccacaacacctccagtttac

SEQ ID NO: 249998 - DNA, 55 bp, Artificial
  Synthetic oligonucleotide
ggggtggagcggtattcccaggtgatgcacctggtatcgcaggtggagggtcgta

SEQ ID NO: 249999 - DNA, 55 bp, Artificial
  Synthetic oligonucleotide
ggggcagtggtcggtcgttgtgccgcagccagaaggattataggggagcccaatg

SEQ ID NO: 250000 - DNA, 55 bp, Artificial
  Synthetic oligonucleotide
ctgcaggcaagtccgcagcttgccgagagtttcctcgggacgggaacaattcgca

SEQ ID NO: 250001 - DNA, 54 bp, Artificial
  Synthetic oligonucleotide
ggggagcggaagcctgggttaccatcacgtctttagagccctccgtaggatggg

SEQ ID NO: 250002 - DNA, 53 bp, Artificial
  Synthetic oligonucleotide
caaacgaggaagggttacaagctttgcgtcaattcttaatctccaaggggtcg

SEQ ID NO: 250003 - DNA, 55 bp, Artificial
  Synthetic oligonucleotide
caaaatcgtcagtaagccggagtgtacgctggtcaaactggacggcgttttcgcc

SEQ ID NO: 250004 - DNA, 54 bp, Artificial
  Synthetic oligonucleotide
gggctcttccgttcgagaccttgaccaagctttacggagctcccaaatacggag

SEQ ID NO: 250005 - DNA, 51 bp, Artificial
  Synthetic oligonucleotide
gggccaaaggaaggggtattcccgttatagtcgaccctaaaccgcaacata

SEQ ID NO: 250006 - DNA, 52 bp, Artificial
  Synthetic oligonucleotide
gggatggaaacaaggggccaaaagtaccagtgctaacaacgcgaaagcgttt

SEQ ID NO: 250007 - DNA, 55 bp, Artificial
  Synthetic oligonucleotide
cacgttgagattttcgaaagggcagagtagaatggatcagtttccgtataaaacc

SEQ ID NO: 250008 - DNA, 55 bp, Artificial
  Synthetic oligonucleotide
cagccatcgaatgaccatccaggaggtgacgagatgaggccggaccccgtagctg

SEQ ID NO: 250009 - DNA, 55 bp, Artificial
  Synthetic oligonucleotide
cacccgagggacagaacgctcgatttgaagacccggactcggctagatgtcgccc

SEQ ID NO: 250010 - DNA, 54 bp, Artificial
  Synthetic oligonucleotide
tgtttccgccgggaacctttatatcgagcaaaaccacgtcaggattccacgaac

SEQ ID NO: 250011 - DNA, 55 bp, Artificial
  Synthetic oligonucleotide
acgggtgcatcaagatgtccgatcgcaacaatctatcggcatgcactggggtacg

SEQ ID NO: 250012 - DNA, 55 bp, Artificial
  Synthetic oligonucleotide
ctcagcaacctttccgaaaaccggtccgatctgaataaatcccgctttcatacca

SEQ ID NO: 250013 - DNA, 50 bp, Artificial
  Synthetic oligonucleotide
acgaagccctggccgctacgcgcaatgcagcactgggagtcaacgatctg

SEQ ID NO: 250014 - DNA, 50 bp, Artificial
  Synthetic oligonucleotide
acctgcgccaacgcctaatggccggagacgaacgattgcccttgttggtc

SEQ ID NO: 250015 - DNA, 50 bp, Artificial
  Synthetic oligonucleotide
accggtttggtcgttgaggcggctcccagccaaggggccagttgacgcca

SEQ ID NO: 250016 - DNA, 50 bp, Artificial
  Synthetic oligonucleotide
accggcctttagttgcggcacgtaggtctcgccacagagaatctcgcccc

SEQ ID NO: 250017 - DNA, 50 bp, Artificial
  Synthetic oligonucleotide
accggcctggtgacacctcaattagatcaagccccatcttgggcgccagg

SEQ ID NO: 250018 - DNA, 50 bp, Artificial
  Synthetic oligonucleotide
accggagcgacggggtttcccgattatgccgcgactctgaggcgattgcg

SEQ ID NO: 250019 - DNA, 50 bp, Artificial
  Synthetic oligonucleotide
accggacggaagatcgtcagagcttcctgggcggtaaggcgtttgcgacg

SEQ ID NO: 250020 - DNA, 50 bp, Artificial
  Synthetic oligonucleotide
accgccggccggggcactcactgggagaattgacgtatcaggacctacgg

SEQ ID NO: 250021 - DNA, 50 bp, Artificial
  Synthetic oligonucleotide
accgccgcttgagctagaggctgcgaccccgccgatatacccttccacat

SEQ ID NO: 250022 - DNA, 50 bp, Artificial
  Synthetic oligonucleotide
accgacacaccgccgcttgagctagaggctgcgaccccgccgatataccc

SEQ ID NO: 250023 - DNA, 55 bp, Artificial
  Synthetic oligonucleotide
gaacatgacccgctggccgctacgcaacgtcacaaattttcgatacgtggcataa

SEQ ID NO: 250024 - DNA, 55 bp, Artificial
  Synthetic oligonucleotide
gaatcatgataagtgtcgagaggaggagtataaacggcgaccgtcttttcccctg

SEQ ID NO: 250025 - DNA, 55 bp, Artificial
  Synthetic oligonucleotide
gagcatttagccacctatctaacccaagatgtccgtcagatggtaagcgctctag

SEQ ID NO: 250026 - DNA, 55 bp, Artificial
  Synthetic oligonucleotide
aatatcatggccctttatcccgatcagttaggagaggctttagatattctgaggc

SEQ ID NO: 250027 - DNA, 55 bp, Artificial
  Synthetic oligonucleotide
gcaagctgactcgaagggatggaagtatattgcctgtgcttattaacgcaactac

SEQ ID NO: 250028 - DNA, 55 bp, Artificial
  Synthetic oligonucleotide
tcgttgctgaatgccttttcgtcagacattttcctgagaaccgacaaaggcgccc

SEQ ID NO: 250029 - DNA, 55 bp, Artificial
  Synthetic oligonucleotide
ttatctggccctgagccgtgaggaggggcagtctctgacagtggccggtaacctc

SEQ ID NO: 250030 - DNA, 55 bp, Artificial
  Synthetic oligonucleotide
gtcgcaatatatcgatatcgtcgcccgacgtttggatcagccggtacataaggtc

SEQ ID NO: 250031 - DNA, 55 bp, Artificial
  Synthetic oligonucleotide
gtccagaggcgtcaagcagactgtattccgctgcaagatgcatcatggccttgtc

SEQ ID NO: 250032 - DNA, 55 bp, Artificial
  Synthetic oligonucleotide
attcgcaggtgtttctccaagttatgcgtgcgaaggatggtttgggccgcccgtg

SEQ ID NO: 250033 - DNA, 55 bp, Artificial
  Synthetic oligonucleotide
ttgggcgtcctgttattcctccgaaccttaaaagtgttgccgtcatggattggtc

SEQ ID NO: 250034 - DNA, 55 bp, Artificial
  Synthetic oligonucleotide
ggcacgtacgtatgcccgactgactatgtatgcttgccgccggttgttttggtgg

SEQ ID NO: 250035 - DNA, 55 bp, Artificial
  Synthetic oligonucleotide
ggaagctacagtggtacgtctccaaatagaattgccactattactgttcaggcag

SEQ ID NO: 250036 - DNA, 55 bp, Artificial
  Synthetic oligonucleotide
gcaggggcggtcaatctcccgacagcacaagtgttcgagaagtatccgccgggtg

SEQ ID NO: 250037 - DNA, 54 bp, Artificial
  Synthetic oligonucleotide
gccaaagagaaccgcgggtgccgtcttgtcttctgactggagtcgcttccaaaa

SEQ ID NO: 250038 - DNA, 50 bp, Artificial
  Synthetic oligonucleotide
cttcccgagtacctccggtttggaaaagagctggtgtcttcccacggggt

SEQ ID NO: 250039 - DNA, 53 bp, Artificial
  Synthetic oligonucleotide
gcggttatctcgcagcacaaaacgatattgggttataagatggttgtcccgac

SEQ ID NO: 250040 - DNA, 53 bp, Artificial
  Synthetic oligonucleotide
gtgggaggaagcacgggacaagaaggaaccgatggaatctttcctcatgaaaa

SEQ ID NO: 250041 - DNA, 53 bp, Artificial
  Synthetic oligonucleotide
gttgagatctttccttacgatcgtggatgatccggctgcttcgttatccgtcc

SEQ ID NO: 250042 - DNA, 53 bp, Artificial
  Synthetic oligonucleotide
tatcgctggccgtgcaaacggaaaactggattctcttcggcagccccagctat

SEQ ID NO: 250043 - DNA, 53 bp, Artificial
  Synthetic oligonucleotide
cacgatttgacaactaccgggaaggtacgaattttgtgttcggcccaagcaac

SEQ ID NO: 250044 - DNA, 52 bp, Artificial
  Synthetic oligonucleotide
atcggcgcccagttatcggaaaggtagcgtgtcagctcaaattgcacacgcg

SEQ ID NO: 250045 - DNA, 52 bp, Artificial
  Synthetic oligonucleotide
tctccctgcgctcgatacttttatgtcacgggacccaatcgcattcgttacg

SEQ ID NO: 250046 - DNA, 52 bp, Artificial
  Synthetic oligonucleotide
catagatttgcccgatcctttgctctgattgttctggatctgcttcgattcg

SEQ ID NO: 250047 - DNA, 52 bp, Artificial
  Synthetic oligonucleotide
cccttcgacaggccatcttatggcgcactcccaaacctggaattcccgccag

SEQ ID NO: 250048 - DNA, 52 bp, Artificial
  Synthetic oligonucleotide
tccttacgaactacagcggatttacgccacctgccaaaatctcggattaaaa

SEQ ID NO: 250049 - DNA, 51 bp, Artificial
  Synthetic oligonucleotide
caggccttatactccgcagtctgtgagacaggatcaaaggccgcgtgggtg

SEQ ID NO: 250050 - DNA, 51 bp, Artificial
  Synthetic oligonucleotide
cgcacggacatctatgctatatgccaacattcaacacgggtgtctcgggag

SEQ ID NO: 250051 - DNA, 50 bp, Artificial
  Synthetic oligonucleotide
agccgcatcacgtaatcccgggttgcaccgtatctcacactccggatgcc

SEQ ID NO: 250052 - DNA, 50 bp, Artificial
  Synthetic oligonucleotide
aggagtgctcccgtcgaggatcaaatcccccgaatacgggattccggcga

SEQ ID NO: 250053 - DNA, 50 bp, Artificial
  Synthetic oligonucleotide
agggctcccgttggacattccccgatgcacgtaccaaggccgtcacagag

SEQ ID NO: 250054 - DNA, 55 bp, Artificial
  Synthetic oligonucleotide
ccagctccatggaactcaatgtccgtcgagacggaaaggtctattcccagtctta

SEQ ID NO: 250055 - DNA, 50 bp, Artificial
  Synthetic oligonucleotide
aggggaacgtcccgcttttcgggggcggatgagcggtctgaacagggctc

SEQ ID NO: 250056 - DNA, 50 bp, Artificial
  Synthetic oligonucleotide
agggtcagggcaacaggattcggccggatcggagtcctcagggcaaaaac

SEQ ID NO: 250057 - DNA, 50 bp, Artificial
  Synthetic oligonucleotide
aggtaagggcgtcgtaactgtctgcaacggcaacaatccgggcccccaga

SEQ ID NO: 250058 - DNA, 50 bp, Artificial
  Synthetic oligonucleotide
aggtccagcgatgaggcacgcagggacgcgcgccaggtaaggggttttat

SEQ ID NO: 250059 - DNA, 50 bp, Artificial
  Synthetic oligonucleotide
agttggccggccgggggaaacatccactatgacgacgtaaccgtccgtcg

SEQ ID NO: 250060 - DNA, 50 bp, Artificial
  Synthetic oligonucleotide
ataccacttgtcccttctgcagcggtagcggtatccgcccctccctggaa

SEQ ID NO: 250061 - DNA, 50 bp, Artificial
  Synthetic oligonucleotide
atccccttattgtctggaaggaagccactccgcccgggggcattgccttt

SEQ ID NO: 250062 - DNA, 50 bp, Artificial
  Synthetic oligonucleotide
atcccgcttcctctcacgcgggaaaagccttacagcagcgaccgcaatct

SEQ ID NO: 250063 - DNA, 50 bp, Artificial
  Synthetic oligonucleotide
atccgggaggatgtggacttcgcatccggagagtcggcgggcaacccata

SEQ ID NO: 250064 - DNA, 50 bp, Artificial
  Synthetic oligonucleotide
ggtgaaagaaaggaaatccgctgaaggcatttcgggcagaaaccgccgga

SEQ ID NO: 250065 - DNA, 55 bp, Artificial
  Synthetic oligonucleotide
cgatggcctcatcgtgatgcttttcctgatagagactatcggctaagtagtagcg

SEQ ID NO: 250066 - DNA, 50 bp, Artificial
  Synthetic oligonucleotide
atcgcccttcgcgagccaattgtctccgtgctttttcaacgcggggcctt

SEQ ID NO: 250067 - DNA, 50 bp, Artificial
  Synthetic oligonucleotide
atcgctcatctttaccgcggaataccgggtccgacgcaatgggccgcatt

SEQ ID NO: 250068 - DNA, 50 bp, Artificial
  Synthetic oligonucleotide
atctcgcgaaagaaatgggaccatgcattgacgtgccggcccccgatgtc

SEQ ID NO: 250069 - DNA, 50 bp, Artificial
  Synthetic oligonucleotide
atgacccacttgctggcatccgcttcactcggccgcttaaaggcagcaat

SEQ ID NO: 250070 - DNA, 50 bp, Artificial
  Synthetic oligonucleotide
cgaaatgttggccgcttttctcatggccctccatagttatgccagaacgc

SEQ ID NO: 250071 - DNA, 50 bp, Artificial
  Synthetic oligonucleotide
catggccctagcggtgcagagcctagtactaaaaccagagctcgtgttaa

SEQ ID NO: 250072 - DNA, 50 bp, Artificial
  Synthetic oligonucleotide
accgaaaacctgtgcaaggtccagcgatgaggcacgcagggacgcgcgcc

SEQ ID NO: 250073 - DNA, 50 bp, Artificial
  Synthetic oligonucleotide
acccccttccagggccgtagtcacccgcttcttgtcccaggggtctacct

SEQ ID NO: 250074 - DNA, 50 bp, Artificial
  Synthetic oligonucleotide
acccaccacgtgaggctctacggacatcgactttcccctggcggtcatcc

SEQ ID NO: 250075 - DNA, 50 bp, Artificial
  Synthetic oligonucleotide
acagttatgcagacgccgcagggacctttcggcatcatggatggggtggg

SEQ ID NO: 250076 - DNA, 53 bp, Artificial
  Synthetic oligonucleotide
cgcctcgggtatcaaggtgggaggtttatcgggcttggccgtgtctacctggg

SEQ ID NO: 250077 - DNA, 50 bp, Artificial
  Synthetic oligonucleotide
acagggcaatgtcccgtaaaaacgcatcgatccgttgccccggaccgcac

SEQ ID NO: 250078 - DNA, 50 bp, Artificial
  Synthetic oligonucleotide
acagggcaaataacggcatgtcaccgggaacgccactaagggccgccatt

SEQ ID NO: 250079 - DNA, 50 bp, Artificial
  Synthetic oligonucleotide
acacgtactgtgggcactcccctcaccccagacggccttagacagttgga

SEQ ID NO: 250080 - DNA, 50 bp, Artificial
  Synthetic oligonucleotide
aatgggcgacttgccgaaccatgccgcggacagccggagtatccttgtgg

SEQ ID NO: 250081 - DNA, 50 bp, Artificial
  Synthetic oligonucleotide
aatgacccaagacctcccaactatcccggaacgggctgtcccctcgggct

SEQ ID NO: 250082 - DNA, 50 bp, Artificial
  Synthetic oligonucleotide
aatcgaccatcctttcccgactaatcttccaagcatttccgatctttata

SEQ ID NO: 250083 - DNA, 50 bp, Artificial
  Synthetic oligonucleotide
aataggcgtgccggacccaacctcgggagcgcgtatagcgggccaattgc

SEQ ID NO: 250084 - DNA, 50 bp, Artificial
  Synthetic oligonucleotide
aagcccggaatacgtgggtcaggtcgactctgccggaacacatgacccga

SEQ ID NO: 250085 - DNA, 50 bp, Artificial
  Synthetic oligonucleotide
aagagtcgccccgacggatggggctacggatgccagagggcgggaaagta

SEQ ID NO: 250086 - DNA, 50 bp, Artificial
  Synthetic oligonucleotide
aagacggcggctgacctgttgaaaggtggcaggtgtggcaacagttccca

SEQ ID NO: 250087 - DNA, 55 bp, Artificial
  Synthetic oligonucleotide
acatgatgggaattatcctgtaagggaaaaccaatgatggagcgtgcactgaaaa

SEQ ID NO: 250088 - DNA, 50 bp, Artificial
  Synthetic oligonucleotide
aactgaaccgtcgcagatatgacctggcgcgcaccttctcaccccgcctg

SEQ ID NO: 250089 - DNA, 50 bp, Artificial
  Synthetic oligonucleotide
aacggtggagtccccgttggcgcaccctacatccaaggtggagcctatgc

SEQ ID NO: 250090 - DNA, 50 bp, Artificial
  Synthetic oligonucleotide
aacgggcgtccgagatggcccaggtggggtgagacaataaaagccccagc

SEQ ID NO: 250091 - DNA, 50 bp, Artificial
  Synthetic oligonucleotide
aacggagaatcttcccggcggtcgcgcatataggcccggagacgtcctga

SEQ ID NO: 250092 - DNA, 50 bp, Artificial
  Synthetic oligonucleotide
aacctgtcccttgcggggaataacggcggggctaaagcttagacggctcc

SEQ ID NO: 250093 - DNA, 50 bp, Artificial
  Synthetic oligonucleotide
aaccggggacctgggcctataatccgaatgtcccgaccttcccccacgat

SEQ ID NO: 250094 - DNA, 50 bp, Artificial
  Synthetic oligonucleotide
aacccgatgaccccacgaccgcgcccccatgatccggaattcagacagcg

SEQ ID NO: 250095 - DNA, 50 bp, Artificial
  Synthetic oligonucleotide
aaccagggaatcatccgactggtcttcgggttgggaacgcgggccgtcaa

SEQ ID NO: 250096 - DNA, 50 bp, Artificial
  Synthetic oligonucleotide
aacatccttcggctcttgggccggcgatggctctgaacctctcgaaacga

SEQ ID NO: 250097 - DNA, 50 bp, Artificial
  Synthetic oligonucleotide
aaaggtgatagcccgggacagccgcgtggtctcggtattcatagcccgcc

SEQ ID NO: 250098 - DNA, 55 bp, Artificial
  Synthetic oligonucleotide
cggaataacgctgccagcactcccgaggacgttaccaaacctggtaatgataaac

SEQ ID NO: 250099 - DNA, 50 bp, Artificial
  Synthetic oligonucleotide
aaagggcgagggaccgacgatggcctcaacctgtttgcttgccagggcgg

SEQ ID NO: 250100 - DNA, 50 bp, Artificial
  Synthetic oligonucleotide
aaaagcgcagcggtgcaaaattcggattgtcgcccctcaggaccaagccg

SEQ ID NO: 250101 - DNA, 50 bp, Artificial
  Synthetic oligonucleotide
aaaagccccagcacggctctgttccacccgcctggcaaatttcggacgcg

SEQ ID NO: 250102 - DNA, 50 bp, Artificial
  Synthetic oligonucleotide
agcccggaaaggggatcgccatcatagagccaggtgtggtaagcccgccc

SEQ ID NO: 250103 - DNA, 50 bp, Artificial
  Synthetic oligonucleotide
agccccgtcacacggtacgctgagcggaacagcgcctgatctgacttaca

SEQ ID NO: 250104 - DNA, 50 bp, Artificial
  Synthetic oligonucleotide
agcaacaaagccgggtgcaggacaccctcactgggttgcccgaggccccc

SEQ ID NO: 250105 - DNA, 50 bp, Artificial
  Synthetic oligonucleotide
agaccaggggagagcttgtcaaaggagcggagggatgtctctcctgcccg

SEQ ID NO: 250106 - DNA, 50 bp, Artificial
  Synthetic oligonucleotide
agacagtccaggccggtgcatctctggtggcaagtgcctacgtagttggc

SEQ ID NO: 250107 - DNA, 50 bp, Artificial
  Synthetic oligonucleotide
agacactgtggcccatattctgcgctttggagtggccgtagcccccgaaa

SEQ ID NO: 250108 - DNA, 50 bp, Artificial
  Synthetic oligonucleotide
actccgttgctgtaacgtagtacaagctggccgggggtcggagttgccgg

SEQ ID NO: 250109 - DNA, 55 bp, Artificial
  Synthetic oligonucleotide
cgggagacgagctacggtgccttccataggttcatcccgcttcccgaaggactcg

SEQ ID NO: 250110 - DNA, 50 bp, Artificial
  Synthetic oligonucleotide
actatgacccggaagcaagacccatagacgcctgccatccccgggacctg

SEQ ID NO: 250111 - DNA, 50 bp, Artificial
  Synthetic oligonucleotide
actatcccggaacgggctgtcccctcgggctaaaacgcggtgcacggacg

SEQ ID NO: 250112 - DNA, 50 bp, Artificial
  Synthetic oligonucleotide
acgtctcgggctctgggtgaagactttttcagcggaccccctagcctccc

SEQ ID NO: 250113 - DNA, 50 bp, Artificial
  Synthetic oligonucleotide
acgtaggtctcgccacagagaatctcgccccgccggctcacctgggcata

SEQ ID NO: 250114 - DNA, 50 bp, Artificial
  Synthetic oligonucleotide
acggtgccgatcctgaatcttgccgatgcgacaaggcgtattgcccgggg

SEQ ID NO: 250115 - DNA, 50 bp, Artificial
  Synthetic oligonucleotide
acggtacgctgagcggaacagcgcctgatctgacttacacgccggcttcc

SEQ ID NO: 250116 - DNA, 50 bp, Artificial
  Synthetic oligonucleotide
acggggtctgggtgcgctggtattctagtaattcctcggggcccggcaga

SEQ ID NO: 250117 - DNA, 50 bp, Artificial
  Synthetic oligonucleotide
acggcgttgataggtgccttcgctgccaaagaggtgttcgtggcccagtt

SEQ ID NO: 250118 - DNA, 50 bp, Artificial
  Synthetic oligonucleotide
acggatggggctacggatgccagagggcgggaaagtagaacgcatcccgc

SEQ ID NO: 250119 - DNA, 50 bp, Artificial
  Synthetic oligonucleotide
acgctgaatgcggctccctgaacgactcgccggatatcctcatccaccgg

SEQ ID NO: 250120 - DNA, 55 bp, Artificial
  Synthetic oligonucleotide
atgccctctcggacggtttatggatgactcaggctgacggatccgtttgaagaca

SEQ ID NO: 250121 - DNA, 55 bp, Artificial
  Synthetic oligonucleotide
ctctccccaggtacgggtatgagatcgtcgccggttcacagtccgcagcgactga

SEQ ID NO: 250122 - DNA, 55 bp, Artificial
  Synthetic oligonucleotide
gatgtcatcggtcgccatgcatcaacggttcgcgatcaggaatcgccgtccggtg

SEQ ID NO: 250123 - DNA, 51 bp, Artificial
  Synthetic oligonucleotide
gcccaaactttggggattcacccggggagataccgaataccggatttcctg

SEQ ID NO: 250124 - DNA, 55 bp, Artificial
  Synthetic oligonucleotide
gcccggacaatcgtcttggctaggttgtgacgtgattcggccaattggctctcgg

SEQ ID NO: 250125 - DNA, 54 bp, Artificial
  Synthetic oligonucleotide
gcgcgaatagtaatagccgggaaaggggcacgaaggggttcgggtgagctcgga

SEQ ID NO: 250126 - DNA, 55 bp, Artificial
  Synthetic oligonucleotide
gcggccgattacggaagaatatgcgctccggcgaaaagtggtcatcaggacttcg

SEQ ID NO: 250127 - DNA, 55 bp, Artificial
  Synthetic oligonucleotide
gggcacatcagtcggtggcgagcgtgttccttgtcaactttggagtcgcgtaggg

SEQ ID NO: 250128 - DNA, 54 bp, Artificial
  Synthetic oligonucleotide
gggcacggtacgctacgtcagcggtccggaacaatgtaagcggtctgaaacccc

SEQ ID NO: 250129 - DNA, 55 bp, Artificial
  Synthetic oligonucleotide
ggtgccactccatccgacgcccggcaagggtttattgtctacagcccgccggatt

SEQ ID NO: 250130 - DNA, 55 bp, Artificial
  Synthetic oligonucleotide
gtcaatatgccgcggagtccaacactcctcggaaccacgagataggatcatgcca

SEQ ID NO: 250131 - DNA, 55 bp, Artificial
  Synthetic oligonucleotide
cacatgttcacgggactcatcgaaggaacgggaatcctgctgcgtctggaccgtc

SEQ ID NO: 250132 - DNA, 55 bp, Artificial
  Synthetic oligonucleotide
ttggacaaatcgataggagtcatatagaggctgattcgaggtgtacggatgcgtg

SEQ ID NO: 250133 - DNA, 54 bp, Artificial
  Synthetic oligonucleotide
catggggtgcgggctctggttgtaaatgcgcgatatcttccaaaccagggaggc

SEQ ID NO: 250134 - DNA, 54 bp, Artificial
  Synthetic oligonucleotide
cacgggtccagcagaagcgaatccgtgaattccccggtcccgatccggtagagc

SEQ ID NO: 250135 - DNA, 53 bp, Artificial
  Synthetic oligonucleotide
gagtgtctctttcatttcaggctcccttctcacatgtatccgtagcctaccgg

SEQ ID NO: 250136 - DNA, 53 bp, Artificial
  Synthetic oligonucleotide
gaaggccggggctccattgagcggcgagacgccctgatcgcttgcgcacgctt

SEQ ID NO: 250137 - DNA, 52 bp, Artificial
  Synthetic oligonucleotide
agatactcccgttggtgacgccggatacgaagaaatgagggatcagttgcca

SEQ ID NO: 250138 - DNA, 51 bp, Artificial
  Synthetic oligonucleotide
ttagtacagcatagcaacggtgttccttgtcaactcttgagtcgcgtacaa

SEQ ID NO: 250139 - DNA, 51 bp, Artificial
  Synthetic oligonucleotide
tgcgtcagtgcgcgatccacgcttgagtcttccgttccacggccgtctcaa

SEQ ID NO: 250140 - DNA, 51 bp, Artificial
  Synthetic oligonucleotide
ccacggcattttgagctcccaggcggtccgttatgacttcgaaggtggttc

SEQ ID NO: 250141 - DNA, 51 bp, Artificial
  Synthetic oligonucleotide
ggcggtataacggcactccgacgagattgttccagacctcccgaaccgatg

SEQ ID NO: 250142 - DNA, 55 bp, Artificial
  Synthetic oligonucleotide
cactcccttgccagttaagatgtgcgccctggggtttgggacgctcctaaatttc

SEQ ID NO: 250143 - DNA, 50 bp, Artificial
  Synthetic oligonucleotide
agcttccaactggaattcatggacacaagacactattccggggccgacta

SEQ ID NO: 250144 - DNA, 50 bp, Artificial
  Synthetic oligonucleotide
aatggctccccacgcgacagcccgtggtgacggacctatgggacaatccg

SEQ ID NO: 250145 - DNA, 50 bp, Artificial
  Synthetic oligonucleotide
aatcgtctcatgggcactcgtgtcgggacctgctttcaacggtgcacggg

SEQ ID NO: 250146 - DNA, 50 bp, Artificial
  Synthetic oligonucleotide
aatccgtaggactcgatctgagccagcacggggaggccgggtataccctg

SEQ ID NO: 250147 - DNA, 50 bp, Artificial
  Synthetic oligonucleotide
aatcccgccgctacgggttcccgtttgaacatgccgcgaacaggcactat

SEQ ID NO: 250148 - DNA, 50 bp, Artificial
  Synthetic oligonucleotide
aacggcgcctcgcgcatgggaaagcgcggaaacgggtcattcgggcaagg

SEQ ID NO: 250149 - DNA, 50 bp, Artificial
  Synthetic oligonucleotide
aacgaccaacggccaatccggcaagaaaagcaccgagggccatcgagact

SEQ ID NO: 250150 - DNA, 50 bp, Artificial
  Synthetic oligonucleotide
aaccttcggccgcgacatgtgcccggtatcgcaaaacagctgccggttga

SEQ ID NO: 250151 - DNA, 50 bp, Artificial
  Synthetic oligonucleotide
aacctgtgtcgcccggtcacagagcatgccagggctgtggggaagtactg

SEQ ID NO: 250152 - DNA, 50 bp, Artificial
  Synthetic oligonucleotide
aaccggggaacgcggctgaagaatggaaatcgcggctcacgcggtcttcc

SEQ ID NO: 250153 - DNA, 55 bp, Artificial
  Synthetic oligonucleotide
cccaacgggcgtgcgatatcaacctaaatctgggcaaatcaagggcatagggcac

SEQ ID NO: 250154 - DNA, 50 bp, Artificial
  Synthetic oligonucleotide
aaccggactgggccgttgccctctggggaataccgggcgtgatcatcgga

SEQ ID NO: 250155 - DNA, 50 bp, Artificial
  Synthetic oligonucleotide
aacagtcgggctcggcgatcgttccaaatttgaggcaacggggctgcatc

SEQ ID NO: 250156 - DNA, 50 bp, Artificial
  Synthetic oligonucleotide
aacacaacacggaatgcggccttggaaaggcctgacgctcgaaaggcgac

SEQ ID NO: 250157 - DNA, 50 bp, Artificial
  Synthetic oligonucleotide
aaagaaaagacgaccgcgggacaggggacactcgaacgcggactaggcgt

SEQ ID NO: 250158 - DNA, 50 bp, Artificial
  Synthetic oligonucleotide
aaactgtccgcggctcaacgctccgaattccaggggctcttcattgcgct

SEQ ID NO: 250159 - DNA, 50 bp, Artificial
  Synthetic oligonucleotide
aaacgctcgggagtgagcctgacggttcaccggttgagggtgctggaggt

SEQ ID NO: 250160 - DNA, 50 bp, Artificial
  Synthetic oligonucleotide
aaaccaagctcaatcctcccctgctcacgatgaacgcggagcagccgggg

SEQ ID NO: 250161 - DNA, 50 bp, Artificial
  Synthetic oligonucleotide
aaacactgctacaccctgatgcacgggaaggactcgcccgttcccctgtg

SEQ ID NO: 250162 - DNA, 50 bp, Artificial
  Synthetic oligonucleotide
aaacacggaaccctgtgggcgtcgtcccgtgtgacggtcggctctgcgcg

SEQ ID NO: 250163 - DNA, 50 bp, Artificial
  Synthetic oligonucleotide
aaaatgccgatcctcacgtcggccttgaagagcctcgacaggtgacgccc

SEQ ID NO: 250164 - DNA, 55 bp, Artificial
  Synthetic oligonucleotide
cggagcctttcgacagggtattcaatacatgaccgaccggcgtctgggaagtgta

SEQ ID NO: 250165 - DNA, 50 bp, Artificial
  Synthetic oligonucleotide
aaaacccgaccgtgcgctcaaacaaaaacgggtcacggcatctcggccgc

SEQ ID NO: 250166 - DNA, 50 bp, Artificial
  Synthetic oligonucleotide
aaaacccccgtgaacgagcgaaccagccggggtttcacaagaccctccgc

SEQ ID NO: 250167 - DNA, 50 bp, Artificial
  Synthetic oligonucleotide
aatagcgcacccggcctctgtccaacagacgtacggaagatcccacggga

SEQ ID NO: 250168 - DNA, 50 bp, Artificial
  Synthetic oligonucleotide
aatacagggtgagcgggcgaattccgtgactcacggggcggggttgggcc

SEQ ID NO: 250169 - DNA, 50 bp, Artificial
  Synthetic oligonucleotide
aagtccgcgtcatcgaaagtgtcgtcccacatgaatcgcacgccctccga

SEQ ID NO: 250170 - DNA, 50 bp, Artificial
  Synthetic oligonucleotide
aagtcatccgggtgcgggggcaccgtctcggaatcatacacggttgggga

SEQ ID NO: 250171 - DNA, 50 bp, Artificial
  Synthetic oligonucleotide
aaggttgacccccttggcatttcgcacctgcatgaggagcgggttccagg

SEQ ID NO: 250172 - DNA, 50 bp, Artificial
  Synthetic oligonucleotide
aaggctggtcctcccgaagtcaaaggtgacgcatccctcccgccgagccg

SEQ ID NO: 250173 - DNA, 50 bp, Artificial
  Synthetic oligonucleotide
aagcgttctccggggatgttccgtgcgtcggggttcatgggccttccttc

SEQ ID NO: 250174 - DNA, 50 bp, Artificial
  Synthetic oligonucleotide
aagcgtcgggagcgaaatggggcaggtagggtttcacgagcatgagcgcg

SEQ ID NO: 250175 - DNA, 55 bp, Artificial
  Synthetic oligonucleotide
cggatatgcgggagatgaacgccagaacggtctccatcggcctatgcgatgggac

SEQ ID NO: 250176 - DNA, 50 bp, Artificial
  Synthetic oligonucleotide
aagcggtcaattcagcgggcttcattgggtgcgaatgtccggcggaacgt

SEQ ID NO: 250177 - DNA, 50 bp, Artificial
  Synthetic oligonucleotide
aagcgccttcaaacacctgtcgaggagtgcggggcgtttgtaagtcggga

SEQ ID NO: 250178 - DNA, 50 bp, Artificial
  Synthetic oligonucleotide
aagccagggagtgaacggagcgttgtatcgcgcaaagatgggttccccga

SEQ ID NO: 250179 - DNA, 50 bp, Artificial
  Synthetic oligonucleotide
aagcagacaccatcgagtgaactaggtagaccgcggcccggcatccccgt

SEQ ID NO: 250180 - DNA, 50 bp, Artificial
  Synthetic oligonucleotide
aagaatcgctccacgccctctgatcgcacaccgtagcgtgcttccgggtc

SEQ ID NO: 250181 - DNA, 50 bp, Artificial
  Synthetic oligonucleotide
aactcatatgtccgagggcgcgggagtgaatggcgggaccattgccgtcc

SEQ ID NO: 250182 - DNA, 50 bp, Artificial
  Synthetic oligonucleotide
aacgttcgccgttaccgttctggaggaaccgaggggctcgtaggtccgct

SEQ ID NO: 250183 - DNA, 50 bp, Artificial
  Synthetic oligonucleotide
aacggttcaaatggctccccacgcgacagcccgtggtgacggacctatgg

SEQ ID NO: 250184 - DNA, 50 bp, Artificial
  Synthetic oligonucleotide
aacggtccggccttgccccgtacttccgcgtagggtgttcccgatacctg

SEQ ID NO: 250185 - DNA, 55 bp, Artificial
  Synthetic oligonucleotide
cggcctgaatcggctcagacggcttgtctccgctctccatggtgtacatccaatt

SEQ ID NO: 250186 - DNA, 52 bp, Artificial
  Synthetic oligonucleotide
cgtccccgggtctcgaaggaaccgcgcctggggttttgagcttgaatgaacc

SEQ ID NO: 250187 - DNA, 55 bp, Artificial
  Synthetic oligonucleotide
ctcgaacacggcaatttacgacaaaagctacgtgaagacgaggatttactgggac

SEQ ID NO: 250188 - DNA, 55 bp, Artificial
  Synthetic oligonucleotide
gccgatgtaggaatcaatccccagaaggtcggtaatgttggcgatgccattagag

SEQ ID NO: 250189 - DNA, 55 bp, Artificial
  Synthetic oligonucleotide
gaaaatgtataccctgggtcatgattttatcccctccggaattcacgcgggcggc

SEQ ID NO: 250190 - DNA, 50 bp, Artificial
  Synthetic oligonucleotide
aatctcgtgtccgccacgaggggtagccacagatacacacagacccggca

SEQ ID NO: 250191 - DNA, 50 bp, Artificial
  Synthetic oligonucleotide
aatgttccggggcctattgtcccgcattacgcgcaacccccaggggattc

SEQ ID NO: 250192 - DNA, 50 bp, Artificial
  Synthetic oligonucleotide
acaagcagtgaaccttccgccacagggaccggggacacgggagccgggag

SEQ ID NO: 250193 - DNA, 50 bp, Artificial
  Synthetic oligonucleotide
acacgcacgtccttagggtgtcacggcgcctgggttggcacaatgcccgt

SEQ ID NO: 250194 - DNA, 50 bp, Artificial
  Synthetic oligonucleotide
acagcagcagtccactgccggcacccaatacaataaccgccacgggatgg

SEQ ID NO: 250195 - DNA, 50 bp, Artificial
  Synthetic oligonucleotide
accaccacttccccggaagccagaggcttaccgttcacacacagggcggc

SEQ ID NO: 250196 - DNA, 50 bp, Artificial
  Synthetic oligonucleotide
accagctttcaaccgcgcttacgcgaaccgttttgggcagcccggtgatt

SEQ ID NO: 250197 - DNA, 50 bp, Artificial
  Synthetic oligonucleotide
accagggcttagccggtggttaccctgacggaacttttggtcccggccga

SEQ ID NO: 250198 - DNA, 50 bp, Artificial
  Synthetic oligonucleotide
accccatccggctcacagggctggtcatcggagttccccagacatacgag

SEQ ID NO: 250199 - DNA, 50 bp, Artificial
  Synthetic oligonucleotide
accccgactgcctgtgggcgcaagagataagcccgaagaaccgtgtgagg

SEQ ID NO: 250200 - DNA, 55 bp, Artificial
  Synthetic oligonucleotide
ctgatcaaaggtcttcttaccctgctcactggccatatagtacttcaaacccaca

SEQ ID NO: 250201 - DNA, 50 bp, Artificial
  Synthetic oligonucleotide
aaacaccgcgtacaccgagataagggcgaaagccgccccgtcagagagcg

SEQ ID NO: 250202 - DNA, 50 bp, Artificial
  Synthetic oligonucleotide
aaagcccaacagggaaatgcggctctggtccacatcgggacgggtactga

SEQ ID NO: 250203 - DNA, 50 bp, Artificial
  Synthetic oligonucleotide
aaaggagttgcagcgcaaaggagcccccaccatcgatttggagcggctgg

SEQ ID NO: 250204 - DNA, 50 bp, Artificial
  Synthetic oligonucleotide
aaaggcggctgcgacctgacgtaccacgttgctgagagctgaagccctac

SEQ ID NO: 250205 - DNA, 50 bp, Artificial
  Synthetic oligonucleotide
aaaggggcccgcggggcgatactgtctcaccggcgcacgacactgtattc

SEQ ID NO: 250206 - DNA, 50 bp, Artificial
  Synthetic oligonucleotide
aaagggtcagggacgttaccagcgtttccttttcaccgccggcccattgc

SEQ ID NO: 250207 - DNA, 50 bp, Artificial
  Synthetic oligonucleotide
aacacatcgagagagcgttcgtacacggctcccggccgcacttctcggta

SEQ ID NO: 250208 - DNA, 50 bp, Artificial
  Synthetic oligonucleotide
aacagggcttgtacaggtagcccggacgcaggcttgtggctttcagtcga

SEQ ID NO: 250209 - DNA, 50 bp, Artificial
  Synthetic oligonucleotide
aaccctctgcgggtgttagactgcaagaaccagggttgccgcgaggcagt

SEQ ID NO: 250210 - DNA, 50 bp, Artificial
  Synthetic oligonucleotide
aaccgcagtggacacttcctgagacgtgccttcgtcgggggttccccagg

SEQ ID NO: 250211 - DNA, 55 bp, Artificial
  Synthetic oligonucleotide
accgacaacaaggtatcttccctttggacaatacctgatacagccttatgagccc

SEQ ID NO: 250212 - DNA, 50 bp, Artificial
  Synthetic oligonucleotide
aaccgctcaacggaatggggacgcggcactaacctgggagcgtcactgaa

SEQ ID NO: 250213 - DNA, 50 bp, Artificial
  Synthetic oligonucleotide
aaccttagctcccagcgggcaccgcaagatcgaatgggcaagccggcaca

SEQ ID NO: 250214 - DNA, 50 bp, Artificial
  Synthetic oligonucleotide
aaccttttcccctacaagcagcctcgcccctcgcatcgggcccaggctac

SEQ ID NO: 250215 - DNA, 50 bp, Artificial
  Synthetic oligonucleotide
aactcccgtttcgtccatctgaccacagcctccaggtcgggggtagagcc

SEQ ID NO: 250216 - DNA, 50 bp, Artificial
  Synthetic oligonucleotide
aactgccgtaggccgcgggaaactctttggcacaccagactccgtaccgg

SEQ ID NO: 250217 - DNA, 50 bp, Artificial
  Synthetic oligonucleotide
aacttccgtggtaagccgcgggggaagagcgctaaccggacaaggtgtag

SEQ ID NO: 250218 - DNA, 50 bp, Artificial
  Synthetic oligonucleotide
aagcccgacatccttaaggtggatacccgcctagccctggcgtctggtta

SEQ ID NO: 250219 - DNA, 50 bp, Artificial
  Synthetic oligonucleotide
aagcctgaagataccaggtcaggggcaggcactccccgattatccgggct

SEQ ID NO: 250220 - DNA, 50 bp, Artificial
  Synthetic oligonucleotide
aagcgaacctggtagcatcccctacctcaaccctgcacgccccgcacata

SEQ ID NO: 250221 - DNA, 50 bp, Artificial
  Synthetic oligonucleotide
aagcgttggcatcgtgcggttcgtggcttgtcgtgtcatggatcacccgg

SEQ ID NO: 250222 - DNA, 55 bp, Artificial
  Synthetic oligonucleotide
ctcctaccacgcttagtgtggagttggcggatactctgggtgttacgctaattgg

SEQ ID NO: 250223 - DNA, 50 bp, Artificial
  Synthetic oligonucleotide
agagacggcccggcccgtcctgagtccagacaaaattgttgtggagagcc

SEQ ID NO: 250224 - DNA, 50 bp, Artificial
  Synthetic oligonucleotide
agcaggcaactgtacggcagaacaatcaatactggccgctgccagcaccg

SEQ ID NO: 250225 - DNA, 50 bp, Artificial
  Synthetic oligonucleotide
agcatatcagagccgggtcggctaaaaaggggcccgcggggcgatactgt

SEQ ID NO: 250226 - DNA, 50 bp, Artificial
  Synthetic oligonucleotide
agcccggtgggactttcctgtgccgctggcgccaattaatgcaaatacct

SEQ ID NO: 250227 - DNA, 50 bp, Artificial
  Synthetic oligonucleotide
agccgcccgtgcagcccaacgtgtcaacgccccttacagtaccgaaccca

SEQ ID NO: 250228 - DNA, 50 bp, Artificial
  Synthetic oligonucleotide
agccgtttagtgctccacacagtgtcccccagctgtatgcacccccggca

SEQ ID NO: 250229 - DNA, 50 bp, Artificial
  Synthetic oligonucleotide
agcgcaccctgtcgggcacttctggtgctccctgcagccgctattaaggt

SEQ ID NO: 250230 - DNA, 50 bp, Artificial
  Synthetic oligonucleotide
agcgcttctgaccaggatgggagattagcgcggtaccccttgagccgcga

SEQ ID NO: 250231 - DNA, 50 bp, Artificial
  Synthetic oligonucleotide
agcgggcttaactccgggccgaagcggtataacggaactgcactttcccc

SEQ ID NO: 250232 - DNA, 50 bp, Artificial
  Synthetic oligonucleotide
agcgggtaccttcgcagtaggggcagtctaccccgcggagataggctaag

SEQ ID NO: 250233 - DNA, 55 bp, Artificial
  Synthetic oligonucleotide
ctccggtcaactattccgtcatatcccggacaattaacaccgtctatctccggac

SEQ ID NO: 250234 - DNA, 50 bp, Artificial
  Synthetic oligonucleotide
agcggtgccgtccctttgagttagaggttcgcggcttgggcgcatttccc

SEQ ID NO: 250235 - DNA, 50 bp, Artificial
  Synthetic oligonucleotide
agcggtggactctatggcagttcgcttaccatcctgccacccgcacagaa

SEQ ID NO: 250236 - DNA, 50 bp, Artificial
  Synthetic oligonucleotide
aggccagctgagtggctacagccaacccgccgggaagatgccccattagt

SEQ ID NO: 250237 - DNA, 50 bp, Artificial
  Synthetic oligonucleotide
aggcgtacccgcaaccttaattagcgaccgcagggagcatcaggagtacc

SEQ ID NO: 250238 - DNA, 50 bp, Artificial
  Synthetic oligonucleotide
agggacgttaccagcgtttccttttcaccgccggcccattgcgacagcct

SEQ ID NO: 250239 - DNA, 50 bp, Artificial
  Synthetic oligonucleotide
aggggcaacccggcaataatggccgacaggacccaccagaacggataccc

SEQ ID NO: 250240 - DNA, 50 bp, Artificial
  Synthetic oligonucleotide
agtgacaccgcaaggtggaacaccagagtgcccgcagggtgaagtgtgct

SEQ ID NO: 250241 - DNA, 50 bp, Artificial
  Synthetic oligonucleotide
agtgagcgctggttgactgcgatgcgggcatactgcggaccctccaggat

SEQ ID NO: 250242 - DNA, 50 bp, Artificial
  Synthetic oligonucleotide
agttcaagcactttcttaggaacgctatgggttcagtaaacgaggtacag

SEQ ID NO: 250243 - DNA, 50 bp, Artificial
  Synthetic oligonucleotide
atcgtcctgtgctgcggagtcatctccgttaccaccgcacccgcttaggg

SEQ ID NO: 250244 - DNA, 55 bp, Artificial
  Synthetic oligonucleotide
ctatccgtttctatggtctcgctgcgataacgactttggaatagataacccaccc

SEQ ID NO: 250245 - DNA, 50 bp, Artificial
  Synthetic oligonucleotide
accctgtcctgactccacgtaccagtccccttggggtttcactcccgcct

SEQ ID NO: 250246 - DNA, 50 bp, Artificial
  Synthetic oligonucleotide
accgaggcgccaaagagccctcgattgggatgtggcccccatatgttccg

SEQ ID NO: 250247 - DNA, 50 bp, Artificial
  Synthetic oligonucleotide
accgccctcccgactcaatccctggcacgcccgttcaatcccggctttaa

SEQ ID NO: 250248 - DNA, 50 bp, Artificial
  Synthetic oligonucleotide
accgctaaaaccaccgaggcgccaaagagccctcgattgggatgtggccc

SEQ ID NO: 250249 - DNA, 50 bp, Artificial
  Synthetic oligonucleotide
accggggcggacactctacccgaagcggttttagctcgagccaggtgcta

SEQ ID NO: 250250 - DNA, 50 bp, Artificial
  Synthetic oligonucleotide
accgggtagtcggggttgtatccgccgctttttccttgccgcagcctgct

SEQ ID NO: 250251 - DNA, 50 bp, Artificial
  Synthetic oligonucleotide
accgtagacccggtaaaccggccgctccgaatccggaagtaccagtgccc

SEQ ID NO: 250252 - DNA, 50 bp, Artificial
  Synthetic oligonucleotide
acctacgtcgcaccagtaccggtcgatagcgtggccgtaaaaaggcgcct

SEQ ID NO: 250253 - DNA, 50 bp, Artificial
  Synthetic oligonucleotide
acctcgccccaaggaacggccacggcaacaacacaccgaaaccttgcacc

SEQ ID NO: 250254 - DNA, 50 bp, Artificial
  Synthetic oligonucleotide
acgatgcgtgtcgactgataagggccgcgggtgccaacgggtagcaaacg

SEQ ID NO: 250255 - DNA, 50 bp, Artificial
  Synthetic oligonucleotide
accggactcccttgggtacaccggttaatatattcgggaaagctaatacg

SEQ ID NO: 250256 - DNA, 50 bp, Artificial
  Synthetic oligonucleotide
acgcatgggtaacacctgcggcttgtctcgcggctcaaggggtaccgcgc

SEQ ID NO: 250257 - DNA, 50 bp, Artificial
  Synthetic oligonucleotide
acggcgcctgggttggcacaatgcccgtgatcctcaggtagcagaggctg

SEQ ID NO: 250258 - DNA, 50 bp, Artificial
  Synthetic oligonucleotide
acgggcacgcgttagtgcacatcttgcagcgtatgcaacggctgtggtcg

SEQ ID NO: 250259 - DNA, 50 bp, Artificial
  Synthetic oligonucleotide
acgggggaatagtggggacacccggcgtttaccaagagatccccgctctc

SEQ ID NO: 250260 - DNA, 50 bp, Artificial
  Synthetic oligonucleotide
acggtaaatgcggacccgggaagaattgcggcccaagtcgtgagcggaat

SEQ ID NO: 250261 - DNA, 50 bp, Artificial
  Synthetic oligonucleotide
acgtataacggtcgggacttggctccccgtgtggccgccaggctgcgaac

SEQ ID NO: 250262 - DNA, 50 bp, Artificial
  Synthetic oligonucleotide
actaggtttcttgggcggcactaggcggaccgctcgggattcgtccggca

SEQ ID NO: 250263 - DNA, 50 bp, Artificial
  Synthetic oligonucleotide
actccgcatcgtttcccttccctgacaagctgcaggtaggcccttgccgc

SEQ ID NO: 250264 - DNA, 50 bp, Artificial
  Synthetic oligonucleotide
agacagcattacaatgaacgcatccagagaggttaatgagccaaccgaac

SEQ ID NO: 250265 - DNA, 50 bp, Artificial
  Synthetic oligonucleotide
agactgctcatggtgccctgacccgttatatcaccaccgcggatcccggg

SEQ ID NO: 250266 - DNA, 55 bp, Artificial
  Synthetic oligonucleotide
ctactgggtcccggctgtcagccagataaaacttcgtttctccagtgtacgcgtt

SEQ ID NO: 250267 - DNA, 55 bp, Artificial
  Synthetic oligonucleotide
cggcatcatatacaaccactaacccacccaattcgaacaacactgcgcatacgcc

SEQ ID NO: 250268 - DNA, 55 bp, Artificial
  Synthetic oligonucleotide
cgcatacctggccttcaatctttcacgcctgacctggataaggttcacggtgtgg

SEQ ID NO: 250269 - DNA, 55 bp, Artificial
  Synthetic oligonucleotide
gccaatcgccttgtgaatggagttgctgtaatgccttttccatagcggtaaacct

SEQ ID NO: 250270 - DNA, 54 bp, Artificial
  Synthetic oligonucleotide
cgcaggttttgtaggggcggataccgtcggggttctcttggccacagaactgga

SEQ ID NO: 250271 - DNA, 55 bp, Artificial
  Synthetic oligonucleotide
cgagttgccggggccatgttatcgagattgtcagatatccactgcagttcagcgt

SEQ ID NO: 250272 - DNA, 54 bp, Artificial
  Synthetic oligonucleotide
cgagtcgtaggattagaacccgccgcctgttctgttaataggaactttggccgc

SEQ ID NO: 250273 - DNA, 55 bp, Artificial
  Synthetic oligonucleotide
ccttcaagctagccatctgcattatcgtctgagaaatagcccatccctgtcctcg

SEQ ID NO: 250274 - DNA, 55 bp, Artificial
  Synthetic oligonucleotide
cctatagaaacagctcgcgacatgggagcagaacgcgttatcgctgtagacgtga

SEQ ID NO: 250275 - DNA, 55 bp, Artificial
  Synthetic oligonucleotide
ccgctgcaggtggcctttgaggcagagccggtatttaccacctatgcttttgagt

SEQ ID NO: 250276 - DNA, 50 bp, Artificial
  Synthetic oligonucleotide
cccgtaaacgttgtactgtaaccttctccccacctaaacgtcctggcagt

SEQ ID NO: 250277 - DNA, 55 bp, Artificial
  Synthetic oligonucleotide
agatattattcgactcccggctttactagcgaagtcgtacacgtttacgtagcca

SEQ ID NO: 250278 - DNA, 55 bp, Artificial
  Synthetic oligonucleotide
agggactcaatccctttatatccgtaaagctgagtatccaagcgtagtggtatag

SEQ ID NO: 250279 - DNA, 52 bp, Artificial
  Synthetic oligonucleotide
atctctggcccgttgggaatccccgccggtttccctccgtcccaagaagcca

SEQ ID NO: 250280 - DNA, 55 bp, Artificial
  Synthetic oligonucleotide
gcatccggaattggaccacggcaaaacgaaggcgaattggtacaggctgcgaaag

SEQ ID NO: 250281 - DNA, 55 bp, Artificial
  Synthetic oligonucleotide
atctccctggggcaactcatgatataccaatggccgcgctcctacatgatcccgg

SEQ ID NO: 250282 - DNA, 55 bp, Artificial
  Synthetic oligonucleotide
atcagccgaagtcaggacaggtactgctatgctaattacgcctcagaccttgccc

SEQ ID NO: 250283 - DNA, 52 bp, Artificial
  Synthetic oligonucleotide
tctccctaaggttttgggaagcaaacgggtacaggtaggcataaaagctaac

SEQ ID NO: 250284 - DNA, 55 bp, Artificial
  Synthetic oligonucleotide
tgaaaacttaaccgttattacttctgtagcagcgtccttatctgcagacgtccca

SEQ ID NO: 250285 - DNA, 55 bp, Artificial
  Synthetic oligonucleotide
tcctcatcggccctccggtactgagcacgacgcaaaagaacatttccccgtacag

SEQ ID NO: 250286 - DNA, 55 bp, Artificial
  Synthetic oligonucleotide
tcccgaagccagcaccattgtcaaccgggttgtccctcgcattcataatgatgcg

SEQ ID NO: 250287 - DNA, 55 bp, Artificial
  Synthetic oligonucleotide
ttcagccccaaatagagcatgatagccggtacttgttaattaattcacagatgct

SEQ ID NO: 250288 - DNA, 52 bp, Artificial
  Synthetic oligonucleotide
gtttcccggggcggtggtgcttttacagggtgatttaggagcgggcaagacc

SEQ ID NO: 250289 - DNA, 55 bp, Artificial
  Synthetic oligonucleotide
ttggattgcattcttgcggttttgggcagattcataggtatctactgcatggaag

SEQ ID NO: 250290 - DNA, 55 bp, Artificial
  Synthetic oligonucleotide
gtcgcttttaatgtagcgcaccctgtcgggcacttctggtgctccctgcagccgc

SEQ ID NO: 250291 - DNA, 55 bp, Artificial
  Synthetic oligonucleotide
gcagtctataccgggaagcagggtgctaaataccagcaatctctccgaggattgg

SEQ ID NO: 250292 - DNA, 55 bp, Artificial
  Synthetic oligonucleotide
gtccccattattccagctaataccctctatccggtaaccaggtcgcgcctgttta

SEQ ID NO: 250293 - DNA, 55 bp, Artificial
  Synthetic oligonucleotide
gtactgctagtagatggttataacgttattgggaactgggaagatttgtcggccc

SEQ ID NO: 250294 - DNA, 53 bp, Artificial
  Synthetic oligonucleotide
gtaaccgtaaataatattaaggtacggatgattaccaggaccatggcctttcc

SEQ ID NO: 250295 - DNA, 55 bp, Artificial
  Synthetic oligonucleotide
gggtgggtagctcgtgaggcacggtctccagggttagtttctccgtaggatagag

SEQ ID NO: 250296 - DNA, 55 bp, Artificial
  Synthetic oligonucleotide
ggggtctgcggagtgcagtatgaggaaactgaaaatcgcgggctcgaggagaggt

SEQ ID NO: 250297 - DNA, 53 bp, Artificial
  Synthetic oligonucleotide
ggggtagccggaacccctacgtaaaacattccgatgatcttgccttgggcgtc

SEQ ID NO: 250298 - DNA, 55 bp, Artificial
  Synthetic oligonucleotide
gggatgagtcgggatcaagctacaaactacgtcctcctgtccttagttgccggcc

SEQ ID NO: 250299 - DNA, 55 bp, Artificial
  Synthetic oligonucleotide
ggcgggcagtctatgtagacgaaatcatagttccgtctgatgttttcaaggccct

SEQ ID NO: 250300 - DNA, 55 bp, Artificial
  Synthetic oligonucleotide
ggcctaccagggcattagcctgatgcggtctacagtggaaaatctgttaggggtc

SEQ ID NO: 250301 - DNA, 55 bp, Artificial
  Synthetic oligonucleotide
ggcacctgtcccgcttaaataagtacaaccccgctgcagattatgcagtatgcca

SEQ ID NO: 250302 - DNA, 55 bp, Artificial
  Synthetic oligonucleotide
acatgggtacgcttaagagtataatggtacgcgatccggttacagtgtcgccgga

SEQ ID NO: 250303 - DNA, 55 bp, Artificial
  Synthetic oligonucleotide
ggcaattctgactaaggccaacatcacagggacttctaccaatactccaaccact

SEQ ID NO: 250304 - DNA, 55 bp, Artificial
  Synthetic oligonucleotide
ggaacgcttctgtaaaggtctcctcgccggttccgtggttatcaactcgcgccac

SEQ ID NO: 250305 - DNA, 55 bp, Artificial
  Synthetic oligonucleotide
gctctggataacggaacaggcttcgatgcagcggcgacatagtatacatttatcc

SEQ ID NO: 250306 - DNA, 53 bp, Artificial
  Synthetic oligonucleotide
atatttggccggtcgaactctggtttccccgggccattaatctgaacgggcta

SEQ ID NO: 250307 - DNA, 51 bp, Artificial
  Synthetic oligonucleotide
aggaggagtagagatgccggtcgtggttggagttaggtttaaaccggcggg

SEQ ID NO: 250308 - DNA, 54 bp, Artificial
  Synthetic oligonucleotide
cctatgaagagagcccgggccatagtaaccgctactgcctattatcaggatcct

SEQ ID NO: 250309 - DNA, 53 bp, Artificial
  Synthetic oligonucleotide
ttttagccccgacgtggacgagaaagcgtttcgcttggcagaagagatgcgtt

SEQ ID NO: 250310 - DNA, 53 bp, Artificial
  Synthetic oligonucleotide
agagaacaccagatttaacctccgaagaggtgagcgtgctcaagacaatcggc

SEQ ID NO: 250311 - DNA, 53 bp, Artificial
  Synthetic oligonucleotide
cccgtattttcgtatagcactctactcggtacctgcatcccgactgccttgaa

SEQ ID NO: 250312 - DNA, 53 bp, Artificial
  Synthetic oligonucleotide
cgacatgcaccgttgtgaatggttcctagtgtagcatgtgccaggggtgcaca

SEQ ID NO: 250313 - DNA, 55 bp, Artificial
  Synthetic oligonucleotide
gcacttgcaattggggcgaaatctaggatctgacgaacgaaaggggagttgccca

SEQ ID NO: 250314 - DNA, 52 bp, Artificial
  Synthetic oligonucleotide
tccctaaatggtcgataatgtcggttttgccttcgccccgaactaatcccag

SEQ ID NO: 250315 - DNA, 52 bp, Artificial
  Synthetic oligonucleotide
ttccgggagacttgcgaatgctccttctaatttcagcctcgatgtcgcactt

SEQ ID NO: 250316 - DNA, 51 bp, Artificial
  Synthetic oligonucleotide
caccgcgagcctatatttgtaaggttggtacttcgttcccctgaagcagta

SEQ ID NO: 250317 - DNA, 51 bp, Artificial
  Synthetic oligonucleotide
tgtgtatgacttccccgttatggacaaaactgatacccggcacctcgaacg

SEQ ID NO: 250318 - DNA, 51 bp, Artificial
  Synthetic oligonucleotide
ccattgaatcggagtagtcgtggtttatgttaattggccccgaaagagccc

SEQ ID NO: 250319 - DNA, 51 bp, Artificial
  Synthetic oligonucleotide
gttccacagcggcgggccctgcatttgaaggagctcagattagttgcggta

SEQ ID NO: 250320 - DNA, 51 bp, Artificial
  Synthetic oligonucleotide
aaggttgcctcccatggacgggagattagcgcggtaccccttgagccgcga

SEQ ID NO: 250321 - DNA, 50 bp, Artificial
  Synthetic oligonucleotide
atgcggcacagatgaagggactgctgcagaaaacggggaggttgcagctg

SEQ ID NO: 250322 - DNA, 50 bp, Artificial
  Synthetic oligonucleotide
gtgccaaccgcgtggctaaggcggtagccctgttggacgaagggaataca

SEQ ID NO: 250323 - DNA, 50 bp, Artificial
  Synthetic oligonucleotide
atgctccgtttccgaccagcgggtaccttcgcagtaggggcagtctaccc

SEQ ID NO: 250324 - DNA, 55 bp, Artificial
  Synthetic oligonucleotide
gagttcaattttagcaaggctctagcatgtctctcacttatacgttcgggtagaa

SEQ ID NO: 250325 - DNA, 50 bp, Artificial
  Synthetic oligonucleotide
tagcatatccaagcccgtgattcacgaactttggcagaccccagttctca

SEQ ID NO: 250326 - DNA, 50 bp, Artificial
  Synthetic oligonucleotide
attaaggttgcatcctgcgggtacgcctggtgctccctgcggtcgctatt

SEQ ID NO: 250327 - DNA, 50 bp, Artificial
  Synthetic oligonucleotide
attgcggagcacgtgggcgtacccatgggacaagcggaagtgaagcgttt

SEQ ID NO: 250328 - DNA, 50 bp, Artificial
  Synthetic oligonucleotide
caatcagctcgccataatgctcaccgtctgagcggcctgccatccaggcc

SEQ ID NO: 250329 - DNA, 50 bp, Artificial
  Synthetic oligonucleotide
taggcgcctgaaacggaactagtatttagcttggaatggagggagatctg

SEQ ID NO: 250330 - DNA, 50 bp, Artificial
  Synthetic oligonucleotide
cacacggaccccgctttttgtggggcctgccataatgtccgccacccaac

SEQ ID NO: 250331 - DNA, 50 bp, Artificial
  Synthetic oligonucleotide
caccccggtgacgtaaccacctcagtgggccacctggtctttcagggaga

SEQ ID NO: 250332 - DNA, 50 bp, Artificial
  Synthetic oligonucleotide
cacgaatacgccgaggaggcaggttcccgcagcgacaaagagatgcgccg

SEQ ID NO: 250333 - DNA, 50 bp, Artificial
  Synthetic oligonucleotide
cacgcgccctgtgcccaccacgatatctgaggatgcaagcagatctgccg

SEQ ID NO: 250334 - DNA, 50 bp, Artificial
  Synthetic oligonucleotide
cacggccttgtacccatctgtcacgctctgcctgccacgctacgtcagta

SEQ ID NO: 250335 - DNA, 55 bp, Artificial
  Synthetic oligonucleotide
gagtccgtcactggggtatgtctccagatgcttatcgtttacatatgtatcggca

SEQ ID NO: 250336 - DNA, 50 bp, Artificial
  Synthetic oligonucleotide
cactcccctggcggaacgcccgacactggtagccgagagaccgggagata

SEQ ID NO: 250337 - DNA, 50 bp, Artificial
  Synthetic oligonucleotide
cagagcctggcccctgtcaatggcacctttagcccaggcagataccgcat

SEQ ID NO: 250338 - DNA, 50 bp, Artificial
  Synthetic oligonucleotide
catggacgggagattagcgcggtaccccttgagccgcgagacaagccgca

SEQ ID NO: 250339 - DNA, 50 bp, Artificial
  Synthetic oligonucleotide
ccaaccccgccggttactgcctccacgcagcactgcaccttgggaaccat

SEQ ID NO: 250340 - DNA, 50 bp, Artificial
  Synthetic oligonucleotide
ccacaggtattgcccatgcgaagcgccctgtcgggcacaactgatgctcc

SEQ ID NO: 250341 - DNA, 50 bp, Artificial
  Synthetic oligonucleotide
ccagggcatttacgctctggataacggaacaggcttcgatgcagcggcga

SEQ ID NO: 250342 - DNA, 50 bp, Artificial
  Synthetic oligonucleotide
ccaggtttaggctgtcgccttgagcaactgcttctcttaagatgaaggct

SEQ ID NO: 250343 - DNA, 50 bp, Artificial
  Synthetic oligonucleotide
tgccatcgtgcctcgataattcagcgtaacgtttcattgggcctcacctc

SEQ ID NO: 250344 - DNA, 50 bp, Artificial
  Synthetic oligonucleotide
tgacactgtcccagaaaccggataacggctcgccggttagaattccgcta

SEQ ID NO: 250345 - DNA, 50 bp, Artificial
  Synthetic oligonucleotide
cgacaccactacgacacttcagccccataaagggaacaaaggatcccggt

SEQ ID NO: 250346 - DNA, 52 bp, Artificial
  Synthetic oligonucleotide
gaaatcccgcttccgggtaaccctctaaaatctgtgaatgggtattttattc

SEQ ID NO: 250347 - DNA, 50 bp, Artificial
  Synthetic oligonucleotide
aagctcatgccgcaactttgcccaagcgcatgttttggaccttggggcga

SEQ ID NO: 250348 - DNA, 50 bp, Artificial
  Synthetic oligonucleotide
aagctcccggcttgggttgaggaatgccggctgagcccatagatccagcc

SEQ ID NO: 250349 - DNA, 50 bp, Artificial
  Synthetic oligonucleotide
aagctgacctgtcgcagtcgctcccctaccttgtaaaggcgccagcggtc

SEQ ID NO: 250350 - DNA, 50 bp, Artificial
  Synthetic oligonucleotide
aaggactcggagcccgggttgaatggcgggcaagtaccaggcaagtggta

SEQ ID NO: 250351 - DNA, 50 bp, Artificial
  Synthetic oligonucleotide
aagggccagtttaaggctccgcccagaagccttagcgggatagctccgtt

SEQ ID NO: 250352 - DNA, 50 bp, Artificial
  Synthetic oligonucleotide
aagggcgaggactttttgcgggctatgccgggaactgtttgggctaaccg

SEQ ID NO: 250353 - DNA, 50 bp, Artificial
  Synthetic oligonucleotide
aagggttcgcttccaacaggaccgctttaccctgctccgggtcccaaccc

SEQ ID NO: 250354 - DNA, 50 bp, Artificial
  Synthetic oligonucleotide
aaggtgcaatgcacccagggggactccccacttaactacccgggaggcat

SEQ ID NO: 250355 - DNA, 50 bp, Artificial
  Synthetic oligonucleotide
aagtcgtcttgcgaggctggtacaatcgcgccaagaagtcgacccgcctg

SEQ ID NO: 250356 - DNA, 50 bp, Artificial
  Synthetic oligonucleotide
aatagcgacaggagggagcatcaggcgaacgcgaagggtgaacgctctcg

SEQ ID NO: 250357 - DNA, 56 bp, Artificial
  Synthetic oligonucleotide
ggcgttgacaagacgcccagccccccctatagaatggggccgcaacgcacgtagcg

SEQ ID NO: 250358 - DNA, 57 bp, Artificial
  Synthetic oligonucleotide
ggaagaagaaggggacgccgcagctgccaaggcgtaggcaccccgcgtacaggctcc

SEQ ID NO: 250359 - DNA, 52 bp, Artificial
  Synthetic oligonucleotide
ttccccctacgagccggcgtttcgtcaccctacggcttctcccgtcatccgg

SEQ ID NO: 250360 - DNA, 60 bp, Artificial
  Synthetic oligonucleotide
tgaatggtcaaaaacgtgatatactctgtcaaggcatgtccctcctgtccgtgaaatgca

SEQ ID NO: 250361 - DNA, 57 bp, Artificial
  Synthetic oligonucleotide
tgtggtcgagggactgcttgggagggccacgctaggggacagggcttacgtaggcac

SEQ ID NO: 250362 - DNA, 56 bp, Artificial
  Synthetic oligonucleotide
aagccccataccgcctccaagtggttgaagaggatgcgggagtagcgtccaggacg

SEQ ID NO: 250363 - DNA, 58 bp, Artificial
  Synthetic oligonucleotide
tgggggcctttcagcgatttgtctacagtacggcgatttcgacggatctctactacaa

SEQ ID NO: 250364 - DNA, 60 bp, Artificial
  Synthetic oligonucleotide
tgagctaggcattgctacgtattattggttacttgctactgggtgttgtctcagtcttca

SEQ ID NO: 250365 - DNA, 60 bp, Artificial
  Synthetic oligonucleotide
tgagtgtgtctcagtcatcaaacccccgagctaggcgttgctactccccccatcctacaa

SEQ ID NO: 250366 - DNA, 53 bp, Artificial
  Synthetic oligonucleotide
tggcctcaggtaaaggaacaaaagcccctcgtgaagcccggggttgaccaaga

SEQ ID NO: 250367 - DNA, 51 bp, Artificial
  Synthetic oligonucleotide
aaggtccaagggtctagggtcctcgtggaggcttaggggggacgactagcc

SEQ ID NO: 250368 - DNA, 55 bp, Artificial
  Synthetic oligonucleotide
tgcaactcccaagggggggcttcaccccgcgaacaacgcactcgccgtttcaatc

SEQ ID NO: 250369 - DNA, 55 bp, Artificial
  Synthetic oligonucleotide
ataccagccaggggtattcagcgcgaccggcctacgtagccggatttttactctg

SEQ ID NO: 250370 - DNA, 58 bp, Artificial
  Synthetic oligonucleotide
tgccccagtaccgggctttcaccgcgagctttatgtccactaacaggactccgctgga

SEQ ID NO: 250371 - DNA, 54 bp, Artificial
  Synthetic oligonucleotide
aaggcctcgcgtagggtcatgccccctctttaccctaaggccgtatatcggtca

SEQ ID NO: 250372 - DNA, 54 bp, Artificial
  Synthetic oligonucleotide
aaaatccccccaggggggctcggcctcccccaggtagtccaggtgcatcagcca

SEQ ID NO: 250373 - DNA, 57 bp, Artificial
  Synthetic oligonucleotide
tcccagggcgcccagaaagttcaccgggacttcgcagtcacaaggctccaggtcgtc

SEQ ID NO: 250374 - DNA, 50 bp, Artificial
  Synthetic oligonucleotide
acgaccccgaggggaggtggcttaagcgctgggccccggaatacccctcc

SEQ ID NO: 250375 - DNA, 57 bp, Artificial
  Synthetic oligonucleotide
tccagttgactcctgaggagggtcgcctcccgctagagctttccctggacccaaaga

SEQ ID NO: 250376 - DNA, 49 bp, Artificial
  Synthetic oligonucleotide
aaacccacccgggaggacccagcctccgttcaagtgggggaggatttct

SEQ ID NO: 250377 - DNA, 57 bp, Artificial
  Synthetic oligonucleotide
tttctcccagacgggaagggcctccagcaggaggcgagagagggacttcggatcgga

SEQ ID NO: 250378 - DNA, 49 bp, Artificial
  Synthetic oligonucleotide
aaactaagcgaagtttccgggtttaacccctcccagacagatgccccct

SEQ ID NO: 250379 - DNA, 51 bp, Artificial
  Synthetic oligonucleotide
aaaaaccgcccgaaactgcgtgcattcgtgtggcctttttaattttcaacc

SEQ ID NO: 250380 - DNA, 58 bp, Artificial
  Synthetic oligonucleotide
ataccggtaaagagtggatttgggaatgccgaatagctgagaagcttgctttacgcta

SEQ ID NO: 250381 - DNA, 59 bp, Artificial
  Synthetic oligonucleotide
tcacgagcgctttcgccttcctcatacgtctacctccttaggagccctctggggctcca

SEQ ID NO: 250382 - DNA, 56 bp, Artificial
  Synthetic oligonucleotide
ttttatgcaacctaacccccggggatctcggggataggggcaggcatggacttgca

SEQ ID NO: 250383 - DNA, 60 bp, Artificial
  Synthetic oligonucleotide
tcccatcatccgcctgaggagcttgggtcgtgtcaaggactctgtgtaagagtctgtgta

SEQ ID NO: 250384 - DNA, 57 bp, Artificial
  Synthetic oligonucleotide
tttatctacgaggtgcgtctaagtctggcctcgaggttcccccagtacatccggatg

SEQ ID NO: 250385 - DNA, 53 bp, Artificial
  Synthetic oligonucleotide
cctacctgaagcgaaaactgggcccttaatcctggggttatgctctttcccgc

SEQ ID NO: 250386 - DNA, 53 bp, Artificial
  Synthetic oligonucleotide
ggagggcctgaacttttcaggccccccagggagcttgaaaagtcacaggtacc

SEQ ID NO: 250387 - DNA, 55 bp, Artificial
  Synthetic oligonucleotide
ttcgcgcaaaaactaggccaaactgcccccctagaccgcataggcttgccgggga

SEQ ID NO: 250388 - DNA, 54 bp, Artificial
  Synthetic oligonucleotide
gaaaggagcccagcatgttccgcggttccataccgcccctacccacaccctttc

SEQ ID NO: 250389 - DNA, 49 bp, Artificial
  Synthetic oligonucleotide
ggtacctgtacccggagttagcggggaaggtggtgcaaaaaggggggcg

SEQ ID NO: 250390 - DNA, 53 bp, Artificial
  Synthetic oligonucleotide
tagctcttggcccgagaaaagcccgttaggagcctccttggggaagaccctta

SEQ ID NO: 250391 - DNA, 60 bp, Artificial
  Synthetic oligonucleotide
atacgtatagggttatgcgcattattactgctcaaggtgggattatgtcaacctcgcgcg

SEQ ID NO: 250392 - DNA, 54 bp, Artificial
  Synthetic oligonucleotide
cacactacgctggcggtttaaaccgaaccgctgactggcaatgcgggaaacccc

SEQ ID NO: 250393 - DNA, 54 bp, Artificial
  Synthetic oligonucleotide
ctgcttgggagggccacgctaggggacagggcttacgtaggcacgggggtgtac

SEQ ID NO: 250394 - DNA, 57 bp, Artificial
  Synthetic oligonucleotide
agttatgggcccgtcacgctgctacctttctacacgagcgaccgcccagagaagtac

SEQ ID NO: 250395 - DNA, 53 bp, Artificial
  Synthetic oligonucleotide
acacaaccatccaaaataggatgggaagggcaggaaacgagggcaaaaacgcg

SEQ ID NO: 250396 - DNA, 54 bp, Artificial
  Synthetic oligonucleotide
cccagaggggctccgtggacctagtcggtaccggtgagggatggagatgtacgt

SEQ ID NO: 250397 - DNA, 53 bp, Artificial
  Synthetic oligonucleotide
ctcccctacacggtagccgaggttctggactttaagcacggtacacctcccgc

SEQ ID NO: 250398 - DNA, 56 bp, Artificial
  Synthetic oligonucleotide
gaagaaagcgtgccgtggttatggcctggcgggaaggtagacgaatcccggctcta

SEQ ID NO: 250399 - DNA, 58 bp, Artificial
  Synthetic oligonucleotide
tatatgggataaggccggagcttgacactatatgggactgaggtgtatatagtgggac

SEQ ID NO: 250400 - DNA, 53 bp, Artificial
  Synthetic oligonucleotide
tttcgggggaatgaacagaaggacggccaccccgttcctcagggactggcgaa

SEQ ID NO: 250401 - DNA, 55 bp, Artificial
  Synthetic oligonucleotide
tagggtaggcttagggcccggcccctagggcgctatacttgtatagcaatggtgg

SEQ ID NO: 250402 - DNA, 49 bp, Artificial
  Synthetic oligonucleotide
gcttctcctttaccggtgggaggtagagaaccggtccttttgggtacgg

SEQ ID NO: 250403 - DNA, 57 bp, Artificial
  Synthetic oligonucleotide
gtaccgggcaaggtctcgggacatcgcaagggtagctatggtggaggacctgaaatc

SEQ ID NO: 250404 - DNA, 57 bp, Artificial
  Synthetic oligonucleotide
tcccctcaggggagggctcacgggatatgggcgcccgctggcggtagctcagggctt

SEQ ID NO: 250405 - DNA, 55 bp, Artificial
  Synthetic oligonucleotide
ggggattgcgactggggtatatcctctttatccccggtattcttgacaggtctgt

SEQ ID NO: 250406 - DNA, 55 bp, Artificial
  Synthetic oligonucleotide
cccggcaccgctccagcttcccggatcctccgggcgagctccttcaggcccggaa

SEQ ID NO: 250407 - DNA, 51 bp, Artificial
  Synthetic oligonucleotide
aaagttcgcccccgctgctccccgggggtcggacccgtgggctagcggcag

SEQ ID NO: 250408 - DNA, 54 bp, Artificial
  Synthetic oligonucleotide
cgagaggcctaccgggaggcccggaaggcgtgggtgcggcggcttctcgagtag

SEQ ID NO: 250409 - DNA, 57 bp, Artificial
  Synthetic oligonucleotide
atgagaaacgcaaacgcgggcaattgacccgcgtccttcgctcctcccttgcttgtc

SEQ ID NO: 250410 - DNA, 54 bp, Artificial
  Synthetic oligonucleotide
cgccattcacccccttacgggttagccccagagtagcagcaggggaataccgcc

SEQ ID NO: 250411 - DNA, 55 bp, Artificial
  Synthetic oligonucleotide
aggttccattgcgctctggggagctttacggacgggagctggtgttggactaccc

SEQ ID NO: 250412 - DNA, 57 bp, Artificial
  Synthetic oligonucleotide
taaacggcgcgacgttgatacgggtcatgcacgatcctcccgggcagtcaacctgag

SEQ ID NO: 250413 - DNA, 50 bp, Artificial
  Synthetic oligonucleotide
atcgccccggaggggcccatcctccccgcccgggcggcctaggcccccgc

SEQ ID NO: 250414 - DNA, 56 bp, Artificial
  Synthetic oligonucleotide
tctgccggtttcgtcgttcctatcccgctgggaaggaggtacgtttgtgctggtgc

SEQ ID NO: 250415 - DNA, 55 bp, Artificial
  Synthetic oligonucleotide
agcggaagagcttccttaaggaggccaggacgcgccccgccctgtgggggctcac

SEQ ID NO: 250416 - DNA, 54 bp, Artificial
  Synthetic oligonucleotide
ggtgacacgtgtctgtcaccgagggaagtggccgaaaggttctcggttaagccc

SEQ ID NO: 250417 - DNA, 52 bp, Artificial
  Synthetic oligonucleotide
caagcttcttttcgaagaccccgtgggggcggtgaaggctctaggtgtaccc

SEQ ID NO: 250418 - DNA, 56 bp, Artificial
  Synthetic oligonucleotide
ggggattgcgactgctctaatcgggcctgttcggctatggccttggggctcgttgc

SEQ ID NO: 250419 - DNA, 56 bp, Artificial
  Synthetic oligonucleotide
atcgcggcttgactggctcccgggttggtatggtggatggtggaagcgaggagctt

SEQ ID NO: 250420 - DNA, 56 bp, Artificial
  Synthetic oligonucleotide
gccgtctatgtcgggcaacaactcgttgtcgtgcataactcctcctttctcgcgag

SEQ ID NO: 250421 - DNA, 54 bp, Artificial
  Synthetic oligonucleotide
aacagtctacggtaaactggaggggtgaatcgggctaaggactggcttctccag

SEQ ID NO: 250422 - DNA, 51 bp, Artificial
  Synthetic oligonucleotide
acgaggggagtctagcacgaaaggccacccccttagggtaaaatcctccgc

SEQ ID NO: 250423 - DNA, 54 bp, Artificial
  Synthetic oligonucleotide
gggctgcgcccgcaaggggagatttaccacgaaacggagatgtgggtaaagtcc

SEQ ID NO: 250424 - DNA, 55 bp, Artificial
  Synthetic oligonucleotide
gcgtgaagcccctagagcggggctccgctacggagccgccacgaaaacgatgggg

SEQ ID NO: 250425 - DNA, 55 bp, Artificial
  Synthetic oligonucleotide
gcggcatccccaacacctgtggccgggagaactgccccgtctgccgggtctacgg

SEQ ID NO: 250426 - DNA, 55 bp, Artificial
  Synthetic oligonucleotide
gaaccgggcacgagaacggggctcgagcggaccatgttcgcagatcgattgttcc

SEQ ID NO: 250427 - DNA, 51 bp, Artificial
  Synthetic oligonucleotide
tttcgcccaaggaactcggggtaggggaatacggcggtgggcttctggagt

SEQ ID NO: 250428 - DNA, 49 bp, Artificial
  Synthetic oligonucleotide
cggggaagggttcccgaggtattggtggtgtccctgaaggaaggacggg

SEQ ID NO: 250429 - DNA, 54 bp, Artificial
  Synthetic oligonucleotide
gaagagggcgatgtcccaggggaccgccactaatggggacgggtcgtgtaagga

SEQ ID NO: 250430 - DNA, 55 bp, Artificial
  Synthetic oligonucleotide
cgcccgattaagagagcgttaagaccttccgagataccgtagtaggctatgagcc

SEQ ID NO: 250431 - DNA, 55 bp, Artificial
  Synthetic oligonucleotide
gacgtgaaagctggtggagtccacgtgaagagcccgcacgggaaagggaaaggct

SEQ ID NO: 250432 - DNA, 55 bp, Artificial
  Synthetic oligonucleotide
gactttcggcttcgccaggggataacgaaaacccaagcagaagctccaagaccgc

SEQ ID NO: 250433 - DNA, 55 bp, Artificial
  Synthetic oligonucleotide
ctttcgcccgtaagctctttctgatcaccgcacattacgcgctcgagaaagcccc

SEQ ID NO: 250434 - DNA, 53 bp, Artificial
  Synthetic oligonucleotide
gagaaaggtctatggcgggcttaggccaaacccgttaggcttggcctcggagg

SEQ ID NO: 250435 - DNA, 51 bp, Artificial
  Synthetic oligonucleotide
gccctgccaggttgggatggtgctaaaaccccctttggtactgggggggta

SEQ ID NO: 250436 - DNA, 50 bp, Artificial
  Synthetic oligonucleotide
cgggacaaaggtcccttcctagactgggaggcgaaccgaacggccgttag

SEQ ID NO: 250437 - DNA, 55 bp, Artificial
  Synthetic oligonucleotide
gagaggcggtggctagcgtccaggatttcaatccccaggagccttccctccctgt

SEQ ID NO: 250438 - DNA, 55 bp, Artificial
  Synthetic oligonucleotide
tgggcgcccacggtgtggaggatcctaatggagcaggactatgtgaaaagccatc

SEQ ID NO: 250439 - DNA, 55 bp, Artificial
  Synthetic oligonucleotide
gaggagcgaggggagatcgagcgtggattccagcgtcactgttttgcgaaggcgg

SEQ ID NO: 250440 - DNA, 55 bp, Artificial
  Synthetic oligonucleotide
gaggattggcgcataccttgactatacgggatattggatgtgggcactggttcta

SEQ ID NO: 250441 - DNA, 55 bp, Artificial
  Synthetic oligonucleotide
cgggaaaggccgcgcatggcctaagtatacgcgggtagaatggacctgtgacgga

SEQ ID NO: 250442 - DNA, 55 bp, Artificial
  Synthetic oligonucleotide
cggctgtcaagaaccagcccgctaagggcggcctctctaagccaagcccggacta

SEQ ID NO: 250443 - DNA, 55 bp, Artificial
  Synthetic oligonucleotide
gaggcctgagcggggcccgaagcgagggcgaagccgggtaaatgcccgtatagta

SEQ ID NO: 250444 - DNA, 55 bp, Artificial
  Synthetic oligonucleotide
cgccagtgctgaggatggttcccgggatcaagcggtcaacatcgtagtcgctgcc

SEQ ID NO: 250445 - DNA, 55 bp, Artificial
  Synthetic oligonucleotide
cggctgtactcgcgtcgggtatcagcttgcatttcacggacaggagggacatgcc

SEQ ID NO: 250446 - DNA, 54 bp, Artificial
  Synthetic oligonucleotide
atggtccactagctcttggcccgagaaaagcccgttaggagcctccttggggaa

SEQ ID NO: 250447 - DNA, 55 bp, Artificial
  Synthetic oligonucleotide
gaggcggtggttcacgaactggaagccccgcgttaggcccatggcgttatagtcc

SEQ ID NO: 250448 - DNA, 54 bp, Artificial
  Synthetic oligonucleotide
tgctggtaaggaggcttcgggcatggtggttggagtagcggggtactacgggtt

SEQ ID NO: 250449 - DNA, 55 bp, Artificial
  Synthetic oligonucleotide
gaggcggtgtaagaccgcaaatcgcgcaggaacatgagggcggtagtacaccgcg

SEQ ID NO: 250450 - DNA, 55 bp, Artificial
  Synthetic oligonucleotide
gaggggctcaatgtaacggtgaagtaacggtagatgtgcaataaagctgttgtgc

SEQ ID NO: 250451 - DNA, 55 bp, Artificial
  Synthetic oligonucleotide
gaggtggggcgggattttggaaggattcgggtggaccttgatccggagctaggca

SEQ ID NO: 250452 - DNA, 55 bp, Artificial
  Synthetic oligonucleotide
tttcaatcggtagattaacggagagtgtggggcagtgttgcctttacgcaccccg

SEQ ID NO: 250453 - DNA, 55 bp, Artificial
  Synthetic oligonucleotide
cggaagggagagctgtaacggagacaggcggaatataaggaaccgccagcagtct

SEQ ID NO: 250454 - DNA, 55 bp, Artificial
  Synthetic oligonucleotide
tttagcttagccggaagaggcccacccgtcaagatatcccgccgctgagctcccc

SEQ ID NO: 250455 - DNA, 55 bp, Artificial
  Synthetic oligonucleotide
cgtttacactcctatcataacccagctacccctgattacacagcagcccgaagtg

SEQ ID NO: 250456 - DNA, 55 bp, Artificial
  Synthetic oligonucleotide
ctaaggcagtatagtacaccttcggacccagaatgcctagccgatccaaaacccg

SEQ ID NO: 250457 - DNA, 56 bp, Artificial
  Synthetic oligonucleotide
gcccgtcctcctacagatccccgatccctcggggtttggattgcgatagaccgcag

SEQ ID NO: 250458 - DNA, 55 bp, Artificial
  Synthetic oligonucleotide
ctaccctactaacaaggacctgaacaaatacacctaccacaaagcacatcaccaa

SEQ ID NO: 250459 - DNA, 53 bp, Artificial
  Synthetic oligonucleotide
cgtgccctccggggaaagggtgccgtagggtacaatgggtctaagatgagccg

SEQ ID NO: 250460 - DNA, 53 bp, Artificial
  Synthetic oligonucleotide
cgctcgcggcgtactcaaacaaaagatccggggtacgatgggccgaaaccacc

SEQ ID NO: 250461 - DNA, 55 bp, Artificial
  Synthetic oligonucleotide
ctcatcaacaactaccgcacgacggacagtgatcagctcaaacagtggatcaact

SEQ ID NO: 250462 - DNA, 54 bp, Artificial
  Synthetic oligonucleotide
ttggactaccggatccgcgtggagtggaacgtggagcggggaaggctcctttcc

SEQ ID NO: 250463 - DNA, 55 bp, Artificial
  Synthetic oligonucleotide
ctccccgaacgcagaacctagcgcatactttcttggcacgaccactgctattgac

SEQ ID NO: 250464 - DNA, 55 bp, Artificial
  Synthetic oligonucleotide
cgtgaacattgatggtacccggatctctcacgttacggacgatcccaagctcgac

SEQ ID NO: 250465 - DNA, 55 bp, Artificial
  Synthetic oligonucleotide
ttgcaagggattgagccctgtaaggggattgcgacccgtagataaggcgcccggg

SEQ ID NO: 250466 - DNA, 52 bp, Artificial
  Synthetic oligonucleotide
cgtcctgaatacccgggacagggcctcaagaggcgaaacgggttttccttga

SEQ ID NO: 250467 - DNA, 55 bp, Artificial
  Synthetic oligonucleotide
ttctccaagcgcgtctggtaccagctggtctaccgtcggcgggccatgttccggc

SEQ ID NO: 250468 - DNA, 53 bp, Artificial
  Synthetic oligonucleotide
ggcgctcgagttgccctggcggaaaacccccaacaaatcccgtctggaacgag

SEQ ID NO: 250469 - DNA, 53 bp, Artificial
  Synthetic oligonucleotide
caaaagcccgctcaggcccttccaggggggtaggtgcacgaaagcgaactttc

SEQ ID NO: 250470 - DNA, 55 bp, Artificial
  Synthetic oligonucleotide
cgggtctagttcgaagcagtcccacttcgattgttctgacgcagccgtattcttc

SEQ ID NO: 250471 - DNA, 54 bp, Artificial
  Synthetic oligonucleotide
cttgttctggtccaccgggctcacctcttgccttggtttgcccgaggtggtacc

SEQ ID NO: 250472 - DNA, 52 bp, Artificial
  Synthetic oligonucleotide
cttgcggaggaggccttttatgagggggcggacctccccttcgggcggcttg

SEQ ID NO: 250473 - DNA, 54 bp, Artificial
  Synthetic oligonucleotide
ttaagggtcgggctccgcaaacccttccgaaccgtcaagcctgcaccaggcgga

SEQ ID NO: 250474 - DNA, 55 bp, Artificial
  Synthetic oligonucleotide
ttaccgtagcgctcctgggtgtgccctttgtgcctccgggctgggaggtagagtt

SEQ ID NO: 250475 - DNA, 54 bp, Artificial
  Synthetic oligonucleotide
ttagaaacgaaataggccgcctcggtcataggccgcctcccaaggcgtaggccg

SEQ ID NO: 250476 - DNA, 52 bp, Artificial
  Synthetic oligonucleotide
cgcccgttcgttcgaagttacaccaggtctcgtgcggaagagggtcgttcgt

SEQ ID NO: 250477 - DNA, 55 bp, Artificial
  Synthetic oligonucleotide
cttcctgcagttctacgggtaccccaaggtgctttggccgtacctgcggagcacc

SEQ ID NO: 250478 - DNA, 55 bp, Artificial
  Synthetic oligonucleotide
cgccgtacgccttttctttcgacgtatgacgtttgacgctaaggccatgtcgctc

SEQ ID NO: 250479 - DNA, 54 bp, Artificial
  Synthetic oligonucleotide
ttcccgaggcggcacgaggtgcggtggtaccccgacgggagccgggcagtggtg

SEQ ID NO: 250480 - DNA, 54 bp, Artificial
  Synthetic oligonucleotide
tatatagaatgggaccctattaagcccgtccctgacgaggttttttcgctgtcg

SEQ ID NO: 250481 - DNA, 55 bp, Artificial
  Synthetic oligonucleotide
cgccttcctcatacgtctacctccttaggagccctctggggctccacccatccct

SEQ ID NO: 250482 - DNA, 55 bp, Artificial
  Synthetic oligonucleotide
cggtcatggacgctcccaaggagtagaggatgtccctgtcaatcttgtcccgagg

SEQ ID NO: 250483 - DNA, 55 bp, Artificial
  Synthetic oligonucleotide
ctgctcagccgaaggcgctcccgagatttgtcccgtgattttgtagccgggaccg

SEQ ID NO: 250484 - DNA, 55 bp, Artificial
  Synthetic oligonucleotide
cggtctgaggctacacctcaccttatcgaggcccgcttttcccaatccctggccg

SEQ ID NO: 250485 - DNA, 55 bp, Artificial
  Synthetic oligonucleotide
cggttcctcaaagagtctcaaatgtgttgaccgattacagggtctagccccagac

SEQ ID NO: 250486 - DNA, 51 bp, Artificial
  Synthetic oligonucleotide
gggttgagggacgcgcttttctctagaaccttgtagtccccgttcccgtcg

SEQ ID NO: 250487 - DNA, 55 bp, Artificial
  Synthetic oligonucleotide
gggtgcaaggtgttcaaacgacgcgtctttgggttcgcgttgctccttggcgccg

SEQ ID NO: 250488 - DNA, 55 bp, Artificial
  Synthetic oligonucleotide
gggtgaaccccagctaatggtggcttacaacgcgcagttcttgattgatgccctg

SEQ ID NO: 250489 - DNA, 49 bp, Artificial
  Synthetic oligonucleotide
gggtatccggataaacggataaagtgggtccccgaaggaatgggacttt

SEQ ID NO: 250490 - DNA, 51 bp, Artificial
  Synthetic oligonucleotide
ggggttccctaggacgcatcccggccctaccgggaagatgggaggtttatg

SEQ ID NO: 250491 - DNA, 53 bp, Artificial
  Synthetic oligonucleotide
tacgtaaacccctatgagggggccatcgttcggggaaccctcgagggcaggca

SEQ ID NO: 250492 - DNA, 55 bp, Artificial
  Synthetic oligonucleotide
tcctggagtcgcgcggctagctgctggaacatatggctccccggcccttaaggcc

SEQ ID NO: 250493 - DNA, 54 bp, Artificial
  Synthetic oligonucleotide
ggggtaacatcgtctaagaggcacccttcaaggataccacccttttacgacagc

SEQ ID NO: 250494 - DNA, 55 bp, Artificial
  Synthetic oligonucleotide
ggggctggggtcgccatgtttcgcctaacaaggttagcagcctagccaggggact

SEQ ID NO: 250495 - DNA, 48 bp, Artificial
  Synthetic oligonucleotide
ggggccttcttcctgccctacggggacgggtgggcctacggggaaggg

SEQ ID NO: 250496 - DNA, 55 bp, Artificial
  Synthetic oligonucleotide
tcgagcgcccgtgcccaggctccctccggcagaaaagcgtggcccggtagggata

SEQ ID NO: 250497 - DNA, 55 bp, Artificial
  Synthetic oligonucleotide
gggatactaactcggtatgtcgaatagagaaaattccgcaacccgcatgtacttg

SEQ ID NO: 250498 - DNA, 55 bp, Artificial
  Synthetic oligonucleotide
ggctggggttccagggactatgcggtttcatgggattcaggctagggcgagcgtc

SEQ ID NO: 250499 - DNA, 55 bp, Artificial
  Synthetic oligonucleotide
tcgccctatggtgagcaccctcaagcgggacgaggccctctttgagctcatcgcc

SEQ ID NO: 250500 - DNA, 55 bp, Artificial
  Synthetic oligonucleotide
ggctacaacgtctacgtaaagcgctggaatggcaaatcttgggttccctatggcc

SEQ ID NO: 250501 - DNA, 55 bp, Artificial
  Synthetic oligonucleotide
ggcgctgtcctctgcgagaaagccagctgaaacttgcacttctacggttcctcgg

SEQ ID NO: 250502 - DNA, 56 bp, Artificial
  Synthetic oligonucleotide
taaggagccagcgctcccctacacggtagccgaggttctggactttaagcacggta

SEQ ID NO: 250503 - DNA, 55 bp, Artificial
  Synthetic oligonucleotide
ggcgccacctccttacggctctagctcacacccctactatgacctaagtcaaggg

SEQ ID NO: 250504 - DNA, 55 bp, Artificial
  Synthetic oligonucleotide
tcgctacgaagtagctcccctgccacctgtgagggataacctgagtagcctgggg

SEQ ID NO: 250505 - DNA, 53 bp, Artificial
  Synthetic oligonucleotide
ggcccgtctgggagccctttacatacatccccaacgggaagtgtagttctcgg

SEQ ID NO: 250506 - DNA, 55 bp, Artificial
  Synthetic oligonucleotide
ggcaccttcgtaggcttcttgctggactcgcggtgttgcagtttccagaccaccc

SEQ ID NO: 250507 - DNA, 55 bp, Artificial
  Synthetic oligonucleotide
tcgttcgagacctagtggacgcgggcaagggattgttgattgcctcccacgacct

SEQ ID NO: 250508 - DNA, 55 bp, Artificial
  Synthetic oligonucleotide
tcaaggttagggaaactgccggtagatgtcaagtagtatatagggcgtttatcct

SEQ ID NO: 250509 - DNA, 55 bp, Artificial
  Synthetic oligonucleotide
tatatgcttacgtccggccgtccccgcacgctttgggaactcgggaggtagcatg

SEQ ID NO: 250510 - DNA, 55 bp, Artificial
  Synthetic oligonucleotide
taggtgggaggttaagcgatgcgaggcaaagcttggatgctcacggcagtggccc

SEQ ID NO: 250511 - DNA, 55 bp, Artificial
  Synthetic oligonucleotide
tactggagcttcctcccgtgaacccaagcgatcaggcgcaccgagcgccctttag

SEQ ID NO: 250512 - DNA, 48 bp, Artificial
  Synthetic oligonucleotide
tactaccaacttcccctcgggcctcccaaaacccggttgtcggggcgg

SEQ ID NO: 250513 - DNA, 55 bp, Artificial
  Synthetic oligonucleotide
actctaggtttgccgcaacgaagaaagcgtgccgtggttatggcctggcgggaag

SEQ ID NO: 250514 - DNA, 55 bp, Artificial
  Synthetic oligonucleotide
tcatagaccctgtgctccgtaaaatttgctcaaccgagtgggataaccccgtgcg

SEQ ID NO: 250515 - DNA, 54 bp, Artificial
  Synthetic oligonucleotide
tacctttgggcgaagctcccctccttgtcctcgtggtagtaggcgtagccctcc

SEQ ID NO: 250516 - DNA, 55 bp, Artificial
  Synthetic oligonucleotide
taccccatactggggccatggcggaagccttgtggggaaaggaggccttgcttcc

SEQ ID NO: 250517 - DNA, 55 bp, Artificial
  Synthetic oligonucleotide
tacaaccgggctatggaacggcgcatctaccgggtgggttcggttattgcagggc

SEQ ID NO: 250518 - DNA, 55 bp, Artificial
  Synthetic oligonucleotide
tccaatggggtgctcaccagaacttgcgttctggacgaggttttcggttaaggag

SEQ ID NO: 250519 - DNA, 52 bp, Artificial
  Synthetic oligonucleotide
taaggaccctttacgcgcccaaaataaacgacgggccgccgcttggagggca

SEQ ID NO: 250520 - DNA, 54 bp, Artificial
  Synthetic oligonucleotide
taaaggaccttctagggcttcccgtgcgccctttccgcctcgaggcctacgaca

SEQ ID NO: 250521 - DNA, 55 bp, Artificial
  Synthetic oligonucleotide
gtgtgctgtaggggtgaactgcgtgtccgcccgtagcgacgtaactgcggtcggt

SEQ ID NO: 250522 - DNA, 55 bp, Artificial
  Synthetic oligonucleotide
gtggactgggccacccttgtgcatcccagagcctatgtgcatgcgaccgcatctt

SEQ ID NO: 250523 - DNA, 55 bp, Artificial
  Synthetic oligonucleotide
gtcgagggctctgtattcttgagtcggagcggcttaggatggattttgtgcgcaa

SEQ ID NO: 250524 - DNA, 53 bp, Artificial
  Synthetic oligonucleotide
agacccgaaccttgttaccgtagcgctcctgggtgtgccctttgtgcctccgg

SEQ ID NO: 250525 - DNA, 55 bp, Artificial
  Synthetic oligonucleotide
gtccctgcgacagcagaggaccggggttggtatcctaatctgacgtgaaggccca

SEQ ID NO: 250526 - DNA, 55 bp, Artificial
  Synthetic oligonucleotide
gtaattgtgcacaacctgtacttaaactgccccacctacattgccctgattgggg

SEQ ID NO: 250527 - DNA, 54 bp, Artificial
  Synthetic oligonucleotide
gtaaaagggtggtatccttgaagggtgcctcttagacgatgttaccccagcgac

SEQ ID NO: 250528 - DNA, 55 bp, Artificial
  Synthetic oligonucleotide
ggttcgggacctccatggccttatgctaagggctggcctcgcattttcacacggc

SEQ ID NO: 250529 - DNA, 55 bp, Artificial
  Synthetic oligonucleotide
ggttcctcaaagagtctcaaatgtgttgaccgattacatatgctacctcgaaggc

SEQ ID NO: 250530 - DNA, 55 bp, Artificial
  Synthetic oligonucleotide
tcctcatcccccgggtggactacctcatagagcaccgccacaagatcaaggcctg

SEQ ID NO: 250531 - DNA, 55 bp, Artificial
  Synthetic oligonucleotide
gcgagaattgcgccgctgtaggtcatggctcgagattcgccctaggccttacgcc

SEQ ID NO: 250532 - DNA, 55 bp, Artificial
  Synthetic oligonucleotide
gccggagaaacacatccaaacgatccgatgcacagatgtccaaggcacaccccgg

SEQ ID NO: 250533 - DNA, 55 bp, Artificial
  Synthetic oligonucleotide
gccgaaattaggttgataccaacgagtcgccatctattcgccagaatgctgacgc

SEQ ID NO: 250534 - DNA, 55 bp, Artificial
  Synthetic oligonucleotide
gcccttcctgagatggtccactagctcttggcccgagaaaagcccgttaggagcc

SEQ ID NO: 250535 - DNA, 53 bp, Artificial
  Synthetic oligonucleotide
gtttgactaaccgcctaaaaaccgcccgaaactgcgtgcattcgtgcggcctt

SEQ ID NO: 250536 - DNA, 49 bp, Artificial
  Synthetic oligonucleotide
tgacaacccggggataacggcctaagatggggggtaaccaaccggtcgg

SEQ ID NO: 250537 - DNA, 55 bp, Artificial
  Synthetic oligonucleotide
tgaccttcctgcacctgctgtagacacaaacactcttcgcgtgctcggaagggtg

SEQ ID NO: 250538 - DNA, 55 bp, Artificial
  Synthetic oligonucleotide
tgacgtacaggacgtttcgcatcgtggtacctcgcttcgcgtgtgggtttgggcc

SEQ ID NO: 250539 - DNA, 52 bp, Artificial
  Synthetic oligonucleotide
gcccgggaggggttgacttttgcttgggcgcgtgaaacaataagttactttc

SEQ ID NO: 250540 - DNA, 53 bp, Artificial
  Synthetic oligonucleotide
gcccctagtcctcctttccacccaacgcctggaaggggagaacatgcaccggg

SEQ ID NO: 250541 - DNA, 55 bp, Artificial
  Synthetic oligonucleotide
gccccgcaacgatccaaatcacactagcgacaaagcgctgtacatcctggacggt

SEQ ID NO: 250542 - DNA, 55 bp, Artificial
  Synthetic oligonucleotide
tgagggtccaggtccgtagccacaatcagccactcccggaccccaaggcgcaacc

SEQ ID NO: 250543 - DNA, 55 bp, Artificial
  Synthetic oligonucleotide
gcccagattaggcacctcagcatctaggcgcacaggtagcgagctgggtccatcc

SEQ ID NO: 250544 - DNA, 54 bp, Artificial
  Synthetic oligonucleotide
gcccacattccccggtgtcaaggccaaacccgttatcccaggcgttattccagc

SEQ ID NO: 250545 - DNA, 55 bp, Artificial
  Synthetic oligonucleotide
gccaggcgacttcgggaaccagcaaaacatttcgtacccttggtattggagagga

SEQ ID NO: 250546 - DNA, 54 bp, Artificial
  Synthetic oligonucleotide
gttacgtggaagctcttcccaacgatggcccctgcgtaacctcgcgtaaccttg

SEQ ID NO: 250547 - DNA, 53 bp, Artificial
  Synthetic oligonucleotide
gcaggccaaagtggcggaaaagcctttccgtgtggtcccgggtggggatgggc

SEQ ID NO: 250548 - DNA, 55 bp, Artificial
  Synthetic oligonucleotide
tgatacctcaagcactttatgatgtcaagtgctactcaggatagaacataggggc

SEQ ID NO: 250549 - DNA, 53 bp, Artificial
  Synthetic oligonucleotide
gcacatcaacccaggttactttaccgagttggtacgattttctcccgacgccg

SEQ ID NO: 250550 - DNA, 55 bp, Artificial
  Synthetic oligonucleotide
gcaatctgactggcaagggttctcgacatgcgttctcctataggacaggcgggct

SEQ ID NO: 250551 - DNA, 55 bp, Artificial
  Synthetic oligonucleotide
tgccttggccccgtctgagaggggtcttcaagtcgcgctaaggtagtataccccg

SEQ ID NO: 250552 - DNA, 55 bp, Artificial
  Synthetic oligonucleotide
gagtgtactacaacactagtacaccatgcaacccctacggatggctgcgctaaac

SEQ ID NO: 250553 - DNA, 54 bp, Artificial
  Synthetic oligonucleotide
ggcaaacgagggttcgacgtcccgcctctactatcggcccaaggctcaaggttc

SEQ ID NO: 250554 - DNA, 55 bp, Artificial
  Synthetic oligonucleotide
ggatgccccttctcgaggttcaagggctttccgtagcattccaacacgaggaggt

SEQ ID NO: 250555 - DNA, 55 bp, Artificial
  Synthetic oligonucleotide
tcgttgacagattgggtctacgggcgcagcccgtcccgagtaactgcctaggcca

SEQ ID NO: 250556 - DNA, 55 bp, Artificial
  Synthetic oligonucleotide
ggatataggcaagggttccatggccgttagtttaacgcaagtgattactgttagc

SEQ ID NO: 250557 - DNA, 59 bp, Artificial
  Synthetic oligonucleotide
gtgcacgagagccgtgtggtcgagggactgcttgggagggccacgctaggggacagggc

SEQ ID NO: 250558 - DNA, 55 bp, Artificial
  Synthetic oligonucleotide
ggagctcggggatctgtgaaggcaacggtcgtgtgtagaactcatccctaaaggt

SEQ ID NO: 250559 - DNA, 55 bp, Artificial
  Synthetic oligonucleotide
ggagagtgtagcaaagaacgcatgctcttgacaatgtggatggccccttttatcc

SEQ ID NO: 250560 - DNA, 55 bp, Artificial
  Synthetic oligonucleotide
tctagccatgggcgcggccaaacaggtgcggcccctgaccttggaagagtacctc

SEQ ID NO: 250561 - DNA, 55 bp, Artificial
  Synthetic oligonucleotide
tctcttttcaggggtaggggaggcgaggcacgaatgaacggagcccaggcgttac

SEQ ID NO: 250562 - DNA, 55 bp, Artificial
  Synthetic oligonucleotide
ggaaaggtgctacttgatttgaacacagttctctttgatgaaatggccagtgcga

SEQ ID NO: 250563 - DNA, 55 bp, Artificial
  Synthetic oligonucleotide
tgaaacgcctcatccacaatgaataataggttagctccagaagttttcaccgttc

SEQ ID NO: 250564 - DNA, 55 bp, Artificial
  Synthetic oligonucleotide
gctggccagagtgcgtaaccaaagaagacgtctcaaaattcttggagtttaccgc

SEQ ID NO: 250565 - DNA, 53 bp, Artificial
  Synthetic oligonucleotide
gctggatttcgtgttatcgttccagtaaatactaacgcgccgccggaaaaccc

SEQ ID NO: 250566 - DNA, 55 bp, Artificial
  Synthetic oligonucleotide
gctggaccggccctcgggcgctcaagcgtagacagggagaacccctccatagccg

SEQ ID NO: 250567 - DNA, 55 bp, Artificial
  Synthetic oligonucleotide
gctgcacctgtccctatacctggggtccggtatgcaagcacgtcgtagccctagc

SEQ ID NO: 250568 - DNA, 60 bp, Artificial
  Synthetic oligonucleotide
gtagccgaggttctgcagacggttctggagctggaccggacggccttcttgcaggtgcac

SEQ ID NO: 250569 - DNA, 55 bp, Artificial
  Synthetic oligonucleotide
gctctatgcgctgggacaaagcgtttaggcgcccggcggtatactccacggtagc

SEQ ID NO: 250570 - DNA, 55 bp, Artificial
  Synthetic oligonucleotide
gctatttggtcgaagcgagcacgtagggcctcagagactgtcttaataccctccc

SEQ ID NO: 250571 - DNA, 55 bp, Artificial
  Synthetic oligonucleotide
gctagcataactactgaggaaagttatggttgaccctaaccaggtcatctacccc

SEQ ID NO: 250572 - DNA, 55 bp, Artificial
  Synthetic oligonucleotide
gctacgtattattggttacttgctactgggtgttgtctcagtcttcaagcccctg

SEQ ID NO: 250573 - DNA, 55 bp, Artificial
  Synthetic oligonucleotide
gcgtgatatatttcacttgattttcgtaagcggctttctcccgtaccaaagcctg

SEQ ID NO: 250574 - DNA, 55 bp, Artificial
  Synthetic oligonucleotide
gcgtagaccacgcggtttctcctggagtcaaatcccgcccagatgaccgtgttcc

SEQ ID NO: 250575 - DNA, 55 bp, Artificial
  Synthetic oligonucleotide
gcggctaccatcagggtccacgggaaggggaatgaaagcgtcaatgccccagtag

SEQ ID NO: 250576 - DNA, 54 bp, Artificial
  Synthetic oligonucleotide
actatctcatgggtacgctccccagcgctaccttcattggttttacgggtaccc

SEQ ID NO: 250577 - DNA, 55 bp, Artificial
  Synthetic oligonucleotide
aggtgccttcccctcatacggggattctatcacgccacacgatagaagagcgctt

SEQ ID NO: 250578 - DNA, 55 bp, Artificial
  Synthetic oligonucleotide
cccggcctaccgctcgggaggtcgtatgccatttgcgcagagcaggacggtaaat

SEQ ID NO: 250579 - DNA, 59 bp, Artificial
  Synthetic oligonucleotide
ggcctccgtttccgtccttataatatgacacaaaagatgatttgtcaagccttctgagc

SEQ ID NO: 250580 - DNA, 58 bp, Artificial
  Synthetic oligonucleotide
ggtggccggtgttgcgctcggttagaaagttctcggctgatcccaaagttctgctgag

SEQ ID NO: 250581 - DNA, 55 bp, Artificial
  Synthetic oligonucleotide
acgtcctcttctcccaccgctacgaggggcttctccgggacatcttctggcggaa

SEQ ID NO: 250582 - DNA, 55 bp, Artificial
  Synthetic oligonucleotide
cacgggtgctatgacctcacggcccatccctactctcggctattctcgccctctt

SEQ ID NO: 250583 - DNA, 55 bp, Artificial
  Synthetic oligonucleotide
agtatccacaacactcgcgggcattacaatctcctcctaatcccaggctagcacg

SEQ ID NO: 250584 - DNA, 52 bp, Artificial
  Synthetic oligonucleotide
acgcggagccgctttgaccaccgggacacctggccctaccccacgaaaagcg

SEQ ID NO: 250585 - DNA, 54 bp, Artificial
  Synthetic oligonucleotide
acgccccgggcttctatacctatactggggccaatgcgagcgtttacgaccgcg

SEQ ID NO: 250586 - DNA, 55 bp, Artificial
  Synthetic oligonucleotide
ccctagatcgtagctcttagagtaaagtaggaacatatccgctttatttggcgcc

SEQ ID NO: 250587 - DNA, 54 bp, Artificial
  Synthetic oligonucleotide
ccctcgggtggagtttatagaggcggatacctacgtacgccttcaggccaccca

SEQ ID NO: 250588 - DNA, 55 bp, Artificial
  Synthetic oligonucleotide
ccctttggagctcggggatctgtgaaggcaacggtcgtgtgtagaactcatccct

SEQ ID NO: 250589 - DNA, 52 bp, Artificial
  Synthetic oligonucleotide
acgaggttccggagctcggggtactccgggcacggccaaggcttcacggacc

SEQ ID NO: 250590 - DNA, 55 bp, Artificial
  Synthetic oligonucleotide
ccgaccgcgtaactgtggagtttcatgtctgttattctaacaaacgcttgttcgc

SEQ ID NO: 250591 - DNA, 54 bp, Artificial
  Synthetic oligonucleotide
ggtgccacgaggagggttacgcgggaggcctgaggttacgcgaggttacgcagg

SEQ ID NO: 250592 - DNA, 50 bp, Artificial
  Synthetic oligonucleotide
accttccccgaacctgggagaagtctgggaggtcctacgggcccaggagg

SEQ ID NO: 250593 - DNA, 55 bp, Artificial
  Synthetic oligonucleotide
cacgcgaaccgttcatgccgcaaccctacacgggccgcccggctaatgtcaagta

SEQ ID NO: 250594 - DNA, 55 bp, Artificial
  Synthetic oligonucleotide
accgttgtgtacgacttggtacagccggtcgaactggagtatgccctcctagccc

SEQ ID NO: 250595 - DNA, 50 bp, Artificial
  Synthetic oligonucleotide
ccgagaaaagcccgttaggagcctccttggggaagacccttaggtagagg

SEQ ID NO: 250596 - DNA, 55 bp, Artificial
  Synthetic oligonucleotide
ccgagctcgataagggcggcacccaaccgcttgtcgccgatcgttaagacgctca

SEQ ID NO: 250597 - DNA, 53 bp, Artificial
  Synthetic oligonucleotide
accggcggcgaaagaagcgtctcagaacggggagtcgtcacccaccccgcgga

SEQ ID NO: 250598 - DNA, 53 bp, Artificial
  Synthetic oligonucleotide
ccgcaggcttacttaaccgacccttaaccggccctgtgctataggtggggtga

SEQ ID NO: 250599 - DNA, 55 bp, Artificial
  Synthetic oligonucleotide
accctcattgctgaaccttaagccttgggaagcggacccgctgacatcctccctg

SEQ ID NO: 250600 - DNA, 55 bp, Artificial
  Synthetic oligonucleotide
ccacggttttcccatgagcgcaagatgagtggccgaaacggtttctaggagcgcg

SEQ ID NO: 250601 - DNA, 55 bp, Artificial
  Synthetic oligonucleotide
ccacggctacaggcttccgttttgcacgacgcaccacgtaccacgaactgcgcac

SEQ ID NO: 250602 - DNA, 58 bp, Artificial
  Synthetic oligonucleotide
ggtgaatgggtctttgttcttactcccatagatcttcatgtgttgtactacccccaga

SEQ ID NO: 250603 - DNA, 55 bp, Artificial
  Synthetic oligonucleotide
ccacataccgcccgtagtataatcggccccgcatgctcttggacgaccgctaccc

SEQ ID NO: 250604 - DNA, 55 bp, Artificial
  Synthetic oligonucleotide
ccaatctacctttcggtccctaaagctttcttcgaatctgcctattacataggca

SEQ ID NO: 250605 - DNA, 55 bp, Artificial
  Synthetic oligonucleotide
agccatcccctcttgttctcaagcttcgttttgagattcagcacccacgcaacag

SEQ ID NO: 250606 - DNA, 55 bp, Artificial
  Synthetic oligonucleotide
ccaacgctcagggcggaggtcttctggccgtaacgctaagcccatagcgctagtc

SEQ ID NO: 250607 - DNA, 55 bp, Artificial
  Synthetic oligonucleotide
ccaaaatgtcccggcctgcctcgttttggcctacgcggttcacactcacatccac

SEQ ID NO: 250608 - DNA, 54 bp, Artificial
  Synthetic oligonucleotide
cccaacaagctacccaggcagcctggaagttcggaaacattgacggtttccgtc

SEQ ID NO: 250609 - DNA, 55 bp, Artificial
  Synthetic oligonucleotide
cagtggatcgtcaaaatcagtgtacctgtcctgaccgtgcacgcgcaaacaacgc

SEQ ID NO: 250610 - DNA, 55 bp, Artificial
  Synthetic oligonucleotide
agcggcctagcggttactcaggggatctatgcagcaaagggagcctcgagtacgt

SEQ ID NO: 250611 - DNA, 53 bp, Artificial
  Synthetic oligonucleotide
agagctccaggagcggcttagggcccttccccgaggggtcttccccatcgtct

SEQ ID NO: 250612 - DNA, 53 bp, Artificial
  Synthetic oligonucleotide
cccatgctacaccggaccttggggttgaacgcggtataaagtgtttggtagcc

SEQ ID NO: 250613 - DNA, 52 bp, Artificial
  Synthetic oligonucleotide
agcccttatacctgtcccacacggcaaaaacccctaatttggaacataccaa

SEQ ID NO: 250614 - DNA, 55 bp, Artificial
  Synthetic oligonucleotide
agcgggatcgctaccggagggtgctggcctacctgtacctggaggatcccagggg

SEQ ID NO: 250615 - DNA, 55 bp, Artificial
  Synthetic oligonucleotide
agagaggaggaagtttattcgcacagatcggcgcattgtccagactgttcgccac

SEQ ID NO: 250616 - DNA, 55 bp, Artificial
  Synthetic oligonucleotide
agggcgttccagaggacccaggcgtagaagcgcacgctcccaggatcccggaact

SEQ ID NO: 250617 - DNA, 50 bp, Artificial
  Synthetic oligonucleotide
ccccgtaccggcccatggaagggagggtagggcagtccggttagacggcc

SEQ ID NO: 250618 - DNA, 55 bp, Artificial
  Synthetic oligonucleotide
ccccgttacggctaaggagctatgctacgaccacgctgcgaaagccttgcctgac

SEQ ID NO: 250619 - DNA, 54 bp, Artificial
  Synthetic oligonucleotide
aggtgaaggctaagaaccctacgatggtccccacgatcccgctgagaaagcccc

SEQ ID NO: 250620 - DNA, 53 bp, Artificial
  Synthetic oligonucleotide
cccctccccaccagaggcaaaacctcggcctacaagccgccttcaaggagacc

SEQ ID NO: 250621 - DNA, 55 bp, Artificial
  Synthetic oligonucleotide
cccgaaggggctgtattggagaacctagagagtccccttagcgtggctgacggct

SEQ ID NO: 250622 - DNA, 55 bp, Artificial
  Synthetic oligonucleotide
cccgaagtgccaataaagccggctgagtcccactccggaaagagtctcctctagg

SEQ ID NO: 250623 - DNA, 55 bp, Artificial
  Synthetic oligonucleotide
actttggctcgctcagggcgagcagccgaaccagagccttagctgccaccgtccg

SEQ ID NO: 250624 - DNA, 48 bp, Artificial
  Synthetic oligonucleotide
ggggttcgtttgggtttcccccttggccatgaccccacccccaggggc

SEQ ID NO: 250625 - DNA, 53 bp, Artificial
  Synthetic oligonucleotide
caagaccaaactgcgggtacttaggaggagggctaggcggtaggggagaaggc

SEQ ID NO: 250626 - DNA, 55 bp, Artificial
  Synthetic oligonucleotide
caaagcggtgtgtgcgcgtcggtactacggcagttactacggcagttgagtccgg

SEQ ID NO: 250627 - DNA, 55 bp, Artificial
  Synthetic oligonucleotide
attctggcgtgcataaaacctcctatgagtgtgggtgtcgctggcactccccgag

SEQ ID NO: 250628 - DNA, 55 bp, Artificial
  Synthetic oligonucleotide
atcgcgaatcccaggaaccctcgaggcttcagcaaccgagtggggtcggatccgt

SEQ ID NO: 250629 - DNA, 55 bp, Artificial
  Synthetic oligonucleotide
atcgtacgggaaagcgtgtatgtggccctgggcatcgcccctaatggggagaggc

SEQ ID NO: 250630 - DNA, 55 bp, Artificial
  Synthetic oligonucleotide
cctcgaggtctggagtggggaggcgtacggtgtggaggagcatggcctcattatc

SEQ ID NO: 250631 - DNA, 55 bp, Artificial
  Synthetic oligonucleotide
aagaggagcatcatgcgccagactgcggtcaggtattcaggggcggcgtagcgct

SEQ ID NO: 250632 - DNA, 55 bp, Artificial
  Synthetic oligonucleotide
cctgagcacctggcccacttgatcgaaaccgtgcacgcatttgaccggacacccg

SEQ ID NO: 250633 - DNA, 55 bp, Artificial
  Synthetic oligonucleotide
atgacgatgtacatggccgcccctatcctacgcctggaccccgtggaggtcgtag

SEQ ID NO: 250634 - DNA, 55 bp, Artificial
  Synthetic oligonucleotide
aagagcgtccacctggagtctgcgcctatagatgtgtccgtcctgtcggacactc

SEQ ID NO: 250635 - DNA, 57 bp, Artificial
  Synthetic oligonucleotide
ggggtagacaccttgagatccgagagaaagtgagataactcacatatttaccccgcc

SEQ ID NO: 250636 - DNA, 55 bp, Artificial
  Synthetic oligonucleotide
aaccttgacgtcgagagcccagaagtcgcactgcgacccggtataggacccgagc

SEQ ID NO: 250637 - DNA, 55 bp, Artificial
  Synthetic oligonucleotide
atgggatgtaatcggtcaacacatttgagactctttgaggaaccgactcctcttg

SEQ ID NO: 250638 - DNA, 53 bp, Artificial
  Synthetic oligonucleotide
atgggaggcgaacatgggttacacgaaggccgagattttaaaagcgcttaagg

SEQ ID NO: 250639 - DNA, 53 bp, Artificial
  Synthetic oligonucleotide
aaagcatccaggtgcgtttacgcatcccaacctcctttcgcttttagggtagg

SEQ ID NO: 250640 - DNA, 55 bp, Artificial
  Synthetic oligonucleotide
atgagggcaaaagcggcgacccctccggacttgttcagccaaccccgcaggcatg

SEQ ID NO: 250641 - DNA, 55 bp, Artificial
  Synthetic oligonucleotide
cgatcagccgtggtacgaagcttcccgctcgctaaagcgttcccaaagcgtctgt

SEQ ID NO: 250642 - DNA, 55 bp, Artificial
  Synthetic oligonucleotide
cgatgacgatggggtaaggcgtgggtttaccgacctctattcttggcataagccc

SEQ ID NO: 250643 - DNA, 54 bp, Artificial
  Synthetic oligonucleotide
cgatgatgaagctttgggccccgtaggtttccccattgacctctatttccctgg

SEQ ID NO: 250644 - DNA, 55 bp, Artificial
  Synthetic oligonucleotide
atggccctgccctgggtcgctgccctagcagtttacgctaggctgagcggtgttt

SEQ ID NO: 250645 - DNA, 54 bp, Artificial
  Synthetic oligonucleotide
acccgtgggcccgagaggcaagctccacgattacgtgccgttttacttctgccc

SEQ ID NO: 250646 - DNA, 60 bp, Artificial
  Synthetic oligonucleotide
ggggagcgacggaaaggaggtgacatgacgcggatgttcgagacgcttgcagaacttgag

SEQ ID NO: 250647 - DNA, 52 bp, Artificial
  Synthetic oligonucleotide
ccgcctcatggtagggagtttaccccttccccggtcgtaagctgaccaacac

SEQ ID NO: 250648 - DNA, 55 bp, Artificial
  Synthetic oligonucleotide
agtcacacgccgctaccgcgacccaatcgttttgcgcgtagctcaaggccgagtg

SEQ ID NO: 250649 - DNA, 49 bp, Artificial
  Synthetic oligonucleotide
ccgggtaggacccggatagggtctaactaacgaccgttcggcttacctc

SEQ ID NO: 250650 - DNA, 55 bp, Artificial
  Synthetic oligonucleotide
agttcaaaagtccgtagcggctcgctggcctaggcagttactcgggacgggctgc

SEQ ID NO: 250651 - DNA, 55 bp, Artificial
  Synthetic oligonucleotide
atactctgtcaaggcatgtccctcctgtccgtgaaatgcaagctgatacccgacg

SEQ ID NO: 250652 - DNA, 55 bp, Artificial
  Synthetic oligonucleotide
atactggccccggtcgggcataggtgcggtgacccaacacgatcatgggccttag

SEQ ID NO: 250653 - DNA, 55 bp, Artificial
  Synthetic oligonucleotide
acacaggcgaggtataatgtctaaggatagaggggcttagcgggaggagctaagg

SEQ ID NO: 250654 - DNA, 55 bp, Artificial
  Synthetic oligonucleotide
ccgtaagctgaacctggatgccgttagcacagcgccctagactggcctaggggtg

SEQ ID NO: 250655 - DNA, 55 bp, Artificial
  Synthetic oligonucleotide
ccgtagtgccacgggatttgaaattcatcctgggtgcgccaggtaaccttcaacg

SEQ ID NO: 250656 - DNA, 54 bp, Artificial
  Synthetic oligonucleotide
aatccccaagacccacaccgccctcactctagcaggggtagccttagggcaggg

SEQ ID NO: 250657 - DNA, 50 bp, Artificial
  Synthetic oligonucleotide
gggctcttgaaggaaagcgtaaggaaacagtcccgtgggggccgggtttc

SEQ ID NO: 250658 - DNA, 55 bp, Artificial
  Synthetic oligonucleotide
atccccgatccctcggggtttggattgcgatagaccgcaggcctctcagcctgca

SEQ ID NO: 250659 - DNA, 55 bp, Artificial
  Synthetic oligonucleotide
cctcaaagagtctcaaatgtgttgaccgattacatcgccttgacaaggccctcgc

SEQ ID NO: 250660 - DNA, 55 bp, Artificial
  Synthetic oligonucleotide
cctaccctgagccccatgacccctaagctgcgccggagtttcctggtgcgagtgt

SEQ ID NO: 250661 - DNA, 55 bp, Artificial
  Synthetic oligonucleotide
cctagcctcggcactttccgcttctttcctcagcatgaacaagaaggccaaaagc

SEQ ID NO: 250662 - DNA, 55 bp, Artificial
  Synthetic oligonucleotide
caagaccgccctggatgtggcagcgggtatagccccttatgagcactaccaagag

SEQ ID NO: 250663 - DNA, 50 bp, Artificial
  Synthetic oligonucleotide
aaggaaagaaggggtcttttcccgacgtctacggacggatgtcctggaat

SEQ ID NO: 250664 - DNA, 54 bp, Artificial
  Synthetic oligonucleotide
gcgcgccataagggcctcctaagggcggtagtccaggggcctcaggtagaactc

SEQ ID NO: 250665 - DNA, 54 bp, Artificial
  Synthetic oligonucleotide
gcgcgtagggcggtggaaggtctcgcgccgtaacctgcccagggcatcaaagta

SEQ ID NO: 250666 - DNA, 54 bp, Artificial
  Synthetic oligonucleotide
agcctctactgggcggagtgcggtaatcgccttccggcatagctttcacgggcg

SEQ ID NO: 250667 - DNA, 54 bp, Artificial
  Synthetic oligonucleotide
cacatccgccttgagagcgtagaccggtccctttcggcttacggcccggataaa

SEQ ID NO: 250668 - DNA, 56 bp, Artificial
  Synthetic oligonucleotide
gggcgtgtccatacaggtgcgttccagggtttacgtaatctaggcgttctatgggc

SEQ ID NO: 250669 - DNA, 54 bp, Artificial
  Synthetic oligonucleotide
gcaacccctagtggaggtgagccttgaggcgtaagctgaagtgtcgcaatcccc

SEQ ID NO: 250670 - DNA, 54 bp, Artificial
  Synthetic oligonucleotide
ggggtagctcttgaacaggtacgatgatcgcgccaggctggtattccactacgc

SEQ ID NO: 250671 - DNA, 54 bp, Artificial
  Synthetic oligonucleotide
gctgctggtttcccctcttatgaggggtgccatgagcccagcagccctatccct

SEQ ID NO: 250672 - DNA, 54 bp, Artificial
  Synthetic oligonucleotide
aggggaggccaaggcgtgctcatagaggaaggcccagtattccggcctcagaaa

SEQ ID NO: 250673 - DNA, 54 bp, Artificial
  Synthetic oligonucleotide
cagcgtccctttgaccaggtgcagtacaccctccgcgacttcagggtccacccc

SEQ ID NO: 250674 - DNA, 53 bp, Artificial
  Synthetic oligonucleotide
cctatcaggggaatcacgggtagcggaggataccacaacccgttttggctccc

SEQ ID NO: 250675 - DNA, 54 bp, Artificial
  Synthetic oligonucleotide
tctaagcccagcttaccacggtctaaaatgcctactgtacggcggatgtatccc

SEQ ID NO: 250676 - DNA, 52 bp, Artificial
  Synthetic oligonucleotide
accatctacctggacctctaaacctaaggggataagcgcctaaggccctaag

SEQ ID NO: 250677 - DNA, 53 bp, Artificial
  Synthetic oligonucleotide
cgtggcaggacctttaaccccaacaaagctataggtggccgggaaccactcac

SEQ ID NO: 250678 - DNA, 54 bp, Artificial
  Synthetic oligonucleotide
tgggaagagtggcggttcagcttacgtccggacttcaggtggcgcatggtctca

SEQ ID NO: 250679 - DNA, 60 bp, Artificial
  Synthetic oligonucleotide
gggccgcagtctcaaggaggtaaaccgtgcggtaccgccttatctgctggatgctgctcg

SEQ ID NO: 250680 - DNA, 54 bp, Artificial
  Synthetic oligonucleotide
tgtccacatggaccttcgtgagagcaagagtcttcggatcccggaagagtcgta

SEQ ID NO: 250681 - DNA, 54 bp, Artificial
  Synthetic oligonucleotide
ccttggggctcgctacgtggaacacgcgttcctgcatcctccgcccaccttacc

SEQ ID NO: 250682 - DNA, 52 bp, Artificial
  Synthetic oligonucleotide
tacccccatggtacacccgggaggtcttgaacccggtacaaagcctctggta

SEQ ID NO: 250683 - DNA, 54 bp, Artificial
  Synthetic oligonucleotide
taaccttctcggtcgtgtaaggaattctgtgtaagggtatgtgtatgaatgggg

SEQ ID NO: 250684 - DNA, 54 bp, Artificial
  Synthetic oligonucleotide
gtttccggggctaaagcttattacgtagatctttggcagaccgatgctcaaggc

SEQ ID NO: 250685 - DNA, 54 bp, Artificial
  Synthetic oligonucleotide
agacgcataatcctctccttctgtgacccaggcacgacatgtggtaaagatagg

SEQ ID NO: 250686 - DNA, 54 bp, Artificial
  Synthetic oligonucleotide
ccccagggtgccgttagaagtgttcggatgaccatagggcggcccatccgaaca

SEQ ID NO: 250687 - DNA, 50 bp, Artificial
  Synthetic oligonucleotide
ttcctttccggttcaggacctgggggtcaaatgggggcacgggccccgag

SEQ ID NO: 250688 - DNA, 54 bp, Artificial
  Synthetic oligonucleotide
ttcgtatagcgaacatatatacaccttgcgaacaagcgtatgctacactagccg

SEQ ID NO: 250689 - DNA, 54 bp, Artificial
  Synthetic oligonucleotide
gaaaagttctctttagtacgctcaagtttgggttataatagcaaggagagcccc

SEQ ID NO: 250690 - DNA, 55 bp, Artificial
  Synthetic oligonucleotide
aggggatcttgagagccaaagtccgtaactgctcccgaatagacacataaacggg

SEQ ID NO: 250691 - DNA, 59 bp, Artificial
  Synthetic oligonucleotide
aggctcatctatgcagaaacacgcataaatcctacgcctttaccggccttggtgtgagg

SEQ ID NO: 250692 - DNA, 48 bp, Artificial
  Synthetic oligonucleotide
gtaccaaccctcggggtcaaacttttttcttcttaccctgttaaaggc

SEQ ID NO: 250693 - DNA, 54 bp, Artificial
  Synthetic oligonucleotide
ccatagccttcaaagcccggacgatgtaggctcccggcctactgacgaggccgt

SEQ ID NO: 250694 - DNA, 54 bp, Artificial
  Synthetic oligonucleotide
ggttcggagccccgagcatgaggcgaaaaccgtttccctggcacatcaccgtct

SEQ ID NO: 250695 - DNA, 52 bp, Artificial
  Synthetic oligonucleotide
aaaacctcacgcgcccttgtcaagcggtcgggccttaaggtttctgttatac

SEQ ID NO: 250696 - DNA, 54 bp, Artificial
  Synthetic oligonucleotide
cgcaacccagctagatcaaggggtcgcttgacaggcaagacagtatcaatcccc

SEQ ID NO: 250697 - DNA, 54 bp, Artificial
  Synthetic oligonucleotide
gggtttggttggctcccgcgataccctaaatcgcgttcaggacaggccctgaac

SEQ ID NO: 250698 - DNA, 53 bp, Artificial
  Synthetic oligonucleotide
atgagagcaggtcggcggctaggaagtcgtcgaagtaaggcttcttggatccc

SEQ ID NO: 250699 - DNA, 53 bp, Artificial
  Synthetic oligonucleotide
ttctcaatgggaataagcttgagttccatgccccgattttaccgaaggccacc

SEQ ID NO: 250700 - DNA, 53 bp, Artificial
  Synthetic oligonucleotide
aagctccggacttttgccgacgtattccagttgcggctcgaggtccctgggtg

SEQ ID NO: 250701 - DNA, 52 bp, Artificial
  Synthetic oligonucleotide
ttttcccctagcccaccgtgccccttagcggtttgagctgccgggttaggga

SEQ ID NO: 250702 - DNA, 52 bp, Artificial
  Synthetic oligonucleotide
aggcttgccggggatcccgggatgacctgcggggtttatgcaacctaacccc

SEQ ID NO: 250703 - DNA, 53 bp, Artificial
  Synthetic oligonucleotide
tggctagggccgcctagctcctcgtggaggacttttacgacagcctctcacat

SEQ ID NO: 250704 - DNA, 53 bp, Artificial
  Synthetic oligonucleotide
aagggctctacgtcctgggcttgcccggttccgctgtagttttccgattcaag

SEQ ID NO: 250705 - DNA, 53 bp, Artificial
  Synthetic oligonucleotide
aagggtttgagcctgcctaaggcctgagggtgtagactgaagcgcgggctgta

SEQ ID NO: 250706 - DNA, 53 bp, Artificial
  Synthetic oligonucleotide
acatcgcagattggatcctgggccattactcggacgcggttgtggccatcgga

SEQ ID NO: 250707 - DNA, 53 bp, Artificial
  Synthetic oligonucleotide
tcgcgtcaactgccagttcctagttcatggacgatagaaagcatttccgaaat

SEQ ID NO: 250708 - DNA, 53 bp, Artificial
  Synthetic oligonucleotide
acctcccacgctgtgttgcgcccagattctaccccgaaaacgcggaacgttgc

SEQ ID NO: 250709 - DNA, 53 bp, Artificial
  Synthetic oligonucleotide
acggcgttttgacggcggggaggccataatggggccatggaaggcctctaccg

SEQ ID NO: 250710 - DNA, 53 bp, Artificial
  Synthetic oligonucleotide
tagggaggacgtttgtccctagggttatctataccttaccagggcagggtata

SEQ ID NO: 250711 - DNA, 53 bp, Artificial
  Synthetic oligonucleotide
acgggttgttggttccagcacaccttacggctggcaaactctatgcgtagggg

SEQ ID NO: 250712 - DNA, 50 bp, Artificial
  Synthetic oligonucleotide
agggtccgcttcatctttaccctccggggtatagggtagtttgtcccttg

SEQ ID NO: 250713 - DNA, 52 bp, Artificial
  Synthetic oligonucleotide
ctggttgtagaccttcgcgttcttaggcggaatgggaagccggtccctacgg

SEQ ID NO: 250714 - DNA, 53 bp, Artificial
  Synthetic oligonucleotide
aggcttcggttgtcttaaggcgagtaggttaccaggacgcctccagtgaaggt

SEQ ID NO: 250715 - DNA, 51 bp, Artificial
  Synthetic oligonucleotide
gtaaaggagggtgttgccaaaactcacgagagcgtttacggggtctttcgg

SEQ ID NO: 250716 - DNA, 53 bp, Artificial
  Synthetic oligonucleotide
agccaggaggacacgcgaaacgcggactacgcgcgtagaggcccgccgtaggg

SEQ ID NO: 250717 - DNA, 53 bp, Artificial
  Synthetic oligonucleotide
ggtctggtaataggtgggaagcttccgctcgataaggtccggttataccaatt

SEQ ID NO: 250718 - DNA, 53 bp, Artificial
  Synthetic oligonucleotide
gggttccacggctccacgtttccgagggcgagttcgctcctcgtccaccgaat

SEQ ID NO: 250719 - DNA, 51 bp, Artificial
  Synthetic oligonucleotide
ggtccgatcggtctaagaatggaaccggcttgacaaacccttaaccggtgg

SEQ ID NO: 250720 - DNA, 49 bp, Artificial
  Synthetic oligonucleotide
cgtgtggcctttttaattttcaaccccccacgaccggggtggcaccctg

SEQ ID NO: 250721 - DNA, 53 bp, Artificial
  Synthetic oligonucleotide
gaggaggtctttgggcgtgtccccaggctctatgggcacggggacgtccaagg

SEQ ID NO: 250722 - DNA, 53 bp, Artificial
  Synthetic oligonucleotide
ccaggtaaccttcgccgtagggttgcacgtcaccggttagaacggcacttcca

SEQ ID NO: 250723 - DNA, 53 bp, Artificial
  Synthetic oligonucleotide
ccccatttcggacgcgagctatgcgcggccaggggtttccgcttccgcttccc

SEQ ID NO: 250724 - DNA, 50 bp, Artificial
  Synthetic oligonucleotide
cccggggaaggccttctaggccctttagaggccgggagaagggtagtctg

SEQ ID NO: 250725 - DNA, 53 bp, Artificial
  Synthetic oligonucleotide
ctcgcatatgctgctcggtgtccagaaagtcggcgtcgactagagccgagaaa

SEQ ID NO: 250726 - DNA, 53 bp, Artificial
  Synthetic oligonucleotide
ccattactcggacgcggttgtggccatcggaatctatgggtccaccgcacggg

SEQ ID NO: 250727 - DNA, 53 bp, Artificial
  Synthetic oligonucleotide
cgagcggggccaagtcgtgtacctagtcctgggctcggctaaccgtgatccca

SEQ ID NO: 250728 - DNA, 53 bp, Artificial
  Synthetic oligonucleotide
cccaagacggagaggtgatccgcctagaattcgctagcgagtacaccgagata

SEQ ID NO: 250729 - DNA, 53 bp, Artificial
  Synthetic oligonucleotide
cgatggcatccctctcgtccatgggatccttgggcaggaggtggcgttccaag

SEQ ID NO: 250730 - DNA, 53 bp, Artificial
  Synthetic oligonucleotide
ctttcccgacttcctatcgtttaacaatctagcacatcctccgtttttctggc

SEQ ID NO: 250731 - DNA, 52 bp, Artificial
  Synthetic oligonucleotide
ttccaagcccacatcgccaagtactccaaactcaagaaaaccctcggcctct

SEQ ID NO: 250732 - DNA, 52 bp, Artificial
  Synthetic oligonucleotide
cacttgtaagactgatagtaactagacagcccgaacgctctccccaagcccc

SEQ ID NO: 250733 - DNA, 52 bp, Artificial
  Synthetic oligonucleotide
ttacgcctttaccgggttcacctaccccgagctctacctcttctggctgcgg

SEQ ID NO: 250734 - DNA, 52 bp, Artificial
  Synthetic oligonucleotide
cgaaaaggggaagctccctgggcaccacctcccgcactgcctgggccacctg

SEQ ID NO: 250735 - DNA, 55 bp, Artificial
  Synthetic oligonucleotide
ctcttgacacgacctggggacgagatttctacggagaagtcttccgtggggagga

SEQ ID NO: 250736 - DNA, 52 bp, Artificial
  Synthetic oligonucleotide
tggggctcgctcgattacaaccactccgaggaaggggtcgcgttgtacgacc

SEQ ID NO: 250737 - DNA, 52 bp, Artificial
  Synthetic oligonucleotide
tggggaagaggtcgctcaaggtctctccgtgctcgactacgaagtagacgaa

SEQ ID NO: 250738 - DNA, 52 bp, Artificial
  Synthetic oligonucleotide
cggattattgttatgcatccataacctccatagtcacgtcccctacgctgtt

SEQ ID NO: 250739 - DNA, 52 bp, Artificial
  Synthetic oligonucleotide
ccggcggtggttctctacgacagcgcacagatacgtagcgggtcgtcctact

SEQ ID NO: 250740 - DNA, 52 bp, Artificial
  Synthetic oligonucleotide
ggggccatcgttcggggaaccctcgagggcaggcacttccacagcgatcccc

SEQ ID NO: 250741 - DNA, 52 bp, Artificial
  Synthetic oligonucleotide
gaggctgacggggtttgcaacggaggcccccctggactggagagaggggtat

SEQ ID NO: 250742 - DNA, 52 bp, Artificial
  Synthetic oligonucleotide
tcgtattgcctcgcgaacaatggacgccttggcctcgtaccagctcaccccc

SEQ ID NO: 250743 - DNA, 52 bp, Artificial
  Synthetic oligonucleotide
tgcgcacggagggattgtagcacaccttccgtgagaagccgtaatagtatgg

SEQ ID NO: 250744 - DNA, 52 bp, Artificial
  Synthetic oligonucleotide
cccctcagggagcgtggtcgtcccctcggggagccgtggcccgatgtattgg

SEQ ID NO: 250745 - DNA, 52 bp, Artificial
  Synthetic oligonucleotide
tgcctgaaagaagcccccgctttgctgaaaccctgaggcgggaggtgcgctg

SEQ ID NO: 250746 - DNA, 54 bp, Artificial
  Synthetic oligonucleotide
cccgttaccggtaaatcgctagatccgataggcgagctgtcaccttcgtttccc

SEQ ID NO: 250747 - DNA, 52 bp, Artificial
  Synthetic oligonucleotide
cttttctacgtgggccccgtgcaacacgatttgaacatcatccactccaaaa

SEQ ID NO: 250748 - DNA, 52 bp, Artificial
  Synthetic oligonucleotide
gtagcgataagccattacgggcgtaggttctttgttcgggtggaccacccaa

SEQ ID NO: 250749 - DNA, 52 bp, Artificial
  Synthetic oligonucleotide
gaccccgggtctcgttcgccggtggctcactcgtccggggatacgtttccga

SEQ ID NO: 250750 - DNA, 52 bp, Artificial
  Synthetic oligonucleotide
gtgtgtacaccttccgcatacggtacaccgccagggtaccccacaaggacat

SEQ ID NO: 250751 - DNA, 52 bp, Artificial
  Synthetic oligonucleotide
ggttgtggccatcggaatctatgggtccaccgcacggggctccgacgagccc

SEQ ID NO: 250752 - DNA, 52 bp, Artificial
  Synthetic oligonucleotide
agattcgctcctttaggagcgaatccggctgtgcctccctgacttacagacg

SEQ ID NO: 250753 - DNA, 52 bp, Artificial
  Synthetic oligonucleotide
gtctaccttccggtctgattccgtcagcggatgtcgggaaccgggcttagcc

SEQ ID NO: 250754 - DNA, 52 bp, Artificial
  Synthetic oligonucleotide
tctcccgctttccccgggactttcaggagctctaatgtaaagcccgtaagat

SEQ ID NO: 250755 - DNA, 52 bp, Artificial
  Synthetic oligonucleotide
gcgagtttgccagggcgaatgggctgcatccacctatctgcgagcaggttga

SEQ ID NO: 250756 - DNA, 52 bp, Artificial
  Synthetic oligonucleotide
aaaggtaggtgagcgcggctgggtacgcaccctcccgcagcaagctgaaggc

SEQ ID NO: 250757 - DNA, 55 bp, Artificial
  Synthetic oligonucleotide
cccttaggaggggatgtgtatgtcaagccgtcctggacgggatttttggcctctc

SEQ ID NO: 250758 - DNA, 52 bp, Artificial
  Synthetic oligonucleotide
gctgcgggttcggcaagtcttcacccacgaagatgggagccagggggtgttg

SEQ ID NO: 250759 - DNA, 52 bp, Artificial
  Synthetic oligonucleotide
gcccaagggctgctcggttagacaagctccggacccttcgctagaataagga

SEQ ID NO: 250760 - DNA, 52 bp, Artificial
  Synthetic oligonucleotide
ccgcaggcctctcagcctgcaggccccgcgttgagtgccgcgccagcgccca

SEQ ID NO: 250761 - DNA, 52 bp, Artificial
  Synthetic oligonucleotide
ttgggcttgcaagagtggcccctcgatcatcgctaagggaacgtaggggtga

SEQ ID NO: 250762 - DNA, 52 bp, Artificial
  Synthetic oligonucleotide
gccagctcccggagcccacctgataagcagctgcgttgaagctccccattgg

SEQ ID NO: 250763 - DNA, 52 bp, Artificial
  Synthetic oligonucleotide
caagccagcggttgagctccgctgtgggcacgcgggtatggttgagctggta

SEQ ID NO: 250764 - DNA, 52 bp, Artificial
  Synthetic oligonucleotide
gatcttgcttcaataagctcagcgacgtgctacgaggttgtttacaaaccga

SEQ ID NO: 250765 - DNA, 51 bp, Artificial
  Synthetic oligonucleotide
cacgtgacaggcgggtgtgttaaccgactacaccacggggccagacgtgtt

SEQ ID NO: 250766 - DNA, 51 bp, Artificial
  Synthetic oligonucleotide
ggggtgagctggtacgaggccaaggcgtccattgttcgcgaggcaatacga

SEQ ID NO: 250767 - DNA, 51 bp, Artificial
  Synthetic oligonucleotide
agcggcataaagtgcgaagatggccgtgagggttaggacgcggagccagta

SEQ ID NO: 250768 - DNA, 54 bp, Artificial
  Synthetic oligonucleotide
ctccccaaggacgacctcagcttctcggggtactccgtcacggtgccggggagc

SEQ ID NO: 250769 - DNA, 51 bp, Artificial
  Synthetic oligonucleotide
attacagcgcccccccctgctgtgggaggttaaggccttcgacgtggccta

SEQ ID NO: 250770 - DNA, 51 bp, Artificial
  Synthetic oligonucleotide
ctcacccgtaagtggctcgagcacctcccgcaatcgaatcggattgtctag

SEQ ID NO: 250771 - DNA, 51 bp, Artificial
  Synthetic oligonucleotide
ctgcagggcggtattgatagaggagacgttaatggaagggctcatgagcat

SEQ ID NO: 250772 - DNA, 51 bp, Artificial
  Synthetic oligonucleotide
ccagggcgaatgggctgcatccacctatctgcgagcaggttgactactcga

SEQ ID NO: 250773 - DNA, 51 bp, Artificial
  Synthetic oligonucleotide
gttcaccaggaggtacggcgtccacaaactggtgtacttcgaagcgcaccc

SEQ ID NO: 250774 - DNA, 51 bp, Artificial
  Synthetic oligonucleotide
ccagggtctacgcccaggagttctgcctttagaagccgcctaaggatcttg

SEQ ID NO: 250775 - DNA, 51 bp, Artificial
  Synthetic oligonucleotide
agactgcggtcaggtattcaggggcggcgtagcgctcgtgaacgtggattc

SEQ ID NO: 250776 - DNA, 51 bp, Artificial
  Synthetic oligonucleotide
gacccgagcgtggtttgcgaccccagccggacgcgcttcgtggtaatcgct

SEQ ID NO: 250777 - DNA, 51 bp, Artificial
  Synthetic oligonucleotide
acatgagggcggtagtacaccgcgtatggtccgttgaagcagccccaccag

SEQ ID NO: 250778 - DNA, 51 bp, Artificial
  Synthetic oligonucleotide
ctacttccccattgaggtctacaacgccggtgctaaccccgatgtctacaa

SEQ ID NO: 250779 - DNA, 54 bp, Artificial
  Synthetic oligonucleotide
ctcatttggtttgactaaccgcctaaaaaccgcccgaaactgcgtgcattcgtg

SEQ ID NO: 250780 - DNA, 51 bp, Artificial
  Synthetic oligonucleotide
tatgcccgccttaacgcgaggaatgcacactaccttgctccgctcaagccc

SEQ ID NO: 250781 - DNA, 51 bp, Artificial
  Synthetic oligonucleotide
gcatacagcgcaattatacatcaccttggcgagtcccccgggtgtgccggt

SEQ ID NO: 250782 - DNA, 51 bp, Artificial
  Synthetic oligonucleotide
tagtagtagtaagtcccgcctatcccgaaaggtccgctaacgaaggtgttt

SEQ ID NO: 250783 - DNA, 51 bp, Artificial
  Synthetic oligonucleotide
tgcgttgttccccgagggtgcccatatgatggttcccatgatactgaagct

SEQ ID NO: 250784 - DNA, 51 bp, Artificial
  Synthetic oligonucleotide
ggggcggttgaggtatactgcgccccatgtacggggtcctggtttggcccc

SEQ ID NO: 250785 - DNA, 51 bp, Artificial
  Synthetic oligonucleotide
tacctgtgtgtgatcgagcctaacccggagggaggtttcgatggttacgcg

SEQ ID NO: 250786 - DNA, 51 bp, Artificial
  Synthetic oligonucleotide
acgggcgaagaggagcatcatgcgccagactgcggtcaggtattcaggggc

SEQ ID NO: 250787 - DNA, 51 bp, Artificial
  Synthetic oligonucleotide
ggggattatacacgaaaagccaggcttgctggccctcgggaatgagcctcc

SEQ ID NO: 250788 - DNA, 51 bp, Artificial
  Synthetic oligonucleotide
agatctgcgcaagctaagtcgaggcgcgcttgagctttcaggttgagcgtc

SEQ ID NO: 250789 - DNA, 51 bp, Artificial
  Synthetic oligonucleotide
gagggacgaaggttacgtggcgtcctgacacctcaaccatacccctttagt

SEQ ID NO: 250790 - DNA, 55 bp, Artificial
  Synthetic oligonucleotide
ctaccgcgtgggctaccgttcaggatgcgcggtgacacaaggttttaaggtactc

SEQ ID NO: 250791 - DNA, 51 bp, Artificial
  Synthetic oligonucleotide
aaaacggctctgagcgggtagaactgggcttgatcctcgtagtccacggcc

SEQ ID NO: 250792 - DNA, 51 bp, Artificial
  Synthetic oligonucleotide
tagggcgtggcaggagtaacctttcaggggccctttagagtggttcccacg

SEQ ID NO: 250793 - DNA, 51 bp, Artificial
  Synthetic oligonucleotide
ctcttgttccattctaggggctctaccggggactctcgggagtttctgaga

SEQ ID NO: 250794 - DNA, 51 bp, Artificial
  Synthetic oligonucleotide
aagccttgcccgcaaggggcctaggtccacggggaaaaggggccgcacctc

SEQ ID NO: 250795 - DNA, 51 bp, Artificial
  Synthetic oligonucleotide
atgcgttccctcctttcttcggcggttctgcgttcgtccatagcctaagcc

SEQ ID NO: 250796 - DNA, 50 bp, Artificial
  Synthetic oligonucleotide
acccgtgggggataaacccgtagtacagcgccaagagtaccgccaggacg

SEQ ID NO: 250797 - DNA, 50 bp, Artificial
  Synthetic oligonucleotide
ccggtagctagtggcctgcggtaagctcgccgaaggtaacttgaccccgg

SEQ ID NO: 250798 - DNA, 50 bp, Artificial
  Synthetic oligonucleotide
ccgacagcccctggcccgttacaccctggggtagaagacgtttgtctccc

SEQ ID NO: 250799 - DNA, 50 bp, Artificial
  Synthetic oligonucleotide
cggttaccaatccgcgccttaaagcccctggctccaaccatggggagcta

SEQ ID NO: 250800 - DNA, 50 bp, Artificial
  Synthetic oligonucleotide
accttcccccgggtacccctcaccgcctcagtatgcctgggggtttccac

SEQ ID NO: 250801 - DNA, 53 bp, Artificial
  Synthetic oligonucleotide
ggccgcccctatcctacgcctggaccccgtggaggtcgtaggtgtccgcccga

SEQ ID NO: 250802 - DNA, 59 bp, Artificial
  Synthetic oligonucleotide
cgtgtgagtcgggtcgttggtatgacgcttgaaacccttctcgctgcgaacaccgcata

SEQ ID NO: 250803 - DNA, 50 bp, Artificial
  Synthetic oligonucleotide
tccgagctattgcgcacggcagggcgagacttccgagtgttctgcgggtt

SEQ ID NO: 250804 - DNA, 50 bp, Artificial
  Synthetic oligonucleotide
cgttccctccacttattgtggcccttctcgggggtgcgctacggcaccgt

SEQ ID NO: 250805 - DNA, 50 bp, Artificial
  Synthetic oligonucleotide
acatgggggtcccgatacgctaccggacgttcgaaggggtgttgtccgta

SEQ ID NO: 250806 - DNA, 50 bp, Artificial
  Synthetic oligonucleotide
accacccaggtgtcccgggaggggtatgaccggttcctcaaaggcaaggc

SEQ ID NO: 250807 - DNA, 50 bp, Artificial
  Synthetic oligonucleotide
cgtctcagaacggggagtcgtcacccaccccgcggaaatgtcaaggcgta

SEQ ID NO: 250808 - DNA, 50 bp, Artificial
  Synthetic oligonucleotide
acccttctagactcaccggagggaccctaacgccgcgcccaaataccccc

SEQ ID NO: 250809 - DNA, 50 bp, Artificial
  Synthetic oligonucleotide
accccagacgcaccctcaccttatccgtgccggtccgaatggatgacggc

SEQ ID NO: 250810 - DNA, 49 bp, Artificial
  Synthetic oligonucleotide
acccccacaactacacccggttcttcgttattgggcgggaggaagcccc

SEQ ID NO: 250811 - DNA, 50 bp, Artificial
  Synthetic oligonucleotide
acccctttgggggtatgatagcctagtccctcgggcagggttccatcccc

SEQ ID NO: 250812 - DNA, 50 bp, Artificial
  Synthetic oligonucleotide
accgcggcaggtagcctaatagtggctcctggagagcatccggttggtgc

SEQ ID NO: 250813 - DNA, 48 bp, Artificial
  Synthetic oligonucleotide
ccggcccctaggggcgaggaggggcaaaacgaagatcccccgggggta

SEQ ID NO: 250814 - DNA, 50 bp, Artificial
  Synthetic oligonucleotide
acccggactacgagacaggaagctcctagagagcgcggcctatgccccca

SEQ ID NO: 250815 - DNA, 50 bp, Artificial
  Synthetic oligonucleotide
accgacggggaaggcccacaggtactcccagattcgcgcgtctgcttccg

SEQ ID NO: 250816 - DNA, 50 bp, Artificial
  Synthetic oligonucleotide
tcgccaaccagggaccggctaggacgcccgtaagcggttcgcccggtgtc

SEQ ID NO: 250817 - DNA, 50 bp, Artificial
  Synthetic oligonucleotide
aagaggcgcacctaccacacctggcgagggtacctggaagccctttcgga

SEQ ID NO: 250818 - DNA, 50 bp, Artificial
  Synthetic oligonucleotide
cgctggtagaatttgctggacgcatgagctttaggggctcggggtggcta

SEQ ID NO: 250819 - DNA, 50 bp, Artificial
  Synthetic oligonucleotide
aactctccttggggaagctccgtctgccgggggtaccgaatgcggtaacg

SEQ ID NO: 250820 - DNA, 50 bp, Artificial
  Synthetic oligonucleotide
aactccaccggctcatccccctcgttcacataggcatggggcgtgtccgg

SEQ ID NO: 250821 - DNA, 50 bp, Artificial
  Synthetic oligonucleotide
aactagcagggtgcgaccccacacgcgcatatcgagtccccctttccacg

SEQ ID NO: 250822 - DNA, 50 bp, Artificial
  Synthetic oligonucleotide
aacgatagccccaccaaagcggtcggaaatgggaccggcaataatgcggg

SEQ ID NO: 250823 - DNA, 50 bp, Artificial
  Synthetic oligonucleotide
cgaccaaaaaccgcggaatggggcgtgtgtacccggtcggttaggctagg

SEQ ID NO: 250824 - DNA, 51 bp, Artificial
  Synthetic oligonucleotide
ccggcctccctcggacctccccccatttgggctctaaccccatagcaaccc

SEQ ID NO: 250825 - DNA, 50 bp, Artificial
  Synthetic oligonucleotide
cgcgatgtcggaaacgggcagggaatgccgttgcgcgctggtagaatttg

SEQ ID NO: 250826 - DNA, 50 bp, Artificial
  Synthetic oligonucleotide
cgacctgatgagctacagcacgctcacaggcatcctggccgtactggggg

SEQ ID NO: 250827 - DNA, 50 bp, Artificial
  Synthetic oligonucleotide
aacctcggggtctaggggcgtcgtggccgcgtaatccaggtagatcatgg

SEQ ID NO: 250828 - DNA, 50 bp, Artificial
  Synthetic oligonucleotide
aaccggaaagggaccgccatagctgaggtagattcgcccctccctcgtta

SEQ ID NO: 250829 - DNA, 50 bp, Artificial
  Synthetic oligonucleotide
aaccgccgcaggcgctcgttgggcgtttgttattcccggttgcaggggga

SEQ ID NO: 250830 - DNA, 50 bp, Artificial
  Synthetic oligonucleotide
ttgtataatctccccgcaacagggggccactatggagcaccttctcgcta

SEQ ID NO: 250831 - DNA, 50 bp, Artificial
  Synthetic oligonucleotide
aaccctgcgttcacaccctcccgggttaagatggctctagcgtatgcggg

SEQ ID NO: 250832 - DNA, 50 bp, Artificial
  Synthetic oligonucleotide
aacccgccttttgtttgcaactgcgaacccgggccggctctagcgttacg

SEQ ID NO: 250833 - DNA, 50 bp, Artificial
  Synthetic oligonucleotide
aaaggtgtcgggatctgggggctcaaccaaccagtcgcctgggggttcgc

SEQ ID NO: 250834 - DNA, 50 bp, Artificial
  Synthetic oligonucleotide
aaaggcacctctcgccaaccagggaccggctaggacgcccgtaagcggtt

SEQ ID NO: 250835 - DNA, 56 bp, Artificial
  Synthetic oligonucleotide
cgtgggtttaggaggcggtgtaagaccgcaaatcgcgcaggaacatgagggcggta

SEQ ID NO: 250836 - DNA, 50 bp, Artificial
  Synthetic oligonucleotide
cgactccgagccaagcataacccccaccaccgtacaccggcagttcacga

SEQ ID NO: 250837 - DNA, 50 bp, Artificial
  Synthetic oligonucleotide
aaaagcggcacaggtcctttggaggccacgcaagcacaccgtacacgacc

SEQ ID NO: 250838 - DNA, 50 bp, Artificial
  Synthetic oligonucleotide
cgattcccacaggccatttcctgcgaaccctccttgccgttggaacgacg

SEQ ID NO: 250839 - DNA, 50 bp, Artificial
  Synthetic oligonucleotide
acaggccccttgcctaacgggtaacgtgcgactaagcccaaatccgctgg

SEQ ID NO: 250840 - DNA, 50 bp, Artificial
  Synthetic oligonucleotide
acaggccacggctacaggcttccgttttgcacgacgcaccacgtaccacg

SEQ ID NO: 250841 - DNA, 50 bp, Artificial
  Synthetic oligonucleotide
acagcgccaagagtaccgccaggacgtacatgatcgggtgtacctcgcgc

SEQ ID NO: 250842 - DNA, 50 bp, Artificial
  Synthetic oligonucleotide
acacccggtgctaccctcagccctaagggggtgacggaccatgcggaaaa

SEQ ID NO: 250843 - DNA, 50 bp, Artificial
  Synthetic oligonucleotide
cggtgccgtagcgcacccccgagaagggccacaataagtggagggaacgc

SEQ ID NO: 250844 - DNA, 50 bp, Artificial
  Synthetic oligonucleotide
acaagctccgtgccctccggggaaagggtgccgtagggtacaatgggtct

SEQ ID NO: 250845 - DNA, 50 bp, Artificial
  Synthetic oligonucleotide
acaaccgcgcgccagtagccgtggaacgcactgtactccgacagtcttct

SEQ ID NO: 250846 - DNA, 51 bp, Artificial
  Synthetic oligonucleotide
ccgggcccccacccgtcagggagctgccgcctggaggttcccccgttagtc

SEQ ID NO: 250847 - DNA, 50 bp, Artificial
  Synthetic oligonucleotide
acaaaaactcccgctccccgatccagtaggcccccaggacctggaaaccc

SEQ ID NO: 250848 - DNA, 50 bp, Artificial
  Synthetic oligonucleotide
ccgttgcgcgctggtagaatttgctggacgcatgagctttaggggctcgg

SEQ ID NO: 250849 - DNA, 50 bp, Artificial
  Synthetic oligonucleotide
aagtccggggatgcccccataggcaccaaggaactcaacgagctccgagg

SEQ ID NO: 250850 - DNA, 50 bp, Artificial
  Synthetic oligonucleotide
aaggtcgccagggtgacccacctcgtatcccttgggcttcctttgcgcat

SEQ ID NO: 250851 - DNA, 50 bp, Artificial
  Synthetic oligonucleotide
cgggggtgagaccatcggagttgcgcaagcggaaagtcagggtcgcggta

SEQ ID NO: 250852 - DNA, 50 bp, Artificial
  Synthetic oligonucleotide
aagggtccgcatccctcccatgctaccggctggggtctgagaaaggggtg

SEQ ID NO: 250853 - DNA, 50 bp, Artificial
  Synthetic oligonucleotide
aaggggcagaaggtagtgaaggcccgagcgcagaataggacccacggggg

SEQ ID NO: 250854 - DNA, 50 bp, Artificial
  Synthetic oligonucleotide
cctaagccggttgccgtacatctagaggaggaaaacgatgatcccggaac

SEQ ID NO: 250855 - DNA, 50 bp, Artificial
  Synthetic oligonucleotide
aaggacctcgcgtactttgggagttatggcacccggggcgtggggtacac

SEQ ID NO: 250856 - DNA, 50 bp, Artificial
  Synthetic oligonucleotide
cggcttgacacccctttgggggtatgatagcctagtccctcgggcagggt

SEQ ID NO: 250857 - DNA, 56 bp, Artificial
  Synthetic oligonucleotide
cctaaggcccggtccttgccgtccaccttgctatagagcacgtccgtagcaataag

SEQ ID NO: 250858 - DNA, 50 bp, Artificial
  Synthetic oligonucleotide
aagctttcgttatcctccccggggtagggcatcacctccacggaggggta

SEQ ID NO: 250859 - DNA, 50 bp, Artificial
  Synthetic oligonucleotide
cggcccccgtcccagaagggaggctcggtgccgctcagaacctaactgtt

SEQ ID NO: 250860 - DNA, 50 bp, Artificial
  Synthetic oligonucleotide
cggccagtctcccataccaaacggacagtctagcacacgcgcccatcccc

SEQ ID NO: 250861 - DNA, 50 bp, Artificial
  Synthetic oligonucleotide
aagcacggtcggggtttgcgacaaggcccttggagtcaacgtaacccgtg

SEQ ID NO: 250862 - DNA, 50 bp, Artificial
  Synthetic oligonucleotide
aggggtgggggacttccggggtgctcagttgggcctgtcgttatggcgca

SEQ ID NO: 250863 - DNA, 50 bp, Artificial
  Synthetic oligonucleotide
aggggcgtcgtggccgcgtaatccaggtagatcatggggttacgaggggt

SEQ ID NO: 250864 - DNA, 50 bp, Artificial
  Synthetic oligonucleotide
cacttattgtggcccttctcgggggtgcgctacggcaccgttctgctcag

SEQ ID NO: 250865 - DNA, 50 bp, Artificial
  Synthetic oligonucleotide
agggcctttaggcattggggcgataccccacttgaaatccaccgtgcgta

SEQ ID NO: 250866 - DNA, 50 bp, Artificial
  Synthetic oligonucleotide
agggcctcgctgaggagtttaagcccgtactcccccaggaagggaccgag

SEQ ID NO: 250867 - DNA, 50 bp, Artificial
  Synthetic oligonucleotide
agggcacaccgaacaaagccttgcagctgacggcgcgatagcatggttgt

SEQ ID NO: 250868 - DNA, 49 bp, Artificial
  Synthetic oligonucleotide
cggacccgggctacaacggtctcctctcccgaaaccccttcctccaccc

SEQ ID NO: 250869 - DNA, 50 bp, Artificial
  Synthetic oligonucleotide
agggattatagcatggccactccggtcggggctacgggctctcgggttcc

SEQ ID NO: 250870 - DNA, 50 bp, Artificial
  Synthetic oligonucleotide
aggctcgggctttgggggaggtctaatgcggggacggtacgtgttaacca

SEQ ID NO: 250871 - DNA, 50 bp, Artificial
  Synthetic oligonucleotide
aggccctccaccacccggtaaagcaccgccttagcctccctcggatcctc

SEQ ID NO: 250872 - DNA, 50 bp, Artificial
  Synthetic oligonucleotide
aggccagctggggaagagaatcgtgaggtgtttgacagccgggcggggaa

SEQ ID NO: 250873 - DNA, 50 bp, Artificial
  Synthetic oligonucleotide
aggcaagaatcggttccatagtgtgggcacgcagccgcgaaggaacggag

SEQ ID NO: 250874 - DNA, 50 bp, Artificial
  Synthetic oligonucleotide
aggcaaaaagcgggtatcccggttaccaatccgcgccttaaagcccctgg

SEQ ID NO: 250875 - DNA, 50 bp, Artificial
  Synthetic oligonucleotide
aggagtgcgaggtcgggctggggttcgctttccgaggaaagccttagcgg

SEQ ID NO: 250876 - DNA, 50 bp, Artificial
  Synthetic oligonucleotide
aggaggcgcttgtaggggaaactcccacaccacatgtccgactcgcacgg

SEQ ID NO: 250877 - DNA, 50 bp, Artificial
  Synthetic oligonucleotide
aggacatggccctcaccgacgtggtagggggaagcgtggtcttctacgaa

SEQ ID NO: 250878 - DNA, 50 bp, Artificial
  Synthetic oligonucleotide
agcgtgtggggcgtagtgcgcagtttgggcggacacttcgtagagggggc

SEQ ID NO: 250879 - DNA, 52 bp, Artificial
  Synthetic oligonucleotide
cctcctcggtaggaggggacaagaacttcgggatcccaatcgtgggtcccaa

SEQ ID NO: 250880 - DNA, 50 bp, Artificial
  Synthetic oligonucleotide
agcggtgtagacctccggaccttacacctttccacgtttccatgccccga

SEQ ID NO: 250881 - DNA, 50 bp, Artificial
  Synthetic oligonucleotide
cagctcccccgcaggctagacgggccccctcacggaaccgtcccgcaacc

SEQ ID NO: 250882 - DNA, 50 bp, Artificial
  Synthetic oligonucleotide
cattggtacgggaggggacgatgggctgggtctacgcgttcaccgaaacc

SEQ ID NO: 250883 - DNA, 50 bp, Artificial
  Synthetic oligonucleotide
atgctcacctcgagcatcctggctgggttcgagcgcgtcctccaagcggc

SEQ ID NO: 250884 - DNA, 50 bp, Artificial
  Synthetic oligonucleotide
atgccttgacctccacaccgacggggaaggcccacaggtactcccagatt

SEQ ID NO: 250885 - DNA, 50 bp, Artificial
  Synthetic oligonucleotide
atggtcgtcgtaccacgtcgtgcccccaatgtcgggggtgttgattaggg

SEQ ID NO: 250886 - DNA, 50 bp, Artificial
  Synthetic oligonucleotide
atgtggcggggcgtgtacagtacgggtatgcgcttagggctcatcggtta

SEQ ID NO: 250887 - DNA, 50 bp, Artificial
  Synthetic oligonucleotide
atcggttccatagtgtgggcacgcagccgcgaaggaacggagtgggttta

SEQ ID NO: 250888 - DNA, 50 bp, Artificial
  Synthetic oligonucleotide
gctcctgggtgtgccctttgtgcctccgggctgggaggtagagttccaca

SEQ ID NO: 250889 - DNA, 50 bp, Artificial
  Synthetic oligonucleotide
gctcggggtactcttccagctcctcactgagcggatccacttcgagcgga

SEQ ID NO: 250890 - DNA, 51 bp, Artificial
  Synthetic oligonucleotide
cctctcggccctggagcttcccgttcgggccctggacggggctccccctaa

SEQ ID NO: 250891 - DNA, 50 bp, Artificial
  Synthetic oligonucleotide
atcgctgacaggttcggttggaagagggctggagcggcgtttttcgtgta

SEQ ID NO: 250892 - DNA, 50 bp, Artificial
  Synthetic oligonucleotide
attcccgttaataacccttaacaggaatatgctatcctgaggcatgctcg

SEQ ID NO: 250893 - DNA, 50 bp, Artificial
  Synthetic oligonucleotide
atcgatcccccgcggccgtaagtgttcctccacaccgaattcaaggggtg

SEQ ID NO: 250894 - DNA, 50 bp, Artificial
  Synthetic oligonucleotide
caagcataacccccaccaccgtacaccggcagttcacgacttcccccgcc

SEQ ID NO: 250895 - DNA, 50 bp, Artificial
  Synthetic oligonucleotide
atccagttaaacaacctccctccggcctgcggcccccgtcccagaaggga

SEQ ID NO: 250896 - DNA, 50 bp, Artificial
  Synthetic oligonucleotide
atacggggtcccgaacctgggcatcagggtttgcaacgcgcaaggctccc

SEQ ID NO: 250897 - DNA, 50 bp, Artificial
  Synthetic oligonucleotide
ggaccggctaggacgcccgtaagcggttcgcccggtgtctacccttggcg

SEQ ID NO: 250898 - DNA, 50 bp, Artificial
  Synthetic oligonucleotide
agtgggttgcggtcctaatcccggcggacttcacggctgtgggggcgtac

SEQ ID NO: 250899 - DNA, 50 bp, Artificial
  Synthetic oligonucleotide
cacccccagtacggccaggatgcctgtgagcgtgctgtagctcatcaggt

SEQ ID NO: 250900 - DNA, 50 bp, Artificial
  Synthetic oligonucleotide
agtagccgcttggagggattatagcatggccactccggtcggggctacgg

SEQ ID NO: 250901 - DNA, 55 bp, Artificial
  Synthetic oligonucleotide
cgctggctcctggcctacccgagcctcacccggggcgtgcgcaaggaacctccct

SEQ ID NO: 250902 - DNA, 50 bp, Artificial
  Synthetic oligonucleotide
cacgttctgatccagttaaacaacctccctccggcctgcggcccccgtcc

SEQ ID NO: 250903 - DNA, 50 bp, Artificial
  Synthetic oligonucleotide
agaagcttcgcaggaacctccagcaggggccctcgttccgaccagaagga

SEQ ID NO: 250904 - DNA, 50 bp, Artificial
  Synthetic oligonucleotide
taaggaaccagctcacctgtccaaaactctggattaactggacttgttga

SEQ ID NO: 250905 - DNA, 50 bp, Artificial
  Synthetic oligonucleotide
agaaacgctccggaattggcttttggaggtgtaccggtgactcccctttt

SEQ ID NO: 250906 - DNA, 50 bp, Artificial
  Synthetic oligonucleotide
ctggtgcatacctgcatgtcgtggtatactgtgtcttgtcaataggcgga

SEQ ID NO: 250907 - DNA, 50 bp, Artificial
  Synthetic oligonucleotide
actccaaggccgcatatcggtcaagtctgcccgaggggatcccggttgga

SEQ ID NO: 250908 - DNA, 50 bp, Artificial
  Synthetic oligonucleotide
actccaaaccgtgcttgggttgagggatcctggggcctacgaggggcgta

SEQ ID NO: 250909 - DNA, 50 bp, Artificial
  Synthetic oligonucleotide
ctgggatcttatcgaagagctaacggggagcggggtgaccttcattctga

SEQ ID NO: 250910 - DNA, 50 bp, Artificial
  Synthetic oligonucleotide
cccgcctaccggcggcgaaagaagcgtctcagaacggggagtcgtcaccc

SEQ ID NO: 250911 - DNA, 50 bp, Artificial
  Synthetic oligonucleotide
acgtaggccacggcgagacccctcttccggtcctttgagcgggtctggac

SEQ ID NO: 250912 - DNA, 50 bp, Artificial
  Synthetic oligonucleotide
agggggtaagcgcccgccctcgggtttcgcggcccgggtctatccggcca

SEQ ID NO: 250913 - DNA, 49 bp, Artificial
  Synthetic oligonucleotide
cgctcaaaccctcgggtactaccaacttcccctcgggcctcccaaaacc

SEQ ID NO: 250914 - DNA, 50 bp, Artificial
  Synthetic oligonucleotide
acggttctcgaagtccggacgcagccagtacttcacccccgggcgcacgc

SEQ ID NO: 250915 - DNA, 50 bp, Artificial
  Synthetic oligonucleotide
ctgagcagaacggtgccgtagcgcacccccgagaagggccacaataagtg

SEQ ID NO: 250916 - DNA, 50 bp, Artificial
  Synthetic oligonucleotide
acgggtgagggtatccacctggataaggtcgccagggtgacccacctcgt

SEQ ID NO: 250917 - DNA, 50 bp, Artificial
  Synthetic oligonucleotide
acgggcccaggcaaaaagcgggtatcccggttaccaatccgcgccttaaa

SEQ ID NO: 250918 - DNA, 50 bp, Artificial
  Synthetic oligonucleotide
cccgtcccgagtaactgcctaggccagcgagccgctacggacttttgaac

SEQ ID NO: 250919 - DNA, 50 bp, Artificial
  Synthetic oligonucleotide
acggcgttcgtatgcggcctcagcgcactctgttgggaattcgcttcgtt

SEQ ID NO: 250920 - DNA, 50 bp, Artificial
  Synthetic oligonucleotide
acgctcacaggcatcctggccgtactgggggtggtgttacgctttcggat

SEQ ID NO: 250921 - DNA, 50 bp, Artificial
  Synthetic oligonucleotide
acgcctcgagcctatgggccgctagccttgtggggtcctccggttagggt

SEQ ID NO: 250922 - DNA, 50 bp, Artificial
  Synthetic oligonucleotide
ctcgacccccgaagtgccaataaagccggctgagtcccactccggaaaga

SEQ ID NO: 250923 - DNA, 50 bp, Artificial
  Synthetic oligonucleotide
acgcacgacgccctagggttttgccttgtcttgctcggtggctgcgggtt

SEQ ID NO: 250924 - DNA, 56 bp, Artificial
  Synthetic oligonucleotide
cgccagtttgaaaatctcccctttgtccgtcagggcatggatcgagccaccgggga

SEQ ID NO: 250925 - DNA, 50 bp, Artificial
  Synthetic oligonucleotide
agcgcgggcggggtatcccctggtccggtgatggacgcccttcaggtggg

SEQ ID NO: 250926 - DNA, 50 bp, Artificial
  Synthetic oligonucleotide
agcgcccttcggctaccatgtaccggatacgcaaaccacgctcgtccgca

SEQ ID NO: 250927 - DNA, 50 bp, Artificial
  Synthetic oligonucleotide
agcgcaggaatccctaggaccccaagccgtaagaccaccttgaggcttga

SEQ ID NO: 250928 - DNA, 50 bp, Artificial
  Synthetic oligonucleotide
ccaccaccgtacaccggcagttcacgacttcccccgccggagcccccagg

SEQ ID NO: 250929 - DNA, 50 bp, Artificial
  Synthetic oligonucleotide
agccgcctccttcgtgggcgaatagccccgccaagggccaaccgtccgct

SEQ ID NO: 250930 - DNA, 50 bp, Artificial
  Synthetic oligonucleotide
gggttggtccacgactcacgcagtttggtccccgacgctggttccagaag

SEQ ID NO: 250931 - DNA, 50 bp, Artificial
  Synthetic oligonucleotide
agcccccgagtgtggtgacgtagacacgttccccatccgtaaaggcagcg

SEQ ID NO: 250932 - DNA, 50 bp, Artificial
  Synthetic oligonucleotide
agccccatccgcttgctcaggtacccgcgccacgcctcgggaagctcagg

SEQ ID NO: 250933 - DNA, 50 bp, Artificial
  Synthetic oligonucleotide
gaagtcgcactgcgacccggtataggacccgagcgccatgaactgcgtta

SEQ ID NO: 250934 - DNA, 50 bp, Artificial
  Synthetic oligonucleotide
agcatgggcgtagaatgagggcgaggtggcacaaaccgggtttaagcccc

SEQ ID NO: 250935 - DNA, 54 bp, Artificial
  Synthetic oligonucleotide
cgcatggaccaggacctgatccccagggcggacggggtaggtgtttttcagaag

SEQ ID NO: 250936 - DNA, 50 bp, Artificial
  Synthetic oligonucleotide
agcacgccgcggagcgtatggaaacgctaccagccgaacgggtacagccc

SEQ ID NO: 250937 - DNA, 50 bp, Artificial
  Synthetic oligonucleotide
ccaggtcaagtcgagcctccctagcgggtccagtttacttcaggccgcta

SEQ ID NO: 250938 - DNA, 50 bp, Artificial
  Synthetic oligonucleotide
agattcggtggagcgtacccggtatacccgccctgccgttgggccggaaa

SEQ ID NO: 250939 - DNA, 50 bp, Artificial
  Synthetic oligonucleotide
agatggtgcgggtcccaaacaggaaaaacgaggggcctgacgctcttggg

SEQ ID NO: 250940 - DNA, 50 bp, Artificial
  Synthetic oligonucleotide
agaggcggatacctacgtacgccttcaggccacccagaccaatccccctt

SEQ ID NO: 250941 - DNA, 50 bp, Artificial
  Synthetic oligonucleotide
ccccaagtggtgccgaggcccctcctggtggaggtaagccggtccgggct

SEQ ID NO: 250942 - DNA, 50 bp, Artificial
  Synthetic oligonucleotide
gtctgatttatccaggcagagccaatctccacatgcccgaagtcctttgt

SEQ ID NO: 250943 - DNA, 50 bp, Artificial
  Synthetic oligonucleotide
agacgggcacgggcgaagaggagcatcatgcgccagactgcggtcaggta

SEQ ID NO: 250944 - DNA, 50 bp, Artificial
  Synthetic oligonucleotide
agaccgaagggatggcgacgagttgggcaagtgtctccttcgcgtaggta

SEQ ID NO: 250945 - DNA, 50 bp, Artificial
  Synthetic oligonucleotide
ccccgtccttttggtcccattgagatttacctcagcgactactacgatct

SEQ ID NO: 250946 - DNA, 53 bp, Artificial
  Synthetic oligonucleotide
gcccccctagaccgcataggcttgccggggatcccgggatgacctgcgggttt

SEQ ID NO: 250947 - DNA, 50 bp, Artificial
  Synthetic oligonucleotide
agaccctgccgcgttagaacccgccttttgtttgcaactgcgaacccggg

SEQ ID NO: 250948 - DNA, 59 bp, Artificial
  Synthetic oligonucleotide
gcaggctcgcgggtgtccccgaacgcaccatccgtgagaaaggcttagagttgctgtcc

SEQ ID NO: 250949 - DNA, 57 bp, Artificial
  Synthetic oligonucleotide
caccaccgggatcgataaccttgacgtcgagagcccagaagtcgcactgcgacccgg

SEQ ID NO: 250950 - DNA, 56 bp, Artificial
  Synthetic oligonucleotide
gcagataggccagtacaaagtccggtaccatccggcctccttcctataaaagattc

SEQ ID NO: 250951 - DNA, 58 bp, Artificial
  Synthetic oligonucleotide
cacgaacatacttccagactaacagagtctgtaagttcggtagtctgtaagtctggaa

SEQ ID NO: 250952 - DNA, 56 bp, Artificial
  Synthetic oligonucleotide
gcacctgcggggaagcggcaaggggaagagcccccaggtcaggctcgtggaggtcc

SEQ ID NO: 250953 - DNA, 53 bp, Artificial
  Synthetic oligonucleotide
gcaaagggcctcgagcccttgttccgggagaggaccgggctcctctttgaccc

SEQ ID NO: 250954 - DNA, 60 bp, Artificial
  Synthetic oligonucleotide
ggccaggtgcgtatataatggccttcgataggaggtcacatgcaaacgatccacgtacac

SEQ ID NO: 250955 - DNA, 52 bp, Artificial
  Synthetic oligonucleotide
gatacgccgccctgtgggagcggttggtaggtcccctgccccgggatccccg

SEQ ID NO: 250956 - DNA, 56 bp, Artificial
  Synthetic oligonucleotide
cactatgcggtgctctttggggtcgtaagaccctttcaggcgcgggtgcgaagtag

SEQ ID NO: 250957 - DNA, 58 bp, Artificial
  Synthetic oligonucleotide
cagcttacctaggttcctcataccgcctcctttcgtggcactatcgcagtggccgagg

SEQ ID NO: 250958 - DNA, 55 bp, Artificial
  Synthetic oligonucleotide
gaggattttcacgggccagaggccacgggggatgcaggccctcccttcaggaaag

SEQ ID NO: 250959 - DNA, 60 bp, Artificial
  Synthetic oligonucleotide
gagcgtattgtctcgaatcccggcctaccgctcgggaggtcgtatgccatttgcgcagag

SEQ ID NO: 250960 - DNA, 58 bp, Artificial
  Synthetic oligonucleotide
gactattgtcggttttctgatggaggaagttcatggactctctatttcagttctaccc

SEQ ID NO: 250961 - DNA, 57 bp, Artificial
  Synthetic oligonucleotide
gacctcagcttctcggggtactccgtcacggtgccggggagcgcaaggatcccctca

SEQ ID NO: 250962 - DNA, 59 bp, Artificial
  Synthetic oligonucleotide
cccattgctgatgtccaaaccaagatttctccaagggtgcaaatagtcgtccctggtga

SEQ ID NO: 250963 - DNA, 56 bp, Artificial
  Synthetic oligonucleotide
ctttaggtaagcctaaactcagacttgacctatatgcggctcctggagtaaagagg

SEQ ID NO: 250964 - DNA, 54 bp, Artificial
  Synthetic oligonucleotide
ccccgcccgcacgcaattttcatcgtccaggacggcaaaaacactgattttccc

SEQ ID NO: 250965 - DNA, 59 bp, Artificial
  Synthetic oligonucleotide
agggtttaggctagcacacccgcccgagagtgtcaagataagggcatgcgcatcgtacc

SEQ ID NO: 250966 - DNA, 50 bp, Artificial
  Synthetic oligonucleotide
cttgcaaaccccctctcccggcccctaggggcgaggaggggcaaaacgaa

SEQ ID NO: 250967 - DNA, 48 bp, Artificial
  Synthetic oligonucleotide
cttgcaaaccccctcccggcccctaggggcaaaacgaagatcccccgg

SEQ ID NO: 250968 - DNA, 53 bp, Artificial
  Synthetic oligonucleotide
cttatcggcctttctagcttgttcagggaaggaggtctggaggtcttttcccg

SEQ ID NO: 250969 - DNA, 60 bp, Artificial
  Synthetic oligonucleotide
ctgtcaatgggacgctgatgaccggtccttcgtgctctagcctgggagccctgaagacta

SEQ ID NO: 250970 - DNA, 58 bp, Artificial
  Synthetic oligonucleotide
tccccaagcggctgggctctcgcctggagaacgtcttgtgcggcgtaaagcggcggtc

SEQ ID NO: 250971 - DNA, 52 bp, Artificial
  Synthetic oligonucleotide
tcctctctctcccggggaaggccttctaggccctttagaggccgggagaagg

SEQ ID NO: 250972 - DNA, 56 bp, Artificial
  Synthetic oligonucleotide
tttccccgggaagagatccaggtcgggccgtaatatggagccatggctagaaccaa

SEQ ID NO: 250973 - DNA, 60 bp, Artificial
  Synthetic oligonucleotide
tccttcagctcatcgtggagattgaggatctggaagggcgaaagcaccttcgccacttcc

SEQ ID NO: 250974 - DNA, 60 bp, Artificial
  Synthetic oligonucleotide
accgaagtggcttgctcggagccgctagatccgggcgttcgcaagcttcagtacatagaa

SEQ ID NO: 250975 - DNA, 60 bp, Artificial
  Synthetic oligonucleotide
tcgagctttcgcccgagtgcaacggcagtaagtattgacaagccgctcgagttatgcgtt

SEQ ID NO: 250976 - DNA, 57 bp, Artificial
  Synthetic oligonucleotide
agtacacgcccttttacttacggaggcactagtcactacacttatgcgcgaaattgc

SEQ ID NO: 250977 - DNA, 60 bp, Artificial
  Synthetic oligonucleotide
tcgcaaagagctttcaggaaaggtgctacttgatttgaacacagttctctttgatgaaat

SEQ ID NO: 250978 - DNA, 54 bp, Artificial
  Synthetic oligonucleotide
tcgcctctaggacgaagggggtgagtgtgtagggggacactacacaccaccccc

SEQ ID NO: 250979 - DNA, 57 bp, Artificial
  Synthetic oligonucleotide
tcgcctggagaacgtcttgtgcggcgtaaagcggcggtccaacggcaggagggcgga

SEQ ID NO: 250980 - DNA, 56 bp, Artificial
  Synthetic oligonucleotide
tcggccctacctgggagaggaccaaagcctagagcctcaagggtcgtttggctgtg

SEQ ID NO: 250981 - DNA, 56 bp, Artificial
  Synthetic oligonucleotide
tcgtgccaggggaaaagttacccttagccttacgcacattgaacacgctgaatccc

SEQ ID NO: 250982 - DNA, 51 bp, Artificial
  Synthetic oligonucleotide
accacagaccactgcccaggttcgggtggattataccacccaaaccccggg

SEQ ID NO: 250983 - DNA, 58 bp, Artificial
  Synthetic oligonucleotide
tttactttcgagaacacatagaggtgcggaaatgatacgttacgttctaacacacatg

SEQ ID NO: 250984 - DNA, 55 bp, Artificial
  Synthetic oligonucleotide
tttactatctaggcgaggtcttccccggaagaaaggtgagcgctgtggttcttcg

SEQ ID NO: 250985 - DNA, 57 bp, Artificial
  Synthetic oligonucleotide
tctcgtgcatctcctcctttcacgcgcgcccgcccagcggtttccccctgtacggcc

SEQ ID NO: 250986 - DNA, 48 bp, Artificial
  Synthetic oligonucleotide
ttcctacgaccccaacctccggcgttcccctacccccagggaaaggaa

SEQ ID NO: 250987 - DNA, 55 bp, Artificial
  Synthetic oligonucleotide
cccttgagtcagagtatacctgacgggatcgccttcggttttgtcgcttatccgg

SEQ ID NO: 250988 - DNA, 55 bp, Artificial
  Synthetic oligonucleotide
aagttgtgcctggggtcgcttcgctccctggtcacgctatgtagggagggttggg

SEQ ID NO: 250989 - DNA, 55 bp, Artificial
  Synthetic oligonucleotide
ccagatcccgtatccatagtaaagcggatcaccaacttctgtgtgaggggtgagt

SEQ ID NO: 250990 - DNA, 55 bp, Artificial
  Synthetic oligonucleotide
gattgtcgccgggtgtatccttgggtaggataagaagaaaccggatgatgcccgg

SEQ ID NO: 250991 - DNA, 54 bp, Artificial
  Synthetic oligonucleotide
attcccttcggggttgtggggcgtcctgtatggagtcagaaaagcgaagcgtag

SEQ ID NO: 250992 - DNA, 55 bp, Artificial
  Synthetic oligonucleotide
agggtccggtaaaggcaccactgcgtccatgtggggaaagcacgggaatggtggc

SEQ ID NO: 250993 - DNA, 55 bp, Artificial
  Synthetic oligonucleotide
gcgatcttcgacccggcaagacacagcgcaattcggatgattgttcccaaagaaa

SEQ ID NO: 250994 - DNA, 55 bp, Artificial
  Synthetic oligonucleotide
ggagatccccgggtgtgccaacgcttgccttcccacatgatccgccacatggcta

SEQ ID NO: 250995 - DNA, 55 bp, Artificial
  Synthetic oligonucleotide
ggcaggccgttgattaatcgggaaattgagcggtgggagggagtcgtgtcctgcc

SEQ ID NO: 250996 - DNA, 55 bp, Artificial
  Synthetic oligonucleotide
gggacagccactcccgtcggaggtggaaccattccggtcgacatcgcaaaatagg

SEQ ID NO: 250997 - DNA, 55 bp, Artificial
  Synthetic oligonucleotide
gtagtggagcaatggttccggggtgattgtttacgatgagaaagatcaaattggc

SEQ ID NO: 250998 - DNA, 54 bp, Artificial
  Synthetic oligonucleotide
ccgccgaagtccgcattatccacctggttgggaaaatcccttttgagatcctcg

SEQ ID NO: 250999 - DNA, 55 bp, Artificial
  Synthetic oligonucleotide
tcattcattgccgtccggccatccaagtatacgcacagttcagcaactgtcggct

SEQ ID NO: 251000 - DNA, 55 bp, Artificial
  Synthetic oligonucleotide
acggagtgacctaggcgagacttgtgctggtgagtgcatagcgagaccaggggcg

SEQ ID NO: 251001 - DNA, 55 bp, Artificial
  Synthetic oligonucleotide
tggctgaccgtggtcaaatacacccaggtgatggagggttccatcgtatagaaca

SEQ ID NO: 251002 - DNA, 55 bp, Artificial
  Synthetic oligonucleotide
ttccctcccggactgatttactgcatgatgcgccgtacactgtagatatcgggca

SEQ ID NO: 251003 - DNA, 53 bp, Artificial
  Synthetic oligonucleotide
aggattacattcagtgcgctattaggaatcatggaggttctccacgtccgaag

SEQ ID NO: 251004 - DNA, 53 bp, Artificial
  Synthetic oligonucleotide
gccaaggaggtccaatatgaattcaaaccaactgttcaactggggacatcgga

SEQ ID NO: 251005 - DNA, 53 bp, Artificial
  Synthetic oligonucleotide
aaactccacttggatcgtcgacgactcttaaaccttgggaacttcgatagccc

SEQ ID NO: 251006 - DNA, 52 bp, Artificial
  Synthetic oligonucleotide
tcctgaccattgtacccaaggtgattcagccgggagagtcagcctatgtagg

SEQ ID NO: 251007 - DNA, 51 bp, Artificial
  Synthetic oligonucleotide
cttcgctattatgactcccatacccatggagaggtcctcagtcgtgtcgtg

SEQ ID NO: 251008 - DNA, 51 bp, Artificial
  Synthetic oligonucleotide
aagtctcgcctaggtcgctccgctctctggtctcgctatgtacccatgggg

SEQ ID NO: 251009 - DNA, 53 bp, Artificial
  Synthetic oligonucleotide
cctcgttaccccgacccatgtgagaattccgtacaaacaacccacgaacactc

SEQ ID NO: 251010 - DNA, 51 bp, Artificial
  Synthetic oligonucleotide
caagtcactccatgtgaaaccccaccctccctacatagcgagaccaggtgc

SEQ ID NO: 251011 - DNA, 51 bp, Artificial
  Synthetic oligonucleotide
aagtctcgccaaggtcactccgttcccggtctcgctatgcactcaccagca

SEQ ID NO: 251012 - DNA, 50 bp, Artificial
  Synthetic oligonucleotide
aaaccgatcacggacctcagaggcgggtttgacggcagttcccaggtgaa

SEQ ID NO: 251013 - DNA, 50 bp, Artificial
  Synthetic oligonucleotide
aaacgcgatgacggagaccagtaaggccggctgaacgcccagagagcaga

SEQ ID NO: 251014 - DNA, 50 bp, Artificial
  Synthetic oligonucleotide
aaactccatcccggggttcccgcctctcgttgcccgctttcatgggatcc

SEQ ID NO: 251015 - DNA, 50 bp, Artificial
  Synthetic oligonucleotide
aaagaggtcgctctcccgcgcagcccgataatactcccgggcttgcttga

SEQ ID NO: 251016 - DNA, 50 bp, Artificial
  Synthetic oligonucleotide
aaagatcccggtagcgacctcccgtcacctttccgatccaccgggaagca

SEQ ID NO: 251017 - DNA, 50 bp, Artificial
  Synthetic oligonucleotide
aaaggtcgctttgcacccatagggcacaagtctcgcctggtccgcttcgc

SEQ ID NO: 251018 - DNA, 50 bp, Artificial
  Synthetic oligonucleotide
aacagaccggtgatccagcaaaccccgaacagtacgtgggccccgtgggt

SEQ ID NO: 251019 - DNA, 50 bp, Artificial
  Synthetic oligonucleotide
aagaccgctgcttgcgcggcctaaaagtcaacgggcattccaccgaagag

SEQ ID NO: 251020 - DNA, 55 bp, Artificial
  Synthetic oligonucleotide
cgaatatttccccggatgttggattgtaaaggctcgggtatactggcgccatctg

SEQ ID NO: 251021 - DNA, 50 bp, Artificial
  Synthetic oligonucleotide
aagccgccggcagtgctccccggtctcgctatgcactcaccagcacaagt

SEQ ID NO: 251022 - DNA, 50 bp, Artificial
  Synthetic oligonucleotide
aaggagcctcgtgcatgtgcattccacagaggggcgcgttcacctgacat

SEQ ID NO: 251023 - DNA, 50 bp, Artificial
  Synthetic oligonucleotide
aagtctcgcctaggtcactccgttcccggtctcgctatgcagggagggtg

SEQ ID NO: 251024 - DNA, 50 bp, Artificial
  Synthetic oligonucleotide
aatcaggcgggggaaagcaaggccgtgtcaaccggcatgttgattcggga

SEQ ID NO: 251025 - DNA, 50 bp, Artificial
  Synthetic oligonucleotide
aatccgcttatttcgccccggaatcagtgcgtcggaccacccgcagactg

SEQ ID NO: 251026 - DNA, 50 bp, Artificial
  Synthetic oligonucleotide
aattccccgggattttctgtccagcacctatcgcgttgcacagcgggtgc

SEQ ID NO: 251027 - DNA, 50 bp, Artificial
  Synthetic oligonucleotide
acatcgcaggcgagggttgcagacgacccttttggggcgatcacacccga

SEQ ID NO: 251028 - DNA, 50 bp, Artificial
  Synthetic oligonucleotide
acatgatgtcagcacgaccgatcctcctttcccctcgccaggcgtacccc

SEQ ID NO: 251029 - DNA, 50 bp, Artificial
  Synthetic oligonucleotide
acatggagggatcaataaccgggaatggccggttcacggaaaggcgggga

SEQ ID NO: 251030 - DNA, 50 bp, Artificial
  Synthetic oligonucleotide
accacgcgaccgttgcacccatagggcacaagtctcgccaaggtctctcc

SEQ ID NO: 251031 - DNA, 55 bp, Artificial
  Synthetic oligonucleotide
ctcatcggaagagcccagcttcggtccattcatggtgtaggtactgacgagcccg

SEQ ID NO: 251032 - DNA, 50 bp, Artificial
  Synthetic oligonucleotide
acccacagggcacaagtctcgccaaggtcactcccgttcccggtctcgct

SEQ ID NO: 251033 - DNA, 50 bp, Artificial
  Synthetic oligonucleotide
acccctggcgctgacaggatgtctgttcggccctgaaaacgagtcacccc

SEQ ID NO: 251034 - DNA, 50 bp, Artificial
  Synthetic oligonucleotide
acccgcccaacgcccctgttccaagtaacacgagccccgcaattgtgtag

SEQ ID NO: 251035 - DNA, 50 bp, Artificial
  Synthetic oligonucleotide
accggggaggaacgaccccaggcgcgacttgtgccctatgggtgcaaccg

SEQ ID NO: 251036 - DNA, 50 bp, Artificial
  Synthetic oligonucleotide
accgtgcccgggagcaactatgaagggggttggaacggcacttccatggc

SEQ ID NO: 251037 - DNA, 50 bp, Artificial
  Synthetic oligonucleotide
acgcaaccctcctatctttttccgttgacaggggagcgggtgacccccga

SEQ ID NO: 251038 - DNA, 50 bp, Artificial
  Synthetic oligonucleotide
acggatttctttcaccgggtgacccatcggctccgctgtcatatagatgg

SEQ ID NO: 251039 - DNA, 55 bp, Artificial
  Synthetic oligonucleotide
ctcgcttgcccacccgttgatagtaaccccgcatcatctcaccgtaggaagcgat

SEQ ID NO: 251040 - DNA, 55 bp, Artificial
  Synthetic oligonucleotide
aatcgcttatgagactattcagttggataacggggctcttccattgctgactccc

SEQ ID NO: 251041 - DNA, 55 bp, Artificial
  Synthetic oligonucleotide
ctgtggtaccacatacgacgtggccggtgtggattatgggtcgaactctgaaccg

SEQ ID NO: 251042 - DNA, 55 bp, Artificial
  Synthetic oligonucleotide
ccattcccctctatccaccggaggaatgggcgcaagcacttcagtacgacagccg

SEQ ID NO: 251043 - DNA, 58 bp, Artificial
  Synthetic oligonucleotide
gccaggctctttctgagcgagcggtaggacacttcaaggaagtataagaaacccgcgc

SEQ ID NO: 251044 - DNA, 56 bp, Artificial
  Synthetic oligonucleotide
cgacagttgtggggctttgggtagctattgtgctatggcgtaccggccctttagga

SEQ ID NO: 251045 - DNA, 54 bp, Artificial
  Synthetic oligonucleotide
gctcggttattatctcaaaaggctgcactaacctcgggtttgacaaaaccaccg

SEQ ID NO: 251046 - DNA, 55 bp, Artificial
  Synthetic oligonucleotide
gctgctatatcaacccctgtgtgaaaacctccccacctagggccaaatctcgagg

SEQ ID NO: 251047 - DNA, 55 bp, Artificial
  Synthetic oligonucleotide
gctggccgcggtaaggcgtcagttggctttagaacttggcctgtacgttcggccc

SEQ ID NO: 251048 - DNA, 55 bp, Artificial
  Synthetic oligonucleotide
gcttcgatcttctgccattctcatacagggtgttaaattaagaagcgattccgcg

SEQ ID NO: 251049 - DNA, 55 bp, Artificial
  Synthetic oligonucleotide
ggagtgccccaactacaagtagaaacatccccgctggccagacacccacaagtcc

SEQ ID NO: 251050 - DNA, 55 bp, Artificial
  Synthetic oligonucleotide
ctatacatgccaatcgcagcccctaatgagtcgaaatccataaagtcgtgtccca

SEQ ID NO: 251051 - DNA, 55 bp, Artificial
  Synthetic oligonucleotide
ctataggaagcaatcagcgtaaatactttgatatggacatatgctaccaagctac

SEQ ID NO: 251052 - DNA, 55 bp, Artificial
  Synthetic oligonucleotide
ctccgcccaggttgtttgagaccgcttctggaattttaaacagcataggcgttca

SEQ ID NO: 251053 - DNA, 55 bp, Artificial
  Synthetic oligonucleotide
ggcggagaagtacctttaggcgatcgaagcaactcagcttttatgggtacggtag

SEQ ID NO: 251054 - DNA, 55 bp, Artificial
  Synthetic oligonucleotide
ctctatggtcgatggtcaccggttgtcgccccgactggaaacctcggtgagtaag

SEQ ID NO: 251055 - DNA, 60 bp, Artificial
  Synthetic oligonucleotide
tatgccccctaaccgctgttggtcattcgtttctgccaggctctttctgagcgagcggta

SEQ ID NO: 251056 - DNA, 55 bp, Artificial
  Synthetic oligonucleotide
ggccgcaccggtggggcactagaggtgtatgaaaccttgagaaattttggatgcc

SEQ ID NO: 251057 - DNA, 55 bp, Artificial
  Synthetic oligonucleotide
ctgccgagacaaatcgctactgtctgctaaaacaattcgccattggctcatcgag

SEQ ID NO: 251058 - DNA, 55 bp, Artificial
  Synthetic oligonucleotide
ctgccggttactccggatatgtaagcgaaactggcagtcagttaattgatgagct

SEQ ID NO: 251059 - DNA, 55 bp, Artificial
  Synthetic oligonucleotide
ctgtaagtttcaagcccataggaggcctgccttatagaagaaggaccaaagcggg

SEQ ID NO: 251060 - DNA, 55 bp, Artificial
  Synthetic oligonucleotide
ctgttactcacaaatgatggggagatagccaatatcttaatgcatcctcgacatg

SEQ ID NO: 251061 - DNA, 55 bp, Artificial
  Synthetic oligonucleotide
cttaacgccggcactactccaggagtatatatcatccactcggttttcacatccc

SEQ ID NO: 251062 - DNA, 55 bp, Artificial
  Synthetic oligonucleotide
cttcgggaattcctaattccatcctatcaagtcttatagtttgtacacttactcc

SEQ ID NO: 251063 - DNA, 55 bp, Artificial
  Synthetic oligonucleotide
cttctccacctgaatcgccgcagtgttgctacctacggggagagacaaagcggtg

SEQ ID NO: 251064 - DNA, 55 bp, Artificial
  Synthetic oligonucleotide
gaacggatacctgaatgtttggctgacgagtaacccttggcaaggagaatggcag

SEQ ID NO: 251065 - DNA, 55 bp, Artificial
  Synthetic oligonucleotide
gaagatagggacagagagtgtaatagacaggatattcataacagggatatccccg

SEQ ID NO: 251066 - DNA, 58 bp, Artificial
  Synthetic oligonucleotide
cttgtgggtgtctggccagcggggatgtttctacttgtagttggggcactcctcactg

SEQ ID NO: 251067 - DNA, 55 bp, Artificial
  Synthetic oligonucleotide
gaagctgtagtacccctataagggcaagaccctgaatacgagtaagaagctcccc

SEQ ID NO: 251068 - DNA, 55 bp, Artificial
  Synthetic oligonucleotide
gaatcagaagcggttagcgtgacccttgcgggcaggagaagtaatgcgggcgtac

SEQ ID NO: 251069 - DNA, 55 bp, Artificial
  Synthetic oligonucleotide
gaattaagtcctaccggcagtgtatacatatcatcactagacgtcaagaggctag

SEQ ID NO: 251070 - DNA, 55 bp, Artificial
  Synthetic oligonucleotide
gacgttcgtattcataaccggtaagccagcggtaaggagtatacgtcacctcgcc

SEQ ID NO: 251071 - DNA, 55 bp, Artificial
  Synthetic oligonucleotide
gagagtctttcccggctatttggttgtcaaagagcgatcctgtggccctacaagc

SEQ ID NO: 251072 - DNA, 53 bp, Artificial
  Synthetic oligonucleotide
gagcggggtaaggttttggtagctcgcggaggaattaatctcaagttagaacg

SEQ ID NO: 251073 - DNA, 55 bp, Artificial
  Synthetic oligonucleotide
gagtcaggggtcagcttccagcatccttgcctctggcctcgcttttgtctctcag

SEQ ID NO: 251074 - DNA, 54 bp, Artificial
  Synthetic oligonucleotide
gagtccgggaaaagaaaccttgcgtacggtcctacagatcttgacggaactgga

SEQ ID NO: 251075 - DNA, 55 bp, Artificial
  Synthetic oligonucleotide
gataagtgtacgcccaaaagtcacagaacatccaatacgctactgcgtttgtacg

SEQ ID NO: 251076 - DNA, 55 bp, Artificial
  Synthetic oligonucleotide
gatcgctgtgtgggttgccgttcctgtgagttagcttgtgcggtaagtcacacag

SEQ ID NO: 251077 - DNA, 60 bp, Artificial
  Synthetic oligonucleotide
ggatataagccaatgtgattttacgcataaacaagtagagtgttataagcgatatactgc

SEQ ID NO: 251078 - DNA, 55 bp, Artificial
  Synthetic oligonucleotide
gatgagcggattcaaccgttccggtatagtccaagcactccattatggagccgac

SEQ ID NO: 251079 - DNA, 55 bp, Artificial
  Synthetic oligonucleotide
gatgcctatataattgctgagaggcttcgctttggacatcttactccatacagcc

SEQ ID NO: 251080 - DNA, 55 bp, Artificial
  Synthetic oligonucleotide
acccctgataggacgaaatcctcttgttcgttgaagtattcctccagtacctcgc

SEQ ID NO: 251081 - DNA, 55 bp, Artificial
  Synthetic oligonucleotide
acctccagatacagcccgggttacggcgatttgcccctttgccttcaaggcgata

SEQ ID NO: 251082 - DNA, 55 bp, Artificial
  Synthetic oligonucleotide
tacgccttcacaactccaataacttcgtcaatcattgtaggccctataccggcac

SEQ ID NO: 251083 - DNA, 55 bp, Artificial
  Synthetic oligonucleotide
tacgagctgtttgaatgccaggaccagagtcaaaatctgtatgaccgcttagctc

SEQ ID NO: 251084 - DNA, 55 bp, Artificial
  Synthetic oligonucleotide
taaacgttgaatccggcttactcaggtttgaaatccacaggaaacttgctccggc

SEQ ID NO: 251085 - DNA, 55 bp, Artificial
  Synthetic oligonucleotide
gttgcttgagttctcctatgacctctccgatgcggtgtatgtaacccggacgggg

SEQ ID NO: 251086 - DNA, 55 bp, Artificial
  Synthetic oligonucleotide
acgttttagaaaccttcgtattgagaagctctacttgcgcggagcgatgacaatc

SEQ ID NO: 251087 - DNA, 55 bp, Artificial
  Synthetic oligonucleotide
actatccattgatggccctattgtaccagttgtcgctgattacattgaaagcggt

SEQ ID NO: 251088 - DNA, 54 bp, Artificial
  Synthetic oligonucleotide
ctacggtacaacctacctccggtaggggagggtataaatcagtgatgtgggaca

SEQ ID NO: 251089 - DNA, 55 bp, Artificial
  Synthetic oligonucleotide
gtggttttacaggaagtactgggccattacggtcatcaggtgactgtcgacctgg

SEQ ID NO: 251090 - DNA, 55 bp, Artificial
  Synthetic oligonucleotide
actctggtattctaacatggacagggcacccggccacacaagtaggtttcgggca

SEQ ID NO: 251091 - DNA, 55 bp, Artificial
  Synthetic oligonucleotide
gtgggtgaaataggcctatgctccggaccttgttcggctaagtcggatcggttct

SEQ ID NO: 251092 - DNA, 55 bp, Artificial
  Synthetic oligonucleotide
gtggaaagatagccggttgatgcagggaaggggtaggacgatgaatggagcgacc

SEQ ID NO: 251093 - DNA, 55 bp, Artificial
  Synthetic oligonucleotide
gtgcctaatacgggaaggtgtaaagagatatttgtcccgggagcagaggttatcc

SEQ ID NO: 251094 - DNA, 54 bp, Artificial
  Synthetic oligonucleotide
agaaccgtaagaattattggtacaggtatcggcccaatataaccgttgccaata

SEQ ID NO: 251095 - DNA, 55 bp, Artificial
  Synthetic oligonucleotide
gtctgctccaaccttataaagaaccctcgcgtgtaattcattgtgagcttttgct

SEQ ID NO: 251096 - DNA, 55 bp, Artificial
  Synthetic oligonucleotide
gtcgtgtactacctgccgggcatgtcaggaagtctgtccggtatacgtagagcac

SEQ ID NO: 251097 - DNA, 55 bp, Artificial
  Synthetic oligonucleotide
gtccttacgtggtaacaaatgcacacaaacgcttggttcttatgaatgcggattt

SEQ ID NO: 251098 - DNA, 55 bp, Artificial
  Synthetic oligonucleotide
gtatgatcattccctgggctttaggacagccatctaaaacatcggcccggatacc

SEQ ID NO: 251099 - DNA, 57 bp, Artificial
  Synthetic oligonucleotide
ctcgttaagagcatacctcagtccctggacctcaaccggtctggacagggcgtacac

SEQ ID NO: 251100 - DNA, 55 bp, Artificial
  Synthetic oligonucleotide
gtagagactaaagagggcaaaagacttagtattatgtcaggagatgtgtctgtaa

SEQ ID NO: 251101 - DNA, 54 bp, Artificial
  Synthetic oligonucleotide
agaggggccggaagctgcaaaagccctgggaatagtagaccgaagaccaactcg

SEQ ID NO: 251102 - DNA, 55 bp, Artificial
  Synthetic oligonucleotide
agattagccaccattacagctccggagccaagagtactagttgtacaaccgtggg

SEQ ID NO: 251103 - DNA, 55 bp, Artificial
  Synthetic oligonucleotide
tttatgcaaccgaggtctatagccgacatggtcagagcaccatagccttgatacg

SEQ ID NO: 251104 - DNA, 55 bp, Artificial
  Synthetic oligonucleotide
aaaatgctttctacggttccaaaatcgacatttcctgctgtggcatatctatgtc

SEQ ID NO: 251105 - DNA, 54 bp, Artificial
  Synthetic oligonucleotide
aaaccggatttggggctgtttgtccaaggccgcacaaagctgtcgctttaatgg

SEQ ID NO: 251106 - DNA, 55 bp, Artificial
  Synthetic oligonucleotide
ttgcgtgagctgtagcactgcgttcgcggtccggagcaacaactgtaatattagc

SEQ ID NO: 251107 - DNA, 55 bp, Artificial
  Synthetic oligonucleotide
ttctatatctgccagttcggctccgtgaaaaccagtggtcatcatatcgggaatc

SEQ ID NO: 251108 - DNA, 54 bp, Artificial
  Synthetic oligonucleotide
ttcgccccgcgggtactgaacgtccccgatcacattgaactccggaacgtcgac

SEQ ID NO: 251109 - DNA, 53 bp, Artificial
  Synthetic oligonucleotide
aaagcgtaggcgatggggaaccggtagatattccggtaccaccgagggccgca

SEQ ID NO: 251110 - DNA, 60 bp, Artificial
  Synthetic oligonucleotide
gtgtcaagggctgtcaaggcccggcgatagcgtatctttgacacctacatgtccggaggc

SEQ ID NO: 251111 - DNA, 55 bp, Artificial
  Synthetic oligonucleotide
aaaggcgtgtgatattggacgtcattatggaaaatagggataaacatctttcctc

SEQ ID NO: 251112 - DNA, 55 bp, Artificial
  Synthetic oligonucleotide
ttatcgggacctgtcgagcagttaacgccaatggcatctaatcctaacccttgta

SEQ ID NO: 251113 - DNA, 55 bp, Artificial
  Synthetic oligonucleotide
ttacggttctataagcattgcccgaaagcaatcccgggccttcagcttaagcggc

SEQ ID NO: 251114 - DNA, 55 bp, Artificial
  Synthetic oligonucleotide
ttaactttccctcagcggttctcccagcgacaggataaccgcctcggtagcttca

SEQ ID NO: 251115 - DNA, 55 bp, Artificial
  Synthetic oligonucleotide
aactgcatcgccaatgaattagtgggctgcagagtcacagactgccatctgttcc

SEQ ID NO: 251116 - DNA, 55 bp, Artificial
  Synthetic oligonucleotide
aagaatgcgtaaggtaaagtaattgtgtccttgctttgcgaaaacgatgcagtgc

SEQ ID NO: 251117 - DNA, 55 bp, Artificial
  Synthetic oligonucleotide
tgtggaaacaacacctgaacttctggagcttgcctattacacaggcttaggagct

SEQ ID NO: 251118 - DNA, 55 bp, Artificial
  Synthetic oligonucleotide
tgggtgctcccggcactcccggggtagaccgcaaaccaagtcatatgcggaacac

SEQ ID NO: 251119 - DNA, 55 bp, Artificial
  Synthetic oligonucleotide
tgggcaaaggtattagccattatagatagagatagttctgtaagcgctgtagatg

SEQ ID NO: 251120 - DNA, 55 bp, Artificial
  Synthetic oligonucleotide
tgataacttggcccgggagaggattcaagtccaccgtttataccagaaaggttgc

SEQ ID NO: 251121 - DNA, 57 bp, Artificial
  Synthetic oligonucleotide
aaacctcggtatagggcactctgatcacagtgcccctttctccctccgtgctcccaa

SEQ ID NO: 251122 - DNA, 55 bp, Artificial
  Synthetic oligonucleotide
tgacgcttaaggatggcacggctgacgtggggtggtacgagcttgacgttatgaa

SEQ ID NO: 251123 - DNA, 54 bp, Artificial
  Synthetic oligonucleotide
tgaaatctgcggagttttacgggaagtctttggtgagtaccgtcaggaataggg

SEQ ID NO: 251124 - DNA, 51 bp, Artificial
  Synthetic oligonucleotide
aaggccgctggtaaccctggaaaaacgggtagagaaactggccgacaggga

SEQ ID NO: 251125 - DNA, 55 bp, Artificial
  Synthetic oligonucleotide
aattctgatgctccgtttataactttaggctgctgattaaacccatcggcactgt

SEQ ID NO: 251126 - DNA, 55 bp, Artificial
  Synthetic oligonucleotide
acaaagccttatagcacttccgccatctctcgcttcataaaccaagtgtccattc

SEQ ID NO: 251127 - DNA, 55 bp, Artificial
  Synthetic oligonucleotide
acaagtggcgtagaaagcatggcctgctcactgcttgctggaaatatcgacagac

SEQ ID NO: 251128 - DNA, 55 bp, Artificial
  Synthetic oligonucleotide
ggggacgtgatacttctaatatagttagaggattcaatagggcaactcaagctta

SEQ ID NO: 251129 - DNA, 55 bp, Artificial
  Synthetic oligonucleotide
ggtaaaaccacacgggaattaggaactctagaagctggagactatatccaggact

SEQ ID NO: 251130 - DNA, 55 bp, Artificial
  Synthetic oligonucleotide
atcataggtattgaggtcatacccatattcctaactgcttcggcagggtaaaccg

SEQ ID NO: 251131 - DNA, 55 bp, Artificial
  Synthetic oligonucleotide
gggtagtatagaatattctgccgcatttagaaggagtacaggggttatcacattg

SEQ ID NO: 251132 - DNA, 55 bp, Artificial
  Synthetic oligonucleotide
ggaagtgtcaggggttagggcccaccgtagaagtgagtgagtactctaggcgaac

SEQ ID NO: 251133 - DNA, 55 bp, Artificial
  Synthetic oligonucleotide
agcttacaagaatggtaagtgaagctgtcaatatccccgttatagcttctggagg

SEQ ID NO: 251134 - DNA, 55 bp, Artificial
  Synthetic oligonucleotide
atgtgcttacgagtacaccccattgtcagtagaaagcgtgataggagtcttgacg

SEQ ID NO: 251135 - DNA, 55 bp, Artificial
  Synthetic oligonucleotide
atgttgagcacgggtctagctcatatgggaatcggtaaaggctccggagagagcc

SEQ ID NO: 251136 - DNA, 55 bp, Artificial
  Synthetic oligonucleotide
agctgcggcccagtactggcgtcgtttctcccggtcgcctaccatccggggacat

SEQ ID NO: 251137 - DNA, 55 bp, Artificial
  Synthetic oligonucleotide
aggaagcagggtttgacagtggccgatatggatcttctgattggtagcacggcga

SEQ ID NO: 251138 - DNA, 55 bp, Artificial
  Synthetic oligonucleotide
attacttcaggttttggtccgagagttgatccagtatatgggacaatgggttttc

SEQ ID NO: 251139 - DNA, 55 bp, Artificial
  Synthetic oligonucleotide
ggtctgagattcttcacctccgcttacgctacggttcagaatgacatcccctctg

SEQ ID NO: 251140 - DNA, 55 bp, Artificial
  Synthetic oligonucleotide
ggggcgtaggtctcggaaagacacatctcatgcatgctattgggcactatatact

SEQ ID NO: 251141 - DNA, 55 bp, Artificial
  Synthetic oligonucleotide
atcaaagtagtgccccgatgatgattcacgaagaggcaatatatattcatgcggg

SEQ ID NO: 251142 - DNA, 55 bp, Artificial
  Synthetic oligonucleotide
gtaagtaacgaatttcctggacctatactagaagccgttacaccaccacttgata

SEQ ID NO: 251143 - DNA, 55 bp, Artificial
  Synthetic oligonucleotide
gctttttagaccagattataccacaccctaaacccagcgcgagtccgcaaaacaa

SEQ ID NO: 251144 - DNA, 54 bp, Artificial
  Synthetic oligonucleotide
agggccaactagtaccgtgatcagctccgactttcttaaacctactcccacgac

SEQ ID NO: 251145 - DNA, 55 bp, Artificial
  Synthetic oligonucleotide
agtggtgccctcggcaaaaggtacaaactgagaatgacgggaactacagctcccc

SEQ ID NO: 251146 - DNA, 55 bp, Artificial
  Synthetic oligonucleotide
atcgggtaaggtaagctaccgctggtgtaggaattatccccacacttatgacctc

SEQ ID NO: 251147 - DNA, 55 bp, Artificial
  Synthetic oligonucleotide
gtaatgaaacgccatagttgcagatggacaatagaaggtggagacaggatgagtc

SEQ ID NO: 251148 - DNA, 55 bp, Artificial
  Synthetic oligonucleotide
ggggatcctactccaagacagagcggtaggcttaccttaaatccgctagctcata

SEQ ID NO: 251149 - DNA, 55 bp, Artificial
  Synthetic oligonucleotide
atgccaaatctttcaatatcccacctggatgtcattgaaggcggcagttccactg

SEQ ID NO: 251150 - DNA, 55 bp, Artificial
  Synthetic oligonucleotide
caaagggtcattataaccacgccgactatcaggttggaccagttcttaaagtgga

SEQ ID NO: 251151 - DNA, 55 bp, Artificial
  Synthetic oligonucleotide
gtacatgtgcctaatacgggaaggtgtaaagagatatttgtcccgggagcagagg

SEQ ID NO: 251152 - DNA, 55 bp, Artificial
  Synthetic oligonucleotide
caatgcgattaaagagggtagtgtatgtaagacctaaggagcactactgtgacat

SEQ ID NO: 251153 - DNA, 54 bp, Artificial
  Synthetic oligonucleotide
atcctatagaccccggtttccttatagcatcaggttctaaaggattcaaaagtg

SEQ ID NO: 251154 - DNA, 60 bp, Artificial
  Synthetic oligonucleotide
tcggctttcactccgaagacctccagtaactcctcgatgtcgtagtgcccatgagcctga

SEQ ID NO: 251155 - DNA, 55 bp, Artificial
  Synthetic oligonucleotide
tacgcaactggggtgtccaacccaagtaacaggcaaaccgccgcctatataaaga

SEQ ID NO: 251156 - DNA, 54 bp, Artificial
  Synthetic oligonucleotide
atgcctgagataaggggtgtaattgtggtggccgatggggcaaaggaccctagg

SEQ ID NO: 251157 - DNA, 54 bp, Artificial
  Synthetic oligonucleotide
gcctgcccgggacaacagcggagcggtcaggtttttgaatttcggctcaattcc

SEQ ID NO: 251158 - DNA, 54 bp, Artificial
  Synthetic oligonucleotide
cccctacaggaggctggtagcaaagttgcagtctacatcaatcatgcggggcga

SEQ ID NO: 251159 - DNA, 54 bp, Artificial
  Synthetic oligonucleotide
gccggtgccgtttctctccctttggacagaggactgcgtaaagcgcggaaaaga

SEQ ID NO: 251160 - DNA, 54 bp, Artificial
  Synthetic oligonucleotide
tccactaccggctcatctagttgccgggttatagccgttgcagtacctccccga

SEQ ID NO: 251161 - DNA, 54 bp, Artificial
  Synthetic oligonucleotide
aatggtcatcgaacgtgcaggtaagggactaaggacaccgccaagggatgccat

SEQ ID NO: 251162 - DNA, 54 bp, Artificial
  Synthetic oligonucleotide
aaggtgccttcagtgccctaagcctacttgtgtggccgggtgccctgtccatgt

SEQ ID NO: 251163 - DNA, 54 bp, Artificial
  Synthetic oligonucleotide
tccggtatgtccgtggctggtccatccgagtaatgcccgtcggctgataatggg

SEQ ID NO: 251164 - DNA, 54 bp, Artificial
  Synthetic oligonucleotide
tccgttcgcctagagtactcgcacacttttgcggtgggcccgaacccctaccgc

SEQ ID NO: 251165 - DNA, 54 bp, Artificial
  Synthetic oligonucleotide
ggaactatcgtctacatgtaacacttctgttactgagtcaacgatgaaacctac

SEQ ID NO: 251166 - DNA, 60 bp, Artificial
  Synthetic oligonucleotide
ggcttgtcggctttcactccgaagacctccagtaactcctcgatgtcgtagtgcccatga

SEQ ID NO: 251167 - DNA, 54 bp, Artificial
  Synthetic oligonucleotide
agaaagagcctgaggacgcgcatacggagttggtccgggacttgttagccatag

SEQ ID NO: 251168 - DNA, 54 bp, Artificial
  Synthetic oligonucleotide
gtcctgatgagagtagagtaaggcttgtacacaggataaccaatcttggagcgt

SEQ ID NO: 251169 - DNA, 54 bp, Artificial
  Synthetic oligonucleotide
cctattactatcggaaagcctacaagagccgcacctatagctaatgggtcccag

SEQ ID NO: 251170 - DNA, 54 bp, Artificial
  Synthetic oligonucleotide
aaagcgacaaaactatggctcgcttgagggcttaggcggggtcccggccaattc

SEQ ID NO: 251171 - DNA, 54 bp, Artificial
  Synthetic oligonucleotide
atggcactgggaggcttttctggtactgacaatatactgactttagaccaattt

SEQ ID NO: 251172 - DNA, 54 bp, Artificial
  Synthetic oligonucleotide
tacccggtaatgctcgatatagagggtaagaggtgcctggtggtaggcggggga

SEQ ID NO: 251173 - DNA, 54 bp, Artificial
  Synthetic oligonucleotide
ttggcaagagccatcgacagtatggacttatgtgcggaagtcagcaccgccgga

SEQ ID NO: 251174 - DNA, 54 bp, Artificial
  Synthetic oligonucleotide
tactgacatgttagcaaaaacccgtcggccctcaggcacctggcttatgcccat

SEQ ID NO: 251175 - DNA, 53 bp, Artificial
  Synthetic oligonucleotide
gattctatataaagtgcgttagccagtacctgtgccgggaattggtagtaggg

SEQ ID NO: 251176 - DNA, 53 bp, Artificial
  Synthetic oligonucleotide
gcaaaccggaagtcagatcgactccatctacattccgctccaataccaccacc

SEQ ID NO: 251177 - DNA, 56 bp, Artificial
  Synthetic oligonucleotide
ctgactctcgagaaggggctgatccttcccgttaaactcgtcgcccagaaagcacg

SEQ ID NO: 251178 - DNA, 53 bp, Artificial
  Synthetic oligonucleotide
tccgaagtgcaaggggccacagctagaggtcttacaatagcgtcaaaagggcc

SEQ ID NO: 251179 - DNA, 53 bp, Artificial
  Synthetic oligonucleotide
aatcatgactgtcatctggcattgtcccgcatggttccttagcaggtcgtgta

SEQ ID NO: 251180 - DNA, 53 bp, Artificial
  Synthetic oligonucleotide
tctgtgttcgcagcaaaggcatagggaagcattggccctgcaagtctcacccc

SEQ ID NO: 251181 - DNA, 53 bp, Artificial
  Synthetic oligonucleotide
cggcctgatttttataacagctgccggtattgcgactcgggcgattgcgccgg

SEQ ID NO: 251182 - DNA, 53 bp, Artificial
  Synthetic oligonucleotide
gcccgggttacggcgatttgcccctttgccttcaaggcgatatagctgcggca

SEQ ID NO: 251183 - DNA, 53 bp, Artificial
  Synthetic oligonucleotide
cgatacttgtggccttcgttgtaatgtttatgtctggctctatgtccgtagcg

SEQ ID NO: 251184 - DNA, 53 bp, Artificial
  Synthetic oligonucleotide
gagttccgtgcccgaaacctacttgtgtggccgggtgccctgtccatgttaga

SEQ ID NO: 251185 - DNA, 53 bp, Artificial
  Synthetic oligonucleotide
atactgtttgttgctccagccggtattgttgtgcccgccgccagtgacccaca

SEQ ID NO: 251186 - DNA, 53 bp, Artificial
  Synthetic oligonucleotide
agctccttgtagggcatcctatgaggagggaaggtagcgggagctaccgctta

SEQ ID NO: 251187 - DNA, 53 bp, Artificial
  Synthetic oligonucleotide
gtaagggatgaaggccgcaactgcgtttccatagtggccgtaagtgctttccc

SEQ ID NO: 251188 - DNA, 52 bp, Artificial
  Synthetic oligonucleotide
gaattggtcgggaccccgccggagcccgaaaagtgagccttagtttagtcgc

SEQ ID NO: 251189 - DNA, 53 bp, Artificial
  Synthetic oligonucleotide
gtgcccctagtcatcctagcggtactttcagtggtttccggttttgtaggggc

SEQ ID NO: 251190 - DNA, 53 bp, Artificial
  Synthetic oligonucleotide
tcactatcccgccattcgcggccagtcaatcggccccgttagctttggtctca

SEQ ID NO: 251191 - DNA, 53 bp, Artificial
  Synthetic oligonucleotide
ccccgcgtcaggctatggctacttttgtgagagtcggcatggaagttgccgga

SEQ ID NO: 251192 - DNA, 53 bp, Artificial
  Synthetic oligonucleotide
cctaaagcctgccccggagtcccggctgaaattctcaatccacgcaacacctg

SEQ ID NO: 251193 - DNA, 53 bp, Artificial
  Synthetic oligonucleotide
tcaatcttcccaatgataggagtagtaacctttgctaccgctctctctggaat

SEQ ID NO: 251194 - DNA, 53 bp, Artificial
  Synthetic oligonucleotide
ccgcttttgtaggttatcattcctaacatcctggcaatgctcaaccccttatc

SEQ ID NO: 251195 - DNA, 53 bp, Artificial
  Synthetic oligonucleotide
taggccaaactccatagcccgcacggcccgctcttgaccgatgatgtccgcag

SEQ ID NO: 251196 - DNA, 53 bp, Artificial
  Synthetic oligonucleotide
atgccgtatatttgagcggcggaagtgcttttggccttgatggtgcatcgggg

SEQ ID NO: 251197 - DNA, 53 bp, Artificial
  Synthetic oligonucleotide
ggggcggtattgtgaaatctggggcgcagcaggattactatcaaccatatgac

SEQ ID NO: 251198 - DNA, 53 bp, Artificial
  Synthetic oligonucleotide
cttaggagcgataataaacgatgaaacgattccacagcttaagtgcaagatag

SEQ ID NO: 251199 - DNA, 55 bp, Artificial
  Synthetic oligonucleotide
cggggcaaaaccggaataatgaggctaccgaagcggttatcctgtcgctgggaga

SEQ ID NO: 251200 - DNA, 52 bp, Artificial
  Synthetic oligonucleotide
caccgtacacagcattgtcaaggccgtatatcctcgctattccgtcccctga

SEQ ID NO: 251201 - DNA, 52 bp, Artificial
  Synthetic oligonucleotide
catgataggaaccattggttttggcaggtcatctgtaagaggtcttagcctt

SEQ ID NO: 251202 - DNA, 52 bp, Artificial
  Synthetic oligonucleotide
tctgctctcacggtacgggttggagcaagttattatgcagccctcatactcc

SEQ ID NO: 251203 - DNA, 52 bp, Artificial
  Synthetic oligonucleotide
gctaagcttccaataaccagagctatataccgtatctccggtctcacttttg

SEQ ID NO: 251204 - DNA, 52 bp, Artificial
  Synthetic oligonucleotide
ggcacccgccaactggtatccgggtatgcctgtcatcgttccacctccaaaa

SEQ ID NO: 251205 - DNA, 52 bp, Artificial
  Synthetic oligonucleotide
cgcacgcagtaagggtcgagctctagccaaggccccggggatttctcccggg

SEQ ID NO: 251206 - DNA, 52 bp, Artificial
  Synthetic oligonucleotide
gggagccaaagccgtctatgcctgctgcacacatccggtactgtcaggccct

SEQ ID NO: 251207 - DNA, 52 bp, Artificial
  Synthetic oligonucleotide
cgtgggagaggtctcttaccatcctcgggaatctattaaataccctctctac

SEQ ID NO: 251208 - DNA, 52 bp, Artificial
  Synthetic oligonucleotide
ctagtgcaaaccacggcagacggtagcgattcaaccctggtggaactgaaaa

SEQ ID NO: 251209 - DNA, 52 bp, Artificial
  Synthetic oligonucleotide
ccgtaaccccttgagcgaagaacaagcggttctgcgtaccacccttctgcct

SEQ ID NO: 251210 - DNA, 57 bp, Artificial
  Synthetic oligonucleotide
agctgccccaaccagactatgcgcctcctgcggccgtaaaagcggttctgggtgagg

SEQ ID NO: 251211 - DNA, 52 bp, Artificial
  Synthetic oligonucleotide
tagcatatagtctggagggtagttaaagaattccggggatagttcacctttt

SEQ ID NO: 251212 - DNA, 52 bp, Artificial
  Synthetic oligonucleotide
tataacagctgccggtattgcgactcgggcgattgcgccggtaatttgcgac

SEQ ID NO: 251213 - DNA, 52 bp, Artificial
  Synthetic oligonucleotide
tcctgaacgccgcgctgactctggtagacgacgaagctacccggggtactac

SEQ ID NO: 251214 - DNA, 52 bp, Artificial
  Synthetic oligonucleotide
tccgataaagcgagtggcaggtcttgacatacctattccctacaacccaatt

SEQ ID NO: 251215 - DNA, 51 bp, Artificial
  Synthetic oligonucleotide
tcgctctccaatatcaggcatgccgttgcgtcctgtgcccgggcttaactg

SEQ ID NO: 251216 - DNA, 51 bp, Artificial
  Synthetic oligonucleotide
tttaactgacaatcctgcgagcatacctcccattatagtagacgccgaccg

SEQ ID NO: 251217 - DNA, 51 bp, Artificial
  Synthetic oligonucleotide
agaggcttcaaggtgccttcaatgccctaagcctacttgtgtggccgggtg

SEQ ID NO: 251218 - DNA, 51 bp, Artificial
  Synthetic oligonucleotide
aagggccgcataaacggcacctggagtagtcgggacggtagtgacggtccc

SEQ ID NO: 251219 - DNA, 51 bp, Artificial
  Synthetic oligonucleotide
cctttagctgacggcgttcaacaacattaggcgcaccaaccattaagtcgg

SEQ ID NO: 251220 - DNA, 51 bp, Artificial
  Synthetic oligonucleotide
agaactgcatcacttgaaaggcagccatttcgcgtctcctcaggataaggc

SEQ ID NO: 251221 - DNA, 58 bp, Artificial
  Synthetic oligonucleotide
tccatagtgctctgccgccgcaaatatggcttgtctcgtctcttctgcatcggccggg

SEQ ID NO: 251222 - DNA, 51 bp, Artificial
  Synthetic oligonucleotide
ttctccgagcgcagtaccgattcgcaggagggtgcctacggaaaggcgggt

SEQ ID NO: 251223 - DNA, 51 bp, Artificial
  Synthetic oligonucleotide
ttccggaagccttgtcgtaggtggaacataaggctcatactggtctcccgg

SEQ ID NO: 251224 - DNA, 51 bp, Artificial
  Synthetic oligonucleotide
ctattaagcgcacagcctgagaggaggcttcatctaattggttttggttgt

SEQ ID NO: 251225 - DNA, 51 bp, Artificial
  Synthetic oligonucleotide
tacattaacttggaggctaagaataacagcgccgttatcaccccaccgcag

SEQ ID NO: 251226 - DNA, 51 bp, Artificial
  Synthetic oligonucleotide
gatcaattgcggaaattaaatcgggtacactagcggctatatgaccatttt

SEQ ID NO: 251227 - DNA, 51 bp, Artificial
  Synthetic oligonucleotide
tcagtcaaaagtgcggggggagttcatgctccagatacgcgttcccggcgg

SEQ ID NO: 251228 - DNA, 51 bp, Artificial
  Synthetic oligonucleotide
gacaaatcacgaccttcgctcaatttgttaactaagatgggcttaaggtta

SEQ ID NO: 251229 - DNA, 51 bp, Artificial
  Synthetic oligonucleotide
gcgaatatacactccagggactataataaatcctgagtccatggacgaaaa

SEQ ID NO: 251230 - DNA, 51 bp, Artificial
  Synthetic oligonucleotide
acctatcttaagcagatcgttatcgaagacccctacaatgtggaagcctcg

SEQ ID NO: 251231 - DNA, 51 bp, Artificial
  Synthetic oligonucleotide
atatcatagagccagtcgtcagctgctgccgtatctttaacagcgtcccat

SEQ ID NO: 251232 - DNA, 52 bp, Artificial
  Synthetic oligonucleotide
ccgggaaacttagcgagaccgaaagacggaagcggggccgaatccaaggata

SEQ ID NO: 251233 - DNA, 51 bp, Artificial
  Synthetic oligonucleotide
cttctagcactaggcgatctctggtggaaagagcgtcgatacccactaatc

SEQ ID NO: 251234 - DNA, 50 bp, Artificial
  Synthetic oligonucleotide
tcaagagggcacccacgttgtgaggacgggttcaagaactaccgggaggc

SEQ ID NO: 251235 - DNA, 50 bp, Artificial
  Synthetic oligonucleotide
tcaccacagctgtcccttttaagacatgagttctaccctctcctactgtc

SEQ ID NO: 251236 - DNA, 50 bp, Artificial
  Synthetic oligonucleotide
tctctcatcattgcctatgctccatgtattgctcacggcataaaacaagg

SEQ ID NO: 251237 - DNA, 50 bp, Artificial
  Synthetic oligonucleotide
ggcgccggagacattgcaacgggcataatttggcgtttgcatcaagcggg

SEQ ID NO: 251238 - DNA, 50 bp, Artificial
  Synthetic oligonucleotide
gggtagcccatgcgaaaattgccgaacggggtctgaccgctaccggctcc

SEQ ID NO: 251239 - DNA, 50 bp, Artificial
  Synthetic oligonucleotide
ggcggcgtactgtctagatgcagccacataccctaagcgccacccggtca

SEQ ID NO: 251240 - DNA, 50 bp, Artificial
  Synthetic oligonucleotide
tcaccacgtagaccgtacttccaacttttactacgctcccttgtggaggg

SEQ ID NO: 251241 - DNA, 50 bp, Artificial
  Synthetic oligonucleotide
ggcataccgggctccgctgtgcagaagtccgtgaaaacgcgaacttgccc

SEQ ID NO: 251242 - DNA, 50 bp, Artificial
  Synthetic oligonucleotide
tcccagccagtgcacttttgtaccgtcatccattacatagtcagcgtaca

SEQ ID NO: 251243 - DNA, 56 bp, Artificial
  Synthetic oligonucleotide
tataaaccgtatcgtaaggagcataggccacacgagtaccgccacttacgcggggc

SEQ ID NO: 251244 - DNA, 50 bp, Artificial
  Synthetic oligonucleotide
gggccgcatttgggtctttgacggcataccgggctccgctgtgcagaagt

SEQ ID NO: 251245 - DNA, 50 bp, Artificial
  Synthetic oligonucleotide
aaggtaccgctcccccaggataacccctgcagtaagcccaatgcccccta

SEQ ID NO: 251246 - DNA, 50 bp, Artificial
  Synthetic oligonucleotide
aagtgaggcgcgtgggggtaataaagtccagacgcaacctcgccgactga

SEQ ID NO: 251247 - DNA, 50 bp, Artificial
  Synthetic oligonucleotide
aatacatggggtccgtccgcaggcgggaaagataggccgccaggccacca

SEQ ID NO: 251248 - DNA, 50 bp, Artificial
  Synthetic oligonucleotide
aatatgagcattagagggggtgaggcaggttcccggagggcgcctttgcg

SEQ ID NO: 251249 - DNA, 50 bp, Artificial
  Synthetic oligonucleotide
aatgagccgcccaaagcagcgggtttttacccctctcgggcacacttccg

SEQ ID NO: 251250 - DNA, 50 bp, Artificial
  Synthetic oligonucleotide
aattagtaccacctgaagactctgcattgtaatccactgcggaaggtctt

SEQ ID NO: 251251 - DNA, 50 bp, Artificial
  Synthetic oligonucleotide
acaagcgtggctagcgaaggcggcgagtattttcggccattctgagggcc

SEQ ID NO: 251252 - DNA, 50 bp, Artificial
  Synthetic oligonucleotide
acaattgtctccagccgaatttccgggaggccccgattttcccagccccg

SEQ ID NO: 251253 - DNA, 50 bp, Artificial
  Synthetic oligonucleotide
acatatctcccccggtaggcaggatcgcgtggagaaagggaacggaggcc

SEQ ID NO: 251254 - DNA, 58 bp, Artificial
  Synthetic oligonucleotide
gtggaatcaggttgcatccccgtcctttcagctatcctcgcccgcagctggagaatcc

SEQ ID NO: 251255 - DNA, 50 bp, Artificial
  Synthetic oligonucleotide
acatcatgggtcgggatgaggtagcccggcagataatgggggactggggc

SEQ ID NO: 251256 - DNA, 50 bp, Artificial
  Synthetic oligonucleotide
accatcaggccgccccgcttctggtaacggcagccccagacatcccggta

SEQ ID NO: 251257 - DNA, 50 bp, Artificial
  Synthetic oligonucleotide
accattgcgtccaggtgtgttactcctcaggtcccgcagggaaacggcga

SEQ ID NO: 251258 - DNA, 48 bp, Artificial
  Synthetic oligonucleotide
acccgtccccggggcgttaggcaaacttccaggccggtacggaaggac

SEQ ID NO: 251259 - DNA, 50 bp, Artificial
  Synthetic oligonucleotide
accggtgtaacccggcatcagtaccttcaaaggggaacgtgccgctagga

SEQ ID NO: 251260 - DNA, 50 bp, Artificial
  Synthetic oligonucleotide
acctagattccccggccgtctctgggggtaggcctcagcgtagtccacga

SEQ ID NO: 251261 - DNA, 50 bp, Artificial
  Synthetic oligonucleotide
acctcctggggagcactcatagatgccggacaggtctaccgcctgggctc

SEQ ID NO: 251262 - DNA, 50 bp, Artificial
  Synthetic oligonucleotide
acctgcccggctcacagacaggccttctaggccctcagaatggccgaaaa

SEQ ID NO: 251263 - DNA, 50 bp, Artificial
  Synthetic oligonucleotide
acctttctagcccctacggcttccacgagttccgccacgcgggagatagc

SEQ ID NO: 251264 - DNA, 50 bp, Artificial
  Synthetic oligonucleotide
acgacctgtggaagcccacctgattgcgtcacatctgcgccctgccaacc

SEQ ID NO: 251265 - DNA, 53 bp, Artificial
  Synthetic oligonucleotide
tccgggggacgataccacggtcgtgggagtaggtttaagaaagtcggagctga

SEQ ID NO: 251266 - DNA, 58 bp, Artificial
  Synthetic oligonucleotide
tagtgggtatcgacgctctttccaccagagatcgcctagtgctagaagtcgcaaggtc

SEQ ID NO: 251267 - DNA, 50 bp, Artificial
  Synthetic oligonucleotide
acgagtgtgacgggagagtcctgcggggccgagtgaagctccctacctgc

SEQ ID NO: 251268 - DNA, 50 bp, Artificial
  Synthetic oligonucleotide
acgccgacacccgtgaatcagctggcgactgtttcatcaccggaagccag

SEQ ID NO: 251269 - DNA, 50 bp, Artificial
  Synthetic oligonucleotide
acgccgttgaggactggttgcatatcggcttgcctacccgggcgggagct

SEQ ID NO: 251270 - DNA, 50 bp, Artificial
  Synthetic oligonucleotide
acgcctttagggcccgtgaagcagctcgtaaggcccgggaacttacccgg

SEQ ID NO: 251271 - DNA, 50 bp, Artificial
  Synthetic oligonucleotide
acgcgcctcaagccagcgttactcacttggccatcccctctttcaaccgg

SEQ ID NO: 251272 - DNA, 50 bp, Artificial
  Synthetic oligonucleotide
acggcaatatgacgggccattaacccgacctcctttcgtcgccggaccca

SEQ ID NO: 251273 - DNA, 50 bp, Artificial
  Synthetic oligonucleotide
aaaacctactccttacatgggtgctcccggcactcccggggtagaccgca

SEQ ID NO: 251274 - DNA, 50 bp, Artificial
  Synthetic oligonucleotide
aaaactcttccggcagagtctttggccccctttacccttcctggccggga

SEQ ID NO: 251275 - DNA, 50 bp, Artificial
  Synthetic oligonucleotide
aaaccaccgcaaacgggtatatcaacaagttcccgtgcagcatgtacccc

SEQ ID NO: 251276 - DNA, 50 bp, Artificial
  Synthetic oligonucleotide
aaactgccgccctggattcgctgtgttctgcgcctgggagccacccagtt

SEQ ID NO: 251277 - DNA, 55 bp, Artificial
  Synthetic oligonucleotide
ggactaaagcctgcctgagttcgggaaccatgaggaagtcccgggataggtcgtc

SEQ ID NO: 251278 - DNA, 50 bp, Artificial
  Synthetic oligonucleotide
aaagaccccggccccagatcccgcccgaacctatggctatctgcgattgg

SEQ ID NO: 251279 - DNA, 50 bp, Artificial
  Synthetic oligonucleotide
aaagcagcgggtttttacccctctcgggcacacttccgtgactgggcgtc

SEQ ID NO: 251280 - DNA, 50 bp, Artificial
  Synthetic oligonucleotide
aaagcatcccgcatactcccctctgccgcttgggccagcaggcgtaaggc

SEQ ID NO: 251281 - DNA, 50 bp, Artificial
  Synthetic oligonucleotide
aaagccactattaatagttccctctaattcctcccatggtgttccaagtc

SEQ ID NO: 251282 - DNA, 50 bp, Artificial
  Synthetic oligonucleotide
aaccacgggagagtgaagacggacaagggctaggcggaagccatcgggaa

SEQ ID NO: 251283 - DNA, 50 bp, Artificial
  Synthetic oligonucleotide
aaccggatgcaccaggggattgacatccccgcacctacgggtaccgatgt

SEQ ID NO: 251284 - DNA, 50 bp, Artificial
  Synthetic oligonucleotide
aacgccgaccccttgaagctagtaagcgcccctaagcgggagaagcgcct

SEQ ID NO: 251285 - DNA, 50 bp, Artificial
  Synthetic oligonucleotide
aagaccatgttttccgggccgggactatcgctaccctggcggagcgaacg

SEQ ID NO: 251286 - DNA, 50 bp, Artificial
  Synthetic oligonucleotide
aagacttcggagtcggactgatagccggtatagcccggaaagccccggga

SEQ ID NO: 251287 - DNA, 50 bp, Artificial
  Synthetic oligonucleotide
aagatgggtactctggccaccgtaaacccgccgtcccactatccgcttgg

SEQ ID NO: 251288 - DNA, 57 bp, Artificial
  Synthetic oligonucleotide
atggctccccgatgcccactctgccgcccctacaacatcaagcgctctattgtccgg

SEQ ID NO: 251289 - DNA, 50 bp, Artificial
  Synthetic oligonucleotide
aagcaaccgacctcctcacagtggggcacacccttcggagcaccgttata

SEQ ID NO: 251290 - DNA, 50 bp, Artificial
  Synthetic oligonucleotide
aagcaattccggaggactgaggcaagccgagtcgacaacccccgggtggg

SEQ ID NO: 251291 - DNA, 50 bp, Artificial
  Synthetic oligonucleotide
aagccgccccagatcgttcgtttcagcaaccgcctgggtgctacctgcct

SEQ ID NO: 251292 - DNA, 49 bp, Artificial
  Synthetic oligonucleotide
aagcggggaacgcggtagttttgcggggagggtcggaggcccttaactc

SEQ ID NO: 251293 - DNA, 50 bp, Artificial
  Synthetic oligonucleotide
aaggagaatgggccgccagccgacccaaccagttatgtatcgcctgccat

SEQ ID NO: 251294 - DNA, 50 bp, Artificial
  Synthetic oligonucleotide
aaggagggcaggcgcagaatagcgctggtgaccccgtagcgggcatggga

SEQ ID NO: 251295 - DNA, 50 bp, Artificial
  Synthetic oligonucleotide
aaggcccgccttatgtcccggccggttaaaagcccagccacggtcacggt

SEQ ID NO: 251296 - DNA, 50 bp, Artificial
  Synthetic oligonucleotide
aaggcggggtgtcttcgccgttaacaggtttttgcacagccacggggaga

SEQ ID NO: 251297 - DNA, 50 bp, Artificial
  Synthetic oligonucleotide
aagggccgcttgtaccggtgtaacccggcatcagtaccttcaaaggggaa

SEQ ID NO: 251298 - DNA, 50 bp, Artificial
  Synthetic oligonucleotide
aaggtaatgccggtcctcgggatcaaaaatctcccgggcgcaatcggggc

SEQ ID NO: 251299 - DNA, 56 bp, Artificial
  Synthetic oligonucleotide
gtacctattggggaataatatcagtacatctcgcttttcagttaccattagctatc

SEQ ID NO: 251300 - DNA, 50 bp, Artificial
  Synthetic oligonucleotide
agcttccgctcgcaagttcccacttcattccatcaacgcggctttcccga

SEQ ID NO: 251301 - DNA, 50 bp, Artificial
  Synthetic oligonucleotide
aggaagagtgggcggaaaggctaaaggtcggccgcgaaagggaggtccag

SEQ ID NO: 251302 - DNA, 50 bp, Artificial
  Synthetic oligonucleotide
aggactggttgcatatcggcttgcctacccgggcgggagctatcctcctg

SEQ ID NO: 251303 - DNA, 49 bp, Artificial
  Synthetic oligonucleotide
aggaggcccagtccaaaaataaggcgaaaacggggactcccgggcggag

SEQ ID NO: 251304 - DNA, 50 bp, Artificial
  Synthetic oligonucleotide
aggaggtcggcccaaggtatcacttccggggcatcctctggcggtcgata

SEQ ID NO: 251305 - DNA, 50 bp, Artificial
  Synthetic oligonucleotide
aggatatcgactccgggagcagtgaccgttacctccgttccccggctgct

SEQ ID NO: 251306 - DNA, 50 bp, Artificial
  Synthetic oligonucleotide
aggcccgactccgcaggctttaacccggtcctccagcgtagccactatat

SEQ ID NO: 251307 - DNA, 50 bp, Artificial
  Synthetic oligonucleotide
attgacatccccgcacctacgggtaccgatgttttagcggcccagacggg

SEQ ID NO: 251308 - DNA, 50 bp, Artificial
  Synthetic oligonucleotide
cccaatatagcactttcgggcggatttataataggcgtgaaactatctat

SEQ ID NO: 251309 - DNA, 50 bp, Artificial
  Synthetic oligonucleotide
ccgaccccgttggtgaagttctcggaatgacccgccgacccaatggcctt

SEQ ID NO: 251310 - DNA, 56 bp, Artificial
  Synthetic oligonucleotide
ccggacaatagagcgcttgatgttgtaggggcggcagagtgggcatcggggagcca

SEQ ID NO: 251311 - DNA, 50 bp, Artificial
  Synthetic oligonucleotide
ccgcatcccgcagtaaaaccgcagctccgtgactcacaaaagcccgggca

SEQ ID NO: 251312 - DNA, 50 bp, Artificial
  Synthetic oligonucleotide
ccgcctggtgaggcgaaaaataaacggccgcaaccgattctacgcgcagc

SEQ ID NO: 251313 - DNA, 50 bp, Artificial
  Synthetic oligonucleotide
cgactcgtgccatatcggtcgggcgggaggagtttacgaaccacctcggg

SEQ ID NO: 251314 - DNA, 50 bp, Artificial
  Synthetic oligonucleotide
cggaaagggtggggttgtgcggagcgatcagctggttggacgctaaggcg

SEQ ID NO: 251315 - DNA, 50 bp, Artificial
  Synthetic oligonucleotide
cgggaattcacctgcagagactgggtgcaaagatcgtaggggtagtagat

SEQ ID NO: 251316 - DNA, 50 bp, Artificial
  Synthetic oligonucleotide
cgggggagcgaagggccgaaagtagcgaggcgaggaccccatcttacctc

SEQ ID NO: 251317 - DNA, 50 bp, Artificial
  Synthetic oligonucleotide
cgtactccgataaaacccgctcgggcctggtgtaaatcgccacccggcta

SEQ ID NO: 251318 - DNA, 50 bp, Artificial
  Synthetic oligonucleotide
ctcgggcctggtgtaaatcgccacccggctaataccaagcacatgggcca

SEQ ID NO: 251319 - DNA, 50 bp, Artificial
  Synthetic oligonucleotide
ctctcctgcttacatatgtaaaccccagtaccgatgcgggcagattaaac

SEQ ID NO: 251320 - DNA, 50 bp, Artificial
  Synthetic oligonucleotide
ctgaggtcgtatatctccgcccgagtcaaaggcagaacttcgtcggctaa

SEQ ID NO: 251321 - DNA, 56 bp, Artificial
  Synthetic oligonucleotide
atactccggaactggcatggggtgctgtctctttggttgcgccgctggccttagtc

SEQ ID NO: 251322 - DNA, 50 bp, Artificial
  Synthetic oligonucleotide
gacccctttttggcggagctcagggggccagaattgttcaccgggtagca

SEQ ID NO: 251323 - DNA, 50 bp, Artificial
  Synthetic oligonucleotide
gccagagctttaggggagccggtacctttggttctgggggaacgggtgtt

SEQ ID NO: 251324 - DNA, 50 bp, Artificial
  Synthetic oligonucleotide
gccttacctgtcacgactggggccagcgttcaccgattcaaaccgcggga

SEQ ID NO: 251325 - DNA, 50 bp, Artificial
  Synthetic oligonucleotide
gcgggtacccggggtggcacgttaatcatcaaccttcccggtagtcccaa

SEQ ID NO: 251326 - DNA, 50 bp, Artificial
  Synthetic oligonucleotide
gcggtgggcctttaaccggcttctggaaggcacttcccgcgacgagatta

SEQ ID NO: 251327 - DNA, 50 bp, Artificial
  Synthetic oligonucleotide
acgggagtgctaccgttttaaccggtgctgcggactgcggtcagggttcc

SEQ ID NO: 251328 - DNA, 50 bp, Artificial
  Synthetic oligonucleotide
acgggcgagtaaacgggcctggatatggggaaccagccctaggggcacct

SEQ ID NO: 251329 - DNA, 50 bp, Artificial
  Synthetic oligonucleotide
acgttcccctttgaaggtactgatgccgggttacaccggtacaagcggcc

SEQ ID NO: 251330 - DNA, 50 bp, Artificial
  Synthetic oligonucleotide
acgttccggctgacaatcccgatacccccgccatagagggagggcgcagg

SEQ ID NO: 251331 - DNA, 50 bp, Artificial
  Synthetic oligonucleotide
actatcgccagggccttcaataccgtgtcccgtggtaaccgccggccgaa

SEQ ID NO: 251332 - DNA, 56 bp, Artificial
  Synthetic oligonucleotide
tggcccgcggctacaaacccctcttatcaatacaaggtgtgggttcgtgactccgc

SEQ ID NO: 251333 - DNA, 50 bp, Artificial
  Synthetic oligonucleotide
actctggccggctgagtggatcagggttaaattgcggggatggccggttt

SEQ ID NO: 251334 - DNA, 50 bp, Artificial
  Synthetic oligonucleotide
actgaggcaagccgagtcgacaacccccgggtggggaaaagacctcaccc

SEQ ID NO: 251335 - DNA, 50 bp, Artificial
  Synthetic oligonucleotide
actgatgccgggtcacaccggtacaagcggcccttttgaacccgttaccg

SEQ ID NO: 251336 - DNA, 50 bp, Artificial
  Synthetic oligonucleotide
actgcttaactctcgtgacccatacctatcagataaccaaccgctaattg

SEQ ID NO: 251337 - DNA, 50 bp, Artificial
  Synthetic oligonucleotide
acttccgaggtaccgcccgagagatggaccgccagaaaggagtccgacgg

SEQ ID NO: 251338 - DNA, 50 bp, Artificial
  Synthetic oligonucleotide
acttccgccggggcgtcaggaatagccaccttaacgctgtacaggcgcgt

SEQ ID NO: 251339 - DNA, 50 bp, Artificial
  Synthetic oligonucleotide
agaacggagtacttcggtgagcagtgttcctatcctcccacgccggccct

SEQ ID NO: 251340 - DNA, 50 bp, Artificial
  Synthetic oligonucleotide
agaccatcaagtacatcctgggtgggcgcttccgggcttcttaccggcca

SEQ ID NO: 251341 - DNA, 50 bp, Artificial
  Synthetic oligonucleotide
agacccactccccgtccaaagccgggggctggattcataaagcccggtac

SEQ ID NO: 251342 - DNA, 50 bp, Artificial
  Synthetic oligonucleotide
agacctggcgcggagcatgattatcctgtccggtcaacgcagcttcccac

SEQ ID NO: 251343 - DNA, 55 bp, Artificial
  Synthetic oligonucleotide
cgcctttactggacgggacagctcatctcggtaagcggcacctggatgcaacagg

SEQ ID NO: 251344 - DNA, 50 bp, Artificial
  Synthetic oligonucleotide
agacgaaccgcgaggacataggggagcgctggcgtgaagttttgatcccg

SEQ ID NO: 251345 - DNA, 50 bp, Artificial
  Synthetic oligonucleotide
agagacagctacggtggaggatatagcccgggccttggatttgggcgccc

SEQ ID NO: 251346 - DNA, 50 bp, Artificial
  Synthetic oligonucleotide
agagcggagggtgcgctggggtagcttctccgtagaagggtagatgggga

SEQ ID NO: 251347 - DNA, 50 bp, Artificial
  Synthetic oligonucleotide
agccaccggtttgggggcttctctggccttttctacggccctcttgacgc

SEQ ID NO: 251348 - DNA, 50 bp, Artificial
  Synthetic oligonucleotide
agcccgctcgtagacagaggttgaccaatacctggcagcgatgaccccgg

SEQ ID NO: 251349 - DNA, 50 bp, Artificial
  Synthetic oligonucleotide
agcgggcgagtgttaactctgcgggttggaacggccaccgttggagcgcc

SEQ ID NO: 251350 - DNA, 50 bp, Artificial
  Synthetic oligonucleotide
agctctgacggcacctgatcccggggtactgcccggaggtcgatgtaaac

SEQ ID NO: 251351 - DNA, 50 bp, Artificial
  Synthetic oligonucleotide
agctgcctggatgccctttacgccaccctcaaaatagaccccgccctggg

SEQ ID NO: 251352 - DNA, 51 bp, Artificial
  Synthetic oligonucleotide
cggaaaggctaaaggtcggccgcgaaagggaggtccaggccggtatgaccc

SEQ ID NO: 251353 - DNA, 54 bp, Artificial
  Synthetic oligonucleotide
ccaggtggggagttacaatcacgtttgggagctcaaataaaggagactcggtaa

SEQ ID NO: 251354 - DNA, 60 bp, Artificial
  Synthetic oligonucleotide
tccgaagacctccagtaactcctcgatgtcgtagtgcccatgagcctgaaaggcggttgc

SEQ ID NO: 251355 - DNA, 55 bp, Artificial
  Synthetic oligonucleotide
ccacaaagtctattagtcgaatattacctgcaggagctacttttgaaagagcacg

SEQ ID NO: 251356 - DNA, 55 bp, Artificial
  Synthetic oligonucleotide
cattccacaataactgccggcattttagcgtttcgcaaaaggtaataactattag

SEQ ID NO: 251357 - DNA, 53 bp, Artificial
  Synthetic oligonucleotide
cggactaccggtggttttgttcggggtgaagcccatattgacggaattgacca

SEQ ID NO: 251358 - DNA, 55 bp, Artificial
  Synthetic oligonucleotide
cggctggtagctacctactcctccgctaccggcagaacggagtacttcggtgagc

SEQ ID NO: 251359 - DNA, 55 bp, Artificial
  Synthetic oligonucleotide
cggctttatacctgtaccaattagcaataacccagatgactatggtaattcaggt

SEQ ID NO: 251360 - DNA, 55 bp, Artificial
  Synthetic oligonucleotide
cagggttgtctttatccgctattgtctcccctatctcaatatcgctaatccccga

SEQ ID NO: 251361 - DNA, 55 bp, Artificial
  Synthetic oligonucleotide
ggctccactctataaaggcaggccgcctgttcataagttcaatatcccctgacaa

SEQ ID NO: 251362 - DNA, 55 bp, Artificial
  Synthetic oligonucleotide
cggggatattgacagcttcacttaccattcttgtaagctctatatcatacccatc

SEQ ID NO: 251363 - DNA, 55 bp, Artificial
  Synthetic oligonucleotide
caggcatggtgaagataaccggtataatcagaaatggtggtttcaggcacgtggt

SEQ ID NO: 251364 - DNA, 50 bp, Artificial
  Synthetic oligonucleotide
cgggtagctggtaaaaccgatagaaacggttagggaaaagaactgctgtt

SEQ ID NO: 251365 - DNA, 60 bp, Artificial
  Synthetic oligonucleotide
ggtcctgatgcaacgcctccagtggatctgactgtagctcccttgggtcgtaagcgagaa

SEQ ID NO: 251366 - DNA, 55 bp, Artificial
  Synthetic oligonucleotide
caggacttataaggaatctagctccggtggtttccccgatggttgctcatgcaag

SEQ ID NO: 251367 - DNA, 55 bp, Artificial
  Synthetic oligonucleotide
ggcggagtggccaaagaggggtgccacagacggatattgatggtacaattgtagt

SEQ ID NO: 251368 - DNA, 55 bp, Artificial
  Synthetic oligonucleotide
cgtctattttcggggcaatctataacagattccatcgcgacaatgcatgatagat

SEQ ID NO: 251369 - DNA, 53 bp, Artificial
  Synthetic oligonucleotide
ctacccggatcttacgtattatgcgggactttactcccctggtagagcccttc

SEQ ID NO: 251370 - DNA, 54 bp, Artificial
  Synthetic oligonucleotide
ctacctccagccggggacctatctctactttaatggcccctaccggacaggtgc

SEQ ID NO: 251371 - DNA, 55 bp, Artificial
  Synthetic oligonucleotide
cacacttggtttcaggcgatagtgtggggttgggcgacctgtatagaagtcggcc

SEQ ID NO: 251372 - DNA, 55 bp, Artificial
  Synthetic oligonucleotide
gggcgaaaaccgcctccagcagactcatgcggggttcatgccagctaagctccac

SEQ ID NO: 251373 - DNA, 55 bp, Artificial
  Synthetic oligonucleotide
gggcagaacagtgcgcataaagggtagagatgccgtctccgtggtcaattataac

SEQ ID NO: 251374 - DNA, 55 bp, Artificial
  Synthetic oligonucleotide
ccgcggtggaaaggctcttcacaacgtgtatggccgtatctccaccggtcagcac

SEQ ID NO: 251375 - DNA, 55 bp, Artificial
  Synthetic oligonucleotide
ccgctgttggtcattcgtttctgccaggctctttctgagcgagcggtaggacact

SEQ ID NO: 251376 - DNA, 54 bp, Artificial
  Synthetic oligonucleotide
acattttaccttcatgataacttggcccgggagaggattcaagtccaccgttta

SEQ ID NO: 251377 - DNA, 55 bp, Artificial
  Synthetic oligonucleotide
ccggctttcggagaggtaaggcacctagaaaacttattgagatgcactatggtcc

SEQ ID NO: 251378 - DNA, 52 bp, Artificial
  Synthetic oligonucleotide
ccctggacctcaaccggtctggacagggcgtacacgaaatgaaccccaaccc

SEQ ID NO: 251379 - DNA, 55 bp, Artificial
  Synthetic oligonucleotide
ccggggtggaaggaggccagatgctgccggcatatttcccgcaggcgacgtttta

SEQ ID NO: 251380 - DNA, 50 bp, Artificial
  Synthetic oligonucleotide
ccgtacgtcgaccgaatacggagtaaagttcggggaagtaatccacttaa

SEQ ID NO: 251381 - DNA, 55 bp, Artificial
  Synthetic oligonucleotide
ccctacccgctcgtgtagggttatcaacggtctgaatatagcgcaagggataagt

SEQ ID NO: 251382 - DNA, 55 bp, Artificial
  Synthetic oligonucleotide
cctatcaaagtctggacaaccgcgctccttgccacatcccgtggaagacccaagc

SEQ ID NO: 251383 - DNA, 54 bp, Artificial
  Synthetic oligonucleotide
cctcctacctttggggtagaccctggactggtggtagggataatagcaggtgga

SEQ ID NO: 251384 - DNA, 55 bp, Artificial
  Synthetic oligonucleotide
cccgctgttatgataggccttagagcatcccttggagcgcaaaacccggcggatt

SEQ ID NO: 251385 - DNA, 55 bp, Artificial
  Synthetic oligonucleotide
cctcctcaccatgtcaaacgcgtgaagcattgaccttgtacgtattctgtctctg

SEQ ID NO: 251386 - DNA, 55 bp, Artificial
  Synthetic oligonucleotide
cccattggtcatacatgccaaaagtagtgggtggtgcaattgaggccatatctac

SEQ ID NO: 251387 - DNA, 55 bp, Artificial
  Synthetic oligonucleotide
gcgagcggtaggacacttcaaggaagtataagaaacccgcgcccataagtaggga

SEQ ID NO: 251388 - DNA, 55 bp, Artificial
  Synthetic oligonucleotide
cctcggtgagtaagttcaaattcctctatggtcgatggtcactcttcatattgcc

SEQ ID NO: 251389 - DNA, 55 bp, Artificial
  Synthetic oligonucleotide
cctgccaacgctgttataaaagttttggaccacataagagcaacatctcagctgg

SEQ ID NO: 251390 - DNA, 55 bp, Artificial
  Synthetic oligonucleotide
ccttcggtgcctgattggacgtgccctaccaaccgcacgctccacctatctcgct

SEQ ID NO: 251391 - DNA, 55 bp, Artificial
  Synthetic oligonucleotide
cccatgctggtggaggcaatttgacgggtactgcaagaggacttatgaaagcggg

SEQ ID NO: 251392 - DNA, 55 bp, Artificial
  Synthetic oligonucleotide
gggctggaactgttctggattcagaaactgcgagaattgctatcatgtctggagc

SEQ ID NO: 251393 - DNA, 55 bp, Artificial
  Synthetic oligonucleotide
ccattagtcaaccggcgagcgccccttattcctctaatggtggcctccatagggc

SEQ ID NO: 251394 - DNA, 55 bp, Artificial
  Synthetic oligonucleotide
cgagtgatggatatagtaagccgcggtggctcctttacaattgcttggatgctcc

SEQ ID NO: 251395 - DNA, 55 bp, Artificial
  Synthetic oligonucleotide
ccagtgactcagccgcacttcagtatattgcaccttacgcaggatgtgccatagg

SEQ ID NO: 251396 - DNA, 55 bp, Artificial
  Synthetic oligonucleotide
gatggggcaagcccaatggttagatggcgttcggaactcacgaggcttttgcctg

SEQ ID NO: 251397 - DNA, 53 bp, Artificial
  Synthetic oligonucleotide
gattacactttaattgatagcccgccatctttgggccttattaccttaaacgg

SEQ ID NO: 251398 - DNA, 59 bp, Artificial
  Synthetic oligonucleotide
gacatccgctatctgactctcgagaaggggctgatccttcccgttaaactcgtcgccca

SEQ ID NO: 251399 - DNA, 55 bp, Artificial
  Synthetic oligonucleotide
gcaactctggattgtccttagtttcttggtagtctatgtcatgtaatatccctgt

SEQ ID NO: 251400 - DNA, 55 bp, Artificial
  Synthetic oligonucleotide
gcaagcgtcaacctcactttgtaggggtactctattatttggaggccgacacttt

SEQ ID NO: 251401 - DNA, 55 bp, Artificial
  Synthetic oligonucleotide
gcaatagggcatgttctgcactactcgctttcataccttgacccaaaaccatggc

SEQ ID NO: 251402 - DNA, 54 bp, Artificial
  Synthetic oligonucleotide
gcacggctacccgcaaaaggcgaacacacgttcgcgggaattacgaaagaaatc

SEQ ID NO: 251403 - DNA, 55 bp, Artificial
  Synthetic oligonucleotide
gcactaccatactgtccacatcatgttgggtccttttaccgcttaaggcctggtc

SEQ ID NO: 251404 - DNA, 55 bp, Artificial
  Synthetic oligonucleotide
gcaggaggaggagtgatttggggagaagcatcagacgaactcgtagaatttgccg

SEQ ID NO: 251405 - DNA, 55 bp, Artificial
  Synthetic oligonucleotide
gccatacgggagattgcacgctttctcattgctcaaatcgcttagtcccacaaag

SEQ ID NO: 251406 - DNA, 55 bp, Artificial
  Synthetic oligonucleotide
gccatcgcctaaggtcgctgtgcgccctgtgtaaaggctataacgaaagcggtcc

SEQ ID NO: 251407 - DNA, 54 bp, Artificial
  Synthetic oligonucleotide
gcccactgtttaacttcccatacttaagcaaaagcactctttcgtcaaaactcc

SEQ ID NO: 251408 - DNA, 55 bp, Artificial
  Synthetic oligonucleotide
gcccgcagtaggtcgataccctcttttaaacctgcagcggtagtatacgctgaaa

SEQ ID NO: 251409 - DNA, 57 bp, Artificial
  Synthetic oligonucleotide
gcggagacctacttgcgtggcttttacaggctacggggtaggatgaacctgtctcgc

SEQ ID NO: 251410 - DNA, 55 bp, Artificial
  Synthetic oligonucleotide
gccgaactccatcgtttaactgccgtggagcttggttgtaccgttcatgcaccgt

SEQ ID NO: 251411 - DNA, 55 bp, Artificial
  Synthetic oligonucleotide
gccgtaaaaggaattaagtcctaccggcagtgtatacatatcatcactagacgtc

SEQ ID NO: 251412 - DNA, 55 bp, Artificial
  Synthetic oligonucleotide
gcctgagtccgaggtcgagctttagtttagtctgtgatgtcactcggagcgaacg

SEQ ID NO: 251413 - DNA, 55 bp, Artificial
  Synthetic oligonucleotide
gcgcttgccactgtaggatatggtacagccttaggagtcattagagaggctcact

SEQ ID NO: 251414 - DNA, 55 bp, Artificial
  Synthetic oligonucleotide
gcggctttacctgcctttgaactaaagtatcctgctcacggggtgagggacttat

SEQ ID NO: 251415 - DNA, 55 bp, Artificial
  Synthetic oligonucleotide
ggcaacactgatatttataaggtcccggtgggaataattatgacccgtatgccta

SEQ ID NO: 251416 - DNA, 53 bp, Artificial
  Synthetic oligonucleotide
ggatgttacgggatataacgagccggttttagtttcatcgaccgatggggtgg

SEQ ID NO: 251417 - DNA, 53 bp, Artificial
  Synthetic oligonucleotide
gctacgggaataaagtgcttttggtgacggggcgccgcagtttaaaagagtcg

SEQ ID NO: 251418 - DNA, 55 bp, Artificial
  Synthetic oligonucleotide
gctatctctccggtcatatctaccagtgtaacggctatgtacggaaataattcag

SEQ ID NO: 251419 - DNA, 55 bp, Artificial
  Synthetic oligonucleotide
gctcccggttatggacaaagggcagatgagcatggagcaccagcgacagataacc

SEQ ID NO: 251420 - DNA, 60 bp, Artificial
  Synthetic oligonucleotide
aggcagcagttcatgaggcaagcggatatgcacgcacaacaggcaaagtgggtgtgtgcg

SEQ ID NO: 251421 - DNA, 59 bp, Artificial
  Synthetic oligonucleotide
gcaacctcgcatacttttgggacatgacagctacaaaattcccgcaaagcttgacattt

SEQ ID NO: 251422 - DNA, 56 bp, Artificial
  Synthetic oligonucleotide
ctacgatacctatcgcattatttatggctatctacatgagatggataagaccaaac

SEQ ID NO: 251423 - DNA, 55 bp, Artificial
  Synthetic oligonucleotide
gcgaatagcgactacaacgattaaaattgatccggcttatgcaaatgacatagcg

SEQ ID NO: 251424 - DNA, 55 bp, Artificial
  Synthetic oligonucleotide
gaaattggcgaaagacaacttactcgtgaactcacaagagctgatgggctttatc

SEQ ID NO: 251425 - DNA, 55 bp, Artificial
  Synthetic oligonucleotide
gaaactcttcaatgaagacatccaacgcggttgttttgccaccaaacccttcagg

SEQ ID NO: 251426 - DNA, 55 bp, Artificial
  Synthetic oligonucleotide
gcggagagtatgagtacctacttcgtcaagtccgagctgcttggcagtacggttt

SEQ ID NO: 251427 - DNA, 55 bp, Artificial
  Synthetic oligonucleotide
gcggagttattacaacagcgtatgtagatggtcctatggatgggaagacaacgta

SEQ ID NO: 251428 - DNA, 55 bp, Artificial
  Synthetic oligonucleotide
gaagtttgaacatcttcaccccactgtgaaattggaacatacacgtttgtgcctc

SEQ ID NO: 251429 - DNA, 55 bp, Artificial
  Synthetic oligonucleotide
gcggcaatgttacggtggtaagtgataccgagatgagtgtagtagtgcctgctcc

SEQ ID NO: 251430 - DNA, 55 bp, Artificial
  Synthetic oligonucleotide
cttttgagattagcgtgacaatgttcgtatccacattaaacccagcaccttcttg

SEQ ID NO: 251431 - DNA, 55 bp, Artificial
  Synthetic oligonucleotide
gaggttggagttatcaatgcaaattataggggttttaagacggttgtatcaactg

SEQ ID NO: 251432 - DNA, 58 bp, Artificial
  Synthetic oligonucleotide
agagctctaacaacactttgctaacgctgagctaacggacagctcaacgttaacaccc

SEQ ID NO: 251433 - DNA, 54 bp, Artificial
  Synthetic oligonucleotide
cttttataggcccaccagtgtctattgcctttacacctcttctaagtccgtcgg

SEQ ID NO: 251434 - DNA, 55 bp, Artificial
  Synthetic oligonucleotide
gcggtgagcttgggaaagtgctgagttttaaaacaacctttggtcatggcggacc

SEQ ID NO: 251435 - DNA, 55 bp, Artificial
  Synthetic oligonucleotide
cttcacagacctgttgcaggggacaacgaacacatctggattgcatattcgtcag

SEQ ID NO: 251436 - DNA, 55 bp, Artificial
  Synthetic oligonucleotide
gctcttgagagttctctcaacaccaattctctccacaatatcctccgtctgcctc

SEQ ID NO: 251437 - DNA, 55 bp, Artificial
  Synthetic oligonucleotide
gctgcgaatggatattacaattcgtggagcggtttctatgatgaactttcgtggg

SEQ ID NO: 251438 - DNA, 55 bp, Artificial
  Synthetic oligonucleotide
gaggacaaggttgggattgtaactgtacacgacggaccatcacttccaagtggtg

SEQ ID NO: 251439 - DNA, 55 bp, Artificial
  Synthetic oligonucleotide
gatgattatgttcagagatgaggtgtacaagagatttgacaatttagagcagcag

SEQ ID NO: 251440 - DNA, 55 bp, Artificial
  Synthetic oligonucleotide
gatacagttgttgtcatagatggcgaaatactaggcaaacctaaggataagggtg

SEQ ID NO: 251441 - DNA, 55 bp, Artificial
  Synthetic oligonucleotide
gactgtatatactcaagtttgtaatctgtgtgcaaactgtttgtactcgctgttg

SEQ ID NO: 251442 - DNA, 55 bp, Artificial
  Synthetic oligonucleotide
gatttgtgatatactagggacaggtgggagcttttcagagattgtagcgacggac

SEQ ID NO: 251443 - DNA, 57 bp, Artificial
  Synthetic oligonucleotide
gtaggggtagttgaggcacccaatgcaggtagagacggtaaccgaggcaaggctata

SEQ ID NO: 251444 - DNA, 55 bp, Artificial
  Synthetic oligonucleotide
gataactcaactgtaatctactgtgagaagggttcaattaccctttacgcagacc

SEQ ID NO: 251445 - DNA, 55 bp, Artificial
  Synthetic oligonucleotide
gacctctccaccaaaatgagtcaacttgtgcatgtactatatcacctgctaaacc

SEQ ID NO: 251446 - DNA, 54 bp, Artificial
  Synthetic oligonucleotide
gcaacaggcggaaatttgagatttaacggaattttagcgacctcaatctttaag

SEQ ID NO: 251447 - DNA, 55 bp, Artificial
  Synthetic oligonucleotide
gaccattcagactcaatgggtgcaagagacagtggctggattcagatttactgcg

SEQ ID NO: 251448 - DNA, 55 bp, Artificial
  Synthetic oligonucleotide
gcaagaaccttcttgagataccatacacgcaccctttggtgtctgaggtgtgcac

SEQ ID NO: 251449 - DNA, 55 bp, Artificial
  Synthetic oligonucleotide
gcacatgataagaaagcctgcctgatgccctaagaggtgttgagagctttattga

SEQ ID NO: 251450 - DNA, 55 bp, Artificial
  Synthetic oligonucleotide
gacaaggcgaaaacatcctctgagtcatgaaggtgacggcagcattttagaagcc

SEQ ID NO: 251451 - DNA, 55 bp, Artificial
  Synthetic oligonucleotide
gagtatagaaacatagcaagaagaatcctgggagagaatattcctattgtgagcg

SEQ ID NO: 251452 - DNA, 55 bp, Artificial
  Synthetic oligonucleotide
gccacctactgatgtacccaaagccatggcgagagcacaggcaaatttaacccag

SEQ ID NO: 251453 - DNA, 55 bp, Artificial
  Synthetic oligonucleotide
gcccaagcaagtgtagttaaactaaccagcgcaaccataacatcaatagctgcag

SEQ ID NO: 251454 - DNA, 53 bp, Artificial
  Synthetic oligonucleotide
ggtttcgttgcccgcccgaatttcaacgtatctattggaaggtacaaatcaac

SEQ ID NO: 251455 - DNA, 54 bp, Artificial
  Synthetic oligonucleotide
gccccgatgataattccctcatcgggaaagtcagtttgtagcctcccctttggg

SEQ ID NO: 251456 - DNA, 55 bp, Artificial
  Synthetic oligonucleotide
gagtacgtaggtgaagtagatcatggttactctataataggtggtcaatctgtag

SEQ ID NO: 251457 - DNA, 55 bp, Artificial
  Synthetic oligonucleotide
gaatgggacaactgcggtcttcaggttggaagttattcagacaaagtagattcgg

SEQ ID NO: 251458 - DNA, 55 bp, Artificial
  Synthetic oligonucleotide
gccctacaagaatatagcttcctcgctgttttgtaagccacatgccatccctaat

SEQ ID NO: 251459 - DNA, 55 bp, Artificial
  Synthetic oligonucleotide
gaatcaagtctgcaatccaaggaatagttgacataggtacatcatcaagagaact

SEQ ID NO: 251460 - DNA, 55 bp, Artificial
  Synthetic oligonucleotide
gccctggcagtgctaatgtcataggtggacaatttgtagccatcaagacttatgg

SEQ ID NO: 251461 - DNA, 55 bp, Artificial
  Synthetic oligonucleotide
gccggttaagcttattagtatgaaaactgccacgtacacaagtcccgcggctatc

SEQ ID NO: 251462 - DNA, 55 bp, Artificial
  Synthetic oligonucleotide
gcctgcaccgacagttacaccgcctgatataggatgcgatgcagtaacatacgga

SEQ ID NO: 251463 - DNA, 55 bp, Artificial
  Synthetic oligonucleotide
gccttgagaacaaccaggttatgactgacaagggcatcttttaccttccatctgc

SEQ ID NO: 251464 - DNA, 55 bp, Artificial
  Synthetic oligonucleotide
gtctcttcggctgctgcgacaaacatagaaggtccgtcgaacttttgtgcaagca

SEQ ID NO: 251465 - DNA, 57 bp, Artificial
  Synthetic oligonucleotide
agacgatggagatgtaccccgaagtggtgcaaggcgaaattgacagggtggtatgtt

SEQ ID NO: 251466 - DNA, 55 bp, Artificial
  Synthetic oligonucleotide
gtgcaaggctgaaggtacggcttgttgactgtgttgggtaccttgttgacggagc

SEQ ID NO: 251467 - DNA, 55 bp, Artificial
  Synthetic oligonucleotide
gtggatgtcagttatgctccattgctgggtcttatgcccttatggtgaaattacc

SEQ ID NO: 251468 - DNA, 55 bp, Artificial
  Synthetic oligonucleotide
gtggtatacctggtgtaaagaattgaatggctctggctgccaaatatgcgtcatc

SEQ ID NO: 251469 - DNA, 55 bp, Artificial
  Synthetic oligonucleotide
gtgtaccagtaccttatcgttaccctgctcaaatctatcgcactgctaccactat

SEQ ID NO: 251470 - DNA, 55 bp, Artificial
  Synthetic oligonucleotide
gttatgctatatacaagtcccaactcctctcttattcgctggaaaagtcgcgagc

SEQ ID NO: 251471 - DNA, 55 bp, Artificial
  Synthetic oligonucleotide
gttgcagtgcctgaagcccataataaatatgatgatgtaccacattgtttaagct

SEQ ID NO: 251472 - DNA, 55 bp, Artificial
  Synthetic oligonucleotide
taaagaggcaagcccttcactgtgccgagatgactttcttttatcccgtaacggg

SEQ ID NO: 251473 - DNA, 55 bp, Artificial
  Synthetic oligonucleotide
taacagcatttcagcaataagaacgtgataaggattgtttgtatgacgccatggg

SEQ ID NO: 251474 - DNA, 54 bp, Artificial
  Synthetic oligonucleotide
taagaataggcggttggttagttctttaggtattttgcgaggtgttgataagaa

SEQ ID NO: 251475 - DNA, 55 bp, Artificial
  Synthetic oligonucleotide
tagcagcctctcaaatgcggaggctctgcgcagctaacgcttatcccatatgtcc

SEQ ID NO: 251476 - DNA, 59 bp, Artificial
  Synthetic oligonucleotide
tctaatctaagatctcaaacttagtcacttcgtgactaagtgctgtacggacttttcag

SEQ ID NO: 251477 - DNA, 55 bp, Artificial
  Synthetic oligonucleotide
tagttgacgctgtaagctcattaggcggcataccacttaatatggatgagtgggg

SEQ ID NO: 251478 - DNA, 55 bp, Artificial
  Synthetic oligonucleotide
tataaacaaaggcctaaccgaggatcacgtcctagactcaataaatatggcgcag

SEQ ID NO: 251479 - DNA, 55 bp, Artificial
  Synthetic oligonucleotide
tatcctgccgtgtttgtacgctttgcagggtgcaatttaaactgttcctggtgcg

SEQ ID NO: 251480 - DNA, 55 bp, Artificial
  Synthetic oligonucleotide
tatgccttaattagagagcccaacacgtatgttacgcagtatgcaaggttacctg

SEQ ID NO: 251481 - DNA, 55 bp, Artificial
  Synthetic oligonucleotide
tccataataaagtgaagggtcaggctcatctataatgacaagcaccgacacctcg

SEQ ID NO: 251482 - DNA, 51 bp, Artificial
  Synthetic oligonucleotide
tccattcccctttaaaatgactttccaagttaggaagtcaccttttaggaa

SEQ ID NO: 251483 - DNA, 54 bp, Artificial
  Synthetic oligonucleotide
tcggggtggtaaaatcaaacaagtactcccacactggtaaagttccatacgcaa

SEQ ID NO: 251484 - DNA, 55 bp, Artificial
  Synthetic oligonucleotide
tctcgtcttcagacgtaatgagactatcaccttctacagtgtgcttcaaagcaca

SEQ ID NO: 251485 - DNA, 55 bp, Artificial
  Synthetic oligonucleotide
tctgtaggtgacacaacaggaccaggtggtcttatcagaggacttaggactgttc

SEQ ID NO: 251486 - DNA, 55 bp, Artificial
  Synthetic oligonucleotide
tgtactcagccatgacggaagaccgcaagtcaatgactttatgagaattgacaga

SEQ ID NO: 251487 - DNA, 54 bp, Artificial
  Synthetic oligonucleotide
gaatttcgacaccctgtatttaggatgttccaagttagaataccctttgtagag

SEQ ID NO: 251488 - DNA, 55 bp, Artificial
  Synthetic oligonucleotide
tgtcctgttcgccttgttgttttaaaaccctcagcttgtccaattgtggtattgc

SEQ ID NO: 251489 - DNA, 55 bp, Artificial
  Synthetic oligonucleotide
tgtgcgtctacaggaccttatttgcgtttcaaggctattcttgtggggtagtgca

SEQ ID NO: 251490 - DNA, 55 bp, Artificial
  Synthetic oligonucleotide
ttattgtcatataagcctgccacgtcaatataccaagcatactgaatggtacagc

SEQ ID NO: 251491 - DNA, 55 bp, Artificial
  Synthetic oligonucleotide
ttcacaacgaccattcagactcaatgggtgcaagagacagtggctggattcagat

SEQ ID NO: 251492 - DNA, 55 bp, Artificial
  Synthetic oligonucleotide
ttccccttactttgttcgcagcaatagagattccaatgcctgtcccgcagatgag

SEQ ID NO: 251493 - DNA, 55 bp, Artificial
  Synthetic oligonucleotide
ttgctcaaaattctggagtttaaactaaagcctgcaaagaacagacaagctccaa

SEQ ID NO: 251494 - DNA, 55 bp, Artificial
  Synthetic oligonucleotide
ttggcacgggaaatggaatcgggcaggtatagggaaaggcaatagccgtggacgg

SEQ ID NO: 251495 - DNA, 55 bp, Artificial
  Synthetic oligonucleotide
tttccacgcgcatcggagggtacagcacgggtcattgtgaggctttaaacctggg

SEQ ID NO: 251496 - DNA, 55 bp, Artificial
  Synthetic oligonucleotide
tttggtgaactgccaatgcggtagggggagtttgcaacgcaacagggggagtgga

SEQ ID NO: 251497 - DNA, 55 bp, Artificial
  Synthetic oligonucleotide
gctgtgatgtgtactgtaacttgtactgtatgtggtgcagtcttcgtaagccgga

SEQ ID NO: 251498 - DNA, 57 bp, Artificial
  Synthetic oligonucleotide
agaagggtgtatgtcctactttaactgcaaacatgggtgaaggtggtcataatgttc

SEQ ID NO: 251499 - DNA, 55 bp, Artificial
  Synthetic oligonucleotide
gcttaaagcaattcgcatgcccagtctgtctgaaagctctttaatcttgagtcgc

SEQ ID NO: 251500 - DNA, 55 bp, Artificial
  Synthetic oligonucleotide
gcttcctggttgttttcgcagtaaatctgaatccagccactgtctcttgcaccca

SEQ ID NO: 251501 - DNA, 55 bp, Artificial
  Synthetic oligonucleotide
gcttgttaataaacgacaaagaagcatctatggccagcgaaagtacactaacgga

SEQ ID NO: 251502 - DNA, 55 bp, Artificial
  Synthetic oligonucleotide
gctttattgatgtcgggcaaggagatagtatcatagtccagactccacaaggtaa

SEQ ID NO: 251503 - DNA, 54 bp, Artificial
  Synthetic oligonucleotide
ggaagggagtctttcaacgaaggagttatcgacgaactgcttatacccaatccc

SEQ ID NO: 251504 - DNA, 55 bp, Artificial
  Synthetic oligonucleotide
ggagtgggtaagaatgggtatggagcaaatcgtcggattcttagaaatgctgaat

SEQ ID NO: 251505 - DNA, 55 bp, Artificial
  Synthetic oligonucleotide
ggattgcgataatactgtcgctgcttcctacatggtttatcatagttgcgtcgct

SEQ ID NO: 251506 - DNA, 55 bp, Artificial
  Synthetic oligonucleotide
ggcggagcttttgcggtctacagaggacttacagagtcgctcccataccacagac

SEQ ID NO: 251507 - DNA, 55 bp, Artificial
  Synthetic oligonucleotide
ggcttgagttccctcgcggaagttctgacaaagattgcttgttcatgccatctat

SEQ ID NO: 251508 - DNA, 55 bp, Artificial
  Synthetic oligonucleotide
ggggaatgagctcgcgacttttccagcgaataagagaggagttgggacttgtata

SEQ ID NO: 251509 - DNA, 60 bp, Artificial
  Synthetic oligonucleotide
gcacgtctgacacgcttgacgtgcaccgagccgagagtagagcgtgatgacatagaaaaa

SEQ ID NO: 251510 - DNA, 55 bp, Artificial
  Synthetic oligonucleotide
ggggttgtaataccccgatatggcattgcccttattgatggaacggcaccccacg

SEQ ID NO: 251511 - DNA, 55 bp, Artificial
  Synthetic oligonucleotide
gggtaggtatagattgcgacgtgttaaggagacagacgatggagatgtaccccga

SEQ ID NO: 251512 - DNA, 55 bp, Artificial
  Synthetic oligonucleotide
gggtgtattctcaatataactcccgaccatctaaacagacacctaacaatggaga

SEQ ID NO: 251513 - DNA, 55 bp, Artificial
  Synthetic oligonucleotide
ggtaacttactttaagttgctgaccatataccggatgaacataaaactcaccgta

SEQ ID NO: 251514 - DNA, 55 bp, Artificial
  Synthetic oligonucleotide
ggtaagttctcaatactaattggagtaatgagcttcagagtatcaccatctacag

SEQ ID NO: 251515 - DNA, 55 bp, Artificial
  Synthetic oligonucleotide
ggtacctatattaagctcggcaaaatctcttgttacgcgggcagctatgtacaag

SEQ ID NO: 251516 - DNA, 55 bp, Artificial
  Synthetic oligonucleotide
ggtaggtgcacacaaggtaataaatgggcagatgagcataggagagttgtttacg

SEQ ID NO: 251517 - DNA, 55 bp, Artificial
  Synthetic oligonucleotide
ggtctcacagattccgtttagtcttatgacaggggacccatacgagctaaatgtg

SEQ ID NO: 251518 - DNA, 55 bp, Artificial
  Synthetic oligonucleotide
ggtgctctttaggtatatcaggatcagagcctaacttcaaatcaccacctacaat

SEQ ID NO: 251519 - DNA, 55 bp, Artificial
  Synthetic oligonucleotide
ggtggaacgtacacagacaggaatcaactgttgcaggcgataggtacttgtgggg

SEQ ID NO: 251520 - DNA, 60 bp, Artificial
  Synthetic oligonucleotide
atagcgcgtggactgttaagaaagaagcagcagccctggcgaaactgtatcattgtcgta

SEQ ID NO: 251521 - DNA, 54 bp, Artificial
  Synthetic oligonucleotide
ggttacaaagacatagttcagatgtggaaagccgaaaggtttaacccagaggaa

SEQ ID NO: 251522 - DNA, 55 bp, Artificial
  Synthetic oligonucleotide
ggtttatctggccgtttgctacagactcaaaagcacctggttgatagatcacacc

SEQ ID NO: 251523 - DNA, 55 bp, Artificial
  Synthetic oligonucleotide
gtagattcggcgtacctaagtaaacactgcctataccttttaaagtgcatgcaca

SEQ ID NO: 251524 - DNA, 55 bp, Artificial
  Synthetic oligonucleotide
gtaggggattagggcatgtcaaggtttgcattgaggaggtcggagacaggtgaag

SEQ ID NO: 251525 - DNA, 55 bp, Artificial
  Synthetic oligonucleotide
gtcaaaactgtggagctatgacagggcaaacgaggtaatctcagagcttatgccg

SEQ ID NO: 251526 - DNA, 55 bp, Artificial
  Synthetic oligonucleotide
gtcagcttttaactaatcaacttagaatgtgcctgagcctatgtgcctgtgccgt

SEQ ID NO: 251527 - DNA, 54 bp, Artificial
  Synthetic oligonucleotide
gtcccatgggttcgggtatgcctgctttacgcttattttcggtgggtctttgct

SEQ ID NO: 251528 - DNA, 55 bp, Artificial
  Synthetic oligonucleotide
gtcgtcgtgtctttacctgccgaatgttcttgcatcttcccataggcacctactg

SEQ ID NO: 251529 - DNA, 55 bp, Artificial
  Synthetic oligonucleotide
caactctcctatgctcatctgcccatttattaccttgtgtgctcctacccatagt

SEQ ID NO: 251530 - DNA, 52 bp, Artificial
  Synthetic oligonucleotide
caagttctaataccgaaaggacttccgccggttttaatgcaagtaccgtcac

SEQ ID NO: 251531 - DNA, 58 bp, Artificial
  Synthetic oligonucleotide
aggagacagacgatggagatgtaccccgaagtggtgcaaggcgaaattgacagggtgg

SEQ ID NO: 251532 - DNA, 56 bp, Artificial
  Synthetic oligonucleotide
taacccagaaggtacattgcttcttcacgtgtaaactcaattgttagctttttcac

SEQ ID NO: 251533 - DNA, 55 bp, Artificial
  Synthetic oligonucleotide
cacctgccgtaggattaattggcgctgtcttgatcggtcctgtattaaagtccgg

SEQ ID NO: 251534 - DNA, 55 bp, Artificial
  Synthetic oligonucleotide
cacgcaggcaaaggtaacacctgcaacatgggataaagcagttgccatgaaactg

SEQ ID NO: 251535 - DNA, 55 bp, Artificial
  Synthetic oligonucleotide
cactatgttctggaacatacttgtttcttctcctgtcgtaagagtacaaaggtag

SEQ ID NO: 251536 - DNA, 55 bp, Artificial
  Synthetic oligonucleotide
cagatgccaaacccctagaacctgattaggttaatacctacgaagggaatgcggc

SEQ ID NO: 251537 - DNA, 55 bp, Artificial
  Synthetic oligonucleotide
cagccaggtacacaatcgaaccccaaccgaggttttgccatattccagagccgac

SEQ ID NO: 251538 - DNA, 55 bp, Artificial
  Synthetic oligonucleotide
cagggtatacagttgttgaccttccgtctgtcatagcaacccatcttacagaaat

SEQ ID NO: 251539 - DNA, 55 bp, Artificial
  Synthetic oligonucleotide
caggttctctgctgttccaatagggtatttctttctttccgcgtggactagcctt

SEQ ID NO: 251540 - DNA, 55 bp, Artificial
  Synthetic oligonucleotide
catagactaacgcacgactgacgtcgtgatgtgtgtgtgggcctacctacacaca

SEQ ID NO: 251541 - DNA, 55 bp, Artificial
  Synthetic oligonucleotide
catgcaaatggaggcatgaccttaggaaactactcaacacagtatgactcagcac

SEQ ID NO: 251542 - DNA, 55 bp, Artificial
  Synthetic oligonucleotide
catgcggctatgtaagactgctgccaccgtatcagctccaacgtacgatgcaacc

SEQ ID NO: 251543 - DNA, 56 bp, Artificial
  Synthetic oligonucleotide
ataccgtgagcattctggacaggttcaacagcctgaaagggcaaaaccccccttga

SEQ ID NO: 251544 - DNA, 55 bp, Artificial
  Synthetic oligonucleotide
ccaaagcagtcgtatcaggtagtattaaactgaacacaatacctgttaatctgcc

SEQ ID NO: 251545 - DNA, 55 bp, Artificial
  Synthetic oligonucleotide
ccaatgccgcttgtaccgtctctgacccacagccctattttgtacacaccttcac

SEQ ID NO: 251546 - DNA, 55 bp, Artificial
  Synthetic oligonucleotide
ccactggcagtaggagattgtagaagtggtaggcagcgatctgaatgctggcaca

SEQ ID NO: 251547 - DNA, 55 bp, Artificial
  Synthetic oligonucleotide
ccagaagatgccagcagtaggttaaggttattaccagtagacggcagtaagaaaa

SEQ ID NO: 251548 - DNA, 55 bp, Artificial
  Synthetic oligonucleotide
ccaggtgattctatcaccatcgcttggcctattataccgcctccggccctttagg

SEQ ID NO: 251549 - DNA, 55 bp, Artificial
  Synthetic oligonucleotide
ccatctcgccgaatgtaatcatgaatggcgctattccaatcggtccgtagtcatc

SEQ ID NO: 251550 - DNA, 55 bp, Artificial
  Synthetic oligonucleotide
cccagggtcaacttcccgaaacccagcaacatagtgggtcccatcgctgtatgcg

SEQ ID NO: 251551 - DNA, 55 bp, Artificial
  Synthetic oligonucleotide
ccccaccgtcattatgtcgtatttgctaaaggcttccctgtacatctcatgcaga

SEQ ID NO: 251552 - DNA, 55 bp, Artificial
  Synthetic oligonucleotide
ccccgtccggatttacaacaccaaacctgtctgcatccccatctgttgcaaggcc

SEQ ID NO: 251553 - DNA, 55 bp, Artificial
  Synthetic oligonucleotide
cccctgatggttctggtatgtaattctggtccactttaatgtatcgccatttaag

SEQ ID NO: 251554 - DNA, 60 bp, Artificial
  Synthetic oligonucleotide
gataaaaaggatagacgcgaaagatatcggcagactgatggtgctgccaggagacgaaac

SEQ ID NO: 251555 - DNA, 55 bp, Artificial
  Synthetic oligonucleotide
cccctttacgagactgagatattctttgtacaatctgtcaatacgttctgtatcg

SEQ ID NO: 251556 - DNA, 55 bp, Artificial
  Synthetic oligonucleotide
ccggaaataagggcagcaagacatgctggtataataacgggtcttcctgatgcgt

SEQ ID NO: 251557 - DNA, 55 bp, Artificial
  Synthetic oligonucleotide
ccggtacacgcatagaaggtaagacttcaatcggtgaggattgtgaaatcggccc

SEQ ID NO: 251558 - DNA, 54 bp, Artificial
  Synthetic oligonucleotide
aaaagactttctcgaaacacgccctgtacccaggacggaaaatgccatgactgt

SEQ ID NO: 251559 - DNA, 55 bp, Artificial
  Synthetic oligonucleotide
aacagacaccttgaactattctaccaagtgtctccaaatcataagggtactcgcc

SEQ ID NO: 251560 - DNA, 55 bp, Artificial
  Synthetic oligonucleotide
aagagggagcaccactgtcttcccaatcaaatgcttgtatctttggtcatttggg

SEQ ID NO: 251561 - DNA, 55 bp, Artificial
  Synthetic oligonucleotide
aagcgatgccagcacaagcccgccaggtgtgtgaaggattatgtcaagcgggaca

SEQ ID NO: 251562 - DNA, 55 bp, Artificial
  Synthetic oligonucleotide
aatactgcctagtgaaaccaggcctcgcctcatttctgcgtttgacatgcttatg

SEQ ID NO: 251563 - DNA, 55 bp, Artificial
  Synthetic oligonucleotide
aatggcgatattgtagtaatatcggcaggaatacctgtcgcgactacaggcacga

SEQ ID NO: 251564 - DNA, 55 bp, Artificial
  Synthetic oligonucleotide
acagacaagtatctaaacaacttagtaaactttggtatcgaaggacagcactacg

SEQ ID NO: 251565 - DNA, 58 bp, Artificial
  Synthetic oligonucleotide
taagatagaacgggtgtgggtaggtatagattgcgacgtgttaaggagacagacgatg

SEQ ID NO: 251566 - DNA, 55 bp, Artificial
  Synthetic oligonucleotide
acagtaaggcctggagattcaatgtggaccatagcgaatatgtttggcataccat

SEQ ID NO: 251567 - DNA, 55 bp, Artificial
  Synthetic oligonucleotide
acggcacccgttcgaaattcagtaaacggctacataacttataacactccagcgc

SEQ ID NO: 251568 - DNA, 55 bp, Artificial
  Synthetic oligonucleotide
acggcatgtatcggataataaacgaggcaaatatgatctccagccttcttaatgg

SEQ ID NO: 251569 - DNA, 55 bp, Artificial
  Synthetic oligonucleotide
acgttgcattctcctgatagaagtcctcttacgatgcaaagcctgtacggatgcg

SEQ ID NO: 251570 - DNA, 55 bp, Artificial
  Synthetic oligonucleotide
agaaaccgctccacgaattgtaatatccattcgcagcagtgtaacctgagtcact

SEQ ID NO: 251571 - DNA, 54 bp, Artificial
  Synthetic oligonucleotide
aggctaagccccgaaataaattccccacaagacatacaccctattacaggaata

SEQ ID NO: 251572 - DNA, 55 bp, Artificial
  Synthetic oligonucleotide
agggctctcaacgtatctggtcctactatcgtaccgctttgaggaggcttgcttt

SEQ ID NO: 251573 - DNA, 55 bp, Artificial
  Synthetic oligonucleotide
agggtaattataggcgagacagtgtatgacagcggacctgacggtatgcacccgg

SEQ ID NO: 251574 - DNA, 55 bp, Artificial
  Synthetic oligonucleotide
agggtaattgaacccttctcacagtagattacagttgagttatcttcacttcccg

SEQ ID NO: 251575 - DNA, 55 bp, Artificial
  Synthetic oligonucleotide
atacgatgcagaaattttggcctataccgtttattgccttgtctacgacgacagc

SEQ ID NO: 251576 - DNA, 56 bp, Artificial
  Synthetic oligonucleotide
taatatttggaattgtcagtttggcacgggaaatggaatcgggcaggtatagggaa

SEQ ID NO: 251577 - DNA, 55 bp, Artificial
  Synthetic oligonucleotide
atatacactcagaattgtgacagagacaaaacctcttcgccactgggatttagag

SEQ ID NO: 251578 - DNA, 55 bp, Artificial
  Synthetic oligonucleotide
atatgccagagattgatggaggcttagttggcggtgcaagccttaatgctcagga

SEQ ID NO: 251579 - DNA, 55 bp, Artificial
  Synthetic oligonucleotide
atcccagtggcgaagaggttttgtctctgtaacaattctgagtgtatattctatc

SEQ ID NO: 251580 - DNA, 55 bp, Artificial
  Synthetic oligonucleotide
atgagcttgcacacatttcctatggttatcttaaccccagggtatatggtatcct

SEQ ID NO: 251581 - DNA, 55 bp, Artificial
  Synthetic oligonucleotide
atgcaagctttacaaaagacaatccacatccaccaattgggcttgaaatggtaag

SEQ ID NO: 251582 - DNA, 55 bp, Artificial
  Synthetic oligonucleotide
caaataagatgtcgccacatattcagtcccattggtgcatggtctaagtcctgaa

SEQ ID NO: 251583 - DNA, 55 bp, Artificial
  Synthetic oligonucleotide
caaccacaagctgactcttggttttgctaagttgtcttttctcctgagtccagcc

SEQ ID NO: 251584 - DNA, 55 bp, Artificial
  Synthetic oligonucleotide
cgctactaccagtcccttcaagttcggccgttatatcgtatgcgtctactcttga

SEQ ID NO: 251585 - DNA, 55 bp, Artificial
  Synthetic oligonucleotide
cggaagcaactaaggctcttgaccaattaaaggcagaggtagcaagctcaattgg

SEQ ID NO: 251586 - DNA, 55 bp, Artificial
  Synthetic oligonucleotide
cggaatacgagagctcccgcaaaacgggtatcatagctataacccttacctcagg

SEQ ID NO: 251587 - DNA, 60 bp, Artificial
  Synthetic oligonucleotide
aggtactggtacacggtagatggggacaaggcacagagtgcgatatcagactgggcacag

SEQ ID NO: 251588 - DNA, 52 bp, Artificial
  Synthetic oligonucleotide
cggcacccgactaataaaatgccggctcgtaagttttgtcggtaaccggcac

SEQ ID NO: 251589 - DNA, 55 bp, Artificial
  Synthetic oligonucleotide
cggcagtgccatgacgtccttacagaggattcaggaactcactacacaattgaag

SEQ ID NO: 251590 - DNA, 55 bp, Artificial
  Synthetic oligonucleotide
cggctggtgttagcatgtagtagtttgtaccgatttgtactttgccgccgtcatt

SEQ ID NO: 251591 - DNA, 55 bp, Artificial
  Synthetic oligonucleotide
cgtaaattccatcttcaatctaccctcctattctgaacatcggcatatctgattc

SEQ ID NO: 251592 - DNA, 55 bp, Artificial
  Synthetic oligonucleotide
cgtagtttgataattgacatgtttcgtgattgccttcaacaggcatttctggtat

SEQ ID NO: 251593 - DNA, 55 bp, Artificial
  Synthetic oligonucleotide
cgtcaactttcccataaagccttgactcaattacgtctacagcaattcctcttgg

SEQ ID NO: 251594 - DNA, 55 bp, Artificial
  Synthetic oligonucleotide
cgtggcttataaacgacggtataaaaggcaaaactgtattatactggcacacgac

SEQ ID NO: 251595 - DNA, 55 bp, Artificial
  Synthetic oligonucleotide
cgttgacaaaggcataatttacggtacagttgtgagcgatccatataagatgggt

SEQ ID NO: 251596 - DNA, 55 bp, Artificial
  Synthetic oligonucleotide
ctagagtctcgccaaagcataagctgcgtattgtcagagctcttaagaagagggg

SEQ ID NO: 251597 - DNA, 55 bp, Artificial
  Synthetic oligonucleotide
ctcacgccaaggttcacaaagtcatgcacgtcatagtctaccatcgcataatcga

SEQ ID NO: 251598 - DNA, 60 bp, Artificial
  Synthetic oligonucleotide
taatgctgcctgtattatggcattttgctcagcgtgggtccccctgcacagctcatgtct

SEQ ID NO: 251599 - DNA, 55 bp, Artificial
  Synthetic oligonucleotide
ctcacttgagagaagcacgtatgtaatacttgctatgaccaccattgaaacaaag

SEQ ID NO: 251600 - DNA, 54 bp, Artificial
  Synthetic oligonucleotide
ctcccctttggggattgaaacaagagagtttaagacttgcaaattcgaggagtg

SEQ ID NO: 251601 - DNA, 55 bp, Artificial
  Synthetic oligonucleotide
ctcctgccggtcaaaagcagcgataacaccactccgatcacagaaagaggcacgg

SEQ ID NO: 251602 - DNA, 55 bp, Artificial
  Synthetic oligonucleotide
ctcgcgtgcagacaactcggcaacttatataagagagcttgagatatggaagtta

SEQ ID NO: 251603 - DNA, 55 bp, Artificial
  Synthetic oligonucleotide
ctctattctttagcgtcactacattaaagccgtcaactacaatcgctgtgggtct

SEQ ID NO: 251604 - DNA, 55 bp, Artificial
  Synthetic oligonucleotide
ctgaggaaggtcaactgtactgagtgcaagtattgtatgccatgtccacagggta

SEQ ID NO: 251605 - DNA, 55 bp, Artificial
  Synthetic oligonucleotide
ctgcttttaacttcagcaggtcagagatccgcaggcctgtgtttattcccaccac

SEQ ID NO: 251606 - DNA, 55 bp, Artificial
  Synthetic oligonucleotide
ctggactgtccaaagagatggcacaagataactcgtattttggcaagcttctttt

SEQ ID NO: 251607 - DNA, 55 bp, Artificial
  Synthetic oligonucleotide
ctggagtgcttttcagcaaatctcctggtacccaggcaagtccgaatgtggggta

SEQ ID NO: 251608 - DNA, 55 bp, Artificial
  Synthetic oligonucleotide
ctgtatcatcgccaagtaaagtaatcgtaggaagtttgcttatgccaagctcaga

SEQ ID NO: 251609 - DNA, 52 bp, Artificial
  Synthetic oligonucleotide
atctatttcagaagcgaaaagtaaaccgcggtagcgggttactttttgcgta

SEQ ID NO: 251610 - DNA, 55 bp, Artificial
  Synthetic oligonucleotide
ctgtgccacagattactcggtcaggatatttatacctatcgtatccatatctatc

SEQ ID NO: 251611 - DNA, 55 bp, Artificial
  Synthetic oligonucleotide
cttaaccctatgcctttgtagaattcaaggtactttctgatgtcctttcgcattt

SEQ ID NO: 251612 - DNA, 55 bp, Artificial
  Synthetic oligonucleotide
cttaagataaaggggactctgagcagtagcatacccttgcatattaaaccctgag

SEQ ID NO: 251613 - DNA, 55 bp, Artificial
  Synthetic oligonucleotide
cctggtctgaatagtcccaagaaatctttccgctcttgtctgaatatgtccagtc

SEQ ID NO: 251614 - DNA, 55 bp, Artificial
  Synthetic oligonucleotide
cgagattttgtgttgtacaatgtatgagagaattcgcattgctgattttgcaagg

SEQ ID NO: 251615 - DNA, 55 bp, Artificial
  Synthetic oligonucleotide
ccgtaatcctgagactccaactgactgcattgaatttgcaaagccacacatggtc

SEQ ID NO: 251616 - DNA, 55 bp, Artificial
  Synthetic oligonucleotide
cctgactccttacatagggagggagcaggctgtatcagggacactcgcatatgct

SEQ ID NO: 251617 - DNA, 54 bp, Artificial
  Synthetic oligonucleotide
cctcgagtactctttcgggattctttagcacttcgtaaaccgaatcctcgagtc

SEQ ID NO: 251618 - DNA, 55 bp, Artificial
  Synthetic oligonucleotide
cctcagcaaacattggtcatgttgtaacatcagcggtgataattttagctggcac

SEQ ID NO: 251619 - DNA, 55 bp, Artificial
  Synthetic oligonucleotide
cctcactttagaaaattgagcgggtcagtaacatctccgtttattctaacctcaa

SEQ ID NO: 251620 - DNA, 59 bp, Artificial
  Synthetic oligonucleotide
gagcgggtggtcagagtacatcccaatacgggcgaagcccctgcatacgagctgaaact

SEQ ID NO: 251621 - DNA, 49 bp, Artificial
  Synthetic oligonucleotide
cgccaggggttttaaggttaccctcgacgaacccaaagacctcggcgga

SEQ ID NO: 251622 - DNA, 55 bp, Artificial
  Synthetic oligonucleotide
cgcagatttcacctatcttcaatgtgcttgaatcgcttctgtcacccggaacgcc

SEQ ID NO: 251623 - DNA, 54 bp, Artificial
  Synthetic oligonucleotide
gtgaacaatctcagagtcccaaacagtgatggaatccacctttgttcgtgtgaa

SEQ ID NO: 251624 - DNA, 54 bp, Artificial
  Synthetic oligonucleotide
gtgatttgtgcttagaacttggtgaacctgcgtgcgtcaagaactgcccgaacg

SEQ ID NO: 251625 - DNA, 54 bp, Artificial
  Synthetic oligonucleotide
tgttgcaattgtagcaggtcctcttgtcatatgtccccatcttagtttcttgcc

SEQ ID NO: 251626 - DNA, 54 bp, Artificial
  Synthetic oligonucleotide
atcggtcgtgtgccaatgttacacccgcccggcatacccagcacaacctttttc

SEQ ID NO: 251627 - DNA, 54 bp, Artificial
  Synthetic oligonucleotide
atttgactctaatagcaccacgtcagagtccattatgttcgctgccacccctct

SEQ ID NO: 251628 - DNA, 54 bp, Artificial
  Synthetic oligonucleotide
gtgcaatcccgcagccttacacagggtgctacagcacgcctcagggagacctac

SEQ ID NO: 251629 - DNA, 54 bp, Artificial
  Synthetic oligonucleotide
accttctctttcaggtccagtcctcttcttgctatgacgtacgctgcagctacg

SEQ ID NO: 251630 - DNA, 54 bp, Artificial
  Synthetic oligonucleotide
acagattatagtgttacgatatgtggaggtactcattatcatgttggggcagta

SEQ ID NO: 251631 - DNA, 60 bp, Artificial
  Synthetic oligonucleotide
atctgcactcgcataagctctagttccacctatcccccaactgtgcaagccgctccacga

SEQ ID NO: 251632 - DNA, 54 bp, Artificial
  Synthetic oligonucleotide
tatggcattttgctcagcgtgggtccccctgcacagctcatgtctttcacctga

SEQ ID NO: 251633 - DNA, 54 bp, Artificial
  Synthetic oligonucleotide
tataaagctccattgctcttgagccccggccaagcttgcattcggcaacccatg

SEQ ID NO: 251634 - DNA, 54 bp, Artificial
  Synthetic oligonucleotide
agggtattctaacttggaacatcctaaatacagggtgtcgaaattcacgacacc

SEQ ID NO: 251635 - DNA, 54 bp, Artificial
  Synthetic oligonucleotide
aggtgtgaggttcaaatcgcacctgtgttgcccggtagaatggaatacccatct

SEQ ID NO: 251636 - DNA, 54 bp, Artificial
  Synthetic oligonucleotide
tgcaattcgcagtttccgcttcttacgcatgtaaggcagcttctgtcgtgtgca

SEQ ID NO: 251637 - DNA, 54 bp, Artificial
  Synthetic oligonucleotide
tctacaggattcacgttggagccttctaaatacccctgcttaactgccccgcta

SEQ ID NO: 251638 - DNA, 54 bp, Artificial
  Synthetic oligonucleotide
gatctatcgtaaacatccaacccttttgccatggtcgtggtgcgtatactatct

SEQ ID NO: 251639 - DNA, 54 bp, Artificial
  Synthetic oligonucleotide
ctttgtaacgatagtcaaaggagctttcgttgcaggaacgtctttactaccatt

SEQ ID NO: 251640 - DNA, 53 bp, Artificial
  Synthetic oligonucleotide
tcaggagccgatatctttgtatgaacccgtatttcaagatagcagtgacacaa

SEQ ID NO: 251641 - DNA, 53 bp, Artificial
  Synthetic oligonucleotide
tccatcgccctcctgcgactaatcgctcgcttatctactttgtcacgccagta

SEQ ID NO: 251642 - DNA, 60 bp, Artificial
  Synthetic oligonucleotide
gtccgctcccccagctgtcgctccaaccttcactaccttcgctgctaccttgctgcctaa

SEQ ID NO: 251643 - DNA, 60 bp, Artificial
  Synthetic oligonucleotide
tatcactgccgatgtcacaacatgcccaatgtttgctgaggttagcctgagcgcctcgtt

SEQ ID NO: 251644 - DNA, 53 bp, Artificial
  Synthetic oligonucleotide
ctataccagcgtactttagcctcaatgccatgtcttctgctctaagacctgat

SEQ ID NO: 251645 - DNA, 53 bp, Artificial
  Synthetic oligonucleotide
atcaagaggcttctgtcataaggacgtacatcgattggcttttggaccttccg

SEQ ID NO: 251646 - DNA, 53 bp, Artificial
  Synthetic oligonucleotide
acatctcctatgcagtatcggatgtaataccggtaaaggcggaagttgcgggt

SEQ ID NO: 251647 - DNA, 53 bp, Artificial
  Synthetic oligonucleotide
tggcagagcaactcccgggtaagacacaccaagcccgagggtatcgcatgctc

SEQ ID NO: 251648 - DNA, 53 bp, Artificial
  Synthetic oligonucleotide
tgcaacatgtatagcttcacaaacctcacccacgaagtcaaaataacctggcg

SEQ ID NO: 251649 - DNA, 53 bp, Artificial
  Synthetic oligonucleotide
tgaccagaccttcaaaagctacatatggcccattttcgtaagaatgtgagttc

SEQ ID NO: 251650 - DNA, 53 bp, Artificial
  Synthetic oligonucleotide
agggcggccctttccatgacaggcgccactgcaggatgcacatgtcttgcgcc

SEQ ID NO: 251651 - DNA, 53 bp, Artificial
  Synthetic oligonucleotide
cccctttgaaaccgctttcataacccgaaaagctcttcacccaccgcatcaat

SEQ ID NO: 251652 - DNA, 53 bp, Artificial
  Synthetic oligonucleotide
gggcaagtttcatacagaacaagtgggtctaagtcaagacaggttgtctcatc

SEQ ID NO: 251653 - DNA, 53 bp, Artificial
  Synthetic oligonucleotide
cattaccactatagttccgtcccaaactgtggagattataaaggatttcgagg

SEQ ID NO: 251654 - DNA, 56 bp, Artificial
  Synthetic oligonucleotide
gtgaaaaacttcgcatagtttttggcttgacattttctcgatggcagtttttggtc

SEQ ID NO: 251655 - DNA, 53 bp, Artificial
  Synthetic oligonucleotide
caggtttgaacgtagcaatttctgttcatcttgaggcaaagacagcaaatctt

SEQ ID NO: 251656 - DNA, 52 bp, Artificial
  Synthetic oligonucleotide
aacgtgtttacaggtttgaggatagatgccgtggaacttaagtcggttttgg

SEQ ID NO: 251657 - DNA, 53 bp, Artificial
  Synthetic oligonucleotide
cttaaacggaagcattgggatgactctgtcaacaagatacacagacgttccgc

SEQ ID NO: 251658 - DNA, 53 bp, Artificial
  Synthetic oligonucleotide
ttgcaacgcacacacccactttgcctgttgtgcgcgcatatccacttgcctca

SEQ ID NO: 251659 - DNA, 53 bp, Artificial
  Synthetic oligonucleotide
ggtctccctgaggcgtgctgtagcaccctgtgtaaggctgcgggattgcaccg

SEQ ID NO: 251660 - DNA, 53 bp, Artificial
  Synthetic oligonucleotide
cgagtggatggtgataagagataggtgaacttgtgagactccagaaatttatg

SEQ ID NO: 251661 - DNA, 53 bp, Artificial
  Synthetic oligonucleotide
cggggcagtgtagccgccgcatcacaaaacctggaacctgcggatagctacta

SEQ ID NO: 251662 - DNA, 53 bp, Artificial
  Synthetic oligonucleotide
gtgacaggaacatctcatgcataaacgatcaccatcctggcgcatgctcaaaa

SEQ ID NO: 251663 - DNA, 53 bp, Artificial
  Synthetic oligonucleotide
ttctattgagtggagcaaggatagtaaatggattgtgatcagcacaagaactc

SEQ ID NO: 251664 - DNA, 53 bp, Artificial
  Synthetic oligonucleotide
attgaaggtggaatcatggtctgctgaccagtactgcggatctcgacaatggt

SEQ ID NO: 251665 - DNA, 60 bp, Artificial
  Synthetic oligonucleotide
atgctaacgcaaacatagactaacgcacgactgacgtcgtgatgtgtgtgtgggcctacc

SEQ ID NO: 251666 - DNA, 53 bp, Artificial
  Synthetic oligonucleotide
ccttggaagcggagcatacggagttggggcggcagcgtacacctatttcggaa

SEQ ID NO: 251667 - DNA, 53 bp, Artificial
  Synthetic oligonucleotide
caacatcagtaccgtcaagaattgccaggtgtacagtgacatttaacatggcc

SEQ ID NO: 251668 - DNA, 52 bp, Artificial
  Synthetic oligonucleotide
ggggcagtacaataaactccgttacacttacaatagttggggccaatcctat

SEQ ID NO: 251669 - DNA, 52 bp, Artificial
  Synthetic oligonucleotide
aacctacagggagtacgttaaggaggcgttagaatttgcgaattgggctcgt

SEQ ID NO: 251670 - DNA, 52 bp, Artificial
  Synthetic oligonucleotide
tttagaaggacttcctaagaagaaagctgaagggcgaattgtcaacattgac

SEQ ID NO: 251671 - DNA, 52 bp, Artificial
  Synthetic oligonucleotide
acaggatatttctcctgacagcaaagttaagatgattgttctcagtccaagc

SEQ ID NO: 251672 - DNA, 52 bp, Artificial
  Synthetic oligonucleotide
ggagtacgttaaggaggcgttagaatttgcgaattgggctcgtactgaaaag

SEQ ID NO: 251673 - DNA, 52 bp, Artificial
  Synthetic oligonucleotide
agtccaaacaacgagtcataaaactctggactatcttttgtaagctcgctca

SEQ ID NO: 251674 - DNA, 52 bp, Artificial
  Synthetic oligonucleotide
gaccgcttatagtagcaacgaggctccattgattaggagtcccactaagggt

SEQ ID NO: 251675 - DNA, 52 bp, Artificial
  Synthetic oligonucleotide
gctcccgctgtggggaaaaacgaaggtagcgttaagctaccgtgctcccgct

SEQ ID NO: 251676 - DNA, 60 bp, Artificial
  Synthetic oligonucleotide
atgctgtgccggaacttttatctgacggcgcaccgcaaagccatctttcacatgaggctg

SEQ ID NO: 251677 - DNA, 52 bp, Artificial
  Synthetic oligonucleotide
ctgtgtaaggctacgggattgcaccgctgtctcccgggactgggagtgtcgt

SEQ ID NO: 251678 - DNA, 52 bp, Artificial
  Synthetic oligonucleotide
atatgagggtcttgtttgtgatgcgatagagtatattgcttcatatggcggc

SEQ ID NO: 251679 - DNA, 51 bp, Artificial
  Synthetic oligonucleotide
agagagctccccctgttgggtcccagccgtttagagcatctcgtgctgcat

SEQ ID NO: 251680 - DNA, 51 bp, Artificial
  Synthetic oligonucleotide
tgtgtgacaaccattctcattacctggtttccatagtcagtaaagtagtcg

SEQ ID NO: 251681 - DNA, 51 bp, Artificial
  Synthetic oligonucleotide
aaacttagtcatggcacagatgtttaacgtatttgacgcaagacgcgccga

SEQ ID NO: 251682 - DNA, 51 bp, Artificial
  Synthetic oligonucleotide
tccggtacctgccctgacttgtatgccgcctctaacttcggccaatcagga

SEQ ID NO: 251683 - DNA, 51 bp, Artificial
  Synthetic oligonucleotide
agacaagtttccgcttgccttaaattctgtcctgcctggcgatatatctat

SEQ ID NO: 251684 - DNA, 51 bp, Artificial
  Synthetic oligonucleotide
aaagcgttgctcttacccggaatgcctatcgttagcctgtaggtcggactc

SEQ ID NO: 251685 - DNA, 51 bp, Artificial
  Synthetic oligonucleotide
acttaccgctcttgtgatagctaggtcagagtagtcaacatttatagacgt

SEQ ID NO: 251686 - DNA, 51 bp, Artificial
  Synthetic oligonucleotide
gcgttattatgttcgctactagcatgtagcctaatgtagagacattaccaa

SEQ ID NO: 251687 - DNA, 60 bp, Artificial
  Synthetic oligonucleotide
tatgcaagagagcgttacagagaagttgagcgtgagataagtcgtgagagaaagcttttc

SEQ ID NO: 251688 - DNA, 51 bp, Artificial
  Synthetic oligonucleotide
cgcataagcggtatccagtgccagactcttggtgctccaacgtaaatcatt

SEQ ID NO: 251689 - DNA, 51 bp, Artificial
  Synthetic oligonucleotide
ccacgtagttccagtccacatcgtcaaggtgtcctgccggacaggccctga

SEQ ID NO: 251690 - DNA, 51 bp, Artificial
  Synthetic oligonucleotide
caagccttattgtctgtacagaacatccaaactcacttgctagttcctcat

SEQ ID NO: 251691 - DNA, 51 bp, Artificial
  Synthetic oligonucleotide
ggtagaagactccggcatcacctactttagtttcagatcgcaacttaagag

SEQ ID NO: 251692 - DNA, 51 bp, Artificial
  Synthetic oligonucleotide
tatattcgcgctatacaaacaagctgtatcgtagacgtatcaatgttccga

SEQ ID NO: 251693 - DNA, 51 bp, Artificial
  Synthetic oligonucleotide
ctccctcacaagattagtcttagccggacctcctatcgaaggattacacgg

SEQ ID NO: 251694 - DNA, 51 bp, Artificial
  Synthetic oligonucleotide
gtgtaactcttgacaactacaatcctaacatcactgcaaaacaagctggga

SEQ ID NO: 251695 - DNA, 50 bp, Artificial
  Synthetic oligonucleotide
atgccggtactgcccttcgtccgggtccccaatatccaggaggcggtaga

SEQ ID NO: 251696 - DNA, 50 bp, Artificial
  Synthetic oligonucleotide
ccgaatgcgtgggtatggttataccgggagccctcagaggagccggcgat

SEQ ID NO: 251697 - DNA, 50 bp, Artificial
  Synthetic oligonucleotide
ggagctggtaatgtggcagcaagtgctgcggtaggagcatgggcgggagc

SEQ ID NO: 251698 - DNA, 60 bp, Artificial
  Synthetic oligonucleotide
gtctagcagtgcttattattggataaagaaactgcaggatgaaggatatctcaaaagggt

SEQ ID NO: 251699 - DNA, 50 bp, Artificial
  Synthetic oligonucleotide
acagcctgaaggatgacctgaacctttacctcagcggccagccagcggca

SEQ ID NO: 251700 - DNA, 50 bp, Artificial
  Synthetic oligonucleotide
cacccgccggcactcctttccctccggcctccggcaaaataacggattaa

SEQ ID NO: 251701 - DNA, 50 bp, Artificial
  Synthetic oligonucleotide
cggtggggcatggctcggtttacatgtatgggaacactacttgttcacga

SEQ ID NO: 251702 - DNA, 50 bp, Artificial
  Synthetic oligonucleotide
cagagggcccacaaggtgaagtaccgcccccgtagcagcgcacgtccggg

SEQ ID NO: 251703 - DNA, 50 bp, Artificial
  Synthetic oligonucleotide
cagcatcgaatgttaaagctattctcttgtcattcctgtcaacacagtag

SEQ ID NO: 251704 - DNA, 50 bp, Artificial
  Synthetic oligonucleotide
ccactggaaggagaaagacctctgtcgccagggtgtggcttacgcctgga

SEQ ID NO: 251705 - DNA, 50 bp, Artificial
  Synthetic oligonucleotide
cagccctggacgcgctatccgacctggggagggcccaactgatacagcta

SEQ ID NO: 251706 - DNA, 50 bp, Artificial
  Synthetic oligonucleotide
aaggggcaagtgcccgacccgggacgtaatcgagctggcgagggaaaata

SEQ ID NO: 251707 - DNA, 50 bp, Artificial
  Synthetic oligonucleotide
ctttctgagtaaccattggcgactaagacatgagcaggtcagtgtatgag

SEQ ID NO: 251708 - DNA, 50 bp, Artificial
  Synthetic oligonucleotide
aagccccgcgggatatgcggttccggtttgatagatatcgtggccgccat

SEQ ID NO: 251709 - DNA, 59 bp, Artificial
  Synthetic oligonucleotide
attgtgccaatctacgccagcctgtggtcgccttgttctcctcttgtttcttagcagtt

SEQ ID NO: 251710 - DNA, 50 bp, Artificial
  Synthetic oligonucleotide
cagctcaaagccctcaggcccgatctagacattgtgccggtcaggggcaa

SEQ ID NO: 251711 - DNA, 50 bp, Artificial
  Synthetic oligonucleotide
aacttctctgccccggtagcccctcagctttttcgggaggacgatgggga

SEQ ID NO: 251712 - DNA, 50 bp, Artificial
  Synthetic oligonucleotide
caggataacgagcgatgcggtggtcccttatcccccgggagtacccctgc

SEQ ID NO: 251713 - DNA, 50 bp, Artificial
  Synthetic oligonucleotide
cagggggcaaggcagcggtttatgtggtaattgaggcagggccgctcttt

SEQ ID NO: 251714 - DNA, 50 bp, Artificial
  Synthetic oligonucleotide
ccgggcctgactggcggtaaggcgaggcgagctgaaggggtagccgaaca

SEQ ID NO: 251715 - DNA, 50 bp, Artificial
  Synthetic oligonucleotide
catccccgggaaatcgatcccccttccggcggtaacccaaaaggacgtgc

SEQ ID NO: 251716 - DNA, 50 bp, Artificial
  Synthetic oligonucleotide
ccggtagcccctcagctttttcgggaggacgatggggacccccggaatga

SEQ ID NO: 251717 - DNA, 50 bp, Artificial
  Synthetic oligonucleotide
agcctttaacgggtgcaggtacccggctgcgaaggataccgtccggtatg

SEQ ID NO: 251718 - DNA, 50 bp, Artificial
  Synthetic oligonucleotide
agcagaaccttcggctaagaggggccaagggtacaaccggtacccaagcg

SEQ ID NO: 251719 - DNA, 50 bp, Artificial
  Synthetic oligonucleotide
agctttcggcaggataacgagcgatgcggtggtcccttatcccccgggag

SEQ ID NO: 251720 - DNA, 60 bp, Artificial
  Synthetic oligonucleotide
ttactaccacttgctatatgcacagctgggcaggatataaacactgtcaagtcgtcaagg

SEQ ID NO: 251721 - DNA, 50 bp, Artificial
  Synthetic oligonucleotide
aggaccacccggtgaatctggacccacgtgcctttaaccgcatcaggcat

SEQ ID NO: 251722 - DNA, 50 bp, Artificial
  Synthetic oligonucleotide
aggccgaaatcagcgggtgtatccccttcacgagggtggggcttcccacg

SEQ ID NO: 251723 - DNA, 50 bp, Artificial
  Synthetic oligonucleotide
agagacggtatgggaccgcgctcgcgctatgcaaccccaatgcggcttcg

SEQ ID NO: 251724 - DNA, 50 bp, Artificial
  Synthetic oligonucleotide
agaccgctgtgagggtaacctttatgtttgctctgccggcggccatgggg

SEQ ID NO: 251725 - DNA, 50 bp, Artificial
  Synthetic oligonucleotide
aggcggctgggaacgagaaaatctctggccccttcgggtgtgctgcgggt

SEQ ID NO: 251726 - DNA, 50 bp, Artificial
  Synthetic oligonucleotide
ccgtgaggttgggcattcccttgggaacctgggccatagttgtgccgccg

SEQ ID NO: 251727 - DNA, 50 bp, Artificial
  Synthetic oligonucleotide
tacggtgcacttggtataagggtaacctcacctgatgaggtggatagcgc

SEQ ID NO: 251728 - DNA, 50 bp, Artificial
  Synthetic oligonucleotide
actgtaaagtttccgggtgtatggtgggggtctgccgcgttagcgccgta

SEQ ID NO: 251729 - DNA, 50 bp, Artificial
  Synthetic oligonucleotide
tacaaccggctatgactatatagtaaacgagaaaagacacacagtttcgc

SEQ ID NO: 251730 - DNA, 50 bp, Artificial
  Synthetic oligonucleotide
tgcaagaggtgccgtacctatttcctccagagccttgtttacttcagcgg

SEQ ID NO: 251731 - DNA, 60 bp, Artificial
  Synthetic oligonucleotide
catagaaaaagcccagtagcaggttgtgcgtaccgtgacatgctactgtggaagacaagt

SEQ ID NO: 251732 - DNA, 50 bp, Artificial
  Synthetic oligonucleotide
ccccatcgcagaatggtcatggcgcgtccagaaacctgacgggacgtgga

SEQ ID NO: 251733 - DNA, 50 bp, Artificial
  Synthetic oligonucleotide
atagccccggtggttccccgcataccgaactgtatcccgcctccctctag

SEQ ID NO: 251734 - DNA, 50 bp, Artificial
  Synthetic oligonucleotide
atatcggcggctatgttatgagccgcacactcgccggactgcatcgcaga

SEQ ID NO: 251735 - DNA, 50 bp, Artificial
  Synthetic oligonucleotide
cccgcccttacgggaggctcttcggaggatcgtcgcggaaaaccacctgg

SEQ ID NO: 251736 - DNA, 50 bp, Artificial
  Synthetic oligonucleotide
acgctttttccacgcgcatcggagggtacagcacgggtcattgtgaggct

SEQ ID NO: 251737 - DNA, 50 bp, Artificial
  Synthetic oligonucleotide
gtgcttattaatccgggttccacatcacttagcaaacgagaggacaagac

SEQ ID NO: 251738 - DNA, 50 bp, Artificial
  Synthetic oligonucleotide
acctgctttgattagctcatccttataagttactattgggtcttgagctg

SEQ ID NO: 251739 - DNA, 50 bp, Artificial
  Synthetic oligonucleotide
tgtgatggacaattataaaggtgcaattaagcctttttgcaatgtcgttc

SEQ ID NO: 251740 - DNA, 50 bp, Artificial
  Synthetic oligonucleotide
atcctgtacgtaaggcccgggttgactgacggacgacgagcctgtggggt

SEQ ID NO: 251741 - DNA, 50 bp, Artificial
  Synthetic oligonucleotide
tgtgctttacaagtttccgaaaggctcaactgtgtatggtccgcttcagg

SEQ ID NO: 251742 - DNA, 57 bp, Artificial
  Synthetic oligonucleotide
ggggattaaagtgcggacttagtggcgatctggttgtgtgttgggcaaccgcacacc

SEQ ID NO: 251743 - DNA, 50 bp, Artificial
  Synthetic oligonucleotide
ccagtgattgctctcaagagaggaggagctgttgaaacggtcgaggaagg

SEQ ID NO: 251744 - DNA, 57 bp, Artificial
  Synthetic oligonucleotide
tcaagtttggctactgcgtaaaggaaagagtaagagacgagaagggaagatttgcag

SEQ ID NO: 251745 - DNA, 60 bp, Artificial
  Synthetic oligonucleotide
ggcagtctcaagttcactgtgcgcattttcatagctttcaccccctgttattgttatagc

SEQ ID NO: 251746 - DNA, 59 bp, Artificial
  Synthetic oligonucleotide
ttgaaaccaccgaaaagactcagctattcctatcccagaggtagctgagtaatgtagaa

SEQ ID NO: 251747 - DNA, 56 bp, Artificial
  Synthetic oligonucleotide
ttgacggagttaagcttgaggtttgcgagtaaggcagtagttcgtgagaagtaaac

SEQ ID NO: 251748 - DNA, 60 bp, Artificial
  Synthetic oligonucleotide
ggagttcagccagcttggtctgtagagttgcaatcaagctgtctttttgagctatcagct

SEQ ID NO: 251749 - DNA, 60 bp, Artificial
  Synthetic oligonucleotide
ccgcaatggtcgtgacagcgagtcaaagcggctcggagtaaaaagagcagatggccagtt

SEQ ID NO: 251750 - DNA, 60 bp, Artificial
  Synthetic oligonucleotide
ctttgccctgccaccaatcttgggtggaattttgccgctaaggtcttcgcgccatgctga

SEQ ID NO: 251751 - DNA, 54 bp, Artificial
  Synthetic oligonucleotide
gctttaaatgacaatagactttcgtggaaagctaaggggttactgtgttactta

SEQ ID NO: 251752 - DNA, 60 bp, Artificial
  Synthetic oligonucleotide
cccagctgtggctcaactataggtccgcctgccgaaagtgaatatgcagtcgacccagta

SEQ ID NO: 251753 - DNA, 54 bp, Artificial
  Synthetic oligonucleotide
tttccgaatagtttatggggtgtcgtgaatttcgacaccctgtatttaggatgt

SEQ ID NO: 251754 - DNA, 57 bp, Artificial
  Synthetic oligonucleotide
tttgagagtcttgaaatctccaagcataaactcacgttttaaactttcccagtcata

SEQ ID NO: 251755 - DNA, 60 bp, Artificial
  Synthetic oligonucleotide
tcagatttctcggtcttaatcctgcatagttgttaatccctcagcattcaatcaacttgg

SEQ ID NO: 251756 - DNA, 58 bp, Artificial
  Synthetic oligonucleotide
aaattgacagggtggtatgtttaagaagtcaggtacagagcaggtatgcaaacttgaa

SEQ ID NO: 251757 - DNA, 57 bp, Artificial
  Synthetic oligonucleotide
aaagcttttcgacagagttgaggatctcgttcgtagtaggcttacaaggctctatcc

SEQ ID NO: 251758 - DNA, 54 bp, Artificial
  Synthetic oligonucleotide
gcttaccttaacatttcttaacacaggacagcgtttataaaacaatttgacact

SEQ ID NO: 251759 - DNA, 60 bp, Artificial
  Synthetic oligonucleotide
tttgcgctggacgtaggtactggtagagcacgtatggcttacgcattggccaggtacggc

SEQ ID NO: 251760 - DNA, 59 bp, Artificial
  Synthetic oligonucleotide
tttggagttttgccgcatctgagagtttagcagtttgcaaaacaaagttcgcagttaga

SEQ ID NO: 251761 - DNA, 57 bp, Artificial
  Synthetic oligonucleotide
actttgaccgctgcggtcaaaatcagctctgttaaattgtcaacctgtcacgttaaa

SEQ ID NO: 251762 - DNA, 60 bp, Artificial
  Synthetic oligonucleotide
ctctattccaagccttctgatgtacttataaactgttgttctcgatatacccagctcatc

SEQ ID NO: 251763 - DNA, 55 bp, Artificial
  Synthetic oligonucleotide
tgagcaagaggggcgctgcaaccccctttgaaaccgctttcataacccgaaaagc

SEQ ID NO: 251764 - DNA, 57 bp, Artificial
  Synthetic oligonucleotide
acgtttgcgataccgtcgacgcttgattggagcggacaacctgatacatggaacggg

SEQ ID NO: 251765 - DNA, 56 bp, Artificial
  Synthetic oligonucleotide
tgcgttcactccgttcactctgttcactcacccccgaaaaatttagttggctcaag

SEQ ID NO: 251766 - DNA, 59 bp, Artificial
  Synthetic oligonucleotide
agcagggagctgtccgttagctttgtgttagcatccttctgttagcctttggcacgtta

SEQ ID NO: 251767 - DNA, 56 bp, Artificial
  Synthetic oligonucleotide
acgtggaatcctgctcgtgtggaaggcatttttagtttctcaacctacagggagta

SEQ ID NO: 251768 - DNA, 59 bp, Artificial
  Synthetic oligonucleotide
tgggcctacctacacacaaaaagaactaacaacagctgactaacgtctgaagagctcta

SEQ ID NO: 251769 - DNA, 55 bp, Artificial
  Synthetic oligonucleotide
ggttgtcgacaattaaaagctggctttgtaccttggcaaactgtcttttttctga

SEQ ID NO: 251770 - DNA, 60 bp, Artificial
  Synthetic oligonucleotide
tgtaccattgaaagatgggaaagacaatacacaaaatagtcctgcaaaagccttgcattc

SEQ ID NO: 251771 - DNA, 58 bp, Artificial
  Synthetic oligonucleotide
cagcgggagaaccagcgttatattggggtgaatcggcaagctttggctgccgtaggga

SEQ ID NO: 251772 - DNA, 57 bp, Artificial
  Synthetic oligonucleotide
accttccacccagtagcaaatctcttctaccttgttttgcgagcgttagcagggagc

SEQ ID NO: 251773 - DNA, 60 bp, Artificial
  Synthetic oligonucleotide
caggaggttgtcagactatgaagaatgataaagttgtttctatacgtattgatagtcgtc

SEQ ID NO: 251774 - DNA, 60 bp, Artificial
  Synthetic oligonucleotide
accggtcttgttttcacatgccagttcccgcacgcaacacctgctgcgtttgcctcgcac

SEQ ID NO: 251775 - DNA, 56 bp, Artificial
  Synthetic oligonucleotide
accgctaatgctgcgtttgtagcctcccctttggggattgaaacaggaggtcgcgc

SEQ ID NO: 251776 - DNA, 60 bp, Artificial
  Synthetic oligonucleotide
cagtttaggcagcaaggtagcagcgaaggtagtgaaggttggagcgacagctgggggagc

SEQ ID NO: 251777 - DNA, 60 bp, Artificial
  Synthetic oligonucleotide
gcaaaatgctattgcactgtgcccgcttggcaaaccacctctcagtggcgtcccttttcc

SEQ ID NO: 251778 - DNA, 60 bp, Artificial
  Synthetic oligonucleotide
tgtttgacagggtccccataaggatggacgtacacagctataggagggaatatgcaagag

SEQ ID NO: 251779 - DNA, 54 bp, Artificial
  Synthetic oligonucleotide
acagggggtatattgatatatcccccctgttttttgtgcgtctacaggacctta

SEQ ID NO: 251780 - DNA, 57 bp, Artificial
  Synthetic oligonucleotide
gcgggtggtcggagtacaatccccataagggcgaagaccctgcatacgagcataacc

SEQ ID NO: 251781 - DNA, 52 bp, Artificial
  Synthetic oligonucleotide
ccccttagcgggagcacggaagcttaacgctaccttcgtttttccccacagc

SEQ ID NO: 251782 - DNA, 59 bp, Artificial
  Synthetic oligonucleotide
cttacatctcagctataacaagaaactactgcattacagtttctatgcctgtatatgac

SEQ ID NO: 251783 - DNA, 59 bp, Artificial
  Synthetic oligonucleotide
ttgccccatgcagcgggagaaccagcgttatattggggtgaatcggcaagctttggctg

SEQ ID NO: 251784 - DNA, 59 bp, Artificial
  Synthetic oligonucleotide
tctctggtgtgaggctcaaatcgctcatgcgcgtaagaacaccgtgcaccctcatgata

SEQ ID NO: 251785 - DNA, 54 bp, Artificial
  Synthetic oligonucleotide
ctaaaacttataaagtcgagtgggtttgaagaggtgtatgtattgacaaaagac

SEQ ID NO: 251786 - DNA, 57 bp, Artificial
  Synthetic oligonucleotide
tattccctgaacacttcttggcagagcaactcccgggtaagacacaccaagcccgag

SEQ ID NO: 251787 - DNA, 58 bp, Artificial
  Synthetic oligonucleotide
cctggaccagacgacgatgtcataactcgcttgccacagcttgatgcgccgtaagcca

SEQ ID NO: 251788 - DNA, 60 bp, Artificial
  Synthetic oligonucleotide
agcacgggcctatgtgtctgaatatttgcagtcgcatatagacaaagggtatagcgcgtg

SEQ ID NO: 251789 - DNA, 57 bp, Artificial
  Synthetic oligonucleotide
aggccttgcaacagatggggatgcagacaggtttggtgttgtaaatccggacgggga

SEQ ID NO: 251790 - DNA, 58 bp, Artificial
  Synthetic oligonucleotide
aggctcaaatcgctcatgcgcgtaagaacaccgtgcaccctcatgatagggggcgaac

SEQ ID NO: 251791 - DNA, 54 bp, Artificial
  Synthetic oligonucleotide
agggaaaggcaatagccgtggacggcgttccgattccgctttgtttgtgcgtta

SEQ ID NO: 251792 - DNA, 57 bp, Artificial
  Synthetic oligonucleotide
ccaacgtactgaagataggtcaccatgggtctaaatactcatcaacttcaacgtttc

SEQ ID NO: 251793 - DNA, 57 bp, Artificial
  Synthetic oligonucleotide
gtgatactctaaagctcattactccaattagtattgagaacttaccagaacaagagg

SEQ ID NO: 251794 - DNA, 57 bp, Artificial
  Synthetic oligonucleotide
gatatgttcctaactttgcagattttagctacacgcttgttggaagttttgaactag

SEQ ID NO: 251795 - DNA, 57 bp, Artificial
  Synthetic oligonucleotide
tggtgaaatagcagacccgacaggctcctgtcatgcacccctgcggcacacgcgaaa

SEQ ID NO: 251796 - DNA, 57 bp, Artificial
  Synthetic oligonucleotide
gactgttagctttattgatgtcgggcaaggagatagtatcatagtccagactccaca

SEQ ID NO: 251797 - DNA, 57 bp, Artificial
  Synthetic oligonucleotide
ccgtgcacccattgcaaggatgttagcgttgttgtgagcccgtgcagccttggcaga

SEQ ID NO: 251798 - DNA, 57 bp, Artificial
  Synthetic oligonucleotide
ttggcacagggggcaaggcacaccttttgctctctggcgggatagacagccccgttg

SEQ ID NO: 251799 - DNA, 58 bp, Artificial
  Synthetic oligonucleotide
agatggcaaaatacctatgtagcttttggactgtgtctttcctaatcacttcgctttc

SEQ ID NO: 251800 - DNA, 55 bp, Artificial
  Synthetic oligonucleotide
gcggttaatcccttctggaaaggtgctattctacccgcacccttgatatgttccc

SEQ ID NO: 251801 - DNA, 57 bp, Artificial
  Synthetic oligonucleotide
agagtactggcgtgacaaagtagataagcgagcgattagtcgcaggagggcgatgga

SEQ ID NO: 251802 - DNA, 56 bp, Artificial
  Synthetic oligonucleotide
ggccgtgaggcgtatgtgaaaagggtggtagcgcgatcaaactcgccccttaatgg

SEQ ID NO: 251803 - DNA, 56 bp, Artificial
  Synthetic oligonucleotide
ggcagtcaaggtgcgcttttgagcggttctgccgagcctctaaaattccgcgcgag

SEQ ID NO: 251804 - DNA, 56 bp, Artificial
  Synthetic oligonucleotide
ccagtctgtagagaataccgtggtctatgcacagcccccatccgggaaaaggccgg

SEQ ID NO: 251805 - DNA, 56 bp, Artificial
  Synthetic oligonucleotide
ccgaagctagggagaggctcgctgccacagcccggtatgcttttaaggtgcatacc

SEQ ID NO: 251806 - DNA, 52 bp, Artificial
  Synthetic oligonucleotide
ttgtcaaggtggggggatataccaaagttttataccccctatagggtatatg

SEQ ID NO: 251807 - DNA, 56 bp, Artificial
  Synthetic oligonucleotide
tttgcagggtacatgtatactgtctatgaacgtcctattgggagcaacaatgcccc

SEQ ID NO: 251808 - DNA, 56 bp, Artificial
  Synthetic oligonucleotide
gtgctatagatttgcatacagaatgccagtatattcaaattgctcactttccctac

SEQ ID NO: 251809 - DNA, 56 bp, Artificial
  Synthetic oligonucleotide
gagaataccgtggtctatgcacagcccccatccgggaaaaggccgggtcgtgtaca

SEQ ID NO: 251810 - DNA, 55 bp, Artificial
  Synthetic oligonucleotide
ccacgccattagcggaaagcatgctgtaccatataccggaaacgattacccatga

SEQ ID NO: 251811 - DNA, 55 bp, Artificial
  Synthetic oligonucleotide
gcgagctgcctgtcccgataaggaatatattacgggctttatatagttcggtaac

SEQ ID NO: 251812 - DNA, 55 bp, Artificial
  Synthetic oligonucleotide
agtcaataggagggagcttcaccttgaatagcgagggaaatatactgagagcttt

SEQ ID NO: 251813 - DNA, 55 bp, Artificial
  Synthetic oligonucleotide
agcggtattcgatacgaggaatgctactaagggtgtgaagttgcataaagagaac

SEQ ID NO: 251814 - DNA, 55 bp, Artificial
  Synthetic oligonucleotide
agccttacggctccgggcataggcaaagaggtgggttcatacgccggcggatacc

SEQ ID NO: 251815 - DNA, 55 bp, Artificial
  Synthetic oligonucleotide
ttgctcgcatcttctgttcatggctttaacccatgcgtttacagaatagcatccg

SEQ ID NO: 251816 - DNA, 55 bp, Artificial
  Synthetic oligonucleotide
ggctattatcatagtaacgacagggtacccgtgtatataaaatcctccgttggcc

SEQ ID NO: 251817 - DNA, 55 bp, Artificial
  Synthetic oligonucleotide
agccatagttaatgccggcgatagggatgctgtcgttacaggtagacctacgggg

SEQ ID NO: 251818 - DNA, 55 bp, Artificial
  Synthetic oligonucleotide
ttattcctataagagcgcgtgaaaatgtgctgcgtatagcccgcgacacaaaccg

SEQ ID NO: 251819 - DNA, 55 bp, Artificial
  Synthetic oligonucleotide
gggttgtcttggcccttatagcgccgggataatccgtgatcttcaaggactcatg

SEQ ID NO: 251820 - DNA, 55 bp, Artificial
  Synthetic oligonucleotide
ttacctttgtaagcgtatacacgcaagctgcgggcattataggttcgcaatggcg

SEQ ID NO: 251821 - DNA, 55 bp, Artificial
  Synthetic oligonucleotide
ccacacaaagctcagtttgctatggtatgccaccctgtccaactcttgtctcaca

SEQ ID NO: 251822 - DNA, 55 bp, Artificial
  Synthetic oligonucleotide
tgatctcttccttcgatataccatcagccacctccctaccgctataatagctctc

SEQ ID NO: 251823 - DNA, 55 bp, Artificial
  Synthetic oligonucleotide
gtgcaatggtacgggctataaaggaagacaaggcgtgtttgagataatgcgtctg

SEQ ID NO: 251824 - DNA, 55 bp, Artificial
  Synthetic oligonucleotide
tacccggcgtagagcatgctaccagagtatttcaacgcggtatggtggatgtgac

SEQ ID NO: 251825 - DNA, 55 bp, Artificial
  Synthetic oligonucleotide
tacggaaattatgatgagctgttgtctgacccggatatacaggcggtttacatac

SEQ ID NO: 251826 - DNA, 54 bp, Artificial
  Synthetic oligonucleotide
acagatagctctccatcaacctaatgttgacgacagaccgacgattattaaccg

SEQ ID NO: 251827 - DNA, 54 bp, Artificial
  Synthetic oligonucleotide
atccgcgactatatcgcccggttttatgcgagcaaaattcgcaagcaacaccgc

SEQ ID NO: 251828 - DNA, 54 bp, Artificial
  Synthetic oligonucleotide
ggttcaaatcggggcggccgaaatgcccatatgccgctacctgcctgtatatcg

SEQ ID NO: 251829 - DNA, 54 bp, Artificial
  Synthetic oligonucleotide
gcgatccacccaagacgctctgtagtgcgttacaccagacggaatgtaggctcg

SEQ ID NO: 251830 - DNA, 53 bp, Artificial
  Synthetic oligonucleotide
atcctggcctatattcaagcgacggaagttcgcgctgtaatcgacctcccatc

SEQ ID NO: 251831 - DNA, 53 bp, Artificial
  Synthetic oligonucleotide
ggccgttcataatccgcgccatagttatactaccacccaaatatggaacacac

SEQ ID NO: 251832 - DNA, 55 bp, Artificial
  Synthetic oligonucleotide
catcggttgtgctgctgtcaatagccgtgatggactgatgtgtgcgccccgtgtc

SEQ ID NO: 251833 - DNA, 51 bp, Artificial
  Synthetic oligonucleotide
tgccggagacgtaatagcgtcgggaggcgtatcggatttggacgatataaa

SEQ ID NO: 251834 - DNA, 50 bp, Artificial
  Synthetic oligonucleotide
cgagccggggcaaaagcaaaccgtcagcttcaccgtagagccacagcaca

SEQ ID NO: 251835 - DNA, 50 bp, Artificial
  Synthetic oligonucleotide
cgacgctgcgcaataggcctgtcccaaagtgaaatcgggcgaagccacca

SEQ ID NO: 251836 - DNA, 50 bp, Artificial
  Synthetic oligonucleotide
cctttggaaagcccagccgcgttaccgcttcagcctatgccggccgcgaa

SEQ ID NO: 251837 - DNA, 50 bp, Artificial
  Synthetic oligonucleotide
ccgtggcttatagcgcagggcagactccggtaggcccgtttgaaaaggct

SEQ ID NO: 251838 - DNA, 50 bp, Artificial
  Synthetic oligonucleotide
ccgggggcctccgtcatgaagctgacaagcgttgagttgggtgccgtata

SEQ ID NO: 251839 - DNA, 50 bp, Artificial
  Synthetic oligonucleotide
ccgcaaggtccgattgtggaggctcaacgactcatggctgaggcgtacgg

SEQ ID NO: 251840 - DNA, 50 bp, Artificial
  Synthetic oligonucleotide
ccgagggatgaaagccctctacccgacggctcaaggctccgcgatacgca

SEQ ID NO: 251841 - DNA, 50 bp, Artificial
  Synthetic oligonucleotide
aaaagacgggggcattcgaggtatgtgaccaactcgagggggcaccggcc

SEQ ID NO: 251842 - DNA, 50 bp, Artificial
  Synthetic oligonucleotide
aaccggtttgcatcccggagctgccaggcaacgagcaccagtgccgcaat

SEQ ID NO: 251843 - DNA, 55 bp, Artificial
  Synthetic oligonucleotide
ccggaaagatggctaactgatgctctagatgatttggcatcacgtgcagataaat

SEQ ID NO: 251844 - DNA, 50 bp, Artificial
  Synthetic oligonucleotide
aacctccgcgtttcgtcctggctgctatcgctgtggagaggttaccgcct

SEQ ID NO: 251845 - DNA, 50 bp, Artificial
  Synthetic oligonucleotide
aatggctgcttttacggcagcgcgactctccacagcatccgccggactta

SEQ ID NO: 251846 - DNA, 50 bp, Artificial
  Synthetic oligonucleotide
acgcatggcgggaggcacgccgatagaggtgcctgcaataggggtatgcg

SEQ ID NO: 251847 - DNA, 50 bp, Artificial
  Synthetic oligonucleotide
acggctgtacaggacagggcgggcatccggtgaggcaattcgacgccgta

SEQ ID NO: 251848 - DNA, 50 bp, Artificial
  Synthetic oligonucleotide
acggtctttggcaaggtacctgttggggtggcaggcgtagctaagcgcca

SEQ ID NO: 251849 - DNA, 50 bp, Artificial
  Synthetic oligonucleotide
agatgagccgcgtgcgccaggtattgccagggctgctttatgcctaccct

SEQ ID NO: 251850 - DNA, 50 bp, Artificial
  Synthetic oligonucleotide
agcatacaacagcaggccgccttgggtaccagtttcggcgcggttacgcg

SEQ ID NO: 251851 - DNA, 50 bp, Artificial
  Synthetic oligonucleotide
agcatcggacagcgacgtggaggtatttttgttgtccgccaagcccggca

SEQ ID NO: 251852 - DNA, 50 bp, Artificial
  Synthetic oligonucleotide
agccctctacccgacggctcaaggctccgcgatacgcaatgcggcttgtt

SEQ ID NO: 251853 - DNA, 50 bp, Artificial
  Synthetic oligonucleotide
agccgccaatatgcccccgctggagcaattcaagaccaaccacagcactc

SEQ ID NO: 251854 - DNA, 55 bp, Artificial
  Synthetic oligonucleotide
cgagctgcgttcactataaacggtactgtaatgactgctcagctattgaacagca

SEQ ID NO: 251855 - DNA, 50 bp, Artificial
  Synthetic oligonucleotide
aggcagtttgtgcgctagtcgctgtttctttgtcatggcacccgtgccgc

SEQ ID NO: 251856 - DNA, 50 bp, Artificial
  Synthetic oligonucleotide
agttgtccgcccaccttatcgtggataccatgtcgcaccaggctgcccat

SEQ ID NO: 251857 - DNA, 50 bp, Artificial
  Synthetic oligonucleotide
atctacgcctaagtgccaggcaagcagtaggccaaagcgctgtgcaggcg

SEQ ID NO: 251858 - DNA, 50 bp, Artificial
  Synthetic oligonucleotide
atgcgcgatccaccgaaaggcccgcaatgattccggctatccacaacgtt

SEQ ID NO: 251859 - DNA, 50 bp, Artificial
  Synthetic oligonucleotide
atggccgtcacaaaaacgtctatgcgcttgtccacaccgcgaggccccac

SEQ ID NO: 251860 - DNA, 50 bp, Artificial
  Synthetic oligonucleotide
cacacgcgggaattgctccgtaagctcgcgcccgaccatagctgctatta

SEQ ID NO: 251861 - DNA, 50 bp, Artificial
  Synthetic oligonucleotide
cacggatgcgaattgcggccgttagcctgttcgagtggagcgagcagcta

SEQ ID NO: 251862 - DNA, 50 bp, Artificial
  Synthetic oligonucleotide
cactcggtaggcggttggaccgcacttataggttccgcaatggtcggccc

SEQ ID NO: 251863 - DNA, 50 bp, Artificial
  Synthetic oligonucleotide
cagagcccggccggtatctccggtaggcgaggtactatggaccgagcatg

SEQ ID NO: 251864 - DNA, 50 bp, Artificial
  Synthetic oligonucleotide
cagcagcgtaccagcttgctagggggacaggcgctggaccgatatcttcg

SEQ ID NO: 251865 - DNA, 55 bp, Artificial
  Synthetic oligonucleotide
caataagattttctatagaacctctgtgcgcgaattgtccggacgttataaccgg

SEQ ID NO: 251866 - DNA, 50 bp, Artificial
  Synthetic oligonucleotide
cagccgcgttaccgcttcagcctatgccggccgcgaaggtatagtcaata

SEQ ID NO: 251867 - DNA, 50 bp, Artificial
  Synthetic oligonucleotide
cagcgctgtattggaggccgacggtacgcctatgacggtgcgttctgcac

SEQ ID NO: 251868 - DNA, 50 bp, Artificial
  Synthetic oligonucleotide
cagggcgggcatccggtgaggcaattcgacgccgtattcggagcatatgg

SEQ ID NO: 251869 - DNA, 50 bp, Artificial
  Synthetic oligonucleotide
catgcgtatgccaccgaacggcattatggcccgtttaagcggctggtcgg

SEQ ID NO: 251870 - DNA, 50 bp, Artificial
  Synthetic oligonucleotide
cccgacggttgctgcccctcgttattttccccttcttgcggcggttgtgt

SEQ ID NO: 251871 - DNA, 53 bp, Artificial
  Synthetic oligonucleotide
cggttagagaagaccggcgtaatgtaatcactaacccggagctttcctactgg

SEQ ID NO: 251872 - DNA, 55 bp, Artificial
  Synthetic oligonucleotide
ctcgtgcgtccttctacgatccgggtatttcgcggcctcaggtaaccgctcacca

SEQ ID NO: 251873 - DNA, 55 bp, Artificial
  Synthetic oligonucleotide
gccgaactaggcacaattacatccagcgggcttaaattggacagatttaaatatg

SEQ ID NO: 251874 - DNA, 56 bp, Artificial
  Synthetic oligonucleotide
ttcctggaccgcttacaacttcacttgtaggtcctttaccactgtattctatatag

SEQ ID NO: 251875 - DNA, 55 bp, Artificial
  Synthetic oligonucleotide
caccacggcgaacaacctttctatgccactgctaggagcccttcagtcgagtctt

SEQ ID NO: 251876 - DNA, 54 bp, Artificial
  Synthetic oligonucleotide
gtagccagaaagtacggcgagacagagtaacaaggttaccaaagtataaaggga

SEQ ID NO: 251877 - DNA, 55 bp, Artificial
  Synthetic oligonucleotide
ggtcctcttcaaaattaagatcgagataatactggtcacctatcttacctacact

SEQ ID NO: 251878 - DNA, 55 bp, Artificial
  Synthetic oligonucleotide
cccgaggtttctgtgataactacgccagtaggtgttattgtagataaccaggcca

SEQ ID NO: 251879 - DNA, 55 bp, Artificial
  Synthetic oligonucleotide
ggccagcaatttctgtggcactccagtttaatactaggcctactactcggttatc

SEQ ID NO: 251880 - DNA, 55 bp, Artificial
  Synthetic oligonucleotide
ccgcttgagtccttgctccacggtattatccgtcagaacatgggttgcacccacc

SEQ ID NO: 251881 - DNA, 55 bp, Artificial
  Synthetic oligonucleotide
gctgtgaactctatgtagctcctggttcacggtttgaacgcaaggccaaaagtgc

SEQ ID NO: 251882 - DNA, 55 bp, Artificial
  Synthetic oligonucleotide
gctaaagagaggggaaactttcctgcctatccaggaagtatttgggacaatcctg

SEQ ID NO: 251883 - DNA, 55 bp, Artificial
  Synthetic oligonucleotide
gagtggggacttcaatagtagtacctaaaacggcctcagagaactttatttcatg

SEQ ID NO: 251884 - DNA, 55 bp, Artificial
  Synthetic oligonucleotide
ccttggactcacttatcaacctaattccaaatggacttttcgcacaggaatagcc

SEQ ID NO: 251885 - DNA, 60 bp, Artificial
  Synthetic oligonucleotide
acctcacagcttgctggtatcttgcaagttggcgaccaaaacaaagctggtattagtcag

SEQ ID NO: 251886 - DNA, 55 bp, Artificial
  Synthetic oligonucleotide
cgagcaacgaaacaagctctttggccatacgggcctgaacacgggcctcctggtc

SEQ ID NO: 251887 - DNA, 55 bp, Artificial
  Synthetic oligonucleotide
gaagtggtgtatgttcgtagttgcccatgtatagattgaggccgcccatggtatc

SEQ ID NO: 251888 - DNA, 54 bp, Artificial
  Synthetic oligonucleotide
ctgccctggattaaaagggattgcgaattgacacctccgtaaactttcgtatcg

SEQ ID NO: 251889 - DNA, 55 bp, Artificial
  Synthetic oligonucleotide
cgattcaattatggtagtacaaaccaggacgtctatttccctgcgtacaaaacgc

SEQ ID NO: 251890 - DNA, 55 bp, Artificial
  Synthetic oligonucleotide
ctgagccataggcgcttgtaagagcccaagaagctgggccataagtacctcgcgc

SEQ ID NO: 251891 - DNA, 55 bp, Artificial
  Synthetic oligonucleotide
tgttgaacgggcaaggtctcgcactatgcgagggaacttattgaacacattacca

SEQ ID NO: 251892 - DNA, 53 bp, Artificial
  Synthetic oligonucleotide
actaaagcggccatcagttaaaagggctaccgaacgccctaatcccattccca

SEQ ID NO: 251893 - DNA, 55 bp, Artificial
  Synthetic oligonucleotide
tgggtatggttggtggcctcttgaggggccgttacgtctgcgggaatctttgccc

SEQ ID NO: 251894 - DNA, 55 bp, Artificial
  Synthetic oligonucleotide
ttaagagtctttcagttagaatgaatacgccgaaagatgcggaacatatcaactc

SEQ ID NO: 251895 - DNA, 55 bp, Artificial
  Synthetic oligonucleotide
tgctcgtaccattatgagcctttctgaggtagaggcagctagagttcacctagcc

SEQ ID NO: 251896 - DNA, 57 bp, Artificial
  Synthetic oligonucleotide
atcgttgcttcagatggatacgaaactaaatacggttcacctacgagcgattgggaa

SEQ ID NO: 251897 - DNA, 55 bp, Artificial
  Synthetic oligonucleotide
accttctccggcgagagatctattaatagacattgcccaatacgtcttaacccga

SEQ ID NO: 251898 - DNA, 55 bp, Artificial
  Synthetic oligonucleotide
agcgcgtttcgtaaggattacaccggcaggccttcgcgaaagtcacgtacacgac

SEQ ID NO: 251899 - DNA, 55 bp, Artificial
  Synthetic oligonucleotide
tcggccatacgaggatcaaaacgtagagcactaatgtcattaactacatccgcgc

SEQ ID NO: 251900 - DNA, 55 bp, Artificial
  Synthetic oligonucleotide
tcacgcagatgagtacgattggtagtccccacttctctcaatatggcccctgaac

SEQ ID NO: 251901 - DNA, 52 bp, Artificial
  Synthetic oligonucleotide
aagcgaaacgctaaaggggcctcaagggactttattaagacggctcttgtgg

SEQ ID NO: 251902 - DNA, 55 bp, Artificial
  Synthetic oligonucleotide
gtgggtagtttctcggtagaggtttcctccggccttatcaagcatctctggggcg

SEQ ID NO: 251903 - DNA, 55 bp, Artificial
  Synthetic oligonucleotide
atcatacccttatggctgttcctataagagcacttctccttagtgaagctttatc

SEQ ID NO: 251904 - DNA, 55 bp, Artificial
  Synthetic oligonucleotide
gtgcggtggtctttaataagccgataaggttgtagcacgtaagagcgtatctggc

SEQ ID NO: 251905 - DNA, 55 bp, Artificial
  Synthetic oligonucleotide
gtgaccccattaatacaaaggcgccgcttgcacctctgcgaaagattctcaactg

SEQ ID NO: 251906 - DNA, 55 bp, Artificial
  Synthetic oligonucleotide
caagcctatcaattcctttaatatgagcctgcaagcggagtatataacgatcaac

SEQ ID NO: 251907 - DNA, 60 bp, Artificial
  Synthetic oligonucleotide
cagtaatccatagacaatccaaggttgtctgcctacctctgctacaatccagccaagttg

SEQ ID NO: 251908 - DNA, 51 bp, Artificial
  Synthetic oligonucleotide
cggaagaagttttgcggagcttgaaaatttcgcctgtccctaccttaattt

SEQ ID NO: 251909 - DNA, 53 bp, Artificial
  Synthetic oligonucleotide
ctaaggttccatctgtaaaaggtcctatagcttgaaaccccagcaccttagtt

SEQ ID NO: 251910 - DNA, 53 bp, Artificial
  Synthetic oligonucleotide
aaaacacctcctacaagataggtagggtctaatccaaggtattcaagggtgta

SEQ ID NO: 251911 - DNA, 53 bp, Artificial
  Synthetic oligonucleotide
gctagtggagattcccaaactaaagctcgcttagttcctatttgtccacgtgc

SEQ ID NO: 251912 - DNA, 53 bp, Artificial
  Synthetic oligonucleotide
taacgtagccccgatcagccgggacgtattggaggataaaacccgtgtgggta

SEQ ID NO: 251913 - DNA, 51 bp, Artificial
  Synthetic oligonucleotide
gatcttttatgttgggaggaactgttttattagctcagcaagctacacccc

SEQ ID NO: 251914 - DNA, 51 bp, Artificial
  Synthetic oligonucleotide
tagatgcgcccatacagaggctattgcagttcctaacggaataggtttagt

SEQ ID NO: 251915 - DNA, 51 bp, Artificial
  Synthetic oligonucleotide
ttggagttagggtagaagtcccagcttctgtaatggacgagttaacctctc

SEQ ID NO: 251916 - DNA, 51 bp, Artificial
  Synthetic oligonucleotide
ggggactttaacggagattactcaggctatacaggaaaagtaatgttaaga

SEQ ID NO: 251917 - DNA, 51 bp, Artificial
  Synthetic oligonucleotide
ggtttaagcttacacaagtttgtccttataccgaaagctgtgaccttttag

SEQ ID NO: 251918 - DNA, 58 bp, Artificial
  Synthetic oligonucleotide
tccaactgttagacgagcagcgtttccaacaatgtagtagttaattcctactgcccaa

SEQ ID NO: 251919 - DNA, 51 bp, Artificial
  Synthetic oligonucleotide
acttaccaatttaaatgaccagctagccgtgcggggtttaagggtacttgg

SEQ ID NO: 251920 - DNA, 51 bp, Artificial
  Synthetic oligonucleotide
aggtaatagtcgaccgaacgaaggctgaagcctacggggtctcggttaacg

SEQ ID NO: 251921 - DNA, 50 bp, Artificial
  Synthetic oligonucleotide
cagggtaaataccgtaagccgcataccctgctcccaggccattgccccgc

SEQ ID NO: 251922 - DNA, 50 bp, Artificial
  Synthetic oligonucleotide
caccggacgcactaactggcctaccaccgctccagagggtcgagtgtcta

SEQ ID NO: 251923 - DNA, 50 bp, Artificial
  Synthetic oligonucleotide
attgctccgggtcacaggggatgtcagggctgtggcgaaattttggccct

SEQ ID NO: 251924 - DNA, 50 bp, Artificial
  Synthetic oligonucleotide
atgatcttcttggcactaaaggccgtcgtggtcgggccaagccggtggta

SEQ ID NO: 251925 - DNA, 50 bp, Artificial
  Synthetic oligonucleotide
agtcgccgtggcgatctctaagactccgatgcccacgttcgggaccgaga

SEQ ID NO: 251926 - DNA, 50 bp, Artificial
  Synthetic oligonucleotide
agtattggggtgccgtgaggcaggttagatcgtcaaccgttgaaagcgag

SEQ ID NO: 251927 - DNA, 50 bp, Artificial
  Synthetic oligonucleotide
agggccgtgcctgtggcctatcccataggacgcgaagagaacctgagtgg

SEQ ID NO: 251928 - DNA, 50 bp, Artificial
  Synthetic oligonucleotide
agcttccaccctgggtttcggcaagagacgtagccctctggatgctgcgt

SEQ ID NO: 251929 - DNA, 55 bp, Artificial
  Synthetic oligonucleotide
acaaccattatcccttactttaagacctgtaactacacttataagccaatttgca

SEQ ID NO: 251930 - DNA, 50 bp, Artificial
  Synthetic oligonucleotide
tccataagcttgaggagaaagattacgactttagggttgagcttccgggg

SEQ ID NO: 251931 - DNA, 50 bp, Artificial
  Synthetic oligonucleotide
agcggctaactccgccacgtttatacgcccacggctgcgcagactaaccg

SEQ ID NO: 251932 - DNA, 50 bp, Artificial
  Synthetic oligonucleotide
agaggtaagggaacggagctgccttgcgtggtgggaggtaagggccgtac

SEQ ID NO: 251933 - DNA, 50 bp, Artificial
  Synthetic oligonucleotide
acggtccggtggctacggaagttaaggctgctctttacaacgccgggcgc

SEQ ID NO: 251934 - DNA, 50 bp, Artificial
  Synthetic oligonucleotide
acggcccttggagaggtctcagcggtaaacgggctggctggttcggggtt

SEQ ID NO: 251935 - DNA, 50 bp, Artificial
  Synthetic oligonucleotide
ttagctacattatctcctacaacactcataccatgccctaaggacctaag

SEQ ID NO: 251936 - DNA, 50 bp, Artificial
  Synthetic oligonucleotide
aagttccccgggaagataagtccctccaccggtacgggcctctggcgtag

SEQ ID NO: 251937 - DNA, 50 bp, Artificial
  Synthetic oligonucleotide
aagcgtcatgcacgccatgcaccatgctcctgaccctacagacatgcgct

SEQ ID NO: 251938 - DNA, 50 bp, Artificial
  Synthetic oligonucleotide
aagatccctgtcggccaattgagctccggcgagtcgtcaatcccgtcccg

SEQ ID NO: 251939 - DNA, 50 bp, Artificial
  Synthetic oligonucleotide
cgtgggcgcgtcgttgttacgggcatcgggaaaagtggccttattggccg

SEQ ID NO: 251940 - DNA, 57 bp, Artificial
  Synthetic oligonucleotide
gtagtactaccaagggtatatcttataatatcgggtctcacacctcttgcccccata

SEQ ID NO: 251941 - DNA, 50 bp, Artificial
  Synthetic oligonucleotide
cgtcactgcgagctttacttcccctgtcactgcgagcccgtatgggcgaa

SEQ ID NO: 251942 - DNA, 50 bp, Artificial
  Synthetic oligonucleotide
cgggaggcacagcaacttgtttagccgctcttgcccaggggcttgaacgt

SEQ ID NO: 251943 - DNA, 50 bp, Artificial
  Synthetic oligonucleotide
ctaatccaggcacgatagcggttagcgtgatagccccaagcagtgctata

SEQ ID NO: 251944 - DNA, 50 bp, Artificial
  Synthetic oligonucleotide
ctacgggccagcccattgtagtgccagccatctctgaagacccgcgcttt

SEQ ID NO: 251945 - DNA, 50 bp, Artificial
  Synthetic oligonucleotide
ctcccttctccggaaaagtggcctgagggctttcgttggctgggcacaga

SEQ ID NO: 251946 - DNA, 50 bp, Artificial
  Synthetic oligonucleotide
cgcagagatttcctcagcgagcctccttccccatgggttggccacgttta

SEQ ID NO: 251947 - DNA, 50 bp, Artificial
  Synthetic oligonucleotide
cgatggcccttcaaggagtggctcggtaggccgcgaagagtgatcgaacc

SEQ ID NO: 251948 - DNA, 50 bp, Artificial
  Synthetic oligonucleotide
gaacggagctgccttgcgtggtgggaggtaagggccgtaccaagtgtggc

SEQ ID NO: 251949 - DNA, 50 bp, Artificial
  Synthetic oligonucleotide
cgaggaggcccgtaggggagatcccttcgctgtgctcgggacaagcgaag

SEQ ID NO: 251950 - DNA, 50 bp, Artificial
  Synthetic oligonucleotide
ccttgccaagccaatctgggtgattatattagcagccagcaaaggtgagt

SEQ ID NO: 251951 - DNA, 56 bp, Artificial
  Synthetic oligonucleotide
ttatcaaataggacctcaggttttagaagaactcggagctgaggttattcctatag

SEQ ID NO: 251952 - DNA, 50 bp, Artificial
  Synthetic oligonucleotide
ccttcaccctcgcacggccaaacagggttttagcggtaaggcccgctggg

SEQ ID NO: 251953 - DNA, 50 bp, Artificial
  Synthetic oligonucleotide
cctggtgaggcctcggagtgacctgctgttacgcccctaccaggggaggg

SEQ ID NO: 251954 - DNA, 50 bp, Artificial
  Synthetic oligonucleotide
cctgagggctttcgttggctgggcacagagattgtggccatgcttgaggc

SEQ ID NO: 251955 - DNA, 50 bp, Artificial
  Synthetic oligonucleotide
cctcacaataacaccacctctgtcactgcgaggaggcccgtagggccacg

SEQ ID NO: 251956 - DNA, 50 bp, Artificial
  Synthetic oligonucleotide
ccgagccaacagcgagaccagggggaggctcctctccttccggaggtatg

SEQ ID NO: 251957 - DNA, 50 bp, Artificial
  Synthetic oligonucleotide
cccctatggctcccgggccaataggcgtagcaatagcggcgatagtggct

SEQ ID NO: 251958 - DNA, 50 bp, Artificial
  Synthetic oligonucleotide
ccatgtgtctggccgccatttctgttacgcgaaggggtcttgccagcgtg

SEQ ID NO: 251959 - DNA, 50 bp, Artificial
  Synthetic oligonucleotide
catggaggatttataagggcgcttctctgtgaacttttaaatttggagag

SEQ ID NO: 251960 - DNA, 56 bp, Artificial
  Synthetic oligonucleotide
cgttcattgatgcctttataccggaagttcctgaagcttccattggtctataagga

SEQ ID NO: 251961 - DNA, 57 bp, Artificial
  Synthetic oligonucleotide
agctttcacgcagagggagcacctatgttgcaggacggaagggggaccaacgtccag

SEQ ID NO: 251962 - DNA, 55 bp, Artificial
  Synthetic oligonucleotide
gtgacacacttaacttgcagtcagtaaccacaacacctttggacgtggatattgc

SEQ ID NO: 251963 - DNA, 55 bp, Artificial
  Synthetic oligonucleotide
taacgtggtagccacagccatagcgaaggctcagcagtatgagtccactacctgg

SEQ ID NO: 251964 - DNA, 55 bp, Artificial
  Synthetic oligonucleotide
ccacgtgcaaaagccttggggtcgcagctctaaccgtataaagcttttcaccact

SEQ ID NO: 251965 - DNA, 55 bp, Artificial
  Synthetic oligonucleotide
ctgaggacacagtatcttataccctcctttctgaaatatgtcgcggcaaaaggat

SEQ ID NO: 251966 - DNA, 55 bp, Artificial
  Synthetic oligonucleotide
taggcaagacttcggcaactgtggacgggaaagcatacaccttagacgctgcccc

SEQ ID NO: 251967 - DNA, 55 bp, Artificial
  Synthetic oligonucleotide
ctgttagctcgtttcttaaaactagcgcacccaatgtgggcggatttgcatagtc

SEQ ID NO: 251968 - DNA, 55 bp, Artificial
  Synthetic oligonucleotide
caggagctgtcatatgagtagccttttcgttatttaactgaactagccactcccc

SEQ ID NO: 251969 - DNA, 55 bp, Artificial
  Synthetic oligonucleotide
cactacgatcgatttggcgttgagacagaggtatacgatccaaagcgtactactc

SEQ ID NO: 251970 - DNA, 55 bp, Artificial
  Synthetic oligonucleotide
ggaccatccttaaccagacctgatggcacaaagagtcttcctccaccttctggta

SEQ ID NO: 251971 - DNA, 55 bp, Artificial
  Synthetic oligonucleotide
cttgctacctgccaaagccgtggtagtcacttcagtaggtatggaccatatgaga

SEQ ID NO: 251972 - DNA, 59 bp, Artificial
  Synthetic oligonucleotide
cctatttatatactctagcgagaaaacactatccatatttagcttattgcaactccacc

SEQ ID NO: 251973 - DNA, 55 bp, Artificial
  Synthetic oligonucleotide
atgttaccctttctaatgttaggaccccacttagggtcgctaagagacagatgca

SEQ ID NO: 251974 - DNA, 55 bp, Artificial
  Synthetic oligonucleotide
ggattgctataatgccactacgcttgtacgataagccttatgccaatgtcattgt

SEQ ID NO: 251975 - DNA, 55 bp, Artificial
  Synthetic oligonucleotide
tgaattacgttgaactgacgagtccttctgtggaggctctccttaaacacttaag

SEQ ID NO: 251976 - DNA, 55 bp, Artificial
  Synthetic oligonucleotide
ggcaagtacactctggggaataggacaataatcgtcgacgaaacctcagctaggt

SEQ ID NO: 251977 - DNA, 55 bp, Artificial
  Synthetic oligonucleotide
ggcgtagtcactggtcttattggagccagtggggtgatggttattgtcccggggc

SEQ ID NO: 251978 - DNA, 55 bp, Artificial
  Synthetic oligonucleotide
ggcgtgttagacacacaagtaggtttcatgggcggacacacagaccaccccactt

SEQ ID NO: 251979 - DNA, 55 bp, Artificial
  Synthetic oligonucleotide
agcttctgaagtacttgaacttcgatggtcagacataggcgacgattatatgctg

SEQ ID NO: 251980 - DNA, 55 bp, Artificial
  Synthetic oligonucleotide
gggagccaatactttagtaagtacgctcccaatggagcctgtggctcccaccact

SEQ ID NO: 251981 - DNA, 55 bp, Artificial
  Synthetic oligonucleotide
accttaagctctgatccgaatttccgtgcctacaattttgatggtgtatcgggcg

SEQ ID NO: 251982 - DNA, 51 bp, Artificial
  Synthetic oligonucleotide
gggcccttacggaaagcctttccctgccgtggtaaccaatactttcctcat

SEQ ID NO: 251983 - DNA, 55 bp, Artificial
  Synthetic oligonucleotide
ctgacctggggtcaaaagttatcattggtttgccaaaactttgcgattctactac

SEQ ID NO: 251984 - DNA, 55 bp, Artificial
  Synthetic oligonucleotide
ggggtacagaagttcgtgcacataaatggggataccgcttttgtacctcatgttg

SEQ ID NO: 251985 - DNA, 55 bp, Artificial
  Synthetic oligonucleotide
gacggtgtaagagaggtgcttggcgtaaaggacagaccattggttggtactattg

SEQ ID NO: 251986 - DNA, 54 bp, Artificial
  Synthetic oligonucleotide
gcaggttcttcactgtgcgcccacgagcattgaaactaggcatgacgagcagaa

SEQ ID NO: 251987 - DNA, 54 bp, Artificial
  Synthetic oligonucleotide
gcgccaacgtcccttagcatcctcgatgggaaaatacgtattaaataactctcg

SEQ ID NO: 251988 - DNA, 54 bp, Artificial
  Synthetic oligonucleotide
ggtcaccatgaatgttaataggcgcactaagtgcacggttagccactatggtaa

SEQ ID NO: 251989 - DNA, 54 bp, Artificial
  Synthetic oligonucleotide
gggtgaagtcactacaatgtccgcactttgagatttggcactgcttacgtctga

SEQ ID NO: 251990 - DNA, 53 bp, Artificial
  Synthetic oligonucleotide
cattgcgattacacctccattggaggaatcgtaaagactggattacgattctc

SEQ ID NO: 251991 - DNA, 53 bp, Artificial
  Synthetic oligonucleotide
gcggctctctccagaccgctgatcgcatcataccttgtaaagctcgctaagga

SEQ ID NO: 251992 - DNA, 52 bp, Artificial
  Synthetic oligonucleotide
gggccttatttctgttgtaggagataatgattttcaccacgggtatgaaagt

SEQ ID NO: 251993 - DNA, 51 bp, Artificial
  Synthetic oligonucleotide
cccgtctctgatttgtgctccagtagataatacacctgggctgaactggtc

SEQ ID NO: 251994 - DNA, 55 bp, Artificial
  Synthetic oligonucleotide
ctaccaggtaagtctactacttcccatatttcaccgttcactttccactgagcca

SEQ ID NO: 251995 - DNA, 51 bp, Artificial
  Synthetic oligonucleotide
ccagcgccctttgtgcgatcagcttgccaatagctgctgcctgctcagtct

SEQ ID NO: 251996 - DNA, 51 bp, Artificial
  Synthetic oligonucleotide
ccacggcaaaccaaggcacctgcttagcgtgtgcgccagcacagcacctcc

SEQ ID NO: 251997 - DNA, 51 bp, Artificial
  Synthetic oligonucleotide
cacagctgcgaagacgcaaaccaaaacgcgtcctattaagcaaccatacgg

SEQ ID NO: 251998 - DNA, 51 bp, Artificial
  Synthetic oligonucleotide
attggggtcaacaatgtcttcagcggcgaaacgcccccaaatacggctgcc

SEQ ID NO: 251999 - DNA, 51 bp, Artificial
  Synthetic oligonucleotide
aaccaaggcacctgcttagcgtgtgcgccagcacagcacctccacgtaata

SEQ ID NO: 252000 - DNA, 51 bp, Artificial
  Synthetic oligonucleotide
aaggaagctgcgcatgctgtagtgggagcgaacgtggggccatgaaaaccg

SEQ ID NO: 252001 - DNA, 51 bp, Artificial
  Synthetic oligonucleotide
agaacgcactcttcagccatgcaggtcagagccatggaagcctggggtgtc

SEQ ID NO: 252002 - DNA, 50 bp, Artificial
  Synthetic oligonucleotide
ttcgagtccgggcccttaccaggttcgggcacccctccgcttaaatgtta

SEQ ID NO: 252003 - DNA, 50 bp, Artificial
  Synthetic oligonucleotide
ttaccctcgccggtttaaggccagacctaacaagctcccaggccgctgga

SEQ ID NO: 252004 - DNA, 50 bp, Artificial
  Synthetic oligonucleotide
tgcggtcatctcgcctatcagccaacggaagtatgacccgtgcggccaca

SEQ ID NO: 252005 - DNA, 51 bp, Artificial
  Synthetic oligonucleotide
cgcaataactttcgtccgtctccgggaaaggttacccaatttattcctcca

SEQ ID NO: 252006 - DNA, 50 bp, Artificial
  Synthetic oligonucleotide
tgacaggggccgcttagtcgcctgtggtacgcttgaggagctgcgtcacg

SEQ ID NO: 252007 - DNA, 50 bp, Artificial
  Synthetic oligonucleotide
tcagccatgcaggtcagagccatggaagcctggggtgtccccataaaggt

SEQ ID NO: 252008 - DNA, 50 bp, Artificial
  Synthetic oligonucleotide
gtaactggcacgcatacatctcccccggttgcgtatctgaggcgcccagc

SEQ ID NO: 252009 - DNA, 50 bp, Artificial
  Synthetic oligonucleotide
ggagggcttgcagtccttagagggcttaagtgtcagggtggtgcgtgccg

SEQ ID NO: 252010 - DNA, 50 bp, Artificial
  Synthetic oligonucleotide
gcaggcgttgtgagtgcaatgacacctacgctccagtcaccgaagcggta

SEQ ID NO: 252011 - DNA, 50 bp, Artificial
  Synthetic oligonucleotide
gcacgccatgagtcctaccggcgcacgcgttgtgtttgaactgatctgcc

SEQ ID NO: 252012 - DNA, 50 bp, Artificial
  Synthetic oligonucleotide
gagcgggagagggcggtatttctgcggggtatcccagtggtaccacagct

SEQ ID NO: 252013 - DNA, 50 bp, Artificial
  Synthetic oligonucleotide
cgaccacgccactggcttaggggttgttggcggcttaaaacccgaagacc

SEQ ID NO: 252014 - DNA, 50 bp, Artificial
  Synthetic oligonucleotide
ccactaacttgcacggcttcggtcaaggttggggcgacaacccaggttgg

SEQ ID NO: 252015 - DNA, 50 bp, Artificial
  Synthetic oligonucleotide
ccaagggcgttgggtggtgcgcaataagtcgttcgtgggtgtcaacccat

SEQ ID NO: 252016 - DNA, 55 bp, Artificial
  Synthetic oligonucleotide
cgatgaacacataagagctgaggtgtgcaagcttcacccggactggctgttacac

SEQ ID NO: 252017 - DNA, 50 bp, Artificial
  Synthetic oligonucleotide
atggcatctaaggaagctgcgcatgctgtagtgggagcgaacgtggggcc

SEQ ID NO: 252018 - DNA, 50 bp, Artificial
  Synthetic oligonucleotide
atgctaccgcagcagggcagcgtataattgacgaccctccgctggctgag

SEQ ID NO: 252019 - DNA, 50 bp, Artificial
  Synthetic oligonucleotide
ataaggctgccctcggatttcgagtccgggcccttaccaggttcgggcac

SEQ ID NO: 252020 - DNA, 50 bp, Artificial
  Synthetic oligonucleotide
agtggagtcgtggggcgcagctttgcagtacttcacgggttctaaggcgc

SEQ ID NO: 252021 - DNA, 50 bp, Artificial
  Synthetic oligonucleotide
agggcgttagctcggaggcgtggaaacgtgaaccaagttagcggcatgca

SEQ ID NO: 252022 - DNA, 50 bp, Artificial
  Synthetic oligonucleotide
aacagtgggcgtggtagctggcaaaggtaacaacggtggggatgcgctta

SEQ ID NO: 252023 - DNA, 55 bp, Artificial
  Synthetic oligonucleotide
gttatccagggcgaatatgaagaggtttacgtcgatatagcactccaacacgttg

SEQ ID NO: 252024 - DNA, 55 bp, Artificial
  Synthetic oligonucleotide
ccgactggtagaggaatggtagctcctactctgaatgctccgccgtttacagtgc

SEQ ID NO: 252025 - DNA, 55 bp, Artificial
  Synthetic oligonucleotide
gtgcttgccaggctattagcgctcgaacttgaactggtattagaacttgcactag

SEQ ID NO: 252026 - DNA, 55 bp, Artificial
  Synthetic oligonucleotide
actcgcgaggtgccgaatagcgtcgcggcactcgtggtatcctcgtgggtcggaa

SEQ ID NO: 252027 - DNA, 55 bp, Artificial
  Synthetic oligonucleotide
cggtactcggtattcccgtcgtgagtggaaatgtcagtctctacaacgaaacgga

SEQ ID NO: 252028 - DNA, 50 bp, Artificial
  Synthetic oligonucleotide
acgctttcgttcgccggacagggacgatgtggagggggacccgtggggcg

SEQ ID NO: 252029 - DNA, 50 bp, Artificial
  Synthetic oligonucleotide
acgcttcacccggccttgacgcgtgcagaagaacagaaacgtggctgtcg

SEQ ID NO: 252030 - DNA, 50 bp, Artificial
  Synthetic oligonucleotide
acgcgtgggccgtttcccctcactatacgggagcgctagcctggtcggca

SEQ ID NO: 252031 - DNA, 50 bp, Artificial
  Synthetic oligonucleotide
acgcgcatgacgattccccggctcggttggctggcctacggtctcatgct

SEQ ID NO: 252032 - DNA, 50 bp, Artificial
  Synthetic oligonucleotide
acgcgatcgtgcttcaccccttgccccgcgtaggggaaatcgagcctacg

SEQ ID NO: 252033 - DNA, 50 bp, Artificial
  Synthetic oligonucleotide
acgcgagcactctacccgtcgctccacacaccgacaggctgagcgtagac

SEQ ID NO: 252034 - DNA, 50 bp, Artificial
  Synthetic oligonucleotide
acgccccgggtcgccaaccgtgtgcgcgaatagtagtaggagccggtctc

SEQ ID NO: 252035 - DNA, 50 bp, Artificial
  Synthetic oligonucleotide
acgcccagagactgccggatgtccgggaatcacgaaccgccacaggaact

SEQ ID NO: 252036 - DNA, 50 bp, Artificial
  Synthetic oligonucleotide
acgcacagtcgtgctctcgctcgctgcaatgagatggcccaggggacaac

SEQ ID NO: 252037 - DNA, 50 bp, Artificial
  Synthetic oligonucleotide
acgatcctcttctgtagtgtgcagatcctaagggagaccggttcactagg

SEQ ID NO: 252038 - DNA, 54 bp, Artificial
  Synthetic oligonucleotide
cggtgcacacaccagttcccgatccggtacctcgattccgtacttccgggtcgc

SEQ ID NO: 252039 - DNA, 50 bp, Artificial
  Synthetic oligonucleotide
accttccggacgtccctggtccgtcggctagcgagacaccgccgctagta

SEQ ID NO: 252040 - DNA, 55 bp, Artificial
  Synthetic oligonucleotide
cgtgcacgagcgtacactcgtctgggaccttctcctgaattcgttcaaacggcgt

SEQ ID NO: 252041 - DNA, 55 bp, Artificial
  Synthetic oligonucleotide
ctgggtaccaatagacgttgtgatagacattggaagcgacatacgaccaggggac

SEQ ID NO: 252042 - DNA, 55 bp, Artificial
  Synthetic oligonucleotide
gacgagcgacccgaagccatagaggaacgctggcagaatatcaccctcttcgagt

SEQ ID NO: 252043 - DNA, 55 bp, Artificial
  Synthetic oligonucleotide
gagaggagaggccgtgcgtcctgaggagtacctggctatcgtcttgcgtcgttgg

SEQ ID NO: 252044 - DNA, 55 bp, Artificial
  Synthetic oligonucleotide
tgtgatggttgcgaccgtagtgctcacagcccgcttcgtcggtgattaccggccg

SEQ ID NO: 252045 - DNA, 55 bp, Artificial
  Synthetic oligonucleotide
aacagatgctggacgagcgtggcagtcgatcccctaccagtggtgcacagcactc

SEQ ID NO: 252046 - DNA, 55 bp, Artificial
  Synthetic oligonucleotide
tctgaggagtccagcgagtcaccggatcgcttgttcgcggagaagatcccttgag

SEQ ID NO: 252047 - DNA, 55 bp, Artificial
  Synthetic oligonucleotide
tagtgccatcggacgcacgatccgagagttccgaaccgcgacgcgcgaagcgact

SEQ ID NO: 252048 - DNA, 55 bp, Artificial
  Synthetic oligonucleotide
caaggggtcaacgaagcaggggtcggttcgactggtaacgccctgactgctactg

SEQ ID NO: 252049 - DNA, 55 bp, Artificial
  Synthetic oligonucleotide
aacgagtgtccatggtttccgatcgtgcacacctcctttcagtcgcgtttgcgag

SEQ ID NO: 252050 - DNA, 55 bp, Artificial
  Synthetic oligonucleotide
tagagtggctgctcgcctgaagccagagcctaccgcaccggaccgcctcatggta

SEQ ID NO: 252051 - DNA, 55 bp, Artificial
  Synthetic oligonucleotide
gttcctgcctggcgtcgcccttacactgaccgttttgtcactgaatctcatcggt

SEQ ID NO: 252052 - DNA, 55 bp, Artificial
  Synthetic oligonucleotide
gtccaactggcgtgtcgagtgggcatcactggtgcaagcgatcaagattccccgg

SEQ ID NO: 252053 - DNA, 54 bp, Artificial
  Synthetic oligonucleotide
gtaattttgccaaccttccggacgtccctggtccgtcggctagcgagacaccgc

SEQ ID NO: 252054 - DNA, 55 bp, Artificial
  Synthetic oligonucleotide
gccgagtcgtgctggaacgatgagcgtgagaagtgcgccgatacgaagtgcccaa

SEQ ID NO: 252055 - DNA, 55 bp, Artificial
  Synthetic oligonucleotide
gcaccgcccaaccgtggcaggtcgaaggtccaccgctgatccgccatccacccct

SEQ ID NO: 252056 - DNA, 55 bp, Artificial
  Synthetic oligonucleotide
gagggtgcgtgaagggatgcgagacatgcacgagaaccaacggatgacgcggcgt

SEQ ID NO: 252057 - DNA, 55 bp, Artificial
  Synthetic oligonucleotide
gcaagcgcggcggactcgctatgcactggcacggaaactgaaggaaggacctcga

SEQ ID NO: 252058 - DNA, 54 bp, Artificial
  Synthetic oligonucleotide
caacgagtcacaggaagcgtgggaggtcaactacgaactcctctgggctgacga

SEQ ID NO: 252059 - DNA, 55 bp, Artificial
  Synthetic oligonucleotide
cagtgacggctcgatcccagtgtagggactgcgcgagtcgtcgtcaatcggaaag

SEQ ID NO: 252060 - DNA, 52 bp, Artificial
  Synthetic oligonucleotide
gtacctcgttacgatccccgaaggggattcgggttgtggcgacgcatgctcg

SEQ ID NO: 252061 - DNA, 52 bp, Artificial
  Synthetic oligonucleotide
ggtagcgcatcgactttcctggccggaatcgtaccaaacaccagtctctggc

SEQ ID NO: 252062 - DNA, 52 bp, Artificial
  Synthetic oligonucleotide
gctcactgaacgatgaacgcaagtggtccaaccgtgtttcgtttcgagcgac

SEQ ID NO: 252063 - DNA, 52 bp, Artificial
  Synthetic oligonucleotide
gaccaggagatctctttcggcctgagcacggagattccaccgggtacgcgat

SEQ ID NO: 252064 - DNA, 52 bp, Artificial
  Synthetic oligonucleotide
aggagcggaaggccaggtcgtgtgggagctgataccgtgcggtcgactcctc

SEQ ID NO: 252065 - DNA, 51 bp, Artificial
  Synthetic oligonucleotide
ccgatgcaacaatcaagtctcccacggttccgtagcggtgcttggagcccc

SEQ ID NO: 252066 - DNA, 51 bp, Artificial
  Synthetic oligonucleotide
gacccgctcgactcatcgcgttgtccgacgatcactgatctacgattatcg

SEQ ID NO: 252067 - DNA, 50 bp, Artificial
  Synthetic oligonucleotide
atcactgcttcgagccggttgcgggcacctaaccgccgcaagacttcttg

SEQ ID NO: 252068 - DNA, 50 bp, Artificial
  Synthetic oligonucleotide
agtgtcaccgagggatatgtcgttggagacgcgccagcaccacacgtccg

SEQ ID NO: 252069 - DNA, 50 bp, Artificial
  Synthetic oligonucleotide
agtacggggcgagttcagctgcctccttgggatcacgcgggacaacagct

SEQ ID NO: 252070 - DNA, 55 bp, Artificial
  Synthetic oligonucleotide
ccacagtggtcggtgagatagcgttgctcgttctggtacgctccagcccctgtcc

SEQ ID NO: 252071 - DNA, 50 bp, Artificial
  Synthetic oligonucleotide
aggggtgggacgcacgaccactcgagagggtacccggatgcaggacgcaa

SEQ ID NO: 252072 - DNA, 50 bp, Artificial
  Synthetic oligonucleotide
aggcttcgtacacccaccgacccggctcctcgatgtggcgacgcatagca

SEQ ID NO: 252073 - DNA, 50 bp, Artificial
  Synthetic oligonucleotide
agcgcgtttcctgccgatcgacgaaagcgatgcacaggacctggagcgtt

SEQ ID NO: 252074 - DNA, 50 bp, Artificial
  Synthetic oligonucleotide
agcgattcacgatcgccatcccacagtcagagatcgacgacttgcggcga

SEQ ID NO: 252075 - DNA, 50 bp, Artificial
  Synthetic oligonucleotide
agcaacccggctcagaaaagcgatcgcatccccgctccgaagaacaggat

SEQ ID NO: 252076 - DNA, 50 bp, Artificial
  Synthetic oligonucleotide
agatcgccgagagtgatccaccgggacccgtctacctcacgctaccccgc

SEQ ID NO: 252077 - DNA, 50 bp, Artificial
  Synthetic oligonucleotide
atctgctctccctgtgacgggttaaccggggctcgctcccgcctgatcgt

SEQ ID NO: 252078 - DNA, 50 bp, Artificial
  Synthetic oligonucleotide
atctggacgggtcgtctcaagcccgtgtgatcgagctgtgtcgtggccca

SEQ ID NO: 252079 - DNA, 50 bp, Artificial
  Synthetic oligonucleotide
atgccggagcacagcaaacggcgacaagccttctccgctcgcctcgcatc

SEQ ID NO: 252080 - DNA, 50 bp, Artificial
  Synthetic oligonucleotide
attttcgttcgattgcccgcgtgcggcataccccatacagcgaccacatt

SEQ ID NO: 252081 - DNA, 55 bp, Artificial
  Synthetic oligonucleotide
acgagcagtggcaagaagggttcgctgctcgaactccatgtcaggacagaggatg

SEQ ID NO: 252082 - DNA, 50 bp, Artificial
  Synthetic oligonucleotide
cacccggttcagcgtgtcagagcgagacttccataggtttccggtcggcg

SEQ ID NO: 252083 - DNA, 50 bp, Artificial
  Synthetic oligonucleotide
cacgactgctcctcatgggtccacggctacagctccgtgcaaccacggca

SEQ ID NO: 252084 - DNA, 50 bp, Artificial
  Synthetic oligonucleotide
cacgcgcgtgcaaccgtagtatagcagcaccacccatcgtgcgccaaggt

SEQ ID NO: 252085 - DNA, 50 bp, Artificial
  Synthetic oligonucleotide
cacgcggtgcattgtccggacgacgggagagagccgaaggaggctagcgt

SEQ ID NO: 252086 - DNA, 50 bp, Artificial
  Synthetic oligonucleotide
cacgttctccgtccgagcaacccggctcagaaaagcgatcgcatccccgc

SEQ ID NO: 252087 - DNA, 50 bp, Artificial
  Synthetic oligonucleotide
cagccgcgtgtcgtctccgtgtaaccggcaggcaccacccgttctccggc

SEQ ID NO: 252088 - DNA, 50 bp, Artificial
  Synthetic oligonucleotide
caggaggctttccgcatcttacgcctcggacactgtgtgctgcgagtgcg

SEQ ID NO: 252089 - DNA, 50 bp, Artificial
  Synthetic oligonucleotide
ccatcactctggggagcaatcaagtcgtcaatgggatggcgatctggatt

SEQ ID NO: 252090 - DNA, 50 bp, Artificial
  Synthetic oligonucleotide
accgcgtatcctccctacggtgagagcccgacgattcgcctctcccttcg

SEQ ID NO: 252091 - DNA, 50 bp, Artificial
  Synthetic oligonucleotide
accgatgtcggtccgtctggccgttcccgattggtcactactcgtcccgc

SEQ ID NO: 252092 - DNA, 55 bp, Artificial
  Synthetic oligonucleotide
cccgatacggcgtgtgttcaccgcaacgtggacaataacccattcgctcaccctc

SEQ ID NO: 252093 - DNA, 50 bp, Artificial
  Synthetic oligonucleotide
acccgtcgctccacacaccgacaggctgagcgtagacgagtatcccgctt

SEQ ID NO: 252094 - DNA, 50 bp, Artificial
  Synthetic oligonucleotide
accccgtgagatcgacgatgcgtgggctgacgaacagtgtccgccagccg

SEQ ID NO: 252095 - DNA, 50 bp, Artificial
  Synthetic oligonucleotide
accagtgcccgggacgggagactcgccactcagtatatctgccgtgcacg

SEQ ID NO: 252096 - DNA, 50 bp, Artificial
  Synthetic oligonucleotide
acatgcctggacagtgcgcgaagtcaatcctgtggccccaccgaagcgaa

SEQ ID NO: 252097 - DNA, 50 bp, Artificial
  Synthetic oligonucleotide
acagttggcagtctcgctcaccatgcaaggttgctcgcacgtcgaagggc

SEQ ID NO: 252098 - DNA, 50 bp, Artificial
  Synthetic oligonucleotide
acagttcgcctctccgttgttcgggcgctctctcgacggtcgaaagtggc

SEQ ID NO: 252099 - DNA, 50 bp, Artificial
  Synthetic oligonucleotide
acagtgacgcaagtcgccgactcgaacctgcaccgctgtggcaggacgct

SEQ ID NO: 252100 - DNA, 50 bp, Artificial
  Synthetic oligonucleotide
acagggacgatgtggagggggacccgtggggcgaccaaatacctttctga

SEQ ID NO: 252101 - DNA, 50 bp, Artificial
  Synthetic oligonucleotide
acaggctccgctccgaatatcgagcgcacgcactgctgtaccctgcagct

SEQ ID NO: 252102 - DNA, 50 bp, Artificial
  Synthetic oligonucleotide
aatgttccgcgtgcgttcttgcgtgtcgtcgaagggcctttagctggcca

SEQ ID NO: 252103 - DNA, 55 bp, Artificial
  Synthetic oligonucleotide
ccctttcgtggtcggcagtggcaggcaacgccgacaccctctgcggggagatcat

SEQ ID NO: 252104 - DNA, 50 bp, Artificial
  Synthetic oligonucleotide
aatggggaaactgaatcggctgtgctttgaccggttgagctgtcggggcg

SEQ ID NO: 252105 - DNA, 50 bp, Artificial
  Synthetic oligonucleotide
aatggctaacctcgacagtgacgcaagtcgccgactcgaacctgcaccgc

SEQ ID NO: 252106 - DNA, 50 bp, Artificial
  Synthetic oligonucleotide
aatgagcggtgccagcggtgggtagaggcgcggattcgcactgtgcggct

SEQ ID NO: 252107 - DNA, 50 bp, Artificial
  Synthetic oligonucleotide
aatcgaccatgcgtgacgactccgagagcgagggtgggacgtggcgcggc

SEQ ID NO: 252108 - DNA, 50 bp, Artificial
  Synthetic oligonucleotide
aatcacggccactgatcgttcctccctcacccgtcgatcgaccgaccccg

SEQ ID NO: 252109 - DNA, 50 bp, Artificial
  Synthetic oligonucleotide
aaggtggatcccccaaatccggtcgggacgtccggaggtgatgacgcaac

SEQ ID NO: 252110 - DNA, 50 bp, Artificial
  Synthetic oligonucleotide
aagggaccgccaggtagcagggtgcacgggatagcgacagcgcttatggg

SEQ ID NO: 252111 - DNA, 50 bp, Artificial
  Synthetic oligonucleotide
aaggaatagtctcatggcctaggggagacggcacagcgggtgctggttgc

SEQ ID NO: 252112 - DNA, 50 bp, Artificial
  Synthetic oligonucleotide
aagcgctcgccttggcagaaccgctcgggttcgcaactgaatccgacgtt

SEQ ID NO: 252113 - DNA, 50 bp, Artificial
  Synthetic oligonucleotide
aagcgcacggttcgaggaaaggagggcacgtcagagcgctgcttttgggt

SEQ ID NO: 252114 - DNA, 55 bp, Artificial
  Synthetic oligonucleotide
cgagcatttcccaaagcagtggcgtagcggctcgctgcgtgatcctcggacggga

SEQ ID NO: 252115 - DNA, 50 bp, Artificial
  Synthetic oligonucleotide
aagagtgcagcggagttgcgaggagcgaaagggccgcacatacttggtcc

SEQ ID NO: 252116 - DNA, 50 bp, Artificial
  Synthetic oligonucleotide
aacggggactggtggctatggtctccggttgcgagagacagcgggattgg

SEQ ID NO: 252117 - DNA, 50 bp, Artificial
  Synthetic oligonucleotide
aaccgtgattcctggcgggacgtggaggacggtcggcgcgtaattgagaa

SEQ ID NO: 252118 - DNA, 50 bp, Artificial
  Synthetic oligonucleotide
aaccgcggtggcaagcgcacggttcgaggaaaggagggcacgtcagagcg

SEQ ID NO: 252119 - DNA, 50 bp, Artificial
  Synthetic oligonucleotide
aaaagccagcgacgaataggctttcgactgggaccgtgccgcgttgccag

SEQ ID NO: 252120 - DNA, 50 bp, Artificial
  Synthetic oligonucleotide
agatcatcgggttctgcggaactgccatccccaggctacgccactcctcg

SEQ ID NO: 252121 - DNA, 50 bp, Artificial
  Synthetic oligonucleotide
agaagcccctcactgcggtgctcccacgctcgtcatgccatctgggggaa

SEQ ID NO: 252122 - DNA, 50 bp, Artificial
  Synthetic oligonucleotide
actgcttcactgccacgtgccccaggcaagacgaccgctgacgcgggaat

SEQ ID NO: 252123 - DNA, 50 bp, Artificial
  Synthetic oligonucleotide
actgcgcccaacccagagacctcgccatgcctctccgaggcgcgtccgct

SEQ ID NO: 252124 - DNA, 50 bp, Artificial
  Synthetic oligonucleotide
actgccggatgtccgggaatcacgaaccgccacaggaactcctgaccgcg

SEQ ID NO: 252125 - DNA, 55 bp, Artificial
  Synthetic oligonucleotide
cgcgggcagtcgtcgtagtcgtaggctcaccttggtgatacgtcgtgtcgtcagg

SEQ ID NO: 252126 - DNA, 50 bp, Artificial
  Synthetic oligonucleotide
actgccccgctacacgaccgtctcgggtatcccgatcacgcaactcatcc

SEQ ID NO: 252127 - DNA, 50 bp, Artificial
  Synthetic oligonucleotide
actgaggcaaagttgttcgagccaaaagagggccgggatgcactgccggc

SEQ ID NO: 252128 - DNA, 50 bp, Artificial
  Synthetic oligonucleotide
actgagccgagtcgatccccgctacatcagagcactcgcctgggctctct

SEQ ID NO: 252129 - DNA, 50 bp, Artificial
  Synthetic oligonucleotide
actcggttcacacgccagccgatttgggggcgagcgaaaaggaacacgcg

SEQ ID NO: 252130 - DNA, 50 bp, Artificial
  Synthetic oligonucleotide
actcgagcaggctctccgctggcgcatcgagggtgaagttcgcttcgacc

SEQ ID NO: 252131 - DNA, 50 bp, Artificial
  Synthetic oligonucleotide
actccctcaccgtaggccgaaccgggattgatgcacagtgtccgaccgat

SEQ ID NO: 252132 - DNA, 50 bp, Artificial
  Synthetic oligonucleotide
acgttgtcgtgctgcgagtatactccaaccggttcggccgccccctagcc

SEQ ID NO: 252133 - DNA, 50 bp, Artificial
  Synthetic oligonucleotide
acgtcgcttgccggggcaccacgcagcggtgataccgtcgtcgggacgcg

SEQ ID NO: 252134 - DNA, 50 bp, Artificial
  Synthetic oligonucleotide
acgtccctggtccgtcggctagcgagacaccgccgctagtataccgggaa

SEQ ID NO: 252135 - DNA, 50 bp, Artificial
  Synthetic oligonucleotide
acgggcacaagtggcttcacgggccgaaaggaaccggcttcctcttcgtg

SEQ ID NO: 252136 - DNA, 55 bp, Artificial
  Synthetic oligonucleotide
cacgtagtacgccgttcccctcataagaagaaggctcgctcccgatcatttgtcc

SEQ ID NO: 252137 - DNA, 55 bp, Artificial
  Synthetic oligonucleotide
gcgcgcgactttgttgtattcggcgcaaaacattccatatcggagcaattgtcgt

SEQ ID NO: 252138 - DNA, 55 bp, Artificial
  Synthetic oligonucleotide
gctttctagatcgactcttggtgaaccctgtatgccaacgtacaccctccgccgc

SEQ ID NO: 252139 - DNA, 55 bp, Artificial
  Synthetic oligonucleotide
ggaagggttgaaggtcacacgtgtcgctcctaacccaccctgtgatctgcagcac

SEQ ID NO: 252140 - DNA, 52 bp, Artificial
  Synthetic oligonucleotide
ggactttgcctgcggtggggtacgccgattcagttccaagggaatttacccc

SEQ ID NO: 252141 - DNA, 55 bp, Artificial
  Synthetic oligonucleotide
gggattctagaaggtgctttgacttagcggacatccggggcgcaccgctctcgcg

SEQ ID NO: 252142 - DNA, 55 bp, Artificial
  Synthetic oligonucleotide
ggggtatgccgtttcgaacacttttggacgcaatgcctaacataggactcgccgg

SEQ ID NO: 252143 - DNA, 55 bp, Artificial
  Synthetic oligonucleotide
tacccactggtcactccacatttggagggcgccgtgtccaccccaacggtcactc

SEQ ID NO: 252144 - DNA, 55 bp, Artificial
  Synthetic oligonucleotide
tcatcatgttgcgccgcaaggtgccaacctttcaatcggaccccgtcagggatcg

SEQ ID NO: 252145 - DNA, 55 bp, Artificial
  Synthetic oligonucleotide
aagcggggcggaaagaagcatccggcgtgctccaatcgaaatcgagcacacgcgc

SEQ ID NO: 252146 - DNA, 55 bp, Artificial
  Synthetic oligonucleotide
tgagagcaccgtggtgcacaggagcaacgggtctaggcaagggcagagacctgct

SEQ ID NO: 252147 - DNA, 55 bp, Artificial
  Synthetic oligonucleotide
cagttaggggagtagggcgtggatctacccacgtacacgaacatatggcgcatcg

SEQ ID NO: 252148 - DNA, 55 bp, Artificial
  Synthetic oligonucleotide
tttcagagtacggccggcctcgaagggagccatccgactcaggtcggacgtccat

SEQ ID NO: 252149 - DNA, 54 bp, Artificial
  Synthetic oligonucleotide
gttgagtgagacgcctcacgagacagcgcggacgttgctactagaacgttttct

SEQ ID NO: 252150 - DNA, 52 bp, Artificial
  Synthetic oligonucleotide
caccgttttccctgagggaacgtttggtgtttcccagggaacattcatcgtg

SEQ ID NO: 252151 - DNA, 53 bp, Artificial
  Synthetic oligonucleotide
aacgggacacgtcggtccgtgctgcgtcacaggtcgtagtgaccggccttgat

SEQ ID NO: 252152 - DNA, 52 bp, Artificial
  Synthetic oligonucleotide
gggatacggcgttggtgcgtcgtccgacagtactgcgcaggcgaatgagggg

SEQ ID NO: 252153 - DNA, 52 bp, Artificial
  Synthetic oligonucleotide
tcgctgggcaggttctctaaagagatcgatacaggacagatagacacgataa

SEQ ID NO: 252154 - DNA, 52 bp, Artificial
  Synthetic oligonucleotide
agatggaggcgcaagctgaggttcaggcgctgattagacgttcatcgaatca

SEQ ID NO: 252155 - DNA, 52 bp, Artificial
  Synthetic oligonucleotide
ccccaaggtgggccacagattagagccaccgggacactttgggtagatctaa

SEQ ID NO: 252156 - DNA, 51 bp, Artificial
  Synthetic oligonucleotide
ttcacccgtttgcggtgaggcattactcttgagcccaattcgtagcgagag

SEQ ID NO: 252157 - DNA, 51 bp, Artificial
  Synthetic oligonucleotide
cggtccccgtgcgagggtcgaaacacgacggcagacgggcgcttcggacgg

SEQ ID NO: 252158 - DNA, 51 bp, Artificial
  Synthetic oligonucleotide
ccggtctttcttaccttatgaccggaccttccaaaccatagccgtatgggg

SEQ ID NO: 252159 - DNA, 50 bp, Artificial
  Synthetic oligonucleotide
tcatccccgacgctacaaagggcagagcaaagggcgttctatcagacggt

SEQ ID NO: 252160 - DNA, 50 bp, Artificial
  Synthetic oligonucleotide
aggcccggtgaaccctgccttccgggtgaaacaggccataaaccttccat

SEQ ID NO: 252161 - DNA, 50 bp, Artificial
  Synthetic oligonucleotide
aggagcagcccacgggacatgcacctcaaggtacccgatgacgcgtgtgt

SEQ ID NO: 252162 - DNA, 50 bp, Artificial
  Synthetic oligonucleotide
agcggcaccggaggctttcccgccctgagatgacctccccgtagaccggg

SEQ ID NO: 252163 - DNA, 50 bp, Artificial
  Synthetic oligonucleotide
aaaacctcttctgtacggcccctgtatgtcctgcttccggcggggctcac

SEQ ID NO: 252164 - DNA, 50 bp, Artificial
  Synthetic oligonucleotide
aacccacctacgagcccagggtactcaccagcgtctgccgggacgacttg

SEQ ID NO: 252165 - DNA, 50 bp, Artificial
  Synthetic oligonucleotide
aactgtctggggtgttcccgaaacggggcggtcctaccggggcagttctg

SEQ ID NO: 252166 - DNA, 50 bp, Artificial
  Synthetic oligonucleotide
aagtgctggtagagccggtgacgagcctgccgcaccccagggtcatcagc

SEQ ID NO: 252167 - DNA, 50 bp, Artificial
  Synthetic oligonucleotide
acactccaggtacttcccttcgaggcaggccctcacccagcgatgctggg

SEQ ID NO: 252168 - DNA, 50 bp, Artificial
  Synthetic oligonucleotide
acagatcgtgcccgttgtcgcatccacgcactatgcagccaggggcgaag

SEQ ID NO: 252169 - DNA, 55 bp, Artificial
  Synthetic oligonucleotide
cgtgcgctgtctcggatgtgagcgatgaaccccaagacgcattcccggctagtga

SEQ ID NO: 252170 - DNA, 50 bp, Artificial
  Synthetic oligonucleotide
acagccccctcgatcgaccgttgacaggacgaccgggccacctccgctca

SEQ ID NO: 252171 - DNA, 50 bp, Artificial
  Synthetic oligonucleotide
acagcggggtttgagtacgtcttccctgctatccggggcgtacaggcacg

SEQ ID NO: 252172 - DNA, 50 bp, Artificial
  Synthetic oligonucleotide
acagcgtcctcatcccccagtagcgcttcagcgtaccctgccgtctggag

SEQ ID NO: 252173 - DNA, 50 bp, Artificial
  Synthetic oligonucleotide
acagggtttcacgacgggacggagcacgcacccatgtcgcacggccttcc

SEQ ID NO: 252174 - DNA, 50 bp, Artificial
  Synthetic oligonucleotide
accaccaggagtttcatcgaaacctcccgtcggttgcagggaggcgctcg

SEQ ID NO: 252175 - DNA, 50 bp, Artificial
  Synthetic oligonucleotide
acccggaaagtacataggaaccacctctccggggaccgcgttgcaccgca

SEQ ID NO: 252176 - DNA, 50 bp, Artificial
  Synthetic oligonucleotide
accctccggcgttccgaatgtgacccatgtcgcaggtgtgcaaaccaggt

SEQ ID NO: 252177 - DNA, 50 bp, Artificial
  Synthetic oligonucleotide
accgccgtgggcggagggtcgaagaacagcgtgcagggggacttcgggga

SEQ ID NO: 252178 - DNA, 50 bp, Artificial
  Synthetic oligonucleotide
accggaagcggggcggaaagaagcatccggcgtgctccaatcgaaatcga

SEQ ID NO: 252179 - DNA, 50 bp, Artificial
  Synthetic oligonucleotide
accggtgagtcgtccggaatcgaccttggggacactccagggggccgaag

SEQ ID NO: 252180 - DNA, 55 bp, Artificial
  Synthetic oligonucleotide
acgggcacgaagaaagagactacccagccccgcggcgttggtcaaagcgagcatg

SEQ ID NO: 252181 - DNA, 50 bp, Artificial
  Synthetic oligonucleotide
acgcgcacgcagggatagtcccgtcttcgacactgcctctgacggacgtt

SEQ ID NO: 252182 - DNA, 50 bp, Artificial
  Synthetic oligonucleotide
agaagatccaccgtggacgggaagaaccacgagggggtagcaggcgaacc

SEQ ID NO: 252183 - DNA, 50 bp, Artificial
  Synthetic oligonucleotide
agacgcctactccgttgaacagtgcatcgtgggccagcgtcatggctgta

SEQ ID NO: 252184 - DNA, 50 bp, Artificial
  Synthetic oligonucleotide
agacgcttgggagagcgggtacgccgaacgtccgggcggttccatcacct

SEQ ID NO: 252185 - DNA, 50 bp, Artificial
  Synthetic oligonucleotide
agagggctactgagatctgctcgggggccgatcctcccaagacggccttc

SEQ ID NO: 252186 - DNA, 50 bp, Artificial
  Synthetic oligonucleotide
agagtccttgacaggggttccccagatactcagcgggcttcggctccgca

SEQ ID NO: 252187 - DNA, 50 bp, Artificial
  Synthetic oligonucleotide
agatccctacgcgcacgcagggatagtcccgtcttcgacactgcctctga

SEQ ID NO: 252188 - DNA, 50 bp, Artificial
  Synthetic oligonucleotide
agcagcacatagggacggtcactcacgctccgaccatagcgctgccacga

SEQ ID NO: 252189 - DNA, 50 bp, Artificial
  Synthetic oligonucleotide
agcagtgcggaagcctcgccagcaaatcccaacaaaacgcaccaagtgcc

SEQ ID NO: 252190 - DNA, 50 bp, Artificial
  Synthetic oligonucleotide
agccctccctcgataagggcctccctcgggccgaccgaaaacgtcattga

SEQ ID NO: 252191 - DNA, 54 bp, Artificial
  Synthetic oligonucleotide
ctgaacggacgctgaaaggcccggtgaaccctgccttccgggtgaaacaggcca

SEQ ID NO: 252192 - DNA, 50 bp, Artificial
  Synthetic oligonucleotide
agcctcgttccagcggaggtggtactcgggaagctcctcaagtacgcggt

SEQ ID NO: 252193 - DNA, 50 bp, Artificial
  Synthetic oligonucleotide
agcggaggtggtactcgggaagctcctcaagtacgcggtcggttacctcg

SEQ ID NO: 252194 - DNA, 55 bp, Artificial
  Synthetic oligonucleotide
gcacggttcctcatccacctcatggaaagcctccgtgagtgaaaccacgcgagtg

SEQ ID NO: 252195 - DNA, 55 bp, Artificial
  Synthetic oligonucleotide
gccatacccaccccttccttggatgagcacagcctattagaacggcattcggtac

SEQ ID NO: 252196 - DNA, 55 bp, Artificial
  Synthetic oligonucleotide
gccggagcataacccgccgatcttccagatccaacaacggtggtcaggagacgag

SEQ ID NO: 252197 - DNA, 60 bp, Artificial
  Synthetic oligonucleotide
tatctctcgtcagcagtccaagagctgccaccgtcattccgaaactgctcagagccagta

SEQ ID NO: 252198 - DNA, 55 bp, Artificial
  Synthetic oligonucleotide
gagcgatctgtccgtgttctctatgaactcgatggaactttccggaatctcagac

SEQ ID NO: 252199 - DNA, 53 bp, Artificial
  Synthetic oligonucleotide
gctccaccacagcgtagttgccactttcgcctaaggaaccggggtttacaaac

SEQ ID NO: 252200 - DNA, 55 bp, Artificial
  Synthetic oligonucleotide
gctcctctgagaacggaaggatcgtacaccctcgtgagggccagcactcccgtgt

SEQ ID NO: 252201 - DNA, 55 bp, Artificial
  Synthetic oligonucleotide
gctcgaaacaggacaccccgtacacgcatttgacctatcaaaattagcggggaga

SEQ ID NO: 252202 - DNA, 53 bp, Artificial
  Synthetic oligonucleotide
gctctccccttgttccggcttacccatcttgggacgagtgaggacttccccgg

SEQ ID NO: 252203 - DNA, 55 bp, Artificial
  Synthetic oligonucleotide
gctgacatcgttccggctatgccctcagctgaaacggggttcaaacctgcagcta

SEQ ID NO: 252204 - DNA, 55 bp, Artificial
  Synthetic oligonucleotide
gctttactacccaagcatcgagtgatccatgatttcctcggataaccccatcggt

SEQ ID NO: 252205 - DNA, 50 bp, Artificial
  Synthetic oligonucleotide
ggaaggtcgagttgtgggtctcccccggcaaaccaaaacgtcacttcggt

SEQ ID NO: 252206 - DNA, 55 bp, Artificial
  Synthetic oligonucleotide
ggactatatcttatcgctatcagcgctacttgtaccagggtagtacgtaatatct

SEQ ID NO: 252207 - DNA, 55 bp, Artificial
  Synthetic oligonucleotide
ggatattataccatcttatttcttgcggggctccaaagtatacctcagcagctat

SEQ ID NO: 252208 - DNA, 55 bp, Artificial
  Synthetic oligonucleotide
ggatccagaaggcgaccacagaatggctatgctcttttccatagcagggctcgtg

SEQ ID NO: 252209 - DNA, 55 bp, Artificial
  Synthetic oligonucleotide
gagcgttaggagtatcacccaggtttcgggtcgggtttcttttatcatcctgcag

SEQ ID NO: 252210 - DNA, 53 bp, Artificial
  Synthetic oligonucleotide
ggatttagagtggggccgcccaaccccctgtttgaccttgctccggatgtggg

SEQ ID NO: 252211 - DNA, 55 bp, Artificial
  Synthetic oligonucleotide
ggcgatacgacagtccttgcaactgctgtcatgtctgattccgcagtagaaggga

SEQ ID NO: 252212 - DNA, 55 bp, Artificial
  Synthetic oligonucleotide
gggactgagctggtagaacacgaaaacgagcagtcctactttgaacgatgttgcc

SEQ ID NO: 252213 - DNA, 55 bp, Artificial
  Synthetic oligonucleotide
gggccgtggtgaccgctttgaacctcatgtacaggtacctcgaggaggtgtcgaa

SEQ ID NO: 252214 - DNA, 55 bp, Artificial
  Synthetic oligonucleotide
gggccttcaagatcctatccgcctcgagcgccaaaacaggaacgaacctcatcgc

SEQ ID NO: 252215 - DNA, 55 bp, Artificial
  Synthetic oligonucleotide
ggggcgagattaacctccgtatatccctcaggcattatctgatttgcttcgtcga

SEQ ID NO: 252216 - DNA, 55 bp, Artificial
  Synthetic oligonucleotide
ggtaactcgtgtaatactcggcccagaatcctatgatgattcccgagaagatacc

SEQ ID NO: 252217 - DNA, 54 bp, Artificial
  Synthetic oligonucleotide
ggtcagtttgttataggaactcttagtggtccaaagacagtaaacgacgttaca

SEQ ID NO: 252218 - DNA, 55 bp, Artificial
  Synthetic oligonucleotide
ggtctacgcttacacaccggagctgtatcccacgtcgctcagggggactggaaac

SEQ ID NO: 252219 - DNA, 54 bp, Artificial
  Synthetic oligonucleotide
ggtgaggagaaaacccgttggagttaggcgactcgggagagacctggtgttctg

SEQ ID NO: 252220 - DNA, 55 bp, Artificial
  Synthetic oligonucleotide
gacgttgttgacagcggacatgaaactggccaggaaatcgaaaataatggttaac

SEQ ID NO: 252221 - DNA, 55 bp, Artificial
  Synthetic oligonucleotide
ggtgtttaagtcaatccatgaaggaaatcctaccaacgacgttattgcagtaaga

SEQ ID NO: 252222 - DNA, 55 bp, Artificial
  Synthetic oligonucleotide
ggttatccgaggaaatcatggatcactcgatgcttgggtagtaaagcttgacggc

SEQ ID NO: 252223 - DNA, 55 bp, Artificial
  Synthetic oligonucleotide
ggttcagaggcttcgctttctttcgcagttggcaggggcgaccgtcgtgtatccc

SEQ ID NO: 252224 - DNA, 55 bp, Artificial
  Synthetic oligonucleotide
ggttgtgaggtggaaccatccgagtgaagcgataaatgcagggatagtgacggtg

SEQ ID NO: 252225 - DNA, 55 bp, Artificial
  Synthetic oligonucleotide
gtaaaggagtgcaaaacggtcttgttaaatttaatgcgagcgaagagtttgatct

SEQ ID NO: 252226 - DNA, 53 bp, Artificial
  Synthetic oligonucleotide
gtaaggtataccggtgacaagcaaagattccttcaaagacggttgacgttcgt

SEQ ID NO: 252227 - DNA, 55 bp, Artificial
  Synthetic oligonucleotide
gtaggagctgcgacataaaacggtataccatgctggtttgaaagtactgccaccg

SEQ ID NO: 252228 - DNA, 55 bp, Artificial
  Synthetic oligonucleotide
gtatccaaacgcagcaattgggaaagtccactacctccgtcatctatagatatag

SEQ ID NO: 252229 - DNA, 55 bp, Artificial
  Synthetic oligonucleotide
gtcaccgtttagaatctacctatgaggaatgaaaaccactcagcctccgggtctg

SEQ ID NO: 252230 - DNA, 55 bp, Artificial
  Synthetic oligonucleotide
gtccacaaagcacccgcaggcattacaggagttgttattccgcaggacaggccga

SEQ ID NO: 252231 - DNA, 54 bp, Artificial
  Synthetic oligonucleotide
gacctttccactttgaaataggcggggaatgcctctatcctctttctcgttccg

SEQ ID NO: 252232 - DNA, 55 bp, Artificial
  Synthetic oligonucleotide
gtcccaaaggtcgctttccttccttctgcaagaagttcatccaggtaccctgttg

SEQ ID NO: 252233 - DNA, 55 bp, Artificial
  Synthetic oligonucleotide
cagaaggctacaaaggtttgtggacaggagagacgaaatggtctgatccgcgagt

SEQ ID NO: 252234 - DNA, 55 bp, Artificial
  Synthetic oligonucleotide
cagagaaccatgtatatacagagtgtctgcggacgttcccgacaccctactttcg

SEQ ID NO: 252235 - DNA, 55 bp, Artificial
  Synthetic oligonucleotide
cagtgtgtagtctgtggagatgaaagtaacggtcacaggctatgtgaacgctgtc

SEQ ID NO: 252236 - DNA, 55 bp, Artificial
  Synthetic oligonucleotide
catacctcgagcatgtgagcccctaaaacgagttcatttccgggagtgaggtggt

SEQ ID NO: 252237 - DNA, 55 bp, Artificial
  Synthetic oligonucleotide
acctggcgaattcacctcaccaagcacgtaagcaaggttttgtggaacgccaacc

SEQ ID NO: 252238 - DNA, 55 bp, Artificial
  Synthetic oligonucleotide
ccaggaagctttgtaacgtggcaatcactcgagcagagtttaaaagcgaggaata

SEQ ID NO: 252239 - DNA, 55 bp, Artificial
  Synthetic oligonucleotide
ccatcgccacaagatgtaaaaccgcgtgagtgcggaaagctccgaagctatccca

SEQ ID NO: 252240 - DNA, 55 bp, Artificial
  Synthetic oligonucleotide
ccatcggccgggtacgcactgaacgctcttgccaggtcgttcgttgctggaagac

SEQ ID NO: 252241 - DNA, 55 bp, Artificial
  Synthetic oligonucleotide
cccaattggctcgacgaaaacacgatggtgtacgttcaggaagatgccacctcga

SEQ ID NO: 252242 - DNA, 54 bp, Artificial
  Synthetic oligonucleotide
gagtcaaccattaagaggacgttataacctttgtccctaaaatattcggctata

SEQ ID NO: 252243 - DNA, 54 bp, Artificial
  Synthetic oligonucleotide
ccgaacctaaatggtccataagacttctgggattatattgtgttagaaccccaa

SEQ ID NO: 252244 - DNA, 55 bp, Artificial
  Synthetic oligonucleotide
ccgagagtccgagaatccgagaaggtaagacgaccaatggcaaagtatagtaacc

SEQ ID NO: 252245 - DNA, 55 bp, Artificial
  Synthetic oligonucleotide
acagtcgatcctaacacaccagcagacgaatacactgtaactgtcacaataactc

SEQ ID NO: 252246 - DNA, 54 bp, Artificial
  Synthetic oligonucleotide
ccgcaacgggtactggtagaacggctataaacgttgcgagattaagaccaagtg

SEQ ID NO: 252247 - DNA, 55 bp, Artificial
  Synthetic oligonucleotide
ccgcaactaacgtatcattaaagtcagaatgcataactactatagcataagcccc

SEQ ID NO: 252248 - DNA, 55 bp, Artificial
  Synthetic oligonucleotide
acagcggtattggacagactcttacaccattgtacgatagtcaatattcgtggaa

SEQ ID NO: 252249 - DNA, 55 bp, Artificial
  Synthetic oligonucleotide
ccgccacacaaatccattgttgcatggtgtccgggcggtctcgttaaggcgtaga

SEQ ID NO: 252250 - DNA, 55 bp, Artificial
  Synthetic oligonucleotide
ccgggatgggatgaagcgtttagcatgcttgaaactggcgaggctgacataatgg

SEQ ID NO: 252251 - DNA, 55 bp, Artificial
  Synthetic oligonucleotide
ccgggttggagtgtaaagcatgagttgctctattccgatctttcccacatcgtgt

SEQ ID NO: 252252 - DNA, 55 bp, Artificial
  Synthetic oligonucleotide
atcatcagagacgttcttgcgatgggagcacgtcctactgcaatccttgattcac

SEQ ID NO: 252253 - DNA, 55 bp, Artificial
  Synthetic oligonucleotide
gaccgctccgattcacaatcaccgtgaccggacagttccatgttgacgtctggac

SEQ ID NO: 252254 - DNA, 55 bp, Artificial
  Synthetic oligonucleotide
agtaatcttttgtgcatctaccgaaagtgctatgagggcgcttaacggggtgtac

SEQ ID NO: 252255 - DNA, 55 bp, Artificial
  Synthetic oligonucleotide
aggctgtctcacctgaccgcttatacactgaaccggacagaccctcgcacacgcg

SEQ ID NO: 252256 - DNA, 55 bp, Artificial
  Synthetic oligonucleotide
agcagcaacgaacctccaacactcttgacccttatatcacgggctggaggagcac

SEQ ID NO: 252257 - DNA, 55 bp, Artificial
  Synthetic oligonucleotide
agcaccatcgtatggcacaggagtcgctggggcagttggggcgtcacctattctg

SEQ ID NO: 252258 - DNA, 55 bp, Artificial
  Synthetic oligonucleotide
attcgaaaacaccggtaacaaaacagatctcgcaattcagggagacggattcttc

SEQ ID NO: 252259 - DNA, 55 bp, Artificial
  Synthetic oligonucleotide
agagacaccgtttcccgtcgttgtttctcatggttgacacatccgacagaagact

SEQ ID NO: 252260 - DNA, 54 bp, Artificial
  Synthetic oligonucleotide
caaaacccgtcctataagaattttgtgcctccatcgcccaaaatccataaggtc

SEQ ID NO: 252261 - DNA, 54 bp, Artificial
  Synthetic oligonucleotide
actacaactgtgggttccccgttataacaggttagaagtgtcgcttttatatca

SEQ ID NO: 252262 - DNA, 55 bp, Artificial
  Synthetic oligonucleotide
caaacaggtagagccagagtatctgttcggtcgaagcattcaccggagcccacaa

SEQ ID NO: 252263 - DNA, 55 bp, Artificial
  Synthetic oligonucleotide
cacaccaaatacggttctaatctcaggtttcagcccatcagtactaaaatacgtc

SEQ ID NO: 252264 - DNA, 55 bp, Artificial
  Synthetic oligonucleotide
gataccccgaacatccggtggcatgtagatcgtctcgaaagaggcactgaacggt

SEQ ID NO: 252265 - DNA, 55 bp, Artificial
  Synthetic oligonucleotide
cacatagcggtaccacagttaagggcaatgttcagaggggattacgcgaggaaga

SEQ ID NO: 252266 - DNA, 55 bp, Artificial
  Synthetic oligonucleotide
caccgacgggtttgaccagcccagcgagttcaaggtgccacagcgtttctctgtc

SEQ ID NO: 252267 - DNA, 55 bp, Artificial
  Synthetic oligonucleotide
acgcggtcatgagtgctgtgggaacgtacgctttcctctacggaacgtttctcgc

SEQ ID NO: 252268 - DNA, 55 bp, Artificial
  Synthetic oligonucleotide
caccgtaagagcacagtcaactggcataatttcacacggtcctcgccctactcag

SEQ ID NO: 252269 - DNA, 54 bp, Artificial
  Synthetic oligonucleotide
caccttatcggacacttcaaagtccgagatccttttcggaacggttccgcttgc

SEQ ID NO: 252270 - DNA, 55 bp, Artificial
  Synthetic oligonucleotide
cactccgtagaactctcccaaaatgccattgttttgaagaggcgacagtattctt

SEQ ID NO: 252271 - DNA, 55 bp, Artificial
  Synthetic oligonucleotide
cactgatactccttgcatcaattgtggaacttgtataaggtgcaagatgtacaac

SEQ ID NO: 252272 - DNA, 53 bp, Artificial
  Synthetic oligonucleotide
aagggccgatgaggccctttacatggcaaaatcccttggaaaagacagggtgg

SEQ ID NO: 252273 - DNA, 54 bp, Artificial
  Synthetic oligonucleotide
aaggatctacacatttggagggtccgctacaacgggggctctcgccaggtggtt

SEQ ID NO: 252274 - DNA, 54 bp, Artificial
  Synthetic oligonucleotide
ccttgccgaccttatgttaaatttaccattccatgtaacggcaagcccgtgcct

SEQ ID NO: 252275 - DNA, 55 bp, Artificial
  Synthetic oligonucleotide
gatagtgaggattccaagaaattccctcgacaggataacgagttcctccaatctc

SEQ ID NO: 252276 - DNA, 55 bp, Artificial
  Synthetic oligonucleotide
cgaaacgaaatttgtgagaacgtcgtagtaatcacacacgcttattattcgcgct

SEQ ID NO: 252277 - DNA, 55 bp, Artificial
  Synthetic oligonucleotide
cgaagatgggtggtttgttatggctccattcccatatggtggcgaaacagtctca

SEQ ID NO: 252278 - DNA, 55 bp, Artificial
  Synthetic oligonucleotide
aacccgttgtggtcaagacctgggacagatacgaagaggcacgttttgtgtctca

SEQ ID NO: 252279 - DNA, 55 bp, Artificial
  Synthetic oligonucleotide
cgaataattctgataatggaacctgagcgtgaactactctggtatttgtccctcc

SEQ ID NO: 252280 - DNA, 55 bp, Artificial
  Synthetic oligonucleotide
cgacttccttggtaacggcacaagagttcactatatagtaagaagcatccccgcc

SEQ ID NO: 252281 - DNA, 55 bp, Artificial
  Synthetic oligonucleotide
cgagaacaagcgaactcaccatacctcaaataggacgaaggaatgttaggacggt

SEQ ID NO: 252282 - DNA, 50 bp, Artificial
  Synthetic oligonucleotide
cgaggtatcttacgggtgttagttcgctttcgtggaaaatgggtacgttt

SEQ ID NO: 252283 - DNA, 55 bp, Artificial
  Synthetic oligonucleotide
aacccgtcgcgtacatccggaatagcccttcctataattacgctcattgaatagc

SEQ ID NO: 252284 - DNA, 55 bp, Artificial
  Synthetic oligonucleotide
aaccactgcttcacatggtttcccataagtgcgaaccgtttcatagtatagtacc

SEQ ID NO: 252285 - DNA, 55 bp, Artificial
  Synthetic oligonucleotide
cgatgtcccgcgtttgtcaaatcttttcgacaacgaaagagatattcgactcgct

SEQ ID NO: 252286 - DNA, 55 bp, Artificial
  Synthetic oligonucleotide
gatcagtatagtaaatttcaacgtatgtaggtgctctcttagtcccttcaactcc

SEQ ID NO: 252287 - DNA, 55 bp, Artificial
  Synthetic oligonucleotide
cgcatcaaatcttggttatgcgtctgtgactaaaagcgatatgattctcattccg

SEQ ID NO: 252288 - DNA, 55 bp, Artificial
  Synthetic oligonucleotide
cgccaatccacccctacacgttgtttcgtttatgtgggaaattatgatcgaagct

SEQ ID NO: 252289 - DNA, 55 bp, Artificial
  Synthetic oligonucleotide
aaagttgcagcaagctttgtagtggtatgaagccccgttccaaaagcaagccccg

SEQ ID NO: 252290 - DNA, 55 bp, Artificial
  Synthetic oligonucleotide
cgcggtttcctgaaatgtgtaccttttccgcccagtccgcttcttcgagtcttgc

SEQ ID NO: 252291 - DNA, 52 bp, Artificial
  Synthetic oligonucleotide
cgcttacgtacaccctttcagagatgattaccgtttccccggtaaaggatac

SEQ ID NO: 252292 - DNA, 48 bp, Artificial
  Synthetic oligonucleotide
aaaacacgtagaggaactaagggaaaatgttttaaagacggttcttgg

SEQ ID NO: 252293 - DNA, 55 bp, Artificial
  Synthetic oligonucleotide
cgcttcacaccagtctcctattcccgcgttgttgactcctatgtcgagtttcccc

SEQ ID NO: 252294 - DNA, 55 bp, Artificial
  Synthetic oligonucleotide
cggacctgctggaaatgttgtaagtcaatcgagtgctaaaggtacagttagagga

SEQ ID NO: 252295 - DNA, 55 bp, Artificial
  Synthetic oligonucleotide
ccgtgaggcttggcatcgccagagccctccttcagtacgaccagaatctgaggcc

SEQ ID NO: 252296 - DNA, 55 bp, Artificial
  Synthetic oligonucleotide
aatatgcactcgatttgagcgttggtagaggagcagacatcctgggattcgacgg

SEQ ID NO: 252297 - DNA, 55 bp, Artificial
  Synthetic oligonucleotide
gcaacagaaaacactccattaaacactccacaagctgcattagtgtcaactgctc

SEQ ID NO: 252298 - DNA, 53 bp, Artificial
  Synthetic oligonucleotide
cctattacggcaatccaaccgctcggttttcccatcgtttcaactaacattac

SEQ ID NO: 252299 - DNA, 55 bp, Artificial
  Synthetic oligonucleotide
cctcttctgcgagttttatgaggcgctctcttgctcttctgagttgctcgtggaa

SEQ ID NO: 252300 - DNA, 55 bp, Artificial
  Synthetic oligonucleotide
cctggcaatctgggccttcaagatcctatccgcctcgagcgccaaaacaggaacg

SEQ ID NO: 252301 - DNA, 55 bp, Artificial
  Synthetic oligonucleotide
cctgtaattctgatcagtgaaatctactacggacgtggatactctgaaacaagtg

SEQ ID NO: 252302 - DNA, 55 bp, Artificial
  Synthetic oligonucleotide
ccttaacctgcttaacactgcaaagagagtcgcagtaaacgtaaaagccagggca

SEQ ID NO: 252303 - DNA, 55 bp, Artificial
  Synthetic oligonucleotide
ccttaatgcctaccacgagggaattgaattgagccaggtggttctcagaagcgca

SEQ ID NO: 252304 - DNA, 55 bp, Artificial
  Synthetic oligonucleotide
ccttcacggctcagctcagactgcggacttacctacagccctcttcgcctaaccg

SEQ ID NO: 252305 - DNA, 54 bp, Artificial
  Synthetic oligonucleotide
ccgtatcgaaaacgatattgagagtactttagcagcatttaggcaggtaaaagc

SEQ ID NO: 252306 - DNA, 54 bp, Artificial
  Synthetic oligonucleotide
tcgtacatctcaacaccgacgggtttgaccagcccagcgagttcaaggtgccac

SEQ ID NO: 252307 - DNA, 54 bp, Artificial
  Synthetic oligonucleotide
ggaggcttttcgtgtggcattccggcttggcttcttatccggaaaacggcgtgt

SEQ ID NO: 252308 - DNA, 58 bp, Artificial
  Synthetic oligonucleotide
agagccagagtatctgttcggtcgaagcattcaccggagcccacaaaagtgccgtaag

SEQ ID NO: 252309 - DNA, 55 bp, Artificial
  Synthetic oligonucleotide
gaagagagggctttcctttaactgcgctccgcgccccattctgagaggaagattg

SEQ ID NO: 252310 - DNA, 54 bp, Artificial
  Synthetic oligonucleotide
ggacagatatggtaatgaagtggtacctgagcaatacagggttgatatagcatt

SEQ ID NO: 252311 - DNA, 54 bp, Artificial
  Synthetic oligonucleotide
ccgcgattatcctgccgtctttcacaacgaccgcaccaactggtgggttgggat

SEQ ID NO: 252312 - DNA, 54 bp, Artificial
  Synthetic oligonucleotide
tacaggatccatcggccgggtacgcactgaacgctcttgccaggtcgttcgttg

SEQ ID NO: 252313 - DNA, 54 bp, Artificial
  Synthetic oligonucleotide
ccccaaggaagttctatcccgataggacacacatcactgcacaaaccacaatcc

SEQ ID NO: 252314 - DNA, 54 bp, Artificial
  Synthetic oligonucleotide
cacccgcaggcattacaggagttgttattccgcaggacaggccgactccagcta

SEQ ID NO: 252315 - DNA, 54 bp, Artificial
  Synthetic oligonucleotide
gtgaacgccctcgtgaggaagggcttccctaacgggcttgtctcctgtgcgata

SEQ ID NO: 252316 - DNA, 54 bp, Artificial
  Synthetic oligonucleotide
tcagctcagactgcggacttacctacagccctcttcgcctaaccgcttggaggg

SEQ ID NO: 252317 - DNA, 54 bp, Artificial
  Synthetic oligonucleotide
gccgcagctgtctctcaggcgggcggacttgggataataggttcaggagcaatg

SEQ ID NO: 252318 - DNA, 54 bp, Artificial
  Synthetic oligonucleotide
gatagataggctggcaagatgtgtcacaggtcagattctggaccaatctgtgta

SEQ ID NO: 252319 - DNA, 54 bp, Artificial
  Synthetic oligonucleotide
acctggggaatcatttcctacacacaatacacctacacgtctcatatattacta

SEQ ID NO: 252320 - DNA, 55 bp, Artificial
  Synthetic oligonucleotide
gaacgcttcaggtcttgcacgatgtgggtctgggatacgtgaaactcgggcaacc

SEQ ID NO: 252321 - DNA, 54 bp, Artificial
  Synthetic oligonucleotide
tacgttgagaacacagacttagatgtagaactcaccaaatcggttgacgatgtt

SEQ ID NO: 252322 - DNA, 54 bp, Artificial
  Synthetic oligonucleotide
ctcaggcttgcaacataaacctgcactaaaagtcacattgttcactcccaaaga

SEQ ID NO: 252323 - DNA, 54 bp, Artificial
  Synthetic oligonucleotide
tacgaaagtggttcagaggcttcgctttctttcgcagttggcaggggcgaccgt

SEQ ID NO: 252324 - DNA, 54 bp, Artificial
  Synthetic oligonucleotide
cactgcccttacccctcaggactgtttagacctgcacgacagagtctggaactt

SEQ ID NO: 252325 - DNA, 54 bp, Artificial
  Synthetic oligonucleotide
tatctccgctccgttgatcaaatcggagagagttacttctatttcgtaccttat

SEQ ID NO: 252326 - DNA, 54 bp, Artificial
  Synthetic oligonucleotide
gccgaactcacctgcttttccccgcgctcccctgaagatccttccctcgtaaac

SEQ ID NO: 252327 - DNA, 53 bp, Artificial
  Synthetic oligonucleotide
gggtccgctacaacgggggctctcgccaggtggtttaaagaacagttcggtga

SEQ ID NO: 252328 - DNA, 53 bp, Artificial
  Synthetic oligonucleotide
tccgcctcgagcgccaaaacaggaacgaacctcatcgcaatggtcatcaccat

SEQ ID NO: 252329 - DNA, 53 bp, Artificial
  Synthetic oligonucleotide
aacttgatagccgacgccatggcttggagggccaacgccgatgtcgcaataat

SEQ ID NO: 252330 - DNA, 53 bp, Artificial
  Synthetic oligonucleotide
agccaagcccgagcataccggaagacattcggttgcacatgacggaacccctt

SEQ ID NO: 252331 - DNA, 55 bp, Artificial
  Synthetic oligonucleotide
gcaatttgcccgataaattcagtgtagtttctcttgcgccacttttaggtgaggc

SEQ ID NO: 252332 - DNA, 53 bp, Artificial
  Synthetic oligonucleotide
tccaggctcgtaaccaaattcttccgctaaagcgaccctcaccgcaggagcgg

SEQ ID NO: 252333 - DNA, 53 bp, Artificial
  Synthetic oligonucleotide
gtgcatcaaccttccattgaacacttggtgcaagccatccttcgtatcgacgc

SEQ ID NO: 252334 - DNA, 53 bp, Artificial
  Synthetic oligonucleotide
aaagtgacctgccataaggctgtcaagccttagtgattcgatccaaaagcgac

SEQ ID NO: 252335 - DNA, 53 bp, Artificial
  Synthetic oligonucleotide
tgtggcgcgaggaaatttatgcattattaggtgacaaaattgccgaagttgat

SEQ ID NO: 252336 - DNA, 53 bp, Artificial
  Synthetic oligonucleotide
gtccattgagaaggttctggggtaacaggtctaaagttatctgggccatatcc

SEQ ID NO: 252337 - DNA, 53 bp, Artificial
  Synthetic oligonucleotide
tccaccgtccagtctgttatcatgtggccgaactcacctgcttttccccgcgc

SEQ ID NO: 252338 - DNA, 53 bp, Artificial
  Synthetic oligonucleotide
tgcaggctgtctctcaaatagaagggatttacgtgccttgtattcacggtttt

SEQ ID NO: 252339 - DNA, 53 bp, Artificial
  Synthetic oligonucleotide
gtctctcatagtcgggcgtgaccctaccagccaggtgttcagaacgcgcctcg

SEQ ID NO: 252340 - DNA, 53 bp, Artificial
  Synthetic oligonucleotide
acccctgggacaaccaagctatgttcgatttcagtgggaacgctctcccatca

SEQ ID NO: 252341 - DNA, 53 bp, Artificial
  Synthetic oligonucleotide
cgagtttctcgttccctggataaaggagaaggtgagtttcatagcgcccgttc

SEQ ID NO: 252342 - DNA, 55 bp, Artificial
  Synthetic oligonucleotide
gcacacgatttgagtttcaccgtatctgtctctcaagtcgatgaatctcacaccg

SEQ ID NO: 252343 - DNA, 53 bp, Artificial
  Synthetic oligonucleotide
ctcgtcgttgcaggaggggcagacaacgcctgtgctgcacttggaatgaacgc

SEQ ID NO: 252344 - DNA, 53 bp, Artificial
  Synthetic oligonucleotide
cctacagccctcttcgcctaaccgcttggagggatttgccacttatccccgga

SEQ ID NO: 252345 - DNA, 53 bp, Artificial
  Synthetic oligonucleotide
cgcgcctttgctgaaggggctatgacctcggctttcgtaccgctttacaacga

SEQ ID NO: 252346 - DNA, 53 bp, Artificial
  Synthetic oligonucleotide
ggcgatacctactcttgcgagggggagcccctcactaccatcggcccaaggcg

SEQ ID NO: 252347 - DNA, 53 bp, Artificial
  Synthetic oligonucleotide
cacattctgaacaccgctatggcctcaccggactacttcaagttcgctgcggg

SEQ ID NO: 252348 - DNA, 53 bp, Artificial
  Synthetic oligonucleotide
cttacacgagaagctagggatatttggggagaaagggacggtagtgatagggg

SEQ ID NO: 252349 - DNA, 53 bp, Artificial
  Synthetic oligonucleotide
cggcggtgattatacggtgtcagttaccgagggatcaggcacggaggctggta

SEQ ID NO: 252350 - DNA, 52 bp, Artificial
  Synthetic oligonucleotide
taaagggcgaatgccagccgaagacatgccaagaatgggacgcggcgattta

SEQ ID NO: 252351 - DNA, 52 bp, Artificial
  Synthetic oligonucleotide
ctcttttgattgcgtcaaagacaagggaagggttggagaaacgaacctcgag

SEQ ID NO: 252352 - DNA, 52 bp, Artificial
  Synthetic oligonucleotide
aagtgtctaaaacttcccgtgcgtaccattcttcatcggttgcaaactccac

SEQ ID NO: 252353 - DNA, 55 bp, Artificial
  Synthetic oligonucleotide
gcacatggctgcgctcatcatcgttgtgagttgtcggttgtaggttatgcgcgac

SEQ ID NO: 252354 - DNA, 52 bp, Artificial
  Synthetic oligonucleotide
tacgatgcccgcaaaaagtccagcaagcgttggaaggaaaaccccaggccat

SEQ ID NO: 252355 - DNA, 52 bp, Artificial
  Synthetic oligonucleotide
tggttggtcgaatcacgcgggacccagaaacgcgttacactacctccgggcg

SEQ ID NO: 252356 - DNA, 52 bp, Artificial
  Synthetic oligonucleotide
acaatgttggttataggggcatatatgcaccgccaacgttggataacaggta

SEQ ID NO: 252357 - DNA, 52 bp, Artificial
  Synthetic oligonucleotide
cccggaatgggagtgtattcgtttatggaaatacctattccttcacttaaac

SEQ ID NO: 252358 - DNA, 52 bp, Artificial
  Synthetic oligonucleotide
accaggatacccaacggctgcactccagacctgttcgctcgactccggatct

SEQ ID NO: 252359 - DNA, 52 bp, Artificial
  Synthetic oligonucleotide
ccgatgaaccttggacttgacaacgatttctgcggaaggtacatgctaccgt

SEQ ID NO: 252360 - DNA, 52 bp, Artificial
  Synthetic oligonucleotide
tcggactgagaatccgatggactagccgttatcctatggggccatacatccg

SEQ ID NO: 252361 - DNA, 52 bp, Artificial
  Synthetic oligonucleotide
agtaagtgttgtagcaggtataggaggcattgtcctaataattggaacctgc

SEQ ID NO: 252362 - DNA, 52 bp, Artificial
  Synthetic oligonucleotide
ctatgtctacaaatccgagcctgcccagaactgaatatacccctggtgatgt

SEQ ID NO: 252363 - DNA, 52 bp, Artificial
  Synthetic oligonucleotide
ctcgggagacccgcaacgttcctggtgaaagggtatgggctgccaagcctat

SEQ ID NO: 252364 - DNA, 55 bp, Artificial
  Synthetic oligonucleotide
gcacggtttgcccttcgtgtgggaccctcgtagtcaggcgtgataggtatgagat

SEQ ID NO: 252365 - DNA, 52 bp, Artificial
  Synthetic oligonucleotide
catcgacgggaaaacaactttcaccctttcatcgttgagtcttagtctctct

SEQ ID NO: 252366 - DNA, 52 bp, Artificial
  Synthetic oligonucleotide
ggcggacaagaaacactacgtgaagaatccgggtaagaagaaggcggtgtta

SEQ ID NO: 252367 - DNA, 51 bp, Artificial
  Synthetic oligonucleotide
gttggatttggttggtagtataagcaacttatcttcatggacataggcggt

SEQ ID NO: 252368 - DNA, 51 bp, Artificial
  Synthetic oligonucleotide
gttagattgtggccaagatttggggccagagtttaatagatacattacatc

SEQ ID NO: 252369 - DNA, 51 bp, Artificial
  Synthetic oligonucleotide
aaggtttctgcagaaagcgattttggagagtacggtggaaaggtggaggtc

SEQ ID NO: 252370 - DNA, 51 bp, Artificial
  Synthetic oligonucleotide
tgatcaagacgaggctcggccttcacgatggtgttctcgataactgttcag

SEQ ID NO: 252371 - DNA, 51 bp, Artificial
  Synthetic oligonucleotide
acaaagacgacgtgccctacgaagaaaaggtgagacgtatgcagtttctca

SEQ ID NO: 252372 - DNA, 51 bp, Artificial
  Synthetic oligonucleotide
accaactaccaggccgttcgcaagcgctgctcctttggaaccggttatacc

SEQ ID NO: 252373 - DNA, 51 bp, Artificial
  Synthetic oligonucleotide
acatcactttatagctataggttaaaaccccaagcgctatacttacgcctc

SEQ ID NO: 252374 - DNA, 51 bp, Artificial
  Synthetic oligonucleotide
gagcaactgaatccagcgcggttattccgcagtcaaccgttacaagacagg

SEQ ID NO: 252375 - DNA, 55 bp, Artificial
  Synthetic oligonucleotide
gcacttttgtgggctccggtgaatgcttcgaccgaacagatactctggctctacc

SEQ ID NO: 252376 - DNA, 51 bp, Artificial
  Synthetic oligonucleotide
gagacttatagtgcaattcatacaggagcgcaagaaatagcgttatacgta

SEQ ID NO: 252377 - DNA, 51 bp, Artificial
  Synthetic oligonucleotide
tccgatccgaaatatacttcgccgatgccaaatcatgtgtgacgtggatca

SEQ ID NO: 252378 - DNA, 51 bp, Artificial
  Synthetic oligonucleotide
ttttgtccatgggtttgaagacatccgggtcgtatccgtttggtatcacag

SEQ ID NO: 252379 - DNA, 51 bp, Artificial
  Synthetic oligonucleotide
tttgtgacagcagcgagtgcccttgcgtgtttcagaataccaccgacgaag

SEQ ID NO: 252380 - DNA, 51 bp, Artificial
  Synthetic oligonucleotide
gggcatgccagtcgcaggtccaggtctttgcgcaagatgaacaaccaaggg

SEQ ID NO: 252381 - DNA, 51 bp, Artificial
  Synthetic oligonucleotide
agtttaactgttcgaatactgagacttgtcaactcagcgtattatggcttg

SEQ ID NO: 252382 - DNA, 51 bp, Artificial
  Synthetic oligonucleotide
atcccgaatatcgtgatgagagcaacagctatgagaaagatccattccagg

SEQ ID NO: 252383 - DNA, 51 bp, Artificial
  Synthetic oligonucleotide
atggccctatccagggatcactccctccggacgttatccggtaccttgccc

SEQ ID NO: 252384 - DNA, 51 bp, Artificial
  Synthetic oligonucleotide
agaccggaggaggatttatctattatgttcacaaagacgcagttaacgcaa

SEQ ID NO: 252385 - DNA, 51 bp, Artificial
  Synthetic oligonucleotide
agaaccgattctattatagagtcagcgctcgtgttgtcttttagaatggcg

SEQ ID NO: 252386 - DNA, 55 bp, Artificial
  Synthetic oligonucleotide
gcccaaagtgcaacgcccacacgattcataccgaaacgaaagcgtaatcgcaggg

SEQ ID NO: 252387 - DNA, 51 bp, Artificial
  Synthetic oligonucleotide
acttacaaccgtatgtaagaacgctgactctcattcaaattagtcctccct

SEQ ID NO: 252388 - DNA, 51 bp, Artificial
  Synthetic oligonucleotide
gtgctggactcccccggaccctccaccatctttctcaggtactccgcaact

SEQ ID NO: 252389 - DNA, 51 bp, Artificial
  Synthetic oligonucleotide
ccaatcggagttaagaagaggacaaccgtctatgcataatttgctagcaaa

SEQ ID NO: 252390 - DNA, 51 bp, Artificial
  Synthetic oligonucleotide
cgatagagtattcgagctcttggtgacctgtttccgcgctatctaccttga

SEQ ID NO: 252391 - DNA, 51 bp, Artificial
  Synthetic oligonucleotide
acggtctttgaagccgtatatttcaggggccctgtcggctgagaaagaaag

SEQ ID NO: 252392 - DNA, 51 bp, Artificial
  Synthetic oligonucleotide
gtctattgttgttttccaggacagatacacgcaattaggtttcatcgtaag

SEQ ID NO: 252393 - DNA, 50 bp, Artificial
  Synthetic oligonucleotide
aagcttgagcctgttgtccgagttttcctgcacgccgctggtccgaccaa

SEQ ID NO: 252394 - DNA, 50 bp, Artificial
  Synthetic oligonucleotide
ttgtagcttcccgttatgaatatgagagcattcttcgaacgaagattcgc

SEQ ID NO: 252395 - DNA, 50 bp, Artificial
  Synthetic oligonucleotide
ttggcctgatggattcgaagtaacgccagaggcaagtaatactggagtgt

SEQ ID NO: 252396 - DNA, 50 bp, Artificial
  Synthetic oligonucleotide
ccttggatggccccataggataacggccagtccgccggattctcagtccg

SEQ ID NO: 252397 - DNA, 55 bp, Artificial
  Synthetic oligonucleotide
gccctgcaaagtaatctgcgaagagaataccgagaacgagcgttaaagtgggagg

SEQ ID NO: 252398 - DNA, 50 bp, Artificial
  Synthetic oligonucleotide
ctgtgctcatctcttgcgcacttgcactttgttcctctgcacttgccgtc

SEQ ID NO: 252399 - DNA, 50 bp, Artificial
  Synthetic oligonucleotide
ttggatttagagcaggcgtatttaacattggtgcagaaggacaaatggta

SEQ ID NO: 252400 - DNA, 50 bp, Artificial
  Synthetic oligonucleotide
aaacgcatcgttgtggcaacagggctaacgccctcggatttttcgcggct

SEQ ID NO: 252401 - DNA, 50 bp, Artificial
  Synthetic oligonucleotide
aaagacccagacgggtgttactcggcctgagcacccttatggcgctgagc

SEQ ID NO: 252402 - DNA, 50 bp, Artificial
  Synthetic oligonucleotide
cggtatccaatccccgggtaggttctgaaacgatcaaaacgtctgggttg

SEQ ID NO: 252403 - DNA, 50 bp, Artificial
  Synthetic oligonucleotide
cgccatggccttcttgaatcaatacgtttaatggaacacttcttgcatcg

SEQ ID NO: 252404 - DNA, 50 bp, Artificial
  Synthetic oligonucleotide
aagtcgtttgaggggccccaaccactcggccattcgagaccatcagcgat

SEQ ID NO: 252405 - DNA, 50 bp, Artificial
  Synthetic oligonucleotide
aacatggcgactatcggtggctccgttgcaccgaggcttggttggtctga

SEQ ID NO: 252406 - DNA, 50 bp, Artificial
  Synthetic oligonucleotide
tgcaccgcaaccacaggtaggaccgttgggcataaccgtgacatggccta

SEQ ID NO: 252407 - DNA, 50 bp, Artificial
  Synthetic oligonucleotide
atcatgtggccgaactcacctgcttttccccgcgctcccctgaagatcct

SEQ ID NO: 252408 - DNA, 55 bp, Artificial
  Synthetic oligonucleotide
gccgggatacacgacggtcgcccctgccaactgcgaaagaaagcgaagcctctga

SEQ ID NO: 252409 - DNA, 50 bp, Artificial
  Synthetic oligonucleotide
gggcaggtgggtgcagacacaacaagcaagctgccaacacgagaaccgca

SEQ ID NO: 252410 - DNA, 50 bp, Artificial
  Synthetic oligonucleotide
ggcttgcccaccacacttgcagacattgggctcgacggtgtttcagacga

SEQ ID NO: 252411 - DNA, 50 bp, Artificial
  Synthetic oligonucleotide
atcaggatgtcggtagcaccggctggggtagagcttcctggaatcgcggg

SEQ ID NO: 252412 - DNA, 50 bp, Artificial
  Synthetic oligonucleotide
ataagtgccaattcccccgtgacaaggtctgtggaggggtgctcaccgcc

SEQ ID NO: 252413 - DNA, 50 bp, Artificial
  Synthetic oligonucleotide
ggtagcaccggctggggtagagcttcctggaatcgcgggaccgccaccgg

SEQ ID NO: 252414 - DNA, 50 bp, Artificial
  Synthetic oligonucleotide
agttgggcttacccacgcgaagcgtgcttaccagctaacagcctcgcaaa

SEQ ID NO: 252415 - DNA, 50 bp, Artificial
  Synthetic oligonucleotide
agggtacatcgattttgaactcgatcacaaggctgtcatcggggtttctg

SEQ ID NO: 252416 - DNA, 50 bp, Artificial
  Synthetic oligonucleotide
atcgaaagtcatagccccggggagggctgttacgtattgtccgcccgcgt

SEQ ID NO: 252417 - DNA, 50 bp, Artificial
  Synthetic oligonucleotide
atgaaaggagtcaccgtctacagaggtatcatgggtttcggtcacaagag

SEQ ID NO: 252418 - DNA, 50 bp, Artificial
  Synthetic oligonucleotide
ggacgctgatgaaagccgagaaaccgagagtccaagacgcttgcggggct

SEQ ID NO: 252419 - DNA, 54 bp, Artificial
  Synthetic oligonucleotide
ccggaattatcccaatttccgttttcttgtagccgggcgggatgcgatcggcca

SEQ ID NO: 252420 - DNA, 55 bp, Artificial
  Synthetic oligonucleotide
gcctcaccacatcaggctcgctaacctcgggaagcttcggaggtgtgctcctgag

SEQ ID NO: 252421 - DNA, 50 bp, Artificial
  Synthetic oligonucleotide
agacagggatttgtcgatatagcgattaagaggattacactggaatccgc

SEQ ID NO: 252422 - DNA, 50 bp, Artificial
  Synthetic oligonucleotide
atttcgagcccttcttttgttgcatactggtgcagtttgtcgcgtgcgat

SEQ ID NO: 252423 - DNA, 50 bp, Artificial
  Synthetic oligonucleotide
gctgcgaagcagtgcgtagcggctatctcggttctcggattctcgggctc

SEQ ID NO: 252424 - DNA, 50 bp, Artificial
  Synthetic oligonucleotide
gtccgagagtccgagaaccgagagggccgttgcgtggcggatacgaatcc

SEQ ID NO: 252425 - DNA, 50 bp, Artificial
  Synthetic oligonucleotide
gcggtccagactggtggcccaagcggtgggtgtatccccgaagaacatct

SEQ ID NO: 252426 - DNA, 50 bp, Artificial
  Synthetic oligonucleotide
acaccttggttggactacatatgatcacacaggcgcacctgttgcactat

SEQ ID NO: 252427 - DNA, 50 bp, Artificial
  Synthetic oligonucleotide
ccgggttccgcactctcgtgaataccgggcctgattccggccaggaggtt

SEQ ID NO: 252428 - DNA, 50 bp, Artificial
  Synthetic oligonucleotide
gaatccaagatcatgttcgtaatccagttcagcgatatctaacggcgtat

SEQ ID NO: 252429 - DNA, 50 bp, Artificial
  Synthetic oligonucleotide
tccaccggccgaaagaagctgtccgtccaaagacactatcctcccctgga

SEQ ID NO: 252430 - DNA, 50 bp, Artificial
  Synthetic oligonucleotide
tcagggacctgattacccgggagtgattgcgttgccgattagggcagggg

SEQ ID NO: 252431 - DNA, 55 bp, Artificial
  Synthetic oligonucleotide
gcgaagtaactgcaggattccattctggtgtatagtggattacatgattagcagc

SEQ ID NO: 252432 - DNA, 50 bp, Artificial
  Synthetic oligonucleotide
tacgtggtagcatcgtcaagcttttgatgcaccagcaaatcacaggtgaa

SEQ ID NO: 252433 - DNA, 50 bp, Artificial
  Synthetic oligonucleotide
tacgccaggcggtttgaagtttctgtggccctttccgaggatcgctcctc

SEQ ID NO: 252434 - DNA, 50 bp, Artificial
  Synthetic oligonucleotide
tacgagggggcattctgaaagggtagcagaacttgcagcgctaaccgcgg

SEQ ID NO: 252435 - DNA, 50 bp, Artificial
  Synthetic oligonucleotide
cccggaagggcgattgcgccattagcgtttattgttcgcagagccggggg

SEQ ID NO: 252436 - DNA, 50 bp, Artificial
  Synthetic oligonucleotide
tacccacgcgaagcgtgcttaccagctgacagcctcggcaaaccttcggg

SEQ ID NO: 252437 - DNA, 50 bp, Artificial
  Synthetic oligonucleotide
ccatcctggcgcgtactatctccgggttgtcgtcacgaacagcgggggtt

SEQ ID NO: 252438 - DNA, 50 bp, Artificial
  Synthetic oligonucleotide
ccagcgtagttgggcttacccacgcgaagcgtgcttaccagctaacagcc

SEQ ID NO: 252439 - DNA, 50 bp, Artificial
  Synthetic oligonucleotide
accgagagggccgttgcgtggcggatacgaatcccttcgggattgacccg

SEQ ID NO: 252440 - DNA, 50 bp, Artificial
  Synthetic oligonucleotide
accgagcaagaaacggcacacaacagcggcttgcttcgatgcgccttcct

SEQ ID NO: 252441 - DNA, 50 bp, Artificial
  Synthetic oligonucleotide
gcctgacgacaaagccatcggaaggatggtgagggagtatccgggccgta

SEQ ID NO: 252442 - DNA, 55 bp, Artificial
  Synthetic oligonucleotide
gcgctcccctgaagatccttccctcgtaaacgatcccagagccgataccccagcc

SEQ ID NO: 252443 - DNA, 50 bp, Artificial
  Synthetic oligonucleotide
gcgggctccaaattgacctcccaagccgcagggcccaaagtcctatggat

SEQ ID NO: 252444 - DNA, 55 bp, Artificial
  Synthetic oligonucleotide
gcgctttctgaacccgggtctttactggtaacaggtttagcaactccacagtgtg

SEQ ID NO: 252445 - DNA, 55 bp, Artificial
  Synthetic oligonucleotide
gcggattacctcaggcaaatccacacctcgaaccaatgcgttgttgtaggttgca

SEQ ID NO: 252446 - DNA, 55 bp, Artificial
  Synthetic oligonucleotide
gcgggcaagttctgtgtagtgtctcacaacgtcgggttcgctcacttccggtaac

SEQ ID NO: 252447 - DNA, 55 bp, Artificial
  Synthetic oligonucleotide
gcgggcctatgaagatgacggagctcagtacacaccttggcatagctaagagtac

SEQ ID NO: 252448 - DNA, 55 bp, Artificial
  Synthetic oligonucleotide
gcgttctttggaagcagtcaacgattttgtacactgtaccgtgttgcatcgattc

SEQ ID NO: 252449 - DNA, 55 bp, Artificial
  Synthetic oligonucleotide
cggagtctccccttcacggctcagctcagactgcggacttacctacagccctctt

SEQ ID NO: 252450 - DNA, 55 bp, Artificial
  Synthetic oligonucleotide
cggcatagcaatcatcaacgcagaagcacctataagcgattcaaaccttccgctg

SEQ ID NO: 252451 - DNA, 55 bp, Artificial
  Synthetic oligonucleotide
acaagctgggaactcgggagacccgcaacgttcctggtgaaagggtatgggctgc

SEQ ID NO: 252452 - DNA, 55 bp, Artificial
  Synthetic oligonucleotide
cgggattttgagaggacgtttgtatatagcccgcaactctcgcgcaataccgatc

SEQ ID NO: 252453 - DNA, 49 bp, Artificial
  Synthetic oligonucleotide
cggggtcgaaatgttcgggacgggttctatcgtccccttttgttattac

SEQ ID NO: 252454 - DNA, 55 bp, Artificial
  Synthetic oligonucleotide
cggtgagatactgtaagctgcaaccgacgctcctataagccctacttcctcttgg

SEQ ID NO: 252455 - DNA, 54 bp, Artificial
  Synthetic oligonucleotide
cggtttcctactacgttcttggggccctcattggtatcaagcttcagccgttaa

SEQ ID NO: 252456 - DNA, 55 bp, Artificial
  Synthetic oligonucleotide
cgtaaacttctctatcccacggccacgtgtcaccttcgacttcaagagcgctgag

SEQ ID NO: 252457 - DNA, 52 bp, Artificial
  Synthetic oligonucleotide
cgtaggaaacgaacgattgtttgtcaactaacgtttgtgtgttgactaacgt

SEQ ID NO: 252458 - DNA, 55 bp, Artificial
  Synthetic oligonucleotide
cgtatcgtatgccaaatgtggatcaagagtatctggttcaccaatagttgcatcc

SEQ ID NO: 252459 - DNA, 55 bp, Artificial
  Synthetic oligonucleotide
cgtgatagcctatcgcatcaatttcctgggacagttgctttagcatagcggcatg

SEQ ID NO: 252460 - DNA, 55 bp, Artificial
  Synthetic oligonucleotide
cgtgtgcgatgtagggaattgactttcgtgacttaccagtactgactttcgtggt

SEQ ID NO: 252461 - DNA, 55 bp, Artificial
  Synthetic oligonucleotide
cgtgtgtgctccgaagaagtccctttgagcctggatgaggtttgcggggagcctt

SEQ ID NO: 252462 - DNA, 56 bp, Artificial
  Synthetic oligonucleotide
ctcgcctttccacggctgtagcctcttgcatgataaggcctacacctcccactgcc

SEQ ID NO: 252463 - DNA, 55 bp, Artificial
  Synthetic oligonucleotide
ctacttcgctcaaacggtgaatctcacagcggactgtcagacgttcacgttcacc

SEQ ID NO: 252464 - DNA, 55 bp, Artificial
  Synthetic oligonucleotide
ctatagtctttggaacgtggaccacctttatttcgcccttcgatctttcacacac

SEQ ID NO: 252465 - DNA, 54 bp, Artificial
  Synthetic oligonucleotide
ctatctatcagaaacggacgcaacccttttattggggatcttagttggggtgaa

SEQ ID NO: 252466 - DNA, 55 bp, Artificial
  Synthetic oligonucleotide
ctccacctgcatgtactagcagttctcttacagttactcccataggtagttctac

SEQ ID NO: 252467 - DNA, 55 bp, Artificial
  Synthetic oligonucleotide
ctcctcgactcgcttcccgacttcagcctattcccgtcgaacccaatcgtcccca

SEQ ID NO: 252468 - DNA, 54 bp, Artificial
  Synthetic oligonucleotide
ctcggcgtccgccgtgtttccacttcccacctgttgataacaccttgaaaagta

SEQ ID NO: 252469 - DNA, 55 bp, Artificial
  Synthetic oligonucleotide
ctcgttcggacacgagatcgggccttgtagaaacggagagctggactatactgtc

SEQ ID NO: 252470 - DNA, 55 bp, Artificial
  Synthetic oligonucleotide
ctgaaggaatcactattttgccgaacacagtgtattcgccgttagcgagtattcc

SEQ ID NO: 252471 - DNA, 55 bp, Artificial
  Synthetic oligonucleotide
ctgacggagatcccaccggactggttcatgagtgattgtcccaggatttccctca

SEQ ID NO: 252472 - DNA, 54 bp, Artificial
  Synthetic oligonucleotide
ctgccttacagaaactttcgccccttcacaggcttaagtccggagcggcccacc

SEQ ID NO: 252473 - DNA, 56 bp, Artificial
  Synthetic oligonucleotide
aagggctgctcctctgagaacggaaggatcgtacaccctcgtgagggccagcactc

SEQ ID NO: 252474 - DNA, 55 bp, Artificial
  Synthetic oligonucleotide
ctgccttcgttgctctgtagagaagtcccgaagcgaaatgcacggaatccaccac

SEQ ID NO: 252475 - DNA, 55 bp, Artificial
  Synthetic oligonucleotide
ctggaaatgtcgtgagagtagctgtcatacagatgaattattctccggtgtctgg

SEQ ID NO: 252476 - DNA, 55 bp, Artificial
  Synthetic oligonucleotide
ctggattactatagatcggatgacaactcatatttgtggaaaggaatctccacac

SEQ ID NO: 252477 - DNA, 55 bp, Artificial
  Synthetic oligonucleotide
ctggctctgagcagtttcggaatgacggtggcagctcttggactgctgacgagag

SEQ ID NO: 252478 - DNA, 55 bp, Artificial
  Synthetic oligonucleotide
ctggtccatcttcgatagagaagacctcaggggaagaatgactctcctcgacgac

SEQ ID NO: 252479 - DNA, 55 bp, Artificial
  Synthetic oligonucleotide
ctgtgtctcgatttcaattcctgcaaggtaaggtacaaacccaaatggcagcgag

SEQ ID NO: 252480 - DNA, 55 bp, Artificial
  Synthetic oligonucleotide
cttccgcaagttacaggtttggcattgcaacttggaaccgttatagctggtcaag

SEQ ID NO: 252481 - DNA, 55 bp, Artificial
  Synthetic oligonucleotide
ctttcccgagaggttcgttgagccctagcctttcagcgacgtctttctcaattac

SEQ ID NO: 252482 - DNA, 55 bp, Artificial
  Synthetic oligonucleotide
gaaagaacggtgattcggaaaccctgagtataactctttacagatcgagtgagaa

SEQ ID NO: 252483 - DNA, 54 bp, Artificial
  Synthetic oligonucleotide
gtcctcccggttcttgtcgtccagaatacctattaccaggctcaagggttcgcc

SEQ ID NO: 252484 - DNA, 51 bp, Artificial
  Synthetic oligonucleotide
agccctctctacctttccttacgggtggggagcggggtgaaagggcaaagc

SEQ ID NO: 252485 - DNA, 55 bp, Artificial
  Synthetic oligonucleotide
gtgaagaattaaccctgaaagcagttactccagcattcagcagctctcgggcaat

SEQ ID NO: 252486 - DNA, 55 bp, Artificial
  Synthetic oligonucleotide
gtgcacatgtggtaattcccggaccattgttgaatatcggtacggtagatggatt

SEQ ID NO: 252487 - DNA, 55 bp, Artificial
  Synthetic oligonucleotide
gtgcagggatctgattttcggaggaccaaatcacgatcttagcactgagcactgt

SEQ ID NO: 252488 - DNA, 55 bp, Artificial
  Synthetic oligonucleotide
gttcgatgtgtactggccagccttcattgttacggtaatcagttctaccctcggg

SEQ ID NO: 252489 - DNA, 55 bp, Artificial
  Synthetic oligonucleotide
gttttctgcccgctcaacatctttggctcctaaacttcgggatattaatgttccc

SEQ ID NO: 252490 - DNA, 55 bp, Artificial
  Synthetic oligonucleotide
taacccgtccctggaattttggaccctcgaggagtatgagccttgttgaggctac

SEQ ID NO: 252491 - DNA, 55 bp, Artificial
  Synthetic oligonucleotide
tagccatgaatgcccaatggggaccgtttaaagacgaacgcgtcaggcttgccat

SEQ ID NO: 252492 - DNA, 55 bp, Artificial
  Synthetic oligonucleotide
tcacggcgcttatatacctttcgatagtctggcttgcaacagcactactttcagc

SEQ ID NO: 252493 - DNA, 55 bp, Artificial
  Synthetic oligonucleotide
tcaggtataagcgattatggaaattccatcggtgtccctacggttggtggagaga

SEQ ID NO: 252494 - DNA, 55 bp, Artificial
  Synthetic oligonucleotide
tccacggccccctccgatgtaaacggaggagacacgaacgtgacggactctatga

SEQ ID NO: 252495 - DNA, 56 bp, Artificial
  Synthetic oligonucleotide
aagccgctgcagctgcgcttatgggtccccattgtgccgtaccgagtccagccatc

SEQ ID NO: 252496 - DNA, 55 bp, Artificial
  Synthetic oligonucleotide
tccataccagagagtactttggcaagagaagtatatccaccacgtgccatgtaat

SEQ ID NO: 252497 - DNA, 55 bp, Artificial
  Synthetic oligonucleotide
tccgggaatgtcgttccattgtatgcgattgcttctactacaaatgccagagttc

SEQ ID NO: 252498 - DNA, 55 bp, Artificial
  Synthetic oligonucleotide
tctcgaatcgtaaagagcgtactcatagatcatcagcgttcgatcgggaaacacg

SEQ ID NO: 252499 - DNA, 55 bp, Artificial
  Synthetic oligonucleotide
tctcggtcgatagacccggaatcaaacccaaaggatacatcacagcggccagtac

SEQ ID NO: 252500 - DNA, 55 bp, Artificial
  Synthetic oligonucleotide
tgatgcgatgaaattggttcgatatggtagacgcgaacgtctcagctttggtcgc

SEQ ID NO: 252501 - DNA, 55 bp, Artificial
  Synthetic oligonucleotide
tgcagtcgtgaatcgggaacaattatcgtagtaccatccgggttgtgattgactc

SEQ ID NO: 252502 - DNA, 55 bp, Artificial
  Synthetic oligonucleotide
tgcccggatttgctgatacacatacacacggattcatgggaatagattgtatgca

SEQ ID NO: 252503 - DNA, 55 bp, Artificial
  Synthetic oligonucleotide
tgcctcaaatttgggctatgcaagtgtcgaaaacagtgatatggttttaattccc

SEQ ID NO: 252504 - DNA, 55 bp, Artificial
  Synthetic oligonucleotide
tgctcttggtgttcggagtgaatcaaaaggaatccggagacatatacgttaacgg

SEQ ID NO: 252505 - DNA, 55 bp, Artificial
  Synthetic oligonucleotide
tgctgtataaacgacttcacttgttgctaaaagcctcccacgtgagtcatatata

SEQ ID NO: 252506 - DNA, 56 bp, Artificial
  Synthetic oligonucleotide
gcctttgtgcgtcttgggatactccttgtgccgcccttgctacttcgtctacccct

SEQ ID NO: 252507 - DNA, 55 bp, Artificial
  Synthetic oligonucleotide
tggaattgtcgattgtcgaataattggttgctgcacgcctgataagcctatctcc

SEQ ID NO: 252508 - DNA, 55 bp, Artificial
  Synthetic oligonucleotide
tggacttccagaatgtccctcgtgtcgagagaaggtgtgtccgttcctttcacgg

SEQ ID NO: 252509 - DNA, 55 bp, Artificial
  Synthetic oligonucleotide
tggagtttgggccggccttgcaggagcttacttaagtattggtgaagttggtcac

SEQ ID NO: 252510 - DNA, 55 bp, Artificial
  Synthetic oligonucleotide
tggcgtctatctacgttttcattcctcataggtagattctaaacgaaacattagg

SEQ ID NO: 252511 - DNA, 55 bp, Artificial
  Synthetic oligonucleotide
tgggaaggttctctggctgttaaaattaatcccgtgtagggtacagctaatctta

SEQ ID NO: 252512 - DNA, 55 bp, Artificial
  Synthetic oligonucleotide
tgtgaagcctattaaggcgaaaacgggcacaggatcatatacgggatacctggag

SEQ ID NO: 252513 - DNA, 53 bp, Artificial
  Synthetic oligonucleotide
ttccagcggtcttcccaaaaccccaccggcgtcgttaatctctttaactgcta

SEQ ID NO: 252514 - DNA, 55 bp, Artificial
  Synthetic oligonucleotide
ttcgatgctacaagaatacacgttctcaacacgttgatttcacgactaacatctg

SEQ ID NO: 252515 - DNA, 55 bp, Artificial
  Synthetic oligonucleotide
ttgagtgcaaacaatacgccgggtacaacgccacaagaaccagcagtcgggcacg

SEQ ID NO: 252516 - DNA, 55 bp, Artificial
  Synthetic oligonucleotide
tttacctcttgatctaatagagtcccatttcagtggaatgagagacatagaacgt

SEQ ID NO: 252517 - DNA, 55 bp, Artificial
  Synthetic oligonucleotide
cattacgatgtagccaaaggaggttggcagcgtactcaaggtggcttatcccacg

SEQ ID NO: 252518 - DNA, 55 bp, Artificial
  Synthetic oligonucleotide
cttcctctgagggtgtcgctgaaaccaccttagctaccttaatttcttgatgcgg

SEQ ID NO: 252519 - DNA, 55 bp, Artificial
  Synthetic oligonucleotide
gaactgaacacgagagccaatcaactcgcacactatttgcaaacaacccaaggga

SEQ ID NO: 252520 - DNA, 55 bp, Artificial
  Synthetic oligonucleotide
gaataacacagagcgtgaatggggcgctatccctgctatactgcatgtcgcgggg

SEQ ID NO: 252521 - DNA, 55 bp, Artificial
  Synthetic oligonucleotide
gcgttgacatctatggggttttgatcttctaatgtgatcgtgtgttgactcagcc

SEQ ID NO: 252522 - DNA, 55 bp, Artificial
  Synthetic oligonucleotide
gctaagggagtcaatgcgtggttttacagcggtggtggtatagaactctggcgcg

SEQ ID NO: 252523 - DNA, 55 bp, Artificial
  Synthetic oligonucleotide
gcttcggtgaccggcttatccatagagcaaatagagagcttgtagaatttgtcgc

SEQ ID NO: 252524 - DNA, 55 bp, Artificial
  Synthetic oligonucleotide
ggcagcttagtgactatcacggggttggctgtgggtgagaggcacattgctggcg

SEQ ID NO: 252525 - DNA, 55 bp, Artificial
  Synthetic oligonucleotide
ggccgcaccaattggcgacaagtctattatccgacacgtaatacgatttgggtga

SEQ ID NO: 252526 - DNA, 55 bp, Artificial
  Synthetic oligonucleotide
ggcgagattctttatcgagtagaacaacgcttaagctctatgttacaacaatatg

SEQ ID NO: 252527 - DNA, 55 bp, Artificial
  Synthetic oligonucleotide
gggcagttgtcggtggtgtcagggataccagtgccggtttctacaatcccggcgc

SEQ ID NO: 252528 - DNA, 55 bp, Artificial
  Synthetic oligonucleotide
cctcgcaccaagaatcagaacaatggcgagggctacccaaccaccaacgctgtgt

SEQ ID NO: 252529 - DNA, 55 bp, Artificial
  Synthetic oligonucleotide
ggtcgtaacagataacgcgaatgaaacaagtaccacaatggcccagcaaacggtg

SEQ ID NO: 252530 - DNA, 55 bp, Artificial
  Synthetic oligonucleotide
tacatgccaagggcacaattcgatgctgagtacgggtgcctcgcagggaattggg

SEQ ID NO: 252531 - DNA, 55 bp, Artificial
  Synthetic oligonucleotide
ttatcaacactccaataccgaaggtattaaatgtgaatagccccaggcggaaccc

SEQ ID NO: 252532 - DNA, 55 bp, Artificial
  Synthetic oligonucleotide
ttttatataaaccgatgctcaaatcacgggattgactgaggcaggaagcgttagt

SEQ ID NO: 252533 - DNA, 55 bp, Artificial
  Synthetic oligonucleotide
atacccaattactcaacaccgcttctataccacaaactgtattagtaggcagttc

SEQ ID NO: 252534 - DNA, 54 bp, Artificial
  Synthetic oligonucleotide
agaatcttgcgccatttgataaacgcgattcggctgtctgggtatgagaggatt

SEQ ID NO: 252535 - DNA, 54 bp, Artificial
  Synthetic oligonucleotide
tacccgatagttccgctcaaaagcccatggctcgaatctctcccctcctcatcg

SEQ ID NO: 252536 - DNA, 53 bp, Artificial
  Synthetic oligonucleotide
ggaaaacgtggtcgtcgataggctgatagtgcgagacgggatttgaaatctcg

SEQ ID NO: 252537 - DNA, 53 bp, Artificial
  Synthetic oligonucleotide
ttgatttagataccagcgagggcttaacgcgcttaaatgtagaaatggtgccc

SEQ ID NO: 252538 - DNA, 53 bp, Artificial
  Synthetic oligonucleotide
ccagcaggaccaacaaaaccagaggccggagtgattgtacctaaaccggccac

SEQ ID NO: 252539 - DNA, 55 bp, Artificial
  Synthetic oligonucleotide
cgaatacgggccccaaatcgtgacttatgaacagaatcatcccgattttgaagtg

SEQ ID NO: 252540 - DNA, 53 bp, Artificial
  Synthetic oligonucleotide
taaggccgctatagcgtgatggtaacgtgttaataggcccgcaatttgtgcca

SEQ ID NO: 252541 - DNA, 52 bp, Artificial
  Synthetic oligonucleotide
ggcttgtctagggattcgggttggcgtgccagcggcaattgaggagcaggag

SEQ ID NO: 252542 - DNA, 52 bp, Artificial
  Synthetic oligonucleotide
gcgcaacaattagcggcgctcgctgccaacgaaaggagatacgtggctgctc

SEQ ID NO: 252543 - DNA, 52 bp, Artificial
  Synthetic oligonucleotide
gtcgttgtgctctactttagtaccagccgttaatttccaatctgggtgaatc

SEQ ID NO: 252544 - DNA, 52 bp, Artificial
  Synthetic oligonucleotide
gacgacaggcccatttgcccaggcctcaatgcaaccggaataggccctaatt

SEQ ID NO: 252545 - DNA, 52 bp, Artificial
  Synthetic oligonucleotide
ttccgtctacaccagccgttcttttgccacgattatcttgagtgactttccg

SEQ ID NO: 252546 - DNA, 51 bp, Artificial
  Synthetic oligonucleotide
gtctgctgtgcggttattgaataaggtgggcgtgacgtatacgattgatca

SEQ ID NO: 252547 - DNA, 51 bp, Artificial
  Synthetic oligonucleotide
gacttgtaaatcgtgggtgatgcaacgtgtcacttcggtgcgattacctcg

SEQ ID NO: 252548 - DNA, 50 bp, Artificial
  Synthetic oligonucleotide
gccccactgacattggatgtgcaaccacccacgacacaaccctggctacc

SEQ ID NO: 252549 - DNA, 50 bp, Artificial
  Synthetic oligonucleotide
gcgcaacgcgctcaagtgccggtcttattggggagtgctacgccgtcatt

SEQ ID NO: 252550 - DNA, 55 bp, Artificial
  Synthetic oligonucleotide
cgacgatgggcttttgtgatcacgatccggagatagaaccacagatttggttgac

SEQ ID NO: 252551 - DNA, 50 bp, Artificial
  Synthetic oligonucleotide
gcgctgatgagtggggcagttgtcggtggtgtcagggataccagtgccgg

SEQ ID NO: 252552 - DNA, 50 bp, Artificial
  Synthetic oligonucleotide
gcgggcatagaggggcacgacttcggtgttgagcagacgatgtttgcgta

SEQ ID NO: 252553 - DNA, 50 bp, Artificial
  Synthetic oligonucleotide
gcgtgaatggggcgctatccctgctatactgcatgtcgcgggggccaata

SEQ ID NO: 252554 - DNA, 50 bp, Artificial
  Synthetic oligonucleotide
agccgggcgttggttgattgtctccggtaaggccgaacaagcggacgggt

SEQ ID NO: 252555 - DNA, 50 bp, Artificial
  Synthetic oligonucleotide
agccgctgtcaacgacacatcacgcaaaactcggcttgggccaaccatcg

SEQ ID NO: 252556 - DNA, 50 bp, Artificial
  Synthetic oligonucleotide
gctaatcgcccacaaaatacctccgagcgatcccccatcccagcgggggt

SEQ ID NO: 252557 - DNA, 50 bp, Artificial
  Synthetic oligonucleotide
gccatgagcggacaaacggatcgcctagtggcattggctaaaggcgtggc

SEQ ID NO: 252558 - DNA, 50 bp, Artificial
  Synthetic oligonucleotide
gcagcaacataaaccgatgccccatctgaactgcccgcaacggccgtcga

SEQ ID NO: 252559 - DNA, 50 bp, Artificial
  Synthetic oligonucleotide
agcaagcgtagtgcgtcccacgcaccgataggcaaccaacttggctttgc

SEQ ID NO: 252560 - DNA, 50 bp, Artificial
  Synthetic oligonucleotide
ggaacccaagccggggagcatacttcttatcggcaccgagtgcagcccct

SEQ ID NO: 252561 - DNA, 55 bp, Artificial
  Synthetic oligonucleotide
cgcatggggttggctccccttctatccgcaatttgaacgcagcagtttagagatc

SEQ ID NO: 252562 - DNA, 50 bp, Artificial
  Synthetic oligonucleotide
ggcattcgcccttttcgcaccccacatcataccgcttccggtgttgccct

SEQ ID NO: 252563 - DNA, 50 bp, Artificial
  Synthetic oligonucleotide
ggcccagatgccacgggcgttggttggatttatgcctacgcgttagtgga

SEQ ID NO: 252564 - DNA, 50 bp, Artificial
  Synthetic oligonucleotide
ggcccggttcatgggttttaacgttacgctctcgccaagagggggcgact

SEQ ID NO: 252565 - DNA, 50 bp, Artificial
  Synthetic oligonucleotide
acgagcgtagggggccggtagagcgatagcgcaacgaagtaacggagcct

SEQ ID NO: 252566 - DNA, 50 bp, Artificial
  Synthetic oligonucleotide
ggccggggttaacacttgtccagccgtgattgcagtacctccattggccg

SEQ ID NO: 252567 - DNA, 50 bp, Artificial
  Synthetic oligonucleotide
acctggcgtctagccaccacccaaccttcttaactagataccacgcatag

SEQ ID NO: 252568 - DNA, 50 bp, Artificial
  Synthetic oligonucleotide
gggatccgatacgactgctgttgccctcgcagccgctctcaaagctgacg

SEQ ID NO: 252569 - DNA, 50 bp, Artificial
  Synthetic oligonucleotide
accacttcggcttgtgcgggccaaaccccacgtcggcccataatgtcatg

SEQ ID NO: 252570 - DNA, 50 bp, Artificial
  Synthetic oligonucleotide
acaccgacacgcaccgcatacagtgctaaaggtggctacagcggcacacg

SEQ ID NO: 252571 - DNA, 50 bp, Artificial
  Synthetic oligonucleotide
aagtacgaacttccccaagagtgcctggggtagtgtggcgtggggcgcgg

SEQ ID NO: 252572 - DNA, 54 bp, Artificial
  Synthetic oligonucleotide
cggcgattatgggaatcgcaaggggtaacggttagccgcttaatgagaatccgt

SEQ ID NO: 252573 - DNA, 50 bp, Artificial
  Synthetic oligonucleotide
tccagcgggtacaccgattatgctaagaatgaccagtcgtgatacccttc

SEQ ID NO: 252574 - DNA, 50 bp, Artificial
  Synthetic oligonucleotide
aaccgtcaattcccctcccagcgtttaccagggttctccagaccgggcga

SEQ ID NO: 252575 - DNA, 50 bp, Artificial
  Synthetic oligonucleotide
aaactactctctgcccctctggtgcgacccttgccattcccacgttcccg

SEQ ID NO: 252576 - DNA, 50 bp, Artificial
  Synthetic oligonucleotide
cgcggcaatcggcccaggatcaatgggattgggttaagatgccacggctt

SEQ ID NO: 252577 - DNA, 50 bp, Artificial
  Synthetic oligonucleotide
atgccacgagtcgtgctaatcaattagcagccctcggacgcgctaccggc

SEQ ID NO: 252578 - DNA, 50 bp, Artificial
  Synthetic oligonucleotide
cgcaaccggtcacggattttccagccaaagtctacaccccggctgctgta

SEQ ID NO: 252579 - DNA, 50 bp, Artificial
  Synthetic oligonucleotide
atgtggtgccgggcgtactaccttgacgcggtggcaaaaatagcggacga

SEQ ID NO: 252580 - DNA, 50 bp, Artificial
  Synthetic oligonucleotide
attgcttcgtaccaccacttcggcttgtgcgggccaaaccccacgtcggc

SEQ ID NO: 252581 - DNA, 50 bp, Artificial
  Synthetic oligonucleotide
caaccgcggggtatgcgcactttggagaatggggagcggcaaggctttaa

SEQ ID NO: 252582 - DNA, 50 bp, Artificial
  Synthetic oligonucleotide
ccggccatcccgataacaacgaaccacacggcgcggcccctagtcaaaca

SEQ ID NO: 252583 - DNA, 55 bp, Artificial
  Synthetic oligonucleotide
cggtcactagccgttgtccgtcagaactgaacattgcataattcacgacaccttg

SEQ ID NO: 252584 - DNA, 50 bp, Artificial
  Synthetic oligonucleotide
ccgctacaccgattgacggctggacctttgatggttgggaaggcgcaggt

SEQ ID NO: 252585 - DNA, 50 bp, Artificial
  Synthetic oligonucleotide
ccctcccagcgtttaccagggttctccagaccgggcgagaactccatccg

SEQ ID NO: 252586 - DNA, 50 bp, Artificial
  Synthetic oligonucleotide
cccagtgccacactgacagttaccaaagcgggcccaggtaccggtacggt

SEQ ID NO: 252587 - DNA, 50 bp, Artificial
  Synthetic oligonucleotide
ccattcaaggacctcagtgccggggctaggacaaaatgggccgcatccac

SEQ ID NO: 252588 - DNA, 50 bp, Artificial
  Synthetic oligonucleotide
ccacgggcgttggttggatttatgcctacgcgttagtggatcgcaccggc

SEQ ID NO: 252589 - DNA, 50 bp, Artificial
  Synthetic oligonucleotide
ccaactcgcaatcggggtaccacttcgacccagcaccccacccgccaaag

SEQ ID NO: 252590 - DNA, 50 bp, Artificial
  Synthetic oligonucleotide
ccaacgccgcatccacgcggatagcggactgcactgggcccctcatactg

SEQ ID NO: 252591 - DNA, 50 bp, Artificial
  Synthetic oligonucleotide
ccaaccgaattgcgagccagagtgcgtcgcttagcccgcgaacaaggtca

SEQ ID NO: 252592 - DNA, 50 bp, Artificial
  Synthetic oligonucleotide
caggcgttggcgaattctctgcccattgtgcttggcgctgcttcaggggt

SEQ ID NO: 252593 - DNA, 50 bp, Artificial
  Synthetic oligonucleotide
gcacttgcaaggggcctggcagccgtaatttgactgggcgttgcggggta

SEQ ID NO: 252594 - DNA, 55 bp, Artificial
  Synthetic oligonucleotide
cggttaatttgggatcacgttcttcgctttctgcgcgccgttgccaatacgtttc

SEQ ID NO: 252595 - DNA, 50 bp, Artificial
  Synthetic oligonucleotide
gaggcgagtctgccgctatcggttgcgggtaatcccagtacggtgcaaga

SEQ ID NO: 252596 - DNA, 50 bp, Artificial
  Synthetic oligonucleotide
agccggggagcatacttcttatcggcaccgagtgcagcccctctcgaccc

SEQ ID NO: 252597 - DNA, 50 bp, Artificial
  Synthetic oligonucleotide
agcgcgtgtgggccgtaatcaggccccctcgtatcaacttggtgatcgat

SEQ ID NO: 252598 - DNA, 50 bp, Artificial
  Synthetic oligonucleotide
gaaaagtcacgcccgcatgttcagtgcctattccactcccttgggcccga

SEQ ID NO: 252599 - DNA, 50 bp, Artificial
  Synthetic oligonucleotide
agcggcacccaatatgccggccgttgctaacagctcgaccgtcttggaac

SEQ ID NO: 252600 - DNA, 50 bp, Artificial
  Synthetic oligonucleotide
cttccccaagagtgcctggggtagtgtggcgtggggcgcggttcgtacta

SEQ ID NO: 252601 - DNA, 50 bp, Artificial
  Synthetic oligonucleotide
agctggcacccgtagggcaaaccggtacgcaaggtggttcttcgcagtgc

SEQ ID NO: 252602 - DNA, 50 bp, Artificial
  Synthetic oligonucleotide
cgttcacgcctttgagccgacatgacaaccgagccgggtgagtggtccat

SEQ ID NO: 252603 - DNA, 50 bp, Artificial
  Synthetic oligonucleotide
cgtgatgggcgactgatgcggggtcccaccagtttggatgtgcccgcctc

SEQ ID NO: 252604 - DNA, 50 bp, Artificial
  Synthetic oligonucleotide
cgtcctcattagtcgggcccccagagttttcgggcggaccaaagggccaa

SEQ ID NO: 252605 - DNA, 55 bp, Artificial
  Synthetic oligonucleotide
cttcaaggcatgctacctggcaagccgatagtttcaaattggaacgcatttcgtg

SEQ ID NO: 252606 - DNA, 50 bp, Artificial
  Synthetic oligonucleotide
cggtctggaacggtcaaccgagaagtatgcaacccgcgctacgcctccgc

SEQ ID NO: 252607 - DNA, 50 bp, Artificial
  Synthetic oligonucleotide
cggtcgtgatagcgaagggccacgcggtgcgttagcggctgccattggat

SEQ ID NO: 252608 - DNA, 50 bp, Artificial
  Synthetic oligonucleotide
atacttcttatcggcaccgagtgcagcccctctcgaccccggatccccat

SEQ ID NO: 252609 - DNA, 50 bp, Artificial
  Synthetic oligonucleotide
cggggagccgcttcaatggtaatcgctaaggccggacaaacggcttcgca

SEQ ID NO: 252610 - DNA, 50 bp, Artificial
  Synthetic oligonucleotide
atcagaagcggccaaggatacgtcgcgcaacagcttgctgggccctcgaa

SEQ ID NO: 252611 - DNA, 50 bp, Artificial
  Synthetic oligonucleotide
cggcaccgagtgcagcccctctcgaccccggatccccataaccaggcaag

SEQ ID NO: 252612 - DNA, 50 bp, Artificial
  Synthetic oligonucleotide
cgctcaatatttatactgccactaccggaaaacaagacccgcatcatatt

SEQ ID NO: 252613 - DNA, 55 bp, Artificial
  Synthetic oligonucleotide
caagctccgagcctctcctctcgaggcttcacctcatcttagacgcaccgctcgg

SEQ ID NO: 252614 - DNA, 55 bp, Artificial
  Synthetic oligonucleotide
gacagaaagcgtcgtgcgtctgtggaaagacaaccccgataatgcgccgtgccga

SEQ ID NO: 252615 - DNA, 55 bp, Artificial
  Synthetic oligonucleotide
gacccgaggatagctgccatgaggaggacacgcatgcccaccccacgcgctaaag

SEQ ID NO: 252616 - DNA, 54 bp, Artificial
  Synthetic oligonucleotide
aagcgcatcgaaacctccccaacgcaccttaaccgaaaggcgccgcaggggctg

SEQ ID NO: 252617 - DNA, 55 bp, Artificial
  Synthetic oligonucleotide
aagcctacaggccgtcgcacgccctacgctgaggtgtgctgagtgtatgggtacc

SEQ ID NO: 252618 - DNA, 55 bp, Artificial
  Synthetic oligonucleotide
gcccctaggggtatgatggggccgcctacagctttccaaaggggtctagaggctc

SEQ ID NO: 252619 - DNA, 55 bp, Artificial
  Synthetic oligonucleotide
gcgaccgagccgtttatactttctggaggcgcggggttttggtcctcgtcgctgc

SEQ ID NO: 252620 - DNA, 55 bp, Artificial
  Synthetic oligonucleotide
gcgcatcgatcctcccgagctgtggcgtgtttgcgaagtgacgagggcttacccc

SEQ ID NO: 252621 - DNA, 55 bp, Artificial
  Synthetic oligonucleotide
gctttgcgagttagaaactcggttatcctcccttccgcatcgcgtaagctcggcg

SEQ ID NO: 252622 - DNA, 55 bp, Artificial
  Synthetic oligonucleotide
ggccgtggggcgcgcaaaaccctactcagggacgctacctgtatgaggaagtcag

SEQ ID NO: 252623 - DNA, 55 bp, Artificial
  Synthetic oligonucleotide
gggccaccgctcgggagtttgcagcgctgcttgcggcctaaggctaaactactac

SEQ ID NO: 252624 - DNA, 54 bp, Artificial
  Synthetic oligonucleotide
cacccttacacgctgaggaggacccgatcaacaaagttcacggtaaactctccg

SEQ ID NO: 252625 - DNA, 55 bp, Artificial
  Synthetic oligonucleotide
gtcaaaaggcgtcacagcgcacctccttgggtcagagggtcgagaacgaccgctg

SEQ ID NO: 252626 - DNA, 55 bp, Artificial
  Synthetic oligonucleotide
ttcagccgcgcccctctgggcgcctttaacgcagggtgaggcggcttggtatact

SEQ ID NO: 252627 - DNA, 52 bp, Artificial
  Synthetic oligonucleotide
tcacctttaaccgcgacgctttggtctttaacgcgggcggcttgttacctaa

SEQ ID NO: 252628 - DNA, 54 bp, Artificial
  Synthetic oligonucleotide
acggtgtaaggttgtcaagtggggagatagtgtgacgaccaaaactcacaagcc

SEQ ID NO: 252629 - DNA, 53 bp, Artificial
  Synthetic oligonucleotide
ggttctccttatcggcctcgtcagccaaacagaccctatcgcgtccttggacg

SEQ ID NO: 252630 - DNA, 53 bp, Artificial
  Synthetic oligonucleotide
cgcgtaacgctacgtcttgatcacgttttgagacgagccgtctaacttgccct

SEQ ID NO: 252631 - DNA, 52 bp, Artificial
  Synthetic oligonucleotide
tctcagccttgacacgcaaaggaacctctatgttgacccctactcacccgac

SEQ ID NO: 252632 - DNA, 51 bp, Artificial
  Synthetic oligonucleotide
aggcgcgcgataccgggaggctcgtcgcccctgcactgggcccgcccctaa

SEQ ID NO: 252633 - DNA, 51 bp, Artificial
  Synthetic oligonucleotide
ccgatggacatcccgaccaaagaggatctgaccgctctaagcgaacagggg

SEQ ID NO: 252634 - DNA, 51 bp, Artificial
  Synthetic oligonucleotide
aacgttcgggtcgtgcggtcgcttgtcgtcatcttagaacgaacgctcgtt

SEQ ID NO: 252635 - DNA, 54 bp, Artificial
  Synthetic oligonucleotide
caccttagaggcacctatacggtgagtttagcacgcctccttaaaatcggaacg

SEQ ID NO: 252636 - DNA, 51 bp, Artificial
  Synthetic oligonucleotide
ttgtgcgtgaatgaggtgttccatccggctcctaactcgccacgacgggta

SEQ ID NO: 252637 - DNA, 50 bp, Artificial
  Synthetic oligonucleotide
acgccaaaccctcggacggggtgcgctacttagagacgctctacgcccct

SEQ ID NO: 252638 - DNA, 50 bp, Artificial
  Synthetic oligonucleotide
acgaggggcagtcacgctggcattgacctcgcattcgcgctcacaaacgg

SEQ ID NO: 252639 - DNA, 50 bp, Artificial
  Synthetic oligonucleotide
acgacgggggtgcgttttagtggagtcagcataccgcgaggggccacgat

SEQ ID NO: 252640 - DNA, 50 bp, Artificial
  Synthetic oligonucleotide
accttagccgcaaggtgggccgaagcgcagagacgctctaaacctcccgg

SEQ ID NO: 252641 - DNA, 50 bp, Artificial
  Synthetic oligonucleotide
aaacccctgctgcctcgagggcatcttgtgaaacacgcgcgcctggggca

SEQ ID NO: 252642 - DNA, 50 bp, Artificial
  Synthetic oligonucleotide
aaaccgtcacaccctcgtgccccctttcgctgccaccccggcacggaaag

SEQ ID NO: 252643 - DNA, 50 bp, Artificial
  Synthetic oligonucleotide
aaacgaaccgctacgggacccgcaacgcttcgcagggcaagctaacgggc

SEQ ID NO: 252644 - DNA, 50 bp, Artificial
  Synthetic oligonucleotide
aaactgacgctggctctgcgtttggctctgcgctcccgaaccctgcacct

SEQ ID NO: 252645 - DNA, 50 bp, Artificial
  Synthetic oligonucleotide
aaagggagccgtcaaccgccggactgagcgtctgcggcgtaggtacctca

SEQ ID NO: 252646 - DNA, 55 bp, Artificial
  Synthetic oligonucleotide
cactcacgcatgacgcctcgcccctctagaggactatcgcgctattttcgcgaac

SEQ ID NO: 252647 - DNA, 50 bp, Artificial
  Synthetic oligonucleotide
aaagtgcatcggggctcctcgtagcggtctgcggtgacggctcatcaggc

SEQ ID NO: 252648 - DNA, 50 bp, Artificial
  Synthetic oligonucleotide
aacggtccttagcgcggctcggtgcttgatgatcccgcagacggttgtac

SEQ ID NO: 252649 - DNA, 50 bp, Artificial
  Synthetic oligonucleotide
aacttggtgcccaagcgagatgtgagctaaaccccttgccgtgcgctgtg

SEQ ID NO: 252650 - DNA, 50 bp, Artificial
  Synthetic oligonucleotide
aagacgcaactctaccgccaaccccacggggcgactgcccgatacgctac

SEQ ID NO: 252651 - DNA, 50 bp, Artificial
  Synthetic oligonucleotide
aagcacccctgggacacaaacgcttgcggcctagccaaaacccatgctcc

SEQ ID NO: 252652 - DNA, 50 bp, Artificial
  Synthetic oligonucleotide
aagggcagacgcgtaaagggtgctgagacgcgtaaagggtgctgacagct

SEQ ID NO: 252653 - DNA, 50 bp, Artificial
  Synthetic oligonucleotide
aaggtaccgaggttaccccgaggctcgcgcatgacgcaccggcctagtgc

SEQ ID NO: 252654 - DNA, 50 bp, Artificial
  Synthetic oligonucleotide
acaagcaccaacgccacaacagaagcgtgaggcatcatgccgccgcatga

SEQ ID NO: 252655 - DNA, 50 bp, Artificial
  Synthetic oligonucleotide
accaggcgttcggtgtgaggtcggaagtgccgcccctagacgtcggcttg

SEQ ID NO: 252656 - DNA, 50 bp, Artificial
  Synthetic oligonucleotide
accaggggccgccgcgtaagagggcgacggagaggagtgcgcatgaacac

SEQ ID NO: 252657 - DNA, 55 bp, Artificial
  Synthetic oligonucleotide
caactgtcaggtagggtgaatacaagcatacaccggccactaaccagatcacctg

SEQ ID NO: 252658 - DNA, 50 bp, Artificial
  Synthetic oligonucleotide
acccatcaaaagagcccaaccgacgtttgtgcggttcgtgcggcccgtat

SEQ ID NO: 252659 - DNA, 50 bp, Artificial
  Synthetic oligonucleotide
accccaaacagggctgcttagcgccaaaactagcgcagcgacccaccaaa

SEQ ID NO: 252660 - DNA, 50 bp, Artificial
  Synthetic oligonucleotide
accccacgcgtctcatgcaagctatgcacctcccatttgggcgcttcagc

SEQ ID NO: 252661 - DNA, 50 bp, Artificial
  Synthetic oligonucleotide
accccgcctctacgccgcaaggagcgccagaccccgtatactaaagcgcg

SEQ ID NO: 252662 - DNA, 50 bp, Artificial
  Synthetic oligonucleotide
acccctccaacggtccttagcgcggctcggtgcttgatgatcccgcagac

SEQ ID NO: 252663 - DNA, 50 bp, Artificial
  Synthetic oligonucleotide
acccctgtgcatcgcctatcaccaagtgcgctatgcgagagggcctcgaa

SEQ ID NO: 252664 - DNA, 50 bp, Artificial
  Synthetic oligonucleotide
acccgccagcctagagcgcgggaccgctccccatccgtgctaccataaac

SEQ ID NO: 252665 - DNA, 50 bp, Artificial
  Synthetic oligonucleotide
acccgctcactgtaacaggttcgctaggcgtgccgccaaaaggccgcgta

SEQ ID NO: 252666 - DNA, 50 bp, Artificial
  Synthetic oligonucleotide
acccggtactcggtagccgccctttggagaccgatgcaacgagaccgtca

SEQ ID NO: 252667 - DNA, 50 bp, Artificial
  Synthetic oligonucleotide
acccgtttgcgagggcgtttttatacccccgcacgcgctctactgagctg

SEQ ID NO: 252668 - DNA, 55 bp, Artificial
  Synthetic oligonucleotide
cggcgtcgagagcttgggagaaggtggtcgctcagcgttctgattggctcgtcgt

SEQ ID NO: 252669 - DNA, 50 bp, Artificial
  Synthetic oligonucleotide
accctgacacgtacctgccacggagtccccatgcagcgtaaccggctcgt

SEQ ID NO: 252670 - DNA, 50 bp, Artificial
  Synthetic oligonucleotide
accgcgtataggtgacacgacgcagaaaccggctttagaggggcagccgc

SEQ ID NO: 252671 - DNA, 50 bp, Artificial
  Synthetic oligonucleotide
acctgtgcgcgagccacgtttgggggctcacggcgtgctagactgtgagc

SEQ ID NO: 252672 - DNA, 55 bp, Artificial
  Synthetic oligonucleotide
cgtaaagggtgctgagacgcgtaaagggtgctgacagctagcgaaaccccagggg

SEQ ID NO: 252673 - DNA, 55 bp, Artificial
  Synthetic oligonucleotide
ctgagcagcggatctgactagcgacgcttgaatgcttgccgtctagcggtaggcg

SEQ ID NO: 252674 - DNA, 55 bp, Artificial
  Synthetic oligonucleotide
ctgtttgcgcccacccttctaagcgcgatgctgtttagcctcgtcgtcaccgcta

SEQ ID NO: 252675 - DNA, 60 bp, Artificial
  Synthetic oligonucleotide
aggctggaagctgtcccgttcgcgcgctctgcattaggccacaagacattctgggcgtac

SEQ ID NO: 252676 - DNA, 55 bp, Artificial
  Synthetic oligonucleotide
acctagccacccgacggtgcttccaatcggctcggcaagtttgattaccgcccag

SEQ ID NO: 252677 - DNA, 59 bp, Artificial
  Synthetic oligonucleotide
tagtagaaggctgttccgtttgcccattcatcgtgggacagtttcgatacagacgactg

SEQ ID NO: 252678 - DNA, 60 bp, Artificial
  Synthetic oligonucleotide
aagtcggagcgctcggacgtgaagcgcacgaccttatacctgtcaaccgatgatgtgcgg

SEQ ID NO: 252679 - DNA, 60 bp, Artificial
  Synthetic oligonucleotide
ctagtatcgccgacgagttgtagctgatatgcaggcaaggccatgtaccccatctgcgtc

SEQ ID NO: 252680 - DNA, 60 bp, Artificial
  Synthetic oligonucleotide
ctcgaagtgacggcacacaagcccactgtcgtgttgttgaccggtgtagcgctgaataca

SEQ ID NO: 252681 - DNA, 60 bp, Artificial
  Synthetic oligonucleotide
tcggatgtgttgttctcgatcctgtgtagctgtgcccgcgcgcactggagtttcactgac

SEQ ID NO: 252682 - DNA, 59 bp, Artificial
  Synthetic oligonucleotide
ctttcaggcgcactacgtactccctgtgtacggcgcgcaagaaccatgcctaccgagga

SEQ ID NO: 252683 - DNA, 57 bp, Artificial
  Synthetic oligonucleotide
tcgtcaacggttcgtaagcacttggtacgtaagcacctggtatgagccacctcccgc

SEQ ID NO: 252684 - DNA, 54 bp, Artificial
  Synthetic oligonucleotide
gccgctcgagttcccgaggacagttcccctgtcgcctacggcgttcgtccgccc

SEQ ID NO: 252685 - DNA, 57 bp, Artificial
  Synthetic oligonucleotide
gttctactcgcgatatagcctgaagctccgaccaccaaaatcctcatgcaacactct

SEQ ID NO: 252686 - DNA, 60 bp, Artificial
  Synthetic oligonucleotide
gcgtatgcaggcacagaagttcatcgtgagacgtcacgacaatcgtcctagaggggaagg

SEQ ID NO: 252687 - DNA, 57 bp, Artificial
  Synthetic oligonucleotide
gcctgctagcagacgaagcgagtaagccgcaagcgacacgcggaagttcgtgtttat

SEQ ID NO: 252688 - DNA, 56 bp, Artificial
  Synthetic oligonucleotide
ttgccatgatgcgacgtggcacggtcgcatagaccgcagggttagcgtctgttacg

SEQ ID NO: 252689 - DNA, 55 bp, Artificial
  Synthetic oligonucleotide
ctggtccccgaaggcagaattctggtacttccgtactcaaactcggctggcgagg

SEQ ID NO: 252690 - DNA, 55 bp, Artificial
  Synthetic oligonucleotide
ctgtacgctcgaatctcctgaggggagcatggatatgcgatttggctacacgcta

SEQ ID NO: 252691 - DNA, 55 bp, Artificial
  Synthetic oligonucleotide
cttcatggagcgcttgtattgctcgagagtcattgtcaagcccacgatctgggag

SEQ ID NO: 252692 - DNA, 55 bp, Artificial
  Synthetic oligonucleotide
cgtgtgcgccaatccgatggcactcgatcgaacaatcattcgatcacttctaata

SEQ ID NO: 252693 - DNA, 55 bp, Artificial
  Synthetic oligonucleotide
gcgattgcaacacaggctgattctttcgatcgcacaccacagagggcaataagtg

SEQ ID NO: 252694 - DNA, 55 bp, Artificial
  Synthetic oligonucleotide
gcgcgggctcactggtcatgacgataagtatgaacgaatcgtctcaagcacgccc

SEQ ID NO: 252695 - DNA, 55 bp, Artificial
  Synthetic oligonucleotide
cgcgcgctctgcattaggccacaagacattctgggcgtacactgcgttagccgcc

SEQ ID NO: 252696 - DNA, 55 bp, Artificial
  Synthetic oligonucleotide
gcgcggtgacaccctgattccgaacgagtttgaaagtgctcacggtgcgactcct

SEQ ID NO: 252697 - DNA, 60 bp, Artificial
  Synthetic oligonucleotide
atcaccagtagcactatgactgccagcgtttgcatccagccaagataggagcgttcgaca

SEQ ID NO: 252698 - DNA, 55 bp, Artificial
  Synthetic oligonucleotide
gcgtatccagatcgctcgacaactgcactctccctgcacatttggggcgtaaccc

SEQ ID NO: 252699 - DNA, 55 bp, Artificial
  Synthetic oligonucleotide
gcgtcgtggccgtacgaaggcccgtgtagaggagtcgaacaagtgcgtcgaatca

SEQ ID NO: 252700 - DNA, 55 bp, Artificial
  Synthetic oligonucleotide
ggcgaagcacgcccgttcggacgtacactcgggtgtttgactcgaatcgtcgacc

SEQ ID NO: 252701 - DNA, 55 bp, Artificial
  Synthetic oligonucleotide
gggcgtgagtccatcgtaatggacatgagtacgacatggcgaacgatcggtgggg

SEQ ID NO: 252702 - DNA, 54 bp, Artificial
  Synthetic oligonucleotide
gtaccctaactctatatatcgattccacgaattcctaggtccgggcggatcccg

SEQ ID NO: 252703 - DNA, 54 bp, Artificial
  Synthetic oligonucleotide
gtatcctggaccttcgattcgtttcccgcccagtagtgttcgaccatcggaacc

SEQ ID NO: 252704 - DNA, 55 bp, Artificial
  Synthetic oligonucleotide
gtgcgccgacctctcgcaaggtgtatcaccagatgtctatacaagttgttctcgt

SEQ ID NO: 252705 - DNA, 55 bp, Artificial
  Synthetic oligonucleotide
tcatcggtagcagggatcggttgtggaggtaggcgatccgctggtcgtagctcgg

SEQ ID NO: 252706 - DNA, 55 bp, Artificial
  Synthetic oligonucleotide
tccctgtgtacggcgcgcaagaaccatgcctaccgaggagcgaacggtacgatcg

SEQ ID NO: 252707 - DNA, 55 bp, Artificial
  Synthetic oligonucleotide
tccgacgtcacatacgaaggagggcgccgaaatgtccaatccgttgtccgggccc

SEQ ID NO: 252708 - DNA, 59 bp, Artificial
  Synthetic oligonucleotide
gggtgggatgcccactcgctaccccggtctaccagcactgacgccgatacgactgtgtc

SEQ ID NO: 252709 - DNA, 55 bp, Artificial
  Synthetic oligonucleotide
tcgagactgcaacacaattcgaacactatttctacggtagcaatggggcgattga

SEQ ID NO: 252710 - DNA, 55 bp, Artificial
  Synthetic oligonucleotide
tgggagaacgtatcgaagtacaacgctgacgtgctgacctcgtggtacctcgacg

SEQ ID NO: 252711 - DNA, 55 bp, Artificial
  Synthetic oligonucleotide
tgtacagccaatctactccaacctcgtcttggctcatgtggcgcttttcccactg

SEQ ID NO: 252712 - DNA, 55 bp, Artificial
  Synthetic oligonucleotide
ttacgatccgccggcgtgtctccggagagaccaggatcccaagaggcgacagtgt

SEQ ID NO: 252713 - DNA, 55 bp, Artificial
  Synthetic oligonucleotide
ttgtgcaccctctgcggcgtcgacagtgcgtacctcaccgatagtctcgccgcga

SEQ ID NO: 252714 - DNA, 55 bp, Artificial
  Synthetic oligonucleotide
cccctcggtacaccagtaagtgcataggagcgtccgccatccactagaggagaag

SEQ ID NO: 252715 - DNA, 55 bp, Artificial
  Synthetic oligonucleotide
aatacactgcactgcaatacacgtgggtgcgtgaatcgcggctctctaccgccgg

SEQ ID NO: 252716 - DNA, 55 bp, Artificial
  Synthetic oligonucleotide
acagaggcaactcggtttacacggggcgttggctgtggcacgctaccgtcgcaca

SEQ ID NO: 252717 - DNA, 55 bp, Artificial
  Synthetic oligonucleotide
aattcagtcatgccaccggacgttaccgtgcccctcaatagatggtggaaccagc

SEQ ID NO: 252718 - DNA, 53 bp, Artificial
  Synthetic oligonucleotide
ggggtagcgtgcagggtaacgggacaactacgttctgtagttcccgcgtgagt

SEQ ID NO: 252719 - DNA, 59 bp, Artificial
  Synthetic oligonucleotide
gaggttacgcgcaagatcgattacgatccgccggcgtgtctccggagagaccaggatcc

SEQ ID NO: 252720 - DNA, 54 bp, Artificial
  Synthetic oligonucleotide
cgttccgccctagcggcgccgatcagacgaacggcgggtgggatatccgccgtt

SEQ ID NO: 252721 - DNA, 53 bp, Artificial
  Synthetic oligonucleotide
gcctcacgatagcgcgtaccgtgacaacgatgcaagcaattcagcgagtgtgg

SEQ ID NO: 252722 - DNA, 52 bp, Artificial
  Synthetic oligonucleotide
actgcaatacacgtgggtgcgtgaatcgcggctctctaccgccgggcgtcta

SEQ ID NO: 252723 - DNA, 51 bp, Artificial
  Synthetic oligonucleotide
tagtcgcccgtaacaaacgctcgctactctcatcgggtgtccagcccgctc

SEQ ID NO: 252724 - DNA, 51 bp, Artificial
  Synthetic oligonucleotide
tcccagtagcgccgacagcactcgaagaggtactgccgtgctcgactcctt

SEQ ID NO: 252725 - DNA, 51 bp, Artificial
  Synthetic oligonucleotide
gcaggcaaggccatgtaccccatctgcgtcggaagaaccttagcgagcccg

SEQ ID NO: 252726 - DNA, 51 bp, Artificial
  Synthetic oligonucleotide
aatcactctacagtcgttcgtatgaagctcacggacgcactcgaagagaag

SEQ ID NO: 252727 - DNA, 51 bp, Artificial
  Synthetic oligonucleotide
aatacaccggaacgtattgcggtgcgtcgtattgtgtcgtactgttacgcc

SEQ ID NO: 252728 - DNA, 51 bp, Artificial
  Synthetic oligonucleotide
ctcggagctatcgcaacagcccacatgtccgcaggtcaggcacagtcgcag

SEQ ID NO: 252729 - DNA, 50 bp, Artificial
  Synthetic oligonucleotide
agactcccaacggtgggaccacggcgcttcagccgggtcactgctgagag

SEQ ID NO: 252730 - DNA, 60 bp, Artificial
  Synthetic oligonucleotide
gacctgctgttaccaacgtgtcggccgatgctagccaggccgaacagacgtatccgatta

SEQ ID NO: 252731 - DNA, 50 bp, Artificial
  Synthetic oligonucleotide
aaatcgttggaaccttcgccgcggttcgcgtgtactcgggacatgagcgg

SEQ ID NO: 252732 - DNA, 50 bp, Artificial
  Synthetic oligonucleotide
agacccctatcggtctatgattgcagggttgcctcgcgtccgggcgtgtc

SEQ ID NO: 252733 - DNA, 50 bp, Artificial
  Synthetic oligonucleotide
acgatcgttcgccgccccatcgtctgacgccgtcccacccttcgactgag

SEQ ID NO: 252734 - DNA, 50 bp, Artificial
  Synthetic oligonucleotide
tagggattgaccagcaattttgtagaacccgaggtgcactggtaatcttt

SEQ ID NO: 252735 - DNA, 49 bp, Artificial
  Synthetic oligonucleotide
acccggtctcgcctgtaaccccggaccttcctgcggccccgtttaccac

SEQ ID NO: 252736 - DNA, 50 bp, Artificial
  Synthetic oligonucleotide
aacgccgaatccggtaccgagcaacccggtctcgcctgtaaccccggacc

SEQ ID NO: 252737 - DNA, 50 bp, Artificial
  Synthetic oligonucleotide
acccgacaggctcctccgacgagatcacgtgcgctgagcagtgccggttt

SEQ ID NO: 252738 - DNA, 50 bp, Artificial
  Synthetic oligonucleotide
aagacgacccgctgatcggggtctccagggtccggatgctccgaatggta

SEQ ID NO: 252739 - DNA, 50 bp, Artificial
  Synthetic oligonucleotide
acccaggttgcgttaaccggcgcgagtgctggttcggtgaatcttcgctg

SEQ ID NO: 252740 - DNA, 50 bp, Artificial
  Synthetic oligonucleotide
accacccgcgtagtgcgagcccagacttaccgcgcgtgcctgtccgtggg

SEQ ID NO: 252741 - DNA, 60 bp, Artificial
  Synthetic oligonucleotide
gtgcgttgcgctgtattgcgccgcaatacaccggaacgtattgcggtgcgtcgtattgtg

SEQ ID NO: 252742 - DNA, 50 bp, Artificial
  Synthetic oligonucleotide
cgtagccagtcttttgcgacataaaacacatgtcagcgacacgcctgcga

SEQ ID NO: 252743 - DNA, 50 bp, Artificial
  Synthetic oligonucleotide
cacccttacgacggcggctcagacctcatcctggcgacaccagctgaacg

SEQ ID NO: 252744 - DNA, 50 bp, Artificial
  Synthetic oligonucleotide
caactgcgacatcgactagcgtcggccccgggtaggcgagagcgtcacgc

SEQ ID NO: 252745 - DNA, 50 bp, Artificial
  Synthetic oligonucleotide
caaccccctgcaaccccgcccgtagcagcgcgaattcgggtaaacccctc

SEQ ID NO: 252746 - DNA, 50 bp, Artificial
  Synthetic oligonucleotide
atgtaatacggcgggtactcgtagccgagttgggccagcacccttcggta

SEQ ID NO: 252747 - DNA, 50 bp, Artificial
  Synthetic oligonucleotide
atgcaccgaggcagcggagcctgcatccacggtttctgaccttgaccgag

SEQ ID NO: 252748 - DNA, 50 bp, Artificial
  Synthetic oligonucleotide
atctgtggacttagcaccggttccgggattcgcccccagcgcgaagcagc

SEQ ID NO: 252749 - DNA, 50 bp, Artificial
  Synthetic oligonucleotide
atcgctcgctgccaggcgaagtgctccggtgtgtcgatgtcatcgggtac

SEQ ID NO: 252750 - DNA, 50 bp, Artificial
  Synthetic oligonucleotide
atcgccaatcttgcgcacccctcgatcccagtccccagcagtgcgaacgc

SEQ ID NO: 252751 - DNA, 50 bp, Artificial
  Synthetic oligonucleotide
agttcctgccgtgcaactgcgacatcgactagcgtcggccccgggtaggc

SEQ ID NO: 252752 - DNA, 60 bp, Artificial
  Synthetic oligonucleotide
acgttcaatcggtagtcattccttccgacgacagcgatcattgacacacctgacgaggtc

SEQ ID NO: 252753 - DNA, 50 bp, Artificial
  Synthetic oligonucleotide
agttaacagaggcaactcggtttacacggggcgttggctgtggcacgcta

SEQ ID NO: 252754 - DNA, 50 bp, Artificial
  Synthetic oligonucleotide
aggtcgcaacgtacggatgggtcggaacacgaggaggtcgcctgtgggcg

SEQ ID NO: 252755 - DNA, 50 bp, Artificial
  Synthetic oligonucleotide
aggagccgactcacccatagtgccggaacggatcccggtacatcagtcga

SEQ ID NO: 252756 - DNA, 50 bp, Artificial
  Synthetic oligonucleotide
aggacgtgctcagcgggctctccaggcgtgaggcgctcaagaacctgtga

SEQ ID NO: 252757 - DNA, 50 bp, Artificial
  Synthetic oligonucleotide
aggaccgtgacgtgcgcataccgaccattgaaccatcgggggctttccac

SEQ ID NO: 252758 - DNA, 50 bp, Artificial
  Synthetic oligonucleotide
gctgaaacggagttctcgggcatttgctgttgtcctcctaggtgcgtctt

SEQ ID NO: 252759 - DNA, 50 bp, Artificial
  Synthetic oligonucleotide
aggaccacccaggaccgcagaacagggtgcttgacgggttcctgacgact

SEQ ID NO: 252760 - DNA, 50 bp, Artificial
  Synthetic oligonucleotide
agcgttcgcactgctggggactgggatcgaggggtgcgcaagattggcga

SEQ ID NO: 252761 - DNA, 50 bp, Artificial
  Synthetic oligonucleotide
agagtaggcgagactggacgcctggagagggggtctcggtgacggattca

SEQ ID NO: 252762 - DNA, 50 bp, Artificial
  Synthetic oligonucleotide
agagcctgtcagcgggcgaaggcaccctcctatccgtgttcggctcacta

SEQ ID NO: 252763 - DNA, 60 bp, Artificial
  Synthetic oligonucleotide
tagcgggtgcattgcagtgcaatacactgcactgcaatacacgtgggtgcgtgaatcgcg

SEQ ID NO: 252764 - DNA, 60 bp, Artificial
  Synthetic oligonucleotide
gacttggttctcctgtgacaagaacatcgatgtgtttgcaccttacagccggaacatagc

SEQ ID NO: 252765 - DNA, 60 bp, Artificial
  Synthetic oligonucleotide
gcacttatgagtgtctcaaattcgcatttgaaacacccctcgtgctggccgccgatgggg

SEQ ID NO: 252766 - DNA, 56 bp, Artificial
  Synthetic oligonucleotide
aagattggctcatgagagagagccctccagcttacagactactgcgttttatcgct

SEQ ID NO: 252767 - DNA, 56 bp, Artificial
  Synthetic oligonucleotide
aggtcgcgtgagtgctacctctacagatgcggtcaacggatcccaactctacggcg

SEQ ID NO: 252768 - DNA, 55 bp, Artificial
  Synthetic oligonucleotide
gactaaacgcgtcctggcataggtcgcctacccagtcaagatgttcgcgaatata

SEQ ID NO: 252769 - DNA, 55 bp, Artificial
  Synthetic oligonucleotide
gactaacccgaagacgatgtacagtaagaagggcatggtgatgaccagatgccag

SEQ ID NO: 252770 - DNA, 55 bp, Artificial
  Synthetic oligonucleotide
gacgagctctcatgagattaacggttctgtcagtacttaagattgccggtacccc

SEQ ID NO: 252771 - DNA, 55 bp, Artificial
  Synthetic oligonucleotide
gagggatgcggtttgcactcaataggttatgcccattagcagaaaggttcgtgga

SEQ ID NO: 252772 - DNA, 55 bp, Artificial
  Synthetic oligonucleotide
gaggctaatggacctggtaaggttatggcgctcatgactaacgatgtaacatcgc

SEQ ID NO: 252773 - DNA, 55 bp, Artificial
  Synthetic oligonucleotide
gactccccgttcaccgatatagctgtcatagccgcgaggcaacctactgataaac

SEQ ID NO: 252774 - DNA, 55 bp, Artificial
  Synthetic oligonucleotide
gactgctgagcattacgaagtacaacagattgaccaggctaccgatgatccatcc

SEQ ID NO: 252775 - DNA, 55 bp, Artificial
  Synthetic oligonucleotide
gacgaccgatgaagcagccccataatatttgggtgccacggatcccataatcgcg

SEQ ID NO: 252776 - DNA, 59 bp, Artificial
  Synthetic oligonucleotide
gggttccccgtggcacatgaaggttaccgcttagtgctgctacctctcagtcctgacac

SEQ ID NO: 252777 - DNA, 55 bp, Artificial
  Synthetic oligonucleotide
gactgggactttcctactaccgtattagatgtcgtacttatgggccgctatggtc

SEQ ID NO: 252778 - DNA, 55 bp, Artificial
  Synthetic oligonucleotide
gaggccacacgcggtatcatctaccaaaaggattcggatgcaatgacgcttgata

SEQ ID NO: 252779 - DNA, 55 bp, Artificial
  Synthetic oligonucleotide
gacttgggaatgcggaactcaaagactaatcttgctctgctatgtagcctgtggc

SEQ ID NO: 252780 - DNA, 55 bp, Artificial
  Synthetic oligonucleotide
gagagcatctattgcgccacttagcatggccgaggaaatatctctgtctaggaac

SEQ ID NO: 252781 - DNA, 55 bp, Artificial
  Synthetic oligonucleotide
gacattttgctggatccgacttgtacagaaccgtcttccgacaagttcagcgtct

SEQ ID NO: 252782 - DNA, 55 bp, Artificial
  Synthetic oligonucleotide
gagagctggtgtaggtcgcattgttattatcgatggagattctatagcgcctagc

SEQ ID NO: 252783 - DNA, 55 bp, Artificial
  Synthetic oligonucleotide
gacgaaatgctccccgacatctctcagcggaacaatgatacgacgcgctgcctca

SEQ ID NO: 252784 - DNA, 55 bp, Artificial
  Synthetic oligonucleotide
gaggagccaacagataatcgtacattgcattcctttgcttacgtattgccggatg

SEQ ID NO: 252785 - DNA, 55 bp, Artificial
  Synthetic oligonucleotide
gaccttacaggagtattgccgaaccggcgcgtaacttccgccgctatcgcttacg

SEQ ID NO: 252786 - DNA, 55 bp, Artificial
  Synthetic oligonucleotide
gagcaccacctactgggcaatctgtaacgacaacaggtagccccatacccatagc

SEQ ID NO: 252787 - DNA, 59 bp, Artificial
  Synthetic oligonucleotide
tagcggcgagcgtctgatgggggtgcagggggcaatgctccctgctgggggcgaggggg

SEQ ID NO: 252788 - DNA, 55 bp, Artificial
  Synthetic oligonucleotide
gccccataccagatagggatgcttgcaaggcacactaatactgacgcaaagggca

SEQ ID NO: 252789 - DNA, 55 bp, Artificial
  Synthetic oligonucleotide
gcccatcgtatagtgacggtacgtaattttaccatctataggcgcacgattagca

SEQ ID NO: 252790 - DNA, 55 bp, Artificial
  Synthetic oligonucleotide
gccattccagaacatcacgggtaataccatatgccacaagtatagtccaaagtgc

SEQ ID NO: 252791 - DNA, 55 bp, Artificial
  Synthetic oligonucleotide
gccatcacggaccatgatacggtggaggggatcagccatctctacgagaatggcc

SEQ ID NO: 252792 - DNA, 55 bp, Artificial
  Synthetic oligonucleotide
gccacgcgttcgggtgtacgatttatccaactggaactaatcgtttgtgcaacgg

SEQ ID NO: 252793 - DNA, 55 bp, Artificial
  Synthetic oligonucleotide
gccaatcatggtgtataatgttccaagtcgtgtggggacaggtattttcccaact

SEQ ID NO: 252794 - DNA, 55 bp, Artificial
  Synthetic oligonucleotide
gccaacgtgaacgtggaaataatcatggccgtttgattcgtcatcccctgcgccg

SEQ ID NO: 252795 - DNA, 55 bp, Artificial
  Synthetic oligonucleotide
gcatgggattcccattgcggtcagttcatcccgtttgattcctgcaccacgaaat

SEQ ID NO: 252796 - DNA, 55 bp, Artificial
  Synthetic oligonucleotide
gcatggcttcttacatactcctattatacgcccgtctgcttgccggagaccacaa

SEQ ID NO: 252797 - DNA, 55 bp, Artificial
  Synthetic oligonucleotide
gcatggatctgagcgagaagtggaagaatgatggctacggcgatgacaacgggca

SEQ ID NO: 252798 - DNA, 58 bp, Artificial
  Synthetic oligonucleotide
tataagggggttgtttgagtggataaacacatggagtacagagccgatacacagactt

SEQ ID NO: 252799 - DNA, 55 bp, Artificial
  Synthetic oligonucleotide
gcatcacggcgcttaatatgaccggccatacccttttgatttgctaaaggtaatg

SEQ ID NO: 252800 - DNA, 55 bp, Artificial
  Synthetic oligonucleotide
gcatagtagctcatgcatgcactatcgaccaagcggtagctacagaaaaccctac

SEQ ID NO: 252801 - DNA, 55 bp, Artificial
  Synthetic oligonucleotide
gcataatgaggagtacatgacgcagccgaccggatatgtcagccgtctgtcgaac

SEQ ID NO: 252802 - DNA, 55 bp, Artificial
  Synthetic oligonucleotide
gcagctgttgaggagatgccgcatgagtaatgtacaacaattgcctatcggtgta

SEQ ID NO: 252803 - DNA, 55 bp, Artificial
  Synthetic oligonucleotide
gcacgggtcatgcatagtgacggtagctttgacttcacccaaattgtcacggcgg

SEQ ID NO: 252804 - DNA, 55 bp, Artificial
  Synthetic oligonucleotide
gcaccgatttccgatgcctcaagaagcgcgggagtcgcatccgtaacttcaggat

SEQ ID NO: 252805 - DNA, 55 bp, Artificial
  Synthetic oligonucleotide
gcaatgctgatagaggcattatgcgtactcgtcgcgactaattatgaggacctcg

SEQ ID NO: 252806 - DNA, 55 bp, Artificial
  Synthetic oligonucleotide
gcaagctgctttgtataccttgtaacctacctgagtagatcctgtaaatgcgagc

SEQ ID NO: 252807 - DNA, 55 bp, Artificial
  Synthetic oligonucleotide
gcaaatttactggcattttgccagctttaagcacgggtttcggagaaactcataa

SEQ ID NO: 252808 - DNA, 55 bp, Artificial
  Synthetic oligonucleotide
gcaaatcctccacatagctttggctatgcgtccggtttgcctcctcaatcggacg

SEQ ID NO: 252809 - DNA, 60 bp, Artificial
  Synthetic oligonucleotide
gaacctggttcagccttataactaccgctatatgccgatggcgccctatgaggtcttgca

SEQ ID NO: 252810 - DNA, 55 bp, Artificial
  Synthetic oligonucleotide
gcaaaccggacgcatagccaaagctatgtggaggatttgctaacgaaaagcggac

SEQ ID NO: 252811 - DNA, 55 bp, Artificial
  Synthetic oligonucleotide
gatggtcgaaaccatcatgcacagtcccttttcgttagctggtagacactagtcg

SEQ ID NO: 252812 - DNA, 55 bp, Artificial
  Synthetic oligonucleotide
gatgcgttgaaacaatgccaggcctatgcagatgagggctatgtctacgtcgtag

SEQ ID NO: 252813 - DNA, 55 bp, Artificial
  Synthetic oligonucleotide
gatgccctggcgggcattttctcggtttatggcattgaaaatacctacttgcgct

SEQ ID NO: 252814 - DNA, 55 bp, Artificial
  Synthetic oligonucleotide
gatctctaccgtatcattcccatactgtcccgtttccaccttctgcagatatact

SEQ ID NO: 252815 - DNA, 55 bp, Artificial
  Synthetic oligonucleotide
gatatccaatttaccgcgcatatcacctaatctcataattgcaccggcaccaaat

SEQ ID NO: 252816 - DNA, 55 bp, Artificial
  Synthetic oligonucleotide
gatagtgaaagctatctcttggggcaagcgctggtaggtaatgtagaaacggtag

SEQ ID NO: 252817 - DNA, 55 bp, Artificial
  Synthetic oligonucleotide
gagtcgaaatgttccgccataccttgttgtgatgcgttgttcagttcgctcatgg

SEQ ID NO: 252818 - DNA, 55 bp, Artificial
  Synthetic oligonucleotide
gagtccaaggacacgccctctgccatcccgcaaaatttgtgcgtaggcattcccc

SEQ ID NO: 252819 - DNA, 55 bp, Artificial
  Synthetic oligonucleotide
gagtcatggtacaatcacaggagaaagcatagtagccttggctatcagaccccgg

SEQ ID NO: 252820 - DNA, 58 bp, Artificial
  Synthetic oligonucleotide
accccttgacagtcccgctcggctcccatggacaatagaaccgcatgacagcggaaag

SEQ ID NO: 252821 - DNA, 55 bp, Artificial
  Synthetic oligonucleotide
gagtaaccgttaaaatatgcatacgtggtcttggtcgcttttcactgacccgtaa

SEQ ID NO: 252822 - DNA, 55 bp, Artificial
  Synthetic oligonucleotide
cggcgttggctcaatgggtggcgctctattgcgcggtgcattacagcatggcgtg

SEQ ID NO: 252823 - DNA, 55 bp, Artificial
  Synthetic oligonucleotide
cgggcagtacgcggcaattcatctacgctttggccaatctcatcaaacgcctggc

SEQ ID NO: 252824 - DNA, 55 bp, Artificial
  Synthetic oligonucleotide
cggtcatacggttattggatacgggacaattggagttggaactgtcctgtctggg

SEQ ID NO: 252825 - DNA, 55 bp, Artificial
  Synthetic oligonucleotide
cgtacgcccagagatactagcggcagtactggcgattctgtggttaatctactag

SEQ ID NO: 252826 - DNA, 55 bp, Artificial
  Synthetic oligonucleotide
cgtacggaacgcttgcaaccccaattgtcgccaaatttcttccgcacaagccggc

SEQ ID NO: 252827 - DNA, 53 bp, Artificial
  Synthetic oligonucleotide
cgtagaagcttccccgaatgtagtggttcgtgttaagacggttgatacggacg

SEQ ID NO: 252828 - DNA, 55 bp, Artificial
  Synthetic oligonucleotide
cgtatacatctattttagccctccttcgccgcgatttcaatagcctccgcgaggt

SEQ ID NO: 252829 - DNA, 55 bp, Artificial
  Synthetic oligonucleotide
cgtatcgggcgtaatcatgaagccggcataagccgaagcgataccgtgttcttcc

SEQ ID NO: 252830 - DNA, 55 bp, Artificial
  Synthetic oligonucleotide
cgtcaagtatggcatgacgtcgagtttatagggaatggtgacattcgctcctgtg

SEQ ID NO: 252831 - DNA, 58 bp, Artificial
  Synthetic oligonucleotide
agatagcccctccagggctatgttcttattggctcgaaaatgcccgtagggcatctcc

SEQ ID NO: 252832 - DNA, 55 bp, Artificial
  Synthetic oligonucleotide
cgtcaatcccgtaatcgttcctgctgtaccgttaatggtcaatgctttgctcgtt

SEQ ID NO: 252833 - DNA, 55 bp, Artificial
  Synthetic oligonucleotide
cgtcacgagtattttcccgcccacatgacagatctcctgcagctgtcgaacgccc

SEQ ID NO: 252834 - DNA, 55 bp, Artificial
  Synthetic oligonucleotide
cgtcagccaaaccagattcgtaagccacgatttgttgagtacgaagagctacttg

SEQ ID NO: 252835 - DNA, 55 bp, Artificial
  Synthetic oligonucleotide
cgtcctgtcaaggagacaaaccggacgcatagccaaagctatgtggaggatttgt

SEQ ID NO: 252836 - DNA, 55 bp, Artificial
  Synthetic oligonucleotide
cgtctatgaggtgcggattctcttcccagacggctgccttgataactctagacaa

SEQ ID NO: 252837 - DNA, 55 bp, Artificial
  Synthetic oligonucleotide
cgtctcgtcatagagcccgtacatatggtgaaatcccgatagcggcagatattca

SEQ ID NO: 252838 - DNA, 55 bp, Artificial
  Synthetic oligonucleotide
cgtgaaacggcagaatatccgtacgtggaactgttcagagactttgccgcagcgt

SEQ ID NO: 252839 - DNA, 55 bp, Artificial
  Synthetic oligonucleotide
cgtgatgaggcactgtccgtcctaaagatgcttgtcgaaaccaatacgacaaatc

SEQ ID NO: 252840 - DNA, 55 bp, Artificial
  Synthetic oligonucleotide
cgtggcagcggtcaccaggcggttaatctggccgcttagtaccaaagccggcaga

SEQ ID NO: 252841 - DNA, 55 bp, Artificial
  Synthetic oligonucleotide
cgtgggagggcgggaatatgacgattcgcgtctatgctcttgggcataaggagga

SEQ ID NO: 252842 - DNA, 60 bp, Artificial
  Synthetic oligonucleotide
tatcgacttggctaacaaccaaagccggttggtagagctgatgatagcggacggcatgat

SEQ ID NO: 252843 - DNA, 55 bp, Artificial
  Synthetic oligonucleotide
cgttagccaaatgaccgacctaagatttaagctcatattcagctcgccttagcgg

SEQ ID NO: 252844 - DNA, 55 bp, Artificial
  Synthetic oligonucleotide
cgttcgtcttcgtgtttgcatccttgttgcgatggctgtagtacgtgtactcagc

SEQ ID NO: 252845 - DNA, 55 bp, Artificial
  Synthetic oligonucleotide
cgcacgtggcgagcccgccggtcatatgtaagaatcccgtggccgatttgtgtgg

SEQ ID NO: 252846 - DNA, 55 bp, Artificial
  Synthetic oligonucleotide
cgcagttagtggaacgcgtggaaaccttacaaacacaagcggtacaagctttaga

SEQ ID NO: 252847 - DNA, 55 bp, Artificial
  Synthetic oligonucleotide
cgcattcataaactcacggggattactcgtatcttgccattccaacaaatttcgt

SEQ ID NO: 252848 - DNA, 55 bp, Artificial
  Synthetic oligonucleotide
cgccgagcactacgatgcagaggcatttcaacgcggtgtcgtctgccgcagacag

SEQ ID NO: 252849 - DNA, 55 bp, Artificial
  Synthetic oligonucleotide
cgccgccccactgctttgtaacgaattgtgttccagctcgcactaacaaactgcc

SEQ ID NO: 252850 - DNA, 55 bp, Artificial
  Synthetic oligonucleotide
cgcctgtcgcttctacactgcggctcttggtcccgacaacacaggggattcccaa

SEQ ID NO: 252851 - DNA, 55 bp, Artificial
  Synthetic oligonucleotide
cgcgcgttcgtagtcaccgctcatgaaataggcgtacgacgcatcataaaaggca

SEQ ID NO: 252852 - DNA, 55 bp, Artificial
  Synthetic oligonucleotide
cgcggaagtttgaatgcatagctaggaatgaggagcgcgcaagggagtcgtagtc

SEQ ID NO: 252853 - DNA, 60 bp, Artificial
  Synthetic oligonucleotide
gcgcacttatgagtgtctcaaatttgccatttgaaacacgagtgcttaacccgccgatgg

SEQ ID NO: 252854 - DNA, 55 bp, Artificial
  Synthetic oligonucleotide
cgcggctgactgcaagaccacaccttagttcccttcgtccaagtatcgcgctcac

SEQ ID NO: 252855 - DNA, 55 bp, Artificial
  Synthetic oligonucleotide
cgctatgcagcatgggctgaccctctgggacacggcttatgcatacgggatcggc

SEQ ID NO: 252856 - DNA, 55 bp, Artificial
  Synthetic oligonucleotide
cgctatgcttattagccatcccttcaagaatgtaaagacgacctgctacactgtc

SEQ ID NO: 252857 - DNA, 55 bp, Artificial
  Synthetic oligonucleotide
cgctcaccttaaccgcactttcaccagcaagtccatagtaagccagtgcatacgc

SEQ ID NO: 252858 - DNA, 55 bp, Artificial
  Synthetic oligonucleotide
cgctcgtcatcacatctcagcttttcagagctacggatttgcctatagctcaacc

SEQ ID NO: 252859 - DNA, 55 bp, Artificial
  Synthetic oligonucleotide
cggaagctgatgtgcagaccgtttgtgaggaagcccgcaattggtcggtgttggc

SEQ ID NO: 252860 - DNA, 54 bp, Artificial
  Synthetic oligonucleotide
cggacacataacgaatgtacccgtactgcctacgttaggtgcggcaaccccgtg

SEQ ID NO: 252861 - DNA, 55 bp, Artificial
  Synthetic oligonucleotide
cggagtccaccttttgaataacatccacgtctttagattgtaacgccatggcacg

SEQ ID NO: 252862 - DNA, 55 bp, Artificial
  Synthetic oligonucleotide
cggatgcaattggtatcctatgatacagcctagcactgtaacaacgaggaaggac

SEQ ID NO: 252863 - DNA, 55 bp, Artificial
  Synthetic oligonucleotide
cggcagtaggagcggcactcatagactccgtaacggcagcattacttatagcacc

SEQ ID NO: 252864 - DNA, 60 bp, Artificial
  Synthetic oligonucleotide
tatggtatcgatatctgtgtggagctgggtctgcagagtaccaatgtgcatacattgacg

SEQ ID NO: 252865 - DNA, 55 bp, Artificial
  Synthetic oligonucleotide
cggcatggcaactaaagctgatgcaaatggtgcgaatgtaacgaatcctgacaca

SEQ ID NO: 252866 - DNA, 55 bp, Artificial
  Synthetic oligonucleotide
cggccaatccaccgtctaccgcatcaaacggagacacgaggaccagtgaacgcag

SEQ ID NO: 252867 - DNA, 50 bp, Artificial
  Synthetic oligonucleotide
cggccgttgtacgtccggtaatcttatgccctgtaaacccggaaaacgaa

SEQ ID NO: 252868 - DNA, 55 bp, Artificial
  Synthetic oligonucleotide
cggcgttcaccagtacgacgaccttctgtattgcggtgttctcccacagatcgac

SEQ ID NO: 252869 - DNA, 55 bp, Artificial
  Synthetic oligonucleotide
cttaacttgtgcttcgtaaatcaaggaacccagttgtgtagattcatcccaaggc

SEQ ID NO: 252870 - DNA, 55 bp, Artificial
  Synthetic oligonucleotide
cttagcacggtttcccgtatcatgtcgaaattacaggaacaaggcttcttgacgc

SEQ ID NO: 252871 - DNA, 55 bp, Artificial
  Synthetic oligonucleotide
cttataactcaaatgaataccatagcgggacccatctcccaggagccgttcaaaa

SEQ ID NO: 252872 - DNA, 55 bp, Artificial
  Synthetic oligonucleotide
cttccacgtgaaaatattatgggtacgggaacgttactcgactctgcaaggttgc

SEQ ID NO: 252873 - DNA, 55 bp, Artificial
  Synthetic oligonucleotide
cttccagtatgcctcgatttcgcaaccctacgtgcgcctagattaacgcgtaatg

SEQ ID NO: 252874 - DNA, 55 bp, Artificial
  Synthetic oligonucleotide
cttgctcaatgaagtaaatgtgcccgtatacgcgacgaaactcgtatgcggcctc

SEQ ID NO: 252875 - DNA, 60 bp, Artificial
  Synthetic oligonucleotide
gcaacgcccaccacactccttgtagtcaagtatgacattgtgtgtagtcacgagttgact

SEQ ID NO: 252876 - DNA, 58 bp, Artificial
  Synthetic oligonucleotide
tattctcgaaaatggggcgcagccccatcttgcgccgaaggtgtatttaattgccgga

SEQ ID NO: 252877 - DNA, 55 bp, Artificial
  Synthetic oligonucleotide
cttgtaaatatactcccaatcatcacgaaagggcgtgaaaagatacttatccggt

SEQ ID NO: 252878 - DNA, 55 bp, Artificial
  Synthetic oligonucleotide
cttgtaacggccgtatggatgggtgatgatacgggttcacgaagtctaggtgccg

SEQ ID NO: 252879 - DNA, 55 bp, Artificial
  Synthetic oligonucleotide
cttgtaatacattgacgaagtcaaaaggacagggaggcggttggatttgtattac

SEQ ID NO: 252880 - DNA, 55 bp, Artificial
  Synthetic oligonucleotide
ctttatataaccgcggcggtcgtgagtgtcacgaacctttgcgtgtagtactagg

SEQ ID NO: 252881 - DNA, 55 bp, Artificial
  Synthetic oligonucleotide
gaaaatgttatcgcactatgcgctgacttagaacactatgcaggtcgcgaaacag

SEQ ID NO: 252882 - DNA, 55 bp, Artificial
  Synthetic oligonucleotide
gaacgccacaagatgtgagcgcccgcggtacggcgtccctgcatgacgtgaccta

SEQ ID NO: 252883 - DNA, 55 bp, Artificial
  Synthetic oligonucleotide
gaagacaatgtaacgatacgctgcggaggagcatcaaaatgaattgttcgtcccg

SEQ ID NO: 252884 - DNA, 55 bp, Artificial
  Synthetic oligonucleotide
gaagactcttgatccggagtacctgcatctcgcaaaggtgctattctgagtaatc

SEQ ID NO: 252885 - DNA, 55 bp, Artificial
  Synthetic oligonucleotide
gaaggtgggagactgtcgtatcgtattgtacggaacgctcaaatattccgacgtg

SEQ ID NO: 252886 - DNA, 55 bp, Artificial
  Synthetic oligonucleotide
gaataccaccgcgtaccatatgctctactacagctcgatataaactacatacagc

SEQ ID NO: 252887 - DNA, 60 bp, Artificial
  Synthetic oligonucleotide
tcagaatcgaaagcccatagacatagtgcaggggcagattcgtcacggcacgctccgttt

SEQ ID NO: 252888 - DNA, 55 bp, Artificial
  Synthetic oligonucleotide
gaatgtcttgcttgattaaccggatttgtttccgtactgattagaccaaaggacg

SEQ ID NO: 252889 - DNA, 55 bp, Artificial
  Synthetic oligonucleotide
gaatttcgtcagaaattgtaccaggcaacgcaccgtatttaccgcgtacaaggtc

SEQ ID NO: 252890 - DNA, 54 bp, Artificial
  Synthetic oligonucleotide
gacattattagccctacctcttcccgtagagaaaagacgcgttatttcacttct

SEQ ID NO: 252891 - DNA, 54 bp, Artificial
  Synthetic oligonucleotide
cgtttccttcttgtagcaacggacccggattataccgtacacaaatagcatcgg

SEQ ID NO: 252892 - DNA, 55 bp, Artificial
  Synthetic oligonucleotide
ctacgcagatagaggagtacgcaccactagcaaagccgatgatcatacaaagcgc

SEQ ID NO: 252893 - DNA, 55 bp, Artificial
  Synthetic oligonucleotide
ctacgcccatctgacagacttcattgtaccagcagctcctaaagtaccgcggcaa

SEQ ID NO: 252894 - DNA, 55 bp, Artificial
  Synthetic oligonucleotide
ctaggagccatgattgacattgttcccggagttcctttcgtcaatgctattagag

SEQ ID NO: 252895 - DNA, 54 bp, Artificial
  Synthetic oligonucleotide
ctatcgctaattcccgtactatgtttaaaggttcccacaccgatacggacttga

SEQ ID NO: 252896 - DNA, 55 bp, Artificial
  Synthetic oligonucleotide
ctcaaatttgccatttgaaacacgagtgcttaacccgccgatggcggtaaatggt

SEQ ID NO: 252897 - DNA, 55 bp, Artificial
  Synthetic oligonucleotide
ctcaattgggcgactgccgttgagtgagcaagtatatatgtcgctaaagcaagcc

SEQ ID NO: 252898 - DNA, 54 bp, Artificial
  Synthetic oligonucleotide
acagaaccgcctgtaagcgtttttaaccctctgggatatattgggctaccctca

SEQ ID NO: 252899 - DNA, 55 bp, Artificial
  Synthetic oligonucleotide
ctccgtttccatgtggaatcgaccggtgaaaatatcgaaaggacgatccgtgccc

SEQ ID NO: 252900 - DNA, 55 bp, Artificial
  Synthetic oligonucleotide
ctcctcaaactgatctcgcatcatatcggtagatgcctctttataacggcgccgc

SEQ ID NO: 252901 - DNA, 55 bp, Artificial
  Synthetic oligonucleotide
ctcgcccttcggatacatatgaccgatgagaggcattccgtaggacatgcactgc

SEQ ID NO: 252902 - DNA, 55 bp, Artificial
  Synthetic oligonucleotide
ctcggtgtgagctatacaaaggtcaatggtcaattaacattaggtcctgcaccgc

SEQ ID NO: 252903 - DNA, 55 bp, Artificial
  Synthetic oligonucleotide
ctctggcggtgcactgagcaagttttccgtattcgctatgagtatcacgccttat

SEQ ID NO: 252904 - DNA, 55 bp, Artificial
  Synthetic oligonucleotide
ctctgtaagatagtcgcgcgaggtgtgtgaagggatataggactccgtatagatg

SEQ ID NO: 252905 - DNA, 55 bp, Artificial
  Synthetic oligonucleotide
ctcttagtaatagcccattgcaagttaatttgactcttttgcataccgcatctcg

SEQ ID NO: 252906 - DNA, 55 bp, Artificial
  Synthetic oligonucleotide
ctcttcacgcatgagaccgatgccatcacatggtagtacaccatattttcgggcc

SEQ ID NO: 252907 - DNA, 55 bp, Artificial
  Synthetic oligonucleotide
ctgcaccgcacgattgaagtggtcttcgcctcttccgcctaccatcgcttttacg

SEQ ID NO: 252908 - DNA, 55 bp, Artificial
  Synthetic oligonucleotide
ctgccccgcgtaaattgcacgatagatcgtgttgtagctaatgataggtctatgg

SEQ ID NO: 252909 - DNA, 52 bp, Artificial
  Synthetic oligonucleotide
acaccgaaggcgagtttttaactgaattgctcgttttggctaacgaccgtag

SEQ ID NO: 252910 - DNA, 55 bp, Artificial
  Synthetic oligonucleotide
ctggagtttgcgtgaaccaatcgaagagtcccataatcactatcctttcttacgt

SEQ ID NO: 252911 - DNA, 55 bp, Artificial
  Synthetic oligonucleotide
ctggcgccaatgccattttaacgggccttgctagcttggaaagaccgtactacgt

SEQ ID NO: 252912 - DNA, 55 bp, Artificial
  Synthetic oligonucleotide
ctggtgagcggacatattgacggcaccggtcatattatgcggatacaaccggacg

SEQ ID NO: 252913 - DNA, 55 bp, Artificial
  Synthetic oligonucleotide
ctgtcctacaagaggaacaaggccgactacaatcttcgcttcggaggtatgcccg

SEQ ID NO: 252914 - DNA, 55 bp, Artificial
  Synthetic oligonucleotide
ctgttgccgattattatcggtggcaattgacggttgccgtagctcgttttcgtcg

SEQ ID NO: 252915 - DNA, 55 bp, Artificial
  Synthetic oligonucleotide
gtcgtaatgacttgtatttcaccgttataacgaccgtaagcgccggtgtcgacag

SEQ ID NO: 252916 - DNA, 55 bp, Artificial
  Synthetic oligonucleotide
gtcgtgacgggtgatcatgcggagcggttcaactttgcgacggatgtctcactct

SEQ ID NO: 252917 - DNA, 55 bp, Artificial
  Synthetic oligonucleotide
gtctgggcatcgtaatgccacccgtgaaagtccaccggtcgcacgctctggcact

SEQ ID NO: 252918 - DNA, 55 bp, Artificial
  Synthetic oligonucleotide
gtgaggttccatctgacgctgatgtagtaagccaacagcttatgcttcgcgctgg

SEQ ID NO: 252919 - DNA, 55 bp, Artificial
  Synthetic oligonucleotide
gtgccggctcttttaccgtatattgtgaagatgctccgcatctcagccaaaccgt

SEQ ID NO: 252920 - DNA, 59 bp, Artificial
  Synthetic oligonucleotide
tcattgcgtcacaggcaacggctatcccttgcgggtactaagaggggtgggtgatccat

SEQ ID NO: 252921 - DNA, 55 bp, Artificial
  Synthetic oligonucleotide
gtggacgaacaagctaggtaccatgtgtatactagcaggatgtttcggcatggta

SEQ ID NO: 252922 - DNA, 55 bp, Artificial
  Synthetic oligonucleotide
gtggatttcacattccatacagattgtgctgcaccaggagccacatgcaagtcgt

SEQ ID NO: 252923 - DNA, 55 bp, Artificial
  Synthetic oligonucleotide
gtgggtatcctctgcggattaccaagcagacgtacgtttgtccaaagacatcgta

SEQ ID NO: 252924 - DNA, 55 bp, Artificial
  Synthetic oligonucleotide
gtggtacccctggttcatgagtgtgtggcacccatttatccgtcggcatagcctt

SEQ ID NO: 252925 - DNA, 55 bp, Artificial
  Synthetic oligonucleotide
gtgtagctaaccactcaaaggtacgtaacactgcatgatgttcaatagccgtggt

SEQ ID NO: 252926 - DNA, 55 bp, Artificial
  Synthetic oligonucleotide
gtgtgccttctgtgcgggaactattacggcttactgacattttggtggacggtcc

SEQ ID NO: 252927 - DNA, 55 bp, Artificial
  Synthetic oligonucleotide
gttaccggtgtcaactatccgggattagaaagcacgaaaacgcacgggtgcgcga

SEQ ID NO: 252928 - DNA, 55 bp, Artificial
  Synthetic oligonucleotide
gttatcagtggttggtctaccttaggggtggctatcttcttcctaggtggcgtac

SEQ ID NO: 252929 - DNA, 55 bp, Artificial
  Synthetic oligonucleotide
gttcaatatgataccgctgccgccccttgacggttcgcgcgtactcatggcattc

SEQ ID NO: 252930 - DNA, 55 bp, Artificial
  Synthetic oligonucleotide
gttcatgaggtacccctggttcatgagtatgtggcacccatttatccgtcggcat

SEQ ID NO: 252931 - DNA, 58 bp, Artificial
  Synthetic oligonucleotide
agtcgcgaaattgtgatgccctggcgggcattttctcggtttatggcattgaaaatac

SEQ ID NO: 252932 - DNA, 55 bp, Artificial
  Synthetic oligonucleotide
gttcgcgccgtcccatgtcgtattggaaagtcccgtaatcgtactcttgccgtct

SEQ ID NO: 252933 - DNA, 55 bp, Artificial
  Synthetic oligonucleotide
gttctggtttggagtccacatttgctccggaatcgagcataagggtcacaccgtc

SEQ ID NO: 252934 - DNA, 54 bp, Artificial
  Synthetic oligonucleotide
gtttagatatcggtacaggtacagggatacttttattagtagccgcccaattag

SEQ ID NO: 252935 - DNA, 55 bp, Artificial
  Synthetic oligonucleotide
gtttcgcgattcatgtgagaacctcctagattaattagtgcaacacattaaacct

SEQ ID NO: 252936 - DNA, 50 bp, Artificial
  Synthetic oligonucleotide
gtttcggagaaactcataagtgcgccctccgggaaataaaacccaaaccc

SEQ ID NO: 252937 - DNA, 55 bp, Artificial
  Synthetic oligonucleotide
gtttgaccacatcacatagagcatagctaacatcgtcccaatacgaataagcgcc

SEQ ID NO: 252938 - DNA, 55 bp, Artificial
  Synthetic oligonucleotide
ggtcagcacgcgattggaagtgcgtgtttaagcatgtaggttgagctataggcaa

SEQ ID NO: 252939 - DNA, 55 bp, Artificial
  Synthetic oligonucleotide
ggtcccgtcgacatgccctgctcaagtgtgctgatgtatgtgccaacgagcgcag

SEQ ID NO: 252940 - DNA, 55 bp, Artificial
  Synthetic oligonucleotide
ggtctatggcatagagcgtactagccacataggcattcactgagttcgcctcttt

SEQ ID NO: 252941 - DNA, 55 bp, Artificial
  Synthetic oligonucleotide
ggtctgcacgagcaacatcttggtcggagtcaaagtagatagattgtacatagta

SEQ ID NO: 252942 - DNA, 60 bp, Artificial
  Synthetic oligonucleotide
actctcgacagtaagcaggttgatgtgttgatttacatcttggagcatactgaaccagcc

SEQ ID NO: 252943 - DNA, 55 bp, Artificial
  Synthetic oligonucleotide
ggtctttactagcaattgtgcgcttaattggtgggcgccattttacttcacgaga

SEQ ID NO: 252944 - DNA, 52 bp, Artificial
  Synthetic oligonucleotide
ggtgactttaaacgtagtatcaacctgggtaggataaccaaccaacagttta

SEQ ID NO: 252945 - DNA, 55 bp, Artificial
  Synthetic oligonucleotide
ggtgggattgcctacttcgtagtgtatgctataggacatcaaatagtggcatcct

SEQ ID NO: 252946 - DNA, 55 bp, Artificial
  Synthetic oligonucleotide
ggttattagggagcattttaacagtacttgggctaggcactacgtatggacaagt

SEQ ID NO: 252947 - DNA, 55 bp, Artificial
  Synthetic oligonucleotide
ggttggggtagtaccttttatgatgtgaaagtacatgtagagccctgcgactaaa

SEQ ID NO: 252948 - DNA, 55 bp, Artificial
  Synthetic oligonucleotide
gtacatagcgcactgaacgacaagagtggtttggccggcccggctaatatcctcc

SEQ ID NO: 252949 - DNA, 55 bp, Artificial
  Synthetic oligonucleotide
gtacatctgtagcagatacgattgctcgttttaagcgattggctggttatgatgt

SEQ ID NO: 252950 - DNA, 55 bp, Artificial
  Synthetic oligonucleotide
gtagacgccgcatcagggaaagaagtaggtacgatagtcgacaaaggggaataaa

SEQ ID NO: 252951 - DNA, 55 bp, Artificial
  Synthetic oligonucleotide
gtataacttattcagcgctacattgccacgtttcggtatcactacaaaatttgtg

SEQ ID NO: 252952 - DNA, 55 bp, Artificial
  Synthetic oligonucleotide
gtatgaaacggcacgcgtatgaaccgtatgactccatttcatgtcatgacgatcc

SEQ ID NO: 252953 - DNA, 53 bp, Artificial
  Synthetic oligonucleotide
cccaccccagtttcggggtttgactgcaactcgatgggcggggcagtcaaggg

SEQ ID NO: 252954 - DNA, 55 bp, Artificial
  Synthetic oligonucleotide
gtatgaactaggctggggacatgtatttcgcctgcagggctggagcgatcgcccg

SEQ ID NO: 252955 - DNA, 55 bp, Artificial
  Synthetic oligonucleotide
gtattaatatgacggcggtatatcgtgcctcgcgctacggaaagggagagcccgc

SEQ ID NO: 252956 - DNA, 54 bp, Artificial
  Synthetic oligonucleotide
gtattagttcggtttactgaactttgcaatccgcgtgaagcaggtttaaacgcc

SEQ ID NO: 252957 - DNA, 55 bp, Artificial
  Synthetic oligonucleotide
gtcacatgagtcgactacgacttatgacagccccgtttcattccctacgtagata

SEQ ID NO: 252958 - DNA, 55 bp, Artificial
  Synthetic oligonucleotide
gtcatataccgaattgctatgcacagccccgcctttagtaacctctacgggactt

SEQ ID NO: 252959 - DNA, 55 bp, Artificial
  Synthetic oligonucleotide
gtccaaacgttgctccttggtgtacttcacgtggcaacctcctgtctgcatcggg

SEQ ID NO: 252960 - DNA, 55 bp, Artificial
  Synthetic oligonucleotide
gtcgacagcctttacggctgcgtgttccatcaggcctacaagtgccggtgtggcg

SEQ ID NO: 252961 - DNA, 55 bp, Artificial
  Synthetic oligonucleotide
tctgcggtgcgctttcacacccgactcccgccatccacacggaggatatcccatc

SEQ ID NO: 252962 - DNA, 55 bp, Artificial
  Synthetic oligonucleotide
tctttctcaccgcgttacaaacggcacgcacaatcggaacatggtgtgagacgtg

SEQ ID NO: 252963 - DNA, 55 bp, Artificial
  Synthetic oligonucleotide
tcttttcatacggaaattcggcggaatgtagggcgcttggatgatcaggaaaccg

SEQ ID NO: 252964 - DNA, 58 bp, Artificial
  Synthetic oligonucleotide
gtagtgcctatataagatataagagcagtttacctcctaaaatggctacggagcctta

SEQ ID NO: 252965 - DNA, 55 bp, Artificial
  Synthetic oligonucleotide
tgacctccacaaggtaggccaatgcgataagggatacaaatcccgctatgatacg

SEQ ID NO: 252966 - DNA, 55 bp, Artificial
  Synthetic oligonucleotide
tgcaccggtcccaaaacaatagtcgcaccactaaggccactaatcatcgttacag

SEQ ID NO: 252967 - DNA, 55 bp, Artificial
  Synthetic oligonucleotide
tgccaccgtatttgctacgcgtatcgcacccgctctgaatatcactgttcgtttt

SEQ ID NO: 252968 - DNA, 55 bp, Artificial
  Synthetic oligonucleotide
tgcctgtgcgcgcccttcctccgaaagcggtacatccgaatgtccctgaaagcgc

SEQ ID NO: 252969 - DNA, 55 bp, Artificial
  Synthetic oligonucleotide
tggcagaacgtatgagcgcgcgttttgcgcatatctttacacttgccgaaatggg

SEQ ID NO: 252970 - DNA, 55 bp, Artificial
  Synthetic oligonucleotide
tgtgccctagttaggggttctagggtatatacggcccctatattagcatatgagg

SEQ ID NO: 252971 - DNA, 55 bp, Artificial
  Synthetic oligonucleotide
tgttacttcatcctgccagagttccggcataatacgatgtcccgaaataatattc

SEQ ID NO: 252972 - DNA, 55 bp, Artificial
  Synthetic oligonucleotide
tgttatcgtaaccgccgtgggagatcatcaaatcgtccgtcggagtgttgtccgg

SEQ ID NO: 252973 - DNA, 55 bp, Artificial
  Synthetic oligonucleotide
tgttccaattcacgtttcgtcaagtcggcaatactgcctcgatacaaggcttccg

SEQ ID NO: 252974 - DNA, 55 bp, Artificial
  Synthetic oligonucleotide
ttagacgccgctacggctttagcatatggcaagcggtatagttcaagggcttcac

SEQ ID NO: 252975 - DNA, 60 bp, Artificial
  Synthetic oligonucleotide
gatacacgcaaggaagcggggtaccgcttatattcattacagtacagctctgctgcaaca

SEQ ID NO: 252976 - DNA, 55 bp, Artificial
  Synthetic oligonucleotide
ttattagccatcccttcaagaatgtaaagacgacctgctacactgtcgatggtag

SEQ ID NO: 252977 - DNA, 55 bp, Artificial
  Synthetic oligonucleotide
ttattttacggaagccgttatgtttaccacgagtgataattcatggggaccgaca

SEQ ID NO: 252978 - DNA, 55 bp, Artificial
  Synthetic oligonucleotide
ttcaggtcgtgaaccgcgactttgcaaactggacggagcgcatggatcccttcgg

SEQ ID NO: 252979 - DNA, 55 bp, Artificial
  Synthetic oligonucleotide
ttcatccataaggggccaatggtccatgaattcacgcacctagtatttgaccata

SEQ ID NO: 252980 - DNA, 55 bp, Artificial
  Synthetic oligonucleotide
ttgagtacgtcggcaagtcccgctacctctccgccgtatgcagcagtcagcccac

SEQ ID NO: 252981 - DNA, 55 bp, Artificial
  Synthetic oligonucleotide
ttgcatttcgctatctctattacggcggatatgttacgtcacatgaaagtcaatg

SEQ ID NO: 252982 - DNA, 55 bp, Artificial
  Synthetic oligonucleotide
ttgttaacgcccgctccggtggatgttcggaggactgcaagttttgcgcccagtc

SEQ ID NO: 252983 - DNA, 55 bp, Artificial
  Synthetic oligonucleotide
ttttaaccctctgggatatattgggctaccctcacacgctcaaaatcgtttctgg

SEQ ID NO: 252984 - DNA, 55 bp, Artificial
  Synthetic oligonucleotide
gttttcgcacgctagcccctttgccaatcggctgcacccctgtggggtttgcctc

SEQ ID NO: 252985 - DNA, 54 bp, Artificial
  Synthetic oligonucleotide
taagttcggtagccggataggcccctaccccgttcagtgctctaccgcctgtac

SEQ ID NO: 252986 - DNA, 59 bp, Artificial
  Synthetic oligonucleotide
cgtgtcaggactgagaggtagcagcactaagcggtaaccttcatgtgccacggggaacc

SEQ ID NO: 252987 - DNA, 59 bp, Artificial
  Synthetic oligonucleotide
ctgcagcacatcagcgaaacccaagttaaaccggagaaacggcagagtagagatagccc

SEQ ID NO: 252988 - DNA, 53 bp, Artificial
  Synthetic oligonucleotide
taatccattccgaacggtaaaagatcatcccgaccgtcggacgcccttcctcg

SEQ ID NO: 252989 - DNA, 55 bp, Artificial
  Synthetic oligonucleotide
tacaaagtcgaccggacggtaaggatgcggttattctgacctatgcgatagggcc

SEQ ID NO: 252990 - DNA, 55 bp, Artificial
  Synthetic oligonucleotide
tacaagcttcttgcttgagtgctatcggagatcacttcggtcccaaccaacgggg

SEQ ID NO: 252991 - DNA, 55 bp, Artificial
  Synthetic oligonucleotide
tacggcggtcacacgagcggcgcaggtacgacgagggacgacaaggataacagct

SEQ ID NO: 252992 - DNA, 55 bp, Artificial
  Synthetic oligonucleotide
tactagcaattgtgcgcttaattggtgggcgccattttacttcacgagaatctag

SEQ ID NO: 252993 - DNA, 55 bp, Artificial
  Synthetic oligonucleotide
tagcggaaggtaggattctcatcgatggtacccgatagcgtcagcgaataattat

SEQ ID NO: 252994 - DNA, 55 bp, Artificial
  Synthetic oligonucleotide
tatacacatcgtccgtgttatagcccgagtcgatacacgcaagattgacatttcg

SEQ ID NO: 252995 - DNA, 55 bp, Artificial
  Synthetic oligonucleotide
tataccgtgaaatctcaatcctctgtccgtaccgtctttgtcacatatggaaatc

SEQ ID NO: 252996 - DNA, 55 bp, Artificial
  Synthetic oligonucleotide
tatatacggcgcacttgcacacctatcgcaatcgcgggcatatctacggattcgc

SEQ ID NO: 252997 - DNA, 55 bp, Artificial
  Synthetic oligonucleotide
tatcgtttacactacggccttcatatttaaatgatgggcccaagtcacctgtaat

SEQ ID NO: 252998 - DNA, 56 bp, Artificial
  Synthetic oligonucleotide
ccccctttcttagtcattgcgtcacaggcaacggctatcccttgcgggtactaaga

SEQ ID NO: 252999 - DNA, 55 bp, Artificial
  Synthetic oligonucleotide
tatggattctgaattggagcgtccttgacatcccacgtaccatcaacctcgatcc

SEQ ID NO: 253000 - DNA, 55 bp, Artificial
  Synthetic oligonucleotide
tcatcacgtgtatccgcccagtgaccgacagatgtcgtttcctgtccgtatgtac

SEQ ID NO: 253001 - DNA, 55 bp, Artificial
  Synthetic oligonucleotide
tcatcgttacgagctgtgtatcgtagtcggctagaactacaccgatatggttcgc

SEQ ID NO: 253002 - DNA, 55 bp, Artificial
  Synthetic oligonucleotide
tccccaacatgcgcccaggacatcttattaccttgtcgttgcaacatagtcagcg

SEQ ID NO: 253003 - DNA, 55 bp, Artificial
  Synthetic oligonucleotide
tccctaaatagcgaatagcccaatacttgtgatgccgatgtaggaccacaaccag

SEQ ID NO: 253004 - DNA, 55 bp, Artificial
  Synthetic oligonucleotide
tcgcaacaatcacctcctccacatctgttgtgccaacgcgcgtgacaagctcacg

SEQ ID NO: 253005 - DNA, 55 bp, Artificial
  Synthetic oligonucleotide
tcgcttcggtctgcgtgagtccgatctgggtatcgtacgtgtctgatgcgcttcg

SEQ ID NO: 253006 - DNA, 55 bp, Artificial
  Synthetic oligonucleotide
tcggacgatttgatatcctttgccggctggaaatggtcgggaatcagtgcaatct

SEQ ID NO: 253007 - DNA, 55 bp, Artificial
  Synthetic oligonucleotide
tcggcagaagagtgaatacggatgataggagttttcgagtataggggtgctttgc

SEQ ID NO: 253008 - DNA, 54 bp, Artificial
  Synthetic oligonucleotide
gcggcggctttatataatcgggattttgtcgggttggatacgaaagtaactgcc

SEQ ID NO: 253009 - DNA, 58 bp, Artificial
  Synthetic oligonucleotide
gtattctcgaaaatggggcgcagccccatcttgcaccaagggcgagttttgcgccgga

SEQ ID NO: 253010 - DNA, 55 bp, Artificial
  Synthetic oligonucleotide
gcgggcatgacgtagagattctctgtcgattgggcggcgagcgtgttgtgccgca

SEQ ID NO: 253011 - DNA, 55 bp, Artificial
  Synthetic oligonucleotide
gcggtcgtatagcttcgattaacggcaatactgaatgatgctaccgcacgacccg

SEQ ID NO: 253012 - DNA, 55 bp, Artificial
  Synthetic oligonucleotide
gcgtataggcacccttaccgtttaggaaggtaacaccgtgtcctatgtagcgcat

SEQ ID NO: 253013 - DNA, 55 bp, Artificial
  Synthetic oligonucleotide
gcgttattggcaggtcaatctggtattgggccgattacacgctttgacgcatctg

SEQ ID NO: 253014 - DNA, 55 bp, Artificial
  Synthetic oligonucleotide
gcgttccgattggacgtactatgagcagtattttgcacagtccggtcaaatgcgc

SEQ ID NO: 253015 - DNA, 55 bp, Artificial
  Synthetic oligonucleotide
gcgttcgttgtcttgtaggtgacgcaattggttaacccagcaggatcccaagtct

SEQ ID NO: 253016 - DNA, 55 bp, Artificial
  Synthetic oligonucleotide
gctatcggtggctctagtcttatggctctactaggtttcactacactattctggg

SEQ ID NO: 253017 - DNA, 55 bp, Artificial
  Synthetic oligonucleotide
gctcatccgcgttgagtgccttctccgcgtggcacgtacttagctctcttgctgg

SEQ ID NO: 253018 - DNA, 55 bp, Artificial
  Synthetic oligonucleotide
gctcgtatttgtgcacaacaataccttgctaaacgcgaagaattaggtttcccac

SEQ ID NO: 253019 - DNA, 55 bp, Artificial
  Synthetic oligonucleotide
gctgacacttacccgtaagattacgcggtcccataaggtgatagaagcatattgc

SEQ ID NO: 253020 - DNA, 54 bp, Artificial
  Synthetic oligonucleotide
acggggttgccgcacctaacgtaggcagtacgggtacattcgttatgtgtccga

SEQ ID NO: 253021 - DNA, 55 bp, Artificial
  Synthetic oligonucleotide
gctgcctacgtcgggccggtcttcgctgcgctcagacgatcgctcccacagaaaa

SEQ ID NO: 253022 - DNA, 55 bp, Artificial
  Synthetic oligonucleotide
gctggtctgagatatttccatatcaaggaatcgcctacgtcccgatggagtcccc

SEQ ID NO: 253023 - DNA, 55 bp, Artificial
  Synthetic oligonucleotide
gctgtaacctgcgttatggttatgcaagtgcatagcgatgtataaggagggagac

SEQ ID NO: 253024 - DNA, 55 bp, Artificial
  Synthetic oligonucleotide
gctgtcttataacacctacatcggcacccaaaggtctcggaataagttcgttgtg

SEQ ID NO: 253025 - DNA, 55 bp, Artificial
  Synthetic oligonucleotide
gcttagggtccgtccaaggtagcatgagattaggtctgtactgcatgcgttcccg

SEQ ID NO: 253026 - DNA, 53 bp, Artificial
  Synthetic oligonucleotide
ggaaacgtcgagaatatttaacccgttgttgagggtaccgataatgagggcac

SEQ ID NO: 253027 - DNA, 55 bp, Artificial
  Synthetic oligonucleotide
ggaacaaactaaacatcgttcccaatcctgtataaagaacgcccataggactcat

SEQ ID NO: 253028 - DNA, 55 bp, Artificial
  Synthetic oligonucleotide
ggaagcggggtaccgcttatattcattacagtacagctctgctgcaacaggggat

SEQ ID NO: 253029 - DNA, 55 bp, Artificial
  Synthetic oligonucleotide
gcccgtcctccaaggacaggcgttttcttacgattataaagagcctatgacggta

SEQ ID NO: 253030 - DNA, 55 bp, Artificial
  Synthetic oligonucleotide
gccctttgagagcacgattcagacaatgccaattgagttcagcgtgcaggacggc

SEQ ID NO: 253031 - DNA, 60 bp, Artificial
  Synthetic oligonucleotide
acttacttgccggattatgagttcaccaattggcgggatgtgaacaagaaatatcacatc

SEQ ID NO: 253032 - DNA, 55 bp, Artificial
  Synthetic oligonucleotide
gccgcccactgtcagcgcaagaagcgccgttctcacgattttgcgtcccggaaca

SEQ ID NO: 253033 - DNA, 55 bp, Artificial
  Synthetic oligonucleotide
gccgctattcgcgatactattcagcaaattataggctttcgtaaggatcagttct

SEQ ID NO: 253034 - DNA, 55 bp, Artificial
  Synthetic oligonucleotide
gcctaattgtatggtcatttcttcgactcgccagaagctcacggaaaacctggta

SEQ ID NO: 253035 - DNA, 55 bp, Artificial
  Synthetic oligonucleotide
gcctcatcaccttccgcctgtccgtccgcgtgaatggaggtctcgagaacaccct

SEQ ID NO: 253036 - DNA, 55 bp, Artificial
  Synthetic oligonucleotide
gcctcttggacggctcagcaaggagacaaaccacaggcgtaacggtgctgcgtcg

SEQ ID NO: 253037 - DNA, 53 bp, Artificial
  Synthetic oligonucleotide
gcgaaacccaagttaaaccggagaaacggcagagtagagatagcccctccagg

SEQ ID NO: 253038 - DNA, 55 bp, Artificial
  Synthetic oligonucleotide
gcgaacgtcgggaacgatttcacgacaaatggcgctgtcacaacgggcagcgact

SEQ ID NO: 253039 - DNA, 53 bp, Artificial
  Synthetic oligonucleotide
gcgaatgcgactggttgttaaggttacgtcttttaggagtaaatcgacaaagg

SEQ ID NO: 253040 - DNA, 55 bp, Artificial
  Synthetic oligonucleotide
gcgagaatttgcgtaaaattaaagatagtttgcctgagtggagcacatctacagc

SEQ ID NO: 253041 - DNA, 55 bp, Artificial
  Synthetic oligonucleotide
gcgagtaggttgctttgccacgggcatacgatacagtacacacatacggcctact

SEQ ID NO: 253042 - DNA, 54 bp, Artificial
  Synthetic oligonucleotide
aggagtgttgccgtacagttttggctattagtcttttacggctacaagcttccc

SEQ ID NO: 253043 - DNA, 55 bp, Artificial
  Synthetic oligonucleotide
gcgataccctttcgacgaagggatgcgcccagaggacgtgtgcaaatgctccaag

SEQ ID NO: 253044 - DNA, 55 bp, Artificial
  Synthetic oligonucleotide
gcgatgctctgagctatggcgagatccgctggttccatagttttgagcaggtctt

SEQ ID NO: 253045 - DNA, 55 bp, Artificial
  Synthetic oligonucleotide
gcgcaaagtggagcgcattggtttgtaggctactgtaaggctggtaatacatggg

SEQ ID NO: 253046 - DNA, 55 bp, Artificial
  Synthetic oligonucleotide
gcgcacagaggagaatttcagcgtcacaccggacaccgccgtgttattggaccag

SEQ ID NO: 253047 - DNA, 55 bp, Artificial
  Synthetic oligonucleotide
gcgcggacaggaacctcctgcaatgccgtaatagagcctgtatattccctcatga

SEQ ID NO: 253048 - DNA, 55 bp, Artificial
  Synthetic oligonucleotide
gcgcgtcacttgggttacagtagtgtgacgcgggattttggcgcataactgtgtc

SEQ ID NO: 253049 - DNA, 55 bp, Artificial
  Synthetic oligonucleotide
gcgcgtgtgcgtacgaaggcactctacgacttccttgatgagttatgtgttccgc

SEQ ID NO: 253050 - DNA, 55 bp, Artificial
  Synthetic oligonucleotide
gcgcttcaatacgacaactgtgcggcccttctttgtctgtccccgcacctcggtt

SEQ ID NO: 253051 - DNA, 55 bp, Artificial
  Synthetic oligonucleotide
gcggacaggagcaataatgcttaatccaaagcttgcccatcgaggaaaagtcggc

SEQ ID NO: 253052 - DNA, 55 bp, Artificial
  Synthetic oligonucleotide
ggctctctgtcaaatgttggggtattcaccctacgagtcttctttggcaccaatc

SEQ ID NO: 253053 - DNA, 60 bp, Artificial
  Synthetic oligonucleotide
gatatgttgcaactgggattcctgaagttcctcaaaggcgcggcgatgatgaacctggtt

SEQ ID NO: 253054 - DNA, 54 bp, Artificial
  Synthetic oligonucleotide
ggctgtagttttactaccatcgccaccaccaaatttaaggttaacacccatgcg

SEQ ID NO: 253055 - DNA, 55 bp, Artificial
  Synthetic oligonucleotide
ggcttacaattaatgcattatcgagttgtggatcgtgagcatcagctagtgctgt

SEQ ID NO: 253056 - DNA, 55 bp, Artificial
  Synthetic oligonucleotide
gggaactaggccggatatcatatcccacgcttatcttcttaggatggtataattg

SEQ ID NO: 253057 - DNA, 55 bp, Artificial
  Synthetic oligonucleotide
gggaccgcgtaatcttacgggtaagtgtcagcatcaattcacgatcctcccggtc

SEQ ID NO: 253058 - DNA, 55 bp, Artificial
  Synthetic oligonucleotide
gggagtgcttgttatgaacaaaagatggacggagcattttaaagccgacttaccg

SEQ ID NO: 253059 - DNA, 55 bp, Artificial
  Synthetic oligonucleotide
gggatcatatttgataaccggcttgccgtgactaggagcttcgcttagccgcaca

SEQ ID NO: 253060 - DNA, 55 bp, Artificial
  Synthetic oligonucleotide
gggattactattattcatcggagaaagggaaccgtatcttccgtttggcgctaca

SEQ ID NO: 253061 - DNA, 55 bp, Artificial
  Synthetic oligonucleotide
gggcatggttcgtatgaattgtggagagcacacgatgccccgtaagcgctgcctg

SEQ ID NO: 253062 - DNA, 55 bp, Artificial
  Synthetic oligonucleotide
gggcgactaagaccctgcaggctaagattatctacaatgaagtcgtagctatgct

SEQ ID NO: 253063 - DNA, 55 bp, Artificial
  Synthetic oligonucleotide
gggctatgttcttattggctcgaaaatgcccgtagggcatctccttccgcagggt

SEQ ID NO: 253064 - DNA, 54 bp, Artificial
  Synthetic oligonucleotide
cccgcgtggtgggtttttagtgcttttactggctgccgttttcgtgccctcatc

SEQ ID NO: 253065 - DNA, 55 bp, Artificial
  Synthetic oligonucleotide
ggggacgacaagggatacgatagaagaaagcatttcactttcgggtattccgctc

SEQ ID NO: 253066 - DNA, 55 bp, Artificial
  Synthetic oligonucleotide
ggggcgcagccccatcttgcgccgaaggtgtatttaattgccggatacatcggat

SEQ ID NO: 253067 - DNA, 55 bp, Artificial
  Synthetic oligonucleotide
ggggtcgatccttggaattggctatgggcttgcccgttatgacagcacatacatt

SEQ ID NO: 253068 - DNA, 55 bp, Artificial
  Synthetic oligonucleotide
ggtaaaggcagtgggagttctgtcagtccaatagattccgaacatagagacggtt

SEQ ID NO: 253069 - DNA, 54 bp, Artificial
  Synthetic oligonucleotide
ggtaaatttgcgggcggatgcacccgtaaacgaaagggtaagtctgcatgtggg

SEQ ID NO: 253070 - DNA, 55 bp, Artificial
  Synthetic oligonucleotide
ggtaacgcagtataccttgccaatgcagctttcatgtggatcgtaccactcgttg

SEQ ID NO: 253071 - DNA, 55 bp, Artificial
  Synthetic oligonucleotide
ggtaagcacttcctacccctatgtgtcgataggggcattagtccgaaagaggagg

SEQ ID NO: 253072 - DNA, 55 bp, Artificial
  Synthetic oligonucleotide
ggtacccttgtattcaacatggccctaaggaatttagccgcgacaataattacca

SEQ ID NO: 253073 - DNA, 55 bp, Artificial
  Synthetic oligonucleotide
ggtagcagcactaagcggtaaccttcatgtgccacggggaacccgggggctgtcg

SEQ ID NO: 253074 - DNA, 55 bp, Artificial
  Synthetic oligonucleotide
ggtagctaaggcaggaataatcctggggaccggacaccttacagttgacgaatgc

SEQ ID NO: 253075 - DNA, 56 bp, Artificial
  Synthetic oligonucleotide
ctctggggcttactgtgttaatcctgatgcagtgtttaagggcggaaaaacggatc

SEQ ID NO: 253076 - DNA, 55 bp, Artificial
  Synthetic oligonucleotide
ggaagtcggagctgttaccagttgcaccttgtaataaggatacaccaccgcctgc

SEQ ID NO: 253077 - DNA, 55 bp, Artificial
  Synthetic oligonucleotide
ggacatgattgcaaaccaaatgcgtcgcaacccgacacgtgaagcaaaattctac

SEQ ID NO: 253078 - DNA, 55 bp, Artificial
  Synthetic oligonucleotide
ggaccgttggctgcaagaggtgtaaatattctaggtacatctgtagacagcatcg

SEQ ID NO: 253079 - DNA, 54 bp, Artificial
  Synthetic oligonucleotide
ggacgtcctacgactagatgagtagccccgttttggacggcttctttcggagtc

SEQ ID NO: 253080 - DNA, 55 bp, Artificial
  Synthetic oligonucleotide
ggactcaccgtaaatccgtattgaatctcgctcaaagcatgtccttgaacgtaga

SEQ ID NO: 253081 - DNA, 54 bp, Artificial
  Synthetic oligonucleotide
ggacttcggtactgtgcctaattttgggtgacccgaaggatgaagcggcggagg

SEQ ID NO: 253082 - DNA, 55 bp, Artificial
  Synthetic oligonucleotide
ggagatgtgccagaggtgcgggccctagaattgccttacctatacggagcaggta

SEQ ID NO: 253083 - DNA, 55 bp, Artificial
  Synthetic oligonucleotide
ggagcagcctttgtagacggtacagccgtagcggaatatctcggtaagactacgg

SEQ ID NO: 253084 - DNA, 55 bp, Artificial
  Synthetic oligonucleotide
ggaggcttaggtgctacccaaggagatataactcgaaaatccttggcagatgcgc

SEQ ID NO: 253085 - DNA, 55 bp, Artificial
  Synthetic oligonucleotide
ggagtgcaccggcatcacgacaaatggactgcgatgggagctgaacggttcacag

SEQ ID NO: 253086 - DNA, 56 bp, Artificial
  Synthetic oligonucleotide
acggcatgatgggcgcgacggcagtaaaaccttggctgcgggaaaatacctaccca

SEQ ID NO: 253087 - DNA, 55 bp, Artificial
  Synthetic oligonucleotide
ggcaggtaaagaataggtatccgcaaggtttcctactacaggtgcgatgataccg

SEQ ID NO: 253088 - DNA, 55 bp, Artificial
  Synthetic oligonucleotide
ggcagtgcctgaactgcggctacgtttgcgagagtacgaaggccccgatgaagtg

SEQ ID NO: 253089 - DNA, 55 bp, Artificial
  Synthetic oligonucleotide
ggcatccgtccgactgcctacgatttcacacttgtcatgaacgcgcttgagctca

SEQ ID NO: 253090 - DNA, 55 bp, Artificial
  Synthetic oligonucleotide
ggccggcggtaaacgtttgcgtgcgcaattatgcttgcttattgccaatgcgggt

SEQ ID NO: 253091 - DNA, 55 bp, Artificial
  Synthetic oligonucleotide
ggcgaatagcgcaagtacccacgaaggcagtcgttagggtagacgaggtgaagag

SEQ ID NO: 253092 - DNA, 55 bp, Artificial
  Synthetic oligonucleotide
ggcgacaccactcccggttgttgctaataaccccgctagcattagaacctaaggc

SEQ ID NO: 253093 - DNA, 55 bp, Artificial
  Synthetic oligonucleotide
ggcgaccaatgctattactatgacactgtggtctttccttggtatggaatcggcc

SEQ ID NO: 253094 - DNA, 55 bp, Artificial
  Synthetic oligonucleotide
ggcgcatggaaggcaaccgagtaccaatgttatcgctaattccctagagacgacc

SEQ ID NO: 253095 - DNA, 55 bp, Artificial
  Synthetic oligonucleotide
ggcggaatatgcccgtatcactagaggcctcgtacagattgaacgccacgcggag

SEQ ID NO: 253096 - DNA, 55 bp, Artificial
  Synthetic oligonucleotide
ggcggcatcgcttgtgaatgaaaggtggcctctatatataagctatcgctgaagg

SEQ ID NO: 253097 - DNA, 55 bp, Artificial
  Synthetic oligonucleotide
cgtgctgactatgttccccgcgtggtgggtttttagtgcttttactggctgccgt

SEQ ID NO: 253098 - DNA, 59 bp, Artificial
  Synthetic oligonucleotide
ggcaacgtgcccaaagatggtgcgtttatccccctctgcttctgcaaaatagtgccttc

SEQ ID NO: 253099 - DNA, 55 bp, Artificial
  Synthetic oligonucleotide
ggctagcataaccatttcagcattggcagttgctacaagatgtagccctgattgc

SEQ ID NO: 253100 - DNA, 55 bp, Artificial
  Synthetic oligonucleotide
ggctcatcgtcggtatggggaccgtcatcgttcagtctctcatgtatcgcaagat

SEQ ID NO: 253101 - DNA, 55 bp, Artificial
  Synthetic oligonucleotide
cattgcaagcctgtacaatcggatccaaccgtttgcataaatcccaatacagcgg

SEQ ID NO: 253102 - DNA, 55 bp, Artificial
  Synthetic oligonucleotide
cattacgtgatgtagcggttcatataccacgccgcttggctgaatcgtcaggtcc

SEQ ID NO: 253103 - DNA, 55 bp, Artificial
  Synthetic oligonucleotide
agatactacgagcgtgctgctataagcccagattatttagactttaacgaccacg

SEQ ID NO: 253104 - DNA, 55 bp, Artificial
  Synthetic oligonucleotide
catggagcgaatcaactacaaggcgaccatgatgacgtatgccggcgtcttggac

SEQ ID NO: 253105 - DNA, 55 bp, Artificial
  Synthetic oligonucleotide
catgcttccaatacttcgttcacatctaatgacactaaggtatgccccgtacaga

SEQ ID NO: 253106 - DNA, 55 bp, Artificial
  Synthetic oligonucleotide
accgtattttctggcaagtctactcgttgcatccatttacggatatcgtcctttg

SEQ ID NO: 253107 - DNA, 55 bp, Artificial
  Synthetic oligonucleotide
catccgtatctctatcgcgagttaatacaacacgtgccccggcctgagtcaattg

SEQ ID NO: 253108 - DNA, 55 bp, Artificial
  Synthetic oligonucleotide
catattggcaaagatgagcgtcgccgcgtcttgataactcaggttacacgacgag

SEQ ID NO: 253109 - DNA, 53 bp, Artificial
  Synthetic oligonucleotide
gtgcttgactaaagttggtaaatatgctaacttagtaggtaaatttaccaact

SEQ ID NO: 253110 - DNA, 53 bp, Artificial
  Synthetic oligonucleotide
catatcaaacacggggtggttaccgggttggacaccaattatatatcggggcc

SEQ ID NO: 253111 - DNA, 55 bp, Artificial
  Synthetic oligonucleotide
catagggctcatttagcggagcgacgaagccgaaatatagcccacctccgtccgt

SEQ ID NO: 253112 - DNA, 55 bp, Artificial
  Synthetic oligonucleotide
cataaatcccgacatgagtaccgccataattcccacaaaacgataagggcctacc

SEQ ID NO: 253113 - DNA, 55 bp, Artificial
  Synthetic oligonucleotide
cagtccgccgaccttcgcttggggatcatagagagaaagtccgatgcacgagccc

SEQ ID NO: 253114 - DNA, 55 bp, Artificial
  Synthetic oligonucleotide
cagtacgaaaccgctggtctatcagggaaatcttattgaccgtttctcacttacc

SEQ ID NO: 253115 - DNA, 55 bp, Artificial
  Synthetic oligonucleotide
cagtaaggtaggtcagcacgcgattggaagagcgtgtttaagcaggtaggttgag

SEQ ID NO: 253116 - DNA, 51 bp, Artificial
  Synthetic oligonucleotide
agagaatgtcccgtgcttcccttgtttcccgaagccggttttcaacttcgt

SEQ ID NO: 253117 - DNA, 55 bp, Artificial
  Synthetic oligonucleotide
acctcatgaagcgtatgggcgacctccgcctctctccgcaggataccggcatctg

SEQ ID NO: 253118 - DNA, 55 bp, Artificial
  Synthetic oligonucleotide
cagcatgtagtgatacggacggctgctccgatgctgaatcatatgctcttcggga

SEQ ID NO: 253119 - DNA, 55 bp, Artificial
  Synthetic oligonucleotide
acctgcttaaacacgctcttccaatcgcgtgctgacctaccttactgtgtcactc

SEQ ID NO: 253120 - DNA, 49 bp, Artificial
  Synthetic oligonucleotide
ccctgcggggcactaagagggcggggttcacgattttccgttacggttt

SEQ ID NO: 253121 - DNA, 55 bp, Artificial
  Synthetic oligonucleotide
cacttgagacaggactccttcgtcgttttgagcggactcgtcatccagtgcgaag

SEQ ID NO: 253122 - DNA, 55 bp, Artificial
  Synthetic oligonucleotide
acaggacgagtggctcgcaagccctgactggctgctcattccgtccatacgctgg

SEQ ID NO: 253123 - DNA, 55 bp, Artificial
  Synthetic oligonucleotide
ccctagcaaattaggattttgcaatgtagacgccattcgacgcatcaatttaggg

SEQ ID NO: 253124 - DNA, 55 bp, Artificial
  Synthetic oligonucleotide
cccgtttcaccgacgagcaatggtacttgattagcggctagcaccaattctacac

SEQ ID NO: 253125 - DNA, 55 bp, Artificial
  Synthetic oligonucleotide
atccaaggcccgcaaacgtgctacagaggagtacgagggcacaaccaaaacggcg

SEQ ID NO: 253126 - DNA, 55 bp, Artificial
  Synthetic oligonucleotide
cccggggctgcataaggaatcgtaggcacgtgtcctaaaacaagatcggcctccg

SEQ ID NO: 253127 - DNA, 55 bp, Artificial
  Synthetic oligonucleotide
cccgccactcgtcgtcatcatgcgtgtataacggaaaacggagtatatctgtacg

SEQ ID NO: 253128 - DNA, 55 bp, Artificial
  Synthetic oligonucleotide
acagtacggactgctttgcagaagtatcctccgcactcaaagtaggtgcgctctc

SEQ ID NO: 253129 - DNA, 55 bp, Artificial
  Synthetic oligonucleotide
cccgatgcacatgccgttacatctgtaagtaccggaccctgcaatcctaaactta

SEQ ID NO: 253130 - DNA, 55 bp, Artificial
  Synthetic oligonucleotide
cccgagagggcgatgattcctagaatagccataaagcctaacggtgttctcgtaa

SEQ ID NO: 253131 - DNA, 56 bp, Artificial
  Synthetic oligonucleotide
caaatactgttattgcccgttcgtactgactacctaccccgagtggtgattctatc

SEQ ID NO: 253132 - DNA, 55 bp, Artificial
  Synthetic oligonucleotide
acatcacggagatctcaaagcagctctcgagctacggcatttcgatttaggggaa

SEQ ID NO: 253133 - DNA, 55 bp, Artificial
  Synthetic oligonucleotide
acccaagaaacggataatttgagccgctaaggagtattcacgcatatctgcaggg

SEQ ID NO: 253134 - DNA, 53 bp, Artificial
  Synthetic oligonucleotide
cccacgctacgtagtcgtctaccggtttgtcgaccgttctcattccgaaggga

SEQ ID NO: 253135 - DNA, 51 bp, Artificial
  Synthetic oligonucleotide
cccaccgtatacgtagtaacacctgttttgttatccttctccgattttacc

SEQ ID NO: 253136 - DNA, 55 bp, Artificial
  Synthetic oligonucleotide
agatgccagtcaatcgttttacgataagcacgcacgatcgtcgcaacgtattcgg

SEQ ID NO: 253137 - DNA, 55 bp, Artificial
  Synthetic oligonucleotide
ccagcgccctctctcggaactcctcgataggtcccagcatcccgtaagctgtgga

SEQ ID NO: 253138 - DNA, 55 bp, Artificial
  Synthetic oligonucleotide
ccactaccaattagatagagctacagtggtaaaaggcttcttagctgcgtccggt

SEQ ID NO: 253139 - DNA, 55 bp, Artificial
  Synthetic oligonucleotide
ccacataagcgaatccgaacatggtcattaccacggcaatcggacgtcgttccga

SEQ ID NO: 253140 - DNA, 54 bp, Artificial
  Synthetic oligonucleotide
ccaatgataaatcggtaatcgttcatcccgttcattcaaaagggctaaaccgtc

SEQ ID NO: 253141 - DNA, 55 bp, Artificial
  Synthetic oligonucleotide
ccaagtcggcataggtagaacgcactcctaacgataccgattcttgcaaagccgg

SEQ ID NO: 253142 - DNA, 56 bp, Artificial
  Synthetic oligonucleotide
agacataccggcttaatcctagaatcgctcaccgtgggctaagaactaccaagaaa

SEQ ID NO: 253143 - DNA, 55 bp, Artificial
  Synthetic oligonucleotide
atcctttactcatagtaaacgaactcctttctaagcggctatggtccgttggaca

SEQ ID NO: 253144 - DNA, 55 bp, Artificial
  Synthetic oligonucleotide
atggcgagcccatgataatgtcgcaataccgtcagtaatacgggtgtatcggttc

SEQ ID NO: 253145 - DNA, 55 bp, Artificial
  Synthetic oligonucleotide
actacggtcccacgggcggattcggcacactcgggctcagcattgcctaccgtcc

SEQ ID NO: 253146 - DNA, 55 bp, Artificial
  Synthetic oligonucleotide
atggctcgtccaaagttgttattactagacgaaccatctatggggcttgcgcctt

SEQ ID NO: 253147 - DNA, 55 bp, Artificial
  Synthetic oligonucleotide
caaagtggcagtgccggcgggaattgtcaagcgcggtcaggggaagtctgaggac

SEQ ID NO: 253148 - DNA, 55 bp, Artificial
  Synthetic oligonucleotide
caaaggtttaacaccggccgctaatgcagcagtacctatagcgagtccattcgca

SEQ ID NO: 253149 - DNA, 53 bp, Artificial
  Synthetic oligonucleotide
acggtttcctgttcggtacggaggaaatgaatgaagtcttctcggagaagtcc

SEQ ID NO: 253150 - DNA, 55 bp, Artificial
  Synthetic oligonucleotide
caaaggccgcccagttcgcctgtatgccgatcgaccaagtgtccgccgaatccgt

SEQ ID NO: 253151 - DNA, 55 bp, Artificial
  Synthetic oligonucleotide
caaagccggttggtagagctgatgatagcggacggcatgatgggcgcgacggcag

SEQ ID NO: 253152 - DNA, 55 bp, Artificial
  Synthetic oligonucleotide
caaaacgaggttttagacacttgtgcttaatggctgcaaaagcagtaaatgagtc

SEQ ID NO: 253153 - DNA, 60 bp, Artificial
  Synthetic oligonucleotide
gattgcagcgcctagaggaagaagaacgggctgaaatcaaacaggctgaaggtgccaaga

SEQ ID NO: 253154 - DNA, 55 bp, Artificial
  Synthetic oligonucleotide
acgtaatctggggttaagcatcgatgatcgtagcccggcagtagatgaacgtacg

SEQ ID NO: 253155 - DNA, 55 bp, Artificial
  Synthetic oligonucleotide
acgttcaaacccgcagtactacgtccgcgttagtactcacagccgtattgattgc

SEQ ID NO: 253156 - DNA, 55 bp, Artificial
  Synthetic oligonucleotide
attgtcatcccaataatggattcgtgtgccttttgatctgtgccaatagcaggtg

SEQ ID NO: 253157 - DNA, 55 bp, Artificial
  Synthetic oligonucleotide
attggcacatcattctgacgatcaagctgaaaccgttattcatcgtctgatcaga

SEQ ID NO: 253158 - DNA, 55 bp, Artificial
  Synthetic oligonucleotide
acgttccaatccatttctagttgaagcacaaaatatacaccccatcgcacaaccg

SEQ ID NO: 253159 - DNA, 55 bp, Artificial
  Synthetic oligonucleotide
attgatccgatgaatcgaacgaattattctctgcgaggagcagaaagtaggcacg

SEQ ID NO: 253160 - DNA, 55 bp, Artificial
  Synthetic oligonucleotide
actaccgctatatgccgatggcgccctatgaggtcttgcaaagcgatgctctgag

SEQ ID NO: 253161 - DNA, 54 bp, Artificial
  Synthetic oligonucleotide
attacgctgaaggcattacgccggggaaaggaacgacatccgttgtcaccgtgg

SEQ ID NO: 253162 - DNA, 52 bp, Artificial
  Synthetic oligonucleotide
attaacctggttcattaatacggaactgattaagtcgccgtggttctacggg

SEQ ID NO: 253163 - DNA, 55 bp, Artificial
  Synthetic oligonucleotide
actacgcacgggcttctatccgaaaatgggcataaagaagcacggtgggagcata

SEQ ID NO: 253164 - DNA, 60 bp, Artificial
  Synthetic oligonucleotide
gattggccatagcacaaagaatctctatggctatctgcgggattttgcccagtctgctta

SEQ ID NO: 253165 - DNA, 55 bp, Artificial
  Synthetic oligonucleotide
agaccagtccagaataaagctgttacgctaagtaccatagtccagtggaagatgc

SEQ ID NO: 253166 - DNA, 55 bp, Artificial
  Synthetic oligonucleotide
cacggcggattccctcagttataacacgcagacgggacttgtcacggcggaaaac

SEQ ID NO: 253167 - DNA, 55 bp, Artificial
  Synthetic oligonucleotide
cacggaggatatcccatccgagcaggtattggaacaatgcacaaaatccgtcgag

SEQ ID NO: 253168 - DNA, 55 bp, Artificial
  Synthetic oligonucleotide
cacgagtgtcgtctgctcacactacccgaggacgaccgggcctagacggttctca

SEQ ID NO: 253169 - DNA, 55 bp, Artificial
  Synthetic oligonucleotide
acgagccaactcgtgaatatttcgttctagctcttgtcgttcacgattcgtttcg

SEQ ID NO: 253170 - DNA, 55 bp, Artificial
  Synthetic oligonucleotide
agaacatcgatgtgtttgcaccttacagccggaacatagcaatatactcaaacgt

SEQ ID NO: 253171 - DNA, 55 bp, Artificial
  Synthetic oligonucleotide
atgaagcgtatgggcgacctccgtctctctccgcaggataccggcatctgggcac

SEQ ID NO: 253172 - DNA, 55 bp, Artificial
  Synthetic oligonucleotide
atgacatctttgcaatcggcataatagaaaacccatggaatttgctttcctgtgc

SEQ ID NO: 253173 - DNA, 55 bp, Artificial
  Synthetic oligonucleotide
actgaattgctcgttttggctaacgaccgtaggccggttagtagggctgctgagt

SEQ ID NO: 253174 - DNA, 55 bp, Artificial
  Synthetic oligonucleotide
caccgtgcccgaaatcagtgcaaagaccgctgcgaacatcataaagatgccgctc

SEQ ID NO: 253175 - DNA, 57 bp, Artificial
  Synthetic oligonucleotide
gtgtagtcacgagttgactacgtactgtgtaatagataagagtaaatttaggctaaa

SEQ ID NO: 253176 - DNA, 53 bp, Artificial
  Synthetic oligonucleotide
cacccgcacaggtattttccggtttatctaattccaccgtcgttctgttcgcc

SEQ ID NO: 253177 - DNA, 55 bp, Artificial
  Synthetic oligonucleotide
acgcggcaataagacacgcggataaaagtccataatcgtccccaactgtcgtccg

SEQ ID NO: 253178 - DNA, 55 bp, Artificial
  Synthetic oligonucleotide
caccatgcgatttccgggatagagctccgcgacatcggcactgagatgatagtcc

SEQ ID NO: 253179 - DNA, 55 bp, Artificial
  Synthetic oligonucleotide
atgctcacggctatttgccgaaactgtcagccttctgtgccaccgtcacggcttc

SEQ ID NO: 253180 - DNA, 55 bp, Artificial
  Synthetic oligonucleotide
caagcggatcgccgttctcatctacatacgttgtcggttcagagcccttcttcgc

SEQ ID NO: 253181 - DNA, 55 bp, Artificial
  Synthetic oligonucleotide
caagaactgataacaacactcatatcaaacggccgcaacctcttcatggtaggag

SEQ ID NO: 253182 - DNA, 55 bp, Artificial
  Synthetic oligonucleotide
caacgattattcgtaacaaaacgagaatctttcaacctagaagcgcaacgcatgt

SEQ ID NO: 253183 - DNA, 55 bp, Artificial
  Synthetic oligonucleotide
caaccttacgagtacgcgcatcggttacaatagcaccaagggcagtaagtccaca

SEQ ID NO: 253184 - DNA, 55 bp, Artificial
  Synthetic oligonucleotide
acggcgccaccaaccatgaccttagttttaaggcctgctgcacggatagcagcga

SEQ ID NO: 253185 - DNA, 55 bp, Artificial
  Synthetic oligonucleotide
atgctggatagagtatccgcaggacggaggcggttgagctatgaataagtacacg

SEQ ID NO: 253186 - DNA, 60 bp, Artificial
  Synthetic oligonucleotide
aggccggttagtagggctgctgagtgcggacgaacatggtgggcgcgacgcgctccacga

SEQ ID NO: 253187 - DNA, 55 bp, Artificial
  Synthetic oligonucleotide
cgaaagagcgtcgtaatgagaagcagtgaagggaagaccgacagatcgagtgcct

SEQ ID NO: 253188 - DNA, 55 bp, Artificial
  Synthetic oligonucleotide
cgaaaacgtggtggaccaaccgtttccatacaagaacgcaggggattcaggctga

SEQ ID NO: 253189 - DNA, 55 bp, Artificial
  Synthetic oligonucleotide
ccgcgctgagcacaattttcggaggtttgatgtcgataatgcgcgtatgaccagc

SEQ ID NO: 253190 - DNA, 55 bp, Artificial
  Synthetic oligonucleotide
ccgctccgtcaaagctgttgtcgaaaacgtctttatcgcttcccaatgttacacc

SEQ ID NO: 253191 - DNA, 55 bp, Artificial
  Synthetic oligonucleotide
ccggaaaacggcatcagcacaggattccgattgctagactgcgcggctctccgtt

SEQ ID NO: 253192 - DNA, 55 bp, Artificial
  Synthetic oligonucleotide
agccgacttatttacaccatacgcaatcaacaggtaatgcttgccagcgaccttg

SEQ ID NO: 253193 - DNA, 55 bp, Artificial
  Synthetic oligonucleotide
ccttgtttgcgtaagtattttatgtgcagttgcgggagcttatacgacatacagg

SEQ ID NO: 253194 - DNA, 55 bp, Artificial
  Synthetic oligonucleotide
ataaagaaatgtggagcttatctggtagtgaacgtcatagcacaatcgataaggc

SEQ ID NO: 253195 - DNA, 53 bp, Artificial
  Synthetic oligonucleotide
ccttgccggtaactgtttccgtcagagttccttttacggtattgctctggtta

SEQ ID NO: 253196 - DNA, 54 bp, Artificial
  Synthetic oligonucleotide
agtatttccgccggtcgttatagaccatgcgaaaggatcttacctgtacgggac

SEQ ID NO: 253197 - DNA, 60 bp, Artificial
  Synthetic oligonucleotide
gctcgaaaatgcccgtagggcatctccttccgcagggtaggtgtcattctatgccttggc

SEQ ID NO: 253198 - DNA, 55 bp, Artificial
  Synthetic oligonucleotide
ccgggaccgcattcaacaaattttgtcactccgttttcaagcataaatcttatag

SEQ ID NO: 253199 - DNA, 55 bp, Artificial
  Synthetic oligonucleotide
aatcctgtgtagcactcaccgctattctcggtttgccaccaacgatgttagacac

SEQ ID NO: 253200 - DNA, 55 bp, Artificial
  Synthetic oligonucleotide
aagacaatagcagatgcgaggaagaatgtaaagccgtaactgacctcgccgaaaa

SEQ ID NO: 253201 - DNA, 53 bp, Artificial
  Synthetic oligonucleotide
ccgtaaagcaattcttgtaaagatatgggtaaatcgggtttcaatcccaaaca

SEQ ID NO: 253202 - DNA, 55 bp, Artificial
  Synthetic oligonucleotide
cctgtcgacatcaaaggtgttttaatcggtatcaatccgtcaggtagtgtatgtg

SEQ ID NO: 253203 - DNA, 54 bp, Artificial
  Synthetic oligonucleotide
agcttacagagggcgttcccttaccgtcttgtcccaagtcggcaggagtagccg

SEQ ID NO: 253204 - DNA, 55 bp, Artificial
  Synthetic oligonucleotide
aactgccgaagcctaatcgcaactgagattttccatccgttctgacagcgcgagc

SEQ ID NO: 253205 - DNA, 55 bp, Artificial
  Synthetic oligonucleotide
cctgccaatttgttaacttcgttcatgtagtgttctacaacgtcaggaacgttca

SEQ ID NO: 253206 - DNA, 55 bp, Artificial
  Synthetic oligonucleotide
agtgcggaccttaatatggtggtcgtttacgacctcgacatagttcacgtttgta

SEQ ID NO: 253207 - DNA, 55 bp, Artificial
  Synthetic oligonucleotide
aacggcatcagcacaggattccgattgctagactgcgcggctctccgtttccgta

SEQ ID NO: 253208 - DNA, 60 bp, Artificial
  Synthetic oligonucleotide
taaaagctctgataatactttgattatcacaaacagagagcttgctaataaatgcaaggt

SEQ ID NO: 253209 - DNA, 57 bp, Artificial
  Synthetic oligonucleotide
cggatcgcctaaatgtgcttatccagtacagaaaaagcgaacaggaaaacacaaaga

SEQ ID NO: 253210 - DNA, 55 bp, Artificial
  Synthetic oligonucleotide
cctctactttagtgtcagtgatacggggcaatggtcgctcccgaatatatccgca

SEQ ID NO: 253211 - DNA, 55 bp, Artificial
  Synthetic oligonucleotide
cctacggatgcggcaaagctgtgtgtagggccaccaaaaccacgtagttccaagg

SEQ ID NO: 253212 - DNA, 54 bp, Artificial
  Synthetic oligonucleotide
ccgttattctaggaggaactatgtcttacgaagttgtagcaagacctttacgcg

SEQ ID NO: 253213 - DNA, 55 bp, Artificial
  Synthetic oligonucleotide
aacgatatttacagcccgccctagttcaaggaaaatctcaatcaagagcacatta

SEQ ID NO: 253214 - DNA, 55 bp, Artificial
  Synthetic oligonucleotide
ccgtgtttagccgcggaataactgaggatacttcattacgtatataccagccact

SEQ ID NO: 253215 - DNA, 55 bp, Artificial
  Synthetic oligonucleotide
ccgtgcgcggtacgaggtaatgtaagattcgactacataacgccaaacggcatcg

SEQ ID NO: 253216 - DNA, 55 bp, Artificial
  Synthetic oligonucleotide
ccgtcgtctcaccctgctcaaacgcaacaagcgacccatgcgaacggcccgtcat

SEQ ID NO: 253217 - DNA, 55 bp, Artificial
  Synthetic oligonucleotide
ccgtgcaagtccgagctgcgacggaaaatgctttgcattgacattgagtgctcca

SEQ ID NO: 253218 - DNA, 55 bp, Artificial
  Synthetic oligonucleotide
ccctatgggcattcgtctgtacagctctaccatcatccctaatcgcggtgcctgg

SEQ ID NO: 253219 - DNA, 55 bp, Artificial
  Synthetic oligonucleotide
ccctggtaaataatagggaataggttactctactatacaagcacacacgaggtcg

SEQ ID NO: 253220 - DNA, 58 bp, Artificial
  Synthetic oligonucleotide
atgattacgctgccggagtacgaggacagggtaatcaaattcctggaacatctttcgc

SEQ ID NO: 253221 - DNA, 55 bp, Artificial
  Synthetic oligonucleotide
cccttcaaaggtatgcagatcactaccgcagattccaatatattcgacacgcacc

SEQ ID NO: 253222 - DNA, 50 bp, Artificial
  Synthetic oligonucleotide
cccttgttgaaacgttccttttaaccgtctaatgccacgtaaggcctgtt

SEQ ID NO: 253223 - DNA, 55 bp, Artificial
  Synthetic oligonucleotide
ccctttgcgggtccgattgcaggcgttcgtgtcggtcgtatagacggcaacttta

SEQ ID NO: 253224 - DNA, 55 bp, Artificial
  Synthetic oligonucleotide
aggtaatctgcggcgtatcttctcctgatacgtaatagatgcctgtcctgtaatg

SEQ ID NO: 253225 - DNA, 55 bp, Artificial
  Synthetic oligonucleotide
ccgaattccatgagcacatcatttcccgccacggttcttacccgtctcgcctttg

SEQ ID NO: 253226 - DNA, 53 bp, Artificial
  Synthetic oligonucleotide
ccgagtgaaaccgaagggaaccgacggatttcctttacagagcaggggcttgc

SEQ ID NO: 253227 - DNA, 55 bp, Artificial
  Synthetic oligonucleotide
cgcaaccgcgttattaccgatagcagttgattgagtattaatacttacggcatga

SEQ ID NO: 253228 - DNA, 55 bp, Artificial
  Synthetic oligonucleotide
agggctccacataacacgtcctattgtatcactgacaacaagaactagtgcgcct

SEQ ID NO: 253229 - DNA, 55 bp, Artificial
  Synthetic oligonucleotide
agtaactcatgtcttcggtgtatgtacttgcagtggacacctgtgctatttcgct

SEQ ID NO: 253230 - DNA, 55 bp, Artificial
  Synthetic oligonucleotide
ccgcattggtatttacgattctctatgccttaccggcaggtatactgagtgcgta

SEQ ID NO: 253231 - DNA, 60 bp, Artificial
  Synthetic oligonucleotide
tgcaggtttaatcgagacgcggacaggagcaataatgcttaatccaaagcttgcccatcg

SEQ ID NO: 253232 - DNA, 55 bp, Artificial
  Synthetic oligonucleotide
cgagtgcaccgccgaccagcttactcacaatgaactcgttgaagcgtgccgcaac

SEQ ID NO: 253233 - DNA, 55 bp, Artificial
  Synthetic oligonucleotide
aatggggcgcagccccatcttgcaccaagggcgagttttgcgccggatttctcgg

SEQ ID NO: 253234 - DNA, 55 bp, Artificial
  Synthetic oligonucleotide
cgaactatcgaggggaatagtatagacatcgtggctcgtacaaaggcactcgctg

SEQ ID NO: 253235 - DNA, 55 bp, Artificial
  Synthetic oligonucleotide
aatgtcgtcagttgctcctacacgtgtgaaaattctgtccacaggacttattacc

SEQ ID NO: 253236 - DNA, 55 bp, Artificial
  Synthetic oligonucleotide
ccgcccctttgtgtctaaactagcccatgaattaagactagtggggacagtgaga

SEQ ID NO: 253237 - DNA, 55 bp, Artificial
  Synthetic oligonucleotide
cgaatattcccacggaggaagtctacacactgccgaagcgagacggtgtgaacgg

SEQ ID NO: 253238 - DNA, 55 bp, Artificial
  Synthetic oligonucleotide
ccgcccaatgaccgacagatgtcgtttcctgtccgtatgtacgggcttgtttccc

SEQ ID NO: 253239 - DNA, 55 bp, Artificial
  Synthetic oligonucleotide
aaactcagcactgacgtcttagcggtcgatgagcgctgctccctccgcaaagagt

SEQ ID NO: 253240 - DNA, 55 bp, Artificial
  Synthetic oligonucleotide
cgaagtagcaaaggccgtaggtatcagtaatgcggcgctttcaaattacgaaaca

SEQ ID NO: 253241 - DNA, 55 bp, Artificial
  Synthetic oligonucleotide
agtagaatcgcatatcatttccgggtgtattgcccgttaccaatgtaaatctcaa

SEQ ID NO: 253242 - DNA, 60 bp, Artificial
  Synthetic oligonucleotide
atactggctgtgacagcgcaggggcaggatatacggcaggctgaaggttcccatcttgcc

SEQ ID NO: 253243 - DNA, 54 bp, Artificial
  Synthetic oligonucleotide
caaagttggcgaaacagctgaatatactggcgatatcatcacatctttcgaaaa

SEQ ID NO: 253244 - DNA, 54 bp, Artificial
  Synthetic oligonucleotide
gtacgaggcctctagtgatacgcgcatattccgcccatttagtaatgcacaagg

SEQ ID NO: 253245 - DNA, 54 bp, Artificial
  Synthetic oligonucleotide
ttcccgcacggaactggaagtagccgccaagatccagactgatatgctgcccaa

SEQ ID NO: 253246 - DNA, 54 bp, Artificial
  Synthetic oligonucleotide
gtagccgatgtgtctggcaagggggtgccggcagctctgtttatggccaaatct

SEQ ID NO: 253247 - DNA, 54 bp, Artificial
  Synthetic oligonucleotide
caattctgtatgtacatgaccgtccacaagtcggctacgatacttactatagcc

SEQ ID NO: 253248 - DNA, 54 bp, Artificial
  Synthetic oligonucleotide
aaaagcttcatgccctaagggaataaatttcgcgccttccggtataatcgcttc

SEQ ID NO: 253249 - DNA, 54 bp, Artificial
  Synthetic oligonucleotide
tttaatgacgccccgaaggtctatgagattgctaacccggagctcccgcttgca

SEQ ID NO: 253250 - DNA, 54 bp, Artificial
  Synthetic oligonucleotide
caatactttagcttgatattgttccgatcccttaccgtagcccaatcacacatt

SEQ ID NO: 253251 - DNA, 54 bp, Artificial
  Synthetic oligonucleotide
ggaacatagcaatatactcaaacgtaacgttgggtggcggtggggatgcttttt

SEQ ID NO: 253252 - DNA, 53 bp, Artificial
  Synthetic oligonucleotide
ccttgccgcaaggacacgccttgatacgaagcccgaggaacggtaacccgacc

SEQ ID NO: 253253 - DNA, 51 bp, Artificial
  Synthetic oligonucleotide
cgatattttctgaggggtgttttttttcacccaccccacaatataccccaa

SEQ ID NO: 253254 - DNA, 54 bp, Artificial
  Synthetic oligonucleotide
gcaagtgacatgattatccctacaggctcccagacgggcaatacggtgttcacg

SEQ ID NO: 253255 - DNA, 54 bp, Artificial
  Synthetic oligonucleotide
gggcgattgtcgttaaacgggtcgaatggtggcggtaacgtagctctgggtgct

SEQ ID NO: 253256 - DNA, 54 bp, Artificial
  Synthetic oligonucleotide
gcctaaattcggctccccttcggtgaccgcagcatgcggttctctccagaggcg

SEQ ID NO: 253257 - DNA, 54 bp, Artificial
  Synthetic oligonucleotide
cccacagaccgcatctagaacagtcttaccacgccagggcaagagctgcttatt

SEQ ID NO: 253258 - DNA, 54 bp, Artificial
  Synthetic oligonucleotide
agatgcgcccgcggtattgatggaggcgccagatgggatagaggtcgtccgtat

SEQ ID NO: 253259 - DNA, 54 bp, Artificial
  Synthetic oligonucleotide
aatgtccatcggtgatacagtgggttggaaacaaaatggggactctaaacacta

SEQ ID NO: 253260 - DNA, 54 bp, Artificial
  Synthetic oligonucleotide
tcggcaacggagaagcacatctccatgtccgtaacgatgttctcaatgcgctgt

SEQ ID NO: 253261 - DNA, 54 bp, Artificial
  Synthetic oligonucleotide
ccaacttgttggacctctgaaggcagttgagctagcgccgcttgcacacggttt

SEQ ID NO: 253262 - DNA, 54 bp, Artificial
  Synthetic oligonucleotide
gaaagagcccaacttcaaggcataattccaacttggggagatgccgtttcttgg

SEQ ID NO: 253263 - DNA, 54 bp, Artificial
  Synthetic oligonucleotide
catacttcggacactgtaaactccgccatttatctcatctccctgataatttcg

SEQ ID NO: 253264 - DNA, 60 bp, Artificial
  Synthetic oligonucleotide
aagagcatttcccatgcagaagttcttaaaatgattgaggcagcatccgttgcttaagct

SEQ ID NO: 253265 - DNA, 54 bp, Artificial
  Synthetic oligonucleotide
tggattcatgcggcggagcgttcgcccgtcgacaagatcatccgtcagtggcag

SEQ ID NO: 253266 - DNA, 54 bp, Artificial
  Synthetic oligonucleotide
gacggcacagtaaagctacacgcgctcggatcatcactgcggttggtccacacg

SEQ ID NO: 253267 - DNA, 54 bp, Artificial
  Synthetic oligonucleotide
ggtacgctgtgcagatggctctctatatacgggatggactacggatttagaaaa

SEQ ID NO: 253268 - DNA, 54 bp, Artificial
  Synthetic oligonucleotide
ggactcgtgtagttaaccgtcttatttcggaacacatgatgaataggtctcgct

SEQ ID NO: 253269 - DNA, 53 bp, Artificial
  Synthetic oligonucleotide
aaaagacccgctatggccgcttgcaaaagctgcggacgtactcagtgcatttt

SEQ ID NO: 253270 - DNA, 53 bp, Artificial
  Synthetic oligonucleotide
gcaagcgtttggagctccggctcgttcacggacgaaatactgtcgtcgatcga

SEQ ID NO: 253271 - DNA, 53 bp, Artificial
  Synthetic oligonucleotide
ctgccatgacatggtgcaggccaccgttgaaagggctcgtgctgatggcataa

SEQ ID NO: 253272 - DNA, 53 bp, Artificial
  Synthetic oligonucleotide
ccccaaaatatcccagacgcgccggataacagtcgcatgtgacagacggttgc

SEQ ID NO: 253273 - DNA, 53 bp, Artificial
  Synthetic oligonucleotide
cggctgtcgaacaggctctgaacgccgggtggagaacagcggatttgtataaa

SEQ ID NO: 253274 - DNA, 53 bp, Artificial
  Synthetic oligonucleotide
tatctcgcgtatcctgcatgcgtaagattggttggagggacacctgttcttgt

SEQ ID NO: 253275 - DNA, 60 bp, Artificial
  Synthetic oligonucleotide
gcgaacatggggcgcagcatcttgcaccgaagcgttttatttaccggatatatcgacttg

SEQ ID NO: 253276 - DNA, 53 bp, Artificial
  Synthetic oligonucleotide
tatccgtctgatggagtgagccctcttcaaaaggatcagatgcagaagcagtc

SEQ ID NO: 253277 - DNA, 53 bp, Artificial
  Synthetic oligonucleotide
agatgtacgaaatctatccattaccatcgatacctttagaggccctttgcgca

SEQ ID NO: 253278 - DNA, 53 bp, Artificial
  Synthetic oligonucleotide
acgaagccgttgacactcccgccccaatttgcgttattccatctcacctgaca

SEQ ID NO: 253279 - DNA, 53 bp, Artificial
  Synthetic oligonucleotide
gattatgactcaacgaaaaatagctgaaaaaacgggtatttcactggaaaccg

SEQ ID NO: 253280 - DNA, 53 bp, Artificial
  Synthetic oligonucleotide
ggcgcagtctatgcgtggacacggcgtagggggagctcttgtcttagagggtc

SEQ ID NO: 253281 - DNA, 53 bp, Artificial
  Synthetic oligonucleotide
aaccattggagcatgccagcgcaggatctaccttcaagcgcccaccgggatat

SEQ ID NO: 253282 - DNA, 53 bp, Artificial
  Synthetic oligonucleotide
taatccaccgttgcggaagtactcaaaccgcccacggcagtgcttgctatacc

SEQ ID NO: 253283 - DNA, 53 bp, Artificial
  Synthetic oligonucleotide
atggccagagaccgtggtttggaaccgttggcacaggcattgttcacaacggc

SEQ ID NO: 253284 - DNA, 53 bp, Artificial
  Synthetic oligonucleotide
caccgggaagagccatgtggtgcgaagctccaaggctccgtccagaggtgcgg

SEQ ID NO: 253285 - DNA, 45 bp, Artificial
  Synthetic oligonucleotide
tcactaccgtaaggttacgggaaaacccgggttaaaggggtttta

SEQ ID NO: 253286 - DNA, 60 bp, Artificial
  Synthetic oligonucleotide
tggacagatgagatacgagaaaatgttatcgcactatgcgctgacttagaacactatgca

SEQ ID NO: 253287 - DNA, 53 bp, Artificial
  Synthetic oligonucleotide
gagggaaagactgcagcgtaaagacgagcaggatccccgcaaagccgtacaca

SEQ ID NO: 253288 - DNA, 53 bp, Artificial
  Synthetic oligonucleotide
tgttgccacagcgaaacctcctattcttgtacaacgcgaggtactttaaagta

SEQ ID NO: 253289 - DNA, 53 bp, Artificial
  Synthetic oligonucleotide
ggttcatgtgacacgggtttcatgaccgcggtaagcggttcagatccggatgg

SEQ ID NO: 253290 - DNA, 53 bp, Artificial
  Synthetic oligonucleotide
taatgcgtatgctcataaacgtcccctcctggtactaaatcgcggtaaatcat

SEQ ID NO: 253291 - DNA, 53 bp, Artificial
  Synthetic oligonucleotide
gaatccccgtgcgggcatgagggctgttgataaattccgagcaatggttggcc

SEQ ID NO: 253292 - DNA, 53 bp, Artificial
  Synthetic oligonucleotide
ccggtgttcctatacttccgccatgatgtgtgaacgcataacgcacatctgca

SEQ ID NO: 253293 - DNA, 53 bp, Artificial
  Synthetic oligonucleotide
tacgtccatataatcacggacaccgcaagtattctgcgaaacaacggccgtaa

SEQ ID NO: 253294 - DNA, 53 bp, Artificial
  Synthetic oligonucleotide
ttagcttatgaatgtggtcgtatggttacaggtccatttggttacctagtttc

SEQ ID NO: 253295 - DNA, 53 bp, Artificial
  Synthetic oligonucleotide
ctaccgaaaaccgcatactgacacaacgcatctacatacagtccatgcgaaaa

SEQ ID NO: 253296 - DNA, 53 bp, Artificial
  Synthetic oligonucleotide
ctgcaagaacatgcctcctatctgctgccgttaaataaagtattcgatcgtat

SEQ ID NO: 253297 - DNA, 56 bp, Artificial
  Synthetic oligonucleotide
ttcggatagctaaaagcggaaccgccaatatctacttggttaataagcaactgtat

SEQ ID NO: 253298 - DNA, 53 bp, Artificial
  Synthetic oligonucleotide
ggacggaggggaaactctacattacgccctccggcaagagaaaatccctgctt

SEQ ID NO: 253299 - DNA, 52 bp, Artificial
  Synthetic oligonucleotide
aggtatacctcggtgcacttgctggtaatgatgaccatggtcgcctattgca

SEQ ID NO: 253300 - DNA, 52 bp, Artificial
  Synthetic oligonucleotide
atcagtagcccctccgcccatgacggggtttggcacataacccggttaacgt

SEQ ID NO: 253301 - DNA, 52 bp, Artificial
  Synthetic oligonucleotide
atcagcggtgtctcgacacagggtgcatcccagcggtacagaccaatcggag

SEQ ID NO: 253302 - DNA, 52 bp, Artificial
  Synthetic oligonucleotide
agtccgtacttgggagcgcggtgcaggggctacattggcttgtggtacaggt

SEQ ID NO: 253303 - DNA, 52 bp, Artificial
  Synthetic oligonucleotide
atcccccaatagcacggcgatgcaagtgacacaccctaagccctacggctgc

SEQ ID NO: 253304 - DNA, 52 bp, Artificial
  Synthetic oligonucleotide
agggagcaaacgcttacccatgcttattatagataccccagaagtactaaca

SEQ ID NO: 253305 - DNA, 52 bp, Artificial
  Synthetic oligonucleotide
ggcttgccgctattaaggaactaaaagcacgcggttctctcactcatcccgt

SEQ ID NO: 253306 - DNA, 52 bp, Artificial
  Synthetic oligonucleotide
ggtcgggcagcggctttcattctcggtaaggataaggaacacccgacctttt

SEQ ID NO: 253307 - DNA, 52 bp, Artificial
  Synthetic oligonucleotide
gggtcgcgtttgttcatgccacatgcggtgtctatgtcccgatcggtatagc

SEQ ID NO: 253308 - DNA, 58 bp, Artificial
  Synthetic oligonucleotide
tggccggcccggctaatatcctcctgcggaatgctgtaggcaaaggacttagcgaact

SEQ ID NO: 253309 - DNA, 52 bp, Artificial
  Synthetic oligonucleotide
atcgattcttttaacaccgctactgtccgcatatcactcatatcgccgatat

SEQ ID NO: 253310 - DNA, 52 bp, Artificial
  Synthetic oligonucleotide
ggaatctacgattgtggaatgcacggcggctgatgaagtaacgattttacga

SEQ ID NO: 253311 - DNA, 52 bp, Artificial
  Synthetic oligonucleotide
atcgccaattgttaaggaaccagatggagtcaagttcacttctttggacaat

SEQ ID NO: 253312 - DNA, 52 bp, Artificial
  Synthetic oligonucleotide
ggataggctgcctcacgcgctaaaatcgctcccggataagagtccttgacat

SEQ ID NO: 253313 - DNA, 52 bp, Artificial
  Synthetic oligonucleotide
accgggccaacgcacgtgggcaagtccttggcaaatagcggtacgtgtcaat

SEQ ID NO: 253314 - DNA, 52 bp, Artificial
  Synthetic oligonucleotide
catcgacgcgacacccgttgccatgggcgcagtctgcctcatgctgatactc

SEQ ID NO: 253315 - DNA, 52 bp, Artificial
  Synthetic oligonucleotide
catgtcttgtaaacgtttagaatcgatggccacaggctctgaaccgactgcg

SEQ ID NO: 253316 - DNA, 52 bp, Artificial
  Synthetic oligonucleotide
tggtggttacgaaggggcagaacgccttcgagtggcctttgtggaccctcac

SEQ ID NO: 253317 - DNA, 52 bp, Artificial
  Synthetic oligonucleotide
accggatttgtcgccaccatatttgcgtgggccatccccgctgcacttggac

SEQ ID NO: 253318 - DNA, 52 bp, Artificial
  Synthetic oligonucleotide
taggcgtctggcacacgatatagcctaaagccatgctgataccactggaacg

SEQ ID NO: 253319 - DNA, 54 bp, Artificial
  Synthetic oligonucleotide
ggcgaaaaagtattcccaccgccgccccactgctttgtaacgaattgtgttcca

SEQ ID NO: 253320 - DNA, 60 bp, Artificial
  Synthetic oligonucleotide
gccccatgcaattaccgctccgtgcaagtgctttccttcgtgaggtgtgccggtatgact

SEQ ID NO: 253321 - DNA, 52 bp, Artificial
  Synthetic oligonucleotide
cacggtcagccgctaagatagcttcgcgtgcttgaggcgtcataaactcttc

SEQ ID NO: 253322 - DNA, 52 bp, Artificial
  Synthetic oligonucleotide
tatgacgcagattgtgtcgtggatggggctgttcgatatcgcatttgactat

SEQ ID NO: 253323 - DNA, 52 bp, Artificial
  Synthetic oligonucleotide
cggacggtacattcaagggcgaaagaaacatgacccgttatgaactggcgca

SEQ ID NO: 253324 - DNA, 52 bp, Artificial
  Synthetic oligonucleotide
ttaccggctcctttgccacgtatggacataaatatatcagtcctttcgtcgg

SEQ ID NO: 253325 - DNA, 52 bp, Artificial
  Synthetic oligonucleotide
tctattcgttggccgattacgggctgtatcacaccaaggcaacgccctgtcc

SEQ ID NO: 253326 - DNA, 52 bp, Artificial
  Synthetic oligonucleotide
gtgtgtagaggaggggtgctcttgttacagataggagataaggtcgtctatc

SEQ ID NO: 253327 - DNA, 52 bp, Artificial
  Synthetic oligonucleotide
cacctgtggcgaggcatattcactccgcatatgtgcccccgaacggcgatta

SEQ ID NO: 253328 - DNA, 52 bp, Artificial
  Synthetic oligonucleotide
cgctccacgattcccgccagcggattaaaacctgccccctttctcagtaaag

SEQ ID NO: 253329 - DNA, 52 bp, Artificial
  Synthetic oligonucleotide
acaggcaagacaactgtcccgtgtacagaatccccatcgattacagacagcc

SEQ ID NO: 253330 - DNA, 52 bp, Artificial
  Synthetic oligonucleotide
ttgggagcgcggtgcaggggctacattggcttgtggtacaggttcttgctct

SEQ ID NO: 253331 - DNA, 60 bp, Artificial
  Synthetic oligonucleotide
atccctgggattgcttggcgcggcctgactggtcaaatctgcaccggccgggatgtgact

SEQ ID NO: 253332 - DNA, 52 bp, Artificial
  Synthetic oligonucleotide
cgccaccatatttgcgtgggccatccccgctgcacttggacttggtacactg

SEQ ID NO: 253333 - DNA, 52 bp, Artificial
  Synthetic oligonucleotide
ttttccccggtttaacaaggcattcccatcgattttcaccacatggtgtgag

SEQ ID NO: 253334 - DNA, 52 bp, Artificial
  Synthetic oligonucleotide
acgggctaataaatcccgcagcgttcatcagtagcccctccgcccatgacgg

SEQ ID NO: 253335 - DNA, 52 bp, Artificial
  Synthetic oligonucleotide
ttttctgtaattcccttcgtaacggccaccgccaagcgaatcgattcctcgg

SEQ ID NO: 253336 - DNA, 51 bp, Artificial
  Synthetic oligonucleotide
agcctgttccagttgagtactgtctatggatgctgcagtcgtagtcgtcac

SEQ ID NO: 253337 - DNA, 51 bp, Artificial
  Synthetic oligonucleotide
aatgccgaccggcggtgttacaccggacaatgccggtgcatggctaaacgc

SEQ ID NO: 253338 - DNA, 51 bp, Artificial
  Synthetic oligonucleotide
tccgtggacatgggctacaacaaaccggagcatgagcacggcagtccgtac

SEQ ID NO: 253339 - DNA, 51 bp, Artificial
  Synthetic oligonucleotide
tccgtcgcaacggggattccgtgcttcttcgcataggcgatctctgccgtg

SEQ ID NO: 253340 - DNA, 51 bp, Artificial
  Synthetic oligonucleotide
gggcatcttggctatccgtatatgtaaccaggtcataccgaactctgtcaa

SEQ ID NO: 253341 - DNA, 51 bp, Artificial
  Synthetic oligonucleotide
agcgaacttggcatctcccatgatttgagcgttggagttctggggactggt

SEQ ID NO: 253342 - DNA, 60 bp, Artificial
  Synthetic oligonucleotide
tggctgcaaaagcagtaaatgagtcactaaaaaaacattgcgccacttgacggctatgca

SEQ ID NO: 253343 - DNA, 51 bp, Artificial
  Synthetic oligonucleotide
ggatatatgctcccgtcactgaggcgcaattgtaccgcagcgccccaagta

SEQ ID NO: 253344 - DNA, 51 bp, Artificial
  Synthetic oligonucleotide
tgtaataggcgaacctatgaaagagggtacaactttatcacaaggactttc

SEQ ID NO: 253345 - DNA, 51 bp, Artificial
  Synthetic oligonucleotide
tgtaccgtcagtacttggaaacgaccgggccaacgcacgtgggcaagtcct

SEQ ID NO: 253346 - DNA, 51 bp, Artificial
  Synthetic oligonucleotide
tgtcgcaccgtagtaatggcttcccacacacgatcccaagagccagttcct

SEQ ID NO: 253347 - DNA, 51 bp, Artificial
  Synthetic oligonucleotide
tgtgcggcggatagcccggatgggacctttgcgtgggagggaagacatatt

SEQ ID NO: 253348 - DNA, 51 bp, Artificial
  Synthetic oligonucleotide
aggcattgcgagaggcagtggcagcggttccgataggctatttccgtagcc

SEQ ID NO: 253349 - DNA, 51 bp, Artificial
  Synthetic oligonucleotide
aaagccggcacggaccgcattgggcattgcgcgtattgtaccctctgtcgt

SEQ ID NO: 253350 - DNA, 51 bp, Artificial
  Synthetic oligonucleotide
tttgcgtgggccatccccgctgcacttggacttggtacactgtggtacgcg

SEQ ID NO: 253351 - DNA, 51 bp, Artificial
  Synthetic oligonucleotide
gctaactgccgcttcctccgccttctctatgtcgctccgcaggcacatgcc

SEQ ID NO: 253352 - DNA, 51 bp, Artificial
  Synthetic oligonucleotide
gcgttggtctcgcgaccgcggattcacactggatcggcaactatgccgata

SEQ ID NO: 253353 - DNA, 60 bp, Artificial
  Synthetic oligonucleotide
tgggcatcagctatacggtggaggacatttatcaggagctgatagcaacagccatggcat

SEQ ID NO: 253354 - DNA, 51 bp, Artificial
  Synthetic oligonucleotide
aggggtgcagccgattggcaaaggggctagcgtgcgaaaacgtcccaagaa

SEQ ID NO: 253355 - DNA, 51 bp, Artificial
  Synthetic oligonucleotide
gtaccggtttctgggggatcatcttggagcggtgcagaccaacacgagggc

SEQ ID NO: 253356 - DNA, 51 bp, Artificial
  Synthetic oligonucleotide
gtcaaatgtggcgtcgtcccgtttatctttcggagtccatgtcgtattaga

SEQ ID NO: 253357 - DNA, 51 bp, Artificial
  Synthetic oligonucleotide
gtcctccgacttttacactagggtcgtaaatggaaaggccgatacaggagc

SEQ ID NO: 253358 - DNA, 51 bp, Artificial
  Synthetic oligonucleotide
acgggacaggtgaacccgctctgtgagaatgtccgacacgcaggcattccc

SEQ ID NO: 253359 - DNA, 51 bp, Artificial
  Synthetic oligonucleotide
gtcgggggctgtgctgtagcgaagagccgcctcttccgccatgtatttgag

SEQ ID NO: 253360 - DNA, 51 bp, Artificial
  Synthetic oligonucleotide
gtgccgctaatctattgccaccccgcatttgtccatcgcccgcactcgcca

SEQ ID NO: 253361 - DNA, 51 bp, Artificial
  Synthetic oligonucleotide
ggttcgcgccgacggcagatcctatggcttgggctcctttaggaatagggg

SEQ ID NO: 253362 - DNA, 51 bp, Artificial
  Synthetic oligonucleotide
gtgcggtcaagtcctgtgaagtcaccttgcgtctcccatcgcacggtcaga

SEQ ID NO: 253363 - DNA, 51 bp, Artificial
  Synthetic oligonucleotide
ggttcatgctttggctgggacctacgagctcgattttcgacattaccacgt

SEQ ID NO: 253364 - DNA, 60 bp, Artificial
  Synthetic oligonucleotide
tggtgacattgttgctgatgtacatagcgcactgaacgacaagagtggtttggccggccc

SEQ ID NO: 253365 - DNA, 51 bp, Artificial
  Synthetic oligonucleotide
gtggagataggtatacccagaatggaatatgtgtcataacaaagtcgaatg

SEQ ID NO: 253366 - DNA, 51 bp, Artificial
  Synthetic oligonucleotide
gttcagtccgcgtaggattccaaggtaatgcgcccatagccagcccccgta

SEQ ID NO: 253367 - DNA, 51 bp, Artificial
  Synthetic oligonucleotide
ggtggtcaattaccggcctaatccgactcctgccggcaacctatggaatgc

SEQ ID NO: 253368 - DNA, 51 bp, Artificial
  Synthetic oligonucleotide
acttaaaaaggggggcattgaatggaaaatcttgataccaaagtgattcca

SEQ ID NO: 253369 - DNA, 51 bp, Artificial
  Synthetic oligonucleotide
gttcgttgaccgaaggtgtttccaccttcacaacgatgttgcatctggctg

SEQ ID NO: 253370 - DNA, 51 bp, Artificial
  Synthetic oligonucleotide
gtttcccctgccacgggccccatacctgcataccgtgagtaaccaccgcat

SEQ ID NO: 253371 - DNA, 51 bp, Artificial
  Synthetic oligonucleotide
taataggaatgaggtgaaacaatgccgcggaatctctcggcatggatcgat

SEQ ID NO: 253372 - DNA, 51 bp, Artificial
  Synthetic oligonucleotide
agacggcggtatgcctccgtaactgtctgcccatccaatgcaccgcgtaca

SEQ ID NO: 253373 - DNA, 51 bp, Artificial
  Synthetic oligonucleotide
taccgcttttacaacccctttgccattagcccttgcggctgccatgggtcc

SEQ ID NO: 253374 - DNA, 51 bp, Artificial
  Synthetic oligonucleotide
tacgctcatagtgatcggtacgttcatctctgaaaggtacataaactttgt

SEQ ID NO: 253375 - DNA, 59 bp, Artificial
  Synthetic oligonucleotide
atcatgcttcggggaagcgaccacaaacagcaacttttgctgtcgtactacaacgacga

SEQ ID NO: 253376 - DNA, 51 bp, Artificial
  Synthetic oligonucleotide
agagccgccaaggtctgctcccgatccatcacgcccgtcatatagagcgca

SEQ ID NO: 253377 - DNA, 51 bp, Artificial
  Synthetic oligonucleotide
tacttggaaacgaccgggccaacgcacgtgggcaagtccttggcaaatagc

SEQ ID NO: 253378 - DNA, 51 bp, Artificial
  Synthetic oligonucleotide
accgcaatttggagccgaccggggttgagtttactgttgtcataccatacg

SEQ ID NO: 253379 - DNA, 51 bp, Artificial
  Synthetic oligonucleotide
tatgcacaaacgtgaggatcgtgtagcgcaagtagtggactttgtagcacg

SEQ ID NO: 253380 - DNA, 51 bp, Artificial
  Synthetic oligonucleotide
tcatattatggtcgcctttgtaaagaatgccgtctcggacttcccaatccc

SEQ ID NO: 253381 - DNA, 51 bp, Artificial
  Synthetic oligonucleotide
tcccctcgttccacactggctaccagtgcatctagcacaggttggggcgga

SEQ ID NO: 253382 - DNA, 51 bp, Artificial
  Synthetic oligonucleotide
tcccgcatcatcactgtcgtcccacaggcgttcagtccgcgtaggattcca

SEQ ID NO: 253383 - DNA, 51 bp, Artificial
  Synthetic oligonucleotide
cctgcctgcagacaggaacgcacgaacctcctgccatgagagccgcatttc

SEQ ID NO: 253384 - DNA, 51 bp, Artificial
  Synthetic oligonucleotide
cagcggcgcggatcatccgtgagaacccaacggcgtcggtgcccgatacgg

SEQ ID NO: 253385 - DNA, 51 bp, Artificial
  Synthetic oligonucleotide
gatgcggcggcggacaatgtttgctatgtcctcggcaagaacattccgggc

SEQ ID NO: 253386 - DNA, 55 bp, Artificial
  Synthetic oligonucleotide
gccgtcggtagccataccgtcagccaaagtcgaaccggtttcaacacgatctccc

SEQ ID NO: 253387 - DNA, 51 bp, Artificial
  Synthetic oligonucleotide
agtcgttaaacgtatccgcaagcttcgttacatcggatttcttcgctacat

SEQ ID NO: 253388 - DNA, 51 bp, Artificial
  Synthetic oligonucleotide
cgggtgcatccgcccgcaaatttacctgataatcccaagctcgctcaccgc

SEQ ID NO: 253389 - DNA, 51 bp, Artificial
  Synthetic oligonucleotide
gacataatgcacccttcctccctgtctaaaagactatatgtaggataccat

SEQ ID NO: 253390 - DNA, 51 bp, Artificial
  Synthetic oligonucleotide
agtgacgcgctctacaccctcatgcaattcaagacggaagcgcagagcggc

SEQ ID NO: 253391 - DNA, 51 bp, Artificial
  Synthetic oligonucleotide
gaagactgtctgccctgcgccgatatcttttaggcggagccgttccgcgct

SEQ ID NO: 253392 - DNA, 51 bp, Artificial
  Synthetic oligonucleotide
attgtgcggcaatccctgtgttccgtagcctattagtgcgaggcgtgccat

SEQ ID NO: 253393 - DNA, 51 bp, Artificial
  Synthetic oligonucleotide
gcacaacacgcacaagccgtttgcagcggacaaggtgaactactgggcgcc

SEQ ID NO: 253394 - DNA, 51 bp, Artificial
  Synthetic oligonucleotide
cgtaccttatacggaacttatcggtgcaaatgctcctttcggacttgctta

SEQ ID NO: 253395 - DNA, 51 bp, Artificial
  Synthetic oligonucleotide
ctttgtatccgacaggaatacttatagccggtgcacctattaaatttgccg

SEQ ID NO: 253396 - DNA, 51 bp, Artificial
  Synthetic oligonucleotide
gcatacctaagtctttcaagtccaatccggcaatgaggctgcctaaggcat

SEQ ID NO: 253397 - DNA, 57 bp, Artificial
  Synthetic oligonucleotide
gccgttttcgtgccctcatcgagtccgctttatcgggatgccctgaagggcattttc

SEQ ID NO: 253398 - DNA, 51 bp, Artificial
  Synthetic oligonucleotide
atgaaccttattaccaagcacggtattagggcgcaagtgaacatatggacc

SEQ ID NO: 253399 - DNA, 51 bp, Artificial
  Synthetic oligonucleotide
gccgacacatggtaagagaactcagcagtttacaccgttaggagaacttat

SEQ ID NO: 253400 - DNA, 51 bp, Artificial
  Synthetic oligonucleotide
gccgaccctgttggggccgagacgcacctgaatgaacgcgcagattttacg

SEQ ID NO: 253401 - DNA, 51 bp, Artificial
  Synthetic oligonucleotide
gccgcacgatgtcatgtgccgttacgggcttacgctctggagtttctcccc

SEQ ID NO: 253402 - DNA, 51 bp, Artificial
  Synthetic oligonucleotide
cgcacggctctcagggaagatcactacattttcgtggctgcaccgccgacc

SEQ ID NO: 253403 - DNA, 51 bp, Artificial
  Synthetic oligonucleotide
cgcgctttatgtacaggacgagtggctcgcaagccctgactggctgctcat

SEQ ID NO: 253404 - DNA, 50 bp, Artificial
  Synthetic oligonucleotide
ctgccatcgtatgaactataccatatacgcatgtataaaggcatacccaa

SEQ ID NO: 253405 - DNA, 50 bp, Artificial
  Synthetic oligonucleotide
cccagaagggcggcacacaggcgtccattgcctcgcatatccgcaagtac

SEQ ID NO: 253406 - DNA, 50 bp, Artificial
  Synthetic oligonucleotide
acccatcgcgggtcacaactgtacacgcccccatcggaagatgtcccgat

SEQ ID NO: 253407 - DNA, 50 bp, Artificial
  Synthetic oligonucleotide
accccaggccgagccaaagggggtgttgcccatctcaaccacaatttcgc

SEQ ID NO: 253408 - DNA, 60 bp, Artificial
  Synthetic oligonucleotide
gggcgcacttatgagtgtctcaaaacgaggttttagacacttgtgcttaatggctgcaaa

SEQ ID NO: 253409 - DNA, 50 bp, Artificial
  Synthetic oligonucleotide
ctggggacatgtatttcgcctgcagggctggagcgatcgcccgaagggct

SEQ ID NO: 253410 - DNA, 50 bp, Artificial
  Synthetic oligonucleotide
tatccatgcggagcaaagcccccgctcccgagaaggatgcgcgtgccgat

SEQ ID NO: 253411 - DNA, 50 bp, Artificial
  Synthetic oligonucleotide
accccaggcgtcgcccccaaacttttccaatagcgcttcggccaacaccc

SEQ ID NO: 253412 - DNA, 50 bp, Artificial
  Synthetic oligonucleotide
cacgacatcggacagcgagggacgccctgcgacgttcacacttgcccata

SEQ ID NO: 253413 - DNA, 50 bp, Artificial
  Synthetic oligonucleotide
tatagcgttgcatgcacctaagctgtccgatgagccctctcacataggga

SEQ ID NO: 253414 - DNA, 50 bp, Artificial
  Synthetic oligonucleotide
acccggttagggcggcccgctgcgaagttcgaccacagcctatccgagta

SEQ ID NO: 253415 - DNA, 50 bp, Artificial
  Synthetic oligonucleotide
accctatgccgacaaccagaccgcacccgaagagagccgccagtctgtgt

SEQ ID NO: 253416 - DNA, 50 bp, Artificial
  Synthetic oligonucleotide
ccataccctccaggccctgaattacggccaatgcacggccctggctctgg

SEQ ID NO: 253417 - DNA, 50 bp, Artificial
  Synthetic oligonucleotide
ccaggtccgtcgtcccataagggccgacttcgacgtaatagcagccccgc

SEQ ID NO: 253418 - DNA, 50 bp, Artificial
  Synthetic oligonucleotide
tagcttttccccggagcttcgtcaagccctcacccgacggagcgcttgaa

SEQ ID NO: 253419 - DNA, 60 bp, Artificial
  Synthetic oligonucleotide
agtctgcttatgatgtatcggcagttctgctggataatctactgcgttatgatgccctgc

SEQ ID NO: 253420 - DNA, 50 bp, Artificial
  Synthetic oligonucleotide
ccccaccgcccgtggtccttcctgcattcccatcatacgacgatttgggg

SEQ ID NO: 253421 - DNA, 50 bp, Artificial
  Synthetic oligonucleotide
ctgcacgccgtgcgagagctactggacggaacaccaactcgacgagaacg

SEQ ID NO: 253422 - DNA, 50 bp, Artificial
  Synthetic oligonucleotide
ccccggccgtatgacactccgtcaacacggataatcccaacgtgtgcgcc

SEQ ID NO: 253423 - DNA, 50 bp, Artificial
  Synthetic oligonucleotide
cccgcaattggggaaggtacagacgggacagtccaggcataacccgccct

SEQ ID NO: 253424 - DNA, 50 bp, Artificial
  Synthetic oligonucleotide
tcacgcacgcaatcagcgatgcgacaatgccggggttgatcagcatacgg

SEQ ID NO: 253425 - DNA, 50 bp, Artificial
  Synthetic oligonucleotide
cccgtccacttccggtgcttgtgcctcaattctccccaccgcttgtcgca

SEQ ID NO: 253426 - DNA, 50 bp, Artificial
  Synthetic oligonucleotide
ctctgcgttgaggacatcagccgtaagtcccgcaggcggactgataccga

SEQ ID NO: 253427 - DNA, 50 bp, Artificial
  Synthetic oligonucleotide
tcagacaagcgccctacgctttaccaaaacccggtctacgatcagcatgc

SEQ ID NO: 253428 - DNA, 50 bp, Artificial
  Synthetic oligonucleotide
ctctcgctgacaacgacagaccccatcaaagaatcggagacgctcaccta

SEQ ID NO: 253429 - DNA, 50 bp, Artificial
  Synthetic oligonucleotide
ctcctctacctacgcattccaaagaaacaacggccgccatgctttgcttt

SEQ ID NO: 253430 - DNA, 60 bp, Artificial
  Synthetic oligonucleotide
ctttcatgggagccgtgaagaacggcttacatgtgcacttaggagtttctcaaaatgaga

SEQ ID NO: 253431 - DNA, 57 bp, Artificial
  Synthetic oligonucleotide
tttccggatacgcatgtgccgcgttctttgccggatacacgcaaggaagcggggtac

SEQ ID NO: 253432 - DNA, 50 bp, Artificial
  Synthetic oligonucleotide
acagagacggcgggccagtttcatgctcatggccgaatggacaccgcaag

SEQ ID NO: 253433 - DNA, 50 bp, Artificial
  Synthetic oligonucleotide
acgcagggatgcaaatctccttttcacgcagcgcacgcacaacagcgcgt

SEQ ID NO: 253434 - DNA, 50 bp, Artificial
  Synthetic oligonucleotide
acacgacacgtccgtccgtgccgatatgggctgacacggcaatacgcccc

SEQ ID NO: 253435 - DNA, 50 bp, Artificial
  Synthetic oligonucleotide
acgcccgatattcgccaaatgcgtgagaacgaacgcccccactgcctcta

SEQ ID NO: 253436 - DNA, 50 bp, Artificial
  Synthetic oligonucleotide
acctgcggctattcgccatatgaaggcatgaccgtccgggcaacgatccg

SEQ ID NO: 253437 - DNA, 50 bp, Artificial
  Synthetic oligonucleotide
gacgagtgcttcgcgcaaggcagtgaaaccagtcgtggagggctcgaacg

SEQ ID NO: 253438 - DNA, 50 bp, Artificial
  Synthetic oligonucleotide
cagatgaggtttccgtgggggcatttgcagggcggttcgttaccgtggcg

SEQ ID NO: 253439 - DNA, 50 bp, Artificial
  Synthetic oligonucleotide
acctgactacccggcttcctaccatccgccgcaccctaacggcatcggaa

SEQ ID NO: 253440 - DNA, 50 bp, Artificial
  Synthetic oligonucleotide
taactgtctgcccatccaatgcaccgcgtacatcctccatgcgggcaagg

SEQ ID NO: 253441 - DNA, 50 bp, Artificial
  Synthetic oligonucleotide
cagcccgcgggacaattcccatttcgacacgatatggcgggacacgcttt

SEQ ID NO: 253442 - DNA, 60 bp, Artificial
  Synthetic oligonucleotide
tttcagctgcccttattgctcatccgcgttgagtgccttctccgcgtggcacgtacttag

SEQ ID NO: 253443 - DNA, 50 bp, Artificial
  Synthetic oligonucleotide
acctgtattgccgggagcatgataaccccctgcggctgccacaactcgtc

SEQ ID NO: 253444 - DNA, 50 bp, Artificial
  Synthetic oligonucleotide
tacatacggcgcaggtcatttccgccattcaaccgaccatgctcagcgct

SEQ ID NO: 253445 - DNA, 50 bp, Artificial
  Synthetic oligonucleotide
caggcccattcatgtatgaacatcatgtcgtattctcaccggcgccgact

SEQ ID NO: 253446 - DNA, 50 bp, Artificial
  Synthetic oligonucleotide
accgttggtaatttgccgcagcctttccggggcaatgggcaaggccgagt

SEQ ID NO: 253447 - DNA, 50 bp, Artificial
  Synthetic oligonucleotide
cacgggctgtgacgagtcgttcattcgatcgggtgcaccgctcgcatcgg

SEQ ID NO: 253448 - DNA, 50 bp, Artificial
  Synthetic oligonucleotide
tacgacaatcgatgtggctgcgggggcgtggagcacgcaggagtatcgcg

SEQ ID NO: 253449 - DNA, 50 bp, Artificial
  Synthetic oligonucleotide
tacgcggtcatgtgtgtcaatacgcaagcgcagtatggcggtttggcggc

SEQ ID NO: 253450 - DNA, 50 bp, Artificial
  Synthetic oligonucleotide
gtttgaaccgccaccgccttttactccaggggcttacagggcgccatacg

SEQ ID NO: 253451 - DNA, 50 bp, Artificial
  Synthetic oligonucleotide
accgttattgcgccatgaatacgggcgccgaaagcgagccaccgtttgcg

SEQ ID NO: 253452 - DNA, 50 bp, Artificial
  Synthetic oligonucleotide
acgaagggtcggctgaagataacggggcgggcatagaaacgccgtccgta

SEQ ID NO: 253453 - DNA, 60 bp, Artificial
  Synthetic oligonucleotide
gcgaggggggcaacgcccaccacactccttgtagtcaagtatgacattgtgtgtagtcac

SEQ ID NO: 253454 - DNA, 50 bp, Artificial
  Synthetic oligonucleotide
acgacacgccctatacgcccgcgtggcaagagaagtacacgggcatctcg

SEQ ID NO: 253455 - DNA, 50 bp, Artificial
  Synthetic oligonucleotide
cacgagcggagtgctccataataagcaggcccgtgtcggacaagagcccg

SEQ ID NO: 253456 - DNA, 50 bp, Artificial
  Synthetic oligonucleotide
tacgtctgccccgggaacattgacatgctgtatgctgcgtcgcggactgt

SEQ ID NO: 253457 - DNA, 50 bp, Artificial
  Synthetic oligonucleotide
acgacggggccggtttttcggggattgacgaaggggcatcatgttcggaa

SEQ ID NO: 253458 - DNA, 50 bp, Artificial
  Synthetic oligonucleotide
gttggcgggcctgattcgcagtgtggaagcgccgttggccacgcggattg

SEQ ID NO: 253459 - DNA, 50 bp, Artificial
  Synthetic oligonucleotide
gagaacccgtgactctctaggccgcccgaaatcatttgcgtgagatgctt

SEQ ID NO: 253460 - DNA, 50 bp, Artificial
  Synthetic oligonucleotide
catggacaatccgtgtcctcctccgatagccacgactttcagcccgcggg

SEQ ID NO: 253461 - DNA, 50 bp, Artificial
  Synthetic oligonucleotide
gagaacgcctactacgttgcgggcggcctctctaaggccttccacgacta

SEQ ID NO: 253462 - DNA, 50 bp, Artificial
  Synthetic oligonucleotide
acgagccaggccgtccaaactgcggataggcagcggtagacccagtccga

SEQ ID NO: 253463 - DNA, 50 bp, Artificial
  Synthetic oligonucleotide
acgcactttgcgggaatggacggacggggaggtttcacgccgggtagatt

SEQ ID NO: 253464 - DNA, 59 bp, Artificial
  Synthetic oligonucleotide
gcccccataagctaccccgcaagggcaaatcaatgatttgcccctctgcctagcggcga

SEQ ID NO: 253465 - DNA, 50 bp, Artificial
  Synthetic oligonucleotide
ccaaaacgaagtcccgtaaccgccgcctcttgtaaagggctgggagcgct

SEQ ID NO: 253466 - DNA, 50 bp, Artificial
  Synthetic oligonucleotide
accgctatgcccagaagggcggcacacaggcgtccattgcctcgcatatc

SEQ ID NO: 253467 - DNA, 50 bp, Artificial
  Synthetic oligonucleotide
cgctgctccaagcaggcctgttagcgctccccgtaagcctttgccagacc

SEQ ID NO: 253468 - DNA, 50 bp, Artificial
  Synthetic oligonucleotide
aacatcgtcccatgtcgcacccactacttgagatcgacgcggcgcccaca

SEQ ID NO: 253469 - DNA, 50 bp, Artificial
  Synthetic oligonucleotide
cctgtttggccaacatacgccgagccccgaaataagcggcagggacagta

SEQ ID NO: 253470 - DNA, 50 bp, Artificial
  Synthetic oligonucleotide
cggcacgagcactgtagagccgaacatcgcgaagagatgctgcagcgaga

SEQ ID NO: 253471 - DNA, 50 bp, Artificial
  Synthetic oligonucleotide
aacccgccagccgtcattgtactcgggataggtcgtgtgcagccggccct

SEQ ID NO: 253472 - DNA, 50 bp, Artificial
  Synthetic oligonucleotide
aaccggcggcagtgaagacccgctggctctcgtaggcaaggatttcgcta

SEQ ID NO: 253473 - DNA, 50 bp, Artificial
  Synthetic oligonucleotide
ccgttccctttagcagcactgcccataccgatagccacggccccgatact

SEQ ID NO: 253474 - DNA, 50 bp, Artificial
  Synthetic oligonucleotide
cggccgcacgtacttcgatgaagcgtgtgtgacgatgctctgccgcaaac

SEQ ID NO: 253475 - DNA, 60 bp, Artificial
  Synthetic oligonucleotide
tcgtgccactgacaggctccgttcccattgtggacgtggctctggtagcaagatcacgca

SEQ ID NO: 253476 - DNA, 50 bp, Artificial
  Synthetic oligonucleotide
cgggaccatacgggggcgatcggatatttcgagtctctcggctttgcggg

SEQ ID NO: 253477 - DNA, 50 bp, Artificial
  Synthetic oligonucleotide
tgtatcgcctcgcaaggctacaaatacatatcccgcctcaatcgtacgcg

SEQ ID NO: 253478 - DNA, 50 bp, Artificial
  Synthetic oligonucleotide
ccgtacgctgccggcgactttatcctgacgttgacgcccgaggcaaatcc

SEQ ID NO: 253479 - DNA, 50 bp, Artificial
  Synthetic oligonucleotide
aacggatcattcgcagagccgtggaattggccagagtcgcaggtggcagc

SEQ ID NO: 253480 - DNA, 50 bp, Artificial
  Synthetic oligonucleotide
cggtcctatgggccacggctccaaatcccatcgtgagccgggttccacgg

SEQ ID NO: 253481 - DNA, 50 bp, Artificial
  Synthetic oligonucleotide
cggtcggctcaccttttggatgaatctcgtcgtcacgcctgcgggcagtg

SEQ ID NO: 253482 - DNA, 50 bp, Artificial
  Synthetic oligonucleotide
cgtacacgggacttctcggcagcgttctttgcatggcgcttagcgtcgga

SEQ ID NO: 253483 - DNA, 50 bp, Artificial
  Synthetic oligonucleotide
aacggccctgggtcccgccgattagccccagatgaagctgcaaatagtga

SEQ ID NO: 253484 - DNA, 50 bp, Artificial
  Synthetic oligonucleotide
aacggtatgcggcatatgcgccccacgagcccttgtccatcggctctgca

SEQ ID NO: 253485 - DNA, 50 bp, Artificial
  Synthetic oligonucleotide
aactgaagccggccctcatcccctttacgacggctgaaacctggccgcat

SEQ ID NO: 253486 - DNA, 60 bp, Artificial
  Synthetic oligonucleotide
tctgagagcgtctgaggggtattctcgaaaatggggcgcagccccatctcacaccgaagg

SEQ ID NO: 253487 - DNA, 50 bp, Artificial
  Synthetic oligonucleotide
cgcactacttcacttcccatgcgcccacttgcaccgttaactaaaattcg

SEQ ID NO: 253488 - DNA, 50 bp, Artificial
  Synthetic oligonucleotide
cgatgttcatagagataggatacggcgtagagtattgcgacccgtacaat

SEQ ID NO: 253489 - DNA, 50 bp, Artificial
  Synthetic oligonucleotide
cgcccttcgtatcccacatagcaccgtcgcttgtcgggaacggggaagcg

SEQ ID NO: 253490 - DNA, 50 bp, Artificial
  Synthetic oligonucleotide
cgccgcaagctgcgacgcacgaacggtttcaaggcttatacgcgctgggt

SEQ ID NO: 253491 - DNA, 50 bp, Artificial
  Synthetic oligonucleotide
aaaagcgggggagacacgcaagtcctgaacctgtacagctgggcggacaa

SEQ ID NO: 253492 - DNA, 50 bp, Artificial
  Synthetic oligonucleotide
cgaattgcggttcgaacccccggtcccccaaggcctgtaaggcggcatcc

SEQ ID NO: 253493 - DNA, 50 bp, Artificial
  Synthetic oligonucleotide
cgccggaagtctgcaaaaaccccgcgcaggttacaacggccaggatagtg

SEQ ID NO: 253494 - DNA, 50 bp, Artificial
  Synthetic oligonucleotide
cgccgtccaactatgcccaaagcgtgatgggggtggtccggggctcccgt

SEQ ID NO: 253495 - DNA, 50 bp, Artificial
  Synthetic oligonucleotide
aaacgggaaccgtatacacttctcccgcccgggtcaagctgaaccacggg

SEQ ID NO: 253496 - DNA, 50 bp, Artificial
  Synthetic oligonucleotide
cgcgaagcccatcaacacgggtgccattggctcgacgacggccatcctca

SEQ ID NO: 253497 - DNA, 55 bp, Artificial
  Synthetic oligonucleotide
gccacctttaagcacaggtttcggagaaactcataagtgcgccctccgggaaata

SEQ ID NO: 253498 - DNA, 50 bp, Artificial
  Synthetic oligonucleotide
cgcgcagtctcaaaggatgcgcggctcttgacgcttgctcaaaacggctc

SEQ ID NO: 253499 - DNA, 50 bp, Artificial
  Synthetic oligonucleotide
aaagcctagttccgggtgtcatattccacggcagcgcccctttggccacg

SEQ ID NO: 253500 - DNA, 50 bp, Artificial
  Synthetic oligonucleotide
aaaggcggcccgttacgcgctgagggcatcccgaagcgtcattgtcagtt

SEQ ID NO: 253501 - DNA, 50 bp, Artificial
  Synthetic oligonucleotide
ttccgtccggcatagttccgggcactgaagtcaccggcgccctccatata

SEQ ID NO: 253502 - DNA, 50 bp, Artificial
  Synthetic oligonucleotide
aaatcccgcagcgttcatcagtagcccctccgcccatgacggggtttggc

SEQ ID NO: 253503 - DNA, 50 bp, Artificial
  Synthetic oligonucleotide
aaatgccggcatctatggggaggcagacctgtacgcgtatcggttccgcc

SEQ ID NO: 253504 - DNA, 50 bp, Artificial
  Synthetic oligonucleotide
aaattaccgctggcttccgcgcgaaatgattccggcccctggagtgcatt

SEQ ID NO: 253505 - DNA, 50 bp, Artificial
  Synthetic oligonucleotide
aacaggacggcccctacgaccattagccgttagccacgagccaccggccc

SEQ ID NO: 253506 - DNA, 50 bp, Artificial
  Synthetic oligonucleotide
tcgtaaggcgccccatcatacgcggtgtagggtcacccagtaaatccgct

SEQ ID NO: 253507 - DNA, 50 bp, Artificial
  Synthetic oligonucleotide
aatgcctctggccgccaattcagcaagccctacggctccggctctataga

SEQ ID NO: 253508 - DNA, 58 bp, Artificial
  Synthetic oligonucleotide
tgaaccagccaataacacctttatcggctcccagcgcgcaatctcggataaatcgggg

SEQ ID NO: 253509 - DNA, 50 bp, Artificial
  Synthetic oligonucleotide
ccgcctcgttgagcctgcgtattggcactcataattgcatactggtgcaa

SEQ ID NO: 253510 - DNA, 50 bp, Artificial
  Synthetic oligonucleotide
cgtgaagggggacgccgcaattccccgccgtgaattggatggcttagtgg

SEQ ID NO: 253511 - DNA, 50 bp, Artificial
  Synthetic oligonucleotide
cgtgacctgacgcagacgcttatgcgccgcaaatgtcgtctcgctcggaa

SEQ ID NO: 253512 - DNA, 50 bp, Artificial
  Synthetic oligonucleotide
ccgccggaggcttggggccgaatccccgtttgggagttttaatcgaaagc

SEQ ID NO: 253513 - DNA, 50 bp, Artificial
  Synthetic oligonucleotide
tccttcggttcttggtcccctcgtaatgccggtggctcttaccgtggcac

SEQ ID NO: 253514 - DNA, 50 bp, Artificial
  Synthetic oligonucleotide
ccgccgcccttatgaaatatgtgtccgcggcgcaaagatgccggtggatt

SEQ ID NO: 253515 - DNA, 50 bp, Artificial
  Synthetic oligonucleotide
ccgccccgcccaaactgcaagcatcgccacgcagtccttcaatcccgctc

SEQ ID NO: 253516 - DNA, 50 bp, Artificial
  Synthetic oligonucleotide
aattcgcgaactgcccgcaagactgtctgcccgcttaatgctaccccgcc

SEQ ID NO: 253517 - DNA, 50 bp, Artificial
  Synthetic oligonucleotide
tcccggatcgttatgctgtatgcatcaactgccgaggagattgacctttt

SEQ ID NO: 253518 - DNA, 50 bp, Artificial
  Synthetic oligonucleotide
tcccgcggtgctattacgaccgatccgaattccatcccccgtgcggtttc

SEQ ID NO: 253519 - DNA, 60 bp, Artificial
  Synthetic oligonucleotide
aatcaagccaattataaagctgaagattggctcatgagagagagccctccagcttacaga

SEQ ID NO: 253520 - DNA, 50 bp, Artificial
  Synthetic oligonucleotide
tcccgcccgctctgtacggatgataccggcagactcgtcacctatggcga

SEQ ID NO: 253521 - DNA, 50 bp, Artificial
  Synthetic oligonucleotide
ccgcatccccttgcaacagcatgagcgcagctgccaacacacgagcccaa

SEQ ID NO: 253522 - DNA, 50 bp, Artificial
  Synthetic oligonucleotide
ccgattgcgatccctccgctcttatcggtaatccccggtgtcgccgtggc

SEQ ID NO: 253523 - DNA, 50 bp, Artificial
  Synthetic oligonucleotide
aattgaaggaatgcctctggccgccaattcagcaagccctacggctccgg

SEQ ID NO: 253524 - DNA, 50 bp, Artificial
  Synthetic oligonucleotide
aattgcggcctgcaaatcaccccaggcgtcgcccccaaacttttccaata

SEQ ID NO: 253525 - DNA, 50 bp, Artificial
  Synthetic oligonucleotide
ccgagtgcggagacgtattggccggaaaggtatcccgttttcgcgacggc

SEQ ID NO: 253526 - DNA, 50 bp, Artificial
  Synthetic oligonucleotide
aactgttggcacgcagtcggatcacggttcttgcgtccgaacgaggggaa

SEQ ID NO: 253527 - DNA, 50 bp, Artificial
  Synthetic oligonucleotide
ccgtacatcccgaggcttggcgtccctagaccttttgctacagggggcct

SEQ ID NO: 253528 - DNA, 50 bp, Artificial
  Synthetic oligonucleotide
ccggtcgcgactgtaggctggtatgatccggctaaggctgacgcccctgt

SEQ ID NO: 253529 - DNA, 50 bp, Artificial
  Synthetic oligonucleotide
tgctgccgctaaatcataccctgcactccccgttgtcttgcgcacgggta

SEQ ID NO: 253530 - DNA, 58 bp, Artificial
  Synthetic oligonucleotide
aaacattcccatcaagccacgagattaaaaagcactttgccgcttgttcggattatga

SEQ ID NO: 253531 - DNA, 50 bp, Artificial
  Synthetic oligonucleotide
aagaccggccggaagtttcccgtgccatcttcagcggatccggaatcctt

SEQ ID NO: 253532 - DNA, 50 bp, Artificial
  Synthetic oligonucleotide
tgccccggccagactcatttcggttccggggacacgtaacaaatcgccga

SEQ ID NO: 253533 - DNA, 50 bp, Artificial
  Synthetic oligonucleotide
aagcactgtggacggaccgactctcagcgggtactacgggaccccctggc

SEQ ID NO: 253534 - DNA, 50 bp, Artificial
  Synthetic oligonucleotide
aagcgacggcgcgggaccattttcttatggtggacccgaaagagcgggaa

SEQ ID NO: 253535 - DNA, 50 bp, Artificial
  Synthetic oligonucleotide
aaggaacttagcttgccagcctttgggccgggtacgatggtgtgcgagca

SEQ ID NO: 253536 - DNA, 50 bp, Artificial
  Synthetic oligonucleotide
aaggttgggcgaccaaacagcggcgcctaaggtcaagtagcgctgccact

SEQ ID NO: 253537 - DNA, 50 bp, Artificial
  Synthetic oligonucleotide
aagtcgaggcaaacgctgtctggcgcctcgtcagccgtcaaaaccgctat

SEQ ID NO: 253538 - DNA, 50 bp, Artificial
  Synthetic oligonucleotide
ccgggtgtcatattccacggcagcgcccctttggccacgtaccttgacgc

SEQ ID NO: 253539 - DNA, 50 bp, Artificial
  Synthetic oligonucleotide
aatctccttttcacgcagcgcacgcacaacagcgcgtgcctcgacaagac

SEQ ID NO: 253540 - DNA, 50 bp, Artificial
  Synthetic oligonucleotide
aatgagatctgcacccgtgaaaaactgctcacaggcgcgcacccacgcac

SEQ ID NO: 253541 - DNA, 60 bp, Artificial
  Synthetic oligonucleotide
gcgggtagctggaagatgcgcacttctgctggcgggtcatttagtggagcggcgaaaaag

SEQ ID NO: 253542 - DNA, 59 bp, Artificial
  Synthetic oligonucleotide
tctttcgccggctatcgtattgcagcggattattggccgggcaccggaggagaacacgc

SEQ ID NO: 253543 - DNA, 50 bp, Artificial
  Synthetic oligonucleotide
aatgagccccatgataagggcaaggagtttcgtgtgtgcccccggccctg

SEQ ID NO: 253544 - DNA, 50 bp, Artificial
  Synthetic oligonucleotide
ccggcaccgacagtcccgcacgctaacactcccgaatcgggctgcataat

SEQ ID NO: 253545 - DNA, 50 bp, Artificial
  Synthetic oligonucleotide
ccggacctctgctgtacctcgcaagactgcgaatgcagtaagcctggcct

SEQ ID NO: 253546 - DNA, 50 bp, Artificial
  Synthetic oligonucleotide
tcgtcccacaggcgttcagtccgcgtaggattccaaggtaatgcgcccat

SEQ ID NO: 253547 - DNA, 50 bp, Artificial
  Synthetic oligonucleotide
agccgaaagtcccggctgctggatcacagaggcgctctcccggtttagga

SEQ ID NO: 253548 - DNA, 50 bp, Artificial
  Synthetic oligonucleotide
ggcgattaccgtgaagggggacgccgcaattccccgccgtgaattggatg

SEQ ID NO: 253549 - DNA, 50 bp, Artificial
  Synthetic oligonucleotide
gcgacaaaccttgcgacaagccttctgctctcgcctcttcagcgcgaacc

SEQ ID NO: 253550 - DNA, 50 bp, Artificial
  Synthetic oligonucleotide
agccgcacgacacggggagattcgggctacctatacggcaccgccctcgg

SEQ ID NO: 253551 - DNA, 50 bp, Artificial
  Synthetic oligonucleotide
agccgccaatcggggatccggcacgaacgcatcgcactcgcatatcccct

SEQ ID NO: 253552 - DNA, 50 bp, Artificial
  Synthetic oligonucleotide
agccgctatccttgccatgtgcctaggagctgtcgccgctttcctagagg

SEQ ID NO: 253553 - DNA, 55 bp, Artificial
  Synthetic oligonucleotide
aatcgggggtatctcttagcacggtttcccgtatcatgtcgaaattacaggaaca

SEQ ID NO: 253554 - DNA, 50 bp, Artificial
  Synthetic oligonucleotide
agccgtgtaaaatcccttgcggagcaaataaccgccgcacgacggatgcc

SEQ ID NO: 253555 - DNA, 50 bp, Artificial
  Synthetic oligonucleotide
agccgtgtggatgctgcgcttacgaccggaacatcgtacctcaaagggct

SEQ ID NO: 253556 - DNA, 50 bp, Artificial
  Synthetic oligonucleotide
ggcatccgtccctactatgcaggggtggacagccggatggcaagtccgaa

SEQ ID NO: 253557 - DNA, 50 bp, Artificial
  Synthetic oligonucleotide
ggcagtgaaaccagtcgtggagggctcgaacggtcttctgtggtacccga

SEQ ID NO: 253558 - DNA, 50 bp, Artificial
  Synthetic oligonucleotide
agccttgcgagcgcctgagcaatctccaatttttcggcggcagccaaaca

SEQ ID NO: 253559 - DNA, 50 bp, Artificial
  Synthetic oligonucleotide
gcgagatacgaggatgtgagaacgccgccatacggctctcggagcagtgc

SEQ ID NO: 253560 - DNA, 50 bp, Artificial
  Synthetic oligonucleotide
ggattgtaaaggcgattaccgtgaagggggacgccgcaattccccgccgt

SEQ ID NO: 253561 - DNA, 50 bp, Artificial
  Synthetic oligonucleotide
ggatgccctcgttacgacgaacgccggtacagcgggactcaagacgcaga

SEQ ID NO: 253562 - DNA, 50 bp, Artificial
  Synthetic oligonucleotide
agttcccgtcgatacgccgaaggtacctcccgcctttttaggcacgcgcg

SEQ ID NO: 253563 - DNA, 50 bp, Artificial
  Synthetic oligonucleotide
agcgcacaatgacggcagaggggccaagtatacccgttcccgtcgccctg

SEQ ID NO: 253564 - DNA, 59 bp, Artificial
  Synthetic oligonucleotide
ttctgctcgctctccatcccttgcaagtcgagcttacagaacgctacgaggggctttcc

SEQ ID NO: 253565 - DNA, 50 bp, Artificial
  Synthetic oligonucleotide
atacgccgccgacagcaagagggccgtcgtatcattgaccagggctgacg

SEQ ID NO: 253566 - DNA, 50 bp, Artificial
  Synthetic oligonucleotide
agcacatagccgctgggcagtccaatcccccaaaacgagagaacggccag

SEQ ID NO: 253567 - DNA, 50 bp, Artificial
  Synthetic oligonucleotide
gggatcgggaatgtagagccccgtgagttcgcagaggatgccgagacccc

SEQ ID NO: 253568 - DNA, 50 bp, Artificial
  Synthetic oligonucleotide
agcagcccgcaatatggcagcccatccgcaggggtcctatacgctgaaat

SEQ ID NO: 253569 - DNA, 50 bp, Artificial
  Synthetic oligonucleotide
agcagctcgtccgtcctagaagggggtgaagcgtcggccttagatcccgt

SEQ ID NO: 253570 - DNA, 50 bp, Artificial
  Synthetic oligonucleotide
agcatcgccgaaccgcacttgcgaacttacactgccgccgcgctgactca

SEQ ID NO: 253571 - DNA, 50 bp, Artificial
  Synthetic oligonucleotide
agcatgagcgcagctgccaacacacgagcccaaggtcagaacggcccctg

SEQ ID NO: 253572 - DNA, 50 bp, Artificial
  Synthetic oligonucleotide
gcgaatcccgttccaggccaacgtcggatacgacatccgccagtccgtgt

SEQ ID NO: 253573 - DNA, 50 bp, Artificial
  Synthetic oligonucleotide
agcatgataaccccctgcggctgccacaactcgtctttacccggacagct

SEQ ID NO: 253574 - DNA, 50 bp, Artificial
  Synthetic oligonucleotide
agcatttctgttgcctgcgtccctgagcaaggcgcatacgggcggaagaa

SEQ ID NO: 253575 - DNA, 51 bp, Artificial
  Synthetic oligonucleotide
ccgacccgaacttcggtcgggcgtttaaacctacttcacgcggattgcaaa

SEQ ID NO: 253576 - DNA, 50 bp, Artificial
  Synthetic oligonucleotide
agccagttccgtcacggactgatacgcccaactgtcttgcggcacatccg

SEQ ID NO: 253577 - DNA, 50 bp, Artificial
  Synthetic oligonucleotide
agccataggctcatgtatcgcgcgggactgatccgcaagtctgccggcgg

SEQ ID NO: 253578 - DNA, 50 bp, Artificial
  Synthetic oligonucleotide
agccccatttgtatatcgccaactgttcgcggcgggccattaggtcgccc

SEQ ID NO: 253579 - DNA, 50 bp, Artificial
  Synthetic oligonucleotide
ggcggtcttttgatggcggtgtacgctgcggggatggcggtccctttcct

SEQ ID NO: 253580 - DNA, 50 bp, Artificial
  Synthetic oligonucleotide
ggcgggagccatggcatttatggaccggcggaggcgggcagtgaacgaag

SEQ ID NO: 253581 - DNA, 50 bp, Artificial
  Synthetic oligonucleotide
agccccgcctgtgcgccccagcatacgtgaaatgtcgagtaggcatgctt

SEQ ID NO: 253582 - DNA, 50 bp, Artificial
  Synthetic oligonucleotide
agccccggaggactgatgggattccaggcgaagttgtgaatcaccgggtc

SEQ ID NO: 253583 - DNA, 50 bp, Artificial
  Synthetic oligonucleotide
ggcgcatggcgaccgtctgcaagaaagtcgttacggtgacaacaccgggc

SEQ ID NO: 253584 - DNA, 50 bp, Artificial
  Synthetic oligonucleotide
aggcagataagtgcccgaccgcttgcgtaacgaagcgtttgcgtgggagc

SEQ ID NO: 253585 - DNA, 50 bp, Artificial
  Synthetic oligonucleotide
aggcagtccgcacgcctgcctcagcggcatagtccgcacattgcgatgat

SEQ ID NO: 253586 - DNA, 58 bp, Artificial
  Synthetic oligonucleotide
tggttatttgctgtgcatggatttggtgaaagaagagggaaacatcagtattttcccc

SEQ ID NO: 253587 - DNA, 50 bp, Artificial
  Synthetic oligonucleotide
aggcatagggggacataagaggcacctcgaggcagctcgcgtccacatcg

SEQ ID NO: 253588 - DNA, 50 bp, Artificial
  Synthetic oligonucleotide
gctgccaccgtatgtccatccgcatagaagcgcccctctccatgggacac

SEQ ID NO: 253589 - DNA, 50 bp, Artificial
  Synthetic oligonucleotide
agtatttggtactcacggcattggggcgcgagtgccaagaccccacggaa

SEQ ID NO: 253590 - DNA, 50 bp, Artificial
  Synthetic oligonucleotide
aggccaggtttacatcgcccggcccggtatccctgtcggcatgaagagcc

SEQ ID NO: 253591 - DNA, 50 bp, Artificial
  Synthetic oligonucleotide
aggccgacttaactaccggcgccttaccgccaatgagcacggttgcaccg

SEQ ID NO: 253592 - DNA, 50 bp, Artificial
  Synthetic oligonucleotide
aggcgctcatctcacgagggcgcgtcttccgcttctccgttcaactcccc

SEQ ID NO: 253593 - DNA, 50 bp, Artificial
  Synthetic oligonucleotide
agtacgcgacgtcctttggtcgcccagccgcaagctaaatattcgccgca

SEQ ID NO: 253594 - DNA, 50 bp, Artificial
  Synthetic oligonucleotide
agggatgcggatctgacgcctgcagaggcagctcttgcggcaaacgagcg

SEQ ID NO: 253595 - DNA, 50 bp, Artificial
  Synthetic oligonucleotide
gctactggcagggcatccgtccctactatgcaggggtggacagccggatg

SEQ ID NO: 253596 - DNA, 50 bp, Artificial
  Synthetic oligonucleotide
gcgggcaggaagaaccgccacacatggtaaaatatgacgggcagcgcgag

SEQ ID NO: 253597 - DNA, 54 bp, Artificial
  Synthetic oligonucleotide
tactgaactttgcaatccgcgtgaagcaggtttaaacgcccgaccgaagttcgg

SEQ ID NO: 253598 - DNA, 50 bp, Artificial
  Synthetic oligonucleotide
aggtttacggaggacgggacagtgaagtgccccgcgctatacaagcggtg

SEQ ID NO: 253599 - DNA, 50 bp, Artificial
  Synthetic oligonucleotide
agggcggcccgctgcgaagttcgaccacagcctatccgagtatatggtct

SEQ ID NO: 253600 - DNA, 50 bp, Artificial
  Synthetic oligonucleotide
aggtgcctggctatgcggcgaagataccggaggggcgcgtcatgagtcgt

SEQ ID NO: 253601 - DNA, 50 bp, Artificial
  Synthetic oligonucleotide
gcggtgacattcctctttggccgcgtgtactgcagtgtgctctgtccgct

SEQ ID NO: 253602 - DNA, 50 bp, Artificial
  Synthetic oligonucleotide
aggtagcgctgggtcgcctgcagtccgcagacgcgcagaatatcatgggg

SEQ ID NO: 253603 - DNA, 50 bp, Artificial
  Synthetic oligonucleotide
agcgcgtccctattgttcccgcataggattgcctcccgtatccgctccga

SEQ ID NO: 253604 - DNA, 50 bp, Artificial
  Synthetic oligonucleotide
agcggcacctcaacaaaaacccctgcgtcccttcttaccgggcgtacact

SEQ ID NO: 253605 - DNA, 50 bp, Artificial
  Synthetic oligonucleotide
agcggcatgtggcggggtagcattaagcgggcagacagtcttgcgggcag

SEQ ID NO: 253606 - DNA, 50 bp, Artificial
  Synthetic oligonucleotide
agcggcgtaagtatccgtccgcctgactgagagtggccgccaatagcggt

SEQ ID NO: 253607 - DNA, 50 bp, Artificial
  Synthetic oligonucleotide
agcgtattgtccgggaggagacattcaggtgccgcgcaagctccattccg

SEQ ID NO: 253608 - DNA, 58 bp, Artificial
  Synthetic oligonucleotide
aaatttcgcggatgtactgaaggcaatgagcaaatcctatgctggcaacagtacttcc

SEQ ID NO: 253609 - DNA, 50 bp, Artificial
  Synthetic oligonucleotide
agcgtccttatgcacgcaagcggccggtagtctgtctggatgagaagccc

SEQ ID NO: 253610 - DNA, 50 bp, Artificial
  Synthetic oligonucleotide
ggacggctgccgactatatgtcgggggagcaccgcaatgcacagcaaagt

SEQ ID NO: 253611 - DNA, 50 bp, Artificial
  Synthetic oligonucleotide
agtcgcagtcaggatagcggtcgcagccgtagaatgcacgtccgcggcga

SEQ ID NO: 253612 - DNA, 50 bp, Artificial
  Synthetic oligonucleotide
agcgtcggcgggacttagggtgcgcacggctttggaaaagggacgtaaga

SEQ ID NO: 253613 - DNA, 50 bp, Artificial
  Synthetic oligonucleotide
agctccgtcgaggaggcaaacacctccgcctgcggtacacgcagaacaag

SEQ ID NO: 253614 - DNA, 50 bp, Artificial
  Synthetic oligonucleotide
agtccatcatgtggcgacgtaattttgtcttcacaagtccgaaagaccga

SEQ ID NO: 253615 - DNA, 50 bp, Artificial
  Synthetic oligonucleotide
agctcctgcccatgaaatgtttgaccatgtggccgtgcattggcgccggg

SEQ ID NO: 253616 - DNA, 50 bp, Artificial
  Synthetic oligonucleotide
gcgcccctgcgatcctcccccgcatagcgcagccctgtcgaataccgttt

SEQ ID NO: 253617 - DNA, 50 bp, Artificial
  Synthetic oligonucleotide
agtccaaacccaacccgccgctagtcgagcgttttagttccgccccggtc

SEQ ID NO: 253618 - DNA, 50 bp, Artificial
  Synthetic oligonucleotide
aggagacattcaggtgccgcgcaagctccattccggtcatgccgtctgca

SEQ ID NO: 253619 - DNA, 58 bp, Artificial
  Synthetic oligonucleotide
gatcacgacagcccccgggttccccgtggcacatgaaggttaccgcttagtgctgcta

SEQ ID NO: 253620 - DNA, 50 bp, Artificial
  Synthetic oligonucleotide
aggatgaacggccgcggtggaaactaccatggccacgattgcccggtttt

SEQ ID NO: 253621 - DNA, 50 bp, Artificial
  Synthetic oligonucleotide
aggcaaagccggggcgacaaggatgcccttccaaataagtcccgccatac

SEQ ID NO: 253622 - DNA, 50 bp, Artificial
  Synthetic oligonucleotide
aggcaagcaagggctggcccggccaagtaaagacaagtcgcccgattttt

SEQ ID NO: 253623 - DNA, 50 bp, Artificial
  Synthetic oligonucleotide
acggccaatacttgatagccggaccgatgaagcgagcgggccacgcttgt

SEQ ID NO: 253624 - DNA, 50 bp, Artificial
  Synthetic oligonucleotide
caacccctttgccattagcccttgcggctgccatgggtcctgctaacgat

SEQ ID NO: 253625 - DNA, 50 bp, Artificial
  Synthetic oligonucleotide
acggctgcgtgttccatcaggcctacaagtgccggtgtggcgtacacggg

SEQ ID NO: 253626 - DNA, 50 bp, Artificial
  Synthetic oligonucleotide
caaatgacatcgctagccgttggctagcaccagggcaactcattgatcct

SEQ ID NO: 253627 - DNA, 50 bp, Artificial
  Synthetic oligonucleotide
gtcggctaaaacacgttctgccgcctttaatacacgacgactgttcgttt

SEQ ID NO: 253628 - DNA, 50 bp, Artificial
  Synthetic oligonucleotide
acgggccgcacgggaagaaatgattatatggttcgcgcgggcatgagccg

SEQ ID NO: 253629 - DNA, 50 bp, Artificial
  Synthetic oligonucleotide
gatgcgttcgtctgctccctctgtctttgcggtgcggctatccgcgctca

SEQ ID NO: 253630 - DNA, 57 bp, Artificial
  Synthetic oligonucleotide
gcatctccttccgcagggtaggtgtcattctatgccttggcggtataaaacccctcc

SEQ ID NO: 253631 - DNA, 50 bp, Artificial
  Synthetic oligonucleotide
acgggggcgatcggatatttcgagtctctcggctttgcgggatccgtgct

SEQ ID NO: 253632 - DNA, 50 bp, Artificial
  Synthetic oligonucleotide
caaatcccaccgctgcctttcgttgttgtcactccttcccccggtgcgcg

SEQ ID NO: 253633 - DNA, 50 bp, Artificial
  Synthetic oligonucleotide
acggtcgaaatcgtgcaaaggggagcgcagggggtaacagaggcggccaa

SEQ ID NO: 253634 - DNA, 50 bp, Artificial
  Synthetic oligonucleotide
acggtgccgtcgcccccacggcggctaaggcatgtacgcctataaatcgg

SEQ ID NO: 253635 - DNA, 50 bp, Artificial
  Synthetic oligonucleotide
gatttccgctcttcgcggctctgccccgaccattcgatgttgtagcccga

SEQ ID NO: 253636 - DNA, 50 bp, Artificial
  Synthetic oligonucleotide
gcaaccccgaggcaaagggcccggaggatgaggcactagcagtctggctt

SEQ ID NO: 253637 - DNA, 50 bp, Artificial
  Synthetic oligonucleotide
gtatcgtgcggagggtgcctttttgcgcggtgtgcggttagatgcaggtt

SEQ ID NO: 253638 - DNA, 50 bp, Artificial
  Synthetic oligonucleotide
attccacggcagcgcccctttggccacgtaccttgacgcgaatcggtcgt

SEQ ID NO: 253639 - DNA, 50 bp, Artificial
  Synthetic oligonucleotide
gcaggccggatgaacccgttggttagtgttgcacgcaagagcgggaggct

SEQ ID NO: 253640 - DNA, 50 bp, Artificial
  Synthetic oligonucleotide
acgccgctctccgaaaatcgtgtcgccaaatgtgagcacaacggggcgga

SEQ ID NO: 253641 - DNA, 58 bp, Artificial
  Synthetic oligonucleotide
tggcggccctgaggtttcctacggtgtgactggattcatgacggaatttcccatggtg

SEQ ID NO: 253642 - DNA, 50 bp, Artificial
  Synthetic oligonucleotide
caccttggtggccaatacggcagatgtctccgaatgggtcgaccgggacc

SEQ ID NO: 253643 - DNA, 50 bp, Artificial
  Synthetic oligonucleotide
acgcctcctgcgcggctatggacatatcgacggggaaggacatctcaccc

SEQ ID NO: 253644 - DNA, 50 bp, Artificial
  Synthetic oligonucleotide
acgcgactcgggcgacttaacgggctcacccggtgttactcttgttggcc

SEQ ID NO: 253645 - DNA, 50 bp, Artificial
  Synthetic oligonucleotide
acgcgcaaaagagccgcctgaacttcatccagacgggagttcacgccgca

SEQ ID NO: 253646 - DNA, 50 bp, Artificial
  Synthetic oligonucleotide
acgcggatcctgcgtatgggggcggggtgatatatccgctggcacattgc

SEQ ID NO: 253647 - DNA, 50 bp, Artificial
  Synthetic oligonucleotide
caccccgcaagcacatagccgctgggcagtccaatcccccaaaacgagag

SEQ ID NO: 253648 - DNA, 50 bp, Artificial
  Synthetic oligonucleotide
gtggggcggtcccgtcgcacgcgtcggagtgatcctcgatacggacgtca

SEQ ID NO: 253649 - DNA, 50 bp, Artificial
  Synthetic oligonucleotide
acgcggccccttcacgatcgaactgcacaagaggaaacggatcactgcga

SEQ ID NO: 253650 - DNA, 50 bp, Artificial
  Synthetic oligonucleotide
cacatctcccgaagggacaccgcggcacacgcgctacctcgcacactgac

SEQ ID NO: 253651 - DNA, 50 bp, Artificial
  Synthetic oligonucleotide
acgcgtgagctgagatccctgtgcgactggtactgcccttcgaacggcgt

SEQ ID NO: 253652 - DNA, 57 bp, Artificial
  Synthetic oligonucleotide
tacctgtatgtccggaagtgttagggggacttagtacgcctcgtgatcctgcggagc

SEQ ID NO: 253653 - DNA, 54 bp, Artificial
  Synthetic oligonucleotide
ccgaactccataccgcttgtcggcaggacgattacctctgaaaacccggaactc

SEQ ID NO: 253654 - DNA, 50 bp, Artificial
  Synthetic oligonucleotide
acgctcatccacaaaacgcagggaaaaaggcgcatcggtgtggcaagggg

SEQ ID NO: 253655 - DNA, 50 bp, Artificial
  Synthetic oligonucleotide
acgcttcggcccatatcgacaacacggtggggcaaaaggccgccaaacag

SEQ ID NO: 253656 - DNA, 50 bp, Artificial
  Synthetic oligonucleotide
cacacgcgctacctcgcacactgactgcgcccccgcacaactcatatgca

SEQ ID NO: 253657 - DNA, 50 bp, Artificial
  Synthetic oligonucleotide
gtgcgagacacacggccgccggaaagaataggcattccccaggcagacaa

SEQ ID NO: 253658 - DNA, 50 bp, Artificial
  Synthetic oligonucleotide
acggaccgactctcagcgggtactacgggaccccctggcaggtagacgta

SEQ ID NO: 253659 - DNA, 50 bp, Artificial
  Synthetic oligonucleotide
gagtgccgtcgccccttcgtatcacggtttggcctccggtaccctggcac

SEQ ID NO: 253660 - DNA, 50 bp, Artificial
  Synthetic oligonucleotide
acggcatcaaaggaatcgtcagcgagcagaggcgcggcgattgtgcgccc

SEQ ID NO: 253661 - DNA, 50 bp, Artificial
  Synthetic oligonucleotide
atcgtgcaaaggggagcgcagggggtaacagaggcggccaaacggctagg

SEQ ID NO: 253662 - DNA, 50 bp, Artificial
  Synthetic oligonucleotide
agaccgcacccgaagagagccgccagtctgtgttcgggagatactcgcgc

SEQ ID NO: 253663 - DNA, 50 bp, Artificial
  Synthetic oligonucleotide
gcccgagcgtaggccgggtcatccctttccccacaggcgacagcaaggct

SEQ ID NO: 253664 - DNA, 57 bp, Artificial
  Synthetic oligonucleotide
tcatccgtgctgactgcaatccccgtgtggtgcgtttatcgcttattttgtcaacta

SEQ ID NO: 253665 - DNA, 50 bp, Artificial
  Synthetic oligonucleotide
agacctagccagaagcacagttcctccgcattgggcagcagccctggcgc

SEQ ID NO: 253666 - DNA, 50 bp, Artificial
  Synthetic oligonucleotide
agacctttgtcagcctggaaagcacgcaccgcctcctccgttacggcgcc

SEQ ID NO: 253667 - DNA, 50 bp, Artificial
  Synthetic oligonucleotide
agacgcccgatgcgactctttggatagcgcttggcggaggtatgcgtcag

SEQ ID NO: 253668 - DNA, 50 bp, Artificial
  Synthetic oligonucleotide
gcccgctcgcattgacgtattcgcccgtcaagggtcccgagggcaacatc

SEQ ID NO: 253669 - DNA, 50 bp, Artificial
  Synthetic oligonucleotide
gcccggcttcccgtatacacgcgtccgtccgccaaagcgcgtaccgtttc

SEQ ID NO: 253670 - DNA, 50 bp, Artificial
  Synthetic oligonucleotide
atcgccaactgttcgcggcgggccattaggtcgcccatacgaaacactta

SEQ ID NO: 253671 - DNA, 50 bp, Artificial
  Synthetic oligonucleotide
agagggcgcggtgcgtaccctgccgtgaaatatgtgcgtgggacaaatta

SEQ ID NO: 253672 - DNA, 50 bp, Artificial
  Synthetic oligonucleotide
ggggattggagttcgcttgcctagtaggggttatcctaggggcggctgcg

SEQ ID NO: 253673 - DNA, 50 bp, Artificial
  Synthetic oligonucleotide
agatgaggccttcacggtgttcttccagtgccgtgcgaggaatgcggggt

SEQ ID NO: 253674 - DNA, 50 bp, Artificial
  Synthetic oligonucleotide
atccttcgccatgaagcacacgaagtttggcagggttccgttctgcccgg

SEQ ID NO: 253675 - DNA, 57 bp, Artificial
  Synthetic oligonucleotide
ctgcacctgcatgcaagttcgccacattgtaacgtggtgcggagcatccttcgatga

SEQ ID NO: 253676 - DNA, 50 bp, Artificial
  Synthetic oligonucleotide
atcccctgcccacgaacatcgcagtatctccgcacgcaggacgggattcg

SEQ ID NO: 253677 - DNA, 50 bp, Artificial
  Synthetic oligonucleotide
atcattacggtcggtcattggttctctcggtcacagcgggggcgtgcgag

SEQ ID NO: 253678 - DNA, 50 bp, Artificial
  Synthetic oligonucleotide
agatggcgagtcgggcctttcttggtttgtcggggcaccgagggggattc

SEQ ID NO: 253679 - DNA, 50 bp, Artificial
  Synthetic oligonucleotide
gggccgcgtatcctccagcataccgcggacaaaaggtgtgccgaattcgg

SEQ ID NO: 253680 - DNA, 50 bp, Artificial
  Synthetic oligonucleotide
atagagtcggctgtcgaacaggctctgaacgccgggtggagaacagcgga

SEQ ID NO: 253681 - DNA, 50 bp, Artificial
  Synthetic oligonucleotide
gcaggcctgttagcgctccccgtaagcctttgccagaccgtcctggctca

SEQ ID NO: 253682 - DNA, 50 bp, Artificial
  Synthetic oligonucleotide
atggctccgtgcagccagacctgccctatccatcaggatatcccggctta

SEQ ID NO: 253683 - DNA, 50 bp, Artificial
  Synthetic oligonucleotide
actcatgcgggacctaaggcttcgcacctcctttcttccccgtcagccct

SEQ ID NO: 253684 - DNA, 50 bp, Artificial
  Synthetic oligonucleotide
actcccatacggacgcgttccatcgtatacgccgccgacagcaagagggc

SEQ ID NO: 253685 - DNA, 50 bp, Artificial
  Synthetic oligonucleotide
atgcgccggcacagataaagcccacaagactccgcagacacgcggtcgag

SEQ ID NO: 253686 - DNA, 57 bp, Artificial
  Synthetic oligonucleotide
gcgacgtgccaaacaacctcgcagtgtatgcctcgtaagcgcagcatgtgcgacatt

SEQ ID NO: 253687 - DNA, 50 bp, Artificial
  Synthetic oligonucleotide
atgcgaccgtggagaaacgctttttcgtccggcgtaagtccgcgcaagta

SEQ ID NO: 253688 - DNA, 50 bp, Artificial
  Synthetic oligonucleotide
atgccccgtatctactccgacttgtcccgaagcactgcccacgaggcgta

SEQ ID NO: 253689 - DNA, 50 bp, Artificial
  Synthetic oligonucleotide
atgatagcgccaggcagccaatggggatcgccgaacttcggccatacgcg

SEQ ID NO: 253690 - DNA, 50 bp, Artificial
  Synthetic oligonucleotide
ggttacaacggccaggatagtgagcatgacgccgatgggtggtgtgcccg

SEQ ID NO: 253691 - DNA, 50 bp, Artificial
  Synthetic oligonucleotide
actgcccgcaagactgtctgcccgcttaatgctaccccgccacatgccgc

SEQ ID NO: 253692 - DNA, 50 bp, Artificial
  Synthetic oligonucleotide
actgccggcatttcccctttcatgagggcatcgaagtggccgcggacatt

SEQ ID NO: 253693 - DNA, 50 bp, Artificial
  Synthetic oligonucleotide
actgtcgtcctgttcgcttcggtgcgtcacaatggccggtcactagccga

SEQ ID NO: 253694 - DNA, 50 bp, Artificial
  Synthetic oligonucleotide
atgaaatcccgtcgtgatgccccagcacattccccgcacggtcgacaata

SEQ ID NO: 253695 - DNA, 50 bp, Artificial
  Synthetic oligonucleotide
atctctggtccgcatccccttgcaacagcatgagcgcagctgccaacaca

SEQ ID NO: 253696 - DNA, 50 bp, Artificial
  Synthetic oligonucleotide
atctcggaaggggtaggaaccacccggcctttcgagttggtaggcgcacc

SEQ ID NO: 253697 - DNA, 57 bp, Artificial
  Synthetic oligonucleotide
attggcaggaatcaacggatggcgagcacgcatcaaattgacgtcacgcccttcgct

SEQ ID NO: 253698 - DNA, 50 bp, Artificial
  Synthetic oligonucleotide
agaacggactctgcctttccgcgcgctccgacgggtctgttaatgtgcag

SEQ ID NO: 253699 - DNA, 50 bp, Artificial
  Synthetic oligonucleotide
ggtcatcggtactgcagatgaggtttccgtgggggcatttgcagggcggt

SEQ ID NO: 253700 - DNA, 50 bp, Artificial
  Synthetic oligonucleotide
agacagaaagcgcttcgccacgggctgacctagtgcttgccagtcgggat

SEQ ID NO: 253701 - DNA, 56 bp, Artificial
  Synthetic oligonucleotide
ccatcttgccgacgctgtagattccatgactgccggagaaaatggcgtcatgtcgg

SEQ ID NO: 253702 - DNA, 56 bp, Artificial
  Synthetic oligonucleotide
gcccgtagggcatctccttccgcagggtaggtgtcattctatgccttggcggtata

SEQ ID NO: 253703 - DNA, 56 bp, Artificial
  Synthetic oligonucleotide
ttgccggatacatcggatttactagcagtcaacgccggttggtagagctgatggca

SEQ ID NO: 253704 - DNA, 56 bp, Artificial
  Synthetic oligonucleotide
acagggtaatcaaattcctggaacatctttcgccggctatcgtattgcagcggatt

SEQ ID NO: 253705 - DNA, 56 bp, Artificial
  Synthetic oligonucleotide
agcactgccggaactagtcaagtctttgcaggcagcggattttgaccggtcaaagg

SEQ ID NO: 253706 - DNA, 55 bp, Artificial
  Synthetic oligonucleotide
cgggcagtcaaaccttgccataatccaacccaggcgatggcatagctgtcggcaa

SEQ ID NO: 253707 - DNA, 55 bp, Artificial
  Synthetic oligonucleotide
agtaacacgaatccacctaacaagatgctgaagccaacttgggttggcgttctca

SEQ ID NO: 253708 - DNA, 55 bp, Artificial
  Synthetic oligonucleotide
ggcggagctgccaatgtggctcgcaacctcacggctctccaggttcccacagatt

SEQ ID NO: 253709 - DNA, 55 bp, Artificial
  Synthetic oligonucleotide
gtgagtgccttaaggcttttatcgtctttgtccttaaagtccactacgacgccag

SEQ ID NO: 253710 - DNA, 55 bp, Artificial
  Synthetic oligonucleotide
agagctgaatcattcatttgagttgccatttcatcctaaagactgccgggagggg

SEQ ID NO: 253711 - DNA, 55 bp, Artificial
  Synthetic oligonucleotide
gttacgggaatctggggagtcgcgtgaacgagcctcgtgcggaggtgctttaagc

SEQ ID NO: 253712 - DNA, 55 bp, Artificial
  Synthetic oligonucleotide
tgagggtcagattggcggaaactacttgataaaaggttcggaaacattctctcgg

SEQ ID NO: 253713 - DNA, 55 bp, Artificial
  Synthetic oligonucleotide
tgctcaaacgtcattccctggcgatcataggataaactgattcgtgcacgcccag

SEQ ID NO: 253714 - DNA, 55 bp, Artificial
  Synthetic oligonucleotide
aaacccgtgatcctcagttctctatcgggctggcagaacgtctttcctggagcac

SEQ ID NO: 253715 - DNA, 55 bp, Artificial
  Synthetic oligonucleotide
tggcgtggcggtcgagtggatatctacgaagtctatcgaggttgggcttactgaa

SEQ ID NO: 253716 - DNA, 55 bp, Artificial
  Synthetic oligonucleotide
tgggccactgcccctggattcaagcccacttgccggtgatccatccccacccaca

SEQ ID NO: 253717 - DNA, 54 bp, Artificial
  Synthetic oligonucleotide
ctacccagttacaagtgcgaccttccgacgtttggcacaatcgtcgaacccgaa

SEQ ID NO: 253718 - DNA, 51 bp, Artificial
  Synthetic oligonucleotide
tgttggtgaccgttttaatcagggtggaaccggaaaagtattggacggtgg

SEQ ID NO: 253719 - DNA, 55 bp, Artificial
  Synthetic oligonucleotide
ttgtccttcgattctgtcagtggcaaagggtatctgttcggtgtggaaaatcagg

SEQ ID NO: 253720 - DNA, 54 bp, Artificial
  Synthetic oligonucleotide
ggttattcccgtctcgactttatctgcctaaaatggccaacaacctaaacattg

SEQ ID NO: 253721 - DNA, 54 bp, Artificial
  Synthetic oligonucleotide
tcacgtattcagtctttgaagggagtcggttgtgtgcgttgcgttgctgatggg

SEQ ID NO: 253722 - DNA, 54 bp, Artificial
  Synthetic oligonucleotide
tgactttgcataaagacgacttcggcccagtatttataattggtttggatggca

SEQ ID NO: 253723 - DNA, 53 bp, Artificial
  Synthetic oligonucleotide
gaattggcgcatcactggcgtcgctttccttgtgatcgtgtggtgttcggttt

SEQ ID NO: 253724 - DNA, 52 bp, Artificial
  Synthetic oligonucleotide
cgccatccccataagttccgctttgagtcctttcagttgttggattcgtccg

SEQ ID NO: 253725 - DNA, 52 bp, Artificial
  Synthetic oligonucleotide
gaaatttatctcgctccctacggttgggtccccgtcgatcaatacatgggca

SEQ ID NO: 253726 - DNA, 52 bp, Artificial
  Synthetic oligonucleotide
gtgcgctcgggatagttcctccaggcagcaacccagagacggcccttggtat

SEQ ID NO: 253727 - DNA, 51 bp, Artificial
  Synthetic oligonucleotide
ggcatctacaatcactcggttccaagatcattcacggcgagttcgttcctg

SEQ ID NO: 253728 - DNA, 55 bp, Artificial
  Synthetic oligonucleotide
ctctaagtaaatacacctgtcactttcggcaactcttactgagcagcccgactct

SEQ ID NO: 253729 - DNA, 51 bp, Artificial
  Synthetic oligonucleotide
agccgggtagctcgatgggaacactcacagttcagggcgacgtgacactca

SEQ ID NO: 253730 - DNA, 50 bp, Artificial
  Synthetic oligonucleotide
aatcgagggcggtttgctgcgatttaccgagccaagtggtggcgacgggt

SEQ ID NO: 253731 - DNA, 50 bp, Artificial
  Synthetic oligonucleotide
aatccttccgtggcagacgatgaatgcatggtggcctggggaagacgcgg

SEQ ID NO: 253732 - DNA, 50 bp, Artificial
  Synthetic oligonucleotide
aatccgtcggatcgcagcacatcgttcacccttttcggcggacgccactc

SEQ ID NO: 253733 - DNA, 50 bp, Artificial
  Synthetic oligonucleotide
aatcccaggtcgcccggccaccatagagagtgtaggtcatgccgcgcaga

SEQ ID NO: 253734 - DNA, 50 bp, Artificial
  Synthetic oligonucleotide
aacgggtcgtaaccacttgctcccgattgggccgtcctaacgccacctgc

SEQ ID NO: 253735 - DNA, 50 bp, Artificial
  Synthetic oligonucleotide
aacggatccccgtcctgatccgtgtcattcgccagcaaactgctcaccgg

SEQ ID NO: 253736 - DNA, 50 bp, Artificial
  Synthetic oligonucleotide
aacctttccgatgccgccccaacatccgtgcctgcgacgctacatcaaat

SEQ ID NO: 253737 - DNA, 50 bp, Artificial
  Synthetic oligonucleotide
aaccgggcgatacaaccttgtggtgattggggcagggaccgcaggattgg

SEQ ID NO: 253738 - DNA, 50 bp, Artificial
  Synthetic oligonucleotide
aaccacttgctcccgattgggccgtcctaacgccacctgcaaggtatcgg

SEQ ID NO: 253739 - DNA, 55 bp, Artificial
  Synthetic oligonucleotide
ctgccgctgtgtctggatcatgcacgaaacgtaactcatggtacatctttatctg

SEQ ID NO: 253740 - DNA, 50 bp, Artificial
  Synthetic oligonucleotide
aaccaccccgcgagaaagggcaatagcgcccgaagtgtcgcctggtttgc

SEQ ID NO: 253741 - DNA, 50 bp, Artificial
  Synthetic oligonucleotide
aacaggcggacaagcttgcagtgcgcatcgggctcgcacaatcgaccgag

SEQ ID NO: 253742 - DNA, 50 bp, Artificial
  Synthetic oligonucleotide
aacaacgcgggcaggcaggctacaccgggatcgatatcttgcgcggcccg

SEQ ID NO: 253743 - DNA, 50 bp, Artificial
  Synthetic oligonucleotide
aacaaatctggtcctgaacgccactgaggcggtgcccaaggaagggctga

SEQ ID NO: 253744 - DNA, 50 bp, Artificial
  Synthetic oligonucleotide
aaatggttccgggacactttcgctgggcggctccaattcgttcaccggcg

SEQ ID NO: 253745 - DNA, 50 bp, Artificial
  Synthetic oligonucleotide
aaagctagctccccactccgatggccaggtggtccactcgagcaagtccg

SEQ ID NO: 253746 - DNA, 50 bp, Artificial
  Synthetic oligonucleotide
aaactttcgccgcaccgcatttagcgcgagcctccccaggttatcgcact

SEQ ID NO: 253747 - DNA, 50 bp, Artificial
  Synthetic oligonucleotide
aaacgtttgttaggcccggccgagcggaccaacacgccttcgcctgaaaa

SEQ ID NO: 253748 - DNA, 50 bp, Artificial
  Synthetic oligonucleotide
aaacatgtaagccacgcgcgaacgccagttcttagccgccagccaaccca

SEQ ID NO: 253749 - DNA, 50 bp, Artificial
  Synthetic oligonucleotide
aaacatcccacccacccgctcacacccgcccgcacggaattgcttcaagc

SEQ ID NO: 253750 - DNA, 55 bp, Artificial
  Synthetic oligonucleotide
gaaagaacgtcattcaaacaaaccatcatcgggtcgccacggtcctttcgcggtc

SEQ ID NO: 253751 - DNA, 50 bp, Artificial
  Synthetic oligonucleotide
aaaatctcacgaggatgtgcggcagacctgcggtcccacagaccaaggcg

SEQ ID NO: 253752 - DNA, 50 bp, Artificial
  Synthetic oligonucleotide
aaaacagctggacggctctggttttgcagcacacccaaaaaccgcgcacg

SEQ ID NO: 253753 - DNA, 50 bp, Artificial
  Synthetic oligonucleotide
aagtgccaacgttgcctcctacaacgatgcgggacgcgcagccaacacga

SEQ ID NO: 253754 - DNA, 50 bp, Artificial
  Synthetic oligonucleotide
aagtgcatggaatcatcctggcttcggatggcagcctgtggtcgtggggg

SEQ ID NO: 253755 - DNA, 50 bp, Artificial
  Synthetic oligonucleotide
aagtcccccgtgagaccgcgcacttccacatggtcgcgcttgccaataat

SEQ ID NO: 253756 - DNA, 50 bp, Artificial
  Synthetic oligonucleotide
aagtattgcccgcatgctgagtcctggaggttgggtggaacccggacaga

SEQ ID NO: 253757 - DNA, 50 bp, Artificial
  Synthetic oligonucleotide
aagggcctgtagcagatgacccagactgccgcgatccaatgctcactgcg

SEQ ID NO: 253758 - DNA, 50 bp, Artificial
  Synthetic oligonucleotide
aagggaataacccacaatcagggaggaagccaccgcgaacccgccactgg

SEQ ID NO: 253759 - DNA, 50 bp, Artificial
  Synthetic oligonucleotide
aaggatggcccgaccgcacaatggactccgccgttgcagtaatccgcagg

SEQ ID NO: 253760 - DNA, 50 bp, Artificial
  Synthetic oligonucleotide
aaggagcacagcaggggccacaggcgacccgccaagaaccaatagatgcg

SEQ ID NO: 253761 - DNA, 51 bp, Artificial
  Synthetic oligonucleotide
cgcaaaccgaacccacaaccttcgggaactccggtttggtcgtatgggcga

SEQ ID NO: 253762 - DNA, 50 bp, Artificial
  Synthetic oligonucleotide
aagctgatcggaatcccgttgcgactgcgctacaagccagcgcttctgcg

SEQ ID NO: 253763 - DNA, 50 bp, Artificial
  Synthetic oligonucleotide
aagcgcccgccaccaacgctagtgcctccttgcggtgcgtctatttggca

SEQ ID NO: 253764 - DNA, 50 bp, Artificial
  Synthetic oligonucleotide
aagccgtcgtgaatgaaccgccacttgtcgtcatgggttatgcccggcac

SEQ ID NO: 253765 - DNA, 50 bp, Artificial
  Synthetic oligonucleotide
aagcccgaccattgaggttggctccctcacgacagttggccagaaccgta

SEQ ID NO: 253766 - DNA, 50 bp, Artificial
  Synthetic oligonucleotide
aagccagtcatagctcctccgaaagcctgggaagcgccgagaaccgtggt

SEQ ID NO: 253767 - DNA, 50 bp, Artificial
  Synthetic oligonucleotide
aagatcagggtgggcactgaactgcgcgtggaaagggaccttacccgtcc

SEQ ID NO: 253768 - DNA, 50 bp, Artificial
  Synthetic oligonucleotide
aactgacgggcaagaggccggtcggataccgtgccccatggtttgagatc

SEQ ID NO: 253769 - DNA, 50 bp, Artificial
  Synthetic oligonucleotide
aacgtggcttacgcaggcctcactcgcagttccacaccctcggttggtta

SEQ ID NO: 253770 - DNA, 50 bp, Artificial
  Synthetic oligonucleotide
aacgtccgcacgaatctcccgaagcgcctgttcatcgaaaggtggcgtga

SEQ ID NO: 253771 - DNA, 55 bp, Artificial
  Synthetic oligonucleotide
ccctgcaatccccatctgcagtgatacctcagtcgcttccgaatgttttaccacg

SEQ ID NO: 253772 - DNA, 55 bp, Artificial
  Synthetic oligonucleotide
gcccaccgcttcagcactcgcacgcaactgacgaaggggtttcgtaacggtccga

SEQ ID NO: 253773 - DNA, 55 bp, Artificial
  Synthetic oligonucleotide
gccccggctgatctcagtggcttccgcatttatatccagacgacgaacttttcct

SEQ ID NO: 253774 - DNA, 55 bp, Artificial
  Synthetic oligonucleotide
agagggcaagccagtgatcttcatgcaccagcatttcccagacaaagtcgcgggg

SEQ ID NO: 253775 - DNA, 54 bp, Artificial
  Synthetic oligonucleotide
cgctccaccaatccggatgcgggaacctgttaccgggaagctttgcccatacgg

SEQ ID NO: 253776 - DNA, 50 bp, Artificial
  Synthetic oligonucleotide
aagcaccccgtcctctgggactggactccgggtgagcctctctccaggcc

SEQ ID NO: 253777 - DNA, 50 bp, Artificial
  Synthetic oligonucleotide
aagcaacgggtgcatgaaggttcgcggaggcatcattcatccctgcacga

SEQ ID NO: 253778 - DNA, 50 bp, Artificial
  Synthetic oligonucleotide
aacttcgctgccagggggagtacggccttcttcagaccagtgctgctcgc

SEQ ID NO: 253779 - DNA, 50 bp, Artificial
  Synthetic oligonucleotide
aactgtctgacgtgagtaggtgctggctgcatgggggtatccgccgttga

SEQ ID NO: 253780 - DNA, 50 bp, Artificial
  Synthetic oligonucleotide
aactgaggcaggtatccaactgcaagcggtagggccgtgcgaagctcagc

SEQ ID NO: 253781 - DNA, 50 bp, Artificial
  Synthetic oligonucleotide
aactgaggaggggcacggcagaggctgggaaggcgctggattcgaaacgg

SEQ ID NO: 253782 - DNA, 50 bp, Artificial
  Synthetic oligonucleotide
aactccgtcgtggcccgtgtccagccaaacgacatcgcgctgccattaac

SEQ ID NO: 253783 - DNA, 50 bp, Artificial
  Synthetic oligonucleotide
aactccgggggaggggaattctgcgcggccttcaaaagaagcgggcaggt

SEQ ID NO: 253784 - DNA, 50 bp, Artificial
  Synthetic oligonucleotide
aactaaaggtgcaacgtgcgggtgcaaaattcgccagggttgcgggccgg

SEQ ID NO: 253785 - DNA, 50 bp, Artificial
  Synthetic oligonucleotide
aacgtgacggcatgcgagacagccctctcaaagtagcctgcagccggttt

SEQ ID NO: 253786 - DNA, 55 bp, Artificial
  Synthetic oligonucleotide
cgctcctggccttatgtaatgaaggagccttccaacaagaattatacgtcctaca

SEQ ID NO: 253787 - DNA, 50 bp, Artificial
  Synthetic oligonucleotide
aacgtctcaagggcaagccacgtgattcgtgcgttgggcaccctctcctc

SEQ ID NO: 253788 - DNA, 50 bp, Artificial
  Synthetic oligonucleotide
aacggcctgaggaacgcgaacgccggaactcctgcgatttgtgcgaggaa

SEQ ID NO: 253789 - DNA, 50 bp, Artificial
  Synthetic oligonucleotide
aacgcgcaccgggggattttacattgcggagagccgcatttccctgacgg

SEQ ID NO: 253790 - DNA, 50 bp, Artificial
  Synthetic oligonucleotide
aacgccaccctcagctaccccagcgacagttccaaagacgccagtcccgt

SEQ ID NO: 253791 - DNA, 45 bp, Artificial
  Synthetic oligonucleotide
aaccggagcggtcgccctacagacccagggtggttgaatccgggg

SEQ ID NO: 253792 - DNA, 55 bp, Artificial
  Synthetic oligonucleotide
cgggttgacgcgggtattcacgcggaaggaagcagcgatagagcgcctcgtttat

SEQ ID NO: 253793 - DNA, 55 bp, Artificial
  Synthetic oligonucleotide
ctagattggcaagctagccagaggcctgacccagatgactatcttcaagaagtat

SEQ ID NO: 253794 - DNA, 55 bp, Artificial
  Synthetic oligonucleotide
gaaacacggcatgacggaaagaccatcaggggaaacaatctccctgcggttttcc

SEQ ID NO: 253795 - DNA, 55 bp, Artificial
  Synthetic oligonucleotide
gaactcacttcggaattctagttcacctgcccgtgtacccagggtgccggctcgt

SEQ ID NO: 253796 - DNA, 55 bp, Artificial
  Synthetic oligonucleotide
gacaaatagtgcggtctcctactacatgagcccaataagcaataaataggtatcc

SEQ ID NO: 253797 - DNA, 55 bp, Artificial
  Synthetic oligonucleotide
gaccaatggggcctgggtgaggagtacaccattcccggtgagttcaagcttccgc

SEQ ID NO: 253798 - DNA, 55 bp, Artificial
  Synthetic oligonucleotide
gaggatgaaagcggcaggctgactgcgagtctccagcacgagggcagggattgga

SEQ ID NO: 253799 - DNA, 55 bp, Artificial
  Synthetic oligonucleotide
ttccattcctccagaagcaacgccaaacttctcttttccgaaccatgcagtaaaa

SEQ ID NO: 253800 - DNA, 55 bp, Artificial
  Synthetic oligonucleotide
agagatgacggacagattctgcctcaacctgtcgtgaatgtttcgagtttggccc

SEQ ID NO: 253801 - DNA, 55 bp, Artificial
  Synthetic oligonucleotide
gcagaggggaccaaggttctccagtacaatcgggacgttcgccccattctggcgg

SEQ ID NO: 253802 - DNA, 55 bp, Artificial
  Synthetic oligonucleotide
gcgccttcgacagtggggagatcattcctcgagtggaacctcaagcgccggaatc

SEQ ID NO: 253803 - DNA, 55 bp, Artificial
  Synthetic oligonucleotide
tgcggagcctgtacggagcattgccccaccaaggccctttacacggtgccctata

SEQ ID NO: 253804 - DNA, 55 bp, Artificial
  Synthetic oligonucleotide
ggatgagacggttttatccctgttccgtgtgacataaaagcgcaatacctttccg

SEQ ID NO: 253805 - DNA, 55 bp, Artificial
  Synthetic oligonucleotide
ggcgaacctcgtaaaatttatatcgcggcggataagagcaacttcaacgagtccc

SEQ ID NO: 253806 - DNA, 55 bp, Artificial
  Synthetic oligonucleotide
ggggaatttccgcggttgcaagtcgtgggcgcgaaaagtacttgtgatgatggcg

SEQ ID NO: 253807 - DNA, 55 bp, Artificial
  Synthetic oligonucleotide
gtgggtggctacaacagttccaacacaacgcatctggtggatattgccagggagc

SEQ ID NO: 253808 - DNA, 53 bp, Artificial
  Synthetic oligonucleotide
cacaaaccattgtagtcccgcttaaagatggagggcatctaagaccatttgcg

SEQ ID NO: 253809 - DNA, 53 bp, Artificial
  Synthetic oligonucleotide
tctcctttaatcgggctggacgagcctgagacaactgaacgcaccgtgtctcc

SEQ ID NO: 253810 - DNA, 52 bp, Artificial
  Synthetic oligonucleotide
agatcattcgtgccgtcgtgagcatggtgactacgtcatccctgtgcccgaa

SEQ ID NO: 253811 - DNA, 53 bp, Artificial
  Synthetic oligonucleotide
aatcccacgagcttttgtggttggctaccggattgcgttccgtgggttcttcc

SEQ ID NO: 253812 - DNA, 52 bp, Artificial
  Synthetic oligonucleotide
aagtcctaaggtttgtgcgcttcgctgctcaaactggcagtctgtccgattt

SEQ ID NO: 253813 - DNA, 52 bp, Artificial
  Synthetic oligonucleotide
agctcagcactgtagcccgatgggacgacggcgtaacctcattcagatagtg

SEQ ID NO: 253814 - DNA, 52 bp, Artificial
  Synthetic oligonucleotide
agggacggcttccaccgtatgcagatagacgcctctccggccaactatgatc

SEQ ID NO: 253815 - DNA, 52 bp, Artificial
  Synthetic oligonucleotide
gcggaagccattgtcatctccgcccggattgaagaggaactcatcgacgtct

SEQ ID NO: 253816 - DNA, 52 bp, Artificial
  Synthetic oligonucleotide
aacaaccggactacgcccgtagcgacctcacatggtcagaactcaagtcttg

SEQ ID NO: 253817 - DNA, 51 bp, Artificial
  Synthetic oligonucleotide
tcgaactcgccacggagaactactcgtccttccttaccaaggggttcggta

SEQ ID NO: 253818 - DNA, 51 bp, Artificial
  Synthetic oligonucleotide
ccgccactacgtcacgggcaatgagcgcttcctcccgttcaaattgccacc

SEQ ID NO: 253819 - DNA, 51 bp, Artificial
  Synthetic oligonucleotide
gatccagctcttcttagccataagttcggcggaataagtagagggacgggg

SEQ ID NO: 253820 - DNA, 51 bp, Artificial
  Synthetic oligonucleotide
cgtctgcctcgacagtcgtgaacttcgcacaaacctgggtgctgtgacagt

SEQ ID NO: 253821 - DNA, 51 bp, Artificial
  Synthetic oligonucleotide
aaggcattccagtccgggcctggggacagtttccattttcccgcggtcacc

SEQ ID NO: 253822 - DNA, 55 bp, Artificial
  Synthetic oligonucleotide
aatcgggatcctgcggtcgtcaaactctggtgcccgctgatggcagagcacccga

SEQ ID NO: 253823 - DNA, 51 bp, Artificial
  Synthetic oligonucleotide
aagccctttccgcagatcccgtttcttcagaccatacggatacaagcatta

SEQ ID NO: 253824 - DNA, 50 bp, Artificial
  Synthetic oligonucleotide
acggggttcccacggaccaggtagccgcttattacaaaaggcgggccaga

SEQ ID NO: 253825 - DNA, 50 bp, Artificial
  Synthetic oligonucleotide
acgggtgatggtcgggcctcgggtaatatccccaggcgtcacgtccacgc

SEQ ID NO: 253826 - DNA, 50 bp, Artificial
  Synthetic oligonucleotide
acgtccttttcccgtttcggagtggccagcagcgacaagtcccacgtgga

SEQ ID NO: 253827 - DNA, 50 bp, Artificial
  Synthetic oligonucleotide
acgcgccgtcattaactccacccacgcccattaccggaagcacatgcgca

SEQ ID NO: 253828 - DNA, 50 bp, Artificial
  Synthetic oligonucleotide
agacggcacggctttttgtggaacggggtctggtcaatcatggctgggcc

SEQ ID NO: 253829 - DNA, 50 bp, Artificial
  Synthetic oligonucleotide
agagtagcgcaattacagttcagggcaagcggaaaacaaccggcgccccc

SEQ ID NO: 253830 - DNA, 50 bp, Artificial
  Synthetic oligonucleotide
agattagtccccacccgcacatcgctcccattggagaaagccaggcggct

SEQ ID NO: 253831 - DNA, 50 bp, Artificial
  Synthetic oligonucleotide
agcacggggctgcgctgttcctccgtcgtggtttcagacacataacggtt

SEQ ID NO: 253832 - DNA, 50 bp, Artificial
  Synthetic oligonucleotide
agcatcccattccgttctggcgactccgggagcatccaccagcacgcgta

SEQ ID NO: 253833 - DNA, 55 bp, Artificial
  Synthetic oligonucleotide
ccacaacccgaccacttgagctgaaacttcacgcctcctcagcgcgttgcctcac

SEQ ID NO: 253834 - DNA, 50 bp, Artificial
  Synthetic oligonucleotide
agcattcccggcaaaaatactgcggtggtgacaggggtctgcctggcgaa

SEQ ID NO: 253835 - DNA, 50 bp, Artificial
  Synthetic oligonucleotide
agcccggagagtccgttcatatgtgtgggggacaccgcggaaggcgtcat

SEQ ID NO: 253836 - DNA, 50 bp, Artificial
  Synthetic oligonucleotide
agccgcggggtgtacaaagccacacgcgtgggactgatattcatcacgga

SEQ ID NO: 253837 - DNA, 50 bp, Artificial
  Synthetic oligonucleotide
agcgcgagaccgggaccctccgcagatggtacggtactcacaccgtccgc

SEQ ID NO: 253838 - DNA, 50 bp, Artificial
  Synthetic oligonucleotide
agctctactgccacggatcccacggaggttgccccggcatgaatctggct

SEQ ID NO: 253839 - DNA, 50 bp, Artificial
  Synthetic oligonucleotide
agcttccttcctcccgggttggaaccatgtcttgcgcaggcggtaaacgc

SEQ ID NO: 253840 - DNA, 50 bp, Artificial
  Synthetic oligonucleotide
aggcatcctggtccggacatgtcagcctgtcccggtgagtgacggcataa

SEQ ID NO: 253841 - DNA, 50 bp, Artificial
  Synthetic oligonucleotide
aggccgtaatagtgaggacggagatgagcggccccttttaccgggcgggc

SEQ ID NO: 253842 - DNA, 50 bp, Artificial
  Synthetic oligonucleotide
aggcgatatacgaccgctatccaaatgccaagagccgcccggacgaagct

SEQ ID NO: 253843 - DNA, 50 bp, Artificial
  Synthetic oligonucleotide
aggcggaagttccaaatccgtccggtcaagcatggcccaatccagccctt

SEQ ID NO: 253844 - DNA, 55 bp, Artificial
  Synthetic oligonucleotide
cccggagtttgggcttgattcacagcgccgtcttaaggcgggaggggtgctttgc

SEQ ID NO: 253845 - DNA, 50 bp, Artificial
  Synthetic oligonucleotide
agggcgcattgacattccttcccacacggggcgcatgggggccgtgaaat

SEQ ID NO: 253846 - DNA, 50 bp, Artificial
  Synthetic oligonucleotide
aacgcaggtcgcgaagctaagctgggcgggtcccaccgatgaacgctgct

SEQ ID NO: 253847 - DNA, 50 bp, Artificial
  Synthetic oligonucleotide
aacgatcttgcacgggccctacagccggaggtcgccacgggggatgagtt

SEQ ID NO: 253848 - DNA, 48 bp, Artificial
  Synthetic oligonucleotide
aaccgcggaggggaaacggctacgctttattttggcgggggtactccc

SEQ ID NO: 253849 - DNA, 50 bp, Artificial
  Synthetic oligonucleotide
aaccgcctcacggagagcaggctattctgcacgtcgtggtccgcctcagt

SEQ ID NO: 253850 - DNA, 50 bp, Artificial
  Synthetic oligonucleotide
aaccgaggtgtcggcatcactggcgtctggagaatagcgccaagcacccc

SEQ ID NO: 253851 - DNA, 50 bp, Artificial
  Synthetic oligonucleotide
aaccgaggcggtcgccctacaacccagggtggttgaatccgaggccagga

SEQ ID NO: 253852 - DNA, 50 bp, Artificial
  Synthetic oligonucleotide
aaccgaggcggtcgccctacaacccaaggtcttcgccagccggtaactga

SEQ ID NO: 253853 - DNA, 50 bp, Artificial
  Synthetic oligonucleotide
aaccctgggtacgtctcccgcacaggccattgagagatcgccagactggg

SEQ ID NO: 253854 - DNA, 50 bp, Artificial
  Synthetic oligonucleotide
aacccggccagtcgcacatggttgcagccgccacagcgtacacttgcgtc

SEQ ID NO: 253855 - DNA, 55 bp, Artificial
  Synthetic oligonucleotide
cctccgagtaacttccggcggcgcactcattacggcgatggataccagaggattc

SEQ ID NO: 253856 - DNA, 50 bp, Artificial
  Synthetic oligonucleotide
aaccaacgccctcgcgagatccgcccatctggcctagcagcctgaacata

SEQ ID NO: 253857 - DNA, 50 bp, Artificial
  Synthetic oligonucleotide
aacatccgtattccggacaggcaatcgtcagggggttcccgacggacccg

SEQ ID NO: 253858 - DNA, 50 bp, Artificial
  Synthetic oligonucleotide
aacatcacctcactgccatacggagcggccacaacacgcatcggcacgtg

SEQ ID NO: 253859 - DNA, 50 bp, Artificial
  Synthetic oligonucleotide
aacagtgcagcaggtctggcccctaccggtaccatcaccgcagggacact

SEQ ID NO: 253860 - DNA, 50 bp, Artificial
  Synthetic oligonucleotide
aacactcgggcgttgggggcgagtaccgtcactctggcagggggaggact

SEQ ID NO: 253861 - DNA, 50 bp, Artificial
  Synthetic oligonucleotide
aaatttgttccgccagctctactgccacggatcccacggaggttgccccg

SEQ ID NO: 253862 - DNA, 50 bp, Artificial
  Synthetic oligonucleotide
aaatggctggaccctgcgacagggaaacgtctggcagatacggaagggct

SEQ ID NO: 253863 - DNA, 50 bp, Artificial
  Synthetic oligonucleotide
aaatgccgcgaactgaggcaggtatccaactgcaagcggtagggccgtgc

SEQ ID NO: 253864 - DNA, 50 bp, Artificial
  Synthetic oligonucleotide
aaaggtggacggaagaggcgacattcgcaagcgagtcaggcgtagccccc

SEQ ID NO: 253865 - DNA, 50 bp, Artificial
  Synthetic oligonucleotide
aaaggtcctggtcgtgccattcaggctcaacgagcccgtaccctcgatgg

SEQ ID NO: 253866 - DNA, 55 bp, Artificial
  Synthetic oligonucleotide
cctggacgtctctctgccggagaagcggaaagatggcccatggcacatgacaggt

SEQ ID NO: 253867 - DNA, 50 bp, Artificial
  Synthetic oligonucleotide
aaagccgtcgagttgcgcactcgtctccacacctacccccatcaactgcg

SEQ ID NO: 253868 - DNA, 50 bp, Artificial
  Synthetic oligonucleotide
aaacggaacgtcgcccccggttcaaggccccatccgcccagatccttcct

SEQ ID NO: 253869 - DNA, 50 bp, Artificial
  Synthetic oligonucleotide
aaacctgtcgccaaactaggcggcgcccgctaacttcaccgcgctatggc

SEQ ID NO: 253870 - DNA, 50 bp, Artificial
  Synthetic oligonucleotide
aaaccgggtcgggtacagtttctccagggctatgcggctcgcggacatgc

SEQ ID NO: 253871 - DNA, 50 bp, Artificial
  Synthetic oligonucleotide
aaaccgccagggaatatggggcgtccgcttccgcacatcccgtaacggac

SEQ ID NO: 253872 - DNA, 50 bp, Artificial
  Synthetic oligonucleotide
aaaccccttggacggtcacaacaccccacaaagacgcctgtgtccccaga

SEQ ID NO: 253873 - DNA, 50 bp, Artificial
  Synthetic oligonucleotide
aaaaccggggtgcgtagcgatgaagattggtcaggccccggcaggcacca

SEQ ID NO: 253874 - DNA, 50 bp, Artificial
  Synthetic oligonucleotide
aaaacagggaggggctgtttgacccggaagccatcaccctgcggataggc

SEQ ID NO: 253875 - DNA, 50 bp, Artificial
  Synthetic oligonucleotide
accgggaccctccgcagatggtacggtactcacaccgtccgcatttgccc

SEQ ID NO: 253876 - DNA, 50 bp, Artificial
  Synthetic oligonucleotide
accgcaggttatgggctccacggaaaccagttggccgggaagcacctcca

SEQ ID NO: 253877 - DNA, 55 bp, Artificial
  Synthetic oligonucleotide
cgaacgccctctgatgaggctccagttcgtgttgattgtgctgggtaacatcttg

SEQ ID NO: 253878 - DNA, 50 bp, Artificial
  Synthetic oligonucleotide
aatggaacgtcattcgcagccgccaaagctgggaagacctcatccgggga

SEQ ID NO: 253879 - DNA, 50 bp, Artificial
  Synthetic oligonucleotide
aatgaagctggccgctattcttgccaaggggtacagcggggacgctaccg

SEQ ID NO: 253880 - DNA, 50 bp, Artificial
  Synthetic oligonucleotide
aatccgcctggagggtagagaaacttccccgtgttgattgccgggaggga

SEQ ID NO: 253881 - DNA, 50 bp, Artificial
  Synthetic oligonucleotide
aatatggggcgtccgcttccgcacatcccgtaacggacaccctgaagcgt

SEQ ID NO: 253882 - DNA, 50 bp, Artificial
  Synthetic oligonucleotide
aatatggagggcatcacctccgcaaccggcgccatgttctggacgcacag

SEQ ID NO: 253883 - DNA, 50 bp, Artificial
  Synthetic oligonucleotide
aaggcggcccaccacattcccctgttcggctacgtattcgccacggcact

SEQ ID NO: 253884 - DNA, 50 bp, Artificial
  Synthetic oligonucleotide
aagcggtcgccaccccgggtcgcacgcgaaagccctggaactccaaggga

SEQ ID NO: 253885 - DNA, 50 bp, Artificial
  Synthetic oligonucleotide
aagcggtagggccgtgcgaagctcagcgggatcatatcctccaacccgca

SEQ ID NO: 253886 - DNA, 50 bp, Artificial
  Synthetic oligonucleotide
aagcctgtgctcgcctagcggagcggcaagaccaagatatcccactgggt

SEQ ID NO: 253887 - DNA, 50 bp, Artificial
  Synthetic oligonucleotide
aagccaccggacggctcccagaaccctgcattgccaattttcgccagtcc

SEQ ID NO: 253888 - DNA, 60 bp, Artificial
  Synthetic oligonucleotide
agcatcccaatgtggtagcaaatgcctaggaacccccattgcagccatcggaccatgatg

SEQ ID NO: 253889 - DNA, 59 bp, Artificial
  Synthetic oligonucleotide
gttatcgagattgaagtgatacgtatcgagtccttttcttgttacaccaaagagtgtca

SEQ ID NO: 253890 - DNA, 58 bp, Artificial
  Synthetic oligonucleotide
ccaattcaccctaacctccaaccatcaggtctcgcacctgattgagcaaaacaccgcc

SEQ ID NO: 253891 - DNA, 55 bp, Artificial
  Synthetic oligonucleotide
gttggaaagtatcggccacaactaccaaatcgtaatcaatgagagctggatggta

SEQ ID NO: 253892 - DNA, 55 bp, Artificial
  Synthetic oligonucleotide
gttgcgggagcggaaaggttgtactcacttcttacctatttgtacaatgagcatg

SEQ ID NO: 253893 - DNA, 55 bp, Artificial
  Synthetic oligonucleotide
gttgcctatccacaaaactaaccatcctctcggtacacatcgtaagagagtcgat

SEQ ID NO: 253894 - DNA, 55 bp, Artificial
  Synthetic oligonucleotide
gttgcacccactgcgatgaatagggtcaacaagcatgtatctgaacttctttggg

SEQ ID NO: 253895 - DNA, 55 bp, Artificial
  Synthetic oligonucleotide
gttgatagggagatcaaaacttcaccccgtcatatttatcctgtgtgtctacgtt

SEQ ID NO: 253896 - DNA, 55 bp, Artificial
  Synthetic oligonucleotide
gttgaccgtaatccgctccatggttttgcactccaattcgaagaaacattacatt

SEQ ID NO: 253897 - DNA, 55 bp, Artificial
  Synthetic oligonucleotide
gttgaccaagaccttctgcatcacgccatacgcctgtgttgtcaacgaccagtgc

SEQ ID NO: 253898 - DNA, 55 bp, Artificial
  Synthetic oligonucleotide
gttgaacgctttatgaagtttcgtcacagcgcctttaaggagacgggatcgtact

SEQ ID NO: 253899 - DNA, 55 bp, Artificial
  Synthetic oligonucleotide
gttcttgaactaggaactcatcaacgtgagcttcttgccatgtgttacctacaga

SEQ ID NO: 253900 - DNA, 55 bp, Artificial
  Synthetic oligonucleotide
gttcgtcaatcccatcgggctaaccttatccgcgcctacaattctcgggtctgcg

SEQ ID NO: 253901 - DNA, 57 bp, Artificial
  Synthetic oligonucleotide
acgatccttggaatagcgggatcttatgcctatcgggaagccacaaaacctgagccc

SEQ ID NO: 253902 - DNA, 55 bp, Artificial
  Synthetic oligonucleotide
gttcggcttacttttatccggcaagttcacccttattgctagatggtttagcact

SEQ ID NO: 253903 - DNA, 55 bp, Artificial
  Synthetic oligonucleotide
gttcgagtatacaacccaacacttagtcgatatggatggcagtcaacacatactg

SEQ ID NO: 253904 - DNA, 54 bp, Artificial
  Synthetic oligonucleotide
gttcctgaaagcggaataattacttggtgctttggctttaagaccgatgaaagt

SEQ ID NO: 253905 - DNA, 55 bp, Artificial
  Synthetic oligonucleotide
gttcatccgagctgaccaaagagagatttgtttcgctggacggcttaacggagag

SEQ ID NO: 253906 - DNA, 55 bp, Artificial
  Synthetic oligonucleotide
gttcagtcgattgggcaacctccgttttgggctcagagcttgtcgactgcggaga

SEQ ID NO: 253907 - DNA, 55 bp, Artificial
  Synthetic oligonucleotide
gttcacgctacctagctctactaccgtacactgacaagcatcagtaatcggttcc

SEQ ID NO: 253908 - DNA, 55 bp, Artificial
  Synthetic oligonucleotide
gttatttactcagtggtggcgctcagagtggttgcatagtgagcactgcggctcc

SEQ ID NO: 253909 - DNA, 55 bp, Artificial
  Synthetic oligonucleotide
gttatggctctctaatacatacgcggcgacttgttgcagccgtttgcttaattcg

SEQ ID NO: 253910 - DNA, 55 bp, Artificial
  Synthetic oligonucleotide
gttatcagatgtcgtattagtcatggttcgggtactcatgctgtatccttgtttc

SEQ ID NO: 253911 - DNA, 55 bp, Artificial
  Synthetic oligonucleotide
gttagtgcaggccatagatagttgataacggccatttctaaggcttgatgtcggc

SEQ ID NO: 253912 - DNA, 60 bp, Artificial
  Synthetic oligonucleotide
acgatgtgctctagtgagataccttcactcatcaagatggttatcacgtcatataactcc

SEQ ID NO: 253913 - DNA, 55 bp, Artificial
  Synthetic oligonucleotide
gttagtgattgtggtggtagatcagccaatgactcatgcagtgttcagttcgggg

SEQ ID NO: 253914 - DNA, 54 bp, Artificial
  Synthetic oligonucleotide
gttaggtaagtttcgaacgccaagcctacgttatacaaaatacactgcgcccta

SEQ ID NO: 253915 - DNA, 55 bp, Artificial
  Synthetic oligonucleotide
gttagaacagcattgggctgcgaacgtggcgtcagttttccattcgcgagataag

SEQ ID NO: 253916 - DNA, 52 bp, Artificial
  Synthetic oligonucleotide
gttacttgtgcccgtaaaagcccaagagcgacattataaaaccgttaacgag

SEQ ID NO: 253917 - DNA, 55 bp, Artificial
  Synthetic oligonucleotide
gttacgagcagctaggaatagattctcatctacttcgctagtcacgataagcgcg

SEQ ID NO: 253918 - DNA, 55 bp, Artificial
  Synthetic oligonucleotide
gttaattcgtgacgaaatgcgcgtactaccttcaattgaccctcacttcgaagtg

SEQ ID NO: 253919 - DNA, 55 bp, Artificial
  Synthetic oligonucleotide
gttaagctagcgaacaaaggttaccgtgaagctctactagaagataacggcttcc

SEQ ID NO: 253920 - DNA, 55 bp, Artificial
  Synthetic oligonucleotide
gtgttgattatgatagaccgttggagcgctatcaatgtcgagattgtcagttatc

SEQ ID NO: 253921 - DNA, 55 bp, Artificial
  Synthetic oligonucleotide
gtgttcgaggcgcagaggaactaagaacgttggcaaaagcgtcgcgtttcgagcc

SEQ ID NO: 253922 - DNA, 55 bp, Artificial
  Synthetic oligonucleotide
gtgtggcctgcaatcactgttgagtgacattcgatataggcttcccaccctaacg

SEQ ID NO: 253923 - DNA, 55 bp, Artificial
  Synthetic oligonucleotide
ccaattaacagccctaaagttcaacaagtcggtttgagtcctaaagcacgagcaa

SEQ ID NO: 253924 - DNA, 55 bp, Artificial
  Synthetic oligonucleotide
gtgtggcactacagggttcataacagctaggcaagagtagagtatacgcctttgc

SEQ ID NO: 253925 - DNA, 55 bp, Artificial
  Synthetic oligonucleotide
gtgtgcccgttattgagcagcccaaccacttgcccttgataattgagcgtgaaag

SEQ ID NO: 253926 - DNA, 55 bp, Artificial
  Synthetic oligonucleotide
tagccataagcgagacgataaaccaattatttagtgaaggcgaacaagttacagg

SEQ ID NO: 253927 - DNA, 55 bp, Artificial
  Synthetic oligonucleotide
tagaggaaagctaggtcaatttatgtcgtcatctgctgtttctaagatacttgcc

SEQ ID NO: 253928 - DNA, 55 bp, Artificial
  Synthetic oligonucleotide
tagaccacggtccattcatgtcagaaacattacgtatcgacagcacggttgatcg

SEQ ID NO: 253929 - DNA, 55 bp, Artificial
  Synthetic oligonucleotide
tagaaattcgctcactaactaagacatcgtaagatttgatcgcccctctcgcccc

SEQ ID NO: 253930 - DNA, 55 bp, Artificial
  Synthetic oligonucleotide
tactggtacatcgctacaaggaacatcataaacccctgaagctaagacacttagc

SEQ ID NO: 253931 - DNA, 55 bp, Artificial
  Synthetic oligonucleotide
tactcggtgtgaaattaccgctactgggtgtagggaatccaattttgtccaagag

SEQ ID NO: 253932 - DNA, 55 bp, Artificial
  Synthetic oligonucleotide
tactcagcggttttggtatggagttcagtgcgcttggtgagttagccgtggtgca

SEQ ID NO: 253933 - DNA, 55 bp, Artificial
  Synthetic oligonucleotide
tacgcttaagcagtgccataatcgctggctagcatacagtgaactggtgcgattg

SEQ ID NO: 253934 - DNA, 60 bp, Artificial
  Synthetic oligonucleotide
gcgaagattagagcacttactgccgctgtcattgcgcctattgggttggcaatcattacc

SEQ ID NO: 253935 - DNA, 55 bp, Artificial
  Synthetic oligonucleotide
tacgcatcacgctcagagccttcaggctgacgccaaggttcacgcagtacttgcc

SEQ ID NO: 253936 - DNA, 55 bp, Artificial
  Synthetic oligonucleotide
tacgcatcaagcgaagtcgggtgaagtcgtgtcttacgtcgatattaaagagtgc

SEQ ID NO: 253937 - DNA, 55 bp, Artificial
  Synthetic oligonucleotide
taccggtaggtgaacaatatcgctactctgttggtgcatccacatcatgggacgg

SEQ ID NO: 253938 - DNA, 55 bp, Artificial
  Synthetic oligonucleotide
taccgcgtatcgaagaggggtacggaacattaggctactgggttggcgtgccaca

SEQ ID NO: 253939 - DNA, 54 bp, Artificial
  Synthetic oligonucleotide
taccccgaataaatctggtcgattaggccgccgtgttaaattacgtaagcactc

SEQ ID NO: 253940 - DNA, 54 bp, Artificial
  Synthetic oligonucleotide
taccccagaactccctccaatttcaacgcacttggttattattcctctagggaa

SEQ ID NO: 253941 - DNA, 55 bp, Artificial
  Synthetic oligonucleotide
taccactgtggaccacgtacgtaaaacaccttaccatcagagagtaagcaacact

SEQ ID NO: 253942 - DNA, 55 bp, Artificial
  Synthetic oligonucleotide
tacacgttacatggggatgaccccaaagagtcagagttatttattcacctttggt

SEQ ID NO: 253943 - DNA, 55 bp, Artificial
  Synthetic oligonucleotide
gttgggaagctgcatgctgactaatttacctcctggcagccaaacgctaagacgg

SEQ ID NO: 253944 - DNA, 55 bp, Artificial
  Synthetic oligonucleotide
gttgttcgtgcaacatacattgaagggtacccacctgtaatcgaattgcacgggt

SEQ ID NO: 253945 - DNA, 60 bp, Artificial
  Synthetic oligonucleotide
gcgaaacgctagggcgtttgcgccttgcggctgcttgcagcggccttctgccttgcccaa

SEQ ID NO: 253946 - DNA, 55 bp, Artificial
  Synthetic oligonucleotide
gtttaaacaggtagagccaacgcgcaatgagccgcatgggtgtgtcgatggcttc

SEQ ID NO: 253947 - DNA, 55 bp, Artificial
  Synthetic oligonucleotide
gtttaaatcatggttaacggaggttgataagtagcgcaatgttcctgttgcaccg

SEQ ID NO: 253948 - DNA, 55 bp, Artificial
  Synthetic oligonucleotide
gtttgaatacctagttcgtcacaacccaggtcaagtgctaaacaacgcgtactca

SEQ ID NO: 253949 - DNA, 55 bp, Artificial
  Synthetic oligonucleotide
gtttgattaccgcaagaacggtaacgagcagcgcgacacaaaataccgtgtaggc

SEQ ID NO: 253950 - DNA, 55 bp, Artificial
  Synthetic oligonucleotide
gtttgcttgcgttaggtaaggaggatagggactaaagtgagcgcacctagcatgc

SEQ ID NO: 253951 - DNA, 55 bp, Artificial
  Synthetic oligonucleotide
gttttatcacggatccatgcttctttgacgtcaacataataagaacaccctccag

SEQ ID NO: 253952 - DNA, 55 bp, Artificial
  Synthetic oligonucleotide
gttttctggcaactgctgccaaggcgtaaaggtgcccggcatctgattgtacggc

SEQ ID NO: 253953 - DNA, 55 bp, Artificial
  Synthetic oligonucleotide
gttttgtgctatcgggctgttttgaaggtaacgtgacaaccgaagagttgtgcca

SEQ ID NO: 253954 - DNA, 55 bp, Artificial
  Synthetic oligonucleotide
taaacgtttatgcgatttacgcgacacgaaaacaagtaacacctttacagagagc

SEQ ID NO: 253955 - DNA, 55 bp, Artificial
  Synthetic oligonucleotide
taaaggttgaatcacaaatgggtaacgatagatatctgggcgaggtaacacgggg

SEQ ID NO: 253956 - DNA, 60 bp, Artificial
  Synthetic oligonucleotide
tcaatcgcgtttgagggtaaaattgatggtgaatatcgtcacattaaggcgctatttgcc

SEQ ID NO: 253957 - DNA, 55 bp, Artificial
  Synthetic oligonucleotide
taaatggcggccaaacctcttacagcgatggtgaagacctagacgttacgctaac

SEQ ID NO: 253958 - DNA, 55 bp, Artificial
  Synthetic oligonucleotide
taacccatgcgtagaggttttgtgagaacttagagccttgttgaacgatggcccc

SEQ ID NO: 253959 - DNA, 55 bp, Artificial
  Synthetic oligonucleotide
taaccccatcatgcgagcatcagcgatgttaatacccgttgctttctgcttaagg

SEQ ID NO: 253960 - DNA, 55 bp, Artificial
  Synthetic oligonucleotide
taaggataagtagttgttaaccatcgggtaattcaatgcttgtgcaacgcgtacc

SEQ ID NO: 253961 - DNA, 55 bp, Artificial
  Synthetic oligonucleotide
taatacaggaacggctaagcactacttttgctctgaatgcggtatttacacgcac

SEQ ID NO: 253962 - DNA, 55 bp, Artificial
  Synthetic oligonucleotide
gtcgtcgcacagccaatcagcttaatcaattacttagccatgaacactattcagg

SEQ ID NO: 253963 - DNA, 55 bp, Artificial
  Synthetic oligonucleotide
gtcgtaaccaactccaaacttgctctatagggttaagctctggcgagtagggagg

SEQ ID NO: 253964 - DNA, 55 bp, Artificial
  Synthetic oligonucleotide
gtcggtttgaggtgcggtgcatgttgcgtcaggtagtgaatatccgcatcggaaa

SEQ ID NO: 253965 - DNA, 55 bp, Artificial
  Synthetic oligonucleotide
gtcgggcgcagcattagcacggtatcgattgagggtaaatcagtcccttcgttga

SEQ ID NO: 253966 - DNA, 55 bp, Artificial
  Synthetic oligonucleotide
gtcgcctgatagtcggttgacaggtaaagcgctgtctatggcctatgaatctcgc

SEQ ID NO: 253967 - DNA, 59 bp, Artificial
  Synthetic oligonucleotide
tcaagtttaagtttatttgactcaagcctttgttcgcgctgatggctaaattctctagc

SEQ ID NO: 253968 - DNA, 55 bp, Artificial
  Synthetic oligonucleotide
gtcgcattccttggttgtgcacgaaatgaatagcgtaatgcttccaaaacgccgc

SEQ ID NO: 253969 - DNA, 55 bp, Artificial
  Synthetic oligonucleotide
gtcgagttcaccttccgaagaaactaatgcgcatgtaagtacgcttctagacgat

SEQ ID NO: 253970 - DNA, 54 bp, Artificial
  Synthetic oligonucleotide
gtcctttctatgggtttactagtccttagtggcttaaacattggcatttagaaa

SEQ ID NO: 253971 - DNA, 55 bp, Artificial
  Synthetic oligonucleotide
gtccgtatgtgcaagcctccttacagcttcaagcagcgtttggcctaagacgcga

SEQ ID NO: 253972 - DNA, 55 bp, Artificial
  Synthetic oligonucleotide
gtccgtaacgtttagagcgtcatatacactaggtacatcgctctgtgggaactct

SEQ ID NO: 253973 - DNA, 55 bp, Artificial
  Synthetic oligonucleotide
gtccgcgcagggatttagtttgcgacttgattcccttactcttgagcctgcgctc

SEQ ID NO: 253974 - DNA, 55 bp, Artificial
  Synthetic oligonucleotide
gtccgcataagcacgcttatttacgcgatcactgtaagtgaacggcaagatgtag

SEQ ID NO: 253975 - DNA, 55 bp, Artificial
  Synthetic oligonucleotide
gtccataaccctagccgcagaagagatgggtatgactcaacctggcgtaagcggc

SEQ ID NO: 253976 - DNA, 55 bp, Artificial
  Synthetic oligonucleotide
gtccactacttacgatttacttagcacgctttaacaagaaagccgtactggctgg

SEQ ID NO: 253977 - DNA, 54 bp, Artificial
  Synthetic oligonucleotide
gtccacgttaccttggtcgtgttatcaagaacgtaaacgctaaagctgaaacac

SEQ ID NO: 253978 - DNA, 52 bp, Artificial
  Synthetic oligonucleotide
ccaagtccgccatacgggattcggccaaacccaagtgggttcttttaatgcc

SEQ ID NO: 253979 - DNA, 55 bp, Artificial
  Synthetic oligonucleotide
gtccaccagaagtggtgccgtttagaagctcaatggacatgcaactgacagatgc

SEQ ID NO: 253980 - DNA, 55 bp, Artificial
  Synthetic oligonucleotide
gtacttacagcattacaactgaatcactgacgctgcctgagttcctatctcgtcg

SEQ ID NO: 253981 - DNA, 55 bp, Artificial
  Synthetic oligonucleotide
gtagccaattgaattaaggcttctgggtcgggttttggcgcgcagtgttctcgtg

SEQ ID NO: 253982 - DNA, 55 bp, Artificial
  Synthetic oligonucleotide
gtagctgttcactgaacgaatgtagctgtctaagctgtcttgtgaaacgagagcc

SEQ ID NO: 253983 - DNA, 55 bp, Artificial
  Synthetic oligonucleotide
gtaggggctttgtttccacttccgcttcacgaaattgattaattgcgaacagaac

SEQ ID NO: 253984 - DNA, 55 bp, Artificial
  Synthetic oligonucleotide
gtagtcaagtaaatattgcgctttaaccagtcgattatactccgtcagagcctgt

SEQ ID NO: 253985 - DNA, 55 bp, Artificial
  Synthetic oligonucleotide
gtagtggtgtggttgctaaccacggtacttaatttgctaaggatagatgggcctt

SEQ ID NO: 253986 - DNA, 55 bp, Artificial
  Synthetic oligonucleotide
gtataatgcgcgacctttgatagccttgtatgggtttccatagcggtataagacc

SEQ ID NO: 253987 - DNA, 55 bp, Artificial
  Synthetic oligonucleotide
gtatcctgtagttcttatgcaaatatcgtcccgcctctctctcaagactccctcg

SEQ ID NO: 253988 - DNA, 54 bp, Artificial
  Synthetic oligonucleotide
gtatctgaacttctttgggtttgacgaattaccgttttctatcgtccccaatgc

SEQ ID NO: 253989 - DNA, 60 bp, Artificial
  Synthetic oligonucleotide
tcaaggcattatagtggtctcgtaagaacgagaccacttgctgcttccaatgctgctcta

SEQ ID NO: 253990 - DNA, 55 bp, Artificial
  Synthetic oligonucleotide
gtatgttggggagggcactcaattaaccctatagagtatcaatatacgcgcgaag

SEQ ID NO: 253991 - DNA, 55 bp, Artificial
  Synthetic oligonucleotide
gtattaaaagatactgttcgtgacatcagccggtatatgggacgagcgataatca

SEQ ID NO: 253992 - DNA, 55 bp, Artificial
  Synthetic oligonucleotide
gtattacggcctacccacattactcgatgtttcactagaccattattgggcagga

SEQ ID NO: 253993 - DNA, 55 bp, Artificial
  Synthetic oligonucleotide
gtcaaaggaatgaggcagggagcactatagtagcgggaatgctgcaagtaagacc

SEQ ID NO: 253994 - DNA, 55 bp, Artificial
  Synthetic oligonucleotide
gtcaagtgggcgatattatcttagagcaagacgtatggcttggttctcgagtgag

SEQ ID NO: 253995 - DNA, 55 bp, Artificial
  Synthetic oligonucleotide
gtcacccgcaagtcatatcacgactcgcttacaagtcactagcgagtcactaacg

SEQ ID NO: 253996 - DNA, 55 bp, Artificial
  Synthetic oligonucleotide
gtcactcacctccgcacttatcgaaatatgtgacaaggtaacacgtaacgttacg

SEQ ID NO: 253997 - DNA, 55 bp, Artificial
  Synthetic oligonucleotide
gtcatcttcggaggcattcgtcagcgagacaacgaagttcgccgtatcaccttcg

SEQ ID NO: 253998 - DNA, 55 bp, Artificial
  Synthetic oligonucleotide
gtgtcccttctaatgtgtatgacgctgagttagagttatttccagtgaagatgac

SEQ ID NO: 253999 - DNA, 55 bp, Artificial
  Synthetic oligonucleotide
gtgtataatttgtcgcttccgaattcgtggctggggctaattgcttgcagttagc

SEQ ID NO: 254000 - DNA, 60 bp, Artificial
  Synthetic oligonucleotide
catgccagagaacgcactcaaacagctcttaatgcaaagcgaacatctcggagtccctct

SEQ ID NO: 254001 - DNA, 57 bp, Artificial
  Synthetic oligonucleotide
acgcgcagcctttgtttcacgccgacggcaccactccctactcacaagaatgtttgg

SEQ ID NO: 254002 - DNA, 55 bp, Artificial
  Synthetic oligonucleotide
gtgtagtaacacatcacgtaagacaagttctgttgtgtcaattcggatctgagcg

SEQ ID NO: 254003 - DNA, 55 bp, Artificial
  Synthetic oligonucleotide
gtgtaggtcaatacaggcatagccatcaaccgcccagagtgcccggatttgaagc

SEQ ID NO: 254004 - DNA, 55 bp, Artificial
  Synthetic oligonucleotide
gtgtagcaccaatggctaaacgtactccgatttctcgcgtacgctcggtcaccgc

SEQ ID NO: 254005 - DNA, 55 bp, Artificial
  Synthetic oligonucleotide
gtggtggttttggatagtcagtgaatcgcattgaccactggctacgacagtgcct

SEQ ID NO: 254006 - DNA, 55 bp, Artificial
  Synthetic oligonucleotide
gtggtggacgtgaagcggcggcggggattaatgtgttgccgagagagtcgattgc

SEQ ID NO: 254007 - DNA, 55 bp, Artificial
  Synthetic oligonucleotide
gtgggtttgaacattggctattgggagccttatgccattactgatgtgactcgcg

SEQ ID NO: 254008 - DNA, 55 bp, Artificial
  Synthetic oligonucleotide
gtgggcatttgcgcgtaccgggtttagatccacaagcgacatatcgagtgacggt

SEQ ID NO: 254009 - DNA, 55 bp, Artificial
  Synthetic oligonucleotide
gtggctctaccggtgactcacttggctggctatgttcatgcgcagaatattcccc

SEQ ID NO: 254010 - DNA, 55 bp, Artificial
  Synthetic oligonucleotide
gtggcggagctgctcaatcaaagcgtgcccaagtacaacaccagctatgtattgg

SEQ ID NO: 254011 - DNA, 55 bp, Artificial
  Synthetic oligonucleotide
gtggcgctattacgactagcgatgatgagctggcagaaaccttgcgtgcccttcg

SEQ ID NO: 254012 - DNA, 52 bp, Artificial
  Synthetic oligonucleotide
gcctttcatcctattaacgaacgtttttataagggaaagctaaatacatact

SEQ ID NO: 254013 - DNA, 53 bp, Artificial
  Synthetic oligonucleotide
gtggcaggtaaaggcactaattccaactaggcgtaaagcccgataaaaccgcc

SEQ ID NO: 254014 - DNA, 55 bp, Artificial
  Synthetic oligonucleotide
gtgcttcttcaagttcaacccatcgttttgggcttactggaccatgactagtcac

SEQ ID NO: 254015 - DNA, 55 bp, Artificial
  Synthetic oligonucleotide
gtgctcgttccatcgatgaactgggaagtgcgaaatcaagcacgaatgcacgtta

SEQ ID NO: 254016 - DNA, 55 bp, Artificial
  Synthetic oligonucleotide
gtgctccctacatcgggttgatagcaccagcgattagcaaggtgaaagtacaact

SEQ ID NO: 254017 - DNA, 55 bp, Artificial
  Synthetic oligonucleotide
gtcgtcttggtggctttctccgcctgtaaactcagttgcgctaagttggtgtgag

SEQ ID NO: 254018 - DNA, 55 bp, Artificial
  Synthetic oligonucleotide
gtcgtgatcagacaaggcttcaagcacccattggaatgccttattatcatcactg

SEQ ID NO: 254019 - DNA, 55 bp, Artificial
  Synthetic oligonucleotide
gtcgttaataatgagtcttttaatgtgcgtttcaaggcgagttgtgccacgtcag

SEQ ID NO: 254020 - DNA, 55 bp, Artificial
  Synthetic oligonucleotide
gtctcgcccgatagcaagttgacaggaaaggcactctctatggcgtttgaatcac

SEQ ID NO: 254021 - DNA, 55 bp, Artificial
  Synthetic oligonucleotide
gtctgacaggtcgactgccacaagtatgtgtttgtaactcatattgctatctcct

SEQ ID NO: 254022 - DNA, 55 bp, Artificial
  Synthetic oligonucleotide
gtctgacatcgcaggctatgtaactcgccaagtcatttcggtaaacggaggccta

SEQ ID NO: 254023 - DNA, 55 bp, Artificial
  Synthetic oligonucleotide
tcaaactcgatctgagtgcgttaagtcgaaacgaagaacgagcgtaaaagaaacg

SEQ ID NO: 254024 - DNA, 55 bp, Artificial
  Synthetic oligonucleotide
gtcttcattattcgcatcccatgtctgcttcgtatcacaccacgaacagcctacg

SEQ ID NO: 254025 - DNA, 55 bp, Artificial
  Synthetic oligonucleotide
gtgaaacacgctggggattgatggtggtaaggcttaagcggggataaacgtgttg

SEQ ID NO: 254026 - DNA, 54 bp, Artificial
  Synthetic oligonucleotide
gtgaacgctgcattttaaccacggttgaagtgaagaaaggggcgtttaggccaa

SEQ ID NO: 254027 - DNA, 55 bp, Artificial
  Synthetic oligonucleotide
gtgaccttaaaccgattgatgacattactttgaagttgccgcgtcacctcggcct

SEQ ID NO: 254028 - DNA, 55 bp, Artificial
  Synthetic oligonucleotide
gtgacgcgaaaagggcgagacaactcttcaaccacatgaaaactctcgacacgaa

SEQ ID NO: 254029 - DNA, 55 bp, Artificial
  Synthetic oligonucleotide
gtgactgcaaactgatcaacccaaattcacagcgcatcgtgcaactcacttatca

SEQ ID NO: 254030 - DNA, 55 bp, Artificial
  Synthetic oligonucleotide
gtgagttgttcactgattggtaaatgtgtgccgaacttgtgtcgtagtgattaat

SEQ ID NO: 254031 - DNA, 55 bp, Artificial
  Synthetic oligonucleotide
gtgcccttttgcgagaagaacattataccgatgctttgcgttgtagtgatcttgc

SEQ ID NO: 254032 - DNA, 55 bp, Artificial
  Synthetic oligonucleotide
gtgcgtcctaacgaactaagcatcagctttgcaccaaaaggctatgcatcaatgg

SEQ ID NO: 254033 - DNA, 55 bp, Artificial
  Synthetic oligonucleotide
gtgctattccgtgcgatgacacaacttgagaatacggtcatgacatcagatgatg

SEQ ID NO: 254034 - DNA, 58 bp, Artificial
  Synthetic oligonucleotide
acgcgtacagtcgaaccgccgatatggcacaaggggccacctatccccatgtcattac

SEQ ID NO: 254035 - DNA, 55 bp, Artificial
  Synthetic oligonucleotide
ttaatcgctaataacccgttggttggtcttcttatactactcaggagctagccac

SEQ ID NO: 254036 - DNA, 55 bp, Artificial
  Synthetic oligonucleotide
ttaatactgcgcccaccatacccaacaagaacatcacaaccaatgcgatacctgt

SEQ ID NO: 254037 - DNA, 55 bp, Artificial
  Synthetic oligonucleotide
ttaaggatacgactggctgatgctttggatttcatgcccaattcataacggatat

SEQ ID NO: 254038 - DNA, 55 bp, Artificial
  Synthetic oligonucleotide
ttaacctgaatatcaccggtaatgatgattattttgctccggtgtttactatggc

SEQ ID NO: 254039 - DNA, 55 bp, Artificial
  Synthetic oligonucleotide
ttaaatttgttgggcaatgccaccgcctctgtgggcgctaagctctcggattact

SEQ ID NO: 254040 - DNA, 55 bp, Artificial
  Synthetic oligonucleotide
tgttgcgtcgttcttaagaagaacaaacttagctttagagtctagttctgcgtcg

SEQ ID NO: 254041 - DNA, 55 bp, Artificial
  Synthetic oligonucleotide
tgttcttccttaaccctgtaggccacattcatggttgggtaagtgatgcatgggg

SEQ ID NO: 254042 - DNA, 55 bp, Artificial
  Synthetic oligonucleotide
tgttccccttaagctaacctatttgctggctctaggtattaatatctgtgcgcca

SEQ ID NO: 254043 - DNA, 55 bp, Artificial
  Synthetic oligonucleotide
tgttacgcaactaactaaggctctggttacactcagtgacgcggtaacacgtatc

SEQ ID NO: 254044 - DNA, 55 bp, Artificial
  Synthetic oligonucleotide
tgtgtaagacgcaccgataccacatggaccgtaccagatcatgtctttagaccag

SEQ ID NO: 254045 - DNA, 59 bp, Artificial
  Synthetic oligonucleotide
tcaaactcccatgctagcacaacgttgctggatcaaatacgagagtgttacggtagggt

SEQ ID NO: 254046 - DNA, 55 bp, Artificial
  Synthetic oligonucleotide
tgtgtaaccacacaaaagccccgctcgctcgtaacagcggatatgggctgggtgg

SEQ ID NO: 254047 - DNA, 55 bp, Artificial
  Synthetic oligonucleotide
tgtgcccttaattgcgttaagtatgtcgtaagcgttttctaagtgtgcatcggat

SEQ ID NO: 254048 - DNA, 55 bp, Artificial
  Synthetic oligonucleotide
tgtgagtgttaccgctgtctatgctgtcttgtgccgacggtgtgaacagttcaag

SEQ ID NO: 254049 - DNA, 55 bp, Artificial
  Synthetic oligonucleotide
tgtcttacgttgatactcaagacgaagacgctcgtgtacaagtcatgcctatccc

SEQ ID NO: 254050 - DNA, 55 bp, Artificial
  Synthetic oligonucleotide
tgtaactcttcaccattcatcgcaactaattgataatcaccctgcgtggttagcg

SEQ ID NO: 254051 - DNA, 55 bp, Artificial
  Synthetic oligonucleotide
tggttggctcaagtgttactaagaagccatcgtcagacgctttacgaacatctgt

SEQ ID NO: 254052 - DNA, 55 bp, Artificial
  Synthetic oligonucleotide
tggagccgacaggcgagggacgagtgcaagccatgggctatgtactgaaacgtta

SEQ ID NO: 254053 - DNA, 55 bp, Artificial
  Synthetic oligonucleotide
tggatctcgccattcaaacgctagtggatttgcaacagactggacgcatgatcgg

SEQ ID NO: 254054 - DNA, 55 bp, Artificial
  Synthetic oligonucleotide
tggcaaatgctgcgtaaaggacagattgtcgacgcgcatagtatgactctttgtg

SEQ ID NO: 254055 - DNA, 55 bp, Artificial
  Synthetic oligonucleotide
tggctaatcacaagttggtcatagcttaaccccgttaaatcttgatccggccagg

SEQ ID NO: 254056 - DNA, 60 bp, Artificial
  Synthetic oligonucleotide
tcaaacacgagatgatagggctcgctttatcactaggctggtttggggggctacgctaca

SEQ ID NO: 254057 - DNA, 55 bp, Artificial
  Synthetic oligonucleotide
tggctctgcgggagcgagaaccattgcagatatagtcacaaatcagggtgtaaag

SEQ ID NO: 254058 - DNA, 55 bp, Artificial
  Synthetic oligonucleotide
tggctggttatggccttcgtttattaaccattattcaagcaccgtctcaactaga

SEQ ID NO: 254059 - DNA, 55 bp, Artificial
  Synthetic oligonucleotide
tgggatatagagtgggcgcttgtcgttgttcattaggtgccttaaatgtagggtt

SEQ ID NO: 254060 - DNA, 55 bp, Artificial
  Synthetic oligonucleotide
tgggatatggcttctgcgagattaagtaagacagacttaacggtgatgaagcgcc

SEQ ID NO: 254061 - DNA, 55 bp, Artificial
  Synthetic oligonucleotide
tgggcgaattggagtgtcagtctgggatacacaaacggacaagcgttgggattat

SEQ ID NO: 254062 - DNA, 55 bp, Artificial
  Synthetic oligonucleotide
tgggcgcgcatagattggtatcggtgttaggcccggcgataaattcgggtcgagc

SEQ ID NO: 254063 - DNA, 53 bp, Artificial
  Synthetic oligonucleotide
tgggcgtgacgttattaattcgtacaactcgaacgctacgtttaacggaagcg

SEQ ID NO: 254064 - DNA, 55 bp, Artificial
  Synthetic oligonucleotide
tgggtaactcgatgaccaaagctatctacgataagtttaagtcagcaaccccata

SEQ ID NO: 254065 - DNA, 55 bp, Artificial
  Synthetic oligonucleotide
tggtaacgcaatccaaagtatgtacgaaagcggtgcgcgtacactgtctgagttc

SEQ ID NO: 254066 - DNA, 55 bp, Artificial
  Synthetic oligonucleotide
tggtaactgttggacagggcccggtttagctgctccgagtacacactggcatggc

SEQ ID NO: 254067 - DNA, 55 bp, Artificial
  Synthetic oligonucleotide
cggtatctgtatcgttcggggaaagtagcaccaggtttcgtcctgggcctgttgc

SEQ ID NO: 254068 - DNA, 55 bp, Artificial
  Synthetic oligonucleotide
tggtactaaatggttgtgcattaacaacagaaccaatgacgcctgaatcaagtgc

SEQ ID NO: 254069 - DNA, 55 bp, Artificial
  Synthetic oligonucleotide
tggtcgatgtgtgtcgtgcgatcctgtgttggatcggttatatcaccactcatgg

SEQ ID NO: 254070 - DNA, 55 bp, Artificial
  Synthetic oligonucleotide
tggtgtatcccattaccaagaggtattagtcactggtgttggctcattaaaggcg

SEQ ID NO: 254071 - DNA, 55 bp, Artificial
  Synthetic oligonucleotide
tttgtccagagacgagctagagctgtaaggtgatagctgtgcttcccacataaaa

SEQ ID NO: 254072 - DNA, 55 bp, Artificial
  Synthetic oligonucleotide
tttgcgccttgcggctgcttgcagcggccttctgccttgcccaaaagggctttgc

SEQ ID NO: 254073 - DNA, 55 bp, Artificial
  Synthetic oligonucleotide
tttctatgcataccacagaaagtaaggttgttgcatggcacgccaattatatcga

SEQ ID NO: 254074 - DNA, 55 bp, Artificial
  Synthetic oligonucleotide
tttcggctgtggttagttgttgctgtgtagctctgagttcagttctaccgcagac

SEQ ID NO: 254075 - DNA, 55 bp, Artificial
  Synthetic oligonucleotide
tttacttaaagagctccgtgattggcttgatagcgcagttagtcgagtatcacct

SEQ ID NO: 254076 - DNA, 55 bp, Artificial
  Synthetic oligonucleotide
tttaagactggcgcagcacataaatggtgacaccgtcactcctataatccgcatt

SEQ ID NO: 254077 - DNA, 55 bp, Artificial
  Synthetic oligonucleotide
ttgttcggtttgcacaacgtttgttcagtgatgaattactagcctccccagaaga

SEQ ID NO: 254078 - DNA, 60 bp, Artificial
  Synthetic oligonucleotide
tacaagtatctgcgagcaatcgagaacgctattgatatcaagtacgaagccgatccagac

SEQ ID NO: 254079 - DNA, 55 bp, Artificial
  Synthetic oligonucleotide
ttgtcatactcggatatatactcgtctaaacacgcccgaagttctgagtgttgag

SEQ ID NO: 254080 - DNA, 55 bp, Artificial
  Synthetic oligonucleotide
ttgtatctgctagctagccgacctgagacaaatatcgacgagcgagactgagcaa

SEQ ID NO: 254081 - DNA, 55 bp, Artificial
  Synthetic oligonucleotide
ttggtaaatttcactacgaagccaaagtggatttttacgctcatcgagaggtaat

SEQ ID NO: 254082 - DNA, 55 bp, Artificial
  Synthetic oligonucleotide
ttgggtgttgagttggcctgctacatcgactggcatttacctcaagggaagcacg

SEQ ID NO: 254083 - DNA, 55 bp, Artificial
  Synthetic oligonucleotide
ttgggcctgcttagcaaatttaccagtcaagggtaacagtaaagcggtgttagtc

SEQ ID NO: 254084 - DNA, 55 bp, Artificial
  Synthetic oligonucleotide
ttggatattaagccagaaatctacggtataacacggcacagcttggagagtatcg

SEQ ID NO: 254085 - DNA, 55 bp, Artificial
  Synthetic oligonucleotide
ttgctgataagctgcttcacgtctatccgtcatcccgtcgcggccgacggccttt

SEQ ID NO: 254086 - DNA, 55 bp, Artificial
  Synthetic oligonucleotide
ttgccaagagtccgcaagaatcatgctgcatacaagtatctgcgagcaatcgaga

SEQ ID NO: 254087 - DNA, 55 bp, Artificial
  Synthetic oligonucleotide
ttaatggagtctccggcgtattgctacgatgtgttggaaagcattgtgcagcggg

SEQ ID NO: 254088 - DNA, 55 bp, Artificial
  Synthetic oligonucleotide
ttacgcttgataacgaaaagttggatgccctccctgcccataagcgtcaggtcgg

SEQ ID NO: 254089 - DNA, 60 bp, Artificial
  Synthetic oligonucleotide
taatgtggtcattaatacaggttcgcccatagctaacccgataccatacataaactgagc

SEQ ID NO: 254090 - DNA, 55 bp, Artificial
  Synthetic oligonucleotide
ttagcaagtagtccgagttcttgagcccgttgacgtctaccgagactagattacg

SEQ ID NO: 254091 - DNA, 55 bp, Artificial
  Synthetic oligonucleotide
ttaggagagcaatttcacgttattgggtttaatgttctcttactcgcgcagccac

SEQ ID NO: 254092 - DNA, 55 bp, Artificial
  Synthetic oligonucleotide
ttagtcgattttacgaaccagaataacgattggttagcattgcgccagttctccg

SEQ ID NO: 254093 - DNA, 55 bp, Artificial
  Synthetic oligonucleotide
ttatgctcgcgcatttaagtgtggcgactcaggcacaataatgagttatgagcgg

SEQ ID NO: 254094 - DNA, 53 bp, Artificial
  Synthetic oligonucleotide
ttcaatcccctactcttcgggcgagtaaaatgtaacaccgttaccgctcaccg

SEQ ID NO: 254095 - DNA, 53 bp, Artificial
  Synthetic oligonucleotide
ttcaatcttgttgtcgttagggtgttccctgtcgacgtggttaactataacgg

SEQ ID NO: 254096 - DNA, 55 bp, Artificial
  Synthetic oligonucleotide
ttcacaaggaaatagagataacacgctagacattaatccaagaacgctgggcacc

SEQ ID NO: 254097 - DNA, 55 bp, Artificial
  Synthetic oligonucleotide
ttccgtcagaaccctcttcctcaaggccatgtgaatattatgccgggctttaccg

SEQ ID NO: 254098 - DNA, 55 bp, Artificial
  Synthetic oligonucleotide
ttcgactctggctaacgactactaccactacgatccgattgtcagcgtctggtgg

SEQ ID NO: 254099 - DNA, 55 bp, Artificial
  Synthetic oligonucleotide
ttcggaaactaagatggtgttaacgggctactctttatcactagtccaagcaagc

SEQ ID NO: 254100 - DNA, 51 bp, Artificial
  Synthetic oligonucleotide
ctttcaaattgcggttaccccttaaaccaatccgtacgtcaactttctcgc

SEQ ID NO: 254101 - DNA, 55 bp, Artificial
  Synthetic oligonucleotide
ttcgtcattggggttactccttgtcagtattgttacggcccttgctataattagg

SEQ ID NO: 254102 - DNA, 55 bp, Artificial
  Synthetic oligonucleotide
ttctagaccgtttaggtagtctttcgctagtttaacgtcacaatctagtgcgtcg

SEQ ID NO: 254103 - DNA, 55 bp, Artificial
  Synthetic oligonucleotide
ttctgtcgtcgaaaagacaacgaaatatcaagctcaaatagccaccgctaacatg

SEQ ID NO: 254104 - DNA, 54 bp, Artificial
  Synthetic oligonucleotide
ttgacccttcttaagccgagggtcacctagccaactgacgttgttagtgaacct

SEQ ID NO: 254105 - DNA, 55 bp, Artificial
  Synthetic oligonucleotide
ttgatgcgccaccaattgatgttgcaccttatggttcaaccacggtgtacgtgcg

SEQ ID NO: 254106 - DNA, 55 bp, Artificial
  Synthetic oligonucleotide
tcctatgagtagcgcgatacatgcgactaataatgtataactggcatctaggatc

SEQ ID NO: 254107 - DNA, 55 bp, Artificial
  Synthetic oligonucleotide
tccctcgtattccgtcactgactgtacggtttctattagttgttcgcgcagtttg

SEQ ID NO: 254108 - DNA, 55 bp, Artificial
  Synthetic oligonucleotide
tcccaacagatcaagcttctgcttacttcatgggtgacaagtctagcaaaccaca

SEQ ID NO: 254109 - DNA, 55 bp, Artificial
  Synthetic oligonucleotide
tccatacgaacagctgaccaaacttgtccgcaacaaactgaactgcaggcgcgac

SEQ ID NO: 254110 - DNA, 55 bp, Artificial
  Synthetic oligonucleotide
tccaggctcatcgttcggaatatcaactccacgaccgacatgtgcaccaatcgct

SEQ ID NO: 254111 - DNA, 60 bp, Artificial
  Synthetic oligonucleotide
gttagtgcctgcctctcagctgcgccgagaagtggcgcagatcttccaagcaccgaaccg

SEQ ID NO: 254112 - DNA, 56 bp, Artificial
  Synthetic oligonucleotide
taagtgggtttagcccttgataactctcttcaaacgtagtcgcccactggcgcgac

SEQ ID NO: 254113 - DNA, 55 bp, Artificial
  Synthetic oligonucleotide
tccaagccgcctccgttggactcactggacgttcgctctcaacgcggtgggtcaa

SEQ ID NO: 254114 - DNA, 55 bp, Artificial
  Synthetic oligonucleotide
tcatggaacattcccgacctttcgtaaacaattataccgccccgctgtggcggcg

SEQ ID NO: 254115 - DNA, 55 bp, Artificial
  Synthetic oligonucleotide
tcatcgttgaatacggctacaacctagatcttgttgacctagtagcgaaagcgaa

SEQ ID NO: 254116 - DNA, 55 bp, Artificial
  Synthetic oligonucleotide
tcatatagagcggcattgtgaccaacatggtcgttccatgcgccgtgtaagtcat

SEQ ID NO: 254117 - DNA, 55 bp, Artificial
  Synthetic oligonucleotide
tcagttttaatgcgaggtacatttgctactgatagcattctggacaatgaaggta

SEQ ID NO: 254118 - DNA, 55 bp, Artificial
  Synthetic oligonucleotide
tcagtttaccaaccgttcaacgctcctcgcctcttctagcggcgtaaaactgcag

SEQ ID NO: 254119 - DNA, 55 bp, Artificial
  Synthetic oligonucleotide
tcagctatatcgacctcaggtatgatactggagccgcggtgggttggttccctga

SEQ ID NO: 254120 - DNA, 55 bp, Artificial
  Synthetic oligonucleotide
tcagcgatatagagcgttcgcaagttcggatatcgcgccgcattaaactgcgtga

SEQ ID NO: 254121 - DNA, 55 bp, Artificial
  Synthetic oligonucleotide
tcagcagggtggtagcgaaaagagggtaagacgggtcttcgagctacctctccgg

SEQ ID NO: 254122 - DNA, 55 bp, Artificial
  Synthetic oligonucleotide
tcagagcgtaaagcaaccatggattgctcaagcttagccaccaagtctgcaagtg

SEQ ID NO: 254123 - DNA, 60 bp, Artificial
  Synthetic oligonucleotide
taagcgtgtatccgtctttggttagaggcacaaccaaaggctgctctgcacttagcggga

SEQ ID NO: 254124 - DNA, 55 bp, Artificial
  Synthetic oligonucleotide
tcactccatgctagtgaattggttacatcttcgttagtatagccatggcgtcagc

SEQ ID NO: 254125 - DNA, 55 bp, Artificial
  Synthetic oligonucleotide
taggcacgggcacaggggatgtcaacgtcattttgagtcacgacgaagcgccttt

SEQ ID NO: 254126 - DNA, 55 bp, Artificial
  Synthetic oligonucleotide
tagggttggagcctttattaatggtggtagtcttgcttgcatcattaaaacgtgc

SEQ ID NO: 254127 - DNA, 55 bp, Artificial
  Synthetic oligonucleotide
tagtacaacgtcactaacaaaggattcaactgatcaggttcttcccataagtacg

SEQ ID NO: 254128 - DNA, 55 bp, Artificial
  Synthetic oligonucleotide
tagtcgagtaatccgtaaatgtgacagacgacgtgacaccataaataacgtcatt

SEQ ID NO: 254129 - DNA, 55 bp, Artificial
  Synthetic oligonucleotide
tagtgccttttctaacagtggtgctgggttacaaccgcttttcacccaaatgcac

SEQ ID NO: 254130 - DNA, 55 bp, Artificial
  Synthetic oligonucleotide
tagtggacgtaataaaccgaacatcgcagagaacacaaccgtaaaggtaccagga

SEQ ID NO: 254131 - DNA, 55 bp, Artificial
  Synthetic oligonucleotide
tataacgtaaaggcacctaagtgcagctagtttgatgcacaacaccccgaactct

SEQ ID NO: 254132 - DNA, 55 bp, Artificial
  Synthetic oligonucleotide
tatagatggtgtacggggtttgagatccagcggaacggttatgtacgctaagggg

SEQ ID NO: 254133 - DNA, 55 bp, Artificial
  Synthetic oligonucleotide
tatccagtagggcgcggctacccaacattggcacaagtgctagacgaactgcctg

SEQ ID NO: 254134 - DNA, 60 bp, Artificial
  Synthetic oligonucleotide
taacttgctcaccagtatcttcatgttcactaatcgaatcacctagctctcggttagtgc

SEQ ID NO: 254135 - DNA, 55 bp, Artificial
  Synthetic oligonucleotide
tatccttttaacgttgcggcataccctggaattttcggctcagcttctattgtca

SEQ ID NO: 254136 - DNA, 55 bp, Artificial
  Synthetic oligonucleotide
tatcgaagattcagatgagggctatatagctgttgcggaaactgcgaatggacgc

SEQ ID NO: 254137 - DNA, 55 bp, Artificial
  Synthetic oligonucleotide
tatgattgaccctttacgctatccttcgaatgatattgcagccctctatgagcac

SEQ ID NO: 254138 - DNA, 53 bp, Artificial
  Synthetic oligonucleotide
tattcgcccaataagccaaatccaccggccaaccgtcggaaattacctgaccg

SEQ ID NO: 254139 - DNA, 55 bp, Artificial
  Synthetic oligonucleotide
tcaacaagtcggtttgagtcctaaagcacgagcaaatggatttaaaggcgcaggt

SEQ ID NO: 254140 - DNA, 55 bp, Artificial
  Synthetic oligonucleotide
tcaagggcgtgcagacatgggtaaagtaagcggtttggtccgcgctaaactggct

SEQ ID NO: 254141 - DNA, 55 bp, Artificial
  Synthetic oligonucleotide
tcacaaactacgtacaattttcgggcatgaacttcccacatatcatggttcccct

SEQ ID NO: 254142 - DNA, 55 bp, Artificial
  Synthetic oligonucleotide
tcacgagcgcttcacgtttggtcgattaggatacacccgttttaagcattctagt

SEQ ID NO: 254143 - DNA, 55 bp, Artificial
  Synthetic oligonucleotide
tggagcaaacattggaacgtgtgttaccgcgttattagcagcgactgcagtctct

SEQ ID NO: 254144 - DNA, 55 bp, Artificial
  Synthetic oligonucleotide
tgcttgcttgaccgggctacccatgtacagaaagccaccttcgagccttttaccg

SEQ ID NO: 254145 - DNA, 55 bp, Artificial
  Synthetic oligonucleotide
taaccgactgtttaatcgaaacttccctgctccaacagcgattaaaaagagcttg

SEQ ID NO: 254146 - DNA, 55 bp, Artificial
  Synthetic oligonucleotide
tgcgtgggataagcgtaaacaggggtggcacgacaaactcgctaatactgtagtt

SEQ ID NO: 254147 - DNA, 55 bp, Artificial
  Synthetic oligonucleotide
tgcgtaatcgccttgatcacgtatgcggcttacatggtaagtgtgaccatgcgga

SEQ ID NO: 254148 - DNA, 55 bp, Artificial
  Synthetic oligonucleotide
tgcgctagcgtcacgtagtcgttcagtactttctgaccgccagtgtggattacgc

SEQ ID NO: 254149 - DNA, 55 bp, Artificial
  Synthetic oligonucleotide
tgcgactttgcccgtggataggctcattcgcgtcggtctgaatactgtctgcggg

SEQ ID NO: 254150 - DNA, 55 bp, Artificial
  Synthetic oligonucleotide
tgccggtttgaccctgtcagtcctctgtcggtgtaaatccgatcgggggaacgcc

SEQ ID NO: 254151 - DNA, 55 bp, Artificial
  Synthetic oligonucleotide
tgcaccaaaagtatctagccatgagcaggcaaaatttgtgagaataagcgcaaag

SEQ ID NO: 254152 - DNA, 55 bp, Artificial
  Synthetic oligonucleotide
tgattagaccgccccatggtgcgtgcagtagtacgtctgttaggaagccgaacac

SEQ ID NO: 254153 - DNA, 55 bp, Artificial
  Synthetic oligonucleotide
tgatgacactactgaactgcgcgtatcgcggtgcaaaactgtaaccgcatagatc

SEQ ID NO: 254154 - DNA, 55 bp, Artificial
  Synthetic oligonucleotide
tgatccttgagtaggtcagtactgctaaaagcacccacttccgcagcccattgac

SEQ ID NO: 254155 - DNA, 55 bp, Artificial
  Synthetic oligonucleotide
tgagtgagcaacgttggcacccgcaaggggtattgattcttagtggccgagtgag

SEQ ID NO: 254156 - DNA, 60 bp, Artificial
  Synthetic oligonucleotide
agacacgatgactggcgatgcgggcaacgtgattggttttgttcctatggcgtcggcatt

SEQ ID NO: 254157 - DNA, 55 bp, Artificial
  Synthetic oligonucleotide
tgactgtcaggatactcggaggagtcgttgaggcgtcgatagcattgatagtgcg

SEQ ID NO: 254158 - DNA, 55 bp, Artificial
  Synthetic oligonucleotide
tgacgcacaatccactccatgacaaatggcaaacaatcgtcttccatcatcacga

SEQ ID NO: 254159 - DNA, 55 bp, Artificial
  Synthetic oligonucleotide
tgaatttatcactacaagccctagccaactcggaggacaaagctggctatcaggc

SEQ ID NO: 254160 - DNA, 55 bp, Artificial
  Synthetic oligonucleotide
tgaagctcgtgcgagacaggaatatcgtcacgagttaatgagctaatcgcaagct

SEQ ID NO: 254161 - DNA, 55 bp, Artificial
  Synthetic oligonucleotide
tcgagaccttatcgatgaacaggagctaagaaccgccgagcttttaattaaccct

SEQ ID NO: 254162 - DNA, 55 bp, Artificial
  Synthetic oligonucleotide
tcgatggcactcgctcgacgttcggagccgcaatccttatcacattaatctcaac

SEQ ID NO: 254163 - DNA, 55 bp, Artificial
  Synthetic oligonucleotide
tcgcacaacacaatacagcgcttgagtcatcgcgcagataaccgtatgctacggc

SEQ ID NO: 254164 - DNA, 55 bp, Artificial
  Synthetic oligonucleotide
tcgcatcgatgtaacgcgtcaccatagggcgtgacatctccaagcgatccgccgt

SEQ ID NO: 254165 - DNA, 55 bp, Artificial
  Synthetic oligonucleotide
tcgccgtttatagttacgaagatcaaagcttcgcctatcattcctgccaatcgaa

SEQ ID NO: 254166 - DNA, 55 bp, Artificial
  Synthetic oligonucleotide
tcgcgcaccgtgtgggtcgctttagccagttgtacaccaccaccgacgtataaca

SEQ ID NO: 254167 - DNA, 59 bp, Artificial
  Synthetic oligonucleotide
agacacttcgtaaaagcacttcaagagtatttctgcactctgtttggactcaagatgtt

SEQ ID NO: 254168 - DNA, 55 bp, Artificial
  Synthetic oligonucleotide
tcgcgcgcacacatcgatagaatttgcattgttcaattagtttgtggtcgccagt

SEQ ID NO: 254169 - DNA, 55 bp, Artificial
  Synthetic oligonucleotide
tcgcgtgataattcgggactgtttgggctccttcacgtgagattaagcaacaccc

SEQ ID NO: 254170 - DNA, 55 bp, Artificial
  Synthetic oligonucleotide
tcgggacttccgctaacagtctcgccagacattgacgtggagaaattgcaccaat

SEQ ID NO: 254171 - DNA, 55 bp, Artificial
  Synthetic oligonucleotide
tcgtcgtgatgtgtaatctcgtttcagaatggttcaggatcactgtacgataatg

SEQ ID NO: 254172 - DNA, 55 bp, Artificial
  Synthetic oligonucleotide
tctacatcactgttggggtttgacgtatagatgttatctatagctcgctcctgac

SEQ ID NO: 254173 - DNA, 55 bp, Artificial
  Synthetic oligonucleotide
tctactgagtatgaagtagcagaccttcgtcatgcttttgagtcattgcccactc

SEQ ID NO: 254174 - DNA, 55 bp, Artificial
  Synthetic oligonucleotide
tctctgcccgatgggatagtaagtatcctcaaattagtcgctcttggacgacgca

SEQ ID NO: 254175 - DNA, 55 bp, Artificial
  Synthetic oligonucleotide
tctgtagtatggtgaccgtatgggatgacaaccccggtacagtttgacagcccgt

SEQ ID NO: 254176 - DNA, 55 bp, Artificial
  Synthetic oligonucleotide
tctgtgtcgttgaaggaaatatggtgcagccaccaaaacgtgtcaaccacgaatg

SEQ ID NO: 254177 - DNA, 55 bp, Artificial
  Synthetic oligonucleotide
tcttaagttatctcttgctgtcttgcctatccgtgacgacttacgccgcggagct

SEQ ID NO: 254178 - DNA, 58 bp, Artificial
  Synthetic oligonucleotide
cattggtacgtgttccttgctatcaacatgcgtctcccaacgcctaaccgctttacac

SEQ ID NO: 254179 - DNA, 55 bp, Artificial
  Synthetic oligonucleotide
tcttgagccaactctttaaaagaaagcacgcccgtggtgtactcacgttcgcccg

SEQ ID NO: 254180 - DNA, 55 bp, Artificial
  Synthetic oligonucleotide
ggaggacggttgtattgccccaagtgtaataggacaacatgaagtaggcggcact

SEQ ID NO: 254181 - DNA, 55 bp, Artificial
  Synthetic oligonucleotide
ggagagcgtagtggcattgtctgggcgttacagtctgctagagatggaagtatat

SEQ ID NO: 254182 - DNA, 55 bp, Artificial
  Synthetic oligonucleotide
ggacgtttatgcgaacaataggcgcctacggcgcaaatcaaaaggactcaacctc

SEQ ID NO: 254183 - DNA, 55 bp, Artificial
  Synthetic oligonucleotide
ggacgccgttaattcgataatagttagatgacaaccctgacttgtcgctaaacat

SEQ ID NO: 254184 - DNA, 55 bp, Artificial
  Synthetic oligonucleotide
ggacgcaatcttagaataacagccaggacacacgaatatgattatctctgcttct

SEQ ID NO: 254185 - DNA, 55 bp, Artificial
  Synthetic oligonucleotide
ggaccgatagcgcagagctggttctgatgcatagtcacaccaaagacctaagtcc

SEQ ID NO: 254186 - DNA, 55 bp, Artificial
  Synthetic oligonucleotide
ggacactcatgagaagacgatttacccgacaatcgatccatcactttatctcggt

SEQ ID NO: 254187 - DNA, 55 bp, Artificial
  Synthetic oligonucleotide
ggacacgaccaacgatagccttcccctcttcacgagcttgtctgcgtctctctgc

SEQ ID NO: 254188 - DNA, 55 bp, Artificial
  Synthetic oligonucleotide
ggaatgagtacaaaatcctcgccagtttaatgacccaagcgggaagagtgatgag

SEQ ID NO: 254189 - DNA, 60 bp, Artificial
  Synthetic oligonucleotide
gctgcggattacgaatacagagtcatgcactttacgcatagataccagaacccaactgac

SEQ ID NO: 254190 - DNA, 55 bp, Artificial
  Synthetic oligonucleotide
ggaagcagctacgctcatgcttacaggtatgtgcgttgtgtttgcattcctaacc

SEQ ID NO: 254191 - DNA, 55 bp, Artificial
  Synthetic oligonucleotide
ggaactcatcaacgtgagcttcttgccatgtgttacctacagaatccgcagagta

SEQ ID NO: 254192 - DNA, 55 bp, Artificial
  Synthetic oligonucleotide
ggaacgcgtcactgttcttaatgagacattcacccatgtagtaaacaatggtaag

SEQ ID NO: 254193 - DNA, 52 bp, Artificial
  Synthetic oligonucleotide
ggaacctggccaaagttaacgctacgaaacgggaaatcgatgttggtgcctt

SEQ ID NO: 254194 - DNA, 55 bp, Artificial
  Synthetic oligonucleotide
ggaaaacgtcggcgtaattctgcaaatgagataatgcctactgctaccataacga

SEQ ID NO: 254195 - DNA, 53 bp, Artificial
  Synthetic oligonucleotide
gctttcctaattcaactttcgatgtttcgttcgaacaactccccgacctcgac

SEQ ID NO: 254196 - DNA, 55 bp, Artificial
  Synthetic oligonucleotide
gctttcacgctgtaattcacccagatcacgttgccaatgcaactcattacgtccg

SEQ ID NO: 254197 - DNA, 55 bp, Artificial
  Synthetic oligonucleotide
gctggcactacggtaatggtggtatgccaacgtctggtaagcgtatgcctatcgg

SEQ ID NO: 254198 - DNA, 55 bp, Artificial
  Synthetic oligonucleotide
gctggcatcccactaaacgcgagccatcgtaactacaagatccaaaccataaacc

SEQ ID NO: 254199 - DNA, 55 bp, Artificial
  Synthetic oligonucleotide
gctggcgtggtatgcggaaactcaggcattgcgtgcctcacacctcaacgcgact

SEQ ID NO: 254200 - DNA, 60 bp, Artificial
  Synthetic oligonucleotide
agaccgatgcggtattcttgatggaattcggtcgctaatcccgatgcgatagttgcggca

SEQ ID NO: 254201 - DNA, 55 bp, Artificial
  Synthetic oligonucleotide
gctgggatccgcgatattgtgggtggacgctctggcacttatgaacgagagctag

SEQ ID NO: 254202 - DNA, 55 bp, Artificial
  Synthetic oligonucleotide
gctgggcagacctatggaagcctgagcttgaaggtcaagtaatgctaatggacga

SEQ ID NO: 254203 - DNA, 55 bp, Artificial
  Synthetic oligonucleotide
gctggttagtcctttatatcgagacattgcggtctcagatattgagcgatagtgg

SEQ ID NO: 254204 - DNA, 55 bp, Artificial
  Synthetic oligonucleotide
gctgtgagtttagcggcaaaataaccttcggcatccaaacgtccgccgagcatgc

SEQ ID NO: 254205 - DNA, 55 bp, Artificial
  Synthetic oligonucleotide
gctgttactgccgtttgacgaaggaatgcgagtgccgactgataacccgacttgg

SEQ ID NO: 254206 - DNA, 55 bp, Artificial
  Synthetic oligonucleotide
gctgttcttagctgaaggttccgaaacggataaacttattcgtgccttacgtgcc

SEQ ID NO: 254207 - DNA, 55 bp, Artificial
  Synthetic oligonucleotide
gcttagccagcgtcagttttgagttcaatttccgacagcgcgttaatgaccgaaa

SEQ ID NO: 254208 - DNA, 55 bp, Artificial
  Synthetic oligonucleotide
gcttcatagaaggaggggaggctttaaagtctctagaggaaaatcgtcagactcg

SEQ ID NO: 254209 - DNA, 55 bp, Artificial
  Synthetic oligonucleotide
gcttctggatgctaccaacaccgctaagttgctatcgcgccatactccaaccact

SEQ ID NO: 254210 - DNA, 55 bp, Artificial
  Synthetic oligonucleotide
gcttcttaacgctagatggccttgcacacttagtactgccgagtattgctctggc

SEQ ID NO: 254211 - DNA, 55 bp, Artificial
  Synthetic oligonucleotide
cggccaattctccagagttgataaacggacaataagtacgaatgacctttaacgc

SEQ ID NO: 254212 - DNA, 55 bp, Artificial
  Synthetic oligonucleotide
gcttgccagatagatgcttgcgcttttctccgttgtgatcgcttgatttgcagcg

SEQ ID NO: 254213 - DNA, 55 bp, Artificial
  Synthetic oligonucleotide
gcttggtgccacctgttgccatcgaatcgccatacttgattgttgtagtgtttgg

SEQ ID NO: 254214 - DNA, 55 bp, Artificial
  Synthetic oligonucleotide
gcttgtccgtcgctaacgtgacttggtgtgctcgcccagggattgctttggtcac

SEQ ID NO: 254215 - DNA, 55 bp, Artificial
  Synthetic oligonucleotide
gctttaaaccggtaagccgtttctttgatcgcattacgcgccctgaacaactgct

SEQ ID NO: 254216 - DNA, 55 bp, Artificial
  Synthetic oligonucleotide
ggcgattcagcagttaacctatgttgatgaagtgaactccatttctagccgtggt

SEQ ID NO: 254217 - DNA, 55 bp, Artificial
  Synthetic oligonucleotide
ggcgagtcacatcgtgcaggagccggaatgcgaacatccctgataaaccgagccc

SEQ ID NO: 254218 - DNA, 55 bp, Artificial
  Synthetic oligonucleotide
ggcctttgacggtcattttgtctgggaactctgtcagtgcagagccgcctatgta

SEQ ID NO: 254219 - DNA, 55 bp, Artificial
  Synthetic oligonucleotide
ggcctgcacacccaccactggatggttcagatacctcaagtgtaacgcctttact

SEQ ID NO: 254220 - DNA, 55 bp, Artificial
  Synthetic oligonucleotide
ggccgtggaaagagaccatcagttggagaactaactcacacggagagcaagttcc

SEQ ID NO: 254221 - DNA, 55 bp, Artificial
  Synthetic oligonucleotide
ggccgccagtcataagggtagtcactcggagagagtttgatccaaaccctagtcg

SEQ ID NO: 254222 - DNA, 57 bp, Artificial
  Synthetic oligonucleotide
gaagtgccagtttggtttcagcaaaacacgattacggggactgatgaagaaccacaa

SEQ ID NO: 254223 - DNA, 60 bp, Artificial
  Synthetic oligonucleotide
agactgacgcgctaacgcttgtcgggtttgcactgtctctacatgcaagcatatagcagc

SEQ ID NO: 254224 - DNA, 55 bp, Artificial
  Synthetic oligonucleotide
ggccgcaccccaacgtttaagccctgctgaactggctaacttgcgtgaacgcctg

SEQ ID NO: 254225 - DNA, 55 bp, Artificial
  Synthetic oligonucleotide
ggccagactctcctagtacaaatgtcgacttcccacctaattgcttagcgcctcg

SEQ ID NO: 254226 - DNA, 55 bp, Artificial
  Synthetic oligonucleotide
ggccacatacccttttgcgaccccattatgctctaagatgttcgcttccccggtt

SEQ ID NO: 254227 - DNA, 55 bp, Artificial
  Synthetic oligonucleotide
ggcatcaagtcagcatacaaacctgaagagctagaaggcaagctaaccgtaatgg

SEQ ID NO: 254228 - DNA, 55 bp, Artificial
  Synthetic oligonucleotide
ggcaggttatactacgacgctatgaccctgtacactaacgcacccaaccggggcc

SEQ ID NO: 254229 - DNA, 55 bp, Artificial
  Synthetic oligonucleotide
ggcagggtgtgtagcaaccacggaagagctggcgcacactggtgattggtatcag

SEQ ID NO: 254230 - DNA, 55 bp, Artificial
  Synthetic oligonucleotide
ggcagctgaatccccttatatgtctgctttgcgacagtaatacactgttctgtgg

SEQ ID NO: 254231 - DNA, 55 bp, Artificial
  Synthetic oligonucleotide
ggcagattgcacatcttctacattagcgacaaattgaacttcagtgtcagctggg

SEQ ID NO: 254232 - DNA, 55 bp, Artificial
  Synthetic oligonucleotide
ggcagacagaagcccgcgatttacttaaagagctccgtgattggcttgatagcgc

SEQ ID NO: 254233 - DNA, 55 bp, Artificial
  Synthetic oligonucleotide
ggagtaaatcgtttatgagtatgcttgtggtggttactaatgtcgtaccgccttg

SEQ ID NO: 254234 - DNA, 57 bp, Artificial
  Synthetic oligonucleotide
taaatacagaaagtagtcataaaactaaccaagatacagcagaaatggtcgttagaa

SEQ ID NO: 254235 - DNA, 55 bp, Artificial
  Synthetic oligonucleotide
ggagtccccttatggttcaacggtgtttcttaaaatggcgaacagtgaatgcgcg

SEQ ID NO: 254236 - DNA, 55 bp, Artificial
  Synthetic oligonucleotide
ggagttaaccacggttaatccatattctggcacgtatgcggggcattacattgat

SEQ ID NO: 254237 - DNA, 55 bp, Artificial
  Synthetic oligonucleotide
ggatacttggcctgagcgaaaagagttagctccgatgttccctgagcaacgagtg

SEQ ID NO: 254238 - DNA, 55 bp, Artificial
  Synthetic oligonucleotide
ggatagatgaacgcccagagcacttaggctcaagttcaacaagcactgatgatct

SEQ ID NO: 254239 - DNA, 55 bp, Artificial
  Synthetic oligonucleotide
ggatcatagataggctcgactaaaccaccttgagcacgacactgagctagtgaac

SEQ ID NO: 254240 - DNA, 55 bp, Artificial
  Synthetic oligonucleotide
ggatgtggatgcgcttatccaagagctgcgacatcaaaagcgttcaccacgacac

SEQ ID NO: 254241 - DNA, 55 bp, Artificial
  Synthetic oligonucleotide
ggattactgcgcggctatccactcgaagtactaggcgaagtcagtgcgtccgatg

SEQ ID NO: 254242 - DNA, 55 bp, Artificial
  Synthetic oligonucleotide
ggattggcgattctgtgctgtctatgtcttccaacgtcgtcaataaagctcgtgg

SEQ ID NO: 254243 - DNA, 55 bp, Artificial
  Synthetic oligonucleotide
ggcaaacacgttgatttccaacccatgtgcaccaaagcctcgaaaggtgactcgc

SEQ ID NO: 254244 - DNA, 55 bp, Artificial
  Synthetic oligonucleotide
ggcaatgtgttccacgagaatattattcgctttgccactatctttgatagttagc

SEQ ID NO: 254245 - DNA, 60 bp, Artificial
  Synthetic oligonucleotide
agagccataattacatctggaccgatagcgcagagctggttctgatgcatagtcacacca

SEQ ID NO: 254246 - DNA, 55 bp, Artificial
  Synthetic oligonucleotide
ggcacaacttagcgtgtgaacgcttagagcctttagcaccgttccccaagccgtc

SEQ ID NO: 254247 - DNA, 55 bp, Artificial
  Synthetic oligonucleotide
ggcacagttacgatggaaatagggttagattggcattccaggtcaaagccgcggt

SEQ ID NO: 254248 - DNA, 55 bp, Artificial
  Synthetic oligonucleotide
ggcaccgattgagattgggtagctacgttcaccgaggttgaccgtaatccgctcc

SEQ ID NO: 254249 - DNA, 55 bp, Artificial
  Synthetic oligonucleotide
ggcactaatcagaactcagcgaaagctcgataacaccgccccttgtagctgctag

SEQ ID NO: 254250 - DNA, 55 bp, Artificial
  Synthetic oligonucleotide
ggcactgattaaccagaaactgaagcaggccggactgatgttacgtcagggcatc

SEQ ID NO: 254251 - DNA, 55 bp, Artificial
  Synthetic oligonucleotide
gcgttgttacattgggacattgataaataaatgtaactagctacgcatgaaccac

SEQ ID NO: 254252 - DNA, 55 bp, Artificial
  Synthetic oligonucleotide
gcgttggagagctcagtattagcaagcatagaaagcgtttcgcctagctccaatt

SEQ ID NO: 254253 - DNA, 55 bp, Artificial
  Synthetic oligonucleotide
gcgttccatcgttcaaaagtgggctaattacccatattcattcgcgattaattag

SEQ ID NO: 254254 - DNA, 55 bp, Artificial
  Synthetic oligonucleotide
gcgttagtttgcgccgaagaccgtattgaccgtttagcacgagacttactgactc

SEQ ID NO: 254255 - DNA, 55 bp, Artificial
  Synthetic oligonucleotide
gcgttacatctgaatagttcataggattaactaaacgcacagtcccattagtcac

SEQ ID NO: 254256 - DNA, 55 bp, Artificial
  Synthetic oligonucleotide
taaaatagcggcctaggtatctaacggttggaccgacatcttctgtctttttggc

SEQ ID NO: 254257 - DNA, 53 bp, Artificial
  Synthetic oligonucleotide
gcgttaactaaacgccacaattgacctgagttaccaacgtaagaaaggtatcc

SEQ ID NO: 254258 - DNA, 55 bp, Artificial
  Synthetic oligonucleotide
gcgtgcccagcattaaccacactacgttcaaccgttacatttgcgttatttcggt

SEQ ID NO: 254259 - DNA, 55 bp, Artificial
  Synthetic oligonucleotide
gcgtgccacgccaccaacagaaattgcagggcgtaaagtgctcgtcgtggaagat

SEQ ID NO: 254260 - DNA, 55 bp, Artificial
  Synthetic oligonucleotide
gcgtcttccattaatacactcggttattctggggtgggttatcgcgtttctggcg

SEQ ID NO: 254261 - DNA, 55 bp, Artificial
  Synthetic oligonucleotide
gcgtcgaatatcgccgctttaccgcggacggaataacccaaagaaccgcgcgctg

SEQ ID NO: 254262 - DNA, 55 bp, Artificial
  Synthetic oligonucleotide
gcgtcagttacaccgggtcattcgttgtgtgtatagagacatcttgacaggtgcg

SEQ ID NO: 254263 - DNA, 55 bp, Artificial
  Synthetic oligonucleotide
gcgtattatggctaaaggactagtgatcgttgttattgatcaaccgatgacgcag

SEQ ID NO: 254264 - DNA, 55 bp, Artificial
  Synthetic oligonucleotide
gcgtaccgctcacagcgtatgaacctaacgcagtagatggcgcatttaaagtacc

SEQ ID NO: 254265 - DNA, 55 bp, Artificial
  Synthetic oligonucleotide
gcgtaagtggccttcgatacgagtaatgggatcgattacgacacgcttgctcatg

SEQ ID NO: 254266 - DNA, 55 bp, Artificial
  Synthetic oligonucleotide
gcgtaaggtgcaacggaagttcatccacaagagcgggtggaatcgctacagtaca

SEQ ID NO: 254267 - DNA, 59 bp, Artificial
  Synthetic oligonucleotide
agagccttactcgattcaaagccaatcgagcaaacaacagttgttcgactcgaccaaga

SEQ ID NO: 254268 - DNA, 55 bp, Artificial
  Synthetic oligonucleotide
gcggtgaacaatccttttgtcttgatggggagtgttatagcccaaccagagaaca

SEQ ID NO: 254269 - DNA, 55 bp, Artificial
  Synthetic oligonucleotide
gcggatatgcgacaaggtgaagaggtggcaaaggagcgtgtggcagcacatggct

SEQ ID NO: 254270 - DNA, 55 bp, Artificial
  Synthetic oligonucleotide
gcggatgttattgcggatgttattgcggatgttattgcggatgttattgcggatg

SEQ ID NO: 254271 - DNA, 55 bp, Artificial
  Synthetic oligonucleotide
gcggcacttgcaggtagttcgctgcatctgccactcggcctgagaacagaaacag

SEQ ID NO: 254272 - DNA, 55 bp, Artificial
  Synthetic oligonucleotide
gcggcagcctcaaaatgagtgatcacattcgcttggccgctttgcatggtcgcgt

SEQ ID NO: 254273 - DNA, 55 bp, Artificial
  Synthetic oligonucleotide
gcggcattcgtagcaaatggcagcgtattacctcgaattgcaggtaactgcgacc

SEQ ID NO: 254274 - DNA, 55 bp, Artificial
  Synthetic oligonucleotide
gcggccaacacagggggcatagcaacaccgatcggcactccacctaacgctatcg

SEQ ID NO: 254275 - DNA, 54 bp, Artificial
  Synthetic oligonucleotide
gcgggcgtaaatagccacgacgtgacggagtcccctataaatccgactacccat

SEQ ID NO: 254276 - DNA, 55 bp, Artificial
  Synthetic oligonucleotide
gcggggtttatatctggtgcgcaattagccggagatttgtactcggcagtcggtc

SEQ ID NO: 254277 - DNA, 54 bp, Artificial
  Synthetic oligonucleotide
gcgggtaggttatcccaaggttcgcttgcctgaggtaaaatacgttcagaaagc

SEQ ID NO: 254278 - DNA, 60 bp, Artificial
  Synthetic oligonucleotide
agagcggctatcgtcagtttattgggtaaggcttattatgagcttgatttatcaagcgaa

SEQ ID NO: 254279 - DNA, 55 bp, Artificial
  Synthetic oligonucleotide
gcggtactggcattcccaatgacctatctttcgcatcgcggacttgcgcggtttg

SEQ ID NO: 254280 - DNA, 55 bp, Artificial
  Synthetic oligonucleotide
gcggtagtaaccatcagggctccaagcgtcacgagtattccaagcgcgataaggg

SEQ ID NO: 254281 - DNA, 55 bp, Artificial
  Synthetic oligonucleotide
gcggtatgtttacttcgtgctaacttcacacaaaagtcatacctaaagacaaggg

SEQ ID NO: 254282 - DNA, 55 bp, Artificial
  Synthetic oligonucleotide
gcggtcatcgcctcatcaggttctgtattccaacgttctggtggcatcaaaatgc

SEQ ID NO: 254283 - DNA, 55 bp, Artificial
  Synthetic oligonucleotide
gcggtcgaagtagtaaccttcttcgttcgccatacgttgccacgcttggtagtgc

SEQ ID NO: 254284 - DNA, 55 bp, Artificial
  Synthetic oligonucleotide
gcggtcgccaaacagtgacttcgctttcgctactaggtcaacaagatctaggttg

SEQ ID NO: 254285 - DNA, 55 bp, Artificial
  Synthetic oligonucleotide
gcggtgaacaacaataccaacgccactattggcattcgtgacgatttaaaagggc

SEQ ID NO: 254286 - DNA, 55 bp, Artificial
  Synthetic oligonucleotide
gctggaatacgttcccgacttattacacgtggggcgagaaaccgcaatcgacgcc

SEQ ID NO: 254287 - DNA, 55 bp, Artificial
  Synthetic oligonucleotide
gctgctagaggggacacgcggaaaaggaataactgattagtgttgtgaggccgga

SEQ ID NO: 254288 - DNA, 55 bp, Artificial
  Synthetic oligonucleotide
gctgcgcggtttaacgaacgaggaacaaacgtttctaatgccgtctcacattcgt

SEQ ID NO: 254289 - DNA, 60 bp, Artificial
  Synthetic oligonucleotide
actccatccacgaaagtctctaatatgttgatagttatcatgtttagtattcaaggcatt

SEQ ID NO: 254290 - DNA, 55 bp, Artificial
  Synthetic oligonucleotide
gctgccgattgtatacaaactcgttcctggttgtttaatcggcgtgccctgtcgg

SEQ ID NO: 254291 - DNA, 55 bp, Artificial
  Synthetic oligonucleotide
gctgcccataactggatgtgtggccgttttataaagtagatcccgataattaccg

SEQ ID NO: 254292 - DNA, 55 bp, Artificial
  Synthetic oligonucleotide
gctgccatttggtcaagcgttgcaaggattgcgtctttagagtggaagttacgag

SEQ ID NO: 254293 - DNA, 55 bp, Artificial
  Synthetic oligonucleotide
gctgcaacaattatcggaccataagaaatgaaggaatcgtcaatcacatcactgg

SEQ ID NO: 254294 - DNA, 55 bp, Artificial
  Synthetic oligonucleotide
gctgattccatttgtgcctatctcaaatgtctagaagagctcagtgcaggtaatc

SEQ ID NO: 254295 - DNA, 55 bp, Artificial
  Synthetic oligonucleotide
gctgataagagaatagacaccgtcaaatactatgaccagagagccaacgagaaga

SEQ ID NO: 254296 - DNA, 55 bp, Artificial
  Synthetic oligonucleotide
gctgaagtaagcttctctggtatggtttgtaatacaacgcctgatttgacgttgg

SEQ ID NO: 254297 - DNA, 55 bp, Artificial
  Synthetic oligonucleotide
gctgaaccaaaccggctttggacgacaggagtaacacatgaagcgcatcataatc

SEQ ID NO: 254298 - DNA, 55 bp, Artificial
  Synthetic oligonucleotide
gctcttgaatgtaagaccaaacgtgagcgtctgtgctggtttgtgccgctagacg

SEQ ID NO: 254299 - DNA, 55 bp, Artificial
  Synthetic oligonucleotide
gctctagcttcttgctgctaccgcggccagagatcgatttggtcttaactgcgga

SEQ ID NO: 254300 - DNA, 59 bp, Artificial
  Synthetic oligonucleotide
tagccagttgttcgtagcggttttgtgcgtagctatggcgtaagccgtgtgctccgttg

SEQ ID NO: 254301 - DNA, 55 bp, Artificial
  Synthetic oligonucleotide
gctcggctacacgaaagccaaagtattcaatctctaactttgccaacttagcgcg

SEQ ID NO: 254302 - DNA, 55 bp, Artificial
  Synthetic oligonucleotide
gctcgctcaactgagcaatcggcatgggcttagccgcatagtaaccttggcaagt

SEQ ID NO: 254303 - DNA, 55 bp, Artificial
  Synthetic oligonucleotide
gctcgagacaatggtgaagtgtttatctactacgcatcatcagatactcgttgtc

SEQ ID NO: 254304 - DNA, 55 bp, Artificial
  Synthetic oligonucleotide
gcgtttggggatttatggaaggagttagccatgggcataccatgcaacccgaacc

SEQ ID NO: 254305 - DNA, 55 bp, Artificial
  Synthetic oligonucleotide
gctaaaccgataggcaggttatgaggctcactcactaatctaaaacccatcacag

SEQ ID NO: 254306 - DNA, 55 bp, Artificial
  Synthetic oligonucleotide
gctaacccctatggcaggagagagcctaaccatggcaaaccacagcgcaagctac

SEQ ID NO: 254307 - DNA, 53 bp, Artificial
  Synthetic oligonucleotide
gctaaccgttacttgtataaacatcggtattcgcgaggagttaaggtttgcct

SEQ ID NO: 254308 - DNA, 55 bp, Artificial
  Synthetic oligonucleotide
gctacatcgtaatgcgtcgcgagggttaggtgttgtcacgaaaggcttacgcgag

SEQ ID NO: 254309 - DNA, 55 bp, Artificial
  Synthetic oligonucleotide
gctaccgatgctcaacagagtaccaatagcggatcctttccggggtacatcacgc

SEQ ID NO: 254310 - DNA, 55 bp, Artificial
  Synthetic oligonucleotide
gctacgcccttaaagattaatctaccccgttcgcatcgtgacttggttgtcgcgg

SEQ ID NO: 254311 - DNA, 60 bp, Artificial
  Synthetic oligonucleotide
tagccacacccaaaggtgccgcaattgagggtatcgttcaggcagatactaccgtcgcga

SEQ ID NO: 254312 - DNA, 55 bp, Artificial
  Synthetic oligonucleotide
gctagagtcataaagcggctatttggatcaggttgatagtcgccaaacggctcgc

SEQ ID NO: 254313 - DNA, 55 bp, Artificial
  Synthetic oligonucleotide
gctaggtagatcacctttcgagctgactcatccgttgggaacagcttgcgcttct

SEQ ID NO: 254314 - DNA, 55 bp, Artificial
  Synthetic oligonucleotide
gctatctatgaggcgtttagtaaggtcggggtgcaactaaagaacgtaagtaagc

SEQ ID NO: 254315 - DNA, 55 bp, Artificial
  Synthetic oligonucleotide
gctatttgctccgcatcacttaagaaactcgtccatctagtttgcgctttggtcg

SEQ ID NO: 254316 - DNA, 54 bp, Artificial
  Synthetic oligonucleotide
gctatttggccgtggcttcccatacggtactttaaccgtaaacgtgctgggctc

SEQ ID NO: 254317 - DNA, 55 bp, Artificial
  Synthetic oligonucleotide
gctcaatacccgactgagtaaacagcgactcttggcggtaaaggggcattgcgta

SEQ ID NO: 254318 - DNA, 55 bp, Artificial
  Synthetic oligonucleotide
gctcagaaagcagcccgattagattgcgaaattcaaaataggaccgacatttagg

SEQ ID NO: 254319 - DNA, 55 bp, Artificial
  Synthetic oligonucleotide
gctcatttgtactgtattacttacagcactagttgcaggttgtggctcgatgcct

SEQ ID NO: 254320 - DNA, 52 bp, Artificial
  Synthetic oligonucleotide
gctcccaacgcttcgggtctcccttacggtttccctctcgataaacgacctg

SEQ ID NO: 254321 - DNA, 55 bp, Artificial
  Synthetic oligonucleotide
ggttaagggacgtcaataaggcagcggctacccagtcaactccggtcacggattc

SEQ ID NO: 254322 - DNA, 60 bp, Artificial
  Synthetic oligonucleotide
tagcaccaggtttcgtcctgggcctgttgcgaaggtaatgctagaaacggctcttgatgc

SEQ ID NO: 254323 - DNA, 55 bp, Artificial
  Synthetic oligonucleotide
ggtgttttacggtaaagcgccgcacaacccatcgtactgggaattctatctcacc

SEQ ID NO: 254324 - DNA, 55 bp, Artificial
  Synthetic oligonucleotide
ggtgtgagcctaggttctgttgagaactacggcttgacggattacgctcaagata

SEQ ID NO: 254325 - DNA, 55 bp, Artificial
  Synthetic oligonucleotide
ggtgtgactgactggcaatctgcaggtgcttattcccaagctctgaggtcggctg

SEQ ID NO: 254326 - DNA, 55 bp, Artificial
  Synthetic oligonucleotide
ggtggtgccaaccataggttgactgctgacgtagagcgatcctcccattaactcg

SEQ ID NO: 254327 - DNA, 55 bp, Artificial
  Synthetic oligonucleotide
ggtgggcagtggcactcgcaacagggcttacatttgtcggttactttgtccccgt

SEQ ID NO: 254328 - DNA, 55 bp, Artificial
  Synthetic oligonucleotide
ggtgggacagataggtcataggaaaggctaatactgccatcagcacagcggccag

SEQ ID NO: 254329 - DNA, 55 bp, Artificial
  Synthetic oligonucleotide
ggtggcgtcagtttctaggccgcgcaggcctgtcacaataccgagcgatgcgttc

SEQ ID NO: 254330 - DNA, 55 bp, Artificial
  Synthetic oligonucleotide
ggtggacgactttcacatcagggcagtaatccaccaaacgagcccacatactgtc

SEQ ID NO: 254331 - DNA, 54 bp, Artificial
  Synthetic oligonucleotide
ggtgcgttgctcgtttggctaacgggtaccacaacaccgctatcaaaccctgtt

SEQ ID NO: 254332 - DNA, 55 bp, Artificial
  Synthetic oligonucleotide
ggtgcgcaacaatgagcgttcactttccgctgaaacgatcgacctactgcttaaa

SEQ ID NO: 254333 - DNA, 57 bp, Artificial
  Synthetic oligonucleotide
cgctctaaccaactaacgatataactttcatgctgaacttctccgactatccctaaa

SEQ ID NO: 254334 - DNA, 58 bp, Artificial
  Synthetic oligonucleotide
tagagcacttcgcccgtaaacgggctgcgccttacacttcgctggacgctacgtttca

SEQ ID NO: 254335 - DNA, 55 bp, Artificial
  Synthetic oligonucleotide
ggtgcacttgggctttcagttaatgttgggttaacttgatttggctcttgtgtga

SEQ ID NO: 254336 - DNA, 55 bp, Artificial
  Synthetic oligonucleotide
ggtgatggaaaccgtatttgtcgttgggttgcaagactcgaaatagatttggcgg

SEQ ID NO: 254337 - DNA, 55 bp, Artificial
  Synthetic oligonucleotide
ggtgatccgattaagaatcagaacttatctgaacaacgctcaaacgaagtacgtc

SEQ ID NO: 254338 - DNA, 55 bp, Artificial
  Synthetic oligonucleotide
ggtgatcaacgtgcgatcattaaacgggtaatgcagggcaagcaggtattgtgcg

SEQ ID NO: 254339 - DNA, 50 bp, Artificial
  Synthetic oligonucleotide
ggtaaaggcctaaaacgtatggttgccagcggtttaaaaccttacgacca

SEQ ID NO: 254340 - DNA, 53 bp, Artificial
  Synthetic oligonucleotide
ggtaacaaaacgaattggattccccggcgaaatcgtaataccgtcatggctta

SEQ ID NO: 254341 - DNA, 54 bp, Artificial
  Synthetic oligonucleotide
ggtagcgaagggtagtgttcccttgatacctaaaacaccactctagtttgagag

SEQ ID NO: 254342 - DNA, 54 bp, Artificial
  Synthetic oligonucleotide
ggtagtggttaagcgtaccgaagttctgacgacctgtggtttggataacaccac

SEQ ID NO: 254343 - DNA, 55 bp, Artificial
  Synthetic oligonucleotide
ggtatgcttcaaactgtgagcagtaaactggttcaacttgccgagttagacaccg

SEQ ID NO: 254344 - DNA, 55 bp, Artificial
  Synthetic oligonucleotide
ggtcaactttccgagggtctaaaccatacaactccgagtggctcaaatcacaacc

SEQ ID NO: 254345 - DNA, 53 bp, Artificial
  Synthetic oligonucleotide
tagaacgttgtcgtttgtctttgtcatcgagaaggtacccaaagttaggaaaa

SEQ ID NO: 254346 - DNA, 55 bp, Artificial
  Synthetic oligonucleotide
ggtcaattaagctgccataaagtgaaagtcttctgcgtagttctggcgttatttg

SEQ ID NO: 254347 - DNA, 55 bp, Artificial
  Synthetic oligonucleotide
ggtcctagcccttcaacgatcaacactaaacctagtgccacccaaagtgtctgcg

SEQ ID NO: 254348 - DNA, 51 bp, Artificial
  Synthetic oligonucleotide
ggtcggcaaggcgactttaactcgataacccgatttgggaaccgagtaaac

SEQ ID NO: 254349 - DNA, 55 bp, Artificial
  Synthetic oligonucleotide
ggtctcgtaagaacgagaccacttgctgcttccaatgctgctctaccatcgcagc

SEQ ID NO: 254350 - DNA, 55 bp, Artificial
  Synthetic oligonucleotide
ggtctgcacctatcatcgagttatcagtaggcagaacacgatagccaatcacgtc

SEQ ID NO: 254351 - DNA, 55 bp, Artificial
  Synthetic oligonucleotide
ggtcttttcacatctcgtcgctaacgtgcgttggatgatcaattggttggtgccg

SEQ ID NO: 254352 - DNA, 55 bp, Artificial
  Synthetic oligonucleotide
ggtgaaagccctctcagaagccccgtgggtgcgtctgcatagcaatgatcgacgg

SEQ ID NO: 254353 - DNA, 55 bp, Artificial
  Synthetic oligonucleotide
ggtgaacttcgcctgttattgcctcacctactcaacagtagtgaggagcgtatga

SEQ ID NO: 254354 - DNA, 55 bp, Artificial
  Synthetic oligonucleotide
ggtgatagacaaccaaggcacgaaactgtacttggttacgaaccttaatgcgccg

SEQ ID NO: 254355 - DNA, 55 bp, Artificial
  Synthetic oligonucleotide
gtactggctacacagccagcgtaaggaaccatcatgacaacactactgatcaaaa

SEQ ID NO: 254356 - DNA, 53 bp, Artificial
  Synthetic oligonucleotide
tactttaaagcaaccacgatgaaaaaacccatgataatggggcgtaaaacttg

SEQ ID NO: 254357 - DNA, 55 bp, Artificial
  Synthetic oligonucleotide
gtactcgtatctactgcgagatgtaatttccgccacactcttcgtttaccatccg

SEQ ID NO: 254358 - DNA, 55 bp, Artificial
  Synthetic oligonucleotide
gtacgtgaattgataagcgaaagcagatgcgtttgatctaatgtgcaatcctccg

SEQ ID NO: 254359 - DNA, 55 bp, Artificial
  Synthetic oligonucleotide
gtacgcctcgttctcacggcgaaggtcgttagagcaggtggtgttaccatcgcag

SEQ ID NO: 254360 - DNA, 54 bp, Artificial
  Synthetic oligonucleotide
gtacgcattacaggatttatgttacgggctacgtttgtaaaacgattctccttc

SEQ ID NO: 254361 - DNA, 55 bp, Artificial
  Synthetic oligonucleotide
gtacctaagatttgatgcaagtccgccagtggaatgtcgtggctagggtagtctc

SEQ ID NO: 254362 - DNA, 55 bp, Artificial
  Synthetic oligonucleotide
gtaccgatttcagacactaccgctagccataagcgtatacaggacgtgactttgc

SEQ ID NO: 254363 - DNA, 55 bp, Artificial
  Synthetic oligonucleotide
gtacatatgtcgttcgcgtatgcccctttagcgtaaacaagcgctaatgatcgcg

SEQ ID NO: 254364 - DNA, 55 bp, Artificial
  Synthetic oligonucleotide
gtacagatcacggtttgactaactgtgaatggaggcagaatgtcggaccaccagc

SEQ ID NO: 254365 - DNA, 55 bp, Artificial
  Synthetic oligonucleotide
gtacacgccaggagtcacggttaagacaaactcgcgtcaaggtgtccagagtatc

SEQ ID NO: 254366 - DNA, 55 bp, Artificial
  Synthetic oligonucleotide
gtacacgattaggatcaacacgggtttgcagtaagttgtcttgctactcggttgc

SEQ ID NO: 254367 - DNA, 59 bp, Artificial
  Synthetic oligonucleotide
cttgccgctttgacagggaatggccgatattttgatattgtagagtcgttatcattaaa

SEQ ID NO: 254368 - DNA, 55 bp, Artificial
  Synthetic oligonucleotide
gtacaaccttggtacacattcgcccttcatttgtaccataagtgtaccacatgaa

SEQ ID NO: 254369 - DNA, 55 bp, Artificial
  Synthetic oligonucleotide
gtacaaattcgatcataaccaaggatcctagcacttcgcctttggtcgaaaatat

SEQ ID NO: 254370 - DNA, 55 bp, Artificial
  Synthetic oligonucleotide
gtaattgaaggcgccatcgcggcaccaaacgcaaaagttgctatcgtaattgcac

SEQ ID NO: 254371 - DNA, 55 bp, Artificial
  Synthetic oligonucleotide
gtaacccttggcttactggtagggcgcgactcattccactcactacgtggtcgcg

SEQ ID NO: 254372 - DNA, 55 bp, Artificial
  Synthetic oligonucleotide
ggttttgtagcctttccaaacgcagtacttgtcccatagttgctgaggtgtcggg

SEQ ID NO: 254373 - DNA, 55 bp, Artificial
  Synthetic oligonucleotide
ggttacgcttcacatgtgcccaacataactgatgacggtctgcggctatccagtt

SEQ ID NO: 254374 - DNA, 55 bp, Artificial
  Synthetic oligonucleotide
ggttactaggctttgcgtttaatcagctggctaagcataaacaggaaggttgcgc

SEQ ID NO: 254375 - DNA, 55 bp, Artificial
  Synthetic oligonucleotide
ggttagcgacttatgccttgattatgcgtttgactttgtactcggtcatgcgctg

SEQ ID NO: 254376 - DNA, 55 bp, Artificial
  Synthetic oligonucleotide
ggttaggctcgccctcttcggttagtaaatgctgcgcggaataggttcggcacgc

SEQ ID NO: 254377 - DNA, 55 bp, Artificial
  Synthetic oligonucleotide
ggttattacagccaattacgaccacatcaatataatggcggattaacaccgaatg

SEQ ID NO: 254378 - DNA, 57 bp, Artificial
  Synthetic oligonucleotide
cgggacagccaagcggctccgaaaagtgatactcaaacagaaaggaaactcctcatg

SEQ ID NO: 254379 - DNA, 55 bp, Artificial
  Synthetic oligonucleotide
ggttccgagctgctcttagagcgggcagttaacctcaatcccgatgatacttcgt

SEQ ID NO: 254380 - DNA, 55 bp, Artificial
  Synthetic oligonucleotide
ggttcgcccatagctaacccgataccatacataaactgagcggttaaaatagcgg

SEQ ID NO: 254381 - DNA, 55 bp, Artificial
  Synthetic oligonucleotide
ggttcggcctcatgcaatgttgcgatcacttggaacaggttggtatcagcatgga

SEQ ID NO: 254382 - DNA, 55 bp, Artificial
  Synthetic oligonucleotide
ggttctgtagcgctttactcggtggtacgatgaagtgataaggagggcctatgcg

SEQ ID NO: 254383 - DNA, 55 bp, Artificial
  Synthetic oligonucleotide
ggttgaaccgtgtgggagagccatatctactggcttattgcgtgacgacttatcg

SEQ ID NO: 254384 - DNA, 55 bp, Artificial
  Synthetic oligonucleotide
ggttgggcaaagcacgttccagtaactgagcggcacctcttagtcctccgagggg

SEQ ID NO: 254385 - DNA, 55 bp, Artificial
  Synthetic oligonucleotide
ggttggggtgagaatggcgcttggatgcgtatgttccagaatgcacgtaagaacg

SEQ ID NO: 254386 - DNA, 55 bp, Artificial
  Synthetic oligonucleotide
ggttgtcttgcagcggtttagttaaacagtgatctaagcgaccttcgttgaccgc

SEQ ID NO: 254387 - DNA, 55 bp, Artificial
  Synthetic oligonucleotide
ggtttcacttgcgtgctttggcgcactaactcaccttgtgtggtacgtgtcaccg

SEQ ID NO: 254388 - DNA, 55 bp, Artificial
  Synthetic oligonucleotide
ggtttcgaatagtgccggatcttgcgccaaagtaggaagttgttcgaataaattc

SEQ ID NO: 254389 - DNA, 56 bp, Artificial
  Synthetic oligonucleotide
tactcaaactcaatgccccattaactcgtgaagtcacgaccttatgggagggtaaa

SEQ ID NO: 254390 - DNA, 55 bp, Artificial
  Synthetic oligonucleotide
ggtttgatacggaagccgtaggaagaggttttgctacaaggcaggaactgcgaga

SEQ ID NO: 254391 - DNA, 55 bp, Artificial
  Synthetic oligonucleotide
ggtttgatgttaagacctgcagcaatgtcgattgtaccagtctggatagttagct

SEQ ID NO: 254392 - DNA, 55 bp, Artificial
  Synthetic oligonucleotide
gggcgccaaacactacgattgcggaacatctaattgcccgcacactaaggtcgtc

SEQ ID NO: 254393 - DNA, 55 bp, Artificial
  Synthetic oligonucleotide
gggcgagccataagcgtaaaccgtgtcgatacccactgcatccaatgcggctttt

SEQ ID NO: 254394 - DNA, 54 bp, Artificial
  Synthetic oligonucleotide
gggcgacattgaaaccgtggtcggttcccttgtccgtgatggaacgaaattcac

SEQ ID NO: 254395 - DNA, 55 bp, Artificial
  Synthetic oligonucleotide
gggcgaattataccttgctctcgattaatgggctactttggatcgactccgtttt

SEQ ID NO: 254396 - DNA, 55 bp, Artificial
  Synthetic oligonucleotide
gggcgaatgtaggcgctttcgagtttgttttgacgcaaggtttcacgagttgctt

SEQ ID NO: 254397 - DNA, 55 bp, Artificial
  Synthetic oligonucleotide
gggcctcgactgagcgactcgtaccctataacacgctcgctcgcaaggtgcacaa

SEQ ID NO: 254398 - DNA, 55 bp, Artificial
  Synthetic oligonucleotide
gggccattgcgacgaataatacgaccgtagcccattgggttgtctaacacgaccg

SEQ ID NO: 254399 - DNA, 55 bp, Artificial
  Synthetic oligonucleotide
gggcatgatttgcatcatactcaaacgaagtaatatgcccattgcgtgtaatacg

SEQ ID NO: 254400 - DNA, 55 bp, Artificial
  Synthetic oligonucleotide
tacgcggcgtgcaaaaccactcacactctcttctccgattaaggtttttaggcgg

SEQ ID NO: 254401 - DNA, 55 bp, Artificial
  Synthetic oligonucleotide
gggcagactctctgttacgtcgatgaatctctctcgcctaacgggtcagtacacc

SEQ ID NO: 254402 - DNA, 55 bp, Artificial
  Synthetic oligonucleotide
gggattgaaggtgtgacgtggtttgttgagtatccatttctgtctccgtgtagga

SEQ ID NO: 254403 - DNA, 55 bp, Artificial
  Synthetic oligonucleotide
gggagcgagaaccattgcagatatagtcacaaatcagggtgtaaagctgagccga

SEQ ID NO: 254404 - DNA, 55 bp, Artificial
  Synthetic oligonucleotide
gggaattgacgtgattcatcggaggactctatgtctgaatctatgcgcggcacca

SEQ ID NO: 254405 - DNA, 55 bp, Artificial
  Synthetic oligonucleotide
gggaacacctaggcacttcctttctcaaaacatcgtgacgccagacagcgcaaac

SEQ ID NO: 254406 - DNA, 55 bp, Artificial
  Synthetic oligonucleotide
ggcttggcgatcataagtccggctcttctatgcttgttgacggatcatcgctttc

SEQ ID NO: 254407 - DNA, 55 bp, Artificial
  Synthetic oligonucleotide
ggcttgaccacaaacgctctgcaatcgcatagctgcgcggccatagacgctgttc

SEQ ID NO: 254408 - DNA, 55 bp, Artificial
  Synthetic oligonucleotide
ggcttcgatgcgttgaacggcttctatagcggaggtgtctttgcgatagctaaga

SEQ ID NO: 254409 - DNA, 55 bp, Artificial
  Synthetic oligonucleotide
ggcgattgcatgttggttagctttaatcagttcagatgcacttgttgccaacgca

SEQ ID NO: 254410 - DNA, 55 bp, Artificial
  Synthetic oligonucleotide
ggcgcatcccaaccacaaagtacagagtagtgatgtgactgaaaggtatgttgtg

SEQ ID NO: 254411 - DNA, 60 bp, Artificial
  Synthetic oligonucleotide
cggctctccgatctcttcgctagctgcatacattggcgcaaatgccaccaaacatgccgc

SEQ ID NO: 254412 - DNA, 55 bp, Artificial
  Synthetic oligonucleotide
ggcgccaatgcgacttacgtagaagatctctacgagttgtatcttagcgacccag

SEQ ID NO: 254413 - DNA, 55 bp, Artificial
  Synthetic oligonucleotide
ggcgcgacaagcccacgcaatacaagggattacgcaaagcagcactaaaccagtg

SEQ ID NO: 254414 - DNA, 55 bp, Artificial
  Synthetic oligonucleotide
ggcgcgttaacctactggaacgctgcatactcactacatcaaagctttgcgagtg

SEQ ID NO: 254415 - DNA, 55 bp, Artificial
  Synthetic oligonucleotide
ggcgctacacctaaaattgttgttagtgcgccaagtaatacaggccttgcacgac

SEQ ID NO: 254416 - DNA, 55 bp, Artificial
  Synthetic oligonucleotide
ggcggattaacaccgaatgaatccgaacgattatattggttaacctctaatactg

SEQ ID NO: 254417 - DNA, 53 bp, Artificial
  Synthetic oligonucleotide
ggcggcgatgtttaaaggcgccaccagttttaaccaacccatcggtaactgga

SEQ ID NO: 254418 - DNA, 55 bp, Artificial
  Synthetic oligonucleotide
ggcgtaagaggtacaactcaaaagacagccgaggacggcttgcaaataagcgtca

SEQ ID NO: 254419 - DNA, 55 bp, Artificial
  Synthetic oligonucleotide
ggcgttaacgttaggcttccacaaattagctcgtggtgagagatgagcgctaaac

SEQ ID NO: 254420 - DNA, 55 bp, Artificial
  Synthetic oligonucleotide
ggcgttcggtgcaacgaccaccccaagcaataccccgtcggcttcagctcacatc

SEQ ID NO: 254421 - DNA, 55 bp, Artificial
  Synthetic oligonucleotide
ggcgtttaagtccaacactagcgacttgctggctaatgcagggatctcactctgc

SEQ ID NO: 254422 - DNA, 53 bp, Artificial
  Synthetic oligonucleotide
tacgcacttacatttatcggtcactcgtgggggaatttgtgaacgtaccggtt

SEQ ID NO: 254423 - DNA, 55 bp, Artificial
  Synthetic oligonucleotide
ggcgtttagcctgcttggtgttgtccgtgcatgaccaccgcttatcgctgtggcc

SEQ ID NO: 254424 - DNA, 55 bp, Artificial
  Synthetic oligonucleotide
ggctgcggaggtggtttactttcagcttggagcctaatcatccactatcggcctt

SEQ ID NO: 254425 - DNA, 55 bp, Artificial
  Synthetic oligonucleotide
ggctgctacaaaagataagcgttcggatgtgatgcaggtgataaatgtagccttg

SEQ ID NO: 254426 - DNA, 55 bp, Artificial
  Synthetic oligonucleotide
ggcttacctcagtacacagttcgccagagaatcgtggtctatggttactcacctg

SEQ ID NO: 254427 - DNA, 55 bp, Artificial
  Synthetic oligonucleotide
ggcttatcgggcatcatcaaatacgtagaacagttacgtaaagtagggcgaggcg

SEQ ID NO: 254428 - DNA, 52 bp, Artificial
  Synthetic oligonucleotide
gggtttacatagaacgaactcaaatacttcgcttaaccagcgttccgaattt

SEQ ID NO: 254429 - DNA, 55 bp, Artificial
  Synthetic oligonucleotide
gggttgttatacgcggatgtttcggataggaaactcactatcttgcggtgaccca

SEQ ID NO: 254430 - DNA, 55 bp, Artificial
  Synthetic oligonucleotide
gggttgtcggccattaggctatccatcacaggtgtacgcgcattattgatcgcgt

SEQ ID NO: 254431 - DNA, 55 bp, Artificial
  Synthetic oligonucleotide
gggttggcatcattaactgtccttacatccctactctgacacaagttcactaggc

SEQ ID NO: 254432 - DNA, 55 bp, Artificial
  Synthetic oligonucleotide
gggttaaatccatgggtattcgttgcatctttgagtcgaaacaccgcagcgtctt

SEQ ID NO: 254433 - DNA, 60 bp, Artificial
  Synthetic oligonucleotide
cttgttgtcagtgatcacaatagggttcgggatttcaccatctagcaggtctaggtattc

SEQ ID NO: 254434 - DNA, 55 bp, Artificial
  Synthetic oligonucleotide
gggtggtatttctgcaatcctaatcgtggcgctatcaaccacatcggcttacgcg

SEQ ID NO: 254435 - DNA, 55 bp, Artificial
  Synthetic oligonucleotide
gggtgcttgtggttgcgccttttgcccagtttaggtgggcattgaacgtggcctc

SEQ ID NO: 254436 - DNA, 55 bp, Artificial
  Synthetic oligonucleotide
gggtgaagaatgcctttcgccctgacgtggttcacaccgcttatcaataccttaa

SEQ ID NO: 254437 - DNA, 55 bp, Artificial
  Synthetic oligonucleotide
gggtctgagagttaaccctgcctcttatgtctcttgttatgagaataaatttgtt

SEQ ID NO: 254438 - DNA, 55 bp, Artificial
  Synthetic oligonucleotide
gggtctactgctctggctatgattctccaggctctggtgttttgccctggattgt

SEQ ID NO: 254439 - DNA, 55 bp, Artificial
  Synthetic oligonucleotide
gggtcgctctattctatcttcgcgaacggtcatccaattgttcttataaacgact

SEQ ID NO: 254440 - DNA, 55 bp, Artificial
  Synthetic oligonucleotide
gggtcgattaacccactgcctgaacgtttgattcgtcgttgcttcaatgtgacga

SEQ ID NO: 254441 - DNA, 55 bp, Artificial
  Synthetic oligonucleotide
gggtcactcgctcattgagtttgtgagcctctaaatacgctcccacttccatgca

SEQ ID NO: 254442 - DNA, 54 bp, Artificial
  Synthetic oligonucleotide
gggtacgtgagttacgcggcgatacgatcaggtggttaaacttgacggggcgga

SEQ ID NO: 254443 - DNA, 55 bp, Artificial
  Synthetic oligonucleotide
gggtaactcgccttgcatttcgttaggagcttgcgagtataagaaatgctcgttc

SEQ ID NO: 254444 - DNA, 56 bp, Artificial
  Synthetic oligonucleotide
gttaggtggtaacatgtcgcttaatgtgaagagtgggatttaacgtaatgtcactt

SEQ ID NO: 254445 - DNA, 53 bp, Artificial
  Synthetic oligonucleotide
ctttaaattcacgtcgatcaatggcacacccgaaaaaagtgtaaactccggtc

SEQ ID NO: 254446 - DNA, 55 bp, Artificial
  Synthetic oligonucleotide
gggtaaacgcacgggttacgatggctttaaccgagtattgaatgcgagtcggcag

SEQ ID NO: 254447 - DNA, 55 bp, Artificial
  Synthetic oligonucleotide
gggcggaaggcacgcaaaggtaagaacacatcgttagaaggcaaatcagggcgca

SEQ ID NO: 254448 - DNA, 54 bp, Artificial
  Synthetic oligonucleotide
gggcggtaattcgtcgtatcgaaacgaagattccaacttgtgaagaacttaatc

SEQ ID NO: 254449 - DNA, 55 bp, Artificial
  Synthetic oligonucleotide
gggcgtacgatatactttcgtttgttgtgaatccacaaacacatgaggagtttcg

SEQ ID NO: 254450 - DNA, 55 bp, Artificial
  Synthetic oligonucleotide
gggctaccaaccaccaattttgtggggttagcggagctttatattgcgactcggc

SEQ ID NO: 254451 - DNA, 55 bp, Artificial
  Synthetic oligonucleotide
gggctgcaatatcattcgaaggatagcgtaaagggtcaatcatagacgttaagac

SEQ ID NO: 254452 - DNA, 55 bp, Artificial
  Synthetic oligonucleotide
gggctgcatgttatagcttgctcggtttggtcggtcgacaatctcgttatccggc

SEQ ID NO: 254453 - DNA, 55 bp, Artificial
  Synthetic oligonucleotide
gggctggacatcggtggatgtatcttgctgtggttatcgatttattttcgagaaa

SEQ ID NO: 254454 - DNA, 55 bp, Artificial
  Synthetic oligonucleotide
gggcttatcgggtatagcatgagcggtgcttacacggaaaacttagtggcatcaa

SEQ ID NO: 254455 - DNA, 55 bp, Artificial
  Synthetic oligonucleotide
gggcttcgaactccctttgctcgtcaaagcacggaatttagccaagtgccagcgg

SEQ ID NO: 254456 - DNA, 52 bp, Artificial
  Synthetic oligonucleotide
ctttacaccctttcttactatacgtttttcctaataacgagcctaatctcgc

SEQ ID NO: 254457 - DNA, 55 bp, Artificial
  Synthetic oligonucleotide
ggggaaacaacttacttttcgcggcagtcgggtgaatggcttcatagccggagcg

SEQ ID NO: 254458 - DNA, 55 bp, Artificial
  Synthetic oligonucleotide
ggggcatattcaatgtaccaacgataaatggtcgaacgattaaccgaaatccctc

SEQ ID NO: 254459 - DNA, 55 bp, Artificial
  Synthetic oligonucleotide
ggggcgtgcgatcatgagtatcttccaagcgaccccgcttcagtatccgctcacc

SEQ ID NO: 254460 - DNA, 55 bp, Artificial
  Synthetic oligonucleotide
ggggcgtttagaccaaccaaagagccgctgcgtactctctcacaatttcgtgcta

SEQ ID NO: 254461 - DNA, 55 bp, Artificial
  Synthetic oligonucleotide
ggggtgaacgcggataaaatactttacactattgcgccaaagtcaattgacgcat

SEQ ID NO: 254462 - DNA, 55 bp, Artificial
  Synthetic oligonucleotide
ggggttcctgtggacttgcaatcactaaggccaatccagcacaagccattgaaat

SEQ ID NO: 254463 - DNA, 54 bp, Artificial
  Synthetic oligonucleotide
ggggttttcgttaggtcagcgatatagcgtcttggcttctctgtaggttaaggg

SEQ ID NO: 254464 - DNA, 55 bp, Artificial
  Synthetic oligonucleotide
gggtaaacccgagatctaagggcttaagtagatttgggtacatgttagacatcgc

SEQ ID NO: 254465 - DNA, 55 bp, Artificial
  Synthetic oligonucleotide
actcacgtactacacctacgtgatcgtctaggtcttcaagacatcctaactgacg

SEQ ID NO: 254466 - DNA, 55 bp, Artificial
  Synthetic oligonucleotide
actcaccaagaacactctttacaggctgtcacggaaggtaacctccaagttcgcg

SEQ ID NO: 254467 - DNA, 60 bp, Artificial
  Synthetic oligonucleotide
taccagcaaagtggtcagtaagcactacgaatgtgaaaaccctgcttgtgagcaccgcta

SEQ ID NO: 254468 - DNA, 55 bp, Artificial
  Synthetic oligonucleotide
acatatcgtccggcttcatcaggaaggtatataataagttaagctgaacaggtat

SEQ ID NO: 254469 - DNA, 55 bp, Artificial
  Synthetic oligonucleotide
cagttggcacatgcttacgccacgttagggaattacggcaaataccaaccggtgc

SEQ ID NO: 254470 - DNA, 55 bp, Artificial
  Synthetic oligonucleotide
attgtgaaaccacgacgggcatgcttaaccctatcgaacccattgccgccttagc

SEQ ID NO: 254471 - DNA, 55 bp, Artificial
  Synthetic oligonucleotide
acatcgttgatacggtgtttaagaaagcgattcttatctctggtgttggtagccg

SEQ ID NO: 254472 - DNA, 55 bp, Artificial
  Synthetic oligonucleotide
ccggcccctaaacgccagcatatggtaactatcgaaccagaaagactaccagagt

SEQ ID NO: 254473 - DNA, 55 bp, Artificial
  Synthetic oligonucleotide
acattggctattgggagccttatgccattactgatgtgactcgtgttccgttttg

SEQ ID NO: 254474 - DNA, 55 bp, Artificial
  Synthetic oligonucleotide
ccggagttccggatggcaatgaaagataatgcactgatttactgggatcagaccg

SEQ ID NO: 254475 - DNA, 55 bp, Artificial
  Synthetic oligonucleotide
atttcacgcacaatagcgataaacttgactggctctaggtgatcaaacttacccc

SEQ ID NO: 254476 - DNA, 55 bp, Artificial
  Synthetic oligonucleotide
accaatacgtttcaggacgcagacgatagtagaactcaccatggagagacggggt

SEQ ID NO: 254477 - DNA, 55 bp, Artificial
  Synthetic oligonucleotide
ccgctttagtgccatcgtcacgagttcagagcccgtcgctaaaatcgattcagcc

SEQ ID NO: 254478 - DNA, 60 bp, Artificial
  Synthetic oligonucleotide
gctgcgccttacactccgctggacgctgcgtttcagttgcatgggcgcgtctgcggctac

SEQ ID NO: 254479 - DNA, 55 bp, Artificial
  Synthetic oligonucleotide
ccgctttaatgcgcttccctctgacgtccgttatatcttgaccgaatacggcgtc

SEQ ID NO: 254480 - DNA, 55 bp, Artificial
  Synthetic oligonucleotide
ccgcttcggatgacaatcgttcattcaaggtttctgttggaacgcacaacacctc

SEQ ID NO: 254481 - DNA, 55 bp, Artificial
  Synthetic oligonucleotide
ccgcttcctagcattaacgtattggtgcgtaaacattttaggtcgaggtgactcc

SEQ ID NO: 254482 - DNA, 55 bp, Artificial
  Synthetic oligonucleotide
ccgcttagtagttgcttgcgtgcagaggaatacgtttagtgccgtttacctagag

SEQ ID NO: 254483 - DNA, 55 bp, Artificial
  Synthetic oligonucleotide
ccgctcacttacttccattcgctcagcaagttgggtggcggtgaccgcatatcgc

SEQ ID NO: 254484 - DNA, 54 bp, Artificial
  Synthetic oligonucleotide
ccgctattggcggccgcttaaaatagcggcctaggtatctaacggttggaccga

SEQ ID NO: 254485 - DNA, 54 bp, Artificial
  Synthetic oligonucleotide
attttgaggtgccgagttgggcgcttagtggggatacttgggctcggtttcgct

SEQ ID NO: 254486 - DNA, 55 bp, Artificial
  Synthetic oligonucleotide
ccgctatggaaacccatacaaggctatcaaaggtcgcgcattatactaacttgag

SEQ ID NO: 254487 - DNA, 55 bp, Artificial
  Synthetic oligonucleotide
cctaagctgtttggtcaagagcgcatgtactctgtatcactcatcaatgttcatt

SEQ ID NO: 254488 - DNA, 55 bp, Artificial
  Synthetic oligonucleotide
attcgtgacaaacttcaatcaggcgagccaggtagcgttatagaagcaatgcgag

SEQ ID NO: 254489 - DNA, 60 bp, Artificial
  Synthetic oligonucleotide
acttcttaccatgcatatgctgacgagcctgaaaaacaacgagtgatggctgttcaatca

SEQ ID NO: 254490 - DNA, 55 bp, Artificial
  Synthetic oligonucleotide
cagtgaaacgttagctcgcctcattcgtcacatggtaactgacacccaacccgat

SEQ ID NO: 254491 - DNA, 55 bp, Artificial
  Synthetic oligonucleotide
cctaagcgtacaaccgcttggttaactgatgatacgctcttaccacgcgagaaat

SEQ ID NO: 254492 - DNA, 55 bp, Artificial
  Synthetic oligonucleotide
cagtgaagcgaacttggatgcgggaggtgggttctttagccaacagattgccgcg

SEQ ID NO: 254493 - DNA, 55 bp, Artificial
  Synthetic oligonucleotide
ccgttttagccctgaaatagagcagtgacataatcgctcggtttatcgcgtaacc

SEQ ID NO: 254494 - DNA, 55 bp, Artificial
  Synthetic oligonucleotide
ccgttgatcatgacaacgatagtcttctcgtcttcaactagcgctttctcgtcaa

SEQ ID NO: 254495 - DNA, 55 bp, Artificial
  Synthetic oligonucleotide
ccgtgtccacgacttaccacaagatccgtcagacaataaatctcaatgggtacgt

SEQ ID NO: 254496 - DNA, 55 bp, Artificial
  Synthetic oligonucleotide
ccgtgtagacattaacggcatgtttgagcttggttctcgattggacgttttaacc

SEQ ID NO: 254497 - DNA, 55 bp, Artificial
  Synthetic oligonucleotide
acacggaaaccgtgtagtctggcagcaagtcgtagtagatgatttgggagtcttg

SEQ ID NO: 254498 - DNA, 55 bp, Artificial
  Synthetic oligonucleotide
cagtgccagaatgtcagtatcgccccataagcgagtctcgccaggtagaggttcg

SEQ ID NO: 254499 - DNA, 55 bp, Artificial
  Synthetic oligonucleotide
ccgtggagcgctaaaatcttggtggattgtgtccgcagtttagtgactcactatg

SEQ ID NO: 254500 - DNA, 57 bp, Artificial
  Synthetic oligonucleotide
gatcttcgtcgccgtgtatttttaccgtggaaagggcagaaggtctgcactgtccgc

SEQ ID NO: 254501 - DNA, 55 bp, Artificial
  Synthetic oligonucleotide
acagccttataccaaggcattaatgtctgcagtgcctattcctgaccccaacatc

SEQ ID NO: 254502 - DNA, 55 bp, Artificial
  Synthetic oligonucleotide
actccgctggacgctgcgtttcagttgcatgggcgcgtctgcggctacgccttga

SEQ ID NO: 254503 - DNA, 55 bp, Artificial
  Synthetic oligonucleotide
ccgtcggtacgcttaggtcaagagtacaatcaggattatcgctagaagaagcaat

SEQ ID NO: 254504 - DNA, 55 bp, Artificial
  Synthetic oligonucleotide
ccgtcgctaagcctccgattcgtagtaaaagccctagtggaatagagcactgccg

SEQ ID NO: 254505 - DNA, 55 bp, Artificial
  Synthetic oligonucleotide
ccgtcgcagttttaagcggtatgttgacgcttgcaggtccagcaatggcggacac

SEQ ID NO: 254506 - DNA, 51 bp, Artificial
  Synthetic oligonucleotide
ccgtcaactaaaagggttaccggaagataaaggtctctggcgtcaaattct

SEQ ID NO: 254507 - DNA, 55 bp, Artificial
  Synthetic oligonucleotide
ccgtaattatgacagagcaaagctataacgccggatccattgaggtcctaaacgg

SEQ ID NO: 254508 - DNA, 55 bp, Artificial
  Synthetic oligonucleotide
ccgtaactaatgatttacccatgagggctaagctccagtaaagaggttcagctcg

SEQ ID NO: 254509 - DNA, 55 bp, Artificial
  Synthetic oligonucleotide
ccggtggtcaagctaacgtatcactggttgtggcgggtctgattggtatggctgc

SEQ ID NO: 254510 - DNA, 55 bp, Artificial
  Synthetic oligonucleotide
agccatggagcgagtgccttaagaggttgccggattactgccaggagctaggtct

SEQ ID NO: 254511 - DNA, 60 bp, Artificial
  Synthetic oligonucleotide
ggcctatcagcaccgaaaaagagcacatcactaagatggccaacaatctactgcgtagaa

SEQ ID NO: 254512 - DNA, 54 bp, Artificial
  Synthetic oligonucleotide
ccgatggaaattctggagccaacggggttggtaagtcgttacttactggatcac

SEQ ID NO: 254513 - DNA, 55 bp, Artificial
  Synthetic oligonucleotide
ccgatcgcaattgtacgcgtgatgtctgtcgtgccatctaggtactgaccgcctg

SEQ ID NO: 254514 - DNA, 55 bp, Artificial
  Synthetic oligonucleotide
ccgaggaattcaatcgttagttgcagagctttataagcaaccacaagaggtcagc

SEQ ID NO: 254515 - DNA, 54 bp, Artificial
  Synthetic oligonucleotide
caaactggccgtttcggctgcctaatttctacccgattgaggagtggtttacgc

SEQ ID NO: 254516 - DNA, 55 bp, Artificial
  Synthetic oligonucleotide
ccgagcttgggcctgaaggtaaaccgatcgcgacttgatcatcacgcaatggcgc

SEQ ID NO: 254517 - DNA, 55 bp, Artificial
  Synthetic oligonucleotide
ccgagacggccattagcacgattgccgaagcctgaataataacgccatacaacgc

SEQ ID NO: 254518 - DNA, 55 bp, Artificial
  Synthetic oligonucleotide
ccgacttgggtggcggtcccgctatcatagacttgagtgagtcgacagaccggag

SEQ ID NO: 254519 - DNA, 55 bp, Artificial
  Synthetic oligonucleotide
ccgactgtaggtagcgtgaccatgttattcgtccaagaggctatcggtggtatcg

SEQ ID NO: 254520 - DNA, 55 bp, Artificial
  Synthetic oligonucleotide
caatcgcacttggcgacctagaaggtaagaaacgcgcattcctagtaactgaccg

SEQ ID NO: 254521 - DNA, 51 bp, Artificial
  Synthetic oligonucleotide
accgcttcggtggattccctaacctaacccgttagacgaatgagcttaaaa

SEQ ID NO: 254522 - DNA, 60 bp, Artificial
  Synthetic oligonucleotide
ggcctctcgactgctacgcagtgaggccttatgtcggtgtggtaagtgctttttgtcatt

SEQ ID NO: 254523 - DNA, 55 bp, Artificial
  Synthetic oligonucleotide
ccgacctgactcacaaggcagcgcgaccaagttttgaatgacgccatgcgccaag

SEQ ID NO: 254524 - DNA, 55 bp, Artificial
  Synthetic oligonucleotide
ccgaattaagcggcaacgggtcgctgtcagaccagacattttctctaacgcacca

SEQ ID NO: 254525 - DNA, 55 bp, Artificial
  Synthetic oligonucleotide
ccgaagatcatgcttagcgcgagccctaaagagcagccgaaccaaattcgtaagg

SEQ ID NO: 254526 - DNA, 55 bp, Artificial
  Synthetic oligonucleotide
ccgaactatgaagagacaaaagcgggatcgtttagaacgtgcgcaggctcgaggt

SEQ ID NO: 254527 - DNA, 55 bp, Artificial
  Synthetic oligonucleotide
ccgaacaatactgtcgatagtgttgaagtacgctcagagcccgttagcatgtcga

SEQ ID NO: 254528 - DNA, 55 bp, Artificial
  Synthetic oligonucleotide
accgtaacgatgaggtaagcgcgatgtccgtatcagcagtttctaatggttcatc

SEQ ID NO: 254529 - DNA, 55 bp, Artificial
  Synthetic oligonucleotide
caaaggcgagtgtcttaagaagggcgtcggtggctcagacaatgagtgcctgagt

SEQ ID NO: 254530 - DNA, 55 bp, Artificial
  Synthetic oligonucleotide
catcaaacaaagacatatgacgtcggcaacgactggctatttggttaatatggtc

SEQ ID NO: 254531 - DNA, 55 bp, Artificial
  Synthetic oligonucleotide
ccgctagcgagcttattgccctaccgattgagctaattgaaacatggcgctcaca

SEQ ID NO: 254532 - DNA, 55 bp, Artificial
  Synthetic oligonucleotide
caaaacgtcacatcctgactaagcgtactactaagaacaagcgtcagctacgtcc

SEQ ID NO: 254533 - DNA, 59 bp, Artificial
  Synthetic oligonucleotide
gatgatgttgatcatgttgaacccaataaatccgacacttatctagttgtaaaactaaa

SEQ ID NO: 254534 - DNA, 54 bp, Artificial
  Synthetic oligonucleotide
ccgctaagaaattcaataccaaacctgtcccgacgaaacgcgcagcgttagacc

SEQ ID NO: 254535 - DNA, 55 bp, Artificial
  Synthetic oligonucleotide
ccgcgttctagacctactagaagagagcggtgacctacgtgaccgtctatgggaa

SEQ ID NO: 254536 - DNA, 55 bp, Artificial
  Synthetic oligonucleotide
accacggcgctgcgacagtagacagtgatgacatgatgacgtggcaagcacgtga

SEQ ID NO: 254537 - DNA, 55 bp, Artificial
  Synthetic oligonucleotide
ccgcgcccatgatcaacagagtgataacggacgttaagatcatgtccagatcatc

SEQ ID NO: 254538 - DNA, 55 bp, Artificial
  Synthetic oligonucleotide
cataaaagccttacctgaacggatagatgcattatgacatgcgcgagccaacatc

SEQ ID NO: 254539 - DNA, 55 bp, Artificial
  Synthetic oligonucleotide
catacaccttgtacgagcaagacggtaaacaatcgatgcatggtggcatgtcttc

SEQ ID NO: 254540 - DNA, 55 bp, Artificial
  Synthetic oligonucleotide
agatcaagattacctttacctccgttggtctcgatactcaagcgacgacctgcag

SEQ ID NO: 254541 - DNA, 55 bp, Artificial
  Synthetic oligonucleotide
accagtgttatcgtgttagggtcatttggtgcctaatttggcgagcaaggttaac

SEQ ID NO: 254542 - DNA, 55 bp, Artificial
  Synthetic oligonucleotide
ccgcatgtaaatagtcacacgttggagagttaacctatggttaagcaggcgttat

SEQ ID NO: 254543 - DNA, 55 bp, Artificial
  Synthetic oligonucleotide
ccgcagcgtcacgtatcattccatgaaccttgctaatattcggtgttgtgaggca

SEQ ID NO: 254544 - DNA, 60 bp, Artificial
  Synthetic oligonucleotide
ggtgacgttcagtgattactttaacggtaatcgagcgcaggtgatcatcgcaatgggtga

SEQ ID NO: 254545 - DNA, 55 bp, Artificial
  Synthetic oligonucleotide
ccgcagcgctagtcgtcaccaccattggatctatcactgtcggtccgatgaatat

SEQ ID NO: 254546 - DNA, 55 bp, Artificial
  Synthetic oligonucleotide
caaacctcttactagcaacgcccttaacagttctgctttatctttatgcgtgtcg

SEQ ID NO: 254547 - DNA, 51 bp, Artificial
  Synthetic oligonucleotide
acccacaacaacatttacttaaacccgttcactcacttagggaaaatggcc

SEQ ID NO: 254548 - DNA, 55 bp, Artificial
  Synthetic oligonucleotide
ccgcagacaaaccactcgacgaattaaaagtacctacagatggtgagcttctagg

SEQ ID NO: 254549 - DNA, 55 bp, Artificial
  Synthetic oligonucleotide
caaacgccatagagagtgcctttcctgtcaacttgctatcgggcgagactgacat

SEQ ID NO: 254550 - DNA, 55 bp, Artificial
  Synthetic oligonucleotide
agccctgcgttgaggtcaacgtgacacgcacggaaacaggcgtcacgctggcatc

SEQ ID NO: 254551 - DNA, 55 bp, Artificial
  Synthetic oligonucleotide
ccgattgatttatgtgaaaccgtagcatccaagattaggacgcattgtcagctaa

SEQ ID NO: 254552 - DNA, 55 bp, Artificial
  Synthetic oligonucleotide
caatcgcttgatcgctctcatctaagtgcaattgagtaacaaacgatcggtcaat

SEQ ID NO: 254553 - DNA, 55 bp, Artificial
  Synthetic oligonucleotide
cgaatagagaatactgcttactcagtgggcgaatggaatccaaacttaacaccga

SEQ ID NO: 254554 - DNA, 55 bp, Artificial
  Synthetic oligonucleotide
cgaagtgaatcatatcgatatttaaccgtaacgctcgacttggctacatgcgaat

SEQ ID NO: 254555 - DNA, 55 bp, Artificial
  Synthetic oligonucleotide
gcttagcagaggtaaaacggtacgcggtgtgacctttagaaaagactgtgtactc

SEQ ID NO: 254556 - DNA, 57 bp, Artificial
  Synthetic oligonucleotide
gatgcgtacggctgtacgtaatgatcatgaaaccaccgtttacttcaataaaaactc

SEQ ID NO: 254557 - DNA, 55 bp, Artificial
  Synthetic oligonucleotide
cgaagctattaataccaatgtatcagtaggccagtacgcccaatcagggtacgct

SEQ ID NO: 254558 - DNA, 55 bp, Artificial
  Synthetic oligonucleotide
cgaagccacctgaaccattacgaacctttacaaatcgaccattatcttcactacc

SEQ ID NO: 254559 - DNA, 55 bp, Artificial
  Synthetic oligonucleotide
cgaactgctcataatgagacacgtcttgtgtgacggggtaacggaatgtaagcgt

SEQ ID NO: 254560 - DNA, 55 bp, Artificial
  Synthetic oligonucleotide
cgaacgcatcgttaatgaggtgaaagaacgcctgaatggtcaccaacccaaagcc

SEQ ID NO: 254561 - DNA, 55 bp, Artificial
  Synthetic oligonucleotide
agctctattgagattgagtaatcgcccgcagggttcacgcttacatctttggcag

SEQ ID NO: 254562 - DNA, 55 bp, Artificial
  Synthetic oligonucleotide
caggcattgtcgtcgctctcccgatgaaagcgagttcaaactaccgcggcaccaa

SEQ ID NO: 254563 - DNA, 55 bp, Artificial
  Synthetic oligonucleotide
cgaacatgcagcgtataacgcttagcggtgaaggattaagtaagtacccaaccga

SEQ ID NO: 254564 - DNA, 55 bp, Artificial
  Synthetic oligonucleotide
caggcatttccgttttgaacgtactgtcgccataaacacaattactgagtgtact

SEQ ID NO: 254565 - DNA, 55 bp, Artificial
  Synthetic oligonucleotide
actcgccttgcatttcgttaggagcttgcgagtataagaaatgctcgtttagcgc

SEQ ID NO: 254566 - DNA, 53 bp, Artificial
  Synthetic oligonucleotide
cgaacaagctttaggtatcgagaaggtacaagacggaagaaaggttagaggaa

SEQ ID NO: 254567 - DNA, 59 bp, Artificial
  Synthetic oligonucleotide
gatgctgtcacgttaagtggcaataccttaatcgcaacgttagataaaagcaccgtcaa

SEQ ID NO: 254568 - DNA, 55 bp, Artificial
  Synthetic oligonucleotide
cagggcaaggttggtgccgccgtgttcattttcagttacggcaaacagatcattg

SEQ ID NO: 254569 - DNA, 55 bp, Artificial
  Synthetic oligonucleotide
aattaggggtttaatagaaatgagttcaggtgacatgagtgttgtggtgtacgca

SEQ ID NO: 254570 - DNA, 55 bp, Artificial
  Synthetic oligonucleotide
cagggccgccaactaaaccacccaacactaatccaagtgttgcacaagccatcgc

SEQ ID NO: 254571 - DNA, 55 bp, Artificial
  Synthetic oligonucleotide
cgaaactctgtaggagccatcgtcaatgaaactaattaaacgctcagacagcgtc

SEQ ID NO: 254572 - DNA, 55 bp, Artificial
  Synthetic oligonucleotide
atgtgatgactcggcggttgctcgtaagcttatcgctcgaaccatcgtacaagat

SEQ ID NO: 254573 - DNA, 55 bp, Artificial
  Synthetic oligonucleotide
actcgccttcataacaagtggcgtcatctcgtttacaaatagaacaaagctctcg

SEQ ID NO: 254574 - DNA, 55 bp, Artificial
  Synthetic oligonucleotide
cgaaacctaatgaatgaatacgtaacgcatggacagctggttgaaatcatcgagc

SEQ ID NO: 254575 - DNA, 55 bp, Artificial
  Synthetic oligonucleotide
cgagaagtcgtcaataagatgctgaacgccaaacctcatccagagcaggcctatc

SEQ ID NO: 254576 - DNA, 55 bp, Artificial
  Synthetic oligonucleotide
agctgttagcatctatgcaagttgattcaccatcctctcacggtttgcaaaggat

SEQ ID NO: 254577 - DNA, 55 bp, Artificial
  Synthetic oligonucleotide
cgactaatacgcggtactcctcattatgtgcaacagcatgaggtcgagggccaac

SEQ ID NO: 254578 - DNA, 60 bp, Artificial
  Synthetic oligonucleotide
gatggtggacgatttgatcgccaacgtgaacaacgacttgcaagcaacactaaagagctt

SEQ ID NO: 254579 - DNA, 55 bp, Artificial
  Synthetic oligonucleotide
cgacggtgggttatggttgacttcgataacggcaacccttttgattggtgcaagc

SEQ ID NO: 254580 - DNA, 55 bp, Artificial
  Synthetic oligonucleotide
cagcgtacaatttccccgagagttctttgcataaatcaggtacaggagtcctatc

SEQ ID NO: 254581 - DNA, 55 bp, Artificial
  Synthetic oligonucleotide
aatgctagccactctggcagacgtgtagtgtggaacgcgttgtaagagtgccctg

SEQ ID NO: 254582 - DNA, 55 bp, Artificial
  Synthetic oligonucleotide
actgagcaaggggtacttcccgtcatggttggcatagctcgtaagtagacttttc

SEQ ID NO: 254583 - DNA, 55 bp, Artificial
  Synthetic oligonucleotide
cagctaacatcactgaccatacttagtcgtggcgatgttcccaaactttcaggcg

SEQ ID NO: 254584 - DNA, 55 bp, Artificial
  Synthetic oligonucleotide
aatggaccaacagtacacttctcaccaaccgttgcgccttcaatcacgctgtatg

SEQ ID NO: 254585 - DNA, 55 bp, Artificial
  Synthetic oligonucleotide
cgaccaatatgttaggaatgtagcgacgtacagagcggcaaagcctagccaaacc

SEQ ID NO: 254586 - DNA, 55 bp, Artificial
  Synthetic oligonucleotide
cgacatacctaatgccgcagcatcaattgcggacgttgcgaaaatcagaatcggg

SEQ ID NO: 254587 - DNA, 55 bp, Artificial
  Synthetic oligonucleotide
cgacactgacattaccaatggaagcgggtgcgtacaccacaacactcatgtcacc

SEQ ID NO: 254588 - DNA, 55 bp, Artificial
  Synthetic oligonucleotide
caatggaagaggttgagtccttttgatttgcgccgtaggcgcctattgttccagg

SEQ ID NO: 254589 - DNA, 54 bp, Artificial
  Synthetic oligonucleotide
caaactattggcggcgttcggtgcaacgaccaccccaagcaataccccgtcggc

SEQ ID NO: 254590 - DNA, 55 bp, Artificial
  Synthetic oligonucleotide
cgacacggaacaacgtatctaaatccggaaaaccgtgactgtgacgcttaggcac

SEQ ID NO: 254591 - DNA, 55 bp, Artificial
  Synthetic oligonucleotide
cgacacacacaatcccttcatagccacattgctctattaacaagcgggcgattaa

SEQ ID NO: 254592 - DNA, 55 bp, Artificial
  Synthetic oligonucleotide
cagctatggcactggtcgtgctttcatttgggtacttagtttatgcgcttattgg

SEQ ID NO: 254593 - DNA, 55 bp, Artificial
  Synthetic oligonucleotide
cgacaagtcacaccgaacagatagcagcgatagggcgctaaacgtttcatcactc

SEQ ID NO: 254594 - DNA, 55 bp, Artificial
  Synthetic oligonucleotide
cgaattttaattcaggctagtcattcattagcgtgtcggttcgcaggtgggtggc

SEQ ID NO: 254595 - DNA, 55 bp, Artificial
  Synthetic oligonucleotide
cgaattatcaccgatatcctgtgatttgtgacacaaagtggactcacttcgctgc

SEQ ID NO: 254596 - DNA, 55 bp, Artificial
  Synthetic oligonucleotide
cgaattactacagcgtttaacggcggtgatcattgggcatttcatgcgttatttg

SEQ ID NO: 254597 - DNA, 55 bp, Artificial
  Synthetic oligonucleotide
cagtacgtaatgacgagcaatacgagtacatggtattccctcgcgtactagcggc

SEQ ID NO: 254598 - DNA, 55 bp, Artificial
  Synthetic oligonucleotide
cctgagcgttgtagtctctcagacttaattttccacctagcaactgcttcaccct

SEQ ID NO: 254599 - DNA, 55 bp, Artificial
  Synthetic oligonucleotide
cctgactgttgttgggcgcattcagttacctaactgtcaggcatatccattgcca

SEQ ID NO: 254600 - DNA, 60 bp, Artificial
  Synthetic oligonucleotide
cagagagttgtgaagttgtccggtatgaaaaactgccgtcagactgggagagctacagcg

SEQ ID NO: 254601 - DNA, 55 bp, Artificial
  Synthetic oligonucleotide
acaatcaaataagtagaatcgctcactacactgcccttcgcgtaaataaggcccc

SEQ ID NO: 254602 - DNA, 55 bp, Artificial
  Synthetic oligonucleotide
cctcgttattgggctagagatgagtcagcattctcggatttaacaccaagtactc

SEQ ID NO: 254603 - DNA, 55 bp, Artificial
  Synthetic oligonucleotide
cctcgtccagaggtgtccatttcccgtccttagtagcaaccatcctagtcactat

SEQ ID NO: 254604 - DNA, 55 bp, Artificial
  Synthetic oligonucleotide
actcgacggaaacaccacttgcacattgttgatcataaatgaaaacgactgggtc

SEQ ID NO: 254605 - DNA, 55 bp, Artificial
  Synthetic oligonucleotide
cagtcatgtgtaattctcttaatctgatctcaagtcaggccgattccaccacatg

SEQ ID NO: 254606 - DNA, 55 bp, Artificial
  Synthetic oligonucleotide
cctcggtaacgcccagcggatgtatacgttacgaccttatcaagccgactcagtg

SEQ ID NO: 254607 - DNA, 55 bp, Artificial
  Synthetic oligonucleotide
cctcccgtaaatcccgttttcttgaccgtatgaatgttctggtgccgtggcagga

SEQ ID NO: 254608 - DNA, 55 bp, Artificial
  Synthetic oligonucleotide
cctcccgctggtttctttcggcgtttaggggcatggacctacgacgcactgatcg

SEQ ID NO: 254609 - DNA, 55 bp, Artificial
  Synthetic oligonucleotide
cctccatgctaaaccctaacattcacatcacgacccttgagctagacggatttcc

SEQ ID NO: 254610 - DNA, 55 bp, Artificial
  Synthetic oligonucleotide
cctccatcggttaatcaaaagcgtttagaaggatcatttagtacaaagctgacta

SEQ ID NO: 254611 - DNA, 60 bp, Artificial
  Synthetic oligonucleotide
caaagcacatgcgaccactacatagaatacatttgtacgggtctatgcctaccaggtgat

SEQ ID NO: 254612 - DNA, 54 bp, Artificial
  Synthetic oligonucleotide
cctcaacggttcggttttaacttggcgtcatatcaaccttcacggccaatacga

SEQ ID NO: 254613 - DNA, 55 bp, Artificial
  Synthetic oligonucleotide
cagtcggtatttattaatcgggtaacgatgcttttctggcaaggttagagccgag

SEQ ID NO: 254614 - DNA, 55 bp, Artificial
  Synthetic oligonucleotide
cctatgtgtcgtcttcgcagacgtcgaatgaaatatgcgacctaaattcgcggtc

SEQ ID NO: 254615 - DNA, 55 bp, Artificial
  Synthetic oligonucleotide
cctatcacttcctatcagcgccaaatgctagagtcgtttggctctttactctcac

SEQ ID NO: 254616 - DNA, 55 bp, Artificial
  Synthetic oligonucleotide
cctagtgtgatgatgacccctaaagtaacggcacaaaatttgccccttcgccgtg

SEQ ID NO: 254617 - DNA, 55 bp, Artificial
  Synthetic oligonucleotide
acacaaggtgaaccatcagtcagttcaggtgtagctgtagagtacggagacgaaa

SEQ ID NO: 254618 - DNA, 55 bp, Artificial
  Synthetic oligonucleotide
cctactagaagagagcggtgacctacgtgaccgtctatgggaaaacgcagcacac

SEQ ID NO: 254619 - DNA, 55 bp, Artificial
  Synthetic oligonucleotide
cagggcgttaggcgacatgagcgaaacgatagagtagtgatagtatcttggcgtg

SEQ ID NO: 254620 - DNA, 55 bp, Artificial
  Synthetic oligonucleotide
aatttctaatcttgtcaccatgcggagtttgccaagagcgccttgtccactgggg

SEQ ID NO: 254621 - DNA, 55 bp, Artificial
  Synthetic oligonucleotide
cctttcacttgaaccagcatttcgactcgcagccacacagccaaattctgctact

SEQ ID NO: 254622 - DNA, 56 bp, Artificial
  Synthetic oligonucleotide
gattcattcggtccgttaagaatgtttccggccatgtccattgtcgtagacaaacc

SEQ ID NO: 254623 - DNA, 55 bp, Artificial
  Synthetic oligonucleotide
acaaatggactaagcgagcatcgatagtgaagtgatttacttgtgacattgtcac

SEQ ID NO: 254624 - DNA, 55 bp, Artificial
  Synthetic oligonucleotide
cagggtacatcacgcaaaagcgatcacattatacacagctaactccatcagatgc

SEQ ID NO: 254625 - DNA, 54 bp, Artificial
  Synthetic oligonucleotide
ccttggcggaatttctcacgcaagaacaaggtacaaatttcgctgttacccgtg

SEQ ID NO: 254626 - DNA, 55 bp, Artificial
  Synthetic oligonucleotide
acaacccgatacgttggcgtggcaaatgttgatacatacggcctcctagcaccaa

SEQ ID NO: 254627 - DNA, 55 bp, Artificial
  Synthetic oligonucleotide
ccttgcgccatagtactggtagttcaatgggtatcgcgattgatctcgttgctga

SEQ ID NO: 254628 - DNA, 55 bp, Artificial
  Synthetic oligonucleotide
actcgatacaacggcgagcctgtcgaatatcaacttttctataacgattcttacg

SEQ ID NO: 254629 - DNA, 55 bp, Artificial
  Synthetic oligonucleotide
ccttccggtacagaatgttagcagcgatatgcgaatctttgttatagcccttacg

SEQ ID NO: 254630 - DNA, 55 bp, Artificial
  Synthetic oligonucleotide
ccttcaatgcctgttgtctgactactgagaagggttgattatcatcaatgttctc

SEQ ID NO: 254631 - DNA, 55 bp, Artificial
  Synthetic oligonucleotide
ccttattaccgtagcttcagtaatcttaatcctctcaaaccgcttcgtcgctctg

SEQ ID NO: 254632 - DNA, 55 bp, Artificial
  Synthetic oligonucleotide
ccttaccggtggtaagttcactgcaaacttgcacttcggatagttatcacacgcg

SEQ ID NO: 254633 - DNA, 60 bp, Artificial
  Synthetic oligonucleotide
caaatgtcggccttgctttaatccaagagtattgtgagcctacgtcctcaagcctatgag

SEQ ID NO: 254634 - DNA, 55 bp, Artificial
  Synthetic oligonucleotide
acaaccgcgataagtctcatctcaccttgtgtcgccgaactcgctaaactgtagc

SEQ ID NO: 254635 - DNA, 55 bp, Artificial
  Synthetic oligonucleotide
cctgtgacgccttaacagtcgtacttcctgaactagacgccctatttggagtccc

SEQ ID NO: 254636 - DNA, 55 bp, Artificial
  Synthetic oligonucleotide
cctgtcattagagcaatatacttcgctcgtttgtggtttggctggggagtttgaa

SEQ ID NO: 254637 - DNA, 55 bp, Artificial
  Synthetic oligonucleotide
cctggggtgtgcgtcagtgaatgaacgtccccgagccgataagcaaatacccagg

SEQ ID NO: 254638 - DNA, 55 bp, Artificial
  Synthetic oligonucleotide
attacttgctcaagttcaactttcttcgcatcaagatcgctacctagagtaccga

SEQ ID NO: 254639 - DNA, 55 bp, Artificial
  Synthetic oligonucleotide
acaactctcatttggaaggtaaactccatgactactaaccctaaaccagcgtatc

SEQ ID NO: 254640 - DNA, 55 bp, Artificial
  Synthetic oligonucleotide
cagtaccgccagcaatatatagtgtcatgctttctgcggttgcggtgttgtttcg

SEQ ID NO: 254641 - DNA, 55 bp, Artificial
  Synthetic oligonucleotide
acaagatcacgccaatctataaaggttcatacacagagaccttaacagcgggtat

SEQ ID NO: 254642 - DNA, 55 bp, Artificial
  Synthetic oligonucleotide
ccagtaactatgcgcgggagcaacaatggtctttgaccaaagttcacactattct

SEQ ID NO: 254643 - DNA, 55 bp, Artificial
  Synthetic oligonucleotide
ccaggttatcgcaacgctcgagtggacgtggatggtcaaaccgtcgttacacacg

SEQ ID NO: 254644 - DNA, 60 bp, Artificial
  Synthetic oligonucleotide
caacaagccaatgcagtgagtgagcacgcgacacaaaatcaagcgtcgcagaatgcccta

SEQ ID NO: 254645 - DNA, 55 bp, Artificial
  Synthetic oligonucleotide
acgctttgctatatcacccagtttgactaatgcatccgctcgtttattagaatct

SEQ ID NO: 254646 - DNA, 55 bp, Artificial
  Synthetic oligonucleotide
ccagctaacttaaggctgcaaccagggttgtttgcgagctacagtcaggcgttag

SEQ ID NO: 254647 - DNA, 55 bp, Artificial
  Synthetic oligonucleotide
ccagccttcatcggtccaaatcgtatcaggggtgacttcgtagacttgtgcacca

SEQ ID NO: 254648 - DNA, 55 bp, Artificial
  Synthetic oligonucleotide
ccagccgtgcttttcagtacaactcgggtgactacggccaattccatactgaaag

SEQ ID NO: 254649 - DNA, 55 bp, Artificial
  Synthetic oligonucleotide
catggtacggtccattgaacgagaaagtaggtgctatttgtacttacggtgatcc

SEQ ID NO: 254650 - DNA, 55 bp, Artificial
  Synthetic oligonucleotide
ccagatgagttcacgcatgagcctgagcttggtttagctgcgggtacggatggtc

SEQ ID NO: 254651 - DNA, 55 bp, Artificial
  Synthetic oligonucleotide
ccagatccaagagcaacagattgatagtggacacgaccaaccaagccacccaatc

SEQ ID NO: 254652 - DNA, 55 bp, Artificial
  Synthetic oligonucleotide
ccagagtcgtcgtttctataacgtcggcgtaagccccaaagcttgtactcgcggc

SEQ ID NO: 254653 - DNA, 55 bp, Artificial
  Synthetic oligonucleotide
ccagaatgcggctccgtctcgtggaggaatgagtgcgactgctcgctttatacgg

SEQ ID NO: 254654 - DNA, 55 bp, Artificial
  Synthetic oligonucleotide
ccacttggattgtctcgggcgctctagccttgtttacgattttatttggtactcg

SEQ ID NO: 254655 - DNA, 60 bp, Artificial
  Synthetic oligonucleotide
ggcgagaaaggctcgctgattaacctcatcatgagccacaaagacatgggctataaagag

SEQ ID NO: 254656 - DNA, 55 bp, Artificial
  Synthetic oligonucleotide
caagcacgaacggcgtttaatcttcccgttgttggtctctagctcgctgctgttt

SEQ ID NO: 254657 - DNA, 55 bp, Artificial
  Synthetic oligonucleotide
ccactggtagtcactgggtgccgcagcaatcccgtaacgcttctggtcagcatcg

SEQ ID NO: 254658 - DNA, 55 bp, Artificial
  Synthetic oligonucleotide
ccactcggcattcgctcgcataatctggggttgactctgcagctaactttgacgg

SEQ ID NO: 254659 - DNA, 55 bp, Artificial
  Synthetic oligonucleotide
ccactcattggctagctcagggatgaattcaagcgtatctgggtggcgaaccacc

SEQ ID NO: 254660 - DNA, 55 bp, Artificial
  Synthetic oligonucleotide
acggggtgaccagtcgaggaccatttacaatcgagatatcaagccagttctcggt

SEQ ID NO: 254661 - DNA, 55 bp, Artificial
  Synthetic oligonucleotide
catggtcagtagaacgtcaacacaacatggagtggtggttcaaggagtagcctca

SEQ ID NO: 254662 - DNA, 55 bp, Artificial
  Synthetic oligonucleotide
ccacgcattgcacattcgccagcaaagacgggatgtcggaaattacgacttcggt

SEQ ID NO: 254663 - DNA, 55 bp, Artificial
  Synthetic oligonucleotide
acgccttattcagtttcacttcggcccaaatttgaatacgagtgaggataaccac

SEQ ID NO: 254664 - DNA, 55 bp, Artificial
  Synthetic oligonucleotide
ccatggtagttcgcgatagctcaatacccgactgagtaaacagcgactctggcgg

SEQ ID NO: 254665 - DNA, 55 bp, Artificial
  Synthetic oligonucleotide
caagaaatccgcctaactggcaacgtaacaggcagcgcgccattcaacggcacgc

SEQ ID NO: 254666 - DNA, 60 bp, Artificial
  Synthetic oligonucleotide
gttagctttctgtaaggctctcagattcttctctgctgctctactcatcatgtaatagcc

SEQ ID NO: 254667 - DNA, 58 bp, Artificial
  Synthetic oligonucleotide
cctaaaggcgacatatcgagacccaaacccaccagggtttccgtcatgcgagctctgc

SEQ ID NO: 254668 - DNA, 55 bp, Artificial
  Synthetic oligonucleotide
catgccctgagtaactcccacgcccatcaatcaacgtagagtgactgttgacggg

SEQ ID NO: 254669 - DNA, 55 bp, Artificial
  Synthetic oligonucleotide
ccatgcctaaacctgccatcatcgattgtattacagcaacaccaatcaccccttg

SEQ ID NO: 254670 - DNA, 55 bp, Artificial
  Synthetic oligonucleotide
agcaaggagaattgaggagcaggtcagggcaagacatttacgaatggaaggggcc

SEQ ID NO: 254671 - DNA, 55 bp, Artificial
  Synthetic oligonucleotide
caagatgatgtgagaccttatccgtttgaggaggcattagagattcaccacgcgc

SEQ ID NO: 254672 - DNA, 55 bp, Artificial
  Synthetic oligonucleotide
catgctcaaggccttgtgattcgtgatctccctcttatcgcttctaacttccgca

SEQ ID NO: 254673 - DNA, 55 bp, Artificial
  Synthetic oligonucleotide
ccatgacctgccataaccgcgttcatcgcatgatcgaacgtactgacatccatcc

SEQ ID NO: 254674 - DNA, 55 bp, Artificial
  Synthetic oligonucleotide
agcaacacgggtaaatttggccagttttgtttgatgctacgtaacagtgctaagc

SEQ ID NO: 254675 - DNA, 55 bp, Artificial
  Synthetic oligonucleotide
catgcttgtttaccctattcatcgcagtgggtgcaacgtatcattgctgactaag

SEQ ID NO: 254676 - DNA, 55 bp, Artificial
  Synthetic oligonucleotide
caataagacgaccgcaatactcatgttggtaccgatcaaaacgtccactagtgcc

SEQ ID NO: 254677 - DNA, 55 bp, Artificial
  Synthetic oligonucleotide
ccatcgtaccctacatgcagcaacaagttttgaccgtcttgcataagacgagagg

SEQ ID NO: 254678 - DNA, 57 bp, Artificial
  Synthetic oligonucleotide
ggtcaaacgtctttgacgtagagaaagttccgatggagtggcgctctatcccttatg

SEQ ID NO: 254679 - DNA, 55 bp, Artificial
  Synthetic oligonucleotide
ccatcccggtttgtggactacgatcgaacagttgaaaattgagaccgttgtagcg

SEQ ID NO: 254680 - DNA, 55 bp, Artificial
  Synthetic oligonucleotide
ccatcacaggtgtacgcgcattgttgatcgcgttatttgcgttgtcttcgcggta

SEQ ID NO: 254681 - DNA, 55 bp, Artificial
  Synthetic oligonucleotide
ccatacaggacggtactcaagacccatgcgatcgaatgctttacagtaagcgtcg

SEQ ID NO: 254682 - DNA, 55 bp, Artificial
  Synthetic oligonucleotide
ccagttctttaactgttttagtggctctacccattgattcactaaaggcagagcc

SEQ ID NO: 254683 - DNA, 55 bp, Artificial
  Synthetic oligonucleotide
ccagttcgccagcactgagttaggtacgacgatcagagtcttactggctcggccc

SEQ ID NO: 254684 - DNA, 55 bp, Artificial
  Synthetic oligonucleotide
ccagttaaatgggtcgtacgctgtcgctatcgagctgtgcattaaatcgacgctc

SEQ ID NO: 254685 - DNA, 55 bp, Artificial
  Synthetic oligonucleotide
ccagtgacgcatacggtcacccattgaaaccaacatgtaagcgactggaatagcg

SEQ ID NO: 254686 - DNA, 55 bp, Artificial
  Synthetic oligonucleotide
ccagtattaccatcgctctatttggatcttgggctatgtggtttgtgctccggca

SEQ ID NO: 254687 - DNA, 55 bp, Artificial
  Synthetic oligonucleotide
ccaagccggaggttgatgcttagagttgaacttaaaatgggtctctcttggcggc

SEQ ID NO: 254688 - DNA, 55 bp, Artificial
  Synthetic oligonucleotide
ccaactccgatacacgtcccttccgtgactggctgcgttggggacatggtcgagt

SEQ ID NO: 254689 - DNA, 60 bp, Artificial
  Synthetic oligonucleotide
cagaagccatgctcacctcgacgaaccttgtcctccctatcgatgcgctcttttggtgct

SEQ ID NO: 254690 - DNA, 55 bp, Artificial
  Synthetic oligonucleotide
acgttgtccatccacctagctcgtgtgatagagcggtttgtagcaagctaatacc

SEQ ID NO: 254691 - DNA, 55 bp, Artificial
  Synthetic oligonucleotide
caaggattagatgcatggagcacctatagtagccggattgctgcgagtaagacta

SEQ ID NO: 254692 - DNA, 55 bp, Artificial
  Synthetic oligonucleotide
ccaaccatcctcagaattgaacaattgcactgcggcgttataaccgagtacaacc

SEQ ID NO: 254693 - DNA, 55 bp, Artificial
  Synthetic oligonucleotide
cattacttgaccttcaagctcaggcttccataggtctgcccagctttggaagtcg

SEQ ID NO: 254694 - DNA, 54 bp, Artificial
  Synthetic oligonucleotide
cattagcgttactcgcctatcctcttgcggtttactatggtttaagccgttggg

SEQ ID NO: 254695 - DNA, 55 bp, Artificial
  Synthetic oligonucleotide
ccaaacggtgtacgaccttcacatcagggcagtaatccaccaaacgagcccacat

SEQ ID NO: 254696 - DNA, 55 bp, Artificial
  Synthetic oligonucleotide
caagtaactacagagcgcactttcatgctgtctactgagttctcttccatgatct

SEQ ID NO: 254697 - DNA, 54 bp, Artificial
  Synthetic oligonucleotide
ccaaacgcttttactgccgtttgacgaaggaatgcgagtgccaaccgataaccc

SEQ ID NO: 254698 - DNA, 55 bp, Artificial
  Synthetic oligonucleotide
ccaaacagtgacttcgctttcgctactaggtcaacaagatctaggttgtagccgt

SEQ ID NO: 254699 - DNA, 55 bp, Artificial
  Synthetic oligonucleotide
caagtgatagaggcttcgcaagtagcgataccacttcaatcagtaggttaaacgg

SEQ ID NO: 254700 - DNA, 60 bp, Artificial
  Synthetic oligonucleotide
ggcgcatgataagggcgcgtacctctgccagcgtgaacgggaagtactgagcctcacgct

SEQ ID NO: 254701 - DNA, 55 bp, Artificial
  Synthetic oligonucleotide
cattttattgtggatgctcggttcactgcacggtatgaactcatattcggttgcc

SEQ ID NO: 254702 - DNA, 55 bp, Artificial
  Synthetic oligonucleotide
catttcgtaaagtgacactcgtcatcgagccttttcctctaagttgtgttgcctg

SEQ ID NO: 254703 - DNA, 55 bp, Artificial
  Synthetic oligonucleotide
actaacgtaataagttggtcatcgattttcactattcgttgggatgcattgggcg

SEQ ID NO: 254704 - DNA, 55 bp, Artificial
  Synthetic oligonucleotide
caagtggcgccttagatcaggtcgatgattcttcaaacagtgactcttcaggcag

SEQ ID NO: 254705 - DNA, 55 bp, Artificial
  Synthetic oligonucleotide
catttatatgcgctacgttatgcgtccaatcttatgcgcagatatgattcgcgcc

SEQ ID NO: 254706 - DNA, 55 bp, Artificial
  Synthetic oligonucleotide
cattgtggtaacgaagcatggtttgtaaatcggagttcgcacgaaggatctcatg

SEQ ID NO: 254707 - DNA, 55 bp, Artificial
  Synthetic oligonucleotide
cattgggttttggctactgataccggccaaagaaagcagtgtgggtgcaaggtca

SEQ ID NO: 254708 - DNA, 55 bp, Artificial
  Synthetic oligonucleotide
cattgaaccgttacaaactgtgtctgcacgtgatggacttggcagtgagttacgc

SEQ ID NO: 254709 - DNA, 55 bp, Artificial
  Synthetic oligonucleotide
cattagttcgccaattccgacggttataatttcatgtccgactagccctctcacg

SEQ ID NO: 254710 - DNA, 55 bp, Artificial
  Synthetic oligonucleotide
acggtcaaggcagttatggcgccgcagatgcgaatgggcattatgcgcttcaaga

SEQ ID NO: 254711 - DNA, 59 bp, Artificial
  Synthetic oligonucleotide
cgatgcccgataagttatggcccatattccgacttaatccatggttaatcaatctgtta

SEQ ID NO: 254712 - DNA, 55 bp, Artificial
  Synthetic oligonucleotide
ccaccttggcgcacagtggcggctgtttgtttgaaattccaaccggttagcatga

SEQ ID NO: 254713 - DNA, 55 bp, Artificial
  Synthetic oligonucleotide
ccacctgagcctttatgaactatcgaaagtccattcgcaccaactgttacgccca

SEQ ID NO: 254714 - DNA, 55 bp, Artificial
  Synthetic oligonucleotide
ccaccgcggaactctactaaacgcagatccaattcttgtgcgtggccagcaagga

SEQ ID NO: 254715 - DNA, 55 bp, Artificial
  Synthetic oligonucleotide
ccacccttaagtgcgtattatatccggtgtttatgttgagtggtttgtcgtagac

SEQ ID NO: 254716 - DNA, 55 bp, Artificial
  Synthetic oligonucleotide
ccacccgataaggttgataattggcactatgctaaatggcgcggttagctggtac

SEQ ID NO: 254717 - DNA, 55 bp, Artificial
  Synthetic oligonucleotide
caagcgctagagcaagctcagctagagactccggtcatggtatggctgaaagtcg

SEQ ID NO: 254718 - DNA, 55 bp, Artificial
  Synthetic oligonucleotide
caagcttagacttagcgaaaagaatcactagtactagcgcaagtacgatcagagt

SEQ ID NO: 254719 - DNA, 55 bp, Artificial
  Synthetic oligonucleotide
acggtcgaaacctagcattttggatagctctgaaatcgagcaaaggaagtgctcg

SEQ ID NO: 254720 - DNA, 53 bp, Artificial
  Synthetic oligonucleotide
acggttatttccccgacggcggggtaaccatcagcgtgctttctacaaaatga

SEQ ID NO: 254721 - DNA, 55 bp, Artificial
  Synthetic oligonucleotide
ccacagcggttggcattgggtactcaaaagtacatacgcgcattcactgttcgcc

SEQ ID NO: 254722 - DNA, 60 bp, Artificial
  Synthetic oligonucleotide
gatagctcttaactgtgtttgtacctaagatttgatgcaagtccgccagtggaatgtcgt

SEQ ID NO: 254723 - DNA, 55 bp, Artificial
  Synthetic oligonucleotide
catggtgatgttcacatcagctgacggtaccactttcaagtaagggattccgagc

SEQ ID NO: 254724 - DNA, 55 bp, Artificial
  Synthetic oligonucleotide
ccaattgcgcatagataccgtcattgttcatgcctaagttggtaaaatcgcctaa

SEQ ID NO: 254725 - DNA, 55 bp, Artificial
  Synthetic oligonucleotide
ccaatcgaaaacatggtgaggttaatgacactcatggccgcatctttcagtgagc

SEQ ID NO: 254726 - DNA, 55 bp, Artificial
  Synthetic oligonucleotide
acgtatcgagtccttttcttgttacaccaaagagtgtcacgttcgtgatgttgtc

SEQ ID NO: 254727 - DNA, 55 bp, Artificial
  Synthetic oligonucleotide
actaatgacccgagattataaccttaaacctaaccaagatgcttccctgatgaga

SEQ ID NO: 254728 - DNA, 55 bp, Artificial
  Synthetic oligonucleotide
ccaatactgggtacagatatagtgacgtgcaaattaagcaaggtagccagtttat

SEQ ID NO: 254729 - DNA, 55 bp, Artificial
  Synthetic oligonucleotide
caaggagggacgaaatctcaatcgtaaacagatgagcgaacttctaacgggcagt

SEQ ID NO: 254730 - DNA, 54 bp, Artificial
  Synthetic oligonucleotide
acgtggacgctctatcaaccaaaccgcagagtttacaggtaagggacgttcaac

SEQ ID NO: 254731 - DNA, 55 bp, Artificial
  Synthetic oligonucleotide
catgtcacctgaactcatttctattaaacccctaatttccaaccgagtgtacgca

SEQ ID NO: 254732 - DNA, 51 bp, Artificial
  Synthetic oligonucleotide
cccgtattacagaccgtcgtctaagccacccacacgttaaagtaaacgtac

SEQ ID NO: 254733 - DNA, 60 bp, Artificial
  Synthetic oligonucleotide
ggccatcgacggacgaagtggtgatacctgaacgagataggtttcattcaacggctgatc

SEQ ID NO: 254734 - DNA, 55 bp, Artificial
  Synthetic oligonucleotide
cccgtagcactcatcggtaactgttcacgaatttcgacaaactttgggtatttga

SEQ ID NO: 254735 - DNA, 55 bp, Artificial
  Synthetic oligonucleotide
cccgggcttaagacctaattgcataaacccggcagatagcttatagatacgatcc

SEQ ID NO: 254736 - DNA, 55 bp, Artificial
  Synthetic oligonucleotide
caacattattagagcctttacgcgtgactctacaatcggcagtgatcgcgtctgg

SEQ ID NO: 254737 - DNA, 55 bp, Artificial
  Synthetic oligonucleotide
caaccaatacgaccccagaaaacgaccgtggtatgcacatgctactgacgaccag

SEQ ID NO: 254738 - DNA, 55 bp, Artificial
  Synthetic oligonucleotide
catcatctggtatactcacgaaaacgaaacgttgatagagagtttggcgggtgcg

SEQ ID NO: 254739 - DNA, 55 bp, Artificial
  Synthetic oligonucleotide
cccgccgccacgttaccgagcacggaatcgggtgaatcccttgagcataaacacg

SEQ ID NO: 254740 - DNA, 55 bp, Artificial
  Synthetic oligonucleotide
cccgcagcaatctcttgctacagggcatggtttaaaacggcgtctatatattaag

SEQ ID NO: 254741 - DNA, 55 bp, Artificial
  Synthetic oligonucleotide
cccgatccatcgggagatatcattggcgcgcgaatctgttatgctcgttaagcgc

SEQ ID NO: 254742 - DNA, 55 bp, Artificial
  Synthetic oligonucleotide
cccgatagggttaactcttaccatggagcagggcagaaaagcagacccaacgcct

SEQ ID NO: 254743 - DNA, 55 bp, Artificial
  Synthetic oligonucleotide
cccgatagctctgcaaatttagtgacaagctgagggtttgctgacgttatctcgt

SEQ ID NO: 254744 - DNA, 60 bp, Artificial
  Synthetic oligonucleotide
cgatccgtccgcgagaccatgctctactgcaagagatttgctacggcgcacttcgttacc

SEQ ID NO: 254745 - DNA, 55 bp, Artificial
  Synthetic oligonucleotide
cccgactagatgcccgtatagccaagttagctattcactcagcaagcaccgcagc

SEQ ID NO: 254746 - DNA, 55 bp, Artificial
  Synthetic oligonucleotide
accttcactcatcaagatggttatcacgtcatataactccgtaatgacggcggtt

SEQ ID NO: 254747 - DNA, 55 bp, Artificial
  Synthetic oligonucleotide
caacgaactaaacgcccgatctcgtctctgtctcggcttatcgctccttacgacg

SEQ ID NO: 254748 - DNA, 55 bp, Artificial
  Synthetic oligonucleotide
ccccttgtagttatgcttggaaccagacagttttctcagatgagataacacgaat

SEQ ID NO: 254749 - DNA, 55 bp, Artificial
  Synthetic oligonucleotide
catccagtgacattgcctagcaatcctatgtatttggatgcgtacttaggcggtc

SEQ ID NO: 254750 - DNA, 53 bp, Artificial
  Synthetic oligonucleotide
cccctgcgtaggtcaatttcaaagatcgcgttgtacgggtaactaaactcacc

SEQ ID NO: 254751 - DNA, 55 bp, Artificial
  Synthetic oligonucleotide
cccctcttaataacgagttacatccgtattttgctttgaaccacccactctgcat

SEQ ID NO: 254752 - DNA, 55 bp, Artificial
  Synthetic oligonucleotide
acgaatccaccattatttgcactggcgttcctgatggacagtacacgcccgactc

SEQ ID NO: 254753 - DNA, 55 bp, Artificial
  Synthetic oligonucleotide
catcgacagctcagcgaagaatggatcactgtggcgcaagcactcaaacagcgcc

SEQ ID NO: 254754 - DNA, 54 bp, Artificial
  Synthetic oligonucleotide
accgtcggttgcaagctaaacgcgttggggactgtgtccaatgttttggtcgta

SEQ ID NO: 254755 - DNA, 55 bp, Artificial
  Synthetic oligonucleotide
atgggtgcggtgcggtgggtctttgaaaaaatggggagagagcatttaatcccta

SEQ ID NO: 254756 - DNA, 55 bp, Artificial
  Synthetic oligonucleotide
cccttcgctacaaactaatgatggccaagcggttaataacatccagtgtcgtcgc

SEQ ID NO: 254757 - DNA, 53 bp, Artificial
  Synthetic oligonucleotide
cccttcccagtacgtcgcccctttgataccaagcttcactgggttgaaggtaa

SEQ ID NO: 254758 - DNA, 50 bp, Artificial
  Synthetic oligonucleotide
accgtgaggcaaagccccctacgggcggtctttttagacgaaggcgcggg

SEQ ID NO: 254759 - DNA, 55 bp, Artificial
  Synthetic oligonucleotide
cccttatgtgattcttacggacaatgttcgttacatggttggggctcgcacccct

SEQ ID NO: 254760 - DNA, 55 bp, Artificial
  Synthetic oligonucleotide
cccttatggaacaataggcgcctacggcgcaaatcaaaaggactcaacctcttcc

SEQ ID NO: 254761 - DNA, 55 bp, Artificial
  Synthetic oligonucleotide
accgttacgtgtcagctcattttgctgaggaaccaaacgatctttcgctaccgcg

SEQ ID NO: 254762 - DNA, 55 bp, Artificial
  Synthetic oligonucleotide
caatcagacctcgaattttgttcacaggtagctcaggtaaggtcttactatgatc

SEQ ID NO: 254763 - DNA, 55 bp, Artificial
  Synthetic oligonucleotide
ccctgcagaatattgggatatcgaagtaccgcaacgtcgattgataggaattagt

SEQ ID NO: 254764 - DNA, 55 bp, Artificial
  Synthetic oligonucleotide
ccctgaccatacggcgggaactctggctctgggaaagtcgcatccagttgcaagc

SEQ ID NO: 254765 - DNA, 55 bp, Artificial
  Synthetic oligonucleotide
ccctcttcgcgcgacagagctttacctagagcacctaaaagacgcttggaatcac

SEQ ID NO: 254766 - DNA, 57 bp, Artificial
  Synthetic oligonucleotide
cgatccagactttaaacgggacatcagcaagaacccgtttcatccacattgggaagc

SEQ ID NO: 254767 - DNA, 52 bp, Artificial
  Synthetic oligonucleotide
ccctcggcactggaaaccagggacaagtactaccccgaacataaagcgcttt

SEQ ID NO: 254768 - DNA, 55 bp, Artificial
  Synthetic oligonucleotide
accgtttaggcgatcttttagctgccctttaatgacgttccagcacatctgagcg

SEQ ID NO: 254769 - DNA, 55 bp, Artificial
  Synthetic oligonucleotide
ccctccccttaactgaatttgtcgcgctaagtcgacttctacacccgctcttagc

SEQ ID NO: 254770 - DNA, 55 bp, Artificial
  Synthetic oligonucleotide
ccctcactgttacgacatggaacagtcatgcaccttcaacaagcaaacacctcag

SEQ ID NO: 254771 - DNA, 55 bp, Artificial
  Synthetic oligonucleotide
ccctattgtgtcttagccttttattattaagcggctgctctagcgtctcaccaca

SEQ ID NO: 254772 - DNA, 55 bp, Artificial
  Synthetic oligonucleotide
caacagatagtgcgtacgctacggcaggtgcagttaatgcacccagtagaatcgc

SEQ ID NO: 254773 - DNA, 55 bp, Artificial
  Synthetic oligonucleotide
catcaggcggtttcgcacatatcaggcaccgtcacactgcttggcgcaagtgcac

SEQ ID NO: 254774 - DNA, 55 bp, Artificial
  Synthetic oligonucleotide
acctacgtagattagaggtactggaagattagtgtgagctgtgtgaacgccgcct

SEQ ID NO: 254775 - DNA, 55 bp, Artificial
  Synthetic oligonucleotide
caacagggcggtgctttgagtgaatttgacggggttaggggcagtagcccctcac

SEQ ID NO: 254776 - DNA, 55 bp, Artificial
  Synthetic oligonucleotide
cccgtcgcgtctttctcacccattgcgatgatcacctgcgctcgattaccgttaa

SEQ ID NO: 254777 - DNA, 54 bp, Artificial
  Synthetic oligonucleotide
agccttttttccgtaccaagctacgccgtagaagacggtgtctctctttcatgg

SEQ ID NO: 254778 - DNA, 60 bp, Artificial
  Synthetic oligonucleotide
atggtggtctcatattgctcatagttgtcaaaagcagatgaagcctgaaccggacgacat

SEQ ID NO: 254779 - DNA, 52 bp, Artificial
  Synthetic oligonucleotide
catcggctattggtctacccacttgaattaaccccggagggaaagtaaataa

SEQ ID NO: 254780 - DNA, 55 bp, Artificial
  Synthetic oligonucleotide
cccacgtataacctaaaccctatagaggctatcgtaacgctgttatcagccgact

SEQ ID NO: 254781 - DNA, 55 bp, Artificial
  Synthetic oligonucleotide
catcgttcgttcgattgtaaatgcacatagtggaaagataacagtgcagtctgcc

SEQ ID NO: 254782 - DNA, 55 bp, Artificial
  Synthetic oligonucleotide
caacgtcagttggctaggtgaccctcggcttaagaagggtcgagaagtattatgc

SEQ ID NO: 254783 - DNA, 55 bp, Artificial
  Synthetic oligonucleotide
cccacagatagtttgtagcatgaatttcatatcgattaccccaaaagccgtttga

SEQ ID NO: 254784 - DNA, 55 bp, Artificial
  Synthetic oligonucleotide
cccaatctacccactctgaattaccatcacgtagcgccagtgacaattggtttgg

SEQ ID NO: 254785 - DNA, 55 bp, Artificial
  Synthetic oligonucleotide
cccaatcactccgcacattcatacgagctatggactgcgcttggtgagtcagaca

SEQ ID NO: 254786 - DNA, 55 bp, Artificial
  Synthetic oligonucleotide
caatcaaacggtagtaatcatgagtaatgtcgctaggtactgtccatccctgcaa

SEQ ID NO: 254787 - DNA, 55 bp, Artificial
  Synthetic oligonucleotide
actagcgaggcaatgacctattggggtagcgccagtgtcatggttctgattgcag

SEQ ID NO: 254788 - DNA, 55 bp, Artificial
  Synthetic oligonucleotide
acgcccttccaggtaatgagacatatccgcccatgaatcaatgtagataccctcg

SEQ ID NO: 254789 - DNA, 58 bp, Artificial
  Synthetic oligonucleotide
atgtaagccgctagccctttattttactaaagcgatgacaacgccaattaatgctata

SEQ ID NO: 254790 - DNA, 55 bp, Artificial
  Synthetic oligonucleotide
acgcccttgcatatttaagtatctggtgggcaacttttatatcatttgatgcgcc

SEQ ID NO: 254791 - DNA, 53 bp, Artificial
  Synthetic oligonucleotide
ccattttaagaaacaccgttgaaccataaggggattccacttggatcaaacga

SEQ ID NO: 254792 - DNA, 55 bp, Artificial
  Synthetic oligonucleotide
agcagctttaaggctgtttagatctactacgtcacctgttactttcgctagctca

SEQ ID NO: 254793 - DNA, 55 bp, Artificial
  Synthetic oligonucleotide
ccatttgcacttgaggcgctaccgagcacctttacccaatttcgtaagcaagtag

SEQ ID NO: 254794 - DNA, 55 bp, Artificial
  Synthetic oligonucleotide
ccatttacttccaaatgaaaacgacagagccttgttggagagcggctatcgtcag

SEQ ID NO: 254795 - DNA, 55 bp, Artificial
  Synthetic oligonucleotide
ccatttaagtacacctcattatgttgtgttagggcttggttttgtgtggtggatt

SEQ ID NO: 254796 - DNA, 55 bp, Artificial
  Synthetic oligonucleotide
ccattggtaagagcggaatacttcgtaagcagaaagtagatggtggcgtatgccg

SEQ ID NO: 254797 - DNA, 55 bp, Artificial
  Synthetic oligonucleotide
ccattctgtacgtctgatatcgcgcatagtgaacctattcgctacgcagctgcga

SEQ ID NO: 254798 - DNA, 55 bp, Artificial
  Synthetic oligonucleotide
caatacattgaccgtgcacttcacggccttctggagccatcaagtacagatagag

SEQ ID NO: 254799 - DNA, 55 bp, Artificial
  Synthetic oligonucleotide
ccatgtactcgtattgctcgtcgttacgtactgtctcagaccaaagctgtgccga

SEQ ID NO: 254800 - DNA, 60 bp, Artificial
  Synthetic oligonucleotide
atgtagcatacgaccatattgagtaggatgtttagactcaacggcttgcttattactaga

SEQ ID NO: 254801 - DNA, 55 bp, Artificial
  Synthetic oligonucleotide
cccctcaaacgatattcttattccattattttgcggagtaggcgtagcacctgat

SEQ ID NO: 254802 - DNA, 55 bp, Artificial
  Synthetic oligonucleotide
caatcaatcatcgtagatacggcacaaacaaccgcagagcttagtactaacggtc

SEQ ID NO: 254803 - DNA, 55 bp, Artificial
  Synthetic oligonucleotide
actattgccatcagtgatttagcatatcgccttcccatagtgacatcctgtatac

SEQ ID NO: 254804 - DNA, 53 bp, Artificial
  Synthetic oligonucleotide
ccccgtttctaataagccgaaaagacctgaaaagctagcagttacgtactcaa

SEQ ID NO: 254805 - DNA, 55 bp, Artificial
  Synthetic oligonucleotide
ccccgttgctaccgatgctcaacagagtaccaatagcggatcctttccggggtac

SEQ ID NO: 254806 - DNA, 55 bp, Artificial
  Synthetic oligonucleotide
ccccgtggtaaacggacgcacatctctctcagtcacgttattatcgatgctgata

SEQ ID NO: 254807 - DNA, 55 bp, Artificial
  Synthetic oligonucleotide
acgatttcgcaccaacagctgagcgtccgttcgttctaggtctaccaaccggtgg

SEQ ID NO: 254808 - DNA, 55 bp, Artificial
  Synthetic oligonucleotide
ccccgtcagcaaagggtgccactctgggagagtttgaccactgccaagcaaacgg

SEQ ID NO: 254809 - DNA, 55 bp, Artificial
  Synthetic oligonucleotide
ccccgcgagaagcgtacacataatcatcgcaatccagcggaatgcactgatatct

SEQ ID NO: 254810 - DNA, 53 bp, Artificial
  Synthetic oligonucleotide
ccccagttgttcgtcagtacgataaccacccgaataccacgtttcttcgcctc

SEQ ID NO: 254811 - DNA, 54 bp, Artificial
  Synthetic oligonucleotide
ggccggtgtcaaaattgccagacttccgttaaggggaagcggcctcaagatacc

SEQ ID NO: 254812 - DNA, 54 bp, Artificial
  Synthetic oligonucleotide
ccccagaagtattcctccgatgtactacctaaatagctctcgggaagaaccacc

SEQ ID NO: 254813 - DNA, 55 bp, Artificial
  Synthetic oligonucleotide
ccccaagacggtaaaccagatcgcaaggtctattcaattactgatctaggacgtc

SEQ ID NO: 254814 - DNA, 55 bp, Artificial
  Synthetic oligonucleotide
cccatgtaatcccctagaaacggcttagtcgcttatggtgatacttcatagttgc

SEQ ID NO: 254815 - DNA, 55 bp, Artificial
  Synthetic oligonucleotide
cccagtgtaaggcttccacgatagacatagagcatggcgttaaacgttgaaggtg

SEQ ID NO: 254816 - DNA, 55 bp, Artificial
  Synthetic oligonucleotide
catcgctacgcctagcttactccaattacgtatagcaccgttgatagcctgaccc

SEQ ID NO: 254817 - DNA, 55 bp, Artificial
  Synthetic oligonucleotide
caacggtcgggatcagtctctcttgactcccgaatctctggaagacttaaactct

SEQ ID NO: 254818 - DNA, 55 bp, Artificial
  Synthetic oligonucleotide
cccagcgtggcgccgattatccgtttcagtttgccatgatcgcattcaatcacgt

SEQ ID NO: 254819 - DNA, 55 bp, Artificial
  Synthetic oligonucleotide
cccagcgcctctatcgtactcgcgcagtcagcgcctggtttagcaaagcactcgc

SEQ ID NO: 254820 - DNA, 55 bp, Artificial
  Synthetic oligonucleotide
caacgtatgtgtttgtggtgccgatcttcacgatctgtacgtaatgatgatccga

SEQ ID NO: 254821 - DNA, 55 bp, Artificial
  Synthetic oligonucleotide
catcggcaacgtccgatcgcagttatatggcttgtgcattaccgtcatgtggact

SEQ ID NO: 254822 - DNA, 60 bp, Artificial
  Synthetic oligonucleotide
atgtgccgtcttatatcgctgttttgccacaatgtttctcctatgcttcaacggtgtcgt

SEQ ID NO: 254823 - DNA, 55 bp, Artificial
  Synthetic oligonucleotide
cccagcagatgactcagtatcgcggagttgaagtagatgatcgcgttggcaagca

SEQ ID NO: 254824 - DNA, 54 bp, Artificial
  Synthetic oligonucleotide
cggtgtttgaaatccctatgatcattacgaaaggtgcaaacggaaccaagacct

SEQ ID NO: 254825 - DNA, 55 bp, Artificial
  Synthetic oligonucleotide
cggtgtgttggaacggccactagtcacctctgttaagcgacgtgtagccaagtcc

SEQ ID NO: 254826 - DNA, 55 bp, Artificial
  Synthetic oligonucleotide
cacgggatgttttgcgatggccgattgctctacattcgaggatggattatgggct

SEQ ID NO: 254827 - DNA, 55 bp, Artificial
  Synthetic oligonucleotide
aaagcagtttacgccattctcgactaaggattcgaggagcgtctttgaccagtgc

SEQ ID NO: 254828 - DNA, 55 bp, Artificial
  Synthetic oligonucleotide
cggtggctatttgagcttgatatttcgttgtcttttcgacgacctctgcccgtac

SEQ ID NO: 254829 - DNA, 55 bp, Artificial
  Synthetic oligonucleotide
cggtgctccacgatataacaaaatctgatagccacgtcctgttaaagctcctagc

SEQ ID NO: 254830 - DNA, 55 bp, Artificial
  Synthetic oligonucleotide
cacgtagcttaccgttgatcattacaacgatagtcttctcgtcttcaactagcgc

SEQ ID NO: 254831 - DNA, 55 bp, Artificial
  Synthetic oligonucleotide
cacccgaaagtgatcgcggggttactgctgggaaaatacagccgcgccaaagagt

SEQ ID NO: 254832 - DNA, 55 bp, Artificial
  Synthetic oligonucleotide
atcactgatcgcactaatgaaaacctgggcgttggtttcttttaaccgttgcgct

SEQ ID NO: 254833 - DNA, 60 bp, Artificial
  Synthetic oligonucleotide
ggtgtatagaaagcaagataagcagtcaagatcccaactgacagtggcataaataattct

SEQ ID NO: 254834 - DNA, 55 bp, Artificial
  Synthetic oligonucleotide
cggtgaataacccctaaacaaacttgatatgtggcaggcacaagaccctgttggt

SEQ ID NO: 254835 - DNA, 55 bp, Artificial
  Synthetic oligonucleotide
cggtctgtcgtgctgtagctgaggatttcaccttgtgggcagcggtaggtgtcag

SEQ ID NO: 254836 - DNA, 55 bp, Artificial
  Synthetic oligonucleotide
cggtcgtcatgttacgcaaacctaatctcaagattgttgaactagcctacggcga

SEQ ID NO: 254837 - DNA, 55 bp, Artificial
  Synthetic oligonucleotide
cggtcgcgcgtattgtggaagcgttggagaatccgggcggggccctatcaacaca

SEQ ID NO: 254838 - DNA, 55 bp, Artificial
  Synthetic oligonucleotide
cggtcccaagcgatgtgtgtatcacagagagttgtgaagttgtccggtatgaaaa

SEQ ID NO: 254839 - DNA, 55 bp, Artificial
  Synthetic oligonucleotide
cggtcagcgggaactctttaaatgaatgctcggtatagctctgggtcacatcccc

SEQ ID NO: 254840 - DNA, 55 bp, Artificial
  Synthetic oligonucleotide
atcacttattcagtgaagtgctcacttacttgcctacccatattcagtctgccgc

SEQ ID NO: 254841 - DNA, 55 bp, Artificial
  Synthetic oligonucleotide
cggtacgcggtgtgacctttagaaaagactgtgtactctttgaactctccctgtg

SEQ ID NO: 254842 - DNA, 55 bp, Artificial
  Synthetic oligonucleotide
acttcgtaactacactgtgcgtgtttgcctagaaagcgtttcgaacattggtgac

SEQ ID NO: 254843 - DNA, 55 bp, Artificial
  Synthetic oligonucleotide
cgggtcaccttaaccgctaaatagcaaagcccgtagctgcatgaacagttacggg

SEQ ID NO: 254844 - DNA, 60 bp, Artificial
  Synthetic oligonucleotide
gatccatagtgcaaatacagaaatcgtcacgccctataccatcatagagcaatggatata

SEQ ID NO: 254845 - DNA, 55 bp, Artificial
  Synthetic oligonucleotide
cgggtatggctctattgcttgaagcaacgcgtcgtgcactgggtccacctttgat

SEQ ID NO: 254846 - DNA, 55 bp, Artificial
  Synthetic oligonucleotide
cgtataccaaaacgcctacgcgttcgagctcacgaaccatatagatgaagtcttg

SEQ ID NO: 254847 - DNA, 55 bp, Artificial
  Synthetic oligonucleotide
agtgaccgactcagagcgtaacagttgcaagttaaacacctgcacatcggaagta

SEQ ID NO: 254848 - DNA, 55 bp, Artificial
  Synthetic oligonucleotide
cgtaggtgctcgacgtcgtgtctcagccttagagagagccggatttacctaactc

SEQ ID NO: 254849 - DNA, 55 bp, Artificial
  Synthetic oligonucleotide
cgtagctaactggacatggcgaaacagagccaatatcagggttaaagaacgcagg

SEQ ID NO: 254850 - DNA, 55 bp, Artificial
  Synthetic oligonucleotide
cgtagcgcactggctggccactccgttgacgagatttgaagagattaccaacatg

SEQ ID NO: 254851 - DNA, 55 bp, Artificial
  Synthetic oligonucleotide
cgtagacgctgctcataagatgatcgacttcctactacgccctgagaacgccgct

SEQ ID NO: 254852 - DNA, 55 bp, Artificial
  Synthetic oligonucleotide
cgtagaaagaaaatcctcgaatcattaatcaatctgtcggcggaagtgcttacgg

SEQ ID NO: 254853 - DNA, 55 bp, Artificial
  Synthetic oligonucleotide
cgtacgccagtagcactactagacttcggcgcatcggctcgtctagcggttggtg

SEQ ID NO: 254854 - DNA, 55 bp, Artificial
  Synthetic oligonucleotide
cgtaattactgctcgccattactgaggatatgggtgatttggagtgtaattagcc

SEQ ID NO: 254855 - DNA, 60 bp, Artificial
  Synthetic oligonucleotide
cgagtgacacatcacttattgatctcgtcatgcgtgtttactgccatagcttcactatgg

SEQ ID NO: 254856 - DNA, 52 bp, Artificial
  Synthetic oligonucleotide
atcaaggtgaatccttaacaggagtggtctactaccttaaaaacccgaccac

SEQ ID NO: 254857 - DNA, 55 bp, Artificial
  Synthetic oligonucleotide
aaagacatgatctggtacggtccatgtggtatcggtgcgtcttacacaatccctc

SEQ ID NO: 254858 - DNA, 53 bp, Artificial
  Synthetic oligonucleotide
atcaccgaggttgccttcggtcaccgaccccgtaaacgtgcccgtcacgactg

SEQ ID NO: 254859 - DNA, 55 bp, Artificial
  Synthetic oligonucleotide
cgtaaagtggtactggaaggtcgcaagccgggcttagaactgcaaattggctgcc

SEQ ID NO: 254860 - DNA, 55 bp, Artificial
  Synthetic oligonucleotide
agtgaacgtttgtttgattcctgtgcgaagtttgattgttagcttaggaggcgtg

SEQ ID NO: 254861 - DNA, 55 bp, Artificial
  Synthetic oligonucleotide
cggttatggatcgaaatattgcgacctacgatggtcaggttaactttcctggcgc

SEQ ID NO: 254862 - DNA, 55 bp, Artificial
  Synthetic oligonucleotide
cggttaggcgactcggtagctattgggcatcccgagctgagtaaagcgatttaaa

SEQ ID NO: 254863 - DNA, 51 bp, Artificial
  Synthetic oligonucleotide
cggttaggccaaagaactttggttcgttcttcagggtaacgttatggacgc

SEQ ID NO: 254864 - DNA, 54 bp, Artificial
  Synthetic oligonucleotide
cggttactgaacctaattacttccctctattgggcaaaggattcgctcgcctag

SEQ ID NO: 254865 - DNA, 55 bp, Artificial
  Synthetic oligonucleotide
cggtgtttgcacaccgcctgtcagtaaacgcaattcaactttgcgagtcaaacct

SEQ ID NO: 254866 - DNA, 60 bp, Artificial
  Synthetic oligonucleotide
attagttggatgaatgtgctgcaccagatgagaaactactgtgggcatcataaccgactg

SEQ ID NO: 254867 - DNA, 53 bp, Artificial
  Synthetic oligonucleotide
aacactattcgatttcgggatcgttgcgatcttttatgtttagccgtaacctt

SEQ ID NO: 254868 - DNA, 55 bp, Artificial
  Synthetic oligonucleotide
aacagcgtgaatagtttcgctatctagtccagagggagcactataatgccagtag

SEQ ID NO: 254869 - DNA, 54 bp, Artificial
  Synthetic oligonucleotide
cggcggtggactaccaagaatataaggaaccagtcctcttcaacggtgacttgt

SEQ ID NO: 254870 - DNA, 55 bp, Artificial
  Synthetic oligonucleotide
agaccaccagctagcctaggtctatcaaccttggaatactgtgtattgatccatg

SEQ ID NO: 254871 - DNA, 55 bp, Artificial
  Synthetic oligonucleotide
cggcgctatcacttccagctgctgtccctacttctgaggaacttgtccctatgcg

SEQ ID NO: 254872 - DNA, 55 bp, Artificial
  Synthetic oligonucleotide
cggcctacaaatggttgtaaaagcggagcacttacgcgcataaaggagatactcc

SEQ ID NO: 254873 - DNA, 55 bp, Artificial
  Synthetic oligonucleotide
cggccagcatagcacgtactttatccagtgaacttgcgtagtcgtagctcgcttc

SEQ ID NO: 254874 - DNA, 55 bp, Artificial
  Synthetic oligonucleotide
atcgcgttacgttcttcaagcgtcattggcgctgcgacggcatgtggtagcatgc

SEQ ID NO: 254875 - DNA, 55 bp, Artificial
  Synthetic oligonucleotide
cggccagaggtaatcgctatgtataaagtgctcgccttggatcttgatggtactg

SEQ ID NO: 254876 - DNA, 55 bp, Artificial
  Synthetic oligonucleotide
cggccaaaattaaattgagaacgagctgggataatattgccgtacaagcgtgatg

SEQ ID NO: 254877 - DNA, 59 bp, Artificial
  Synthetic oligonucleotide
gatcccgtgttgatactccaaccttgtacaaatcacctcgcaggtgattaagctgttta

SEQ ID NO: 254878 - DNA, 55 bp, Artificial
  Synthetic oligonucleotide
cacttatcgttgaatattgtaagctaggctcccttcaacccgtcaatgggcacgc

SEQ ID NO: 254879 - DNA, 55 bp, Artificial
  Synthetic oligonucleotide
cggccaaaaggaactacggtcagcactgacgactttctggtaaagcactcagata

SEQ ID NO: 254880 - DNA, 55 bp, Artificial
  Synthetic oligonucleotide
agtaagttgcaccacgccagttggtgttacttcggacagacgcttcacgtaaacc

SEQ ID NO: 254881 - DNA, 55 bp, Artificial
  Synthetic oligonucleotide
cggcagttggattacttcattacgcaagagacatgcagtctagcgacgatagcga

SEQ ID NO: 254882 - DNA, 55 bp, Artificial
  Synthetic oligonucleotide
caccaatcccttttgcatgagcctgtaatgtattacgcgcttcactctcaatcgc

SEQ ID NO: 254883 - DNA, 55 bp, Artificial
  Synthetic oligonucleotide
cggcacctgaatgcagcatagagggtgaagtgttgcgtctcatgtggcggagggg

SEQ ID NO: 254884 - DNA, 55 bp, Artificial
  Synthetic oligonucleotide
agtaagtacgaagttcatcgcatacttgtggaaggctttcagctggcaataatcg

SEQ ID NO: 254885 - DNA, 55 bp, Artificial
  Synthetic oligonucleotide
cggattgtaatgtgtgggctaacttcactacgtcagataagcaagtgtgctcgtc

SEQ ID NO: 254886 - DNA, 55 bp, Artificial
  Synthetic oligonucleotide
cactttagagagttggccaacgtaaacccagacgaacgctgcatggttctatcgt

SEQ ID NO: 254887 - DNA, 55 bp, Artificial
  Synthetic oligonucleotide
cgggtatctggctaaatggtctagctatcttcgtagcagcggtattcaacatccc

SEQ ID NO: 254888 - DNA, 60 bp, Artificial
  Synthetic oligonucleotide
gaagtggttatatacatcactccatgctagtgaattggttacatcttcgttagtatagcc

SEQ ID NO: 254889 - DNA, 59 bp, Artificial
  Synthetic oligonucleotide
cagaggtatggttggccacatacccttttgcgaccccattatgctctaagatgttcgct

SEQ ID NO: 254890 - DNA, 55 bp, Artificial
  Synthetic oligonucleotide
acttcactgtctactgctagctgacctttcaaaacgtctgatacaggcgcgtaag

SEQ ID NO: 254891 - DNA, 55 bp, Artificial
  Synthetic oligonucleotide
cactatatggcactcttcaccaactactgactctgaatcttgagtcgttctttcg

SEQ ID NO: 254892 - DNA, 55 bp, Artificial
  Synthetic oligonucleotide
cgggtagtaataagaagagtgctttctacgaagacggtaagcgtcagaaagagcg

SEQ ID NO: 254893 - DNA, 55 bp, Artificial
  Synthetic oligonucleotide
agtcgtacgctgcccatctaacgtcatcatttctaattcaccgccagtttcgaca

SEQ ID NO: 254894 - DNA, 55 bp, Artificial
  Synthetic oligonucleotide
agaattatccaggagcaagttcggccacaattgggtcttaactttggtgatgtgc

SEQ ID NO: 254895 - DNA, 55 bp, Artificial
  Synthetic oligonucleotide
acttcaagctcgtcgatactggcaccaaagtactcctgctctttacggcttagag

SEQ ID NO: 254896 - DNA, 55 bp, Artificial
  Synthetic oligonucleotide
aaagtctgcgaagcgatacttccgttagtcgataccgatatgactagagggcgcg

SEQ ID NO: 254897 - DNA, 54 bp, Artificial
  Synthetic oligonucleotide
cgggctgattaacatactacctaaaccgccagttgaactacgataaccaacttc

SEQ ID NO: 254898 - DNA, 55 bp, Artificial
  Synthetic oligonucleotide
cactgagagcttacaaggccattcaccggttcagcgttactcagttccgatgaag

SEQ ID NO: 254899 - DNA, 54 bp, Artificial
  Synthetic oligonucleotide
cgggcgttcgtctaaacgtaggtattcgtgaaactcacgcaacactactagcgg

SEQ ID NO: 254900 - DNA, 54 bp, Artificial
  Synthetic oligonucleotide
attgccagacttccgttaaggggaagcggcctcaagataccccacagggaataa

SEQ ID NO: 254901 - DNA, 55 bp, Artificial
  Synthetic oligonucleotide
cactgcggtgataccccgcaccatctaagatgatatgaagcttatgggttaacgg

SEQ ID NO: 254902 - DNA, 55 bp, Artificial
  Synthetic oligonucleotide
aaatcaaaaggactcaacctcttccattgttgccaataaatcgtttatcctatcg

SEQ ID NO: 254903 - DNA, 55 bp, Artificial
  Synthetic oligonucleotide
cgggactggtaggttttatggctaccatcttgattcggcgtcgcttcttgttccg

SEQ ID NO: 254904 - DNA, 55 bp, Artificial
  Synthetic oligonucleotide
aaattacccactcttgcggcattatgcttagttactttactggcgggttgtagtg

SEQ ID NO: 254905 - DNA, 54 bp, Artificial
  Synthetic oligonucleotide
cgggaaaatgacgtaatgtgtcgcccaactaaagcgttcaggttggggtcgcga

SEQ ID NO: 254906 - DNA, 55 bp, Artificial
  Synthetic oligonucleotide
cgggaaaacatggcatttcgtatgttattaggtcgtacggctatgcgtcatcgaa

SEQ ID NO: 254907 - DNA, 55 bp, Artificial
  Synthetic oligonucleotide
cactgttcgaccaaggtattttaaacggaacgcatattgccattctggcgcccgc

SEQ ID NO: 254908 - DNA, 55 bp, Artificial
  Synthetic oligonucleotide
aacacccgccgagcgtgtagcgtatgcagtgcgtaagtttggggttcactcaccg

SEQ ID NO: 254909 - DNA, 55 bp, Artificial
  Synthetic oligonucleotide
cggcttacggcacgaatacgcccaagcgcgctacttagagttaactgggtggccg

SEQ ID NO: 254910 - DNA, 50 bp, Artificial
  Synthetic oligonucleotide
aaaaaatcccgtcgaacaaccgataattatgtcccaaccggcacctttgt

SEQ ID NO: 254911 - DNA, 60 bp, Artificial
  Synthetic oligonucleotide
ggtgcgaacttgattcggaactctctagatacacgagagtcaagtcgtcacctgagccgt

SEQ ID NO: 254912 - DNA, 55 bp, Artificial
  Synthetic oligonucleotide
cgttgagccaccactcaagagggtcgtctggcaaccaacgaattggcgtattgag

SEQ ID NO: 254913 - DNA, 55 bp, Artificial
  Synthetic oligonucleotide
cacctttaacagcaagctggtcgctggttgtaagagaaaccgactcaactttagt

SEQ ID NO: 254914 - DNA, 55 bp, Artificial
  Synthetic oligonucleotide
cacgaatttcatttatacgagcaaatttagcggcttgttcatgctcattgggttc

SEQ ID NO: 254915 - DNA, 55 bp, Artificial
  Synthetic oligonucleotide
cgttcacctaagttgaccgtaatccgctccatggttttgcactccaattcgaaga

SEQ ID NO: 254916 - DNA, 55 bp, Artificial
  Synthetic oligonucleotide
atacagcggaactgtgtgactacgaacgtaacgttagcctgttcaacgtattgcg

SEQ ID NO: 254917 - DNA, 55 bp, Artificial
  Synthetic oligonucleotide
agtggattcaggcggtcagtatctagatggcacgacagacatcacgcgtactatt

SEQ ID NO: 254918 - DNA, 54 bp, Artificial
  Synthetic oligonucleotide
cacgaccgcctgagttaaataccgcaaggatagacgctaggtaaaccgcgtttg

SEQ ID NO: 254919 - DNA, 55 bp, Artificial
  Synthetic oligonucleotide
cgttactgctgcttacttgtgcgagtgcgcaagctcaaacgcactccccggagtt

SEQ ID NO: 254920 - DNA, 55 bp, Artificial
  Synthetic oligonucleotide
cgttacgtcagattttaggctttacacagagtcgagtcggggcattagtggggcg

SEQ ID NO: 254921 - DNA, 55 bp, Artificial
  Synthetic oligonucleotide
cgttacgcaaccatcattcgtcgttgggccactgaactctgttacgacccatacc

SEQ ID NO: 254922 - DNA, 59 bp, Artificial
  Synthetic oligonucleotide
ggcgtttcgcgcctagccgtgatcgtaaagagaccagcttgcgtcggaaacagtgtcaa

SEQ ID NO: 254923 - DNA, 55 bp, Artificial
  Synthetic oligonucleotide
cgttaattgctcgtatatatttggactgcgttagttctactggagtgttgggtag

SEQ ID NO: 254924 - DNA, 55 bp, Artificial
  Synthetic oligonucleotide
agaaagctgtctattcttcccgctccgctactctctaaatagtaaagtcatctac

SEQ ID NO: 254925 - DNA, 49 bp, Artificial
  Synthetic oligonucleotide
cgttaagtcgaaacgaagaacgagcgtaaaagaaacggggtaacgagag

SEQ ID NO: 254926 - DNA, 55 bp, Artificial
  Synthetic oligonucleotide
cgttaaagcctctgatgaagtagacgcggacatcatcgctcttatcgttcgtggt

SEQ ID NO: 254927 - DNA, 55 bp, Artificial
  Synthetic oligonucleotide
cgtgttccctgcattatcgaagtaataggtttccccgtactgctcgccatcttgg

SEQ ID NO: 254928 - DNA, 55 bp, Artificial
  Synthetic oligonucleotide
cgtgttaattattggtcgttcagttaatggtgctgcgcgttggatcccattgggc

SEQ ID NO: 254929 - DNA, 55 bp, Artificial
  Synthetic oligonucleotide
cgtgtgaagtacattacacaaaggcttcaggaactgaggtgctgtggcaagccag

SEQ ID NO: 254930 - DNA, 54 bp, Artificial
  Synthetic oligonucleotide
cgtgtgaacgacctaggtagtggttaagcgtaccgaagttctgacgacctgtgg

SEQ ID NO: 254931 - DNA, 55 bp, Artificial
  Synthetic oligonucleotide
ctagagaaatcttaccaagcgatgcacgatgcttactgtaaagcattcgatcgca

SEQ ID NO: 254932 - DNA, 55 bp, Artificial
  Synthetic oligonucleotide
caccgtgcgatggtttgagaatatggtgataggcaaagtcgatattcatcggctt

SEQ ID NO: 254933 - DNA, 60 bp, Artificial
  Synthetic oligonucleotide
gcacctcatggtgcagaccaaagcgtatagcgcctctaaagaattactcaatgagttgag

SEQ ID NO: 254934 - DNA, 53 bp, Artificial
  Synthetic oligonucleotide
ctactgaaagaccgcccacaaacttacggtatgcccgatccaggtaccgtgtt

SEQ ID NO: 254935 - DNA, 55 bp, Artificial
  Synthetic oligonucleotide
caccgatgcgtctggccaagtagtcagaagggcgcctgctttgatgcctccccaa

SEQ ID NO: 254936 - DNA, 54 bp, Artificial
  Synthetic oligonucleotide
ataaacggacaataagtacgaatgacctttaacgcgtttcttggctcggctgtc

SEQ ID NO: 254937 - DNA, 55 bp, Artificial
  Synthetic oligonucleotide
ctaccgcttatggaagattgaagagcgtgtacgcatgtacgatacgccaacttac

SEQ ID NO: 254938 - DNA, 54 bp, Artificial
  Synthetic oligonucleotide
ataaatacggtgcagtttaacaatagttggccgacctaattcaccaacacttgg

SEQ ID NO: 254939 - DNA, 52 bp, Artificial
  Synthetic oligonucleotide
ctaccaccgaaaggaaccgaaggtttactccgagactcagttaaaggacgca

SEQ ID NO: 254940 - DNA, 55 bp, Artificial
  Synthetic oligonucleotide
ctaatgcgagtgactcatgcgttgatacgatcacttgattgagtgcgctgcgaca

SEQ ID NO: 254941 - DNA, 55 bp, Artificial
  Synthetic oligonucleotide
ctaactggctgtagcgctggctttgacagcgaatacagttgcgacaaagtcgggg

SEQ ID NO: 254942 - DNA, 55 bp, Artificial
  Synthetic oligonucleotide
ctaactgactgagcgtaatagaacgagagccagtaagaagttccatcccatatcc

SEQ ID NO: 254943 - DNA, 55 bp, Artificial
  Synthetic oligonucleotide
ctaacgtatccccagcgtgcgtcaccgacgagtatgttgttataacgaaagagtg

SEQ ID NO: 254944 - DNA, 60 bp, Artificial
  Synthetic oligonucleotide
cacggccattactctattagccgtgtagacattaacggcatgtttgagcttggttctcga

SEQ ID NO: 254945 - DNA, 55 bp, Artificial
  Synthetic oligonucleotide
ctaacaggacgatgtttactgctttgccaaacgccacttatcatgtaatgccccg

SEQ ID NO: 254946 - DNA, 54 bp, Artificial
  Synthetic oligonucleotide
cacccgaggggtatcgcggagaattacttctgtcgggcaaacagttagtgaagg

SEQ ID NO: 254947 - DNA, 55 bp, Artificial
  Synthetic oligonucleotide
cacctcgaaccaagctatcaaatgagcccgctttaatgttggcaccggaaaggcc

SEQ ID NO: 254948 - DNA, 55 bp, Artificial
  Synthetic oligonucleotide
cgtttagaacttaacggctatgttcaacgaattcgtagcgaatctgaccgtcgta

SEQ ID NO: 254949 - DNA, 55 bp, Artificial
  Synthetic oligonucleotide
cgttgttatctctggtaaagctaacatcgcagtcgatttagagtgtcaacgctgt

SEQ ID NO: 254950 - DNA, 55 bp, Artificial
  Synthetic oligonucleotide
cgttgtgggtatcgcactaggctcactaacaacagcagttatcgttggcttctgg

SEQ ID NO: 254951 - DNA, 55 bp, Artificial
  Synthetic oligonucleotide
cacctctaactctaaacgcgtcaagtttagctgctcatcacaatacgacagcaag

SEQ ID NO: 254952 - DNA, 55 bp, Artificial
  Synthetic oligonucleotide
cgtcatcaatggctgttatgctgtccagaaagacgtgaagttcaggactggtgag

SEQ ID NO: 254953 - DNA, 55 bp, Artificial
  Synthetic oligonucleotide
cacgcctttactacttggtagctcagtgccttctactttgattgcttggcgtaac

SEQ ID NO: 254954 - DNA, 53 bp, Artificial
  Synthetic oligonucleotide
actttcaagcggtgtttagaggtcggttactcaacgaagctccgaggcttaaa

SEQ ID NO: 254955 - DNA, 54 bp, Artificial
  Synthetic oligonucleotide
ccttttaagacagaatttacctttactacgcatcaagcgaagtcgggtgaagtc

SEQ ID NO: 254956 - DNA, 55 bp, Artificial
  Synthetic oligonucleotide
cgtcagtaaagcgaaccaatcacaaggaatgttgatgttcacgctcagtgcccag

SEQ ID NO: 254957 - DNA, 55 bp, Artificial
  Synthetic oligonucleotide
cacggcagcattggacaccgtgctgcgcacgtatagccacgacaataacgcggtg

SEQ ID NO: 254958 - DNA, 55 bp, Artificial
  Synthetic oligonucleotide
cgtcacttgacagagaaagctggtttaatcgttcattgagcataaagtgctccca

SEQ ID NO: 254959 - DNA, 55 bp, Artificial
  Synthetic oligonucleotide
atagatgttcaacaaggctataaagaacattggaccgatagccctcgttagagat

SEQ ID NO: 254960 - DNA, 55 bp, Artificial
  Synthetic oligonucleotide
agtgctcgaaccacggtattaatcggcgttctaagcccataacgattcttccaac

SEQ ID NO: 254961 - DNA, 55 bp, Artificial
  Synthetic oligonucleotide
acttgtggatgtaaaccaaagtcggcgaacttatgctctgtgatatgcgtctttt

SEQ ID NO: 254962 - DNA, 55 bp, Artificial
  Synthetic oligonucleotide
acttcgtcgaaatgtgtacggttaaattacagtttcgcatcgcgttgtgcgtacg

SEQ ID NO: 254963 - DNA, 55 bp, Artificial
  Synthetic oligonucleotide
cgtcacggtataacccaaggaatgagtcacgttgaccatcgtagctatcaggatc

SEQ ID NO: 254964 - DNA, 54 bp, Artificial
  Synthetic oligonucleotide
cacggccaaaataaaggggttcgccagccaagcatttagccccaggcgtactgg

SEQ ID NO: 254965 - DNA, 55 bp, Artificial
  Synthetic oligonucleotide
cgtcaccgtaagcaaagcacagaattaacgttattagcggaatctaatccagcgg

SEQ ID NO: 254966 - DNA, 56 bp, Artificial
  Synthetic oligonucleotide
ccttgggcgtgttgaaatgagtgaccttaaaccgattgatgacattactttgaagt

SEQ ID NO: 254967 - DNA, 55 bp, Artificial
  Synthetic oligonucleotide
agtgctatggtagataggattgctgcgcattgtgatatgcgtaaccgtaaagaca

SEQ ID NO: 254968 - DNA, 55 bp, Artificial
  Synthetic oligonucleotide
cgtattaagcttgtgcgtccagataaccaaagcttgtttaaagatacgaatggcc

SEQ ID NO: 254969 - DNA, 55 bp, Artificial
  Synthetic oligonucleotide
aaactcacgccgcgtaatactaagattacttcgtcgtacacgacttcaatgttgt

SEQ ID NO: 254970 - DNA, 55 bp, Artificial
  Synthetic oligonucleotide
cgtatggcacaggtgttacgaggttaccaaagtgatgcgccactaggtatgctag

SEQ ID NO: 254971 - DNA, 55 bp, Artificial
  Synthetic oligonucleotide
aaacttgatcaagagaatattcctcactctgaagcctatccggttattcgtggcc

SEQ ID NO: 254972 - DNA, 55 bp, Artificial
  Synthetic oligonucleotide
ataggcctgcaggtcccattggcaactcataaggataagtgccagcatcgtaacg

SEQ ID NO: 254973 - DNA, 55 bp, Artificial
  Synthetic oligonucleotide
atacccatccagcgctttattactgaacgtgccagtgtaaatcggatcctgcgcc

SEQ ID NO: 254974 - DNA, 55 bp, Artificial
  Synthetic oligonucleotide
cgtgtatccagacactacacgtaagtctaactccaatccttcgtgtatctcacgc

SEQ ID NO: 254975 - DNA, 55 bp, Artificial
  Synthetic oligonucleotide
aaaatggcatgcgaagagtgatggtttagcacaagagaggttgtatggtagttgt

SEQ ID NO: 254976 - DNA, 55 bp, Artificial
  Synthetic oligonucleotide
cacgagttacgtttacttcacctagtgcaaccatgccttggtctgcgttgttagc

SEQ ID NO: 254977 - DNA, 60 bp, Artificial
  Synthetic oligonucleotide
cacacattcaagatatgtcacacctagcggtcgcttatggtgtgtcgaaacgccttgctc

SEQ ID NO: 254978 - DNA, 55 bp, Artificial
  Synthetic oligonucleotide
cgtggaaatgtcgcctatcgtcagctagtaaacaatggatttaaagctcggaatc

SEQ ID NO: 254979 - DNA, 54 bp, Artificial
  Synthetic oligonucleotide
agaaaccgtttggaatagcgcttggtcaaacacttcgtaaattgaatctaccgc

SEQ ID NO: 254980 - DNA, 55 bp, Artificial
  Synthetic oligonucleotide
cgtgcttgttcttatcacttaatgcaagcgcggctcaaccaacctataaggtttc

SEQ ID NO: 254981 - DNA, 55 bp, Artificial
  Synthetic oligonucleotide
cacgccttagattcgttatcgttcgcttctgccattgcattttcagcagtgatac

SEQ ID NO: 254982 - DNA, 55 bp, Artificial
  Synthetic oligonucleotide
cgtgcgccggcatcataggaagtatcgtctagttgaatcgtctgagcatacgcca

SEQ ID NO: 254983 - DNA, 55 bp, Artificial
  Synthetic oligonucleotide
acttttccagtacctggccgcattgcggctacatcgtccgtacatataccgggcg

SEQ ID NO: 254984 - DNA, 52 bp, Artificial
  Synthetic oligonucleotide
cgtgccagtacgccttacgtttcaaggtaattatcgtcgtttaaacttcgat

SEQ ID NO: 254985 - DNA, 55 bp, Artificial
  Synthetic oligonucleotide
cgtgagtggagtaatgagcagcggcaagtactgaatgcggtacacacggcattac

SEQ ID NO: 254986 - DNA, 55 bp, Artificial
  Synthetic oligonucleotide
cgtgagcggtagtgacttgatccatactacacgtactccgatcttgtagaggcag

SEQ ID NO: 254987 - DNA, 55 bp, Artificial
  Synthetic oligonucleotide
cgtgaagcggggctgaatctagtacggaccaatatgctgcaagggcaaagtaccc

SEQ ID NO: 254988 - DNA, 59 bp, Artificial
  Synthetic oligonucleotide
ggctccagtcggcaagcaatcagggttcacactagagtgataaacttagcgaaagcggt

SEQ ID NO: 254989 - DNA, 55 bp, Artificial
  Synthetic oligonucleotide
cgtgaaccggtttgaattcacattactttgcgatgcgttaaaacgccataatggg

SEQ ID NO: 254990 - DNA, 54 bp, Artificial
  Synthetic oligonucleotide
cgtctggttgggcttacttcgctgtgactaactttattcttggtgttcgtaccg

SEQ ID NO: 254991 - DNA, 55 bp, Artificial
  Synthetic oligonucleotide
cgtctagcttaaagccacggcgcgccagtttagcagctgtatcatccagctctgt

SEQ ID NO: 254992 - DNA, 55 bp, Artificial
  Synthetic oligonucleotide
atagaagacgtctctgactcgcatagtgcccagtatggcgcttaggcaatacgct

SEQ ID NO: 254993 - DNA, 55 bp, Artificial
  Synthetic oligonucleotide
cgtcctgtatacgcttatggctagcggtagtgtctgaaatcggtacactaaccca

SEQ ID NO: 254994 - DNA, 55 bp, Artificial
  Synthetic oligonucleotide
cgtcctatgggttggtcagcccttgagttctccggtactactgagtcaatccgag

SEQ ID NO: 254995 - DNA, 55 bp, Artificial
  Synthetic oligonucleotide
cgtcattatctggtagtaggtggccgtgccatgctcccatatcaaagaaagggtt

SEQ ID NO: 254996 - DNA, 55 bp, Artificial
  Synthetic oligonucleotide
cgcagttctgtagccttgggtcgaaatcttgtaaatcgatgtgggtcaactcgcg

SEQ ID NO: 254997 - DNA, 55 bp, Artificial
  Synthetic oligonucleotide
atgcgtaaactcgttttagcaatcaccattgcttcattagtcggctgttctatgg

SEQ ID NO: 254998 - DNA, 55 bp, Artificial
  Synthetic oligonucleotide
cgcagtgaaatatactaagcctaactacccctaagcatgaatgaatcgcttctgg

SEQ ID NO: 254999 - DNA, 58 bp, Artificial
  Synthetic oligonucleotide
gttcgtaatgaacaacatcaccctattgtgtcttagccttttattattaagcggctgc

SEQ ID NO: 255000 - DNA, 50 bp, Artificial
  Synthetic oligonucleotide
gttttttcgaaatacttaactacgtttagacggcgttgtaagtcctttca

SEQ ID NO: 255001 - DNA, 60 bp, Artificial
  Synthetic oligonucleotide
ggctcgcaagtcgattggctacaggacttagattactccctatatgcttagattctacgc

SEQ ID NO: 255002 - DNA, 55 bp, Artificial
  Synthetic oligonucleotide
aaggggcgtacatagattgcgttcttaataccagtatgaactctaccgttgcagg

SEQ ID NO: 255003 - DNA, 55 bp, Artificial
  Synthetic oligonucleotide
atgcgttacctgggcggggtgttaaacaaaatctagtgttagcaacatgcatggc

SEQ ID NO: 255004 - DNA, 55 bp, Artificial
  Synthetic oligonucleotide
aagtaccaacccgatacggatgcccctgggtacatcgcatagctcgatgttagtg

SEQ ID NO: 255005 - DNA, 55 bp, Artificial
  Synthetic oligonucleotide
cagcactgtctctacatgttcgctatgctccccatataacagccagcactcgacc

SEQ ID NO: 255006 - DNA, 55 bp, Artificial
  Synthetic oligonucleotide
atgctcacgactcattgatagtcgacttccctaacttaccaaataatggacgagt

SEQ ID NO: 255007 - DNA, 55 bp, Artificial
  Synthetic oligonucleotide
aagtctttccacactctagcgtacgttgactccactgatagcgccctttactcgg

SEQ ID NO: 255008 - DNA, 55 bp, Artificial
  Synthetic oligonucleotide
cagccagcacaaactagctgaacaagcccttactcgccttaacccatagtcctat

SEQ ID NO: 255009 - DNA, 55 bp, Artificial
  Synthetic oligonucleotide
aataaacgatggggagagggacgaccattccattataataggcataacgcgaaat

SEQ ID NO: 255010 - DNA, 55 bp, Artificial
  Synthetic oligonucleotide
cgcagacggctgtatgtcaggtaaggaatatcgaagttaagcgcaggccatacca

SEQ ID NO: 255011 - DNA, 55 bp, Artificial
  Synthetic oligonucleotide
cgcagaaaactcatgtgctggtggagcgatcatataacagcttctgctgagggaa

SEQ ID NO: 255012 - DNA, 60 bp, Artificial
  Synthetic oligonucleotide
gcatgaaaatacgacctatgccaccagccacgagtatgctggcaagctttagggacgacc

SEQ ID NO: 255013 - DNA, 55 bp, Artificial
  Synthetic oligonucleotide
cgcactttaggcgggaacgggtcacgataaactggagtcatattgacctcacgct

SEQ ID NO: 255014 - DNA, 55 bp, Artificial
  Synthetic oligonucleotide
cgcacttgagtaatgcccacccattgaattcgccacactctgatacgtggcatcc

SEQ ID NO: 255015 - DNA, 55 bp, Artificial
  Synthetic oligonucleotide
cgcactcatgtaaattaaacgcgagacaacttaggttgtttaaacagcaacccga

SEQ ID NO: 255016 - DNA, 55 bp, Artificial
  Synthetic oligonucleotide
cgcactactgacgacatccgacaagtacaccgtttgtcgactcatattcggcagc

SEQ ID NO: 255017 - DNA, 55 bp, Artificial
  Synthetic oligonucleotide
cgcacgtacacacgtttactcaatgctgatgcgaactatgtcggactgatgacgc

SEQ ID NO: 255018 - DNA, 55 bp, Artificial
  Synthetic oligonucleotide
cagccattctactgttgggtacttacaccggttaccgaatcagcgaattacgtcg

SEQ ID NO: 255019 - DNA, 55 bp, Artificial
  Synthetic oligonucleotide
cgcacaaggctagtgatcacttcttcagcggtagggctaagaacaaacggacgag

SEQ ID NO: 255020 - DNA, 55 bp, Artificial
  Synthetic oligonucleotide
aagcgcaggataagcaagaagtaaatgctgggcgctacagacgaatcaaaccaac

SEQ ID NO: 255021 - DNA, 55 bp, Artificial
  Synthetic oligonucleotide
cgcccatgtcttgccattcttgcatagaaccttggaaacgcttcacaacgcgacc

SEQ ID NO: 255022 - DNA, 55 bp, Artificial
  Synthetic oligonucleotide
aggctcgaaagacctaggcagtcacacgctagaaggctctcgttctggtatggcc

SEQ ID NO: 255023 - DNA, 60 bp, Artificial
  Synthetic oligonucleotide
cacatcctagtcgctaggcaatacgggcattagattgagcgggagtataattagcgttat

SEQ ID NO: 255024 - DNA, 55 bp, Artificial
  Synthetic oligonucleotide
cgcccaaactactggaatttctcgctcagatgcgacacccgagacctgctgagcg

SEQ ID NO: 255025 - DNA, 55 bp, Artificial
  Synthetic oligonucleotide
cagatacatcattcgctaagcgattacgaggatcaaacatggttctaagcaaccc

SEQ ID NO: 255026 - DNA, 55 bp, Artificial
  Synthetic oligonucleotide
cgccattatcaggctcctgagtttcatctatttcctgcgtatgattgaggtcgac

SEQ ID NO: 255027 - DNA, 55 bp, Artificial
  Synthetic oligonucleotide
cagatacgaaagtacggtggtgtgatgtcgccgttactagatagtcaaaagcccg

SEQ ID NO: 255028 - DNA, 55 bp, Artificial
  Synthetic oligonucleotide
aggcgagagaatgccgattgatttatgtgaaaccgtagcatccaagattaggacg

SEQ ID NO: 255029 - DNA, 55 bp, Artificial
  Synthetic oligonucleotide
cgccagtgtggtctagtagagaacctagagaagcacgttcgatacccatatcagt

SEQ ID NO: 255030 - DNA, 55 bp, Artificial
  Synthetic oligonucleotide
cgccagcaaggtcaatcagaactgagccgaagcttgttgtggatgagtctcgagg

SEQ ID NO: 255031 - DNA, 55 bp, Artificial
  Synthetic oligonucleotide
cgccactttcgactgtattgactagagagaaactgactccatccacgaaagtctc

SEQ ID NO: 255032 - DNA, 55 bp, Artificial
  Synthetic oligonucleotide
cgccacacaaatggctctgtatcacgctacctacacttatctcagcgcaacgtcc

SEQ ID NO: 255033 - DNA, 55 bp, Artificial
  Synthetic oligonucleotide
cgccaatgggtcatcggcttagtcggcgcagtatgcagaatgtgctgatacgctt

SEQ ID NO: 255034 - DNA, 60 bp, Artificial
  Synthetic oligonucleotide
gcatctggaacctctttgcggcgaggtataacactctccatgcgacgcatgtgcttggag

SEQ ID NO: 255035 - DNA, 55 bp, Artificial
  Synthetic oligonucleotide
cgccaagtggccttacaggtgcaatacagtcgtgcagcgacctatgcgggtaatg

SEQ ID NO: 255036 - DNA, 55 bp, Artificial
  Synthetic oligonucleotide
cagcaaatcttctcggtcaatgcaggtttcaaaatggcgaacatacacaagcgcc

SEQ ID NO: 255037 - DNA, 55 bp, Artificial
  Synthetic oligonucleotide
atgcgacttaaaacatgaattagatctgaaagcacttaagtgcccagagtccgta

SEQ ID NO: 255038 - DNA, 55 bp, Artificial
  Synthetic oligonucleotide
cgccaaccgccgccaaaagaatcgcaacaaactgccctttagatagcttgtcgcc

SEQ ID NO: 255039 - DNA, 55 bp, Artificial
  Synthetic oligonucleotide
cgcatcgaagaagtgttcgagccatatgttcgcattgcaacggataaagaggggc

SEQ ID NO: 255040 - DNA, 55 bp, Artificial
  Synthetic oligonucleotide
cgcatccgtgaagaatgggcattatagcgcgctgagtaaatcgcaccagttgaga

SEQ ID NO: 255041 - DNA, 55 bp, Artificial
  Synthetic oligonucleotide
cagcaatgatacgttgcacccactgcgatgaatagggtcaacaagcatgtatctg

SEQ ID NO: 255042 - DNA, 55 bp, Artificial
  Synthetic oligonucleotide
cgcagttgcgcggtttcaaagtgcttggtgagcagcgcaggtagccagtcgcatt

SEQ ID NO: 255043 - DNA, 55 bp, Artificial
  Synthetic oligonucleotide
cagcgctttaaccaagacttcgggttctgtgcttcactattacgtcggatttcga

SEQ ID NO: 255044 - DNA, 55 bp, Artificial
  Synthetic oligonucleotide
cgatgcacgatgcttactgtaaagcattcgaccgcatgggtcttgagtaccgtcc

SEQ ID NO: 255045 - DNA, 60 bp, Artificial
  Synthetic oligonucleotide
gcatatttgagtcaatatgtgcatcgtttggatcattgcaggttattgtaccattagaga

SEQ ID NO: 255046 - DNA, 55 bp, Artificial
  Synthetic oligonucleotide
cgatcgcccaatgcagattgggaaccaagcgtgttcggttgaggtgtggttaacc

SEQ ID NO: 255047 - DNA, 55 bp, Artificial
  Synthetic oligonucleotide
cgatccgtgtcagaattacgtctaccaacagtaaaacttggagattgatacccac

SEQ ID NO: 255048 - DNA, 55 bp, Artificial
  Synthetic oligonucleotide
aatccggcatgtttgctaattgcagttgatttagcctcgccatatgaagggacaa

SEQ ID NO: 255049 - DNA, 55 bp, Artificial
  Synthetic oligonucleotide
cgataagacagcatcactcatacgcaacgcagctacagcactgctatatcctaca

SEQ ID NO: 255050 - DNA, 55 bp, Artificial
  Synthetic oligonucleotide
agcttgtccagataatcagagtccagtagttgagcctgcttcttacgcctcttcg

SEQ ID NO: 255051 - DNA, 55 bp, Artificial
  Synthetic oligonucleotide
cgagtttaggtcacacttaccaaggcacagtaatgcaggcctacaaaggacgggt

SEQ ID NO: 255052 - DNA, 55 bp, Artificial
  Synthetic oligonucleotide
agaggccattggcgagctagtcagcaacatgattgccaactcaggcgaagagaac

SEQ ID NO: 255053 - DNA, 55 bp, Artificial
  Synthetic oligonucleotide
cgagctgctttcgaacatgatccgccaaagtaagcgagagagcggcaaggcactg

SEQ ID NO: 255054 - DNA, 55 bp, Artificial
  Synthetic oligonucleotide
cgagcgagtaaaagtctttctggatttcgttacaagcaaactgggcacgagcagc

SEQ ID NO: 255055 - DNA, 54 bp, Artificial
  Synthetic oligonucleotide
cgagcgacctaggtagtggttaagcgtaccgaagttctgacgacctgtggtttg

SEQ ID NO: 255056 - DNA, 58 bp, Artificial
  Synthetic oligonucleotide
ccttaactcaactcctagtgcattcatacttgttccgtatgacctccgccccgtgtgc

SEQ ID NO: 255057 - DNA, 55 bp, Artificial
  Synthetic oligonucleotide
aatcgcccaagatctgagccgctatgagcgcacgatttggaccgatcacgaacgt

SEQ ID NO: 255058 - DNA, 55 bp, Artificial
  Synthetic oligonucleotide
cgagcaattattaaagcgcgggcagatacactatcgtcacctctatggtaactgg

SEQ ID NO: 255059 - DNA, 55 bp, Artificial
  Synthetic oligonucleotide
cgagatcagacacccgtaaactcgatttaatccgttcagcacacgccactagcac

SEQ ID NO: 255060 - DNA, 55 bp, Artificial
  Synthetic oligonucleotide
cgagagcttacgtcaccgtcactatacaaattcccttgagggataccatagcgac

SEQ ID NO: 255061 - DNA, 55 bp, Artificial
  Synthetic oligonucleotide
cgagagattatccaagtgcacaagcaaaaccggaaactatcggcaattctagcca

SEQ ID NO: 255062 - DNA, 55 bp, Artificial
  Synthetic oligonucleotide
cgagaatcgattgaccagcggtaaaacgactgcgttgctcactgtatggcactag

SEQ ID NO: 255063 - DNA, 55 bp, Artificial
  Synthetic oligonucleotide
aatctaacacaatgcctaacgctgtcattagtataagctcacccatagctaaccc

SEQ ID NO: 255064 - DNA, 55 bp, Artificial
  Synthetic oligonucleotide
aatgacaggcagtgaagctgtcgtcatccctgcgaaattatttatgggcggctat

SEQ ID NO: 255065 - DNA, 55 bp, Artificial
  Synthetic oligonucleotide
aataaccctaaactcgaacttgagaatgcgtcacaacactaagcgtatgttgttg

SEQ ID NO: 255066 - DNA, 55 bp, Artificial
  Synthetic oligonucleotide
cgcaaccggtggtagaaagcgcggtgccagtcactcagcgagaagcatcacactc

SEQ ID NO: 255067 - DNA, 60 bp, Artificial
  Synthetic oligonucleotide
cctgaatacccgggaagtggatgcgttaattttgctctctatgataatgcagcggagtac

SEQ ID NO: 255068 - DNA, 55 bp, Artificial
  Synthetic oligonucleotide
cgcaaatgttcgggtagcgcaccacttttaaatctcgaaagaagacctccgtcaa

SEQ ID NO: 255069 - DNA, 55 bp, Artificial
  Synthetic oligonucleotide
cgcaaatcaccgagcgacattcacctagctgcttcgcgacaatattgggcgtcag

SEQ ID NO: 255070 - DNA, 55 bp, Artificial
  Synthetic oligonucleotide
cgatttgttcgcactagcagaaatgggtcgcttcctactagcaagctatgtggca

SEQ ID NO: 255071 - DNA, 55 bp, Artificial
  Synthetic oligonucleotide
cagcccctcgtaagcaccaagccaattgcccgtctcacgtgcttgccacgccatc

SEQ ID NO: 255072 - DNA, 55 bp, Artificial
  Synthetic oligonucleotide
cgatttcacttgcccaacaggcacacctttgtctaaccacgcaaggatctcctga

SEQ ID NO: 255073 - DNA, 55 bp, Artificial
  Synthetic oligonucleotide
cagcccgcatgctgattcgcgaggctcagaacactcaaaagctaagtcaccccaa

SEQ ID NO: 255074 - DNA, 55 bp, Artificial
  Synthetic oligonucleotide
cgattggtggtacctactacctaaacagtgcttggacatgcgtgctggctacatg

SEQ ID NO: 255075 - DNA, 55 bp, Artificial
  Synthetic oligonucleotide
cgattgcacttaacgaaggtactcttcaccacgctgttaaaggtcgccacactgg

SEQ ID NO: 255076 - DNA, 55 bp, Artificial
  Synthetic oligonucleotide
cagccgccaaaacttgcctcaatcaacgggcaaccctcgcattcaaattggttcg

SEQ ID NO: 255077 - DNA, 55 bp, Artificial
  Synthetic oligonucleotide
cagcgaatctcgtgtcagccaaatactgagccaatctatgcagcgtttacgcact

SEQ ID NO: 255078 - DNA, 60 bp, Artificial
  Synthetic oligonucleotide
cctgctcaactggggagccaatatcggcccagccacacgagaagtcgtcaataagatgct

SEQ ID NO: 255079 - DNA, 55 bp, Artificial
  Synthetic oligonucleotide
cgattgaaacctcaaactcgcaagttctaggtgactatactcaacagcaccgacc

SEQ ID NO: 255080 - DNA, 55 bp, Artificial
  Synthetic oligonucleotide
aataggttatccagtgcaacttctacaggcatttctggttgaagaacgtaagtgt

SEQ ID NO: 255081 - DNA, 55 bp, Artificial
  Synthetic oligonucleotide
aatatttctaaagggtcctcttgaagtgctttaatccaagagccgacataagcgg

SEQ ID NO: 255082 - DNA, 55 bp, Artificial
  Synthetic oligonucleotide
cagcgacaactgtcactgaagagtgtcaggcattcttacagaagcttgagtggtt

SEQ ID NO: 255083 - DNA, 55 bp, Artificial
  Synthetic oligonucleotide
cgattactgatgcttgtcagtgtacggtagtagagctaggtagcgagaacgtttg

SEQ ID NO: 255084 - DNA, 55 bp, Artificial
  Synthetic oligonucleotide
cgattaagtggtgtgtcgatgttcagtgtgtaagtgaaagagtccacgacgaatc

SEQ ID NO: 255085 - DNA, 55 bp, Artificial
  Synthetic oligonucleotide
cagcgatgactttccccgtttaacagttagcagagacgcgagtcgtcagctttac

SEQ ID NO: 255086 - DNA, 55 bp, Artificial
  Synthetic oligonucleotide
cgattaacgcaccttcaattaaacgagcaacaaatggaatcgccccaatggttag

SEQ ID NO: 255087 - DNA, 55 bp, Artificial
  Synthetic oligonucleotide
aatcactatgtagggctgtttgatgcgttgaaagagcatcgtttggtgatctgtg

SEQ ID NO: 255088 - DNA, 55 bp, Artificial
  Synthetic oligonucleotide
agtaagcctcagttacgtaaagcggcattcagtaacgtatttgcactaacatttg

SEQ ID NO: 255089 - DNA, 59 bp, Artificial
  Synthetic oligonucleotide
cacctagaatgttcccgcatgctaggtgcgctcactttagtccctatcctccttaccta

SEQ ID NO: 255090 - DNA, 55 bp, Artificial
  Synthetic oligonucleotide
cgctctgagtaacgatgggcaacaagtgttgctgggtgtatccaacggtaaagcc

SEQ ID NO: 255091 - DNA, 55 bp, Artificial
  Synthetic oligonucleotide
cgctctcacgagtaggtgcaaataccgttgagggaatataatggttgctaccttc

SEQ ID NO: 255092 - DNA, 55 bp, Artificial
  Synthetic oligonucleotide
cgctcgttagaagtgtccatgatccacgacgcgagaaccgcggtaaagctaccaa

SEQ ID NO: 255093 - DNA, 55 bp, Artificial
  Synthetic oligonucleotide
cgctccacgtctttacgcgcaatcttactcataactttgtccaccctgtattgga

SEQ ID NO: 255094 - DNA, 55 bp, Artificial
  Synthetic oligonucleotide
cgctcagctttataagcgtaaagaaggtgatgcatttcgtggaggtgctgcacgt

SEQ ID NO: 255095 - DNA, 55 bp, Artificial
  Synthetic oligonucleotide
cgctatttgttacgccccatacaagctactacgattagtgcaagttacagtgagg

SEQ ID NO: 255096 - DNA, 55 bp, Artificial
  Synthetic oligonucleotide
cgctactgccacgattgcttacggcttaccaagctattttggcaaagctcgcgag

SEQ ID NO: 255097 - DNA, 55 bp, Artificial
  Synthetic oligonucleotide
atctcgattgtaaatggtcctcgactggtcaccccgtagctgttttgatagccgt

SEQ ID NO: 255098 - DNA, 55 bp, Artificial
  Synthetic oligonucleotide
cacactatcaaggattagatgcatggagcacctatagtagccggattgctgcgag

SEQ ID NO: 255099 - DNA, 55 bp, Artificial
  Synthetic oligonucleotide
cagagaacagttcgtgtctcaagcgatgatacatcaagcgtatgataacaatgcg

SEQ ID NO: 255100 - DNA, 55 bp, Artificial
  Synthetic oligonucleotide
gggatcttatgcctatcgggaagccacaaaacctgagcccttacccccaccagtg

SEQ ID NO: 255101 - DNA, 55 bp, Artificial
  Synthetic oligonucleotide
cgctaagccaacggcctgtgagctcatgcaattggaaatcggtaaattcgatacg

SEQ ID NO: 255102 - DNA, 55 bp, Artificial
  Synthetic oligonucleotide
cgctaacgcttccatcaatttgacatgcccttcaatcagacaatgtgccctagtg

SEQ ID NO: 255103 - DNA, 55 bp, Artificial
  Synthetic oligonucleotide
cgcgttgtttagcacctgacctgggttgtgacgaactaggtattcaaacatcttg

SEQ ID NO: 255104 - DNA, 55 bp, Artificial
  Synthetic oligonucleotide
cgcgtggttaatccacagctttacggcagtcaatggtgtatcaagtatcgatctg

SEQ ID NO: 255105 - DNA, 55 bp, Artificial
  Synthetic oligonucleotide
cgcgtcatggtcgcttgcaatgggaagttcagtaccgaggttagctgtttcggcg

SEQ ID NO: 255106 - DNA, 55 bp, Artificial
  Synthetic oligonucleotide
aactcttgagggatttccgacgtcacataggtctcgtgcaaaatatttgccgcac

SEQ ID NO: 255107 - DNA, 55 bp, Artificial
  Synthetic oligonucleotide
cgcgtcacagaaggcgctgctctagcgggttataaatggctaggccgtggtgaca

SEQ ID NO: 255108 - DNA, 55 bp, Artificial
  Synthetic oligonucleotide
actgttttgatctgcaagaagtcagtattcgccagtgggttcgacgcaaagtccg

SEQ ID NO: 255109 - DNA, 55 bp, Artificial
  Synthetic oligonucleotide
cacagctttaacgctcgattcatttatagccgcgttaaactctttggctaggact

SEQ ID NO: 255110 - DNA, 55 bp, Artificial
  Synthetic oligonucleotide
cggagcagcccttagctaaggtaacgcgtatccttccgttctcttgtgttgatgg

SEQ ID NO: 255111 - DNA, 58 bp, Artificial
  Synthetic oligonucleotide
cggcatgaatactcaccgcttgatccacgttggtacggttacacgccgattcgcacgg

SEQ ID NO: 255112 - DNA, 56 bp, Artificial
  Synthetic oligonucleotide
cctgaccgtctggggacgctctacgtttgcggctccccccatgcctactggcgaaa

SEQ ID NO: 255113 - DNA, 55 bp, Artificial
  Synthetic oligonucleotide
cggaatgctttctacgctaatttaatccatgccaagctctaagatacccaggttt

SEQ ID NO: 255114 - DNA, 55 bp, Artificial
  Synthetic oligonucleotide
cggaatctaagctcggagcacaaagaatgtggcaatacgcgggtctatctgaggc

SEQ ID NO: 255115 - DNA, 55 bp, Artificial
  Synthetic oligonucleotide
cggaatcagagcaggcatttgttcgtagttggttgtctaagctcttagctagcat

SEQ ID NO: 255116 - DNA, 55 bp, Artificial
  Synthetic oligonucleotide
cggaaggtgggcgaagtaaactctgtgggcgcaaaatcttgtcaccaatcgtgag

SEQ ID NO: 255117 - DNA, 55 bp, Artificial
  Synthetic oligonucleotide
aaccgtgctcggcataaggtcgcctattgtaccatgagtggtaccccagagtggt

SEQ ID NO: 255118 - DNA, 55 bp, Artificial
  Synthetic oligonucleotide
cggaaacttgcgatgagcactgagacacatggattgcagcggtaaaccgtagtgc

SEQ ID NO: 255119 - DNA, 55 bp, Artificial
  Synthetic oligonucleotide
cgctttactcagctcgggatgcccaatagctaccgagtcgcctaaccgtatcaaa

SEQ ID NO: 255120 - DNA, 55 bp, Artificial
  Synthetic oligonucleotide
atctaatcctgtgacggagcaaccttcccagtgacggatcagcctagtgcgaaat

SEQ ID NO: 255121 - DNA, 54 bp, Artificial
  Synthetic oligonucleotide
aaccgttcttcgcgatcgcactcaactgtttagaaccaacggctcgggcgaaat

SEQ ID NO: 255122 - DNA, 55 bp, Artificial
  Synthetic oligonucleotide
aacgcaaacggccaatgggactaagcagtatttagtcacggtggaataggaatag

SEQ ID NO: 255123 - DNA, 57 bp, Artificial
  Synthetic oligonucleotide
cacctttaacacaagtcattgcacctgcgaaacccagtattccgtgtcttttcgata

SEQ ID NO: 255124 - DNA, 55 bp, Artificial
  Synthetic oligonucleotide
cgcttaatgtgaagagtgggatttaacgtaatgtcactttgtgcgaagtgcagtg

SEQ ID NO: 255125 - DNA, 55 bp, Artificial
  Synthetic oligonucleotide
cgctgttgcgttatatgggtgagctcgtcgatattctctctaatcaggatcgcgc

SEQ ID NO: 255126 - DNA, 55 bp, Artificial
  Synthetic oligonucleotide
cagactgatgacgatttgtgtcaggtctttctgagctctcaaaatgcgcctaggt

SEQ ID NO: 255127 - DNA, 55 bp, Artificial
  Synthetic oligonucleotide
atctagaaagcgaggggaagtcctacctgaagatatttattggtgggatggcgat

SEQ ID NO: 255128 - DNA, 55 bp, Artificial
  Synthetic oligonucleotide
atctcagccccaagaacatgcttctcatgtttagggaactgttttatcacctgat

SEQ ID NO: 255129 - DNA, 55 bp, Artificial
  Synthetic oligonucleotide
cgctgattggtaaggatgcccgactatgattgatacctggtttaaagaggattta

SEQ ID NO: 255130 - DNA, 55 bp, Artificial
  Synthetic oligonucleotide
cgctgaatccactaagtaaaacgctaaccgtccatccattaaccacgtgtaatca

SEQ ID NO: 255131 - DNA, 55 bp, Artificial
  Synthetic oligonucleotide
cagagtagggatgtaaggacagttaatgatgccaacccgccaaatcgattctcac

SEQ ID NO: 255132 - DNA, 55 bp, Artificial
  Synthetic oligonucleotide
caatgtctgcttcatgtggccttgatgttgcaatgacatactgctcgttttcgac

SEQ ID NO: 255133 - DNA, 55 bp, Artificial
  Synthetic oligonucleotide
cgcctacacagcaggtatcgcaccgatcagtaatcctcgtttagcagttgtagtg

SEQ ID NO: 255134 - DNA, 47 bp, Artificial
  Synthetic oligonucleotide
ggtaaaaacgtacgaggttgacggcctctttttattaacccaaaacc

SEQ ID NO: 255135 - DNA, 55 bp, Artificial
  Synthetic oligonucleotide
aagcacgcccgtttggaaaccaaacactggtgacacctcccctgcataagcaatc

SEQ ID NO: 255136 - DNA, 55 bp, Artificial
  Synthetic oligonucleotide
cgcctccacgtgtgactgatagatggaaatggacattccaattaagttgacgacc

SEQ ID NO: 255137 - DNA, 55 bp, Artificial
  Synthetic oligonucleotide
atgatcgtagcctgtatcacgccccaatgtatctgtaacgacccagtgatcaacg

SEQ ID NO: 255138 - DNA, 55 bp, Artificial
  Synthetic oligonucleotide
atgcatagccttttggtgcaaagctgatgcttagttcgttaggacgcactttgcg

SEQ ID NO: 255139 - DNA, 55 bp, Artificial
  Synthetic oligonucleotide
cgcctgtggaatacctgcaatcttgagcagtattctttctaactcgctccaaggc

SEQ ID NO: 255140 - DNA, 55 bp, Artificial
  Synthetic oligonucleotide
cgccttccttacaggccattctaccctaactacctgcactggatgttgtcatgcc

SEQ ID NO: 255141 - DNA, 55 bp, Artificial
  Synthetic oligonucleotide
aagcaacgaagcttgctatcttgaacgctaactacgtaatggaacgtctacgccc

SEQ ID NO: 255142 - DNA, 55 bp, Artificial
  Synthetic oligonucleotide
cgccgcgttacttgctatcgtaaattcagaaggcaaagcgaacgcgcttattttc

SEQ ID NO: 255143 - DNA, 54 bp, Artificial
  Synthetic oligonucleotide
aagccacgtccatggtgcctctttgtatcgccagttcaaagggtttacccgccc

SEQ ID NO: 255144 - DNA, 55 bp, Artificial
  Synthetic oligonucleotide
aagagccgtaccattctacggcagttggattacttcattacgcaagagacatgca

SEQ ID NO: 255145 - DNA, 60 bp, Artificial
  Synthetic oligonucleotide
cctagcggtcgcttatggtgtgtcgaaacgccttgctcatgagttgggactggcagaaga

SEQ ID NO: 255146 - DNA, 55 bp, Artificial
  Synthetic oligonucleotide
cgcgactgtgaaagcggtggtaaccccattaccgcgcaaccgtgctgaccttaag

SEQ ID NO: 255147 - DNA, 55 bp, Artificial
  Synthetic oligonucleotide
cgcgagggaataccatgtactcgtattgctcatcgttacgtactgtctcagacca

SEQ ID NO: 255148 - DNA, 53 bp, Artificial
  Synthetic oligonucleotide
agggtaatgttatggaaaacgtcagttcaatcgtaccggagcaagactttact

SEQ ID NO: 255149 - DNA, 55 bp, Artificial
  Synthetic oligonucleotide
aagcccgattcgctcgattcaagagctcaatctccataccttggcattcccctct

SEQ ID NO: 255150 - DNA, 55 bp, Artificial
  Synthetic oligonucleotide
cgcgagttaaacgcggctcatagcgctcaaggcactgttgaatcgcccaatttaa

SEQ ID NO: 255151 - DNA, 55 bp, Artificial
  Synthetic oligonucleotide
atgaggtggatgtttaacggtgccaccagctttaaccaacctatcggtgactggg

SEQ ID NO: 255152 - DNA, 55 bp, Artificial
  Synthetic oligonucleotide
cgcgcacgttggtttgccaaagttggctttcgtcaaatgcgatataaccgacagt

SEQ ID NO: 255153 - DNA, 55 bp, Artificial
  Synthetic oligonucleotide
cgccgaagtgttggctttctgccgtcaagtaggcttaccgactaatttacacgaa

SEQ ID NO: 255154 - DNA, 55 bp, Artificial
  Synthetic oligonucleotide
aagacgatctttgtagagtgccgcttggctggttagctccaaaatacgctctggg

SEQ ID NO: 255155 - DNA, 55 bp, Artificial
  Synthetic oligonucleotide
agggcaagtggttgggctgctcaataacgggcacactttacaagcgatagtcagt

SEQ ID NO: 255156 - DNA, 60 bp, Artificial
  Synthetic oligonucleotide
gccaacgattaacttaccagccatgagtgatgcaactgcagttcctatggttttccatcc

SEQ ID NO: 255157 - DNA, 55 bp, Artificial
  Synthetic oligonucleotide
actgcctcggctgatcaacttagaaagcggcgtatcgtgcagattggatttaacg

SEQ ID NO: 255158 - DNA, 55 bp, Artificial
  Synthetic oligonucleotide
cgcgtacaccaactcaggtttatggtttggatccttgtagttacgatggctcgcg

SEQ ID NO: 255159 - DNA, 55 bp, Artificial
  Synthetic oligonucleotide
cgcggaaagaatggcaacgcccgcagcaaacacgggtttacgatcatcggttaag

SEQ ID NO: 255160 - DNA, 55 bp, Artificial
  Synthetic oligonucleotide
cgcggcgtgctaggtagctcctttgttactgtgctcactgatgcatgggaagtgc

SEQ ID NO: 255161 - DNA, 54 bp, Artificial
  Synthetic oligonucleotide
cacaaggtcatgggaaaggtcgcggctattgggtaacgcctaaagaggcaacgg

SEQ ID NO: 255162 - DNA, 55 bp, Artificial
  Synthetic oligonucleotide
aagcgagcagtcgcactcattcctccacgagacggagccgcattctgggagcgag

SEQ ID NO: 255163 - DNA, 55 bp, Artificial
  Synthetic oligonucleotide
cgcccggaaccaactccaattcacgtttcacataatcgacataatctaacagatc

SEQ ID NO: 255164 - DNA, 54 bp, Artificial
  Synthetic oligonucleotide
cacggcgttcaattggttatgttcgtaacgattggtaactttggtagccaaatc

SEQ ID NO: 255165 - DNA, 54 bp, Artificial
  Synthetic oligonucleotide
agaatgttccatgcttcttcccagctatcacgataaaccgcatcgttaaactct

SEQ ID NO: 255166 - DNA, 54 bp, Artificial
  Synthetic oligonucleotide
actctctgcggctattgaatctgggatactggacgttctaatggaatcttgtcc

SEQ ID NO: 255167 - DNA, 54 bp, Artificial
  Synthetic oligonucleotide
caactaccaccacaatgatgttaacttaacggagtataccccgtattattttga

SEQ ID NO: 255168 - DNA, 54 bp, Artificial
  Synthetic oligonucleotide
cagataaccagactcagtgcccgccgtgggctaattgggatggactgcccctct

SEQ ID NO: 255169 - DNA, 54 bp, Artificial
  Synthetic oligonucleotide
ggcttaagtgaactaaagtcgcgcttgttgttcgtaattggtgcacttttagta

SEQ ID NO: 255170 - DNA, 53 bp, Artificial
  Synthetic oligonucleotide
catcccctccgaccgaatgggcttcaccacttaaacgacttccgtttgccgta

SEQ ID NO: 255171 - DNA, 54 bp, Artificial
  Synthetic oligonucleotide
actcgcccattggcgcgatctaacaatcctcgttcactgtccgtcagtggcaca

SEQ ID NO: 255172 - DNA, 54 bp, Artificial
  Synthetic oligonucleotide
agataagtaacccaatgcagaggtaaagtaacgacagatcgacctgttgtagcg

SEQ ID NO: 255173 - DNA, 54 bp, Artificial
  Synthetic oligonucleotide
cacgagctaatcgctgagtacggtgtgaagaacgtgattcgtgtaggtagctgt

SEQ ID NO: 255174 - DNA, 54 bp, Artificial
  Synthetic oligonucleotide
agactgactatccgccagttctgcaccactttgctcgcgtagcgtttctaacgc

SEQ ID NO: 255175 - DNA, 54 bp, Artificial
  Synthetic oligonucleotide
tacggtactgagccagatccagtgagctacgtgcaagcaacggttggtcatcac

SEQ ID NO: 255176 - DNA, 54 bp, Artificial
  Synthetic oligonucleotide
caccattgaagtcgggtatatgcccttcaacattcgcacaggcaagaggtcttt

SEQ ID NO: 255177 - DNA, 54 bp, Artificial
  Synthetic oligonucleotide
agaggggcagtccatcccaattagcccacggcgggcactgagtctggttatctg

SEQ ID NO: 255178 - DNA, 58 bp, Artificial
  Synthetic oligonucleotide
caactcgggcaatattagtaatcgctatggtcaaataactaaagcgctaaacaagcag

SEQ ID NO: 255179 - DNA, 54 bp, Artificial
  Synthetic oligonucleotide
cacggtgacgaatcgtagcagccagctcccctagactatccttactaaagccag

SEQ ID NO: 255180 - DNA, 54 bp, Artificial
  Synthetic oligonucleotide
cacgaatcatgggttcacgcgatttatacagcgcatcacagtggccctataaat

SEQ ID NO: 255181 - DNA, 54 bp, Artificial
  Synthetic oligonucleotide
cagagcgtccgcttgtgcgccgtgaagtaagcccaaacttacgccagcaaacga

SEQ ID NO: 255182 - DNA, 54 bp, Artificial
  Synthetic oligonucleotide
gggacaagacgtgactttcgaagtcgaaattttgtcagtagaatagcgaaccaa

SEQ ID NO: 255183 - DNA, 54 bp, Artificial
  Synthetic oligonucleotide
ggcgccgctagtctataggagcgccatgccgtttgcatcttacctttgcggcac

SEQ ID NO: 255184 - DNA, 54 bp, Artificial
  Synthetic oligonucleotide
cagttacgccagtagcgtcaactttcagagtgtaagcgcctttaacttcacgac

SEQ ID NO: 255185 - DNA, 54 bp, Artificial
  Synthetic oligonucleotide
caatggtctgagattaacgaattctttctatccgcgacagatcaacctgtgacg

SEQ ID NO: 255186 - DNA, 53 bp, Artificial
  Synthetic oligonucleotide
taaatgtccctggtaacaaggtaaacattgaaagaggtttgttgggacttgag

SEQ ID NO: 255187 - DNA, 54 bp, Artificial
  Synthetic oligonucleotide
gggatacaggtgcttgtttctttaacgattgcagtatcttgtcttctgactcgg

SEQ ID NO: 255188 - DNA, 54 bp, Artificial
  Synthetic oligonucleotide
ttgagtaagcaaatccaaggcagcacgtttagtgggctgcggcttagtgttaaa

SEQ ID NO: 255189 - DNA, 59 bp, Artificial
  Synthetic oligonucleotide
cgaatttaaggcatggctttgctttgttgctaaagcgcaatcctgacgggagctataaa

SEQ ID NO: 255190 - DNA, 54 bp, Artificial
  Synthetic oligonucleotide
aaagtgtgaacccgacacgctgacgtcaaaactttgccatacattgggcatacc

SEQ ID NO: 255191 - DNA, 54 bp, Artificial
  Synthetic oligonucleotide
ttgaaagcggaaaagccctctgtaagcctcccagacgtgcgtgacttcctgacg

SEQ ID NO: 255192 - DNA, 54 bp, Artificial
  Synthetic oligonucleotide
atcgccagtgaatgcaccgctgttgtttaggtcagtgttttgtgcaccaaggat

SEQ ID NO: 255193 - DNA, 54 bp, Artificial
  Synthetic oligonucleotide
agtaatgaaatagggtaggaactttctttgcgtaagtaaggacggctgtctgtc

SEQ ID NO: 255194 - DNA, 54 bp, Artificial
  Synthetic oligonucleotide
ttcagggcgcgtaatgcgatcaaagaaacggcttaccggtttaaagcaatcatt

SEQ ID NO: 255195 - DNA, 54 bp, Artificial
  Synthetic oligonucleotide
atcgtcaatacggctgtttagttttgcagcgtagtagtaacgtagacattcagg

SEQ ID NO: 255196 - DNA, 54 bp, Artificial
  Synthetic oligonucleotide
ttcaatctcagatcgttatcgatttctcgttaaacctgcgtcaactttgtcttg

SEQ ID NO: 255197 - DNA, 54 bp, Artificial
  Synthetic oligonucleotide
cggattacttccgctttctctctaccttgtgcacggtgcttacgcgcaacagac

SEQ ID NO: 255198 - DNA, 54 bp, Artificial
  Synthetic oligonucleotide
aacgtcttgcccatcttgcaccgcacttaggctcacggtgatcgcaaccgtacc

SEQ ID NO: 255199 - DNA, 54 bp, Artificial
  Synthetic oligonucleotide
aactaccggcatacgacaataaacttgtctcggtaaatcagcctcgataacagt

SEQ ID NO: 255200 - DNA, 60 bp, Artificial
  Synthetic oligonucleotide
caagatgttttggacagagcgacgcgcatcagccaccgaccaagggatgttccaaaggtg

SEQ ID NO: 255201 - DNA, 54 bp, Artificial
  Synthetic oligonucleotide
gtaacgggcgtatctcggattttaagatcgatgggcttgcgttgtttaaacacg

SEQ ID NO: 255202 - DNA, 54 bp, Artificial
  Synthetic oligonucleotide
gtaacctcgtttaatgattaggaattatccgcatgcgcatcccacgaatttatc

SEQ ID NO: 255203 - DNA, 54 bp, Artificial
  Synthetic oligonucleotide
tgtgtactttaaacaagccgcacaataacggtagtcatgacggggcaggttttg

SEQ ID NO: 255204 - DNA, 54 bp, Artificial
  Synthetic oligonucleotide
gacgcaagttaatcaacttctccatctgcagcggtagctcctcaagatcagcac

SEQ ID NO: 255205 - DNA, 54 bp, Artificial
  Synthetic oligonucleotide
gagagatccgtcagcggtgaaagctgccaaagaccggcgagtgagagctgcata

SEQ ID NO: 255206 - DNA, 54 bp, Artificial
  Synthetic oligonucleotide
gagcagcttgttccgtctgcacattaacggatggggcgatcagtggcacactta

SEQ ID NO: 255207 - DNA, 54 bp, Artificial
  Synthetic oligonucleotide
aagtatcctcggggtaacgctctagaccccatgtgtgactgcattgtctaaaca

SEQ ID NO: 255208 - DNA, 54 bp, Artificial
  Synthetic oligonucleotide
gtgctccgatctcctcggtcggccacgttggtactcgcgtgcgcggcattttct

SEQ ID NO: 255209 - DNA, 54 bp, Artificial
  Synthetic oligonucleotide
ggttatgaacaccaggtgagagagttattttattaccgttaggtaggtgtacag

SEQ ID NO: 255210 - DNA, 54 bp, Artificial
  Synthetic oligonucleotide
gagtgagaacgactccctactcggcccggtatttggtgcctctgatgcggttga

SEQ ID NO: 255211 - DNA, 55 bp, Artificial
  Synthetic oligonucleotide
ggcggctgcgggggtctatagtacgcattacaggatttatgttacgggctacgtt

SEQ ID NO: 255212 - DNA, 54 bp, Artificial
  Synthetic oligonucleotide
gagtgcgaaggagctagacggtgcttcagtgtgtgttcaatctggtacaacgac

SEQ ID NO: 255213 - DNA, 54 bp, Artificial
  Synthetic oligonucleotide
gtgcttgattcgattggttaacagttcttcgttaaccggtagagatgtaaatcc

SEQ ID NO: 255214 - DNA, 54 bp, Artificial
  Synthetic oligonucleotide
cgattgatctcgccaacttaaccgaattgtttggtgaccaagatctcgtcatgc

SEQ ID NO: 255215 - DNA, 54 bp, Artificial
  Synthetic oligonucleotide
aatcacaccggtcaagcggagcgatggtgccaatatctagcgcagactcattac

SEQ ID NO: 255216 - DNA, 54 bp, Artificial
  Synthetic oligonucleotide
aatcacctagtgatgcggaaggagcgcggattttactgtgatcggtgcctcata

SEQ ID NO: 255217 - DNA, 54 bp, Artificial
  Synthetic oligonucleotide
tgcgatccaccaaggttacattggctcgacctttgcgcccgagtgtgcgaccca

SEQ ID NO: 255218 - DNA, 54 bp, Artificial
  Synthetic oligonucleotide
tgcgagttcctttatcaccagctaagaactgaccaacacccactttaagtaagg

SEQ ID NO: 255219 - DNA, 54 bp, Artificial
  Synthetic oligonucleotide
ttttgtatcggaagtacatgagtcagacatttcatgaacccggtttcgcgctct

SEQ ID NO: 255220 - DNA, 54 bp, Artificial
  Synthetic oligonucleotide
ttttggtgataacgttagcagctttaaggctgtttagatcaaccacgtcaccag

SEQ ID NO: 255221 - DNA, 54 bp, Artificial
  Synthetic oligonucleotide
gtatgtcgagacactgatcactgcaccggaatatggtgaacttgaggtccgtgc

SEQ ID NO: 255222 - DNA, 60 bp, Artificial
  Synthetic oligonucleotide
cattcccttcaggtgtggcactacagggttcataacagctaggcaagagtagagtatacg

SEQ ID NO: 255223 - DNA, 59 bp, Artificial
  Synthetic oligonucleotide
gcaagcaatcagggttcacactagagtgataaacttagcgaaagcggttatcctctagg

SEQ ID NO: 255224 - DNA, 50 bp, Artificial
  Synthetic oligonucleotide
ctaaacagccctttatttcctagctttcggggttccgacttttgtaccac

SEQ ID NO: 255225 - DNA, 54 bp, Artificial
  Synthetic oligonucleotide
ttttcttgatgtgtaccgcgatctctaagcatggcgtcactggcttctaaccag

SEQ ID NO: 255226 - DNA, 54 bp, Artificial
  Synthetic oligonucleotide
ttttcgtggttcagaattccggctaacgcttttgtgcaattagttaggaacatt

SEQ ID NO: 255227 - DNA, 54 bp, Artificial
  Synthetic oligonucleotide
ataagcgctttacagagccctcgcttaactccaaatgctgtgcgacatcgacgt

SEQ ID NO: 255228 - DNA, 54 bp, Artificial
  Synthetic oligonucleotide
ttttacctgtttgtacgtcccagaccataattcggcttgaaggagtaccagtga

SEQ ID NO: 255229 - DNA, 51 bp, Artificial
  Synthetic oligonucleotide
aaaagacccgtacacacacggggttttgtcttacgaggaaaacgcattaga

SEQ ID NO: 255230 - DNA, 54 bp, Artificial
  Synthetic oligonucleotide
agtgtgagcgtcatagcgataaccggtaccgcaatttcacgtgtacctatgatg

SEQ ID NO: 255231 - DNA, 54 bp, Artificial
  Synthetic oligonucleotide
ctcatttactttcgaccatgcaatgatactcactgctcgatatttggcaatctc

SEQ ID NO: 255232 - DNA, 54 bp, Artificial
  Synthetic oligonucleotide
gtatcagcaccaacgcaaccaagtatcaatacatccactcataaagcgtcaaca

SEQ ID NO: 255233 - DNA, 54 bp, Artificial
  Synthetic oligonucleotide
ctcggccaatggcccaagctcatccgctatatcgatgacggtcatttatctatc

SEQ ID NO: 255234 - DNA, 55 bp, Artificial
  Synthetic oligonucleotide
cgaaggcatggtttttataggctaacttacggatttaacataaggggcataatga

SEQ ID NO: 255235 - DNA, 54 bp, Artificial
  Synthetic oligonucleotide
agtgctgggtgacgcgagataaaagcgtgcatggttcccactctggcggagtgg

SEQ ID NO: 255236 - DNA, 51 bp, Artificial
  Synthetic oligonucleotide
aaaattccgtactagagtgggctggctaaggaaattaataccgacctttat

SEQ ID NO: 255237 - DNA, 54 bp, Artificial
  Synthetic oligonucleotide
tttacgggattgcgttggtgcgttattcctcacaagatgcgttgcgcatctatg

SEQ ID NO: 255238 - DNA, 54 bp, Artificial
  Synthetic oligonucleotide
cgtgccgttgaatggcgcgctgcctgttacgttgccagttaggcggatttcttg

SEQ ID NO: 255239 - DNA, 54 bp, Artificial
  Synthetic oligonucleotide
tttaagcgctttaccgagtttatgaactgttacaccaagaataaaggcgcgaat

SEQ ID NO: 255240 - DNA, 54 bp, Artificial
  Synthetic oligonucleotide
cgtcaggcacttttttactcaacggtaataagcgcatctgaacgagaagccgca

SEQ ID NO: 255241 - DNA, 54 bp, Artificial
  Synthetic oligonucleotide
ttgtggttcaagcaactggggatccaacgtgtccccgcgtttgccgtgataaaa

SEQ ID NO: 255242 - DNA, 54 bp, Artificial
  Synthetic oligonucleotide
aaaccgctagtgaggtgcaagctatgatcggtaccgcccaagagtggacgctat

SEQ ID NO: 255243 - DNA, 54 bp, Artificial
  Synthetic oligonucleotide
ctggtcaattacatcgatttgctgttcatcaaccacttctggccataagtcttg

SEQ ID NO: 255244 - DNA, 54 bp, Artificial
  Synthetic oligonucleotide
ctgtacgtacttcgtaactacactgtacgtgtttgcctagaaagcgtttcgaac

SEQ ID NO: 255245 - DNA, 60 bp, Artificial
  Synthetic oligonucleotide
gcaatcaacatcatcgagaggtgggtgcctcgctgcgcgcttcgcacttgcttatccctg

SEQ ID NO: 255246 - DNA, 54 bp, Artificial
  Synthetic oligonucleotide
cggtgcgtggtacggcgttcagttttgctcgtaacggtatgcgaggcacccctg

SEQ ID NO: 255247 - DNA, 54 bp, Artificial
  Synthetic oligonucleotide
aaaggcgtggtttgtgcgtttacccgctaacgcatttgtacagctagtacgcaa

SEQ ID NO: 255248 - DNA, 54 bp, Artificial
  Synthetic oligonucleotide
ttgccggattactgccaggagctaggtcttccggataccgccagcgagtttgta

SEQ ID NO: 255249 - DNA, 54 bp, Artificial
  Synthetic oligonucleotide
cgggtgcagacctcatggctgcacgtacacacatcggcctcagcatctcagccg

SEQ ID NO: 255250 - DNA, 54 bp, Artificial
  Synthetic oligonucleotide
ttgccccatcactcgagcaggaaaaaagattttccctgctcaagcgatgctcat

SEQ ID NO: 255251 - DNA, 52 bp, Artificial
  Synthetic oligonucleotide
cttatttgagggcggaacacgggttccctttatcgtccgttggccgaagcaa

SEQ ID NO: 255252 - DNA, 54 bp, Artificial
  Synthetic oligonucleotide
gtcccatcttgttacggccggagtggacgttacccttgtgacagtgacgcgcgc

SEQ ID NO: 255253 - DNA, 54 bp, Artificial
  Synthetic oligonucleotide
tctcgccctgaatgtcgtgctggtttcgagcatggttatgacatgggtaactcc

SEQ ID NO: 255254 - DNA, 54 bp, Artificial
  Synthetic oligonucleotide
ggtgcaacgaccaccccaagcaataccccgtcggcttcagctcacatctacgca

SEQ ID NO: 255255 - DNA, 53 bp, Artificial
  Synthetic oligonucleotide
acagtttacagcgtacaacaagtctctaaccggcgttcgtttgagtccgttta

SEQ ID NO: 255256 - DNA, 58 bp, Artificial
  Synthetic oligonucleotide
gggtagctggaaacagctacccgatttcagattgtaaggtataggccacaagcaccca

SEQ ID NO: 255257 - DNA, 54 bp, Artificial
  Synthetic oligonucleotide
ccgggccaacactacgtaatgtctgtgggaaactttcgatgtaagtgcggtaag

SEQ ID NO: 255258 - DNA, 54 bp, Artificial
  Synthetic oligonucleotide
ccggctgagcgtagttgagggtatgtcgagggtgcttgggtgcgagtgagcatt

SEQ ID NO: 255259 - DNA, 54 bp, Artificial
  Synthetic oligonucleotide
tcgtcgccaccgcaaacaataacgtggtagggcttaataatcgcatgccgtggc

SEQ ID NO: 255260 - DNA, 54 bp, Artificial
  Synthetic oligonucleotide
tcggcgacagagggttggtgagcaaaggttaggcgattatcataacgtctgagc

SEQ ID NO: 255261 - DNA, 54 bp, Artificial
  Synthetic oligonucleotide
accagcgcccttttcgcaacgtcctattatgttgtgcagcgtacctgtcaaacg

SEQ ID NO: 255262 - DNA, 52 bp, Artificial
  Synthetic oligonucleotide
accgacgatgaactatcttggtcggtatttaaaacggcccccaatttcagcg

SEQ ID NO: 255263 - DNA, 54 bp, Artificial
  Synthetic oligonucleotide
accgatttccctctaaagcggatctcaaaatgcaaacgtacactgctcgtacta

SEQ ID NO: 255264 - DNA, 54 bp, Artificial
  Synthetic oligonucleotide
tccggcaaatagaacagacgctcgccttggcgcaatacacggatcatttgcttg

SEQ ID NO: 255265 - DNA, 54 bp, Artificial
  Synthetic oligonucleotide
ccctgtttggtgaacagaacaacggtgaactacagaaagctcgcgagaaagcgc

SEQ ID NO: 255266 - DNA, 54 bp, Artificial
  Synthetic oligonucleotide
gttcatgaggcacttaacctggcgaactagcaattaaatccaacctagttggac

SEQ ID NO: 255267 - DNA, 60 bp, Artificial
  Synthetic oligonucleotide
gcaatcagtaagtcggtattatctaatcctgtgacggagcaaccttcccagtgacggatc

SEQ ID NO: 255268 - DNA, 54 bp, Artificial
  Synthetic oligonucleotide
gcgcactaatctctatacaatccgccctcggagttgaacgggtaatcgctgctt

SEQ ID NO: 255269 - DNA, 54 bp, Artificial
  Synthetic oligonucleotide
acctttggcgatgtgttgaattggtacctagaccatgtcgagctatcaagacaa

SEQ ID NO: 255270 - DNA, 54 bp, Artificial
  Synthetic oligonucleotide
caacgagagaatactgactcagagataagcgttagtggaatgcctaggtctagt

SEQ ID NO: 255271 - DNA, 54 bp, Artificial
  Synthetic oligonucleotide
agccaaccagttctagcacgagcttgccccatagtttgttagtgctaatactca

SEQ ID NO: 255272 - DNA, 54 bp, Artificial
  Synthetic oligonucleotide
tcactgaggcgcgacaagcccacgcaatacaagggattacgcaaagcagcacta

SEQ ID NO: 255273 - DNA, 54 bp, Artificial
  Synthetic oligonucleotide
acgcagtacacttcgccccaataccgaagcactccccgaccctaagccttgcaa

SEQ ID NO: 255274 - DNA, 53 bp, Artificial
  Synthetic oligonucleotide
cccagatttagacacaaaaacggctccctattgggagccgttcttcgttgtgg

SEQ ID NO: 255275 - DNA, 54 bp, Artificial
  Synthetic oligonucleotide
cccacccctgtcgcatcgggccctaatgtgggctttgcctctgcgggtaatcta

SEQ ID NO: 255276 - DNA, 54 bp, Artificial
  Synthetic oligonucleotide
gttcgttaaaggcggtagttgtgtgtttgagggcgacagttcctgtcaatacag

SEQ ID NO: 255277 - DNA, 54 bp, Artificial
  Synthetic oligonucleotide
cccaataaatggttgacgaaagtttagcgcaggctctgtagagccgtttcccct

SEQ ID NO: 255278 - DNA, 56 bp, Artificial
  Synthetic oligonucleotide
cgaaccttccgcatctggacgcttaacaaacgacacaaccgtaccaatagagccca

SEQ ID NO: 255279 - DNA, 54 bp, Artificial
  Synthetic oligonucleotide
gggttgtatcgtttactgtcttttaaggtcagctctgtctcgataacatgaacg

SEQ ID NO: 255280 - DNA, 54 bp, Artificial
  Synthetic oligonucleotide
gcgtaacctaatcttcttgggtttatatcatttcggtcaaatagagcgcttcgt

SEQ ID NO: 255281 - DNA, 54 bp, Artificial
  Synthetic oligonucleotide
acgctgtcagtacttgcatgctctagcacgctgccatcgacttgtgccgtccac

SEQ ID NO: 255282 - DNA, 54 bp, Artificial
  Synthetic oligonucleotide
tatgcatctatcacgtacttcgcgatcagcgttcgtgataattccccttgaaac

SEQ ID NO: 255283 - DNA, 54 bp, Artificial
  Synthetic oligonucleotide
gctccgctatccattcgatcttctttgctcctggatagttaatgagagattcta

SEQ ID NO: 255284 - DNA, 54 bp, Artificial
  Synthetic oligonucleotide
ccaatagaacgccaatcgtgacaacctgctgataatttaaccccaagttaaccg

SEQ ID NO: 255285 - DNA, 54 bp, Artificial
  Synthetic oligonucleotide
gctctagccgcttactctgctaatacttcataatgccatcgcatcgcgctctgt

SEQ ID NO: 255286 - DNA, 54 bp, Artificial
  Synthetic oligonucleotide
tagtcggtgtatcttgctcaccgtatgcaagctctggcggaataacaaacttga

SEQ ID NO: 255287 - DNA, 54 bp, Artificial
  Synthetic oligonucleotide
tgacgaggcgtagcgaacgcagtaagcggaggcgttgggtgattgttcgcagga

SEQ ID NO: 255288 - DNA, 52 bp, Artificial
  Synthetic oligonucleotide
acaagaaagggcgcaacaacgttacgccctgggaaggttatttgtcgtctct

SEQ ID NO: 255289 - DNA, 58 bp, Artificial
  Synthetic oligonucleotide
ggcgtcatcgctggatcttgttgggtttggaccctatcaggcgaccaacggctcaaac

SEQ ID NO: 255290 - DNA, 54 bp, Artificial
  Synthetic oligonucleotide
tgatactaccgcgacacaaggaaaacggcccgaacgaatcggcctcactcggcc

SEQ ID NO: 255291 - DNA, 54 bp, Artificial
  Synthetic oligonucleotide
cgaaactcaagctcaattagttacgcaacaagcttatgatttcccactcgtcac

SEQ ID NO: 255292 - DNA, 54 bp, Artificial
  Synthetic oligonucleotide
agcgtaacgtgtagcctcttcactacacgatgttggcactggaaaagcgctgag

SEQ ID NO: 255293 - DNA, 54 bp, Artificial
  Synthetic oligonucleotide
aatgtcgctgtttggctcttatcacaatctcacttcacaggtgccggaaagtct

SEQ ID NO: 255294 - DNA, 54 bp, Artificial
  Synthetic oligonucleotide
aatgtatgcagttaaatcgtactatcgagttatcgacctactctgagatttatg

SEQ ID NO: 255295 - DNA, 54 bp, Artificial
  Synthetic oligonucleotide
tgcagcgagtggtgaaagaaaagtctacaacatcgaacaaaacatggataagct

SEQ ID NO: 255296 - DNA, 54 bp, Artificial
  Synthetic oligonucleotide
ggtgctctgtttgggctgaattgcgttatagtgaatgcataacgcatcgagcgt

SEQ ID NO: 255297 - DNA, 54 bp, Artificial
  Synthetic oligonucleotide
acagcacctgcgcctactgccatcaactagcccccaaagttcaacaagccagcc

SEQ ID NO: 255298 - DNA, 54 bp, Artificial
  Synthetic oligonucleotide
cgaccacggattacataattcgagtgcgtaagagacctttatctacagaatatt

SEQ ID NO: 255299 - DNA, 54 bp, Artificial
  Synthetic oligonucleotide
tgcctcacagctcgaaaacacacagctcattaccctttacgacaacgtcatacg

SEQ ID NO: 255300 - DNA, 60 bp, Artificial
  Synthetic oligonucleotide
gcaattcgcaaccactaccagaagcaaggtatcgacatgctcgcagtcaacctgcgtggc

SEQ ID NO: 255301 - DNA, 54 bp, Artificial
  Synthetic oligonucleotide
tgccctatttctgttatgtctacactaattgctatcgcatttatgacataaccc

SEQ ID NO: 255302 - DNA, 54 bp, Artificial
  Synthetic oligonucleotide
gccaacagtaccgatcagttcttctaggctagggtgatccccaaggcctgaatt

SEQ ID NO: 255303 - DNA, 53 bp, Artificial
  Synthetic oligonucleotide
atgggcgcatggtgaatcggacgccgctcctgcttcgaccacgtctttagttg

SEQ ID NO: 255304 - DNA, 53 bp, Artificial
  Synthetic oligonucleotide
agctgcaacgttcaccgcaggttttgcttgcgtcaccgcctgcgcataactgg

SEQ ID NO: 255305 - DNA, 53 bp, Artificial
  Synthetic oligonucleotide
ataagatgctctactccaagcctcatccagagcagtcgtatcgctcctgtctt

SEQ ID NO: 255306 - DNA, 53 bp, Artificial
  Synthetic oligonucleotide
agatgctgcgcccacaacggaagacgtatcgtgaatcgcaatcgcagcccagg

SEQ ID NO: 255307 - DNA, 53 bp, Artificial
  Synthetic oligonucleotide
gtttacggactgcttcctactttcatcctcccgatgcacacgcggcaatgtgc

SEQ ID NO: 255308 - DNA, 53 bp, Artificial
  Synthetic oligonucleotide
caagggtacgcaccttacgctgaccagctcagcaaaagaatactgggccggtg

SEQ ID NO: 255309 - DNA, 53 bp, Artificial
  Synthetic oligonucleotide
agtttgcaggtttgagtaggttcaccacaacacctttagggccgtcgcttgcg

SEQ ID NO: 255310 - DNA, 53 bp, Artificial
  Synthetic oligonucleotide
atggcccggacgttctgtcatgctaaatacacgcgtcggcaacccatcgccat

SEQ ID NO: 255311 - DNA, 54 bp, Artificial
  Synthetic oligonucleotide
ggggttgaccctgccttacgctaaaaaatcgcttagaacgcatctgaggcggtt

SEQ ID NO: 255312 - DNA, 53 bp, Artificial
  Synthetic oligonucleotide
gtataaggaacacgaggaaagcgagctgatgtaatactctgaatgtcacggct

SEQ ID NO: 255313 - DNA, 53 bp, Artificial
  Synthetic oligonucleotide
gttactgggatatctaaacaatgtccctgtaacatggggagggcgtgaaaagc

SEQ ID NO: 255314 - DNA, 53 bp, Artificial
  Synthetic oligonucleotide
gtcggtctgccgacaagagtggggcgctaacagccattggagccagaacagtt

SEQ ID NO: 255315 - DNA, 53 bp, Artificial
  Synthetic oligonucleotide
aggttggtcgccacactaaaccaatctcacggtacgcttcctgacctggcggc

SEQ ID NO: 255316 - DNA, 53 bp, Artificial
  Synthetic oligonucleotide
agtaattttaggtatggtagcgggtatcttgacaggatttgcaattcgcacac

SEQ ID NO: 255317 - DNA, 53 bp, Artificial
  Synthetic oligonucleotide
agtcgagcgcactccaagacagacgcaagctctcttcgatttctcggtaggcg

SEQ ID NO: 255318 - DNA, 53 bp, Artificial
  Synthetic oligonucleotide
ggggcgttccattgaggtagccagttggcgctaccctgacaagcttgcactgt

SEQ ID NO: 255319 - DNA, 53 bp, Artificial
  Synthetic oligonucleotide
atcgatgcgctcatctcatttacagctgtcgctactgattctgttcgattatt

SEQ ID NO: 255320 - DNA, 53 bp, Artificial
  Synthetic oligonucleotide
gttaccattcatatcccgcctctaagggcacgcaaagcagacattccactctt

SEQ ID NO: 255321 - DNA, 53 bp, Artificial
  Synthetic oligonucleotide
agtcgggctgagacaccgatgccgctcaatatgacgcaaggggtgacccaaat

SEQ ID NO: 255322 - DNA, 60 bp, Artificial
  Synthetic oligonucleotide
caatcacctacgctgctacccacctaaatcaactatgcagctatcgcaatcaacatcatc

SEQ ID NO: 255323 - DNA, 53 bp, Artificial
  Synthetic oligonucleotide
gtaaaagaaggcattgttcgtcaaggggatcaggttgaagtgttagagcaccg

SEQ ID NO: 255324 - DNA, 53 bp, Artificial
  Synthetic oligonucleotide
agccgaaggctggctactgttcggttgagacacctgactccggctgtgcggtt

SEQ ID NO: 255325 - DNA, 53 bp, Artificial
  Synthetic oligonucleotide
gttacacgccggaaggtgctctcacgcaaacgccacacccgaaagcactggga

SEQ ID NO: 255326 - DNA, 53 bp, Artificial
  Synthetic oligonucleotide
agcgcatcaccgttggtgacagaagctcgtggcaagaaccgttagcggtcacg

SEQ ID NO: 255327 - DNA, 53 bp, Artificial
  Synthetic oligonucleotide
gtctcccaacttagcccttagtgacggatgtcacgcatatggaatgcacatgg

SEQ ID NO: 255328 - DNA, 53 bp, Artificial
  Synthetic oligonucleotide
caatcatttaattaagtcactagctgtttcctatccgaatgtgactatttacg

SEQ ID NO: 255329 - DNA, 53 bp, Artificial
  Synthetic oligonucleotide
agcgcattcggtccgcggtgattcgccagttgtccttacaaacccccacgatc

SEQ ID NO: 255330 - DNA, 53 bp, Artificial
  Synthetic oligonucleotide
agccagtaagccaccaggttggagcgggtaacacttcagtgccatggctaggg

SEQ ID NO: 255331 - DNA, 53 bp, Artificial
  Synthetic oligonucleotide
atgccctagcgtttatagcgacactcttaccgtgccaaccagggcagctgtgc

SEQ ID NO: 255332 - DNA, 53 bp, Artificial
  Synthetic oligonucleotide
gtagtgcttatgtattgtgcgactacaatatagtgtgttattaaacatgttgc

SEQ ID NO: 255333 - DNA, 60 bp, Artificial
  Synthetic oligonucleotide
gctgctatcgaacgcacgtacacacgtttactcaatgctgatgcgaactatgtcggactg

SEQ ID NO: 255334 - DNA, 60 bp, Artificial
  Synthetic oligonucleotide
ggggtatcgagttcgaccatttcagtgatcatgaaagagttggtgatcatggggctgttg

SEQ ID NO: 255335 - DNA, 53 bp, Artificial
  Synthetic oligonucleotide
gtgattatcttaacccgcgttcacggatctcatacttctttgacagcgaagag

SEQ ID NO: 255336 - DNA, 53 bp, Artificial
  Synthetic oligonucleotide
ggtagaggtgcctgctgatagtgctgtcggctcacaagactactatggcatga

SEQ ID NO: 255337 - DNA, 52 bp, Artificial
  Synthetic oligonucleotide
gttaaagtagcttgcccccattccgggagaaaccgaggggacggcttggcca

SEQ ID NO: 255338 - DNA, 53 bp, Artificial
  Synthetic oligonucleotide
tctatctaccaggtcaatagctgcgggcatgtctcctgacttggccgcttggt

SEQ ID NO: 255339 - DNA, 53 bp, Artificial
  Synthetic oligonucleotide
tctacagctgcaggggctgaagtacttacatatcagcgtttaggtggggtcga

SEQ ID NO: 255340 - DNA, 53 bp, Artificial
  Synthetic oligonucleotide
cttgcttgggtttggctatcgtcgcttgtcgattgaaaagaccaactgtgctc

SEQ ID NO: 255341 - DNA, 53 bp, Artificial
  Synthetic oligonucleotide
gcccctgagatcattctttggtgccttcgttggtatggttcgaccccaatgag

SEQ ID NO: 255342 - DNA, 53 bp, Artificial
  Synthetic oligonucleotide
gcccgattcccaatgtgcagtgtgaacaattgtcaaccgaccctgcaacgttg

SEQ ID NO: 255343 - DNA, 53 bp, Artificial
  Synthetic oligonucleotide
gcccgccaaattagcgagcataaagggctaaaagtgaggttctaggccgcagt

SEQ ID NO: 255344 - DNA, 53 bp, Artificial
  Synthetic oligonucleotide
cttcgccccaataccgaagcactccccgaccctaagccttgcaacagacggcc

SEQ ID NO: 255345 - DNA, 60 bp, Artificial
  Synthetic oligonucleotide
gggggaacgagcgtagcgagtcacacgcgcttgctactgcggatcatcgtcttttgccag

SEQ ID NO: 255346 - DNA, 53 bp, Artificial
  Synthetic oligonucleotide
cggggaaacaagctcgtttggtcattggtgaaaaatggactagtactatcaat

SEQ ID NO: 255347 - DNA, 53 bp, Artificial
  Synthetic oligonucleotide
cttatggtctccattaaccaagccatgtatctagcaggcagtcgcagcgtacc

SEQ ID NO: 255348 - DNA, 53 bp, Artificial
  Synthetic oligonucleotide
tcgacgggggctgttacagcacaagcgttggcgtattttggtgcagagccgac

SEQ ID NO: 255349 - DNA, 53 bp, Artificial
  Synthetic oligonucleotide
tccgtctgcacattaacggatggggcgatcagtggcacacttacgttggtcgg

SEQ ID NO: 255350 - DNA, 53 bp, Artificial
  Synthetic oligonucleotide
cccttgcctaagtcgtgcacttgggcggcaaagcgtaccgtggttgcgtggct

SEQ ID NO: 255351 - DNA, 53 bp, Artificial
  Synthetic oligonucleotide
ctgtggctatacgctcgaaccaccttctcatttgatgcactcagcgcgctgtc

SEQ ID NO: 255352 - DNA, 53 bp, Artificial
  Synthetic oligonucleotide
ccctacgtaatcttgacgcaattaacagccgcgtagtgttccttgatgttgct

SEQ ID NO: 255353 - DNA, 53 bp, Artificial
  Synthetic oligonucleotide
tccatcgtgcacaatgcacccctggagcaggtttcccgcgccccactggcagt

SEQ ID NO: 255354 - DNA, 53 bp, Artificial
  Synthetic oligonucleotide
acctccaacacgcaagctgggtgaatccgctgtgactaactccggatactgcg

SEQ ID NO: 255355 - DNA, 53 bp, Artificial
  Synthetic oligonucleotide
acctgttgcagagctgcgtgttcgcccgcgcttttatgagtcaaaagtacaga

SEQ ID NO: 255356 - DNA, 60 bp, Artificial
  Synthetic oligonucleotide
gcccagaagcgcaccctcggtactatccacaccatcagaactagccccgcagggataagc

SEQ ID NO: 255357 - DNA, 53 bp, Artificial
  Synthetic oligonucleotide
accttcaacagatcaagcaaccgttcatcaatgtacagtcgatggtatcgatc

SEQ ID NO: 255358 - DNA, 53 bp, Artificial
  Synthetic oligonucleotide
ctggctggttaaaaccgtgaggaagcccttcgataaattctaacgcgcctgct

SEQ ID NO: 255359 - DNA, 53 bp, Artificial
  Synthetic oligonucleotide
ttggattatcaccgtgttgcgcttgaagacggctaaagtcgaccgttcgagca

SEQ ID NO: 255360 - DNA, 53 bp, Artificial
  Synthetic oligonucleotide
ctgcgtttgtttcgatacgaatcaaggcagggttagagcccgattgcttggcc

SEQ ID NO: 255361 - DNA, 53 bp, Artificial
  Synthetic oligonucleotide
acgagtctatgcgacaaagtggcgacttcgatggatacgaaccggcttaaaag

SEQ ID NO: 255362 - DNA, 53 bp, Artificial
  Synthetic oligonucleotide
cgtatagacgctctttcttcacttgctctgataggtcacaagggtaatctgcc

SEQ ID NO: 255363 - DNA, 53 bp, Artificial
  Synthetic oligonucleotide
cgtattatggcgtcaggtgggaggcaaacgccgtcacttgatctttggccgaa

SEQ ID NO: 255364 - DNA, 53 bp, Artificial
  Synthetic oligonucleotide
ttgtgcatgagctgtgtggcggtgtgtccaacacgtgcattgcatacggacgg

SEQ ID NO: 255365 - DNA, 53 bp, Artificial
  Synthetic oligonucleotide
cgccgtacggccacaggtccagaggtgaccttgatttcgtgccgcgaatagta

SEQ ID NO: 255366 - DNA, 53 bp, Artificial
  Synthetic oligonucleotide
tggttagccgtaccctacattctgtgcgcgttagctcatcccgattgatggag

SEQ ID NO: 255367 - DNA, 59 bp, Artificial
  Synthetic oligonucleotide
agtgacgaccttctggaatggtaagcgctacgttggcacccttgcctcacagctcgaaa

SEQ ID NO: 255368 - DNA, 53 bp, Artificial
  Synthetic oligonucleotide
cgccatggcaagtgctaaccccaaccgcggtcgaaaatgtttacggctggcca

SEQ ID NO: 255369 - DNA, 53 bp, Artificial
  Synthetic oligonucleotide
tggtgggcagcttgatgcagcagttgacccaaaaccgactcacctcaccgctg

SEQ ID NO: 255370 - DNA, 53 bp, Artificial
  Synthetic oligonucleotide
aagagacgaatgaatgaaaacgacactttcccccctaaatacatggcatccgc

SEQ ID NO: 255371 - DNA, 53 bp, Artificial
  Synthetic oligonucleotide
tgggtggtgcacaacatttcgccgattgtaaccgtgaaattcgcgctttgaat

SEQ ID NO: 255372 - DNA, 53 bp, Artificial
  Synthetic oligonucleotide
gagcgtctacccaatgcaagtacggcagtcaaaggggcggtgcagctaaacga

SEQ ID NO: 255373 - DNA, 53 bp, Artificial
  Synthetic oligonucleotide
aagttatgtactttggccgctgttagcattaaccattctcgctactttctcct

SEQ ID NO: 255374 - DNA, 53 bp, Artificial
  Synthetic oligonucleotide
gagggctgagagataaaggttacgccctcttggagtttgaccctgaaaccgct

SEQ ID NO: 255375 - DNA, 53 bp, Artificial
  Synthetic oligonucleotide
tgggaaaggcacaacctgccagttcctaactacgtcgctatgagtcgtgatag

SEQ ID NO: 255376 - DNA, 53 bp, Artificial
  Synthetic oligonucleotide
tgttttatgcggtaactggggaaggctttagcgaccaacagctccaagactac

SEQ ID NO: 255377 - DNA, 53 bp, Artificial
  Synthetic oligonucleotide
tggccctcacattgccacggtacgtctggatttgctgggcgcagagagtcgta

SEQ ID NO: 255378 - DNA, 58 bp, Artificial
  Synthetic oligonucleotide
gcccaactcgtaccttacatagctctgctaagtcaccttgagttaggtgtttatctct

SEQ ID NO: 255379 - DNA, 53 bp, Artificial
  Synthetic oligonucleotide
ttactccgtcgaaagaatgggagaccaacttaattgtggttacaagtaaacgc

SEQ ID NO: 255380 - DNA, 53 bp, Artificial
  Synthetic oligonucleotide
gaaggcgttggcacatcttgtggatgagtgtgccaagtacctatatagcccaa

SEQ ID NO: 255381 - DNA, 53 bp, Artificial
  Synthetic oligonucleotide
gcaccgagttagcctagccaaacagatcattaacgaccgctttggatactcat

SEQ ID NO: 255382 - DNA, 53 bp, Artificial
  Synthetic oligonucleotide
gaagagtctacatgcctgagtaagcgacatactggttctcttagtttgcacgg

SEQ ID NO: 255383 - DNA, 53 bp, Artificial
  Synthetic oligonucleotide
cgctttaccccgtgcaatgtgaactcccttcaatgtcgcgtccactgtatgag

SEQ ID NO: 255384 - DNA, 53 bp, Artificial
  Synthetic oligonucleotide
tgacgcaccgttttcacggtatttgttaactaaccgttgaacctgtcttcgcg

SEQ ID NO: 255385 - DNA, 53 bp, Artificial
  Synthetic oligonucleotide
gaaacggcaatggtggttgttgatcgcctaagtggagaagtacgcgctattgt

SEQ ID NO: 255386 - DNA, 53 bp, Artificial
  Synthetic oligonucleotide
gcagaatcgaccgagcaacttagcgcccaagcgcagaaccttatcattccacc

SEQ ID NO: 255387 - DNA, 53 bp, Artificial
  Synthetic oligonucleotide
tgacacggggttagagctgaactggtaatcttgattttcgtatcgatcggcat

SEQ ID NO: 255388 - DNA, 53 bp, Artificial
  Synthetic oligonucleotide
gcagtttgttagtcgcgaggcaccgagcgacaattttaagccgaactaaactt

SEQ ID NO: 255389 - DNA, 58 bp, Artificial
  Synthetic oligonucleotide
ccggctcatactcgtatcgtcaatttcactttgcgtaaattgccgccagagtttcgtc

SEQ ID NO: 255390 - DNA, 53 bp, Artificial
  Synthetic oligonucleotide
cctgaagcagagtatacgccgttgggtgactatcctaatgaagggcatgctgt

SEQ ID NO: 255391 - DNA, 53 bp, Artificial
  Synthetic oligonucleotide
aaccgtaccaattcctattgcgaaataagtactggccgataagcgttctatta

SEQ ID NO: 255392 - DNA, 53 bp, Artificial
  Synthetic oligonucleotide
ttcatgcccaattcataacggatattttctaaggtcgagtatcgatgatgcga

SEQ ID NO: 255393 - DNA, 53 bp, Artificial
  Synthetic oligonucleotide
gccaatcagtatcattgtccgcaccataaggctgagcagtcacgccagaggta

SEQ ID NO: 255394 - DNA, 53 bp, Artificial
  Synthetic oligonucleotide
ttcctcgttcaatgcgatgacgactatcaatctggagcgacacgcgaggttcc

SEQ ID NO: 255395 - DNA, 53 bp, Artificial
  Synthetic oligonucleotide
catgaccgctccccaaggggtatttgggataccttggacgctgcgtagcgctt

SEQ ID NO: 255396 - DNA, 53 bp, Artificial
  Synthetic oligonucleotide
aaaatgagcgtctaatgtctggtacaccgcattggtatcatacattttgtcgg

SEQ ID NO: 255397 - DNA, 53 bp, Artificial
  Synthetic oligonucleotide
tagctcagcgcgttgaactatggtggtcggccaatcttgcccaccctcgtcaa

SEQ ID NO: 255398 - DNA, 53 bp, Artificial
  Synthetic oligonucleotide
ggaacatagcaaaaggcgcatgtgctctcacgtttttatcatggttagctttg

SEQ ID NO: 255399 - DNA, 53 bp, Artificial
  Synthetic oligonucleotide
catagctagccggttgattttcccgaggaaaagtcacagaacccggattaaaa

SEQ ID NO: 255400 - DNA, 60 bp, Artificial
  Synthetic oligonucleotide
gtcagcttgcaactggatgcgactttcccagagccagagttcccgccgtatggtcagggg

SEQ ID NO: 255401 - DNA, 53 bp, Artificial
  Synthetic oligonucleotide
tagctatgacaggggcttcaggagcgccttatgggctgcgtttgctcgagtgt

SEQ ID NO: 255402 - DNA, 53 bp, Artificial
  Synthetic oligonucleotide
catacatcaccacaatctagtacaccctcaggacactcaggattaacgttcaa

SEQ ID NO: 255403 - DNA, 53 bp, Artificial
  Synthetic oligonucleotide
cgttaatagcaacaagtttaaatacggctaacggttggtttcaacatacaaca

SEQ ID NO: 255404 - DNA, 53 bp, Artificial
  Synthetic oligonucleotide
tagcacgttacgcctacccgaatcacaaccagcaggtttagcggcgaccgttg

SEQ ID NO: 255405 - DNA, 53 bp, Artificial
  Synthetic oligonucleotide
tttggtgattacgattggttccacgggaatatctctcatgtagccttggcttt

SEQ ID NO: 255406 - DNA, 53 bp, Artificial
  Synthetic oligonucleotide
cagattgaattgtttgtaatgggaacgggtaaaacgcgaagtgacacgtttcg

SEQ ID NO: 255407 - DNA, 53 bp, Artificial
  Synthetic oligonucleotide
cagagctcgcagcactcttaccgtggacagtaatagacagggtgtagttcccc

SEQ ID NO: 255408 - DNA, 51 bp, Artificial
  Synthetic oligonucleotide
aaaacatcccgtgccaaaggtgaaacctttgaaaccctgacgcacttcgtt

SEQ ID NO: 255409 - DNA, 53 bp, Artificial
  Synthetic oligonucleotide
ctaaataagccaacgaacccagtcgcggtgcctgccaaatctttccttgcgca

SEQ ID NO: 255410 - DNA, 53 bp, Artificial
  Synthetic oligonucleotide
actggttcaactcctattagccatctccgttgcggtggcattggaagcgggta

SEQ ID NO: 255411 - DNA, 60 bp, Artificial
  Synthetic oligonucleotide
gtcactactcaatacagaaaatgctcacgactcattgatagtcgacttccctaacttacc

SEQ ID NO: 255412 - DNA, 53 bp, Artificial
  Synthetic oligonucleotide
ctaacaaagcggatgctacgggagtatggttgagaggactcattgcacgccga

SEQ ID NO: 255413 - DNA, 53 bp, Artificial
  Synthetic oligonucleotide
tacctgtacactcctcgccccaacgctgactggtttgctttgcaatggcggtt

SEQ ID NO: 255414 - DNA, 53 bp, Artificial
  Synthetic oligonucleotide
cagacgcctatcggcttgccacaatgtactatttacgggacatcaagcctttt

SEQ ID NO: 255415 - DNA, 53 bp, Artificial
  Synthetic oligonucleotide
cacttgcagagtgaaaacgcgctcgtgagtgtggcacccgatctgtatcgtga

SEQ ID NO: 255416 - DNA, 53 bp, Artificial
  Synthetic oligonucleotide
ttttgaaaacctgcttatagccagggtaatccatcaggcgatcaattttagct

SEQ ID NO: 255417 - DNA, 53 bp, Artificial
  Synthetic oligonucleotide
cactgtaccaacgtaaagcaacgcccggagtcacgaatactatctgagtgttg

SEQ ID NO: 255418 - DNA, 53 bp, Artificial
  Synthetic oligonucleotide
cacgttctataaacgttccaataaccttatcgtgcatctcttcgcttttcgaa

SEQ ID NO: 255419 - DNA, 53 bp, Artificial
  Synthetic oligonucleotide
ctagtcgcgaaactacgggtgaggattacctatcgttttgctcaactcgaaca

SEQ ID NO: 255420 - DNA, 53 bp, Artificial
  Synthetic oligonucleotide
caccgtgactccgccacgtggtaacaccgtgtatcgttgggactacccagcta

SEQ ID NO: 255421 - DNA, 53 bp, Artificial
  Synthetic oligonucleotide
taacgcttcgctctcagtggcttaaactaggtagttaatccagccttcctctg

SEQ ID NO: 255422 - DNA, 57 bp, Artificial
  Synthetic oligonucleotide
ggatatggcttgcggcatttctttgttcaggattagggcttcgcctttattgtaaag

SEQ ID NO: 255423 - DNA, 53 bp, Artificial
  Synthetic oligonucleotide
gcggccctaaaccaccaagaaaccgcaactcgtgtgttatgtgagcgcgccat

SEQ ID NO: 255424 - DNA, 53 bp, Artificial
  Synthetic oligonucleotide
tcaatactggtaagaatagggacacaattatggtacattgcctcgagaaccac

SEQ ID NO: 255425 - DNA, 53 bp, Artificial
  Synthetic oligonucleotide
gcggtagcaaaggtgcagccctaaccacttttatctctctagcgggcagctac

SEQ ID NO: 255426 - DNA, 53 bp, Artificial
  Synthetic oligonucleotide
cgtcacttacgcgcagcctttgtttcacgccgacggcaccactccctactcac

SEQ ID NO: 255427 - DNA, 53 bp, Artificial
  Synthetic oligonucleotide
tcaacccaaaagcaccaacttaaactgcggctaagtataaccattgcgtaacg

SEQ ID NO: 255428 - DNA, 53 bp, Artificial
  Synthetic oligonucleotide
aaacactcctcagcattaaagccacgatactgaagaaagcggagctgccgcgc

SEQ ID NO: 255429 - DNA, 53 bp, Artificial
  Synthetic oligonucleotide
cgtcataagcatcgcgctctgagccgataggaagttgccaaggttcgcgcagc

SEQ ID NO: 255430 - DNA, 53 bp, Artificial
  Synthetic oligonucleotide
tatggtgcaacaaggggtcgccgggatcttatttagcccagtacgcggggtta

SEQ ID NO: 255431 - DNA, 53 bp, Artificial
  Synthetic oligonucleotide
gcgtcacaagtagagcagtactccttgtcacactcatgatggccacagtggga

SEQ ID NO: 255432 - DNA, 53 bp, Artificial
  Synthetic oligonucleotide
ccatgaacttacgccgtgcatgcgccaagcaaccaacattggttacgtgatga

SEQ ID NO: 255433 - DNA, 57 bp, Artificial
  Synthetic oligonucleotide
agttacggatataagtggtaactttgttgccttcgccaccaaaaagcatgtcagcca

SEQ ID NO: 255434 - DNA, 53 bp, Artificial
  Synthetic oligonucleotide
tatcgtgattcaaccctaggtcgagtaacgtatcgatgcgctcttggctcacc

SEQ ID NO: 255435 - DNA, 53 bp, Artificial
  Synthetic oligonucleotide
gctaacgcacaaaagaagacttcaaaactaaagaacctacctgtaagcgacaa

SEQ ID NO: 255436 - DNA, 53 bp, Artificial
  Synthetic oligonucleotide
acggtaccgacagcgctattgcacacaagctagcgcgcgttgcacgtatccac

SEQ ID NO: 255437 - DNA, 53 bp, Artificial
  Synthetic oligonucleotide
gctacgatggataggttgagtgatggtcaacgttcgctattacatatcgccat

SEQ ID NO: 255438 - DNA, 53 bp, Artificial
  Synthetic oligonucleotide
tttcactagatgtacgaccacaacctggacaagcagtaatctgcggtcggtag

SEQ ID NO: 255439 - DNA, 53 bp, Artificial
  Synthetic oligonucleotide
catggcaagcatctgtccattgaaaacttgatctctggattagctgtacgtag

SEQ ID NO: 255440 - DNA, 53 bp, Artificial
  Synthetic oligonucleotide
taggtccggtacctctgtcggcacgaaaaggggcactctcgctcacaatggta

SEQ ID NO: 255441 - DNA, 53 bp, Artificial
  Synthetic oligonucleotide
tagtcgactttaacaatcgagcgatactcaacgacacctggctgtttgcaaaa

SEQ ID NO: 255442 - DNA, 53 bp, Artificial
  Synthetic oligonucleotide
ccaacgtcatttccacgatcataaggagagctaataacatgaagcgcagaacc

SEQ ID NO: 255443 - DNA, 53 bp, Artificial
  Synthetic oligonucleotide
ccacaggcattacgtgggatctccagcgtaatatccgcggggtaagcggccaa

SEQ ID NO: 255444 - DNA, 56 bp, Artificial
  Synthetic oligonucleotide
gaaaacttctagcctatttgttagatgtagatctaacagggtaccaccctagacaa

SEQ ID NO: 255445 - DNA, 57 bp, Artificial
  Synthetic oligonucleotide
caggggttttaaggggtagctctctctcggcgagtgttgaagatcgagcgtgtatta

SEQ ID NO: 255446 - DNA, 53 bp, Artificial
  Synthetic oligonucleotide
gctcggtatagctctgggtcacatcccccagctgaaccggtgcaacgggatag

SEQ ID NO: 255447 - DNA, 52 bp, Artificial
  Synthetic oligonucleotide
gtctacgagaatattattgacaaccgaaaggctgtgcgtggtatgcgtaaat

SEQ ID NO: 255448 - DNA, 52 bp, Artificial
  Synthetic oligonucleotide
aaaagctggtaggcttcagagcccggcatgcgaatgatctgcttggaaatcc

SEQ ID NO: 255449 - DNA, 50 bp, Artificial
  Synthetic oligonucleotide
ttttttaaggagcctaacctttatggacccgtacattaagcgggataggt

SEQ ID NO: 255450 - DNA, 52 bp, Artificial
  Synthetic oligonucleotide
aacagtgttgattatgtcttctcgagcttggctctacaatggtgtcaggatt

SEQ ID NO: 255451 - DNA, 52 bp, Artificial
  Synthetic oligonucleotide
aagcaggacgagactcaaccgttcgtattagcccagtagtatctttacgtta

SEQ ID NO: 255452 - DNA, 52 bp, Artificial
  Synthetic oligonucleotide
agggttggtatcgcccgaaggcaatggtcgtttgtgcgttcgagccatacgc

SEQ ID NO: 255453 - DNA, 52 bp, Artificial
  Synthetic oligonucleotide
tgtgttgacgagaatggccgcttagtgggcgaagtcacacagcgcggcatta

SEQ ID NO: 255454 - DNA, 52 bp, Artificial
  Synthetic oligonucleotide
ttgattcattgctgggccgtgtttactattaatggccgctaacattccaggc

SEQ ID NO: 255455 - DNA, 52 bp, Artificial
  Synthetic oligonucleotide
aacattgccagctaatactgaacctcactggataggactcttattaaaaggg

SEQ ID NO: 255456 - DNA, 56 bp, Artificial
  Synthetic oligonucleotide
agttctgcttaggcgttacaagttcaacccgatcaacatccccattgctaaggtta

SEQ ID NO: 255457 - DNA, 52 bp, Artificial
  Synthetic oligonucleotide
aaacttggggatacgctgacatttatgatcaatagccaaacagtgagcgcgc

SEQ ID NO: 255458 - DNA, 52 bp, Artificial
  Synthetic oligonucleotide
agttcaccgctgactctgtgggatagattcagtcacgtgttggactttagtt

SEQ ID NO: 255459 - DNA, 52 bp, Artificial
  Synthetic oligonucleotide
tttgtttccgctagctttagtaggttctgctctgcttcttgcagtcgctgta

SEQ ID NO: 255460 - DNA, 52 bp, Artificial
  Synthetic oligonucleotide
aggtgtaacggcttcttggtgttcaggtgcggcttgggcatatgctccggga

SEQ ID NO: 255461 - DNA, 52 bp, Artificial
  Synthetic oligonucleotide
gtcagttaatgtactccctacgtaatgcgttagtcgttaaaaaaggcgttgg

SEQ ID NO: 255462 - DNA, 52 bp, Artificial
  Synthetic oligonucleotide
aagacaccaaaggcaacgcattgggtgcaacgggctttatgcgtccggctta

SEQ ID NO: 255463 - DNA, 52 bp, Artificial
  Synthetic oligonucleotide
ttccgtataaggtgaggtaatagactttaacgtgcttttttgagtgacgggc

SEQ ID NO: 255464 - DNA, 52 bp, Artificial
  Synthetic oligonucleotide
aacgtacgcgtcgccctgagtgcctgcggcatgaaccgatttccagaaaccc

SEQ ID NO: 255465 - DNA, 52 bp, Artificial
  Synthetic oligonucleotide
ttccgagtcggaaattcggtcaatgatttagtcacccatgcgatagttcagt

SEQ ID NO: 255466 - DNA, 52 bp, Artificial
  Synthetic oligonucleotide
ttagaacgctgcctcacaacaataattaagcatcacccaatattcggagcta

SEQ ID NO: 255467 - DNA, 60 bp, Artificial
  Synthetic oligonucleotide
agttgatggctctaagagagtcgcttcagtaagtcacagtaacgagttcaaacctgccac

SEQ ID NO: 255468 - DNA, 52 bp, Artificial
  Synthetic oligonucleotide
tttacctagaggcttgctaacaattaacccttggcgagcgaaatcatgaatc

SEQ ID NO: 255469 - DNA, 52 bp, Artificial
  Synthetic oligonucleotide
aacggctctcatgcgcaaggggactatttggttccgctggccaccacagaag

SEQ ID NO: 255470 - DNA, 52 bp, Artificial
  Synthetic oligonucleotide
aacggacggaacttaggttgcaagaacgcagaaccggctgggaatgcccctt

SEQ ID NO: 255471 - DNA, 52 bp, Artificial
  Synthetic oligonucleotide
ttgcccgaagtacggttccaaacgtaaggcgcttctgccatttcgtcgtaac

SEQ ID NO: 255472 - DNA, 52 bp, Artificial
  Synthetic oligonucleotide
tcgcctgcttttggttgccagtcgccccatttcttgggcagttcggcattag

SEQ ID NO: 255473 - DNA, 52 bp, Artificial
  Synthetic oligonucleotide
tcgacgaccacagagctgatgaacagtctttacgactactttgctccgtacc

SEQ ID NO: 255474 - DNA, 52 bp, Artificial
  Synthetic oligonucleotide
gttcaaggtctaccagaaggtactttcgggtttggatcaacagagttcatcg

SEQ ID NO: 255475 - DNA, 52 bp, Artificial
  Synthetic oligonucleotide
agccaatcgtgcgggtgtgaccgcctttacgcaatcggatccagcaggtttg

SEQ ID NO: 255476 - DNA, 52 bp, Artificial
  Synthetic oligonucleotide
tcatagagggttccttctcacatctgtgttgattatcgtcataagcagtaac

SEQ ID NO: 255477 - DNA, 52 bp, Artificial
  Synthetic oligonucleotide
acgaccagattcagaggccgattcgacttgatgtaccttctctaacgagttt

SEQ ID NO: 255478 - DNA, 60 bp, Artificial
  Synthetic oligonucleotide
agtttgagatctcggacatctctcgatctaacgtcacctcggatatggaacgactatacc

SEQ ID NO: 255479 - DNA, 52 bp, Artificial
  Synthetic oligonucleotide
tcagtagtgccagaccacctactagtaagaagatcaacgtcgctatcgcact

SEQ ID NO: 255480 - DNA, 52 bp, Artificial
  Synthetic oligonucleotide
gttcgggcttaggctgccatcccccatcaccaatttggccggttttccttga

SEQ ID NO: 255481 - DNA, 52 bp, Artificial
  Synthetic oligonucleotide
acgcagcgcagcaagtttgattctctatttgggtctaccacttattgatgta

SEQ ID NO: 255482 - DNA, 52 bp, Artificial
  Synthetic oligonucleotide
tcacaggcccctcaggggtagtgtcaaccgtagacccaagcaaagctctgct

SEQ ID NO: 255483 - DNA, 52 bp, Artificial
  Synthetic oligonucleotide
acgccttaaccccagcttcgaccttactgcgcggacaaccgacattcaggcg

SEQ ID NO: 255484 - DNA, 52 bp, Artificial
  Synthetic oligonucleotide
acgctaaactctggcatcaacagctcggaaccgctccgacggacacggcata

SEQ ID NO: 255485 - DNA, 52 bp, Artificial
  Synthetic oligonucleotide
acgtttaaccctaagcgttgcaccatgtcatcaagtacgtgatcatgtaggt

SEQ ID NO: 255486 - DNA, 52 bp, Artificial
  Synthetic oligonucleotide
actaaccctggtacctctgttcttggtctaaatgccgttatggcagctaccg

SEQ ID NO: 255487 - DNA, 52 bp, Artificial
  Synthetic oligonucleotide
taggccgtttgagcagagtgtttatgaggggaaatacctagaacgaggctcg

SEQ ID NO: 255488 - DNA, 52 bp, Artificial
  Synthetic oligonucleotide
taggatccgcgccccattggtttggcccatcggtacagatattggcagggca

SEQ ID NO: 255489 - DNA, 59 bp, Artificial
  Synthetic oligonucleotide
gtatttctaagagcgtagctaactggacatggcgaaacagagccaatatcagggttaaa

SEQ ID NO: 255490 - DNA, 52 bp, Artificial
  Synthetic oligonucleotide
actccctagtggtgcctattgtactaatggttcttgtgaccgagtgtgtgga

SEQ ID NO: 255491 - DNA, 52 bp, Artificial
  Synthetic oligonucleotide
actcggcctagccctgatggcgaacagttagctcaccagctttgtgcggtgg

SEQ ID NO: 255492 - DNA, 52 bp, Artificial
  Synthetic oligonucleotide
tacgtccgtagttgtctaccccaaagtccgcccctgcattgcgtactgcgtt

SEQ ID NO: 255493 - DNA, 52 bp, Artificial
  Synthetic oligonucleotide
actggtaatggacatagttgctccttgcttgcggccaaatacgaatacccag

SEQ ID NO: 255494 - DNA, 52 bp, Artificial
  Synthetic oligonucleotide
taaacctcggctagggcgtattactaagcgaggcgataaatacctcagaacg

SEQ ID NO: 255495 - DNA, 52 bp, Artificial
  Synthetic oligonucleotide
agagatcgtccgtttagaatagatcgtctgaaaacaggtactccacctcgaa

SEQ ID NO: 255496 - DNA, 52 bp, Artificial
  Synthetic oligonucleotide
tacgattaattaaggttgtccagatcgtttaaggtgtgaacgcccaatacga

SEQ ID NO: 255497 - DNA, 52 bp, Artificial
  Synthetic oligonucleotide
acttagggctgagcacatcatggtgcagttcgatcaatgcttgtttacgctc

SEQ ID NO: 255498 - DNA, 52 bp, Artificial
  Synthetic oligonucleotide
taccgaccagtagagggaacgagtagcctatccctgcacgcctatggtgccg

SEQ ID NO: 255499 - DNA, 52 bp, Artificial
  Synthetic oligonucleotide
agaactttattacacagggtttaatggctgccctcctatcatcggagtatct

SEQ ID NO: 255500 - DNA, 60 bp, Artificial
  Synthetic oligonucleotide
gtatcttgatagttaggaattaaccccatcatgcgagcatcagcgatgttaatacccgtt

SEQ ID NO: 255501 - DNA, 52 bp, Artificial
  Synthetic oligonucleotide
agaatgagcgtctgtttggctctatccttgcgagtatgcgcgcaggtatgaa

SEQ ID NO: 255502 - DNA, 52 bp, Artificial
  Synthetic oligonucleotide
tgtctaaagggaccccgttactgaccctagacaccctaggcgtcaatcagga

SEQ ID NO: 255503 - DNA, 52 bp, Artificial
  Synthetic oligonucleotide
tgtcggactgatgacgcacaatccactccatgacaaatggcaaacaatcgtc

SEQ ID NO: 255504 - DNA, 52 bp, Artificial
  Synthetic oligonucleotide
tgtagctctgtggcattaaccctttgtatgctacctgccacgaatcaacatg

SEQ ID NO: 255505 - DNA, 52 bp, Artificial
  Synthetic oligonucleotide
tggtcattgtccaagacctcacgctagtaatgatattgctttcgctgcatta

SEQ ID NO: 255506 - DNA, 52 bp, Artificial
  Synthetic oligonucleotide
tggtatcgctcctgagctaagaagcgcagttcgtaattatacagcaagtggt

SEQ ID NO: 255507 - DNA, 52 bp, Artificial
  Synthetic oligonucleotide
tggtagccttgcggcgatggattgggttctttgtgactacgcttgtgctggt

SEQ ID NO: 255508 - DNA, 52 bp, Artificial
  Synthetic oligonucleotide
aaggcaccccgcatgagatcttcacgcaacaaggttcggcaagagtgcgcag

SEQ ID NO: 255509 - DNA, 52 bp, Artificial
  Synthetic oligonucleotide
tggcttgttgagccatcggtagatgtcgcaatgatcgtgatagagtgagaat

SEQ ID NO: 255510 - DNA, 52 bp, Artificial
  Synthetic oligonucleotide
aggcaacggtagggtgcgattctcctgctaagattgcggcaccacgatacat

SEQ ID NO: 255511 - DNA, 60 bp, Artificial
  Synthetic oligonucleotide
ataagctagtatacacagagtgcactcgcttcgctcctttctctgtgagctggaaagggg

SEQ ID NO: 255512 - DNA, 52 bp, Artificial
  Synthetic oligonucleotide
tggcaggctttcttgctatgcttatcaccaacctggtattgggttacaccag

SEQ ID NO: 255513 - DNA, 52 bp, Artificial
  Synthetic oligonucleotide
tgcttgggcattactcgccaacaagacggattaggctatttagatgtcgact

SEQ ID NO: 255514 - DNA, 52 bp, Artificial
  Synthetic oligonucleotide
tgctgaattcggcgtttatcgtgatagcggctaaggcagaggtcgcacgtag

SEQ ID NO: 255515 - DNA, 52 bp, Artificial
  Synthetic oligonucleotide
tgcatgtgttgaagcaagtatggctcgtgaggctttattggttgagatctca

SEQ ID NO: 255516 - DNA, 52 bp, Artificial
  Synthetic oligonucleotide
tgcactaaaccgcttcatcgcgttaaccgacaacagtttatctaacgtactg

SEQ ID NO: 255517 - DNA, 52 bp, Artificial
  Synthetic oligonucleotide
aattcgtttggcgatgctcacctctcgcgagattggcaaagttagttgtgat

SEQ ID NO: 255518 - DNA, 52 bp, Artificial
  Synthetic oligonucleotide
agcggtgcctgtgcgtcgtaacgtgcaagatcctcagtgcaattgggtgaaa

SEQ ID NO: 255519 - DNA, 52 bp, Artificial
  Synthetic oligonucleotide
agcgcctataggtcaatggcaaggggcaccagcaccaagtattgcgccacaa

SEQ ID NO: 255520 - DNA, 52 bp, Artificial
  Synthetic oligonucleotide
gtgtttacactttaaaacttcgttttagcgtcactccctgtgccaaagggta

SEQ ID NO: 255521 - DNA, 52 bp, Artificial
  Synthetic oligonucleotide
agcgatcgtgttttacttcctcacaacggcctattgattccgttacagtgtc

SEQ ID NO: 255522 - DNA, 60 bp, Artificial
  Synthetic oligonucleotide
cagggatgggtgctgcatatcgtttgaggctgcttaatctgcctaagcgagtccaagata

SEQ ID NO: 255523 - DNA, 52 bp, Artificial
  Synthetic oligonucleotide
tgaactcagctcccgccccgtagtaggggttcaccccttcataagtgctgac

SEQ ID NO: 255524 - DNA, 52 bp, Artificial
  Synthetic oligonucleotide
acaatttacagtttaagctgtttggtggcgctcagatgcttggcagacattc

SEQ ID NO: 255525 - DNA, 52 bp, Artificial
  Synthetic oligonucleotide
tcttcgagctctggcacgtcggcaagtaacggttctggcgtttcgaaagcgg

SEQ ID NO: 255526 - DNA, 52 bp, Artificial
  Synthetic oligonucleotide
tctgtcgatgtattggcgcctacaggaccatttaatagtgtcgattgcccgc

SEQ ID NO: 255527 - DNA, 52 bp, Artificial
  Synthetic oligonucleotide
acaggtttagtgggagattaggagagtccaaaaaggtacacctttctggaca

SEQ ID NO: 255528 - DNA, 52 bp, Artificial
  Synthetic oligonucleotide
gttagccaaaccgaaaattttattatcctctctatccagtaatgcctgcata

SEQ ID NO: 255529 - DNA, 52 bp, Artificial
  Synthetic oligonucleotide
accaacactgcgtagagtctgaggaaagctcgacatgaaagtgcggtaagtc

SEQ ID NO: 255530 - DNA, 52 bp, Artificial
  Synthetic oligonucleotide
tcgctgggcatctccagttggtccggtcagctttgactttgcttggggtctc

SEQ ID NO: 255531 - DNA, 52 bp, Artificial
  Synthetic oligonucleotide
tcgcgagatcgcttcaaattgagcaccacacgccagtgcggtctgttggctt

SEQ ID NO: 255532 - DNA, 52 bp, Artificial
  Synthetic oligonucleotide
ctcgtatgtcacctcattacgtgtcttggagagtcatgttttatccagcgcg

SEQ ID NO: 255533 - DNA, 60 bp, Artificial
  Synthetic oligonucleotide
gtatcgcttgaaagttccattctgtacgtctgatatcgcgcatagtgaacctattcgcta

SEQ ID NO: 255534 - DNA, 52 bp, Artificial
  Synthetic oligonucleotide
gctacactcgatttgtgagcaaaatgcctagcctaatcgccccaatgtgtgc

SEQ ID NO: 255535 - DNA, 52 bp, Artificial
  Synthetic oligonucleotide
cgccgagaacatgcgtaaggtgattgggcacgtgacttccggttcgctggag

SEQ ID NO: 255536 - DNA, 52 bp, Artificial
  Synthetic oligonucleotide
ccgacgcaacgtggtggtttgttcacgtaacgcgggttgcaatgtcgcctgt

SEQ ID NO: 255537 - DNA, 52 bp, Artificial
  Synthetic oligonucleotide
cactgtttagcctgcatctttagcaagagttacttggccgttaacgctacac

SEQ ID NO: 255538 - DNA, 52 bp, Artificial
  Synthetic oligonucleotide
cactgtttctctgacgaaaaagagaacgggcaaagactaccatttagagagg

SEQ ID NO: 255539 - DNA, 52 bp, Artificial
  Synthetic oligonucleotide
gcgaagggacagtaagcacgtctctgcttgataaatacgcccgagtcattgc

SEQ ID NO: 255540 - DNA, 52 bp, Artificial
  Synthetic oligonucleotide
ctgccattacatcagattggtgtataaacttcccttacgtcaagctcagggg

SEQ ID NO: 255541 - DNA, 52 bp, Artificial
  Synthetic oligonucleotide
gcgaatgtttgtacaagctggcatccctcgttcgtgctccgactgggaggac

SEQ ID NO: 255542 - DNA, 52 bp, Artificial
  Synthetic oligonucleotide
gcacgattgctcgtcgtacacaccacatgacagctatcctagcggctggcct

SEQ ID NO: 255543 - DNA, 52 bp, Artificial
  Synthetic oligonucleotide
gcgtcacacgccattctgtgcccaatgttaaccgcgctctagcgtcggcacg

SEQ ID NO: 255544 - DNA, 60 bp, Artificial
  Synthetic oligonucleotide
atacgttcaagtcgatggacatgatgcatgcatcactgggttctgagttcggtgaacagt

SEQ ID NO: 255545 - DNA, 52 bp, Artificial
  Synthetic oligonucleotide
ctgcgtagaatggggttatctgttaaacgctctgagttcgcccccccaataa

SEQ ID NO: 255546 - DNA, 52 bp, Artificial
  Synthetic oligonucleotide
cgtaagtacgagcggtattatgttgctataagttccagttctaatgtttgcg

SEQ ID NO: 255547 - DNA, 52 bp, Artificial
  Synthetic oligonucleotide
gcgtagcattttgataccacgacctgcaacttttgggtttgggtcctgcatg

SEQ ID NO: 255548 - DNA, 52 bp, Artificial
  Synthetic oligonucleotide
ggaacggcagagcaacaggccgtcttgtgcaaatcctttgtcgcctactttt

SEQ ID NO: 255549 - DNA, 52 bp, Artificial
  Synthetic oligonucleotide
gagctgggaaactataccggaccagtacatcaaagggacccgttgtcgacgt

SEQ ID NO: 255550 - DNA, 52 bp, Artificial
  Synthetic oligonucleotide
cttgccatacgcgatagcaattaagttcgcgacacacccgacggtactgccc

SEQ ID NO: 255551 - DNA, 52 bp, Artificial
  Synthetic oligonucleotide
cgtaagacggatgttaccacccaacccgacagccacttcgtcccccaacgcg

SEQ ID NO: 255552 - DNA, 52 bp, Artificial
  Synthetic oligonucleotide
gcacactgcagcttacccggaacacccgctgtcgcttttctggctactgcac

SEQ ID NO: 255553 - DNA, 52 bp, Artificial
  Synthetic oligonucleotide
ccatgctaaacacgttaggaggaggtaaatccaacgtaggtgatatttttaa

SEQ ID NO: 255554 - DNA, 52 bp, Artificial
  Synthetic oligonucleotide
caaccgcagtgcacatcatgcgctagcggcagccagtcgctacatccgagag

SEQ ID NO: 255555 - DNA, 60 bp, Artificial
  Synthetic oligonucleotide
agagtatacgcctttgcatcagtgaactgcctagcagaacacccaactcacgggacttgt

SEQ ID NO: 255556 - DNA, 58 bp, Artificial
  Synthetic oligonucleotide
gtatatggacgttacacgatcacgcgcgttctgaactgatttaacgaaaataaactga

SEQ ID NO: 255557 - DNA, 52 bp, Artificial
  Synthetic oligonucleotide
ccatgtgggcactgatccccgcgttaggtatgctcggcggcacaaccatttg

SEQ ID NO: 255558 - DNA, 52 bp, Artificial
  Synthetic oligonucleotide
atgcgaattaagggtgtgtcgttcttgttgaagttggcgcagctcgttatcc

SEQ ID NO: 255559 - DNA, 52 bp, Artificial
  Synthetic oligonucleotide
caaacggcatcgctccgaagcactgaccctaatgcagtgtaccaagaaggat

SEQ ID NO: 255560 - DNA, 52 bp, Artificial
  Synthetic oligonucleotide
gaaacgttccaagatggcgagcagtacggggaaacctattacttcgataatg

SEQ ID NO: 255561 - DNA, 52 bp, Artificial
  Synthetic oligonucleotide
cccagtcgctcacacggcgcttactgtgacgcgtttttcgcctgatggcagc

SEQ ID NO: 255562 - DNA, 52 bp, Artificial
  Synthetic oligonucleotide
gcggggatatgcgagactaaccgatcgatcatctctatttgactaaggacca

SEQ ID NO: 255563 - DNA, 52 bp, Artificial
  Synthetic oligonucleotide
gagcgcttgtggtagtaaggcgtattttacgggaccaaaataggccgattga

SEQ ID NO: 255564 - DNA, 52 bp, Artificial
  Synthetic oligonucleotide
gcggatggtaaatacggcggccctactcgtgcccgtattggtctagcgcgtt

SEQ ID NO: 255565 - DNA, 52 bp, Artificial
  Synthetic oligonucleotide
cggatttagtactgcgttagcttgtcgtctgcgccttttctttaccacgcgg

SEQ ID NO: 255566 - DNA, 52 bp, Artificial
  Synthetic oligonucleotide
cgcagctatggaacgtgcgaagaaccgtcgttctgatcgtggcgaacgtgga

SEQ ID NO: 255567 - DNA, 60 bp, Artificial
  Synthetic oligonucleotide
gtctccattttggtggtcgcactcgccatgttgcctggcatgaccaagttggtcttgtcg

SEQ ID NO: 255568 - DNA, 52 bp, Artificial
  Synthetic oligonucleotide
cgcgcaccgtaagcaccgttgtcgacaactaataatttcccctctttgccaa

SEQ ID NO: 255569 - DNA, 52 bp, Artificial
  Synthetic oligonucleotide
caatggctcgtaaggatttgctgtaacgtactgactccaatcctccacatcg

SEQ ID NO: 255570 - DNA, 52 bp, Artificial
  Synthetic oligonucleotide
cgcgtcagtgtggcaactggcacctgggttttgcgtgaggcagcggtataac

SEQ ID NO: 255571 - DNA, 52 bp, Artificial
  Synthetic oligonucleotide
gggcaagaggccacgttcaatgcccacctaaactgggcaaaaggcgcaacca

SEQ ID NO: 255572 - DNA, 52 bp, Artificial
  Synthetic oligonucleotide
attacagcacattgttcgcaatcgttttgtagaaccaggtaccacaggcggc

SEQ ID NO: 255573 - DNA, 52 bp, Artificial
  Synthetic oligonucleotide
atgtttgagcactcggcgacgccaaggcacagagcctgcacttggttcacga

SEQ ID NO: 255574 - DNA, 52 bp, Artificial
  Synthetic oligonucleotide
attattaggattgcacctggttgctctttgccaagctgcggtcgataaggga

SEQ ID NO: 255575 - DNA, 52 bp, Artificial
  Synthetic oligonucleotide
ccgtctattgaggcggtctttttgtagctggacgtttgtctgcccaacgtta

SEQ ID NO: 255576 - DNA, 52 bp, Artificial
  Synthetic oligonucleotide
ctacgttacagacctttgccaaacagacgggcttacccgtctatgcgttctc

SEQ ID NO: 255577 - DNA, 52 bp, Artificial
  Synthetic oligonucleotide
atcgaatagtaaatgggttctctctaatcgcattgtatccgatagccggact

SEQ ID NO: 255578 - DNA, 55 bp, Artificial
  Synthetic oligonucleotide
agggtgtaccttaacatcatgctgttctaactgtttgatttaacgcttaacgtac

SEQ ID NO: 255579 - DNA, 52 bp, Artificial
  Synthetic oligonucleotide
cttgtcatactccgcatgagtaacaatatgctttacgtaaaatcgcccttgc

SEQ ID NO: 255580 - DNA, 52 bp, Artificial
  Synthetic oligonucleotide
gggtgttctttcgtcaaatggaacggtcgcaaatagtacagggttatcgcta

SEQ ID NO: 255581 - DNA, 52 bp, Artificial
  Synthetic oligonucleotide
ataaggcgacgggcctacctgtatttgtggcgaatgatacccgagcttgggc

SEQ ID NO: 255582 - DNA, 52 bp, Artificial
  Synthetic oligonucleotide
cgttataaacctatcacctagcgcagtcccctcagattctcctgccaattga

SEQ ID NO: 255583 - DNA, 52 bp, Artificial
  Synthetic oligonucleotide
gccaagatccgattctgatcatagcgctcaagcaagctgcttaaataacggc

SEQ ID NO: 255584 - DNA, 52 bp, Artificial
  Synthetic oligonucleotide
gccgggggttgtgacccaccaaggtctgcaagtgcctgcattacgtggctct

SEQ ID NO: 255585 - DNA, 52 bp, Artificial
  Synthetic oligonucleotide
ccgtctacgacaaagtagaaagtacgaatagccagttcaatgttcctttgcc

SEQ ID NO: 255586 - DNA, 52 bp, Artificial
  Synthetic oligonucleotide
cttggcaaataagccaagagcacccgcgcatattatactgacacttcaaagt

SEQ ID NO: 255587 - DNA, 52 bp, Artificial
  Synthetic oligonucleotide
cgtggtcaagccgctcccgttaaaggcgacgtttcggggttcattccctaga

SEQ ID NO: 255588 - DNA, 52 bp, Artificial
  Synthetic oligonucleotide
ctcggccttgtacgcgacgcacaccaagcgctactttaccactcgggctata

SEQ ID NO: 255589 - DNA, 58 bp, Artificial
  Synthetic oligonucleotide
agggttagattgacattccaggtcaaagccgcggttcatacgcttcggctccgcttgc

SEQ ID NO: 255590 - DNA, 52 bp, Artificial
  Synthetic oligonucleotide
gggttatgatgaatcggatcaagttggtaaccgatacatgacccaacgcgca

SEQ ID NO: 255591 - DNA, 52 bp, Artificial
  Synthetic oligonucleotide
gcctactcgacggcttggggtaaacccccaaaacagaccattcactggggtg

SEQ ID NO: 255592 - DNA, 52 bp, Artificial
  Synthetic oligonucleotide
ccaactaaaatgccatgctatccaacctccaataaccggcgctaatattggt

SEQ ID NO: 255593 - DNA, 51 bp, Artificial
  Synthetic oligonucleotide
cgcagccccaatttcctcacgaggcgtattcacactggcaagcgtcggtga

SEQ ID NO: 255594 - DNA, 51 bp, Artificial
  Synthetic oligonucleotide
ggacagccgctctcttgcctcggttgcagataaaccggggatgccaagctt

SEQ ID NO: 255595 - DNA, 51 bp, Artificial
  Synthetic oligonucleotide
gctgatgaatgatcctggctggcatgaggcaagccgtctatgcctggcgca

SEQ ID NO: 255596 - DNA, 51 bp, Artificial
  Synthetic oligonucleotide
ccaaacaatcaggagcgatggcatcaatacagcctttcagcgcttcttgta

SEQ ID NO: 255597 - DNA, 51 bp, Artificial
  Synthetic oligonucleotide
gctgcctcgcaatacgtcaacgttgccgcgaatgctccaatcgagtgggta

SEQ ID NO: 255598 - DNA, 51 bp, Artificial
  Synthetic oligonucleotide
gctgcctctccgattgatcgcccgtcgtttacgcaacggcaagagccagtg

SEQ ID NO: 255599 - DNA, 51 bp, Artificial
  Synthetic oligonucleotide
tagcgggggcgtgtagccaaggcttattcaaaaacccattagccagccccg

SEQ ID NO: 255600 - DNA, 53 bp, Artificial
  Synthetic oligonucleotide
agggtttagaactagacctagggcggaaggcacgcaaaggtaagaacacatcg

SEQ ID NO: 255601 - DNA, 51 bp, Artificial
  Synthetic oligonucleotide
taggtccatacaaaggcggactgaggttccatcattcagtgaacgcgagca

SEQ ID NO: 255602 - DNA, 51 bp, Artificial
  Synthetic oligonucleotide
gagtgctgatgtcatatttgacccttgaggcgctgatccgataaatgattt

SEQ ID NO: 255603 - DNA, 51 bp, Artificial
  Synthetic oligonucleotide
tagctatggcgtaagccgtgtgctccgttggagtacccaagagcgcgagaa

SEQ ID NO: 255604 - DNA, 51 bp, Artificial
  Synthetic oligonucleotide
tagctcgatgaaccgcttctcacacggcgcacactgggttggcacactctt

SEQ ID NO: 255605 - DNA, 51 bp, Artificial
  Synthetic oligonucleotide
catgcccgaggctgatcacacctaatgctagcgccgcttgagagggcggtg

SEQ ID NO: 255606 - DNA, 51 bp, Artificial
  Synthetic oligonucleotide
gagtcaagcgctcacacccaacgcgctaccgctcaatatcgatgagtattg

SEQ ID NO: 255607 - DNA, 51 bp, Artificial
  Synthetic oligonucleotide
ttaacgacacaacgctgcccactggcactgttgctagcaaaacgcgcgtgc

SEQ ID NO: 255608 - DNA, 51 bp, Artificial
  Synthetic oligonucleotide
cacacagccagccatgcgagctactatccgggcgctgaagtggtgtcgttc

SEQ ID NO: 255609 - DNA, 51 bp, Artificial
  Synthetic oligonucleotide
cacacgcaataccgcggatttagctgacatcgcactgcgccaacgcgtgct

SEQ ID NO: 255610 - DNA, 51 bp, Artificial
  Synthetic oligonucleotide
agaccgaccgagggaatataaagcgcccacgcatgcccgaggctgatcaca

SEQ ID NO: 255611 - DNA, 53 bp, Artificial
  Synthetic oligonucleotide
aggtgggtagtggagaatttaacgactttacgcttgtcgtcttctggagtgtt

SEQ ID NO: 255612 - DNA, 51 bp, Artificial
  Synthetic oligonucleotide
gggcccggtttagctgctccgagtacacactggcatggcgaccaaacaggt

SEQ ID NO: 255613 - DNA, 51 bp, Artificial
  Synthetic oligonucleotide
caccggaactctgccgcacttatcgctttgaggcctcctacggctaaggcc

SEQ ID NO: 255614 - DNA, 51 bp, Artificial
  Synthetic oligonucleotide
agaacgacaccgaaaacaataccagcaaggatctgtagaacgagatttcca

SEQ ID NO: 255615 - DNA, 51 bp, Artificial
  Synthetic oligonucleotide
cacgagaagtctcggtacgcagcgtacttgcgccacaacccaccgggtcaa

SEQ ID NO: 255616 - DNA, 51 bp, Artificial
  Synthetic oligonucleotide
taataatgctttctggtgacgtatcatcgagggctaaccaatgagaggcat

SEQ ID NO: 255617 - DNA, 51 bp, Artificial
  Synthetic oligonucleotide
taatcgcgatacactcttcaggcgtccctactgggttgatttcgtagctgt

SEQ ID NO: 255618 - DNA, 51 bp, Artificial
  Synthetic oligonucleotide
ggcttaacggaaaccaagctatctgaggcgattgataaagtgcgtggcgga

SEQ ID NO: 255619 - DNA, 51 bp, Artificial
  Synthetic oligonucleotide
taattctaactaggcgtaaagcccgataactccgccccttgtagctgctag

SEQ ID NO: 255620 - DNA, 51 bp, Artificial
  Synthetic oligonucleotide
gacgcttgattgtgtcatcacagcggcgagctctgttgaggccgacgccac

SEQ ID NO: 255621 - DNA, 51 bp, Artificial
  Synthetic oligonucleotide
acttctggcgtacattgatgggcaataatcgctctgggtcagcgctgagtg

SEQ ID NO: 255622 - DNA, 60 bp, Artificial
  Synthetic oligonucleotide
gactagcgtaacatccgataacgcacaccaaatgagtggactgaagcaagaactagcgta

SEQ ID NO: 255623 - DNA, 51 bp, Artificial
  Synthetic oligonucleotide
ggctactcagtggatgtgctgcagttagccgcggagaaagtgggcgttgcg

SEQ ID NO: 255624 - DNA, 51 bp, Artificial
  Synthetic oligonucleotide
ggcgtcctaagaatgcggatggtaaatacggcggccctactcgtgcccgta

SEQ ID NO: 255625 - DNA, 51 bp, Artificial
  Synthetic oligonucleotide
cactacaaaagcaccaactacgcagtgtttatgggtgctcagactgcgcat

SEQ ID NO: 255626 - DNA, 51 bp, Artificial
  Synthetic oligonucleotide
gactatgcttaggtagattctgacaacacgcctatgtgattcgaggccaat

SEQ ID NO: 255627 - DNA, 51 bp, Artificial
  Synthetic oligonucleotide
tacgaagcgcagtgtttcgagtgatttcgggccgcgagccaccaaatctcc

SEQ ID NO: 255628 - DNA, 51 bp, Artificial
  Synthetic oligonucleotide
gactgccgaactcatggctggcaccgatagcggcaaaagcgcttattgggc

SEQ ID NO: 255629 - DNA, 51 bp, Artificial
  Synthetic oligonucleotide
ggcctctcgtactggtgttgtttccgagaaaagcgggcgaacttgggggct

SEQ ID NO: 255630 - DNA, 51 bp, Artificial
  Synthetic oligonucleotide
aagcgtactgactgccgaactcatggctggcaccgatagcggcaaaagcgc

SEQ ID NO: 255631 - DNA, 51 bp, Artificial
  Synthetic oligonucleotide
tggtgactcaatctacaacgtgtgcactaacgagtttatacaaccgacgct

SEQ ID NO: 255632 - DNA, 51 bp, Artificial
  Synthetic oligonucleotide
cagcgtacggtgttagctgagccataccttgcggtgtgcctctcgggccat

SEQ ID NO: 255633 - DNA, 59 bp, Artificial
  Synthetic oligonucleotide
cgccgaaacagctaacctcggtactgaacttcccattgcaagcgaccatgacgcgcgta

SEQ ID NO: 255634 - DNA, 51 bp, Artificial
  Synthetic oligonucleotide
ggcaaccgcagtacctggtttacgcccgactcgtgtgacggtgaccgatca

SEQ ID NO: 255635 - DNA, 51 bp, Artificial
  Synthetic oligonucleotide
ggcaaccactggttttgcatgcgtgacaccatggccatgcaccccaaacgc

SEQ ID NO: 255636 - DNA, 51 bp, Artificial
  Synthetic oligonucleotide
gagcgaaatcaagtcgaactgcttattttaggctaacgtctgcatacatta

SEQ ID NO: 255637 - DNA, 51 bp, Artificial
  Synthetic oligonucleotide
ggatctgcagagttttcgccactaggggtaaaagcgtaaacacctacgtcc

SEQ ID NO: 255638 - DNA, 51 bp, Artificial
  Synthetic oligonucleotide
tagacacttgtgctgcaacgggcttgtgtgcagatcgttgccctgtgggta

SEQ ID NO: 255639 - DNA, 51 bp, Artificial
  Synthetic oligonucleotide
tgggtggaacaatgattaatatcgacagagttagtctttgtcatgactcta

SEQ ID NO: 255640 - DNA, 51 bp, Artificial
  Synthetic oligonucleotide
ggaggcatccataggtgccacgtcgaccccctgtataaccgcgagggttgg

SEQ ID NO: 255641 - DNA, 51 bp, Artificial
  Synthetic oligonucleotide
tccacaaccaactgagtgctcaataggttatctaggctggcgttactggcg

SEQ ID NO: 255642 - DNA, 51 bp, Artificial
  Synthetic oligonucleotide
acctccgaaataacggtggcggtgctttgagcgaggcaacggccctgacgg

SEQ ID NO: 255643 - DNA, 51 bp, Artificial
  Synthetic oligonucleotide
tgataaatggtcagcgacgtactcagcgccacctaaggtgctgcctgtgat

SEQ ID NO: 255644 - DNA, 55 bp, Artificial
  Synthetic oligonucleotide
cgcccttgcggtattccggattgggctttcggtactgatttgttatttgagccgc

SEQ ID NO: 255645 - DNA, 51 bp, Artificial
  Synthetic oligonucleotide
acctaggcggcagtgatgcacatggttgggttggcggtaacacggtgccta

SEQ ID NO: 255646 - DNA, 51 bp, Artificial
  Synthetic oligonucleotide
gcgagcatcgcgtctcacgccagtcattgctttgagtgcgagggcctagtc

SEQ ID NO: 255647 - DNA, 51 bp, Artificial
  Synthetic oligonucleotide
ccgaacaagtgtgctggctggtgtcgcgttgtttggttacgccgttgcctt

SEQ ID NO: 255648 - DNA, 51 bp, Artificial
  Synthetic oligonucleotide
tccgtaagatcaattaatgcagggactgtccaatttgagatcgtaccaaaa

SEQ ID NO: 255649 - DNA, 51 bp, Artificial
  Synthetic oligonucleotide
cctctagaacggtttcatagtgagctaagtaacctctgcaatgttccaaat

SEQ ID NO: 255650 - DNA, 51 bp, Artificial
  Synthetic oligonucleotide
tcgaatctatggtggggcgaatgggcggcaaaatgtcgcttgaaggtccgc

SEQ ID NO: 255651 - DNA, 51 bp, Artificial
  Synthetic oligonucleotide
tcgacctaaagtggtactcacaattcgcttaccctgcgtttccaagtaatt

SEQ ID NO: 255652 - DNA, 51 bp, Artificial
  Synthetic oligonucleotide
gcatgcaccgaactgggaaggcgcattaggcaaccctgaatggcgtcaagg

SEQ ID NO: 255653 - DNA, 51 bp, Artificial
  Synthetic oligonucleotide
tcgacgcgtctcttgcgttgaaatccgtctagccgccctgagcgctagtgc

SEQ ID NO: 255654 - DNA, 51 bp, Artificial
  Synthetic oligonucleotide
tcgactgatcgcccaagcaataacgctggccccagcaatcgcaatatcgga

SEQ ID NO: 255655 - DNA, 57 bp, Artificial
  Synthetic oligonucleotide
gtcggtatcttttgtgctcttcatacttacggtcgaaaactgaattggaatacgcac

SEQ ID NO: 255656 - DNA, 51 bp, Artificial
  Synthetic oligonucleotide
tcgatgcttcatccgtgttagaacggccaaacaaacgcaatatcccattgg

SEQ ID NO: 255657 - DNA, 51 bp, Artificial
  Synthetic oligonucleotide
accctccagcgcccttgaatgtcatccctccggattcgccttttcgcacta

SEQ ID NO: 255658 - DNA, 51 bp, Artificial
  Synthetic oligonucleotide
tcgcataagacagggctctagcataaaaaagccaacgactattttgtagcg

SEQ ID NO: 255659 - DNA, 51 bp, Artificial
  Synthetic oligonucleotide
acccccagtaaaccgggtacgatattgaccgcagagcggcgagtggggtta

SEQ ID NO: 255660 - DNA, 51 bp, Artificial
  Synthetic oligonucleotide
ccgcagcaggctcgttagccttggcgtacgtgtttgccaaatgtggtcgct

SEQ ID NO: 255661 - DNA, 51 bp, Artificial
  Synthetic oligonucleotide
accatctgcgtccttgggtagttggtcgttggacacaatcgccccctcggg

SEQ ID NO: 255662 - DNA, 51 bp, Artificial
  Synthetic oligonucleotide
accatccgcactggcatgcagctggtcctcctgaatatggtagtggtggaa

SEQ ID NO: 255663 - DNA, 51 bp, Artificial
  Synthetic oligonucleotide
accagtggccgttgtggcccgagtgaaattcgcgatgcacgcagtttacaa

SEQ ID NO: 255664 - DNA, 51 bp, Artificial
  Synthetic oligonucleotide
tcgctctcccccttactggataccccatccgctcagaccaatccagagcaa

SEQ ID NO: 255665 - DNA, 51 bp, Artificial
  Synthetic oligonucleotide
tctgtccgcaatttctcgtggggaggcgatctcgtttattccttttcgagc

SEQ ID NO: 255666 - DNA, 60 bp, Artificial
  Synthetic oligonucleotide
gtttgagcagaccactgctctgatgaagtatgactatttggcacagcggctcctgaacgt

SEQ ID NO: 255667 - DNA, 59 bp, Artificial
  Synthetic oligonucleotide
ggacgaccctttaactagcttctggatgctaccaacaccgctaagttgctatcgcgcca

SEQ ID NO: 255668 - DNA, 51 bp, Artificial
  Synthetic oligonucleotide
accagacctgtcgcatcaatcctaatcccatgaaataacgagggttagagc

SEQ ID NO: 255669 - DNA, 51 bp, Artificial
  Synthetic oligonucleotide
tcggcttcgtccaaacggttccaacaccacaacacttgcgctcgtacgcgc

SEQ ID NO: 255670 - DNA, 51 bp, Artificial
  Synthetic oligonucleotide
ccgtggtgacggtatttggtggcaacccggttgacggacgccgaagaactt

SEQ ID NO: 255671 - DNA, 51 bp, Artificial
  Synthetic oligonucleotide
tcgtggtgcacaaacgccaggtgagattcgcactcgcacaaaccgtcttgc

SEQ ID NO: 255672 - DNA, 51 bp, Artificial
  Synthetic oligonucleotide
gcccacagagcaatccatccctcgtcctttaaacaggatcggcggctcccc

SEQ ID NO: 255673 - DNA, 51 bp, Artificial
  Synthetic oligonucleotide
gagttagcccacgagcaacattggctctcgaccgctgtgcacgcgcccatg

SEQ ID NO: 255674 - DNA, 51 bp, Artificial
  Synthetic oligonucleotide
ccaaccaggatggccgtaacgacctgcatcatggctggtggcttgggcatc

SEQ ID NO: 255675 - DNA, 51 bp, Artificial
  Synthetic oligonucleotide
gctcgttaaagaagcgtgggaaacctttctcggtgcgccgaacctaccgaa

SEQ ID NO: 255676 - DNA, 51 bp, Artificial
  Synthetic oligonucleotide
aatatggtgatttaatgggtattagtaatgcgcggagagatctatataaag

SEQ ID NO: 255677 - DNA, 51 bp, Artificial
  Synthetic oligonucleotide
gagttcatcatttgggattgacggactcggtatgcaatctacgactaatga

SEQ ID NO: 255678 - DNA, 60 bp, Artificial
  Synthetic oligonucleotide
cagtgtgcactgcttaggggacgggtgtcagtcagtcgaacagctgtctgatgatggggt

SEQ ID NO: 255679 - DNA, 51 bp, Artificial
  Synthetic oligonucleotide
gatacgttacgctggattccagtacatggcttgctgcatcgcgctgagtag

SEQ ID NO: 255680 - DNA, 51 bp, Artificial
  Synthetic oligonucleotide
tatcacgcacaaaagcatgtttaatgttgtaggctgcaattaaatctccac

SEQ ID NO: 255681 - DNA, 51 bp, Artificial
  Synthetic oligonucleotide
cgatacagatcaagatggtctgacagactgccaggaaatacagggcattcg

SEQ ID NO: 255682 - DNA, 51 bp, Artificial
  Synthetic oligonucleotide
ccacgaacccgccacataaagcgcggctttacccgaggtaaagagctcatt

SEQ ID NO: 255683 - DNA, 51 bp, Artificial
  Synthetic oligonucleotide
tatccggtcggtgatggaagactgagtctgctgagcccagggcaacgcctc

SEQ ID NO: 255684 - DNA, 51 bp, Artificial
  Synthetic oligonucleotide
acggctttgtcgcggctctgttcactgccttaacctggggtgcggacattg

SEQ ID NO: 255685 - DNA, 51 bp, Artificial
  Synthetic oligonucleotide
tatctggtggcgcaccgatgcttgcatccagcactaggttgccttcatccg

SEQ ID NO: 255686 - DNA, 51 bp, Artificial
  Synthetic oligonucleotide
aatcggaagagcgccagccgacaattacacccgtagctacaaccgccagcg

SEQ ID NO: 255687 - DNA, 51 bp, Artificial
  Synthetic oligonucleotide
acgctgaatcccccgtcgacgcatctgacggctcaaacggccgtaaaccat

SEQ ID NO: 255688 - DNA, 51 bp, Artificial
  Synthetic oligonucleotide
aatctatccaccgtgaagcgttcgatcctcgaaccagccaccgtagtttcc

SEQ ID NO: 255689 - DNA, 58 bp, Artificial
  Synthetic oligonucleotide
cagtgggcgccttccaacgcttataggggatctcttggggcatagcccaaactatcca

SEQ ID NO: 255690 - DNA, 51 bp, Artificial
  Synthetic oligonucleotide
gcgggtgcacacggcgaagaatgggcaacgctatgcacagcaacgatccgt

SEQ ID NO: 255691 - DNA, 51 bp, Artificial
  Synthetic oligonucleotide
tcaaggtgcccgaattctgaaccaaactatgccaaaagttgcggcgctatt

SEQ ID NO: 255692 - DNA, 51 bp, Artificial
  Synthetic oligonucleotide
acgcccggtattcgcaccacagtcttgtggcctaaccagcggtacatccgc

SEQ ID NO: 255693 - DNA, 51 bp, Artificial
  Synthetic oligonucleotide
cccagccaccgtagtaaccttgtgtcgccccgacaaccacaccaatcacgc

SEQ ID NO: 255694 - DNA, 51 bp, Artificial
  Synthetic oligonucleotide
tgcgtgccgctcgttctcaacccgttcgtgtttatgccccagttggtagcc

SEQ ID NO: 255695 - DNA, 51 bp, Artificial
  Synthetic oligonucleotide
gattgtgacgtatgcggatgagcagcattacacgctctctttacgcgcccc

SEQ ID NO: 255696 - DNA, 51 bp, Artificial
  Synthetic oligonucleotide
cgaccatccgttacaacgtacgcgtcgccctgagtgcctgcggcatgaacc

SEQ ID NO: 255697 - DNA, 51 bp, Artificial
  Synthetic oligonucleotide
tgcgagtgagcggccgtgcggaacttgccgaccagcgcttaggcattgaaa

SEQ ID NO: 255698 - DNA, 51 bp, Artificial
  Synthetic oligonucleotide
tcactgcgaatagtgacactagagacatcaaatcgtgcagcaaggtcctct

SEQ ID NO: 255699 - DNA, 51 bp, Artificial
  Synthetic oligonucleotide
gcaaactcacgtgtcactcgatacaccaattcacgagactcgggactgttc

SEQ ID NO: 255700 - DNA, 60 bp, Artificial
  Synthetic oligonucleotide
agtaggactcgtgattatagtgatcttcgctatgattgccgctgagatgatagtgctgat

SEQ ID NO: 255701 - DNA, 51 bp, Artificial
  Synthetic oligonucleotide
cgacacaatcgtccgccaagcgctggacttgctctgtgggcagggtgagca

SEQ ID NO: 255702 - DNA, 51 bp, Artificial
  Synthetic oligonucleotide
tcaggtacccctcctgccttgctcgctccaacttgtgcagcgcgtattcca

SEQ ID NO: 255703 - DNA, 51 bp, Artificial
  Synthetic oligonucleotide
gcgccagaaacattgccgcttcgttagacagcgacgaacaagattgaattg

SEQ ID NO: 255704 - DNA, 51 bp, Artificial
  Synthetic oligonucleotide
tgcatccaaaggctatcaacttgaatgcaatactgatcttgtgaacagtag

SEQ ID NO: 255705 - DNA, 51 bp, Artificial
  Synthetic oligonucleotide
cgaaattggcagtgtcaccctcgttgatcgtaccggcatcactaatcgaaa

SEQ ID NO: 255706 - DNA, 51 bp, Artificial
  Synthetic oligonucleotide
acctgtctccgggttgacgtccacgatgtggctgcgagcagagacactgct

SEQ ID NO: 255707 - DNA, 51 bp, Artificial
  Synthetic oligonucleotide
gcaccaatagaatacggctgtaccgcatcaaaataacgagaggtttcaccc

SEQ ID NO: 255708 - DNA, 51 bp, Artificial
  Synthetic oligonucleotide
ggtatcgtacacagcgtctgaattgtgctcgttgctcactatcattagaaa

SEQ ID NO: 255709 - DNA, 51 bp, Artificial
  Synthetic oligonucleotide
atctacgctcctccaacactgagcctgttgttcgtttgaacgttgaatcga

SEQ ID NO: 255710 - DNA, 51 bp, Artificial
  Synthetic oligonucleotide
ttattcgcagacccagtataaagggatgcatcatttatccactcttttagc

SEQ ID NO: 255711 - DNA, 59 bp, Artificial
  Synthetic oligonucleotide
agtatcacgctcagctgcgcttaacccttgccaaccctgaatagtttgggcgccgaatc

SEQ ID NO: 255712 - DNA, 51 bp, Artificial
  Synthetic oligonucleotide
tttagacccaaccgcagtgcacatcatgcgctagcggcagccagtcgctac

SEQ ID NO: 255713 - DNA, 51 bp, Artificial
  Synthetic oligonucleotide
cgtgcgtcgagtacaataagggaactgtgctttacgccattcgttcttatt

SEQ ID NO: 255714 - DNA, 51 bp, Artificial
  Synthetic oligonucleotide
aaaatgattggtgcttatctacctacggcagggcaaggttgtacgattccg

SEQ ID NO: 255715 - DNA, 51 bp, Artificial
  Synthetic oligonucleotide
aaaatcgcttagaacgcatctgaggcggtttgggagggttttggagcgtag

SEQ ID NO: 255716 - DNA, 51 bp, Artificial
  Synthetic oligonucleotide
cgcttgcggcggaattgcggggcacgtgttgaagtccatcgcggtttctcc

SEQ ID NO: 255717 - DNA, 51 bp, Artificial
  Synthetic oligonucleotide
cgttcaatgctatcatcaccatcgagcaagttgataaccagtatcgctaag

SEQ ID NO: 255718 - DNA, 51 bp, Artificial
  Synthetic oligonucleotide
aaaagctatcgcttttcaatggattagcctctttattgagccttgagctgg

SEQ ID NO: 255719 - DNA, 51 bp, Artificial
  Synthetic oligonucleotide
cgctgggaacagacggtttctgcgttgtcggaatggcaaacccgttcgcgt

SEQ ID NO: 255720 - DNA, 51 bp, Artificial
  Synthetic oligonucleotide
gggttgtcgcttgattcatccggaaacgcattaattgagttgcatgtaggt

SEQ ID NO: 255721 - DNA, 51 bp, Artificial
  Synthetic oligonucleotide
ttcttgatacgtagctcgttcaaataggcggaccgcatccaatttagtcag

SEQ ID NO: 255722 - DNA, 60 bp, Artificial
  Synthetic oligonucleotide
gacttagtgtcaacagatgtctcttaaatttctaacacagcctgtggatagcccaagaat

SEQ ID NO: 255723 - DNA, 51 bp, Artificial
  Synthetic oligonucleotide
aaatccaagccgggggcatttcaaggccagggtatggcggtgttactgcgc

SEQ ID NO: 255724 - DNA, 51 bp, Artificial
  Synthetic oligonucleotide
aaaacccagcgattggggccaaaaccttagatctaggcgataactattttc

SEQ ID NO: 255725 - DNA, 51 bp, Artificial
  Synthetic oligonucleotide
ttagtaacgccttgccctaaaattgtactaccgaacaatacgccattacta

SEQ ID NO: 255726 - DNA, 51 bp, Artificial
  Synthetic oligonucleotide
ttaggttatgctacgtgtgaatactgggcttctgatcgttggtctagttgg

SEQ ID NO: 255727 - DNA, 51 bp, Artificial
  Synthetic oligonucleotide
atggggcagcaggttggcttccctggtacttctgctacaggttttgccggc

SEQ ID NO: 255728 - DNA, 51 bp, Artificial
  Synthetic oligonucleotide
aggcggcagtccaagtcatggaataaggggcttgagtatcagcgcctagtg

SEQ ID NO: 255729 - DNA, 51 bp, Artificial
  Synthetic oligonucleotide
ctttatccgcctgagtaacgacctagatttgatggtcaaaggcgcattgca

SEQ ID NO: 255730 - DNA, 51 bp, Artificial
  Synthetic oligonucleotide
attctacgttgcactgattgcggccctaatggcggtgacctttattcctga

SEQ ID NO: 255731 - DNA, 51 bp, Artificial
  Synthetic oligonucleotide
attcgccggtaacgggtaagggggcttgttggtcgcatggtaagtacggcc

SEQ ID NO: 255732 - DNA, 51 bp, Artificial
  Synthetic oligonucleotide
attgtgtcatcacagcggcgagctctgttgaggccgacgccacatccacac

SEQ ID NO: 255733 - DNA, 59 bp, Artificial
  Synthetic oligonucleotide
agtcgacattcaggatcacagctttaacgctcgattcatttatagccgcgttaaactct

SEQ ID NO: 255734 - DNA, 51 bp, Artificial
  Synthetic oligonucleotide
aaacggatgcacgacgcatcagcccgcataggcaaactgggagggtgtgta

SEQ ID NO: 255735 - DNA, 51 bp, Artificial
  Synthetic oligonucleotide
ctgcgcattaacataagttgcagtagatacacgccaaaggccaggatggta

SEQ ID NO: 255736 - DNA, 51 bp, Artificial
  Synthetic oligonucleotide
attacgtttacttcacccttggcgtaaaggcccattcaccatgcacgatat

SEQ ID NO: 255737 - DNA, 51 bp, Artificial
  Synthetic oligonucleotide
ctgcagtattgactctatcgcttcatccgtcatacccaacttagacatgta

SEQ ID NO: 255738 - DNA, 51 bp, Artificial
  Synthetic oligonucleotide
gtgtgtcggagacggttcgacctatcgagcgtcagaaagagctcttttacg

SEQ ID NO: 255739 - DNA, 51 bp, Artificial
  Synthetic oligonucleotide
caaaccgtggttggacattaactcctgtgccttggtgtgataccggctttt

SEQ ID NO: 255740 - DNA, 51 bp, Artificial
  Synthetic oligonucleotide
aaagagcccgttcttatggtgagctactccgtattgattcgatgttagacg

SEQ ID NO: 255741 - DNA, 51 bp, Artificial
  Synthetic oligonucleotide
aaagcacgataagccgcatcaatatgccacttagccaccgcactccattgg

SEQ ID NO: 255742 - DNA, 51 bp, Artificial
  Synthetic oligonucleotide
ggtgtttagcgaatactcttcggttaggtattcggttagccttaggaggcg

SEQ ID NO: 255743 - DNA, 51 bp, Artificial
  Synthetic oligonucleotide
ggtctgaaacgcgacaacccatactaaacagatagccgtgcaaaacccgag

SEQ ID NO: 255744 - DNA, 57 bp, Artificial
  Synthetic oligonucleotide
ccggacctacatcgttatcggtatcaccaccgcccggtgtcgaaccatctgcatccg

SEQ ID NO: 255745 - DNA, 51 bp, Artificial
  Synthetic oligonucleotide
aaccgtgagttcgcgttaccacaccttccgaattccagctcgcagcgcgcg

SEQ ID NO: 255746 - DNA, 51 bp, Artificial
  Synthetic oligonucleotide
caacaggcgcacaacttagaacttgggaacctctggtaatcttagacacag

SEQ ID NO: 255747 - DNA, 51 bp, Artificial
  Synthetic oligonucleotide
cgtcgattcggatcagccttccacgcagcaagctagctcactttcgttgcg

SEQ ID NO: 255748 - DNA, 51 bp, Artificial
  Synthetic oligonucleotide
aaaattgcctggcggttcatcactcctatacgccagtcaaagtcggtcggc

SEQ ID NO: 255749 - DNA, 51 bp, Artificial
  Synthetic oligonucleotide
caagatggccgtgccttgcaactgacgttgggcggaacgccaaatgtgtgg

SEQ ID NO: 255750 - DNA, 51 bp, Artificial
  Synthetic oligonucleotide
ttaccatcgcctttgacagtaactatcgaccaaagttgtggtgctcagaag

SEQ ID NO: 255751 - DNA, 51 bp, Artificial
  Synthetic oligonucleotide
ctgtctcgcactcatgtaaattaaacgcgagacaacttaggttgtttaaac

SEQ ID NO: 255752 - DNA, 51 bp, Artificial
  Synthetic oligonucleotide
ttgatctctcggagtattcggagggctttgttagtgctgtcgaggtatcat

SEQ ID NO: 255753 - DNA, 51 bp, Artificial
  Synthetic oligonucleotide
ggggcttttgaccacctaatcgtcactgcgggctcatacgcgccagcaggt

SEQ ID NO: 255754 - DNA, 51 bp, Artificial
  Synthetic oligonucleotide
ttgaggtagtcggcttttttacgaatgctgtatagttagattgacagtcta

SEQ ID NO: 255755 - DNA, 60 bp, Artificial
  Synthetic oligonucleotide
gcccagtgtcactaccagcgcgttcgagaagcttgcaactatcagggagcatgattgggt

SEQ ID NO: 255756 - DNA, 51 bp, Artificial
  Synthetic oligonucleotide
ggggctggtattgctacagatgcggcgggtcgtgggctacgagttggctta

SEQ ID NO: 255757 - DNA, 51 bp, Artificial
  Synthetic oligonucleotide
cggtgacattatagatacgaaggttattcgtgttgctcattaccctaacgt

SEQ ID NO: 255758 - DNA, 51 bp, Artificial
  Synthetic oligonucleotide
atactactcccatcgtagccccgataacgtcagttggtatcaagagtcggc

SEQ ID NO: 255759 - DNA, 51 bp, Artificial
  Synthetic oligonucleotide
gtcagacactctcaagtaatcgtgcaaaaggaggggagggactgttgactc

SEQ ID NO: 255760 - DNA, 51 bp, Artificial
  Synthetic oligonucleotide
ttttggtatcggctggcaatgtaaattgagacaccactaaaacctgaccgt

SEQ ID NO: 255761 - DNA, 51 bp, Artificial
  Synthetic oligonucleotide
caatgcccggaagcgttagcacagcgccaggaatgagcgccaataggccaa

SEQ ID NO: 255762 - DNA, 51 bp, Artificial
  Synthetic oligonucleotide
cgggctattgggcgcttcgtcttggcttgccaccgaataagcttcctctgc

SEQ ID NO: 255763 - DNA, 51 bp, Artificial
  Synthetic oligonucleotide
atgggatcaccgttcaccaaagcactgcgcccaagcggggttgagattggt

SEQ ID NO: 255764 - DNA, 51 bp, Artificial
  Synthetic oligonucleotide
aactgggctgggtcgggatcgctgcgtgtagcttatggctgtcaggttgcg

SEQ ID NO: 255765 - DNA, 51 bp, Artificial
  Synthetic oligonucleotide
gtggactgggcccgacaagtgacgatctcaccgcagtcgctgctgcgatgg

SEQ ID NO: 255766 - DNA, 58 bp, Artificial
  Synthetic oligonucleotide
agtcgtctggcctcgcaaggtcgagagattatccaagtgcacaagcaaaaccggaaac

SEQ ID NO: 255767 - DNA, 51 bp, Artificial
  Synthetic oligonucleotide
aggcatccacgcatacacggtcacccctgcacgggtgctaagttgccacga

SEQ ID NO: 255768 - DNA, 51 bp, Artificial
  Synthetic oligonucleotide
cggtatatacccacagtttagcttgggctttagctggcaatagagaaaccg

SEQ ID NO: 255769 - DNA, 51 bp, Artificial
  Synthetic oligonucleotide
cgctacggtagctaactctgaggtattcacgtggctaatgcggcgagattc

SEQ ID NO: 255770 - DNA, 51 bp, Artificial
  Synthetic oligonucleotide
ctattggggtgttgtactggtgctaacccgagtgcaaatttgggccgagaa

SEQ ID NO: 255771 - DNA, 51 bp, Artificial
  Synthetic oligonucleotide
cttcgtagcgcgtaaactcaccgaaatccgtatgagcacgctcgcaagccc

SEQ ID NO: 255772 - DNA, 51 bp, Artificial
  Synthetic oligonucleotide
ttgctgcgtgttggccattcttatgagacccgcactcatattggtgtaggt

SEQ ID NO: 255773 - DNA, 51 bp, Artificial
  Synthetic oligonucleotide
ttttgtttgtcctatcatcgtccattccatagcggaacgaccgagtaggga

SEQ ID NO: 255774 - DNA, 51 bp, Artificial
  Synthetic oligonucleotide
cgctaccgccttcgggtacgccctgcatgcgtagtagcaaaatgtaggccg

SEQ ID NO: 255775 - DNA, 51 bp, Artificial
  Synthetic oligonucleotide
aaagggccgaaagcttggagcataagttttaacggacgcatgttacatacc

SEQ ID NO: 255776 - DNA, 51 bp, Artificial
  Synthetic oligonucleotide
gaatcgcctttcgtatcgcctatctctagcgcggtaccagtgttagtacac

SEQ ID NO: 255777 - DNA, 55 bp, Artificial
  Synthetic oligonucleotide
gtttatggaaacccatttacttccaaatgaaaacgacagagccttgttggagagc

SEQ ID NO: 255778 - DNA, 60 bp, Artificial
  Synthetic oligonucleotide
gtccagacccaatgatcgcagctatggaacgtgcgaagaaccgtcgttctgatcgtggcg

SEQ ID NO: 255779 - DNA, 51 bp, Artificial
  Synthetic oligonucleotide
agtgaagagtattacacctatctggttaaatggatggcccacatggttcag

SEQ ID NO: 255780 - DNA, 51 bp, Artificial
  Synthetic oligonucleotide
agtgcggcttggcgaaaggtccgttagggcaattccctccagagccgtttc

SEQ ID NO: 255781 - DNA, 50 bp, Artificial
  Synthetic oligonucleotide
aatgctcgaattgcgcctagcagtaggggtggccagtccgcaagggtgaa

SEQ ID NO: 255782 - DNA, 50 bp, Artificial
  Synthetic oligonucleotide
gatttacaacttcggtctgtcttcttcagcggtatggggtggttacttct

SEQ ID NO: 255783 - DNA, 50 bp, Artificial
  Synthetic oligonucleotide
tgagggtgaaacacgtactttaccccttgcgatgttcagttatattgaga

SEQ ID NO: 255784 - DNA, 50 bp, Artificial
  Synthetic oligonucleotide
acaaaagggaggcacgaccaaaccgccttgggcgtctatcgttgggccgt

SEQ ID NO: 255785 - DNA, 50 bp, Artificial
  Synthetic oligonucleotide
cgaaaccatcgacacaccaacatgtccttatcaggacgtggcttgcaaga

SEQ ID NO: 255786 - DNA, 50 bp, Artificial
  Synthetic oligonucleotide
aaacggggcctgacattttcaatgggagtggaaccgtccgtgccggccaa

SEQ ID NO: 255787 - DNA, 50 bp, Artificial
  Synthetic oligonucleotide
aattggcagcattgcgacctgcgtgatcggagtcggccgcaggcattaag

SEQ ID NO: 255788 - DNA, 50 bp, Artificial
  Synthetic oligonucleotide
ctggcggtgtgagcacggtatttgcccgtagtgagaaacgacgcgaccgc

SEQ ID NO: 255789 - DNA, 59 bp, Artificial
  Synthetic oligonucleotide
cgcacagcggtataacagattgattaaccatggattaagtcggaatatgggccataact

SEQ ID NO: 255790 - DNA, 50 bp, Artificial
  Synthetic oligonucleotide
ttggccattcgaaccattagtcgcttgcagtgacaggtctcgcatgcgtt

SEQ ID NO: 255791 - DNA, 50 bp, Artificial
  Synthetic oligonucleotide
aattcaaacttcgcttgggcggtttgtctgtttcggctcccccgttcttg

SEQ ID NO: 255792 - DNA, 50 bp, Artificial
  Synthetic oligonucleotide
aaagggcactcgggtcacgtccgttagggcgtaaggctcccaatatccga

SEQ ID NO: 255793 - DNA, 50 bp, Artificial
  Synthetic oligonucleotide
cgaccacagtaagccaggcgtgccaaaagtgggggccggtaacctttcgc

SEQ ID NO: 255794 - DNA, 50 bp, Artificial
  Synthetic oligonucleotide
gcacataaccgggtagggtgtgccccgtgatgtctgtgacgctggcatcc

SEQ ID NO: 255795 - DNA, 50 bp, Artificial
  Synthetic oligonucleotide
aatggcgacctacaaccagggccgcagcacccactatggcggcgtgaaca

SEQ ID NO: 255796 - DNA, 50 bp, Artificial
  Synthetic oligonucleotide
aatgtgtgccaatagtatcccaaggcgcaggtttacgcccctgctggcga

SEQ ID NO: 255797 - DNA, 50 bp, Artificial
  Synthetic oligonucleotide
ttggcaacactggctcaatgtgtggtcgaagccaatggtgcgccgagcac

SEQ ID NO: 255798 - DNA, 50 bp, Artificial
  Synthetic oligonucleotide
cggtggcttttgcgcttagctcaggtatgtttggcttacaagcgtccgat

SEQ ID NO: 255799 - DNA, 50 bp, Artificial
  Synthetic oligonucleotide
aaagcgcccacgcatgcccgaggctgatcacacctaatgctagcgccgct

SEQ ID NO: 255800 - DNA, 56 bp, Artificial
  Synthetic oligonucleotide
atcggtgttgctcgtgcacgtttcccgaaaggcacacgtggttaccaaatcgatac

SEQ ID NO: 255801 - DNA, 50 bp, Artificial
  Synthetic oligonucleotide
aatgggcggaaagtcttgctgagcggaacgatccgttggcggtgaaggta

SEQ ID NO: 255802 - DNA, 50 bp, Artificial
  Synthetic oligonucleotide
cgaacatagcggctttagccgtggtctgcctgactacgatccgggctggg

SEQ ID NO: 255803 - DNA, 50 bp, Artificial
  Synthetic oligonucleotide
cgaacccgagaatcggaaaggagatgggttaaggaaagctttaatgcata

SEQ ID NO: 255804 - DNA, 50 bp, Artificial
  Synthetic oligonucleotide
aaagccgtgctctcccctatcgtcaagcgttatcgcgaactggggtggga

SEQ ID NO: 255805 - DNA, 50 bp, Artificial
  Synthetic oligonucleotide
aatggcgcgtctgtggcaatcgaccctcgcatgcacaactctgcttggct

SEQ ID NO: 255806 - DNA, 50 bp, Artificial
  Synthetic oligonucleotide
gcaatcccgccatagaaaagtaggtgaacataataccttcgcatagcttc

SEQ ID NO: 255807 - DNA, 50 bp, Artificial
  Synthetic oligonucleotide
acaccgctaacggggcttttaaccaccgttcgcgcctgcacatcactggc

SEQ ID NO: 255808 - DNA, 50 bp, Artificial
  Synthetic oligonucleotide
tcttaaggggatgggggtttaacgtacattagatgaatgcctgtaggggt

SEQ ID NO: 255809 - DNA, 50 bp, Artificial
  Synthetic oligonucleotide
tcttaaatcgttgtagttactatcgatttaaagcttatctatcacccttt

SEQ ID NO: 255810 - DNA, 50 bp, Artificial
  Synthetic oligonucleotide
acaccggtgattggcttatacgcccaccacaaccccgcacgtaccggtcc

SEQ ID NO: 255811 - DNA, 57 bp, Artificial
  Synthetic oligonucleotide
gaggtaaaccgatcaatagatcttcgttactaggtgaagcccaaaccatgacttgag

SEQ ID NO: 255812 - DNA, 50 bp, Artificial
  Synthetic oligonucleotide
cgttcgtcagaattaataagagctaagtatatgtccgtaaactcaaacct

SEQ ID NO: 255813 - DNA, 50 bp, Artificial
  Synthetic oligonucleotide
ctcaccacggaagaggccgtgtcaggctttacagggttaaccgtcgtttt

SEQ ID NO: 255814 - DNA, 50 bp, Artificial
  Synthetic oligonucleotide
cgttgcagcaccagctgatgcgtcaccacttatgcgcctgaagggctgtc

SEQ ID NO: 255815 - DNA, 50 bp, Artificial
  Synthetic oligonucleotide
cgttgctgcctgcggagcacaacaagccgtcgcgaacaacagcttgaaca

SEQ ID NO: 255816 - DNA, 50 bp, Artificial
  Synthetic oligonucleotide
ccgtggtggccattgcatctcgctacccaatcacacacgttgcggccgtg

SEQ ID NO: 255817 - DNA, 50 bp, Artificial
  Synthetic oligonucleotide
acactgcccgaccatgtgacttggttgccacccacgtacacagcactggc

SEQ ID NO: 255818 - DNA, 50 bp, Artificial
  Synthetic oligonucleotide
acagaggttggttccccgcgatcgcccccttcggtgagagtgccacgcgg

SEQ ID NO: 255819 - DNA, 50 bp, Artificial
  Synthetic oligonucleotide
tctgagaagcaaggcgagagccttcttcaatggtacgacgcagcgggcct

SEQ ID NO: 255820 - DNA, 50 bp, Artificial
  Synthetic oligonucleotide
ctacccggtgcgctgagctgaggaatcggcatcacttgcacactcgcgtg

SEQ ID NO: 255821 - DNA, 50 bp, Artificial
  Synthetic oligonucleotide
ctagcggagcggcccactttgcacgtaaagcgagttgtaaagcacggcga

SEQ ID NO: 255822 - DNA, 56 bp, Artificial
  Synthetic oligonucleotide
cgcaagcaattctttgtttgtcggtgagaggattcgattcaacgttgtcaaaaaac

SEQ ID NO: 255823 - DNA, 50 bp, Artificial
  Synthetic oligonucleotide
gccagtgtttggggcaccgatatgtcgggcgttgcggaaaacttgggtga

SEQ ID NO: 255824 - DNA, 50 bp, Artificial
  Synthetic oligonucleotide
tctcatcgcgtgggtcgctcgacatgggtgcataaactgcttggcacggg

SEQ ID NO: 255825 - DNA, 50 bp, Artificial
  Synthetic oligonucleotide
tctcaacgcgaggctccccttctagttcctccctactcgccccttgtccc

SEQ ID NO: 255826 - DNA, 50 bp, Artificial
  Synthetic oligonucleotide
tctatttcacgcccctcgacccactctcccgtgcgttgaaacccacagct

SEQ ID NO: 255827 - DNA, 50 bp, Artificial
  Synthetic oligonucleotide
tctatcttgctaagaacagctctaatcgttgattcgccaaactgagcggt

SEQ ID NO: 255828 - DNA, 50 bp, Artificial
  Synthetic oligonucleotide
ccgggtagggtgtgccccgtgatgtctgtgacgctggcatcccattttcg

SEQ ID NO: 255829 - DNA, 50 bp, Artificial
  Synthetic oligonucleotide
acaggtttatggacagttccaacaaaaccgtctcgacctatgatttggtg

SEQ ID NO: 255830 - DNA, 50 bp, Artificial
  Synthetic oligonucleotide
ccggggttaaagctggcgatttggggcgcggagaaagcgttaccgcaact

SEQ ID NO: 255831 - DNA, 50 bp, Artificial
  Synthetic oligonucleotide
ccgggagtctccgtaaacgcggcccttaagcgccactacccatacggtga

SEQ ID NO: 255832 - DNA, 50 bp, Artificial
  Synthetic oligonucleotide
ctagccaccgcctgcttttgcccccactcggccatgcgtttttgtacgtt

SEQ ID NO: 255833 - DNA, 60 bp, Artificial
  Synthetic oligonucleotide
atctcacacagagcgcatttattcgaatagttttccaagacaatacgtctcaatactctc

SEQ ID NO: 255834 - DNA, 50 bp, Artificial
  Synthetic oligonucleotide
aaacgctcggaggcgttaaagccttacgatgaatcacaaggtgacctctt

SEQ ID NO: 255835 - DNA, 50 bp, Artificial
  Synthetic oligonucleotide
acaaactccgctgaacggcgatgacaacacagcccggcgtcaaccgagct

SEQ ID NO: 255836 - DNA, 50 bp, Artificial
  Synthetic oligonucleotide
aaacgaaatacatccaacgccgagtgcatgtaatcgccaaccaaataaat

SEQ ID NO: 255837 - DNA, 50 bp, Artificial
  Synthetic oligonucleotide
gcacgcatgaactcagggaacgtgcctattaagtctatttgtagcccgta

SEQ ID NO: 255838 - DNA, 50 bp, Artificial
  Synthetic oligonucleotide
tgactaatccattgcgctgcaactgtggggctaacacactgaaattggct

SEQ ID NO: 255839 - DNA, 50 bp, Artificial
  Synthetic oligonucleotide
gcacgggtgttgctgatgaatgatcctggctggcatgaggcaagccgtct

SEQ ID NO: 255840 - DNA, 50 bp, Artificial
  Synthetic oligonucleotide
cgtcactgaatacttcctcttcatgacaatcaacaggctcagaaacgcag

SEQ ID NO: 255841 - DNA, 50 bp, Artificial
  Synthetic oligonucleotide
ccttgctggacgcagtcgctctcctcaagtggtgtcggggatcattgccc

SEQ ID NO: 255842 - DNA, 50 bp, Artificial
  Synthetic oligonucleotide
gcactgccagagcttcccccttcgacgcaaggtgagccttcgtctgcctc

SEQ ID NO: 255843 - DNA, 50 bp, Artificial
  Synthetic oligonucleotide
tgacgaaaagcgcacccaacacgcgctatgtctacagcgagcaggggacg

SEQ ID NO: 255844 - DNA, 60 bp, Artificial
  Synthetic oligonucleotide
gtaatgtaagtcatcatcaagcatttctctttcgtaggcgtaatacgatttatcaattga

SEQ ID NO: 255845 - DNA, 50 bp, Artificial
  Synthetic oligonucleotide
gcagcggaggttcaactcgtcgcatctgcggtgagtcagtggttcccgaa

SEQ ID NO: 255846 - DNA, 50 bp, Artificial
  Synthetic oligonucleotide
aaaccatcgcctctctcggcaccgtgtcacaggcagagtcggtgacaacc

SEQ ID NO: 255847 - DNA, 50 bp, Artificial
  Synthetic oligonucleotide
ctgatcatgtgttttatcgcctctgtcctgaattacggcacggttctaaa

SEQ ID NO: 255848 - DNA, 50 bp, Artificial
  Synthetic oligonucleotide
gcagggttggcgttgtgtgcttgatagcagtgtatcggggacgaagcgcg

SEQ ID NO: 255849 - DNA, 50 bp, Artificial
  Synthetic oligonucleotide
cgtcataaaccgggttgttgaattgactttcccgacagataggataaata

SEQ ID NO: 255850 - DNA, 50 bp, Artificial
  Synthetic oligonucleotide
gcagtagccagaaaagcgacagcgggtgttccgggtaagctgcagtgtgc

SEQ ID NO: 255851 - DNA, 50 bp, Artificial
  Synthetic oligonucleotide
gcagtattgagcgtgtcgcccccaaagcctctgcgaattgggtcgccgct

SEQ ID NO: 255852 - DNA, 50 bp, Artificial
  Synthetic oligonucleotide
cctcggtgcgactctgttaccgcaactctcgccatcaccgagtgaccgct

SEQ ID NO: 255853 - DNA, 50 bp, Artificial
  Synthetic oligonucleotide
ctcgccctagcggtcgctgagcctgcatacagttatttgcgcagcaccgt

SEQ ID NO: 255854 - DNA, 50 bp, Artificial
  Synthetic oligonucleotide
aaaagtcgcgggctgcaaggtgaagttgcgtttgctacggcgcaagctgc

SEQ ID NO: 255855 - DNA, 60 bp, Artificial
  Synthetic oligonucleotide
gtaatagcgacgctcctgtgatgtacctacagtaaatagcgcataacgagctaattcgtt

SEQ ID NO: 255856 - DNA, 50 bp, Artificial
  Synthetic oligonucleotide
acacccaacgaggatgggcgaccactgccgctgacgctaaggccgcaacc

SEQ ID NO: 255857 - DNA, 50 bp, Artificial
  Synthetic oligonucleotide
gccaatactcaagtacctgaagtgctaaagcaatcatcaggtaatgtgct

SEQ ID NO: 255858 - DNA, 50 bp, Artificial
  Synthetic oligonucleotide
cgttcgggtcatcaccatacggtggcgagctccaacagtcgccccaacga

SEQ ID NO: 255859 - DNA, 50 bp, Artificial
  Synthetic oligonucleotide
acaccgcagcgcctaaagtaccccctgcctctaccccagcaaatgcatcc

SEQ ID NO: 255860 - DNA, 50 bp, Artificial
  Synthetic oligonucleotide
ctcacgtaatcaacgcgattggtcaccgtcagttcagggagttcatgtga

SEQ ID NO: 255861 - DNA, 50 bp, Artificial
  Synthetic oligonucleotide
aacggtgtcgcaccgagttttggcatcgaaaggccgccagttgccacaac

SEQ ID NO: 255862 - DNA, 50 bp, Artificial
  Synthetic oligonucleotide
cgccgcaccaagggacactaaagcgttggtcctcaaaccggccatgcgtt

SEQ ID NO: 255863 - DNA, 50 bp, Artificial
  Synthetic oligonucleotide
aacggtcttgcagcgtttgagcgacctcagtgccacgcaacaggcgccca

SEQ ID NO: 255864 - DNA, 50 bp, Artificial
  Synthetic oligonucleotide
gaagcctgctagtagatgcggccaccctgatgctaacggggatggcggtc

SEQ ID NO: 255865 - DNA, 50 bp, Artificial
  Synthetic oligonucleotide
aagcgacaccgcaagggaatctagtgctgtcgtcgcgcctttcagaccct

SEQ ID NO: 255866 - DNA, 59 bp, Artificial
  Synthetic oligonucleotide
gtaatacctgatggctctaaaattcttttctgcggggatatgcgagactaaccgatcga

SEQ ID NO: 255867 - DNA, 50 bp, Artificial
  Synthetic oligonucleotide
cgccctccaagtggagccacagtaatcccaaatgcgtcaacaggcacccc

SEQ ID NO: 255868 - DNA, 50 bp, Artificial
  Synthetic oligonucleotide
cgcccgtggtgtactcacgttcgcccgtggcctgcaacaaaagctgtcta

SEQ ID NO: 255869 - DNA, 50 bp, Artificial
  Synthetic oligonucleotide
aagcgcaagattcggaacgccaaagcacccagctctggctcgctacgcat

SEQ ID NO: 255870 - DNA, 50 bp, Artificial
  Synthetic oligonucleotide
aacgcctagactggcgagcaccaatcgcgcggttcacatagggcccgatg

SEQ ID NO: 255871 - DNA, 50 bp, Artificial
  Synthetic oligonucleotide
aagcggttgttcgtgtgcgcttcccagttggccgcttcgacattgtcggc

SEQ ID NO: 255872 - DNA, 50 bp, Artificial
  Synthetic oligonucleotide
aacgccgtggttgggttgtctacgccttgaactgtgcgtgggtggctctt

SEQ ID NO: 255873 - DNA, 50 bp, Artificial
  Synthetic oligonucleotide
cgccatacggccgcttcacgcgtggtttcaagatcggtccccatgttcgg

SEQ ID NO: 255874 - DNA, 50 bp, Artificial
  Synthetic oligonucleotide
cgcttacactcacctcacgctgatatttgtctcgttcgtaaaactgcaat

SEQ ID NO: 255875 - DNA, 50 bp, Artificial
  Synthetic oligonucleotide
aagcgttcacggttccgacctgtaccacctgcgctcacgctagcgtcgtt

SEQ ID NO: 255876 - DNA, 50 bp, Artificial
  Synthetic oligonucleotide
cgccaacgttcccgcgcccgctaagcagtcgaggaaaatttgtccgcgcg

SEQ ID NO: 255877 - DNA, 60 bp, Artificial
  Synthetic oligonucleotide
gtaagctcgaatataagtgcttacgggagaagggtatcggtcattcgcttgtgaatatgc

SEQ ID NO: 255878 - DNA, 50 bp, Artificial
  Synthetic oligonucleotide
cgccaacgtgcacctgtccttgctcgcaccatgcgttggataagcagtgc

SEQ ID NO: 255879 - DNA, 50 bp, Artificial
  Synthetic oligonucleotide
aacgaaacatgctacgtgtgtctatcgaaagatagaacacgtagcaattc

SEQ ID NO: 255880 - DNA, 50 bp, Artificial
  Synthetic oligonucleotide
gagccgcctagatttcgatagcgctgagttggtgtgtaatcaggtcaaca

SEQ ID NO: 255881 - DNA, 50 bp, Artificial
  Synthetic oligonucleotide
cgcagtgtgaatctccgttgccacgcgcttaccagtgggctgacggctct

SEQ ID NO: 255882 - DNA, 50 bp, Artificial
  Synthetic oligonucleotide
cgcttgttgcaaggtctaggggcgggtagtgcctcggttcttgggcgaag

SEQ ID NO: 255883 - DNA, 50 bp, Artificial
  Synthetic oligonucleotide
cggaaccctgtggcgcaatcgctctcgctgcagcactcgctgatgttgaa

SEQ ID NO: 255884 - DNA, 50 bp, Artificial
  Synthetic oligonucleotide
aaggtcgcggtctcgcaaatcgttgagcaccctgccctagatgcaacgcg

SEQ ID NO: 255885 - DNA, 50 bp, Artificial
  Synthetic oligonucleotide
cgcagctcaccttgccgccaactttcgcgcttccaccacttaaggtgccc

SEQ ID NO: 255886 - DNA, 50 bp, Artificial
  Synthetic oligonucleotide
aagtacgcgcgtttcattgccgtctggaccatggggcttgcttacggtgg

SEQ ID NO: 255887 - DNA, 50 bp, Artificial
  Synthetic oligonucleotide
ttaagcgcgcaccgcaagtttccatttggctcggccgacgcaaaaatccg

SEQ ID NO: 255888 - DNA, 56 bp, Artificial
  Synthetic oligonucleotide
agatattagcgccctaccccagaacggcagtcgccaccccttaacactagtagcag

SEQ ID NO: 255889 - DNA, 60 bp, Artificial
  Synthetic oligonucleotide
ggcacgtctgcataaagtccaattgagcaaacatacgatcatcattagagaagatgagta

SEQ ID NO: 255890 - DNA, 50 bp, Artificial
  Synthetic oligonucleotide
aactgtttgccccacccggtggctcggtagcgccggcagtgcgtttgtcg

SEQ ID NO: 255891 - DNA, 50 bp, Artificial
  Synthetic oligonucleotide
ttaagctgggttggtgccgctgtgtcgatggagactccgttcgtacccga

SEQ ID NO: 255892 - DNA, 50 bp, Artificial
  Synthetic oligonucleotide
aactttccattgtcggcgccttttgcgctgaccacttctcccgtgcgcat

SEQ ID NO: 255893 - DNA, 50 bp, Artificial
  Synthetic oligonucleotide
cgcggcttgtacccgcaggcgttcctaaacggatgcccgatgtaatcata

SEQ ID NO: 255894 - DNA, 50 bp, Artificial
  Synthetic oligonucleotide
cgcgcgcccacatgtgaaacacgttcgatcaaccccaagccttccacacg

SEQ ID NO: 255895 - DNA, 50 bp, Artificial
  Synthetic oligonucleotide
aagacatggcgggttctcacacagtgtcaacgctgaccaccgcagcccca

SEQ ID NO: 255896 - DNA, 50 bp, Artificial
  Synthetic oligonucleotide
cgcgcagagcccgatcgcattgcaccttatgccgacagctttgatgggat

SEQ ID NO: 255897 - DNA, 50 bp, Artificial
  Synthetic oligonucleotide
aactgtgaacactgctccccagcgagtgcagtggtgtaacggcgcgacat

SEQ ID NO: 255898 - DNA, 50 bp, Artificial
  Synthetic oligonucleotide
cgcgaagcttagcgagggcgcagagccttccactaacaaacgcgctagct

SEQ ID NO: 255899 - DNA, 50 bp, Artificial
  Synthetic oligonucleotide
aagagtcgaatgcttttaccgatgtaccatcaagacgcacgacttcaagg

SEQ ID NO: 255900 - DNA, 57 bp, Artificial
  Synthetic oligonucleotide
atgaggagtttcctttctgtttgagtatcacttttcggagccgcttagctgtccggc

SEQ ID NO: 255901 - DNA, 50 bp, Artificial
  Synthetic oligonucleotide
cgccttgctcatgagttgggactggcagaagacccaatccataacctgaa

SEQ ID NO: 255902 - DNA, 50 bp, Artificial
  Synthetic oligonucleotide
cgcctgcttttgcccccactcggccatgcgtttttgtacgttgcgatgcg

SEQ ID NO: 255903 - DNA, 50 bp, Artificial
  Synthetic oligonucleotide
aactgccgtcctatggctcgcatcgttgtgcacttttcccttgtgggccg

SEQ ID NO: 255904 - DNA, 50 bp, Artificial
  Synthetic oligonucleotide
tgtgtatatcttcccgattggcattggtcgcgtgggacgcgcaaccccga

SEQ ID NO: 255905 - DNA, 50 bp, Artificial
  Synthetic oligonucleotide
aactcgccgagagcgatacttccacttcactcatgccacacgccgctccc

SEQ ID NO: 255906 - DNA, 50 bp, Artificial
  Synthetic oligonucleotide
cgcctatcaaaagccggaccagctttgcccagtctccctgccggatgcgt

SEQ ID NO: 255907 - DNA, 50 bp, Artificial
  Synthetic oligonucleotide
cgctaccgccctcgggtacgcccccgcatgcgtagtaacaaaatgtaagc

SEQ ID NO: 255908 - DNA, 50 bp, Artificial
  Synthetic oligonucleotide
aagcaacgcaatggcgaggaacggtgagaagtggggcggagcagcccgta

SEQ ID NO: 255909 - DNA, 50 bp, Artificial
  Synthetic oligonucleotide
aacgtggttgcttgcatcggctttccttgccgcaaagcgggttgatgcta

SEQ ID NO: 255910 - DNA, 50 bp, Artificial
  Synthetic oligonucleotide
gacgcgacgcgactgaccgatatcagccttgtccctccggcgcattacag

SEQ ID NO: 255911 - DNA, 53 bp, Artificial
  Synthetic oligonucleotide
gtaaaggtcttcgggaaaatgacgtaatgtgtcgcccaactaaagcgttcagg

SEQ ID NO: 255912 - DNA, 50 bp, Artificial
  Synthetic oligonucleotide
aagcagagcggttccgtagcagcctgcattgatgccgttagccgcgcctt

SEQ ID NO: 255913 - DNA, 50 bp, Artificial
  Synthetic oligonucleotide
aagccaatgcgaccgagtagcagccaccccattgcgtcgtctggggtttg

SEQ ID NO: 255914 - DNA, 50 bp, Artificial
  Synthetic oligonucleotide
aagccacgcggttcgcagtctagctcatgcatcgctttctcgctgctgta

SEQ ID NO: 255915 - DNA, 50 bp, Artificial
  Synthetic oligonucleotide
cgccgcgccagacgtaataaccgctttttagcgtgcttggcccgcaatgc

SEQ ID NO: 255916 - DNA, 50 bp, Artificial
  Synthetic oligonucleotide
gaatcgccataggcactagaatagtgctggttcgtgtaaacgaacccttc

SEQ ID NO: 255917 - DNA, 50 bp, Artificial
  Synthetic oligonucleotide
aacacggcagtcattggggcgggataatgcggacctgctttttgggcgac

SEQ ID NO: 255918 - DNA, 50 bp, Artificial
  Synthetic oligonucleotide
aacaacatggcgtttgtgtgccttcagacatgccgacgcctgagcacgcc

SEQ ID NO: 255919 - DNA, 50 bp, Artificial
  Synthetic oligonucleotide
cgagtttgtttcgcggcctttggttgagcgtttgcctgctggtgcgacga

SEQ ID NO: 255920 - DNA, 50 bp, Artificial
  Synthetic oligonucleotide
aaattgcagtgctaagtaaagcgattgcccaaagttgtgcggttaatcca

SEQ ID NO: 255921 - DNA, 50 bp, Artificial
  Synthetic oligonucleotide
cgagtaaggcaatatcgcgcttcactccggtcactaactgcgtcaattta

SEQ ID NO: 255922 - DNA, 52 bp, Artificial
  Synthetic oligonucleotide
ggtttgggagggttttggagcgtagagctgtcaaccagaaaggcggggggtc

SEQ ID NO: 255923 - DNA, 50 bp, Artificial
  Synthetic oligonucleotide
aaattcgctgtcccacgccaaccacgtttagtgcctgcagcacgctctcg

SEQ ID NO: 255924 - DNA, 50 bp, Artificial
  Synthetic oligonucleotide
cttgccttgaaatacccacagcgtgtgtttctatactcgtttcggaagag

SEQ ID NO: 255925 - DNA, 50 bp, Artificial
  Synthetic oligonucleotide
cgagccactgactctcgggtgaagcctgcctccgaggagggtgtctgagc

SEQ ID NO: 255926 - DNA, 50 bp, Artificial
  Synthetic oligonucleotide
aatcgcgaatcgctggcaagccgggcagtaactcaacgcccgaagtacca

SEQ ID NO: 255927 - DNA, 50 bp, Artificial
  Synthetic oligonucleotide
aaatcgcacggggcgcacgccaaccgattaccgcgcctcaatttagcagg

SEQ ID NO: 255928 - DNA, 50 bp, Artificial
  Synthetic oligonucleotide
tggactgcgctcgacccgccaagcgagcaccagtacttggttaagtgggt

SEQ ID NO: 255929 - DNA, 50 bp, Artificial
  Synthetic oligonucleotide
gatgcgattgtctcagttgttgacgtacgacagaggcgggtttggtttga

SEQ ID NO: 255930 - DNA, 50 bp, Artificial
  Synthetic oligonucleotide
cttgccatcgccccaagggctgattttgcatccgcgaccaccgcagtagc

SEQ ID NO: 255931 - DNA, 50 bp, Artificial
  Synthetic oligonucleotide
cgagaagttcacaggcaaagtgccgccagtgacgtcgttcggtggaccga

SEQ ID NO: 255932 - DNA, 50 bp, Artificial
  Synthetic oligonucleotide
cgactatgggtggcctaatggcggctggctgtgtttacgttgcgatgggc

SEQ ID NO: 255933 - DNA, 56 bp, Artificial
  Synthetic oligonucleotide
ccgtctacggtgaaatttcatccagtcgcggggttgcacgaacgaaccgtatgagc

SEQ ID NO: 255934 - DNA, 50 bp, Artificial
  Synthetic oligonucleotide
aatgcacgctttgtctgtgcgattggcggcacacaccgtagcggtgacat

SEQ ID NO: 255935 - DNA, 50 bp, Artificial
  Synthetic oligonucleotide
cgacggctcctttcgttgcacaatagaatgcggcgccccaatcaccacct

SEQ ID NO: 255936 - DNA, 50 bp, Artificial
  Synthetic oligonucleotide
cgggccactttctggtagcaactgtaccgtcgcacgagcaccggaaggta

SEQ ID NO: 255937 - DNA, 50 bp, Artificial
  Synthetic oligonucleotide
aatgcaggccgcgtggcactcgctcaatgtcgctgtattttctgcgacgg

SEQ ID NO: 255938 - DNA, 50 bp, Artificial
  Synthetic oligonucleotide
aatgccgcagccactccccatcacgaacccgcttcgctgtgcatcaaacg

SEQ ID NO: 255939 - DNA, 50 bp, Artificial
  Synthetic oligonucleotide
tgctagccattcgcgaattgcattcacgcggctttgggtatcgttgtgca

SEQ ID NO: 255940 - DNA, 50 bp, Artificial
  Synthetic oligonucleotide
aatgcgcggcctctgtggtatgcgtgcgggcttgatccctcatcagctct

SEQ ID NO: 255941 - DNA, 50 bp, Artificial
  Synthetic oligonucleotide
cgggctggatgtcgaatgggctgcctaagtcgtggattaccgcacctcga

SEQ ID NO: 255942 - DNA, 50 bp, Artificial
  Synthetic oligonucleotide
aatgcgttcgccccatattgatcccggagcgccctgatcttgtctgcggc

SEQ ID NO: 255943 - DNA, 50 bp, Artificial
  Synthetic oligonucleotide
cttatgtcttttctaccctaggaaatcaagatgttaatgaacgcgaaccc

SEQ ID NO: 255944 - DNA, 60 bp, Artificial
  Synthetic oligonucleotide
gataacccaccttgccatggtagttcgcgatagctcaatacccgactgagtaaacagcga

SEQ ID NO: 255945 - DNA, 50 bp, Artificial
  Synthetic oligonucleotide
tggggcaaccgagggttattggtggatgaaaacagcctcaaccagtgtat

SEQ ID NO: 255946 - DNA, 50 bp, Artificial
  Synthetic oligonucleotide
ttcagccaaccacgcgcttgcagatcctcctgcagtaccgaccactcgat

SEQ ID NO: 255947 - DNA, 50 bp, Artificial
  Synthetic oligonucleotide
cggcactgagcaaggcaccatgcaccgttctattccgtctcgaggcgcag

SEQ ID NO: 255948 - DNA, 50 bp, Artificial
  Synthetic oligonucleotide
ttcaggtcggtaacacggtactccgcaccgcccgtcagcaagtgtgaacc

SEQ ID NO: 255949 - DNA, 50 bp, Artificial
  Synthetic oligonucleotide
aagttgatggcacttattaacgataccaatgcgtaagtcacacctaatcc

SEQ ID NO: 255950 - DNA, 50 bp, Artificial
  Synthetic oligonucleotide
aaccctgaagtacgcatccgttgcgtcaatcggcggatggatgaggcgct

SEQ ID NO: 255951 - DNA, 50 bp, Artificial
  Synthetic oligonucleotide
gaaaaattactcagcgcctagccgacaagcggagagaacgccaagttttc

SEQ ID NO: 255952 - DNA, 50 bp, Artificial
  Synthetic oligonucleotide
aagtttgcacgcccggtattcgcaccacagtcttgtggcctaaccagcgg

SEQ ID NO: 255953 - DNA, 50 bp, Artificial
  Synthetic oligonucleotide
aacccgttggattacaaagccctcggtaagcatgttgctagtagtatggg

SEQ ID NO: 255954 - DNA, 50 bp, Artificial
  Synthetic oligonucleotide
gagcttaaacgcggctgcgcgctaaaattcgcactgagaatcgagccatc

SEQ ID NO: 255955 - DNA, 54 bp, Artificial
  Synthetic oligonucleotide
atgcgcttctaatcaataaaccctatcttaagttcgtcaaaaacttgttagtaa

SEQ ID NO: 255956 - DNA, 50 bp, Artificial
  Synthetic oligonucleotide
cgcacaaagcgcctcgggcataaaagcgccgattgccaagtttgcaccta

SEQ ID NO: 255957 - DNA, 50 bp, Artificial
  Synthetic oligonucleotide
ttccccgttgcaatgacgtttgtgccagacctcgcttatgccgctgatat

SEQ ID NO: 255958 - DNA, 50 bp, Artificial
  Synthetic oligonucleotide
cttttagcctccccgaattagagcggctagtactgcgcacctctttgcga

SEQ ID NO: 255959 - DNA, 50 bp, Artificial
  Synthetic oligonucleotide
ctttggtggcgcattagcgactgagttggcgatgggcccagcacaagcgg

SEQ ID NO: 255960 - DNA, 50 bp, Artificial
  Synthetic oligonucleotide
aataacgaacctgcgccctagagtgtcgcggcctaagccctgcatcgcga

SEQ ID NO: 255961 - DNA, 50 bp, Artificial
  Synthetic oligonucleotide
aaccccgtaaatgcgcgggagccaagcggtcgatttgcacgttaagcgtc

SEQ ID NO: 255962 - DNA, 50 bp, Artificial
  Synthetic oligonucleotide
aaccccggtgcctctctcgacatgcgctcccgcactgtcattctacgcta

SEQ ID NO: 255963 - DNA, 50 bp, Artificial
  Synthetic oligonucleotide
aaccagcacaagtttccgggagtctccgtaaacgcggcccttaagcgcca

SEQ ID NO: 255964 - DNA, 50 bp, Artificial
  Synthetic oligonucleotide
aaccaagagatttggagccgggcgggagtggcctacccaactacatggga

SEQ ID NO: 255965 - DNA, 50 bp, Artificial
  Synthetic oligonucleotide
cggcggaggctttacgtgataaggcggcacaatcgctcagacgcggagag

SEQ ID NO: 255966 - DNA, 60 bp, Artificial
  Synthetic oligonucleotide
atggagtcataccgagcgcatcgtgacacaatgataggatctacagtggtagctgttata

SEQ ID NO: 255967 - DNA, 50 bp, Artificial
  Synthetic oligonucleotide
ttcgcattcgctagggtgcagtcggtaatctcactcccgcccagcaacct

SEQ ID NO: 255968 - DNA, 50 bp, Artificial
  Synthetic oligonucleotide
cggcgtggtgaaatgtttgcttgcgcgtgggtactcgtttaccggggcgg

SEQ ID NO: 255969 - DNA, 50 bp, Artificial
  Synthetic oligonucleotide
cgattcgttacatagcgtactttgtaatcgggctctaactcagcccactt

SEQ ID NO: 255970 - DNA, 50 bp, Artificial
  Synthetic oligonucleotide
aacagctgtccaatctcgggggcagcgctttaacggcgcgctataacggc

SEQ ID NO: 255971 - DNA, 50 bp, Artificial
  Synthetic oligonucleotide
cgatggaagcgtctacctcacggccgccagacattaacgcggttaccgct

SEQ ID NO: 255972 - DNA, 50 bp, Artificial
  Synthetic oligonucleotide
cggcgttgcatcccacgtctgctttgtatcgcaccaagcgcatcccactg

SEQ ID NO: 255973 - DNA, 50 bp, Artificial
  Synthetic oligonucleotide
agccttagaccatgcacgctcagccattgcaagcagacgtgggaacgcca

SEQ ID NO: 255974 - DNA, 50 bp, Artificial
  Synthetic oligonucleotide
agcctatcgccccaaggagcacccgatgttatcaatcagtcccctatcac

SEQ ID NO: 255975 - DNA, 50 bp, Artificial
  Synthetic oligonucleotide
ggtgagctaggcgaccctgcggaagaaggctacatgcctcgcggtattcg

SEQ ID NO: 255976 - DNA, 50 bp, Artificial
  Synthetic oligonucleotide
agccgcctcagcggagcgcaccaaaatgcaaaccgtgggcattgctacgg

SEQ ID NO: 255977 - DNA, 53 bp, Artificial
  Synthetic oligonucleotide
ggttcagaagcttttggaggttggccgtaaaaatccaatccctgataactttg

SEQ ID NO: 255978 - DNA, 50 bp, Artificial
  Synthetic oligonucleotide
agccgacactttacgcccggcgctcgccaaatgccgagtcaggctatcga

SEQ ID NO: 255979 - DNA, 50 bp, Artificial
  Synthetic oligonucleotide
caaacggtgtgtcggcttcttctgtgatggttgcacgcggcacagacgcg

SEQ ID NO: 255980 - DNA, 50 bp, Artificial
  Synthetic oligonucleotide
agcccggtcacagtcaactgtgccactgcggttgctatcgcggctcctgt

SEQ ID NO: 255981 - DNA, 50 bp, Artificial
  Synthetic oligonucleotide
agcccggaagaatcacaaggtcggcgtgttgaatcggctccccttgccct

SEQ ID NO: 255982 - DNA, 50 bp, Artificial
  Synthetic oligonucleotide
agcccctcgatacaggagcggcagaggtcgcccgtttatcggattggttg

SEQ ID NO: 255983 - DNA, 50 bp, Artificial
  Synthetic oligonucleotide
caacacccaatccattgcccccaacgcggggacgttataccttgcgccgt

SEQ ID NO: 255984 - DNA, 50 bp, Artificial
  Synthetic oligonucleotide
agccagaaagccgagggcaggtcgctataacgtctgcggatccactcagc

SEQ ID NO: 255985 - DNA, 50 bp, Artificial
  Synthetic oligonucleotide
agccactcaaaccacgggactatccaagctgcaactagcgcccgcactcc

SEQ ID NO: 255986 - DNA, 50 bp, Artificial
  Synthetic oligonucleotide
agccacagggagtgtgtttttcctacccgcctccccttattgggggcgac

SEQ ID NO: 255987 - DNA, 50 bp, Artificial
  Synthetic oligonucleotide
caacgcagcagtctcacgtggccgctcaacaaacgcgtgctagcagtgat

SEQ ID NO: 255988 - DNA, 58 bp, Artificial
  Synthetic oligonucleotide
gagcctcccgtaattgcaacaaaacgtatatccattgcaacttgtggggtttgcgtca

SEQ ID NO: 255989 - DNA, 50 bp, Artificial
  Synthetic oligonucleotide
agcatgtcagtgtttttgctcgcgaacgcatcgcccctatcgcagcacga

SEQ ID NO: 255990 - DNA, 50 bp, Artificial
  Synthetic oligonucleotide
caacggctcttcggtggggcactaggcagtcaccagctaaccctagctgg

SEQ ID NO: 255991 - DNA, 50 bp, Artificial
  Synthetic oligonucleotide
agcatcgacactcagagcggggcacagccgctcctttggcttgatcatcc

SEQ ID NO: 255992 - DNA, 50 bp, Artificial
  Synthetic oligonucleotide
agctctgacccacaagcgcgcaacgatggacactctggttgcattgggta

SEQ ID NO: 255993 - DNA, 50 bp, Artificial
  Synthetic oligonucleotide
agctcgcactatcgcggcggttgcagacttacctatgggcgcagcggttc

SEQ ID NO: 255994 - DNA, 50 bp, Artificial
  Synthetic oligonucleotide
agctagtggcacgtgaacctgacagtgcgcgttggtggctaggcttgggt

SEQ ID NO: 255995 - DNA, 50 bp, Artificial
  Synthetic oligonucleotide
agcgtcgttgtttgcgatcccgtccatcgaaaaagaccaacgcccggggg

SEQ ID NO: 255996 - DNA, 50 bp, Artificial
  Synthetic oligonucleotide
atgtgagcgccgaccacagtaagccaggcgtgccaaaagtgggggccggt

SEQ ID NO: 255997 - DNA, 50 bp, Artificial
  Synthetic oligonucleotide
atgtgcgagagcttaaacagtggcgcagaaacggaatgttgtgatctgta

SEQ ID NO: 255998 - DNA, 50 bp, Artificial
  Synthetic oligonucleotide
agcggccctgttagaacacggcctcatttatggcgggacgctgatggcgg

SEQ ID NO: 255999 - DNA, 59 bp, Artificial
  Synthetic oligonucleotide
gtttagtgttacctccacgcgcacacaatcactggttatcgttccatcgttactgaata

SEQ ID NO: 256000 - DNA, 60 bp, Artificial
  Synthetic oligonucleotide
gtagtccgtgcatctcaagaagctctattgagattgagtaatcgcccgcagggttcacgc

SEQ ID NO: 256001 - DNA, 50 bp, Artificial
  Synthetic oligonucleotide
gttaacggggctagaccccagtgttgcactctttggcgcaggggttggca

SEQ ID NO: 256002 - DNA, 50 bp, Artificial
  Synthetic oligonucleotide
ggtgggagcattaggcaggcagagcgagattgtccgcgctgattctccga

SEQ ID NO: 256003 - DNA, 50 bp, Artificial
  Synthetic oligonucleotide
attcgcaacgcccctcaagccggggagcgcatattgctgcgtccaacgcg

SEQ ID NO: 256004 - DNA, 50 bp, Artificial
  Synthetic oligonucleotide
agcgagtgcagtggtgtaacggcgcgacatgcatacctcatcgacgcagc

SEQ ID NO: 256005 - DNA, 50 bp, Artificial
  Synthetic oligonucleotide
gttaccagcggtgaatgtgggcctgtacagagctagctcgccacttacta

SEQ ID NO: 256006 - DNA, 50 bp, Artificial
  Synthetic oligonucleotide
agcgagcggcgtatgctgaacgtccccaatgcgctcaacgacccagaatg

SEQ ID NO: 256007 - DNA, 50 bp, Artificial
  Synthetic oligonucleotide
agcgacgttcacggctggttccgctgaagacaccgcctcggcgtattgag

SEQ ID NO: 256008 - DNA, 50 bp, Artificial
  Synthetic oligonucleotide
attggtacgacaacgcagcagtctcacgtggccgctcaacaaacgcgtgc

SEQ ID NO: 256009 - DNA, 50 bp, Artificial
  Synthetic oligonucleotide
agcgacctttttctgcgcagccactgactctattcccccgtcagtcgcct

SEQ ID NO: 256010 - DNA, 50 bp, Artificial
  Synthetic oligonucleotide
agcgaaaagaccagaggccccatcggtgagcgccattggattgctacccc

SEQ ID NO: 256011 - DNA, 56 bp, Artificial
  Synthetic oligonucleotide
ataggcgcatttatagcagttgggaaaagttcccaactaacgcaaatgtatattta

SEQ ID NO: 256012 - DNA, 50 bp, Artificial
  Synthetic oligonucleotide
agaggcgtctggtgaggcgagctatttggcgccctacgacttgtccgttg

SEQ ID NO: 256013 - DNA, 50 bp, Artificial
  Synthetic oligonucleotide
agaggcggaatgtgggaccagtttctcccccagactgaacccgtcagcca

SEQ ID NO: 256014 - DNA, 50 bp, Artificial
  Synthetic oligonucleotide
agagcgggtcgcctgagctggtgcggaaacacgtcgactgccgacttcaa

SEQ ID NO: 256015 - DNA, 50 bp, Artificial
  Synthetic oligonucleotide
agagcgagcaacccatatactcaccgccagtgatcctgcgccgcttacga

SEQ ID NO: 256016 - DNA, 50 bp, Artificial
  Synthetic oligonucleotide
agagcctatctgggatggtatctggcctgcgtgcgttggcacactgtcgg

SEQ ID NO: 256017 - DNA, 50 bp, Artificial
  Synthetic oligonucleotide
taaaatggcgttgtcgaccccttgattaactcgcacgacaccactcattg

SEQ ID NO: 256018 - DNA, 50 bp, Artificial
  Synthetic oligonucleotide
cacacaaaccgaagtgcaatgcgccgtcgcagtggtttttctgcggcacc

SEQ ID NO: 256019 - DNA, 50 bp, Artificial
  Synthetic oligonucleotide
agagaccacacgtatccatgtgagataccgttaatgggactctaagcatg

SEQ ID NO: 256020 - DNA, 50 bp, Artificial
  Synthetic oligonucleotide
taaatcagaaatcgagcacctactgctacttaaatgggtgcaacccatcg

SEQ ID NO: 256021 - DNA, 50 bp, Artificial
  Synthetic oligonucleotide
agacggcctccccatccgtagcgagcaccttctggaagccccgacatcca

SEQ ID NO: 256022 - DNA, 60 bp, Artificial
  Synthetic oligonucleotide
atatactgcggggctttacacaatccatccatctagcttcgctatcaatcaatatgggtc

SEQ ID NO: 256023 - DNA, 50 bp, Artificial
  Synthetic oligonucleotide
caccacgctccggtgtacagcgctgacgaggtttgtgcccagtagagcat

SEQ ID NO: 256024 - DNA, 50 bp, Artificial
  Synthetic oligonucleotide
agacggccgaacagtggtcctcctggacacaagaggccctgcaccctgac

SEQ ID NO: 256025 - DNA, 50 bp, Artificial
  Synthetic oligonucleotide
taaccaccaatgcgcagttcgcgacccaaccaagacggcggtaccatagc

SEQ ID NO: 256026 - DNA, 50 bp, Artificial
  Synthetic oligonucleotide
agaccgcatttctatccgtgagggttgccgccccaccagcaaaacgcaga

SEQ ID NO: 256027 - DNA, 50 bp, Artificial
  Synthetic oligonucleotide
caccacggtgagccgcaagcgccactagcagtgatcggcgatacagacaa

SEQ ID NO: 256028 - DNA, 50 bp, Artificial
  Synthetic oligonucleotide
cacccagtggcaactctgccgcgttcagtgccgtacgtgcaatcaggtcg

SEQ ID NO: 256029 - DNA, 50 bp, Artificial
  Synthetic oligonucleotide
taacgcaagacgtcagtcaggcgctttcgaccctggcaaaagcgcaaaac

SEQ ID NO: 256030 - DNA, 50 bp, Artificial
  Synthetic oligonucleotide
agcatcaccccctgaacgtcagacttgtgggcaatgtccggagagcggag

SEQ ID NO: 256031 - DNA, 50 bp, Artificial
  Synthetic oligonucleotide
caacgtggcgatcatgggagcaggcggtattggggtcgatgttgcgagca

SEQ ID NO: 256032 - DNA, 50 bp, Artificial
  Synthetic oligonucleotide
agcataaatggagcgctggggatcgcaagcggaccatatgaccggcccac

SEQ ID NO: 256033 - DNA, 60 bp, Artificial
  Synthetic oligonucleotide
atatctgaaaagcggcactgtgagcttctgagggggcgaaagcatggttttcataggcta

SEQ ID NO: 256034 - DNA, 50 bp, Artificial
  Synthetic oligonucleotide
agcagatcaccaccggacctcgtatttggccagccggggctttcatctct

SEQ ID NO: 256035 - DNA, 50 bp, Artificial
  Synthetic oligonucleotide
agcagaattgcacggtctacttgttggcatgctaagcggcgggctagcga

SEQ ID NO: 256036 - DNA, 50 bp, Artificial
  Synthetic oligonucleotide
agcactttcgtggaccttgtcggcctttgctggcgttgggcgcgattctc

SEQ ID NO: 256037 - DNA, 50 bp, Artificial
  Synthetic oligonucleotide
agcacgtatgttggccggcgttgttgagccaagttcgggagagatccgcg

SEQ ID NO: 256038 - DNA, 50 bp, Artificial
  Synthetic oligonucleotide
gggttcttaatgacaagggcgcgaagcgtatatttacccttgtcattaag

SEQ ID NO: 256039 - DNA, 50 bp, Artificial
  Synthetic oligonucleotide
agcaatggcggtgggaactgggatacacagttgcccctgactgggcgagt

SEQ ID NO: 256040 - DNA, 50 bp, Artificial
  Synthetic oligonucleotide
agcaaggtcgcacttaccataccgccaagtacgcccgtgcctaccgcgtt

SEQ ID NO: 256041 - DNA, 50 bp, Artificial
  Synthetic oligonucleotide
agcaagattcaccgcaaggggagaacgcgcacggtatgccaacggagagg

SEQ ID NO: 256042 - DNA, 50 bp, Artificial
  Synthetic oligonucleotide
agcaacatcccgcacggtcgcccaacaaggcacaatggcggggtatattg

SEQ ID NO: 256043 - DNA, 50 bp, Artificial
  Synthetic oligonucleotide
agatgtggtgaccaaccgcgtgaagtgttgctgcacggagtgcgcagtca

SEQ ID NO: 256044 - DNA, 57 bp, Artificial
  Synthetic oligonucleotide
atcaccaccctggtaatgacgtaggcgagaagccgctattggcggccgcttaaaata

SEQ ID NO: 256045 - DNA, 50 bp, Artificial
  Synthetic oligonucleotide
agatcaggggagcaccgacgacgtatccccgcaagcagaaaccagtgcca

SEQ ID NO: 256046 - DNA, 50 bp, Artificial
  Synthetic oligonucleotide
gggtggtatgggtcttgacggtcgtacgctagtaacgcgttcaaacttcc

SEQ ID NO: 256047 - DNA, 50 bp, Artificial
  Synthetic oligonucleotide
agatagattacgtcgtcgacgcctcgcaccatgtggtgacccccggctta

SEQ ID NO: 256048 - DNA, 50 bp, Artificial
  Synthetic oligonucleotide
agagtcacactagccccgctgactccccatggtgcgctatgcataggcga

SEQ ID NO: 256049 - DNA, 50 bp, Artificial
  Synthetic oligonucleotide
agaggttggtcgcttgttgcaaggtctaggggcgggtagtgcctcggttc

SEQ ID NO: 256050 - DNA, 50 bp, Artificial
  Synthetic oligonucleotide
agtcagtggtgggcgattgacggccggagagccagtatgtttggcgtctc

SEQ ID NO: 256051 - DNA, 50 bp, Artificial
  Synthetic oligonucleotide
agtcaggttcgcacacacaaatcgtagtgcaatgcgccgtcgcagtggtt

SEQ ID NO: 256052 - DNA, 50 bp, Artificial
  Synthetic oligonucleotide
agtcaggctctgggtacacgggggccggctcactccctcttgcggtagag

SEQ ID NO: 256053 - DNA, 50 bp, Artificial
  Synthetic oligonucleotide
atcgcgggttctgtgacttcgccacttgcgcaatgtgacacctcctccgg

SEQ ID NO: 256054 - DNA, 50 bp, Artificial
  Synthetic oligonucleotide
atcggcgaatgcacccgacggtacttcagcaagcacaatggtggccgccc

SEQ ID NO: 256055 - DNA, 53 bp, Artificial
  Synthetic oligonucleotide
gtaggaaaatttgaggtacgaaaaattccgtactagagtgggctggctaagga

SEQ ID NO: 256056 - DNA, 50 bp, Artificial
  Synthetic oligonucleotide
atcgggcccaagggtaggttttgcgctaggtggcaacttaggtgcgacct

SEQ ID NO: 256057 - DNA, 50 bp, Artificial
  Synthetic oligonucleotide
atcgggtcgtgagcgttcggtggtcgttgcagcaccagctgatgcgtcac

SEQ ID NO: 256058 - DNA, 50 bp, Artificial
  Synthetic oligonucleotide
atctccgctcaagaccccacagcccaagcataccaaagataggccggcgc

SEQ ID NO: 256059 - DNA, 50 bp, Artificial
  Synthetic oligonucleotide
atgaacaccgttcacactgctccactctccgggggtacccatgcgagcac

SEQ ID NO: 256060 - DNA, 50 bp, Artificial
  Synthetic oligonucleotide
atgagactggccgtgcggttccgggttcactcatctattggggctaccga

SEQ ID NO: 256061 - DNA, 50 bp, Artificial
  Synthetic oligonucleotide
aggtgagcgcacactacaccttggggaccaactggcgttctagcgcgaat

SEQ ID NO: 256062 - DNA, 50 bp, Artificial
  Synthetic oligonucleotide
aggtactcttccagtgtcggaatgcggcctaagatggcacccacggccga

SEQ ID NO: 256063 - DNA, 50 bp, Artificial
  Synthetic oligonucleotide
atgatagggattggtgtcgcgactgcagccgctgggaccgtggttggtgt

SEQ ID NO: 256064 - DNA, 50 bp, Artificial
  Synthetic oligonucleotide
atgcacagcaacaccgtgcgagagggcctgcttgactgtctcacaggtcc

SEQ ID NO: 256065 - DNA, 50 bp, Artificial
  Synthetic oligonucleotide
atgccatgcgcgttttgaccgaccctgccgatactggtgcggtcaccatc

SEQ ID NO: 256066 - DNA, 56 bp, Artificial
  Synthetic oligonucleotide
gagctattgttcaataacccatggaaaccacccttaagtgcgtattatatccggtg

SEQ ID NO: 256067 - DNA, 50 bp, Artificial
  Synthetic oligonucleotide
atgcccacagacataggaacccccgcggtgcaacacatacagccaccggg

SEQ ID NO: 256068 - DNA, 50 bp, Artificial
  Synthetic oligonucleotide
agggcttgctcggattggtcccccgttgcgtggatcgtgacgtattgtcc

SEQ ID NO: 256069 - DNA, 50 bp, Artificial
  Synthetic oligonucleotide
agtttgcctctccaactaaatgaagccaacagttctgcgttgcaaataag

SEQ ID NO: 256070 - DNA, 50 bp, Artificial
  Synthetic oligonucleotide
ataaatggcggccatgcggactgcgcgacacgcaaactcgtagccagaca

SEQ ID NO: 256071 - DNA, 50 bp, Artificial
  Synthetic oligonucleotide
agttaggcaaatccggctcgctatatactgagacacgatgtcgagacacc

SEQ ID NO: 256072 - DNA, 50 bp, Artificial
  Synthetic oligonucleotide
agtggggtcatagcgtaaaggcgcgggcgaaataaaccaaccgcggcgat

SEQ ID NO: 256073 - DNA, 50 bp, Artificial
  Synthetic oligonucleotide
atacagttgaagcaggcctactgaagagaccactggcggtacagcaaatg

SEQ ID NO: 256074 - DNA, 50 bp, Artificial
  Synthetic oligonucleotide
gtatatgccgccacctaaaggtcgaagttttccatttgcaccgcgtcact

SEQ ID NO: 256075 - DNA, 50 bp, Artificial
  Synthetic oligonucleotide
atagcagcggtccacacttccgactcggctgtgccctctcagcgttgagt

SEQ ID NO: 256076 - DNA, 50 bp, Artificial
  Synthetic oligonucleotide
gtccaataccgagtcataccattaagatcggcaaataaagtttgccaacg

SEQ ID NO: 256077 - DNA, 59 bp, Artificial
  Synthetic oligonucleotide
atcattccccatgtcgctcgttttttggtcggcgcaaatcacattcgcctcattcctac

SEQ ID NO: 256078 - DNA, 50 bp, Artificial
  Synthetic oligonucleotide
ataggagggcccgatgctcgtcacatggcttatcgaactgcatgggcggg

SEQ ID NO: 256079 - DNA, 50 bp, Artificial
  Synthetic oligonucleotide
gtagtagtcatcgaattaggaatactaacggtgattaacttatttgcatg

SEQ ID NO: 256080 - DNA, 50 bp, Artificial
  Synthetic oligonucleotide
atcacgtcagcgcaaccgttgcaaccaaactggtcgcccacacggttacc

SEQ ID NO: 256081 - DNA, 50 bp, Artificial
  Synthetic oligonucleotide
atccaatgcgacgcgtttgagatccgctggcatacccggctcgcgctcaa

SEQ ID NO: 256082 - DNA, 50 bp, Artificial
  Synthetic oligonucleotide
atccacaggagccgcgtcggtatatggtgtaaacaggtcacccgcacccc

SEQ ID NO: 256083 - DNA, 50 bp, Artificial
  Synthetic oligonucleotide
atccccggggtatggaatgcatgggaagcgggagtgcgcgcagtgctcgg

SEQ ID NO: 256084 - DNA, 50 bp, Artificial
  Synthetic oligonucleotide
gtccgccaagcgctggacttgctctgtgggcagggtgagcaaaggttgca

SEQ ID NO: 256085 - DNA, 50 bp, Artificial
  Synthetic oligonucleotide
agtcgctgttgcggttaaccccaatgcaacctcagacgaagaacgcgcgc

SEQ ID NO: 256086 - DNA, 50 bp, Artificial
  Synthetic oligonucleotide
atcgcccagtagcaatgcttcgcgacctccttactctggttcccgtcgcg

SEQ ID NO: 256087 - DNA, 50 bp, Artificial
  Synthetic oligonucleotide
agtcgagcacgctacatcgcttactcggtgcaatccccggtcgcgttgag

SEQ ID NO: 256088 - DNA, 57 bp, Artificial
  Synthetic oligonucleotide
ccgtaaagagtcgcttcgctccggcttagcaggacggggggaggcgtgctcaatcac

SEQ ID NO: 256089 - DNA, 50 bp, Artificial
  Synthetic oligonucleotide
aggcagtaggcgggcaattatgtcggtcgccaccctcaaaagcgaccacc

SEQ ID NO: 256090 - DNA, 50 bp, Artificial
  Synthetic oligonucleotide
atggccaagcgccgtggaagtttgaagctgggacgcccaacatcgcgggt

SEQ ID NO: 256091 - DNA, 50 bp, Artificial
  Synthetic oligonucleotide
aggcagacccatttgcgttagtgcgccacggttacgttgaaccgggtgct

SEQ ID NO: 256092 - DNA, 50 bp, Artificial
  Synthetic oligonucleotide
gtgctctcccagtaacccttcgacatgacacactaatgaaaagtcgacac

SEQ ID NO: 256093 - DNA, 50 bp, Artificial
  Synthetic oligonucleotide
atggcgacgcaaattgcctcggccgctgaagagcaagcttctgtgacgtc

SEQ ID NO: 256094 - DNA, 50 bp, Artificial
  Synthetic oligonucleotide
aggcacataacgcttgtcgggctgcggctgagggcttagtcgctcagtct

SEQ ID NO: 256095 - DNA, 50 bp, Artificial
  Synthetic oligonucleotide
atggctccggcacagcctctgtatttggtgtgggcagcagtgaaccgcat

SEQ ID NO: 256096 - DNA, 50 bp, Artificial
  Synthetic oligonucleotide
aggagcaatggggctggatccggtgacagccatttctggtgcggtcactg

SEQ ID NO: 256097 - DNA, 50 bp, Artificial
  Synthetic oligonucleotide
aggagatccctccatgccagagcgccgctgctaacagcagattaccgacc

SEQ ID NO: 256098 - DNA, 50 bp, Artificial
  Synthetic oligonucleotide
aggagagactattgcggcatcgtgagtcgggtcccaatgcagcgcttgcg

SEQ ID NO: 256099 - DNA, 60 bp, Artificial
  Synthetic oligonucleotide
cgcactttgagccaatcagtatcattgtccgcgccataaggttgagcggtgacgccggag

SEQ ID NO: 256100 - DNA, 50 bp, Artificial
  Synthetic oligonucleotide
gtggctgggaccaagcagcagtaatgccttcaggaggcaaccaagcccgc

SEQ ID NO: 256101 - DNA, 50 bp, Artificial
  Synthetic oligonucleotide
aggagaccgccgaaccctctgtcggccccagtgagcttgaagatcacctt

SEQ ID NO: 256102 - DNA, 50 bp, Artificial
  Synthetic oligonucleotide
atggtcacgcaagccacccagacgttttgcatgaggctggagcgcaggac

SEQ ID NO: 256103 - DNA, 50 bp, Artificial
  Synthetic oligonucleotide
agctgtcgcaccaaaataggaaccccgtaaatgcgcgggagccaagcggt

SEQ ID NO: 256104 - DNA, 50 bp, Artificial
  Synthetic oligonucleotide
agctggtggcgacacgaacatgagtgtcggggtaggtctcgcgaacacgc

SEQ ID NO: 256105 - DNA, 50 bp, Artificial
  Synthetic oligonucleotide
atggtccctcccggaacaaggctcgggtgtagcacggttgggtgaatcac

SEQ ID NO: 256106 - DNA, 50 bp, Artificial
  Synthetic oligonucleotide
agctgattgagcgattcgacgctacccggtgcgctgagctgaggaatcgg

SEQ ID NO: 256107 - DNA, 50 bp, Artificial
  Synthetic oligonucleotide
agggcggacgtatcccgaaatacccaacgcccctgctgaaacggtatgcc

SEQ ID NO: 256108 - DNA, 50 bp, Artificial
  Synthetic oligonucleotide
agggcagagcccgagctaaattctcgcaggacgaagtccggtctcggagc

SEQ ID NO: 256109 - DNA, 50 bp, Artificial
  Synthetic oligonucleotide
agggcacgcgcccccttggacgtgtgtctcaccagacggccgaacagtgg

SEQ ID NO: 256110 - DNA, 56 bp, Artificial
  Synthetic oligonucleotide
gaactagacctagggcggaaggcacgcaaaggtaagaacacatcgttagaaggcaa

SEQ ID NO: 256111 - DNA, 60 bp, Artificial
  Synthetic oligonucleotide
ccgatatgcataggaattgcactttatctttcagggatcatctatttcatgatccatagt

SEQ ID NO: 256112 - DNA, 59 bp, Artificial
  Synthetic oligonucleotide
atcgagatagatacaggcaagcttattgaaagtggtcccacccaccttttgactagcac

SEQ ID NO: 256113 - DNA, 50 bp, Artificial
  Synthetic oligonucleotide
ggtttacgcgcgttctttctatgcgggtgccgcacattcatcgggtccga

SEQ ID NO: 256114 - DNA, 50 bp, Artificial
  Synthetic oligonucleotide
gtctgctggacgctttgagaccttagccgatgtttatggactatacgacc

SEQ ID NO: 256115 - DNA, 50 bp, Artificial
  Synthetic oligonucleotide
agggaggttgctgtctgctactggagcaggttgagtgcggcctgaggcaa

SEQ ID NO: 256116 - DNA, 50 bp, Artificial
  Synthetic oligonucleotide
agggaatccggcttcatgcattagcgccacagcgcgagcggcaatcagac

SEQ ID NO: 256117 - DNA, 50 bp, Artificial
  Synthetic oligonucleotide
aggcttgagtcaactgccaccccgagacaccgacttggcgcagactacca

SEQ ID NO: 256118 - DNA, 50 bp, Artificial
  Synthetic oligonucleotide
atgcccggcgaccattacgcggtctgcttgttgagccccacataacagca

SEQ ID NO: 256119 - DNA, 50 bp, Artificial
  Synthetic oligonucleotide
aggctagcggaaactcacgactacttcgtactcgccggcagcctaccggg

SEQ ID NO: 256120 - DNA, 50 bp, Artificial
  Synthetic oligonucleotide
gtgacctctccaacttgggtagcaagtggtgggataacgtgtctgaaggg

SEQ ID NO: 256121 - DNA, 50 bp, Artificial
  Synthetic oligonucleotide
aggcgtagcagcagggacgccgatctcaaaagcaatgcgtaccgccagta

SEQ ID NO: 256122 - DNA, 50 bp, Artificial
  Synthetic oligonucleotide
aggcgggagagtgttttctgagcgaagggcgtcagttcgggcaacgggtc

SEQ ID NO: 256123 - DNA, 60 bp, Artificial
  Synthetic oligonucleotide
ccgtcaacagatccgacgccataacttcccgagaatcggtgaactgagcttcagcgctgg

SEQ ID NO: 256124 - DNA, 50 bp, Artificial
  Synthetic oligonucleotide
aggcgcgattgaacaaaccgcgatcccgaccctaagcgaccctcaagctc

SEQ ID NO: 256125 - DNA, 50 bp, Artificial
  Synthetic oligonucleotide
atgcctcgggtgcctaccaccaagtaaagaggaacgcgtatgcccgacgg

SEQ ID NO: 256126 - DNA, 50 bp, Artificial
  Synthetic oligonucleotide
atgcgcagaagaaatacatgcccggtcctgcagtgcatttgctggcggcc

SEQ ID NO: 256127 - DNA, 50 bp, Artificial
  Synthetic oligonucleotide
aggccccatcggtgagcgccattggattgctaccccgtatgacgcacggt

SEQ ID NO: 256128 - DNA, 50 bp, Artificial
  Synthetic oligonucleotide
aggccacatggcctcaggtcgccttgcagaaaaaggggctggcatcaata

SEQ ID NO: 256129 - DNA, 50 bp, Artificial
  Synthetic oligonucleotide
tcatggttagtccttccatatctcgggcgcgggtcgaccactccactggc

SEQ ID NO: 256130 - DNA, 50 bp, Artificial
  Synthetic oligonucleotide
gcgatcgataagcagatcaccaccggacctcgtatttggccagccggggc

SEQ ID NO: 256131 - DNA, 50 bp, Artificial
  Synthetic oligonucleotide
tccaatgcgcggtctttgtggtatgcgtgcaggcttgattcctcaccagc

SEQ ID NO: 256132 - DNA, 50 bp, Artificial
  Synthetic oligonucleotide
acctgcgccctagagtgtcgcggcctaagccctgcatcgcgagaggaaca

SEQ ID NO: 256133 - DNA, 50 bp, Artificial
  Synthetic oligonucleotide
tccactgcgacactgtgcgtatcgcaacgggtagacgttccggccccagt

SEQ ID NO: 256134 - DNA, 57 bp, Artificial
  Synthetic oligonucleotide
cgcactaaaaggtcacatcggtgttgctcgtgcacgtttcccgaaaggcacacgtgg

SEQ ID NO: 256135 - DNA, 50 bp, Artificial
  Synthetic oligonucleotide
cccgctcattgtgatttggcctacatcccaacaccgccgaaagagggcga

SEQ ID NO: 256136 - DNA, 50 bp, Artificial
  Synthetic oligonucleotide
cccgtctagctggctaatctctaacgcggcacgctcagggacgccacgtt

SEQ ID NO: 256137 - DNA, 50 bp, Artificial
  Synthetic oligonucleotide
cccgtgcggataacaatcagccgatgtttagccagccagcaccgacgcac

SEQ ID NO: 256138 - DNA, 50 bp, Artificial
  Synthetic oligonucleotide
acctaccaaccgagcctagcgtttggcccctaccttggggatactgggct

SEQ ID NO: 256139 - DNA, 50 bp, Artificial
  Synthetic oligonucleotide
gcgactgagttggcgatgggcccagcacaagcggtgacggtgaatacgat

SEQ ID NO: 256140 - DNA, 50 bp, Artificial
  Synthetic oligonucleotide
accgtgggcagccaaccacgatgcatactcgctctcttcggctagcgtct

SEQ ID NO: 256141 - DNA, 50 bp, Artificial
  Synthetic oligonucleotide
accgtgaggggcgcgaatggtgcgcgtggtatcaagacgttgctcttgag

SEQ ID NO: 256142 - DNA, 50 bp, Artificial
  Synthetic oligonucleotide
tcccgcgtagcatccttgccgcttgtgcccgaatgtcatgtgtcggacca

SEQ ID NO: 256143 - DNA, 50 bp, Artificial
  Synthetic oligonucleotide
cccttgcactcctctcccacagtcaggatcagtgggcgttctccttgcgc

SEQ ID NO: 256144 - DNA, 50 bp, Artificial
  Synthetic oligonucleotide
tccctgtcgcagtgacactcgacccagccggagcaacgagagagagtgtg

SEQ ID NO: 256145 - DNA, 60 bp, Artificial
  Synthetic oligonucleotide
cagcgcacacggcgtcggcttgttctacttccgaaaatagtccaagcgcattcgctgagc

SEQ ID NO: 256146 - DNA, 50 bp, Artificial
  Synthetic oligonucleotide
tccgcctaagtgcggagatggtactgggttccgtactcgagctcggggat

SEQ ID NO: 256147 - DNA, 50 bp, Artificial
  Synthetic oligonucleotide
cccttgccgccagtcatactcgtaccgcccaacacgacagccgctagaac

SEQ ID NO: 256148 - DNA, 50 bp, Artificial
  Synthetic oligonucleotide
cccaggggttaagcgtgtctactaccgcctgatccctgagcaaggcacga

SEQ ID NO: 256149 - DNA, 50 bp, Artificial
  Synthetic oligonucleotide
acgcagccattatgcggatactgcccagctaacccgggaaggtcgcttgg

SEQ ID NO: 256150 - DNA, 50 bp, Artificial
  Synthetic oligonucleotide
tcacgattgatgcctctgatatgagccgacctatcgtagagaagtacggt

SEQ ID NO: 256151 - DNA, 50 bp, Artificial
  Synthetic oligonucleotide
acgcacgcactgcaaagtctaggtggaacgccagtgcgcagagaagggtg

SEQ ID NO: 256152 - DNA, 50 bp, Artificial
  Synthetic oligonucleotide
tcactccgtctctatgcagcccttccggtgttggtcggcccacttccgaa

SEQ ID NO: 256153 - DNA, 50 bp, Artificial
  Synthetic oligonucleotide
gcgcgccaatttaagtgccatgcctaccgcagatgtgccacccggagcaa

SEQ ID NO: 256154 - DNA, 50 bp, Artificial
  Synthetic oligonucleotide
gcgcgaagccgctagggcgtaatgacaagttgtgcctaaccgcgattgcc

SEQ ID NO: 256155 - DNA, 50 bp, Artificial
  Synthetic oligonucleotide
acgactcacggacactgctttaccgaagccacctcgggacatggcacgcc

SEQ ID NO: 256156 - DNA, 58 bp, Artificial
  Synthetic oligonucleotide
gtaccccgtgccggaagatgcagggttaggcatcgcaatgtggcctttgtagacaggg

SEQ ID NO: 256157 - DNA, 50 bp, Artificial
  Synthetic oligonucleotide
acgaccgtagcccatcgggttatctagaacgacagtaagtagtgcgatac

SEQ ID NO: 256158 - DNA, 50 bp, Artificial
  Synthetic oligonucleotide
cccctaaagcggtcgtggtggttacgcttgtcgcgtccatgacacctcga

SEQ ID NO: 256159 - DNA, 50 bp, Artificial
  Synthetic oligonucleotide
acgacacgagctgcttggcgtcaacgggttgcccatcgtggaaggttagg

SEQ ID NO: 256160 - DNA, 50 bp, Artificial
  Synthetic oligonucleotide
gcgcagagcaagagttgaaaggcagtgttgcctgcgtagcagacggcgcg

SEQ ID NO: 256161 - DNA, 50 bp, Artificial
  Synthetic oligonucleotide
gcgcaatgttgccactgacagtcgaaaggtgcttaccgagccccctcgct

SEQ ID NO: 256162 - DNA, 50 bp, Artificial
  Synthetic oligonucleotide
accttgcttgcgttgtcgtcctgacagtgcgccaagctcttgggcatgga

SEQ ID NO: 256163 - DNA, 50 bp, Artificial
  Synthetic oligonucleotide
tcatcgagaggtcaaacacgatgtgaggcaggcgctcttttacgagagag

SEQ ID NO: 256164 - DNA, 50 bp, Artificial
  Synthetic oligonucleotide
cccgaatttactcgcagccacggccaagcaccaactaccgacccacagga

SEQ ID NO: 256165 - DNA, 50 bp, Artificial
  Synthetic oligonucleotide
gcgatgtcaaaagtaccttctcgacctaacttccataaattattgtcggt

SEQ ID NO: 256166 - DNA, 50 bp, Artificial
  Synthetic oligonucleotide
accagggacttggcgtaccgctcagaagcctgttggccgccccagtagta

SEQ ID NO: 256167 - DNA, 60 bp, Artificial
  Synthetic oligonucleotide
cgcacgtaaaccgcactggcgtgaccctgcagtgacagactttgcaccgttcacgtggga

SEQ ID NO: 256168 - DNA, 50 bp, Artificial
  Synthetic oligonucleotide
gcccttccggtgttggtcggcccacttccgaatggttcgccacaattcga

SEQ ID NO: 256169 - DNA, 50 bp, Artificial
  Synthetic oligonucleotide
ccgccgcgttatagacacgcgcgccatctaagtgcatttgcaggccgtgt

SEQ ID NO: 256170 - DNA, 50 bp, Artificial
  Synthetic oligonucleotide
tcggctctggtgcatgacagcgtaggctagccctatcgacaaagcagcgg

SEQ ID NO: 256171 - DNA, 50 bp, Artificial
  Synthetic oligonucleotide
ccgcgggctcggcttctttgacgggtaaatgacggctggccaattcatgc

SEQ ID NO: 256172 - DNA, 50 bp, Artificial
  Synthetic oligonucleotide
accacatcagtgccacggcgcctaccacaagcacggcgacggatgccaat

SEQ ID NO: 256173 - DNA, 50 bp, Artificial
  Synthetic oligonucleotide
gcccattgccctcgctgcgggacccaactttatcgaggtggcagcccatc

SEQ ID NO: 256174 - DNA, 50 bp, Artificial
  Synthetic oligonucleotide
accaagtgctcttgcgtgactggcgttgagagcggcgcctccatttgtcg

SEQ ID NO: 256175 - DNA, 50 bp, Artificial
  Synthetic oligonucleotide
ccggaggcccctctaccagaatgtgcccatcggctaacagcgcgacaagt

SEQ ID NO: 256176 - DNA, 50 bp, Artificial
  Synthetic oligonucleotide
gcccaggcaccaaaacagcgagtcgattggcaatgcgtgccctgtggtgg

SEQ ID NO: 256177 - DNA, 50 bp, Artificial
  Synthetic oligonucleotide
acatggttggctgcaacgaccccggttacctgatgccccgttacgcgctg

SEQ ID NO: 256178 - DNA, 52 bp, Artificial
  Synthetic oligonucleotide
atcgggctctgtaaaccactgccaaactaaaaccgcaaaagtcggtgggttg

SEQ ID NO: 256179 - DNA, 50 bp, Artificial
  Synthetic oligonucleotide
ccggccactgcttgctggacggctgacttgcgccttcatgcgtacttcat

SEQ ID NO: 256180 - DNA, 50 bp, Artificial
  Synthetic oligonucleotide
acatgcatacctcatcgacgcagccactccggcgaaaggagccgaaagcc

SEQ ID NO: 256181 - DNA, 50 bp, Artificial
  Synthetic oligonucleotide
acatgagcatcacaagtgcaccgcttgcagcgctaccggagacggcagac

SEQ ID NO: 256182 - DNA, 50 bp, Artificial
  Synthetic oligonucleotide
acatgaatcggcgccacaaaacgaatgcccccggcgtaagcggtgatgca

SEQ ID NO: 256183 - DNA, 50 bp, Artificial
  Synthetic oligonucleotide
tcgttgctggtggcgaaacctctggtgttgttacgcaaagcctcgcggta

SEQ ID NO: 256184 - DNA, 50 bp, Artificial
  Synthetic oligonucleotide
ccggccctgcgtggcactttgctgaagcgcaactaaagcctgtgctagtt

SEQ ID NO: 256185 - DNA, 50 bp, Artificial
  Synthetic oligonucleotide
accgggcttggtgccaatgttaacccacatggtggtggcaactggtgggg

SEQ ID NO: 256186 - DNA, 50 bp, Artificial
  Synthetic oligonucleotide
accggaagatggcccgaacaaccaaacgccggaacagctggcacgctata

SEQ ID NO: 256187 - DNA, 50 bp, Artificial
  Synthetic oligonucleotide
tcctccggcctcttaattgagagcgcgctggtgttgccaatgggctaccg

SEQ ID NO: 256188 - DNA, 50 bp, Artificial
  Synthetic oligonucleotide
gcctcaaagttggcgttgtttaatatggctctgatggtcgtaacatcact

SEQ ID NO: 256189 - DNA, 60 bp, Artificial
  Synthetic oligonucleotide
tgtagattggggaaacccttgcaaggtactgatgcagaggtcggcagagaacggtgagga

SEQ ID NO: 256190 - DNA, 50 bp, Artificial
  Synthetic oligonucleotide
accgctcggcgcagtgtgtgagtaagcgaagcgtccgtacaccgtgcaag

SEQ ID NO: 256191 - DNA, 50 bp, Artificial
  Synthetic oligonucleotide
accgcaggcccgtaccctgctcgcgactgcccttaaccggcaaacctatt

SEQ ID NO: 256192 - DNA, 50 bp, Artificial
  Synthetic oligonucleotide
tcgaatcaccgtcataggacgtgtggtcgcaggagcaagtcctcgataga

SEQ ID NO: 256193 - DNA, 50 bp, Artificial
  Synthetic oligonucleotide
gccgtgaattagaggcgcaaagtggtcctggcccccgaatcctaggcagt

SEQ ID NO: 256194 - DNA, 50 bp, Artificial
  Synthetic oligonucleotide
accgagcaatggatgccttcaccggttgtcccgcacacgtaggccccctt

SEQ ID NO: 256195 - DNA, 50 bp, Artificial
  Synthetic oligonucleotide
gccgggcgactgacggggtacacccacgcagatatcgttagctggtccga

SEQ ID NO: 256196 - DNA, 50 bp, Artificial
  Synthetic oligonucleotide
ccgcaacaagtggcttacgccgtcgatcaagcggacaagcgcctgactca

SEQ ID NO: 256197 - DNA, 50 bp, Artificial
  Synthetic oligonucleotide
accctaaccccgtgcctccgctatgcctatcccgtgccgtcgagactcgg

SEQ ID NO: 256198 - DNA, 50 bp, Artificial
  Synthetic oligonucleotide
acccgatcaactcgcgcctaaagcccgaggtgaaggcacaacaacacgga

SEQ ID NO: 256199 - DNA, 50 bp, Artificial
  Synthetic oligonucleotide
accccggccgcagctaacacgccccaatctatccccgaggcactgacggt

SEQ ID NO: 256200 - DNA, 58 bp, Artificial
  Synthetic oligonucleotide
tgtaagggataagacacaacgaactaaacgcccgatctcgtctctgtctcggcttatc

SEQ ID NO: 256201 - DNA, 50 bp, Artificial
  Synthetic oligonucleotide
gccgcttcacgcgtggtttcaagatcggtccccatgttcggcgtcagata

SEQ ID NO: 256202 - DNA, 50 bp, Artificial
  Synthetic oligonucleotide
gccgctggctccaataaattgtggccccctacagcgttgccgatcaagct

SEQ ID NO: 256203 - DNA, 50 bp, Artificial
  Synthetic oligonucleotide
accatgccgggcaaatcccgttgccagaatgcactgacccggaaccggcc

SEQ ID NO: 256204 - DNA, 50 bp, Artificial
  Synthetic oligonucleotide
ccgccctagcaggggcaactgtggcacttgaactcatgtacgcatgggca

SEQ ID NO: 256205 - DNA, 50 bp, Artificial
  Synthetic oligonucleotide
cagagcccaacttgctggctaggatcgcggcggggattgtttgggttgca

SEQ ID NO: 256206 - DNA, 50 bp, Artificial
  Synthetic oligonucleotide
actgccccggaactggtttccagagccggataacgactgcctgtcgcgac

SEQ ID NO: 256207 - DNA, 50 bp, Artificial
  Synthetic oligonucleotide
tacggagtcaggtcgtggcgtaaagcgggttagtgagcgccagtcctgtg

SEQ ID NO: 256208 - DNA, 50 bp, Artificial
  Synthetic oligonucleotide
ggcagatactcataccccaacaccggatgctggttttccgtgcggcggta

SEQ ID NO: 256209 - DNA, 50 bp, Artificial
  Synthetic oligonucleotide
ggcaccacctatgctgtcacgcaatacacacttgcggactggccccctct

SEQ ID NO: 256210 - DNA, 50 bp, Artificial
  Synthetic oligonucleotide
actcttgagtcgcaggctgaggacgcaccgtcagaccgttgcgcacacgt

SEQ ID NO: 256211 - DNA, 60 bp, Artificial
  Synthetic oligonucleotide
aagcgccgactgattattagcttacctcctgagctcgatgaagctttggctaggttctct

SEQ ID NO: 256212 - DNA, 50 bp, Artificial
  Synthetic oligonucleotide
tactccgcaccgcccgtcagcaagtgtgaacccacataaccagacagctg

SEQ ID NO: 256213 - DNA, 50 bp, Artificial
  Synthetic oligonucleotide
tactgcgcccatagtgatcggtacccagcggttcaccccaactgggggcg

SEQ ID NO: 256214 - DNA, 50 bp, Artificial
  Synthetic oligonucleotide
actcgtgacgcccataagcgcaccatgccaggtcgcgtgattggggtttc

SEQ ID NO: 256215 - DNA, 50 bp, Artificial
  Synthetic oligonucleotide
caggcgtctgcaaccgaattgccgttactggaccaagcctgcccaatcgg

SEQ ID NO: 256216 - DNA, 50 bp, Artificial
  Synthetic oligonucleotide
cagggtacgacggcgatgcttagcggcaccattgcgagtgcaccttgcca

SEQ ID NO: 256217 - DNA, 50 bp, Artificial
  Synthetic oligonucleotide
actcgcagcgaaccttcgccgtcatcaatgaatgggcccaacgccgcaaa

SEQ ID NO: 256218 - DNA, 50 bp, Artificial
  Synthetic oligonucleotide
actcgcagccacggccaagcaccaactaccgacccacaggatcacgttgg

SEQ ID NO: 256219 - DNA, 50 bp, Artificial
  Synthetic oligonucleotide
cagggttgtatcgcatcgatattaccgccgcagatcaggaattatggagt

SEQ ID NO: 256220 - DNA, 50 bp, Artificial
  Synthetic oligonucleotide
tagcacgagcccagcaatgcccggaagcgttagcacagcgccaggaatga

SEQ ID NO: 256221 - DNA, 50 bp, Artificial
  Synthetic oligonucleotide
ggacgtaccacctacgacagcacacaaacggtcagccgaggtaatatctc

SEQ ID NO: 256222 - DNA, 60 bp, Artificial
  Synthetic oligonucleotide
agcaaatggatttaaaggcgcaggtgtattgacgtttgtggtatcggcagcgatagcaac

SEQ ID NO: 256223 - DNA, 60 bp, Artificial
  Synthetic oligonucleotide
ccatcacttatcagtaacggcatttatatgcgctacgttatgcgtccaatcttatgcgca

SEQ ID NO: 256224 - DNA, 50 bp, Artificial
  Synthetic oligonucleotide
cagtgcgctggtggcaaatgtccgcacggtggaaccacatcaatcgacgg

SEQ ID NO: 256225 - DNA, 50 bp, Artificial
  Synthetic oligonucleotide
caccgtgggtgttgcaccgatcagtaacccgcgcttagcgattgtggtga

SEQ ID NO: 256226 - DNA, 50 bp, Artificial
  Synthetic oligonucleotide
agaaattgccaaccagtgccggattaaccgtgcgtgaattggtgcgctta

SEQ ID NO: 256227 - DNA, 50 bp, Artificial
  Synthetic oligonucleotide
ggcttactcagtcaccggagcgagtatctgcatttaggcctgggcccgcg

SEQ ID NO: 256228 - DNA, 50 bp, Artificial
  Synthetic oligonucleotide
tacaacgctgagcgactcttgcagccacaccatggcaaatatggccccga

SEQ ID NO: 256229 - DNA, 50 bp, Artificial
  Synthetic oligonucleotide
actttcagaaacggagcttgccaagatgacaccaagcgaaagacgtacct

SEQ ID NO: 256230 - DNA, 50 bp, Artificial
  Synthetic oligonucleotide
cacgcgtcatcaaacacggtcaccacagagcccgccaacacgccatgacg

SEQ ID NO: 256231 - DNA, 50 bp, Artificial
  Synthetic oligonucleotide
ggctcaatgtgtggtcgaagccaatggtgcgccgagcactaccgcttacg

SEQ ID NO: 256232 - DNA, 50 bp, Artificial
  Synthetic oligonucleotide
tacatcattaaggagtgcgtttggactgcactctagagcatcgatcaacg

SEQ ID NO: 256233 - DNA, 50 bp, Artificial
  Synthetic oligonucleotide
taccaaagccaagcaacgcgggaggtgcgttgaaatcacgcagcgaacta

SEQ ID NO: 256234 - DNA, 60 bp, Artificial
  Synthetic oligonucleotide
cgtgtagcagcgtttgtgcgccagggatcatggcaaacataccaaatgaaccagcggctg

SEQ ID NO: 256235 - DNA, 50 bp, Artificial
  Synthetic oligonucleotide
cactcgccgcttcattgagcgcttggcccatttgaacgctcgcttggtta

SEQ ID NO: 256236 - DNA, 50 bp, Artificial
  Synthetic oligonucleotide
taccccgcccccgctcataccatcttggacaggggcatcggtaatactcg

SEQ ID NO: 256237 - DNA, 50 bp, Artificial
  Synthetic oligonucleotide
ggcgatagcagctggactgcgctcgacccgccaagcgagcaccagtactt

SEQ ID NO: 256238 - DNA, 50 bp, Artificial
  Synthetic oligonucleotide
actgtaagggccgaacgccaagattaccgctatgccgccaaagcgaccga

SEQ ID NO: 256239 - DNA, 50 bp, Artificial
  Synthetic oligonucleotide
tacctggtttacgcccgactcgtgtgacggtgaccgatcagcatggtcgc

SEQ ID NO: 256240 - DNA, 50 bp, Artificial
  Synthetic oligonucleotide
ggcgaatccacattcaggatcacggctttaacactcgactcatttagagc

SEQ ID NO: 256241 - DNA, 50 bp, Artificial
  Synthetic oligonucleotide
ggcgaaactcgcccaacggcagaagtgttcgctgagctaggcattgaccc

SEQ ID NO: 256242 - DNA, 50 bp, Artificial
  Synthetic oligonucleotide
cagagcacaagcgggtaggccagagacaccgcgccaagagcgccaatgac

SEQ ID NO: 256243 - DNA, 50 bp, Artificial
  Synthetic oligonucleotide
actgctccccagcgagtgcagtggtgtaacggcgcgacatgcatacctca

SEQ ID NO: 256244 - DNA, 50 bp, Artificial
  Synthetic oligonucleotide
ccagccgcacagcacatacaaccgcctggcacctctttgatgatggcacc

SEQ ID NO: 256245 - DNA, 56 bp, Artificial
  Synthetic oligonucleotide
aaggcgcgtgctaaattgctttaagtttctgattcgtcggcggttattgcctactc

SEQ ID NO: 256246 - DNA, 50 bp, Artificial
  Synthetic oligonucleotide
acggccagcgatctctgacagggccgttgccagcgaatgcagttcctccc

SEQ ID NO: 256247 - DNA, 50 bp, Artificial
  Synthetic oligonucleotide
ccaggggagaactgaaacaaacggattcgacatcagatcaacgtagagcc

SEQ ID NO: 256248 - DNA, 50 bp, Artificial
  Synthetic oligonucleotide
ccatgcattccttaagcaattattacttgcatagttagtcaatgctgatt

SEQ ID NO: 256249 - DNA, 50 bp, Artificial
  Synthetic oligonucleotide
tatttccgcgccgctcgttccttaggggcgacccctcttgttgcattcgt

SEQ ID NO: 256250 - DNA, 50 bp, Artificial
  Synthetic oligonucleotide
acgctcgcgtgtggggcgtaatggaacttgacgagggggcggttgaatta

SEQ ID NO: 256251 - DNA, 50 bp, Artificial
  Synthetic oligonucleotide
ccatgcattgaccacgcgtcatcaaacacggtcaccacagagcccgccaa

SEQ ID NO: 256252 - DNA, 50 bp, Artificial
  Synthetic oligonucleotide
acgcgtggtcgactgacgggtattgacgttcggtaaggcgggctgggtag

SEQ ID NO: 256253 - DNA, 50 bp, Artificial
  Synthetic oligonucleotide
acgcggacggaagagcagtctgggttcgcgagaacattcgcccgttggtt

SEQ ID NO: 256254 - DNA, 50 bp, Artificial
  Synthetic oligonucleotide
acgcgctcccaccagcttgggttacacgttctgatgggggcacctaacgt

SEQ ID NO: 256255 - DNA, 50 bp, Artificial
  Synthetic oligonucleotide
tcaaccaccgcacctttaagctgggttggtgccgctgtgtcgatggagac

SEQ ID NO: 256256 - DNA, 56 bp, Artificial
  Synthetic oligonucleotide
aaggcggaatgataacgtttaattatttagaccatcgaacaggaacaacagacagc

SEQ ID NO: 256257 - DNA, 50 bp, Artificial
  Synthetic oligonucleotide
gcggtgcatgacgccgtctaaaccaccgacgttgttggcgcgagtatggc

SEQ ID NO: 256258 - DNA, 50 bp, Artificial
  Synthetic oligonucleotide
acgccctttggattaggggaatccgttgttgagtgggcgaccggccttgc

SEQ ID NO: 256259 - DNA, 50 bp, Artificial
  Synthetic oligonucleotide
cccaagtgtcgcgcagtgctgacccacattaccaaacgcgagccgctgcc

SEQ ID NO: 256260 - DNA, 50 bp, Artificial
  Synthetic oligonucleotide
tcaatcgcgccaaccggtgcagtccgccaaacgaccttgtcctgactcca

SEQ ID NO: 256261 - DNA, 50 bp, Artificial
  Synthetic oligonucleotide
acgcaggcttgccccttcacggacgttatcggtcgcgctgagaacttgct

SEQ ID NO: 256262 - DNA, 50 bp, Artificial
  Synthetic oligonucleotide
tcacagggtattgcgggcacacagcgtcccgggctaaccgacacaaacgc

SEQ ID NO: 256263 - DNA, 50 bp, Artificial
  Synthetic oligonucleotide
cagttagtcgccagctgtctagttcacgaactaggtttagattggcgcta

SEQ ID NO: 256264 - DNA, 50 bp, Artificial
  Synthetic oligonucleotide
tagcgcaatcgcgacgcctgttaggctgaccgagacggccattagcacga

SEQ ID NO: 256265 - DNA, 50 bp, Artificial
  Synthetic oligonucleotide
cagttatgacaacacactgttactttctagtgacgaggttggccgtgatt

SEQ ID NO: 256266 - DNA, 50 bp, Artificial
  Synthetic oligonucleotide
catcacgcagccagcaaccgccagtgcgaagccacaaatgagtgcgactg

SEQ ID NO: 256267 - DNA, 59 bp, Artificial
  Synthetic oligonucleotide
aaggggccacctatccccatgtcattaccgccattcagagcaaaggcgcattgaccaac

SEQ ID NO: 256268 - DNA, 50 bp, Artificial
  Synthetic oligonucleotide
catcgcgtacatgcctcccacataggcgcccatactggtacccgtgacga

SEQ ID NO: 256269 - DNA, 50 bp, Artificial
  Synthetic oligonucleotide
gcttgcttgagtatgctaatgtctcgttgagcgaatctcgggtgtgaatg

SEQ ID NO: 256270 - DNA, 50 bp, Artificial
  Synthetic oligonucleotide
actagcctgacacccgcagagctaaacgcgtggacgttcttggtcgcggc

SEQ ID NO: 256271 - DNA, 50 bp, Artificial
  Synthetic oligonucleotide
actagagcagcgacgttcacggctggttccgctgaagacaccgcctcggc

SEQ ID NO: 256272 - DNA, 50 bp, Artificial
  Synthetic oligonucleotide
catggtggcgcttcagttgtgctcgcagagactctcggttcccttgccgc

SEQ ID NO: 256273 - DNA, 50 bp, Artificial
  Synthetic oligonucleotide
ccaacagcccacccagtgaccagcctaaccaggtcgctttgtgtggagcg

SEQ ID NO: 256274 - DNA, 50 bp, Artificial
  Synthetic oligonucleotide
tagttgagtgtggcgggatctagctcgtgtcccttagcgtggcgcaccca

SEQ ID NO: 256275 - DNA, 50 bp, Artificial
  Synthetic oligonucleotide
acgtgaccccgagtgaaactcgcgtggccatgattgaaggtggaacccta

SEQ ID NO: 256276 - DNA, 50 bp, Artificial
  Synthetic oligonucleotide
acgtcccatcgcttgtgcggagcctttggttgcccagcgcagagcgtcaa

SEQ ID NO: 256277 - DNA, 50 bp, Artificial
  Synthetic oligonucleotide
gctcgccacactaccgattcaacttccggctagtgaggccgcgatcccta

SEQ ID NO: 256278 - DNA, 57 bp, Artificial
  Synthetic oligonucleotide
gcgtgaatgtaaggtcttattaggaaatcggccgaggtgcctcccttccgctctggc

SEQ ID NO: 256279 - DNA, 50 bp, Artificial
  Synthetic oligonucleotide
gctccaaccaattggcgcgttcttccgttaagcacaaacacacgatgcca

SEQ ID NO: 256280 - DNA, 50 bp, Artificial
  Synthetic oligonucleotide
ccacagctttgctcgcctaagtaggccgctctaccgcgcttagctggcag

SEQ ID NO: 256281 - DNA, 50 bp, Artificial
  Synthetic oligonucleotide
ccacattgaaaggcgaggcgccccactacaacaccccgactcctgcgttg

SEQ ID NO: 256282 - DNA, 50 bp, Artificial
  Synthetic oligonucleotide
ccactaccgttccctgtcgcagtgacactcgacccagccggagcaacgag

SEQ ID NO: 256283 - DNA, 60 bp, Artificial
  Synthetic oligonucleotide
aaggtcacgaggctgtgatgtacgtagacgttggctgttaagctgtgcgccagaaccacg

SEQ ID NO: 256284 - DNA, 58 bp, Artificial
  Synthetic oligonucleotide
cccgcactttgtaatcagtcgccaaaaagacttggtgttagaaggtgcgcagcgagtg

SEQ ID NO: 256285 - DNA, 53 bp, Artificial
  Synthetic oligonucleotide
tggggttaacaaacgcttggcacgaaccgacaaatttgtggggattcacgacc

SEQ ID NO: 256286 - DNA, 60 bp, Artificial
  Synthetic oligonucleotide
tggggcagatatgtttaaggcattgctacagtttggtgcaggagaggctatattgtttgg

SEQ ID NO: 256287 - DNA, 56 bp, Artificial
  Synthetic oligonucleotide
gaaagcggttatcctctagggtgagtattaccgaaatctagctcaaaactcaccta

SEQ ID NO: 256288 - DNA, 55 bp, Artificial
  Synthetic oligonucleotide
aagtcaccttgagttaggtgtttatctcttctgagacgtcttaaattttcgccta

SEQ ID NO: 256289 - DNA, 60 bp, Artificial
  Synthetic oligonucleotide
aagtgttgagtggtcagaatgctacacccaagcgcattctgagatccaatccgccattaa

SEQ ID NO: 256290 - DNA, 57 bp, Artificial
  Synthetic oligonucleotide
ccagttagcaaatgccgtggtaaagaacgttcttgcacgacctccgtcctcaattgc

SEQ ID NO: 256291 - DNA, 59 bp, Artificial
  Synthetic oligonucleotide
gcgtgtaccgccttttactggcccagcttcacgagtcacgttgccacctagtgctttga

SEQ ID NO: 256292 - DNA, 60 bp, Artificial
  Synthetic oligonucleotide
aacttcaactgactacatcatcgctagaccaggctaagcaagagctcacaaatagcagtc

SEQ ID NO: 256293 - DNA, 53 bp, Artificial
  Synthetic oligonucleotide
gcgtaaataattacgcccttacgatttttaccaacccaacctatatgttcaca

SEQ ID NO: 256294 - DNA, 60 bp, Artificial
  Synthetic oligonucleotide
tgttttgcacgaaaagattgatagagccaacaggctactatctgaaatattgaaagaggt

SEQ ID NO: 256295 - DNA, 56 bp, Artificial
  Synthetic oligonucleotide
aagacagaatttacctttactacgcatcaagcgaagtcgggtgaagtcgtgtctta

SEQ ID NO: 256296 - DNA, 60 bp, Artificial
  Synthetic oligonucleotide
tgttggtgtggtttatatcttaaaaacgcctctatgggcttctgaggctgcgaaggcatg

SEQ ID NO: 256297 - DNA, 51 bp, Artificial
  Synthetic oligonucleotide
aagacatttacgaatggaaggggccccgtttcgtcggggaaggagccattc

SEQ ID NO: 256298 - DNA, 60 bp, Artificial
  Synthetic oligonucleotide
ccgcagaccaaccagatttagcggttactcgaaggcgtacacactcgacatatcaatgtc

SEQ ID NO: 256299 - DNA, 59 bp, Artificial
  Synthetic oligonucleotide
aagactactagagcgatcccacgcgccaccagtaagacaccgcacatcataacgttttc

SEQ ID NO: 256300 - DNA, 51 bp, Artificial
  Synthetic oligonucleotide
aagactcgcatattaaccccgttaatatactacaactgaagggggggggga

SEQ ID NO: 256301 - DNA, 56 bp, Artificial
  Synthetic oligonucleotide
aagagggggggccaaccatctctcctagtgtgatgatgacccctaaagtaacggca

SEQ ID NO: 256302 - DNA, 55 bp, Artificial
  Synthetic oligonucleotide
tgttcaataacccatggaaaccacccttaagtgcgtattatatccggtgtttatg

SEQ ID NO: 256303 - DNA, 57 bp, Artificial
  Synthetic oligonucleotide
ccatgatagtagaccggacaacatggttaggttaataacctaatcacgaaatagaca

SEQ ID NO: 256304 - DNA, 57 bp, Artificial
  Synthetic oligonucleotide
cgttaaattctcgtgagcttaattcgattagtaactctaatgttgagtaactggata

SEQ ID NO: 256305 - DNA, 60 bp, Artificial
  Synthetic oligonucleotide
tgtgatagagaaaccattctcagacgttgcccatatgtttgtgcaagacgatacggctct

SEQ ID NO: 256306 - DNA, 60 bp, Artificial
  Synthetic oligonucleotide
ctcctttaggtaaaatcatttcagcacactatgcgcacccacaaaaagcagatcacgtgg

SEQ ID NO: 256307 - DNA, 58 bp, Artificial
  Synthetic oligonucleotide
tgtcgtctgtctcggactggccatatcaccgttaggccgggtcagaatcggcggtacc

SEQ ID NO: 256308 - DNA, 60 bp, Artificial
  Synthetic oligonucleotide
tgtcagggaggtgggcttactcgttgttggtttggcacatctgccggtcaagctagtgct

SEQ ID NO: 256309 - DNA, 57 bp, Artificial
  Synthetic oligonucleotide
gttgatatccattgacggctaaccggcttaggatcgcctttgacgcgatttccggta

SEQ ID NO: 256310 - DNA, 53 bp, Artificial
  Synthetic oligonucleotide
aagcgaccaaatacagtacccaaatcactcaaaatcgagttgaaacgggtagg

SEQ ID NO: 256311 - DNA, 59 bp, Artificial
  Synthetic oligonucleotide
tgctagggcttttttccacacacctggtggatgtgttccagatcgcctccgttggactc

SEQ ID NO: 256312 - DNA, 60 bp, Artificial
  Synthetic oligonucleotide
ccaggatatcttgctttgcttccagtccttggtgcttatcttgtgattgttgcaaatcag

SEQ ID NO: 256313 - DNA, 60 bp, Artificial
  Synthetic oligonucleotide
tgccagcttgacggactcatccgcttcgagcaaatggctcatttcatgaaagagcgtgcg

SEQ ID NO: 256314 - DNA, 60 bp, Artificial
  Synthetic oligonucleotide
aatggcggttagtagcagatatatagcgataaaatagcgagcttatagcgatataatgaa

SEQ ID NO: 256315 - DNA, 58 bp, Artificial
  Synthetic oligonucleotide
tgcaaaatccgtatcttacatggctggttatggccttcgtttattaaccattattcaa

SEQ ID NO: 256316 - DNA, 60 bp, Artificial
  Synthetic oligonucleotide
ccagcatggaacaacgttaacccaagtatggctcactcgtcatggtaagcaactctcgat

SEQ ID NO: 256317 - DNA, 51 bp, Artificial
  Synthetic oligonucleotide
aattagcgaaaaagggttgcacgtaatggccgtcggtaaaaaggatacacc

SEQ ID NO: 256318 - DNA, 57 bp, Artificial
  Synthetic oligonucleotide
tgatcacaatcaacggtagaacaagcactaacaagccaagtaaacgagacgaaaacc

SEQ ID NO: 256319 - DNA, 55 bp, Artificial
  Synthetic oligonucleotide
tgatagttacgtcgtaattacccatataatcccctagaaacggcttagtcgctta

SEQ ID NO: 256320 - DNA, 59 bp, Artificial
  Synthetic oligonucleotide
gaacaagatgccgcgactattattcgccacctagaacccaagcaagtgcagcgggtggg

SEQ ID NO: 256321 - DNA, 59 bp, Artificial
  Synthetic oligonucleotide
tgataactttatctctaaaggcttaaagacagcacagagcaccccagtaacctccaaca

SEQ ID NO: 256322 - DNA, 60 bp, Artificial
  Synthetic oligonucleotide
ctgcaaggcgacgcaatcaacttaactgcagaacgaacctctaacggtcaacgcactgtg

SEQ ID NO: 256323 - DNA, 57 bp, Artificial
  Synthetic oligonucleotide
tgagtcgaaacacggtttctaaacgtcttcgtgagttcaatgtgcaaccttccggca

SEQ ID NO: 256324 - DNA, 55 bp, Artificial
  Synthetic oligonucleotide
tgagatttcgtaactgtaatttgtaacgtcaagggtaaatgtatcttcgataaag

SEQ ID NO: 256325 - DNA, 57 bp, Artificial
  Synthetic oligonucleotide
acaacacgctctagagtcaattccaaatgcggcattaaaacgaattaagggattgta

SEQ ID NO: 256326 - DNA, 60 bp, Artificial
  Synthetic oligonucleotide
gctaaatggatcacgatataactaggttcagcctcaccagataaatcaatataccccact

SEQ ID NO: 256327 - DNA, 56 bp, Artificial
  Synthetic oligonucleotide
tgacagatcggagtgaccccaacgctcacggagggggtgagggaaagaaggccgaa

SEQ ID NO: 256328 - DNA, 58 bp, Artificial
  Synthetic oligonucleotide
ccagaggtaatacaatgtcagatagacaatctgtttttcgagaaatactaacttctta

SEQ ID NO: 256329 - DNA, 58 bp, Artificial
  Synthetic oligonucleotide
tgaagttgccgcgtcacctcggccttacgtatctatcttggaagagggctattgcctt

SEQ ID NO: 256330 - DNA, 56 bp, Artificial
  Synthetic oligonucleotide
tgggaatacgtcccagaatggcccagagccatgtttcagaagaaaaaggggtctta

SEQ ID NO: 256331 - DNA, 55 bp, Artificial
  Synthetic oligonucleotide
cgcttggaggtgaaagccgacaacaggaccctcgcgccgaaaggtcacggttatg

SEQ ID NO: 256332 - DNA, 52 bp, Artificial
  Synthetic oligonucleotide
cccgccacaaatctttacgggtaaacccatgaagtgcgacaaaaaactcgcc

SEQ ID NO: 256333 - DNA, 56 bp, Artificial
  Synthetic oligonucleotide
aataagagtggttatcgtcttagtatcaaccagacgcttaaactcaccttctttga

SEQ ID NO: 256334 - DNA, 60 bp, Artificial
  Synthetic oligonucleotide
aatatcgacgagcgagactgagcaaggagaattgaggagcaggtcagggcaagacattta

SEQ ID NO: 256335 - DNA, 51 bp, Artificial
  Synthetic oligonucleotide
tggctctaaagcgttacaaagttacagccaacttccgggtaatttaggggg

SEQ ID NO: 256336 - DNA, 60 bp, Artificial
  Synthetic oligonucleotide
ctctggtgtctgacggctatcacgctgtctatcagtcgtttacttcaagagctacgttct

SEQ ID NO: 256337 - DNA, 56 bp, Artificial
  Synthetic oligonucleotide
tggccttaataacgctaggttttctattgaactgaccaattgaccaagcttaggcc

SEQ ID NO: 256338 - DNA, 60 bp, Artificial
  Synthetic oligonucleotide
aatcataacttcgtcagcttgcaactggatgcgactttcccagagccagagttcccgccg

SEQ ID NO: 256339 - DNA, 60 bp, Artificial
  Synthetic oligonucleotide
tggcatgctgccaacagctctacggctaatattccccgcgtgttttccgccatatccgtt

SEQ ID NO: 256340 - DNA, 60 bp, Artificial
  Synthetic oligonucleotide
gcgttactggctcaactaaggaatcgcctctatgcgagcaagcaaccgcaaggacgccct

SEQ ID NO: 256341 - DNA, 60 bp, Artificial
  Synthetic oligonucleotide
cgtctggaattgaattttcacatcgtgaatatggaactcagcactggcaaggcgctaacg

SEQ ID NO: 256342 - DNA, 60 bp, Artificial
  Synthetic oligonucleotide
gttctgacatttcgtctgtcagtggaatatcgggagtacggccaacactcttcattgcac

SEQ ID NO: 256343 - DNA, 59 bp, Artificial
  Synthetic oligonucleotide
ctcttgcgaaaccgcgcaagccagtgtctctgccctcgctggttttgcaggggtcggga

SEQ ID NO: 256344 - DNA, 59 bp, Artificial
  Synthetic oligonucleotide
cgtcgcgtaacatctatgaacaagtcgcttatgcacatttaggtggaaagttccctgta

SEQ ID NO: 256345 - DNA, 56 bp, Artificial
  Synthetic oligonucleotide
tggactaaatcagggcttttatctattgaacgttaattcgtatctatttgggctag

SEQ ID NO: 256346 - DNA, 59 bp, Artificial
  Synthetic oligonucleotide
tggacgacttacagtgttgggttcgattactggggtgcaacctcatcacacgattagat

SEQ ID NO: 256347 - DNA, 57 bp, Artificial
  Synthetic oligonucleotide
aatctgggcaagccgtcccgctacgcgagaccaaaggcaaatggcgcgtgaaaaata

SEQ ID NO: 256348 - DNA, 56 bp, Artificial
  Synthetic oligonucleotide
aatgaacaccaattttgtgcgtacctagattcaacacaagacaacctacttcaccc

SEQ ID NO: 256349 - DNA, 58 bp, Artificial
  Synthetic oligonucleotide
tggaacggtatagacttgaaagattcgatttcacggtccctattcactactagagcaa

SEQ ID NO: 256350 - DNA, 60 bp, Artificial
  Synthetic oligonucleotide
ctaacttttcgaacaaatggactaagcgagcatcgatagtgaagtgatttacttgtgaca

SEQ ID NO: 256351 - DNA, 57 bp, Artificial
  Synthetic oligonucleotide
ttggggtaataagctcggaggtgttagatgtattggccgcaatacttccggagataa

SEQ ID NO: 256352 - DNA, 60 bp, Artificial
  Synthetic oligonucleotide
ttggctaagtgaatacgccactttcgactgtattgactagagagaaactgactccatcca

SEQ ID NO: 256353 - DNA, 60 bp, Artificial
  Synthetic oligonucleotide
cgcttagttttgagatttacgcctccacgtgtgactgatagatggaaatggacattccaa

SEQ ID NO: 256354 - DNA, 60 bp, Artificial
  Synthetic oligonucleotide
ttggcattccaggtcaaagccgcggttcatacgcttcggctctgcttgcgcgtaatgggg

SEQ ID NO: 256355 - DNA, 53 bp, Artificial
  Synthetic oligonucleotide
aaagcacgttggggggaatgcggtaacgactcgcaggtcattaaaccggattc

SEQ ID NO: 256356 - DNA, 53 bp, Artificial
  Synthetic oligonucleotide
aaagcttttttccgctgcgctcggcatttgacggtaaaccgtcaaatctaccc

SEQ ID NO: 256357 - DNA, 53 bp, Artificial
  Synthetic oligonucleotide
aaagtcgtctggtgtttacgaatttccgagtcggaaattcggtcaatgattta

SEQ ID NO: 256358 - DNA, 58 bp, Artificial
  Synthetic oligonucleotide
aaatcacgttccgttataacttcactagaggcgctaacactcgatgcaaacagactta

SEQ ID NO: 256359 - DNA, 56 bp, Artificial
  Synthetic oligonucleotide
ttgaaaccctgacgcacttcgtttgtctccagtacgcccaaaaaagccagctacgc

SEQ ID NO: 256360 - DNA, 60 bp, Artificial
  Synthetic oligonucleotide
ttcttattctagcgatgtagcttacggacaagagcgcgtgttagttgcttggcaacggat

SEQ ID NO: 256361 - DNA, 50 bp, Artificial
  Synthetic oligonucleotide
aaatgggtttccataaaccggtacgttcacaaattcccccacgagtgacc

SEQ ID NO: 256362 - DNA, 59 bp, Artificial
  Synthetic oligonucleotide
aaattaatgcgcccaacagctgtcaggttttcgcacaccaaccgtagtgcgatgcgccg

SEQ ID NO: 256363 - DNA, 60 bp, Artificial
  Synthetic oligonucleotide
ttctgtaaggctctcagattcttctctgctgctctactcatcatgtaatagccgccagtc

SEQ ID NO: 256364 - DNA, 57 bp, Artificial
  Synthetic oligonucleotide
gaccaacgatgcacttatcgccgcgctttctcatctggtttccgaaggtcgtaaccc

SEQ ID NO: 256365 - DNA, 58 bp, Artificial
  Synthetic oligonucleotide
aaattcttatacgccaaggaggattaagcgagatttttgctgagttgatccgattcac

SEQ ID NO: 256366 - DNA, 60 bp, Artificial
  Synthetic oligonucleotide
ttctgagctctatcagctctcaaggcaatcaagcgtacgcgaaataggacttaaaaagct

SEQ ID NO: 256367 - DNA, 56 bp, Artificial
  Synthetic oligonucleotide
ttctctagctgagtcctcttttgcttgtaaataacttccaagtccttcttggaact

SEQ ID NO: 256368 - DNA, 58 bp, Artificial
  Synthetic oligonucleotide
gcgcgcttccgttgtccaagtggcccaagagtttgacagcggcatggttagtcccggc

SEQ ID NO: 256369 - DNA, 60 bp, Artificial
  Synthetic oligonucleotide
ttttatctgcctgttccatgcttcaaaatccaacgcactgtatgccttgatgaaggtaga

SEQ ID NO: 256370 - DNA, 55 bp, Artificial
  Synthetic oligonucleotide
ttttagaacgccctaataggacgtttatgcgaacaataggcgcctacggcgcaaa

SEQ ID NO: 256371 - DNA, 54 bp, Artificial
  Synthetic oligonucleotide
aaaactcgcgccactgcgatcgaaaagcgtatttaaaaggcccagagtttaatc

SEQ ID NO: 256372 - DNA, 60 bp, Artificial
  Synthetic oligonucleotide
gcgcttcccagttagcaactacgtcgccagctgttaccgcatcgttgtccgctttgctta

SEQ ID NO: 256373 - DNA, 56 bp, Artificial
  Synthetic oligonucleotide
tttgcacgtctaacgagacgtcttgagccaactctttaaaagaaagcacgcccgtg

SEQ ID NO: 256374 - DNA, 52 bp, Artificial
  Synthetic oligonucleotide
aaaagttccggcttcacggaacgattaacatcaccgagaaggtagttaatac

SEQ ID NO: 256375 - DNA, 56 bp, Artificial
  Synthetic oligonucleotide
gttcgctggaaaacttctagcctatttgttagatgtagatctaacagggtaccacc

SEQ ID NO: 256376 - DNA, 57 bp, Artificial
  Synthetic oligonucleotide
aggaggcaatccgtctatctgttcgccattgaataccgtagcaaagaacacccgcgg

SEQ ID NO: 256377 - DNA, 60 bp, Artificial
  Synthetic oligonucleotide
tttgagcaccaatctccttacagtgaaacgttagctcgcctcattcgtcacatggtaact

SEQ ID NO: 256378 - DNA, 60 bp, Artificial
  Synthetic oligonucleotide
cccagtggacctatgttgtcctcaaacgcttctgcacgcatcgcagcatggttgaagtag

SEQ ID NO: 256379 - DNA, 55 bp, Artificial
  Synthetic oligonucleotide
ctacgcttcgggctttttcgagcgcaccggctaattgttgaaaatagacgttaca

SEQ ID NO: 256380 - DNA, 55 bp, Artificial
  Synthetic oligonucleotide
tttagttagttcgagaaggtttgctactgcgtctttaattggcactttggctacc

SEQ ID NO: 256381 - DNA, 60 bp, Artificial
  Synthetic oligonucleotide
gcgctatttccaaagtggtgtgtctaacggtgcaaagtcagctgggatctcgtcaaatcc

SEQ ID NO: 256382 - DNA, 51 bp, Artificial
  Synthetic oligonucleotide
ctacccgcaagcgtgagacgctttacgaaccttacgttaaatcccttcgtt

SEQ ID NO: 256383 - DNA, 56 bp, Artificial
  Synthetic oligonucleotide
aaacccttgttcgtactttatgccctcactgcaacttatctcttgatgacgttacc

SEQ ID NO: 256384 - DNA, 58 bp, Artificial
  Synthetic oligonucleotide
ttgtctcttttgagccgactaaccctagtcttatgattgactggctctctgttaagtt

SEQ ID NO: 256385 - DNA, 55 bp, Artificial
  Synthetic oligonucleotide
aaaccgtatttttagctgctcgatggacgtactatacggaagggacatactcaaa

SEQ ID NO: 256386 - DNA, 60 bp, Artificial
  Synthetic oligonucleotide
ctaattgctctggagtctcattatctttgataacgtgaccacaatactttgtgctaccag

SEQ ID NO: 256387 - DNA, 55 bp, Artificial
  Synthetic oligonucleotide
aggattattgacaggtttttggtgtgatagacaaactcaaaatatcgataccttt

SEQ ID NO: 256388 - DNA, 59 bp, Artificial
  Synthetic oligonucleotide
ttgtatccacgatgaatagggtcactctcccctgaaatttgacggtctaagtcactgga

SEQ ID NO: 256389 - DNA, 56 bp, Artificial
  Synthetic oligonucleotide
ttggtttttgggaaagctcatggcgaaaaaccgcgggtgcagcaaattggatatgg

SEQ ID NO: 256390 - DNA, 56 bp, Artificial
  Synthetic oligonucleotide
ttataggctaacttacggatttaacataaggggcataatgaacaccaattttgtgc

SEQ ID NO: 256391 - DNA, 59 bp, Artificial
  Synthetic oligonucleotide
aacgccacttgttcatttacaacgtatgtgtttgtggtgccgatcttcacgatctgtac

SEQ ID NO: 256392 - DNA, 57 bp, Artificial
  Synthetic oligonucleotide
ttagttggacaatacaacgggcaagtagcattcggtcaagaacgcttaccagttcaa

SEQ ID NO: 256393 - DNA, 60 bp, Artificial
  Synthetic oligonucleotide
ctcacgctcgagtaactgcaccgtgtgagtgtcggtgccgagttgctttgctatgtcgcg

SEQ ID NO: 256394 - DNA, 60 bp, Artificial
  Synthetic oligonucleotide
ttagtcacccatgcgatagttcagtcagaattgagggcagcataataaggtttgtaggat

SEQ ID NO: 256395 - DNA, 52 bp, Artificial
  Synthetic oligonucleotide
cgttcgcaacgttcgcaacgttcgatttaggttactgtttgggttgtcggga

SEQ ID NO: 256396 - DNA, 58 bp, Artificial
  Synthetic oligonucleotide
ttagaaacacgtcaggccgttggtgcacactacacaaaccaaaagcgaactgatgacg

SEQ ID NO: 256397 - DNA, 60 bp, Artificial
  Synthetic oligonucleotide
ttactccacaagagctacaagctttactcttacaagagttatagatgactttgcggtgct

SEQ ID NO: 256398 - DNA, 60 bp, Artificial
  Synthetic oligonucleotide
gctttgctaaatcgagtctcacaccatcttgtttgtggtagtacggctggagcacacgcc

SEQ ID NO: 256399 - DNA, 54 bp, Artificial
  Synthetic oligonucleotide
ttacccttttttactatggataatagattgccaagcagccgttttaatcttggt

SEQ ID NO: 256400 - DNA, 60 bp, Artificial
  Synthetic oligonucleotide
ttacacacgggtaatctatgagtaatctctacacaatcaaagaagcttgtgatcactttg

SEQ ID NO: 256401 - DNA, 52 bp, Artificial
  Synthetic oligonucleotide
aactcgcagttaaaaacctagattttcaactaacgtctttagtccatatttg

SEQ ID NO: 256402 - DNA, 59 bp, Artificial
  Synthetic oligonucleotide
ttaatgtttgtcattcaaatttggcagcttaaacgagtaattcctagacatatgaagcc

SEQ ID NO: 256403 - DNA, 54 bp, Artificial
  Synthetic oligonucleotide
aactcgccggctttaacgactgctgcaaagactcgggttggggtcaaaatctgg

SEQ ID NO: 256404 - DNA, 53 bp, Artificial
  Synthetic oligonucleotide
ctcaggtacagttaagtcctttctatgggtttactagtccttagtggcttaaa

SEQ ID NO: 256405 - DNA, 60 bp, Artificial
  Synthetic oligonucleotide
gcggttacatctgtcgtttacttagctgtcattcaagtagttgcgattctcactgttatg

SEQ ID NO: 256406 - DNA, 60 bp, Artificial
  Synthetic oligonucleotide
ttaaggcgcaaatggagtgttaaacgcagcgcagcaagtttgattctctatttgggtcta

SEQ ID NO: 256407 - DNA, 60 bp, Artificial
  Synthetic oligonucleotide
ctcatacgatacggtcacatactagcttaatcactaaagctaacgcatagcctaaatacg

SEQ ID NO: 256408 - DNA, 57 bp, Artificial
  Synthetic oligonucleotide
ctccaaggacacaacgtctacgggccaacttctatcgaagttggagctacagaaatg

SEQ ID NO: 256409 - DNA, 60 bp, Artificial
  Synthetic oligonucleotide
gcccgctacttagttcgcttagaagctggtgcgcaccgcagatacttagacgctctaaac

SEQ ID NO: 256410 - DNA, 60 bp, Artificial
  Synthetic oligonucleotide
cgtttggttactctggcaagctgacgcttcgtccatgtgtacgaataactgtatggcgca

SEQ ID NO: 256411 - DNA, 58 bp, Artificial
  Synthetic oligonucleotide
aacagaaaaacttaatacgattcgctcccgcaatcttcctgtctggatgtattggcaa

SEQ ID NO: 256412 - DNA, 60 bp, Artificial
  Synthetic oligonucleotide
aacagacttgcttgagtagttgtgattatagctatctagcctgtaattacaagagacgaa

SEQ ID NO: 256413 - DNA, 60 bp, Artificial
  Synthetic oligonucleotide
ttcgctctcaacgcggtgggtcaaggcgacattcgcaggctcattctgcctatacgcgcg

SEQ ID NO: 256414 - DNA, 56 bp, Artificial
  Synthetic oligonucleotide
aacagtgttaacgttgcggtatgtttacttcgtgctaacttcacacaaaagtcata

SEQ ID NO: 256415 - DNA, 58 bp, Artificial
  Synthetic oligonucleotide
ttccgtgcttgcagccttgtgcatttaggcctttcaactgccttccacgaagacccgt

SEQ ID NO: 256416 - DNA, 58 bp, Artificial
  Synthetic oligonucleotide
ttccccgaatcgagtatcacgctcagctgcgcttaacccttgccaaccctgaatagtt

SEQ ID NO: 256417 - DNA, 60 bp, Artificial
  Synthetic oligonucleotide
aaccgaaagatattcaacacgcttgaaaagcatggtgcgtggatcaattcgcaatggcct

SEQ ID NO: 256418 - DNA, 58 bp, Artificial
  Synthetic oligonucleotide
aaccgaagtaataacggtcccaagcgatgtgtgtatcacagagagttgtgaagttgtc

SEQ ID NO: 256419 - DNA, 55 bp, Artificial
  Synthetic oligonucleotide
aaccgccctatcctaccctgaggataccgcgggtggactgatgaacaccgacgta

SEQ ID NO: 256420 - DNA, 55 bp, Artificial
  Synthetic oligonucleotide
gacccaaaaccgactcacctcaccgctgacgttgggaacctcatccggtgcttgg

SEQ ID NO: 256421 - DNA, 57 bp, Artificial
  Synthetic oligonucleotide
ctcaaatttatcttgcaagcacaattataaccccttatattcaccccataggacaaa

SEQ ID NO: 256422 - DNA, 54 bp, Artificial
  Synthetic oligonucleotide
ttatttaagagcaatggccaacaagtaaaaacggttagcagggttagggatatg

SEQ ID NO: 256423 - DNA, 55 bp, Artificial
  Synthetic oligonucleotide
aacctaatttttaccgatacagctagaaccatccttggcagcttaccactactag

SEQ ID NO: 256424 - DNA, 50 bp, Artificial
  Synthetic oligonucleotide
aaccttccctttagccccaaacgtttccccttgaacgtcaacagtgatgg

SEQ ID NO: 256425 - DNA, 57 bp, Artificial
  Synthetic oligonucleotide
aaccttctacgactagatagtgctccccctcatctaccgttccaaagccatccacga

SEQ ID NO: 256426 - DNA, 54 bp, Artificial
  Synthetic oligonucleotide
cgttgacacgttcactgtgtaaataaccggcgcgttttaggtacgagatagctt

SEQ ID NO: 256427 - DNA, 58 bp, Artificial
  Synthetic oligonucleotide
ttatctcttctgagacgtcttaaattttcgcctatagccacattattgacctcaaatt

SEQ ID NO: 256428 - DNA, 58 bp, Artificial
  Synthetic oligonucleotide
aacgactttacgcttgtcgtcttctggagtgtttacagagtcggcgccacgtgcacca

SEQ ID NO: 256429 - DNA, 56 bp, Artificial
  Synthetic oligonucleotide
acattccaggtcaaagccgcggttcatacgctttggttccgcttgcgcgtaatggg

SEQ ID NO: 256430 - DNA, 60 bp, Artificial
  Synthetic oligonucleotide
accgaccagagacaccgatacaatgctggacgcattgtatcggctctttgtatcgacagg

SEQ ID NO: 256431 - DNA, 59 bp, Artificial
  Synthetic oligonucleotide
catagcgttacgtcactcacctccgcacttatcgaaatatgtgacaaggtaacacgtaa

SEQ ID NO: 256432 - DNA, 60 bp, Artificial
  Synthetic oligonucleotide
tcgactcgctacaaaaagcacagccggaactgtgggagttgttggatgtcggcttagcag

SEQ ID NO: 256433 - DNA, 57 bp, Artificial
  Synthetic oligonucleotide
ccctgtcgagtaagcagacataaccttcaggtggacttcaaaaagtcggtcaatatg

SEQ ID NO: 256434 - DNA, 58 bp, Artificial
  Synthetic oligonucleotide
tcgttctaacaagttggtgatccatacgaacagctgaccaaacttgtccgcaacaaac

SEQ ID NO: 256435 - DNA, 59 bp, Artificial
  Synthetic oligonucleotide
acatccctacccaaagagcatgttaatactgccacctttgcatctttgttagaccaaca

SEQ ID NO: 256436 - DNA, 60 bp, Artificial
  Synthetic oligonucleotide
ctgcttaaagatcctgtttattgccaagagtccgcaagaatcatgctgcatacaagtatc

SEQ ID NO: 256437 - DNA, 60 bp, Artificial
  Synthetic oligonucleotide
acatactaggtctgcaatatataaggcgatattagtatcgagaaactcattggctgtggg

SEQ ID NO: 256438 - DNA, 57 bp, Artificial
  Synthetic oligonucleotide
accgagtattcgataagctacgaagggttaatcaagccgttgttgggtgcagcatta

SEQ ID NO: 256439 - DNA, 56 bp, Artificial
  Synthetic oligonucleotide
cgtaggcgagaagccgctattggcggccgcttaaaatagcggcctaggtatctaac

SEQ ID NO: 256440 - DNA, 58 bp, Artificial
  Synthetic oligonucleotide
acagtcgaaccgccgatatggcacaaggggccacctatccccatgtcattaccgccat

SEQ ID NO: 256441 - DNA, 59 bp, Artificial
  Synthetic oligonucleotide
tcgaccaaccgccgttttgccagcaatagagcaataggaatccacctaaactgccgcca

SEQ ID NO: 256442 - DNA, 57 bp, Artificial
  Synthetic oligonucleotide
cgcgactcgcaagtgagtctacccccatcaataagcgacactggtacggtttttatc

SEQ ID NO: 256443 - DNA, 60 bp, Artificial
  Synthetic oligonucleotide
tcatgtaaaccgccctgtgacgctgttccatcagctacgcaatgccttgattgctcttac

SEQ ID NO: 256444 - DNA, 60 bp, Artificial
  Synthetic oligonucleotide
acagtattgcccttgcttacagggtatgagctattgattgcagccgcccctctgccttgt

SEQ ID NO: 256445 - DNA, 55 bp, Artificial
  Synthetic oligonucleotide
tctagagtgttaaaaaacgctcctagcgcttctgagggcgtcagaggggcgtttt

SEQ ID NO: 256446 - DNA, 60 bp, Artificial
  Synthetic oligonucleotide
accttatagagccttgcaacttggatctccgtattagcgcgttgtacgtctatcttgcga

SEQ ID NO: 256447 - DNA, 55 bp, Artificial
  Synthetic oligonucleotide
acagcgatattaggtgtacaaattgacacgctaaacgacggtttaggtgtacaaa

SEQ ID NO: 256448 - DNA, 58 bp, Artificial
  Synthetic oligonucleotide
gctaatccgcctagaatcgccctacgctccgttttaatgatgaccctagtcgcttcta

SEQ ID NO: 256449 - DNA, 56 bp, Artificial
  Synthetic oligonucleotide
ctgtaccttgcccgaaggggataagtgggattatcagtttgtgttggtcggcaata

SEQ ID NO: 256450 - DNA, 52 bp, Artificial
  Synthetic oligonucleotide
acagatttttacacctgtaaggtcaactttccgagggtctaaaccatacaac

SEQ ID NO: 256451 - DNA, 60 bp, Artificial
  Synthetic oligonucleotide
tctgcaatgctcacttctgacattcttaatactcgcattaaggtcatgttcgagattata

SEQ ID NO: 256452 - DNA, 60 bp, Artificial
  Synthetic oligonucleotide
tctggaatggtaagcgctacgttggcacccttgcctcacagctcgaaaacacacagctca

SEQ ID NO: 256453 - DNA, 55 bp, Artificial
  Synthetic oligonucleotide
gtgagtaaataaaagccaccacattaacttacttattagtgtggtggctttagtg

SEQ ID NO: 256454 - DNA, 60 bp, Artificial
  Synthetic oligonucleotide
cggtgtagcgcatttagccaaatctaacacaatgcctaacgctgtcattagtataagctc

SEQ ID NO: 256455 - DNA, 60 bp, Artificial
  Synthetic oligonucleotide
cgtagcaatgatgagatcgcaaatgttcgggtagcgcaccacttttaaatctcgaaagaa

SEQ ID NO: 256456 - DNA, 60 bp, Artificial
  Synthetic oligonucleotide
tcgcgctaacgtgccatgctcagtgtggtagtgcttggcttgctcatgggtcatcttgca

SEQ ID NO: 256457 - DNA, 60 bp, Artificial
  Synthetic oligonucleotide
accaggtgatgcatcatttgcgcgtaattcaatggttttggctctacaggctcttcctga

SEQ ID NO: 256458 - DNA, 60 bp, Artificial
  Synthetic oligonucleotide
tcgcttgtgttccagaagccatgctcacctcgacgaaccttgtcctccctatcgatgcgc

SEQ ID NO: 256459 - DNA, 60 bp, Artificial
  Synthetic oligonucleotide
gcgacttggctcacccgaacttgttcgtggtgcttaggagagagaatcgctttggagcga

SEQ ID NO: 256460 - DNA, 60 bp, Artificial
  Synthetic oligonucleotide
tccatcaatggcgtgccatgtggtttcgatgggcgctaagtagtcgcttgacaacacgag

SEQ ID NO: 256461 - DNA, 60 bp, Artificial
  Synthetic oligonucleotide
ctgggtgcactaagacaggattgatggcttcaagttgccgaatggctcgttgttgagcgg

SEQ ID NO: 256462 - DNA, 60 bp, Artificial
  Synthetic oligonucleotide
tccatccatccgcttactgtatcccagatgcctgttatttttgccaatccagaatcgaag

SEQ ID NO: 256463 - DNA, 60 bp, Artificial
  Synthetic oligonucleotide
tcggctggacgtaccgcagttggatcggacatagcctgtgtaccttgaactgactgcata

SEQ ID NO: 256464 - DNA, 60 bp, Artificial
  Synthetic oligonucleotide
aggcggctcaatcacgctaacgtccggcatgttatcgcgcaaagttgttgctaacaccta

SEQ ID NO: 256465 - DNA, 55 bp, Artificial
  Synthetic oligonucleotide
tcgggaagccacaaaacctgagcccttacccccaccagtggatccgtatctggct

SEQ ID NO: 256466 - DNA, 60 bp, Artificial
  Synthetic oligonucleotide
acccatctgtgggatgtgttccaagccgcctccgttggactcactggacgttcgctctca

SEQ ID NO: 256467 - DNA, 60 bp, Artificial
  Synthetic oligonucleotide
tccatacaagatattatgcacgatggacgattgccaagaacgctatgcaccactccgcta

SEQ ID NO: 256468 - DNA, 60 bp, Artificial
  Synthetic oligonucleotide
gctagagatcggctttttctgcgaatgctatgttgttagattgagggtctaacacattct

SEQ ID NO: 256469 - DNA, 58 bp, Artificial
  Synthetic oligonucleotide
tccaggtcaaagccgcggttcatacgcttcggctccgcttgcgcgtaatggggaacac

SEQ ID NO: 256470 - DNA, 54 bp, Artificial
  Synthetic oligonucleotide
accccctgctacgcattggataaaaacatcccgtgccaaaggtgaaacctttga

SEQ ID NO: 256471 - DNA, 54 bp, Artificial
  Synthetic oligonucleotide
accacccccatctaagagagtggttctggtaggtagtccaattggtagtggtac

SEQ ID NO: 256472 - DNA, 56 bp, Artificial
  Synthetic oligonucleotide
tcggggaaagtagcaccaggtttcgtcctgggcctgttgcgaaggtaatgctagaa

SEQ ID NO: 256473 - DNA, 60 bp, Artificial
  Synthetic oligonucleotide
tcgcatgcaactgccaatacctgcatgcaataccaagcaaccgcctatgtaacgttatct

SEQ ID NO: 256474 - DNA, 60 bp, Artificial
  Synthetic oligonucleotide
ctggcgcaggctaaacgtgagctttcattggctcgtatccggctgagcgtagttgagggt

SEQ ID NO: 256475 - DNA, 60 bp, Artificial
  Synthetic oligonucleotide
aggcggtcagtacctagatggcacgacagacatcacgcgtacaattgcgatcggtcagcc

SEQ ID NO: 256476 - DNA, 55 bp, Artificial
  Synthetic oligonucleotide
tcgggtcttagtgatacccgacttttgtaccacggatggtatcacaaccactaaa

SEQ ID NO: 256477 - DNA, 58 bp, Artificial
  Synthetic oligonucleotide
tcggtaactgtccgcaaaccttgtttgacccgagacaagagccgatgtcaccttggca

SEQ ID NO: 256478 - DNA, 58 bp, Artificial
  Synthetic oligonucleotide
tccactaacccaacatgtagcggtactactccgcgaagcaacgccagttcgactggcc

SEQ ID NO: 256479 - DNA, 60 bp, Artificial
  Synthetic oligonucleotide
tcgtatggagaaatcccacattcagccctcatccatggctcgcgtgatggcaagtaccca

SEQ ID NO: 256480 - DNA, 60 bp, Artificial
  Synthetic oligonucleotide
tcataatggtgctgttctttcaccacaagaaatagtaagcacattacgttctttctataa

SEQ ID NO: 256481 - DNA, 60 bp, Artificial
  Synthetic oligonucleotide
tccgttgcttgttgtaagcgagattccgcttcaccatgcagttgtggtaagcctgggtga

SEQ ID NO: 256482 - DNA, 60 bp, Artificial
  Synthetic oligonucleotide
acacaagatcaggccgatgcttaaacttcataatatgctcgtattgcttgaagtttccta

SEQ ID NO: 256483 - DNA, 53 bp, Artificial
  Synthetic oligonucleotide
accggtcttcgtatcacaaatagacgttgctatttcacccaacccttacaccg

SEQ ID NO: 256484 - DNA, 55 bp, Artificial
  Synthetic oligonucleotide
accggttaccgagataccccgatgcaatcggcggtattaatggccgagcgactta

SEQ ID NO: 256485 - DNA, 60 bp, Artificial
  Synthetic oligonucleotide
tcttattctcacctctgagattgaaacgctaggcaactttttacaaggcacagaatcggc

SEQ ID NO: 256486 - DNA, 60 bp, Artificial
  Synthetic oligonucleotide
catgccttaccatgcaagggataagcagcaacgaactaaacgcccgatctcgtctctgtc

SEQ ID NO: 256487 - DNA, 60 bp, Artificial
  Synthetic oligonucleotide
ggaatacatgcgtgatatgccccttatggaacaataggcgcctacggcgcaaatcaaaag

SEQ ID NO: 256488 - DNA, 59 bp, Artificial
  Synthetic oligonucleotide
tccggcagctggctacggtacccgattcctaccagcgactaagtcgatgcccaaagaga

SEQ ID NO: 256489 - DNA, 60 bp, Artificial
  Synthetic oligonucleotide
tcttcgctatatctccatagcaaagctataaccaatggatcttgactcaacttcaccgta

SEQ ID NO: 256490 - DNA, 50 bp, Artificial
  Synthetic oligonucleotide
tcccctttaggggttccgcgcccgtagggccgccaaaggcgctttgtggt

SEQ ID NO: 256491 - DNA, 60 bp, Artificial
  Synthetic oligonucleotide
tcccggtattggtttctcgctcgacctcattggggtgcatcaatagcaccagtgcgacct

SEQ ID NO: 256492 - DNA, 59 bp, Artificial
  Synthetic oligonucleotide
tcctggttaattttcgattttcaggccctatttaacatatgatatgtaatgcgcactaa

SEQ ID NO: 256493 - DNA, 57 bp, Artificial
  Synthetic oligonucleotide
ccagagacttcgagtcagtggttgcttgtattaatgaaaattcggaacgctggttaa

SEQ ID NO: 256494 - DNA, 60 bp, Artificial
  Synthetic oligonucleotide
tcctgatgttgccatgtccaagcgatgaatgattaacccgccagtcgcatcggggtaacg

SEQ ID NO: 256495 - DNA, 57 bp, Artificial
  Synthetic oligonucleotide
ctggcttgaaagatctacttgttgatttagaaacgctttccacctgtattacatccc

SEQ ID NO: 256496 - DNA, 60 bp, Artificial
  Synthetic oligonucleotide
gcgagcctgccgcattaagtcgattgttagatagccgagtgtactttgaccaacaaggta

SEQ ID NO: 256497 - DNA, 59 bp, Artificial
  Synthetic oligonucleotide
ctcgcaaggttgatagcttaagtggattcgaagtgagtgtggtaacacaaagtgtcacc

SEQ ID NO: 256498 - DNA, 59 bp, Artificial
  Synthetic oligonucleotide
gacgaaccgcaagaggcacagttacgatggaaatagggttagattggcattccaggtca

SEQ ID NO: 256499 - DNA, 58 bp, Artificial
  Synthetic oligonucleotide
gacgggcttacccgtctatgcgttctcggtcgatggcctaggactgcctcaataccca

SEQ ID NO: 256500 - DNA, 59 bp, Artificial
  Synthetic oligonucleotide
ttgcgagctgcaatttatagtgcagaccttatccgaagagtcatcgaaacagtccaaaa

SEQ ID NO: 256501 - DNA, 59 bp, Artificial
  Synthetic oligonucleotide
gccaagctcaataaaaccgcctcttgtggaccgtgtgagagcaaatggcgcgagcgacg

SEQ ID NO: 256502 - DNA, 51 bp, Artificial
  Synthetic oligonucleotide
tcgtgggatgccaccagcgttaccaagtaacgtaaaaagggcgtttaaaat

SEQ ID NO: 256503 - DNA, 57 bp, Artificial
  Synthetic oligonucleotide
gagtgtgcacaacccttcgggacggtacgctttgcacacaaaccgtcaatccttgcc

SEQ ID NO: 256504 - DNA, 59 bp, Artificial
  Synthetic oligonucleotide
cctaccatgcgcagttggcgcaccgtgttcaccactcgcctcaatttgaaaacggccgc

SEQ ID NO: 256505 - DNA, 59 bp, Artificial
  Synthetic oligonucleotide
agcgagcatgatggctgcgaataggtactggacaccgtgagtcgcgacaagcgaaacca

SEQ ID NO: 256506 - DNA, 58 bp, Artificial
  Synthetic oligonucleotide
tcgttggtttactcgaagtggtttgattcatcccggtggcggttcatatgccgcacgc

SEQ ID NO: 256507 - DNA, 54 bp, Artificial
  Synthetic oligonucleotide
taaccacggttgaagtgaagaaaggggcgtttaggccaaccaaagagccgctgc

SEQ ID NO: 256508 - DNA, 59 bp, Artificial
  Synthetic oligonucleotide
caccgcagaaaagcgctcaaccgaatcatgacggaccactacgccgactgtgaagctcc

SEQ ID NO: 256509 - DNA, 52 bp, Artificial
  Synthetic oligonucleotide
aggctcagggggtatctcggtatatatgcgaagttacgaaccccccaaaaac

SEQ ID NO: 256510 - DNA, 57 bp, Artificial
  Synthetic oligonucleotide
tgcgcctttttggatgaatccgtgatgggaaccgagtggggcgcgtccagtttatgg

SEQ ID NO: 256511 - DNA, 59 bp, Artificial
  Synthetic oligonucleotide
tcaaaccttgccttttcgctatcaaaagcgcaccctttgcagcgctcgtcacagaacga

SEQ ID NO: 256512 - DNA, 59 bp, Artificial
  Synthetic oligonucleotide
gatctcccctcggcttggtgcgcttatgttggagtgcggattggtttcatcgcggctca

SEQ ID NO: 256513 - DNA, 59 bp, Artificial
  Synthetic oligonucleotide
gtccacgtcccgagctatccagctcgagtttgcgggcaagttctgcggcatattcccct

SEQ ID NO: 256514 - DNA, 57 bp, Artificial
  Synthetic oligonucleotide
aaatttcacccttcggtgtactcatccgaagataaagcttatcaccctgccatgtta

SEQ ID NO: 256515 - DNA, 59 bp, Artificial
  Synthetic oligonucleotide
tacaagccgtcacatggatatgtgaatgaccccacggaccggaccagctacgttccact

SEQ ID NO: 256516 - DNA, 59 bp, Artificial
  Synthetic oligonucleotide
cgcacgctgtgaaggttgcacgctcgcttattatcgaagattacttacctagtttaagc

SEQ ID NO: 256517 - DNA, 59 bp, Artificial
  Synthetic oligonucleotide
gttcaagcggcattattcaaccgtttgaatggaggtgcagcacttgaatctagtcccaa

SEQ ID NO: 256518 - DNA, 59 bp, Artificial
  Synthetic oligonucleotide
ctaaacgagtgcgcgctaacacttgagagcgagacaacgccaccttatgccgatttaac

SEQ ID NO: 256519 - DNA, 59 bp, Artificial
  Synthetic oligonucleotide
tcaactgcagcgatttggaaacggtactcactggtctgcggagagaaatgcgctggctg

SEQ ID NO: 256520 - DNA, 60 bp, Artificial
  Synthetic oligonucleotide
cagtttccactgtcgcttttttgtatctgctagctagccgacctgagacaaatatcgacg

SEQ ID NO: 256521 - DNA, 59 bp, Artificial
  Synthetic oligonucleotide
gcttaatttgcaatgaatcattaaactgatagaacctatttgtcagcgttatgccatgc

SEQ ID NO: 256522 - DNA, 58 bp, Artificial
  Synthetic oligonucleotide
cggttagtgcgaattatactttcgagcatatttcgaaattcagctctaggggcttgga

SEQ ID NO: 256523 - DNA, 59 bp, Artificial
  Synthetic oligonucleotide
gccatgctcagtgtggtagtgcttggcttgctcatgggtcatcttgcagtgcggacata

SEQ ID NO: 256524 - DNA, 59 bp, Artificial
  Synthetic oligonucleotide
gaacgacgtcttaaaatctcgctatctttaccactgtgacgctctgatggcgtaacgta

SEQ ID NO: 256525 - DNA, 59 bp, Artificial
  Synthetic oligonucleotide
gcaaggcaaagcgcgagaaatgcagtctctgcgtcatcccctcactgagcgcataatga

SEQ ID NO: 256526 - DNA, 59 bp, Artificial
  Synthetic oligonucleotide
cgttatgctgcgcatcgagagaatattgtagctaaaaggctgctagacatcgaagctca

SEQ ID NO: 256527 - DNA, 59 bp, Artificial
  Synthetic oligonucleotide
atcaagggtgtccgtttagagagcggtgcgagcatcgagagacgcgttgccaatacgaa

SEQ ID NO: 256528 - DNA, 59 bp, Artificial
  Synthetic oligonucleotide
taaaaccgcctcttgtggaccgtgtgagagcaaatggcgcgagcgacgactatagccaa

SEQ ID NO: 256529 - DNA, 56 bp, Artificial
  Synthetic oligonucleotide
ttcgaccacagagcagggctgttaccttccacaaacaaaggataaccccttatgta

SEQ ID NO: 256530 - DNA, 59 bp, Artificial
  Synthetic oligonucleotide
cgatatggcacaaggggccacctatccccatgtcattaccgccattcagagcaaaggcg

SEQ ID NO: 256531 - DNA, 60 bp, Artificial
  Synthetic oligonucleotide
gtcttactatgtcgataaggtgaaagccctctcagaagccccgtgggtgcgtctgcatag

SEQ ID NO: 256532 - DNA, 59 bp, Artificial
  Synthetic oligonucleotide
cagagtaagatatcttgcttggactgtattctctcttcgttactaaatgttcagtattg

SEQ ID NO: 256533 - DNA, 57 bp, Artificial
  Synthetic oligonucleotide
cggtaacgagggctcgtgtcatcgtcaattttaccgtcaatgtctctggccgattta

SEQ ID NO: 256534 - DNA, 55 bp, Artificial
  Synthetic oligonucleotide
ttgaccgataataacaacctggtcaacgtacttttggaaggtggcaaagccgaca

SEQ ID NO: 256535 - DNA, 56 bp, Artificial
  Synthetic oligonucleotide
tctctcgccctagcttccgcacgtaagacggggaacaacgagagatcaaacccaaa

SEQ ID NO: 256536 - DNA, 59 bp, Artificial
  Synthetic oligonucleotide
aatcaacacctgtttactcgcacaccatccgccaacaaacgatactggatattctaatg

SEQ ID NO: 256537 - DNA, 56 bp, Artificial
  Synthetic oligonucleotide
gcaggctaattgtatctaataaataggctcgtcccgcgatttttcaaactttacga

SEQ ID NO: 256538 - DNA, 59 bp, Artificial
  Synthetic oligonucleotide
ttcgatacagggaaagtgaacgtcatggtctgattgaacaggtccatatccgttgtgac

SEQ ID NO: 256539 - DNA, 56 bp, Artificial
  Synthetic oligonucleotide
acgttcaatgcccacctaaactgggcaaaaggcgcaaccacaagcacccaagccaa

SEQ ID NO: 256540 - DNA, 59 bp, Artificial
  Synthetic oligonucleotide
gggctcaattcactacgtacgcgctgggcactccaatttgacgcttcaccttggcagta

SEQ ID NO: 256541 - DNA, 59 bp, Artificial
  Synthetic oligonucleotide
aacataacttcaactttgattgtccaaagcgatccattaacagcactatggttgcctat

SEQ ID NO: 256542 - DNA, 60 bp, Artificial
  Synthetic oligonucleotide
gacgatttatcatgactgcgcacaactgcgttcgagtgcgtgtggctgcgtttcaatgcg

SEQ ID NO: 256543 - DNA, 57 bp, Artificial
  Synthetic oligonucleotide
gcgtggggatccaacgacaaggtcgaatctttaaatagacgctgatcccaatcgtct

SEQ ID NO: 256544 - DNA, 59 bp, Artificial
  Synthetic oligonucleotide
tagttggcccctttcggtttctcagtctgctgacgcaagttgtacagcacatgcgcgac

SEQ ID NO: 256545 - DNA, 56 bp, Artificial
  Synthetic oligonucleotide
aggactcgggcgcaacattaaacatcgcggaccaacgcacatctttacccactggt

SEQ ID NO: 256546 - DNA, 59 bp, Artificial
  Synthetic oligonucleotide
agggacaccgctcagggaacaagtgatgtgagctaacgaggattgttggtagaccagga

SEQ ID NO: 256547 - DNA, 58 bp, Artificial
  Synthetic oligonucleotide
aatcgcttggtacttatcgttcgcttgcttagccaaatctatattggacgccaaaaca

SEQ ID NO: 256548 - DNA, 59 bp, Artificial
  Synthetic oligonucleotide
gtttaccagaaagtgtcgcggcgcttagccctagcgatcacattgccaggcatacgcat

SEQ ID NO: 256549 - DNA, 59 bp, Artificial
  Synthetic oligonucleotide
gatcgttctggatagtccgaatctcgatagaacgggcgtttaccatctttgcgcgtggc

SEQ ID NO: 256550 - DNA, 58 bp, Artificial
  Synthetic oligonucleotide
gctaagttgagtgaattgctctcgcaatctaatggcaaccctccagtagatttgcctg

SEQ ID NO: 256551 - DNA, 58 bp, Artificial
  Synthetic oligonucleotide
ccggtgcttagccaatacaagccgtcacatggatatgtgaatgaccccacggaccgga

SEQ ID NO: 256552 - DNA, 55 bp, Artificial
  Synthetic oligonucleotide
ccacgctcgttttcaccgtggagacggaatcgaaagtggtatgggttgcctcgcg

SEQ ID NO: 256553 - DNA, 58 bp, Artificial
  Synthetic oligonucleotide
gtctgcatagcaatgatcgacggtgggttatggttgacttcgataacggcaacccttt

SEQ ID NO: 256554 - DNA, 58 bp, Artificial
  Synthetic oligonucleotide
cacattactcggtagataagatagttcgattactgaatatacctgcaaggaaaatacg

SEQ ID NO: 256555 - DNA, 58 bp, Artificial
  Synthetic oligonucleotide
ggtggttctgcctatctagagtgttaaaaaacgctcctagcgcttctgagggcgtcag

SEQ ID NO: 256556 - DNA, 58 bp, Artificial
  Synthetic oligonucleotide
cgctcttagctgagtgggtattcctatgcgcgtcatttatggcggtataaaaatcgta

SEQ ID NO: 256557 - DNA, 58 bp, Artificial
  Synthetic oligonucleotide
cctgaccaacgctctgggtgtcgctctcttgctaccgacaacacatccgaacgacgtc

SEQ ID NO: 256558 - DNA, 58 bp, Artificial
  Synthetic oligonucleotide
tgaagtgtgacaatgtcacttccggtgtgttgttctactggcaggttgagcatatccc

SEQ ID NO: 256559 - DNA, 55 bp, Artificial
  Synthetic oligonucleotide
acacaaccaccttacgtgcctgcttttggtcaagcggattcaaccaacgcccacc

SEQ ID NO: 256560 - DNA, 58 bp, Artificial
  Synthetic oligonucleotide
cgcatatagtagtcagagatacgatttcaactgttcaggaggaccagaaggattcgtg

SEQ ID NO: 256561 - DNA, 58 bp, Artificial
  Synthetic oligonucleotide
gaagcgcaattagttgagttagcgttgccacgtttagacgggctactcgcgagcggcg

SEQ ID NO: 256562 - DNA, 57 bp, Artificial
  Synthetic oligonucleotide
ttcgcgctgaactaaccctccgcaccaaggagcttgttaaacttgggctgaatgttg

SEQ ID NO: 256563 - DNA, 58 bp, Artificial
  Synthetic oligonucleotide
ccgtgttgcttatagcaacggcatttgtgcctatctgcatgttttctctgatgacact

SEQ ID NO: 256564 - DNA, 60 bp, Artificial
  Synthetic oligonucleotide
gacgcaatggcaaattcaagaggttgatgtctcacatcaacctcgataacaggggaaagt

SEQ ID NO: 256565 - DNA, 58 bp, Artificial
  Synthetic oligonucleotide
gtatcaactctatgcgtttatctgctatttccacgttaatggaaataatattgacgcc

SEQ ID NO: 256566 - DNA, 58 bp, Artificial
  Synthetic oligonucleotide
aatcccacattcagccctcatccatggctcgcgtgatggcaagtacccaaagtctcga

SEQ ID NO: 256567 - DNA, 56 bp, Artificial
  Synthetic oligonucleotide
ggttcgcggtcgggtttaacgtgcactgcgagtgagaactggctataatcgccggt

SEQ ID NO: 256568 - DNA, 56 bp, Artificial
  Synthetic oligonucleotide
ccgcatctggacgcttaacaaacgacacaaccgtaccaatagagcccactcgggcg

SEQ ID NO: 256569 - DNA, 53 bp, Artificial
  Synthetic oligonucleotide
aaaggtacggttaatcacgagcttactcatagaccgttctcccctaagtaata

SEQ ID NO: 256570 - DNA, 58 bp, Artificial
  Synthetic oligonucleotide
cagttcagatccaagtcttgttggtctggcggtggcagttcgtcacatccgagtattg

SEQ ID NO: 256571 - DNA, 58 bp, Artificial
  Synthetic oligonucleotide
taacccgccagtcgcatcggggtaacgttgttgtatgcgtgcataaaccgaatcgtga

SEQ ID NO: 256572 - DNA, 58 bp, Artificial
  Synthetic oligonucleotide
gcccctccgccacatgagacgcaacacttcaccctctatgctgcattcaggtgccgca

SEQ ID NO: 256573 - DNA, 58 bp, Artificial
  Synthetic oligonucleotide
ctatctcgtctttaatgtgtaaatctgttgcataacagagagttaaccatgaatgtgg

SEQ ID NO: 256574 - DNA, 58 bp, Artificial
  Synthetic oligonucleotide
tcaatggtcatatcgtaggattttgccattccggtgatcgctgacgtattgctatttg

SEQ ID NO: 256575 - DNA, 60 bp, Artificial
  Synthetic oligonucleotide
gttactagcggtaatcgatcgtaaagtagagaatagcgacctctatcgagacagaagtca

SEQ ID NO: 256576 - DNA, 58 bp, Artificial
  Synthetic oligonucleotide
ggacgctgtgttattgcatgctaagaaagctagcgtaggtaagcgttagattagttgc

SEQ ID NO: 256577 - DNA, 52 bp, Artificial
  Synthetic oligonucleotide
gccgctcccgttaaaggcgacgtttcggggttcattccctagagcccctaga

SEQ ID NO: 256578 - DNA, 58 bp, Artificial
  Synthetic oligonucleotide
tgtggcctgatttccttgcgacaccactcgacgtgagcgatttagccctgcttgctta

SEQ ID NO: 256579 - DNA, 58 bp, Artificial
  Synthetic oligonucleotide
gcgggctattactatcaagcagtgctcactctattgcggttgtctgtgttaactgcgc

SEQ ID NO: 256580 - DNA, 58 bp, Artificial
  Synthetic oligonucleotide
aaatcagagttagacacgactggctcagtgaccaagttggctggcaactgaattcgag

SEQ ID NO: 256581 - DNA, 58 bp, Artificial
  Synthetic oligonucleotide
cggccgttttcaaattgaggcgagtggtgaacacggtgcgccaactgcgcatggtagg

SEQ ID NO: 256582 - DNA, 58 bp, Artificial
  Synthetic oligonucleotide
ttctattttttatggcttgctctgctcgatatattggatcggttattagcattttacg

SEQ ID NO: 256583 - DNA, 58 bp, Artificial
  Synthetic oligonucleotide
accgccacagggttcaattgacagagtgcggacacacaatcgagttgcttgcgaagcg

SEQ ID NO: 256584 - DNA, 58 bp, Artificial
  Synthetic oligonucleotide
gtccacggccatgtcgaacatagagcaaagcgggatcagcttgaaagaaaacttaatg

SEQ ID NO: 256585 - DNA, 54 bp, Artificial
  Synthetic oligonucleotide
cggtactccactcggttttggccgaagcgactaactcaacccagggcaagtgac

SEQ ID NO: 256586 - DNA, 55 bp, Artificial
  Synthetic oligonucleotide
gaatactggacgaataaccgctttcacttgagaacgattaacaggcccaaaataa

SEQ ID NO: 256587 - DNA, 57 bp, Artificial
  Synthetic oligonucleotide
tagcggttttgtgcgtagctatggcgtaagccgtgtgctccgttggagtacccaaga

SEQ ID NO: 256588 - DNA, 57 bp, Artificial
  Synthetic oligonucleotide
gataccccaataaacatgccactcgctcttaagcgagtggcattaagccatagggct

SEQ ID NO: 256589 - DNA, 57 bp, Artificial
  Synthetic oligonucleotide
gtagaagctggacgggtagctggaaacagctacccgatttcaggttgtgaggtacag

SEQ ID NO: 256590 - DNA, 57 bp, Artificial
  Synthetic oligonucleotide
attggctcgtatccggctgagcgtagttgagggtatgtcgagggtgcttgggtgcga

SEQ ID NO: 256591 - DNA, 57 bp, Artificial
  Synthetic oligonucleotide
ggtgtcggatcagctctccgcttgcataaggggtatcgtgcgtggtgtgcccatcgc

SEQ ID NO: 256592 - DNA, 54 bp, Artificial
  Synthetic oligonucleotide
cgacgtgtcgttacgttccgcccgggtcagaagttgaaagctcgcgtagagaac

SEQ ID NO: 256593 - DNA, 54 bp, Artificial
  Synthetic oligonucleotide
aacagaaccttgaacggcccaatcgttaccaccggcagagctcccacctaacga

SEQ ID NO: 256594 - DNA, 57 bp, Artificial
  Synthetic oligonucleotide
atcccttcggtagtcagcgaatagaccttgcggtctggtttgccctcttgtggatcg

SEQ ID NO: 256595 - DNA, 57 bp, Artificial
  Synthetic oligonucleotide
attggggtaaaaggagtcattaatctcaaccgagataacagcacatttgctcgtgtt

SEQ ID NO: 256596 - DNA, 57 bp, Artificial
  Synthetic oligonucleotide
ttcagttgctgcagcggtgtatcggtctattatatttgggtaactaagaaggacagc

SEQ ID NO: 256597 - DNA, 60 bp, Artificial
  Synthetic oligonucleotide
gaagcatgatccagataagatttattatcgatcgatatctaatggaaagctactaacttc

SEQ ID NO: 256598 - DNA, 56 bp, Artificial
  Synthetic oligonucleotide
cgctatcgggtcgtgggctcccctgaacgtcttgggacgttctacgcttgcggctc

SEQ ID NO: 256599 - DNA, 57 bp, Artificial
  Synthetic oligonucleotide
cgaatgagaatttccacggttggacgcaatcggctctagcccgctcaataggcgatc

SEQ ID NO: 256600 - DNA, 57 bp, Artificial
  Synthetic oligonucleotide
acccatgaccgcgcttttaacgcggcctacattgagcacgccctgaaagcctttctc

SEQ ID NO: 256601 - DNA, 57 bp, Artificial
  Synthetic oligonucleotide
aacctgaattagatctcgcgcttcatccctcaggtgggggaatccacgccagcttga

SEQ ID NO: 256602 - DNA, 57 bp, Artificial
  Synthetic oligonucleotide
aaccaactcacgcgggttgcgcgtctgcacaatcaagtgctcagggccgtagtagtt

SEQ ID NO: 256603 - DNA, 57 bp, Artificial
  Synthetic oligonucleotide
cacgggcgaagccgtgtcgaacttgcactggaatgtgggctcaaatcaagacgtgca

SEQ ID NO: 256604 - DNA, 57 bp, Artificial
  Synthetic oligonucleotide
acagcctttcagttcaacgctatctcaccgaaaccttcatgattaatttgcctactg

SEQ ID NO: 256605 - DNA, 55 bp, Artificial
  Synthetic oligonucleotide
tcgtcgaatgaatcgtaatcgttctttttatggggcgacggtatatagcccttta

SEQ ID NO: 256606 - DNA, 55 bp, Artificial
  Synthetic oligonucleotide
gaatttcgcttcgctcattcctatttatcgtctggttaggggatgcccctaaaac

SEQ ID NO: 256607 - DNA, 57 bp, Artificial
  Synthetic oligonucleotide
ggctaacgagtgcaaacacctgtaacgcgatggcgtaaagaaacacatcacgcagtt

SEQ ID NO: 256608 - DNA, 57 bp, Artificial
  Synthetic oligonucleotide
tgctccggggtgctcttcaacggttgtcactgccttcgatggctaccctatggcaca

SEQ ID NO: 256609 - DNA, 57 bp, Artificial
  Synthetic oligonucleotide
gccgctcaatccatcctcaacggttcggttttaacttggcgtcatatcaaccttcac

SEQ ID NO: 256610 - DNA, 57 bp, Artificial
  Synthetic oligonucleotide
ccgccattatattgatgtggtcgtaattggctgtaataaccaataatatatcgagtg

SEQ ID NO: 256611 - DNA, 56 bp, Artificial
  Synthetic oligonucleotide
agttaccatccgcgtgcatggttttaggcaacccagagaaggagggggcgagttga

SEQ ID NO: 256612 - DNA, 56 bp, Artificial
  Synthetic oligonucleotide
cctgggtatttgcttatcggctcggggacgttcattcactgacgcacaccccaggg

SEQ ID NO: 256613 - DNA, 57 bp, Artificial
  Synthetic oligonucleotide
gtcacaccacagcgatgggttcctacaacggtgcatacgcatctcgcctgttccgtt

SEQ ID NO: 256614 - DNA, 57 bp, Artificial
  Synthetic oligonucleotide
tacccatttcgacaatctgtgcgcccgttgccttaatcgcctcgtcaacgtgtgcgt

SEQ ID NO: 256615 - DNA, 57 bp, Artificial
  Synthetic oligonucleotide
ctgaatgcttggcgcacaaaataggccgtgcctcctgcattggggtagcgtttccct

SEQ ID NO: 256616 - DNA, 57 bp, Artificial
  Synthetic oligonucleotide
tggcgggtcaattccagcggagagcaagtaccactgctgcaacgcaacctatcaccg

SEQ ID NO: 256617 - DNA, 57 bp, Artificial
  Synthetic oligonucleotide
ggatgaatccgtgatgggaaccgagtggggcgcgtccagtttatgggccgagcactc

SEQ ID NO: 256618 - DNA, 57 bp, Artificial
  Synthetic oligonucleotide
taagaggtgatctctagccagcatagatatgtcattacacttcgtgaattccatatc

SEQ ID NO: 256619 - DNA, 56 bp, Artificial
  Synthetic oligonucleotide
aggcgtctccattccgcgcgtggccgctacgatgatttgggaaacccgctttcctc

SEQ ID NO: 256620 - DNA, 57 bp, Artificial
  Synthetic oligonucleotide
gttaacgtaaaattgcgtaggcaatttaaagtgagttgcagatctgcaatttttgaa

SEQ ID NO: 256621 - DNA, 57 bp, Artificial
  Synthetic oligonucleotide
gtatgagacaacagtattgataaccactcaaaacacaaggttattagaacggattcg

SEQ ID NO: 256622 - DNA, 57 bp, Artificial
  Synthetic oligonucleotide
cctctttcatggaagaaatcgagcaagacatgcaccgtctagagcaagacggcgaga

SEQ ID NO: 256623 - DNA, 57 bp, Artificial
  Synthetic oligonucleotide
tcaagctggcgtggattcccccacctgagggatgaagcgcgagatctaattcaggtt

SEQ ID NO: 256624 - DNA, 57 bp, Artificial
  Synthetic oligonucleotide
tcttcgtcgtagcaaatctcgtgttgctcgcatggctctagggtaaacataggcgat

SEQ ID NO: 256625 - DNA, 57 bp, Artificial
  Synthetic oligonucleotide
ctatagtcagctggggcaaacttcgttagacaaaggccgtcaatgattggcaccaat

SEQ ID NO: 256626 - DNA, 57 bp, Artificial
  Synthetic oligonucleotide
tcggagaggtagcgtaaccatgagtcaatggctggcgtttgcaacccaattggtggg

SEQ ID NO: 256627 - DNA, 57 bp, Artificial
  Synthetic oligonucleotide
gggcatagcccaaactatccaccggcgaacctcttgctcttcgcggtccacattcca

SEQ ID NO: 256628 - DNA, 57 bp, Artificial
  Synthetic oligonucleotide
ctgagtctaaggcctctctttatcaaatagacaatgcctaactactacaatgaagct

SEQ ID NO: 256629 - DNA, 55 bp, Artificial
  Synthetic oligonucleotide
gcgtttgggtttgatctctcgttattccccgtcttacgtgcggaagctagggcga

SEQ ID NO: 256630 - DNA, 56 bp, Artificial
  Synthetic oligonucleotide
gggaacaccaagagtattcaccgtttcgctgtagtcagctggggcaaacttcgtta

SEQ ID NO: 256631 - DNA, 60 bp, Artificial
  Synthetic oligonucleotide
agcggtaaatcgcgctaacgtgccatgctcagtgtggtagtgcttggcttgctcatgggt

SEQ ID NO: 256632 - DNA, 57 bp, Artificial
  Synthetic oligonucleotide
acaaattgcggcatatatccgaattgaaatcaggacattccattcgactgtatgagt

SEQ ID NO: 256633 - DNA, 57 bp, Artificial
  Synthetic oligonucleotide
gtctcgcaacgattatttgcaagacccgctgacttataagaagcgaacgtaagtgtt

SEQ ID NO: 256634 - DNA, 57 bp, Artificial
  Synthetic oligonucleotide
tctctgtgccattacacactggggatgtgtcgcaatacgggcgtggatttgccaaga

SEQ ID NO: 256635 - DNA, 56 bp, Artificial
  Synthetic oligonucleotide
tggccgggatctctagcctattgacggctactggctctgccgcaaagtccctgtca

SEQ ID NO: 256636 - DNA, 56 bp, Artificial
  Synthetic oligonucleotide
atgtcatccatttcacacgcccagcttggctggaacgacgcaggaacccccgtctc

SEQ ID NO: 256637 - DNA, 56 bp, Artificial
  Synthetic oligonucleotide
gcgatgtgtttgaaaagtgggcggtagtcgaattcgatatctcctttacctgtctc

SEQ ID NO: 256638 - DNA, 56 bp, Artificial
  Synthetic oligonucleotide
tttcgtttgtggtggtccttcacttggagagctactttgatgtggatgcctgtcaa

SEQ ID NO: 256639 - DNA, 56 bp, Artificial
  Synthetic oligonucleotide
ggttagccaagttcgagtccaaactgcgccaataatggctccccagatcggggcac

SEQ ID NO: 256640 - DNA, 56 bp, Artificial
  Synthetic oligonucleotide
cattctgaacttatcattgcgtagctgacgttatcaaaagttagacaaaacctaag

SEQ ID NO: 256641 - DNA, 53 bp, Artificial
  Synthetic oligonucleotide
cgtgatgcgtccttccccggtacagggattaagcaccaccacggcccctaaaa

SEQ ID NO: 256642 - DNA, 60 bp, Artificial
  Synthetic oligonucleotide
gccgcagcgatttctagtgcacgtgaaacggcttgttctagctcggtacgttgctcagca

SEQ ID NO: 256643 - DNA, 56 bp, Artificial
  Synthetic oligonucleotide
agagacaggtgggcgctagggacaaagagagcaaccaaacacagtccggtggttgc

SEQ ID NO: 256644 - DNA, 55 bp, Artificial
  Synthetic oligonucleotide
cgcgtatgataactttcgttacacttaatcgattaaaatatgaggagctttaggg

SEQ ID NO: 256645 - DNA, 54 bp, Artificial
  Synthetic oligonucleotide
agaggggacacgcggaaaaggaataactgattagtgttgtgaggccggaatggg

SEQ ID NO: 256646 - DNA, 56 bp, Artificial
  Synthetic oligonucleotide
gctctcgaagcgataattggcttcaaagcgttctttgcgtttgacgatgtgtgtcc

SEQ ID NO: 256647 - DNA, 56 bp, Artificial
  Synthetic oligonucleotide
tccccgtcgccgccacatgcgctgagaagtagagccaaaactggcactaagatctt

SEQ ID NO: 256648 - DNA, 56 bp, Artificial
  Synthetic oligonucleotide
agcgttactggctttcgctagtattgctccgcctcccgttaggaggtcgctagcct

SEQ ID NO: 256649 - DNA, 56 bp, Artificial
  Synthetic oligonucleotide
cccgctttgaatgcgaggtctcccgctcggatcggcagatggtattgcaagccagc

SEQ ID NO: 256650 - DNA, 56 bp, Artificial
  Synthetic oligonucleotide
gttaccaccggcagagctcccacctaacgatggggacatcgcaggtaatacacccg

SEQ ID NO: 256651 - DNA, 56 bp, Artificial
  Synthetic oligonucleotide
cccgtaactattcctggtcacgggctttgggaaacggctcatcgcgagccttgcgc

SEQ ID NO: 256652 - DNA, 56 bp, Artificial
  Synthetic oligonucleotide
acaccattgtatcaacgtatgggcttcccattgccattatgctgatagctttactg

SEQ ID NO: 256653 - DNA, 57 bp, Artificial
  Synthetic oligonucleotide
gaattgcgtagcaacagggcggtgctttgagtgaatttgacggggttaggggcagta

SEQ ID NO: 256654 - DNA, 56 bp, Artificial
  Synthetic oligonucleotide
ttttaatcgctcaacccttgtcacataagggctagcgctccctccccaatttgtag

SEQ ID NO: 256655 - DNA, 56 bp, Artificial
  Synthetic oligonucleotide
ggtctggcaaggcatcagtcgtaatagcctgcgtccatcgaagcgttgatactgaa

SEQ ID NO: 256656 - DNA, 56 bp, Artificial
  Synthetic oligonucleotide
agcacgtgagacgggcaattggcttggtgcttacgaggggctgataacccaagata

SEQ ID NO: 256657 - DNA, 55 bp, Artificial
  Synthetic oligonucleotide
gaacgggaagagttaaggcaataacaagatgagatttaatacctcgttgtttatg

SEQ ID NO: 256658 - DNA, 56 bp, Artificial
  Synthetic oligonucleotide
gccaaccaaacggccttgaacgtcaactaccggagccgcagataaatggtggtcga

SEQ ID NO: 256659 - DNA, 56 bp, Artificial
  Synthetic oligonucleotide
tagaggaaagcgggtttcccaaatcatcgtagcggccacgcgcggaatggagacgc

SEQ ID NO: 256660 - DNA, 56 bp, Artificial
  Synthetic oligonucleotide
accgtttggttagagcatcctcaaaagtccctatgtcaacacgggatagcctttca

SEQ ID NO: 256661 - DNA, 56 bp, Artificial
  Synthetic oligonucleotide
tcgcgaacgactaccgggcgtcactcaactgtccgacaaccactttgtccgctgtt

SEQ ID NO: 256662 - DNA, 56 bp, Artificial
  Synthetic oligonucleotide
taccgttattctacgattgaagctttcgctattatcatggaccgttgtcgattagc

SEQ ID NO: 256663 - DNA, 56 bp, Artificial
  Synthetic oligonucleotide
gagcgaaaagggcacaagatggagcccaccgagcacgctcaccacatcgcgccaac

SEQ ID NO: 256664 - DNA, 60 bp, Artificial
  Synthetic oligonucleotide
catcgccgcgagttgcttgagtttggtatcgatatatccataccaaatcctgtcgaacct

SEQ ID NO: 256665 - DNA, 56 bp, Artificial
  Synthetic oligonucleotide
ttgcgccagagtcagcccatactggacggtactcaagacccatgcgatcgaatgct

SEQ ID NO: 256666 - DNA, 56 bp, Artificial
  Synthetic oligonucleotide
gtcgatctctttgacctaacttactctgtgtctgttggttttgtcgacgtgtgcgt

SEQ ID NO: 256667 - DNA, 56 bp, Artificial
  Synthetic oligonucleotide
gcggcggtttaatgcgtggctgacacgatccatacccggctctgctaactgtgtgt

SEQ ID NO: 256668 - DNA, 56 bp, Artificial
  Synthetic oligonucleotide
tcaccgcaaaactgggtggataatatccgaacgttgcatagtcagaatggtgagcg

SEQ ID NO: 256669 - DNA, 56 bp, Artificial
  Synthetic oligonucleotide
gtagtggcagcgtttaacgacaacatagcattggtactgaaaagtagtgctactac

SEQ ID NO: 256670 - DNA, 56 bp, Artificial
  Synthetic oligonucleotide
aaacacggacacgttgccatacaccacgtcatagttatcggggtcacagggcggct

SEQ ID NO: 256671 - DNA, 56 bp, Artificial
  Synthetic oligonucleotide
aaagacaccgcctgtcagcagcaactcagcaacccggaacaaacccgttatcgcaa

SEQ ID NO: 256672 - DNA, 54 bp, Artificial
  Synthetic oligonucleotide
tcgctaaagctttctcggtagcttggatcgccactgaaaagggttcgtgttttt

SEQ ID NO: 256673 - DNA, 56 bp, Artificial
  Synthetic oligonucleotide
atatcgaccgccgtcaccctcttggtcattggccccttgaaccctgcgccctcact

SEQ ID NO: 256674 - DNA, 56 bp, Artificial
  Synthetic oligonucleotide
cttgcgtacctctgcaagttgccccgcagcttcactagtacgcttctctgaactct

SEQ ID NO: 256675 - DNA, 60 bp, Artificial
  Synthetic oligonucleotide
agctcactcaactgctgagcgagatacacgcgcaatacaatagcccaactctcatgagca

SEQ ID NO: 256676 - DNA, 56 bp, Artificial
  Synthetic oligonucleotide
ccagttcttcactacttgagccgcgagttctggctcgtttgccaccaaggcacgta

SEQ ID NO: 256677 - DNA, 56 bp, Artificial
  Synthetic oligonucleotide
tcccatgggccaaagctaaacagcccgcctaacttggtgatcgacgttatcgggta

SEQ ID NO: 256678 - DNA, 56 bp, Artificial
  Synthetic oligonucleotide
ttcagatcgaagtactaacaaagaattactctctgcaattaatcacttcagcttat

SEQ ID NO: 256679 - DNA, 53 bp, Artificial
  Synthetic oligonucleotide
taaccaaacgattccttaacggtttcttgagtactcacacctaatgttaatcg

SEQ ID NO: 256680 - DNA, 56 bp, Artificial
  Synthetic oligonucleotide
caacatctatgacttaatacaagaagaacgatactcgatcaaaatcgaaccagcag

SEQ ID NO: 256681 - DNA, 56 bp, Artificial
  Synthetic oligonucleotide
tcgaaaacatcacatcatgtaagaccttgttgtattgtccatgtagggagtcggga

SEQ ID NO: 256682 - DNA, 55 bp, Artificial
  Synthetic oligonucleotide
gcgaagttgtcggcagatatgtatttgccctgatcttgcagggacgaagataagg

SEQ ID NO: 256683 - DNA, 55 bp, Artificial
  Synthetic oligonucleotide
gcgaatggactttcgatagttcataaaggctcaggtggtgaagcgaatgcaacgc

SEQ ID NO: 256684 - DNA, 55 bp, Artificial
  Synthetic oligonucleotide
gcgcttgaatgccagaggcatccacttttctcacttcgcttcctatcaactgaag

SEQ ID NO: 256685 - DNA, 55 bp, Artificial
  Synthetic oligonucleotide
gcatttctctttcgtaggcgtaatacgatttatcaattgagtgatgcactctatc

SEQ ID NO: 256686 - DNA, 60 bp, Artificial
  Synthetic oligonucleotide
cgcgttaggttatacccaaagctcttatcgctaatagaacgcgctagagcgctcatacca

SEQ ID NO: 256687 - DNA, 55 bp, Artificial
  Synthetic oligonucleotide
gccaaaagtggtctcgatcgttgatttgattcgacccgctttgcttgatggggag

SEQ ID NO: 256688 - DNA, 55 bp, Artificial
  Synthetic oligonucleotide
gcattgcctaacgagatgacgataagtaaaccagaggcgactactccccaaacgc

SEQ ID NO: 256689 - DNA, 55 bp, Artificial
  Synthetic oligonucleotide
gcgaacaagtaagaaggtttcttaacgtgatcatgataggtaacgctgtgtcgtc

SEQ ID NO: 256690 - DNA, 55 bp, Artificial
  Synthetic oligonucleotide
gcgctgcgcctaatgcagcatcactgctatctagcgcatcaacgcctttgctctg

SEQ ID NO: 256691 - DNA, 55 bp, Artificial
  Synthetic oligonucleotide
gccaatcgtggacgatgtcgactacgaaacacccggctcattcggtacttggtgt

SEQ ID NO: 256692 - DNA, 55 bp, Artificial
  Synthetic oligonucleotide
gcgaattacagctttactgtcttgcgtatgcactttaaacgcttcgtggctcaca

SEQ ID NO: 256693 - DNA, 52 bp, Artificial
  Synthetic oligonucleotide
gccaattggcgacacgcgtaaaaccggtttcctttaccctacagtgtcttac

SEQ ID NO: 256694 - DNA, 55 bp, Artificial
  Synthetic oligonucleotide
gccaagcttatcgagattgcaggagatagtgcaaagaacgggattaaggccaagc

SEQ ID NO: 256695 - DNA, 55 bp, Artificial
  Synthetic oligonucleotide
gcgcgtacacattcgaaagccgtcatgtttcgtctaactcgttgagccatggcgt

SEQ ID NO: 256696 - DNA, 55 bp, Artificial
  Synthetic oligonucleotide
gcgctaatctttggctactcatattgctgcctcgcaatacgtcaacgttgccgcg

SEQ ID NO: 256697 - DNA, 60 bp, Artificial
  Synthetic oligonucleotide
gcccttcttggcatagctttttaaggatacgactggctgatgctttggatttcatgccca

SEQ ID NO: 256698 - DNA, 55 bp, Artificial
  Synthetic oligonucleotide
gcatctcctacttacacctagtcaactgctacgcagtcaatttaaggcgggtatc

SEQ ID NO: 256699 - DNA, 55 bp, Artificial
  Synthetic oligonucleotide
gccaacgattgcctgtgatccgctataaaggcggtgggtactcaacatgaaaagg

SEQ ID NO: 256700 - DNA, 55 bp, Artificial
  Synthetic oligonucleotide
gcgctgtggcagatcttatgcgactctgaattcactctcgtgatagacttcgagc

SEQ ID NO: 256701 - DNA, 55 bp, Artificial
  Synthetic oligonucleotide
gcatggagcagtttgtcgctcagttgaaagaagtgaatggtgacttagctgcact

SEQ ID NO: 256702 - DNA, 55 bp, Artificial
  Synthetic oligonucleotide
gcatatgacgtgtgagtgtaacttattgaagttgagagccttagtccctgtatcg

SEQ ID NO: 256703 - DNA, 55 bp, Artificial
  Synthetic oligonucleotide
gcgacaccatttactgagcctcatgcgcaaatccggattttgaatggattgcagc

SEQ ID NO: 256704 - DNA, 55 bp, Artificial
  Synthetic oligonucleotide
gcatgttgcttacctcgcaacaacattgcgatgaataccacgccacccaatatgc

SEQ ID NO: 256705 - DNA, 55 bp, Artificial
  Synthetic oligonucleotide
gcattcgcatgattgaccataccgcaacgtcaccacaaatggtgcatgcgcaagc

SEQ ID NO: 256706 - DNA, 55 bp, Artificial
  Synthetic oligonucleotide
gcgctaggcgattagaatgcgggttttatggagcgcttacgttctatttagactc

SEQ ID NO: 256707 - DNA, 55 bp, Artificial
  Synthetic oligonucleotide
gcgctaggctagaagtaccgatgtcttctgttaatacgtttggatcaccgtaagt

SEQ ID NO: 256708 - DNA, 60 bp, Artificial
  Synthetic oligonucleotide
cgctgcgtactctctcacaatttcgtgctaatgagcgcggtggcgtgtttttcgggcaaa

SEQ ID NO: 256709 - DNA, 60 bp, Artificial
  Synthetic oligonucleotide
gacagcctaacattatcaccagaagagatgataagacggatagtagagcactatcctgat

SEQ ID NO: 256710 - DNA, 55 bp, Artificial
  Synthetic oligonucleotide
gcccctttaccgccaagagtcgctgtttactcagtcgggtattgagctatcgcga

SEQ ID NO: 256711 - DNA, 55 bp, Artificial
  Synthetic oligonucleotide
gcccctcgcatggcaccgcagtacaacctttctgcagaaacgaccgcgccaatcc

SEQ ID NO: 256712 - DNA, 55 bp, Artificial
  Synthetic oligonucleotide
gccgttatgtatcgctgttgcaatgtacggttgatactcactgatacgaatagtt

SEQ ID NO: 256713 - DNA, 55 bp, Artificial
  Synthetic oligonucleotide
gcgattgaatggataaagaacgcgtttgaatacggcgcgatgtggcttatctcag

SEQ ID NO: 256714 - DNA, 55 bp, Artificial
  Synthetic oligonucleotide
gccccggtaatgatagtaagaccactgccaggctctccatttggtacagcgaatt

SEQ ID NO: 256715 - DNA, 55 bp, Artificial
  Synthetic oligonucleotide
gccccgcagcttcactagtacgcttctctgaactctcaaggtctgcttgggtgtc

SEQ ID NO: 256716 - DNA, 55 bp, Artificial
  Synthetic oligonucleotide
gccccataagcgagtctcgccaggtagaggttcgaatacaggcgtatcctgcgcg

SEQ ID NO: 256717 - DNA, 55 bp, Artificial
  Synthetic oligonucleotide
gcgatttaacgaaccgtcgctttctgcggcggcagtacaccaccaaaacacatcc

SEQ ID NO: 256718 - DNA, 55 bp, Artificial
  Synthetic oligonucleotide
gcgagataccatcaatattactcattatacctaccgtcaactcattgagttagct

SEQ ID NO: 256719 - DNA, 55 bp, Artificial
  Synthetic oligonucleotide
gccccactggtgtaacccgttttcatgccatctacatttaggctgcggtcacgca

SEQ ID NO: 256720 - DNA, 53 bp, Artificial
  Synthetic oligonucleotide
gtgtaaaacctacccagcctgatacccaagatttacccattaagggtgctaac

SEQ ID NO: 256721 - DNA, 55 bp, Artificial
  Synthetic oligonucleotide
gccccacagcgtttaaccgctcttcaaccgcctgaattaacaatagagggcatga

SEQ ID NO: 256722 - DNA, 55 bp, Artificial
  Synthetic oligonucleotide
gcgatttactcagcgcgctataatgcccattcttcacggatgcgtaatacaggcg

SEQ ID NO: 256723 - DNA, 55 bp, Artificial
  Synthetic oligonucleotide
gcccatggctaactccttccataaatccccaaacgcgtatggtgttcagtcccat

SEQ ID NO: 256724 - DNA, 55 bp, Artificial
  Synthetic oligonucleotide
gcccactgattgcagccgcaagggtcagccaaccccgcgaggttatgaatgacca

SEQ ID NO: 256725 - DNA, 55 bp, Artificial
  Synthetic oligonucleotide
gcctaaatgagtcggttctttagttaccagttcagcaacaaatgcgctctctgcg

SEQ ID NO: 256726 - DNA, 55 bp, Artificial
  Synthetic oligonucleotide
gcccaacagaacaaacacgtaagtgctgcgttgtttatctgcatcgactttactt

SEQ ID NO: 256727 - DNA, 55 bp, Artificial
  Synthetic oligonucleotide
gcgatttctttggtgagtgccattgaagcaccggaattatttgcgattgagcgtt

SEQ ID NO: 256728 - DNA, 55 bp, Artificial
  Synthetic oligonucleotide
gcgcaaccctattttgttgagaatcccgtgtgaaaactaagctgattacccgagc

SEQ ID NO: 256729 - DNA, 55 bp, Artificial
  Synthetic oligonucleotide
gccattcctaagatcgcctcataccaagtactcccgttagaatcattcccaacta

SEQ ID NO: 256730 - DNA, 55 bp, Artificial
  Synthetic oligonucleotide
gcgataccagagccatcatctttgtatcgtcccggaaagtcgtaatgttcgtagc

SEQ ID NO: 256731 - DNA, 57 bp, Artificial
  Synthetic oligonucleotide
gacagtatggcaaatttgtgtaataattacccaatcaatgggtaaaacaattacaca

SEQ ID NO: 256732 - DNA, 55 bp, Artificial
  Synthetic oligonucleotide
gccgctctgaagtcaacttcaccgaaggtcgaatcctagtagaaaccgtttcacc

SEQ ID NO: 256733 - DNA, 55 bp, Artificial
  Synthetic oligonucleotide
gcgagcttgggcgaccgctaccaacgatacggcgcaatgcgtttccgttgatcgg

SEQ ID NO: 256734 - DNA, 55 bp, Artificial
  Synthetic oligonucleotide
gccgcttaaaatagcggcctaggtatctaacggttggaccgacatcttctgtctt

SEQ ID NO: 256735 - DNA, 55 bp, Artificial
  Synthetic oligonucleotide
gccgctttggtctcacgcagttcagacaataacagctcttgagactcttgtttgg

SEQ ID NO: 256736 - DNA, 55 bp, Artificial
  Synthetic oligonucleotide
gccggtacaaattttctatgttgtagcaatcaggatcatagatggtcaagttttg

SEQ ID NO: 256737 - DNA, 55 bp, Artificial
  Synthetic oligonucleotide
gcgatacccttgaggggtgcgagccccaaccatgtaacgaacattgtccgtaaga

SEQ ID NO: 256738 - DNA, 55 bp, Artificial
  Synthetic oligonucleotide
gccgtacttaacgtcaacaacatgcgtgacatcgaaaatgatagcgcctgcggca

SEQ ID NO: 256739 - DNA, 55 bp, Artificial
  Synthetic oligonucleotide
gcgatagacggtgacatggctaatgccgagagtcgcaatcatcgggatatcacgt

SEQ ID NO: 256740 - DNA, 55 bp, Artificial
  Synthetic oligonucleotide
gccgccgtctaatccggcctttcgcccagatgtaggggtcgccaatccataacgt

SEQ ID NO: 256741 - DNA, 55 bp, Artificial
  Synthetic oligonucleotide
gcgatatcaactagctctggtggtaattgactgatcaactgttggcctgtctcgc

SEQ ID NO: 256742 - DNA, 56 bp, Artificial
  Synthetic oligonucleotide
gtggtggggaaatttatcgccaagcgctacccttagcccagcgcgtttatcgcacg

SEQ ID NO: 256743 - DNA, 55 bp, Artificial
  Synthetic oligonucleotide
gcgagcgaagcttttgatggttgtctattacgtccttatgcgatgaaaccgtttg

SEQ ID NO: 256744 - DNA, 55 bp, Artificial
  Synthetic oligonucleotide
gccgtagagagtccagttgtcgcatggcaatgcaacgctagaggcacggcacaag

SEQ ID NO: 256745 - DNA, 55 bp, Artificial
  Synthetic oligonucleotide
gccgtgtttcagtactgggagaacgttcgtggcctagaaatcgaagtacgcgaaa

SEQ ID NO: 256746 - DNA, 55 bp, Artificial
  Synthetic oligonucleotide
gccctcgctctttcaacgtattaaaggtcacgatgtttgcccctcgcaatgaggc

SEQ ID NO: 256747 - DNA, 55 bp, Artificial
  Synthetic oligonucleotide
gccctatcgctaaccaactccacatgccaatacacctttcacctaatctcgtcgc

SEQ ID NO: 256748 - DNA, 55 bp, Artificial
  Synthetic oligonucleotide
gcccgcgatttacttaaagagctccgtgattggcttgatagcgcagttagtcgag

SEQ ID NO: 256749 - DNA, 55 bp, Artificial
  Synthetic oligonucleotide
gcccgacttcttaagtacttcagggttagcccaaatccagttcacacggtgcacg

SEQ ID NO: 256750 - DNA, 55 bp, Artificial
  Synthetic oligonucleotide
gccagttcgaacgccattgcctgataacacgggctgattcaaatgcctggggccg

SEQ ID NO: 256751 - DNA, 55 bp, Artificial
  Synthetic oligonucleotide
gccagttagcggtaaacatcagatagacagcaacaacgaatgtcattgcaccaaa

SEQ ID NO: 256752 - DNA, 55 bp, Artificial
  Synthetic oligonucleotide
gccagtgcatgtccttttaaacagccgttaatagggataattcctgttcgttacg

SEQ ID NO: 256753 - DNA, 60 bp, Artificial
  Synthetic oligonucleotide
agcttaccgttttcactgcgacaccatttactgagcctcatgcgcaaatccggattttga

SEQ ID NO: 256754 - DNA, 55 bp, Artificial
  Synthetic oligonucleotide
gccaggtgccgatcgattgcgtttagtggacacgcttcgtcaggtcattgcacgt

SEQ ID NO: 256755 - DNA, 55 bp, Artificial
  Synthetic oligonucleotide
gccagctcggaatactaaaagtgcaccaattacgaataataagcgcgacttcagt

SEQ ID NO: 256756 - DNA, 55 bp, Artificial
  Synthetic oligonucleotide
gcgcctaatgccgagtattctgtgatgccgtgggagacgagaatgccaccgatga

SEQ ID NO: 256757 - DNA, 55 bp, Artificial
  Synthetic oligonucleotide
gccagaatccaaagaacttacgattgcctatcacgctcagcatcctatgtttccg

SEQ ID NO: 256758 - DNA, 55 bp, Artificial
  Synthetic oligonucleotide
gccagaaacgataataagcgtgttggtatcaatcccggttgctttctggactggg

SEQ ID NO: 256759 - DNA, 55 bp, Artificial
  Synthetic oligonucleotide
gccactgagtaattctgaaccatagcctttatgccaatactcgtcacccaataag

SEQ ID NO: 256760 - DNA, 55 bp, Artificial
  Synthetic oligonucleotide
gccactcacggtttaaattgaccccaatagcattgcagcgtaggtgccctcgaat

SEQ ID NO: 256761 - DNA, 55 bp, Artificial
  Synthetic oligonucleotide
gccttctttcgcatgcacgagtttacaaggttcgcaaccacgtttgataacgatc

SEQ ID NO: 256762 - DNA, 55 bp, Artificial
  Synthetic oligonucleotide
gccactcaccgtaagtgttttctagagacgcaggtgggaatgcgatagctagagg

SEQ ID NO: 256763 - DNA, 55 bp, Artificial
  Synthetic oligonucleotide
gcgcgaatacactaatgtgtcgagtgcacctgttattgttggccccatgaacttg

SEQ ID NO: 256764 - DNA, 60 bp, Artificial
  Synthetic oligonucleotide
agcttgcgagcctgcttacatatggtccgacgatcgcagagcatgagcctactggcacta

SEQ ID NO: 256765 - DNA, 55 bp, Artificial
  Synthetic oligonucleotide
gcgcgagataaaatggccattagccccaaaccgagctggtattacacggcttgcc

SEQ ID NO: 256766 - DNA, 55 bp, Artificial
  Synthetic oligonucleotide
gccacatcggtattgtagtgtttggctagctgagagagggtttctcctcgtcgta

SEQ ID NO: 256767 - DNA, 55 bp, Artificial
  Synthetic oligonucleotide
gcgcgatatccggtcgctgagatttaaccgaagagagaatcaagttagagctcac

SEQ ID NO: 256768 - DNA, 55 bp, Artificial
  Synthetic oligonucleotide
gccacatagccaaccaaccctttgactttactcgattttcgaagattccatatgc

SEQ ID NO: 256769 - DNA, 55 bp, Artificial
  Synthetic oligonucleotide
gccaatttgcagtgctaagcccggcttgcgaccttctagtaccactttacgccag

SEQ ID NO: 256770 - DNA, 55 bp, Artificial
  Synthetic oligonucleotide
gcgcaatataggctttaccacccattcctgatgtatctgagcgcatattgcccat

SEQ ID NO: 256771 - DNA, 55 bp, Artificial
  Synthetic oligonucleotide
gccatgtataaacggataagcgactaagccagtaaggtgcgtaatgtgccgaggc

SEQ ID NO: 256772 - DNA, 55 bp, Artificial
  Synthetic oligonucleotide
gcgcacgacgctttacctaccaaagctttacaggcaaactgaactgcgattttgg

SEQ ID NO: 256773 - DNA, 55 bp, Artificial
  Synthetic oligonucleotide
gcgcactcgcgaccacaatgttgtgtcggtgacgttgggtaaacataagactcct

SEQ ID NO: 256774 - DNA, 55 bp, Artificial
  Synthetic oligonucleotide
gccatggtagaacaaacaacacgacaatagacgcgcccatcgcgataacacctag

SEQ ID NO: 256775 - DNA, 53 bp, Artificial
  Synthetic oligonucleotide
gacatcgtaaccggttgagaccattttttcggtttgttcatcccaacgacgaa

SEQ ID NO: 256776 - DNA, 55 bp, Artificial
  Synthetic oligonucleotide
gcctaactggatctatttataatgtaatgtgaccgtgtgcaatcgaggttgtgaa

SEQ ID NO: 256777 - DNA, 54 bp, Artificial
  Synthetic oligonucleotide
gcctcgaatgttcgaaatagagggcaattttaacgtttaaggtcattcctattg

SEQ ID NO: 256778 - DNA, 55 bp, Artificial
  Synthetic oligonucleotide
gcctcggcaagcggtggtaactcttacacaaacagcgacagcagtacgtttaacg

SEQ ID NO: 256779 - DNA, 55 bp, Artificial
  Synthetic oligonucleotide
gcgactggtcaggctgtgggtgaattcgtcctttacaacggtagtgctgatacgc

SEQ ID NO: 256780 - DNA, 55 bp, Artificial
  Synthetic oligonucleotide
gccatgcagagctaattacggtggttaagttttggaaagagtttccataagccac

SEQ ID NO: 256781 - DNA, 55 bp, Artificial
  Synthetic oligonucleotide
gccatgcactttaacggcgaggcaatgtctgagttcgccgcactcttagcgacct

SEQ ID NO: 256782 - DNA, 55 bp, Artificial
  Synthetic oligonucleotide
gcctctcatatcctaaagaacccaaatgctcaacgatcgcaaaagcgtttgctgg

SEQ ID NO: 256783 - DNA, 55 bp, Artificial
  Synthetic oligonucleotide
gcgcagcgttagacctgctggcctctgcgcattggatgcgtcgtcagtacgggaa

SEQ ID NO: 256784 - DNA, 55 bp, Artificial
  Synthetic oligonucleotide
gcctgccgtttatcggggttagagcctctgactatcgcaagtgatactctgttcg

SEQ ID NO: 256785 - DNA, 55 bp, Artificial
  Synthetic oligonucleotide
gcgcagtggcgagagttcttgtccattcaacagcttgtactggcgcttcatgaac

SEQ ID NO: 256786 - DNA, 60 bp, Artificial
  Synthetic oligonucleotide
gacattccaattaagttgacgaccaaatgtatggactacacagaataggccaatctctat

SEQ ID NO: 256787 - DNA, 55 bp, Artificial
  Synthetic oligonucleotide
gcgactgcccacttcaaagcgtaaattcgggatgtcgttaccacagtattcctgc

SEQ ID NO: 256788 - DNA, 55 bp, Artificial
  Synthetic oligonucleotide
gcgacgaatgggatttgcttaaatccatgtctcatcttgagtcttgggcttcctc

SEQ ID NO: 256789 - DNA, 55 bp, Artificial
  Synthetic oligonucleotide
gcgacatctcgtgcagaaaatttaccaactcagttctctgataatcacgctgtgg

SEQ ID NO: 256790 - DNA, 55 bp, Artificial
  Synthetic oligonucleotide
gccttccaatcgcaatgagcgacctagaaggtaagaaacgcgcattcctagtaac

SEQ ID NO: 256791 - DNA, 55 bp, Artificial
  Synthetic oligonucleotide
cttcgttatccgttagaggctgcgttgcaataatcgaaacaacatcattaggcgt

SEQ ID NO: 256792 - DNA, 55 bp, Artificial
  Synthetic oligonucleotide
cttcattacgcaagagacatgcagtctagcgacgatagcgattacaatgaaccta

SEQ ID NO: 256793 - DNA, 55 bp, Artificial
  Synthetic oligonucleotide
cttactattgcaagctagcgcggttactctgccgcagctatttccgactcaacgg

SEQ ID NO: 256794 - DNA, 55 bp, Artificial
  Synthetic oligonucleotide
cttacctcctgagctcgatgaagctttggctaggttctctagggttaccggtcag

SEQ ID NO: 256795 - DNA, 55 bp, Artificial
  Synthetic oligonucleotide
cttaccagcattgcctgtgtcgttcgctttgtctgaagtgacagaacaatgcgcc

SEQ ID NO: 256796 - DNA, 55 bp, Artificial
  Synthetic oligonucleotide
cttaaagatgctcaggcacgaggtgctatcactgctcgtgttcagcgccttactc

SEQ ID NO: 256797 - DNA, 60 bp, Artificial
  Synthetic oligonucleotide
tatgccaccagccacgagtatgctggcaagctttagggacgacctcttagctagactggc

SEQ ID NO: 256798 - DNA, 55 bp, Artificial
  Synthetic oligonucleotide
cttaaaatggcgaacagtgaatgcgcgtatgtacttttgagtacccaatgccaac

SEQ ID NO: 256799 - DNA, 55 bp, Artificial
  Synthetic oligonucleotide
ctgtttgaagttggcgctctggtcggtacattaatgtggggttatttatcagacc

SEQ ID NO: 256800 - DNA, 54 bp, Artificial
  Synthetic oligonucleotide
ctgttggactccggtcgtacattaaccgttcacctatacaaactgactaccgaa

SEQ ID NO: 256801 - DNA, 55 bp, Artificial
  Synthetic oligonucleotide
ctgttccgagtgactaatgcggatgacagcttacgtcaagcgacagactcggcac

SEQ ID NO: 256802 - DNA, 55 bp, Artificial
  Synthetic oligonucleotide
ctgtgtgccgattgctggaaatccacttcttcaaacagcgaatgcaagaaagtgc

SEQ ID NO: 256803 - DNA, 55 bp, Artificial
  Synthetic oligonucleotide
ctgtgtatttgatacctgcggcgtctaaaagttcacatagacctgcgaagtgtgc

SEQ ID NO: 256804 - DNA, 55 bp, Artificial
  Synthetic oligonucleotide
ctgtgaatagggagcggtcacttgcagtaacccactaaccagcgccatgacagcg

SEQ ID NO: 256805 - DNA, 55 bp, Artificial
  Synthetic oligonucleotide
ctgtcgggatcgcgatgaccctattggtgatcgggaatctcagcgccacgttttc

SEQ ID NO: 256806 - DNA, 55 bp, Artificial
  Synthetic oligonucleotide
ctgtcgcgtaacaccacatggactctgcagcgtgatagcgctctgggccttaact

SEQ ID NO: 256807 - DNA, 55 bp, Artificial
  Synthetic oligonucleotide
ctgtagctcgtttgatacgggtggtggacgtgaagcggcggcggggattaatgtg

SEQ ID NO: 256808 - DNA, 58 bp, Artificial
  Synthetic oligonucleotide
acgcttcggctctgcttgcgcgtaatggggaacaccaagagtattcaccgtttcgctg

SEQ ID NO: 256809 - DNA, 55 bp, Artificial
  Synthetic oligonucleotide
ctggttcatggtgcgagagcagcattaagacgagccaagttcaagtccgataagc

SEQ ID NO: 256810 - DNA, 55 bp, Artificial
  Synthetic oligonucleotide
ctggtgacaactgcaaataatacggttagcgagggccacaaatagttgatgatac

SEQ ID NO: 256811 - DNA, 55 bp, Artificial
  Synthetic oligonucleotide
ctggtaacactgtgcttgctttccctattgcgaagcaaggctagcgtatgttatg

SEQ ID NO: 256812 - DNA, 55 bp, Artificial
  Synthetic oligonucleotide
ctggggaatcttggcacctaaatgttgtcccatcgacagcaagaacattaagctc

SEQ ID NO: 256813 - DNA, 55 bp, Artificial
  Synthetic oligonucleotide
ctggctattggtaatccatacaacctaggacaaaccacgacctttggcattatct

SEQ ID NO: 256814 - DNA, 55 bp, Artificial
  Synthetic oligonucleotide
ctggctataatatgggtccatcgattgtatggggtagcgttatgtctggggtaaa

SEQ ID NO: 256815 - DNA, 55 bp, Artificial
  Synthetic oligonucleotide
ctggcggtgagctcagacttatcgtctggggtatttgaggtccctcagacactgg

SEQ ID NO: 256816 - DNA, 52 bp, Artificial
  Synthetic oligonucleotide
ctggccgttatcaatacgggtggcgtacaagttaacccgtcccggttcattc

SEQ ID NO: 256817 - DNA, 55 bp, Artificial
  Synthetic oligonucleotide
ctggccaatctccactcggcattcgctcgcataatctggggttggctctgcagct

SEQ ID NO: 256818 - DNA, 55 bp, Artificial
  Synthetic oligonucleotide
ctggcatagaggtgatacaacgcaggaataagcttacggtacgtcaaatctcccg

SEQ ID NO: 256819 - DNA, 55 bp, Artificial
  Synthetic oligonucleotide
gcttaatttttacaacgaccccgtattggtcgaagtcatcgatgtcatagggttg

SEQ ID NO: 256820 - DNA, 60 bp, Artificial
  Synthetic oligonucleotide
tatgcagtcagttcaaggtacacaggctatgtccgatccaactgcggtacgtccagccga

SEQ ID NO: 256821 - DNA, 55 bp, Artificial
  Synthetic oligonucleotide
ctggacgttacgcgccattgtcggccttcagtgtcgtatccgggactttcccaga

SEQ ID NO: 256822 - DNA, 55 bp, Artificial
  Synthetic oligonucleotide
ctgctaagatagtgagctgtaaagcagcgtttcatggaggaaagggatgcctctc

SEQ ID NO: 256823 - DNA, 55 bp, Artificial
  Synthetic oligonucleotide
gaagtggcgatctatgtattagaagtggcgatctatgtattaaaagtggcgatct

SEQ ID NO: 256824 - DNA, 55 bp, Artificial
  Synthetic oligonucleotide
gaagggtagagccagcacatttcatcactgtaaggctcgataacatagatgggcc

SEQ ID NO: 256825 - DNA, 55 bp, Artificial
  Synthetic oligonucleotide
gaagcgctaggctagaattaatttgcaccgggattctttaccccgtacgctgccg

SEQ ID NO: 256826 - DNA, 55 bp, Artificial
  Synthetic oligonucleotide
gaagagattcgccgtgatcaatacgctttagttgctaacccaaatcatgaacttg

SEQ ID NO: 256827 - DNA, 55 bp, Artificial
  Synthetic oligonucleotide
gaagaccaacacagcccggtggatgtcatgttcctgtataagattctcgagtggg

SEQ ID NO: 256828 - DNA, 55 bp, Artificial
  Synthetic oligonucleotide
gaacaaaggcattcatgatcttaacgtcgatatcaaccagtcacacgcggacatc

SEQ ID NO: 256829 - DNA, 55 bp, Artificial
  Synthetic oligonucleotide
gaaatctagactcaccttcactaattacagtgttatccggtgtcagcctgagacg

SEQ ID NO: 256830 - DNA, 55 bp, Artificial
  Synthetic oligonucleotide
gaaataggacggcacgccagcatgttctcaatatcgacgcgtaattcgctcacgc

SEQ ID NO: 256831 - DNA, 58 bp, Artificial
  Synthetic oligonucleotide
cttaaacgtcttgctgctaagcaccgttatccagtgtcgaaactgatttataaatcgc

SEQ ID NO: 256832 - DNA, 55 bp, Artificial
  Synthetic oligonucleotide
gaaatacgtctttagagggaaaagttatacgacattgacatcatgttaccgagac

SEQ ID NO: 256833 - DNA, 55 bp, Artificial
  Synthetic oligonucleotide
gaaataccgtcacaggatacaagctccagcttatgagatgtgtgtgctaacgccc

SEQ ID NO: 256834 - DNA, 55 bp, Artificial
  Synthetic oligonucleotide
gaaagatgagatcgtcgactacatgattgctcgttacggtaacttcgtaacttac

SEQ ID NO: 256835 - DNA, 55 bp, Artificial
  Synthetic oligonucleotide
gaaagatatgtcagagcgcactaaagtatccaatgtagagcaactgttactcttt

SEQ ID NO: 256836 - DNA, 55 bp, Artificial
  Synthetic oligonucleotide
gaaactgatgagacggcattacccacagaatccgctcaagaattagtctgtagac

SEQ ID NO: 256837 - DNA, 55 bp, Artificial
  Synthetic oligonucleotide
gaaaatctggaagcgttcgctagctttaatggccctgatttctacggcctacctc

SEQ ID NO: 256838 - DNA, 55 bp, Artificial
  Synthetic oligonucleotide
gaaaatctgaccaataaactgcaaattctcctgtacggtgagatcgtcatacacg

SEQ ID NO: 256839 - DNA, 55 bp, Artificial
  Synthetic oligonucleotide
gaaaacgacatttggtcggtgctacatgcggagaacatcaaacgcggtggtgagt

SEQ ID NO: 256840 - DNA, 53 bp, Artificial
  Synthetic oligonucleotide
gaaaaccctctggcttgttagacgttaagtttgtcagcgtagccaacgacggg

SEQ ID NO: 256841 - DNA, 54 bp, Artificial
  Synthetic oligonucleotide
cttttccggtcgagagtttaattattggcaaagagtggtcgcgaagcgagtagg

SEQ ID NO: 256842 - DNA, 58 bp, Artificial
  Synthetic oligonucleotide
tatctctacgatgggcgttattgagaagctgaaccaccacaacaacggggtttttgca

SEQ ID NO: 256843 - DNA, 55 bp, Artificial
  Synthetic oligonucleotide
cttttacagaaaggtgcccagtggtgtcttccactcttagatatgccgaaccgcc

SEQ ID NO: 256844 - DNA, 55 bp, Artificial
  Synthetic oligonucleotide
ctttgtcttggcatcctgtatgcttggagtgtatttaacaaggcgctagttactg

SEQ ID NO: 256845 - DNA, 55 bp, Artificial
  Synthetic oligonucleotide
ctttggatatgtggcagtcgattctgaaagtggagttagtgatccgtctacggtc

SEQ ID NO: 256846 - DNA, 55 bp, Artificial
  Synthetic oligonucleotide
ctttataagtcgactgatcatcagggttgaggttaatcgcacgttctaacagcag

SEQ ID NO: 256847 - DNA, 55 bp, Artificial
  Synthetic oligonucleotide
ctttagatgaggcacctcgaagcagtggttgactttgaccctggacgaagctgca

SEQ ID NO: 256848 - DNA, 54 bp, Artificial
  Synthetic oligonucleotide
cttggggtctacccttgtctttaggtatgacttttgtgtgaagttagcacgaag

SEQ ID NO: 256849 - DNA, 55 bp, Artificial
  Synthetic oligonucleotide
cttggcgcgctacatcatcaggttcaacgtcattgtctctaactatcctgtctgt

SEQ ID NO: 256850 - DNA, 55 bp, Artificial
  Synthetic oligonucleotide
cttgcgctaatagtgccaatgcaaattggtaagccgaacgtgctgcttgtgtgcc

SEQ ID NO: 256851 - DNA, 55 bp, Artificial
  Synthetic oligonucleotide
cttgataagttcatgccttacgttcttggtaagactgacggtgttgttaagaacc

SEQ ID NO: 256852 - DNA, 55 bp, Artificial
  Synthetic oligonucleotide
cttgagattaggtaatttcgcgtactgaggtttgccacaatatcaacgccgtcac

SEQ ID NO: 256853 - DNA, 55 bp, Artificial
  Synthetic oligonucleotide
acggggcgcggattcgtttgttgtagacggtacaactggagcacttagaggaatg

SEQ ID NO: 256854 - DNA, 55 bp, Artificial
  Synthetic oligonucleotide
cttctgccagtcccaactcatgagcaaggcgtttcgacacaccataagcgaccgc

SEQ ID NO: 256855 - DNA, 55 bp, Artificial
  Synthetic oligonucleotide
ctcctgtaacaataactctgcgggctgttttagtctgtccagtgttgatgaggcc

SEQ ID NO: 256856 - DNA, 55 bp, Artificial
  Synthetic oligonucleotide
ctcctagtgcattcatacttgttccgtatgacctccgccccgtgtgcgacgaaca

SEQ ID NO: 256857 - DNA, 55 bp, Artificial
  Synthetic oligonucleotide
ctccgtcagagcctgtaatatggcactgttgcaaagttagcgatgaggcagcctt

SEQ ID NO: 256858 - DNA, 55 bp, Artificial
  Synthetic oligonucleotide
ctccgcctaaaggaattcgaaagcaaacgattaataattcatgcgtccctacatg

SEQ ID NO: 256859 - DNA, 55 bp, Artificial
  Synthetic oligonucleotide
ctccccttattcaccgttaatcacacccagcccttttgcgctaggcgactgactg

SEQ ID NO: 256860 - DNA, 55 bp, Artificial
  Synthetic oligonucleotide
ctcccactcagagacgaagtcacttttcagaaactctcccgcctgttgtgtagac

SEQ ID NO: 256861 - DNA, 55 bp, Artificial
  Synthetic oligonucleotide
ctcccaagattcgctttgtgtaagtagctcagccagtgcagactcgaaaagttca

SEQ ID NO: 256862 - DNA, 55 bp, Artificial
  Synthetic oligonucleotide
ctccagtctgcaaggtcactcgctgttacttgagcaatcggatcttgcgccaagt

SEQ ID NO: 256863 - DNA, 55 bp, Artificial
  Synthetic oligonucleotide
ctcagtgaaactaccgctccagagcgcgcacctgatgtcgtgaactttcgtcacc

SEQ ID NO: 256864 - DNA, 60 bp, Artificial
  Synthetic oligonucleotide
gctctaggaacgtgcatatcagcaattagtaaggcgttgcaccatctcgctctgcgatat

SEQ ID NO: 256865 - DNA, 55 bp, Artificial
  Synthetic oligonucleotide
ctcagattcttctctgctgctctactcatcatgtaatagccgccagtcactcggt

SEQ ID NO: 256866 - DNA, 55 bp, Artificial
  Synthetic oligonucleotide
ctcactgcgacacaaccaacagaggtacaataatgagtattatggcggcaaccgg

SEQ ID NO: 256867 - DNA, 55 bp, Artificial
  Synthetic oligonucleotide
ctcaagttgcactgggtcacctgaataaaccaagaagttcactaggtcaccaacc

SEQ ID NO: 256868 - DNA, 55 bp, Artificial
  Synthetic oligonucleotide
ctcaagagaggttacgccttatctgagtgggcatttagctcatcaagccgagtgc

SEQ ID NO: 256869 - DNA, 55 bp, Artificial
  Synthetic oligonucleotide
ctcaaatagcaacggtagaacctatggggctagatgttttacgcgatagaaacca

SEQ ID NO: 256870 - DNA, 55 bp, Artificial
  Synthetic oligonucleotide
ctcaaacactcctgcgattgataaaacaatgtacaacccgcgacccctgttggtg

SEQ ID NO: 256871 - DNA, 55 bp, Artificial
  Synthetic oligonucleotide
ctattttgatcatggggcttggcgctatcggtagaagcgttcttcgtgaactctc

SEQ ID NO: 256872 - DNA, 55 bp, Artificial
  Synthetic oligonucleotide
ctatgtgacgaatgcgaatacgggttgattgcttatcttgaggggtaatgcctgg

SEQ ID NO: 256873 - DNA, 55 bp, Artificial
  Synthetic oligonucleotide
ctatctggggtggtcaacgttacctaaaccgttctgcaagtgtactatcgggtga

SEQ ID NO: 256874 - DNA, 54 bp, Artificial
  Synthetic oligonucleotide
ctatccgaaccgaacaacaaaaggccgttctagcgatggttcgtaatgtcgccg

SEQ ID NO: 256875 - DNA, 59 bp, Artificial
  Synthetic oligonucleotide
cggtaacgatataagcacgaccataccaatgttcattttctaggaactcacgttcatca

SEQ ID NO: 256876 - DNA, 55 bp, Artificial
  Synthetic oligonucleotide
ctatcaggtactgacgacgccgtatttgctggaatccaagcagagaacactcgtc

SEQ ID NO: 256877 - DNA, 55 bp, Artificial
  Synthetic oligonucleotide
ctatcaaataacgtgtccaagtcgggttatcggtcggcactcgcattccttcgtc

SEQ ID NO: 256878 - DNA, 55 bp, Artificial
  Synthetic oligonucleotide
ctatatcggcgagatcagtattctttgattgagccaaatagtaagagttaacacc

SEQ ID NO: 256879 - DNA, 55 bp, Artificial
  Synthetic oligonucleotide
ctatagagttcgtcgtgctttcttaacaaagcgtggtaaagagttccttgcggct

SEQ ID NO: 256880 - DNA, 55 bp, Artificial
  Synthetic oligonucleotide
ctagttgcctcgatttatttagccacaatgaacggccggcataacaccgaccgac

SEQ ID NO: 256881 - DNA, 55 bp, Artificial
  Synthetic oligonucleotide
ctagttgagccattacttgctcaagttcaactttcttcgcatcaagatcgctacc

SEQ ID NO: 256882 - DNA, 55 bp, Artificial
  Synthetic oligonucleotide
ctaggttacgaacaagccgtaggcgatagctggttactaaaaggcgagtatgagt

SEQ ID NO: 256883 - DNA, 55 bp, Artificial
  Synthetic oligonucleotide
ctaggtctgcttcgtatagagacttacctacgttgtggccttcagctgcgatgaa

SEQ ID NO: 256884 - DNA, 55 bp, Artificial
  Synthetic oligonucleotide
ctagcgcctcacccgttgctctcgctccctgaacaagattaatgacccctttagg

SEQ ID NO: 256885 - DNA, 55 bp, Artificial
  Synthetic oligonucleotide
ctagcgaaagtaactggtgacgtggttgatctaaacagccttaaagctgctaacg

SEQ ID NO: 256886 - DNA, 60 bp, Artificial
  Synthetic oligonucleotide
tatcaattgagtgatgcactctatcgccatgagtttgatacaaatcccttttataggcga

SEQ ID NO: 256887 - DNA, 55 bp, Artificial
  Synthetic oligonucleotide
ctgcgttggttagctggggataatagagtaaaccgcaccgcatttaggtttgccg

SEQ ID NO: 256888 - DNA, 55 bp, Artificial
  Synthetic oligonucleotide
ctgcgttgaacaatgttctgtagatcttgcactttgtagtactcaagacgctgag

SEQ ID NO: 256889 - DNA, 55 bp, Artificial
  Synthetic oligonucleotide
ctgcggttgagacgatagctctgatgaacgagataacccatctttaaataacgta

SEQ ID NO: 256890 - DNA, 55 bp, Artificial
  Synthetic oligonucleotide
ctgccttgccttattgataacaacctccacgctaacgctcgttggcctgtggacc

SEQ ID NO: 256891 - DNA, 55 bp, Artificial
  Synthetic oligonucleotide
ctgccgtttgacgaaggaatgcgagtgccaaccgataacccgacttggacacgtt

SEQ ID NO: 256892 - DNA, 55 bp, Artificial
  Synthetic oligonucleotide
ctgccgtaacaaacatagtgtcattaccgttaaaatcttgatcgggttgatattc

SEQ ID NO: 256893 - DNA, 55 bp, Artificial
  Synthetic oligonucleotide
ctgccaattccgcatcgttcagagaaaagtacagacgttgttcttcgattgaaaa

SEQ ID NO: 256894 - DNA, 55 bp, Artificial
  Synthetic oligonucleotide
ctgcatgttcagttggttttagggattgtatgggtcacggttcaagttagcttac

SEQ ID NO: 256895 - DNA, 55 bp, Artificial
  Synthetic oligonucleotide
ctgagtgtgcagatgtatcgctctattcgcatgcagcagcatcatccaatgccga

SEQ ID NO: 256896 - DNA, 55 bp, Artificial
  Synthetic oligonucleotide
ctgagtatggtttagtggatgttccgaacctagacgtaccacgtagtctgcgtac

SEQ ID NO: 256897 - DNA, 56 bp, Artificial
  Synthetic oligonucleotide
tatacgcgcggggcaagccccccccgctgcactatcgggtcgtgggctcccctgac

SEQ ID NO: 256898 - DNA, 55 bp, Artificial
  Synthetic oligonucleotide
ctgagctgctatccaacgctctgtggccttttggccacacgaggggcataactta

SEQ ID NO: 256899 - DNA, 55 bp, Artificial
  Synthetic oligonucleotide
ctgacgcttgttcttagtagtacgcttagtcaggatgtgacgttttgtagcgtgc

SEQ ID NO: 256900 - DNA, 55 bp, Artificial
  Synthetic oligonucleotide
ctgacgcaggctgaaggtataatgcatttgcctagcattcattatctatcgatta

SEQ ID NO: 256901 - DNA, 55 bp, Artificial
  Synthetic oligonucleotide
ctgaattccgccttgtgtaacccatgcgtagaggttttgtgagaacttagagcct

SEQ ID NO: 256902 - DNA, 55 bp, Artificial
  Synthetic oligonucleotide
ctgaacctcgtaaagtagagcttgctcttaattgtgtagcagctaaacgctttca

SEQ ID NO: 256903 - DNA, 55 bp, Artificial
  Synthetic oligonucleotide
ctcttggtctgacatatagcgactgtgtaaaacgtaaccttcacagcgaaggtca

SEQ ID NO: 256904 - DNA, 55 bp, Artificial
  Synthetic oligonucleotide
ctctggtttgttcggtctactcgaaacaggccgcatcgatacaatttctaaccaa

SEQ ID NO: 256905 - DNA, 55 bp, Artificial
  Synthetic oligonucleotide
ctctctagatacacgagagtcaagtcgtcacctgagccgtggaatcgttgctgga

SEQ ID NO: 256906 - DNA, 55 bp, Artificial
  Synthetic oligonucleotide
ctctcagctgcgccgagaagtggcgcagatcttccaagcaccgaaccggatgcct

SEQ ID NO: 256907 - DNA, 55 bp, Artificial
  Synthetic oligonucleotide
ctctacgcgacaataatgcatgagcttactcattggacaggtcacaagacacgtc

SEQ ID NO: 256908 - DNA, 60 bp, Artificial
  Synthetic oligonucleotide
gctcttaaatagaactgcgctaatctttggctactcatattgctgcctcgcaatacgtca

SEQ ID NO: 256909 - DNA, 55 bp, Artificial
  Synthetic oligonucleotide
ctcgttttggtgtgtttcgtgtcagatctggatgacggaatatatccgctgtcgc

SEQ ID NO: 256910 - DNA, 55 bp, Artificial
  Synthetic oligonucleotide
ctcgtgcggttggtagtagtaagagaatcttaaatcgagctcttttaccgtcgcg

SEQ ID NO: 256911 - DNA, 55 bp, Artificial
  Synthetic oligonucleotide
ctcgtattgctcgtcgttacgtactgtctcagaccaaagctgtgctgatagaccg

SEQ ID NO: 256912 - DNA, 55 bp, Artificial
  Synthetic oligonucleotide
ctcgtacttttagcaaatcatcacccaggttcacccgaatttcccatgcggtgcc

SEQ ID NO: 256913 - DNA, 55 bp, Artificial
  Synthetic oligonucleotide
ctcggttgctcacatgcaatacttcataaaatcgttggttttcttttacaagcgt

SEQ ID NO: 256914 - DNA, 55 bp, Artificial
  Synthetic oligonucleotide
ctcggccatcaaagcgctgccaacccctttcgctgtttgacaatcctcctgctcg

SEQ ID NO: 256915 - DNA, 55 bp, Artificial
  Synthetic oligonucleotide
ctcggaggtgttagatgtattggccgcaatacttccggagataaatctgattggg

SEQ ID NO: 256916 - DNA, 55 bp, Artificial
  Synthetic oligonucleotide
ctcgctctccatgagccaaaatctgcgtctgttcgacttaagcattacctaagtc

SEQ ID NO: 256917 - DNA, 55 bp, Artificial
  Synthetic oligonucleotide
ctcgagttagtttaacgctcagtgacgatttcacgtgagaagactttctcgcagt

SEQ ID NO: 256918 - DNA, 55 bp, Artificial
  Synthetic oligonucleotide
gcaacagaaacctatatgcgcttgagaatcacaactgaaacgttaacagcaagtg

SEQ ID NO: 256919 - DNA, 58 bp, Artificial
  Synthetic oligonucleotide
tagtcgtgctttaaccgaagtaataacggtcccaagcgatgtgtgtatcacagagagt

SEQ ID NO: 256920 - DNA, 55 bp, Artificial
  Synthetic oligonucleotide
gcaaacgagtgatcaagttgcaggcattacgggtgaagcacaaacgagtactgat

SEQ ID NO: 256921 - DNA, 52 bp, Artificial
  Synthetic oligonucleotide
gcaaacctactcggtagagaaaccaatgttcgtcaaactacggggctaaacg

SEQ ID NO: 256922 - DNA, 55 bp, Artificial
  Synthetic oligonucleotide
gcaaaagagaacactaagcactttggtagcggtagacgaaatttcggtcatagtc

SEQ ID NO: 256923 - DNA, 54 bp, Artificial
  Synthetic oligonucleotide
gcaaaacggtgtgacgccaaccaatggtatgtttactggcaaccgtcgttactt

SEQ ID NO: 256924 - DNA, 55 bp, Artificial
  Synthetic oligonucleotide
gatttagcggctattggggcattcagaattgatgtccctgataatgagagcccgt

SEQ ID NO: 256925 - DNA, 55 bp, Artificial
  Synthetic oligonucleotide
gatttaccgaccagttatcagtttatgagtaacacagatgacttcacagaacgaa

SEQ ID NO: 256926 - DNA, 55 bp, Artificial
  Synthetic oligonucleotide
gattgagctacaattgaccgagttaccgagcaaataatttgaccaactgtaagcg

SEQ ID NO: 256927 - DNA, 54 bp, Artificial
  Synthetic oligonucleotide
gattagaataagtcctggagagttctctattttccaggggttaagttacacctc

SEQ ID NO: 256928 - DNA, 55 bp, Artificial
  Synthetic oligonucleotide
gattacattaagtgctccaaattgcgtgcgggactgcaacttgtggtcatcgccg

SEQ ID NO: 256929 - DNA, 55 bp, Artificial
  Synthetic oligonucleotide
gatgacgtaataattgtcaccgttttagctgttggcaaaagagaacgcagcgacg

SEQ ID NO: 256930 - DNA, 60 bp, Artificial
  Synthetic oligonucleotide
gttattcacgtgagtttgagatctcggacatctctcgatctaacgtcacctcggatatgg

SEQ ID NO: 256931 - DNA, 57 bp, Artificial
  Synthetic oligonucleotide
cttactggcaaaaggggcgtacatagattgcgttcttaataccagtatgaactctac

SEQ ID NO: 256932 - DNA, 55 bp, Artificial
  Synthetic oligonucleotide
gatcttgatcggaatggatcaactgttagcacgttggggatgcaatgtgcgcacc

SEQ ID NO: 256933 - DNA, 55 bp, Artificial
  Synthetic oligonucleotide
gatcgtggtcaactactagctggtgcagttctaactgatagctacccacgtggtg

SEQ ID NO: 256934 - DNA, 55 bp, Artificial
  Synthetic oligonucleotide
gatcgcgttggcaagcaatcttgcacattcattccagatagcgatttcactctcg

SEQ ID NO: 256935 - DNA, 55 bp, Artificial
  Synthetic oligonucleotide
gatcgacgtgatcatgtttgcctgctgggaagtcagcgtccagcacacgcaatga

SEQ ID NO: 256936 - DNA, 55 bp, Artificial
  Synthetic oligonucleotide
gatccaatgcgtgtgattccatcttgtatggcaggtggcgcgcttactggtgccc

SEQ ID NO: 256937 - DNA, 53 bp, Artificial
  Synthetic oligonucleotide
gatcatttgttcggattacccacgctctaaggcgttttatacggaaattttag

SEQ ID NO: 256938 - DNA, 55 bp, Artificial
  Synthetic oligonucleotide
gatcagatagggactccgcagtaagaagcgattgatcgcgtccattcacatcgaa

SEQ ID NO: 256939 - DNA, 55 bp, Artificial
  Synthetic oligonucleotide
gatcactattggccgagcgagtgctgtctaagctacgttcaccgtgtaatggaag

SEQ ID NO: 256940 - DNA, 55 bp, Artificial
  Synthetic oligonucleotide
gatagagtacttgaccggttgatgtcggctaaacaatagtagctcgtgagggtgg

SEQ ID NO: 256941 - DNA, 55 bp, Artificial
  Synthetic oligonucleotide
gatacaccttcggtgaacacgaatttaagatctgcacgattacgaggaagtggcg

SEQ ID NO: 256942 - DNA, 57 bp, Artificial
  Synthetic oligonucleotide
cttcaatactaaggcacgctgccgattgtatacaaactcgttcctggttgtttaatc

SEQ ID NO: 256943 - DNA, 55 bp, Artificial
  Synthetic oligonucleotide
gataagagcacgagcaagacatacacgctgcttctgacctgctgcaagcatttgc

SEQ ID NO: 256944 - DNA, 55 bp, Artificial
  Synthetic oligonucleotide
gagtggatgctcagccgagccaactcatctacaaggagggacgaaatctcaatcg

SEQ ID NO: 256945 - DNA, 55 bp, Artificial
  Synthetic oligonucleotide
gagtgcattgcatagcacgttacctgcgtagagtattacgcagtgtattaaggac

SEQ ID NO: 256946 - DNA, 55 bp, Artificial
  Synthetic oligonucleotide
gagtgcactcgcttcgctcctttctctgtgagctggaaaggggcgctaacgcccc

SEQ ID NO: 256947 - DNA, 53 bp, Artificial
  Synthetic oligonucleotide
gagtcacccaaagaaaaccatcgtagccttttaacgtatcttcacaaacttcg

SEQ ID NO: 256948 - DNA, 55 bp, Artificial
  Synthetic oligonucleotide
gagtattagatactctaagcattccagcccgtctgattgcagaatcgtaaaccgc

SEQ ID NO: 256949 - DNA, 54 bp, Artificial
  Synthetic oligonucleotide
gagtacgcagcggctctttggttggtctaaacgcccctttcttcacttcaaccg

SEQ ID NO: 256950 - DNA, 55 bp, Artificial
  Synthetic oligonucleotide
gcatacggttgttgagtaatgccgtgtgtaccgcattcagtacttgccgctgctc

SEQ ID NO: 256951 - DNA, 55 bp, Artificial
  Synthetic oligonucleotide
gcataccatgcaacccgaaccaggaatatataccccaccggccggcgttaaaagc

SEQ ID NO: 256952 - DNA, 55 bp, Artificial
  Synthetic oligonucleotide
gcagtaccagcgtacggcccacagaatgatgtcacgctgaaaatgccggcctttg

SEQ ID NO: 256953 - DNA, 59 bp, Artificial
  Synthetic oligonucleotide
actacggcgctcaagctttgacgatggaactgggtcgtgtggctcgcattggtgaaaac

SEQ ID NO: 256954 - DNA, 55 bp, Artificial
  Synthetic oligonucleotide
gcaggcgaaatcaacttctcagtgggtgacgaaatcaacttgtcgggctttgagg

SEQ ID NO: 256955 - DNA, 55 bp, Artificial
  Synthetic oligonucleotide
gcagcaatccggctactaagtgtgctccatgcatcaaatccatgatagtgtgctg

SEQ ID NO: 256956 - DNA, 55 bp, Artificial
  Synthetic oligonucleotide
gcagcaaaacccactctgaactcaatcaaataggctggaccaaacgtattggcgg

SEQ ID NO: 256957 - DNA, 55 bp, Artificial
  Synthetic oligonucleotide
gcagacctgcttatctaggaaggtgttagttatatcctactgcgttgtcactacg

SEQ ID NO: 256958 - DNA, 55 bp, Artificial
  Synthetic oligonucleotide
gcagaccattcgatttcgaatacgatagtacgaccgtttagaccgaacttacgct

SEQ ID NO: 256959 - DNA, 55 bp, Artificial
  Synthetic oligonucleotide
gcactggccttagtcagcaatgctcagcatgaattatcgcacctcttatggttat

SEQ ID NO: 256960 - DNA, 55 bp, Artificial
  Synthetic oligonucleotide
gcactcggatggtttgtatggggatcccagtgtccatagtactccgatgaaaagg

SEQ ID NO: 256961 - DNA, 55 bp, Artificial
  Synthetic oligonucleotide
gcacgcacataacctgagccttctacaacggctaagcgaggggttttacgaaggg

SEQ ID NO: 256962 - DNA, 55 bp, Artificial
  Synthetic oligonucleotide
gcacgagctggttcattttactgggcaccctagccgacttgaccgtaatatcatg

SEQ ID NO: 256963 - DNA, 55 bp, Artificial
  Synthetic oligonucleotide
gcaccgtgtgagtgtcggtgccgagttgctttgctatgtcgcgcgagctcatgcc

SEQ ID NO: 256964 - DNA, 56 bp, Artificial
  Synthetic oligonucleotide
tagggacgactctttaactagatattagcgccctaccccagaacggcagtcgccac

SEQ ID NO: 256965 - DNA, 55 bp, Artificial
  Synthetic oligonucleotide
gcacccagtaccatgtaaagaatgaccgctgatgcttcgaagcggaactcccaag

SEQ ID NO: 256966 - DNA, 55 bp, Artificial
  Synthetic oligonucleotide
gcacagccggaactgtgggagttgttggatgtcggcttagcagagatgactcgta

SEQ ID NO: 256967 - DNA, 55 bp, Artificial
  Synthetic oligonucleotide
gcacagcccaagccagtaataaggtagtgccagtattgagtcgtgtttgagatga

SEQ ID NO: 256968 - DNA, 55 bp, Artificial
  Synthetic oligonucleotide
gcacaacgattaggcgtcgacttacacggtattataggaagcggacctgacggtt

SEQ ID NO: 256969 - DNA, 55 bp, Artificial
  Synthetic oligonucleotide
gcaatttgctagactgggttttagtaagaccaagcaaatggacgccacccaggta

SEQ ID NO: 256970 - DNA, 55 bp, Artificial
  Synthetic oligonucleotide
gcaatccggctactataggtgctccatgcatctaatccttgatagtatgctgacg

SEQ ID NO: 256971 - DNA, 55 bp, Artificial
  Synthetic oligonucleotide
gcaaggggtacttcccgtcatagttggcatagctcgtaagtagacttcccctctc

SEQ ID NO: 256972 - DNA, 55 bp, Artificial
  Synthetic oligonucleotide
gcaactcgggttgacactcggcccgctaaatccatcgacagcatgtccatacccg

SEQ ID NO: 256973 - DNA, 55 bp, Artificial
  Synthetic oligonucleotide
gcaacgtaacactggcaacgttgcggaaaattcgattcatgaccctcgtccttgg

SEQ ID NO: 256974 - DNA, 55 bp, Artificial
  Synthetic oligonucleotide
gcaacggttgctgtcttatcgaagccgtgctgcatagaagttggtttagccaact

SEQ ID NO: 256975 - DNA, 60 bp, Artificial
  Synthetic oligonucleotide
taggccaaccaaagagccgctgcgtactctctcacaatttcgtgctaatgagcgcggtgg

SEQ ID NO: 256976 - DNA, 55 bp, Artificial
  Synthetic oligonucleotide
gcaacgagtcgtttaatgcattctttcagtatggaattggccgtagtcacccgag

SEQ ID NO: 256977 - DNA, 55 bp, Artificial
  Synthetic oligonucleotide
gcaacctgccttgtgtactcagggtcaacttgaacaagctcggtttttggcaaat

SEQ ID NO: 256978 - DNA, 55 bp, Artificial
  Synthetic oligonucleotide
gcaaccgattcgtgtctgcgagccgctttaggcaatgtttctaccatactcgtca

SEQ ID NO: 256979 - DNA, 55 bp, Artificial
  Synthetic oligonucleotide
gcaacatttgccgctatacaatcaacgaagtcttcgtgttctgcacaaagtacgc

SEQ ID NO: 256980 - DNA, 55 bp, Artificial
  Synthetic oligonucleotide
gactgtttaagaccatcacggctgaactcccaattgacatatttacgctcacggc

SEQ ID NO: 256981 - DNA, 55 bp, Artificial
  Synthetic oligonucleotide
gactgacgcaacgccttcacttggcagcgaagcgccactggctctatcgtacggc

SEQ ID NO: 256982 - DNA, 55 bp, Artificial
  Synthetic oligonucleotide
gactcgctcgacgactaacaaccagcacagtacaacaatggcagctaaccataat

SEQ ID NO: 256983 - DNA, 55 bp, Artificial
  Synthetic oligonucleotide
gactcgcctgcgccataagtcacccactcttgagcaccggctagtttgacggtca

SEQ ID NO: 256984 - DNA, 55 bp, Artificial
  Synthetic oligonucleotide
gactagcggcgagattacgtgaaaggtgtatcggcatgtggagttggttagcgat

SEQ ID NO: 256985 - DNA, 55 bp, Artificial
  Synthetic oligonucleotide
gacgtatgcagtaagccacctgacacagataaactatttcgtagggtattcttcg

SEQ ID NO: 256986 - DNA, 54 bp, Artificial
  Synthetic oligonucleotide
taggcaaagatacagcgttaatagcaacaagtttaaatacggctaacggttggt

SEQ ID NO: 256987 - DNA, 55 bp, Artificial
  Synthetic oligonucleotide
gacggcagttcacttagctgcgtgtttatctctaaatttggataagcgctaccgt

SEQ ID NO: 256988 - DNA, 55 bp, Artificial
  Synthetic oligonucleotide
gacggacttcgctctagttcacgggctatagccctcattgatacgttatcagctc

SEQ ID NO: 256989 - DNA, 55 bp, Artificial
  Synthetic oligonucleotide
gacgagtcgctgaaaagtctttcatcaatggctaaccagcaattctaccctgcca

SEQ ID NO: 256990 - DNA, 55 bp, Artificial
  Synthetic oligonucleotide
gacgagctcgcaatagcgggaagtggaatgcctcatataatattgcctcttggag

SEQ ID NO: 256991 - DNA, 55 bp, Artificial
  Synthetic oligonucleotide
gacctgggcctaactctagtgcggaacttgcccaacgttgacctaattcccataa

SEQ ID NO: 256992 - DNA, 55 bp, Artificial
  Synthetic oligonucleotide
gacctgcaagagcaccttgaccccgcgatgaaccgcgattgggtggtagtgtcga

SEQ ID NO: 256993 - DNA, 55 bp, Artificial
  Synthetic oligonucleotide
gaccgtggttaagtagaggatggatacgttgcatatggcatcgcacttgtaggca

SEQ ID NO: 256994 - DNA, 55 bp, Artificial
  Synthetic oligonucleotide
gaccctgtcagtcctctgtcggtgtaaatccgatcgggggaacgcccaggctaac

SEQ ID NO: 256995 - DNA, 55 bp, Artificial
  Synthetic oligonucleotide
gaccctctaacacgcactctggcaaggcgaggtagtcaatttcaatgacgttaat

SEQ ID NO: 256996 - DNA, 55 bp, Artificial
  Synthetic oligonucleotide
gaccctaaagccaatgctcgggtactgaccacattagcttatagtcatttgaggg

SEQ ID NO: 256997 - DNA, 54 bp, Artificial
  Synthetic oligonucleotide
cttcgtttttgatttcctcgatgtctttttggtatcgagattggaaaggtagaa

SEQ ID NO: 256998 - DNA, 55 bp, Artificial
  Synthetic oligonucleotide
gaccatgcctctgacacccaaaccgcgctcattggtgttacctatgtatattccg

SEQ ID NO: 256999 - DNA, 55 bp, Artificial
  Synthetic oligonucleotide
gaccaacttaaggtcttagaaagttgctgatagtagtcatccatcattccgatac

SEQ ID NO: 257000 - DNA, 55 bp, Artificial
  Synthetic oligonucleotide
gaccaaatgtatggactacacagaataggccaatctctattccccgtttctttgc

SEQ ID NO: 257001 - DNA, 55 bp, Artificial
  Synthetic oligonucleotide
gacatcgcgcaaccttcactcgatttaggcatgactgaagcatctaagctgctaa

SEQ ID NO: 257002 - DNA, 55 bp, Artificial
  Synthetic oligonucleotide
gacacaaatactaccaaactcataatcaccgtcttggtaattaagaacatgcgct

SEQ ID NO: 257003 - DNA, 55 bp, Artificial
  Synthetic oligonucleotide
gaattggttttgcgagcttgtacaacttcgacgagcgtaatagcttccgccttcc

SEQ ID NO: 257004 - DNA, 55 bp, Artificial
  Synthetic oligonucleotide
gaattactggtcatcagtttattgcgccacttcgcaaatctgaccctgggctcac

SEQ ID NO: 257005 - DNA, 55 bp, Artificial
  Synthetic oligonucleotide
gaatggtgaaaagcatcgagttataaccgattgatctcaatctatatcggtggtg

SEQ ID NO: 257006 - DNA, 55 bp, Artificial
  Synthetic oligonucleotide
gaatcaccatagggacttgcagttggtagcgacttaagttggtgtttgaacccca

SEQ ID NO: 257007 - DNA, 55 bp, Artificial
  Synthetic oligonucleotide
gaatagccgagtctcattgctagaagcttattggatggcaacaacgggtggaggt

SEQ ID NO: 257008 - DNA, 60 bp, Artificial
  Synthetic oligonucleotide
ctgtatgcgtgttaataatgctctacgtgagctaggctctggctggatggtacaagtcga

SEQ ID NO: 257009 - DNA, 55 bp, Artificial
  Synthetic oligonucleotide
gaatagaccagtattcgttatgcatcgaactcgtatggctcgcttgcaaggtggt

SEQ ID NO: 257010 - DNA, 55 bp, Artificial
  Synthetic oligonucleotide
gaataacaactcgacgattcagagccgattcatttcgcatgaggtcttcatttac

SEQ ID NO: 257011 - DNA, 55 bp, Artificial
  Synthetic oligonucleotide
gagtacaaccgtgttactaagttccgcccaaatggcacatttgatcgcccaggac

SEQ ID NO: 257012 - DNA, 55 bp, Artificial
  Synthetic oligonucleotide
gaggtaaagtaacaacacgctggcaagcactcgacaacttgagtattgacgcatc

SEQ ID NO: 257013 - DNA, 55 bp, Artificial
  Synthetic oligonucleotide
gaggggcgatattggtctcaggaacgatatgactgcacccatacacttcccaacc

SEQ ID NO: 257014 - DNA, 55 bp, Artificial
  Synthetic oligonucleotide
gagggaatgagatagcggattcgttagcagttgatgctgctagaagtgatatcga

SEQ ID NO: 257015 - DNA, 55 bp, Artificial
  Synthetic oligonucleotide
gaggcgtttgtctaacaaactcaaggcttgtgttgtggcgtagtaagcctcaccg

SEQ ID NO: 257016 - DNA, 55 bp, Artificial
  Synthetic oligonucleotide
gaggccacgctcaaccgccaactcgcgaaacgtacaggcgcgattgttagcctag

SEQ ID NO: 257017 - DNA, 55 bp, Artificial
  Synthetic oligonucleotide
gaggacttctgcggcttcgttggtatcggcggtaacaatgacacggtgcatttcc

SEQ ID NO: 257018 - DNA, 55 bp, Artificial
  Synthetic oligonucleotide
gagcttcgctctatggaacgcttcgctcctagattcgagaggcggcagtggttcg

SEQ ID NO: 257019 - DNA, 60 bp, Artificial
  Synthetic oligonucleotide
acgaccgtcaacgtgcaagtgatgcgctaagtgaagctctaggccagcagctaggacaag

SEQ ID NO: 257020 - DNA, 55 bp, Artificial
  Synthetic oligonucleotide
gagcttcaagacggtgaagtgtggaacgcaatggtcttacgcagtgcaagaggcg

SEQ ID NO: 257021 - DNA, 55 bp, Artificial
  Synthetic oligonucleotide
gagcggcgtgtgtaccaacgttttgctatggcaagatgagctagagatccaccaa

SEQ ID NO: 257022 - DNA, 55 bp, Artificial
  Synthetic oligonucleotide
gagcgaataacagaggtaggccttcaataggaatgcctgccgccagtagtaccgc

SEQ ID NO: 257023 - DNA, 55 bp, Artificial
  Synthetic oligonucleotide
gagcctaggatgccacgactaatgcttggattccatgttgttaccgttttggctc

SEQ ID NO: 257024 - DNA, 55 bp, Artificial
  Synthetic oligonucleotide
gagccggtattgttaatcgtaatcgaccattaaccggagccagtggcagtgctcc

SEQ ID NO: 257025 - DNA, 55 bp, Artificial
  Synthetic oligonucleotide
gagccgagccaacaatcacaacgatatcgataggaaaacgtcggcgtaactctgc

SEQ ID NO: 257026 - DNA, 55 bp, Artificial
  Synthetic oligonucleotide
gagccattacttgctcaagttcaactttcttcgcatcaagatcgctaccaagagt

SEQ ID NO: 257027 - DNA, 55 bp, Artificial
  Synthetic oligonucleotide
gagccagaccagcccgtgactataggcaaagcgttggcaggaagtgagttgtttc

SEQ ID NO: 257028 - DNA, 55 bp, Artificial
  Synthetic oligonucleotide
gagcatcgactctttgtttggtacacgacctgtgaacatcacgtatacgtcacgc

SEQ ID NO: 257029 - DNA, 55 bp, Artificial
  Synthetic oligonucleotide
gagcagtttactgctcgtgctagctcttcaatcatgtgagcgaatcggatgaagt

SEQ ID NO: 257030 - DNA, 60 bp, Artificial
  Synthetic oligonucleotide
gctccggtttcatgcaatgcccctggcgattgtctgaggttgaacatggggcgagataac

SEQ ID NO: 257031 - DNA, 55 bp, Artificial
  Synthetic oligonucleotide
gagcacatcactaagatggccaacaatctactgcgtagaatggggttatctgtta

SEQ ID NO: 257032 - DNA, 55 bp, Artificial
  Synthetic oligonucleotide
gagcaaagggatccatattgcttatcgccatcacttcttgcgcttcagtcggacg

SEQ ID NO: 257033 - DNA, 55 bp, Artificial
  Synthetic oligonucleotide
gagatggacaagtgcgtgccaacgtcatcaaagtggctcctcgcgtttcaggccc

SEQ ID NO: 257034 - DNA, 55 bp, Artificial
  Synthetic oligonucleotide
gagatgagcttggagagaacttgagaaatcataggctatacagtgcacctaacgc

SEQ ID NO: 257035 - DNA, 55 bp, Artificial
  Synthetic oligonucleotide
gagatctcacgacttacttggttggaaactgaagcaaacactcggctacgtaatg

SEQ ID NO: 257036 - DNA, 53 bp, Artificial
  Synthetic oligonucleotide
gagatccgctagggtttgttcaagtaagctacggtttgggttaccagagcggg

SEQ ID NO: 257037 - DNA, 55 bp, Artificial
  Synthetic oligonucleotide
gagagctgataccgctttacgtttctaattcggagtttcttacaatggtcatcag

SEQ ID NO: 257038 - DNA, 55 bp, Artificial
  Synthetic oligonucleotide
gagagctaacttctcagtggttaattgggctgtagtggcattactgtgaccgcac

SEQ ID NO: 257039 - DNA, 55 bp, Artificial
  Synthetic oligonucleotide
gagagcgccattctgtatcctactaaaggaaacagtcccgtcggcgattgcatct

SEQ ID NO: 257040 - DNA, 55 bp, Artificial
  Synthetic oligonucleotide
gacttggcgatcgcggtggaactcttgctccagcaatgggtaatcgcttgggtgg

SEQ ID NO: 257041 - DNA, 55 bp, Artificial
  Synthetic oligonucleotide
cccgtagagcattagctccaaccgctactaatggtcaagaacttatcgcaggtga

SEQ ID NO: 257042 - DNA, 55 bp, Artificial
  Synthetic oligonucleotide
gcccagttactgcgatacaatgcgtaggtgacgctgtgtgcggtcacatcctggg

SEQ ID NO: 257043 - DNA, 55 bp, Artificial
  Synthetic oligonucleotide
gccccaccagacgtgccactcctgaatatagaccggcatatctttcagcgccccg

SEQ ID NO: 257044 - DNA, 55 bp, Artificial
  Synthetic oligonucleotide
gcctcaatggctacgattcccggacttaacttctattgctattccatgagtacgt

SEQ ID NO: 257045 - DNA, 55 bp, Artificial
  Synthetic oligonucleotide
gcgaggaaaacacggcggttactgctccttttcaggctgggacgcaggtttgtcc

SEQ ID NO: 257046 - DNA, 55 bp, Artificial
  Synthetic oligonucleotide
gctgctatgtgtttgtggagaatgcgcgctcgtacgacatccttgaaacgaaggc

SEQ ID NO: 257047 - DNA, 55 bp, Artificial
  Synthetic oligonucleotide
ggagttcggcacacatttgagccaccggttcgtcttgatcagttcgcggaaacgc

SEQ ID NO: 257048 - DNA, 55 bp, Artificial
  Synthetic oligonucleotide
ggcacagccgagtgctttccgttttccgtgtttcatgtcgtcatcccctccgtac

SEQ ID NO: 257049 - DNA, 55 bp, Artificial
  Synthetic oligonucleotide
ggggactgttgcgatctggaatgtgccgctgtccatacccgtgtggtgaacgccg

SEQ ID NO: 257050 - DNA, 55 bp, Artificial
  Synthetic oligonucleotide
aaggcgacatcagagcagcaattgacaactccagactgacgacgcgtctatcgat

SEQ ID NO: 257051 - DNA, 55 bp, Artificial
  Synthetic oligonucleotide
tccgcagctatgagaactcctgcgtggaactgcgttctctgctcggattctatcc

SEQ ID NO: 257052 - DNA, 55 bp, Artificial
  Synthetic oligonucleotide
cgaacgcaatgcaatatatcgtgccctgcaagattccggctacgtttccccatgg

SEQ ID NO: 257053 - DNA, 53 bp, Artificial
  Synthetic oligonucleotide
gcgcataccttttccaatcggagtcaccttcccgggtcggcacctgaagatag

SEQ ID NO: 257054 - DNA, 53 bp, Artificial
  Synthetic oligonucleotide
ggataaccgctgtcgagaattctgccccagtaacggcggataatctccaatgc

SEQ ID NO: 257055 - DNA, 53 bp, Artificial
  Synthetic oligonucleotide
agttgttatgcgcatgaatggattcaaggaggtgccggaagccgtcgggaagt

SEQ ID NO: 257056 - DNA, 53 bp, Artificial
  Synthetic oligonucleotide
tcagtccggtggaataaattccgatatcgcactccggatagaccgtatggatc

SEQ ID NO: 257057 - DNA, 53 bp, Artificial
  Synthetic oligonucleotide
aacacccagcggtccgggtggttcaaatagagtttgcgcaccgagtaggggca

SEQ ID NO: 257058 - DNA, 52 bp, Artificial
  Synthetic oligonucleotide
gacctggtcgcaaccacttacgctctggtgacgcgctatatggaattggcgc

SEQ ID NO: 257059 - DNA, 52 bp, Artificial
  Synthetic oligonucleotide
tccgtaattgagttgtttggagttgaacgcatagttcgtttcggccggacac

SEQ ID NO: 257060 - DNA, 51 bp, Artificial
  Synthetic oligonucleotide
tatgacctcaactggttcggtcatgtgaactccacggaccccaggcgcggc

SEQ ID NO: 257061 - DNA, 51 bp, Artificial
  Synthetic oligonucleotide
tccagactgtgggtgtaagcgaccggattgtggtggccgttcgcaatcaca

SEQ ID NO: 257062 - DNA, 51 bp, Artificial
  Synthetic oligonucleotide
tctgcatgcacgagcactatgaggactgtccgtggcgcgaacaggcattat

SEQ ID NO: 257063 - DNA, 55 bp, Artificial
  Synthetic oligonucleotide
cgcggtagatttccttgtaacggacctgtgtagacatctgaaagttgcactcctg

SEQ ID NO: 257064 - DNA, 50 bp, Artificial
  Synthetic oligonucleotide
aggatcacgccggagtctggtatctctcccggttcgggcggctcaatcta

SEQ ID NO: 257065 - DNA, 50 bp, Artificial
  Synthetic oligonucleotide
agctgccgagcagtttctcctgcttgaagccaagtgtcaaagcgccgtcg

SEQ ID NO: 257066 - DNA, 50 bp, Artificial
  Synthetic oligonucleotide
agcggccgttactcgcaggcggtcatccgaacgtcataccggcttgtgga

SEQ ID NO: 257067 - DNA, 50 bp, Artificial
  Synthetic oligonucleotide
agcgcacaagtgtctccgacggcaagggcacttcgtcccttgaccccgac

SEQ ID NO: 257068 - DNA, 50 bp, Artificial
  Synthetic oligonucleotide
agaaagcaggcgtgcagtgtaaggcgaacctgctcaattgcagcgccctt

SEQ ID NO: 257069 - DNA, 50 bp, Artificial
  Synthetic oligonucleotide
actcccccgtctccgtgcagacgccgtggcggatgtccgactccttcttc

SEQ ID NO: 257070 - DNA, 50 bp, Artificial
  Synthetic oligonucleotide
acgcacgctttgaagtttgaccgggcgtttccactgggacaaacggcggg

SEQ ID NO: 257071 - DNA, 50 bp, Artificial
  Synthetic oligonucleotide
accggaccgtgccgaaaagcgattcccacccggccatgaacgtcgaatgg

SEQ ID NO: 257072 - DNA, 50 bp, Artificial
  Synthetic oligonucleotide
aatagaggatccctttgatgccagctcccgcagcggtgtacgcgtcgcgc

SEQ ID NO: 257073 - DNA, 50 bp, Artificial
  Synthetic oligonucleotide
aagggcacttcgtcccttgaccccgaccgggtagcacccgatggcaagta

SEQ ID NO: 257074 - DNA, 55 bp, Artificial
  Synthetic oligonucleotide
cgctttgcgccgtttctggggtaatccccaatgcccggaatggaagcttcgcctg

SEQ ID NO: 257075 - DNA, 50 bp, Artificial
  Synthetic oligonucleotide
aaggcgccttaagccgggtacgcttcaccggttcgttagcccagcccgac

SEQ ID NO: 257076 - DNA, 50 bp, Artificial
  Synthetic oligonucleotide
aaggccgtaagccagtccgattttcccgcagtcggcataaggcgcgtcga

SEQ ID NO: 257077 - DNA, 50 bp, Artificial
  Synthetic oligonucleotide
aagcggggttgcccggagggtaacaacttttgaacgcaagcacaggcagg

SEQ ID NO: 257078 - DNA, 50 bp, Artificial
  Synthetic oligonucleotide
aacgggagcgtccgggctgagtcggttagaatggcatcagctgggggaat

SEQ ID NO: 257079 - DNA, 50 bp, Artificial
  Synthetic oligonucleotide
aaccgacgttctcccatgagaccagcggccgtgagagccgctctttttct

SEQ ID NO: 257080 - DNA, 50 bp, Artificial
  Synthetic oligonucleotide
aacccttccttgttgtacaggttcgcgttgcccggataaccggcccacgc

SEQ ID NO: 257081 - DNA, 50 bp, Artificial
  Synthetic oligonucleotide
attcatggaaggggacccctaccgccctttttacccgacggtcggcatga

SEQ ID NO: 257082 - DNA, 50 bp, Artificial
  Synthetic oligonucleotide
attcccaatgggacgccatcgcggtccccctggattggtaccggcaatat

SEQ ID NO: 257083 - DNA, 50 bp, Artificial
  Synthetic oligonucleotide
attgataaccgctggtccacggcgcggcaggagaactcggattaggcccc

SEQ ID NO: 257084 - DNA, 50 bp, Artificial
  Synthetic oligonucleotide
attgctcttcaatggggaaacgtgcgtgccgcgaccaaccgtcgatgagc

SEQ ID NO: 257085 - DNA, 55 bp, Artificial
  Synthetic oligonucleotide
cgggccatgtgggacgcatcccacgatcttgaattgatgatcgcctacggtaata

SEQ ID NO: 257086 - DNA, 50 bp, Artificial
  Synthetic oligonucleotide
caatgcgccggttctccggaggggttccagacggtcgttccttcttgaga

SEQ ID NO: 257087 - DNA, 50 bp, Artificial
  Synthetic oligonucleotide
cacagggacctccatggttcaacacggaataagacggcaatgcgccgccg

SEQ ID NO: 257088 - DNA, 50 bp, Artificial
  Synthetic oligonucleotide
caccgcaaattcattcggcaacagctcgaaaggggccgccgggagttcat

SEQ ID NO: 257089 - DNA, 50 bp, Artificial
  Synthetic oligonucleotide
atgcttcgctgtacgtctgtcccggcgattcccggcagaagctcacttcc

SEQ ID NO: 257090 - DNA, 50 bp, Artificial
  Synthetic oligonucleotide
ccgttgacttgcgaagcacttccattcgcgggcggccctagcgggcctta

SEQ ID NO: 257091 - DNA, 50 bp, Artificial
  Synthetic oligonucleotide
atctggcgttggtatgaagccagtccccgtaagcggactgccagccgttg

SEQ ID NO: 257092 - DNA, 50 bp, Artificial
  Synthetic oligonucleotide
atccgatccatacgatgcgcaatgcgtttcacgcgacagccgaaacccgc

SEQ ID NO: 257093 - DNA, 50 bp, Artificial
  Synthetic oligonucleotide
atcccgtccttccgcacggtcggagccctgttcgatgtttcccgcaacct

SEQ ID NO: 257094 - DNA, 50 bp, Artificial
  Synthetic oligonucleotide
atactccggacgcagcccgaaagaaggatcgccgctcgggaaaggaaccg

SEQ ID NO: 257095 - DNA, 50 bp, Artificial
  Synthetic oligonucleotide
agtttgaccgggcgtttccactgggacaaacggcgggagcaggcggaacg

SEQ ID NO: 257096 - DNA, 55 bp, Artificial
  Synthetic oligonucleotide
ctatccgcgaatgaatacgggctctggtaaggtttccccgcttctctcgtgaggt

SEQ ID NO: 257097 - DNA, 50 bp, Artificial
  Synthetic oligonucleotide
agttccagccgttctcacacggccacgggtgcatgtcaaaggcataccgc

SEQ ID NO: 257098 - DNA, 50 bp, Artificial
  Synthetic oligonucleotide
agtggttatgcagaccgaccaatgccttgcctgtgcttggtcgcacgccc

SEQ ID NO: 257099 - DNA, 50 bp, Artificial
  Synthetic oligonucleotide
agtaaggggcgctagccccgcccgcgaatggaagtgcttcgcaagtcaac

SEQ ID NO: 257100 - DNA, 55 bp, Artificial
  Synthetic oligonucleotide
ctgtatgttcccagccacaggtcatacagcaaccatgccgtattgccgacagccc

SEQ ID NO: 257101 - DNA, 53 bp, Artificial
  Synthetic oligonucleotide
gacccggaaaacggtggtgcttcgcccttccgccgtaactcccgccagtgtga

SEQ ID NO: 257102 - DNA, 55 bp, Artificial
  Synthetic oligonucleotide
gcatgtgcgttacttcgttcctgcttatgccgcgggtaagtttcgccggattccc

SEQ ID NO: 257103 - DNA, 60 bp, Artificial
  Synthetic oligonucleotide
ttttgagacgctttcatcaatactctcatccgatgttgcaattagataggtgtcggacac

SEQ ID NO: 257104 - DNA, 59 bp, Artificial
  Synthetic oligonucleotide
ctgctccagaccaattcttgtcgagtgttgttattgcacagtttctttttgtaacgtca

SEQ ID NO: 257105 - DNA, 60 bp, Artificial
  Synthetic oligonucleotide
agagataaaattgcgtggcagaaaatggaaatgctctctttggattctattatcgttgaa

SEQ ID NO: 257106 - DNA, 60 bp, Artificial
  Synthetic oligonucleotide
gaagttttgctaataatgcttcggcagctctcttatccctttttcctacatgcattgcca

SEQ ID NO: 257107 - DNA, 58 bp, Artificial
  Synthetic oligonucleotide
aggtttgagacttccgtttttgatcctagaggacagacataggcactaagaatgtcca

SEQ ID NO: 257108 - DNA, 55 bp, Artificial
  Synthetic oligonucleotide
atactagaaaaaaaccgcatcagtttgagatcaaaacgacaccttgttgacgaaa

SEQ ID NO: 257109 - DNA, 55 bp, Artificial
  Synthetic oligonucleotide
ctagtcagtccaattcctggaacgacacgcgacagcgtggatgtgcgggtgtctc

SEQ ID NO: 257110 - DNA, 55 bp, Artificial
  Synthetic oligonucleotide
ctacagcctgattgccagcgatctcatctctacactgccagaggcattccactac

SEQ ID NO: 257111 - DNA, 55 bp, Artificial
  Synthetic oligonucleotide
cgtcaacaatccttgacagagtttccccttctgctggtgatatctctccgtttcc

SEQ ID NO: 257112 - DNA, 55 bp, Artificial
  Synthetic oligonucleotide
cgattccggctcctgttagatatagtcgagggcaggatatcagtggaggttgcgg

SEQ ID NO: 257113 - DNA, 55 bp, Artificial
  Synthetic oligonucleotide
cgacgaacaaacgacggatttccttttgactacaagcttccgcatctacgatcgc

SEQ ID NO: 257114 - DNA, 54 bp, Artificial
  Synthetic oligonucleotide
ttcggaatccataatgaaacaattaaaagatcttctaggagagggggagggtta

SEQ ID NO: 257115 - DNA, 55 bp, Artificial
  Synthetic oligonucleotide
cctgaaggatcgcactctatatcctacagggaaaaggaagtagccgatgaaagga

SEQ ID NO: 257116 - DNA, 55 bp, Artificial
  Synthetic oligonucleotide
cctcgctcacaatgagcttaatcatccttaaaacacttggatctgtcgacgcatg

SEQ ID NO: 257117 - DNA, 55 bp, Artificial
  Synthetic oligonucleotide
cctatagcggagggctcggcgttttagcgggagacaccattaaatcagcggcaaa

SEQ ID NO: 257118 - DNA, 55 bp, Artificial
  Synthetic oligonucleotide
ctatctttcttccttcgttgatctcactaaatacagccattcgaactccttcaag

SEQ ID NO: 257119 - DNA, 55 bp, Artificial
  Synthetic oligonucleotide
ctccgcgggcttcaaacaaagcaagtacagatcattgttgcgagggactctgctg

SEQ ID NO: 257120 - DNA, 55 bp, Artificial
  Synthetic oligonucleotide
ctgaacaagcttgtgtcgagacagaatgcggcaggaaaccctcttttggctgctt

SEQ ID NO: 257121 - DNA, 55 bp, Artificial
  Synthetic oligonucleotide
gccgctaatctctacaatttctcctgtattgtaaaggtgtgtgtgattttcttcg

SEQ ID NO: 257122 - DNA, 55 bp, Artificial
  Synthetic oligonucleotide
gggattcacctatttcactcctgtccaaaggcactctttcgccattccttaacat

SEQ ID NO: 257123 - DNA, 55 bp, Artificial
  Synthetic oligonucleotide
gggattgaaagctagagacttaacaatatatgcaaagacagtttcatgaagtccg

SEQ ID NO: 257124 - DNA, 55 bp, Artificial
  Synthetic oligonucleotide
gtccaagacttttggcatagtccctgtcgaaagtcagtaccttaagttctttgta

SEQ ID NO: 257125 - DNA, 60 bp, Artificial
  Synthetic oligonucleotide
ttccaatgctcaggtttctacttgaaatgggtgctaatccaaatgctatagctatgggaa

SEQ ID NO: 257126 - DNA, 55 bp, Artificial
  Synthetic oligonucleotide
gtcttctaaaagcgtaactgtgttgcaaaggccgtgatgctttgcgcagagatct

SEQ ID NO: 257127 - DNA, 55 bp, Artificial
  Synthetic oligonucleotide
tccgcaacagttaaacaaacaggaaaggttgtaggcatgttggatattgactccg

SEQ ID NO: 257128 - DNA, 55 bp, Artificial
  Synthetic oligonucleotide
ttttgagtcgaaacagcagggtcttgaaaacacatctcttctagaaagcaaccga

SEQ ID NO: 257129 - DNA, 53 bp, Artificial
  Synthetic oligonucleotide
agtaatcccgatctcaaaccgtctcatccgaacctttaatccaaaagcctttc

SEQ ID NO: 257130 - DNA, 55 bp, Artificial
  Synthetic oligonucleotide
acccaagaagggatgtgccacgactgcacagggctcgggattcaatacggcgcaa

SEQ ID NO: 257131 - DNA, 55 bp, Artificial
  Synthetic oligonucleotide
accacttagccggcccgccaataccgatggtgcataggtgtcttaaagagcggcc

SEQ ID NO: 257132 - DNA, 55 bp, Artificial
  Synthetic oligonucleotide
agtcctcgaacacggattcaagataaaagtcgcggtagtcgacagtcattcaatt

SEQ ID NO: 257133 - DNA, 55 bp, Artificial
  Synthetic oligonucleotide
acatcgcaatcacgcttgtcgaccaagggactgtcattcctaaagatcgagtatc

SEQ ID NO: 257134 - DNA, 55 bp, Artificial
  Synthetic oligonucleotide
acagccgccactaccgcgctatccagacccttcacgggcacacatccgcagtttc

SEQ ID NO: 257135 - DNA, 55 bp, Artificial
  Synthetic oligonucleotide
caaccaccacttcccaggacctccaaagcgtcttgcggtaactgatccgcttccc

SEQ ID NO: 257136 - DNA, 58 bp, Artificial
  Synthetic oligonucleotide
tactgcaaagctgtactcgaaattaagatcgtccgatattgtctggcttcccttttcc

SEQ ID NO: 257137 - DNA, 55 bp, Artificial
  Synthetic oligonucleotide
ccgtgaagtgatgaaagctgctacatttctcacccgataaagcctttggtaggtc

SEQ ID NO: 257138 - DNA, 55 bp, Artificial
  Synthetic oligonucleotide
aaattcgtaaattctttgtggccagggctgttcggtgcatagtgtcctattggaa

SEQ ID NO: 257139 - DNA, 55 bp, Artificial
  Synthetic oligonucleotide
catcgaaaccctaccatcaaaacattggcgaagattatgtattcctctacacact

SEQ ID NO: 257140 - DNA, 55 bp, Artificial
  Synthetic oligonucleotide
cagttgacttaagatgcagtaccctatctcgtctttccaccaactgaggtgaccc

SEQ ID NO: 257141 - DNA, 55 bp, Artificial
  Synthetic oligonucleotide
cagatgagattccgcaacagttaaacaaacaggaaaggttgtaggcatgttggat

SEQ ID NO: 257142 - DNA, 54 bp, Artificial
  Synthetic oligonucleotide
atctcatcgctttcagtgcaggcgacaaagacttcggccgttccgatcttttcg

SEQ ID NO: 257143 - DNA, 54 bp, Artificial
  Synthetic oligonucleotide
cttctagcaaagtcaatccttctactttaaccggagcaatatccggtagatcta

SEQ ID NO: 257144 - DNA, 54 bp, Artificial
  Synthetic oligonucleotide
ttttaccgcggttgactcgcatttagggcacgatgggttcatttcatttctcca

SEQ ID NO: 257145 - DNA, 53 bp, Artificial
  Synthetic oligonucleotide
ttcccttggcttttccgcagggatttcctgattgtccctttcgaaaccttgtg

SEQ ID NO: 257146 - DNA, 53 bp, Artificial
  Synthetic oligonucleotide
ccaatacccgttcgtcgattttgttatcaatagtcggtagcatgactcggtaa

SEQ ID NO: 257147 - DNA, 60 bp, Artificial
  Synthetic oligonucleotide
gttccgctagatataatgtcgcttgcttgacctctggttagtttatccaagccagcccga

SEQ ID NO: 257148 - DNA, 53 bp, Artificial
  Synthetic oligonucleotide
ctttcagtaaaagggatgcaaagaggatgaccaagtatgtctgttacctggta

SEQ ID NO: 257149 - DNA, 53 bp, Artificial
  Synthetic oligonucleotide
ccaccatacctgcgatacctatatcgaccgcctagtggccaaagggtttcgca

SEQ ID NO: 257150 - DNA, 53 bp, Artificial
  Synthetic oligonucleotide
ggagaatagcggtctgattggaaatgattatgggaatttgtttgttcagggaa

SEQ ID NO: 257151 - DNA, 53 bp, Artificial
  Synthetic oligonucleotide
ggagtggttgaatggcgctcatgcaatggatcgtgtagcgcttcggtccgata

SEQ ID NO: 257152 - DNA, 52 bp, Artificial
  Synthetic oligonucleotide
gttcgtagacgatcgtttcccgttgtgcaggaggaatataaacaggttcgta

SEQ ID NO: 257153 - DNA, 52 bp, Artificial
  Synthetic oligonucleotide
ttttgtcatcagacgctcaagaggcgactctaacgcatccaccccatatttt

SEQ ID NO: 257154 - DNA, 52 bp, Artificial
  Synthetic oligonucleotide
ggaaggaatactacatgggagctgtgatcgatcggcagaatgcgcgtgcagt

SEQ ID NO: 257155 - DNA, 51 bp, Artificial
  Synthetic oligonucleotide
attgattgcgatgggagccggacagcccaaccgcgtcgacagcctggaaag

SEQ ID NO: 257156 - DNA, 51 bp, Artificial
  Synthetic oligonucleotide
tatgagaagctgtatacccaagcgcctcaactgctgtattacttctgtgaa

SEQ ID NO: 257157 - DNA, 51 bp, Artificial
  Synthetic oligonucleotide
tgcaattcaactaggttattaggttgtctggcactttggattgaggagact

SEQ ID NO: 257158 - DNA, 58 bp, Artificial
  Synthetic oligonucleotide
accatggatagtatcagatgagattccgcaacagttaaacaaacaggaaaggttgtag

SEQ ID NO: 257159 - DNA, 51 bp, Artificial
  Synthetic oligonucleotide
tgggaaatcgtacttagtcgaagcggaagcaatgtcttacgatctggcgat

SEQ ID NO: 257160 - DNA, 51 bp, Artificial
  Synthetic oligonucleotide
aatatgcaggtgaacgcgcgtgatggtgcccctctctgaagacatgcgccc

SEQ ID NO: 257161 - DNA, 51 bp, Artificial
  Synthetic oligonucleotide
ctataaaaaatcgcccaaaattgagcgaagaggcgttagagttagtctggg

SEQ ID NO: 257162 - DNA, 51 bp, Artificial
  Synthetic oligonucleotide
atccctcaagcacacagccgccactaccgcgctatccagacccttcacggg

SEQ ID NO: 257163 - DNA, 51 bp, Artificial
  Synthetic oligonucleotide
gcatcccactttctctgcgatatgcttatggctcggcttcaccactcgata

SEQ ID NO: 257164 - DNA, 51 bp, Artificial
  Synthetic oligonucleotide
aagccccgcagcatcccacggctctgcaatcagcttagttgcagcaaggat

SEQ ID NO: 257165 - DNA, 51 bp, Artificial
  Synthetic oligonucleotide
acggggtgctccaaccgtagcggatcgtgtgacccatgcggtcctgtaagc

SEQ ID NO: 257166 - DNA, 51 bp, Artificial
  Synthetic oligonucleotide
cacttgctcagatcctccggccgctgtgtgcgctggatgcgcatagtactc

SEQ ID NO: 257167 - DNA, 51 bp, Artificial
  Synthetic oligonucleotide
agcccagagcaggctaatgcagccccagtagccacttttcggatcactccg

SEQ ID NO: 257168 - DNA, 51 bp, Artificial
  Synthetic oligonucleotide
cccttggattgcgtgggtcgtgccactatgacgcaagaggtctcaggggca

SEQ ID NO: 257169 - DNA, 58 bp, Artificial
  Synthetic oligonucleotide
ccatattcggattgagccaccagaaggtggagttaaccttcctagttttgctgtatgc

SEQ ID NO: 257170 - DNA, 50 bp, Artificial
  Synthetic oligonucleotide
ttggtccctggctgcaatcgatggatgacgcgcgcctgaacgctgacagg

SEQ ID NO: 257171 - DNA, 50 bp, Artificial
  Synthetic oligonucleotide
cccagctcatgaatcgactccctcaaaatccttgcccctaaactatggaa

SEQ ID NO: 257172 - DNA, 50 bp, Artificial
  Synthetic oligonucleotide
tcgtcaatttggaagggcgtatcgtcatgtcttcggaaggccctaattgc

SEQ ID NO: 257173 - DNA, 50 bp, Artificial
  Synthetic oligonucleotide
tcgccccatctacaccatctattcctgctgcaccggtaggccctgtcgga

SEQ ID NO: 257174 - DNA, 50 bp, Artificial
  Synthetic oligonucleotide
atgcccggtaagcaacgaagaccaaacctgcaacaaggagggcactgccc

SEQ ID NO: 257175 - DNA, 50 bp, Artificial
  Synthetic oligonucleotide
tacgccaaagagtgcctgccccatggtgtgttggggctaaatgccggatt

SEQ ID NO: 257176 - DNA, 50 bp, Artificial
  Synthetic oligonucleotide
taccatcgggtgctgcttccgaaatcccactaagccgcagcccatacagc

SEQ ID NO: 257177 - DNA, 50 bp, Artificial
  Synthetic oligonucleotide
gcgtcttcgtaataaccgggggagagccccaaccctccttcggcaagggg

SEQ ID NO: 257178 - DNA, 50 bp, Artificial
  Synthetic oligonucleotide
gtcgggcccctgcaagcgagcagccgctctttaatggcacatttagcccc

SEQ ID NO: 257179 - DNA, 50 bp, Artificial
  Synthetic oligonucleotide
agaagtggggaagggacgcgtttgccgctcgtatgggaggtgaagcagtc

SEQ ID NO: 257180 - DNA, 60 bp, Artificial
  Synthetic oligonucleotide
acgatatatcgtactatataattaaagaacagagacagaatgaatcgatataagctttat

SEQ ID NO: 257181 - DNA, 50 bp, Artificial
  Synthetic oligonucleotide
gtaataaccgggggagagccccaaccctccttcggcaaggggagtggtga

SEQ ID NO: 257182 - DNA, 50 bp, Artificial
  Synthetic oligonucleotide
gggtccggcatctccgtaccccgccatcttaagcctcatgcctgaatcga

SEQ ID NO: 257183 - DNA, 50 bp, Artificial
  Synthetic oligonucleotide
gggccggaaccttatcgcgccgcttatgtagaaccctgccggcgtccaac

SEQ ID NO: 257184 - DNA, 50 bp, Artificial
  Synthetic oligonucleotide
ggcttgagagtcgggtagtgcgttaggcggagcaggctgtctcgcggact

SEQ ID NO: 257185 - DNA, 59 bp, Artificial
  Synthetic oligonucleotide
gtctccgccttgccttgcccaatgggtagaggattgctgttcgtctaggtctattagaa

SEQ ID NO: 257186 - DNA, 57 bp, Artificial
  Synthetic oligonucleotide
ccctatgggtaccatccgtttcggttgatccactaggaccacgatgattggtcctgc

SEQ ID NO: 257187 - DNA, 59 bp, Artificial
  Synthetic oligonucleotide
ggacgttcagacactgaaacgcatcctttgcccccgtagcccacatggtgagcgcccaa

SEQ ID NO: 257188 - DNA, 50 bp, Artificial
  Synthetic oligonucleotide
atgggaatgagttcgaatcccaccgttgcctccgattcccgccggtcgca

SEQ ID NO: 257189 - DNA, 50 bp, Artificial
  Synthetic oligonucleotide
atgtggaccttcgcgaggctggttccgggtggcgcgttttgcgtcggaca

SEQ ID NO: 257190 - DNA, 50 bp, Artificial
  Synthetic oligonucleotide
caaacgtcgaggggcgctactgctcagggccggtggcggactattcgcta

SEQ ID NO: 257191 - DNA, 50 bp, Artificial
  Synthetic oligonucleotide
cacagcttgacgtctcgcggcagcttgtggggttgcacgatgcaatgcgc

SEQ ID NO: 257192 - DNA, 50 bp, Artificial
  Synthetic oligonucleotide
cacctccgacggatccgcaacgaggcagggtgcaatgatggccgacgaca

SEQ ID NO: 257193 - DNA, 50 bp, Artificial
  Synthetic oligonucleotide
cgatcgaaaatgcgcgaccgaactatgaggttctgtcggtcgggagcaat

SEQ ID NO: 257194 - DNA, 50 bp, Artificial
  Synthetic oligonucleotide
tcgttgaaattcggagctcataaacggcgtggggtccaacggcctccgcc

SEQ ID NO: 257195 - DNA, 50 bp, Artificial
  Synthetic oligonucleotide
ccttccccaagggtaaagtatttccaagcgtgtgaatcatgttgccgaga

SEQ ID NO: 257196 - DNA, 50 bp, Artificial
  Synthetic oligonucleotide
acactgcgacccgccattgcctgaacccctcgtgttgccgccttttcgag

SEQ ID NO: 257197 - DNA, 50 bp, Artificial
  Synthetic oligonucleotide
acagaggccaccagaaagtcccttcgaacggccgtcgcaccttggcgtgc

SEQ ID NO: 257198 - DNA, 60 bp, Artificial
  Synthetic oligonucleotide
agatcgcctgcgcacagcctgaatgagtcccgccgtcgaatgcccggtcgcctcatagcc

SEQ ID NO: 257199 - DNA, 50 bp, Artificial
  Synthetic oligonucleotide
acagcaatccggcggggcctctgctacataacatcccagaacgcggcgcc

SEQ ID NO: 257200 - DNA, 50 bp, Artificial
  Synthetic oligonucleotide
acagcgggtttggctgtcgccagctcagcaggtggtgtcgtaatggacac

SEQ ID NO: 257201 - DNA, 50 bp, Artificial
  Synthetic oligonucleotide
acaggcgggggatgcagaacggttgcgaagctgcatgacggccgaacgtc

SEQ ID NO: 257202 - DNA, 50 bp, Artificial
  Synthetic oligonucleotide
acatccatgccggctgatcctcaggacacccccgcctcagatcccctcct

SEQ ID NO: 257203 - DNA, 50 bp, Artificial
  Synthetic oligonucleotide
acattccggccctaggccgcgcaccggcaaccctgtatgcagacgaaatc

SEQ ID NO: 257204 - DNA, 50 bp, Artificial
  Synthetic oligonucleotide
accctcgaggtcgaccgcccccaacgtcagatgacggcgcattgcggccg

SEQ ID NO: 257205 - DNA, 50 bp, Artificial
  Synthetic oligonucleotide
accgcacgtatccggctcggaagtggcctcatccccgaaacgacaatggg

SEQ ID NO: 257206 - DNA, 50 bp, Artificial
  Synthetic oligonucleotide
accgcggcatgcataataggcgcagatcgaaacggggtgttgcgctcagc

SEQ ID NO: 257207 - DNA, 50 bp, Artificial
  Synthetic oligonucleotide
accgcggttgcagcggtcgaaaatgcggtcagtgttatcggcgccagcaa

SEQ ID NO: 257208 - DNA, 50 bp, Artificial
  Synthetic oligonucleotide
accgctgaactcccaaactaagactccgccctcctctcgagggtggggcc

SEQ ID NO: 257209 - DNA, 59 bp, Artificial
  Synthetic oligonucleotide
acacgggcgagcgatccccgaggtcatcttggaatacgctgcgtccaatgagcacgata

SEQ ID NO: 257210 - DNA, 50 bp, Artificial
  Synthetic oligonucleotide
accggacccatatccgccaggttttgtcgcatctgggctctcgggacctc

SEQ ID NO: 257211 - DNA, 50 bp, Artificial
  Synthetic oligonucleotide
accgggatttcgagaggcgggtttagccctctcgcggggtcgcactagat

SEQ ID NO: 257212 - DNA, 50 bp, Artificial
  Synthetic oligonucleotide
accgtgaaccgtgccggcctctcccgtaatcaagatcaccacgggatgcc

SEQ ID NO: 257213 - DNA, 50 bp, Artificial
  Synthetic oligonucleotide
accgtttgcttgccctcggctttggtcctgggccagatttgaccgtcgga

SEQ ID NO: 257214 - DNA, 50 bp, Artificial
  Synthetic oligonucleotide
acgaacccgtaagggggcgcgatatcggaaccttgggtgcagagccgcgg

SEQ ID NO: 257215 - DNA, 50 bp, Artificial
  Synthetic oligonucleotide
acgaacgcgtggtctttgcaggttgtagtgctctcgcatggtggagcgcc

SEQ ID NO: 257216 - DNA, 50 bp, Artificial
  Synthetic oligonucleotide
acgactagcgtgtgcagcctttcaggggcttcgtggcccaattgggacgt

SEQ ID NO: 257217 - DNA, 50 bp, Artificial
  Synthetic oligonucleotide
acgatccgccgttcgtcttatgccagatcgtgacacccccgcgtggtacg

SEQ ID NO: 257218 - DNA, 50 bp, Artificial
  Synthetic oligonucleotide
acgatgatcgtcgacataccggcacgcaattggacgggtacgctcgcgcc

SEQ ID NO: 257219 - DNA, 50 bp, Artificial
  Synthetic oligonucleotide
acgcacttgctcaaaacgggcgacccgcgagtcacattgccgaagcacga

SEQ ID NO: 257220 - DNA, 58 bp, Artificial
  Synthetic oligonucleotide
atacgcatccgcgaaggattgcaatacgggacttctcttggcgccctatctatgccaa

SEQ ID NO: 257221 - DNA, 50 bp, Artificial
  Synthetic oligonucleotide
acgcagtcgtgttcagcgtccggagcggatcacatgtcacgtggtcgaga

SEQ ID NO: 257222 - DNA, 50 bp, Artificial
  Synthetic oligonucleotide
aaagacacctctgcagacggtcccggcagatttgagtgccatcggccgcg

SEQ ID NO: 257223 - DNA, 50 bp, Artificial
  Synthetic oligonucleotide
aaagccctcagttcggagcgcggaggatgccccagacgtgaccacgtccg

SEQ ID NO: 257224 - DNA, 50 bp, Artificial
  Synthetic oligonucleotide
aaaggcaacggacatctcgggtctcggtcctcgggacggcaagtggcgac

SEQ ID NO: 257225 - DNA, 50 bp, Artificial
  Synthetic oligonucleotide
aaatgacaaccgacgcgttcgcctctgcaaccgccagggtgacgcctagc

SEQ ID NO: 257226 - DNA, 50 bp, Artificial
  Synthetic oligonucleotide
aaatgatcgggggatcactcttcatgcggagcccgccgtctgcttggacg

SEQ ID NO: 257227 - DNA, 50 bp, Artificial
  Synthetic oligonucleotide
aacgccctccgacgggcccctggcttgcggtttggactgacgacatttcc

SEQ ID NO: 257228 - DNA, 50 bp, Artificial
  Synthetic oligonucleotide
aacgcgctccggcactgttccgccctcacccgaacccggtaaacggggtg

SEQ ID NO: 257229 - DNA, 50 bp, Artificial
  Synthetic oligonucleotide
aacgcgtgcgtcccatcgctcgccgttgcccaaagcgatccaatacccgg

SEQ ID NO: 257230 - DNA, 50 bp, Artificial
  Synthetic oligonucleotide
aactggtcggccgcaactgctttgacgaccctacctccgcgcagatactc

SEQ ID NO: 257231 - DNA, 52 bp, Artificial
  Synthetic oligonucleotide
ggaactgccttaacgttcccacggttggaggtcccaccgtccgctcaagatt

SEQ ID NO: 257232 - DNA, 50 bp, Artificial
  Synthetic oligonucleotide
aacttccattggttccgctgtcaataatgccgggagcgatgcccccgcag

SEQ ID NO: 257233 - DNA, 50 bp, Artificial
  Synthetic oligonucleotide
aagccgtagccttcttgaccctcgtaagcgcgcagtgctccatcgtggtg

SEQ ID NO: 257234 - DNA, 50 bp, Artificial
  Synthetic oligonucleotide
aaggacgccgcgactgttgccgcgacgctatgggatgagagtcttgtcgg

SEQ ID NO: 257235 - DNA, 50 bp, Artificial
  Synthetic oligonucleotide
aaggactcggtcctttggtgcgcccatattcgcggccctgacgatgtggt

SEQ ID NO: 257236 - DNA, 50 bp, Artificial
  Synthetic oligonucleotide
aaggggcgggttggcgcgatagtcggttatccggtgctcacgtccccgtc

SEQ ID NO: 257237 - DNA, 50 bp, Artificial
  Synthetic oligonucleotide
aaggggctccgctccaacgttccctcatgcttgacccgtctccatcgaaa

SEQ ID NO: 257238 - DNA, 50 bp, Artificial
  Synthetic oligonucleotide
aagtgcacttcgcgagggcggtcactcacgaagcagatcccgtcccaagg

SEQ ID NO: 257239 - DNA, 50 bp, Artificial
  Synthetic oligonucleotide
aagttccccaaatcggacggcctctcagcggcactttgacgtgagccggt

SEQ ID NO: 257240 - DNA, 50 bp, Artificial
  Synthetic oligonucleotide
aataatgccgggagcgatgcccccgcagtcataggcgtccgcacatatcc

SEQ ID NO: 257241 - DNA, 50 bp, Artificial
  Synthetic oligonucleotide
aatcggtgagtattcgcgcgtcaccttagcagcagcgcactcgtgggcat

SEQ ID NO: 257242 - DNA, 55 bp, Artificial
  Synthetic oligonucleotide
gcttgcggcaagcgaacttgagcacccggccccaagcctccggtcaacatgaatg

SEQ ID NO: 257243 - DNA, 50 bp, Artificial
  Synthetic oligonucleotide
aatgctgcggtgcaacatgtaaagaggcagccatgtcggaggtagccggc

SEQ ID NO: 257244 - DNA, 50 bp, Artificial
  Synthetic oligonucleotide
acaagctgtggacgtgcgatctctatacggccgacgctcccgggtgctga

SEQ ID NO: 257245 - DNA, 50 bp, Artificial
  Synthetic oligonucleotide
acacccagcgcatggggaatgctatgtggcgcacggggaactgccgccgg

SEQ ID NO: 257246 - DNA, 50 bp, Artificial
  Synthetic oligonucleotide
acactcccggccgcgacgaactacacagactggggcttcgggcaggcatt

SEQ ID NO: 257247 - DNA, 50 bp, Artificial
  Synthetic oligonucleotide
agcctgtgtgccgatgaccgtcagagtgccgggaacgtagctgagggcat

SEQ ID NO: 257248 - DNA, 50 bp, Artificial
  Synthetic oligonucleotide
agccttccgcttaaaccgttcttagccgccccatcccacactccgtcccg

SEQ ID NO: 257249 - DNA, 50 bp, Artificial
  Synthetic oligonucleotide
agcgatgcccccgcagtcataggcgtccgcacatatcccgggagcacggt

SEQ ID NO: 257250 - DNA, 50 bp, Artificial
  Synthetic oligonucleotide
agcgccaaatccagtcccggcactctcttagcgcctcagccagacgcctt

SEQ ID NO: 257251 - DNA, 50 bp, Artificial
  Synthetic oligonucleotide
agcgccgcataccaccggacagcaatctaacgggccggttggcacagtcc

SEQ ID NO: 257252 - DNA, 50 bp, Artificial
  Synthetic oligonucleotide
agcgtcacgaccgcctcatcgaatgccctgtcaataaccgggtccggcga

SEQ ID NO: 257253 - DNA, 55 bp, Artificial
  Synthetic oligonucleotide
ggacggcggctaaggccttggtgccgaagtcattccgccgcttctttaggaggct

SEQ ID NO: 257254 - DNA, 50 bp, Artificial
  Synthetic oligonucleotide
agcgtgtctcggtcgtctcgtggctcatgacttgcctttctgcgcgggca

SEQ ID NO: 257255 - DNA, 50 bp, Artificial
  Synthetic oligonucleotide
agctaaccggtctggcaccatgcgatctttctaggcaggtgctcccgtga

SEQ ID NO: 257256 - DNA, 50 bp, Artificial
  Synthetic oligonucleotide
agctccggcccagctgcgccctcccgcaaacggtaaagcgttgaacgcac

SEQ ID NO: 257257 - DNA, 50 bp, Artificial
  Synthetic oligonucleotide
aggacaggcgcgtagcgataaagatggaccgagctttccgtaacggcccg

SEQ ID NO: 257258 - DNA, 50 bp, Artificial
  Synthetic oligonucleotide
aggagcgcccacgaccgcttgcatccggccgaacatggtgtcttcgagcg

SEQ ID NO: 257259 - DNA, 50 bp, Artificial
  Synthetic oligonucleotide
aggaggccatacttggaccctgccgggaaccaacaccccgggctacccgt

SEQ ID NO: 257260 - DNA, 50 bp, Artificial
  Synthetic oligonucleotide
aggcggctgatggctcgtgtcgttgctaatggacggcgggttattgctcc

SEQ ID NO: 257261 - DNA, 50 bp, Artificial
  Synthetic oligonucleotide
aggcgtcacccagaggtcatagaaccgtggtgccggagcggtaagagtcc

SEQ ID NO: 257262 - DNA, 50 bp, Artificial
  Synthetic oligonucleotide
aggctgcgccccgcattctcgttcaatcctacgctcacgtcgctcatgac

SEQ ID NO: 257263 - DNA, 50 bp, Artificial
  Synthetic oligonucleotide
aggcttcccgtgaacacgctcgcaggcacacaaggttgtcctcctcggag

SEQ ID NO: 257264 - DNA, 55 bp, Artificial
  Synthetic oligonucleotide
gctgcgatcctgggcaaaccgatatctggagctacgcagcggctcctgcgttgag

SEQ ID NO: 257265 - DNA, 50 bp, Artificial
  Synthetic oligonucleotide
agggcacggggttcgcccttcaaattcccgcgcttggttgtcttcccgac

SEQ ID NO: 257266 - DNA, 50 bp, Artificial
  Synthetic oligonucleotide
agggctcacaggctcgatcttcatgcgtgcctccagtccccgcacgcctg

SEQ ID NO: 257267 - DNA, 50 bp, Artificial
  Synthetic oligonucleotide
aggggcgctactgctcagggccggtggcggactattcgctattgggggac

SEQ ID NO: 257268 - DNA, 50 bp, Artificial
  Synthetic oligonucleotide
agggttggttcccggggtgtgtaattgccaacgcaccgactcgattccgc

SEQ ID NO: 257269 - DNA, 50 bp, Artificial
  Synthetic oligonucleotide
aggtcgcccttaggttcccgcggacccgaacccttccgaattcatcctcc

SEQ ID NO: 257270 - DNA, 50 bp, Artificial
  Synthetic oligonucleotide
aggttgctcgtcgggcactcagtgtgccgccacctaaggcaacggtcact

SEQ ID NO: 257271 - DNA, 50 bp, Artificial
  Synthetic oligonucleotide
aggttgttgagctttgcctgccccggcgccaatcgagccttcgggcgcag

SEQ ID NO: 257272 - DNA, 50 bp, Artificial
  Synthetic oligonucleotide
atcgaagtgtgcctccgacacgattgccccacacgggggaccgggaatgg

SEQ ID NO: 257273 - DNA, 50 bp, Artificial
  Synthetic oligonucleotide
acgcctgaccttcgagcgctgacgtgatggtgggtggaaccccgatggcg

SEQ ID NO: 257274 - DNA, 50 bp, Artificial
  Synthetic oligonucleotide
acgccttggctttgcggcggatccaaagctcgatcccatcccgctcatcg

SEQ ID NO: 257275 - DNA, 55 bp, Artificial
  Synthetic oligonucleotide
gcctcgacttttgcgcacggctggatgtatctggatgagcgttgctttgaagggg

SEQ ID NO: 257276 - DNA, 50 bp, Artificial
  Synthetic oligonucleotide
acgcgccctagtttcctcatcgaccctcccgcgagggaagaggcttgtcg

SEQ ID NO: 257277 - DNA, 50 bp, Artificial
  Synthetic oligonucleotide
acgctgcccggctttagcgtcacgaccgcctcatcgaatgccctgtcaat

SEQ ID NO: 257278 - DNA, 50 bp, Artificial
  Synthetic oligonucleotide
acgctgcggcgcacacattcgttacttgcgatccggcgcccggtacataa

SEQ ID NO: 257279 - DNA, 50 bp, Artificial
  Synthetic oligonucleotide
acgggaaaaacctgaacatgtccgggcacgaaccttcatccggggagcgg

SEQ ID NO: 257280 - DNA, 50 bp, Artificial
  Synthetic oligonucleotide
acgggcgacccgcgagtcacattgccgaagcacgactgccgacatgcgac

SEQ ID NO: 257281 - DNA, 50 bp, Artificial
  Synthetic oligonucleotide
acggtcgttcgcgtcttgttcccgacggcgcttcgatgtagccagtgagc

SEQ ID NO: 257282 - DNA, 50 bp, Artificial
  Synthetic oligonucleotide
acgttccgaaccgccaaggcgctacctagcttatatccgggcccgtgtga

SEQ ID NO: 257283 - DNA, 50 bp, Artificial
  Synthetic oligonucleotide
actcagagccgggaggtttcccgctaacgtccggtccccgcgcgaagggg

SEQ ID NO: 257284 - DNA, 50 bp, Artificial
  Synthetic oligonucleotide
actccggggatacgctggggccggagtatcgaacggttaaggttgacggg

SEQ ID NO: 257285 - DNA, 50 bp, Artificial
  Synthetic oligonucleotide
actgacgacagcctgtgtgccgatgaccgtcagagtgccgggaacgtagc

SEQ ID NO: 257286 - DNA, 55 bp, Artificial
  Synthetic oligonucleotide
gcccagaggacttcacctattaggtagtctgaaacgcagatcggcgcatagcgca

SEQ ID NO: 257287 - DNA, 50 bp, Artificial
  Synthetic oligonucleotide
actttgacgcccgcccccgaagtcggcggttccctaacacggctgtttga

SEQ ID NO: 257288 - DNA, 50 bp, Artificial
  Synthetic oligonucleotide
agaacgtggcgctagaggtggatcactgaacgccgtaggcaagcgtggcg

SEQ ID NO: 257289 - DNA, 50 bp, Artificial
  Synthetic oligonucleotide
agaccggcaatccacgcctgaccttcgagcgctgacgtgatggtgggtgg

SEQ ID NO: 257290 - DNA, 50 bp, Artificial
  Synthetic oligonucleotide
agacgtcgagttcggctaagccaaccccagtagtggccttgtccggtgcg

SEQ ID NO: 257291 - DNA, 50 bp, Artificial
  Synthetic oligonucleotide
agaggagtggccgacgcgcgccgaatccgttcacctccgacggatccgca

SEQ ID NO: 257292 - DNA, 50 bp, Artificial
  Synthetic oligonucleotide
agaggcgatagacgtcaagccccttgtgcgcctatgaagcgcgatcagga

SEQ ID NO: 257293 - DNA, 50 bp, Artificial
  Synthetic oligonucleotide
agagttggtgcagcagatggtttgcagcggccgtgccagatctcgggagg

SEQ ID NO: 257294 - DNA, 50 bp, Artificial
  Synthetic oligonucleotide
agatcagatcatccacgcgcgctctcccgtccagtctgctcagggcacgg

SEQ ID NO: 257295 - DNA, 50 bp, Artificial
  Synthetic oligonucleotide
agccgccaatgtgatctgttagacgatggcccccggctgggagcggtcct

SEQ ID NO: 257296 - DNA, 50 bp, Artificial
  Synthetic oligonucleotide
agccggggactagcatcgggtcaatgggggagctggaaggttgacgatcc

SEQ ID NO: 257297 - DNA, 59 bp, Artificial
  Synthetic oligonucleotide
gattatatcgtctcgtacaagtgagttaaataggctaatttgtcagtgagccgaaaggc

SEQ ID NO: 257298 - DNA, 55 bp, Artificial
  Synthetic oligonucleotide
gcccaactcaccacgtgaaccggtggtggcgtgccggaagtgttattccagtggc

SEQ ID NO: 257299 - DNA, 50 bp, Artificial
  Synthetic oligonucleotide
agccgtgtcggcttcttgccggggagattgctatgggcatgcagtcgatg

SEQ ID NO: 257300 - DNA, 55 bp, Artificial
  Synthetic oligonucleotide
gccagctacgtaactttacggatgatcctcgctctttactgcccagatatcgctc

SEQ ID NO: 257301 - DNA, 55 bp, Artificial
  Synthetic oligonucleotide
gcagcgtgtgctatcggatgcgccgtcttccggtttcggctcgtcggttgcgggg

SEQ ID NO: 257302 - DNA, 55 bp, Artificial
  Synthetic oligonucleotide
cgcccctctcaatccccgattgtctttgctcaatgcgcacgcctctgatgcggag

SEQ ID NO: 257303 - DNA, 55 bp, Artificial
  Synthetic oligonucleotide
gatcggacgaggattctacaacctatgccgcataaggcttcggtagcacagcctc

SEQ ID NO: 257304 - DNA, 55 bp, Artificial
  Synthetic oligonucleotide
gaggccgagtccgcctataatcagcgatttgccctgacacatggctgcgttctac

SEQ ID NO: 257305 - DNA, 55 bp, Artificial
  Synthetic oligonucleotide
acgcatggcacttcggtgcggggttcgtctctggccggtccatggaaacgaccac

SEQ ID NO: 257306 - DNA, 55 bp, Artificial
  Synthetic oligonucleotide
cggctattgtggctgacgtggaatttccagcctccgttgactgaggggcgccttc

SEQ ID NO: 257307 - DNA, 55 bp, Artificial
  Synthetic oligonucleotide
gaccgcggtccaatctaggtgtctaaaatgcttgctcagcgcacctcagggttga

SEQ ID NO: 257308 - DNA, 55 bp, Artificial
  Synthetic oligonucleotide
gaacgacttccctcgactgacgcgcctatgcgagatgcttgaatggtgcgaggtg

SEQ ID NO: 257309 - DNA, 54 bp, Artificial
  Synthetic oligonucleotide
gccctcatttttggtaagcgtcgtcccgggcgcacctttataggtcgggcgtga

SEQ ID NO: 257310 - DNA, 55 bp, Artificial
  Synthetic oligonucleotide
cttttgctctcgaagcagaggcgccgccatgcacctgatgccaaccgcctacttc

SEQ ID NO: 257311 - DNA, 55 bp, Artificial
  Synthetic oligonucleotide
cttcgtgagtctcacggcgcggaacggacctgagttggcttccgaggaggaccct

SEQ ID NO: 257312 - DNA, 55 bp, Artificial
  Synthetic oligonucleotide
cgtcaggcggcagaaccagttcgacatggctcacatccagagcacgtgccagctc

SEQ ID NO: 257313 - DNA, 55 bp, Artificial
  Synthetic oligonucleotide
cgtcccaagggcgacgagacacacgccggctactgggccatggcgcgtcgcaagt

SEQ ID NO: 257314 - DNA, 55 bp, Artificial
  Synthetic oligonucleotide
acgtgttgaacgacatgacgcgacaaaacccctcactcgtcccggctcaataaac

SEQ ID NO: 257315 - DNA, 55 bp, Artificial
  Synthetic oligonucleotide
cgtcgtaggccggctcccgcccgacggaacctcatcctgagggtctgactcgtaa

SEQ ID NO: 257316 - DNA, 55 bp, Artificial
  Synthetic oligonucleotide
ttctgtccctagactgcggtgcaacggacgaaaagtccggaatgacacctgttcc

SEQ ID NO: 257317 - DNA, 55 bp, Artificial
  Synthetic oligonucleotide
atcattaaggctctcggatgcggagaattgctctgcagcggccctgatcttgggg

SEQ ID NO: 257318 - DNA, 54 bp, Artificial
  Synthetic oligonucleotide
agtttatcggtatccgctgtcccggaacgacattgggtatctcggccggcgttg

SEQ ID NO: 257319 - DNA, 55 bp, Artificial
  Synthetic oligonucleotide
caccgaccaatccacccgattccatttaacgtgtcggcggctccaatgctcgtcg

SEQ ID NO: 257320 - DNA, 60 bp, Artificial
  Synthetic oligonucleotide
agaggaatcctgtgctgcgatcctgggcaaaccgatatctggagctacgcagcggctcct

SEQ ID NO: 257321 - DNA, 55 bp, Artificial
  Synthetic oligonucleotide
cagaatagcgggcatgtggttcgcctcccgttcgaatgacttgtctgccgcctcg

SEQ ID NO: 257322 - DNA, 55 bp, Artificial
  Synthetic oligonucleotide
cagctgtcgatttatctcgtcagcatgcttgtagctctcgaacgctctatccgtg

SEQ ID NO: 257323 - DNA, 55 bp, Artificial
  Synthetic oligonucleotide
ccagggctctaggaaagccacggctaccgagggaggatacggccatgagcacact

SEQ ID NO: 257324 - DNA, 55 bp, Artificial
  Synthetic oligonucleotide
tcgcgtcccagggaaaggacgtccaacgacttccatgaatcgatcccgcgggacc

SEQ ID NO: 257325 - DNA, 55 bp, Artificial
  Synthetic oligonucleotide
tcgcgctgagccggtctcatgacgtgaccgacatacaaaagcgcgctgcctgcgt

SEQ ID NO: 257326 - DNA, 55 bp, Artificial
  Synthetic oligonucleotide
cccagggatgaggcggttcggcatgcgccttgttgtgagcctgcatccatgatcg

SEQ ID NO: 257327 - DNA, 55 bp, Artificial
  Synthetic oligonucleotide
tcagccatccgtaggtccgagccgataggcccaggagaatcccgagaggaatccc

SEQ ID NO: 257328 - DNA, 55 bp, Artificial
  Synthetic oligonucleotide
tcagaccgcagcgagagaagcgttgcccgaggagttctccatgcgtgatgccgag

SEQ ID NO: 257329 - DNA, 55 bp, Artificial
  Synthetic oligonucleotide
tatagacgaggttcagatagacgttctgctggtcgtagctcagttccggctgaag

SEQ ID NO: 257330 - DNA, 55 bp, Artificial
  Synthetic oligonucleotide
tacccgcggaacgcgatcgcgtcttatcctgaggcaaccacaaggaggagcgcca

SEQ ID NO: 257331 - DNA, 60 bp, Artificial
  Synthetic oligonucleotide
tcggtgtgtcaatattcaatccctggaccgatggcggccaatcgagatgagggcctctat

SEQ ID NO: 257332 - DNA, 55 bp, Artificial
  Synthetic oligonucleotide
ggatgactttaagcaatgggcctcacgaagccgaaatgtaaatgatatcgcctgc

SEQ ID NO: 257333 - DNA, 55 bp, Artificial
  Synthetic oligonucleotide
ggcccgctaaaagggaatgacctatgtcccgtgcagaggaaacgtcgaacatggc

SEQ ID NO: 257334 - DNA, 55 bp, Artificial
  Synthetic oligonucleotide
ccggattggctatgtgccttgaatcgcgctattttcggttgaatcgatttgcgtg

SEQ ID NO: 257335 - DNA, 54 bp, Artificial
  Synthetic oligonucleotide
ggccggcaaaccctatcattaccgcgaattcactttgtccgccgggacttgggc

SEQ ID NO: 257336 - DNA, 55 bp, Artificial
  Synthetic oligonucleotide
ccgacgctgcgatcaatgtggatgtatatgctgccaacgtccgatagcagctccc

SEQ ID NO: 257337 - DNA, 55 bp, Artificial
  Synthetic oligonucleotide
gggtcaaacggtgatcactcgatgcacattaaatgagcccgaccggctgtgccta

SEQ ID NO: 257338 - DNA, 55 bp, Artificial
  Synthetic oligonucleotide
ggtgtggaccgtaaatttaggtaatcttcggcatgatgtgctgtatagcggtagc

SEQ ID NO: 257339 - DNA, 54 bp, Artificial
  Synthetic oligonucleotide
ggtttcgccgctctaccgctgaactgcgcggtccccacgttccccataactgtt

SEQ ID NO: 257340 - DNA, 55 bp, Artificial
  Synthetic oligonucleotide
gtacagtcgttttcgatgattccgcctgttattcagggaacggagcgtattgcga

SEQ ID NO: 257341 - DNA, 55 bp, Artificial
  Synthetic oligonucleotide
gtaggtttcgaagcctcgatcaggagcggcgtgtcgtgctcagtgaacgcggctg

SEQ ID NO: 257342 - DNA, 59 bp, Artificial
  Synthetic oligonucleotide
cgaggcaacgaaggcgaccgttgcgggaacgatgtagtcgggtgcgccatcgagcttga

SEQ ID NO: 257343 - DNA, 55 bp, Artificial
  Synthetic oligonucleotide
gtcccatcattggaatgagtggtgatgtcgggacattccgggctgaaccggtatg

SEQ ID NO: 257344 - DNA, 55 bp, Artificial
  Synthetic oligonucleotide
ccgaagcagctgtttgatgcggtgcgacaggaattccctgacgccacacggaaag

SEQ ID NO: 257345 - DNA, 55 bp, Artificial
  Synthetic oligonucleotide
gtgaggaggtttcatggtgatacctgctgggaggacctacggattggcgcgcaac

SEQ ID NO: 257346 - DNA, 55 bp, Artificial
  Synthetic oligonucleotide
taacactgagacgccgcaggacaggctgcagcatctcccgtgatcagcggagtcg

SEQ ID NO: 257347 - DNA, 55 bp, Artificial
  Synthetic oligonucleotide
ccgaaacggaagcaatcaggtcgcctccgtagcgttcagacgcctcgacgccttc

SEQ ID NO: 257348 - DNA, 54 bp, Artificial
  Synthetic oligonucleotide
cagtcggcttaagacagttctatatacgcacctgtggatggcacctccgccact

SEQ ID NO: 257349 - DNA, 54 bp, Artificial
  Synthetic oligonucleotide
cggccatgcctcgctcatacaccgagacaagttccgggacgatatccacgtctt

SEQ ID NO: 257350 - DNA, 54 bp, Artificial
  Synthetic oligonucleotide
atctagacggtccggtcttgggtgccgagggtcgaatagcttccattgaaggcg

SEQ ID NO: 257351 - DNA, 54 bp, Artificial
  Synthetic oligonucleotide
acagccagatgaatgcccacgaaccccgtacccgtactcgacgtttccttgaga

SEQ ID NO: 257352 - DNA, 54 bp, Artificial
  Synthetic oligonucleotide
tggtactacaagtcctaagccgcaaggccataagatctgggaggaacacgtgac

SEQ ID NO: 257353 - DNA, 60 bp, Artificial
  Synthetic oligonucleotide
ctcctccattcgatgatctgtcgtgcgtggtccaagctcgaagggatattcattgaggca

SEQ ID NO: 257354 - DNA, 53 bp, Artificial
  Synthetic oligonucleotide
ccattgaaaccgggaacggccttcgctataggggccacgacgattcaatatga

SEQ ID NO: 257355 - DNA, 53 bp, Artificial
  Synthetic oligonucleotide
cggcgtctaacgttgcagcgggccatacgaggaaaggacccgcacatgccgct

SEQ ID NO: 257356 - DNA, 52 bp, Artificial
  Synthetic oligonucleotide
gggagaatgtatcacgcgcgcaaccgattgtagcgcacaccgcatgtaccca

SEQ ID NO: 257357 - DNA, 52 bp, Artificial
  Synthetic oligonucleotide
cgaaggttcggcgccagtgtgccgcaaagctagaccatgtgggttacggctt

SEQ ID NO: 257358 - DNA, 52 bp, Artificial
  Synthetic oligonucleotide
tggcgctccgcttttgcccctcggtcagtaggggaagggccagcgtcggagt

SEQ ID NO: 257359 - DNA, 52 bp, Artificial
  Synthetic oligonucleotide
cgttcgctgcgagcgccgtcgacagatcctcaatcagcccatcagggttgac

SEQ ID NO: 257360 - DNA, 52 bp, Artificial
  Synthetic oligonucleotide
ttccggtaggcatcgacacctcagttatcctcttgagccgtgctcttgccgc

SEQ ID NO: 257361 - DNA, 51 bp, Artificial
  Synthetic oligonucleotide
atggctagggctggacgcacgcgcactttttcactcattcggctcactccg

SEQ ID NO: 257362 - DNA, 51 bp, Artificial
  Synthetic oligonucleotide
atggcgcctccggttgaggtcatccagccttcattcggatcaggccgaatc

SEQ ID NO: 257363 - DNA, 51 bp, Artificial
  Synthetic oligonucleotide
atgcttgctcagcgcacctcagggttgaaattgcagcgtgatcttgcgcgg

SEQ ID NO: 257364 - DNA, 58 bp, Artificial
  Synthetic oligonucleotide
ctaaaatttggcacgactgatcaagtctggaatggaacatgggtgcgcgggaaattac

SEQ ID NO: 257365 - DNA, 51 bp, Artificial
  Synthetic oligonucleotide
aacgccggtctgaatctgcagccgccagatctttcggccctggacacgagc

SEQ ID NO: 257366 - DNA, 51 bp, Artificial
  Synthetic oligonucleotide
tctgtcgggaatgaagcctgagatcggcattgaacattggcgttgcctccc

SEQ ID NO: 257367 - DNA, 51 bp, Artificial
  Synthetic oligonucleotide
ccccagcggaggctacccgttcgcgtcgctatcttggtgtgggtcgaaata

SEQ ID NO: 257368 - DNA, 51 bp, Artificial
  Synthetic oligonucleotide
aagggtctggaccaacgctgcatgtagcagacgaacccgttcgaccaacgc

SEQ ID NO: 257369 - DNA, 51 bp, Artificial
  Synthetic oligonucleotide
taccatcgcgcactgaggaccgttaccactcggttgcatgtagctcatgag

SEQ ID NO: 257370 - DNA, 51 bp, Artificial
  Synthetic oligonucleotide
tggtcttatccgtggcccagccaatcccttgcccgccgggcgccacgtgac

SEQ ID NO: 257371 - DNA, 51 bp, Artificial
  Synthetic oligonucleotide
gtcgtgtctaagcgcaacggcacggggagggaagttgccgcatgcagggat

SEQ ID NO: 257372 - DNA, 51 bp, Artificial
  Synthetic oligonucleotide
gctgtgaaaccctgttggatattcgctcagatgggtgcctgaagccgtccc

SEQ ID NO: 257373 - DNA, 51 bp, Artificial
  Synthetic oligonucleotide
actcaccgttccccagcggaggctacccgttcgcgtcgctatcttggtgtg

SEQ ID NO: 257374 - DNA, 51 bp, Artificial
  Synthetic oligonucleotide
cgtcggtctctgctcggctcgacggataccactgccatgccctgatggagc

SEQ ID NO: 257375 - DNA, 60 bp, Artificial
  Synthetic oligonucleotide
ggacgtgccgaccgctcgaatgattggagcggattgctcttagagccaagagccctcccg

SEQ ID NO: 257376 - DNA, 51 bp, Artificial
  Synthetic oligonucleotide
ggatcgtccgtacaacggtcgattgcttggtgtgccggtaagacgggtggt

SEQ ID NO: 257377 - DNA, 51 bp, Artificial
  Synthetic oligonucleotide
cctataatgtcgcgatcaatgggcatgtaagctctacaggtcggcatcgag

SEQ ID NO: 257378 - DNA, 51 bp, Artificial
  Synthetic oligonucleotide
ccgccaaagcgctacgcatgttcctggacacgatcacagccctgcagtccg

SEQ ID NO: 257379 - DNA, 50 bp, Artificial
  Synthetic oligonucleotide
ttccgatctggctgagctcgagataggcgggcatgggatgctcctcgaaa

SEQ ID NO: 257380 - DNA, 50 bp, Artificial
  Synthetic oligonucleotide
cgtgccggtttcttgggatctccaggttcgccatacgcacgctcatcgcc

SEQ ID NO: 257381 - DNA, 50 bp, Artificial
  Synthetic oligonucleotide
atgatcggggagcgagggaaccaagcacgccagcgcgagtttcagctgcg

SEQ ID NO: 257382 - DNA, 50 bp, Artificial
  Synthetic oligonucleotide
atgcgagcatggctagacccgagatctttggcggtctgaaccactcccga

SEQ ID NO: 257383 - DNA, 50 bp, Artificial
  Synthetic oligonucleotide
gaccttcagccatccgtaggtccgagccgataggcccaggagaatcccga

SEQ ID NO: 257384 - DNA, 50 bp, Artificial
  Synthetic oligonucleotide
atggccaacccaacgctccaccggctgcatagggacccattcccgctaaa

SEQ ID NO: 257385 - DNA, 50 bp, Artificial
  Synthetic oligonucleotide
cggatcgcccagggatgaggcggttcggcatgcgccttgttgtgagcctg

SEQ ID NO: 257386 - DNA, 60 bp, Artificial
  Synthetic oligonucleotide
cgcgtctcagacgctcgtagggctggtgatcgttatcgcctccgtagtgctcgtaggatg

SEQ ID NO: 257387 - DNA, 59 bp, Artificial
  Synthetic oligonucleotide
cgagaccagcacccgttaacttgtcctcccgaacgcacatgaggaactcagtattgcga

SEQ ID NO: 257388 - DNA, 55 bp, Artificial
  Synthetic oligonucleotide
tttttacgtaacaacgtcaatgactaattcagtaattaactaacgaggtcaatca

SEQ ID NO: 257389 - DNA, 50 bp, Artificial
  Synthetic oligonucleotide
agcggccaggtagggacacgccccgcactacgggaatcgcgtccgcacgg

SEQ ID NO: 257390 - DNA, 50 bp, Artificial
  Synthetic oligonucleotide
accatgcccgtgcgccgaggcactgattttcgcaaggtcatgtgcacccc

SEQ ID NO: 257391 - DNA, 50 bp, Artificial
  Synthetic oligonucleotide
acccacagtcgtcacgacatgtccagtggctacgggatccgcgcatgctt

SEQ ID NO: 257392 - DNA, 50 bp, Artificial
  Synthetic oligonucleotide
cgttcccaacaccaattgcgaagtacccacttgaggcttactcgataacc

SEQ ID NO: 257393 - DNA, 50 bp, Artificial
  Synthetic oligonucleotide
accccaccgccagtcgcagccaggtggacacccgatcgcgcggttccagt

SEQ ID NO: 257394 - DNA, 50 bp, Artificial
  Synthetic oligonucleotide
cgggctacaacccagagagggattcgctggttgtgcgtccacgtgtcgcc

SEQ ID NO: 257395 - DNA, 50 bp, Artificial
  Synthetic oligonucleotide
accgatgccgtagcggaatagggtcggtgtcgcgtagccgtccacagcgt

SEQ ID NO: 257396 - DNA, 50 bp, Artificial
  Synthetic oligonucleotide
accgcccggtcctccgaagccacgcatcatcgactctgcttctggtcacg

SEQ ID NO: 257397 - DNA, 50 bp, Artificial
  Synthetic oligonucleotide
accgcccgtttgcgacggctccctccaatcccggtagcatatccgccccg

SEQ ID NO: 257398 - DNA, 50 bp, Artificial
  Synthetic oligonucleotide
accgcctggggcctgaagatcctcagcccgagccttgtctacacacagcc

SEQ ID NO: 257399 - DNA, 54 bp, Artificial
  Synthetic oligonucleotide
tttcagccccgcgcagtcccttaacttgcccagaattgcgtttttcgaggggtc

SEQ ID NO: 257400 - DNA, 50 bp, Artificial
  Synthetic oligonucleotide
accgcgcgccactcgcatacaagcgtccgaggcgctttttcgccctacag

SEQ ID NO: 257401 - DNA, 59 bp, Artificial
  Synthetic oligonucleotide
ttggttcaaggttgagctggttgtccacacgccgttcgcttgcgaattcgacgctgagg

SEQ ID NO: 257402 - DNA, 60 bp, Artificial
  Synthetic oligonucleotide
ttgggtgactgagtggcagcgtagaggtgtcccgcatctacattgtgctatctggttttc

SEQ ID NO: 257403 - DNA, 60 bp, Artificial
  Synthetic oligonucleotide
ttggctttcgatgattgttccttgctctcatccaacgccaattactggtggacatgttct

SEQ ID NO: 257404 - DNA, 60 bp, Artificial
  Synthetic oligonucleotide
ttggcctaaagtatctgaaatcgtggatggactacagcagtccgccgaacaagtttctca

SEQ ID NO: 257405 - DNA, 52 bp, Artificial
  Synthetic oligonucleotide
ttgccaatcgtgcgaccctaaacaaaccggttcacccaatcgaccctaaccg

SEQ ID NO: 257406 - DNA, 55 bp, Artificial
  Synthetic oligonucleotide
ttcgtaataagggccatttggcccacacataacggaccgaaggagatggcgtaaa

SEQ ID NO: 257407 - DNA, 54 bp, Artificial
  Synthetic oligonucleotide
ttcgacctggaatagggggcgcgtcgcggctaggtcggtagggtagaggtcggc

SEQ ID NO: 257408 - DNA, 60 bp, Artificial
  Synthetic oligonucleotide
ttccaatacaagacgagcgctaactctgcgtggttctcaggcaactaccgcacgtacacg

SEQ ID NO: 257409 - DNA, 56 bp, Artificial
  Synthetic oligonucleotide
cgactatgcgaaagcggggtgggcgtatcttgatgaccctacccagtgggaagcgt

SEQ ID NO: 257410 - DNA, 60 bp, Artificial
  Synthetic oligonucleotide
ttatggtcatccatctaggaaactccctttgtcacgccgtggcgggatggccgcagctct

SEQ ID NO: 257411 - DNA, 58 bp, Artificial
  Synthetic oligonucleotide
ttatggctttcggccataagtttgaagaatccacgcctttgaccttgtatcagtattg

SEQ ID NO: 257412 - DNA, 60 bp, Artificial
  Synthetic oligonucleotide
ttatggagtggggttccctatgaggtccagatggccttttgcgcgcatctagcagctcgt

SEQ ID NO: 257413 - DNA, 55 bp, Artificial
  Synthetic oligonucleotide
tggctgacgttaaatccaagggggttgaactgaatgtcccccaattggaggacac

SEQ ID NO: 257414 - DNA, 60 bp, Artificial
  Synthetic oligonucleotide
tggcactgtatccgcccgcacatacgcgcttggatcttcaacagacaatcacggacccct

SEQ ID NO: 257415 - DNA, 59 bp, Artificial
  Synthetic oligonucleotide
tgcggaggtgcgaaggttcatcaatctctccagggttcgttagtggcgcgttaagcgcc

SEQ ID NO: 257416 - DNA, 60 bp, Artificial
  Synthetic oligonucleotide
tgcgacagcagtcttgtagcaatcgttgagaacccgggcggatgcacgtaggttggtgca

SEQ ID NO: 257417 - DNA, 58 bp, Artificial
  Synthetic oligonucleotide
tgccggtgtcgtgcaaacggtcagcgtagatcccggatctaacggaaacttcagcgga

SEQ ID NO: 257418 - DNA, 60 bp, Artificial
  Synthetic oligonucleotide
tgatccaactcacacgcgttgacgttacggaatctttccatctcgagagccgcgcgcaag

SEQ ID NO: 257419 - DNA, 60 bp, Artificial
  Synthetic oligonucleotide
tgacgaattgcaggcacttcgtgaagcgactgcacagttgtcggcagttggtcggaacgt

SEQ ID NO: 257420 - DNA, 60 bp, Artificial
  Synthetic oligonucleotide
cgacggcaatcgctcggggcgcggtcagggcgataggaggcccaagacaatgaggccaca

SEQ ID NO: 257421 - DNA, 60 bp, Artificial
  Synthetic oligonucleotide
gcttaatgtcgctcaaggggccaacatcaacgcaattttgcgcagcagtcacgattcaag

SEQ ID NO: 257422 - DNA, 59 bp, Artificial
  Synthetic oligonucleotide
gctggttcggtcgtggcggagagccgacgcccggtcatcaggggatgcgtaccgcatcc

SEQ ID NO: 257423 - DNA, 60 bp, Artificial
  Synthetic oligonucleotide
gctatgttgcattatttggccaacgtgactgttccacgaacgtcgcgcattgagataagg

SEQ ID NO: 257424 - DNA, 60 bp, Artificial
  Synthetic oligonucleotide
gctagtgataccgcacatttgtgcacgcggtgcactgccaatccccttgcaggcactccg

SEQ ID NO: 257425 - DNA, 60 bp, Artificial
  Synthetic oligonucleotide
gctacactgcgaggcaacaccgatgcaaaagcgaggatgataggatgccaacacaagcgg

SEQ ID NO: 257426 - DNA, 60 bp, Artificial
  Synthetic oligonucleotide
gcctgcactaacagggttgtccccagcagcaggccagccgattcggttccgagtagcaga

SEQ ID NO: 257427 - DNA, 57 bp, Artificial
  Synthetic oligonucleotide
gcctagggcgctgttatctgattaggttcaaggcctagttgacacttttgcccccga

SEQ ID NO: 257428 - DNA, 60 bp, Artificial
  Synthetic oligonucleotide
gccgtcacaacccgatacagcatttcgcataatgtatagaccgtgggcttatcaaagccc

SEQ ID NO: 257429 - DNA, 60 bp, Artificial
  Synthetic oligonucleotide
gccagcagtcatcgcccatagctcacccttaaggtcagtaacgacgacgctgtgcggcca

SEQ ID NO: 257430 - DNA, 60 bp, Artificial
  Synthetic oligonucleotide
gcattgccacaagggatgtcacagagtcctggatggatacctgggccggtgacgtatgcg

SEQ ID NO: 257431 - DNA, 58 bp, Artificial
  Synthetic oligonucleotide
cctacgggacgtgtgatgaggggtcatggcaggtacaacggcacagaaactagacaac

SEQ ID NO: 257432 - DNA, 58 bp, Artificial
  Synthetic oligonucleotide
gcaagtaccccttgcgcctggcacagaagtggtacgacgaaggcgagttcgacaatcg

SEQ ID NO: 257433 - DNA, 60 bp, Artificial
  Synthetic oligonucleotide
gaggacgcaacagccaaccacgcatcgacgcatagaagcacatcgtaaacagtgccagaa

SEQ ID NO: 257434 - DNA, 60 bp, Artificial
  Synthetic oligonucleotide
gagcagggcacgcgctacgatttgagtcagcccgaatgccgcacactcgcgcgcaatgga

SEQ ID NO: 257435 - DNA, 60 bp, Artificial
  Synthetic oligonucleotide
gacgtatgcgccaagcattcgctccataccctctggacacttgccgtacagctcttctac

SEQ ID NO: 257436 - DNA, 57 bp, Artificial
  Synthetic oligonucleotide
gacggctatccagtttctttgggttccgatttcgtatttcacacacgcgaacactca

SEQ ID NO: 257437 - DNA, 60 bp, Artificial
  Synthetic oligonucleotide
gacagaaggtcacgcgctagcgcacgctgatttgctgcgtcgcgtttggtgcgttcttcg

SEQ ID NO: 257438 - DNA, 57 bp, Artificial
  Synthetic oligonucleotide
gacaaaacggcgcttccatcgctcatccactacctcgtccctttcgaggttcggcac

SEQ ID NO: 257439 - DNA, 56 bp, Artificial
  Synthetic oligonucleotide
gaaacgccctggtagccagctacgccacactggcaaagttgaccggcaagtcccgg

SEQ ID NO: 257440 - DNA, 55 bp, Artificial
  Synthetic oligonucleotide
gttcatgggtcaccggtcagaaaagtcgttgtcgtattacggccgggccactcaa

SEQ ID NO: 257441 - DNA, 57 bp, Artificial
  Synthetic oligonucleotide
gttacctagcagatgacggagtaaccacgggtacgtagattcgcgcaaaaggccatc

SEQ ID NO: 257442 - DNA, 54 bp, Artificial
  Synthetic oligonucleotide
ccgtagaacctgagcgcctgatttttggacggaatttccgtaacgcacggaata

SEQ ID NO: 257443 - DNA, 55 bp, Artificial
  Synthetic oligonucleotide
gttaaatccaagggggttgaactgaatgtcatccaattggagaccactggaaacc

SEQ ID NO: 257444 - DNA, 60 bp, Artificial
  Synthetic oligonucleotide
gtgcgtgatcacgttgcgctttcccctcatggccctggttcgagccggctcgccattggc

SEQ ID NO: 257445 - DNA, 60 bp, Artificial
  Synthetic oligonucleotide
gtgagaacgggtcggatcactgacttcacttgttcgcggctgatgattccgtagtaacga

SEQ ID NO: 257446 - DNA, 59 bp, Artificial
  Synthetic oligonucleotide
gtcatacaaccaacctgaaaggggtaactacacatgagcgtcaaggtcactgtcctgaa

SEQ ID NO: 257447 - DNA, 55 bp, Artificial
  Synthetic oligonucleotide
gtaaatcgaagcgatttggaccccaagcgccgacccctgaagcgttgttggtcaa

SEQ ID NO: 257448 - DNA, 60 bp, Artificial
  Synthetic oligonucleotide
ggtgctctccattggttgcatgcgtagttacatgatgccgcgcatgcaaccaaaacgcga

SEQ ID NO: 257449 - DNA, 51 bp, Artificial
  Synthetic oligonucleotide
ggtaccccccacacccccctactcgctcgtaactgagtacccacgaccggc

SEQ ID NO: 257450 - DNA, 57 bp, Artificial
  Synthetic oligonucleotide
gggtgtagcctacaggtgttgacacctacggatgtaggcgcgtataaagcccccatc

SEQ ID NO: 257451 - DNA, 57 bp, Artificial
  Synthetic oligonucleotide
gggtggttccagtacctcagcaaacacgccgctcgcggcgtgtcgcactaccaacgt

SEQ ID NO: 257452 - DNA, 55 bp, Artificial
  Synthetic oligonucleotide
gggtatccctttgtcgaaccatcaaaagccggtactctgttgccaaccgtgcgac

SEQ ID NO: 257453 - DNA, 55 bp, Artificial
  Synthetic oligonucleotide
ccgcgcagaacggattggtgtagtccgcctgctggtattcggttacccggcgacg

SEQ ID NO: 257454 - DNA, 60 bp, Artificial
  Synthetic oligonucleotide
ggggtgttcatagatccgttctctctgtaagtggttgggttctatcactcagcaggagat

SEQ ID NO: 257455 - DNA, 60 bp, Artificial
  Synthetic oligonucleotide
ggggtctgtctagcgcggtggcgccaccttgcttgatacatgtgtctaagtagcgggcag

SEQ ID NO: 257456 - DNA, 57 bp, Artificial
  Synthetic oligonucleotide
ggggcgcttaacgcgccactaacgaaccctggagagattgatgaaccttcgcacctc

SEQ ID NO: 257457 - DNA, 57 bp, Artificial
  Synthetic oligonucleotide
ggggcgcgattgcagggcaatcaacggactctcccgcaggcaccgaggtaatccccc

SEQ ID NO: 257458 - DNA, 59 bp, Artificial
  Synthetic oligonucleotide
ggccttgaagtcaccatgccccaatttctgcaccgattggtggccatctttgccgaagt

SEQ ID NO: 257459 - DNA, 58 bp, Artificial
  Synthetic oligonucleotide
ggccatctggacctcatagggaacccactccataaacccaatgacacgagaacgcgac

SEQ ID NO: 257460 - DNA, 60 bp, Artificial
  Synthetic oligonucleotide
ggaaaagcgcatgctacgggctggtatgatccggcttcattgggtgactgagtggcagcg

SEQ ID NO: 257461 - DNA, 60 bp, Artificial
  Synthetic oligonucleotide
gcttgtttgtctgatcgctcatatcagttacccccgacagtgctcaccgggccactcaca

SEQ ID NO: 257462 - DNA, 60 bp, Artificial
  Synthetic oligonucleotide
agatcagactacactcaagcaacacgaagcgatgtgggctagcgctggtagcttccgttg

SEQ ID NO: 257463 - DNA, 58 bp, Artificial
  Synthetic oligonucleotide
agacggcacatctttctcatcgtggtcgaggtcagttggttaaaggcacaacgcttta

SEQ ID NO: 257464 - DNA, 60 bp, Artificial
  Synthetic oligonucleotide
ccgaccatgctgcccacgcaaagcagccgacaggaggacgcaacagccaaccacgcatcg

SEQ ID NO: 257465 - DNA, 58 bp, Artificial
  Synthetic oligonucleotide
actacgccagttgtgttggtacccgcacccatgagcgacacggtaaagcctgccgtgc

SEQ ID NO: 257466 - DNA, 60 bp, Artificial
  Synthetic oligonucleotide
acgggctggtatgatccggcttcattgggtgactgagtggcagcgtagaggtgtcccgca

SEQ ID NO: 257467 - DNA, 60 bp, Artificial
  Synthetic oligonucleotide
acgagccacgcccaggtcgtgcatcctcgccctataggggtgggcttcgcgccatgcagc

SEQ ID NO: 257468 - DNA, 52 bp, Artificial
  Synthetic oligonucleotide
accatcaaaagccggtactctgttgccaaccgtgcgaccctaaacaaaccgg

SEQ ID NO: 257469 - DNA, 60 bp, Artificial
  Synthetic oligonucleotide
aatacgcatagaatcttgcgctccatatcaacctcctacgctgttggcagattccgagtt

SEQ ID NO: 257470 - DNA, 56 bp, Artificial
  Synthetic oligonucleotide
aaggggaacgtcatggcatacgcagggtatttcgtgatgatcggatttttgggggc

SEQ ID NO: 257471 - DNA, 56 bp, Artificial
  Synthetic oligonucleotide
aagccaacccgcaaccaccctagcgcccgcttctaagcggaccctagagcgccata

SEQ ID NO: 257472 - DNA, 60 bp, Artificial
  Synthetic oligonucleotide
aacgcgacgtatcgctacaggtaagcatcctacgagcactacggagacgataacgatcac

SEQ ID NO: 257473 - DNA, 54 bp, Artificial
  Synthetic oligonucleotide
aacctccccgcgttttcctacactgcctaggctaggcaccgacttttgagctta

SEQ ID NO: 257474 - DNA, 55 bp, Artificial
  Synthetic oligonucleotide
aaccgtagcgaggcttctgaccgataccctaactgttacggagttaaagcatggc

SEQ ID NO: 257475 - DNA, 58 bp, Artificial
  Synthetic oligonucleotide
cccatgccgcgccggactgacgcataaattcccgcccctcgaccttcgcgcgaggcaa

SEQ ID NO: 257476 - DNA, 59 bp, Artificial
  Synthetic oligonucleotide
aacccaatgacacgagaacgcgacgtatcgctacaggtaagcatcctacgagcactacg

SEQ ID NO: 257477 - DNA, 59 bp, Artificial
  Synthetic oligonucleotide
aaccaatacgtgcttgggtactacgctttggcagccggggctgtagcgcatcaagaggc

SEQ ID NO: 257478 - DNA, 53 bp, Artificial
  Synthetic oligonucleotide
aaatttcgtcagttatcccctcccagggacaacctgagaaaccacgcgaaaca

SEQ ID NO: 257479 - DNA, 59 bp, Artificial
  Synthetic oligonucleotide
aaagcccacacacctgtcgccgtcaacgcaagcccgcatgtaaaaactgccagtgccca

SEQ ID NO: 257480 - DNA, 55 bp, Artificial
  Synthetic oligonucleotide
aaaacagttcgatgacgtgggggaatggcatagagcaaccctaacaagggcaaag

SEQ ID NO: 257481 - DNA, 60 bp, Artificial
  Synthetic oligonucleotide
agcacagcgctccgggaccagcgaaggtcagcccattgaggagtcatccatgtacggttc

SEQ ID NO: 257482 - DNA, 56 bp, Artificial
  Synthetic oligonucleotide
agattcccgggaccacctctatacttgcgcaaccgctcttaggcggtccaatagta

SEQ ID NO: 257483 - DNA, 57 bp, Artificial
  Synthetic oligonucleotide
gtagtaaatctctacgtagtggatttataaaattagatccatccttaacaggcacga

SEQ ID NO: 257484 - DNA, 59 bp, Artificial
  Synthetic oligonucleotide
acctctgccggctgcactcgacgcaagcggtggcaggccagtacgacgcggaaaccagc

SEQ ID NO: 257485 - DNA, 59 bp, Artificial
  Synthetic oligonucleotide
cggcttgacgcgccccgcaagtatattgggcattccttatgaagcgtgtgtcgctgaat

SEQ ID NO: 257486 - DNA, 60 bp, Artificial
  Synthetic oligonucleotide
ccattcgactagtaatgtcaaattagcccagctgcggactgagctagatgactgaaggcg

SEQ ID NO: 257487 - DNA, 59 bp, Artificial
  Synthetic oligonucleotide
ctactgttgaaggatcgttcggcacaggccttcaaattcgaacatgcacacataccgct

SEQ ID NO: 257488 - DNA, 58 bp, Artificial
  Synthetic oligonucleotide
agtaaagcacggcgaggtgcggtaatagctaacgtcttgatagcgcgacaggtacgaa

SEQ ID NO: 257489 - DNA, 59 bp, Artificial
  Synthetic oligonucleotide
tcattagcgatcacggaattgccatcaaggcgtcaacgctcaagagctatgcacgacgc

SEQ ID NO: 257490 - DNA, 56 bp, Artificial
  Synthetic oligonucleotide
ctgagtacccacgaccggctaggttcgcgcaaaaggccaacatgacctctagggga

SEQ ID NO: 257491 - DNA, 59 bp, Artificial
  Synthetic oligonucleotide
caacgcgctggagtaacgacgcaaaggccaaagcagagcggattcttaatgcagcgatg

SEQ ID NO: 257492 - DNA, 58 bp, Artificial
  Synthetic oligonucleotide
gcgccgtgggttgccacacaaactatggccgcaatcgtcaaaaccgaatctggcttta

SEQ ID NO: 257493 - DNA, 58 bp, Artificial
  Synthetic oligonucleotide
agtggactggtcttgcaattcatgcggtgacaactccgagtggggaacggatgcatcg

SEQ ID NO: 257494 - DNA, 55 bp, Artificial
  Synthetic oligonucleotide
cagcgttgggaccgtatcctccaggcatcagggatgaaaagggccaaaccgtccc

SEQ ID NO: 257495 - DNA, 58 bp, Artificial
  Synthetic oligonucleotide
cagccgctggctggactagatccggtgtctctgaaattcacgcgcaacgaacttcaga

SEQ ID NO: 257496 - DNA, 54 bp, Artificial
  Synthetic oligonucleotide
atggctaacgaaaccgaagttcgttgccgaagacaacccgtatttcatggacag

SEQ ID NO: 257497 - DNA, 59 bp, Artificial
  Synthetic oligonucleotide
ccatcgcaacgtttaatcatctgatcggtgttttatcgttgaatccgactgacacggac

SEQ ID NO: 257498 - DNA, 58 bp, Artificial
  Synthetic oligonucleotide
tatgaatgcgatctctaaaattgcggtcgcgttgttcgctgtgatgcccgatcaaaat

SEQ ID NO: 257499 - DNA, 58 bp, Artificial
  Synthetic oligonucleotide
gtgatctaaatacatctctggccaagtggcttcatggattctatgcaactcaccgtca

SEQ ID NO: 257500 - DNA, 58 bp, Artificial
  Synthetic oligonucleotide
tgaggccacactatcaaccggaactgtttctagcaagcgctccaaagcgcccattttg

SEQ ID NO: 257501 - DNA, 58 bp, Artificial
  Synthetic oligonucleotide
ccctgttgcggccagtattgtcgctggtcagaagccgaacagcgatgtgatcctcagc

SEQ ID NO: 257502 - DNA, 58 bp, Artificial
  Synthetic oligonucleotide
gctatgtaggaaccacagaccgctagtctggaggcgaccatgtaaagaggtatgcctg

SEQ ID NO: 257503 - DNA, 54 bp, Artificial
  Synthetic oligonucleotide
actcggcaaagttttgttgaccggcacgagcctcgacatgttgggttccggcgg

SEQ ID NO: 257504 - DNA, 57 bp, Artificial
  Synthetic oligonucleotide
ttaggacctgtcgttatgggtgcgcttaacgatcctgagacagttgaggttctactg

SEQ ID NO: 257505 - DNA, 55 bp, Artificial
  Synthetic oligonucleotide
gaaggacgaaagagtggggtacttccggatcgttgaccgctgctgggccaaacca

SEQ ID NO: 257506 - DNA, 54 bp, Artificial
  Synthetic oligonucleotide
aagttccacaaatctgcgttcggccaacacagggggaaaccacgtgaccgtgac

SEQ ID NO: 257507 - DNA, 51 bp, Artificial
  Synthetic oligonucleotide
gcgaccctaaacaaaccggttcaccgaatcgaccctaaccgtaccgatgac

SEQ ID NO: 257508 - DNA, 52 bp, Artificial
  Synthetic oligonucleotide
cgcggttggaggcatttcgtaagggtgaaattgtccttaatccttaaccgcc

SEQ ID NO: 257509 - DNA, 60 bp, Artificial
  Synthetic oligonucleotide
ccaggatcacccgaagttgtgtactgccatgcggcctcggaagctatgtaggaaccacag

SEQ ID NO: 257510 - DNA, 57 bp, Artificial
  Synthetic oligonucleotide
ttggcctcagatcttgatgccctcagctgggaagacgtcagagagcttggactgcaa

SEQ ID NO: 257511 - DNA, 53 bp, Artificial
  Synthetic oligonucleotide
ccggcacagaccttcgttctatcctccctcaccgcaccttttacaagtaccgt

SEQ ID NO: 257512 - DNA, 56 bp, Artificial
  Synthetic oligonucleotide
ctccccgtgcccagttccaagaagcggatcgagtacgtccagctctatcgatcatc

SEQ ID NO: 257513 - DNA, 56 bp, Artificial
  Synthetic oligonucleotide
atgtacattggtgcaataccgtactcttttccatgacggtttatgtacgatgcata

SEQ ID NO: 257514 - DNA, 56 bp, Artificial
  Synthetic oligonucleotide
tgcagtgaaatgccagaagctcagtcggcagctgacggcaattgcacacgtgctcg

SEQ ID NO: 257515 - DNA, 56 bp, Artificial
  Synthetic oligonucleotide
atgatctcaatggcctgtttttcaggctccggatgcccttggatacgaagcgcatc

SEQ ID NO: 257516 - DNA, 56 bp, Artificial
  Synthetic oligonucleotide
gcctacacccgttacgacaggaatcaccatgctggtgtagttagcggcattcaaac

SEQ ID NO: 257517 - DNA, 56 bp, Artificial
  Synthetic oligonucleotide
atcaatttaagtgttcgtcactctgatgccaattcaagccagtcgtgaagacctta

SEQ ID NO: 257518 - DNA, 56 bp, Artificial
  Synthetic oligonucleotide
cgatatccgtctatcctgtgtccgattcgtgtccgagcctagcgcgcttcgcgtac

SEQ ID NO: 257519 - DNA, 56 bp, Artificial
  Synthetic oligonucleotide
gcaaccacaggatattctcgttcaagcgcgatgctccgtaaggccatcgcccgagc

SEQ ID NO: 257520 - DNA, 59 bp, Artificial
  Synthetic oligonucleotide
ctttttagaatcgatccgatttgcgatgttaatctggggaagtcagtaattcatgacga

SEQ ID NO: 257521 - DNA, 56 bp, Artificial
  Synthetic oligonucleotide
agctgatacgacggggtaatccccccacttctagcggtcgccagaagtggagctaa

SEQ ID NO: 257522 - DNA, 56 bp, Artificial
  Synthetic oligonucleotide
gcaggaacaatgacgcatgctgtgatgttggccatacattgaaaaccgtgtttgtc

SEQ ID NO: 257523 - DNA, 56 bp, Artificial
  Synthetic oligonucleotide
gtattcactcaatgcatcctcttggaaagcaccgacacgactcgcctgagcctgcg

SEQ ID NO: 257524 - DNA, 56 bp, Artificial
  Synthetic oligonucleotide
ggttgtccacacgccgttcgcttgcgaattcgacgctgaggtgtatgccgttggag

SEQ ID NO: 257525 - DNA, 55 bp, Artificial
  Synthetic oligonucleotide
gaacgtcatcgccgcttggctcttggagctagtcagcttgaagtagtacgtgcgc

SEQ ID NO: 257526 - DNA, 55 bp, Artificial
  Synthetic oligonucleotide
cgcgcggccgtcacaattctcaactgaacatgtatcagtcattgcggacagaagc

SEQ ID NO: 257527 - DNA, 55 bp, Artificial
  Synthetic oligonucleotide
gcacatcgtaaacagtgccagaaaaccagatagcacaatgcagatgcgggacacc

SEQ ID NO: 257528 - DNA, 55 bp, Artificial
  Synthetic oligonucleotide
gaatgccggagtggtaacgactgacagcaacaacgagacgcacaactcacgaaaa

SEQ ID NO: 257529 - DNA, 55 bp, Artificial
  Synthetic oligonucleotide
gaatttagcgcagttgcagagagggttggctaagataaatggtagagtcgaactc

SEQ ID NO: 257530 - DNA, 55 bp, Artificial
  Synthetic oligonucleotide
gacaacgaacggatgagcaagacgcagatgaattcggtacgcaagacagcagtca

SEQ ID NO: 257531 - DNA, 56 bp, Artificial
  Synthetic oligonucleotide
ctttgattgccaagacgtgtttttcgtactggttacgacggtctatgactccgcgc

SEQ ID NO: 257532 - DNA, 55 bp, Artificial
  Synthetic oligonucleotide
tatgcagcgaacatctgcacgcttccgctggatctcgcgttctgcctgctctcgt

SEQ ID NO: 257533 - DNA, 55 bp, Artificial
  Synthetic oligonucleotide
gcaatatccactgccggtgcgtaagtccaatgaatacccgccgcagtagcctcaa

SEQ ID NO: 257534 - DNA, 55 bp, Artificial
  Synthetic oligonucleotide
gacaggagtagcgcaatgcccctcaacccgaagcatgagatctatatcgtcggcg

SEQ ID NO: 257535 - DNA, 55 bp, Artificial
  Synthetic oligonucleotide
gacattaatcgcggggagcctttcgacgctatcgagaacggcaggcctcacccag

SEQ ID NO: 257536 - DNA, 55 bp, Artificial
  Synthetic oligonucleotide
gcaagtgtccagagggtatggagcgaatgcttggcgcatacgtcaccggcccagg

SEQ ID NO: 257537 - DNA, 55 bp, Artificial
  Synthetic oligonucleotide
gaccccaaggatccgcttttggcgaatcccaatcctgactcccaaatcgcggcac

SEQ ID NO: 257538 - DNA, 55 bp, Artificial
  Synthetic oligonucleotide
acaaatgcttacgtggaatctgtcgtggaaggctgcagacggcacgacgttgcaa

SEQ ID NO: 257539 - DNA, 55 bp, Artificial
  Synthetic oligonucleotide
ctggttgctaacggcccgtgtcctggattctttatgcgcggggcctgaacgctgc

SEQ ID NO: 257540 - DNA, 55 bp, Artificial
  Synthetic oligonucleotide
tcaaccacgctgacgatccacccgtagttctcggtcgcctgctctagctcgcgct

SEQ ID NO: 257541 - DNA, 53 bp, Artificial
  Synthetic oligonucleotide
cttcagactccgttcttaatctgcctgggtattacgtcaagtttcccggtacc

SEQ ID NO: 257542 - DNA, 53 bp, Artificial
  Synthetic oligonucleotide
cttgctgacccgtttttttcggatttcgccgcgatgcttggttttactggggc

SEQ ID NO: 257543 - DNA, 55 bp, Artificial
  Synthetic oligonucleotide
cttccgaagcggaagatcgtcattgaaacgacgctaggcgcaaacatctcaccac

SEQ ID NO: 257544 - DNA, 55 bp, Artificial
  Synthetic oligonucleotide
cttcgacccgaacgccccactctgttgctgagcaacgacttcctgccacgaacca

SEQ ID NO: 257545 - DNA, 55 bp, Artificial
  Synthetic oligonucleotide
tcaaaccccttgcacttggcgaccgctgggaaaacgcgctgggctacgccacaac

SEQ ID NO: 257546 - DNA, 55 bp, Artificial
  Synthetic oligonucleotide
cttgatggctcccactgatccttccgcgatggttgcactggagacgctggatagc

SEQ ID NO: 257547 - DNA, 55 bp, Artificial
  Synthetic oligonucleotide
tatttgaaagttcaaccgagacaggccgttcgcgggcgcaccaatagactcagcg

SEQ ID NO: 257548 - DNA, 55 bp, Artificial
  Synthetic oligonucleotide
cttggcagaaggtgcgggagcagaggcagaattgacgtaggacaagagtcgggtc

SEQ ID NO: 257549 - DNA, 55 bp, Artificial
  Synthetic oligonucleotide
cgcggtggcgccaccttgcttgatacatgtgtctaagtagcgggcagacccttcg

SEQ ID NO: 257550 - DNA, 55 bp, Artificial
  Synthetic oligonucleotide
tattcaccctggcaacattaagcctggcgctaaaaccactgtggccccaagcacg

SEQ ID NO: 257551 - DNA, 55 bp, Artificial
  Synthetic oligonucleotide
tatgtctctcgccttagcctcacgacacgtctgatagaacatctcaaacgctcgc

SEQ ID NO: 257552 - DNA, 55 bp, Artificial
  Synthetic oligonucleotide
cgcggactgtaagcgttttcatacagaggcgtaaacccctatcttcacatgcgtg

SEQ ID NO: 257553 - DNA, 60 bp, Artificial
  Synthetic oligonucleotide
cttcggcgctcaccatacagaggctgccacaggcgagtgggatgaggtgcaatcgggtct

SEQ ID NO: 257554 - DNA, 55 bp, Artificial
  Synthetic oligonucleotide
gaaaatcgattggccgcactcgacgagattcaagaaaccttgcagcctaccgatc

SEQ ID NO: 257555 - DNA, 55 bp, Artificial
  Synthetic oligonucleotide
cgcgctagcgcacgctgatttgctgcgtcgcgtttggtgcgttcttcgtctgggt

SEQ ID NO: 257556 - DNA, 54 bp, Artificial
  Synthetic oligonucleotide
gaacccggacacaattcgaactgccagccgcagtacccgaaccggtcctactcc

SEQ ID NO: 257557 - DNA, 55 bp, Artificial
  Synthetic oligonucleotide
tatccagttagtcatctatccgtccatataatgtctactttgtgtctccatcgcc

SEQ ID NO: 257558 - DNA, 55 bp, Artificial
  Synthetic oligonucleotide
gattgcgccagtggaatctcctctttgatttatgacgtgagtgttgctgctgagg

SEQ ID NO: 257559 - DNA, 55 bp, Artificial
  Synthetic oligonucleotide
gattacttcgcgaaggtgccactaaacagggagttcataaatccagtggtgtagg

SEQ ID NO: 257560 - DNA, 55 bp, Artificial
  Synthetic oligonucleotide
gattactgtggagaaagcttcgtcagcgaagatcgctccgggcaatcgctggagt

SEQ ID NO: 257561 - DNA, 55 bp, Artificial
  Synthetic oligonucleotide
gatggggcgatcggcgcgaggtgtccgtaagccaacaagcagtctgtaatagtgg

SEQ ID NO: 257562 - DNA, 55 bp, Artificial
  Synthetic oligonucleotide
gatggaagttccgaattcgcagtacctgcgcgcctgagtgacgccagtcccgacc

SEQ ID NO: 257563 - DNA, 55 bp, Artificial
  Synthetic oligonucleotide
gatacacgcgtggggcccgcggtgcattctgctccgcacggggttgggaaccgtt

SEQ ID NO: 257564 - DNA, 60 bp, Artificial
  Synthetic oligonucleotide
cttaccgttatatgggctattcatgcgaatagccttcgctacatctgcgacatagttcag

SEQ ID NO: 257565 - DNA, 55 bp, Artificial
  Synthetic oligonucleotide
gagctgtctgctgcgaatcgcaccgcgggattcaagaccacacgcgactctgtgc

SEQ ID NO: 257566 - DNA, 55 bp, Artificial
  Synthetic oligonucleotide
tatcgccaagcttcgcaagcggcttcctgattagcacgcactttcagcggtgaac

SEQ ID NO: 257567 - DNA, 55 bp, Artificial
  Synthetic oligonucleotide
gagcgcctcagagcagaaattagcaagtcgaactacaagtgcaccccgattgcgt

SEQ ID NO: 257568 - DNA, 55 bp, Artificial
  Synthetic oligonucleotide
cgcgactggagacgttcttacgatcgggaaaggtgcaactgcgtggcgagtggca

SEQ ID NO: 257569 - DNA, 55 bp, Artificial
  Synthetic oligonucleotide
gcaacggctcacaatcctcgcatcgggactatgccctggactgcaccgatctacg

SEQ ID NO: 257570 - DNA, 55 bp, Artificial
  Synthetic oligonucleotide
gagccgacgcccggtcatcaggggatgcgtaccgcatccggtcagcgcggaagat

SEQ ID NO: 257571 - DNA, 55 bp, Artificial
  Synthetic oligonucleotide
gagcagggtgccagcgccaacccattcgcgctcccaaacatggcttcggtgaatc

SEQ ID NO: 257572 - DNA, 55 bp, Artificial
  Synthetic oligonucleotide
gagatgctagaggcagaagccaagattggtgcacgtccgttatttgcggcgggta

SEQ ID NO: 257573 - DNA, 55 bp, Artificial
  Synthetic oligonucleotide
cgcgatacattcaaatgaacgtccgagaaaattgcacgtgccatacactgcgaca

SEQ ID NO: 257574 - DNA, 55 bp, Artificial
  Synthetic oligonucleotide
cgcgatatgcagtgctcaacaatgtggcgcatcacgatctgcgggtgattctgcg

SEQ ID NO: 257575 - DNA, 54 bp, Artificial
  Synthetic oligonucleotide
ctcttgaaacctttacggtccaagcaatcgtggtccgttgtcgccgtggacacg

SEQ ID NO: 257576 - DNA, 55 bp, Artificial
  Synthetic oligonucleotide
gagacgccaacgtcgatgtcactccattcgcaaaggactacatccaggcatcgcg

SEQ ID NO: 257577 - DNA, 55 bp, Artificial
  Synthetic oligonucleotide
gactaggtgttctgcaaaagagtttcgtgcgattagagcacggcttcggaaggca

SEQ ID NO: 257578 - DNA, 55 bp, Artificial
  Synthetic oligonucleotide
acagagtcctggatggatacctgggccggtgacgtatgcgccaagcattcgctcc

SEQ ID NO: 257579 - DNA, 55 bp, Artificial
  Synthetic oligonucleotide
gacggtaaacactatcgcttccgcgtaacgaatgtaggctcagcccaggcacgca

SEQ ID NO: 257580 - DNA, 55 bp, Artificial
  Synthetic oligonucleotide
gcaactgccatcgggacctttgacctcaccctgaggacactcgttctccttaggc

SEQ ID NO: 257581 - DNA, 55 bp, Artificial
  Synthetic oligonucleotide
gacgcttgttccaacggtcggagccaaagccgctgttaggaagcggtggcatttc

SEQ ID NO: 257582 - DNA, 55 bp, Artificial
  Synthetic oligonucleotide
gcaagactccacattcgcgacggactctagtgtgtcccaccggacgttaagttcc

SEQ ID NO: 257583 - DNA, 55 bp, Artificial
  Synthetic oligonucleotide
cgcgcacttgtcacctaatgtgccttcaacagtggagcggatgaggtgcccacgc

SEQ ID NO: 257584 - DNA, 55 bp, Artificial
  Synthetic oligonucleotide
gacgcctgggtagcatcctatgcccacccgcaactaacaacaggaccgccgcaac

SEQ ID NO: 257585 - DNA, 55 bp, Artificial
  Synthetic oligonucleotide
gaccttggcgaacacctacgcaacggaggcttgagatgactgacggcatgacacc

SEQ ID NO: 257586 - DNA, 60 bp, Artificial
  Synthetic oligonucleotide
ctccgcttgcaaccaggcttcacgtcggaactcttgcgagcctgacaacttgagactgtc

SEQ ID NO: 257587 - DNA, 55 bp, Artificial
  Synthetic oligonucleotide
gaccctcctaggtcctcagatcctgcttagtcgtagtcaatgcggtcttcgccac

SEQ ID NO: 257588 - DNA, 55 bp, Artificial
  Synthetic oligonucleotide
cgggtagcgagcgcacgaacgggacgctacacactcgtacagcaaccgttggtaa

SEQ ID NO: 257589 - DNA, 50 bp, Artificial
  Synthetic oligonucleotide
cggtacggttagggtcgattgggtgaaccggtttgtttagggtcgcacga

SEQ ID NO: 257590 - DNA, 55 bp, Artificial
  Synthetic oligonucleotide
cggtagataggtcgacctccacgtagttgcctgtggcggggtcgtcgtatccgag

SEQ ID NO: 257591 - DNA, 55 bp, Artificial
  Synthetic oligonucleotide
cggttatcgggttcatggcgggatggtatcaaggaggtgtcgcgccccgggttga

SEQ ID NO: 257592 - DNA, 55 bp, Artificial
  Synthetic oligonucleotide
tccgcttgcgttacgagatcacgcggcagttcgcgccctacgtgggattcgagcg

SEQ ID NO: 257593 - DNA, 55 bp, Artificial
  Synthetic oligonucleotide
cggttggttgaagccggccattttacgcgctgctgtattgcattgcacaacgagt

SEQ ID NO: 257594 - DNA, 55 bp, Artificial
  Synthetic oligonucleotide
cgtaattacgtaacgaggtgaatccatgagcagtaagagtccgttgggcaagctg

SEQ ID NO: 257595 - DNA, 55 bp, Artificial
  Synthetic oligonucleotide
cgtaccgtcgtagtgacaaccgtcgtatttcctgggctcatggtagttccgcgtg

SEQ ID NO: 257596 - DNA, 55 bp, Artificial
  Synthetic oligonucleotide
cgctgtgttatggctcgcgagtcgcaaatagatgcacgttccgctttctgcactt

SEQ ID NO: 257597 - DNA, 59 bp, Artificial
  Synthetic oligonucleotide
ctcccgaatcgcaaccccggcgcgaaggttccgccgcacattgaggcgatggcacgtca

SEQ ID NO: 257598 - DNA, 55 bp, Artificial
  Synthetic oligonucleotide
cgtatagacctaagccgcagtatcacttaatgtggcaaagctttacggtgattgc

SEQ ID NO: 257599 - DNA, 55 bp, Artificial
  Synthetic oligonucleotide
cgtattccggcgacaaagtggcgagaacgcaatttggctcgcttgctgcgctcat

SEQ ID NO: 257600 - DNA, 55 bp, Artificial
  Synthetic oligonucleotide
tcccagacacgtgactcacgtacagcacggatggagacccgccatcccggggtaa

SEQ ID NO: 257601 - DNA, 55 bp, Artificial
  Synthetic oligonucleotide
cgtcgcgctgatggcacgtatacggctcgcatcgagctaactggcgaagggtgca

SEQ ID NO: 257602 - DNA, 55 bp, Artificial
  Synthetic oligonucleotide
cgtcttgagcggaggctcggaactgggccaaattcggatgagcagacttgcccag

SEQ ID NO: 257603 - DNA, 55 bp, Artificial
  Synthetic oligonucleotide
cgtcttggcgttctacgtgcccatgattccgttcattacctggacggtcggcgtg

SEQ ID NO: 257604 - DNA, 55 bp, Artificial
  Synthetic oligonucleotide
cgtgacgaacatcgaatctggaccatcgcttgaggaaataagcaaccgagccatt

SEQ ID NO: 257605 - DNA, 55 bp, Artificial
  Synthetic oligonucleotide
cgtgcaaacacggccgcgcataccggatcggctcaagcgcagtcaacgaattagg

SEQ ID NO: 257606 - DNA, 55 bp, Artificial
  Synthetic oligonucleotide
cggatttcgccgcgatgcttggttttactggggcctgcggcccttgggcatggtt

SEQ ID NO: 257607 - DNA, 55 bp, Artificial
  Synthetic oligonucleotide
cggattaagcctggcaagctccgctttggtgtgaggtgctcgtcatctcacattt

SEQ ID NO: 257608 - DNA, 57 bp, Artificial
  Synthetic oligonucleotide
ctcaagggcgcaaaggacggcgttacaaagccgttgtggcgaaggacatcgagccac

SEQ ID NO: 257609 - DNA, 55 bp, Artificial
  Synthetic oligonucleotide
cggcgaagtagatatggctggatgtcatcgcggcctctcgaaggtgcacggagag

SEQ ID NO: 257610 - DNA, 55 bp, Artificial
  Synthetic oligonucleotide
cggcggagagcgagccgttaatcagtttggcaaacgagctaagtctcatgcggcc

SEQ ID NO: 257611 - DNA, 55 bp, Artificial
  Synthetic oligonucleotide
tccgcagtggatacgcggcgcatgctggatcccgtgcgtggcggcacgatggggc

SEQ ID NO: 257612 - DNA, 55 bp, Artificial
  Synthetic oligonucleotide
cggagttgttcagtccgcgcgattacgaccaaagcgggcattcggaacggtgagg

SEQ ID NO: 257613 - DNA, 55 bp, Artificial
  Synthetic oligonucleotide
cggacttacggtgcagtgcaacaaaacgcggcctggccggctgaaaacccatgac

SEQ ID NO: 257614 - DNA, 55 bp, Artificial
  Synthetic oligonucleotide
cggacgctgatacatagcgtcgggcctgctccgtttaagcgagatgaacccgcag

SEQ ID NO: 257615 - DNA, 55 bp, Artificial
  Synthetic oligonucleotide
cggaatcaataccgccgcccaaagtgatcgcgtgattaacgcggccatgccgggg

SEQ ID NO: 257616 - DNA, 55 bp, Artificial
  Synthetic oligonucleotide
cggcttggaacggaattctcccagcaggttgtactgattgaccggatgccccact

SEQ ID NO: 257617 - DNA, 55 bp, Artificial
  Synthetic oligonucleotide
cgggactaccgcctggtagcgttgagcataggctaagtcgagtaccaaactggcg

SEQ ID NO: 257618 - DNA, 55 bp, Artificial
  Synthetic oligonucleotide
accgatcgaatacctgcgaacacccggataacacggcagcgtgtgtgcagcgatc

SEQ ID NO: 257619 - DNA, 57 bp, Artificial
  Synthetic oligonucleotide
cgcaacgtgtcgttgttcgaggggctgcggtcgtgggcataccgcgcacgaaaacag

SEQ ID NO: 257620 - DNA, 57 bp, Artificial
  Synthetic oligonucleotide
ctaggttcgcgcaaaaggccaacatgacctctaggggaacccactccatgaagccaa

SEQ ID NO: 257621 - DNA, 55 bp, Artificial
  Synthetic oligonucleotide
tccccagcagcaggccagccgattcggttccgagtagcagattgctacctagggg

SEQ ID NO: 257622 - DNA, 55 bp, Artificial
  Synthetic oligonucleotide
cgggcttggaacctcatcagacgtggcagcgcgttgttccaattatgcatccgag

SEQ ID NO: 257623 - DNA, 55 bp, Artificial
  Synthetic oligonucleotide
cggggcgcacccaactggcatcgaaggcaggtagcggattcaatagcgtgatcag

SEQ ID NO: 257624 - DNA, 55 bp, Artificial
  Synthetic oligonucleotide
accgaccaacagcgactgagtaccgcagacgccatactctatgtagtgtggcttc

SEQ ID NO: 257625 - DNA, 55 bp, Artificial
  Synthetic oligonucleotide
cggggtaggcacgaccgatggcgaaatcccgttgactctcatgcggtgcttcgct

SEQ ID NO: 257626 - DNA, 55 bp, Artificial
  Synthetic oligonucleotide
tcagttctgtctcacccatacccaccgtagcggctttggcttgttccacagcccg

SEQ ID NO: 257627 - DNA, 55 bp, Artificial
  Synthetic oligonucleotide
ctcctcagcatccgacctgacacactcccaacttaaaccaattgactccatgacc

SEQ ID NO: 257628 - DNA, 55 bp, Artificial
  Synthetic oligonucleotide
ctcgctcaacgacagcgtccaattggcggtcaattcgcttccgacctccacctca

SEQ ID NO: 257629 - DNA, 55 bp, Artificial
  Synthetic oligonucleotide
ctcgctgaaggacgaaagagtggggtacttccggatcgttgaccgctgctgggcc

SEQ ID NO: 257630 - DNA, 55 bp, Artificial
  Synthetic oligonucleotide
ctcgctggctcgaagtgcgagcccaatcgccggtaccatagacagcctgtaacag

SEQ ID NO: 257631 - DNA, 60 bp, Artificial
  Synthetic oligonucleotide
ctactcggcgtagccccttggtctgcgcacgcacaggctcaacagtgtgcaaacaactcc

SEQ ID NO: 257632 - DNA, 55 bp, Artificial
  Synthetic oligonucleotide
ctcggcaactgtcggttacgtccctactgcggcgtacgttcttgatcccgctcgc

SEQ ID NO: 257633 - DNA, 55 bp, Artificial
  Synthetic oligonucleotide
cgctatctgtgttggttgtttatccctttgcgttgtcagtgttgcttgggatgcc

SEQ ID NO: 257634 - DNA, 55 bp, Artificial
  Synthetic oligonucleotide
ctctacgtgcgcttcttggttcctgttgatttgcgggaacaggtcggctcgcgtt

SEQ ID NO: 257635 - DNA, 55 bp, Artificial
  Synthetic oligonucleotide
ctctgcggtcatttcgttgcgtggtgcctacgctaatcagccgagtgttaggacg

SEQ ID NO: 257636 - DNA, 55 bp, Artificial
  Synthetic oligonucleotide
tcacgtaagacatttagccactgacgcggtctttgccatgagcgacctagacgaa

SEQ ID NO: 257637 - DNA, 53 bp, Artificial
  Synthetic oligonucleotide
cgctaacgcgtcgaaacaaaaccccacgacaagaagtatccggaggccgtatg

SEQ ID NO: 257638 - DNA, 55 bp, Artificial
  Synthetic oligonucleotide
ctcttgccaaaatctctgggttcgatgcccttggatgccggcccttggatcgcct

SEQ ID NO: 257639 - DNA, 55 bp, Artificial
  Synthetic oligonucleotide
cgcgtgtagagatgatcgaatcagtgacgtggcgggtgtagggcatgtagcgcga

SEQ ID NO: 257640 - DNA, 54 bp, Artificial
  Synthetic oligonucleotide
cgcgtcctttctgtcaattcatggcggctaggtcggtaaactttcgacgtaccc

SEQ ID NO: 257641 - DNA, 55 bp, Artificial
  Synthetic oligonucleotide
aaccgaagtgacctctgtccaggtaccaatctactttgcgagaactacacaaatg

SEQ ID NO: 257642 - DNA, 58 bp, Artificial
  Synthetic oligonucleotide
ctaactctgcgtggttctcaggcaactaccgcacgtacacgtggaccaagggttgcga

SEQ ID NO: 257643 - DNA, 55 bp, Artificial
  Synthetic oligonucleotide
ctgcggcctactgggctgcccaactcatcacattgggcaatgctgaaggactgtc

SEQ ID NO: 257644 - DNA, 55 bp, Artificial
  Synthetic oligonucleotide
ctgggcgtcattgatgtggcgtgatagcactagcgctgcatcccgataggtctgc

SEQ ID NO: 257645 - DNA, 55 bp, Artificial
  Synthetic oligonucleotide
cgtgcaccatacgatatcgtcaactattccgaatacgtggatgcagctgtcgccg

SEQ ID NO: 257646 - DNA, 55 bp, Artificial
  Synthetic oligonucleotide
cgttaccccgagagaccgccacgttacatgcacggtggtttctgtgatcccgtac

SEQ ID NO: 257647 - DNA, 55 bp, Artificial
  Synthetic oligonucleotide
cgttccagaagaggggctatgaggttctacgggtgagtctgttctggatttgtgc

SEQ ID NO: 257648 - DNA, 55 bp, Artificial
  Synthetic oligonucleotide
cgttgctgatatgtagagatgtgcgtgacaccaatcgtgttgactatcgacatat

SEQ ID NO: 257649 - DNA, 55 bp, Artificial
  Synthetic oligonucleotide
ctaaagggaccacccatcgcacaaactgcccctggttcaagcgtgttacggctca

SEQ ID NO: 257650 - DNA, 55 bp, Artificial
  Synthetic oligonucleotide
ctaacgccacgctgacatcgactaggcaccgcgcttacatcttctcgcctaggtt

SEQ ID NO: 257651 - DNA, 54 bp, Artificial
  Synthetic oligonucleotide
accccaagcgccgacccctgaagcgttgttggtcaacatggggaaggtgcgtgg

SEQ ID NO: 257652 - DNA, 55 bp, Artificial
  Synthetic oligonucleotide
ctaagtcgggcaggtgtatggtctaccccgccacgcgtcggcccaatgagcgcat

SEQ ID NO: 257653 - DNA, 55 bp, Artificial
  Synthetic oligonucleotide
cgtcctgagcggagcgctaaggctcggtggccaagtggggggggggtgcagcccc

SEQ ID NO: 257654 - DNA, 55 bp, Artificial
  Synthetic oligonucleotide
tccactcttccctccggctacgaacccaagaccttcgaatcgcggctttatgccg

SEQ ID NO: 257655 - DNA, 55 bp, Artificial
  Synthetic oligonucleotide
cgctgggtaaaccgtgctgtgtgatcaggattggctccttgtcgcgctctgtagc

SEQ ID NO: 257656 - DNA, 55 bp, Artificial
  Synthetic oligonucleotide
ctagcaacgggttggacatagcgataggcctcttgtggaacgtttacggtgtgga

SEQ ID NO: 257657 - DNA, 55 bp, Artificial
  Synthetic oligonucleotide
ctaggcagcttaaagggtgcaggcatccgcagttggaccacattcgctcaccgac

SEQ ID NO: 257658 - DNA, 55 bp, Artificial
  Synthetic oligonucleotide
ctatactctgcgaccacgaaattcgcaatcggaatctgaacccgatgactcgact

SEQ ID NO: 257659 - DNA, 55 bp, Artificial
  Synthetic oligonucleotide
ctatatctcgattgcctcggaaaacacacgctccggtgtgatgacctctttccgg

SEQ ID NO: 257660 - DNA, 55 bp, Artificial
  Synthetic oligonucleotide
cgctgcaagaggtggttcacagcaaggcggccgacaaagccgtctcctatgccgt

SEQ ID NO: 257661 - DNA, 55 bp, Artificial
  Synthetic oligonucleotide
cgctcttgctccatccagtgtggcgtagctcgttcgatagatccgctcacgcttg

SEQ ID NO: 257662 - DNA, 55 bp, Artificial
  Synthetic oligonucleotide
aaccgccgccactgcgcgctcatcgggtttggtttcccgatctggctgatgcgca

SEQ ID NO: 257663 - DNA, 55 bp, Artificial
  Synthetic oligonucleotide
ctccgaaatgtagcgaccgttgcgctcggtgtatttccactgcacaacaacgtcg

SEQ ID NO: 257664 - DNA, 51 bp, Artificial
  Synthetic oligonucleotide
cggtaactctaacagcgggttgaattttccccgcgttgttggctccggaaa

SEQ ID NO: 257665 - DNA, 55 bp, Artificial
  Synthetic oligonucleotide
ggggtaaaggcagcgtacgccttcatgtagcggcatcgtcgggagttcaggcgtg

SEQ ID NO: 257666 - DNA, 55 bp, Artificial
  Synthetic oligonucleotide
ggggtcactcttctaaggagacacggagtacactcgttgccagcgtcagtcgggg

SEQ ID NO: 257667 - DNA, 53 bp, Artificial
  Synthetic oligonucleotide
aagtgcagccacctactacggccctccctacaaggtccagtcgttccgcgggg

SEQ ID NO: 257668 - DNA, 55 bp, Artificial
  Synthetic oligonucleotide
ggggtgcgtcgagagatcgagaacggctcggtttaatcctattcgggtgcgtggc

SEQ ID NO: 257669 - DNA, 55 bp, Artificial
  Synthetic oligonucleotide
aacgtgcgctcagcccatcaatcgacctgattagcacgcactttcagcggtgaac

SEQ ID NO: 257670 - DNA, 55 bp, Artificial
  Synthetic oligonucleotide
gggtagggaaccgtatgtccaagaacagaatagtgagaggtgttcattacctgga

SEQ ID NO: 257671 - DNA, 55 bp, Artificial
  Synthetic oligonucleotide
taacgtggttccgctactgcgcctgacgggcgctcgaccgagtggactgagtgcg

SEQ ID NO: 257672 - DNA, 55 bp, Artificial
  Synthetic oligonucleotide
gggtcgtagtgaccagcaaatacgcactgccataacgtaagccattaccgatggt

SEQ ID NO: 257673 - DNA, 55 bp, Artificial
  Synthetic oligonucleotide
gggtctagcgcgatctcatgtatggagagcacgcgatcaatgctcctaaggtcgt

SEQ ID NO: 257674 - DNA, 52 bp, Artificial
  Synthetic oligonucleotide
gggtctggtcgttccggcgtggggtacggaacgccccgagtatagcctcagg

SEQ ID NO: 257675 - DNA, 56 bp, Artificial
  Synthetic oligonucleotide
cgggggagatttctattccccaatgacaatttgtcaagcaatcacttgacgttaaa

SEQ ID NO: 257676 - DNA, 55 bp, Artificial
  Synthetic oligonucleotide
ggtaaccaggttaagcctaggatgccggtgattaggcttgccatggcgagagtgc

SEQ ID NO: 257677 - DNA, 52 bp, Artificial
  Synthetic oligonucleotide
ggtaactggtatcacaaagccggggtaaccgggccaggctaacctatcggtc

SEQ ID NO: 257678 - DNA, 55 bp, Artificial
  Synthetic oligonucleotide
ggtaagcatcctacgagcactacggagacgataacgatcaccagccctacgacgg

SEQ ID NO: 257679 - DNA, 55 bp, Artificial
  Synthetic oligonucleotide
ggtagcggaaggtcagcagataattgcggcgtggctgggcataccagcgtgcggt

SEQ ID NO: 257680 - DNA, 54 bp, Artificial
  Synthetic oligonucleotide
ggtcaggagggattagaccgcttgcgggacgattattcccctaaatccggacta

SEQ ID NO: 257681 - DNA, 55 bp, Artificial
  Synthetic oligonucleotide
ggtcggtgtgtgtggtccaagcaatgcatggcgtgcgttttctgataacggcaca

SEQ ID NO: 257682 - DNA, 55 bp, Artificial
  Synthetic oligonucleotide
ggtctcggacatgcgcgcatcagcaatgggtaaaccgcaagtttaggcggtggca

SEQ ID NO: 257683 - DNA, 55 bp, Artificial
  Synthetic oligonucleotide
ggcctcgtatgccaggacgaaaacaggcagtacgtgggaattgaactcaaccccg

SEQ ID NO: 257684 - DNA, 55 bp, Artificial
  Synthetic oligonucleotide
ggcctcttggggagtaggaccggttcgggtactgcggctggcagttcgaattgtg

SEQ ID NO: 257685 - DNA, 55 bp, Artificial
  Synthetic oligonucleotide
ggcgacaatgaccattgagggaatgattggtgcgaccgatggcgtcactcaatcg

SEQ ID NO: 257686 - DNA, 58 bp, Artificial
  Synthetic oligonucleotide
cgggcggcgtgcttgctcacgtactgaaaccatccgacaaccccatcaataatccgac

SEQ ID NO: 257687 - DNA, 55 bp, Artificial
  Synthetic oligonucleotide
ggcgaccaaatggggcgtgggtcgagctatggcgcctgtgcatgatctgaaggga

SEQ ID NO: 257688 - DNA, 55 bp, Artificial
  Synthetic oligonucleotide
ggcgataacccctgaacagggatagttgtcgctatcaacccgtaccccacaggcc

SEQ ID NO: 257689 - DNA, 55 bp, Artificial
  Synthetic oligonucleotide
ggcgatcaaagcctaccattcgttcaccacaagaggaagtagcttatggcaacgg

SEQ ID NO: 257690 - DNA, 55 bp, Artificial
  Synthetic oligonucleotide
ggcgttgtcatggcaaatgtatcgatagtgcagatgggtgagcgttgtcgctcct

SEQ ID NO: 257691 - DNA, 55 bp, Artificial
  Synthetic oligonucleotide
ggcttggagagtctttccccgtagctgagaatctttcggcgaatccagcctggcg

SEQ ID NO: 257692 - DNA, 55 bp, Artificial
  Synthetic oligonucleotide
gggacaaggcgaatgttttgcacgctgtcgtttacagcagagaacgcaggtgaat

SEQ ID NO: 257693 - DNA, 55 bp, Artificial
  Synthetic oligonucleotide
gggaccacagaccgctagtctggaggcgaccatgtaaagaggtatgccagatgga

SEQ ID NO: 257694 - DNA, 55 bp, Artificial
  Synthetic oligonucleotide
gggaggcaggtcatggctttcagtacgacagggaaccgggagccactggcggata

SEQ ID NO: 257695 - DNA, 53 bp, Artificial
  Synthetic oligonucleotide
gggagtaatcgcccactcaatggggcgtaacctccccgcttctggggaacgaa

SEQ ID NO: 257696 - DNA, 55 bp, Artificial
  Synthetic oligonucleotide
gggagtggatcgcgccctaagcgtttcatgatgctggtaacacgcccctgggcac

SEQ ID NO: 257697 - DNA, 56 bp, Artificial
  Synthetic oligonucleotide
cggaagaccttggcatctcaacctttacccttggtgtcgtattagctgccataacc

SEQ ID NO: 257698 - DNA, 55 bp, Artificial
  Synthetic oligonucleotide
gggccgatcggaccagacgcaacgttgacgttcgatgtcgaactgatgggtatcc

SEQ ID NO: 257699 - DNA, 55 bp, Artificial
  Synthetic oligonucleotide
gggctgaatggccgcgaccgtaggaagaagccgctatgatgcagtgcacagcgga

SEQ ID NO: 257700 - DNA, 55 bp, Artificial
  Synthetic oligonucleotide
ggggagaaccggagagcttcgcattcacctgtgtcagcgcttgcgattgcgcgtc

SEQ ID NO: 257701 - DNA, 55 bp, Artificial
  Synthetic oligonucleotide
aagtgcgcccctagccccatagcgtcgccccttggcatcggagggcaacttcaat

SEQ ID NO: 257702 - DNA, 55 bp, Artificial
  Synthetic oligonucleotide
ggggcggcggttaggcttcgcttggcatgacttgcatgtaacgcatgcgtaacgc

SEQ ID NO: 257703 - DNA, 55 bp, Artificial
  Synthetic oligonucleotide
gtcgtgttccctaggctcatggtagttccgcgtgtaattcccgaagcttaacggc

SEQ ID NO: 257704 - DNA, 55 bp, Artificial
  Synthetic oligonucleotide
gtctccatccgcgctgtacgtgagtcacgtgtctgggagggcgcatgagtccaca

SEQ ID NO: 257705 - DNA, 55 bp, Artificial
  Synthetic oligonucleotide
gtctggtcagaataccagggcaacttgcatgactcagcccatcagtggcaaggcg

SEQ ID NO: 257706 - DNA, 55 bp, Artificial
  Synthetic oligonucleotide
gtcttgcgatgagcttctatttccccggcatggccgcgttaatcacgcgatcact

SEQ ID NO: 257707 - DNA, 55 bp, Artificial
  Synthetic oligonucleotide
gtcttggcgctcgtcagtacgaccgccgttgcttcacgcgcaacctacgcctttg

SEQ ID NO: 257708 - DNA, 56 bp, Artificial
  Synthetic oligonucleotide
cgctcgtaactgagtacccacgaccggctaggttcgcgcaaaaggccaacatgacc

SEQ ID NO: 257709 - DNA, 55 bp, Artificial
  Synthetic oligonucleotide
gtgaccgttcccaatgaatacttcttgacgtcgccgtgtgggtgatggatgccga

SEQ ID NO: 257710 - DNA, 55 bp, Artificial
  Synthetic oligonucleotide
gtgatatgagtagtttcgatccaaccgcaagtcgcgtggaccacacctgcatccg

SEQ ID NO: 257711 - DNA, 55 bp, Artificial
  Synthetic oligonucleotide
gtgcacgcggtgcactgccaatccccttgcaggcactccgcgttactcctagact

SEQ ID NO: 257712 - DNA, 55 bp, Artificial
  Synthetic oligonucleotide
gtgcacttgcaatctacggccaaggagcgtcgaaactcctctcatagcggtaccc

SEQ ID NO: 257713 - DNA, 55 bp, Artificial
  Synthetic oligonucleotide
taaattccggcggatatcgctcatggcaccccaagtctcgattgtgtgtcatggt

SEQ ID NO: 257714 - DNA, 55 bp, Artificial
  Synthetic oligonucleotide
gtggcccggaggcctgtggggtacgggttgatagcgacaactatccctgttcagg

SEQ ID NO: 257715 - DNA, 55 bp, Artificial
  Synthetic oligonucleotide
gtggctgcatggtcgctgctgcgtatatgccccaggtgaaaggattccccgaaac

SEQ ID NO: 257716 - DNA, 55 bp, Artificial
  Synthetic oligonucleotide
gtggtcggctgagatggcgagttcatgcggaccctctcgaacgacaaagcgcgac

SEQ ID NO: 257717 - DNA, 55 bp, Artificial
  Synthetic oligonucleotide
gtgtacgctccttcagtggaaggcgcctgatcccacatgggcaggcacgtgatgg

SEQ ID NO: 257718 - DNA, 55 bp, Artificial
  Synthetic oligonucleotide
gtgtgacgctttctagttagcaccacacgctccagaccgcttcccgatcgttccg

SEQ ID NO: 257719 - DNA, 60 bp, Artificial
  Synthetic oligonucleotide
cgcgtttgagaccagcagctatatgacgagcccgacgatccccaccaaactctgaaatat

SEQ ID NO: 257720 - DNA, 55 bp, Artificial
  Synthetic oligonucleotide
gttgcgatgtagagcccacgtacaccggcaccggaccatggtcatccggaggttc

SEQ ID NO: 257721 - DNA, 55 bp, Artificial
  Synthetic oligonucleotide
gttgcgtaacgccatgacttgcattgccgcaacgcctagcatgccaacggcgaga

SEQ ID NO: 257722 - DNA, 55 bp, Artificial
  Synthetic oligonucleotide
gtttcggtaagtacgctgcatcccaacgatcgcataagtgcctaaaatgatagcg

SEQ ID NO: 257723 - DNA, 55 bp, Artificial
  Synthetic oligonucleotide
gttttgccagtggtcgtcggttgcgtgatggtctacttcagcgcgatcagcctct

SEQ ID NO: 257724 - DNA, 55 bp, Artificial
  Synthetic oligonucleotide
taaccgcaaacgacctcgactagacccctggcaattcggcccacctggcgtgtgc

SEQ ID NO: 257725 - DNA, 55 bp, Artificial
  Synthetic oligonucleotide
ggtgcttagtaagcaggcgcttaatataagtctccgcagactgcataacctgggt

SEQ ID NO: 257726 - DNA, 55 bp, Artificial
  Synthetic oligonucleotide
ggtgcttcgcgccaatacccacaggcttcgcggataccaggataccagtccacac

SEQ ID NO: 257727 - DNA, 55 bp, Artificial
  Synthetic oligonucleotide
ggtgttgttagactcgtaggatggttgcattcgacgctaccgaagcactgacgcc

SEQ ID NO: 257728 - DNA, 55 bp, Artificial
  Synthetic oligonucleotide
ggttagttcctgcgcctggtacgcaaacgtggaaggagtgttgagatgctagtcg

SEQ ID NO: 257729 - DNA, 51 bp, Artificial
  Synthetic oligonucleotide
aacgttgtgtcgtggggtcgtagatccgggtattcaccgccggggcctggt

SEQ ID NO: 257730 - DNA, 60 bp, Artificial
  Synthetic oligonucleotide
cgcaacgcctgcatcgccggtaacgaccgtgcttgtcgcatgtacgaggtcgaatatggc

SEQ ID NO: 257731 - DNA, 60 bp, Artificial
  Synthetic oligonucleotide
atggaaagtgatatcgcagtagccttcatggcgcgatagacgcactaatgtgcccatgtt

SEQ ID NO: 257732 - DNA, 55 bp, Artificial
  Synthetic oligonucleotide
gtaagaccggaatcaataccgccgcccaaagtgatcgcgtgattaacgcggccat

SEQ ID NO: 257733 - DNA, 55 bp, Artificial
  Synthetic oligonucleotide
gtaccccgccccaagtcaacccctggcagctacgcgaattcaccgggctgtgcaa

SEQ ID NO: 257734 - DNA, 55 bp, Artificial
  Synthetic oligonucleotide
gtactatctgtgccgattcctgatagcctttgatctcccacgatggggtttcccc

SEQ ID NO: 257735 - DNA, 55 bp, Artificial
  Synthetic oligonucleotide
gtactgccatgcggcctcggaagctatgtaggaaccacagaccgctagtctggag

SEQ ID NO: 257736 - DNA, 55 bp, Artificial
  Synthetic oligonucleotide
gtcaaattagcccagctgcggactgagctagatgactgaaggcgtaacgagcatg

SEQ ID NO: 257737 - DNA, 55 bp, Artificial
  Synthetic oligonucleotide
gtcaacaagccgggagagctctggctgcgaaagaaagacgcgtactacgccgagc

SEQ ID NO: 257738 - DNA, 55 bp, Artificial
  Synthetic oligonucleotide
gtccagagggccttaggcatttgctttgctcccatagttaccggtgttgagttgc

SEQ ID NO: 257739 - DNA, 55 bp, Artificial
  Synthetic oligonucleotide
gtcgagcgtccgcgtcaagttgccctgagcctttgaagtagctccttgactgcgc

SEQ ID NO: 257740 - DNA, 55 bp, Artificial
  Synthetic oligonucleotide
gtcgattacacgcagtagtagttccacgagatgttccacagaggagaggtgtttt

SEQ ID NO: 257741 - DNA, 55 bp, Artificial
  Synthetic oligonucleotide
gtcgcagcagatcggtcttttggtgggttggcctgttagcgttcctggcgggtcc

SEQ ID NO: 257742 - DNA, 60 bp, Artificial
  Synthetic oligonucleotide
atgccattccttggcagtagcaggacaatcacgaacagtgagggtcaaagcgagaccagc

SEQ ID NO: 257743 - DNA, 55 bp, Artificial
  Synthetic oligonucleotide
gtcgtccacgtcctgagcttgctaggaatccggagtgtgttgttcttcaggggtc

SEQ ID NO: 257744 - DNA, 55 bp, Artificial
  Synthetic oligonucleotide
gccgggcgtcaagcaacctctgaacaacgcgtggcgttgcgagcgaacttgggat

SEQ ID NO: 257745 - DNA, 55 bp, Artificial
  Synthetic oligonucleotide
gccggtgattcgcgtgccgcgatcaagcagcactgtgtgtccgttcgccgaatac

SEQ ID NO: 257746 - DNA, 55 bp, Artificial
  Synthetic oligonucleotide
aatgtccgggcaggcagggatgatcatgcggcacaacgaaatccataagcgcaga

SEQ ID NO: 257747 - DNA, 55 bp, Artificial
  Synthetic oligonucleotide
gcctgcgatccaacgagcgtgagtgcggtacgaagcaacaaagcggccattgctg

SEQ ID NO: 257748 - DNA, 55 bp, Artificial
  Synthetic oligonucleotide
gcgaagcatcggccgcgagaggcctgtcaggtgcatcaggcgatcattcgtgatg

SEQ ID NO: 257749 - DNA, 55 bp, Artificial
  Synthetic oligonucleotide
gcgacgaagaggaacgattgtcggaattcatgctcatcggtaagcgcgccacacc

SEQ ID NO: 257750 - DNA, 55 bp, Artificial
  Synthetic oligonucleotide
gcgagataatcatcccaatagcacgacagctcgtactcagagaataatcgcgacg

SEQ ID NO: 257751 - DNA, 55 bp, Artificial
  Synthetic oligonucleotide
gcgaggcagctggcgttaaaccgccaatgaatgggaaccccgatggaatcgcagg

SEQ ID NO: 257752 - DNA, 55 bp, Artificial
  Synthetic oligonucleotide
gcgatacgtcgcgttctcgtgccattgggtttatggagtggggttccctatgagg

SEQ ID NO: 257753 - DNA, 60 bp, Artificial
  Synthetic oligonucleotide
atgaaccaaatcatggacgcctgtaacagcaatgcgatacgaatcacgcttgagtggcgt

SEQ ID NO: 257754 - DNA, 55 bp, Artificial
  Synthetic oligonucleotide
gcgcaagacattgtccgggatccagttgataaatccgaacactgaatgcagcacg

SEQ ID NO: 257755 - DNA, 55 bp, Artificial
  Synthetic oligonucleotide
gcgcctactgcgtctgacttgttagcgttatgcgcccctggacgaatgacgcctc

SEQ ID NO: 257756 - DNA, 55 bp, Artificial
  Synthetic oligonucleotide
gcgcgaacaggtggtttgcctgaactgagcgttggattggttaacgggcgtggac

SEQ ID NO: 257757 - DNA, 55 bp, Artificial
  Synthetic oligonucleotide
tagtgatgctgtgacaatgttgcacatggacgctactctttcgacacgccgccac

SEQ ID NO: 257758 - DNA, 55 bp, Artificial
  Synthetic oligonucleotide
gcgcggcgactgagactgagagtcaaagccgggccaagaaagcaaaaccggggtc

SEQ ID NO: 257759 - DNA, 55 bp, Artificial
  Synthetic oligonucleotide
gcgctagtgcgtgtctccggtgccgcatacgtacctatcaccttgcgtgtgatgc

SEQ ID NO: 257760 - DNA, 55 bp, Artificial
  Synthetic oligonucleotide
gcgctccatatcaacctcctacgctgttggcagattccgagttcacgcgatagct

SEQ ID NO: 257761 - DNA, 55 bp, Artificial
  Synthetic oligonucleotide
gcggagagcacgcacttgaacgattccggttacggagagccacgggcgccattga

SEQ ID NO: 257762 - DNA, 55 bp, Artificial
  Synthetic oligonucleotide
gcacccaactttcatgcctgatgcccttcgtcgttgccgccttggcgacttgcca

SEQ ID NO: 257763 - DNA, 55 bp, Artificial
  Synthetic oligonucleotide
gcacgcaaggatgtctgcatgccgctcgatacacgctagcgcaaattcagtccgc

SEQ ID NO: 257764 - DNA, 60 bp, Artificial
  Synthetic oligonucleotide
atcgtatattgacaaaacttcgcatttataagatgcaagagtttgtgtcacgatgatctg

SEQ ID NO: 257765 - DNA, 55 bp, Artificial
  Synthetic oligonucleotide
gcacgcagcggtcgtttccttttcccacggtgacgcatgaatttccacgaatacc

SEQ ID NO: 257766 - DNA, 55 bp, Artificial
  Synthetic oligonucleotide
gcactctgtgcccgaagccctgaaaagtgctgggaaaccgtgcttttcgccctgt

SEQ ID NO: 257767 - DNA, 55 bp, Artificial
  Synthetic oligonucleotide
gcagacgcagcgaggagtactagccactcagctgacctccggtcttggccaagtc

SEQ ID NO: 257768 - DNA, 55 bp, Artificial
  Synthetic oligonucleotide
gcagcgaactcggtcacacattgcaacttttcctggctgcatttgtgtcgtgcgt

SEQ ID NO: 257769 - DNA, 55 bp, Artificial
  Synthetic oligonucleotide
gcagtgagggtgtttgactgcatgggtcaagaatcgttgcggagttgcgcatgag

SEQ ID NO: 257770 - DNA, 55 bp, Artificial
  Synthetic oligonucleotide
gcagttcagtagcccctacggatctgtagcagatagctacaaagcacgtccgacc

SEQ ID NO: 257771 - DNA, 55 bp, Artificial
  Synthetic oligonucleotide
gcatcgtcggcgtaacgaatcaccagtcggtattcggtatcactgagctttgtgc

SEQ ID NO: 257772 - DNA, 55 bp, Artificial
  Synthetic oligonucleotide
gcatgcgccaaacaagtgtgatctaagtcacatataagccgtccccgcatcacgc

SEQ ID NO: 257773 - DNA, 55 bp, Artificial
  Synthetic oligonucleotide
agcgcacgctgatttgctgcgtcgcgtttggtgcgttcttcgtctgggtagcggt

SEQ ID NO: 257774 - DNA, 55 bp, Artificial
  Synthetic oligonucleotide
gccaattccaggtcctgatcctcgttatgtccacgcgcctcgcacagcacgtgcg

SEQ ID NO: 257775 - DNA, 60 bp, Artificial
  Synthetic oligonucleotide
atcgagcaaacaacgcgctcttgtatttgcggcggcagatcaaggaagggcatcgtgatt

SEQ ID NO: 257776 - DNA, 52 bp, Artificial
  Synthetic oligonucleotide
gccacccttaccccaaacacggcccgtaagccctttccagccttcagggaga

SEQ ID NO: 257777 - DNA, 55 bp, Artificial
  Synthetic oligonucleotide
gccatcttgcggtacgaccttgcaagcggcgcactgagtgatgtttcgatagacg

SEQ ID NO: 257778 - DNA, 55 bp, Artificial
  Synthetic oligonucleotide
gcccacgcaaagcagccgacaggaggacgcaacagccaaccacgcatcgatgcat

SEQ ID NO: 257779 - DNA, 55 bp, Artificial
  Synthetic oligonucleotide
gccctgttgactcagtgtgacatcgaatacgctacggtacttgctgctggttggg

SEQ ID NO: 257780 - DNA, 55 bp, Artificial
  Synthetic oligonucleotide
gccgcatggtgagatcactctggatgtgcccgtggttgagtggtgcgccgtttgc

SEQ ID NO: 257781 - DNA, 55 bp, Artificial
  Synthetic oligonucleotide
gccggaactttgacttcggttgccatgcggggagcgtcctagatatctcgtcggt

SEQ ID NO: 257782 - DNA, 55 bp, Artificial
  Synthetic oligonucleotide
tagacattcgatacctcttaagtagtgcttaccgattaggtcgaagattagggcg

SEQ ID NO: 257783 - DNA, 55 bp, Artificial
  Synthetic oligonucleotide
ggaaacccggataatgcacaaaagccggccgggcacgctccaaccagagcactcc

SEQ ID NO: 257784 - DNA, 55 bp, Artificial
  Synthetic oligonucleotide
aacgcgcaaacattccccatcaacacgaatctgtaactctacagcaggcgttttg

SEQ ID NO: 257785 - DNA, 55 bp, Artificial
  Synthetic oligonucleotide
ggactatacgaaggtctagtgtcttggcgttttcgcaggcattgcgttcgaagcg

SEQ ID NO: 257786 - DNA, 60 bp, Artificial
  Synthetic oligonucleotide
atcataggaatagcacccacctcgtgctacgtcttgtggcgtgatcccatattgacgtag

SEQ ID NO: 257787 - DNA, 55 bp, Artificial
  Synthetic oligonucleotide
ggagaatccaatacttgggatctcagtagctggaattgttgcaaagatgggaccg

SEQ ID NO: 257788 - DNA, 55 bp, Artificial
  Synthetic oligonucleotide
ggagaggtgtggcggcgtgcgggaaccgtcatgtacaacgcgtacatggcgctac

SEQ ID NO: 257789 - DNA, 55 bp, Artificial
  Synthetic oligonucleotide
ggagagtccgcttcacaatgtgatgacgatcatgaaccgggacgcatgacacggg

SEQ ID NO: 257790 - DNA, 55 bp, Artificial
  Synthetic oligonucleotide
ggagctgcactgcagggaccaaggcccgcagatacgtgtatacatccatgttggg

SEQ ID NO: 257791 - DNA, 55 bp, Artificial
  Synthetic oligonucleotide
tactcgattcgcccgcttcctagtttcgcttcgcaagtccacccaagacgcgccg

SEQ ID NO: 257792 - DNA, 55 bp, Artificial
  Synthetic oligonucleotide
ggatgaaatacgtgtgatgtgtgtgctcgattggataggaataccatgcgaggtg

SEQ ID NO: 257793 - DNA, 55 bp, Artificial
  Synthetic oligonucleotide
tactcatcagcatctgtcacaagaagattcaagatgcgcgcgttgttcgcaatcc

SEQ ID NO: 257794 - DNA, 55 bp, Artificial
  Synthetic oligonucleotide
ggatggcgggtactgatcacttggggaaagctccggacggacttatctgtcgtca

SEQ ID NO: 257795 - DNA, 55 bp, Artificial
  Synthetic oligonucleotide
tactcaagcgcgatcgtatacatgcggaccaagcacgtggcgaggggaccgcctc

SEQ ID NO: 257796 - DNA, 55 bp, Artificial
  Synthetic oligonucleotide
ggcacagatcactgactaccaagtccacgcacgattgcacacctacgccggaccg

SEQ ID NO: 257797 - DNA, 56 bp, Artificial
  Synthetic oligonucleotide
atattccgtaaagatccaaactacgcagtaaagttgcttaacaacattcttgaaga

SEQ ID NO: 257798 - DNA, 55 bp, Artificial
  Synthetic oligonucleotide
ggcacggcgtgtaggccgattcaaggaccatctgcggaaactgtcctaaaccgcc

SEQ ID NO: 257799 - DNA, 55 bp, Artificial
  Synthetic oligonucleotide
ggcagtagcaggacaatcacgaacagtgagggtcaaagcgagaccagcacccgtt

SEQ ID NO: 257800 - DNA, 55 bp, Artificial
  Synthetic oligonucleotide
ggcattgcttgcctgccactgctccaatgtgcgacgaatttggtcctcatcgaca

SEQ ID NO: 257801 - DNA, 55 bp, Artificial
  Synthetic oligonucleotide
tacgaagggtcgatgatagcctagtgtcctgtccagcgactgaaaccggccgccg

SEQ ID NO: 257802 - DNA, 55 bp, Artificial
  Synthetic oligonucleotide
ggcccgctatgatccatacaggtatggagtgaccctggaatcccatgaacgatgc

SEQ ID NO: 257803 - DNA, 55 bp, Artificial
  Synthetic oligonucleotide
gcggagtcttgttctacacgggtgcttccccaatcggttaagaatgggtgggcac

SEQ ID NO: 257804 - DNA, 55 bp, Artificial
  Synthetic oligonucleotide
gcggctgtaaggatgcgatcacgtgcgtcttgggacgggtccatgtgcaactccg

SEQ ID NO: 257805 - DNA, 55 bp, Artificial
  Synthetic oligonucleotide
gcgggttagcaattgctccacgtggtactggagctccatcgccgatagtgtctcc

SEQ ID NO: 257806 - DNA, 55 bp, Artificial
  Synthetic oligonucleotide
gcggtacgaccttgcaagcggcgcactgagtgatgtttcgatagacgaatgagcg

SEQ ID NO: 257807 - DNA, 55 bp, Artificial
  Synthetic oligonucleotide
gcgtcagattccccgtgaagcgccaggtatcaccaatcgtggggattcgtatacc

SEQ ID NO: 257808 - DNA, 60 bp, Artificial
  Synthetic oligonucleotide
ataccccccatcaccacgctcacgatgatcctgtagatcgatacgaagggcatcagacac

SEQ ID NO: 257809 - DNA, 55 bp, Artificial
  Synthetic oligonucleotide
gcgtgattaacagcgaatcggtgcgagtgcctctggtgccagtttcgggcatcgc

SEQ ID NO: 257810 - DNA, 55 bp, Artificial
  Synthetic oligonucleotide
gcgtggatacccctgtgaatacgccgaaaacctagttcctgacgcgagccactag

SEQ ID NO: 257811 - DNA, 55 bp, Artificial
  Synthetic oligonucleotide
gctaaccaagggcgcgagctgtaatagtggcgcaatgcaatactctgctcctccg

SEQ ID NO: 257812 - DNA, 55 bp, Artificial
  Synthetic oligonucleotide
gctagggccccgcgccctcgactaattgctttgggctctggactcgtctatccct

SEQ ID NO: 257813 - DNA, 55 bp, Artificial
  Synthetic oligonucleotide
tagcgcagctgtgcgacttcagcgtgtggcttcgccccgtaccctcacccctatt

SEQ ID NO: 257814 - DNA, 55 bp, Artificial
  Synthetic oligonucleotide
aatgagagcaggcctctcaacatgccgggcttactcacgctgcatccctcttgac

SEQ ID NO: 257815 - DNA, 55 bp, Artificial
  Synthetic oligonucleotide
gctcgggtcacgcgaggtagcgcttatacgattcagtagtgcggctgtaccccgc

SEQ ID NO: 257816 - DNA, 55 bp, Artificial
  Synthetic oligonucleotide
gctctgtcgtattttgaagtaaggattgcaacgttctagcacgagtggtgcgacc

SEQ ID NO: 257817 - DNA, 55 bp, Artificial
  Synthetic oligonucleotide
gctgatcgggaaaccgccaatgctgacagtgatcggcttggaacggaattctccc

SEQ ID NO: 257818 - DNA, 55 bp, Artificial
  Synthetic oligonucleotide
aatctcccaagctcgctctcgaaaacggtttccccagccgagttgcagccaagct

SEQ ID NO: 257819 - DNA, 54 bp, Artificial
  Synthetic oligonucleotide
agttgaagtaggggacggtttggcccttttcatccctgatgcctggaggatacg

SEQ ID NO: 257820 - DNA, 55 bp, Artificial
  Synthetic oligonucleotide
gctgttaggtgcggcatgaggtgaaaggctcgcgcacgagtcactagaccagaac

SEQ ID NO: 257821 - DNA, 55 bp, Artificial
  Synthetic oligonucleotide
gcttgcgaacatcggaggaatcttgttcaccaacgcaagcaaaacgatggacgcc

SEQ ID NO: 257822 - DNA, 55 bp, Artificial
  Synthetic oligonucleotide
cccaggaatgcgagtagaggtctttccgcgaggtgaggctgcggaaccgcaagag

SEQ ID NO: 257823 - DNA, 55 bp, Artificial
  Synthetic oligonucleotide
tgcattctctgtagcgcttagtcgacgcacgaaacgggtgatccgtcagaacgtg

SEQ ID NO: 257824 - DNA, 55 bp, Artificial
  Synthetic oligonucleotide
cccacgcagatgtcacatccgtgcgctagtctgtagccaggtcgcaacagggagt

SEQ ID NO: 257825 - DNA, 55 bp, Artificial
  Synthetic oligonucleotide
ttcatctttagactcctagggtgaaatcacacaggcagtccctgtgacctcagga

SEQ ID NO: 257826 - DNA, 55 bp, Artificial
  Synthetic oligonucleotide
cccaacgtcgcacatttcacacatctaggtggcatgctgtttggctggttactga

SEQ ID NO: 257827 - DNA, 55 bp, Artificial
  Synthetic oligonucleotide
cccaacccatcttgggctgcgtcacgtttcggctcccttgtgcacgctcgatacc

SEQ ID NO: 257828 - DNA, 55 bp, Artificial
  Synthetic oligonucleotide
ccatgcgctgagtgcgccataccatgccttcacttaccgcctgagtgtggaagtc

SEQ ID NO: 257829 - DNA, 55 bp, Artificial
  Synthetic oligonucleotide
ccatgaacaccttcatggccgcaatgtgagcgcccgtcatcccatcagagcctcg

SEQ ID NO: 257830 - DNA, 60 bp, Artificial
  Synthetic oligonucleotide
agtgccagaaaaccagatagcacaatgcaaatgcgggacacctcgacgctgccactccgt

SEQ ID NO: 257831 - DNA, 55 bp, Artificial
  Synthetic oligonucleotide
ccatctgtatcccaattccacagcgtataaccatgctcacgtaagcaatcataag

SEQ ID NO: 257832 - DNA, 55 bp, Artificial
  Synthetic oligonucleotide
tgcgaatccatgcggtacagcacaaccatttcgaagtccggagcggccatggcgc

SEQ ID NO: 257833 - DNA, 55 bp, Artificial
  Synthetic oligonucleotide
ccatcccaaattaccgcatcacctggcgggtgcgggatctctccatacgaggcgc

SEQ ID NO: 257834 - DNA, 55 bp, Artificial
  Synthetic oligonucleotide
atgccgctacactcgcgggcaaacccaggagagtcccgacatgtcctcgatcgtc

SEQ ID NO: 257835 - DNA, 55 bp, Artificial
  Synthetic oligonucleotide
atgcgcacatcgttgcactcagccaacacccggcagcgttagggaccgtcgctgt

SEQ ID NO: 257836 - DNA, 55 bp, Artificial
  Synthetic oligonucleotide
ccatataagctagacgatttaccgcatcttttgaccggaaggggttggacggtca

SEQ ID NO: 257837 - DNA, 55 bp, Artificial
  Synthetic oligonucleotide
atgcgcagtggcggtgggaggggcgcagcccctctatcgagcttctaacgttgtc

SEQ ID NO: 257838 - DNA, 55 bp, Artificial
  Synthetic oligonucleotide
atgcgcctgccatcgacgcacgtgtaggagcgcacttgtgcgcgaaggagcgtta

SEQ ID NO: 257839 - DNA, 55 bp, Artificial
  Synthetic oligonucleotide
ccagctacgccacactggcaaagttgaccggcaagtcccgggcaacgatcactcg

SEQ ID NO: 257840 - DNA, 55 bp, Artificial
  Synthetic oligonucleotide
ccagcgcaatcaccacacacacgatgaaagttttcacgttcacgtcattccctcg

SEQ ID NO: 257841 - DNA, 59 bp, Artificial
  Synthetic oligonucleotide
cgatgggctaccatgtgacgtaactcgggagttactccgcgagcgtttgcaggggatga

SEQ ID NO: 257842 - DNA, 54 bp, Artificial
  Synthetic oligonucleotide
agtaggggacggtttggcccttttcatccctgatgcctggaggatacggtccca

SEQ ID NO: 257843 - DNA, 55 bp, Artificial
  Synthetic oligonucleotide
atggaagacgcctagcaggtagtcgtaggcgcggcgtggctcgatgcctagagtg

SEQ ID NO: 257844 - DNA, 54 bp, Artificial
  Synthetic oligonucleotide
ccacggccagtatagttgagaatctttacggtgtaggaaacataccccttgtag

SEQ ID NO: 257845 - DNA, 55 bp, Artificial
  Synthetic oligonucleotide
acgctttatttcggcaagaacagtcgccgatggggtcttaagctgtatagcaaag

SEQ ID NO: 257846 - DNA, 55 bp, Artificial
  Synthetic oligonucleotide
ccaagtctaagttcatgagtgttgccaaggccatcccgatggttatcgttaaagc

SEQ ID NO: 257847 - DNA, 55 bp, Artificial
  Synthetic oligonucleotide
tgcgtagttacatgatgccgcgcatgcaaccaaaacgcgagtacggataactcga

SEQ ID NO: 257848 - DNA, 55 bp, Artificial
  Synthetic oligonucleotide
ccaagcagtcaccgaacccacattattttgacgggacgctcgcaacatctgtccc

SEQ ID NO: 257849 - DNA, 55 bp, Artificial
  Synthetic oligonucleotide
tgcgtcctgatgtaaaggtgagcggtggcgggtgtgactctgttccggtatgtac

SEQ ID NO: 257850 - DNA, 55 bp, Artificial
  Synthetic oligonucleotide
ccaactgatagagatcccggagagtgcgctaatgtccccactcctactggcacat

SEQ ID NO: 257851 - DNA, 55 bp, Artificial
  Synthetic oligonucleotide
aaatcgtggatggactacagcagtccgccgaacaagtttctcaccgccttgacgg

SEQ ID NO: 257852 - DNA, 55 bp, Artificial
  Synthetic oligonucleotide
atgtaagccgcgccgccacgcgtgcatccacgttgatcatctgccctgccaggat

SEQ ID NO: 257853 - DNA, 60 bp, Artificial
  Synthetic oligonucleotide
aggtctttccactgcataggggagtgcccggcatagaccttgtagccatgcagcgcccaa

SEQ ID NO: 257854 - DNA, 55 bp, Artificial
  Synthetic oligonucleotide
ccctctaatcgttacgactccggaagaaattgagggcttccatatcgttcgagcc

SEQ ID NO: 257855 - DNA, 55 bp, Artificial
  Synthetic oligonucleotide
ccctcgtgtagtggatcaccgatcctttgcggtcaggcccgcatccaatggcgca

SEQ ID NO: 257856 - DNA, 55 bp, Artificial
  Synthetic oligonucleotide
ccctcctgcaaagagcaacaacgggtcagcagggaatgattaaccggacttcgag

SEQ ID NO: 257857 - DNA, 55 bp, Artificial
  Synthetic oligonucleotide
cccgtgttggagcggccacctagcttcaacaccgtaataagatcgccctcgcgtg

SEQ ID NO: 257858 - DNA, 55 bp, Artificial
  Synthetic oligonucleotide
cccggtttctggactatagtgcgcggacctgttggggaatcagggcttcacacct

SEQ ID NO: 257859 - DNA, 54 bp, Artificial
  Synthetic oligonucleotide
cccggtgaccaatccgaaaggttggcccaggaaagctctcagaacgctcggtag

SEQ ID NO: 257860 - DNA, 55 bp, Artificial
  Synthetic oligonucleotide
cccggaattcatcaagaatctgttgtgcccaaatgctacccgtcagcgcacgatg

SEQ ID NO: 257861 - DNA, 55 bp, Artificial
  Synthetic oligonucleotide
ttcttggtaacccgaagcgagggtggctggtactgcgaccagagcgccacgtacc

SEQ ID NO: 257862 - DNA, 55 bp, Artificial
  Synthetic oligonucleotide
atcggaatacggctcatcggtcacgtcgctattgacgaatcggaaagcgccctgc

SEQ ID NO: 257863 - DNA, 55 bp, Artificial
  Synthetic oligonucleotide
tgatcctcacgaacggacatgaggaactctgtattgcgacggacagccccaggag

SEQ ID NO: 257864 - DNA, 49 bp, Artificial
  Synthetic oligonucleotide
aggggggggcgaattcacgaagaggggggggcgaattcacggggataag

SEQ ID NO: 257865 - DNA, 55 bp, Artificial
  Synthetic oligonucleotide
ttcgcagccgctctgagttgagcacagcagcgtgcaaaaggtgccgtatccagta

SEQ ID NO: 257866 - DNA, 55 bp, Artificial
  Synthetic oligonucleotide
cccgacgcctcctacgccgaatggatttattgacgcgcgaccaagttgacaccgt

SEQ ID NO: 257867 - DNA, 55 bp, Artificial
  Synthetic oligonucleotide
cccgaccattgagggctgcgggcgatacaccaccgtcaaatacagttcgttgacc

SEQ ID NO: 257868 - DNA, 55 bp, Artificial
  Synthetic oligonucleotide
atctggaatgctttcaagggattacctgtactcagacgccgtccgaaggtggctg

SEQ ID NO: 257869 - DNA, 55 bp, Artificial
  Synthetic oligonucleotide
cccctgcagaattgaacccggcgtatggggaacgttcacggaggtgatagcggcc

SEQ ID NO: 257870 - DNA, 55 bp, Artificial
  Synthetic oligonucleotide
ttcgaggggctgcggtcgtgggcataccgcgcacgaaaacagttcgatgacgtgg

SEQ ID NO: 257871 - DNA, 55 bp, Artificial
  Synthetic oligonucleotide
cccctctaaatagagtccgcagagactggcgcgcacagccattaaaaccctgcat

SEQ ID NO: 257872 - DNA, 55 bp, Artificial
  Synthetic oligonucleotide
cccctcaccgtgtatccactcaccgggatagctcggaccccgcgtgcatgcttta

SEQ ID NO: 257873 - DNA, 54 bp, Artificial
  Synthetic oligonucleotide
cccctactcgctcgtaactgagtacccacgaccggctaggttcgcgcaaaaggc

SEQ ID NO: 257874 - DNA, 55 bp, Artificial
  Synthetic oligonucleotide
atgacagaacggtgctgaacaatactattgatagattcctctcggcttatagagg

SEQ ID NO: 257875 - DNA, 60 bp, Artificial
  Synthetic oligonucleotide
aggcgtgcttgggaaaagcgcatgctacgggctggtatgatccggcttcattgggtgact

SEQ ID NO: 257876 - DNA, 54 bp, Artificial
  Synthetic oligonucleotide
ccccggatagctcattccggggcttaaccgcactttccgttccgttgcgcctca

SEQ ID NO: 257877 - DNA, 55 bp, Artificial
  Synthetic oligonucleotide
atgacgtaacagcccgggaggagccgtagctaatatctcacctagtggggtatgc

SEQ ID NO: 257878 - DNA, 55 bp, Artificial
  Synthetic oligonucleotide
ttcgaagtggttggctgccggcgggctctgacagctgaaggtgctggttagaccg

SEQ ID NO: 257879 - DNA, 55 bp, Artificial
  Synthetic oligonucleotide
cccattatgcaggccttcgaacatcggtcaagcacttcgttcaaagccgctgacc

SEQ ID NO: 257880 - DNA, 55 bp, Artificial
  Synthetic oligonucleotide
atgcacaccgcgcgtggaaagcgatgggaacttggtgtggacaagtggccgcgag

SEQ ID NO: 257881 - DNA, 55 bp, Artificial
  Synthetic oligonucleotide
atgcaccgacccgggtgcaccggacgcagctcccttgtagcgcatctgcgattcg

SEQ ID NO: 257882 - DNA, 55 bp, Artificial
  Synthetic oligonucleotide
tgcaggcattcttcggccagtaaccaatcaagaagcggcctgccgtgggagccgc

SEQ ID NO: 257883 - DNA, 55 bp, Artificial
  Synthetic oligonucleotide
cccaggcttgtgtccgccaaggggtgtaaccagttcatcgatccatcgaacatgc

SEQ ID NO: 257884 - DNA, 55 bp, Artificial
  Synthetic oligonucleotide
caagagcgggtgtcagcacgtccgatgattgagcgccgcaaagcagcgcgatcca

SEQ ID NO: 257885 - DNA, 55 bp, Artificial
  Synthetic oligonucleotide
agattcacgcggctctcacccatacctgcctccgcatctaaatgttcaacgcgga

SEQ ID NO: 257886 - DNA, 60 bp, Artificial
  Synthetic oligonucleotide
aggcactccgcgttactcctagacttgatccatgccatctgaccagacccgcgtcaatct

SEQ ID NO: 257887 - DNA, 55 bp, Artificial
  Synthetic oligonucleotide
caagcgcagatacgctatgacgctatttcgattggagacccttgtaatgcatgcc

SEQ ID NO: 257888 - DNA, 55 bp, Artificial
  Synthetic oligonucleotide
acgtccaccccacgcgccgaacgtactgacacaaccaccgcgtctaccgcatctt

SEQ ID NO: 257889 - DNA, 55 bp, Artificial
  Synthetic oligonucleotide
tgtagcaccgactgcgaggtttgcgcggctgcctgttgcaccgattgccgatagg

SEQ ID NO: 257890 - DNA, 55 bp, Artificial
  Synthetic oligonucleotide
cagcatggtcgcgtcatcgacggccctgtcgggtggttccagtacctcagcaaac

SEQ ID NO: 257891 - DNA, 55 bp, Artificial
  Synthetic oligonucleotide
cagcagccttcaacccgatcaactaccttaagggtacgttaggaaacttgatctc

SEQ ID NO: 257892 - DNA, 55 bp, Artificial
  Synthetic oligonucleotide
caagtgctagaccgtgggcaagcgtgagggcacttgtgggatttgtgagcaccac

SEQ ID NO: 257893 - DNA, 55 bp, Artificial
  Synthetic oligonucleotide
caagtgtggccgatcgggttggaagatcgttgcgatgacgcaaccgctgcaacga

SEQ ID NO: 257894 - DNA, 55 bp, Artificial
  Synthetic oligonucleotide
cagaacttgatacgggtgcggtacagcgatcgattcattgggtcacctcagcagg

SEQ ID NO: 257895 - DNA, 55 bp, Artificial
  Synthetic oligonucleotide
cacgtgaatcccggtccgatggggagcctgcaggtcaggcgctagcacccggaga

SEQ ID NO: 257896 - DNA, 55 bp, Artificial
  Synthetic oligonucleotide
cacgtcagcgcaaccgccgtacgaccaaagtactaccgcagattcgtcctgtgcc

SEQ ID NO: 257897 - DNA, 60 bp, Artificial
  Synthetic oligonucleotide
agcgtgtgtgggccgctcactgcgcgcaaggccacgagaattgacgactaggcagggtca

SEQ ID NO: 257898 - DNA, 55 bp, Artificial
  Synthetic oligonucleotide
cacgtatcatgcagccggtttcctacccatgaggtcgccctccgatgtttccccg

SEQ ID NO: 257899 - DNA, 55 bp, Artificial
  Synthetic oligonucleotide
caataaatgcatcacgccttaccgcttgcttagccaccattgaggcaccatccca

SEQ ID NO: 257900 - DNA, 55 bp, Artificial
  Synthetic oligonucleotide
ttaatccccagggcagcgtaatttcgagccacgatcgccggctgattaccggcat

SEQ ID NO: 257901 - DNA, 55 bp, Artificial
  Synthetic oligonucleotide
cacgaactgaggggagtttggctcgaagggcggtgcgtttaggggattgctcttg

SEQ ID NO: 257902 - DNA, 54 bp, Artificial
  Synthetic oligonucleotide
caccgcttggcctgttccccatactccgcaatatcctttccctctcccgtcggg

SEQ ID NO: 257903 - DNA, 55 bp, Artificial
  Synthetic oligonucleotide
caccgcagtaaccgtggatcaaggtgcgtcgaagtgtcttgtgcgtcatgcgcgc

SEQ ID NO: 257904 - DNA, 55 bp, Artificial
  Synthetic oligonucleotide
cacccagccacaggcttatgcggcgtgccgtgctgagctttcttcctacatcgcc

SEQ ID NO: 257905 - DNA, 55 bp, Artificial
  Synthetic oligonucleotide
tgtccactcaatcgggaccttggataaacgaagtagccaggcaaaaacgagtgcc

SEQ ID NO: 257906 - DNA, 55 bp, Artificial
  Synthetic oligonucleotide
caccaggccactcacagcgcgcttgtagggattggcgttgttctgcacgcagagg

SEQ ID NO: 257907 - DNA, 55 bp, Artificial
  Synthetic oligonucleotide
caccacgctcacgatgatcctgtagatcgatacgaagggcatcagacacaggcca

SEQ ID NO: 257908 - DNA, 60 bp, Artificial
  Synthetic oligonucleotide
agcggtctgctgtctggttgtctagtttctgtgccgttgtacctgccatgacccctcatc

SEQ ID NO: 257909 - DNA, 55 bp, Artificial
  Synthetic oligonucleotide
caatccagccggatacaatgggcggatgaatactccagtccccgtcgtccgtctc

SEQ ID NO: 257910 - DNA, 55 bp, Artificial
  Synthetic oligonucleotide
caccaagagggtttcggcatacgacttcccgctggtatgcgctgccccgtcagca

SEQ ID NO: 257911 - DNA, 55 bp, Artificial
  Synthetic oligonucleotide
tgtttggaggcgctgccttggggtgcaacgggtaaggctgtcacgcccgggtgcg

SEQ ID NO: 257912 - DNA, 55 bp, Artificial
  Synthetic oligonucleotide
cacaccgtaggccgcgtatgtcttctcggtctgagcgttaatattgttgggtgcg

SEQ ID NO: 257913 - DNA, 55 bp, Artificial
  Synthetic oligonucleotide
caatgagagaaacgccctggtagccagctacgccacactggcaaagttgaccggc

SEQ ID NO: 257914 - DNA, 55 bp, Artificial
  Synthetic oligonucleotide
caatgcaccagcccgttacggctttgaacgcggttggatgaagcccggaagcctc

SEQ ID NO: 257915 - DNA, 55 bp, Artificial
  Synthetic oligonucleotide
ccaaaggcactagcgggtttaccgttgtactgagagtcaatgccataactctctg

SEQ ID NO: 257916 - DNA, 55 bp, Artificial
  Synthetic oligonucleotide
atgtcgccctcataccggcgatggggaacgtgcggttgattcgaaccacgcaccc

SEQ ID NO: 257917 - DNA, 55 bp, Artificial
  Synthetic oligonucleotide
ccaaaaccgtccgcgtacgtgcataaagcgagtttgcaggacgcgaagtctctag

SEQ ID NO: 257918 - DNA, 55 bp, Artificial
  Synthetic oligonucleotide
tgcgtggttctcagggtttggcggaccttatgtaactaccgtatgggtaggacgc

SEQ ID NO: 257919 - DNA, 58 bp, Artificial
  Synthetic oligonucleotide
agcgcattgccgcatttgctcgtgtccccttgtcgggctctttcgtgaccgacaaggg

SEQ ID NO: 257920 - DNA, 55 bp, Artificial
  Synthetic oligonucleotide
attcccaactgctacccgcatcgcggccactccagtgttcttcgatcggcacacc

SEQ ID NO: 257921 - DNA, 55 bp, Artificial
  Synthetic oligonucleotide
cattgtgactccgtggggtaacgcggttggtccatcaaaggaccctgcgcacgat

SEQ ID NO: 257922 - DNA, 55 bp, Artificial
  Synthetic oligonucleotide
attcggacggcctcgtgtgtgggagaggcgcagtgtacgcagtgcaggattcagc

SEQ ID NO: 257923 - DNA, 55 bp, Artificial
  Synthetic oligonucleotide
attgaccgaagtgcatatcgtcttaggaaagccgcgatagccaaggttagccgga

SEQ ID NO: 257924 - DNA, 55 bp, Artificial
  Synthetic oligonucleotide
catggatgactcctcaatgggctgaccttcgctggtcccggagcgctgtgctcct

SEQ ID NO: 257925 - DNA, 55 bp, Artificial
  Synthetic oligonucleotide
catggacccgtcccaagacgcacgtgatcgcatccttacagccgctgactcgctg

SEQ ID NO: 257926 - DNA, 55 bp, Artificial
  Synthetic oligonucleotide
tgctgagtgctgtttgccgttgcccgttgcaccgggacggcttgtgcttggcgct

SEQ ID NO: 257927 - DNA, 55 bp, Artificial
  Synthetic oligonucleotide
attgatgacggcctctggtgaggacgctgggtcgaatgcggcctcagagccgatc

SEQ ID NO: 257928 - DNA, 55 bp, Artificial
  Synthetic oligonucleotide
caaagcagcacttgattagtctggatttaggggaataatcgtcccgcaagcggtc

SEQ ID NO: 257929 - DNA, 55 bp, Artificial
  Synthetic oligonucleotide
catccaacggtttgtaggcgactaagcacgcagtcgcgcagggatacccgtggcg

SEQ ID NO: 257930 - DNA, 54 bp, Artificial
  Synthetic oligonucleotide
agccggtactctgttgccaatcgtgcgaccctaaacaaaccggttcacccaatc

SEQ ID NO: 257931 - DNA, 55 bp, Artificial
  Synthetic oligonucleotide
catcatatgtgggaatcacgaaggtccataagtagatagcagacggtgcaggcgc

SEQ ID NO: 257932 - DNA, 55 bp, Artificial
  Synthetic oligonucleotide
actggcatcggtcactctccgatagctggtcacgaccccgggtgctcgtaacacc

SEQ ID NO: 257933 - DNA, 55 bp, Artificial
  Synthetic oligonucleotide
ttacacacgcgcacatcgttgcgctcagccaacacccggcagcgttagggaccgt

SEQ ID NO: 257934 - DNA, 55 bp, Artificial
  Synthetic oligonucleotide
caaattaatgcaccagagaaacgccaagctttgggtcgttgttcaaagcaggggt

SEQ ID NO: 257935 - DNA, 55 bp, Artificial
  Synthetic oligonucleotide
tggcattgcatccgaatgcacgagcgcgtttgcagtattgagcgggtgagccacg

SEQ ID NO: 257936 - DNA, 55 bp, Artificial
  Synthetic oligonucleotide
caacacgaagcgatgtgggctagcgctggtagcttccgttggacatccaagccgg

SEQ ID NO: 257937 - DNA, 55 bp, Artificial
  Synthetic oligonucleotide
ttacaacgcccgatgctttgcctcaccaaagaacggtgtgtggtgcgcacagtcg

SEQ ID NO: 257938 - DNA, 55 bp, Artificial
  Synthetic oligonucleotide
actccagatcgtaattccgcactcttcgttacccctggctgatagtcgttggacc

SEQ ID NO: 257939 - DNA, 55 bp, Artificial
  Synthetic oligonucleotide
agatgtccccgtgcctggtttcgggaatcttcccgtggaacagatgaaggtctga

SEQ ID NO: 257940 - DNA, 55 bp, Artificial
  Synthetic oligonucleotide
aacaacgccaatccctacaagcgcgctgtgagtggcctggtgaacactgacgggg

SEQ ID NO: 257941 - DNA, 52 bp, Artificial
  Synthetic oligonucleotide
agcagctcgtgggttcttctctaccctggtaaggggggggggtggcttccaa

SEQ ID NO: 257942 - DNA, 55 bp, Artificial
  Synthetic oligonucleotide
caggtccttgaggttcgagatttccgagtccaataccaccggctccggtggactg

SEQ ID NO: 257943 - DNA, 55 bp, Artificial
  Synthetic oligonucleotide
caacgggcagcttgatctacgataacgctccttatctgctcatatggttcgtggc

SEQ ID NO: 257944 - DNA, 55 bp, Artificial
  Synthetic oligonucleotide
cagggccatacgccatgtcccaggggtacaaagcctggtccacgaatataaccac

SEQ ID NO: 257945 - DNA, 55 bp, Artificial
  Synthetic oligonucleotide
caacggtactgattcccgccttgcgttccctgtctatcgcatcccgcgggaaggg

SEQ ID NO: 257946 - DNA, 55 bp, Artificial
  Synthetic oligonucleotide
agtaagctgcggcgtgtccggtctgggtggacggaactgcgtggtatcgagcctt

SEQ ID NO: 257947 - DNA, 55 bp, Artificial
  Synthetic oligonucleotide
ttggcccacacataacggaccgaaggagatggcgtaaaagcgttctccgcagggg

SEQ ID NO: 257948 - DNA, 55 bp, Artificial
  Synthetic oligonucleotide
tctggcgtttacgcttcggttcgtcgtagctttaaggcaacgtgcctatctcgca

SEQ ID NO: 257949 - DNA, 55 bp, Artificial
  Synthetic oligonucleotide
cctgctcgtataggtaggaagacgttctgcgtaagacaacgcagagatcgctgca

SEQ ID NO: 257950 - DNA, 55 bp, Artificial
  Synthetic oligonucleotide
cgcactgggactagcgtccctgctcttcatagattcgtgcggggcggttgatctg

SEQ ID NO: 257951 - DNA, 55 bp, Artificial
  Synthetic oligonucleotide
cgcactggtacgcacgccttcggcgtccacatctgtatcggtgtagtgaaaattg

SEQ ID NO: 257952 - DNA, 55 bp, Artificial
  Synthetic oligonucleotide
cgatcgtccaaattgcattaaaggtgtaaccaccttttacgcgcttaatgtaagc

SEQ ID NO: 257953 - DNA, 60 bp, Artificial
  Synthetic oligonucleotide
ccacgcatcgatgcatagaggcacatcgtaaacagtgccagaaaaccagatagcacaatg

SEQ ID NO: 257954 - DNA, 55 bp, Artificial
  Synthetic oligonucleotide
agtgcgcgcgccctcaatccatcacggattcgttccacatgcccaatttccgtcc

SEQ ID NO: 257955 - DNA, 55 bp, Artificial
  Synthetic oligonucleotide
cctgaatacgcatcggtgtatcgacgggtctgtgcaggtcccgacaggtaggtga

SEQ ID NO: 257956 - DNA, 55 bp, Artificial
  Synthetic oligonucleotide
cctctaatcgtgagttttctcgccaccaggtgcgtacgctccctaagcatgtcta

SEQ ID NO: 257957 - DNA, 55 bp, Artificial
  Synthetic oligonucleotide
cctcggtcgaagacattggaggcgggttctggtgggatccacagcctgccaatgg

SEQ ID NO: 257958 - DNA, 51 bp, Artificial
  Synthetic oligonucleotide
tttgtgcattatccgggtttccggggtcgggtgccacctttccgacgggcg

SEQ ID NO: 257959 - DNA, 55 bp, Artificial
  Synthetic oligonucleotide
cctcgcgttattttccctgatgctatgcatgacactaggtttcgccattgcaagc

SEQ ID NO: 257960 - DNA, 55 bp, Artificial
  Synthetic oligonucleotide
cgcacttccactccaccgaaacgcatccgcctttcgggcaacctcttcttgaata

SEQ ID NO: 257961 - DNA, 55 bp, Artificial
  Synthetic oligonucleotide
cctcgcgatccgcgcatctacacatatgcgattcattgcaaactgcgtcagtgcg

SEQ ID NO: 257962 - DNA, 55 bp, Artificial
  Synthetic oligonucleotide
cctcattccgaacaaatagtgtctcgcatgtgtggtgcgttgttcagaggttccc

SEQ ID NO: 257963 - DNA, 55 bp, Artificial
  Synthetic oligonucleotide
agcaacgcaggggcaacccagacatatatccgcaatgactatgaccatgagggtc

SEQ ID NO: 257964 - DNA, 57 bp, Artificial
  Synthetic oligonucleotide
ccaattggaggacacggcaacatgagtttccacgaagatgaacagagggcgtaaaac

SEQ ID NO: 257965 - DNA, 55 bp, Artificial
  Synthetic oligonucleotide
agagatttcatcgcctggactgagtcgggtgagtactttacgtagatcggcataa

SEQ ID NO: 257966 - DNA, 55 bp, Artificial
  Synthetic oligonucleotide
agttgctgcacaagccaggacgcgaacgggacatgccccagccatgcactgaagg

SEQ ID NO: 257967 - DNA, 54 bp, Artificial
  Synthetic oligonucleotide
tgaaattggagtcggcgtcaatccggtgtggacgtaagtgttataaggggtggg

SEQ ID NO: 257968 - DNA, 55 bp, Artificial
  Synthetic oligonucleotide
ttgcatcgtccgtgtgcatctccggaaggtcttcatcaattcggaccgcttgagc

SEQ ID NO: 257969 - DNA, 55 bp, Artificial
  Synthetic oligonucleotide
tgacacgcccggatcctagcaaccccggcgttaagcgctgcgaaggcagtcaaga

SEQ ID NO: 257970 - DNA, 55 bp, Artificial
  Synthetic oligonucleotide
cctagtacttttgctagcggtaatcctgtgatgcttgctagttctgcgcatactg

SEQ ID NO: 257971 - DNA, 55 bp, Artificial
  Synthetic oligonucleotide
cctagacttgatccatgccatctgaccagacccgcgtcaatctcacccttcccgc

SEQ ID NO: 257972 - DNA, 55 bp, Artificial
  Synthetic oligonucleotide
cgcaggccagctctacgctacgtatccgcgaggtcttcccagcgatgtcaagagg

SEQ ID NO: 257973 - DNA, 55 bp, Artificial
  Synthetic oligonucleotide
ttgtcctcccgaacgcacatgaggaactcagtattgcgacggacagcaccaggag

SEQ ID NO: 257974 - DNA, 55 bp, Artificial
  Synthetic oligonucleotide
ttggtacccgcacccatgagcgacacggtaaagcctgccgtgcgggcgaagttac

SEQ ID NO: 257975 - DNA, 60 bp, Artificial
  Synthetic oligonucleotide
ccaagacaatgaggccacactatcaaccggaactgtttctagcaagcgctccaaagcgcc

SEQ ID NO: 257976 - DNA, 55 bp, Artificial
  Synthetic oligonucleotide
cgagtgtgccgtcagtaaggctatttaagtccgtttggagcacttcgcacagggc

SEQ ID NO: 257977 - DNA, 55 bp, Artificial
  Synthetic oligonucleotide
cgatgctgaggtctacgccgttgcagtagatcacctgcaggttctcaacgaggcg

SEQ ID NO: 257978 - DNA, 55 bp, Artificial
  Synthetic oligonucleotide
accgggacaattcctgtactggccggttcaatggataggttaagattcagtcttc

SEQ ID NO: 257979 - DNA, 55 bp, Artificial
  Synthetic oligonucleotide
cgattccaccttagattgagaggttcgtaccacgctatgtccagtacgcccaagc

SEQ ID NO: 257980 - DNA, 55 bp, Artificial
  Synthetic oligonucleotide
tcgcttggccgtaccatcaagcttcgatagcaacgtatatccatgcgatgccacg

SEQ ID NO: 257981 - DNA, 55 bp, Artificial
  Synthetic oligonucleotide
tttccgcaaatcagttcaatcaaatcgcgttttgaccagggtacggacgcccaca

SEQ ID NO: 257982 - DNA, 53 bp, Artificial
  Synthetic oligonucleotide
agggccgtaagcatggcctacgtgtcgcggccggcctacaaaccgtttcccaa

SEQ ID NO: 257983 - DNA, 55 bp, Artificial
  Synthetic oligonucleotide
ttgggatcaaggcgcggtaccaggtccaggagttaccccaacgtgtctcggtgcg

SEQ ID NO: 257984 - DNA, 55 bp, Artificial
  Synthetic oligonucleotide
cgacttgctctcccctatcgaagcgcctgtcatcaacagccggcggatctgatct

SEQ ID NO: 257985 - DNA, 55 bp, Artificial
  Synthetic oligonucleotide
acctttccaggctcaaagaacggaacgtggaggcaatccgtcaaatcatggtgga

SEQ ID NO: 257986 - DNA, 60 bp, Artificial
  Synthetic oligonucleotide
ccaaccagtacgtgcttgggtactacgctttggcagctgggtctgtcgcgcatcaagagg

SEQ ID NO: 257987 - DNA, 55 bp, Artificial
  Synthetic oligonucleotide
acgaacggcgacacgttagcgtccagacaccctaacagcagcgagctctgggcca

SEQ ID NO: 257988 - DNA, 55 bp, Artificial
  Synthetic oligonucleotide
cgaccaacgaaaggaacgcgatgcgcacctttgttctcgcacacagagattcccc

SEQ ID NO: 257989 - DNA, 55 bp, Artificial
  Synthetic oligonucleotide
cgacacactgaggccacatgcacgtgcctgacagagcagggcacgcgctacgatt

SEQ ID NO: 257990 - DNA, 55 bp, Artificial
  Synthetic oligonucleotide
cgaacgcagacgggtcatagcctgcatcgtgagtagcggttacacgttgcgcccg

SEQ ID NO: 257991 - DNA, 53 bp, Artificial
  Synthetic oligonucleotide
cgaacctgaccagaacttaaccgaacgaatcaaagcccggacacggtcccatg

SEQ ID NO: 257992 - DNA, 55 bp, Artificial
  Synthetic oligonucleotide
cgaaccctgcggcatctgttccgctacgagcatggtcggcgcattcatacgtata

SEQ ID NO: 257993 - DNA, 55 bp, Artificial
  Synthetic oligonucleotide
tttgatcgaccaaacgcgccccgtgcccttgctacccgggtgtgtgcgttcgcta

SEQ ID NO: 257994 - DNA, 55 bp, Artificial
  Synthetic oligonucleotide
ccttggtctcttgggagactcgtctgatgttagttccctcaagaagaacgaggtg

SEQ ID NO: 257995 - DNA, 55 bp, Artificial
  Synthetic oligonucleotide
tctgctgtaaacgacagcgtgcaaaacattcgccttgtcccttaattacgaccac

SEQ ID NO: 257996 - DNA, 55 bp, Artificial
  Synthetic oligonucleotide
tgagcgcgctagacacgatgcctagcagttggccatggtcattcgtgaccggccc

SEQ ID NO: 257997 - DNA, 60 bp, Artificial
  Synthetic oligonucleotide
cattcgctactgtgaaaatcgattggccgcactcgacgagattcaagaaaccttgcagcc

SEQ ID NO: 257998 - DNA, 55 bp, Artificial
  Synthetic oligonucleotide
ccggcaagttggaacgtcaccttcgtcctatctcagggacgcgttggcccaagcg

SEQ ID NO: 257999 - DNA, 55 bp, Artificial
  Synthetic oligonucleotide
ccggattgaaggtggggtgccgttcaatccagttctagcgagaccttgggaagtg

SEQ ID NO: 258000 - DNA, 55 bp, Artificial
  Synthetic oligonucleotide
ccgcttaatcactccctgctgacccgctgttgttctttgcgggagggaaccgccg

SEQ ID NO: 258001 - DNA, 55 bp, Artificial
  Synthetic oligonucleotide
atcaagcagttcgtcgcgatagccggacagacaacacacaagccgttcttgttgg

SEQ ID NO: 258002 - DNA, 55 bp, Artificial
  Synthetic oligonucleotide
tcgcgaccatggttgggttcgctgagcactcacggcgtcacgatgtgtggccgat

SEQ ID NO: 258003 - DNA, 55 bp, Artificial
  Synthetic oligonucleotide
cgccagtcaaacaacgcgcgcagttagaacgtattgcccataggcgaagcattgc

SEQ ID NO: 258004 - DNA, 55 bp, Artificial
  Synthetic oligonucleotide
ccgcagtgtagcggaacgcttaatgcacagacaacgcaatgtacgcagtcggccc

SEQ ID NO: 258005 - DNA, 55 bp, Artificial
  Synthetic oligonucleotide
ccgcaaagtgtagcgcaccaagggctttcgtcacttggctacgcaggcgtatgga

SEQ ID NO: 258006 - DNA, 55 bp, Artificial
  Synthetic oligonucleotide
atcaagccgacaccgcccgatcacagctgccacttagatgcgcaaatctcggcca

SEQ ID NO: 258007 - DNA, 55 bp, Artificial
  Synthetic oligonucleotide
ccgatcgtcgtgtttcacgatcagccgcatggtgaagtacagcggcactagtgcc

SEQ ID NO: 258008 - DNA, 60 bp, Artificial
  Synthetic oligonucleotide
catgcgttacgccgcagcggtggaacaggcctatcgtgacgcgttacaggcggacagcgg

SEQ ID NO: 258009 - DNA, 55 bp, Artificial
  Synthetic oligonucleotide
ccgatcagggtgcctcactcattgctgcactatccggaagacagcgctcgggaag

SEQ ID NO: 258010 - DNA, 55 bp, Artificial
  Synthetic oligonucleotide
agctgcgtgcgacggcgtcccacaaacggcgctgactgaccaagcgctaattcga

SEQ ID NO: 258011 - DNA, 55 bp, Artificial
  Synthetic oligonucleotide
atcacccagcgatcccgaacgctcgtccgctggtggccaacatcttgcgatccga

SEQ ID NO: 258012 - DNA, 55 bp, Artificial
  Synthetic oligonucleotide
ccgaggtatgtggggccgttatgatgccgctgcgaatatgggcatatcaatgttg

SEQ ID NO: 258013 - DNA, 55 bp, Artificial
  Synthetic oligonucleotide
tcgatccatctggcgcgatgcggggacgcagtgtcctactgacgtcgctcgaatc

SEQ ID NO: 258014 - DNA, 55 bp, Artificial
  Synthetic oligonucleotide
ccgaggacggtgttgctctctgcgacgatggacttctgagccgggcgacaaactg

SEQ ID NO: 258015 - DNA, 55 bp, Artificial
  Synthetic oligonucleotide
cgccgcctgccaagatgccttggtaatcatgttagggaagtcgttgacgttcgaa

SEQ ID NO: 258016 - DNA, 55 bp, Artificial
  Synthetic oligonucleotide
cgcctgcgtagccaagtgacgaaagcccttggtgcgctacactttgcggtctaga

SEQ ID NO: 258017 - DNA, 55 bp, Artificial
  Synthetic oligonucleotide
tgagtgtctacagaaccctggacgattcagtcattcttaaacgactaatgtgcac

SEQ ID NO: 258018 - DNA, 55 bp, Artificial
  Synthetic oligonucleotide
cgccttggcccttactacattgccatctgggaaggatgcgcccctggcgtttctc

SEQ ID NO: 258019 - DNA, 60 bp, Artificial
  Synthetic oligonucleotide
catcgctcatccactacctcgtccctttcgaggttcggcacgctgcaactgtcttgcggc

SEQ ID NO: 258020 - DNA, 55 bp, Artificial
  Synthetic oligonucleotide
cgcgacggtggtcgtatagtgcggatgcttcctatgcttcagtgcaacctctacc

SEQ ID NO: 258021 - DNA, 55 bp, Artificial
  Synthetic oligonucleotide
agacttgcgggcggcaactttgcgcgacatgtaggggtccagtgatggggccgct

SEQ ID NO: 258022 - DNA, 55 bp, Artificial
  Synthetic oligonucleotide
ccctgcgatgcatccgttccccactcggagttgtcaccgcatgaattgcaagacc

SEQ ID NO: 258023 - DNA, 55 bp, Artificial
  Synthetic oligonucleotide
ccctgacgtgatgatccactccaatcaggtagcgttcgaaaggcgtgacgcgcag

SEQ ID NO: 258024 - DNA, 55 bp, Artificial
  Synthetic oligonucleotide
cgcatggttggtgatgatcgtacgcgagacatccttgccataggtcgcgtccagc

SEQ ID NO: 258025 - DNA, 55 bp, Artificial
  Synthetic oligonucleotide
ccgtgacttagagggtgcattaaataccttagtagcacgtgcaaactttactggg

SEQ ID NO: 258026 - DNA, 55 bp, Artificial
  Synthetic oligonucleotide
ccgtcccggaccgatgcgtacaatcgccggatgaaaacacgttccctctctgcat

SEQ ID NO: 258027 - DNA, 55 bp, Artificial
  Synthetic oligonucleotide
atactgacccgcagggttctctgtcggcctggtggaactctcgcgaggcgcaaag

SEQ ID NO: 258028 - DNA, 55 bp, Artificial
  Synthetic oligonucleotide
ccgtcaggcatctcgcttgactgcgtggagatgggtctttgattggacgtgcgcc

SEQ ID NO: 258029 - DNA, 55 bp, Artificial
  Synthetic oligonucleotide
cgccaacgaatggtttggttatcatcgcccaggttccttcttcgcaacgagaccg

SEQ ID NO: 258030 - DNA, 54 bp, Artificial
  Synthetic oligonucleotide
catcagacacaggccaatagccacccttaccccaaacacggcccgtaagccctt

SEQ ID NO: 258031 - DNA, 55 bp, Artificial
  Synthetic oligonucleotide
ccgtatcagagaattggagtcatacattgctgtgggtgagtgggaaggcgtgacc

SEQ ID NO: 258032 - DNA, 55 bp, Artificial
  Synthetic oligonucleotide
cgcagtagccttcatggcgcgatagacgcactaatgtgcccatgttgtgttgcag

SEQ ID NO: 258033 - DNA, 54 bp, Artificial
  Synthetic oligonucleotide
cgccacgcaacccttgggcattcgcccgtcaaccgctaaactatggctttccgg

SEQ ID NO: 258034 - DNA, 55 bp, Artificial
  Synthetic oligonucleotide
ttgatgaagaccttccggagatgcacacggacgatgcaatgcttcgcctatgggc

SEQ ID NO: 258035 - DNA, 55 bp, Artificial
  Synthetic oligonucleotide
ttgagtctctgtgccgatagctgagagatgtcggctgcgtcccagaaaccactcc

SEQ ID NO: 258036 - DNA, 55 bp, Artificial
  Synthetic oligonucleotide
atacgcgcatcctgcggagatggggtcgggatttcagtcccatgggcgacagtac

SEQ ID NO: 258037 - DNA, 55 bp, Artificial
  Synthetic oligonucleotide
atcaagattaggcagctttgcagccaaacgggcttgcaagacggtaggttccaga

SEQ ID NO: 258038 - DNA, 55 bp, Artificial
  Synthetic oligonucleotide
ccggtctcgctccaacgtttctcgggcgtctaagagggatgcacgatcagaagcc

SEQ ID NO: 258039 - DNA, 55 bp, Artificial
  Synthetic oligonucleotide
ccggctgagcagagggaacaaacgctgatcgtgagtagcaccaacgaagcgcggc

SEQ ID NO: 258040 - DNA, 54 bp, Artificial
  Synthetic oligonucleotide
cgcgtcatggagtcacgatgcgtccccgtagctaacgggtcccgtccaatacac

SEQ ID NO: 258041 - DNA, 56 bp, Artificial
  Synthetic oligonucleotide
cagccgtgttttcgtccttgaattggggcggcctagggcagagcatctacggattt

SEQ ID NO: 258042 - DNA, 54 bp, Artificial
  Synthetic oligonucleotide
ttaagtcaagcgttacgcgccagtagcagacatcactgtgaccattatgaatac

SEQ ID NO: 258043 - DNA, 53 bp, Artificial
  Synthetic oligonucleotide
caccggctccccctatttctatcgtgtcaacaagcggatttaccggggtcaaa

SEQ ID NO: 258044 - DNA, 54 bp, Artificial
  Synthetic oligonucleotide
cgatgcggcacctgccttggaaccatgctggggaaaccatgaagttgcgcctgt

SEQ ID NO: 258045 - DNA, 54 bp, Artificial
  Synthetic oligonucleotide
tgtccacgcctacccgacagcgactcacgacattctaggaaatgcgtgcgctca

SEQ ID NO: 258046 - DNA, 54 bp, Artificial
  Synthetic oligonucleotide
tgtcagagactgcttgatccaggccgttcgcgatgtgcatcccgagtacgagcc

SEQ ID NO: 258047 - DNA, 54 bp, Artificial
  Synthetic oligonucleotide
gcggacaagaaattacggaacggcccaccggttaacggctcacgtgcacgttca

SEQ ID NO: 258048 - DNA, 54 bp, Artificial
  Synthetic oligonucleotide
tcgaaggccagacgcagcagctcgtttaatttcaagtcgtggtcagcagcaaac

SEQ ID NO: 258049 - DNA, 54 bp, Artificial
  Synthetic oligonucleotide
cgcaacttttgcaaccctgttgcgcgcgccctgccctagcatcgtgggtatccc

SEQ ID NO: 258050 - DNA, 54 bp, Artificial
  Synthetic oligonucleotide
tgtcgccttttgtgccgagacctaggagtttggctgccgtcccaccagtgaggc

SEQ ID NO: 258051 - DNA, 54 bp, Artificial
  Synthetic oligonucleotide
gcggttcatgcccggtggtcgggtggtccccaaagacacgtcaatgtccgcagc

SEQ ID NO: 258052 - DNA, 59 bp, Artificial
  Synthetic oligonucleotide
cacggtgaatccttatctcaatgctcgacgttcgtggaacagtcacgttggccaaataa

SEQ ID NO: 258053 - DNA, 54 bp, Artificial
  Synthetic oligonucleotide
gcgcagcaacgatcttactgactgtgcccttaccaaccccggacggaccatcaa

SEQ ID NO: 258054 - DNA, 54 bp, Artificial
  Synthetic oligonucleotide
cagaactgactggaggcaagcagaaccggttgattcgtgtcattgaccctagag

SEQ ID NO: 258055 - DNA, 54 bp, Artificial
  Synthetic oligonucleotide
gcgatcagtttagccccgctgcgctaggctgggtcggtccgccccggaagcccc

SEQ ID NO: 258056 - DNA, 54 bp, Artificial
  Synthetic oligonucleotide
agtggagtactaagcgaatggcgcaatgacataaaaccaatgccagacgaacgc

SEQ ID NO: 258057 - DNA, 54 bp, Artificial
  Synthetic oligonucleotide
tgcgacacccagagtgcgtttggacattgtttacgtttccgctgcaacgaggaa

SEQ ID NO: 258058 - DNA, 54 bp, Artificial
  Synthetic oligonucleotide
gtaagtgcaaagtgaaacaccttgacgcaacgatcggctaatctcattagcgat

SEQ ID NO: 258059 - DNA, 54 bp, Artificial
  Synthetic oligonucleotide
ctacacaatacgaagagtaattatacaaattgtgttgcgcgggatgtgcccata

SEQ ID NO: 258060 - DNA, 54 bp, Artificial
  Synthetic oligonucleotide
gggctatacggcaagctagccgccattttactggttgaacttcacgcgtgcgcc

SEQ ID NO: 258061 - DNA, 54 bp, Artificial
  Synthetic oligonucleotide
atgcccttacgctgtaatgccccaaacgcagccaacccctgctcaacaggaatg

SEQ ID NO: 258062 - DNA, 54 bp, Artificial
  Synthetic oligonucleotide
atagcagtcaaaaggttgcctttaggtagatgattgggatgcaactagagtaca

SEQ ID NO: 258063 - DNA, 57 bp, Artificial
  Synthetic oligonucleotide
cgagtaagccggttatggcagctaatacgacaccaagggtaaaggttgagatgccaa

SEQ ID NO: 258064 - DNA, 60 bp, Artificial
  Synthetic oligonucleotide
caccatgggtgcgctatgaagcacagttccgcgcgtccaatcgcaaggaattgccgctcg

SEQ ID NO: 258065 - DNA, 54 bp, Artificial
  Synthetic oligonucleotide
atgccaacccaagcgcgcagcaacgatcttactgactgtgcccttaccaacccc

SEQ ID NO: 258066 - DNA, 54 bp, Artificial
  Synthetic oligonucleotide
ggtggcggttgctgcttacacggcggctgctaaagtgcgcgagcgaatgtatgc

SEQ ID NO: 258067 - DNA, 54 bp, Artificial
  Synthetic oligonucleotide
tatgcgacgctgcgtttgcgttctggggaaatgcgtagagtgctggctgagtgt

SEQ ID NO: 258068 - DNA, 54 bp, Artificial
  Synthetic oligonucleotide
atctaaccggtagctgacaggcagccactaccgatggttccgtgataatgaccc

SEQ ID NO: 258069 - DNA, 54 bp, Artificial
  Synthetic oligonucleotide
ctgcggcattggagtcgcagtacctatctcgcctacctactcgacgttcacctg

SEQ ID NO: 258070 - DNA, 54 bp, Artificial
  Synthetic oligonucleotide
ctgctgcctacaaccccacctattacgatccagtggtcaaatacgacccgtgga

SEQ ID NO: 258071 - DNA, 54 bp, Artificial
  Synthetic oligonucleotide
cttggactcaatgcccttacgctgtaatgccccaaacgcagccaacccctgctc

SEQ ID NO: 258072 - DNA, 54 bp, Artificial
  Synthetic oligonucleotide
tgatattgcaacgttggttcctcgcgaagtctccaacgtagtacctctctttag

SEQ ID NO: 258073 - DNA, 53 bp, Artificial
  Synthetic oligonucleotide
acttggtttgacacaaccgaactcgcggttatgggcctgaccgaagtactacg

SEQ ID NO: 258074 - DNA, 54 bp, Artificial
  Synthetic oligonucleotide
agcgcgtttggcagtgccgggtgtcgtggacctgtcagacgtcgctgcagaagc

SEQ ID NO: 258075 - DNA, 60 bp, Artificial
  Synthetic oligonucleotide
cacaagctggctactcaagcgcgatcgtatacatgcggaccaagcacgtggcgaggggac

SEQ ID NO: 258076 - DNA, 54 bp, Artificial
  Synthetic oligonucleotide
gtggtcgcatcccgccggcacagttcgccgccaactaccgtacacaacaagcca

SEQ ID NO: 258077 - DNA, 54 bp, Artificial
  Synthetic oligonucleotide
aggcgatggcgaattgcgttcgccgatccaaccactgatggcgttgtacggatg

SEQ ID NO: 258078 - DNA, 54 bp, Artificial
  Synthetic oligonucleotide
agtccgttccagcccctgaagggcctataacaacgcgatggatatgcgcttggg

SEQ ID NO: 258079 - DNA, 54 bp, Artificial
  Synthetic oligonucleotide
aaacggcagtgcgataatcgtctaccagagcctcgggaatgcgatcaggacgtg

SEQ ID NO: 258080 - DNA, 54 bp, Artificial
  Synthetic oligonucleotide
ggcatggtagtgctccaacgagggcaccaatccttcctccatacgctcacgctg

SEQ ID NO: 258081 - DNA, 54 bp, Artificial
  Synthetic oligonucleotide
aggcttatgcggcgtgccgtgctgagctttcttcctacatcgccattcgaaagg

SEQ ID NO: 258082 - DNA, 54 bp, Artificial
  Synthetic oligonucleotide
gccctctcaacaggggcgtaactcaacaatccgctaggagcaccactatggccg

SEQ ID NO: 258083 - DNA, 53 bp, Artificial
  Synthetic oligonucleotide
gcccggtttattggggtgggtcaccgtttagttgctcgcgtgttgtgacccaa

SEQ ID NO: 258084 - DNA, 53 bp, Artificial
  Synthetic oligonucleotide
taacgccgggtgagtacgagttcgtgcgtgacacccctcccgagaaccggacg

SEQ ID NO: 258085 - DNA, 53 bp, Artificial
  Synthetic oligonucleotide
atccgtgtaccagaatgacgtaactgcgccacaccaaccggcaacacatccaa

SEQ ID NO: 258086 - DNA, 60 bp, Artificial
  Synthetic oligonucleotide
caaggggatacccaaacaaaaccagcatcctggcagggcagatgatcaacgtggatgcac

SEQ ID NO: 258087 - DNA, 53 bp, Artificial
  Synthetic oligonucleotide
aggctagaattctccgacttacctggttctatacatgtcagtgcgaattatta

SEQ ID NO: 258088 - DNA, 50 bp, Artificial
  Synthetic oligonucleotide
taaatcaggggggtttttcgtttctcctgcatgcgttaaaaaataacccc

SEQ ID NO: 258089 - DNA, 53 bp, Artificial
  Synthetic oligonucleotide
atgacaagccgtttggaggaagacgcctacagaaagttagttgctgtggacgc

SEQ ID NO: 258090 - DNA, 53 bp, Artificial
  Synthetic oligonucleotide
aaagtcttctgacctcacgtgcggggaatggaacgaccgtatcagatcgcgtg

SEQ ID NO: 258091 - DNA, 53 bp, Artificial
  Synthetic oligonucleotide
gttgtaactcgccctaacgagcaatgcgcccgatacgtcccgcgatgcaaatc

SEQ ID NO: 258092 - DNA, 53 bp, Artificial
  Synthetic oligonucleotide
ggggaatggcatagagcaaccctaacaagggcaaaggtgttgaacggtgactt

SEQ ID NO: 258093 - DNA, 53 bp, Artificial
  Synthetic oligonucleotide
atgtcaaagagcctgcgtgtattcactgagcagggcgcatcactattgtatca

SEQ ID NO: 258094 - DNA, 53 bp, Artificial
  Synthetic oligonucleotide
gtcagtaacgacgacgctgtgcggccacgacagcaatgtggggacaacgagac

SEQ ID NO: 258095 - DNA, 53 bp, Artificial
  Synthetic oligonucleotide
gtcaatagcgcggtagatgttgatcgattctgcatgtgtaaccgagtaagcag

SEQ ID NO: 258096 - DNA, 53 bp, Artificial
  Synthetic oligonucleotide
agacacgatgcctagcagttggccatggtcattcgtgaccggccccccgctat

SEQ ID NO: 258097 - DNA, 60 bp, Artificial
  Synthetic oligonucleotide
caacgctcatggtggcagcggagccaacgctgcgtccaagattgcaccgttggccgagat

SEQ ID NO: 258098 - DNA, 53 bp, Artificial
  Synthetic oligonucleotide
ttattgctggggatgcgacgtacgctgaggatattctacgttcagggaaggta

SEQ ID NO: 258099 - DNA, 53 bp, Artificial
  Synthetic oligonucleotide
cattaaaggtgtaaccaccttttacgcgcttaatgtaagcctcacaatgccct

SEQ ID NO: 258100 - DNA, 53 bp, Artificial
  Synthetic oligonucleotide
gcacctgcacgcataacgattcagcgttaaagctttcccgcaccccgccgtta

SEQ ID NO: 258101 - DNA, 53 bp, Artificial
  Synthetic oligonucleotide
ccaaacgcagccaacccctgctcaacaggaatgcggaaatccttctggccgtg

SEQ ID NO: 258102 - DNA, 53 bp, Artificial
  Synthetic oligonucleotide
ccaacgttcgatcgataacgtgcctgccgcatggcagacaaagaccggccgcg

SEQ ID NO: 258103 - DNA, 53 bp, Artificial
  Synthetic oligonucleotide
aacaatgagccactgaacttccgggtttctggcgacttccgccggcgctttcg

SEQ ID NO: 258104 - DNA, 53 bp, Artificial
  Synthetic oligonucleotide
gaggatgatcgaaaccactttcgcaacgatgtgcgcgtggttagccagcttca

SEQ ID NO: 258105 - DNA, 53 bp, Artificial
  Synthetic oligonucleotide
acacgtctacgggccagatgtctacgtacagccgtacttcaatagtccggatt

SEQ ID NO: 258106 - DNA, 53 bp, Artificial
  Synthetic oligonucleotide
gacgttcctggcttgaatgtgggcaaagagacgattgcggccattcttcctat

SEQ ID NO: 258107 - DNA, 53 bp, Artificial
  Synthetic oligonucleotide
acagcaatgtggggacaacgagaccgacccctttaccagaacgagtgggggcg

SEQ ID NO: 258108 - DNA, 60 bp, Artificial
  Synthetic oligonucleotide
caaccatggatgacgcgtaatcgactcggtcgtggatgattgcgggggcgaccgcgccat

SEQ ID NO: 258109 - DNA, 53 bp, Artificial
  Synthetic oligonucleotide
gaccgacccctttaccagaacgagtgggggcgtaggtcagaacatgctcggga

SEQ ID NO: 258110 - DNA, 53 bp, Artificial
  Synthetic oligonucleotide
tgatttccgaacccattaccgatggcgtagggcgcattgtgcggctggcggtt

SEQ ID NO: 258111 - DNA, 53 bp, Artificial
  Synthetic oligonucleotide
gaaggttcggacacggatggaatacatcgacccacctgatgttgaacttgcgc

SEQ ID NO: 258112 - DNA, 53 bp, Artificial
  Synthetic oligonucleotide
tatgcgccagcaggttctaccgttgccgaattcccggctcggcagagagttct

SEQ ID NO: 258113 - DNA, 53 bp, Artificial
  Synthetic oligonucleotide
tcaccgctgcgctacacgcgacgccgaacaatccgttcatggttggcggggtt

SEQ ID NO: 258114 - DNA, 53 bp, Artificial
  Synthetic oligonucleotide
ctgtcaacctgagcactgcccggagactgcgttgtccacgaccctgctccagt

SEQ ID NO: 258115 - DNA, 53 bp, Artificial
  Synthetic oligonucleotide
ctcagcaacgttgagtacatccgtagtatcaaagcccctgtccctgacagcga

SEQ ID NO: 258116 - DNA, 53 bp, Artificial
  Synthetic oligonucleotide
acgacgctgtgcggccacgacagcaatgtggggacaacgagaccgaccccttt

SEQ ID NO: 258117 - DNA, 53 bp, Artificial
  Synthetic oligonucleotide
ctaccaatctccacagattacttcgtgaaggtaccactaaacagggagttcat

SEQ ID NO: 258118 - DNA, 53 bp, Artificial
  Synthetic oligonucleotide
cgttggcataggtcattccgaatcttcgcaatgctgccaacggacaactcgga

SEQ ID NO: 258119 - DNA, 60 bp, Artificial
  Synthetic oligonucleotide
caacacgcgacttgtctgccgcatttgacttccgtcgtggctaagacggtatcatgtgac

SEQ ID NO: 258120 - DNA, 53 bp, Artificial
  Synthetic oligonucleotide
cctgcccaccggaagattgtggcgggccgtggggttatggggacatgctcagg

SEQ ID NO: 258121 - DNA, 53 bp, Artificial
  Synthetic oligonucleotide
cgggacgttccgttcttcgtgcgacagccacactcgattcaccgtttgcgaca

SEQ ID NO: 258122 - DNA, 53 bp, Artificial
  Synthetic oligonucleotide
cgagaacaggggcatgttcacttaggagcctgaccgaactcgcttcaccaaaa

SEQ ID NO: 258123 - DNA, 53 bp, Artificial
  Synthetic oligonucleotide
cgattaattgcgaaacgataaacgtttccgtattgtcgagtctcccaacccac

SEQ ID NO: 258124 - DNA, 53 bp, Artificial
  Synthetic oligonucleotide
tcgcttaacggaattaaatttcttgcaactgtcagtgcgctgtcgaaaagggg

SEQ ID NO: 258125 - DNA, 53 bp, Artificial
  Synthetic oligonucleotide
caggtaggcgctggaacttgggccgccacgggtcaatcccaaaccgctgtagc

SEQ ID NO: 258126 - DNA, 53 bp, Artificial
  Synthetic oligonucleotide
gcgaagtgttcacgcgtgcatatccgatgagcccgatgcgatgacaaccgaca

SEQ ID NO: 258127 - DNA, 53 bp, Artificial
  Synthetic oligonucleotide
gcgagcgtcgaactcgttttgcaggggggtcaagtgctgccacgtcgtcggta

SEQ ID NO: 258128 - DNA, 53 bp, Artificial
  Synthetic oligonucleotide
cagacacacagttcgggtaattgctttatagcgctcgtatcattccttgtcga

SEQ ID NO: 258129 - DNA, 53 bp, Artificial
  Synthetic oligonucleotide
tagtaataccgaccaaccgcactccaggtgggattgatcggatacaggaagga

SEQ ID NO: 258130 - DNA, 56 bp, Artificial
  Synthetic oligonucleotide
caaagggctttcccgaccattgagggctgcgggcgatacaccaccgtcaaatacag

SEQ ID NO: 258131 - DNA, 53 bp, Artificial
  Synthetic oligonucleotide
gccagcaggtcgcacctggcctgcagcgggatttacgcgatgggcaatcgcaa

SEQ ID NO: 258132 - DNA, 52 bp, Artificial
  Synthetic oligonucleotide
aattcgaactgccagccgcagtacccgaaccggtcctactccccaagaggcc

SEQ ID NO: 258133 - DNA, 52 bp, Artificial
  Synthetic oligonucleotide
gacagtagactgggcggcaccgcgaacgaaccccagagtttaaaccaccgcc

SEQ ID NO: 258134 - DNA, 52 bp, Artificial
  Synthetic oligonucleotide
gggtacatgaagttatgggctacatacggcgcgcccaggtgtcccgattgta

SEQ ID NO: 258135 - DNA, 52 bp, Artificial
  Synthetic oligonucleotide
gggtaggcgtggacagcagatgtccagtgcaaaagaatcgccgcctaacccc

SEQ ID NO: 258136 - DNA, 52 bp, Artificial
  Synthetic oligonucleotide
aatcgtgtgatcgctcatgggttatcactaccttgcacggtgcggatcacat

SEQ ID NO: 258137 - DNA, 52 bp, Artificial
  Synthetic oligonucleotide
cccggaacacgctgacggaaagagtagtggccagaggcagctagaacgagat

SEQ ID NO: 258138 - DNA, 52 bp, Artificial
  Synthetic oligonucleotide
atcatcctcttcgggatccggtggtacttcgcatccaagatcgcggaatatg

SEQ ID NO: 258139 - DNA, 52 bp, Artificial
  Synthetic oligonucleotide
gcctggcactgacgtaatttggacagccacgccacgaagcctgttcttgggc

SEQ ID NO: 258140 - DNA, 52 bp, Artificial
  Synthetic oligonucleotide
atcatcacgttgtaggcatgccagatcagccagattgcaaggcaggttgcta

SEQ ID NO: 258141 - DNA, 60 bp, Artificial
  Synthetic oligonucleotide
caaaggccacctgtcaggcatatcgcgtcagtcgaacgcgatggacaccgcacaacgcat

SEQ ID NO: 258142 - DNA, 52 bp, Artificial
  Synthetic oligonucleotide
tagcccgtcgcacctggctggcggcctagctcggccattgccctgacaacct

SEQ ID NO: 258143 - DNA, 52 bp, Artificial
  Synthetic oligonucleotide
ccgcgcaagtcgaacccgcatagaacgattaccacgccactcacccacacaa

SEQ ID NO: 258144 - DNA, 52 bp, Artificial
  Synthetic oligonucleotide
ttttgcctcacgggctgagtcggcgaatccagttcatggcacaatgatccgg

SEQ ID NO: 258145 - DNA, 52 bp, Artificial
  Synthetic oligonucleotide
ggttagcctggatcgccgtattcccgaaggtggctcggatgtgatcaatcac

SEQ ID NO: 258146 - DNA, 52 bp, Artificial
  Synthetic oligonucleotide
tccggatacctcgcaagcactacgtacacttgatggccaatgcatcgcactg

SEQ ID NO: 258147 - DNA, 52 bp, Artificial
  Synthetic oligonucleotide
cgatagctggtcacgaccccgggtgctcgtaacaccgcggggttattttttg

SEQ ID NO: 258148 - DNA, 52 bp, Artificial
  Synthetic oligonucleotide
agctccgaagaagctatcctcaatgcctacacagacgcccgctgcccatcag

SEQ ID NO: 258149 - DNA, 52 bp, Artificial
  Synthetic oligonucleotide
acccttaaggtcagtaacgacgacgctgtgcggccacgacagcaatgtgggg

SEQ ID NO: 258150 - DNA, 52 bp, Artificial
  Synthetic oligonucleotide
cgtaagctgcaatggcccaaagggcatacgactttgcacgatatgaagggtc

SEQ ID NO: 258151 - DNA, 52 bp, Artificial
  Synthetic oligonucleotide
aaagaatgcaccgctttggtgccatgtccccgactgcgggacacagctcagt

SEQ ID NO: 258152 - DNA, 55 bp, Artificial
  Synthetic oligonucleotide
attcggttccgagtagcagattgctacctaggggggggcgatttcacgaacgctc

SEQ ID NO: 258153 - DNA, 52 bp, Artificial
  Synthetic oligonucleotide
cgtcctcgatagtgaggatgcgttcgttagtcgggatcttcccaaccaatga

SEQ ID NO: 258154 - DNA, 52 bp, Artificial
  Synthetic oligonucleotide
gtcataagctggcctgcgaattttggcgctgtggcatgtgcgacggtaggcg

SEQ ID NO: 258155 - DNA, 52 bp, Artificial
  Synthetic oligonucleotide
agtggcatgtgggttagcaggcgaccgtcgttgaatcgctatagcaattcac

SEQ ID NO: 258156 - DNA, 52 bp, Artificial
  Synthetic oligonucleotide
cgttcttcgtgcgacagccacactcgattcaccgtttgcgacactgctcccc

SEQ ID NO: 258157 - DNA, 52 bp, Artificial
  Synthetic oligonucleotide
gtaggctgctatcgaattcaactagatgaagctggaatgtgcctacccgtgt

SEQ ID NO: 258158 - DNA, 52 bp, Artificial
  Synthetic oligonucleotide
atacgaacctcaggatagagcggccactccccgaccttaccccagacacggc

SEQ ID NO: 258159 - DNA, 52 bp, Artificial
  Synthetic oligonucleotide
ggttgcgcgtaatccacatgacggtatgtcttttaagtccttaggtgaacca

SEQ ID NO: 258160 - DNA, 52 bp, Artificial
  Synthetic oligonucleotide
cctaagggcagtgattcgtgacctgttcctcatgacgctttcaaatatgaaa

SEQ ID NO: 258161 - DNA, 52 bp, Artificial
  Synthetic oligonucleotide
tactgtcgcctatgatgtaagccagtcgcaagtaagcaagactatcgacgag

SEQ ID NO: 258162 - DNA, 52 bp, Artificial
  Synthetic oligonucleotide
gatcgctcttttgaggtgttcatccgatgacggccttgagtgtcgcgcattt

SEQ ID NO: 258163 - DNA, 59 bp, Artificial
  Synthetic oligonucleotide
atggcgccggccacaggggtcagcatggtcgcgtcatcgacggccctgtcgggtggttc

SEQ ID NO: 258164 - DNA, 52 bp, Artificial
  Synthetic oligonucleotide
gatctgctccaacgtagcgcttaatcgcggccatcgcacgttcccaatcggc

SEQ ID NO: 258165 - DNA, 52 bp, Artificial
  Synthetic oligonucleotide
cagtacccgaaccggtcctactccccaagaggccatccccaagggagctcat

SEQ ID NO: 258166 - DNA, 52 bp, Artificial
  Synthetic oligonucleotide
gattcggatttagtaacacaggtagaattagcacgcactttcagcggtgaac

SEQ ID NO: 258167 - DNA, 52 bp, Artificial
  Synthetic oligonucleotide
ggctgagccgcaaagtcttggcgcatgtaactgcgcatacgcagcgagaggc

SEQ ID NO: 258168 - DNA, 52 bp, Artificial
  Synthetic oligonucleotide
gcccaggggcggccacacctgcataactgccaagaatccctgagatcaggtc

SEQ ID NO: 258169 - DNA, 52 bp, Artificial
  Synthetic oligonucleotide
tgcgtggaaagaaccggaaattctacggggcgccggtttgctgcgtcaaggg

SEQ ID NO: 258170 - DNA, 52 bp, Artificial
  Synthetic oligonucleotide
tggcgatgttgacggaagagtacgagccggccaggccacacctgttggcata

SEQ ID NO: 258171 - DNA, 52 bp, Artificial
  Synthetic oligonucleotide
ggagcttgatcggcggtggccgactcgctcggtgtgtcctcagcttggaagc

SEQ ID NO: 258172 - DNA, 52 bp, Artificial
  Synthetic oligonucleotide
agcggcaacaacgtctgcaccgatcccttaccgaaggtacagctgccaatga

SEQ ID NO: 258173 - DNA, 52 bp, Artificial
  Synthetic oligonucleotide
actgggccgaaacgtacggaacatccaccaacgtaattgaacgcttcgacaa

SEQ ID NO: 258174 - DNA, 60 bp, Artificial
  Synthetic oligonucleotide
cgagcagcggcgccagttttgaatagctctcgaccttggccgctacgcgggttcgctcaa

SEQ ID NO: 258175 - DNA, 59 bp, Artificial
  Synthetic oligonucleotide
atggatcccattcgttcgcgcacaccaagtcctgcccgcgagcttctgcccggacccca

SEQ ID NO: 258176 - DNA, 52 bp, Artificial
  Synthetic oligonucleotide
catgtccgaacactcgctacgccgcgacgttggccccttcgccctcatgctt

SEQ ID NO: 258177 - DNA, 52 bp, Artificial
  Synthetic oligonucleotide
tggatctgagcaaacccactggacagaggttggtatcgctttcccgcacagg

SEQ ID NO: 258178 - DNA, 52 bp, Artificial
  Synthetic oligonucleotide
catgcggcatcacagcggaaacaggcctctatggtacccgttcaggcgtgtt

SEQ ID NO: 258179 - DNA, 52 bp, Artificial
  Synthetic oligonucleotide
agcccggcatgagggtcggcagtgcgtcgtgagaaatccttagttgacaggg

SEQ ID NO: 258180 - DNA, 52 bp, Artificial
  Synthetic oligonucleotide
attggagctcaaactccaatcgtccccgtgatctccttttccggcgaggcaa

SEQ ID NO: 258181 - DNA, 52 bp, Artificial
  Synthetic oligonucleotide
ttatgagtaaatttccacgaatgaccagtcatcggccctatctgttacgagc

SEQ ID NO: 258182 - DNA, 52 bp, Artificial
  Synthetic oligonucleotide
gccagaacccctgcactgaccgtacacttgggggcatagcgcattcaggagc

SEQ ID NO: 258183 - DNA, 52 bp, Artificial
  Synthetic oligonucleotide
acaacgtgcacttgatcagcgcgcatttcttgcggctcgaatgctaggcgac

SEQ ID NO: 258184 - DNA, 52 bp, Artificial
  Synthetic oligonucleotide
gaccgtacacttgggggcatagcgcattcaggagcgtccccgtgagcgagtg

SEQ ID NO: 258185 - DNA, 52 bp, Artificial
  Synthetic oligonucleotide
gacctagttaggcttccccctgtgcttgttccacctgagatggccaccatgc

SEQ ID NO: 258186 - DNA, 57 bp, Artificial
  Synthetic oligonucleotide
tgaccctcggatgcgttttgtctacatgcgtaatcgacgttacaaggcttattaccc

SEQ ID NO: 258187 - DNA, 52 bp, Artificial
  Synthetic oligonucleotide
aattgagtcgtatgttcgcgttggtggctttgtaccccacacaacacggcat

SEQ ID NO: 258188 - DNA, 52 bp, Artificial
  Synthetic oligonucleotide
gccgcgacatttgcttggtgatgtgtattgaagctcaacgtcggctgtagtg

SEQ ID NO: 258189 - DNA, 52 bp, Artificial
  Synthetic oligonucleotide
ggggatgtatgggaggtcaaggtttccgcgcaacagtggctcggatggagca

SEQ ID NO: 258190 - DNA, 52 bp, Artificial
  Synthetic oligonucleotide
tgggtactgcggttcgcggaagctcgaggttggaccctccgtgtaggtggga

SEQ ID NO: 258191 - DNA, 52 bp, Artificial
  Synthetic oligonucleotide
ggggattgttgcggctccagtacttccatggggcggcgttctccggtagatc

SEQ ID NO: 258192 - DNA, 51 bp, Artificial
  Synthetic oligonucleotide
cctcgcggttattgccatgtctagcgaccctcgtagtagtcaacaggggag

SEQ ID NO: 258193 - DNA, 51 bp, Artificial
  Synthetic oligonucleotide
cctgcactgaccgtacacttgggggcatagcgcattcaggagcgtccccgt

SEQ ID NO: 258194 - DNA, 51 bp, Artificial
  Synthetic oligonucleotide
ttgctgcactggctgtccgttgtaggtccggcctttgaaccccaactgcag

SEQ ID NO: 258195 - DNA, 51 bp, Artificial
  Synthetic oligonucleotide
cgtcattccccctgcctgcgaaacacgcacggtgtctatcaccattcgtaa

SEQ ID NO: 258196 - DNA, 51 bp, Artificial
  Synthetic oligonucleotide
agtccattccaacgtatgcggtgcatgtcggtcgtgtgtagcgaatgcgtt

SEQ ID NO: 258197 - DNA, 60 bp, Artificial
  Synthetic oligonucleotide
tctggttttctggcactgtttacgatttttccctatgcattgatgcatggttggccgttg

SEQ ID NO: 258198 - DNA, 51 bp, Artificial
  Synthetic oligonucleotide
gtcgctatcaacccgtaccccacaggcctccgggccacacccaggacacta

SEQ ID NO: 258199 - DNA, 51 bp, Artificial
  Synthetic oligonucleotide
ccttacgtaaggccatcattccataggtccagaccatacttagcagtgcta

SEQ ID NO: 258200 - DNA, 51 bp, Artificial
  Synthetic oligonucleotide
ttatggcctggcggacgatggaatcgatgccttgcgtggcaccctagcacc

SEQ ID NO: 258201 - DNA, 51 bp, Artificial
  Synthetic oligonucleotide
cgaggtaaggccggctgctgcgtccggacgtacttgcggcgccagccgtga

SEQ ID NO: 258202 - DNA, 51 bp, Artificial
  Synthetic oligonucleotide
cggcggccggtttcagtcgctggacaggacactaggctatcatcgaccctt

SEQ ID NO: 258203 - DNA, 51 bp, Artificial
  Synthetic oligonucleotide
tctccttgggtcccgttgaggacggttggcactgaaaagtggctaagccac

SEQ ID NO: 258204 - DNA, 51 bp, Artificial
  Synthetic oligonucleotide
tagactgcgaatccacatccctgtcgtctccttgacaaggttgacgttatg

SEQ ID NO: 258205 - DNA, 51 bp, Artificial
  Synthetic oligonucleotide
aacccttgctgcctacatggctgtgaccagcttagatggctctccgaccat

SEQ ID NO: 258206 - DNA, 51 bp, Artificial
  Synthetic oligonucleotide
tcgggagttactccgcgagcgtttgcaggggatgaccatgactactaccgc

SEQ ID NO: 258207 - DNA, 51 bp, Artificial
  Synthetic oligonucleotide
tgtttgtgtcgttgagttgacagcgcggcttgcggtaggcaccttcgctga

SEQ ID NO: 258208 - DNA, 57 bp, Artificial
  Synthetic oligonucleotide
tctgacgcatgggtaaccgcaaacgacctcgactagacccctggcaattcggcccac

SEQ ID NO: 258209 - DNA, 51 bp, Artificial
  Synthetic oligonucleotide
accgcctatgaggacctcacagaggctagtaacgaggtatctaaagacggt

SEQ ID NO: 258210 - DNA, 51 bp, Artificial
  Synthetic oligonucleotide
caaagggcgaggttcgcggtccagatggaacctgcaagaaggattccgaca

SEQ ID NO: 258211 - DNA, 51 bp, Artificial
  Synthetic oligonucleotide
tagcacataaacagcgttaccaatgttcgtgacgtagaatgcccggaacgc

SEQ ID NO: 258212 - DNA, 51 bp, Artificial
  Synthetic oligonucleotide
ctatttggtcgagctacgtcaatatgggatcacgccacaagacgtagcacg

SEQ ID NO: 258213 - DNA, 51 bp, Artificial
  Synthetic oligonucleotide
tggcgcgtggctgtctacgaaaaatctattgactagtgttgacaaatgggt

SEQ ID NO: 258214 - DNA, 51 bp, Artificial
  Synthetic oligonucleotide
cccgcgaccgagtcaaaagcttaggttcaaggctggaaggtcgattgtcga

SEQ ID NO: 258215 - DNA, 51 bp, Artificial
  Synthetic oligonucleotide
ccgatctatgcacgcgatcgcacgcagtcgtcttatccaattcccggcaca

SEQ ID NO: 258216 - DNA, 51 bp, Artificial
  Synthetic oligonucleotide
gtaagtgcttgcggcacataggaaagccgtggataatgcgcggctcgctgt

SEQ ID NO: 258217 - DNA, 51 bp, Artificial
  Synthetic oligonucleotide
ctgagcaggcacctggtacgtaccgaggacataggcataccgggactatgg

SEQ ID NO: 258218 - DNA, 51 bp, Artificial
  Synthetic oligonucleotide
cgttgcgcctcaaaccccaatatcgccatttgcgttcctgtgcgcccgtta

SEQ ID NO: 258219 - DNA, 57 bp, Artificial
  Synthetic oligonucleotide
tctgacaaccttcctgaggcctggaaagcgcttactggccgtgtctggggtaaggtc

SEQ ID NO: 258220 - DNA, 51 bp, Artificial
  Synthetic oligonucleotide
caagcacaacggagaccacaggcaccttgcctaggacgttctcgtctagcg

SEQ ID NO: 258221 - DNA, 51 bp, Artificial
  Synthetic oligonucleotide
atcaggactgggaaacccggtggggtagggcagacgcatacacgctggaag

SEQ ID NO: 258222 - DNA, 51 bp, Artificial
  Synthetic oligonucleotide
atccaacgcaaaagtggccacactagaacagtcacaacccataacacttta

SEQ ID NO: 258223 - DNA, 51 bp, Artificial
  Synthetic oligonucleotide
gcactccctgcaaccccgacactccgcaactgaaaggaccgtccatgattg

SEQ ID NO: 258224 - DNA, 50 bp, Artificial
  Synthetic oligonucleotide
aagccatgatgcacctctcgtcagcgggccgtgaatgaagacgctgccgt

SEQ ID NO: 258225 - DNA, 50 bp, Artificial
  Synthetic oligonucleotide
aacggccagcgtacagacacaggcaagcgaggttcgaagcgtcatggcag

SEQ ID NO: 258226 - DNA, 50 bp, Artificial
  Synthetic oligonucleotide
aaaaccgccatgacaacagtgccataacgcgctccaagcaccgcacagca

SEQ ID NO: 258227 - DNA, 49 bp, Artificial
  Synthetic oligonucleotide
aaaacttgccttcccttagacggcgaaggcggaccgaggttcccggccc

SEQ ID NO: 258228 - DNA, 50 bp, Artificial
  Synthetic oligonucleotide
aacaagggcgcgggcctctacctgacctgttcgatccgccatcgcacgcc

SEQ ID NO: 258229 - DNA, 50 bp, Artificial
  Synthetic oligonucleotide
agccgcgaggccctattaccaagaagtcgatttcgccccaccgctggtaa

SEQ ID NO: 258230 - DNA, 60 bp, Artificial
  Synthetic oligonucleotide
tcgtaggatgctcacctgtagcgatacgtcgcgttctcgtgccattgggtttatggagtg

SEQ ID NO: 258231 - DNA, 50 bp, Artificial
  Synthetic oligonucleotide
aaaatcgaggcgacagggacggcaactgtaagcgtggagcgcgaggtgtg

SEQ ID NO: 258232 - DNA, 50 bp, Artificial
  Synthetic oligonucleotide
aacggtgggcaggtctacgaaatgcagcaggtgtgggatgaccgctgggt

SEQ ID NO: 258233 - DNA, 50 bp, Artificial
  Synthetic oligonucleotide
aacagcaggaccgcctatacccagcccaaagcgaggggacgatggaagca

SEQ ID NO: 258234 - DNA, 50 bp, Artificial
  Synthetic oligonucleotide
agcaacagatagagtggcgtcaactcacctccgagcgggtaggcgaggct

SEQ ID NO: 258235 - DNA, 50 bp, Artificial
  Synthetic oligonucleotide
tccagatttcgtataactatcttgctgagtggcgacctcctcttcactgg

SEQ ID NO: 258236 - DNA, 50 bp, Artificial
  Synthetic oligonucleotide
aaaggtggcacccgaccccggaaacccggataatgcacaaaagccggacg

SEQ ID NO: 258237 - DNA, 50 bp, Artificial
  Synthetic oligonucleotide
agcgcagcaccacatgctatccagactcgcggggacctaatgcccgtagg

SEQ ID NO: 258238 - DNA, 50 bp, Artificial
  Synthetic oligonucleotide
aacctgacgtgcttgccttcggaggatccatgggggagcccctgccggtg

SEQ ID NO: 258239 - DNA, 50 bp, Artificial
  Synthetic oligonucleotide
ttgcatccatacgcctgcgtagccaagtgacgaaagcccttggtgcgcta

SEQ ID NO: 258240 - DNA, 50 bp, Artificial
  Synthetic oligonucleotide
agccgttcggaccaggcttacacagagttccgtctgctgttgcccaacga

SEQ ID NO: 258241 - DNA, 60 bp, Artificial
  Synthetic oligonucleotide
tcgatacgatgtagcctatgagccaaccaggcgtatacgtctagggcaagtgcagaaccc

SEQ ID NO: 258242 - DNA, 50 bp, Artificial
  Synthetic oligonucleotide
aacatgctgcaaatacacgatgccacggcgcaaagcagtcgcatgcgcag

SEQ ID NO: 258243 - DNA, 50 bp, Artificial
  Synthetic oligonucleotide
aaatccttgtgcaccaaggaactcgggcgggcttcaacggtcatcgccag

SEQ ID NO: 258244 - DNA, 50 bp, Artificial
  Synthetic oligonucleotide
agccttacgttctcgtggatgccaagggagtcggctgggcgagcaaacct

SEQ ID NO: 258245 - DNA, 50 bp, Artificial
  Synthetic oligonucleotide
aacgagtcacattcacgggcagtggagggttgcatgccggtgtcaagcca

SEQ ID NO: 258246 - DNA, 50 bp, Artificial
  Synthetic oligonucleotide
aacccggcgtatggggaacgttcacggaggtgatagcggccacagtcctg

SEQ ID NO: 258247 - DNA, 50 bp, Artificial
  Synthetic oligonucleotide
aactgacaccattgccatgcggaggacacgaaagccacagtggcccgata

SEQ ID NO: 258248 - DNA, 50 bp, Artificial
  Synthetic oligonucleotide
aacccggttgccattgtgactccctttgaacgcggcaagtcgaagctgcc

SEQ ID NO: 258249 - DNA, 50 bp, Artificial
  Synthetic oligonucleotide
aaagcggatagccgcaagcacgtgggtgagtttcgaggctactggggcga

SEQ ID NO: 258250 - DNA, 50 bp, Artificial
  Synthetic oligonucleotide
aaacacccatgaccctcgttgcgcgtagcaccgctcgcactctacagggg

SEQ ID NO: 258251 - DNA, 50 bp, Artificial
  Synthetic oligonucleotide
acggccgcttgaagtatcataaggccctccccgaccgcgatacgcccccg

SEQ ID NO: 258252 - DNA, 60 bp, Artificial
  Synthetic oligonucleotide
tcatctacggcggacgctcgattcaccgcacgagaggactccaatgacatctaaacgggc

SEQ ID NO: 258253 - DNA, 50 bp, Artificial
  Synthetic oligonucleotide
acggctccctccaatcccggtagcatatccgccccgtaggtatggcccgc

SEQ ID NO: 258254 - DNA, 50 bp, Artificial
  Synthetic oligonucleotide
acgggcggtccttgggtggtgaacgacggccgaaggctagtggtcagttg

SEQ ID NO: 258255 - DNA, 50 bp, Artificial
  Synthetic oligonucleotide
cagtcgcgttcgctgagacgcaccgacgctaggcttgcaggcatgggtga

SEQ ID NO: 258256 - DNA, 50 bp, Artificial
  Synthetic oligonucleotide
cagtccgttcaactcatcgtattggttctctaatacattgtcgctcgtca

SEQ ID NO: 258257 - DNA, 50 bp, Artificial
  Synthetic oligonucleotide
caggtggttcgtagcgaggacagactcgtgagccgtgccgctctcttggg

SEQ ID NO: 258258 - DNA, 50 bp, Artificial
  Synthetic oligonucleotide
cagcgcagcacgccagtcttggggcatggggaacacgcacatccaacttc

SEQ ID NO: 258259 - DNA, 50 bp, Artificial
  Synthetic oligonucleotide
cagccggacttaatgcactgcctaactcagcctcaatgattcccattagt

SEQ ID NO: 258260 - DNA, 50 bp, Artificial
  Synthetic oligonucleotide
acggggccatcggcgtttttatggtcgccgtcacgtgttaccgcctccca

SEQ ID NO: 258261 - DNA, 50 bp, Artificial
  Synthetic oligonucleotide
cacgggcacacttgtacgcaggttgagtccgcaagttcgaggttggcggc

SEQ ID NO: 258262 - DNA, 50 bp, Artificial
  Synthetic oligonucleotide
cacgacgatggagctcaagtgcgccattcggggcaactcgccgggtcaaa

SEQ ID NO: 258263 - DNA, 60 bp, Artificial
  Synthetic oligonucleotide
tatctgccacagcaacacgcaagccacgctcgtgaaaatcgaaagctaagtggcacgttg

SEQ ID NO: 258264 - DNA, 50 bp, Artificial
  Synthetic oligonucleotide
acggtaagacgtcggcagtccatgggccaacccccgctatccagtgtcct

SEQ ID NO: 258265 - DNA, 50 bp, Artificial
  Synthetic oligonucleotide
caccagtctcggaagctcgaccggaatccatgagcggtcgcgacacggcc

SEQ ID NO: 258266 - DNA, 50 bp, Artificial
  Synthetic oligonucleotide
acggtcgttcgcggtgaggggcgatgccgcgtggattggtcttatccgtt

SEQ ID NO: 258267 - DNA, 50 bp, Artificial
  Synthetic oligonucleotide
caatgcaccgattgcgtttgcagagttgcccatcgccccctgcacttgcg

SEQ ID NO: 258268 - DNA, 50 bp, Artificial
  Synthetic oligonucleotide
caatacgcagcatcctgcccagtgtgcccgacatggcttggcccccgttc

SEQ ID NO: 258269 - DNA, 50 bp, Artificial
  Synthetic oligonucleotide
caaccagttgaacaagtagcgcgaccctcccctgacctcgcccgccttac

SEQ ID NO: 258270 - DNA, 50 bp, Artificial
  Synthetic oligonucleotide
ccgacgccagtccagatcatagcaacctgcgcgttcggccaagcgtcagg

SEQ ID NO: 258271 - DNA, 50 bp, Artificial
  Synthetic oligonucleotide
acgcccagggttccgtaaacacccatgaccctcgttgcgcgtagcaccgc

SEQ ID NO: 258272 - DNA, 50 bp, Artificial
  Synthetic oligonucleotide
cccggtcatgggcaggtcgatacactgcacgcccccgcatcccccgaaga

SEQ ID NO: 258273 - DNA, 50 bp, Artificial
  Synthetic oligonucleotide
cccgcgccatctgacgtctagggttgtgtggttcagagccgagacctgta

SEQ ID NO: 258274 - DNA, 60 bp, Artificial
  Synthetic oligonucleotide
tagtgtccaacgccatgggaatagctcgatggaggggggggcgcgattgcagggcaatca

SEQ ID NO: 258275 - DNA, 50 bp, Artificial
  Synthetic oligonucleotide
cccctgaagggacaccggcgttgaatgggctatcggcccgcttcgccccc

SEQ ID NO: 258276 - DNA, 50 bp, Artificial
  Synthetic oligonucleotide
ccccgcttctggggaacgaacacccctgatatggggagtcgtgtcagccg

SEQ ID NO: 258277 - DNA, 50 bp, Artificial
  Synthetic oligonucleotide
acgccccagcaggcgtgcctagatgacggggagcttacggcgggacgaag

SEQ ID NO: 258278 - DNA, 50 bp, Artificial
  Synthetic oligonucleotide
cccagccggaaaccggatagtcgtggctgtccacttccagcttctgcgaa

SEQ ID NO: 258279 - DNA, 50 bp, Artificial
  Synthetic oligonucleotide
cccacgggcgattgcagttccgggtccgcatgacgcgcctatgatcgcga

SEQ ID NO: 258280 - DNA, 50 bp, Artificial
  Synthetic oligonucleotide
acgcctggatagcgcgtatgaggacacacatgggcccaaccacgccgaca

SEQ ID NO: 258281 - DNA, 50 bp, Artificial
  Synthetic oligonucleotide
acgcgcccccattgcatcgaaggccacacgagcgaagagcatcgcgagtc

SEQ ID NO: 258282 - DNA, 50 bp, Artificial
  Synthetic oligonucleotide
acgcggcgcacagagaggcattcgcgctgtcgcttcatccgccctgccga

SEQ ID NO: 258283 - DNA, 50 bp, Artificial
  Synthetic oligonucleotide
ccactgtatgcgcagaaccctccggaatcagccacggtgacggagctctc

SEQ ID NO: 258284 - DNA, 50 bp, Artificial
  Synthetic oligonucleotide
acggaatgtaaggcaccccgaaaaacatcgcaggccgggtacagcctcga

SEQ ID NO: 258285 - DNA, 60 bp, Artificial
  Synthetic oligonucleotide
cgagaccagcgcccgttaactgatcctcacgaacggacatgaggaactctgtattgcgac

SEQ ID NO: 258286 - DNA, 60 bp, Artificial
  Synthetic oligonucleotide
tagtcgtgaacctcaccagtgcgcatatcgaccacttcagtccccgagcgataagccgcg

SEQ ID NO: 258287 - DNA, 50 bp, Artificial
  Synthetic oligonucleotide
ccaagcttagccgcagtcaccccggtcatttcttgacgcaatgcggggac

SEQ ID NO: 258288 - DNA, 50 bp, Artificial
  Synthetic oligonucleotide
acggatgctgtgaacggtgggcaggtctacgaaatgcagcaggtgtggga

SEQ ID NO: 258289 - DNA, 50 bp, Artificial
  Synthetic oligonucleotide
acggcaaagcccctcatggtgggtcgcatacagctatcccggagttggct

SEQ ID NO: 258290 - DNA, 50 bp, Artificial
  Synthetic oligonucleotide
ccaaaaaaccgcccactgcgtttgcagttggggtgacatatatgccgctg

SEQ ID NO: 258291 - DNA, 50 bp, Artificial
  Synthetic oligonucleotide
catggaaccttcgggtgacgcggaaagacgcgcaagtgtgcggcctgtct

SEQ ID NO: 258292 - DNA, 50 bp, Artificial
  Synthetic oligonucleotide
agagaatgcggaaccgatagcaggcccctatgttttctgatgatgggtgc

SEQ ID NO: 258293 - DNA, 50 bp, Artificial
  Synthetic oligonucleotide
agttcgtcgctccagagagctgcgcgccccacctgactcgaacttccaga

SEQ ID NO: 258294 - DNA, 50 bp, Artificial
  Synthetic oligonucleotide
agagctccatcgctcgcccaaagggtcgtgggctgggtacagagcgcgtg

SEQ ID NO: 258295 - DNA, 50 bp, Artificial
  Synthetic oligonucleotide
agtccagatcatagcaacctgcgcgttcggccaagcgtcagggcttggga

SEQ ID NO: 258296 - DNA, 50 bp, Artificial
  Synthetic oligonucleotide
agagggtgtgtttgacggtcgatgggacggccatgacgacatgccgatcg

SEQ ID NO: 258297 - DNA, 58 bp, Artificial
  Synthetic oligonucleotide
tagtactaggattttcataggtcctcgtttgttgtgcttggacgaacaaacgatagca

SEQ ID NO: 258298 - DNA, 50 bp, Artificial
  Synthetic oligonucleotide
agtacaggtcagcgctctgtcgcgagcagacgccatcggtagagttccgc

SEQ ID NO: 258299 - DNA, 50 bp, Artificial
  Synthetic oligonucleotide
agatacagcccagcgatggcaacgggtagcaacgcgatgacggcggtaat

SEQ ID NO: 258300 - DNA, 50 bp, Artificial
  Synthetic oligonucleotide
agggccgttcctaggtcaatcaagacgtccccgggagtgttccctgcctc

SEQ ID NO: 258301 - DNA, 50 bp, Artificial
  Synthetic oligonucleotide
agatctggaatttcacggtgcaacggcagtggacacgcaatgggctgcgc

SEQ ID NO: 258302 - DNA, 50 bp, Artificial
  Synthetic oligonucleotide
aggcagcgaaggaatgagacgtttccgacggcccacgccggagcacgtcc

SEQ ID NO: 258303 - DNA, 50 bp, Artificial
  Synthetic oligonucleotide
aggagccaccgatgccaatgggcgttgaccgccctgacatgtcaatcata

SEQ ID NO: 258304 - DNA, 50 bp, Artificial
  Synthetic oligonucleotide
aggacgtagatcgcatccggggacatgcaccggccatcacggcattccgg

SEQ ID NO: 258305 - DNA, 50 bp, Artificial
  Synthetic oligonucleotide
aggacgaatccgcgtttcctgcgaattatcccgtggcatccgtggagcga

SEQ ID NO: 258306 - DNA, 50 bp, Artificial
  Synthetic oligonucleotide
aggaaccatgcaacgcggcaaccccctacaacgtggcagcctggttacct

SEQ ID NO: 258307 - DNA, 50 bp, Artificial
  Synthetic oligonucleotide
agctggcttggtcaatcgagggggccgggtgggcactccctaaaccgcac

SEQ ID NO: 258308 - DNA, 59 bp, Artificial
  Synthetic oligonucleotide
tagccgggggaggcgcttctacctgtggcgcgtcaagaatcatcaatgccgaaaagaag

SEQ ID NO: 258309 - DNA, 50 bp, Artificial
  Synthetic oligonucleotide
agctgatgccatgcgtcggagaggtcgttgggtgtggggtgggtcagtac

SEQ ID NO: 258310 - DNA, 50 bp, Artificial
  Synthetic oligonucleotide
agctcgtgcaaagcaggctccatcgatccgaggcttggacacgtcatccc

SEQ ID NO: 258311 - DNA, 50 bp, Artificial
  Synthetic oligonucleotide
caaatcgttctgccacgtcatgtcgccctctcttgcgaacttgccggcgg

SEQ ID NO: 258312 - DNA, 50 bp, Artificial
  Synthetic oligonucleotide
actgcggcgaacgatcgcgtacctggcgcgaaatggaccagcgatcagac

SEQ ID NO: 258313 - DNA, 50 bp, Artificial
  Synthetic oligonucleotide
attggttcgagcggaagcttcgccggctttacagttcgatgcgcgatcgc

SEQ ID NO: 258314 - DNA, 50 bp, Artificial
  Synthetic oligonucleotide
attgcgcattgcactatccgacggtatgacgccctcgcgtctgccggcct

SEQ ID NO: 258315 - DNA, 50 bp, Artificial
  Synthetic oligonucleotide
attctagggcagtcgcgttcgctgagacgcaccgacgctaggcttgcagg

SEQ ID NO: 258316 - DNA, 50 bp, Artificial
  Synthetic oligonucleotide
atggtggcatggtcgcggggaaccagaggtcgtaatgcaacgctgcggat

SEQ ID NO: 258317 - DNA, 50 bp, Artificial
  Synthetic oligonucleotide
atgggcttcccttcgcaacatccggtggtccatggctccaagactggtcg

SEQ ID NO: 258318 - DNA, 50 bp, Artificial
  Synthetic oligonucleotide
agaccataggattcgaaagcggggctcccagcacaatcgctggtgcgacc

SEQ ID NO: 258319 - DNA, 60 bp, Artificial
  Synthetic oligonucleotide
tagaaataacctcgatatgatcgactctagaacgcaaggattgcctcctggttatgaacg

SEQ ID NO: 258320 - DNA, 50 bp, Artificial
  Synthetic oligonucleotide
atgcatgcgctggtgtgggttgactccaattctccccatatgtggggcgc

SEQ ID NO: 258321 - DNA, 50 bp, Artificial
  Synthetic oligonucleotide
atgaggtcgggccactaagctcgtcatgtagcgactcaagcatggccgcg

SEQ ID NO: 258322 - DNA, 50 bp, Artificial
  Synthetic oligonucleotide
atgaagtcggcgggcacttatggagcgagtggcaccaatctgctgcctgc

SEQ ID NO: 258323 - DNA, 50 bp, Artificial
  Synthetic oligonucleotide
agacgcaccgtcgtctggcgagagacgtgaatcgatccgcatccgcacat

SEQ ID NO: 258324 - DNA, 50 bp, Artificial
  Synthetic oligonucleotide
agacgcgcgctgcacgcatacgaaagctggtccgtattcctggaagcctc

SEQ ID NO: 258325 - DNA, 50 bp, Artificial
  Synthetic oligonucleotide
atcggagcgaggtgctaggcacttcggcacggttgtgatcgacacgcgcc

SEQ ID NO: 258326 - DNA, 50 bp, Artificial
  Synthetic oligonucleotide
agctcaagtgcgccattcggggcaactcgccgggtcaaagtcgcgtaatg

SEQ ID NO: 258327 - DNA, 50 bp, Artificial
  Synthetic oligonucleotide
atcaagacgtccccgggagtgttccctgcctccgtgggcccgcttggact

SEQ ID NO: 258328 - DNA, 50 bp, Artificial
  Synthetic oligonucleotide
agagaaatggagtcgcgggccggatatctggagcaggcgtgggatgccgt

SEQ ID NO: 258329 - DNA, 50 bp, Artificial
  Synthetic oligonucleotide
atacctgggccggtgacgtatgcgccaagcattcgctccataccctctgg

SEQ ID NO: 258330 - DNA, 59 bp, Artificial
  Synthetic oligonucleotide
tactaggattcggtggtggtcggtggacctcagatattgcaattagctactacaagacg

SEQ ID NO: 258331 - DNA, 50 bp, Artificial
  Synthetic oligonucleotide
gcttggcagtcaggtggttcgtagcgaggacagactcgtgagccgtgccg

SEQ ID NO: 258332 - DNA, 50 bp, Artificial
  Synthetic oligonucleotide
gctgttattaacggtgatggctggacgcatacgtccggtgaaattaacgc

SEQ ID NO: 258333 - DNA, 50 bp, Artificial
  Synthetic oligonucleotide
gctgtgcactgcatcatagcggcttcttcctacggtcgcggccattcagc

SEQ ID NO: 258334 - DNA, 50 bp, Artificial
  Synthetic oligonucleotide
gctgaccgaatcggtacgctgtcagaaatccgcgaggagctaggcgccaa

SEQ ID NO: 258335 - DNA, 50 bp, Artificial
  Synthetic oligonucleotide
aatgctattgcgcaacttgtcgctagtctgtgcgaagctgcgtaagtggg

SEQ ID NO: 258336 - DNA, 50 bp, Artificial
  Synthetic oligonucleotide
aatggtgcatgagggcggaaccaatcgggtgtgggcatacacgagtccct

SEQ ID NO: 258337 - DNA, 50 bp, Artificial
  Synthetic oligonucleotide
gcgtctatgggacgccctgagagctccatcgctcgcccaaagggtcgtgg

SEQ ID NO: 258338 - DNA, 50 bp, Artificial
  Synthetic oligonucleotide
gcgcgcagaagtgatcaaccgaccaagcgatcctgcttgcaaggcggcgt

SEQ ID NO: 258339 - DNA, 50 bp, Artificial
  Synthetic oligonucleotide
gcgcgaacgcatagacgacacgttgcgtggcatcaaaacgggtgccaact

SEQ ID NO: 258340 - DNA, 50 bp, Artificial
  Synthetic oligonucleotide
acaaagttcgccccagccacgacggtcaacaccgcgccttggaacttcag

SEQ ID NO: 258341 - DNA, 56 bp, Artificial
  Synthetic oligonucleotide
tacagttactcgctcgaaacctttcgggacgttccgttcttcgtgcgacagccaca

SEQ ID NO: 258342 - DNA, 50 bp, Artificial
  Synthetic oligonucleotide
gcaaattgggggctttgtagcgcaacaaaggcgtcatggcagacttgagg

SEQ ID NO: 258343 - DNA, 50 bp, Artificial
  Synthetic oligonucleotide
acacagcggcgatatgcttagcctatcccactagccactgcggacgggcc

SEQ ID NO: 258344 - DNA, 50 bp, Artificial
  Synthetic oligonucleotide
gaccaggctgcgaggaatgcagcggccaaacaccaggcgtgcgcggtcgt

SEQ ID NO: 258345 - DNA, 50 bp, Artificial
  Synthetic oligonucleotide
acagcgcatagctagcagtggcctgcccattaggcgcagcgttcaggtct

SEQ ID NO: 258346 - DNA, 50 bp, Artificial
  Synthetic oligonucleotide
acaggaaagctccctgcgctggcgtggagacgggattaaaggcaggagca

SEQ ID NO: 258347 - DNA, 50 bp, Artificial
  Synthetic oligonucleotide
acaggcatgaccgcctggggcctgaagatcctcagcccgagccttgtcta

SEQ ID NO: 258348 - DNA, 50 bp, Artificial
  Synthetic oligonucleotide
acaggcctcggtcaacggatccagaccccaagcctatcccagatcgggcg

SEQ ID NO: 258349 - DNA, 50 bp, Artificial
  Synthetic oligonucleotide
acaggtccgcgcactatagtccagaaaccggggcgcaaggcaagcgttgg

SEQ ID NO: 258350 - DNA, 50 bp, Artificial
  Synthetic oligonucleotide
aagccgacgtccaccctgtcaagcccgccgcaacgcctacccgtgccaac

SEQ ID NO: 258351 - DNA, 50 bp, Artificial
  Synthetic oligonucleotide
aagccgctgaatgttaaggaccgcgatgccccatgtcaaacccgcgtcat

SEQ ID NO: 258352 - DNA, 57 bp, Artificial
  Synthetic oligonucleotide
taaccaatcgagccgtggccgtgcctttggcgcggtcacggcgaaggagtccctatg

SEQ ID NO: 258353 - DNA, 50 bp, Artificial
  Synthetic oligonucleotide
aagcggcggatgttactcgattgcgctgccgcgccccattagatggacgc

SEQ ID NO: 258354 - DNA, 50 bp, Artificial
  Synthetic oligonucleotide
aagcgggaacggcagtgagcctgccctcagatccgggcatggggccagtt

SEQ ID NO: 258355 - DNA, 50 bp, Artificial
  Synthetic oligonucleotide
aaggcgcctgcccgatacgttgcgaacagacgcgtgaagaaagtccacgg

SEQ ID NO: 258356 - DNA, 50 bp, Artificial
  Synthetic oligonucleotide
agcgcgtggggcgactgccaccatccattgccggggaggctttcgaaccg

SEQ ID NO: 258357 - DNA, 50 bp, Artificial
  Synthetic oligonucleotide
aagggggctgcgcacatatctgaacgccgatgctggtttctgggtggtcc

SEQ ID NO: 258358 - DNA, 50 bp, Artificial
  Synthetic oligonucleotide
aaggtctacttgcagggaccaggctgcgaggaatgcagcggccaaacacc

SEQ ID NO: 258359 - DNA, 50 bp, Artificial
  Synthetic oligonucleotide
aagtccagggaatcggctgctgtcacgcacggttgctgctcaggggattt

SEQ ID NO: 258360 - DNA, 50 bp, Artificial
  Synthetic oligonucleotide
aagtcctccagcgctctttcagacgtgtcgccccgggtacgtgggccatt

SEQ ID NO: 258361 - DNA, 50 bp, Artificial
  Synthetic oligonucleotide
gggcgaggctcggagaacaagcagccattcgtgatcgcagtgcaagtgga

SEQ ID NO: 258362 - DNA, 50 bp, Artificial
  Synthetic oligonucleotide
aagtttgctggcacctcatcgggcgtgctaaagcgcgtttcttgcgaccg

SEQ ID NO: 258363 - DNA, 60 bp, Artificial
  Synthetic oligonucleotide
taacatttagtgcggtcgttataatggtgtgaactgcaaggcgcgagcatgaacaccatt

SEQ ID NO: 258364 - DNA, 50 bp, Artificial
  Synthetic oligonucleotide
ggcaatcgatggccaagagccaccgccgatcacggaagcgctgcgtccga

SEQ ID NO: 258365 - DNA, 50 bp, Artificial
  Synthetic oligonucleotide
ggcaagagtcagacccaacccatcttgggctgcgtcacgtttcggctccc

SEQ ID NO: 258366 - DNA, 50 bp, Artificial
  Synthetic oligonucleotide
ggatgcggctctcccggaggcgtcataagcagcgtggtgaaattgacggc

SEQ ID NO: 258367 - DNA, 50 bp, Artificial
  Synthetic oligonucleotide
ggatacagactcggatctcgctgcataacgctctcatcaaatattggccg

SEQ ID NO: 258368 - DNA, 50 bp, Artificial
  Synthetic oligonucleotide
ggactggtctgtgtctctttaggcattaaacccaaagcgctatagcaagc

SEQ ID NO: 258369 - DNA, 50 bp, Artificial
  Synthetic oligonucleotide
ggaagcgctgcgtccgagctcttcagggttcgggttgatcgctgtctcat

SEQ ID NO: 258370 - DNA, 50 bp, Artificial
  Synthetic oligonucleotide
aatcgtgacgggttcttcactccgcctttccccgggactcacgcgccggg

SEQ ID NO: 258371 - DNA, 50 bp, Artificial
  Synthetic oligonucleotide
cgccattggcaggcacctggccaccttctttggtcatcgtatttcctgtt

SEQ ID NO: 258372 - DNA, 50 bp, Artificial
  Synthetic oligonucleotide
cgccaggcttgcgatagatgtgacctcgaaatcccaatcacgaaatcgtg

SEQ ID NO: 258373 - DNA, 50 bp, Artificial
  Synthetic oligonucleotide
accgctgcccgtagtccaagtcgatgcctgcagtcgaaccgacctgcccc

SEQ ID NO: 258374 - DNA, 60 bp, Artificial
  Synthetic oligonucleotide
taaagcggcagcggttgcgacgttcaagagcgcatgtcgccacttcaagcgccaatacgg

SEQ ID NO: 258375 - DNA, 50 bp, Artificial
  Synthetic oligonucleotide
accgtagcgcttccaatggtgagcgttacatgcacacgagcgcgtcgcca

SEQ ID NO: 258376 - DNA, 50 bp, Artificial
  Synthetic oligonucleotide
accgttggttggtggccacaacgggcgtagcgttatgcctcttagcgtgg

SEQ ID NO: 258377 - DNA, 50 bp, Artificial
  Synthetic oligonucleotide
acctacgcggtatcctaggcagatgccttcccccgcccacgctttgctca

SEQ ID NO: 258378 - DNA, 50 bp, Artificial
  Synthetic oligonucleotide
acctgtcgcgtcgtgccgacccacatgacccgggtagcagatctggacga

SEQ ID NO: 258379 - DNA, 50 bp, Artificial
  Synthetic oligonucleotide
ccttccttcctatcgggagcgcgcagatgagtaacctccccgctgacccc

SEQ ID NO: 258380 - DNA, 50 bp, Artificial
  Synthetic oligonucleotide
cctggcccatacccacccgagcggcaaaggctctagaacgccctccggcg

SEQ ID NO: 258381 - DNA, 50 bp, Artificial
  Synthetic oligonucleotide
cctgatgaatggaaggccccattgtgcacggccgatgtcgccacgagatg

SEQ ID NO: 258382 - DNA, 50 bp, Artificial
  Synthetic oligonucleotide
cctcgtccgctggcacggcaaatgggcggcagacctggcaaggatccaac

SEQ ID NO: 258383 - DNA, 50 bp, Artificial
  Synthetic oligonucleotide
cctatcggcgatcggttccggtggctagcaagtgccttggggaagtgcgc

SEQ ID NO: 258384 - DNA, 50 bp, Artificial
  Synthetic oligonucleotide
acgaaggtgtgggtgctgcgtaagcgtgaggtcaggaggacgatgcgtgc

SEQ ID NO: 258385 - DNA, 59 bp, Artificial
  Synthetic oligonucleotide
taaactgtaattactggcatcggtcactctccgatagctggtcacgaccccgggtgctc

SEQ ID NO: 258386 - DNA, 50 bp, Artificial
  Synthetic oligonucleotide
ccgtgcaacaccccggtttcggggtcgaataggcgttaggccccctccac

SEQ ID NO: 258387 - DNA, 50 bp, Artificial
  Synthetic oligonucleotide
ccggcgtcaaggtgacccaccgattcgattctgtatctgggttgcgcgcg

SEQ ID NO: 258388 - DNA, 50 bp, Artificial
  Synthetic oligonucleotide
ccgaggcgaccttctcctatgacccacccgagccatacatggcacccaag

SEQ ID NO: 258389 - DNA, 50 bp, Artificial
  Synthetic oligonucleotide
acaggtgacaacccaggcgtctgcgtggcaattggttcgctggggaccac

SEQ ID NO: 258390 - DNA, 50 bp, Artificial
  Synthetic oligonucleotide
acagtggcgcagcctcagcacgtacaaacctggcacgaacccgcagcacc

SEQ ID NO: 258391 - DNA, 50 bp, Artificial
  Synthetic oligonucleotide
accaagaatcagccaggcacgccacgcacggaatcggcgaaaggtgtgtg

SEQ ID NO: 258392 - DNA, 50 bp, Artificial
  Synthetic oligonucleotide
accaagttgccgcaacggaatgtcaccatcgtgcagggttagcccaccga

SEQ ID NO: 258393 - DNA, 50 bp, Artificial
  Synthetic oligonucleotide
ctgtggatattcatcataccgcaggccttcactcgggcttgcctgctagt

SEQ ID NO: 258394 - DNA, 50 bp, Artificial
  Synthetic oligonucleotide
accacggatattgcggcgtcgttcgattcgggagaggcgcctagtaccgc

SEQ ID NO: 258395 - DNA, 50 bp, Artificial
  Synthetic oligonucleotide
accagcccgatctatccgcccaacgacggggacgtgacagttccgagatg

SEQ ID NO: 258396 - DNA, 60 bp, Artificial
  Synthetic oligonucleotide
agtttggcggaattgacgcagatggtcgaaaatcataagggcaatgagtgtgatgattca

SEQ ID NO: 258397 - DNA, 58 bp, Artificial
  Synthetic oligonucleotide
cggggtgattccccttccaagtcatggtgctagcccatcccaacagggtatcaacatc

SEQ ID NO: 258398 - DNA, 55 bp, Artificial
  Synthetic oligonucleotide
tgagtcggcgtctcaatcgtcgctttggcctggagcgtcttgggtgcgcggatca

SEQ ID NO: 258399 - DNA, 55 bp, Artificial
  Synthetic oligonucleotide
tgcctccccataaaaccctaatttctgcagcacattgccacattgcagccaggca

SEQ ID NO: 258400 - DNA, 55 bp, Artificial
  Synthetic oligonucleotide
tgtggatggccccaccatcgtctccttgaccaccagaattggctatcccacccgt

SEQ ID NO: 258401 - DNA, 55 bp, Artificial
  Synthetic oligonucleotide
ttacccctgatccgcgcacccaagacgctccaggccaaagcgacgattgagacgc

SEQ ID NO: 258402 - DNA, 55 bp, Artificial
  Synthetic oligonucleotide
ttataagatgatctgctccgccactaatcaagtagtcaccagatggactgaatac

SEQ ID NO: 258403 - DNA, 55 bp, Artificial
  Synthetic oligonucleotide
ttatgactcgcaagccaaattcttctgacgatcgcccttctaacaactctatcag

SEQ ID NO: 258404 - DNA, 55 bp, Artificial
  Synthetic oligonucleotide
ttgagctgcccaaggagtgacaggaggattagaggcttgatcacttccccacgcc

SEQ ID NO: 258405 - DNA, 55 bp, Artificial
  Synthetic oligonucleotide
ttgccctgtccgaatataggggttcacgtcatcgcctaacaccagcagtcatcgt

SEQ ID NO: 258406 - DNA, 55 bp, Artificial
  Synthetic oligonucleotide
ttgctctcattaaatgctgataagcaacgacactcccttgatcggctaaatcccc

SEQ ID NO: 258407 - DNA, 55 bp, Artificial
  Synthetic oligonucleotide
ttggctcgtatggataggggcttgatccaccacaatgacggtgggcaactccacg

SEQ ID NO: 258408 - DNA, 60 bp, Artificial
  Synthetic oligonucleotide
ctccgggcaaaagccaagacctatgaccaggtggcatctgagacaggttactccagtggc

SEQ ID NO: 258409 - DNA, 55 bp, Artificial
  Synthetic oligonucleotide
ttggttcaaggcttatgccaaccgctctctgccctttaattttctacgtcaaacc

SEQ ID NO: 258410 - DNA, 55 bp, Artificial
  Synthetic oligonucleotide
acaacagccttgagtacagttgcgatcattcggttttaatggggcgagaatcacg

SEQ ID NO: 258411 - DNA, 55 bp, Artificial
  Synthetic oligonucleotide
ggcattaactagatttgcaccccatagattagaagatgtgagttgggcacaggtg

SEQ ID NO: 258412 - DNA, 53 bp, Artificial
  Synthetic oligonucleotide
ggcgtgggccatactgggtatcccattctttggccgggaaaaggacttgggcg

SEQ ID NO: 258413 - DNA, 55 bp, Artificial
  Synthetic oligonucleotide
ggctacccagccggtctctaatccacaactcgggatgaatttaggggaggtggtg

SEQ ID NO: 258414 - DNA, 54 bp, Artificial
  Synthetic oligonucleotide
ggctatggacgttagtctacacgacgggagttaatcaccgtaccaccgtaagga

SEQ ID NO: 258415 - DNA, 55 bp, Artificial
  Synthetic oligonucleotide
ggctctacattgagaagaactagcacactcattcatacactgaccgacattaccc

SEQ ID NO: 258416 - DNA, 55 bp, Artificial
  Synthetic oligonucleotide
ggctgaattaaacaccgttgccttatggtctagggtgtcagatttaaggctcttg

SEQ ID NO: 258417 - DNA, 55 bp, Artificial
  Synthetic oligonucleotide
gggaacatggattgactggcggttcacgacgcaagatgccagggtcaaattacac

SEQ ID NO: 258418 - DNA, 55 bp, Artificial
  Synthetic oligonucleotide
gggagacatcacggaatacgatgacaaacccgcagaagcaaggctatggatcgac

SEQ ID NO: 258419 - DNA, 59 bp, Artificial
  Synthetic oligonucleotide
gaagattggctgatttacagagctttaagaagactgacataggctgttttactaggtaa

SEQ ID NO: 258420 - DNA, 55 bp, Artificial
  Synthetic oligonucleotide
gggatggatcttgaggcgtaaggtcgctaagtagttttcaatggaggtgcggcag

SEQ ID NO: 258421 - DNA, 55 bp, Artificial
  Synthetic oligonucleotide
gggcaatagtaatcttgtgtcgtcggcaatctaggtagcgaagatcgaaataccc

SEQ ID NO: 258422 - DNA, 55 bp, Artificial
  Synthetic oligonucleotide
gggccgagaccgatagccaaggagcgattgaatcccgtactccacaatgatccgt

SEQ ID NO: 258423 - DNA, 55 bp, Artificial
  Synthetic oligonucleotide
gggcgggtttccatcctcgcagcatgagacaaaccgtcttggctatcgtgagcta

SEQ ID NO: 258424 - DNA, 55 bp, Artificial
  Synthetic oligonucleotide
ggggctgaacatcaatgttttaggataggggtatcaacacgccagcgctaacgct

SEQ ID NO: 258425 - DNA, 55 bp, Artificial
  Synthetic oligonucleotide
gggtggtggcctcaaaagcgctacccgtttcaatgctgccaatcgactgctccag

SEQ ID NO: 258426 - DNA, 55 bp, Artificial
  Synthetic oligonucleotide
ggtgaatcgttggcctattctctaaattcactccaaggggaaacacagcccctag

SEQ ID NO: 258427 - DNA, 55 bp, Artificial
  Synthetic oligonucleotide
ggtgagtcagcaagacggaagtaaggcatttacctgaaggaacgcgcctcatccc

SEQ ID NO: 258428 - DNA, 55 bp, Artificial
  Synthetic oligonucleotide
ggttgataactatgaccactgagttgatttagaaggactgagcccatcgccatac

SEQ ID NO: 258429 - DNA, 55 bp, Artificial
  Synthetic oligonucleotide
ggttgatgggtgccggcctcaattcgttgtccggttcttgtagatatttcggcaa

SEQ ID NO: 258430 - DNA, 60 bp, Artificial
  Synthetic oligonucleotide
gacgattgcaatccttacactgatatcgctggactaatgtcccatcttgcagactatcaa

SEQ ID NO: 258431 - DNA, 55 bp, Artificial
  Synthetic oligonucleotide
gtaaatgggaagtggccttttccggggcagaaccgatcaaagctgataccctcga

SEQ ID NO: 258432 - DNA, 55 bp, Artificial
  Synthetic oligonucleotide
gtagggttaagcagcgggatccgaatcataaaacgagtttggctaccgatctgtg

SEQ ID NO: 258433 - DNA, 55 bp, Artificial
  Synthetic oligonucleotide
gtattcgaggtaatacgattggaggtcggttgcgcttacaggtacgacctactcc

SEQ ID NO: 258434 - DNA, 53 bp, Artificial
  Synthetic oligonucleotide
gtccccgtaggagagggtttactgggtcgagtcgtggatgcaaccggtcgtcc

SEQ ID NO: 258435 - DNA, 55 bp, Artificial
  Synthetic oligonucleotide
gtctacggaggcgatctcaacttggcctggaatccatctttaggcagaagggtca

SEQ ID NO: 258436 - DNA, 55 bp, Artificial
  Synthetic oligonucleotide
gtctattgtccaaggcgtaacatgaactgaattgcgagaaggttgaacatcgtcg

SEQ ID NO: 258437 - DNA, 55 bp, Artificial
  Synthetic oligonucleotide
cctgaattggttcaaccgtgtattggctccgatttcaaccctccccgagattgca

SEQ ID NO: 258438 - DNA, 52 bp, Artificial
  Synthetic oligonucleotide
cctgagttcgggccgcttcgttaggggagggactggacttgggttttctcta

SEQ ID NO: 258439 - DNA, 55 bp, Artificial
  Synthetic oligonucleotide
cctggcaaattaagatcgcctgtcaagtcttccattcgctcacgcatggtatcgg

SEQ ID NO: 258440 - DNA, 52 bp, Artificial
  Synthetic oligonucleotide
cctgggctactttggggccgttccatagaccaccgtcggcgggtggtgtttg

SEQ ID NO: 258441 - DNA, 55 bp, Artificial
  Synthetic oligonucleotide
gagcgattactgatcgcctttgaaacgtggacagagttagataaacgaaaacggt

SEQ ID NO: 258442 - DNA, 55 bp, Artificial
  Synthetic oligonucleotide
ccttgatccgcgatggggttatccgttagatagatcgccccaaatccaatcacga

SEQ ID NO: 258443 - DNA, 55 bp, Artificial
  Synthetic oligonucleotide
caaacgatggattgtagagcggacgtttggatggttgttgtggtctcgacgtctc

SEQ ID NO: 258444 - DNA, 55 bp, Artificial
  Synthetic oligonucleotide
cgacgggactgctgactacagtcttactccagttgggagcagtctatctgtccgg

SEQ ID NO: 258445 - DNA, 53 bp, Artificial
  Synthetic oligonucleotide
cgagaccagttagggccgtttaacctcgcgttttactggaagcgacagtatcg

SEQ ID NO: 258446 - DNA, 55 bp, Artificial
  Synthetic oligonucleotide
cgagttctaccccgatgctggggcgattcagaacaagtcagtactgcggcaatac

SEQ ID NO: 258447 - DNA, 55 bp, Artificial
  Synthetic oligonucleotide
cgcaccttatgccgggagcaatgttcttaaactaggccaccgcgtctagtttgag

SEQ ID NO: 258448 - DNA, 55 bp, Artificial
  Synthetic oligonucleotide
cgcataactcccctatgcagaatattagatgtcaagtgtcgtctaacacccctga

SEQ ID NO: 258449 - DNA, 55 bp, Artificial
  Synthetic oligonucleotide
atggagaacgtcgatactccaaggtattgtggaagctagcgagtgcctacttgcc

SEQ ID NO: 258450 - DNA, 54 bp, Artificial
  Synthetic oligonucleotide
cgccgattcccctgagaccctttaactttcatcacgacttctaacccttctcgc

SEQ ID NO: 258451 - DNA, 55 bp, Artificial
  Synthetic oligonucleotide
cgcctacgtcagtttagagccgtgtaatcactttgggcgcactccgccgtgttcc

SEQ ID NO: 258452 - DNA, 60 bp, Artificial
  Synthetic oligonucleotide
gccttcatctcatagattgattggctcgtatggataggggcttgatccaccacaatgacg

SEQ ID NO: 258453 - DNA, 55 bp, Artificial
  Synthetic oligonucleotide
atgaaagttaaagggtctcaggggaatcggcgagtagagtgggtgaaagcagagc

SEQ ID NO: 258454 - DNA, 55 bp, Artificial
  Synthetic oligonucleotide
cggatcgcttgaatcgggctggagctgcttaataacgcactttggataatcgggt

SEQ ID NO: 258455 - DNA, 55 bp, Artificial
  Synthetic oligonucleotide
atctcttgtcgattcaaaataactcgcagattgctaatctcaatgctacgaccca

SEQ ID NO: 258456 - DNA, 55 bp, Artificial
  Synthetic oligonucleotide
cggctggctcaacagtgcaaactggtcgcagactactcttggagggacggagagt

SEQ ID NO: 258457 - DNA, 55 bp, Artificial
  Synthetic oligonucleotide
cggtaaagggatgctctgctttcacccactctactcgccgattcccctgagaccc

SEQ ID NO: 258458 - DNA, 55 bp, Artificial
  Synthetic oligonucleotide
cggtagcgcatactaacacctatgtttgagggctaaatgctttacagttgagggc

SEQ ID NO: 258459 - DNA, 55 bp, Artificial
  Synthetic oligonucleotide
cggtcgtggtatagatgcagttccaattgacggccaattagccgagaaggaacgg

SEQ ID NO: 258460 - DNA, 55 bp, Artificial
  Synthetic oligonucleotide
cgtagaaaggatcgtaatgaatgcaatggtctggagagagcgaatcatcgtagac

SEQ ID NO: 258461 - DNA, 55 bp, Artificial
  Synthetic oligonucleotide
cgtagtgacttcggggctaccgtaggtgacgccaattttctggcgaagctgattc

SEQ ID NO: 258462 - DNA, 55 bp, Artificial
  Synthetic oligonucleotide
cagtcccacgccaagagagtcaacggattcatccaagtcttccaagtaaacgcga

SEQ ID NO: 258463 - DNA, 58 bp, Artificial
  Synthetic oligonucleotide
gcctttgggattacgaatctgagtgagattaccttcaatgcaacaacgggggagctat

SEQ ID NO: 258464 - DNA, 55 bp, Artificial
  Synthetic oligonucleotide
cagactcaatcttcgaaggtcctggtaattagctctaaaacctaagatcaccctc

SEQ ID NO: 258465 - DNA, 55 bp, Artificial
  Synthetic oligonucleotide
agagtgtgatggatagacagcggttacatatggagcagcatcctgaccattaccc

SEQ ID NO: 258466 - DNA, 55 bp, Artificial
  Synthetic oligonucleotide
cagtcctccaagtcgctgcctgtattggtactcaatttgacttacataccttagc

SEQ ID NO: 258467 - DNA, 55 bp, Artificial
  Synthetic oligonucleotide
cacgtgagtaaagctctgacacagcgcttagagcggaccaatggcatactacgtc

SEQ ID NO: 258468 - DNA, 55 bp, Artificial
  Synthetic oligonucleotide
cataaaatgaccctccgagagttaagccgctcctctggccaagacatcgctggcg

SEQ ID NO: 258469 - DNA, 55 bp, Artificial
  Synthetic oligonucleotide
catgtgttcgcttaaccactgtggatctgcgacaaccaaactattgagagcagcc

SEQ ID NO: 258470 - DNA, 55 bp, Artificial
  Synthetic oligonucleotide
caccttagctacgattaacccgtactcctcccatatagcgatctgtggactgatc

SEQ ID NO: 258471 - DNA, 55 bp, Artificial
  Synthetic oligonucleotide
ccagacttaattcaccattgacaagcccttgattcagatgggtagtaaggaccgc

SEQ ID NO: 258472 - DNA, 55 bp, Artificial
  Synthetic oligonucleotide
ccagcctggcgtaaacaaatggcccaagctattgcccagggaattctcaactatt

SEQ ID NO: 258473 - DNA, 55 bp, Artificial
  Synthetic oligonucleotide
ccagtaccgacgtggctgcaaacgatacgagctatagccgatcccattccatatc

SEQ ID NO: 258474 - DNA, 60 bp, Artificial
  Synthetic oligonucleotide
gcgatcagttgcttctgagtcggcgtctcaatcgtcgctttggcctggagcgtcttgggt

SEQ ID NO: 258475 - DNA, 55 bp, Artificial
  Synthetic oligonucleotide
ccatctcattgcaaatggtcaaatggggtggatgacaacgctgaatatgggcaac

SEQ ID NO: 258476 - DNA, 55 bp, Artificial
  Synthetic oligonucleotide
ccatctgtcctcaatgttagcggtccttactacccatctgaatcaagggcttgtc

SEQ ID NO: 258477 - DNA, 55 bp, Artificial
  Synthetic oligonucleotide
cccacgcgagagaccctcaaccaagttcactctctcaaacgtgagttgatgaatc

SEQ ID NO: 258478 - DNA, 55 bp, Artificial
  Synthetic oligonucleotide
agagatgtatcagtcctgatctaggataatgcgtgaaaagtgaccagcgtctcag

SEQ ID NO: 258479 - DNA, 55 bp, Artificial
  Synthetic oligonucleotide
ccccaatagtctcttcactagcaattttgatgggttcccaactctgattagtcct

SEQ ID NO: 258480 - DNA, 55 bp, Artificial
  Synthetic oligonucleotide
ccctcaatcgctacgttaatcgcattggtcagcgtttggtgcaagcgggtgccaa

SEQ ID NO: 258481 - DNA, 54 bp, Artificial
  Synthetic oligonucleotide
ccgccccttgtcacccggtatctatcctccagggacggtcgcagtatagggcgt

SEQ ID NO: 258482 - DNA, 55 bp, Artificial
  Synthetic oligonucleotide
ccggacccagagcatttggttgccaccgggtacagggtcaggcacagactttgaa

SEQ ID NO: 258483 - DNA, 55 bp, Artificial
  Synthetic oligonucleotide
cacataggaattgcgtaactctatgctcactatgctcaagcgggcagagcgatac

SEQ ID NO: 258484 - DNA, 55 bp, Artificial
  Synthetic oligonucleotide
caaccctccagtcagctcgttaaatagcccgccaactaccccactaatcagcccg

SEQ ID NO: 258485 - DNA, 58 bp, Artificial
  Synthetic oligonucleotide
gcggcgagaagaataccaatgcaatcagggggttcccttgatgcccctagtccatccc

SEQ ID NO: 258486 - DNA, 55 bp, Artificial
  Synthetic oligonucleotide
cctcagtgagaccttagcaaccctcgattatcgtaataagattccaggtgcttcc

SEQ ID NO: 258487 - DNA, 55 bp, Artificial
  Synthetic oligonucleotide
ctccagagctaatgctaaccatcgtccaaaagttaaccgcaatcgtcccaatggg

SEQ ID NO: 258488 - DNA, 55 bp, Artificial
  Synthetic oligonucleotide
ctccgagagaaactcacgcagatatttgagggcaggtacaccaagcacggagcta

SEQ ID NO: 258489 - DNA, 55 bp, Artificial
  Synthetic oligonucleotide
ctcaattctagagcaacgtcaccaatgcgtcgattgagtagacgaaggatgagcg

SEQ ID NO: 258490 - DNA, 55 bp, Artificial
  Synthetic oligonucleotide
ctcaacgtaccagtgattgaatcttggcgttgcattgacattaggaatcaagtga

SEQ ID NO: 258491 - DNA, 55 bp, Artificial
  Synthetic oligonucleotide
ctatggatgatgcgtttacttcatgcagccatgataaatagacgcttggcggtag

SEQ ID NO: 258492 - DNA, 55 bp, Artificial
  Synthetic oligonucleotide
ctcctggctactgcgggtggaatccaaaggtgttgaatgagtcaggtgggatgcc

SEQ ID NO: 258493 - DNA, 55 bp, Artificial
  Synthetic oligonucleotide
ctatcatgatctgtccttcgatgaacgactggctctaatggtggagcgtgaatac

SEQ ID NO: 258494 - DNA, 55 bp, Artificial
  Synthetic oligonucleotide
ctagacgcggtggcctagtttaagaacattgctcccggcataaggtgcgacctta

SEQ ID NO: 258495 - DNA, 53 bp, Artificial
  Synthetic oligonucleotide
ctactattcttgcggggtattaacttaagccgggcaaccttatccctcaagga

SEQ ID NO: 258496 - DNA, 60 bp, Artificial
  Synthetic oligonucleotide
ggcaagattgaaataggatgcgaatagcagcataaaattgattactaaatgctgctattc

SEQ ID NO: 258497 - DNA, 55 bp, Artificial
  Synthetic oligonucleotide
ctcggagctaactaactttcgaccaattaccgtctggcgacctgcccatgagact

SEQ ID NO: 258498 - DNA, 55 bp, Artificial
  Synthetic oligonucleotide
ctgatatcgctggactaatgtcccatcttgcagactatcaaagccacgcttaagg

SEQ ID NO: 258499 - DNA, 55 bp, Artificial
  Synthetic oligonucleotide
ctaagaactgccgatattgggtaaacgcgccctcaaaatcttgttttcgaatcag

SEQ ID NO: 258500 - DNA, 55 bp, Artificial
  Synthetic oligonucleotide
ctgcgtgagggagtacaagccttataaattcagcgatagagcgcatctcaaagga

SEQ ID NO: 258501 - DNA, 55 bp, Artificial
  Synthetic oligonucleotide
agcgtttgaggcttcctcacgtccgagaacgctaatcctttgagaaagttgtgag

SEQ ID NO: 258502 - DNA, 55 bp, Artificial
  Synthetic oligonucleotide
atcgtgatcacaggctttcgtttgggttcgagtcttgccccgacgagaggacgcc

SEQ ID NO: 258503 - DNA, 55 bp, Artificial
  Synthetic oligonucleotide
ctggcaagctgccaaagttcttgtccataacgcctttcaccatcggtaaaccatc

SEQ ID NO: 258504 - DNA, 55 bp, Artificial
  Synthetic oligonucleotide
cgtcacaccagcctttgcgtgccagtttctacgtttatgaatgacgtggttgaag

SEQ ID NO: 258505 - DNA, 55 bp, Artificial
  Synthetic oligonucleotide
cgtcgggctactctcaaaatactagcgggagcaggaccgagaatactgccctcat

SEQ ID NO: 258506 - DNA, 55 bp, Artificial
  Synthetic oligonucleotide
cgttgcattctatacaccgttccttctcggctaattggccgtcaattggaactgc

SEQ ID NO: 258507 - DNA, 60 bp, Artificial
  Synthetic oligonucleotide
atcacctttgagatagacactggcaagctgccaaagttcttgtccataacgcctttcacc

SEQ ID NO: 258508 - DNA, 60 bp, Artificial
  Synthetic oligonucleotide
gtgctgaggcaaccaatgtaggttcccggcaaaactgctgttgactgggctggagattac

SEQ ID NO: 258509 - DNA, 55 bp, Artificial
  Synthetic oligonucleotide
ctggcagcattgctaaccgtctgtggcccaggtgctcagattatcgtgccgagga

SEQ ID NO: 258510 - DNA, 54 bp, Artificial
  Synthetic oligonucleotide
ttgattcgatcagtcttcccaggaggtaccattactggctgccctaaggtccgg

SEQ ID NO: 258511 - DNA, 54 bp, Artificial
  Synthetic oligonucleotide
gcgatatcgggccaaggtcactcgtgaaatctatgtgactcgcaaggctcatat

SEQ ID NO: 258512 - DNA, 54 bp, Artificial
  Synthetic oligonucleotide
tgccaaggacttgaacacccgtcaaaccaaggcataccttactgccgaggactg

SEQ ID NO: 258513 - DNA, 54 bp, Artificial
  Synthetic oligonucleotide
tcaatggcaagagccgataaaattctccaacgattagggttgctcaatacgcct

SEQ ID NO: 258514 - DNA, 54 bp, Artificial
  Synthetic oligonucleotide
caggcgagcgttgccttccacaatcttcgatatgcccccgattaacgtaaattt

SEQ ID NO: 258515 - DNA, 54 bp, Artificial
  Synthetic oligonucleotide
ggcacctgatgcgaagcggtttcggtgtgatcaaatggcagcgctagaacgtga

SEQ ID NO: 258516 - DNA, 54 bp, Artificial
  Synthetic oligonucleotide
tagcttttaaccagacctcgctgttggagctctcttaagccgacctgggctttt

SEQ ID NO: 258517 - DNA, 54 bp, Artificial
  Synthetic oligonucleotide
ggttcaggggtgggttcactgacggcaagttgagcgatggttgctccctctaga

SEQ ID NO: 258518 - DNA, 54 bp, Artificial
  Synthetic oligonucleotide
agtaccttgagagctttactcacttctcaaacagcctctaacgaactgcgttca

SEQ ID NO: 258519 - DNA, 60 bp, Artificial
  Synthetic oligonucleotide
tacatcgtctcctcaaggcagcattgtgagcctcattatgattggcatggatctcagacc

SEQ ID NO: 258520 - DNA, 54 bp, Artificial
  Synthetic oligonucleotide
gagaagggttagaagtcgtgatgaaagttaaagggtctcaggggaatcggcgag

SEQ ID NO: 258521 - DNA, 54 bp, Artificial
  Synthetic oligonucleotide
cgttgccatgtgcgacgttcctcgtataaacaccgcgatcgctataaccgaaat

SEQ ID NO: 258522 - DNA, 54 bp, Artificial
  Synthetic oligonucleotide
gctgttaccagagagggcaatcacttggccttgcttaacaggatcacctatttg

SEQ ID NO: 258523 - DNA, 54 bp, Artificial
  Synthetic oligonucleotide
acatttatggatcggaccactccaaccactgctggattcgactacagcttccag

SEQ ID NO: 258524 - DNA, 54 bp, Artificial
  Synthetic oligonucleotide
ctgctaaaggaaacccaacgatggatagtttgaacgcaatctttactgcactgc

SEQ ID NO: 258525 - DNA, 53 bp, Artificial
  Synthetic oligonucleotide
caccgcagccctagccacaccagatggcttggtcagagacgttatctaccccg

SEQ ID NO: 258526 - DNA, 53 bp, Artificial
  Synthetic oligonucleotide
ctccttggccccctcgtgggcttgagcttcaccctcgtgagtacgccttccgt

SEQ ID NO: 258527 - DNA, 53 bp, Artificial
  Synthetic oligonucleotide
acctaagatcaccctctaaatcaccgattatcacgcctagcttgtgatccagc

SEQ ID NO: 258528 - DNA, 53 bp, Artificial
  Synthetic oligonucleotide
cccatgccacagatccatacacacagcctgatattcaactcgacaaagtgcaa

SEQ ID NO: 258529 - DNA, 53 bp, Artificial
  Synthetic oligonucleotide
ctgaacccgacccggtgactcggcgaacattgcccaaagaggagtgtgagtcg

SEQ ID NO: 258530 - DNA, 60 bp, Artificial
  Synthetic oligonucleotide
tctaacccttctcgccaaaccttgcgatgcccatagtcaggatgacactcatcacctttg

SEQ ID NO: 258531 - DNA, 53 bp, Artificial
  Synthetic oligonucleotide
aggccactgcgtttgtcctaccgccactccctactgatgcccccacccgctaa

SEQ ID NO: 258532 - DNA, 53 bp, Artificial
  Synthetic oligonucleotide
ccggttgaggcatccggtagtctaaggtttgggccgcttgctgccagacggct

SEQ ID NO: 258533 - DNA, 53 bp, Artificial
  Synthetic oligonucleotide
ctgatcttcggaggaaagggcgtcaaccccatgggtcgtaaagattcgaccta

SEQ ID NO: 258534 - DNA, 53 bp, Artificial
  Synthetic oligonucleotide
gatggtcggaccttggttcaggtgaatgcattgacccgcgatcgcaacaacga

SEQ ID NO: 258535 - DNA, 53 bp, Artificial
  Synthetic oligonucleotide
ctaacttagtcatgggtgtatcatgagctggtcgtacaaacccaaccccaata

SEQ ID NO: 258536 - DNA, 53 bp, Artificial
  Synthetic oligonucleotide
ctacacagcatcgtactgatagtttgagtgcagcctatcgcaacatgtgcggc

SEQ ID NO: 258537 - DNA, 53 bp, Artificial
  Synthetic oligonucleotide
ggaacgtccgaactcggttcgagaggccactgcgtttgtcctaccgccactcc

SEQ ID NO: 258538 - DNA, 52 bp, Artificial
  Synthetic oligonucleotide
aatagaccagccgcacccctatcgcagcagcatactccctgatgactgcccc

SEQ ID NO: 258539 - DNA, 52 bp, Artificial
  Synthetic oligonucleotide
ccagaagcgtttacgtgtctagcacggaagccccgacgtgcaccgtcgtact

SEQ ID NO: 258540 - DNA, 52 bp, Artificial
  Synthetic oligonucleotide
aagcatgggattatcgttgttgaactcaacttcagccagtagattagaggcc

SEQ ID NO: 258541 - DNA, 60 bp, Artificial
  Synthetic oligonucleotide
tctcctcaaggcagcattgtgagcctcattatgattggcatggatctcagaccttggact

SEQ ID NO: 258542 - DNA, 52 bp, Artificial
  Synthetic oligonucleotide
agacacaacggtcactgctgctcccacggtggtcaccacagctcccgtatag

SEQ ID NO: 258543 - DNA, 52 bp, Artificial
  Synthetic oligonucleotide
tctcaatcgtcgctttggcctggagcgtcttgggtgcgcggatcaggggcaa

SEQ ID NO: 258544 - DNA, 52 bp, Artificial
  Synthetic oligonucleotide
agagtgaggcgacgcccaacccaactgtcggagcggcaattagcacgtactc

SEQ ID NO: 258545 - DNA, 52 bp, Artificial
  Synthetic oligonucleotide
cttccaatagtaacggagcaatttggccagtagactgtataagctaatcacg

SEQ ID NO: 258546 - DNA, 52 bp, Artificial
  Synthetic oligonucleotide
tacattcgggcagggatagtggaacgctcaatgattgaaatgcgacgtggat

SEQ ID NO: 258547 - DNA, 52 bp, Artificial
  Synthetic oligonucleotide
tacgatgtccctgtggtggcaattaacacggggcggtcctgccatctagacg

SEQ ID NO: 258548 - DNA, 52 bp, Artificial
  Synthetic oligonucleotide
tagatacctcgtctaaggcaatcgctctcattcggtgggcaatgtctcggta

SEQ ID NO: 258549 - DNA, 52 bp, Artificial
  Synthetic oligonucleotide
ctggcatgaaacgtagctatggaatatccgagaacttaactgggatactagt

SEQ ID NO: 258550 - DNA, 52 bp, Artificial
  Synthetic oligonucleotide
tcgttcgttgcacctgacgccgttcgttaagggcctgatgcaattcacgggg

SEQ ID NO: 258551 - DNA, 52 bp, Artificial
  Synthetic oligonucleotide
actgttgcactccaccaggcaacggcttgacgagtgtcactgcggtgagcga

SEQ ID NO: 258552 - DNA, 60 bp, Artificial
  Synthetic oligonucleotide
tgccacggttcggcaaagactgcttgttctgcgggtaaccacaccgcatgattgctacga

SEQ ID NO: 258553 - DNA, 52 bp, Artificial
  Synthetic oligonucleotide
tcagtgaccgacgcccccgtgacatacgaccagcaccactaggttcgccctc

SEQ ID NO: 258554 - DNA, 52 bp, Artificial
  Synthetic oligonucleotide
cagctttcgatgcgcgaaccgcttcaaactcaaccgcttctagatcagccaa

SEQ ID NO: 258555 - DNA, 52 bp, Artificial
  Synthetic oligonucleotide
tgatgacggactgaggggccaaccacaaatagacctggcgtcagcgtagact

SEQ ID NO: 258556 - DNA, 52 bp, Artificial
  Synthetic oligonucleotide
gcactatgctcaggtgtattgaacacacgattacccacgggaatatcattat

SEQ ID NO: 258557 - DNA, 52 bp, Artificial
  Synthetic oligonucleotide
ccttggtgacgtgccacggtctttgaccccggtggacctgctagagccatgg

SEQ ID NO: 258558 - DNA, 52 bp, Artificial
  Synthetic oligonucleotide
gggcttaactgccctcgcagcagtggatcagggaaatcgcctagtgggcaat

SEQ ID NO: 258559 - DNA, 52 bp, Artificial
  Synthetic oligonucleotide
agattacgacgcaaccctactcctctcggtgtctagccaccctcagtagtga

SEQ ID NO: 258560 - DNA, 52 bp, Artificial
  Synthetic oligonucleotide
agttttgccaggaacgagggtggctaaaacctcgcagtcgccaacgaacgga

SEQ ID NO: 258561 - DNA, 52 bp, Artificial
  Synthetic oligonucleotide
ggagtatcgggtgcaaggaccggatgctaatttacgagttttgtctgccgaa

SEQ ID NO: 258562 - DNA, 52 bp, Artificial
  Synthetic oligonucleotide
gagcctcatcctttcatgcagcggtggatctagcgttacccttgggtgcgcc

SEQ ID NO: 258563 - DNA, 56 bp, Artificial
  Synthetic oligonucleotide
ttagccgcagatccgggttggttggagcgcgccgagaactgccttattttgggacc

SEQ ID NO: 258564 - DNA, 52 bp, Artificial
  Synthetic oligonucleotide
ggagcattggtatcggtttgtccgccagcgtctccattggaccgttccccaa

SEQ ID NO: 258565 - DNA, 52 bp, Artificial
  Synthetic oligonucleotide
ggttcgagaggccactgcgtttgtcctaccgccactccctactgatgccccc

SEQ ID NO: 258566 - DNA, 52 bp, Artificial
  Synthetic oligonucleotide
cgatatagggcagtcacccctggtaatcctaccgttagatgaccctgactga

SEQ ID NO: 258567 - DNA, 52 bp, Artificial
  Synthetic oligonucleotide
ggactcgagtggacacacacaagcgtcgcttctggcacctgctcctcagcct

SEQ ID NO: 258568 - DNA, 52 bp, Artificial
  Synthetic oligonucleotide
gactctttctccctaatcatcgtggttagtggcccgtgggtcataacccagg

SEQ ID NO: 258569 - DNA, 52 bp, Artificial
  Synthetic oligonucleotide
attctcagggctagcactgcttctgcgagtttgcggctaaaagctctttctg

SEQ ID NO: 258570 - DNA, 52 bp, Artificial
  Synthetic oligonucleotide
gccagttgcgggcttaactgccctcgcagcagtggatcagggaaatcgccta

SEQ ID NO: 258571 - DNA, 51 bp, Artificial
  Synthetic oligonucleotide
atccatgggatttcactctgatacggcagaggaattatctccaggtactgg

SEQ ID NO: 258572 - DNA, 51 bp, Artificial
  Synthetic oligonucleotide
tgtcggtcttacgggcgttgccgtctgatcctcacgctgagacctgtgctg

SEQ ID NO: 258573 - DNA, 51 bp, Artificial
  Synthetic oligonucleotide
aaaagtgatttaacgagtgtaccaaagaaaagctgcttcagactgagcttc

SEQ ID NO: 258574 - DNA, 58 bp, Artificial
  Synthetic oligonucleotide
ttatcctgtattctcaaactagacgcggtggcctagtttaagaacattgctcccggca

SEQ ID NO: 258575 - DNA, 51 bp, Artificial
  Synthetic oligonucleotide
aggtttcagacgcacggctctgacgcggatgcacaatgctggagtgccgac

SEQ ID NO: 258576 - DNA, 51 bp, Artificial
  Synthetic oligonucleotide
atcacgcaccgtgccttctcgccgaaagggggcataaacgggctgatctaa

SEQ ID NO: 258577 - DNA, 51 bp, Artificial
  Synthetic oligonucleotide
aacaccattgaaactgatttgtggcttgacggtcccactagtccgtctgga

SEQ ID NO: 258578 - DNA, 51 bp, Artificial
  Synthetic oligonucleotide
tgagattgcaccatagacgggcagcgatacccccggaccattgcgctctga

SEQ ID NO: 258579 - DNA, 51 bp, Artificial
  Synthetic oligonucleotide
tctgacagagattctgcgtcgccatcaggggctacgcacccgcattgagac

SEQ ID NO: 258580 - DNA, 51 bp, Artificial
  Synthetic oligonucleotide
cagagggaacccgaccagccaagcgggaaccagggcatgaggagctgggag

SEQ ID NO: 258581 - DNA, 51 bp, Artificial
  Synthetic oligonucleotide
ctgtgccttattaaaggcctcgccgatcaccaaagaggcagggttcgctag

SEQ ID NO: 258582 - DNA, 51 bp, Artificial
  Synthetic oligonucleotide
cttcagacagctcgtgctgggcagtgggctgaacgaccgagtgttgcttgc

SEQ ID NO: 258583 - DNA, 51 bp, Artificial
  Synthetic oligonucleotide
gagatgggaagagccctagcccgcaagccagggtgcgacggaagacgttaa

SEQ ID NO: 258584 - DNA, 51 bp, Artificial
  Synthetic oligonucleotide
ctatgagtctccttctccgattcaagcccagagtattccaccgttattagc

SEQ ID NO: 258585 - DNA, 60 bp, Artificial
  Synthetic oligonucleotide
ttcaaatgactgccacggttcggcaaagactgcttgttctgcgggtaaccacaccgcatg

SEQ ID NO: 258586 - DNA, 51 bp, Artificial
  Synthetic oligonucleotide
gccaccctgtttgtgctcgacaaagctagtccacagccccgcgtcacctct

SEQ ID NO: 258587 - DNA, 51 bp, Artificial
  Synthetic oligonucleotide
cgttggcagcgaaccaccacctttgagcgattgccgcctgagttcctgtca

SEQ ID NO: 258588 - DNA, 51 bp, Artificial
  Synthetic oligonucleotide
cggggcaaccattgaagcgatcctcctacggaggggtttcacgaacgctcc

SEQ ID NO: 258589 - DNA, 51 bp, Artificial
  Synthetic oligonucleotide
cggataaggcagcggaagacacaacggtcactgctgctcccacggtggtca

SEQ ID NO: 258590 - DNA, 51 bp, Artificial
  Synthetic oligonucleotide
cgcaaccgcttgccttggaatatgaccgggtgtggacttcctaccgctccc

SEQ ID NO: 258591 - DNA, 51 bp, Artificial
  Synthetic oligonucleotide
ggccctcgctgctgccctctaggcaccaagttagaaatgtgactgccgccc

SEQ ID NO: 258592 - DNA, 51 bp, Artificial
  Synthetic oligonucleotide
ggcgaactgtgtttcgaggtgtcaccgtccttctagcgggcactctcgccg

SEQ ID NO: 258593 - DNA, 51 bp, Artificial
  Synthetic oligonucleotide
ggcgtttgcgtggcctaccgctcagacggcaccccggtaagcattgaataa

SEQ ID NO: 258594 - DNA, 51 bp, Artificial
  Synthetic oligonucleotide
cctagggcagcgatcctttacagtgctctcagcgcccttaaccggcgtcgt

SEQ ID NO: 258595 - DNA, 51 bp, Artificial
  Synthetic oligonucleotide
ggggacagtctgcaatttcgcactcagaaggctccatgcgaatcggcggct

SEQ ID NO: 258596 - DNA, 58 bp, Artificial
  Synthetic oligonucleotide
ttcagcaactggagtaaaaagtgatttaacgagtgtaccaaagaaaagctgcttcaga

SEQ ID NO: 258597 - DNA, 51 bp, Artificial
  Synthetic oligonucleotide
tcccgctccaaccacaccccgatcatctcgatagtttcccctggccgcaga

SEQ ID NO: 258598 - DNA, 51 bp, Artificial
  Synthetic oligonucleotide
cccgagctaatggcaatcatggaaggtcgcctcaacgttaataggttgccc

SEQ ID NO: 258599 - DNA, 51 bp, Artificial
  Synthetic oligonucleotide
gttaggcttatcacccaacccgccgtggatcggaatcggttgccccaccgc

SEQ ID NO: 258600 - DNA, 50 bp, Artificial
  Synthetic oligonucleotide
tcgagaaagccaccgttggattctatagtattggtctttatccgggttct

SEQ ID NO: 258601 - DNA, 50 bp, Artificial
  Synthetic oligonucleotide
gaccccaagcgcaaaaccgctccaggttgcccatttcgctaggtaagggg

SEQ ID NO: 258602 - DNA, 50 bp, Artificial
  Synthetic oligonucleotide
ctcgctcaaagcggaactgaacgatcgaggttggcgcctcacccctcagc

SEQ ID NO: 258603 - DNA, 50 bp, Artificial
  Synthetic oligonucleotide
tcgcgccttgggcctcaatttgctcgcgattaatcacatacaccgggcga

SEQ ID NO: 258604 - DNA, 50 bp, Artificial
  Synthetic oligonucleotide
tattccatggcagcgattaacttgatggaactccagtcctttcgttatcc

SEQ ID NO: 258605 - DNA, 50 bp, Artificial
  Synthetic oligonucleotide
tagccacgaacaggttgtggagatataacctacttgccattggtagcgcc

SEQ ID NO: 258606 - DNA, 50 bp, Artificial
  Synthetic oligonucleotide
tacgcctatgtttgcccctatgggcgttcaagccgagaattggccagcga

SEQ ID NO: 258607 - DNA, 55 bp, Artificial
  Synthetic oligonucleotide
tttttagagggagacctagacagcgtagcaagaagtatgccccgagcttaaaaaa

SEQ ID NO: 258608 - DNA, 50 bp, Artificial
  Synthetic oligonucleotide
ttcgcgttttagagtgaggcgacgcccaacccaactgtcggagcggcaat

SEQ ID NO: 258609 - DNA, 50 bp, Artificial
  Synthetic oligonucleotide
ttcaggccgacctatgccgcaatggagccagccagaaagccaaagctgag

SEQ ID NO: 258610 - DNA, 50 bp, Artificial
  Synthetic oligonucleotide
gccccacgcgcaaaaaggagggggcaacgcgagttgaaatggccacagga

SEQ ID NO: 258611 - DNA, 50 bp, Artificial
  Synthetic oligonucleotide
taactccggggtcttctggtcaatcaatcctgctagggtatcgagtaact

SEQ ID NO: 258612 - DNA, 50 bp, Artificial
  Synthetic oligonucleotide
acatattgcggtcaataccatagtctgtcggacgttgcgtcagaaccatc

SEQ ID NO: 258613 - DNA, 50 bp, Artificial
  Synthetic oligonucleotide
gcgttgtctgcccctggcttgaggctattgccgctaacccctgaaatcgc

SEQ ID NO: 258614 - DNA, 50 bp, Artificial
  Synthetic oligonucleotide
gtgtatccaagctgatgtctctatccctgaagtcccacctcatgggcatt

SEQ ID NO: 258615 - DNA, 50 bp, Artificial
  Synthetic oligonucleotide
gctctggtgagactaagctgtggtggattctaagcttctatccatatcaa

SEQ ID NO: 258616 - DNA, 50 bp, Artificial
  Synthetic oligonucleotide
cgcatcaggagaaggggttcgcactccctctcgccatggggttaggcttc

SEQ ID NO: 258617 - DNA, 50 bp, Artificial
  Synthetic oligonucleotide
gtggagaatattcgccctatccttaataagtttggcgggacttgttacgt

SEQ ID NO: 258618 - DNA, 60 bp, Artificial
  Synthetic oligonucleotide
caacaaatgtaaaggctctacattgagaagaactagcacactcattcatacactgaccga

SEQ ID NO: 258619 - DNA, 60 bp, Artificial
  Synthetic oligonucleotide
agactatcaaagccacgcttaaggatcttctcactttgacagtatgggcattccattgat

SEQ ID NO: 258620 - DNA, 50 bp, Artificial
  Synthetic oligonucleotide
gtggaataggctacctcaatccctagattaatccgggaccattggtgagt

SEQ ID NO: 258621 - DNA, 50 bp, Artificial
  Synthetic oligonucleotide
gtcgaagtccagtgcctttgatcatgagtcggtactccgaatgaaggggt

SEQ ID NO: 258622 - DNA, 50 bp, Artificial
  Synthetic oligonucleotide
tctgcgtcgccatcaggggctacgcacccgcattgagactcgcgtaggag

SEQ ID NO: 258623 - DNA, 50 bp, Artificial
  Synthetic oligonucleotide
gggacaccccgtaaagagtggcccatacaccgatagcaaggccaagcgct

SEQ ID NO: 258624 - DNA, 50 bp, Artificial
  Synthetic oligonucleotide
cctaggtgccccactgttgagggcacatcctgactcactgcccgacccag

SEQ ID NO: 258625 - DNA, 50 bp, Artificial
  Synthetic oligonucleotide
tctggagtctatgtactactttgacatcgccacgttgtctggctctgaat

SEQ ID NO: 258626 - DNA, 50 bp, Artificial
  Synthetic oligonucleotide
tgaatcgactgtggtacattgcgtatggcggtgtctgttcgcgttccagt

SEQ ID NO: 258627 - DNA, 56 bp, Artificial
  Synthetic oligonucleotide
actagcggtgcgtaaacgagccattggggtgcctgtgcgttcgttgaaacgacgat

SEQ ID NO: 258628 - DNA, 60 bp, Artificial
  Synthetic oligonucleotide
aagatttttgcctacacgagtgtatacttcatccccttctaccgtcacatcagaggctgc

SEQ ID NO: 258629 - DNA, 54 bp, Artificial
  Synthetic oligonucleotide
aacagcgacggtactacagtgaccgtccgaactaccaagtcaagggaggagtcc

SEQ ID NO: 258630 - DNA, 59 bp, Artificial
  Synthetic oligonucleotide
aacaaacattgcaagaggtctattgtccaaggcgtaacatgaactgaattgcgagaagg

SEQ ID NO: 258631 - DNA, 60 bp, Artificial
  Synthetic oligonucleotide
agcaatcatgcggtgtggttacccgcagaacaagcagtctttgccgaaccgtggcagtca

SEQ ID NO: 258632 - DNA, 60 bp, Artificial
  Synthetic oligonucleotide
agacattcccccaattggacaaagaccccatgattctgagaatggctgatgcctatctga

SEQ ID NO: 258633 - DNA, 59 bp, Artificial
  Synthetic oligonucleotide
gtagcccatctacaggggattcttgtttgtgaccctccatgttctcaagcgatgcccta

SEQ ID NO: 258634 - DNA, 59 bp, Artificial
  Synthetic oligonucleotide
tctgacggcactgggttaatggactgcggactcagggacatcgttcatcgcctccaagt

SEQ ID NO: 258635 - DNA, 58 bp, Artificial
  Synthetic oligonucleotide
gtaacttaggcagtaagcctagatttttatcactttggcccaattgaagagttgctga

SEQ ID NO: 258636 - DNA, 60 bp, Artificial
  Synthetic oligonucleotide
cactgaccgacattacccacaggaaatcctgaacggatatctccaccctgacgatctgta

SEQ ID NO: 258637 - DNA, 59 bp, Artificial
  Synthetic oligonucleotide
gcgagccccttgttggtagttggtaatcgcctgacagtcacctgtagcttcttcgcgga

SEQ ID NO: 258638 - DNA, 58 bp, Artificial
  Synthetic oligonucleotide
cccgctgccccaatcgtggggagctgcaatcgttgagagaggagatagggtttgaccc

SEQ ID NO: 258639 - DNA, 54 bp, Artificial
  Synthetic oligonucleotide
agatttaccaaaggtacgacctgctgaacggacccccattccttcggtgcgagc

SEQ ID NO: 258640 - DNA, 54 bp, Artificial
  Synthetic oligonucleotide
tctactaacagggcacatacctaaaccctttattggtgaggagttctaaagtac

SEQ ID NO: 258641 - DNA, 53 bp, Artificial
  Synthetic oligonucleotide
gccaagttgcggttaatggtcgcgttccttcggagttggccccgttgattggg

SEQ ID NO: 258642 - DNA, 55 bp, Artificial
  Synthetic oligonucleotide
gcggttgtcttcatgaacattgcgcttccgcaattgcaaggccacgatttgatcg

SEQ ID NO: 258643 - DNA, 55 bp, Artificial
  Synthetic oligonucleotide
gcggtcgttgatcactgacccgcaacagactacgcccactaaaattcatcgcctc

SEQ ID NO: 258644 - DNA, 55 bp, Artificial
  Synthetic oligonucleotide
gcgggtgttggagctaatctcgcgagacctcataaactctcccactcgcatccat

SEQ ID NO: 258645 - DNA, 55 bp, Artificial
  Synthetic oligonucleotide
gcggctaaggctgggagctcgtaaatcagcatcgactaacaagactcgtcttccc

SEQ ID NO: 258646 - DNA, 55 bp, Artificial
  Synthetic oligonucleotide
gcgtacatccaggcaggggcttagagtgaactgatctcgatgctcagatctgcgt

SEQ ID NO: 258647 - DNA, 60 bp, Artificial
  Synthetic oligonucleotide
catattgagatgcgcaggtttgaggttaaccagatagaggacattgcacgagggaatagg

SEQ ID NO: 258648 - DNA, 55 bp, Artificial
  Synthetic oligonucleotide
gcgtgccagcagagtactttgaggctgtatgtcgagggattgctgtggaggcggc

SEQ ID NO: 258649 - DNA, 55 bp, Artificial
  Synthetic oligonucleotide
gcgtggtccaatgtggaaagctttgatcgagatgttccctttgactttccgcctc

SEQ ID NO: 258650 - DNA, 55 bp, Artificial
  Synthetic oligonucleotide
gctagatagctgatgccggataccagtaatgcggagagtgcgatcgcaagtatcg

SEQ ID NO: 258651 - DNA, 55 bp, Artificial
  Synthetic oligonucleotide
gctatttcgatagtctccgagcaaagggtaataaatctcagccaggtcaatcgat

SEQ ID NO: 258652 - DNA, 55 bp, Artificial
  Synthetic oligonucleotide
gctcaatggaaaatcgtcgccagctacccagaaatcaatcttggactgaacccca

SEQ ID NO: 258653 - DNA, 55 bp, Artificial
  Synthetic oligonucleotide
gctcataagaaacgagcttcccagtctgtccgtaccccagtctctcgacctactg

SEQ ID NO: 258654 - DNA, 55 bp, Artificial
  Synthetic oligonucleotide
gctctgattattcatgaattcaggcatctttggctacgctttagttcaacgtagc

SEQ ID NO: 258655 - DNA, 55 bp, Artificial
  Synthetic oligonucleotide
gctggcttctggatatgtattaggggcattcaatttgaacttatgtccatgctta

SEQ ID NO: 258656 - DNA, 55 bp, Artificial
  Synthetic oligonucleotide
gcttggattcaagtcgcttaatcaatttatggagggaccagtcgggcttattggc

SEQ ID NO: 258657 - DNA, 55 bp, Artificial
  Synthetic oligonucleotide
ggacagcttgagatcgcaacctcaatcccctctgcatcaagcgctccgtaaaccg

SEQ ID NO: 258658 - DNA, 55 bp, Artificial
  Synthetic oligonucleotide
cccactctactcgccgattcccctgagaccctttaactttcatcacgacttctaa

SEQ ID NO: 258659 - DNA, 55 bp, Artificial
  Synthetic oligonucleotide
ggaccattgccgttaggattgcggcgggtaaaactggacaaccagatgtagcggt

SEQ ID NO: 258660 - DNA, 55 bp, Artificial
  Synthetic oligonucleotide
ggactctgcgttatctaaaatcactagacaacgtgaggtgcgcagataactcaga

SEQ ID NO: 258661 - DNA, 55 bp, Artificial
  Synthetic oligonucleotide
ggatgttgctcaaagtaagctctcacactatcgctatgagcgttgagtagactcg

SEQ ID NO: 258662 - DNA, 55 bp, Artificial
  Synthetic oligonucleotide
cttacagcgcaatactcaagttgtctatggtgaagaaaacacggccaccacagtc

SEQ ID NO: 258663 - DNA, 55 bp, Artificial
  Synthetic oligonucleotide
ctttgataatgaagcggttttgaagtctcccgtctacgaaggatagttcgtacac

SEQ ID NO: 258664 - DNA, 55 bp, Artificial
  Synthetic oligonucleotide
gaacactaggctgaagcgctgaggctacctaaaacagacgctaataaaccaggga

SEQ ID NO: 258665 - DNA, 55 bp, Artificial
  Synthetic oligonucleotide
gaagaagctacaggtgactgtcaggcgattaccaactaccaacaaggggctcgcc

SEQ ID NO: 258666 - DNA, 55 bp, Artificial
  Synthetic oligonucleotide
acggggtagataacgtctctgaccaagccatctggtgtggctagggctgcggtgg

SEQ ID NO: 258667 - DNA, 55 bp, Artificial
  Synthetic oligonucleotide
gaccgtgagctaaagcaaccgatgatggtgatttatgaaggggtgtctatgtatc

SEQ ID NO: 258668 - DNA, 55 bp, Artificial
  Synthetic oligonucleotide
acgagtgtatacttcatccccttctaccgtcacatcagaggctgctggtgcgggg

SEQ ID NO: 258669 - DNA, 59 bp, Artificial
  Synthetic oligonucleotide
cccttgatgcaattagccgcagatccgggttggttggagcgcgccgagaactgccttat

SEQ ID NO: 258670 - DNA, 55 bp, Artificial
  Synthetic oligonucleotide
gactctccatttcaattgagtcaccaattctaagacctgatcatgttcgctgacg

SEQ ID NO: 258671 - DNA, 55 bp, Artificial
  Synthetic oligonucleotide
gagcgacggctgattgatgctccagaattgagagcgcttaagtggctagcaacag

SEQ ID NO: 258672 - DNA, 55 bp, Artificial
  Synthetic oligonucleotide
gagctttaagaagactgacataggctgttttactaggtaattggtataaggtgtc

SEQ ID NO: 258673 - DNA, 55 bp, Artificial
  Synthetic oligonucleotide
gataatttcaacacgttccataggcattactgccttatacgctactgctaccgtc

SEQ ID NO: 258674 - DNA, 55 bp, Artificial
  Synthetic oligonucleotide
gcacatggcaacgctgacccacccagcactcctttaactttgcttggtccacggg

SEQ ID NO: 258675 - DNA, 55 bp, Artificial
  Synthetic oligonucleotide
gcagccaatagaccattacaacgctttccacttgtcgcgtttcaaggtgaacgac

SEQ ID NO: 258676 - DNA, 55 bp, Artificial
  Synthetic oligonucleotide
gcagcttgattcacatggtcagtgcatgggccagtcacaatcgtctagttttagg

SEQ ID NO: 258677 - DNA, 55 bp, Artificial
  Synthetic oligonucleotide
gcattactctacgacaaccaaggacggtacacagaagcagaacccctctatgtcc

SEQ ID NO: 258678 - DNA, 55 bp, Artificial
  Synthetic oligonucleotide
gcattgtgagcctcattatgattggcatggatctcagaccttggactgatagcgg

SEQ ID NO: 258679 - DNA, 55 bp, Artificial
  Synthetic oligonucleotide
gccacacggacgcttcacaaagctgcacaaccgatattcgagattcggcgcgagg

SEQ ID NO: 258680 - DNA, 54 bp, Artificial
  Synthetic oligonucleotide
ccttgaggttctggggttcccccttgctcgggggcaatttaagcgctgccacga

SEQ ID NO: 258681 - DNA, 55 bp, Artificial
  Synthetic oligonucleotide
gccagaagtttatgcccaacgcttagagctgttccgtagaggtctattagaaccc

SEQ ID NO: 258682 - DNA, 55 bp, Artificial
  Synthetic oligonucleotide
gcccagcttagtttaggacaggctcagactaaggtatccaagattgaccaacgga

SEQ ID NO: 258683 - DNA, 55 bp, Artificial
  Synthetic oligonucleotide
acccactattctttaatgcccagccttaccaaagtcgctgaactcactgagatcg

SEQ ID NO: 258684 - DNA, 55 bp, Artificial
  Synthetic oligonucleotide
gcgaagtccgctttgtagacaatatgtcgtgactgacgttcagacgaaacaagcc

SEQ ID NO: 258685 - DNA, 55 bp, Artificial
  Synthetic oligonucleotide
acatcttcgctttcgctactcataagttcttgctcgaaggggttcagagctaggc

SEQ ID NO: 258686 - DNA, 55 bp, Artificial
  Synthetic oligonucleotide
gcgatcgacccgacaagtttctggaataccattatgatcttctggatttgcatag

SEQ ID NO: 258687 - DNA, 55 bp, Artificial
  Synthetic oligonucleotide
gcggcgggtactaaccctgcctccgtcagcctgggagactttaatggcgatagcc

SEQ ID NO: 258688 - DNA, 55 bp, Artificial
  Synthetic oligonucleotide
gtgtagtttacaaggcgaaatctccagcaagttctctcaggtctgccgtttgttg

SEQ ID NO: 258689 - DNA, 55 bp, Artificial
  Synthetic oligonucleotide
gttagatcttgagtccctttgggcaaaatcagtctaatcagctattacgaacctg

SEQ ID NO: 258690 - DNA, 55 bp, Artificial
  Synthetic oligonucleotide
gtttagggacaggactgttgaatttgcagaggtctctaacgcttaggtttagcgt

SEQ ID NO: 258691 - DNA, 58 bp, Artificial
  Synthetic oligonucleotide
cgcgaaccgtttctgacggcactgggttaatggactgcggactcagggacatcgttca

SEQ ID NO: 258692 - DNA, 55 bp, Artificial
  Synthetic oligonucleotide
taacgatagcgccgctgaaagaacccgactctgatcccagtcaggatgggtgtct

SEQ ID NO: 258693 - DNA, 55 bp, Artificial
  Synthetic oligonucleotide
aaggatcttctcactttgacagtatgggcattccattgatctacatcaggttccg

SEQ ID NO: 258694 - DNA, 55 bp, Artificial
  Synthetic oligonucleotide
taggttgctccaatggaggagcgaggaccgctgaatcatctgctaatggctctgg

SEQ ID NO: 258695 - DNA, 55 bp, Artificial
  Synthetic oligonucleotide
tatgccagtaccgttgtcggtgaatatggcacctccgctcaaagcgccaaatcca

SEQ ID NO: 258696 - DNA, 55 bp, Artificial
  Synthetic oligonucleotide
tcatcgcagcgattctaaacgaacaagtcgcaaatacttacagctattagtagac

SEQ ID NO: 258697 - DNA, 55 bp, Artificial
  Synthetic oligonucleotide
tcgcatcagcgtacaatctaacggcaagctattagtcagtagtgcttacaccaag

SEQ ID NO: 258698 - DNA, 55 bp, Artificial
  Synthetic oligonucleotide
tctaacagcgaagaacagactacccaggttcagcccactgaatctccagagcaag

SEQ ID NO: 258699 - DNA, 55 bp, Artificial
  Synthetic oligonucleotide
aaggaagccggtgatagactcggcgtttcacctcccaagcaatcagtaacacacc

SEQ ID NO: 258700 - DNA, 55 bp, Artificial
  Synthetic oligonucleotide
tctggaaatacggtggaaacagcaggattgaactctcagggtatttccgttcggc

SEQ ID NO: 258701 - DNA, 55 bp, Artificial
  Synthetic oligonucleotide
tgaggattagcgccaaacttaactccgaggggcaccgaaattgtgagtaagggtg

SEQ ID NO: 258702 - DNA, 55 bp, Artificial
  Synthetic oligonucleotide
gcgcgtcgcctttaccattgtagtgatcgagtacggcttggtagcccttagccaa

SEQ ID NO: 258703 - DNA, 52 bp, Artificial
  Synthetic oligonucleotide
ccaataaggagtcgttccgccttttaaacttttgcgagcataactaattccg

SEQ ID NO: 258704 - DNA, 55 bp, Artificial
  Synthetic oligonucleotide
gagggtttattacgcactcactgccgcctattcttgagcgcttatcagttgatcg

SEQ ID NO: 258705 - DNA, 55 bp, Artificial
  Synthetic oligonucleotide
ccctaatgccgcataagttaccgccatgccttgtatgtatacgaacgaaagtgca

SEQ ID NO: 258706 - DNA, 55 bp, Artificial
  Synthetic oligonucleotide
gagctagagttatttggccactcacgaccgtaatgaagagtaccgtgcacgtaag

SEQ ID NO: 258707 - DNA, 55 bp, Artificial
  Synthetic oligonucleotide
cgtgcgatcttgtgggcatcagtcgaacagggtttcgttatcacccacaagttgc

SEQ ID NO: 258708 - DNA, 55 bp, Artificial
  Synthetic oligonucleotide
cctaaaaggtaacgttgtgagcgccaatataatggccagagagttcttcgagcgc

SEQ ID NO: 258709 - DNA, 55 bp, Artificial
  Synthetic oligonucleotide
cgccctcatgcttaacgcaggccgagaagtcttagcagcccaactaaatacaatt

SEQ ID NO: 258710 - DNA, 55 bp, Artificial
  Synthetic oligonucleotide
cgatacgcacttgccccgtgggttggtcgtcaactgtttgtacactgcgcaccac

SEQ ID NO: 258711 - DNA, 55 bp, Artificial
  Synthetic oligonucleotide
ttatcgggtttccgcactggggtaaatggtagttgggtaattgagacagcaacac

SEQ ID NO: 258712 - DNA, 55 bp, Artificial
  Synthetic oligonucleotide
tgattgtctcaaacccaattacagcctcaaaggagcagactaggcctaataatgg

SEQ ID NO: 258713 - DNA, 55 bp, Artificial
  Synthetic oligonucleotide
attaccagcaaggctcgcctctaccccgttaaagctaaatgtttgcgttgtatta

SEQ ID NO: 258714 - DNA, 55 bp, Artificial
  Synthetic oligonucleotide
tcacctgttacgtagcgagacataagcgaaagagtggtcttttacgacacttggc

SEQ ID NO: 258715 - DNA, 55 bp, Artificial
  Synthetic oligonucleotide
tcacccacgttgcaccgcccgctgtgcttagaagcgcgttaagtagaggccagtc

SEQ ID NO: 258716 - DNA, 55 bp, Artificial
  Synthetic oligonucleotide
tagatagcgctagttgatcattagcctttgctggagctgtgtacgaaagtgaacc

SEQ ID NO: 258717 - DNA, 55 bp, Artificial
  Synthetic oligonucleotide
gtggtacataatccgtggagcgatttacgccgctttaccgatgcccgtataggcc

SEQ ID NO: 258718 - DNA, 55 bp, Artificial
  Synthetic oligonucleotide
gtgactgatcaattatcggggcgaaccatgggcttacgtgcggatatgacaccgc

SEQ ID NO: 258719 - DNA, 55 bp, Artificial
  Synthetic oligonucleotide
gtcaacgacagtcgctttagaataaacagtgtcagtcccggtggtatatttgata

SEQ ID NO: 258720 - DNA, 55 bp, Artificial
  Synthetic oligonucleotide
ggtgcccgcgcaatactcacgcactagcagcatttcgtcatcagccgttataggc

SEQ ID NO: 258721 - DNA, 55 bp, Artificial
  Synthetic oligonucleotide
aggagcctcaccataacgaatctgaaaatctaacagcagccgctgaaccaagcct

SEQ ID NO: 258722 - DNA, 55 bp, Artificial
  Synthetic oligonucleotide
ggtccgtttgggtgttggcttggtgatgcctcacataagtgtaagtatttagcgt

SEQ ID NO: 258723 - DNA, 53 bp, Artificial
  Synthetic oligonucleotide
gggaccccttaataattaccgcactaaaacgggtgaggaacattgtccagctc

SEQ ID NO: 258724 - DNA, 55 bp, Artificial
  Synthetic oligonucleotide
caaaagcgattgttcaacgctttaatggtgaggcctgggaggacgtgggtactga

SEQ ID NO: 258725 - DNA, 55 bp, Artificial
  Synthetic oligonucleotide
ggctggcggtgccgcttagtaggcgtaactagcacaacatcgggtaatgggttgc

SEQ ID NO: 258726 - DNA, 53 bp, Artificial
  Synthetic oligonucleotide
ggcacccacactccccggaataagtgctaagttttcgatgccgtaccaaccgt

SEQ ID NO: 258727 - DNA, 55 bp, Artificial
  Synthetic oligonucleotide
gcgtacacagtgcacaatttagcactacaaggaataaggccttttaagcacgatg

SEQ ID NO: 258728 - DNA, 55 bp, Artificial
  Synthetic oligonucleotide
gcgctaacctgggcaatgacgagccccacagcatttgatggcgcaatggttatgc

SEQ ID NO: 258729 - DNA, 54 bp, Artificial
  Synthetic oligonucleotide
ttttgtgacgctctaagcacttgcgaaagcgttatttcacctgaacctacatga

SEQ ID NO: 258730 - DNA, 54 bp, Artificial
  Synthetic oligonucleotide
cgagcaagctaaaacggccattgttacaccgcttttatcattacctccacatag

SEQ ID NO: 258731 - DNA, 54 bp, Artificial
  Synthetic oligonucleotide
aagcgagcatacgaaagtagatgcgcctgagggttttacagaaactcaccaaga

SEQ ID NO: 258732 - DNA, 52 bp, Artificial
  Synthetic oligonucleotide
agtagcgccttgagctgaactacctgagcgagggcggaacgaaccagtgctg

SEQ ID NO: 258733 - DNA, 52 bp, Artificial
  Synthetic oligonucleotide
aagccgatacgctttacgtagcatagcaggccaagcaagctggcctccggtg

SEQ ID NO: 258734 - DNA, 52 bp, Artificial
  Synthetic oligonucleotide
atgccccgctcagcgcaagcaagctataaagcactttgcctcgcgtaaggca

SEQ ID NO: 258735 - DNA, 55 bp, Artificial
  Synthetic oligonucleotide
gcgaggcttaggtgccgacgcaacacttgtactgattaacgggcgcagagtctca

SEQ ID NO: 258736 - DNA, 52 bp, Artificial
  Synthetic oligonucleotide
aggcgttggcccaaaccccacgccaacggggagctttgtttctcgccatacg

SEQ ID NO: 258737 - DNA, 52 bp, Artificial
  Synthetic oligonucleotide
agcaacgctttgcccacgtgcctatgatggcccttacagcgacggccgataa

SEQ ID NO: 258738 - DNA, 52 bp, Artificial
  Synthetic oligonucleotide
tgactgtgcatttacagcaccagaggctagtaatccggcagcaaccagagat

SEQ ID NO: 258739 - DNA, 52 bp, Artificial
  Synthetic oligonucleotide
ctaggcgggtgtaaatgtagcctggttcgtcccctgcaaaacgtgcggcgcc

SEQ ID NO: 258740 - DNA, 52 bp, Artificial
  Synthetic oligonucleotide
aacgagcgacatgtacgctgccactgcccaatacccgctcttagccagcgcg

SEQ ID NO: 258741 - DNA, 52 bp, Artificial
  Synthetic oligonucleotide
cgccgaaatacccgacccctaccgccaaagcaccgaagcatttgagcacgtt

SEQ ID NO: 258742 - DNA, 52 bp, Artificial
  Synthetic oligonucleotide
ccttgggcgggagctgtccgctttactcgtactggtggcgaatcgtgtgcgt

SEQ ID NO: 258743 - DNA, 51 bp, Artificial
  Synthetic oligonucleotide
tgccggccctgcgagcataaacactaacaccgctccaggcgatactccact

SEQ ID NO: 258744 - DNA, 51 bp, Artificial
  Synthetic oligonucleotide
tgcgctgcaatacctaacccgcggccttttggcagctttcggccccattta

SEQ ID NO: 258745 - DNA, 51 bp, Artificial
  Synthetic oligonucleotide
gcagcaggccttacttgggcactgcgagagccacctaaattgggcccggta

SEQ ID NO: 258746 - DNA, 55 bp, Artificial
  Synthetic oligonucleotide
gagtcggcaacaccctaccaaattgccacccgtgcgttttgtactagtgtgagtg

SEQ ID NO: 258747 - DNA, 51 bp, Artificial
  Synthetic oligonucleotide
taacacgcacgagactcaattattaaccggcgtatatttaattggcccaag

SEQ ID NO: 258748 - DNA, 51 bp, Artificial
  Synthetic oligonucleotide
cacaatcattcgaactatctaaaggcggcgttggtctaccgtggcattacg

SEQ ID NO: 258749 - DNA, 51 bp, Artificial
  Synthetic oligonucleotide
aaaacgcccacgagacgcacccgcagtgaagtttacgttagcggcactgcc

SEQ ID NO: 258750 - DNA, 50 bp, Artificial
  Synthetic oligonucleotide
aatgtattgggtagctgcacggctaggcggtcacccggcgcaagagtggt

SEQ ID NO: 258751 - DNA, 50 bp, Artificial
  Synthetic oligonucleotide
tacacccgtgctagccgtgcgaatctgcatggggcgactacacgttgagc

SEQ ID NO: 258752 - DNA, 50 bp, Artificial
  Synthetic oligonucleotide
tagaagggcagcaaacaaccgaccccgcgtttggtctagaagccgtctgg

SEQ ID NO: 258753 - DNA, 50 bp, Artificial
  Synthetic oligonucleotide
tattcaagcgggtgcgcaaagtaaagccgcgctagcagacatcgctgcct

SEQ ID NO: 258754 - DNA, 50 bp, Artificial
  Synthetic oligonucleotide
aagatcgttaacgggggcgactgtcacggtagcggtgcctgttgcgactt

SEQ ID NO: 258755 - DNA, 50 bp, Artificial
  Synthetic oligonucleotide
aacggtgtccggggtgcgttagtaccgcatagctcaccatgccgtcgcta

SEQ ID NO: 258756 - DNA, 50 bp, Artificial
  Synthetic oligonucleotide
tcagcctgtaggcccgctttcgtcagcacatcgtaggtaccacgagtggc

SEQ ID NO: 258757 - DNA, 55 bp, Artificial
  Synthetic oligonucleotide
caggcaagtcgctaacaactacacaatgtgagagttcgccacccgctagcgtccc

SEQ ID NO: 258758 - DNA, 50 bp, Artificial
  Synthetic oligonucleotide
tcggctttggacaaaacacccacctacaaaacaacgacagtaaagtgacg

SEQ ID NO: 258759 - DNA, 50 bp, Artificial
  Synthetic oligonucleotide
aacgattcgcctcttcattgttccgcgtccacactagcgccgcgcgatgt

SEQ ID NO: 258760 - DNA, 50 bp, Artificial
  Synthetic oligonucleotide
tgggggatggggtatgcaactgaagccgcgagagcattatgcgcagagct

SEQ ID NO: 258761 - DNA, 50 bp, Artificial
  Synthetic oligonucleotide
cgagtaggcagcgctcttcctccttggttgcagggcgtgtagtcacggtg

SEQ ID NO: 258762 - DNA, 50 bp, Artificial
  Synthetic oligonucleotide
cggcacgccatgagcagcgtaggctgtacccgcagcaagaaacgatgcca

SEQ ID NO: 258763 - DNA, 50 bp, Artificial
  Synthetic oligonucleotide
ccggcgactacggtgtgtgccggtactgggtgcagtacaacgctaccaga

SEQ ID NO: 258764 - DNA, 50 bp, Artificial
  Synthetic oligonucleotide
ctggaagccctgtattctttccccgtgccagaatcggcttccgtcggcga

SEQ ID NO: 258765 - DNA, 50 bp, Artificial
  Synthetic oligonucleotide
ccgccctaacgattcccagcatgtacgcgcttgcgcaaaggcactgcgat

SEQ ID NO: 258766 - DNA, 50 bp, Artificial
  Synthetic oligonucleotide
ccaccgcatttcgcgtgacaccggaggtactgcaggtcgctaacggctcc

SEQ ID NO: 258767 - DNA, 50 bp, Artificial
  Synthetic oligonucleotide
caggctgtgctagggggtcctgcactggcagaaggggttcgccttactgg

SEQ ID NO: 258768 - DNA, 55 bp, Artificial
  Synthetic oligonucleotide
gaggtcattcaaggcttgcaaaataagaggccgctaatagtccattatttcgatc

SEQ ID NO: 258769 - DNA, 50 bp, Artificial
  Synthetic oligonucleotide
gcctcacgtagcgcccccatgccggtaatgtgatcagcgtgtaggtgggt

SEQ ID NO: 258770 - DNA, 50 bp, Artificial
  Synthetic oligonucleotide
gcctcttcattgttccgcgtccacactagcgccgcgcgatgttgctgctc

SEQ ID NO: 258771 - DNA, 50 bp, Artificial
  Synthetic oligonucleotide
gcctgatccgcgagtaggcagcgctcttcctccttggttgcagggcgtgt

SEQ ID NO: 258772 - DNA, 50 bp, Artificial
  Synthetic oligonucleotide
atggagtcgcaccgtatttctcccctacggcttccacctccgtaggcggc

SEQ ID NO: 258773 - DNA, 50 bp, Artificial
  Synthetic oligonucleotide
atgccgtgtgcggcgagttcagatgtaggtacgcgtcggtgcgggttaga

SEQ ID NO: 258774 - DNA, 50 bp, Artificial
  Synthetic oligonucleotide
ggatattgcaatgtattgggtagctgcacggctaggcggtcacccggcgc

SEQ ID NO: 258775 - DNA, 50 bp, Artificial
  Synthetic oligonucleotide
atcaaataccacggcaggtggcgtagccacaggttccggtatggggccaa

SEQ ID NO: 258776 - DNA, 50 bp, Artificial
  Synthetic oligonucleotide
agggggtcctgcactggcagaaggggttcgccttactggcttgcctagtg

SEQ ID NO: 258777 - DNA, 50 bp, Artificial
  Synthetic oligonucleotide
gggcaattaggtgctatgcctgcggtggcgggacagcaactcaacgcgac

SEQ ID NO: 258778 - DNA, 50 bp, Artificial
  Synthetic oligonucleotide
ggggttaggcctttagtcgcccccagccttaggaatgcgtgttggccgat

SEQ ID NO: 258779 - DNA, 55 bp, Artificial
  Synthetic oligonucleotide
ccaagccggcgactcctgatcgttttaggtaggcacgtaatgggctgtagcctgg

SEQ ID NO: 258780 - DNA, 50 bp, Artificial
  Synthetic oligonucleotide
ggtacatatcaacagggatgcccactccgtcacgcacagtggcaggccct

SEQ ID NO: 258781 - DNA, 50 bp, Artificial
  Synthetic oligonucleotide
ggttcccgccatccaagggcgctctgcccgccttactcgccaacgaatat

SEQ ID NO: 258782 - DNA, 50 bp, Artificial
  Synthetic oligonucleotide
accgtggcgccattgctactcgctaacactgggctgtgtggcgtagcttc

SEQ ID NO: 258783 - DNA, 55 bp, Artificial
  Synthetic oligonucleotide
ccaaggctatcggttgatatcgacttaacctacgttgaaatagctgagcgcaatg

SEQ ID NO: 258784 - DNA, 58 bp, Artificial
  Synthetic oligonucleotide
gctggaacgacggggctacctggcttcctgctatacttgtgggggtcaaatgaacagc

SEQ ID NO: 258785 - DNA, 53 bp, Artificial
  Synthetic oligonucleotide
gaaatgaccctaattttgccggggtcttccctagaaaatacttccatgagggc

SEQ ID NO: 258786 - DNA, 52 bp, Artificial
  Synthetic oligonucleotide
gccctattttaacctgtttgggaactgtggtaaagcggggcgacggatcgac

SEQ ID NO: 258787 - DNA, 55 bp, Artificial
  Synthetic oligonucleotide
gcctggttatttgcccaagagcccaatgtgtttatcgccggggatttattgtggt

SEQ ID NO: 258788 - DNA, 55 bp, Artificial
  Synthetic oligonucleotide
gcgatcaaggggactatttgtacctgtcgaggccccaaagagtccaaccctacca

SEQ ID NO: 258789 - DNA, 55 bp, Artificial
  Synthetic oligonucleotide
ggagacgagttgcaactgctcttggcgatcgagttgggtgacttctgctaagact

SEQ ID NO: 258790 - DNA, 55 bp, Artificial
  Synthetic oligonucleotide
ggctttagaccagtatcgccaagtcgtcctggagtttggggagtgcggtccggct

SEQ ID NO: 258791 - DNA, 55 bp, Artificial
  Synthetic oligonucleotide
ggggagtagggcgtttagcaaatcaaccggtagtcatgctaggccatcaaaaggg

SEQ ID NO: 258792 - DNA, 52 bp, Artificial
  Synthetic oligonucleotide
gggtcgtctgttgcagaaccgtatttacccgtcggtctagtaaaagtatccg

SEQ ID NO: 258793 - DNA, 55 bp, Artificial
  Synthetic oligonucleotide
gggtggtgcggtcaatttatgaggctattaccaatagcacattggcggtagtaac

SEQ ID NO: 258794 - DNA, 55 bp, Artificial
  Synthetic oligonucleotide
gtcggtggtgctaccatctccagcacttgattgctcaaagttttatgagccaaac

SEQ ID NO: 258795 - DNA, 58 bp, Artificial
  Synthetic oligonucleotide
gggctccataaacggggtcaaaaccgacatcagctaggtagtccagggcgctctcaga

SEQ ID NO: 258796 - DNA, 55 bp, Artificial
  Synthetic oligonucleotide
gtggcttggaatttacaaactctcatctgggcgcgtcagggagtttcggatatgt

SEQ ID NO: 258797 - DNA, 53 bp, Artificial
  Synthetic oligonucleotide
gttcgctattggactttcccggaacggaaacaggtacgacgggtgacaacgca

SEQ ID NO: 258798 - DNA, 55 bp, Artificial
  Synthetic oligonucleotide
gttggggtctgacagatactatggcgcgtaaccctttacctgatattgaagggac

SEQ ID NO: 258799 - DNA, 53 bp, Artificial
  Synthetic oligonucleotide
tagttgacgacccttgggagtttgttgtaacctaacttgatagtaaactgtgg

SEQ ID NO: 258800 - DNA, 55 bp, Artificial
  Synthetic oligonucleotide
tccaagacaggtaaactgctcccctaggggttgggcattcaccccactccagtag

SEQ ID NO: 258801 - DNA, 55 bp, Artificial
  Synthetic oligonucleotide
ttgatctcctaaccaactagctcctgcggctccccaaatggcattagtagctggg

SEQ ID NO: 258802 - DNA, 51 bp, Artificial
  Synthetic oligonucleotide
caccctttaacctgaagactccccggtacaatgaataccaccggacccagt

SEQ ID NO: 258803 - DNA, 55 bp, Artificial
  Synthetic oligonucleotide
cagtggtcatctcccctgtagcttttccccgcaaattggcgattaaagttgctcc

SEQ ID NO: 258804 - DNA, 55 bp, Artificial
  Synthetic oligonucleotide
catccctaaaactgttgaggattattccccacagaattacaggcaaaatgcaccg

SEQ ID NO: 258805 - DNA, 55 bp, Artificial
  Synthetic oligonucleotide
caaacccatcgtggaaacgggaattagactgatgaggcttgcatagtcagcacat

SEQ ID NO: 258806 - DNA, 53 bp, Artificial
  Synthetic oligonucleotide
ccaaacgtggtaatttggtcaagcgtcccggaggagatgtcgggagttgggcc

SEQ ID NO: 258807 - DNA, 55 bp, Artificial
  Synthetic oligonucleotide
ccactgaggcttgataggactcgcgaatagagttagccctggtaacaattagttc

SEQ ID NO: 258808 - DNA, 55 bp, Artificial
  Synthetic oligonucleotide
ccagaaggactagcctttaacgggacccgcgaagatatgggtagcagtctcgtcc

SEQ ID NO: 258809 - DNA, 55 bp, Artificial
  Synthetic oligonucleotide
cccacgaagcgatccccacctcatttagtgcctcgtcccgaacattccctcagtc

SEQ ID NO: 258810 - DNA, 52 bp, Artificial
  Synthetic oligonucleotide
atgggttggggaccgattccggtagtgagtaatatttggtttcactggggat

SEQ ID NO: 258811 - DNA, 53 bp, Artificial
  Synthetic oligonucleotide
cccataccagaaaccgtcacagaaaccgatcaaccccttaaccaaattgatta

SEQ ID NO: 258812 - DNA, 55 bp, Artificial
  Synthetic oligonucleotide
ccgtaagttaagagggaagtcttgtatctgctatgatacttcgtagcccagagac

SEQ ID NO: 258813 - DNA, 53 bp, Artificial
  Synthetic oligonucleotide
atgagtacgggagtccgagggcggatttagaggaaaatccctacggtcattta

SEQ ID NO: 258814 - DNA, 55 bp, Artificial
  Synthetic oligonucleotide
aggattaatcgcctaaatcaactcaatgggcgcaactactgcgccctaagtgtta

SEQ ID NO: 258815 - DNA, 55 bp, Artificial
  Synthetic oligonucleotide
agaaacatccacaacagccaatcatttaggttagcctcatgggtgtataagatag

SEQ ID NO: 258816 - DNA, 55 bp, Artificial
  Synthetic oligonucleotide
cctcgatatggtttgctcctcactgtcttaggagtaatgaattggcatactcagc

SEQ ID NO: 258817 - DNA, 56 bp, Artificial
  Synthetic oligonucleotide
acccacgcctacaccgagtccaggagaggcattagtgcgagtcctgcgagccggga

SEQ ID NO: 258818 - DNA, 51 bp, Artificial
  Synthetic oligonucleotide
cctcgcggggataagaaaactcccgacgtaccattgataaacgggttacta

SEQ ID NO: 258819 - DNA, 54 bp, Artificial
  Synthetic oligonucleotide
cgcataatataaaaggcgcttcgtaggcgattttccgagtcgttggaccctggg

SEQ ID NO: 258820 - DNA, 55 bp, Artificial
  Synthetic oligonucleotide
cgcggtagggcataaactccaggataatcagggcttcgcgatagctacgtccgcg

SEQ ID NO: 258821 - DNA, 55 bp, Artificial
  Synthetic oligonucleotide
cgctgaggctaatgaggctatctatagggttaatatgcaggggactcgttctggt

SEQ ID NO: 258822 - DNA, 55 bp, Artificial
  Synthetic oligonucleotide
agggcgcgttcatttggtcactcagtaacgattacagccctttcagtaatcatgc

SEQ ID NO: 258823 - DNA, 54 bp, Artificial
  Synthetic oligonucleotide
atgaacgagcttaaccgattacgagacactttgcgccctcacttgccctggcac

SEQ ID NO: 258824 - DNA, 54 bp, Artificial
  Synthetic oligonucleotide
gggctaatttgacgggagcgcgactgagtggggctaacttgcgaggagcgcaat

SEQ ID NO: 258825 - DNA, 54 bp, Artificial
  Synthetic oligonucleotide
gctgaccaaactcccgtcgtcgatagatccgccgtctgtgctggaatgcttccc

SEQ ID NO: 258826 - DNA, 54 bp, Artificial
  Synthetic oligonucleotide
ccgtagacgcagctatccgccaaatgggatatcttctcagccgcagaggttgcc

SEQ ID NO: 258827 - DNA, 54 bp, Artificial
  Synthetic oligonucleotide
ctcggcgaaataccccatcttgcgctcccaaaattactaatcctgccccagtta

SEQ ID NO: 258828 - DNA, 54 bp, Artificial
  Synthetic oligonucleotide
ggtcaagcgtcccggaggagatgtcgggagttgggccggttctaaacactttca

SEQ ID NO: 258829 - DNA, 51 bp, Artificial
  Synthetic oligonucleotide
aagggcgacctttacccgtgaaggttccccaaccgacacggatacctgcga

SEQ ID NO: 258830 - DNA, 51 bp, Artificial
  Synthetic oligonucleotide
gccaggaagtggcgtttaggcctgtggagacgatgggagaccccagctata

SEQ ID NO: 258831 - DNA, 51 bp, Artificial
  Synthetic oligonucleotide
gaacgttgtaacccctctaatgctctgcctataaaccagtgagtaatgcta

SEQ ID NO: 258832 - DNA, 51 bp, Artificial
  Synthetic oligonucleotide
acccacagttaagcctacctgttgagcgcttccccataggtaactagccgt

SEQ ID NO: 258833 - DNA, 51 bp, Artificial
  Synthetic oligonucleotide
cggcctgagtccccgcagttcccctaggggtagaccctccactaatcgaga

SEQ ID NO: 258834 - DNA, 55 bp, Artificial
  Synthetic oligonucleotide
cgtctaggactgtcggcgcggggaagcgatcgcgttttgaaagtagcgaggacta

SEQ ID NO: 258835 - DNA, 55 bp, Artificial
  Synthetic oligonucleotide
cgttatcatggacgatagcacaattaactgttgagttggaccactaaggtcgcta

SEQ ID NO: 258836 - DNA, 55 bp, Artificial
  Synthetic oligonucleotide
ctacgaagctcaagacgtggcgtttgatgctcccaaaactattttagtgggcaac

SEQ ID NO: 258837 - DNA, 55 bp, Artificial
  Synthetic oligonucleotide
ctgcgtatgcgtggtgataatcagcctccaattcgtaatcaaatgacggctcgac

SEQ ID NO: 258838 - DNA, 55 bp, Artificial
  Synthetic oligonucleotide
agtaggccaacaaccacttacagataacttgtcacgaataatgcgactgcgaaac

SEQ ID NO: 258839 - DNA, 55 bp, Artificial
  Synthetic oligonucleotide
ctcgtgacaagcagtcttctcatactgagttacaattgatgtccgtatcagcaaa

SEQ ID NO: 258840 - DNA, 55 bp, Artificial
  Synthetic oligonucleotide
gacttgaagaaacattgacggcgacgttaaatgcaagctaccgggtcagtctact

SEQ ID NO: 258841 - DNA, 55 bp, Artificial
  Synthetic oligonucleotide
gcctcacatgagggatgctcctgccgtatctgggccaatagtagttcacgaaagc

SEQ ID NO: 258842 - DNA, 55 bp, Artificial
  Synthetic oligonucleotide
gcgcataacgtacaaatagagtgattagtacgagtgcgaaaacttcccacaccca

SEQ ID NO: 258843 - DNA, 55 bp, Artificial
  Synthetic oligonucleotide
gcggcatcagtaaactgagttcgccaataccccagtgttcacagagtagttcaga

SEQ ID NO: 258844 - DNA, 55 bp, Artificial
  Synthetic oligonucleotide
tgagagttattacacggtctatattcccaatccattgcttaatcccaatgccctg

SEQ ID NO: 258845 - DNA, 55 bp, Artificial
  Synthetic oligonucleotide
gtgagctggacggggctactgctgccgctatttgtgagcgccaattcgtcgaagt

SEQ ID NO: 258846 - DNA, 55 bp, Artificial
  Synthetic oligonucleotide
gtgaacgggctcgatgatataggtcttacgctgcaggacgcagatgcgataagag

SEQ ID NO: 258847 - DNA, 55 bp, Artificial
  Synthetic oligonucleotide
gtcggctttctagtttgacctgttttactgttatcgccggaccctatcgtgcggc

SEQ ID NO: 258848 - DNA, 55 bp, Artificial
  Synthetic oligonucleotide
gtcctgcgagcaccatacggggcaatataggtttgtcgttgtaccgaagcgccgt

SEQ ID NO: 258849 - DNA, 55 bp, Artificial
  Synthetic oligonucleotide
caagccgctgagactatggctcaaataagcaacggggctcatgccgctactagct

SEQ ID NO: 258850 - DNA, 55 bp, Artificial
  Synthetic oligonucleotide
ggcgcgctatggccggttagcctgtatacctcagcgcaataagagctctgttttc

SEQ ID NO: 258851 - DNA, 55 bp, Artificial
  Synthetic oligonucleotide
ggagcgctatattgatttggatcgtcgtttggggcaggctgctaatgccgttccc

SEQ ID NO: 258852 - DNA, 55 bp, Artificial
  Synthetic oligonucleotide
ggacgataattcgccgcagggaagttcttaccgccgccgttagcgcgccagaatc

SEQ ID NO: 258853 - DNA, 55 bp, Artificial
  Synthetic oligonucleotide
gctgcgccgccatacccataacaacagcttttaggccatcatcgatacctacttc

SEQ ID NO: 258854 - DNA, 55 bp, Artificial
  Synthetic oligonucleotide
gcggcgagaagattgaaagtcgtcatgttgtgttagcgattggtcacagcgcccg

SEQ ID NO: 258855 - DNA, 54 bp, Artificial
  Synthetic oligonucleotide
aagctgaatgcggtagctaacgccaaccgagtgcttattcgatcggccaatgca

SEQ ID NO: 258856 - DNA, 54 bp, Artificial
  Synthetic oligonucleotide
cagcatgccaacacttgcgcagagcggcagcagtctagccctgaatggacgaat

SEQ ID NO: 258857 - DNA, 53 bp, Artificial
  Synthetic oligonucleotide
gcctaatccgatctcaggcttacccttagctgtcatttcgattctcgcattgc

SEQ ID NO: 258858 - DNA, 52 bp, Artificial
  Synthetic oligonucleotide
acattgatagttaccgggaagactgatagtttctgcccacagcttgcgctgt

SEQ ID NO: 258859 - DNA, 52 bp, Artificial
  Synthetic oligonucleotide
tatacgttggcatttccagctcagacatatgacgcaacaccaactggtaccc

SEQ ID NO: 258860 - DNA, 55 bp, Artificial
  Synthetic oligonucleotide
cagcggtgaaagtgtagaaaacttctgtcagttggtaggccctgagcactggtca

SEQ ID NO: 258861 - DNA, 52 bp, Artificial
  Synthetic oligonucleotide
tcgataaatgaccgataggcgtcgttgtctcgggccagctgatcgtgaggcc

SEQ ID NO: 258862 - DNA, 50 bp, Artificial
  Synthetic oligonucleotide
agggtaggctgccgattggggcgctcgagccgtggtttccgatgttaatc

SEQ ID NO: 258863 - DNA, 50 bp, Artificial
  Synthetic oligonucleotide
aggcccgcctagcgctgttgttggcaaggtctactccaaccaccatggta

SEQ ID NO: 258864 - DNA, 50 bp, Artificial
  Synthetic oligonucleotide
agctggtagctcactatttgtcaccttgggaggttggcccgccgcaggtg

SEQ ID NO: 258865 - DNA, 50 bp, Artificial
  Synthetic oligonucleotide
aaaacggcaaacttgggcctcaagtccagcggtccctcggctaaccgaga

SEQ ID NO: 258866 - DNA, 50 bp, Artificial
  Synthetic oligonucleotide
aaacttgggcctcaagtccagcggtccctcggctaaccgagacaacccgt

SEQ ID NO: 258867 - DNA, 50 bp, Artificial
  Synthetic oligonucleotide
aaatttgcgctctctcccaagcgacccctgtctctcgctccaccagcgac

SEQ ID NO: 258868 - DNA, 50 bp, Artificial
  Synthetic oligonucleotide
aacggctggcaaccgcgggcgggctcaacagcagataacgcttacctacc

SEQ ID NO: 258869 - DNA, 50 bp, Artificial
  Synthetic oligonucleotide
aactacctgccgactgtcggacctctgcgctgggccctccaccgctaacg

SEQ ID NO: 258870 - DNA, 50 bp, Artificial
  Synthetic oligonucleotide
aactcaataggcgccgccactatctctgccacctcggcccgagcaacatt

SEQ ID NO: 258871 - DNA, 55 bp, Artificial
  Synthetic oligonucleotide
catgccgactgatcaaggatcgaggcctggaggtcactgatcgagcgtttatccg

SEQ ID NO: 258872 - DNA, 50 bp, Artificial
  Synthetic oligonucleotide
aagcctacaggccactgtcgactggctaatcgccaacggtagcgggctcc

SEQ ID NO: 258873 - DNA, 50 bp, Artificial
  Synthetic oligonucleotide
aatcgaagatacgtcccagcgcatgagtacgccccgatagcgccgcggga

SEQ ID NO: 258874 - DNA, 50 bp, Artificial
  Synthetic oligonucleotide
acagcctccatgattccggggcccccaccggttatcaccgctagcccgct

SEQ ID NO: 258875 - DNA, 50 bp, Artificial
  Synthetic oligonucleotide
acaggcgtcgaccctagttacgcgcaggtagcacgtgagtcggcacgcta

SEQ ID NO: 258876 - DNA, 50 bp, Artificial
  Synthetic oligonucleotide
accaccaaactcctccggtttaccccagcgccgctcgattggcactcgtg

SEQ ID NO: 258877 - DNA, 50 bp, Artificial
  Synthetic oligonucleotide
acccgcctgaccacagttggcgtcagacagcaccatgatttcaccgacgc

SEQ ID NO: 258878 - DNA, 50 bp, Artificial
  Synthetic oligonucleotide
accgcaacaccaccaaactcctccggtttaccccagcgccgctcgattgg

SEQ ID NO: 258879 - DNA, 50 bp, Artificial
  Synthetic oligonucleotide
accgccttggagggtaggctgccgattggggcgctcgagccgtggtttcc

SEQ ID NO: 258880 - DNA, 50 bp, Artificial
  Synthetic oligonucleotide
acctagcggcaactgcaggactcaaaccctgcgctagcagcgctcccaat

SEQ ID NO: 258881 - DNA, 50 bp, Artificial
  Synthetic oligonucleotide
acctggtcggtcaggcgtcagtacttccagaacactatgcccgccagcga

SEQ ID NO: 258882 - DNA, 52 bp, Artificial
  Synthetic oligonucleotide
ccgttcgttaacttcgcaccggttgttgcgggtaccaacggtatctctccaa

SEQ ID NO: 258883 - DNA, 50 bp, Artificial
  Synthetic oligonucleotide
acgttagtctcattgccggacccaacgccgtccgcagaatgtggcccaaa

SEQ ID NO: 258884 - DNA, 50 bp, Artificial
  Synthetic oligonucleotide
agagtcacacttgagcgacgtggccgggttgcactaatcctgctggaccg

SEQ ID NO: 258885 - DNA, 50 bp, Artificial
  Synthetic oligonucleotide
agcaacacctcaggtcccagggccaaagcctccgcgcgtaactcttttgc

SEQ ID NO: 258886 - DNA, 50 bp, Artificial
  Synthetic oligonucleotide
agcaggctatcgcctctaaagcggggttcagtgtcgccggtcagtgggtt

SEQ ID NO: 258887 - DNA, 50 bp, Artificial
  Synthetic oligonucleotide
agcagtccgggaatagtggcgtaggcggtgtctacgggtaccatccgcga

SEQ ID NO: 258888 - DNA, 50 bp, Artificial
  Synthetic oligonucleotide
agccaaggtgtcttctataaggggacccgtgaccgtgccccggacccgta

SEQ ID NO: 258889 - DNA, 50 bp, Artificial
  Synthetic oligonucleotide
agccaccgactaggcgtgcgagggctgccggttgcagaaataggccttaa

SEQ ID NO: 258890 - DNA, 50 bp, Artificial
  Synthetic oligonucleotide
agccgcacgcgcagatataggcccggaggccactagctaatgatgcgaac

SEQ ID NO: 258891 - DNA, 50 bp, Artificial
  Synthetic oligonucleotide
agcctcccactcagctaggcggcagcacccatgaccatgtccgccaataa

SEQ ID NO: 258892 - DNA, 50 bp, Artificial
  Synthetic oligonucleotide
agcgacgtggccgggttgcactaatcctgctggaccgacctgagagactt

SEQ ID NO: 258893 - DNA, 55 bp, Artificial
  Synthetic oligonucleotide
cgccaacgtaaaggcctgttaatggcaattcaaagcgagctgacacataaagtag

SEQ ID NO: 258894 - DNA, 50 bp, Artificial
  Synthetic oligonucleotide
agcgccatagtgttagtccatggatggggtgcaaccgtgcgagcttggga

SEQ ID NO: 258895 - DNA, 50 bp, Artificial
  Synthetic oligonucleotide
agcggacactgtcgcggcagatggcaatagcaccctggcgttcaagggat

SEQ ID NO: 258896 - DNA, 50 bp, Artificial
  Synthetic oligonucleotide
agcggttttggcgccgtacaggagattgccgcgagtcctcggctttttga

SEQ ID NO: 258897 - DNA, 50 bp, Artificial
  Synthetic oligonucleotide
agctgccacagtccccgcaaacaacgcggtgcacattaacgccaagctca

SEQ ID NO: 258898 - DNA, 55 bp, Artificial
  Synthetic oligonucleotide
cgcctgatctatttaacactcagcagcataacgaaacactacagtggacggtacg

SEQ ID NO: 258899 - DNA, 55 bp, Artificial
  Synthetic oligonucleotide
cggcgctcttatcgagtaacgcttgctgagtcatgttgagtcttgcatcggcatg

SEQ ID NO: 258900 - DNA, 55 bp, Artificial
  Synthetic oligonucleotide
cgttcgcgttaactggatcagcgggccaaatttaatcagcggataaactgccgag

SEQ ID NO: 258901 - DNA, 56 bp, Artificial
  Synthetic oligonucleotide
acaaaaaatcctctgattacacaagttgacgtgcgcaaagttcgcaacggtcggga

SEQ ID NO: 258902 - DNA, 58 bp, Artificial
  Synthetic oligonucleotide
atgtaaaggcgtgttgctcttgggttgttacattgcccgaaaatctcaaagatgcacc

SEQ ID NO: 258903 - DNA, 60 bp, Artificial
  Synthetic oligonucleotide
cagctcaatatatctctcgggatcggtggttggagttgtggcagcaagtcacaaaaaatc

SEQ ID NO: 258904 - DNA, 60 bp, Artificial
  Synthetic oligonucleotide
gagcatgctgcaagatgataatcgggatttaaatattagccagacggaaattgacgggcg

SEQ ID NO: 258905 - DNA, 53 bp, Artificial
  Synthetic oligonucleotide
agattaaagactataatcattcgtttaaaaagctgatggaacgcaaggaaatt

SEQ ID NO: 258906 - DNA, 53 bp, Artificial
  Synthetic oligonucleotide
ggtaacatcttcgatttacccttaacggtcttgagcccttggtacatatggct

SEQ ID NO: 258907 - DNA, 57 bp, Artificial
  Synthetic oligonucleotide
cgcaatttactgacatcagtagtcaaatcccctataccaacctgtacatttcctttc

SEQ ID NO: 258908 - DNA, 56 bp, Artificial
  Synthetic oligonucleotide
acatgtgcaggctacgtaacatttcgttacatagcccagtaattccgttctgtaaa

SEQ ID NO: 258909 - DNA, 55 bp, Artificial
  Synthetic oligonucleotide
gcagagtgttacgcaaacaaaggacctacgatgaagagaattcagccgagagctc

SEQ ID NO: 258910 - DNA, 55 bp, Artificial
  Synthetic oligonucleotide
ccaaattgctcgttgacgtgataatgaggtatgtgcctgggcataacaagttgcc

SEQ ID NO: 258911 - DNA, 53 bp, Artificial
  Synthetic oligonucleotide
ccggagtttctacgggacgagattaaaagctatacagaacggctctacgggct

SEQ ID NO: 258912 - DNA, 55 bp, Artificial
  Synthetic oligonucleotide
ccacagtgctgatacgtacttcaccaccgagtgcagcctgtgcgaaagtaatcgg

SEQ ID NO: 258913 - DNA, 55 bp, Artificial
  Synthetic oligonucleotide
cccacagaaatcacccgccctgccgtagatggaatggtcaaggttgtttccggtg

SEQ ID NO: 258914 - DNA, 54 bp, Artificial
  Synthetic oligonucleotide
gtagtatatcccaccttacctacgatcgtggaagaatccgggtcctccaaagcc

SEQ ID NO: 258915 - DNA, 55 bp, Artificial
  Synthetic oligonucleotide
gacaggtaagatactatgtatgccccagagcaaggggtcctgttcatctacaggc

SEQ ID NO: 258916 - DNA, 55 bp, Artificial
  Synthetic oligonucleotide
ccccaggtggccggttttggtgtcacggaggaaagcgccttggctcaggattctg

SEQ ID NO: 258917 - DNA, 55 bp, Artificial
  Synthetic oligonucleotide
gccagatggcggggaactcagttcctgcatgactgaaaattaaggttgcccagag

SEQ ID NO: 258918 - DNA, 60 bp, Artificial
  Synthetic oligonucleotide
cactagaagccgcaggtgcagaatatgtaacgtcaccctcagcactataacgagaattcg

SEQ ID NO: 258919 - DNA, 55 bp, Artificial
  Synthetic oligonucleotide
ggctcgtctatgacaccggaaccttcggatacacaagatccttgtaacgaaatgg

SEQ ID NO: 258920 - DNA, 55 bp, Artificial
  Synthetic oligonucleotide
cctgtttccacggtttactggcttgcggtcactgctttgtatctgggtttcagcc

SEQ ID NO: 258921 - DNA, 54 bp, Artificial
  Synthetic oligonucleotide
gcttgtgttcctacattaaggctttcgccacccataaagggttagtcgttgaac

SEQ ID NO: 258922 - DNA, 55 bp, Artificial
  Synthetic oligonucleotide
gagagagcagtgggagccgcagggagaatctctggacagtattcctactgagagg

SEQ ID NO: 258923 - DNA, 55 bp, Artificial
  Synthetic oligonucleotide
gcgcgtggagaaagtagtccagggtgtaattggtgccacccaaagccacttcgtg

SEQ ID NO: 258924 - DNA, 55 bp, Artificial
  Synthetic oligonucleotide
aaaaggcctacgaggataatcgggacagtatcggaatttattatgatggcgagtt

SEQ ID NO: 258925 - DNA, 55 bp, Artificial
  Synthetic oligonucleotide
cggttcctgaagactcatgattttcgctcctaccttaccgatatacgcctccggt

SEQ ID NO: 258926 - DNA, 55 bp, Artificial
  Synthetic oligonucleotide
cggtacggctacagatatgataggccaccaactccgccagactgtaaaagcttcg

SEQ ID NO: 258927 - DNA, 55 bp, Artificial
  Synthetic oligonucleotide
ctagataggaaagcgcagcgatctccataatcgtcgaggcaattcccagactggc

SEQ ID NO: 258928 - DNA, 55 bp, Artificial
  Synthetic oligonucleotide
ctgggattattgtgggagagaacgatacggagcttttaattgccacgaataacca

SEQ ID NO: 258929 - DNA, 60 bp, Artificial
  Synthetic oligonucleotide
gtgaataatggctgtagctactcgaatgaacagctttccatgatctgtgtatcccttggc

SEQ ID NO: 258930 - DNA, 55 bp, Artificial
  Synthetic oligonucleotide
cttgctactgcctccgccgatctttgtgaccagtggtgtgataattcctttcacc

SEQ ID NO: 258931 - DNA, 55 bp, Artificial
  Synthetic oligonucleotide
gaagcttctacgcatcctgccatatttgccgagtggttgtgcttctgtgtgcgct

SEQ ID NO: 258932 - DNA, 55 bp, Artificial
  Synthetic oligonucleotide
ataacaaccggataatggattatatacatcggctgttctgatgaacatgtaagcg

SEQ ID NO: 258933 - DNA, 55 bp, Artificial
  Synthetic oligonucleotide
gtggccttctagtagctctttgcggtacaggcagtccaggcgttctaacagagcg

SEQ ID NO: 258934 - DNA, 55 bp, Artificial
  Synthetic oligonucleotide
atatcggagtcaaactgggagtttgggcggcagacgatcatctttcggtattccc

SEQ ID NO: 258935 - DNA, 55 bp, Artificial
  Synthetic oligonucleotide
gtggacgagtattttaaggctatatcagggatttcttcgcaaacgtgagtctgtg

SEQ ID NO: 258936 - DNA, 55 bp, Artificial
  Synthetic oligonucleotide
gtccagttgataagtctgccagtttcatttgtataacacctcccaccaaatttcg

SEQ ID NO: 258937 - DNA, 55 bp, Artificial
  Synthetic oligonucleotide
caaacgcgccagagctctatttatcttcttccagacatgagaatcattcttctga

SEQ ID NO: 258938 - DNA, 55 bp, Artificial
  Synthetic oligonucleotide
cacggactattatggattccgctatatgatacataggctgggtgtcagcgtggca

SEQ ID NO: 258939 - DNA, 55 bp, Artificial
  Synthetic oligonucleotide
cactcgtgagttgcccttccccatcaaatcctgtcgtttcataggacatgctata

SEQ ID NO: 258940 - DNA, 56 bp, Artificial
  Synthetic oligonucleotide
gggaagatttgtacacctgccacaactttaggctttccgccatagctgccgtaaaa

SEQ ID NO: 258941 - DNA, 55 bp, Artificial
  Synthetic oligonucleotide
cagacgtcctggtgcctttgactcccgtggttgtaaaacacatgaagccgggcgg

SEQ ID NO: 258942 - DNA, 54 bp, Artificial
  Synthetic oligonucleotide
cgtgaacccacataatacctattccggctgggcttgtattcgatatggtatcgg

SEQ ID NO: 258943 - DNA, 54 bp, Artificial
  Synthetic oligonucleotide
gtagccttcatctccatcgaaatgcggccttttacgtgtatgaagaagagcgta

SEQ ID NO: 258944 - DNA, 54 bp, Artificial
  Synthetic oligonucleotide
ttagataagcgtgtaggataaagttgcattcccagagcattgacttcgcctacg

SEQ ID NO: 258945 - DNA, 54 bp, Artificial
  Synthetic oligonucleotide
aacaacaccccttgaggggtagcgacgcgtcaaaagcaattaggcttgaacgga

SEQ ID NO: 258946 - DNA, 53 bp, Artificial
  Synthetic oligonucleotide
gctggagtcccaaaaccattcagactctaatcaagcgccttgtaaccaaaggt

SEQ ID NO: 258947 - DNA, 53 bp, Artificial
  Synthetic oligonucleotide
gacaatcagacaatccgccggagcgatatcatctgtataaaccggctgccccg

SEQ ID NO: 258948 - DNA, 53 bp, Artificial
  Synthetic oligonucleotide
tataaaggttacggtaaatgaggcgtttccgagagttttatttgcgcgtagaa

SEQ ID NO: 258949 - DNA, 52 bp, Artificial
  Synthetic oligonucleotide
cgaattgctattgggattttcgtaggaactattgctcttgtacagtttgggg

SEQ ID NO: 258950 - DNA, 52 bp, Artificial
  Synthetic oligonucleotide
tctgttacgtctgtatttgcgcccacaaccttatctatgtaagatgtcaggg

SEQ ID NO: 258951 - DNA, 60 bp, Artificial
  Synthetic oligonucleotide
agtgtaataatcgtgccatactccggcgttgtaacttgagcgtgatctcaatactcctaa

SEQ ID NO: 258952 - DNA, 52 bp, Artificial
  Synthetic oligonucleotide
acacaagacaagaagaaactgagcgttctcatagggtgtctccccgggagaa

SEQ ID NO: 258953 - DNA, 52 bp, Artificial
  Synthetic oligonucleotide
ttcctgtgttgggcgggcttttgatctatattgcgaagaaggctcatccgca

SEQ ID NO: 258954 - DNA, 51 bp, Artificial
  Synthetic oligonucleotide
catggactaattcaaagagatcgaattttcactgtgtcagtgcgtttgcct

SEQ ID NO: 258955 - DNA, 51 bp, Artificial
  Synthetic oligonucleotide
tagaatatggcatagaaggatggaattctgtaagcacataagaacttccgt

SEQ ID NO: 258956 - DNA, 50 bp, Artificial
  Synthetic oligonucleotide
gccgttcatcccattacctctatcgaccagaatatttcccttatggcgca

SEQ ID NO: 258957 - DNA, 50 bp, Artificial
  Synthetic oligonucleotide
ctaaggatgcgcacgccgcaataaggtagggcacgcaaagcggtgttgcg

SEQ ID NO: 258958 - DNA, 50 bp, Artificial
  Synthetic oligonucleotide
aaaacgccgacaatttatcagatggaggcgacagaatgcggagcagcgtc

SEQ ID NO: 258959 - DNA, 50 bp, Artificial
  Synthetic oligonucleotide
aagagagacggccacattcgcctcacctccgccgtaagtagcgccaaagg

SEQ ID NO: 258960 - DNA, 50 bp, Artificial
  Synthetic oligonucleotide
acactccgctaaggatgcgcacgccgcaataaggtagggcacgcaaagcg

SEQ ID NO: 258961 - DNA, 50 bp, Artificial
  Synthetic oligonucleotide
acccagtggttgtgtgcgaatggctatgcggagaatgcggacgcctgcct

SEQ ID NO: 258962 - DNA, 54 bp, Artificial
  Synthetic oligonucleotide
gtgtaggtggtcttttaaatgcggcggttggacttggaggttatctgggattta

SEQ ID NO: 258963 - DNA, 50 bp, Artificial
  Synthetic oligonucleotide
acccattcgccctggtgcccggggtcgatacacactacatggccattgga

SEQ ID NO: 258964 - DNA, 50 bp, Artificial
  Synthetic oligonucleotide
acgctccgcgaaggatgcacacgccgcaatgaggaatatcaccgcaaggc

SEQ ID NO: 258965 - DNA, 50 bp, Artificial
  Synthetic oligonucleotide
agccaagaaacagggacaactccgagcggagggaatggagcaagcggcaa

SEQ ID NO: 258966 - DNA, 50 bp, Artificial
  Synthetic oligonucleotide
aggatgccaggacgaactgggagatgggacacccacagtcgtaccggcag

SEQ ID NO: 258967 - DNA, 50 bp, Artificial
  Synthetic oligonucleotide
ataccacgctgggttccagaccaggcgctagatacgcgccgaatgcgatt

SEQ ID NO: 258968 - DNA, 50 bp, Artificial
  Synthetic oligonucleotide
atcaccggggactgccttggcccttacgtgggacatcagctctctgacta

SEQ ID NO: 258969 - DNA, 50 bp, Artificial
  Synthetic oligonucleotide
atgaagggagcggcatggggcgcagtgagcaggatattcgaaggctctgc

SEQ ID NO: 258970 - DNA, 50 bp, Artificial
  Synthetic oligonucleotide
atgagagtcttcacgaaggagccggatacgcagggagtgccgcgcctttg

SEQ ID NO: 258971 - DNA, 50 bp, Artificial
  Synthetic oligonucleotide
cccagaggcggtagaacgggtcacgggagagaagctagaagggtacgcga

SEQ ID NO: 258972 - DNA, 50 bp, Artificial
  Synthetic oligonucleotide
cccgcggtttctaccccgctgaaagcaactgtccgctcccatatggcaga

SEQ ID NO: 258973 - DNA, 57 bp, Artificial
  Synthetic oligonucleotide
tgtagcggcaaggtttaacgaatttatcactgctaagttgttgggaggggctatgga

SEQ ID NO: 258974 - DNA, 50 bp, Artificial
  Synthetic oligonucleotide
ccctactcgtggacgctccgctggggcctttataccaacgcaccccacgg

SEQ ID NO: 258975 - DNA, 50 bp, Artificial
  Synthetic oligonucleotide
ccctggcgggcgccctgagaaactctgtcataccgtttggcacctacgtt

SEQ ID NO: 258976 - DNA, 50 bp, Artificial
  Synthetic oligonucleotide
ccgaagacagaggggagatcgcaagcatcggggcccccagggcaatcgta

SEQ ID NO: 258977 - DNA, 50 bp, Artificial
  Synthetic oligonucleotide
ccgattaaaccgcgggccggaatagagaattccaggcgggaggagccgtc

SEQ ID NO: 258978 - DNA, 50 bp, Artificial
  Synthetic oligonucleotide
ccgcatcctcgccccatacagagagcagctctacgctcaatgacaggccg

SEQ ID NO: 258979 - DNA, 50 bp, Artificial
  Synthetic oligonucleotide
ccgcctgccagcagaggactgaagttacgcactgccataacgccctccgc

SEQ ID NO: 258980 - DNA, 50 bp, Artificial
  Synthetic oligonucleotide
ccgctgcgtgaaatgctagacgagaggattccctgcgccgtggggttgga

SEQ ID NO: 258981 - DNA, 50 bp, Artificial
  Synthetic oligonucleotide
ccgtgtgacgcggcggtcctgcgagcagggaaccttgacaatctggtcca

SEQ ID NO: 258982 - DNA, 50 bp, Artificial
  Synthetic oligonucleotide
cgacgtgatttatccagagcggcagatggctacctgggcggcagtacgct

SEQ ID NO: 258983 - DNA, 50 bp, Artificial
  Synthetic oligonucleotide
cgatggcatcccggtacgcctcccatacggcttcgttcagtgtagggtgg

SEQ ID NO: 258984 - DNA, 60 bp, Artificial
  Synthetic oligonucleotide
gcatcctctaatgtgtatctgtctatctgagaaaacagcgtaatccccatctctgcagca

SEQ ID NO: 258985 - DNA, 50 bp, Artificial
  Synthetic oligonucleotide
cgcaggcgaatgtgcgggagtgcgaatacctgtcaggattgcgggagtgc

SEQ ID NO: 258986 - DNA, 50 bp, Artificial
  Synthetic oligonucleotide
cgcctgacggcaatgcaagcaacaccgccagggtagccacaagcatcatc

SEQ ID NO: 258987 - DNA, 50 bp, Artificial
  Synthetic oligonucleotide
cgcggcggtcctgcgagcagggaaccttgacaatctggtccaagagaacc

SEQ ID NO: 258988 - DNA, 50 bp, Artificial
  Synthetic oligonucleotide
cgcgggccggaatagagaattccaggcgggaggagccgtcactgagcaga

SEQ ID NO: 258989 - DNA, 50 bp, Artificial
  Synthetic oligonucleotide
cgctccgctggggcctttataccaacgcaccccacggcaacccgacggaa

SEQ ID NO: 258990 - DNA, 50 bp, Artificial
  Synthetic oligonucleotide
cggcaattgcatctgtgcgaagagaacttggaggcaagtgggcggccgct

SEQ ID NO: 258991 - DNA, 50 bp, Artificial
  Synthetic oligonucleotide
cgtggcagaaaagaaagcggttgttttgggaaacgggggcgtcgctccgg

SEQ ID NO: 258992 - DNA, 57 bp, Artificial
  Synthetic oligonucleotide
ttaaccagaaaatatgtatgccgggtcacacgtttatttggatgacgtgactggcat

SEQ ID NO: 258993 - DNA, 55 bp, Artificial
  Synthetic oligonucleotide
gagctgtcataacaggtgtaactctcataggcagtaccttgatagcccttaacgc

SEQ ID NO: 258994 - DNA, 55 bp, Artificial
  Synthetic oligonucleotide
cgactaaaccgtcggaaatatcacagcaggccgtagcgacattgagcaatccgcg

SEQ ID NO: 258995 - DNA, 55 bp, Artificial
  Synthetic oligonucleotide
cctttccgctgtctaatgagacaatgggaacccaagctcaaatacagcctacgac

SEQ ID NO: 258996 - DNA, 55 bp, Artificial
  Synthetic oligonucleotide
ggcatcaaaaggaccgacagaatgaattcacggatagtgcgtcctctggaaatct

SEQ ID NO: 258997 - DNA, 55 bp, Artificial
  Synthetic oligonucleotide
ggcgatcagagaagagcgtccgaacggcagcgttattgccgacgtaggcaccgac

SEQ ID NO: 258998 - DNA, 55 bp, Artificial
  Synthetic oligonucleotide
catatccggttgtttgcatggacgagtcgcccaaacagcttataggagaagtccg

SEQ ID NO: 258999 - DNA, 55 bp, Artificial
  Synthetic oligonucleotide
gtaagattaggcctgtactctctccgctttatggagatccgttaatgaagcgccc

SEQ ID NO: 259000 - DNA, 55 bp, Artificial
  Synthetic oligonucleotide
tatttgcgcatacccaaataccgtgcgactacgacgtttgcgccgatggaaaggc

SEQ ID NO: 259001 - DNA, 55 bp, Artificial
  Synthetic oligonucleotide
tcgcttccgtcggaagaaaggtcgcgttctccagtcgtttggtgtattcggctct

SEQ ID NO: 259002 - DNA, 55 bp, Artificial
  Synthetic oligonucleotide
tctttcatggcatagtcgccgtaccaagctttcagaaggctgaccatgtagttcg

SEQ ID NO: 259003 - DNA, 55 bp, Artificial
  Synthetic oligonucleotide
tggctggaaacttagagatgcctacaaagttttgctcggcggtcactataagttt

SEQ ID NO: 259004 - DNA, 53 bp, Artificial
  Synthetic oligonucleotide
gaacgacacgcggtacgtacgaagtgtacggctacaaaacgaaattagacgga

SEQ ID NO: 259005 - DNA, 54 bp, Artificial
  Synthetic oligonucleotide
cttgtaggacatcaagctatgccgtccagttcggtcgtaagactaactccaaaa

SEQ ID NO: 259006 - DNA, 53 bp, Artificial
  Synthetic oligonucleotide
ggactggtcttcctgatacttcgctgagagccggttggtctcagggcttccgt

SEQ ID NO: 259007 - DNA, 53 bp, Artificial
  Synthetic oligonucleotide
taactcctacggttacaacgttgttaggcttccattcatgttcgggagaagcc

SEQ ID NO: 259008 - DNA, 53 bp, Artificial
  Synthetic oligonucleotide
aaaacgacgaacagatttatcccgatgaataaaagaggccgtcacttggacgg

SEQ ID NO: 259009 - DNA, 52 bp, Artificial
  Synthetic oligonucleotide
gaaggttgctcgtcagggcgcaactagccgctacatggaaggtaccggcaac

SEQ ID NO: 259010 - DNA, 52 bp, Artificial
  Synthetic oligonucleotide
ctgcgcctcgttcacttgttccgaagacccggaggtttgtgccgaagactgc

SEQ ID NO: 259011 - DNA, 52 bp, Artificial
  Synthetic oligonucleotide
aaggggttgcctcgcaagttctgcttagcaacggggaggtttggcaggggtg

SEQ ID NO: 259012 - DNA, 52 bp, Artificial
  Synthetic oligonucleotide
ggaagccggaatcggagcttctgcaggagcgtgggcatagttaggaccgcca

SEQ ID NO: 259013 - DNA, 52 bp, Artificial
  Synthetic oligonucleotide
acggcagccgcatgggacggagatacgctcaagggacgcatgttctgtcagt

SEQ ID NO: 259014 - DNA, 52 bp, Artificial
  Synthetic oligonucleotide
agcttctgcaggagcgtgggcatagttaggaccgccatatccgaagggacga

SEQ ID NO: 259015 - DNA, 55 bp, Artificial
  Synthetic oligonucleotide
ctggtcttggcctctcttcttggacaagcgctatcggtactagcttcagtcgtac

SEQ ID NO: 259016 - DNA, 52 bp, Artificial
  Synthetic oligonucleotide
ccttcccgaacttcccgggcgcaaaggaatgcaagtacaacgcttaccgcgc

SEQ ID NO: 259017 - DNA, 52 bp, Artificial
  Synthetic oligonucleotide
ggggctcagtcgctagttccgtgggctaatggcggcggcaagtttagtatgc

SEQ ID NO: 259018 - DNA, 51 bp, Artificial
  Synthetic oligonucleotide
acctttatgagcaatgatgtgcataaagttatgggaggcgtcggctgtata

SEQ ID NO: 259019 - DNA, 51 bp, Artificial
  Synthetic oligonucleotide
ccggaggtttgtgccgaagactgcggaatacttggttcgggtgacggggtg

SEQ ID NO: 259020 - DNA, 51 bp, Artificial
  Synthetic oligonucleotide
ctcagccactaagtatttaactacgccctaacaagttgcagtccctcaatg

SEQ ID NO: 259021 - DNA, 51 bp, Artificial
  Synthetic oligonucleotide
ctcaggtgctagtgtaaagaccgaggcagacctagtcaagcttcgggagct

SEQ ID NO: 259022 - DNA, 50 bp, Artificial
  Synthetic oligonucleotide
ggagtgtccggtctttggactgatttccggtactccgaaggggcacgccg

SEQ ID NO: 259023 - DNA, 50 bp, Artificial
  Synthetic oligonucleotide
gtggcgtcttttccctgacggtaatccgggccgacccgatctctgatcgg

SEQ ID NO: 259024 - DNA, 50 bp, Artificial
  Synthetic oligonucleotide
cggagaaggcgagtttacggtagaaaacacgactcgcgaccatttcggta

SEQ ID NO: 259025 - DNA, 50 bp, Artificial
  Synthetic oligonucleotide
tcccgactctgcgcctcgttcacttgttccgaagacccggaggtttgtgc

SEQ ID NO: 259026 - DNA, 55 bp, Artificial
  Synthetic oligonucleotide
ctgcggctgaaggcacacctgacgtcatttatggttggggtatgcccgatctcga

SEQ ID NO: 259027 - DNA, 50 bp, Artificial
  Synthetic oligonucleotide
tcctgccggacatctgccagagtcacatccttagaaccgacggaaccgcc

SEQ ID NO: 259028 - DNA, 50 bp, Artificial
  Synthetic oligonucleotide
gctggattgatccggaccaaatgcatttgaaaaccggtaagccgaggatt

SEQ ID NO: 259029 - DNA, 50 bp, Artificial
  Synthetic oligonucleotide
gctcctgactcatccagataccacgcagataggaactatccggacacgag

SEQ ID NO: 259030 - DNA, 50 bp, Artificial
  Synthetic oligonucleotide
tttctaacggctcctttaagtgcaaagctggataccgtggcacctgtgac

SEQ ID NO: 259031 - DNA, 55 bp, Artificial
  Synthetic oligonucleotide
gatacttgtcacggcatctgagtcaaattctagggagcagcaacggtttgagcta

SEQ ID NO: 259032 - DNA, 55 bp, Artificial
  Synthetic oligonucleotide
gctttgggagtccgtaaagaagttccggcacgtcctcaatcgtaatgattctctg

SEQ ID NO: 259033 - DNA, 55 bp, Artificial
  Synthetic oligonucleotide
ggactactcgttggataccgctaatgtcgagatcactccagccggtgaaacttca

SEQ ID NO: 259034 - DNA, 55 bp, Artificial
  Synthetic oligonucleotide
cgtgcgcctttaaatcgctggaataaagcacaagtcgtggccaaaggattggagc

SEQ ID NO: 259035 - DNA, 53 bp, Artificial
  Synthetic oligonucleotide
cgcccaatagttttactccgaaggctcctttcttaagagcgatttgaacggcc

SEQ ID NO: 259036 - DNA, 57 bp, Artificial
  Synthetic oligonucleotide
tcttggtgactgcgactctgttttagttgccggaggctttggaagtcgtggggttga

SEQ ID NO: 259037 - DNA, 55 bp, Artificial
  Synthetic oligonucleotide
cttaatcggctatacccatttatgctagatgctccaactcagtatggcgacacat

SEQ ID NO: 259038 - DNA, 55 bp, Artificial
  Synthetic oligonucleotide
ctggaacagtaactaacatgtatagagaacctgatggagcagtccaagcatcaac

SEQ ID NO: 259039 - DNA, 55 bp, Artificial
  Synthetic oligonucleotide
ctcttgccggggtaattcaaggtatcgtctcacaaagacttatccctacgataga

SEQ ID NO: 259040 - DNA, 55 bp, Artificial
  Synthetic oligonucleotide
ctcgcgtttgcaatagacttatccgcacctctatctacaagtactctacagaggt

SEQ ID NO: 259041 - DNA, 55 bp, Artificial
  Synthetic oligonucleotide
ctcagatggagatatacgaagagctttccttaagggtgctacactagatgacccc

SEQ ID NO: 259042 - DNA, 55 bp, Artificial
  Synthetic oligonucleotide
cgcatacttcaccaatgggtggaactctaagacttggggagtacccttgtgatac

SEQ ID NO: 259043 - DNA, 55 bp, Artificial
  Synthetic oligonucleotide
ccgtcacactggcatcagagctgcactttgtcacgatgcttacactgctatggta

SEQ ID NO: 259044 - DNA, 55 bp, Artificial
  Synthetic oligonucleotide
ccatcgtcgcactatgaagtatggcactaactggtgtcggtgctaccatagctcc

SEQ ID NO: 259045 - DNA, 55 bp, Artificial
  Synthetic oligonucleotide
ccagatgcaagcattgcaaacatagcactacgatgtgatatagacttatccggag

SEQ ID NO: 259046 - DNA, 55 bp, Artificial
  Synthetic oligonucleotide
cagtatgcattctccttctagatggggtcagtgctctattgtagatcaatcaaat

SEQ ID NO: 259047 - DNA, 60 bp, Artificial
  Synthetic oligonucleotide
tcccagttttatggcaactcctgcacccaaaactgcaccgctcgagatgcccagagtata

SEQ ID NO: 259048 - DNA, 55 bp, Artificial
  Synthetic oligonucleotide
cagcctaaagagtagagttgccaagcgcatacatgagttagagcaacatgatgag

SEQ ID NO: 259049 - DNA, 55 bp, Artificial
  Synthetic oligonucleotide
aaggctaagtgagccaccgataagtatgtgggactgtatactctctcctaagaca

SEQ ID NO: 259050 - DNA, 55 bp, Artificial
  Synthetic oligonucleotide
atgctaaaagctcaatagcaggagtagccataatagcgtctccgagccaatttgg

SEQ ID NO: 259051 - DNA, 55 bp, Artificial
  Synthetic oligonucleotide
atacggagtagcccaatagtcactcatgccgtatgtattttgatcgcttgagtac

SEQ ID NO: 259052 - DNA, 55 bp, Artificial
  Synthetic oligonucleotide
aagggtgcttcagcacttagaaacagcgtaaatagtatatctgacattagtgagt

SEQ ID NO: 259053 - DNA, 54 bp, Artificial
  Synthetic oligonucleotide
cagcggcatccaccctgagagttacaagatagctaaacagataaacggcttaga

SEQ ID NO: 259054 - DNA, 54 bp, Artificial
  Synthetic oligonucleotide
agttccagctaagaacatgtggcgtgtaaccataccttgagtaaatgccggcat

SEQ ID NO: 259055 - DNA, 53 bp, Artificial
  Synthetic oligonucleotide
gaactgtgttacccgcacttctctcacttgctagtggaacgagtttgttaagt

SEQ ID NO: 259056 - DNA, 53 bp, Artificial
  Synthetic oligonucleotide
gtgttttacaattacaccctcctgagtgtccttgcttccaagagcagtcatac

SEQ ID NO: 259057 - DNA, 53 bp, Artificial
  Synthetic oligonucleotide
acctctgcgtgcaagtattgagagcactcatgaagcaagcgcaaagaagagtt

SEQ ID NO: 259058 - DNA, 55 bp, Artificial
  Synthetic oligonucleotide
tgctgtctgacttaccccatacaactatctgtcgccctatcttagcatctagagc

SEQ ID NO: 259059 - DNA, 52 bp, Artificial
  Synthetic oligonucleotide
ttttcaagctaaacgctcagatggtagacttagcccaagatgcggacaaagt

SEQ ID NO: 259060 - DNA, 52 bp, Artificial
  Synthetic oligonucleotide
cggctacggttctggtcaaacaagagcaatgctaataggtgatcatggacaa

SEQ ID NO: 259061 - DNA, 51 bp, Artificial
  Synthetic oligonucleotide
ggcggtgcttcttctacggctatcggctgtatgagataaaattcgtcttgt

SEQ ID NO: 259062 - DNA, 55 bp, Artificial
  Synthetic oligonucleotide
gtttcgcgtatctgattcccataccttcaaaacgctctgtaagtgaacggtagtg

SEQ ID NO: 259063 - DNA, 55 bp, Artificial
  Synthetic oligonucleotide
gtgctattccacgtatggttgacatgggaatagaaaactatcttatcagtggtgc

SEQ ID NO: 259064 - DNA, 55 bp, Artificial
  Synthetic oligonucleotide
gtactatcttcaactacttccaagttagcacccttagatgctaggtactgctcag

SEQ ID NO: 259065 - DNA, 55 bp, Artificial
  Synthetic oligonucleotide
gctcacattggcttcttgtagtaaggtctatatagtcttgtccgtaagcaagcgc

SEQ ID NO: 259066 - DNA, 55 bp, Artificial
  Synthetic oligonucleotide
gctagaggcatcagcccgtagacttgctccataaaacgaacactcacgtatggct

SEQ ID NO: 259067 - DNA, 55 bp, Artificial
  Synthetic oligonucleotide
gccgtacttgaagcaggttacaatgtagcccggagattcagtagcagcggaactc

SEQ ID NO: 259068 - DNA, 58 bp, Artificial
  Synthetic oligonucleotide
tttttacatgcagtaactccgtccgccgtccgaacagcttacacaaacgccatgacat

SEQ ID NO: 259069 - DNA, 60 bp, Artificial
  Synthetic oligonucleotide
gcgctagaagacttccatgtaattcctacgcaagttagccagtctatcgccttcgagtat

SEQ ID NO: 259070 - DNA, 60 bp, Artificial
  Synthetic oligonucleotide
gccgagctcgtgcctttgcaattccgcatgcccccagatttcgtgcgatccttcaagcaa

SEQ ID NO: 259071 - DNA, 60 bp, Artificial
  Synthetic oligonucleotide
gcatgcgttgagccgtggcgtgtcccgatgaaccgaatttagccgctaaacatccgttgc

SEQ ID NO: 259072 - DNA, 60 bp, Artificial
  Synthetic oligonucleotide
ctcttgattgtgcgtctgggccaacatcattttgcgtcgctacaggtagcggtgtgcacg

SEQ ID NO: 259073 - DNA, 59 bp, Artificial
  Synthetic oligonucleotide
cgtccgacaatagttgtaattcagcatcttcgggtcacacccgaccgcgagtgctagat

SEQ ID NO: 259074 - DNA, 56 bp, Artificial
  Synthetic oligonucleotide
cggcgacagcgtgggactttcggcttgtctcaccccgaaatagctcgggacaaaga

SEQ ID NO: 259075 - DNA, 57 bp, Artificial
  Synthetic oligonucleotide
cgcaggctatggcgagccttctctcggaccgaacagctcggggcttggccaggtttt

SEQ ID NO: 259076 - DNA, 56 bp, Artificial
  Synthetic oligonucleotide
actccgtccgccgtccgaacagcttacacaaacgccatgacattcgggcattttgg

SEQ ID NO: 259077 - DNA, 57 bp, Artificial
  Synthetic oligonucleotide
aagtcatacgggatcacccgcgtatcctggccgtaaggaaagcaggttatgggcaga

SEQ ID NO: 259078 - DNA, 59 bp, Artificial
  Synthetic oligonucleotide
acgccacagtggcataccgtactgtatcggacggtcatcgttaatgtcttccggcactc

SEQ ID NO: 259079 - DNA, 60 bp, Artificial
  Synthetic oligonucleotide
ttggccgtcgagtctatcggcaccaggcgctccggatgtcgtatcggcaaggccgctaat

SEQ ID NO: 259080 - DNA, 60 bp, Artificial
  Synthetic oligonucleotide
atccgagacacatcaggcacggcatccgagacacattggcacggcatccgagacacattt

SEQ ID NO: 259081 - DNA, 53 bp, Artificial
  Synthetic oligonucleotide
taacccgtcggactctacgatttgcaaccgacctcaatatcaccgggtacggt

SEQ ID NO: 259082 - DNA, 57 bp, Artificial
  Synthetic oligonucleotide
tccgacctatcagacacggtttccccgtgcagctttcgccctgtcgagaccatcgtt

SEQ ID NO: 259083 - DNA, 57 bp, Artificial
  Synthetic oligonucleotide
tgccaccgttctatgacggacctatcggcgtcgattccgatgttccgccttgccggt

SEQ ID NO: 259084 - DNA, 56 bp, Artificial
  Synthetic oligonucleotide
gatcattcgctcagtggggattggaaggaccaccgggattgtcacgtcaagcccga

SEQ ID NO: 259085 - DNA, 56 bp, Artificial
  Synthetic oligonucleotide
ggtgcgtgccttcatatcctcatacgaggcaatgccaactttcagcgttttcataa

SEQ ID NO: 259086 - DNA, 55 bp, Artificial
  Synthetic oligonucleotide
gcgtctgggccaacatcattttgcgtcgctacaggtagcggtgtgcacgcacccc

SEQ ID NO: 259087 - DNA, 55 bp, Artificial
  Synthetic oligonucleotide
gtggttccttgatcgcctctcagtgattgttggcatcctctcgccttgccacggg

SEQ ID NO: 259088 - DNA, 55 bp, Artificial
  Synthetic oligonucleotide
ggcactgtgcccctgcaatttggcatcgaagtattgacccctatcaccgccttac

SEQ ID NO: 259089 - DNA, 55 bp, Artificial
  Synthetic oligonucleotide
gtgactccctcagcgagagggtttcgtggttacgatgcaagtccgagacgactgc

SEQ ID NO: 259090 - DNA, 59 bp, Artificial
  Synthetic oligonucleotide
tgcggagtcaagcgtcaatcgacccggcacgcctcccagggtcggcccgccggcatgga

SEQ ID NO: 259091 - DNA, 55 bp, Artificial
  Synthetic oligonucleotide
tacgacagacaaggggttgctagacaatgaacgtcaatctcacccctcagattga

SEQ ID NO: 259092 - DNA, 55 bp, Artificial
  Synthetic oligonucleotide
ggcgcgtagttacgccccagcgcgtaagcatcctcactcaagcggataaaaaccc

SEQ ID NO: 259093 - DNA, 55 bp, Artificial
  Synthetic oligonucleotide
gtcccgccctattctggattctttgtcccgagctatttcggggtgagacaagccg

SEQ ID NO: 259094 - DNA, 55 bp, Artificial
  Synthetic oligonucleotide
gagtgaatcgactagagaagaggcacttgaactctccgtcactgaatcagagcca

SEQ ID NO: 259095 - DNA, 55 bp, Artificial
  Synthetic oligonucleotide
gagcgttacgaccctcgatgacttggtcgaagctgtctatgcctggaactctcgc

SEQ ID NO: 259096 - DNA, 55 bp, Artificial
  Synthetic oligonucleotide
aaagagggcttcagtcaactcgctggtccggtcgtggaatgggaggtcgcagggg

SEQ ID NO: 259097 - DNA, 55 bp, Artificial
  Synthetic oligonucleotide
cgacgaatggacaaggatcaaggagagttcgctcaaccggcatcacgcggaactg

SEQ ID NO: 259098 - DNA, 53 bp, Artificial
  Synthetic oligonucleotide
ttcgcccgaccccgtttagagggcaacccctaacgcgaacgcgcggcaccgca

SEQ ID NO: 259099 - DNA, 55 bp, Artificial
  Synthetic oligonucleotide
cgcaacaggaattatgacgcaatccgccccgtcaattcccgcgactgtttgcggc

SEQ ID NO: 259100 - DNA, 55 bp, Artificial
  Synthetic oligonucleotide
ccggacgacttggaccttttcacgcaagccaaggctcagcgacctcgaaccagag

SEQ ID NO: 259101 - DNA, 60 bp, Artificial
  Synthetic oligonucleotide
tccgctaacgcgcttgcacatggcgctaaccaatcgcacctctggtcgcgacaggtggaa

SEQ ID NO: 259102 - DNA, 55 bp, Artificial
  Synthetic oligonucleotide
cgcctgccaaatttacggtattaagttgtgcgctcaccacagcatcgatgtgcga

SEQ ID NO: 259103 - DNA, 55 bp, Artificial
  Synthetic oligonucleotide
cgcgtgtctgtttcctcgatgaccccaagagcccaatcagactcctctcctgcgc

SEQ ID NO: 259104 - DNA, 55 bp, Artificial
  Synthetic oligonucleotide
cggcacataggcgtactgcggatgcccgtaggtactcagcacggatcggttccga

SEQ ID NO: 259105 - DNA, 55 bp, Artificial
  Synthetic oligonucleotide
tgccgctgtggataactttccgccgacgggttagaattcgctcttgaaacgctcg

SEQ ID NO: 259106 - DNA, 55 bp, Artificial
  Synthetic oligonucleotide
cccctggttgcggccgtttcaatcctcgttgctacacccgcgtctctggcatctc

SEQ ID NO: 259107 - DNA, 55 bp, Artificial
  Synthetic oligonucleotide
ctattggttacccgtcttgcggtgctcaatctacaactctgtccactgccttccc

SEQ ID NO: 259108 - DNA, 55 bp, Artificial
  Synthetic oligonucleotide
ctgctcgccagtccgctccggcaacatgagaatcgcatcgcggttgctccacgaa

SEQ ID NO: 259109 - DNA, 54 bp, Artificial
  Synthetic oligonucleotide
ctgtgcgaagtcgggttcgtagggcgtcagggttacgcctgcgggagcgtcggt

SEQ ID NO: 259110 - DNA, 55 bp, Artificial
  Synthetic oligonucleotide
cttctgcccctggcgtgtgcagcttgactctgcgcaggaactgatcctctcggca

SEQ ID NO: 259111 - DNA, 55 bp, Artificial
  Synthetic oligonucleotide
gaccaactcgggtccgatcatctggaaatcgacggatcacataccgctgcgcggg

SEQ ID NO: 259112 - DNA, 56 bp, Artificial
  Synthetic oligonucleotide
gtggcctctccccggcaggctgtgttaccaagtcggggttgcgcattaagttcgga

SEQ ID NO: 259113 - DNA, 55 bp, Artificial
  Synthetic oligonucleotide
gacgagctttcccactcaaagcaaccgcgacaggaagaccaatcctcagcaagaa

SEQ ID NO: 259114 - DNA, 54 bp, Artificial
  Synthetic oligonucleotide
tgatgtgctcgcgttcggctagagtaggctttcggacaagatcgaagctgcaac

SEQ ID NO: 259115 - DNA, 54 bp, Artificial
  Synthetic oligonucleotide
ctataggccgaatgcgtgcccttgcctattgccctggcaggcgaacgagcgaga

SEQ ID NO: 259116 - DNA, 54 bp, Artificial
  Synthetic oligonucleotide
gcaattccgcatgcccccagatttcgtgcgatccttcaagcaagcggctctcga

SEQ ID NO: 259117 - DNA, 54 bp, Artificial
  Synthetic oligonucleotide
atccgctgtgtcgcatcaattaatcctcccggggttaatgacgtgcgtaagttg

SEQ ID NO: 259118 - DNA, 54 bp, Artificial
  Synthetic oligonucleotide
gcgaatcacatgcggcgagatgtggcgtgttgccaactcagggcaggattctgt

SEQ ID NO: 259119 - DNA, 54 bp, Artificial
  Synthetic oligonucleotide
ccgttccggtgttttgctgaggcactccatgaatcggctcgccttttgcaatga

SEQ ID NO: 259120 - DNA, 53 bp, Artificial
  Synthetic oligonucleotide
ggccagccgagagtttgacgtcacgggtcggatcaaagcgttccaagcgctag

SEQ ID NO: 259121 - DNA, 53 bp, Artificial
  Synthetic oligonucleotide
agtgactacgccaacgatacctggaacatacgcacacacactacgtaaggacg

SEQ ID NO: 259122 - DNA, 53 bp, Artificial
  Synthetic oligonucleotide
ttttcgaacatgcggctggaaaactcgtaggaaagctggaattcgatcttgca

SEQ ID NO: 259123 - DNA, 55 bp, Artificial
  Synthetic oligonucleotide
ggtctttcgagttgccgcatcaccaactgaacacggggtggcgcgaggtaccggg

SEQ ID NO: 259124 - DNA, 53 bp, Artificial
  Synthetic oligonucleotide
cggccagaccagccttgagtctcgccgtgcggatggtggtcttcaactccgca

SEQ ID NO: 259125 - DNA, 53 bp, Artificial
  Synthetic oligonucleotide
tcgaccgcataccgggcgtttgtgcatcaggggcgcaacgataagttgctgcg

SEQ ID NO: 259126 - DNA, 53 bp, Artificial
  Synthetic oligonucleotide
ctatctatcagtaagatgtggttttcacatggtggaagtagtgcatttagctc

SEQ ID NO: 259127 - DNA, 52 bp, Artificial
  Synthetic oligonucleotide
atcccccgaggtccgcagcctacgtgagtgcattctccgaggcacaaagtac

SEQ ID NO: 259128 - DNA, 52 bp, Artificial
  Synthetic oligonucleotide
aaatagcgtggagaaaggccggcacttgccagagtcaggtcgaaaagccatt

SEQ ID NO: 259129 - DNA, 52 bp, Artificial
  Synthetic oligonucleotide
tcaaaggcgtcggtccggagccgtatgccgcgacactcatccgccagcgtat

SEQ ID NO: 259130 - DNA, 52 bp, Artificial
  Synthetic oligonucleotide
tggcaaatccgaaaagcgggcattggggactgtcctcgacactctgcgggaa

SEQ ID NO: 259131 - DNA, 52 bp, Artificial
  Synthetic oligonucleotide
tttcgcgcttcccaaggtcagttggtgaaaacctacggtgagatcaatgcgt

SEQ ID NO: 259132 - DNA, 51 bp, Artificial
  Synthetic oligonucleotide
cccagagggacatcgggctatgcctggccttccgaactctcctcgacaaca

SEQ ID NO: 259133 - DNA, 51 bp, Artificial
  Synthetic oligonucleotide
gccgccagatttctgcggatgtacgcagccgctaacaacggtgcagtaacg

SEQ ID NO: 259134 - DNA, 60 bp, Artificial
  Synthetic oligonucleotide
ggtcagtgcgatccttagctacgaggcagaacggcgaatggtcggttcgcaccttgcctc

SEQ ID NO: 259135 - DNA, 51 bp, Artificial
  Synthetic oligonucleotide
gtcacagccaaaattccggccggctacacactcactcggttacgcgtcgca

SEQ ID NO: 259136 - DNA, 51 bp, Artificial
  Synthetic oligonucleotide
acgtcctcgcgaaagggctccaccgtcgacacatggctcggattcttgatc

SEQ ID NO: 259137 - DNA, 51 bp, Artificial
  Synthetic oligonucleotide
ggtgacgacaatgcggcgtcaacagcgcgtgatactcggctgccgtcagaa

SEQ ID NO: 259138 - DNA, 50 bp, Artificial
  Synthetic oligonucleotide
attcgctcggtttccctattcggcctgtcttacgtcggtgtctatttcaa

SEQ ID NO: 259139 - DNA, 56 bp, Artificial
  Synthetic oligonucleotide
ggcttggagcgtgccgcggcatacccggacgtgactgttggcgttttcacggcccg

SEQ ID NO: 259140 - DNA, 60 bp, Artificial
  Synthetic oligonucleotide
ggacaagggcacatcccaattgccttgagtagcggtgattggcagttcgacagttaccaa

SEQ ID NO: 259141 - DNA, 60 bp, Artificial
  Synthetic oligonucleotide
tcgatggtacgatcactaccctacagaaaataccactcgccgactgggccaatggtgcgc

SEQ ID NO: 259142 - DNA, 55 bp, Artificial
  Synthetic oligonucleotide
gcgttgcttagtaaagccagtaggaaatctattttctacgatagcctctaatgta

SEQ ID NO: 259143 - DNA, 55 bp, Artificial
  Synthetic oligonucleotide
gcttattaaagctctgcccgcataatactcatgggtaccatgacttgcctcgccg

SEQ ID NO: 259144 - DNA, 55 bp, Artificial
  Synthetic oligonucleotide
ggatagctgtcgatagactcagtaaacgctttctctcttacgtgtgtggagaccg

SEQ ID NO: 259145 - DNA, 55 bp, Artificial
  Synthetic oligonucleotide
ggccataatgcctcgagctctaactaaagcgccccttgtggtgtgttagttgtag

SEQ ID NO: 259146 - DNA, 55 bp, Artificial
  Synthetic oligonucleotide
gggctggtcaagccgagctagatctctaggatcttccaaatcataccaatgcacc

SEQ ID NO: 259147 - DNA, 55 bp, Artificial
  Synthetic oligonucleotide
ggggcgctttaagccgacttctaggaaataagtcctatgtgacgatataatcccc

SEQ ID NO: 259148 - DNA, 55 bp, Artificial
  Synthetic oligonucleotide
gtgagtcctaatatgcgggtaggaggaaccattggttatgagtttggtaggatgc

SEQ ID NO: 259149 - DNA, 52 bp, Artificial
  Synthetic oligonucleotide
tatttaacggaacatcttaaacagtaccctaaggataaagcttctaggttag

SEQ ID NO: 259150 - DNA, 55 bp, Artificial
  Synthetic oligonucleotide
acgactgggcactcatctgaaagacgtacggcccgatagatattcgaggaggttc

SEQ ID NO: 259151 - DNA, 55 bp, Artificial
  Synthetic oligonucleotide
ccacattagcctttctgctgatttataacgctcatgtgaccctgacgtagagtgg

SEQ ID NO: 259152 - DNA, 60 bp, Artificial
  Synthetic oligonucleotide
atgcactgggactcattcatcagcacttagccaaacagcccataccccctcaccaccgta

SEQ ID NO: 259153 - DNA, 55 bp, Artificial
  Synthetic oligonucleotide
ccatgcaatcatgaggcgtcctatatagtatccacctctcattagggcttacatc

SEQ ID NO: 259154 - DNA, 55 bp, Artificial
  Synthetic oligonucleotide
ccccaatagtttaatagcagccgttaatctcatgtattatgtaggcgctagagac

SEQ ID NO: 259155 - DNA, 55 bp, Artificial
  Synthetic oligonucleotide
ccgtagacatagccagagctaaaacacctatgcctatcaacccacgtaagccagc

SEQ ID NO: 259156 - DNA, 55 bp, Artificial
  Synthetic oligonucleotide
cctccgagtactcaaagaccgtggcctattaagcgcaaagctaactgctactctt

SEQ ID NO: 259157 - DNA, 55 bp, Artificial
  Synthetic oligonucleotide
ctgcactattcaaaagctcaaaagtgatgcttactgcattaacatccacagctgg

SEQ ID NO: 259158 - DNA, 55 bp, Artificial
  Synthetic oligonucleotide
ctgccaggagaacctatatcgctttcacattcgtcagaaggagtagggcactggg

SEQ ID NO: 259159 - DNA, 55 bp, Artificial
  Synthetic oligonucleotide
gatagcttacgttttactgataagctcatgcttgcaaagttgtagtgggttgcat

SEQ ID NO: 259160 - DNA, 55 bp, Artificial
  Synthetic oligonucleotide
gatcgggctttgtcaagatgcccgccaaagtataaggctgagacgatagctgttg

SEQ ID NO: 259161 - DNA, 54 bp, Artificial
  Synthetic oligonucleotide
gtacacgcgatttagagcaacatactccttttatgcgtgctgtaaacggtggag

SEQ ID NO: 259162 - DNA, 54 bp, Artificial
  Synthetic oligonucleotide
taacctgataaggagttagccccttgatatttgtagcatttgcgttagctcctt

SEQ ID NO: 259163 - DNA, 58 bp, Artificial
  Synthetic oligonucleotide
taagggggatcaagcgccatatagccgtagacagccaaggcttaccccatgggatagg

SEQ ID NO: 259164 - DNA, 54 bp, Artificial
  Synthetic oligonucleotide
atcgtttggtgctacttcacatgctaaactagcaggtactaacaaacaggaacc

SEQ ID NO: 259165 - DNA, 53 bp, Artificial
  Synthetic oligonucleotide
cttgcatgctcacaggtactactattagtgactatacagcgggccccaactat

SEQ ID NO: 259166 - DNA, 52 bp, Artificial
  Synthetic oligonucleotide
caagccactgtgggaacttactattatagcagtcatcagcagttagagcgac

SEQ ID NO: 259167 - DNA, 51 bp, Artificial
  Synthetic oligonucleotide
agccaccattagacaaatgttagaccatggagagttggtatacgacttagc

SEQ ID NO: 259168 - DNA, 50 bp, Artificial
  Synthetic oligonucleotide
cctgcgtcccttgtaacgctttagctacttctatcgccccttctgctcct

SEQ ID NO: 259169 - DNA, 50 bp, Artificial
  Synthetic oligonucleotide
gggcatagcatacccgcatccaacccttacattgttcaaatagctcggtg

SEQ ID NO: 259170 - DNA, 58 bp, Artificial
  Synthetic oligonucleotide
catcagcacttagccaaacagcccataccccctcaccaccgtaaacccacgattgcgc

SEQ ID NO: 259171 - DNA, 58 bp, Artificial
  Synthetic oligonucleotide
tacctatcccatggggtaagccttggctgtctacggctatatggcgcttgatccccct

SEQ ID NO: 259172 - DNA, 58 bp, Artificial
  Synthetic oligonucleotide
cttatataggacctgctaatcgtagttctaaaagaatatacgtagctacaggatatgc

SEQ ID NO: 259173 - DNA, 56 bp, Artificial
  Synthetic oligonucleotide
gggtatgaatagtcagaatatagatactccgattatgggttgtaaacgtaaactcc

SEQ ID NO: 259174 - DNA, 55 bp, Artificial
  Synthetic oligonucleotide
gatgcagtcaaaaggcgtttggtctgtaattgagtaaggattgcagttagccgcg

SEQ ID NO: 259175 - DNA, 55 bp, Artificial
  Synthetic oligonucleotide
gcgcagatctttatagaatatctttgctgcagcactaaacgccagtaattggaac

SEQ ID NO: 259176 - DNA, 58 bp, Artificial
  Synthetic oligonucleotide
caggggtttagtatgcgattacgcgatacataaacctgaccgaaatggcgataacaga

SEQ ID NO: 259177 - DNA, 55 bp, Artificial
  Synthetic oligonucleotide
gccaggacttaaaacgaacctgttgtttcgtgttaggcgtgatgactaaggaatc

SEQ ID NO: 259178 - DNA, 54 bp, Artificial
  Synthetic oligonucleotide
gcgggggcaaggcgtaaaactcgacttaatccgttttgatgttacgctatacac

SEQ ID NO: 259179 - DNA, 53 bp, Artificial
  Synthetic oligonucleotide
gcgtgggaaagaatacttgccgtatcaaagcgaaaccacgaagtaaaaggaac

SEQ ID NO: 259180 - DNA, 60 bp, Artificial
  Synthetic oligonucleotide
ggaatggttgggcaaccaacatggccctgctcatttcagcatgtcttgcaacattcatgc

SEQ ID NO: 259181 - DNA, 52 bp, Artificial
  Synthetic oligonucleotide
ggagaaaaagacagggaagcaaacgacaaggattttcttcttaaagtccgaa

SEQ ID NO: 259182 - DNA, 60 bp, Artificial
  Synthetic oligonucleotide
gtcagtcagatggttcgtgattacctagtcttagaccatgaagcattctgcaaacgctac

SEQ ID NO: 259183 - DNA, 55 bp, Artificial
  Synthetic oligonucleotide
gtgtgcggtcaggggttacacccccgacacccctgtagcaagcaggctaaagccc

SEQ ID NO: 259184 - DNA, 60 bp, Artificial
  Synthetic oligonucleotide
taaagtgatgcactaagtctgtcagtatccacttggcacttagataagtgccatagacag

SEQ ID NO: 259185 - DNA, 60 bp, Artificial
  Synthetic oligonucleotide
taagaccgccatcacggggtagtatgctgacttgccgaacaaggcaagtcagcatactac

SEQ ID NO: 259186 - DNA, 60 bp, Artificial
  Synthetic oligonucleotide
tcataaagtgtacttttcagccttcgcagttggctattcttccctagatccattctgacg

SEQ ID NO: 259187 - DNA, 60 bp, Artificial
  Synthetic oligonucleotide
catacttaagtaagaggtatccgcactcaacagtaaaagctgtggatgctatatccttga

SEQ ID NO: 259188 - DNA, 60 bp, Artificial
  Synthetic oligonucleotide
tcgtggttctccattgtgtttagtaatgtcaaacgtcacatagtgtgaatgctctgtttc

SEQ ID NO: 259189 - DNA, 60 bp, Artificial
  Synthetic oligonucleotide
tctcgttgttccaaaaggtagccctatctatcgttgtctctagtgcaggaggcacaggat

SEQ ID NO: 259190 - DNA, 60 bp, Artificial
  Synthetic oligonucleotide
tcttgaactgtatagttataagtgtattcccgtatgataagacagcggacacgataaata

SEQ ID NO: 259191 - DNA, 60 bp, Artificial
  Synthetic oligonucleotide
tgagtatgcggtcaaaaaaaacgccttgctgcggtcgatattcgacctgagcacaaacgc

SEQ ID NO: 259192 - DNA, 55 bp, Artificial
  Synthetic oligonucleotide
tgtcgttatggagttcaatcctaaactttgggaaacgctgaaagaattcaaaggc

SEQ ID NO: 259193 - DNA, 52 bp, Artificial
  Synthetic oligonucleotide
tgtttaaggtgtaggaaagtccaccgtaaggtgtaggaaagtccaccgatat

SEQ ID NO: 259194 - DNA, 58 bp, Artificial
  Synthetic oligonucleotide
atcggcggtagccgccgccgcttatcgttcaaccagccgattggttgaccggagcaca

SEQ ID NO: 259195 - DNA, 53 bp, Artificial
  Synthetic oligonucleotide
acaaggcagttaaggaatttaagcgaaacgttataaaactgcccatcgaggaa

SEQ ID NO: 259196 - DNA, 60 bp, Artificial
  Synthetic oligonucleotide
atggctatttatcatttgcacgcccagataatagggcgtagcgccggacaatcggcggta

SEQ ID NO: 259197 - DNA, 50 bp, Artificial
  Synthetic oligonucleotide
atttattttaaggtgtaggaaagtccaccgatatttattttaaggtgtat

SEQ ID NO: 259198 - DNA, 60 bp, Artificial
  Synthetic oligonucleotide
ccatagacagcaacatatttactgcaccagtaatatgtttcccttagagctttaggcatc

SEQ ID NO: 259199 - DNA, 60 bp, Artificial
  Synthetic oligonucleotide
atgctcattatgaacacaaattaccctgaagaacgtcccggatacatccctgagtatgcg

SEQ ID NO: 259200 - DNA, 56 bp, Artificial
  Synthetic oligonucleotide
atcccgcagtcccctgcgaaatttgtgccgtcccagtcttaccgacaatgcgtacc

SEQ ID NO: 259201 - DNA, 55 bp, Artificial
  Synthetic oligonucleotide
atctagcgcgattttaacacccattgatacgccggaatgggcaaaaaaccgcgag

SEQ ID NO: 259202 - DNA, 60 bp, Artificial
  Synthetic oligonucleotide
caacataataatctgtgcgatttgaataaatggttcgggcatcttcgggtgaggacgcaa

SEQ ID NO: 259203 - DNA, 52 bp, Artificial
  Synthetic oligonucleotide
aaaatactgggaaatttgcgcaaactccgaattaaaaaagttgtatgtcgcc

SEQ ID NO: 259204 - DNA, 55 bp, Artificial
  Synthetic oligonucleotide
agttgccaggacttaaaacgaacctgttgtttcatgttagggcacgatgactaag

SEQ ID NO: 259205 - DNA, 54 bp, Artificial
  Synthetic oligonucleotide
caacctgcctacgatttggaaaaagaaacccgcatacagcaaagcctttttgcc

SEQ ID NO: 259206 - DNA, 60 bp, Artificial
  Synthetic oligonucleotide
agcatactacccctagcatagaatagcgatatatgctattctatgctaatagcgcactta

SEQ ID NO: 259207 - DNA, 58 bp, Artificial
  Synthetic oligonucleotide
agtatgcgattacgcgatacataaacctgaccgaaatggcgataacagaaacgaacac

SEQ ID NO: 259208 - DNA, 58 bp, Artificial
  Synthetic oligonucleotide
agcccgcttgcccggcataaagttagattactttatgccgtatagcatttatggctat

SEQ ID NO: 259209 - DNA, 58 bp, Artificial
  Synthetic oligonucleotide
ccggatacatccctgagtatgcggtcaaaaaaaacgccttgctgcggtcgatattcga

SEQ ID NO: 259210 - DNA, 58 bp, Artificial
  Synthetic oligonucleotide
agccaacccaagctaattgtattaccacgtttggaccatcaagccatgcatcgtacgt

SEQ ID NO: 259211 - DNA, 56 bp, Artificial
  Synthetic oligonucleotide
tatcctgttgggtccatagacaggtagtacggaaccccgtacatcaatattccgta

SEQ ID NO: 259212 - DNA, 59 bp, Artificial
  Synthetic oligonucleotide
gggcaaccaacatggccctgctcatttcagcatgtcttgcaacattcatgctccacggg

SEQ ID NO: 259213 - DNA, 57 bp, Artificial
  Synthetic oligonucleotide
gtaggaaagtccaccgatatttattttaaggtgtattgtctggacataatcatacac

SEQ ID NO: 259214 - DNA, 56 bp, Artificial
  Synthetic oligonucleotide
ctagttaagcaatatggaggttctaaagtcttaatccattacggcaataaatcggc

SEQ ID NO: 259215 - DNA, 55 bp, Artificial
  Synthetic oligonucleotide
agaggtatccgcactcaacagtaaaagctgtggatgctatatccttgattgtttg

SEQ ID NO: 259216 - DNA, 55 bp, Artificial
  Synthetic oligonucleotide
gcaattattatccaccgtctttacgggtagaaaggcttgttgttacgagagttgc

SEQ ID NO: 259217 - DNA, 55 bp, Artificial
  Synthetic oligonucleotide
acgcgatacataaacctgaccgaaatggcgataacagaaacgaacacgcccacat

SEQ ID NO: 259218 - DNA, 52 bp, Artificial
  Synthetic oligonucleotide
gcatccgaatgttaacgggaacaattttttcccagcccgggataagtccact

SEQ ID NO: 259219 - DNA, 55 bp, Artificial
  Synthetic oligonucleotide
gcatcctagaaccataatacaaaacatgtcaatcatcgattggcgtttattacgg

SEQ ID NO: 259220 - DNA, 56 bp, Artificial
  Synthetic oligonucleotide
cgttacaggtcaatttcgggctattatacgatgtgtgctattttgagcgtttgggg

SEQ ID NO: 259221 - DNA, 55 bp, Artificial
  Synthetic oligonucleotide
gcatggaggtattcttcagttcgaaggacagacattaacatatcttcccggaacg

SEQ ID NO: 259222 - DNA, 55 bp, Artificial
  Synthetic oligonucleotide
gttttcggatataccaacccaagccctgcacatgagattacgcctactcctcctt

SEQ ID NO: 259223 - DNA, 55 bp, Artificial
  Synthetic oligonucleotide
atcacgcaggtcagagagttctggaattttatttagacgctcctctgactttcga

SEQ ID NO: 259224 - DNA, 55 bp, Artificial
  Synthetic oligonucleotide
gttggaccagttttggtgcactacatggcattattctcttgtaatgagtaattcg

SEQ ID NO: 259225 - DNA, 55 bp, Artificial
  Synthetic oligonucleotide
gtcttggcgaataagccactcattgtcatctttacgagttccacgtacgtatggg

SEQ ID NO: 259226 - DNA, 55 bp, Artificial
  Synthetic oligonucleotide
ggttgtcctaaggctataacgagagctttagcggcaagggcggaggtagaacatg

SEQ ID NO: 259227 - DNA, 55 bp, Artificial
  Synthetic oligonucleotide
caatcctaaactttgggaaacgctgaaagaattcaaaggctggtcaactgtagag

SEQ ID NO: 259228 - DNA, 55 bp, Artificial
  Synthetic oligonucleotide
caattcacttaatcgttcacgagagataatagagggtgcccctaccattgtatct

SEQ ID NO: 259229 - DNA, 55 bp, Artificial
  Synthetic oligonucleotide
cagacaagacagtcatactcatatttaccactactcccaacgtagtagtaagaaa

SEQ ID NO: 259230 - DNA, 55 bp, Artificial
  Synthetic oligonucleotide
caggcaaccggactttcggaagccgcttaccgtgaagcaatagtatatgcccgag

SEQ ID NO: 259231 - DNA, 52 bp, Artificial
  Synthetic oligonucleotide
ctgagagagtgaaagcctcagggtaaccctcctaaataaacaccccctacct

SEQ ID NO: 259232 - DNA, 55 bp, Artificial
  Synthetic oligonucleotide
caactggaattttccctcaccatgagctatccaaatacccaacttactatttgac

SEQ ID NO: 259233 - DNA, 55 bp, Artificial
  Synthetic oligonucleotide
caacgttctctacctattgcacacagtccagatgataactttgagtaacgctagc

SEQ ID NO: 259234 - DNA, 55 bp, Artificial
  Synthetic oligonucleotide
catagtttgctagacctaattgtctatacagctcggcagtagccctattacgatc

SEQ ID NO: 259235 - DNA, 51 bp, Artificial
  Synthetic oligonucleotide
ccaccgtaaggtgtaggaaagtccaccgatatttattttaaggtgtaggaa

SEQ ID NO: 259236 - DNA, 55 bp, Artificial
  Synthetic oligonucleotide
cccatcgtaaggatgtggtttagtgaagggtgttccatcattattaactcgaacg

SEQ ID NO: 259237 - DNA, 55 bp, Artificial
  Synthetic oligonucleotide
cgaacctgttgtttcatgttagggcacgatgactaaggaatccctaagcttgtca

SEQ ID NO: 259238 - DNA, 55 bp, Artificial
  Synthetic oligonucleotide
cgtagtctcaataatgtaggttcagtatttcgtacgtgtgatgctttccgcgtag

SEQ ID NO: 259239 - DNA, 55 bp, Artificial
  Synthetic oligonucleotide
cgtgaagggagaactctgtttattgtttatgggatcaccaatgggctgtttctac

SEQ ID NO: 259240 - DNA, 55 bp, Artificial
  Synthetic oligonucleotide
tgcgatttgaataaatggttcgggcatcttcgggtgaggacgcaataacgagagg

SEQ ID NO: 259241 - DNA, 54 bp, Artificial
  Synthetic oligonucleotide
aagcgaaacgttataaaactgcccatcgaggaattaaacaacgcagatataggg

SEQ ID NO: 259242 - DNA, 56 bp, Artificial
  Synthetic oligonucleotide
cttaatcccgctatcggctgtcgcggctatacccggtgagccggtgaaaatttgcc

SEQ ID NO: 259243 - DNA, 55 bp, Artificial
  Synthetic oligonucleotide
ctatatcattaggctgggctaataaacaagccgttcggatagcttcttttcgatc

SEQ ID NO: 259244 - DNA, 55 bp, Artificial
  Synthetic oligonucleotide
gaacacaaattaccctgaagaacgtcccggatacatccctgagtatgcggtcaaa

SEQ ID NO: 259245 - DNA, 55 bp, Artificial
  Synthetic oligonucleotide
tcgacttaatccgttttgatgttacgctatacacgccgggcaaagaaaagccggc

SEQ ID NO: 259246 - DNA, 55 bp, Artificial
  Synthetic oligonucleotide
gacgtaaatattcgaaccatttataacgtaggacacgagctgccatttctatgga

SEQ ID NO: 259247 - DNA, 55 bp, Artificial
  Synthetic oligonucleotide
tcatttgcacgcccagataatagggcgtagcgccggacaatcggcggtagccgcc

SEQ ID NO: 259248 - DNA, 54 bp, Artificial
  Synthetic oligonucleotide
ttaaccttccggccaaatagtacaccggtttagcaaatcgtgctttattcgctc

SEQ ID NO: 259249 - DNA, 51 bp, Artificial
  Synthetic oligonucleotide
ctacctccgtaggctaggcaaaacccaaagccgtaggctaggtaaaaccca

SEQ ID NO: 259250 - DNA, 54 bp, Artificial
  Synthetic oligonucleotide
gactccgtacttagacagtccagtggaaatctcattatatgcctttctaccttc

SEQ ID NO: 259251 - DNA, 53 bp, Artificial
  Synthetic oligonucleotide
gaattgttacgatgctacagattacagttagtatacccagtccccataggttc

SEQ ID NO: 259252 - DNA, 53 bp, Artificial
  Synthetic oligonucleotide
gatggcattagatggattgagtcgtaatgagtcatgcggtggtcattttcggg

SEQ ID NO: 259253 - DNA, 56 bp, Artificial
  Synthetic oligonucleotide
gaattaaacaacgcagatataggggttagaatagatatagcaccatttaagcgggg

SEQ ID NO: 259254 - DNA, 53 bp, Artificial
  Synthetic oligonucleotide
tcctacacttgtaggccatactattccacgtgcattacatggggtatcacaaa

SEQ ID NO: 259255 - DNA, 53 bp, Artificial
  Synthetic oligonucleotide
gatagtcttaatccacttttttacgtcgcctagcaaattaggcactgcttctg

SEQ ID NO: 259256 - DNA, 52 bp, Artificial
  Synthetic oligonucleotide
caagatctacgatactctctttggtattagtacagtgggtacttgccttgtg

SEQ ID NO: 259257 - DNA, 52 bp, Artificial
  Synthetic oligonucleotide
aaggacctttaggatttacagatttagaccataggggattacttgttcgtgg

SEQ ID NO: 259258 - DNA, 52 bp, Artificial
  Synthetic oligonucleotide
taagttacttatagatcgtctaatgacgatactcaagctggtcttttactat

SEQ ID NO: 259259 - DNA, 52 bp, Artificial
  Synthetic oligonucleotide
actatgggaatagtgagaggaatgtgaaggactccaattgtcttgtgcatca

SEQ ID NO: 259260 - DNA, 52 bp, Artificial
  Synthetic oligonucleotide
gccactcggaaagagtgtttacgtatgttgtatcacgtctatgacgacgaaa

SEQ ID NO: 259261 - DNA, 52 bp, Artificial
  Synthetic oligonucleotide
gctaagatataaccgccgagtataattttcaaatgcgcgtctaatttgcggt

SEQ ID NO: 259262 - DNA, 51 bp, Artificial
  Synthetic oligonucleotide
tcgtgtatccatgtatttagtttagccgctttcacagggtttgttttggcc

SEQ ID NO: 259263 - DNA, 51 bp, Artificial
  Synthetic oligonucleotide
ctagtaggttaatagaagtatgtagaatacgcgaagtacgcgtctgttacg

SEQ ID NO: 259264 - DNA, 59 bp, Artificial
  Synthetic oligonucleotide
gcactagatctttcccatcgtaaggatgtggtttagtgaagggtgttccatcattatta

SEQ ID NO: 259265 - DNA, 51 bp, Artificial
  Synthetic oligonucleotide
tgatcaggggaggatgaactaacggatggaaaagttgcttccatgcccata

SEQ ID NO: 259266 - DNA, 51 bp, Artificial
  Synthetic oligonucleotide
tgggagtgcagtcgcaagccgataattacgaggcaagacaaacggacgccg

SEQ ID NO: 259267 - DNA, 51 bp, Artificial
  Synthetic oligonucleotide
cctaattgtagattacactctgtttatacctagcattacaggagtacggga

SEQ ID NO: 259268 - DNA, 50 bp, Artificial
  Synthetic oligonucleotide
gatattacaccagggatagacatgttaaccggaatgccatctaaacaacg

SEQ ID NO: 259269 - DNA, 50 bp, Artificial
  Synthetic oligonucleotide
ctcgctccgcagtccccatgaacaaacgataacctctatgtaggtgtgtg

SEQ ID NO: 259270 - DNA, 50 bp, Artificial
  Synthetic oligonucleotide
aagtctaatcggatcataggcacgatgactaaggaatccataagcttgtc

SEQ ID NO: 259271 - DNA, 50 bp, Artificial
  Synthetic oligonucleotide
cccttctccacgattttatggttactttcccgcggatagccattgtttct

SEQ ID NO: 259272 - DNA, 50 bp, Artificial
  Synthetic oligonucleotide
gctcgaaagatagatcctgattacgaaagtggcgaggaaataagcgatgc

SEQ ID NO: 259273 - DNA, 55 bp, Artificial
  Synthetic oligonucleotide
tctgtacacgtggactagtaaaacgtacctcttgttcagaagtaactaaccagtc

SEQ ID NO: 259274 - DNA, 55 bp, Artificial
  Synthetic oligonucleotide
cttatttcatggtctatagcacgtgtaacgatatctcgcggtgctagttcagcac

SEQ ID NO: 259275 - DNA, 55 bp, Artificial
  Synthetic oligonucleotide
ctggttgtctagctatagtggtgagcgttgtattacaaacgtactacatttaggc

SEQ ID NO: 259276 - DNA, 55 bp, Artificial
  Synthetic oligonucleotide
ctattgtcgtgattaactttgctagttcactagtgctagttatcaaacgtcggcg

SEQ ID NO: 259277 - DNA, 55 bp, Artificial
  Synthetic oligonucleotide
actttgagtgaacgtacccgtataattgaacgtgttatacgaagaatcaacgatc

SEQ ID NO: 259278 - DNA, 55 bp, Artificial
  Synthetic oligonucleotide
cgaagttgctactatgcaaactgatatgaaatcagctaaagacgaagttgctact

SEQ ID NO: 259279 - DNA, 55 bp, Artificial
  Synthetic oligonucleotide
ccgcagcatagctcagtagagaagtcccctatgcttaatactcgtacttgggacg

SEQ ID NO: 259280 - DNA, 54 bp, Artificial
  Synthetic oligonucleotide
ccccgcctatcctacgggcagattgataaggttctaacgttaatacattagtcc

SEQ ID NO: 259281 - DNA, 55 bp, Artificial
  Synthetic oligonucleotide
catgagttggtgtaaccataacattaagtacttgacgggtaaactgtggtaactg

SEQ ID NO: 259282 - DNA, 55 bp, Artificial
  Synthetic oligonucleotide
agtaccaggattaacttctatagtcagttccaagtttgtagctagaggcaccatt

SEQ ID NO: 259283 - DNA, 55 bp, Artificial
  Synthetic oligonucleotide
atcaccgaatggcatcacggctattactagcatatgtggtagagttacactgatc

SEQ ID NO: 259284 - DNA, 55 bp, Artificial
  Synthetic oligonucleotide
tagtagaacgttaggatagtagtcagcatgtaataagctaattacgctctctccc

SEQ ID NO: 259285 - DNA, 54 bp, Artificial
  Synthetic oligonucleotide
actactaacatcgccatcagtgagcgatggttcaagatctacgccattagttct

SEQ ID NO: 259286 - DNA, 54 bp, Artificial
  Synthetic oligonucleotide
gttaccagaacgtagtacctgccgtttgctatcattagatggtcatagcggagc

SEQ ID NO: 259287 - DNA, 53 bp, Artificial
  Synthetic oligonucleotide
agcaagaacttggttcggttgtactccagcataagctgcataactattaagaa

SEQ ID NO: 259288 - DNA, 53 bp, Artificial
  Synthetic oligonucleotide
gattccttgttgcaaaatcttagcactagttacgaataggtcatcgccgacta

SEQ ID NO: 259289 - DNA, 53 bp, Artificial
  Synthetic oligonucleotide
cggaaattcattagctgtcggcattacagctaatatcccgcgttttgcaagac

SEQ ID NO: 259290 - DNA, 52 bp, Artificial
  Synthetic oligonucleotide
gggacgtagatgagcgaatggacctacaatacttccgttagctaagtgagcc

SEQ ID NO: 259291 - DNA, 51 bp, Artificial
  Synthetic oligonucleotide
caggctattactgcagctggtagtgagctagtaacattagcaatgcgtaga

SEQ ID NO: 259292 - DNA, 51 bp, Artificial
  Synthetic oligonucleotide
ctaggattagaggtttatgctacgtggacttcacctattcgaaaatatagc

SEQ ID NO: 259293 - DNA, 51 bp, Artificial
  Synthetic oligonucleotide
tatcagttctaatacgcgccatacgccaggattacgaaaggtgaggcgtgg

SEQ ID NO: 259294 - DNA, 50 bp, Artificial
  Synthetic oligonucleotide
cactcggtaggcaacagaggctaccgcattatttgcgtctgtagtaatca

SEQ ID NO: 259295 - DNA, 55 bp, Artificial
  Synthetic oligonucleotide
gtatactacaacatcgcgtagaggtaagacggggatttctatacgttcggaacgc

SEQ ID NO: 259296 - DNA, 50 bp, Artificial
  Synthetic oligonucleotide
atagcgttaaccgctactgcgttattaattcgggtcataatcgttacagc

SEQ ID NO: 259297 - DNA, 55 bp, Artificial
  Synthetic oligonucleotide
gctaaagcctatcgcaaacgcatcattgatatagcaactcaactgcctaataagc

SEQ ID NO: 259298 - DNA, 55 bp, Artificial
  Synthetic oligonucleotide
gcgtaatttcctgctctcctaacggagcaccgtgcgtactatgatgacctgcttt

SEQ ID NO: 259299 - DNA, 55 bp, Artificial
  Synthetic oligonucleotide
gcacgtggtagctatatgggttttagtcgtcttggtctagctttaggaggagcca

SEQ ID NO: 259300 - DNA, 55 bp, Artificial
  Synthetic oligonucleotide
gcacgtgcgggataatctttacgtagtggatgtcctacccaactaggtggcataa

SEQ ID NO: 259301 - DNA, 52 bp, Artificial
  Synthetic oligonucleotide
gcacgtaagttagagggagtaacccgtaacgtaggtaaacacgctggcggag

SEQ ID NO: 259302 - DNA, 55 bp, Artificial
  Synthetic oligonucleotide
gatcgtggctgtcgattaactgtagtgccagcgcagactactgcggatactgtac

SEQ ID NO: 259303 - DNA, 60 bp, Artificial
  Synthetic oligonucleotide
aaaatgttaaaagaacgagtaatttatctcaatggtgctattgaagatacgatggcatca

SEQ ID NO: 259304 - DNA, 60 bp, Artificial
  Synthetic oligonucleotide
caagttggaattgcatcaacttggagtaatataacaccttgtaataatcatatcaatgta

SEQ ID NO: 259305 - DNA, 60 bp, Artificial
  Synthetic oligonucleotide
cttagaatatacaattattgtagcttcaactgcctcagatagtgcagcggagcagtatat

SEQ ID NO: 259306 - DNA, 56 bp, Artificial
  Synthetic oligonucleotide
tcgcatattagcgtctttcatcgtctttagttacctagacattcgttatatacgat

SEQ ID NO: 259307 - DNA, 54 bp, Artificial
  Synthetic oligonucleotide
gctatcattgcttctgtagtaattaataatcctccaattgaacctgctgattgt

SEQ ID NO: 259308 - DNA, 52 bp, Artificial
  Synthetic oligonucleotide
atgaatactatattttcaagaataacaccattaggaaatggtacgttatgtg

SEQ ID NO: 259309 - DNA, 52 bp, Artificial
  Synthetic oligonucleotide
taaacataaacctcttaatgcaccttctgatcctcctgatattcctgcacta

SEQ ID NO: 259310 - DNA, 52 bp, Artificial
  Synthetic oligonucleotide
tacttgctccaggagattcataacaacctcgtgatttaattcctattaatct

SEQ ID NO: 259311 - DNA, 51 bp, Artificial
  Synthetic oligonucleotide
attgcacctattaaacttgttatattcaagttaccttaagaaagacaacaa

SEQ ID NO: 259312 - DNA, 56 bp, Artificial
  Synthetic oligonucleotide
ccacgacatcgtgagatgccaccacgcaccgtgcctgcttaattgcccagtcttta

SEQ ID NO: 259313 - DNA, 55 bp, Artificial
  Synthetic oligonucleotide
ggcgttgttggataacctgataggtcaaaatcaggtctttgttcaagtccgacag

SEQ ID NO: 259314 - DNA, 55 bp, Artificial
  Synthetic oligonucleotide
ggggtttgtcacgtcccgaaccacacgtacggtcacattggcgtcacaggctggc

SEQ ID NO: 259315 - DNA, 55 bp, Artificial
  Synthetic oligonucleotide
ggtgcaaaggtgtttagatgccccaagtgcaaccataggctaccacgagattggc

SEQ ID NO: 259316 - DNA, 55 bp, Artificial
  Synthetic oligonucleotide
ggtggtcaacaggacacgtcggggcaggaagagaaccgtgcgcacttttgcgcac

SEQ ID NO: 259317 - DNA, 55 bp, Artificial
  Synthetic oligonucleotide
gttgccgcctgttcatctggcgtaacacaaggtggctgctgtcatgacgaaacgc

SEQ ID NO: 259318 - DNA, 55 bp, Artificial
  Synthetic oligonucleotide
tatcagcgtctgaagccgatgacctgtcttacgccgtggccgcaactggtgacag

SEQ ID NO: 259319 - DNA, 55 bp, Artificial
  Synthetic oligonucleotide
tcagtcatcgaaagtatgctcctcacagtgacacaggcttgttcagccgggacat

SEQ ID NO: 259320 - DNA, 55 bp, Artificial
  Synthetic oligonucleotide
tcctgagcctaccggccgcaccaggtgagcaacaccgaagtgtcctctctctaac

SEQ ID NO: 259321 - DNA, 55 bp, Artificial
  Synthetic oligonucleotide
tgccgctaagcttggcgacacggagcggaaagtcaacccggatggctcagggatg

SEQ ID NO: 259322 - DNA, 55 bp, Artificial
  Synthetic oligonucleotide
ccgggtgactggtatctgcatgcgttcaatccgggatgcttgaacatggactccc

SEQ ID NO: 259323 - DNA, 55 bp, Artificial
  Synthetic oligonucleotide
atacgacggtggtcaacaggacacgtcggggcaggaagagaaccgtgcgcacttt

SEQ ID NO: 259324 - DNA, 55 bp, Artificial
  Synthetic oligonucleotide
cccggacgagcaggggatgttttcgtcagggctgtatttcgagccgacttcgcgg

SEQ ID NO: 259325 - DNA, 55 bp, Artificial
  Synthetic oligonucleotide
aaaggtacgggctgtccgtcccagactgtcgtgcggtacggaagtgcaggtaatg

SEQ ID NO: 259326 - DNA, 55 bp, Artificial
  Synthetic oligonucleotide
cccacgtcaagactgccaatttcgttctccagtccaagcgcccgtgctccgtgcc

SEQ ID NO: 259327 - DNA, 55 bp, Artificial
  Synthetic oligonucleotide
aagtgcgcacggttctcttcctgccccgacgtgtcctgttgaccaccgtcgtatc

SEQ ID NO: 259328 - DNA, 55 bp, Artificial
  Synthetic oligonucleotide
aattgaacttagtccctggcgcaccaagcacggcactgctcccttcaaatggtcg

SEQ ID NO: 259329 - DNA, 55 bp, Artificial
  Synthetic oligonucleotide
cacccagagcaccttgccaatctcgtggtagcctatggttgcacttggggcatct

SEQ ID NO: 259330 - DNA, 55 bp, Artificial
  Synthetic oligonucleotide
caaacccgatagactcttggcaccagacatctgcccggtgctatggcatagccgc

SEQ ID NO: 259331 - DNA, 55 bp, Artificial
  Synthetic oligonucleotide
acctatcgccaccacccgtttgacgacaaatcactcgtcaacagctacacccatg

SEQ ID NO: 259332 - DNA, 55 bp, Artificial
  Synthetic oligonucleotide
atgtggctgaagtcaggttttccattcccgcgccctggtaccgtacccgcctcgc

SEQ ID NO: 259333 - DNA, 55 bp, Artificial
  Synthetic oligonucleotide
atgatggacgacgaaaagtggactgcctttctgagggagatcgaaaggcgtatca

SEQ ID NO: 259334 - DNA, 55 bp, Artificial
  Synthetic oligonucleotide
ccgtggcaaccaaaaccttacgaaccgtgtagtcagcaggcatgagggcatctcc

SEQ ID NO: 259335 - DNA, 54 bp, Artificial
  Synthetic oligonucleotide
aggcgcgtcccggacctgtccaactcaatctgcttacgcccaatggtgtgcgtc

SEQ ID NO: 259336 - DNA, 53 bp, Artificial
  Synthetic oligonucleotide
atacccatgtgtgtcacgggctatcgtccgtacaatcgcctctccctgccagc

SEQ ID NO: 259337 - DNA, 53 bp, Artificial
  Synthetic oligonucleotide
caaacatgacaggcagggaagtcgtgggatgagagcacagtcaacgcagggat

SEQ ID NO: 259338 - DNA, 52 bp, Artificial
  Synthetic oligonucleotide
gtcttcatacgccacgacatcgtgagatgccaccacgcaccgtgcctgctta

SEQ ID NO: 259339 - DNA, 52 bp, Artificial
  Synthetic oligonucleotide
cagccgatttcgagaccatagggacttcagaacaaaccggagcttctatggt

SEQ ID NO: 259340 - DNA, 52 bp, Artificial
  Synthetic oligonucleotide
tgattcggggacgtacccgctaatctagccctgccccacaccaacctaccgt

SEQ ID NO: 259341 - DNA, 51 bp, Artificial
  Synthetic oligonucleotide
attgaagtccacaatggctgtgacctgccgtttgggcacaaccagcgtttc

SEQ ID NO: 259342 - DNA, 51 bp, Artificial
  Synthetic oligonucleotide
tcatctgaccacgggtgaggttatgtccaaaagcaagcgatttgccacaag

SEQ ID NO: 259343 - DNA, 51 bp, Artificial
  Synthetic oligonucleotide
tgatttgtggctactgtttccacctggcatggcagtaaatcgcctgctgac

SEQ ID NO: 259344 - DNA, 50 bp, Artificial
  Synthetic oligonucleotide
tcaaagctacagcgcatcgggtttcttccacatccgggaaagctggtgta

SEQ ID NO: 259345 - DNA, 55 bp, Artificial
  Synthetic oligonucleotide
ctcccaacagtctgcacgcccaagtgcaactgggtgagattctgctctatcgtgg

SEQ ID NO: 259346 - DNA, 50 bp, Artificial
  Synthetic oligonucleotide
gatacggtaacgtggttttggattggtacgcatgacgaatatgaacggct

SEQ ID NO: 259347 - DNA, 50 bp, Artificial
  Synthetic oligonucleotide
ccccaagtgagttgccatgaagtttgtactcgttggccttaatcaccata

SEQ ID NO: 259348 - DNA, 50 bp, Artificial
  Synthetic oligonucleotide
tgtctcgtgcctttgggagtcacgggtagtgagcgagagcttaagttctc

SEQ ID NO: 259349 - DNA, 54 bp, Artificial
  Synthetic oligonucleotide
gacccgttatgagccggagggcgttaaccagcctaacttgcagtgggtacaacg

SEQ ID NO: 259350 - DNA, 55 bp, Artificial
  Synthetic oligonucleotide
gacgatatgacatgggcaacagaagtgagctatcaccagatggtgacgacgcgcg

SEQ ID NO: 259351 - DNA, 55 bp, Artificial
  Synthetic oligonucleotide
gcagaccaaccgacagaagcctggttggtgactattgtcctgtgtcaagcgcgtg

SEQ ID NO: 259352 - DNA, 55 bp, Artificial
  Synthetic oligonucleotide
gctgtgcattgaccgatgcaccttccacaaaggaagtctgccattatacaaacgc

SEQ ID NO: 259353 - DNA, 55 bp, Artificial
  Synthetic oligonucleotide
ggcgtgtcctgtagcagcgcccgtgtgatttctgcgtacgtctggcggtaacggt

SEQ ID NO: 259354 - DNA, 56 bp, Artificial
  Synthetic oligonucleotide
cgcgcggggcaaaattgccgtcctgtttgcagccattccagtaaagaactcccgca

SEQ ID NO: 259355 - DNA, 51 bp, Artificial
  Synthetic oligonucleotide
cctatgctcgttaagggtttacctttctactaacctcttgaccttcaaact

SEQ ID NO: 259356 - DNA, 51 bp, Artificial
  Synthetic oligonucleotide
cctacggcggttactttatagaacttcttgggagcggtaggtccggtatag

SEQ ID NO: 259357 - DNA, 55 bp, Artificial
  Synthetic oligonucleotide
cctacgaaggcagaaatcccgatacttgtcattcctacgaaggcagaaatcccga

SEQ ID NO: 259358 - DNA, 55 bp, Artificial
  Synthetic oligonucleotide
ccggaactctatgctttgaaaggaaagcgcaccgaacgggccttacgcctctggc

SEQ ID NO: 259359 - DNA, 53 bp, Artificial
  Synthetic oligonucleotide
ccgaattatacgctaataaggccttacaaaacgacccaaccctatatctgccc

SEQ ID NO: 259360 - DNA, 55 bp, Artificial
  Synthetic oligonucleotide
ccattcatccggtgcgggctcaattttaactcccaattcattttgcaactgaccg

SEQ ID NO: 259361 - DNA, 52 bp, Artificial
  Synthetic oligonucleotide
ccaccccttagaaaagcgggtagcggttttggaagatagccgcctggtagaa

SEQ ID NO: 259362 - DNA, 55 bp, Artificial
  Synthetic oligonucleotide
ccaccaccgcagatatgagccgtattattccaatctacgcttataattccggaag

SEQ ID NO: 259363 - DNA, 55 bp, Artificial
  Synthetic oligonucleotide
ccaatttcacaacatcagtattgcgtccctcgccaataagatgatcggtattata

SEQ ID NO: 259364 - DNA, 55 bp, Artificial
  Synthetic oligonucleotide
caacttatccaagcattaaattatacgggagtctgtgagattgaatggctaagag

SEQ ID NO: 259365 - DNA, 55 bp, Artificial
  Synthetic oligonucleotide
acggtagcctggctccggaactctatgctttgaaaggaaagcgcaccgaacgggc

SEQ ID NO: 259366 - DNA, 55 bp, Artificial
  Synthetic oligonucleotide
agtataagctgccgtctgcacaaaatccgagattggaaatttcgctatcggaact

SEQ ID NO: 259367 - DNA, 55 bp, Artificial
  Synthetic oligonucleotide
gggcatagtaaaagcaacttcaccggacatagaaagctgggaaggagccgtagta

SEQ ID NO: 259368 - DNA, 52 bp, Artificial
  Synthetic oligonucleotide
ggggttatgcgtgcagaactaatttacctcctaatacggcttttcgtggttt

SEQ ID NO: 259369 - DNA, 55 bp, Artificial
  Synthetic oligonucleotide
acaaacagtagcattttgccaggatgcggcaacataacctatgggcagaacaaac

SEQ ID NO: 259370 - DNA, 55 bp, Artificial
  Synthetic oligonucleotide
aattggcagtggagcgggctaccaagtccctcccggccaagcagactaaagtcat

SEQ ID NO: 259371 - DNA, 55 bp, Artificial
  Synthetic oligonucleotide
aattctggctcgtttgcattatacgggaacagaaactcccgatagaacacagggt

SEQ ID NO: 259372 - DNA, 55 bp, Artificial
  Synthetic oligonucleotide
tagctatccggcattagatcactcccacccggatcaggcgagcttgtctgggctt

SEQ ID NO: 259373 - DNA, 52 bp, Artificial
  Synthetic oligonucleotide
aaatttgcgtttggataaccacctaccggagtaagcaaagtccaggttgttc

SEQ ID NO: 259374 - DNA, 54 bp, Artificial
  Synthetic oligonucleotide
tcataccgcctccggaagagatagtgccaccggcggcataatatgagcccaggt

SEQ ID NO: 259375 - DNA, 54 bp, Artificial
  Synthetic oligonucleotide
gattgggagttccttaccagtgatcaaaacgctatgggcttcaatcctgcttcc

SEQ ID NO: 259376 - DNA, 56 bp, Artificial
  Synthetic oligonucleotide
aggggcttacgccaccatcgctaacattgtgtcgccctgactggcttttgggaacc

SEQ ID NO: 259377 - DNA, 54 bp, Artificial
  Synthetic oligonucleotide
gagacaattaccaactggtatctaccactgacatagctggaccggacactaccg

SEQ ID NO: 259378 - DNA, 54 bp, Artificial
  Synthetic oligonucleotide
cgtcaccgacgagataactttgaacttacttgcagacaattttggcggtgagga

SEQ ID NO: 259379 - DNA, 54 bp, Artificial
  Synthetic oligonucleotide
aaaagttacgggacccaaaggcaagagctcataacgcttatcaacagggtctgt

SEQ ID NO: 259380 - DNA, 53 bp, Artificial
  Synthetic oligonucleotide
agagcccgtcagggcgatacaattatagcgatgggtgcgtaagcccctcgtga

SEQ ID NO: 259381 - DNA, 52 bp, Artificial
  Synthetic oligonucleotide
gcgggaataaccctcttgataataggaaggagcataagcaatagttattgct

SEQ ID NO: 259382 - DNA, 51 bp, Artificial
  Synthetic oligonucleotide
ctcctgctataactatggaagacacattaagagtaccagtacctgtattac

SEQ ID NO: 259383 - DNA, 51 bp, Artificial
  Synthetic oligonucleotide
cgttcattctactttcggttaatgcttcataacgggtaacaattacaggtg

SEQ ID NO: 259384 - DNA, 51 bp, Artificial
  Synthetic oligonucleotide
actaatgcccggaataaattgcctgattagcgctcagggtataactcagca

SEQ ID NO: 259385 - DNA, 51 bp, Artificial
  Synthetic oligonucleotide
aagcccctaagggcgaaacaatgatagcgaaggtggcgtaagcccctcgga

SEQ ID NO: 259386 - DNA, 50 bp, Artificial
  Synthetic oligonucleotide
tatctatgctgctctggagagccgactgcatctgattggttctgtgattg

SEQ ID NO: 259387 - DNA, 55 bp, Artificial
  Synthetic oligonucleotide
gcaatatagtccattccagcaccggagcagaaacccagaatttggctgtaagtgg

SEQ ID NO: 259388 - DNA, 55 bp, Artificial
  Synthetic oligonucleotide
gcagcagatattcatttccccgtcccaatttataaccggttgtgtccataagcgt

SEQ ID NO: 259389 - DNA, 55 bp, Artificial
  Synthetic oligonucleotide
gcatattcctaaacccctttggtatggaattgcgccattgggtataattggaaac

SEQ ID NO: 259390 - DNA, 55 bp, Artificial
  Synthetic oligonucleotide
gccaaacgcaaaactttggttataagtatttgcctccttgtagctattggtgcta

SEQ ID NO: 259391 - DNA, 55 bp, Artificial
  Synthetic oligonucleotide
gctattaaagctcatagcggaacagtaagtttgcaacataacggctcaaacagcg

SEQ ID NO: 259392 - DNA, 55 bp, Artificial
  Synthetic oligonucleotide
cctgatctatattatagccaatccaataggcagttgcaggttgaatttgcacggg

SEQ ID NO: 259393 - DNA, 59 bp, Artificial
  Synthetic oligonucleotide
cagttttgagctgtcgtttcgagtggtgcttttgaagttgcgtccagcgtcggagtgtg

SEQ ID NO: 259394 - DNA, 55 bp, Artificial
  Synthetic oligonucleotide
cgggctgacacgcgtcgcttgctgcgcccacactgttaagcgctatcaacctagc

SEQ ID NO: 259395 - DNA, 55 bp, Artificial
  Synthetic oligonucleotide
cggcgtactccaagtggtgagtcaagcacaacgtgatagcgcacgtgctagcagg

SEQ ID NO: 259396 - DNA, 55 bp, Artificial
  Synthetic oligonucleotide
cgctctaaacagcgccctaagctttgactcgcacgttagcatgtctagctcggcc

SEQ ID NO: 259397 - DNA, 55 bp, Artificial
  Synthetic oligonucleotide
gtggtgcctgtactgaggtgtttgtggtctacgactcgagctattgagagctgct

SEQ ID NO: 259398 - DNA, 55 bp, Artificial
  Synthetic oligonucleotide
gttggtctgaacgcgaggctagatcacttaaagcgcgtcgaagcttgcgtcgaca

SEQ ID NO: 259399 - DNA, 54 bp, Artificial
  Synthetic oligonucleotide
taaagaggggcatgttgttaaaggctccaagttttgcgggctagttcgtgtggg

SEQ ID NO: 259400 - DNA, 55 bp, Artificial
  Synthetic oligonucleotide
tctcacagactcaggttgacttgtatgggtggaggtggcgttaacgcgcgctcag

SEQ ID NO: 259401 - DNA, 55 bp, Artificial
  Synthetic oligonucleotide
tgaaaaccacgccatgtgatctaggcgcactagcccgtttcgccaacccatgtcc

SEQ ID NO: 259402 - DNA, 55 bp, Artificial
  Synthetic oligonucleotide
tggacttggcgcttactggcatggacttggtgtgtgaagcgtacctgaaagcaag

SEQ ID NO: 259403 - DNA, 55 bp, Artificial
  Synthetic oligonucleotide
aacgcccgagctttgagctcagcttttgaatctaggggattcaagctggtgactg

SEQ ID NO: 259404 - DNA, 55 bp, Artificial
  Synthetic oligonucleotide
gctagaaggacgctgcttactcctaagcttaacaagcgcgtcaaaacgctagcgc

SEQ ID NO: 259405 - DNA, 53 bp, Artificial
  Synthetic oligonucleotide
ctcacgcggcgaaggtgcttagtaggccccaacttcgtaggccccaagtttga

SEQ ID NO: 259406 - DNA, 53 bp, Artificial
  Synthetic oligonucleotide
ctgtccagcactgagtacgtggaccgcaccttgaggtttacaaactcgcgcct

SEQ ID NO: 259407 - DNA, 52 bp, Artificial
  Synthetic oligonucleotide
cgcgtcagctagcgccgtcttgcacggctgcaccgttttctgaattaggtcg

SEQ ID NO: 259408 - DNA, 52 bp, Artificial
  Synthetic oligonucleotide
cacaccaccactgtcacgttagcggtgtcgactcgacgcttggctgcagcta

SEQ ID NO: 259409 - DNA, 52 bp, Artificial
  Synthetic oligonucleotide
attcgtctaacgtgctgggcgcgcttatacctgttaagctttacgtgaacgt

SEQ ID NO: 259410 - DNA, 52 bp, Artificial
  Synthetic oligonucleotide
tctgtcgtacttgcagctaaccagagctaacgccctaagctggcgcgcacac

SEQ ID NO: 259411 - DNA, 51 bp, Artificial
  Synthetic oligonucleotide
tgtagtaagcagcgctgagctggcttcgcgtgtgagagctaacgtggcgct

SEQ ID NO: 259412 - DNA, 51 bp, Artificial
  Synthetic oligonucleotide
gcgcggagctgttttactaaatcggctgtgaagcgcaggttgcctcaatgg

SEQ ID NO: 259413 - DNA, 51 bp, Artificial
  Synthetic oligonucleotide
aggtggggtttaatctcgtactgctcgtcgtttgaccaagttggtttgttt

SEQ ID NO: 259414 - DNA, 51 bp, Artificial
  Synthetic oligonucleotide
cttcaaactgagctccgaggtcttcgcttaagttgggcgtttgcaggtagc

SEQ ID NO: 259415 - DNA, 55 bp, Artificial
  Synthetic oligonucleotide
gctgacgacgtggtaggtgacaagtgctagctagggctctcgttatgctcgagct

SEQ ID NO: 259416 - DNA, 51 bp, Artificial
  Synthetic oligonucleotide
cgcgttttggtaagcggccggctagcgatgtgggcgctcaagagtgggcgc

SEQ ID NO: 259417 - DNA, 50 bp, Artificial
  Synthetic oligonucleotide
aacggcgttgtgccccctgacctgtcgcttgtagtgaagcgcgcgtcaaa

SEQ ID NO: 259418 - DNA, 50 bp, Artificial
  Synthetic oligonucleotide
aatcttacgtgtacaacgtgcttacgggctacaccccaggcctcgcgcgc

SEQ ID NO: 259419 - DNA, 50 bp, Artificial
  Synthetic oligonucleotide
acgaagcttggcggcttgtcgccggctcacaccaccactgtcacgttagc

SEQ ID NO: 259420 - DNA, 50 bp, Artificial
  Synthetic oligonucleotide
acgcgtcaacaaacccccacacgctatgcctcattgcgcgcgtcagctgc

SEQ ID NO: 259421 - DNA, 50 bp, Artificial
  Synthetic oligonucleotide
tctccagcttgatgctgctagcgcctagggaggagcgcgtcgttaggctt

SEQ ID NO: 259422 - DNA, 50 bp, Artificial
  Synthetic oligonucleotide
tcaaaacgttaacaactccgaacgcgcagcctacgatggtgcacccgggc

SEQ ID NO: 259423 - DNA, 50 bp, Artificial
  Synthetic oligonucleotide
tacgatggtgcacccgggctgacacgcgtcgcttgctgcgcccacactgt

SEQ ID NO: 259424 - DNA, 50 bp, Artificial
  Synthetic oligonucleotide
cccacacgctatgcctcattgcgcgcgtcagctgctcggagcatgtctca

SEQ ID NO: 259425 - DNA, 50 bp, Artificial
  Synthetic oligonucleotide
ccggctcacaccaccactgtcacgttagcggtgtcgactcgacgcttggc

SEQ ID NO: 259426 - DNA, 55 bp, Artificial
  Synthetic oligonucleotide
gcccacgtctggttttgcgtcagtgcccacgtctggttttgcgtcagtgcccacg

SEQ ID NO: 259427 - DNA, 50 bp, Artificial
  Synthetic oligonucleotide
gtgccccaagcttgcggcttcttgtacacaactagcatgccggcgctgtc

SEQ ID NO: 259428 - DNA, 50 bp, Artificial
  Synthetic oligonucleotide
ctgtttgtcgctttgatctagctagcgatcgccggtgcgtggggcttggc

SEQ ID NO: 259429 - DNA, 50 bp, Artificial
  Synthetic oligonucleotide
ggcttgtcgccggctcacaccaccactgtcacgttagcggtgtcgactcg

SEQ ID NO: 259430 - DNA, 50 bp, Artificial
  Synthetic oligonucleotide
gctttgatctagctagcgatcgccggtgcgtggggcttggcgtctacgta

SEQ ID NO: 259431 - DNA, 50 bp, Artificial
  Synthetic oligonucleotide
gcttggcgtctacgtaagcaccgcaagacgcatgttaagtgggcgcgtgc

SEQ ID NO: 259432 - DNA, 50 bp, Artificial
  Synthetic oligonucleotide
gcttaagctaacgcgcctgctgacggcttgttggctacgcgccgacgcaa

SEQ ID NO: 259433 - DNA, 50 bp, Artificial
  Synthetic oligonucleotide
cttcatgcctcggctctcgagctgaaacgtgcccagcacccttccgccac

SEQ ID NO: 259434 - DNA, 50 bp, Artificial
  Synthetic oligonucleotide
gctcgctgctgccactacgggcatgtctgttccgtcaaacgcgttccgca

SEQ ID NO: 259435 - DNA, 50 bp, Artificial
  Synthetic oligonucleotide
gcgctctcgctacctgcgacgccctggctacaccgccctgatctaacgcc

SEQ ID NO: 259436 - DNA, 55 bp, Artificial
  Synthetic oligonucleotide
gagcccgtgcctagacgacaacctgaaagctggtgcgcgtttggttgacaccatg

SEQ ID NO: 259437 - DNA, 55 bp, Artificial
  Synthetic oligonucleotide
gctgtgctcgcatgccagcttgcaaagcttggagtatgacgttttggaggtgtca

SEQ ID NO: 259438 - DNA, 55 bp, Artificial
  Synthetic oligonucleotide
gctttcgcgcacgactctgttaagcttaagctggtaggcgccagcttgcagtctg

SEQ ID NO: 259439 - DNA, 55 bp, Artificial
  Synthetic oligonucleotide
gtagcttaacactagatcgtcgaacgtcacgtctctgtgtgagggccttgacgcg

SEQ ID NO: 259440 - DNA, 55 bp, Artificial
  Synthetic oligonucleotide
ctagagtagcccaggtacgttatcactagaactacgctgctggcgcacgctagcc

SEQ ID NO: 259441 - DNA, 55 bp, Artificial
  Synthetic oligonucleotide
ccattcgcaggccggaccgctcactcgatatgcttgggagcattatggcgacgca

SEQ ID NO: 259442 - DNA, 55 bp, Artificial
  Synthetic oligonucleotide
gcgctcttgtcgacgggatgggagtgccggttctggtggcgaatgtagtcgcgat

SEQ ID NO: 259443 - DNA, 55 bp, Artificial
  Synthetic oligonucleotide
gcttcgtcctgaatctatctcggctaaaacgcctccttggtgcgtcgaaggttgt

SEQ ID NO: 259444 - DNA, 55 bp, Artificial
  Synthetic oligonucleotide
ggatgtcgaatgcagaaacccaaataggctcccatggattgcgttcgttcccgac

SEQ ID NO: 259445 - DNA, 55 bp, Artificial
  Synthetic oligonucleotide
ggctctgatcacccgttcgtatgcgcccttcgcagcaagaggtacacccgctgac

SEQ ID NO: 259446 - DNA, 55 bp, Artificial
  Synthetic oligonucleotide
gggacccgaaggacgtcgaacactttcggaagtatgcacgcgacgcggaattcat

SEQ ID NO: 259447 - DNA, 55 bp, Artificial
  Synthetic oligonucleotide
ggtaacttctgtaaggattgctgtgcgcattgccggttcgaggtccggtgcccac

SEQ ID NO: 259448 - DNA, 55 bp, Artificial
  Synthetic oligonucleotide
gtgtcgtcactcactgactcttgcggctgacccacgtaatctgtgcacgcggggc

SEQ ID NO: 259449 - DNA, 55 bp, Artificial
  Synthetic oligonucleotide
tacaactacgagacgtttcgccgcaacctgctgatcaaagacttggcgttcacaa

SEQ ID NO: 259450 - DNA, 55 bp, Artificial
  Synthetic oligonucleotide
tagcgacgcccgtcgtaagacccacgcgaagagcgaacagccacgctccctccac

SEQ ID NO: 259451 - DNA, 55 bp, Artificial
  Synthetic oligonucleotide
cacgagtcccacggtgatgggacttctgcggcagcacagactcgcgcattagact

SEQ ID NO: 259452 - DNA, 55 bp, Artificial
  Synthetic oligonucleotide
cgcgccgagaagtcggtgcgtgagcaatcggaacttttgcgtgaattgggactcg

SEQ ID NO: 259453 - DNA, 55 bp, Artificial
  Synthetic oligonucleotide
tcccaacccatgtagttccacatgcagatcaggattccgccaatcagtccaacgt

SEQ ID NO: 259454 - DNA, 55 bp, Artificial
  Synthetic oligonucleotide
tcctgccggaggttcggtgacattcaccgcgcaggtaagttctcccgtggtgctc

SEQ ID NO: 259455 - DNA, 55 bp, Artificial
  Synthetic oligonucleotide
tcgggctgacgtgatagctcggatagtacggctcaccgtagctcaacgggaccca

SEQ ID NO: 259456 - DNA, 55 bp, Artificial
  Synthetic oligonucleotide
tcgtcttttcggaagcgattccgatgtggcacgatagcttgtggtaaggcctgtt

SEQ ID NO: 259457 - DNA, 55 bp, Artificial
  Synthetic oligonucleotide
acgattacagcagtgagtgaaggggtccgtacgtacgcggtagctccagagaacg

SEQ ID NO: 259458 - DNA, 53 bp, Artificial
  Synthetic oligonucleotide
ggagccctgaagctatgaaccggatttcgatggtagcagttctgattgcaggc

SEQ ID NO: 259459 - DNA, 52 bp, Artificial
  Synthetic oligonucleotide
ttttcattgcgtacggagtgatgtcgattccgggagggttcctggtcgaacg

SEQ ID NO: 259460 - DNA, 51 bp, Artificial
  Synthetic oligonucleotide
cccgtgaccgactgcccattcggctacatccttttcgatccgcattcgtct

SEQ ID NO: 259461 - DNA, 51 bp, Artificial
  Synthetic oligonucleotide
cctcggacatgacacgacgaattggggaacatacgcaaccaagggcggaat

SEQ ID NO: 259462 - DNA, 51 bp, Artificial
  Synthetic oligonucleotide
cgtgctcacattcccgccgaacgcttgtccgtgaccgaatggtaggtcata

SEQ ID NO: 259463 - DNA, 55 bp, Artificial
  Synthetic oligonucleotide
cgtcggtgctcccgccacgatgattagccccgctcttggatcgattctaaccagc

SEQ ID NO: 259464 - DNA, 50 bp, Artificial
  Synthetic oligonucleotide
tattctgcgcatgtggatcacttccactgaaccgcgatctttgaaaaccg

SEQ ID NO: 259465 - DNA, 50 bp, Artificial
  Synthetic oligonucleotide
aatgagacgcccctcgggagcaagacgagcacgggaatcgttgccacata

SEQ ID NO: 259466 - DNA, 50 bp, Artificial
  Synthetic oligonucleotide
aatctccccggcagcctcggtcgtaactggaaatggcgcgtgtgcaagga

SEQ ID NO: 259467 - DNA, 50 bp, Artificial
  Synthetic oligonucleotide
aatcgacgcactccacatcaaccgggcctgcttgggaagacgccggcgca

SEQ ID NO: 259468 - DNA, 50 bp, Artificial
  Synthetic oligonucleotide
aatccgccagactttggctcatcttcgctgggagcaggtgcctccggatt

SEQ ID NO: 259469 - DNA, 50 bp, Artificial
  Synthetic oligonucleotide
aactcttggtcctcacccaagtccggcggtcacgcggtgtcacaaacact

SEQ ID NO: 259470 - DNA, 50 bp, Artificial
  Synthetic oligonucleotide
aacgccgctgaattcgcagggtttaaaggccttgatcccccagccgacgc

SEQ ID NO: 259471 - DNA, 50 bp, Artificial
  Synthetic oligonucleotide
aacgccgcggtatagctggtgtccgccgttggagcggtgatggagtgcga

SEQ ID NO: 259472 - DNA, 50 bp, Artificial
  Synthetic oligonucleotide
aacgcatccgcaaccacacccgacaacgcaccgactttgatgtgcacggc

SEQ ID NO: 259473 - DNA, 50 bp, Artificial
  Synthetic oligonucleotide
aacgagtactgctcgctgtggtaaggcgggatcggcgtgccattctgcgt

SEQ ID NO: 259474 - DNA, 55 bp, Artificial
  Synthetic oligonucleotide
cactgccgaactttcgcttcaggtagttcgcgagcaggtcgcgtgagagtttcac

SEQ ID NO: 259475 - DNA, 50 bp, Artificial
  Synthetic oligonucleotide
aacgacgggtacatcctaccgctggagcaactgttgtcggcgcacgcaaa

SEQ ID NO: 259476 - DNA, 50 bp, Artificial
  Synthetic oligonucleotide
aacgaatcgcaccgtgtacaacgaaccgcgtcgccagtttggcagcaact

SEQ ID NO: 259477 - DNA, 50 bp, Artificial
  Synthetic oligonucleotide
aaccgtgggttcggtggcgtgcgagacagtaaagacgaaccttgccgcga

SEQ ID NO: 259478 - DNA, 50 bp, Artificial
  Synthetic oligonucleotide
aaccgaccgcgcttgcttgtggcctctacccgaagtggttcgactgccga

SEQ ID NO: 259479 - DNA, 50 bp, Artificial
  Synthetic oligonucleotide
aacagtacgcgacttcagtgacgcggctcagtgcaccgggggaacgtacg

SEQ ID NO: 259480 - DNA, 50 bp, Artificial
  Synthetic oligonucleotide
aaattcggcgggacagtcatcgcaacattgctcggcgcacacacggttcc

SEQ ID NO: 259481 - DNA, 50 bp, Artificial
  Synthetic oligonucleotide
aaagcgtctgcgactcagtgttgacctgagcggctccgccttctgccgtt

SEQ ID NO: 259482 - DNA, 50 bp, Artificial
  Synthetic oligonucleotide
aaagcccttgcgcgaacgagggtaaggccatgatctgggacgcccgcaga

SEQ ID NO: 259483 - DNA, 50 bp, Artificial
  Synthetic oligonucleotide
aaactcgcgccaatgccgctccgtgcaatgcgagtgcagacagtgaaacc

SEQ ID NO: 259484 - DNA, 50 bp, Artificial
  Synthetic oligonucleotide
aaactagggtcgttctgatcccagcgggctcgatggccccaccaggagtg

SEQ ID NO: 259485 - DNA, 52 bp, Artificial
  Synthetic oligonucleotide
cttcgcgattaccacggttcggacgcaaccactttctaggtcggaatttagg

SEQ ID NO: 259486 - DNA, 50 bp, Artificial
  Synthetic oligonucleotide
aaacgcgcgtaccgttcctagtgaataggtgggtacagctccaccggcgc

SEQ ID NO: 259487 - DNA, 50 bp, Artificial
  Synthetic oligonucleotide
aaacgagcgaattatgcgccgtctccgaacgcaatcgccccacgcgggaa

SEQ ID NO: 259488 - DNA, 50 bp, Artificial
  Synthetic oligonucleotide
aatcccgccgattgcggccctgcgataaacgaaaccgtgccgtggctgga

SEQ ID NO: 259489 - DNA, 50 bp, Artificial
  Synthetic oligonucleotide
aatcaggcgcgcagctccactgctcactcttgtcatcccgaggagtgcgt

SEQ ID NO: 259490 - DNA, 50 bp, Artificial
  Synthetic oligonucleotide
aatcaagatctcccgtccctccggactcgccttccggcgcgctgtaacgc

SEQ ID NO: 259491 - DNA, 50 bp, Artificial
  Synthetic oligonucleotide
aatacggcggatgggcgagacgacataccaggctgcgagtccgcacatga

SEQ ID NO: 259492 - DNA, 50 bp, Artificial
  Synthetic oligonucleotide
aagttgctccgctgctaccgcgtacgctccccgcgaaatggatgatccgg

SEQ ID NO: 259493 - DNA, 50 bp, Artificial
  Synthetic oligonucleotide
aagtcgttccgcgacgaagtttgagcctggggatggcaacgtcgagcacc

SEQ ID NO: 259494 - DNA, 50 bp, Artificial
  Synthetic oligonucleotide
aaggtcccaggttcggcctgcagagacttgccggcggtgcgtggaagccc

SEQ ID NO: 259495 - DNA, 50 bp, Artificial
  Synthetic oligonucleotide
aagggtttgatcgctgatcccggggttgccactcgcgtcgtgagcgtctt

SEQ ID NO: 259496 - DNA, 55 bp, Artificial
  Synthetic oligonucleotide
gaattagtaacgggacgtacctgacgaaatagttatccggcatgagatcgcttgt

SEQ ID NO: 259497 - DNA, 50 bp, Artificial
  Synthetic oligonucleotide
aaggccggaaccctccccagagcacgattctgtccgctttagacggccca

SEQ ID NO: 259498 - DNA, 50 bp, Artificial
  Synthetic oligonucleotide
aaggccatcaaagttcggacgccgttctgctgcaggttcgcgactgcttc

SEQ ID NO: 259499 - DNA, 50 bp, Artificial
  Synthetic oligonucleotide
aaggagacggcagtgagcgagtccgtcagtgtccatagcgaggctccgag

SEQ ID NO: 259500 - DNA, 50 bp, Artificial
  Synthetic oligonucleotide
aagcttgcatcgagttcgtccacgcaaaggacactgccgtgctcaagcga

SEQ ID NO: 259501 - DNA, 50 bp, Artificial
  Synthetic oligonucleotide
aagctatacctggtcgcatgggcagctactccttcgcagtccgcgacccg

SEQ ID NO: 259502 - DNA, 50 bp, Artificial
  Synthetic oligonucleotide
aagctacgtcgcgggcttgggggttatgcgtccatttcgggttcgctcaa

SEQ ID NO: 259503 - DNA, 50 bp, Artificial
  Synthetic oligonucleotide
aagcggtacacggcaacatcccacgcatgtttaaaccccgaagggtcgcg

SEQ ID NO: 259504 - DNA, 50 bp, Artificial
  Synthetic oligonucleotide
aagcggggagtaccagcattcctccgaaggcacgcgatactctgccgccg

SEQ ID NO: 259505 - DNA, 50 bp, Artificial
  Synthetic oligonucleotide
aagcgggcgagatagacacgtacccggcgagaagcgatcttgcgcctacc

SEQ ID NO: 259506 - DNA, 50 bp, Artificial
  Synthetic oligonucleotide
aactgcgcaaacattcgatccggcttccagccccgagcccaattcctgga

SEQ ID NO: 259507 - DNA, 55 bp, Artificial
  Synthetic oligonucleotide
gcaccgcactcttgcggttttcattacagcagctatagatcatgatccggaccca

SEQ ID NO: 259508 - DNA, 55 bp, Artificial
  Synthetic oligonucleotide
gcgagcgactgtagacaagtttcatctggcttgaacgctcacttaacgccgaccc

SEQ ID NO: 259509 - DNA, 55 bp, Artificial
  Synthetic oligonucleotide
gcgcggatctcaaattaagcgccctttaaccatcggcagctaacttcagggcttt

SEQ ID NO: 259510 - DNA, 58 bp, Artificial
  Synthetic oligonucleotide
ttgccaggcgtcttatgaggatcgaagctgtcaagggggagttcgcgttgctgcctgt

SEQ ID NO: 259511 - DNA, 55 bp, Artificial
  Synthetic oligonucleotide
tagccggtgatgcgttgcttacatatgctttcgaagtaatagcgtctgatcaagc

SEQ ID NO: 259512 - DNA, 55 bp, Artificial
  Synthetic oligonucleotide
gtctaagccgtactgccataagtcaaggcgcgctaaagaatccaactgtgctccg

SEQ ID NO: 259513 - DNA, 55 bp, Artificial
  Synthetic oligonucleotide
ggctcgctaaccgactgtctagctatgatcccaggtgcctttacttctactcgcc

SEQ ID NO: 259514 - DNA, 55 bp, Artificial
  Synthetic oligonucleotide
ggattccagtcagtctctctatcgtcctaatcccacagtcctcaagattaggttt

SEQ ID NO: 259515 - DNA, 55 bp, Artificial
  Synthetic oligonucleotide
gcctaaggtgactatctcctatattggctactctttcatagtaatcgcaggtctg

SEQ ID NO: 259516 - DNA, 55 bp, Artificial
  Synthetic oligonucleotide
gcccaatttgtacggcggctagagctgaagaggggatattaagtacgtatccgac

SEQ ID NO: 259517 - DNA, 55 bp, Artificial
  Synthetic oligonucleotide
gagctacagagttcagatgggatctggcactacctgaggttaggggaaggtatag

SEQ ID NO: 259518 - DNA, 55 bp, Artificial
  Synthetic oligonucleotide
gacgttctactctctgacctagcattgtatggtagcgagcaaaggtatccttaat

SEQ ID NO: 259519 - DNA, 55 bp, Artificial
  Synthetic oligonucleotide
ctaccatcggaaactaaatatactccgaactctcctttaggagcttccactgcag

SEQ ID NO: 259520 - DNA, 55 bp, Artificial
  Synthetic oligonucleotide
ctaaatttccttcagtgaagctccatatagtctggaggtttgtcccattcgctca

SEQ ID NO: 259521 - DNA, 58 bp, Artificial
  Synthetic oligonucleotide
atcccatgcgattccagagcccctaagcattggccccgaaaacccataatctagcgcc

SEQ ID NO: 259522 - DNA, 55 bp, Artificial
  Synthetic oligonucleotide
aacgacaattgtaagccgtacttcttcaagtgatacagcttggaaagttgagtcc

SEQ ID NO: 259523 - DNA, 54 bp, Artificial
  Synthetic oligonucleotide
aggcatcgggaataaccttgggcacgttggctctaaccccttactatagtccag

SEQ ID NO: 259524 - DNA, 53 bp, Artificial
  Synthetic oligonucleotide
cgtcgtttccttggaccggcacatcccaaactaatacttcaaccgggaatcta

SEQ ID NO: 259525 - DNA, 55 bp, Artificial
  Synthetic oligonucleotide
cgtccaaccgtcagaagttgcaaaattaggggtaatactcgcactatctagatac

SEQ ID NO: 259526 - DNA, 55 bp, Artificial
  Synthetic oligonucleotide
cctgataacaacaatgtaaattttgcgctacgtaatgctttgagaagtggcagcc

SEQ ID NO: 259527 - DNA, 55 bp, Artificial
  Synthetic oligonucleotide
ccaacccttgaaggtatgaatccggtagagtacttcattccaagaggccgtcata

SEQ ID NO: 259528 - DNA, 55 bp, Artificial
  Synthetic oligonucleotide
cagtatgcaatagtgcaggacggaagcgctttaaaggagagcgaatttccatggc

SEQ ID NO: 259529 - DNA, 55 bp, Artificial
  Synthetic oligonucleotide
atcatcggaataaggcctaatatcgcagtgagtgcagtaagtagaataggcctca

SEQ ID NO: 259530 - DNA, 54 bp, Artificial
  Synthetic oligonucleotide
gcgttaccatactgttataccagtttaaggactccactgactgtcgattcttta

SEQ ID NO: 259531 - DNA, 54 bp, Artificial
  Synthetic oligonucleotide
tcgaaccacgataggttaggtttaaagcgccatgaaggtattctatctgcaagc

SEQ ID NO: 259532 - DNA, 58 bp, Artificial
  Synthetic oligonucleotide
atgcttgccctagctcggcttgagcgatacgccgcacaaaacccatcctgtaaactgg

SEQ ID NO: 259533 - DNA, 53 bp, Artificial
  Synthetic oligonucleotide
tttgcgtgaattcgctaactcacgttataggcagccagccatatttgaacggc

SEQ ID NO: 259534 - DNA, 53 bp, Artificial
  Synthetic oligonucleotide
tcggagccctagctggcggtgtaatggggcactctattggagcgcaattggac

SEQ ID NO: 259535 - DNA, 53 bp, Artificial
  Synthetic oligonucleotide
gctttccctctcccctgggcgcgtttagcgcctaatgccagctgcttagtagc

SEQ ID NO: 259536 - DNA, 52 bp, Artificial
  Synthetic oligonucleotide
caagcatggttgctgttcttatgccctcaaacgtactgatgttgtatgcgta

SEQ ID NO: 259537 - DNA, 51 bp, Artificial
  Synthetic oligonucleotide
tatgcagtagatgaagttctagcgactgttacagagagtggggacgttacc

SEQ ID NO: 259538 - DNA, 51 bp, Artificial
  Synthetic oligonucleotide
tcgcaacatttctaaccacaaatagatcgcctggctcacaactcagtagca

SEQ ID NO: 259539 - DNA, 51 bp, Artificial
  Synthetic oligonucleotide
gcgctacataattaacatgttcgatgcgactaattttgttctgcaagtctc

SEQ ID NO: 259540 - DNA, 51 bp, Artificial
  Synthetic oligonucleotide
gagacaaacttgccaaccactgagtatagtaggtccaccgatccttataac

SEQ ID NO: 259541 - DNA, 50 bp, Artificial
  Synthetic oligonucleotide
caagtaggacctcagctttgcgcacgtactaacgtgtacacttacgcagc

SEQ ID NO: 259542 - DNA, 50 bp, Artificial
  Synthetic oligonucleotide
gttagttggaacgtcaattcaattaatgcccggatccatcatttaaggag

SEQ ID NO: 259543 - DNA, 58 bp, Artificial
  Synthetic oligonucleotide
gtcaagggggagttcgcgttgctgcctgtagtcctacgacacttgcatctgttgcgtg

SEQ ID NO: 259544 - DNA, 54 bp, Artificial
  Synthetic oligonucleotide
cggatataataaacggctggctttccctctcccctgggcgcgtttagcgcctaa

SEQ ID NO: 259545 - DNA, 56 bp, Artificial
  Synthetic oligonucleotide
tccccagtccctcgggttagggcgtatttgagcttgcccttctgatatagcgcaga

SEQ ID NO: 259546 - DNA, 54 bp, Artificial
  Synthetic oligonucleotide
gggcacgcccgtgagaatttggacgctctagcggtcaaaaagcctacccttggg

SEQ ID NO: 259547 - DNA, 55 bp, Artificial
  Synthetic oligonucleotide
tgtggttacttcggtagtgctacagttcacttcaggacaaaccggacgctcgacc

SEQ ID NO: 259548 - DNA, 55 bp, Artificial
  Synthetic oligonucleotide
tggtcaagataaacaagacccctcgagtattgcttataacgcgcaacttctagtc

SEQ ID NO: 259549 - DNA, 55 bp, Artificial
  Synthetic oligonucleotide
cagaaagcagcgttgcccaatccataggacttttgccgggcgataaagtgttaac

SEQ ID NO: 259550 - DNA, 55 bp, Artificial
  Synthetic oligonucleotide
ggcggctcagaccaatgcttagtttccagtcatttcatacagccaaccgaactat

SEQ ID NO: 259551 - DNA, 55 bp, Artificial
  Synthetic oligonucleotide
acgggccttggggtgaccataaccgggtagtgcggacgccagagtcaatgacgca

SEQ ID NO: 259552 - DNA, 55 bp, Artificial
  Synthetic oligonucleotide
ggctacccctaatgtgaatggcgtacccctccgtgatgctttagacgtacagaca

SEQ ID NO: 259553 - DNA, 55 bp, Artificial
  Synthetic oligonucleotide
ggtgaaggacttgcatttccgctatccaggacaaacccatatggcgttacagggg

SEQ ID NO: 259554 - DNA, 55 bp, Artificial
  Synthetic oligonucleotide
gtgagccctgttattagtgaggagagtcgcaccggacgggcaattgtcgaactcg

SEQ ID NO: 259555 - DNA, 55 bp, Artificial
  Synthetic oligonucleotide
tatctgcagcaagttaaagctacgatccaaggccaggactataagttttccgtcc

SEQ ID NO: 259556 - DNA, 55 bp, Artificial
  Synthetic oligonucleotide
aacttaagcttctgcgcaagcaaactcgcctaagtcaaggtgatcttgctttacg

SEQ ID NO: 259557 - DNA, 55 bp, Artificial
  Synthetic oligonucleotide
tcctacagattatgaccttttgcctcccgataacagcatgctgatgccagctaga

SEQ ID NO: 259558 - DNA, 55 bp, Artificial
  Synthetic oligonucleotide
cctcagccactgttagcgagctagaggcatacacggatgggctcgcggtcaagag

SEQ ID NO: 259559 - DNA, 55 bp, Artificial
  Synthetic oligonucleotide
cccgctatgacggtaactggttatggcggcctaagtggactgtttctgaaagaga

SEQ ID NO: 259560 - DNA, 55 bp, Artificial
  Synthetic oligonucleotide
caggagcaagcgcattatatacacatcgttgaaaatacagagcctgtcgacactg

SEQ ID NO: 259561 - DNA, 54 bp, Artificial
  Synthetic oligonucleotide
ctatcggtcctcgcctgagtgagtcattcttaccctgcgtcctagtgcctgagg

SEQ ID NO: 259562 - DNA, 53 bp, Artificial
  Synthetic oligonucleotide
ccttatccacttatgggcacggttgtcaatataaactcttaccgggtgttgca

SEQ ID NO: 259563 - DNA, 53 bp, Artificial
  Synthetic oligonucleotide
tgacaccgcatgctcataagtattatcggccccattgcgagatttcaccatgc

SEQ ID NO: 259564 - DNA, 53 bp, Artificial
  Synthetic oligonucleotide
cagaaggggacttatactcaaatgtcgattagtcactttcttagcttgcccgt

SEQ ID NO: 259565 - DNA, 52 bp, Artificial
  Synthetic oligonucleotide
gctatcaaggatatatggttgctttggccgcattaatggaaatacctgggat

SEQ ID NO: 259566 - DNA, 51 bp, Artificial
  Synthetic oligonucleotide
ccaagccgaatgcttcaggtccgccaaaataagcatagagtggaacgataa

SEQ ID NO: 259567 - DNA, 51 bp, Artificial
  Synthetic oligonucleotide
ggtggtacggcgccattctgaggtccgtccaaatagcttaacaccgacgta

SEQ ID NO: 259568 - DNA, 51 bp, Artificial
  Synthetic oligonucleotide
tggtgcgtcgcttggaagaaggacggttaccgttagaagaggccattagtg

SEQ ID NO: 259569 - DNA, 51 bp, Artificial
  Synthetic oligonucleotide
tttcttatggcggcgtaaaatggaagaaggagcggtaatcctcccaacact

SEQ ID NO: 259570 - DNA, 50 bp, Artificial
  Synthetic oligonucleotide
cgccttgggaagcggagctgtaactcttggcacagccagtagtgcgggga

SEQ ID NO: 259571 - DNA, 55 bp, Artificial
  Synthetic oligonucleotide
cgccgctacctcctctttagaagaagagcgacaggtaagtaaacacttagcgacc

SEQ ID NO: 259572 - DNA, 50 bp, Artificial
  Synthetic oligonucleotide
cgcgagtctcgagtgagtctgaggcgactttgcgcgttaagctgcggcga

SEQ ID NO: 259573 - DNA, 50 bp, Artificial
  Synthetic oligonucleotide
cggcgcgagtatggctgcttgatagcccgattcaatggcccgaagcatgc

SEQ ID NO: 259574 - DNA, 50 bp, Artificial
  Synthetic oligonucleotide
cgatcggccggaattaacctctgcccgtatcgtagtttctggcggccgcg

SEQ ID NO: 259575 - DNA, 50 bp, Artificial
  Synthetic oligonucleotide
cctctgctttgttagtagcggttgctagctcatgtaaacgggctagggct

SEQ ID NO: 259576 - DNA, 50 bp, Artificial
  Synthetic oligonucleotide
ccgtcaactggcacatccttcctatagtcatgtatcggacctacggaaac

SEQ ID NO: 259577 - DNA, 50 bp, Artificial
  Synthetic oligonucleotide
ccgcaggctatgctaatggccgttctgtggtaacggtggcgattcagcgc

SEQ ID NO: 259578 - DNA, 50 bp, Artificial
  Synthetic oligonucleotide
aaaagcccagtgcccggtagctttctgcccctaaggctccatggcgtttc

SEQ ID NO: 259579 - DNA, 50 bp, Artificial
  Synthetic oligonucleotide
aacacttaagccgcggtaggctggcggtacggtgtcattcagatgcgccc

SEQ ID NO: 259580 - DNA, 50 bp, Artificial
  Synthetic oligonucleotide
aaccggtgaacgcttagatgggcggactcaagatgatcgggcgccgcaag

SEQ ID NO: 259581 - DNA, 50 bp, Artificial
  Synthetic oligonucleotide
aactgcttatccaccctgtcctagccgtggaacggggccctgattgtgcg

SEQ ID NO: 259582 - DNA, 55 bp, Artificial
  Synthetic oligonucleotide
cttcaacactttctaagctcggtgtttatcgttgtaggctggttttcggtcgatg

SEQ ID NO: 259583 - DNA, 50 bp, Artificial
  Synthetic oligonucleotide
aaggatcggtgggggcgagtggggacttgacgccgttatcctatgtggcg

SEQ ID NO: 259584 - DNA, 50 bp, Artificial
  Synthetic oligonucleotide
aagggcgcttccaacttgtcctcttgcgcggcccttagtttcggaggtgg

SEQ ID NO: 259585 - DNA, 50 bp, Artificial
  Synthetic oligonucleotide
aagtcgtgccgccacctcataacgcttactcgctggaacagggcgcccct

SEQ ID NO: 259586 - DNA, 50 bp, Artificial
  Synthetic oligonucleotide
aatcgaaagtctcccgtccacgcatcgcaatagtagcccgagccgcgaga

SEQ ID NO: 259587 - DNA, 50 bp, Artificial
  Synthetic oligonucleotide
acagcgacctcataataacggcacacctgggctgtgtcgcggtcagggca

SEQ ID NO: 259588 - DNA, 50 bp, Artificial
  Synthetic oligonucleotide
agccaacaatgctgcaggtcataccggcaccacgaccattagtggcggca

SEQ ID NO: 259589 - DNA, 50 bp, Artificial
  Synthetic oligonucleotide
agccagctatgaccggcagttaagccgagctcagcaccgtggctttccat

SEQ ID NO: 259590 - DNA, 50 bp, Artificial
  Synthetic oligonucleotide
agcctggctgcacttgccagagatcttcggctgctacagtgcgggttcct

SEQ ID NO: 259591 - DNA, 50 bp, Artificial
  Synthetic oligonucleotide
agctgccatcagtaccatggccgcctttccctccgggaccgccatttgtc

SEQ ID NO: 259592 - DNA, 50 bp, Artificial
  Synthetic oligonucleotide
aggcgatggctccattgttatccctgccggtcctcgcttgggcgatacag

SEQ ID NO: 259593 - DNA, 55 bp, Artificial
  Synthetic oligonucleotide
gaagaggcaaactgataaggagttcaaagctaacacctaggagcatggtaacccc

SEQ ID NO: 259594 - DNA, 50 bp, Artificial
  Synthetic oligonucleotide
agggcttctcctgtcaccgtcgcctcttggcaagcctcctctagagaccg

SEQ ID NO: 259595 - DNA, 50 bp, Artificial
  Synthetic oligonucleotide
agtccagctgcttcgcgcactgcgtctcccgctaaaccaggggcgcaact

SEQ ID NO: 259596 - DNA, 50 bp, Artificial
  Synthetic oligonucleotide
atctcgtggtcagtggtgacgggtaagcccgtggctgtgctcaactccga

SEQ ID NO: 259597 - DNA, 50 bp, Artificial
  Synthetic oligonucleotide
atggtaatggcgatgtggcggggactcctgggaaggatgacgggttgctc

SEQ ID NO: 259598 - DNA, 50 bp, Artificial
  Synthetic oligonucleotide
atgtggcggggactcctgggaaggatgacgggttgctcaatagctggctc

SEQ ID NO: 259599 - DNA, 50 bp, Artificial
  Synthetic oligonucleotide
attaccttataccggtgcccctacatcgctggcgcttagtgcgccgtcgc

SEQ ID NO: 259600 - DNA, 50 bp, Artificial
  Synthetic oligonucleotide
atttgtagagcattaagacccgcgagcgttgaggccgcccgagtggcccc

SEQ ID NO: 259601 - DNA, 50 bp, Artificial
  Synthetic oligonucleotide
catggcttgcaagcaccgacccgcaaagaagacctcaatgccgggggcaa

SEQ ID NO: 259602 - DNA, 50 bp, Artificial
  Synthetic oligonucleotide
ccagggcccaaacaatactaacaaacgtctccacccgcgcttgcaggggc

SEQ ID NO: 259603 - DNA, 50 bp, Artificial
  Synthetic oligonucleotide
ccagtcagtccgacctgatccaagtcaccggcaccgctaccctaggcggg

SEQ ID NO: 259604 - DNA, 55 bp, Artificial
  Synthetic oligonucleotide
gcctgaggtacttccagcaagcagacttgttgtaccgcctgaggttatctttcgc

SEQ ID NO: 259605 - DNA, 50 bp, Artificial
  Synthetic oligonucleotide
cccagcgtcggcttgaatctccgccatgtggtcgttatctcggcccacat

SEQ ID NO: 259606 - DNA, 50 bp, Artificial
  Synthetic oligonucleotide
ccccgtcaaggtcagggtacctgccccctctttggttatattgccggcgc

SEQ ID NO: 259607 - DNA, 50 bp, Artificial
  Synthetic oligonucleotide
cccgtcattcctagtgaaggatcggtgggggcgagtggggacttgacgcc

SEQ ID NO: 259608 - DNA, 50 bp, Artificial
  Synthetic oligonucleotide
ccgagctggggattctcagaaagccggagtggggatggccgtaaatcggc

SEQ ID NO: 259609 - DNA, 53 bp, Artificial
  Synthetic oligonucleotide
gctaataatgcgagggtcattagggtttaaaggtggacgccccactttccgcc

SEQ ID NO: 259610 - DNA, 55 bp, Artificial
  Synthetic oligonucleotide
gctttagtgctcgggctaaatgttgcgattgtcgatattttgtggcagttaacgc

SEQ ID NO: 259611 - DNA, 55 bp, Artificial
  Synthetic oligonucleotide
ggaacctaattgtacacgatatggcccctcaccaaccagtgccttaggagaatct

SEQ ID NO: 259612 - DNA, 60 bp, Artificial
  Synthetic oligonucleotide
gactaattgttcagttgtcgtgtacccatgctgagacacaactgacatgccgttatagaa

SEQ ID NO: 259613 - DNA, 60 bp, Artificial
  Synthetic oligonucleotide
gagcatataactttagacatcataggcactaatcgagagtatgacccttcagtctacgag

SEQ ID NO: 259614 - DNA, 50 bp, Artificial
  Synthetic oligonucleotide
ccgagggctatacaataaatgaagacgagtgggacggtaaagcagtgaga

SEQ ID NO: 259615 - DNA, 50 bp, Artificial
  Synthetic oligonucleotide
ttatctctaggagggtccttaggtgcggtaggaattataacaaagcatga

SEQ ID NO: 259616 - DNA, 50 bp, Artificial
  Synthetic oligonucleotide
catcacaaggatattgcttatgacgagggtgcaacaaaaaaaggtgccta

SEQ ID NO: 259617 - DNA, 50 bp, Artificial
  Synthetic oligonucleotide
atgcccatcctatggatacaactaggactacagtgagtcacatggggtta

SEQ ID NO: 259618 - DNA, 56 bp, Artificial
  Synthetic oligonucleotide
tttacccgaacatgaagatgagtggcttggttttagacctacattacctgactact

SEQ ID NO: 259619 - DNA, 54 bp, Artificial
  Synthetic oligonucleotide
cgaaacgtagtaaaattcaattcgaattacctggttatgttcatattgaaggga

SEQ ID NO: 259620 - DNA, 58 bp, Artificial
  Synthetic oligonucleotide
gccctaccactctggataaaacacttgcttcgttatcaacccatacaacaataatgtg

SEQ ID NO: 259621 - DNA, 57 bp, Artificial
  Synthetic oligonucleotide
agcctcaagaaaagcttctgagttaactcttaatgctcttacgagagaaaataatac

SEQ ID NO: 259622 - DNA, 54 bp, Artificial
  Synthetic oligonucleotide
tgcccccacgtccgtaatggttattacgaaattcgtttatcgtcgtagttggca

SEQ ID NO: 259623 - DNA, 57 bp, Artificial
  Synthetic oligonucleotide
tctggttaaatgctcctcaacccaggccaatggcccccgaatttgccaaccaattga

SEQ ID NO: 259624 - DNA, 56 bp, Artificial
  Synthetic oligonucleotide
gtgtcagttgatccgggttccctaaaatgagtttgagtatcaatacatcctggtaa

SEQ ID NO: 259625 - DNA, 55 bp, Artificial
  Synthetic oligonucleotide
gagcgtaccattctgcgacgcacttattgcacgagtcattaagaagggttttagg

SEQ ID NO: 259626 - DNA, 55 bp, Artificial
  Synthetic oligonucleotide
gaatgctttacttggagtaggacaaggcagtattagaggctcttatcttgtaacc

SEQ ID NO: 259627 - DNA, 59 bp, Artificial
  Synthetic oligonucleotide
cataaacccagtggcacccacagaataatctcctgtaactaaattgcttccatgaccga

SEQ ID NO: 259628 - DNA, 55 bp, Artificial
  Synthetic oligonucleotide
gaataatatagccacagcataagaattgcactagttccaactattacccagtgag

SEQ ID NO: 259629 - DNA, 53 bp, Artificial
  Synthetic oligonucleotide
ctggtgggtaacgctcccactacccctccgatgtcaacggagtactctacttt

SEQ ID NO: 259630 - DNA, 55 bp, Artificial
  Synthetic oligonucleotide
ctccaatggatcggaactagccgcacgtatccaacctctagatgtaggtctaaga

SEQ ID NO: 259631 - DNA, 54 bp, Artificial
  Synthetic oligonucleotide
cgttgttaaccgtccaatagactaccagtcccgaaggaaacgaagctagcatta

SEQ ID NO: 259632 - DNA, 54 bp, Artificial
  Synthetic oligonucleotide
cggttcaggtaatattgttggcttaacgggtttgggaaatgcgatgtataactc

SEQ ID NO: 259633 - DNA, 55 bp, Artificial
  Synthetic oligonucleotide
gagcttagtcacaaagcgaaagctgctcatttggggtcatcactatcgtgcgtag

SEQ ID NO: 259634 - DNA, 55 bp, Artificial
  Synthetic oligonucleotide
gcatcatactggcctcgcggaagtgcttgtaatcctccccttataacttcagctg

SEQ ID NO: 259635 - DNA, 55 bp, Artificial
  Synthetic oligonucleotide
gcgtaggaggaactactaattatgagtttgctagttccaacgaactttggcgtgc

SEQ ID NO: 259636 - DNA, 55 bp, Artificial
  Synthetic oligonucleotide
ggattacctgttttcgccagagtatatactgggcccacagctgagctatattgag

SEQ ID NO: 259637 - DNA, 55 bp, Artificial
  Synthetic oligonucleotide
ggcgaaatcattttatcctcagtctgcaaatgaactttgtcaggttgcaaaagta

SEQ ID NO: 259638 - DNA, 54 bp, Artificial
  Synthetic oligonucleotide
ctaaagatggctacaaacgttacctataatgcgaaactaagaaacactagtatt

SEQ ID NO: 259639 - DNA, 55 bp, Artificial
  Synthetic oligonucleotide
ggtctatttataggaacggatgcatatggagaaaagtgaccagcgttaccgtagg

SEQ ID NO: 259640 - DNA, 55 bp, Artificial
  Synthetic oligonucleotide
ggtggagttatacttccttttggaggctataaaggatctagtatagcaatgatgg

SEQ ID NO: 259641 - DNA, 55 bp, Artificial
  Synthetic oligonucleotide
ggtgggatagtgtcttgcaatctatcaggaccaaggaggtttaagtctggatctt

SEQ ID NO: 259642 - DNA, 55 bp, Artificial
  Synthetic oligonucleotide
gtaatcatgcttgatcgtaaaggagtggtctatagaggtagaactgagggaatgg

SEQ ID NO: 259643 - DNA, 55 bp, Artificial
  Synthetic oligonucleotide
gtacagtaatccatagtgcaaatagtctagctgacgagctagttactcgatctct

SEQ ID NO: 259644 - DNA, 55 bp, Artificial
  Synthetic oligonucleotide
gtagcggacgcgtcccttggtactacaattgaagttcccactattgatggttctc

SEQ ID NO: 259645 - DNA, 55 bp, Artificial
  Synthetic oligonucleotide
taacgttacgcattttggtggagcaccgatcgtactaaatatgattacgggcgca

SEQ ID NO: 259646 - DNA, 51 bp, Artificial
  Synthetic oligonucleotide
tcgtcgttacctaaggtttaaacggtactaaagaatacgaaagtgggatca

SEQ ID NO: 259647 - DNA, 55 bp, Artificial
  Synthetic oligonucleotide
tcaaccgatacacctaacggaagactgttagtgcttactgctgctctagtatgca

SEQ ID NO: 259648 - DNA, 55 bp, Artificial
  Synthetic oligonucleotide
tttgagagcgattgtgatcggacgaggtgaagtccattaggacggagcaacggtc

SEQ ID NO: 259649 - DNA, 59 bp, Artificial
  Synthetic oligonucleotide
ccgatttcgactaaattaccacttttcattactgctactctatcggctgtctcagcaat

SEQ ID NO: 259650 - DNA, 55 bp, Artificial
  Synthetic oligonucleotide
aagacaaagtggtgctcgagtaatggttacagaagcggatccaatttgtgcactc

SEQ ID NO: 259651 - DNA, 55 bp, Artificial
  Synthetic oligonucleotide
ataattagtacgatatattgtgcaacctgtgtccaagttaccgctctcatacccc

SEQ ID NO: 259652 - DNA, 55 bp, Artificial
  Synthetic oligonucleotide
atgacaatccaaactgcggtactaatagaaacactagttgctctaggagctgacg

SEQ ID NO: 259653 - DNA, 55 bp, Artificial
  Synthetic oligonucleotide
cacccggggctgaacactctgtgcggaatatgggtgtcccactcgtctcctccaa

SEQ ID NO: 259654 - DNA, 55 bp, Artificial
  Synthetic oligonucleotide
cagcaggcatagtagtaatagataagtcgcaagatattgttaagtgcatgactag

SEQ ID NO: 259655 - DNA, 55 bp, Artificial
  Synthetic oligonucleotide
caggttatggtccaagcggacttcctcacatagggacatttggagaggtagcgcg

SEQ ID NO: 259656 - DNA, 55 bp, Artificial
  Synthetic oligonucleotide
cagtccggaggcaatcggagattatatagctggtccaaatcatgtactacccaca

SEQ ID NO: 259657 - DNA, 55 bp, Artificial
  Synthetic oligonucleotide
ttgcaacctgacaaagttcatttgcagactggggataaaatgatttcgccatatc

SEQ ID NO: 259658 - DNA, 55 bp, Artificial
  Synthetic oligonucleotide
ccacttacccatgctcctgaacatgttgcgtgagaacccataacataaggctcag

SEQ ID NO: 259659 - DNA, 55 bp, Artificial
  Synthetic oligonucleotide
cccatactgatacacaacgtccctgccgccaatgaacatagtattacaatcatat

SEQ ID NO: 259660 - DNA, 60 bp, Artificial
  Synthetic oligonucleotide
tctatagaactataacccgcagctatagttcctgaggtgcatccataaacaacacagtcg

SEQ ID NO: 259661 - DNA, 55 bp, Artificial
  Synthetic oligonucleotide
ccgactacaatatttgtatgagatgccacgaaattactttggaccataacctcaa

SEQ ID NO: 259662 - DNA, 55 bp, Artificial
  Synthetic oligonucleotide
cctactgccatatgagtagtgtcacaattagaaacccaatatctcatacactcgc

SEQ ID NO: 259663 - DNA, 55 bp, Artificial
  Synthetic oligonucleotide
cgctgtcactgtaactttcagttatactggctctgcacaaacatggacagtacca

SEQ ID NO: 259664 - DNA, 55 bp, Artificial
  Synthetic oligonucleotide
cgctgcaaaaggaattttaacagcaaggggtgggatgactagtcatgctgcagtg

SEQ ID NO: 259665 - DNA, 55 bp, Artificial
  Synthetic oligonucleotide
cgatgctcccgttgctaataacgatactggttcagtaaatgaagacgcaaccttg

SEQ ID NO: 259666 - DNA, 55 bp, Artificial
  Synthetic oligonucleotide
cctgtcctggcatggcacctacttgctcgattaacactgctgaattatctctgtc

SEQ ID NO: 259667 - DNA, 55 bp, Artificial
  Synthetic oligonucleotide
cctgcatcgtaagtagactcagcgtaaccaactgatagactatctgatacagcgt

SEQ ID NO: 259668 - DNA, 55 bp, Artificial
  Synthetic oligonucleotide
tgttcctgatcttaaatctctacctttaacagcataagtgttgctgttcgatggt

SEQ ID NO: 259669 - DNA, 54 bp, Artificial
  Synthetic oligonucleotide
tagctgctgcggagcagttacgtaagtcaggttatcaaattacagtatacgatc

SEQ ID NO: 259670 - DNA, 54 bp, Artificial
  Synthetic oligonucleotide
tttctactcacaagagaggcataccgcctttccattacatggtagcaatggcag

SEQ ID NO: 259671 - DNA, 60 bp, Artificial
  Synthetic oligonucleotide
tctcatctaacaatacatgatccacatatggacattgctcaaacaaagattggtatggtt

SEQ ID NO: 259672 - DNA, 54 bp, Artificial
  Synthetic oligonucleotide
atatcaccaatggatgtgccgactcttgttggttctgagttgggttgaccagta

SEQ ID NO: 259673 - DNA, 54 bp, Artificial
  Synthetic oligonucleotide
gtacctaagtcactggagcctacttttcggactgagacgttcacatctgctctt

SEQ ID NO: 259674 - DNA, 54 bp, Artificial
  Synthetic oligonucleotide
cgaccccttggacatagccaaaggaccacttctagtaatactggctaacccgta

SEQ ID NO: 259675 - DNA, 54 bp, Artificial
  Synthetic oligonucleotide
ccttcgccaccatttgcccaatgagtacaaagacttgctttaactccaatagtg

SEQ ID NO: 259676 - DNA, 54 bp, Artificial
  Synthetic oligonucleotide
tggtttactaattgctacgcctgcaggtagcactgcttacaatctttcagcggg

SEQ ID NO: 259677 - DNA, 54 bp, Artificial
  Synthetic oligonucleotide
gggtcaacctttaagagttgcattgacaggatcaaaatttggaccaggtttata

SEQ ID NO: 259678 - DNA, 54 bp, Artificial
  Synthetic oligonucleotide
gaatgatagccttatctccaaaagccctagagcgactatctgagtatcaaccta

SEQ ID NO: 259679 - DNA, 54 bp, Artificial
  Synthetic oligonucleotide
ttaggtttggatatagggtcaaagattccaataactggtttagttgctactatc

SEQ ID NO: 259680 - DNA, 54 bp, Artificial
  Synthetic oligonucleotide
ccagtacgagaggttttctctataccgtacttatctagaaccttccaaaatgcc

SEQ ID NO: 259681 - DNA, 54 bp, Artificial
  Synthetic oligonucleotide
cccagttgccgttagactaaattgttcttgaacagcccttacacctaataggga

SEQ ID NO: 259682 - DNA, 55 bp, Artificial
  Synthetic oligonucleotide
agtagcgccacaaatactagtgtttcttagtttcgcattataggtaacgtttgta

SEQ ID NO: 259683 - DNA, 53 bp, Artificial
  Synthetic oligonucleotide
ttcgataatgatctgggtcactctctaaaggatagggcccgaaatgcaaggcg

SEQ ID NO: 259684 - DNA, 53 bp, Artificial
  Synthetic oligonucleotide
gactgggaaccgtcgcttgtggacttgcgtccccgaggtaccctagcatgagg

SEQ ID NO: 259685 - DNA, 53 bp, Artificial
  Synthetic oligonucleotide
acgtgtggtggaggctgacgcccacctcgcagcttggaagcggcgtaaactca

SEQ ID NO: 259686 - DNA, 53 bp, Artificial
  Synthetic oligonucleotide
cgctagtcattaatcccaaggagccatatccttgcgcaacagtatcacactga

SEQ ID NO: 259687 - DNA, 53 bp, Artificial
  Synthetic oligonucleotide
atatggtacagatgtaatcgatcaatctgaggatagtgccactcaaagatacg

SEQ ID NO: 259688 - DNA, 53 bp, Artificial
  Synthetic oligonucleotide
ctcacagtttggaatgcaagacgtctctaaacattatcacttaggaagtttcc

SEQ ID NO: 259689 - DNA, 53 bp, Artificial
  Synthetic oligonucleotide
gctgcatcgcagtgtgtcatagctaacattggaacatctaccttcatctcaga

SEQ ID NO: 259690 - DNA, 53 bp, Artificial
  Synthetic oligonucleotide
gaaggagcacacgtgtggtggaggctgacgcccacctcgcagcttggaagcgg

SEQ ID NO: 259691 - DNA, 53 bp, Artificial
  Synthetic oligonucleotide
ccaaaggtggcatttgtatctcactctacatttggccaacctttaacaagtcg

SEQ ID NO: 259692 - DNA, 53 bp, Artificial
  Synthetic oligonucleotide
ggcgtagacgcaagactcggagacggtgccgtgatcccgaaccggaatcaaat

SEQ ID NO: 259693 - DNA, 54 bp, Artificial
  Synthetic oligonucleotide
gtggacttcggaccgagggaaggcaggaaaccccttttcgattgccagaatctc

SEQ ID NO: 259694 - DNA, 52 bp, Artificial
  Synthetic oligonucleotide
ttacgtttagagaccatcttacgatatcttcccatacagaatcaccttgtct

SEQ ID NO: 259695 - DNA, 52 bp, Artificial
  Synthetic oligonucleotide
tcaggcaaagctgcacgtcctaacgcatggccttcactatgctagctcagtt

SEQ ID NO: 259696 - DNA, 52 bp, Artificial
  Synthetic oligonucleotide
tgacgcaagttacggtggagctatatggggaaaagtggttccagaattgact

SEQ ID NO: 259697 - DNA, 52 bp, Artificial
  Synthetic oligonucleotide
aaaatttagactgcttctcgaagctatcgctcagttctgtatctgacgttgc

SEQ ID NO: 259698 - DNA, 51 bp, Artificial
  Synthetic oligonucleotide
cccgaacgaaagaatagcctttagtcacccgtcgatcctatttcacccccg

SEQ ID NO: 259699 - DNA, 52 bp, Artificial
  Synthetic oligonucleotide
ccctactaacacttgggtcagctaagttatgtggctacactaaaggaggtcg

SEQ ID NO: 259700 - DNA, 52 bp, Artificial
  Synthetic oligonucleotide
cctcccagctattaatgcacacgaaacttgctcaccagtagataccagagcg

SEQ ID NO: 259701 - DNA, 52 bp, Artificial
  Synthetic oligonucleotide
gaactagaacgctccattgttgcagaatactatcagcgatgctttggtagtg

SEQ ID NO: 259702 - DNA, 52 bp, Artificial
  Synthetic oligonucleotide
gaggctgacgcccacctcgcagcttggaagcggcgtaaactcactaacccat

SEQ ID NO: 259703 - DNA, 52 bp, Artificial
  Synthetic oligonucleotide
tagaggaacagtgggcgtagacgcaagactcggagacggtgccgtgatcccg

SEQ ID NO: 259704 - DNA, 58 bp, Artificial
  Synthetic oligonucleotide
gtgatgaaccattttcgatacgtcgagccggtaaagaattatatagatcgtctttcgc

SEQ ID NO: 259705 - DNA, 52 bp, Artificial
  Synthetic oligonucleotide
tagttgcttggatacttgttagtgcaacctctggtggttgtctttacacgat

SEQ ID NO: 259706 - DNA, 51 bp, Artificial
  Synthetic oligonucleotide
ggatgttaaacctgaaacaagcgcaggctctaaagtgtagccagaaagtct

SEQ ID NO: 259707 - DNA, 51 bp, Artificial
  Synthetic oligonucleotide
gtggttctgcgggaggattactaatgggttatatagccaatgaaaggcctg

SEQ ID NO: 259708 - DNA, 51 bp, Artificial
  Synthetic oligonucleotide
tacagaaatccttcatttacccgcaactaccatgccttctattaacatcgt

SEQ ID NO: 259709 - DNA, 51 bp, Artificial
  Synthetic oligonucleotide
tcattagagaattctagatcagtaatagcactaataggacccgaagtcgtg

SEQ ID NO: 259710 - DNA, 51 bp, Artificial
  Synthetic oligonucleotide
tttacacgtacccatcacctgattatgtgtggcaacatgatatgagtaaac

SEQ ID NO: 259711 - DNA, 51 bp, Artificial
  Synthetic oligonucleotide
aagactcggagacggtgccgtgatcccgaaccggaatcaaatagccggggg

SEQ ID NO: 259712 - DNA, 51 bp, Artificial
  Synthetic oligonucleotide
tttttccacctctaactactgctagggcaattgatttatttaaattagggc

SEQ ID NO: 259713 - DNA, 50 bp, Artificial
  Synthetic oligonucleotide
gcaaggtatatagcgccctttatatatggtcaactactattctacctgac

SEQ ID NO: 259714 - DNA, 50 bp, Artificial
  Synthetic oligonucleotide
gaacaagcagttacaacattatcccagttggtttgtccacctttagatct

SEQ ID NO: 259715 - DNA, 55 bp, Artificial
  Synthetic oligonucleotide
cagggcaggttaaccgccgatgtggtgcaaagctgtgtcgtaactggtgagccat

SEQ ID NO: 259716 - DNA, 55 bp, Artificial
  Synthetic oligonucleotide
cgcattagcgccataaacagcaccactgctaagatataccacccgacaattaggg

SEQ ID NO: 259717 - DNA, 55 bp, Artificial
  Synthetic oligonucleotide
cggaagccaatgggtgccaactaataacaattggggtgcgcgtgggccagtgacc

SEQ ID NO: 259718 - DNA, 55 bp, Artificial
  Synthetic oligonucleotide
ctgttaccacgtaataggccacggcgataaagacaaccgacgaaccaatggtgcc

SEQ ID NO: 259719 - DNA, 55 bp, Artificial
  Synthetic oligonucleotide
gaagcacgacgcgaccccgattgcccacagttttgcgacgcctgtttcacgggtg

SEQ ID NO: 259720 - DNA, 55 bp, Artificial
  Synthetic oligonucleotide
gaccgctttacattggcacaggttacatcgaggccagacgaattacgcgcattat

SEQ ID NO: 259721 - DNA, 55 bp, Artificial
  Synthetic oligonucleotide
tgcttcggtcttgcaaacagcaacgacggatgatgtgttgctactggcggatacc

SEQ ID NO: 259722 - DNA, 55 bp, Artificial
  Synthetic oligonucleotide
tcgcccctgtgtcgcccctgtgtcgcccctgtgttgcctcatatgctaccctgat

SEQ ID NO: 259723 - DNA, 55 bp, Artificial
  Synthetic oligonucleotide
tattatccgtcatcattgcgatgacctcattgtaaaaggctgtatgcatgtggtc

SEQ ID NO: 259724 - DNA, 55 bp, Artificial
  Synthetic oligonucleotide
gtgccgctgctgactctatagacaccgcctataagcggattagcaaccacacaga

SEQ ID NO: 259725 - DNA, 55 bp, Artificial
  Synthetic oligonucleotide
gcttatcgctgtgattgtgggatgcatttcgctgcgtgatcgattcaaccaggtg

SEQ ID NO: 259726 - DNA, 55 bp, Artificial
  Synthetic oligonucleotide
attgatgcactgatgacaacgaatgcttgtgcatagggcaactcgtcgctaagcg

SEQ ID NO: 259727 - DNA, 55 bp, Artificial
  Synthetic oligonucleotide
gctgtcgcgcagcaacccaaaacgcatcaagtccggccattcacggtatatgcgc

SEQ ID NO: 259728 - DNA, 55 bp, Artificial
  Synthetic oligonucleotide
gcaaagtttgtctaatggccttgacattgcaacttccaggtgattctctgcatct

SEQ ID NO: 259729 - DNA, 55 bp, Artificial
  Synthetic oligonucleotide
agagctctcatcattaatctggtgacgtaacacaatctcgtagctatctgctacc

SEQ ID NO: 259730 - DNA, 55 bp, Artificial
  Synthetic oligonucleotide
gagaccgcacagccttagtatggagataaaccgtatggaaaggatcccacgcatt

SEQ ID NO: 259731 - DNA, 55 bp, Artificial
  Synthetic oligonucleotide
gaccttaagccggattgcatgatatgccgaacagatatttagcgccacaagcagg

SEQ ID NO: 259732 - DNA, 55 bp, Artificial
  Synthetic oligonucleotide
agcccgccactaggatttattgatggcgctttaacgcaactggctaatcccaaag

SEQ ID NO: 259733 - DNA, 52 bp, Artificial
  Synthetic oligonucleotide
ccgccgcaccagctatgctgacctcgattagggtttcattctcaacgattgt

SEQ ID NO: 259734 - DNA, 52 bp, Artificial
  Synthetic oligonucleotide
catgcatggtattgggccggtgcgaatgaacgcgcatcacattgtcaacagt

SEQ ID NO: 259735 - DNA, 51 bp, Artificial
  Synthetic oligonucleotide
ggcaaaagaaccagtcgatcgttgttgtcccttcacaggcaaaatgatgtc

SEQ ID NO: 259736 - DNA, 51 bp, Artificial
  Synthetic oligonucleotide
accaagcgcatagcggaacaacccggtttccatatccaacccgatagacca

SEQ ID NO: 259737 - DNA, 55 bp, Artificial
  Synthetic oligonucleotide
cccgttttaagagaggtcagctcacaaggatggccgaaacaggatccgacccgaa

SEQ ID NO: 259738 - DNA, 50 bp, Artificial
  Synthetic oligonucleotide
gtaaactgcctatcacatatgcagagattgtgtcgtcatagtaggagaat

SEQ ID NO: 259739 - DNA, 50 bp, Artificial
  Synthetic oligonucleotide
ccagtgaacatgacaccgccagggtcggcctcaccccatcctgagacgcc

SEQ ID NO: 259740 - DNA, 50 bp, Artificial
  Synthetic oligonucleotide
ccagctagcatttccaagcgcggaagcctgtccgtgtcggctggtatggt

SEQ ID NO: 259741 - DNA, 50 bp, Artificial
  Synthetic oligonucleotide
ccaagcgtcttacggctggcaatgcggattgagtccccttcgccaccatg

SEQ ID NO: 259742 - DNA, 50 bp, Artificial
  Synthetic oligonucleotide
aacacgggcacccgcaatcatatcatccatgctacggcgcgacaggccac

SEQ ID NO: 259743 - DNA, 50 bp, Artificial
  Synthetic oligonucleotide
aactgcctagctggcgcggtgaccagacggaatggcatttgcggtgtttc

SEQ ID NO: 259744 - DNA, 50 bp, Artificial
  Synthetic oligonucleotide
aagaaccacgccttgctgctatcatcgcggctgttggcccccgtgtagag

SEQ ID NO: 259745 - DNA, 50 bp, Artificial
  Synthetic oligonucleotide
aagccagcacgtgcgagtgagccaagatgccggttgcgtaaaacctgagg

SEQ ID NO: 259746 - DNA, 50 bp, Artificial
  Synthetic oligonucleotide
aatcgggccattgaccacgcgggtgatcccaccactgcccagaataggca

SEQ ID NO: 259747 - DNA, 50 bp, Artificial
  Synthetic oligonucleotide
accccagcgcaactggcttgccgaaaaccgggcatcttttccggcacttc

SEQ ID NO: 259748 - DNA, 55 bp, Artificial
  Synthetic oligonucleotide
ccgcataggcaaagcaatttgtgaacatccgggcatagccaagatatcccttaca

SEQ ID NO: 259749 - DNA, 50 bp, Artificial
  Synthetic oligonucleotide
acgctccgacgactttgccaacccatcaaacgcccgcgatccgagagtcg

SEQ ID NO: 259750 - DNA, 50 bp, Artificial
  Synthetic oligonucleotide
acggcaagctgggtagcgggacctagtgcgggacgctgggcagccattat

SEQ ID NO: 259751 - DNA, 50 bp, Artificial
  Synthetic oligonucleotide
agcaacgatggagatgcgctattcccggcgattgcgattgccccacgtgt

SEQ ID NO: 259752 - DNA, 50 bp, Artificial
  Synthetic oligonucleotide
agcccgacgtggcccgccaagggatgacgacaattcatggctacaagtga

SEQ ID NO: 259753 - DNA, 50 bp, Artificial
  Synthetic oligonucleotide
agccggggcatctagtcagctaacagcgccgaaacaccgccccctgctag

SEQ ID NO: 259754 - DNA, 50 bp, Artificial
  Synthetic oligonucleotide
agcgaagaaaccagtgccgcctacagcccctgaagccagctttgcggctg

SEQ ID NO: 259755 - DNA, 50 bp, Artificial
  Synthetic oligonucleotide
agcgcgcgatgtcgggctttcggcctttcatgaccgctggcttgataatc

SEQ ID NO: 259756 - DNA, 50 bp, Artificial
  Synthetic oligonucleotide
agcgggacctagtgcgggacgctgggcagccattatatggattgccctac

SEQ ID NO: 259757 - DNA, 50 bp, Artificial
  Synthetic oligonucleotide
aggtatggtaaggcggcggtgacgcaacctgccattccagcgttgtagcg

SEQ ID NO: 259758 - DNA, 50 bp, Artificial
  Synthetic oligonucleotide
agtcatggcggcagtgcggtcaaatgtggcaccaagctcgtgaaacccat

SEQ ID NO: 259759 - DNA, 55 bp, Artificial
  Synthetic oligonucleotide
ccgctaggtgtcaccgttacccgtttgcttgatccctatatacggccattctggg

SEQ ID NO: 259760 - DNA, 50 bp, Artificial
  Synthetic oligonucleotide
agtgacgcggtcaactagttgcttgggtacaacccgggctagcgtgtccg

SEQ ID NO: 259761 - DNA, 50 bp, Artificial
  Synthetic oligonucleotide
atccggcgcacgggaaacgcggcatccattccctctataggcaagctcac

SEQ ID NO: 259762 - DNA, 50 bp, Artificial
  Synthetic oligonucleotide
atgaagggccagctagcatttccaagcgcggaagcctgtccgtgtcggct

SEQ ID NO: 259763 - DNA, 50 bp, Artificial
  Synthetic oligonucleotide
atgactggcgcccgggcacttgatgtatcttcaggcgttgagtcggcgct

SEQ ID NO: 259764 - DNA, 50 bp, Artificial
  Synthetic oligonucleotide
atgcggtgcgatgcgtgccccctcaaaacaaaccaagcgctgtcgaaacg

SEQ ID NO: 259765 - DNA, 50 bp, Artificial
  Synthetic oligonucleotide
atgcggttatgcggcggctaacacgcgagggcgatacccgttttgaaacg

SEQ ID NO: 259766 - DNA, 50 bp, Artificial
  Synthetic oligonucleotide
attatggcgaacggcaagctgggtagcgggacctagtgcgggacgctggg

SEQ ID NO: 259767 - DNA, 50 bp, Artificial
  Synthetic oligonucleotide
attgcggctggttgtgacccagcaattagtcaagcgcaagggaggcgggc

SEQ ID NO: 259768 - DNA, 50 bp, Artificial
  Synthetic oligonucleotide
cacacgccagcttgttggccggacctgtcatcacatgcaacgccccttgg

SEQ ID NO: 259769 - DNA, 50 bp, Artificial
  Synthetic oligonucleotide
cacccatctggcggttgcgccgtaatgtgtcggcatggggaagcatcgat

SEQ ID NO: 259770 - DNA, 55 bp, Artificial
  Synthetic oligonucleotide
ccggttcaagatatcacgctgttcataggatttgtagcgccgtagattttcgcgg

SEQ ID NO: 259771 - DNA, 50 bp, Artificial
  Synthetic oligonucleotide
caggcgtatagggaatcgggccattgaccacgcgggtgatcccaccactg

SEQ ID NO: 259772 - DNA, 55 bp, Artificial
  Synthetic oligonucleotide
atagcaacgcaagggctggtaagacgggtaatggataatgcggtaatttagttgg

SEQ ID NO: 259773 - DNA, 55 bp, Artificial
  Synthetic oligonucleotide
cgaataatagcgggatcagatttgtcagacgcatatggttctcgtttcggcttag

SEQ ID NO: 259774 - DNA, 55 bp, Artificial
  Synthetic oligonucleotide
cgatgcaccgccccagctttaaactcgccagctactagggcgtcatcaggcagaa

SEQ ID NO: 259775 - DNA, 60 bp, Artificial
  Synthetic oligonucleotide
cagtggctaataagctagtatttcccatacgaactacagctgatccattagctttacgag

SEQ ID NO: 259776 - DNA, 60 bp, Artificial
  Synthetic oligonucleotide
gcatagtattgctgtactatctattaacgaatccgctaagccagtaattaaatttgtggc

SEQ ID NO: 259777 - DNA, 50 bp, Artificial
  Synthetic oligonucleotide
ccctggttacaagaattaccggaccctataacacgtaccacatgggagaa

SEQ ID NO: 259778 - DNA, 50 bp, Artificial
  Synthetic oligonucleotide
aaatccattagaaggaataccatttctgtttctgggatgtcctccagatg

SEQ ID NO: 259779 - DNA, 50 bp, Artificial
  Synthetic oligonucleotide
atccttatccaagaaggaactttaaagttaggagattatgtagtagcggg

SEQ ID NO: 259780 - DNA, 50 bp, Artificial
  Synthetic oligonucleotide
gacattcctacaattacccgtttacgtttaacattcatctttctgatgaa

SEQ ID NO: 259781 - DNA, 50 bp, Artificial
  Synthetic oligonucleotide
ccaggagaactaaaaattaccataattagagaaaatcaagttataaactt

SEQ ID NO: 259782 - DNA, 50 bp, Artificial
  Synthetic oligonucleotide
catattcttttaacccagtagcatacagcattgcttgtgcagcaggtaaa

SEQ ID NO: 259783 - DNA, 50 bp, Artificial
  Synthetic oligonucleotide
ctcgaaaagcattaactagagcttctaatctcttaataagacattttcaa

SEQ ID NO: 259784 - DNA, 50 bp, Artificial
  Synthetic oligonucleotide
ctactaaaattggtagtagtatgaagagtgtaggtgagttaatgtctata

SEQ ID NO: 259785 - DNA, 60 bp, Artificial
  Synthetic oligonucleotide
gcgtatatctataaatagatcagcagaagctatgactatatttgcggtaatacaggcagc

SEQ ID NO: 259786 - DNA, 53 bp, Artificial
  Synthetic oligonucleotide
ggccgaacctccccgacgatgtgagctcgggggggagactagccggtgacccc

SEQ ID NO: 259787 - DNA, 54 bp, Artificial
  Synthetic oligonucleotide
gtactccgtcgcaagactaaatggtaaccaataaatacgtagtacaataaagtc

SEQ ID NO: 259788 - DNA, 55 bp, Artificial
  Synthetic oligonucleotide
gtaggtagcgtaacgctacttatgtaagtaggtagcgtaacgctacttatgtaag

SEQ ID NO: 259789 - DNA, 60 bp, Artificial
  Synthetic oligonucleotide
gtcatactactaaatttacattaacatgtgatcatcgaatgatagatggtgcagtaggaa

SEQ ID NO: 259790 - DNA, 60 bp, Artificial
  Synthetic oligonucleotide
taaacctttttatatgcgtctaaatgatgataatcaaactgtagctgctatggatgtaat

SEQ ID NO: 259791 - DNA, 56 bp, Artificial
  Synthetic oligonucleotide
taagtaggtagcgtaacgctacttacatacttatgtaagtaggtagcgtaacgcta

SEQ ID NO: 259792 - DNA, 54 bp, Artificial
  Synthetic oligonucleotide
tagaaaatctaactgattggaatttatcgcgttctagattttggggaatacctt

SEQ ID NO: 259793 - DNA, 57 bp, Artificial
  Synthetic oligonucleotide
tagatccaattatgcgtgatatagagtgtttttttacaaatactcaaaaacgagtaa

SEQ ID NO: 259794 - DNA, 54 bp, Artificial
  Synthetic oligonucleotide
ccgttgcacctactctggaaaccgaaattccttcatttatagccggtcttattc

SEQ ID NO: 259795 - DNA, 60 bp, Artificial
  Synthetic oligonucleotide
tatggggcataaagtaaacacattatctaatagattaggattaattgtaggatggcaatc

SEQ ID NO: 259796 - DNA, 60 bp, Artificial
  Synthetic oligonucleotide
tatttggaattctattggatctcatcatgatgagattgaaatgaaatccttattatctcc

SEQ ID NO: 259797 - DNA, 60 bp, Artificial
  Synthetic oligonucleotide
tcatctcatttagaatctgtggatcctattgtagaaggaattgttcgtgctaaaattgat

SEQ ID NO: 259798 - DNA, 60 bp, Artificial
  Synthetic oligonucleotide
tccatagatatacaacgtaccgtacattctccaatatgctgttggacctcaagtataatt

SEQ ID NO: 259799 - DNA, 56 bp, Artificial
  Synthetic oligonucleotide
tgaggttacgaagttgtgaaactgttgcgtgcttacggaattgcacgttaaatttg

SEQ ID NO: 259800 - DNA, 57 bp, Artificial
  Synthetic oligonucleotide
tggcacccggcgtacgggtgagtaatacatacgtaactttccttatgctgaaggata

SEQ ID NO: 259801 - DNA, 59 bp, Artificial
  Synthetic oligonucleotide
tgggggttcaatcccccctcacgctactggattaaaatatatgatctatggatagatat

SEQ ID NO: 259802 - DNA, 60 bp, Artificial
  Synthetic oligonucleotide
tttgttgagctccattcattattccagctattgaatttgcagtcgataatcccatatcat

SEQ ID NO: 259803 - DNA, 55 bp, Artificial
  Synthetic oligonucleotide
aaagtattggtagatctctataagagttaatccaacgtttataagaattccagat

SEQ ID NO: 259804 - DNA, 59 bp, Artificial
  Synthetic oligonucleotide
aacctcttttatatcaagtcgctacatttgggcttgaacctgattccatagcaaaatca

SEQ ID NO: 259805 - DNA, 60 bp, Artificial
  Synthetic oligonucleotide
cctaataaataattggctcctactacaatgcctgcggcactagctgcactagaacctata

SEQ ID NO: 259806 - DNA, 59 bp, Artificial
  Synthetic oligonucleotide
aagtgcttatataattacctgatgaggtacatgtatctgataatttcttaccaagaaat

SEQ ID NO: 259807 - DNA, 60 bp, Artificial
  Synthetic oligonucleotide
aatattggccatgcgtggcatgtataaggatgaacaattggtgaaaagtgtagacagatt

SEQ ID NO: 259808 - DNA, 59 bp, Artificial
  Synthetic oligonucleotide
agatatggcaatatgtctaggtatggaccccaaaatccaatccatacgtggaacagtaa

SEQ ID NO: 259809 - DNA, 60 bp, Artificial
  Synthetic oligonucleotide
aggatatatgggagctccagagtggattgctaaagcttgtgataaaatacaaggtcaaac

SEQ ID NO: 259810 - DNA, 60 bp, Artificial
  Synthetic oligonucleotide
aggttatcctacttgttcagatcgtgttcttgcaagccgtcttggagtagcttctgttga

SEQ ID NO: 259811 - DNA, 60 bp, Artificial
  Synthetic oligonucleotide
ataggatctaccatcccacatccaatgatttcaagccatttattattccataatatatct

SEQ ID NO: 259812 - DNA, 60 bp, Artificial
  Synthetic oligonucleotide
atgcatacaggttctgatatcctagatattggagtttttttacaaggagctgatatttta

SEQ ID NO: 259813 - DNA, 60 bp, Artificial
  Synthetic oligonucleotide
atgtaacatgtcttatgtaacatgtcttatgtaacatgtcttatgtaacatgtcttatgt

SEQ ID NO: 259814 - DNA, 58 bp, Artificial
  Synthetic oligonucleotide
caaactgtactttatttctgttgcacaattcctcatctcacgatggacggttattacc

SEQ ID NO: 259815 - DNA, 60 bp, Artificial
  Synthetic oligonucleotide
caatcattgtagctgcattaattttcattctatatggaccagaaattaaatcagccgctt

SEQ ID NO: 259816 - DNA, 60 bp, Artificial
  Synthetic oligonucleotide
cggtatatatagcatttcacaacacagagtttacaatatttcactacagccaaactgtac

SEQ ID NO: 259817 - DNA, 59 bp, Artificial
  Synthetic oligonucleotide
attccacaccatttaagagattcaattatataattttcagcaccaaacatcaatcttga

SEQ ID NO: 259818 - DNA, 59 bp, Artificial
  Synthetic oligonucleotide
ggcataaatctagctaaaagtatagctgtaaattctgtatctgaggctatagatgcatc

SEQ ID NO: 259819 - DNA, 55 bp, Artificial
  Synthetic oligonucleotide
tttccttttctaggcttgaagggtcagacccaatattaggtgtagatatggtttc

SEQ ID NO: 259820 - DNA, 59 bp, Artificial
  Synthetic oligonucleotide
ggatctatcataccacatccaagaatttcaagccatttattattccataatatatctaa

SEQ ID NO: 259821 - DNA, 59 bp, Artificial
  Synthetic oligonucleotide
tgcatctaggaaatggatctagtataacagctgtagattctggcgtatctgtagaaacg

SEQ ID NO: 259822 - DNA, 48 bp, Artificial
  Synthetic oligonucleotide
gttgaaatttgggggttgaaatttgggggttgaaatttgggggttgaa

SEQ ID NO: 259823 - DNA, 52 bp, Artificial
  Synthetic oligonucleotide
taaaaaaaaccttgtacgcctttcccaacgtattatattagcccattgatta

SEQ ID NO: 259824 - DNA, 58 bp, Artificial
  Synthetic oligonucleotide
acgcattattattaatctctgacatttcagatggatctttacgtgatgctttatctct

SEQ ID NO: 259825 - DNA, 58 bp, Artificial
  Synthetic oligonucleotide
catcagttatatccatagatatacaacgtacagtacagtctccaatatgttgttggac

SEQ ID NO: 259826 - DNA, 58 bp, Artificial
  Synthetic oligonucleotide
aaattgaatatgggtattggcaccaatcgctacatgcgggcctacaatggcatttttt

SEQ ID NO: 259827 - DNA, 57 bp, Artificial
  Synthetic oligonucleotide
cttataattatagcggtatttagattaccatctaatccaaaaaatccgattgctcca

SEQ ID NO: 259828 - DNA, 58 bp, Artificial
  Synthetic oligonucleotide
ttacagagattattccatctcccccccctagaactataggtaatcctattgtatcatc

SEQ ID NO: 259829 - DNA, 57 bp, Artificial
  Synthetic oligonucleotide
ctcagacccattttcattaatctcagacccattttcattaatctcagacccattttc

SEQ ID NO: 259830 - DNA, 57 bp, Artificial
  Synthetic oligonucleotide
gtattatacgaactgttgatacaggcccctgaaaagatatttctgatatagaaaccg

SEQ ID NO: 259831 - DNA, 56 bp, Artificial
  Synthetic oligonucleotide
gctagaagataacaagataatgcattaacgcaagaaattccaactccatgtaaccc

SEQ ID NO: 259832 - DNA, 56 bp, Artificial
  Synthetic oligonucleotide
ccaattcacattggtcatttatcaggagtttaccttccagcagatatatttgtacg

SEQ ID NO: 259833 - DNA, 55 bp, Artificial
  Synthetic oligonucleotide
cccaattggggtgatacattgtaattttaacctaagaggagatgattcggataaa

SEQ ID NO: 259834 - DNA, 56 bp, Artificial
  Synthetic oligonucleotide
cctatttcagactcacatgtaataggagatcttacttcaagactatctagttctgc

SEQ ID NO: 259835 - DNA, 55 bp, Artificial
  Synthetic oligonucleotide
ctttatttcctgaacgagagttcaaaatatatgttccagactttaattggcccga

SEQ ID NO: 259836 - DNA, 55 bp, Artificial
  Synthetic oligonucleotide
ggatctagtataacagctgtagattctggcgtatctgtagaaacgtctatgggat

SEQ ID NO: 259837 - DNA, 55 bp, Artificial
  Synthetic oligonucleotide
gcgatagtcggtagaattagacgcgaacccgggtgatctacctatgggcaggttg

SEQ ID NO: 259838 - DNA, 56 bp, Artificial
  Synthetic oligonucleotide
cttatggcccctgtaggaagtttagaatctttagaagccgctattaattctggagc

SEQ ID NO: 259839 - DNA, 55 bp, Artificial
  Synthetic oligonucleotide
ccgatatatagcataactcgaatgaaggcctccgccagcaacgaagagtcaacac

SEQ ID NO: 259840 - DNA, 55 bp, Artificial
  Synthetic oligonucleotide
gtatttcccatacgaactacagctgatccattagctttacgagctaattctccag

SEQ ID NO: 259841 - DNA, 55 bp, Artificial
  Synthetic oligonucleotide
gtgacattccagggcctgaagttccagtaatacctaaatgacctgaataagatgc

SEQ ID NO: 259842 - DNA, 55 bp, Artificial
  Synthetic oligonucleotide
agtatgggagatggaagacaatttgataatccctggttacaagaattaccggacc

SEQ ID NO: 259843 - DNA, 55 bp, Artificial
  Synthetic oligonucleotide
acaccagccgatcctaacgctgggcctataggaggtgctggatttgctagtccac

SEQ ID NO: 259844 - DNA, 55 bp, Artificial
  Synthetic oligonucleotide
tgcagtagctggcccaaaaggattattagtcccagttattagaaatgctgatact

SEQ ID NO: 259845 - DNA, 55 bp, Artificial
  Synthetic oligonucleotide
cagattatatggagatttgggctcctattcatcattggcttgaatcttggggaga

SEQ ID NO: 259846 - DNA, 55 bp, Artificial
  Synthetic oligonucleotide
ctgttgcacaattcctcatctcacgatggacggttattacccgatgtgttcccct

SEQ ID NO: 259847 - DNA, 55 bp, Artificial
  Synthetic oligonucleotide
cttaacccgttatgctagaatgaagggatataatgcatgttgggtgcctggttta

SEQ ID NO: 259848 - DNA, 54 bp, Artificial
  Synthetic oligonucleotide
ctccacctcatggggtaagtcataatgaaagggtaaaatagggtcaagctaaac

SEQ ID NO: 259849 - DNA, 58 bp, Artificial
  Synthetic oligonucleotide
cttgtctcaagttcaatctgtgttaccgaagagatataagataaagcttcccctctaa

SEQ ID NO: 259850 - DNA, 55 bp, Artificial
  Synthetic oligonucleotide
gaaacagcagcagaagctactaatccagctaatccatcaggtaatacatttctat

SEQ ID NO: 259851 - DNA, 54 bp, Artificial
  Synthetic oligonucleotide
gaaccgttatatcctggttggggagtaacaattggaaatacacttcgaagagta

SEQ ID NO: 259852 - DNA, 55 bp, Artificial
  Synthetic oligonucleotide
cggcctcctctccaatctctaattgatggagaatcaacaactttctgagtcgctg

SEQ ID NO: 259853 - DNA, 55 bp, Artificial
  Synthetic oligonucleotide
cggatggtgtcttcaaactgtatggcaactataggatcaattgctaattctgatc

SEQ ID NO: 259854 - DNA, 55 bp, Artificial
  Synthetic oligonucleotide
gagctcctggatctataggagcaggttctgacccttcaagggtatttaaaggtac

SEQ ID NO: 259855 - DNA, 55 bp, Artificial
  Synthetic oligonucleotide
gatagatacttgggcaactataggtagttgtgcccaaattgggaatagagtacat

SEQ ID NO: 259856 - DNA, 55 bp, Artificial
  Synthetic oligonucleotide
gatcagcagaagctatgactatatttgcggtaatacaggcagctttatttccgat

SEQ ID NO: 259857 - DNA, 54 bp, Artificial
  Synthetic oligonucleotide
caatacctcatgaacaagaagccaaatatggaggagcccgtgtttttatttgtc

SEQ ID NO: 259858 - DNA, 53 bp, Artificial
  Synthetic oligonucleotide
ccctctaaatttgaggttgaggactctaaatttgaggttgaggactctaaatt

SEQ ID NO: 259859 - DNA, 54 bp, Artificial
  Synthetic oligonucleotide
cacagaacaccaatagcgaaagcaagttactaagcctatactgacgcggagggc

SEQ ID NO: 259860 - DNA, 58 bp, Artificial
  Synthetic oligonucleotide
gaaattagattgtttaacaattgcttcgcctgatatgggaggagtaaaacgtgcaaga

SEQ ID NO: 259861 - DNA, 53 bp, Artificial
  Synthetic oligonucleotide
ggaaatttaactcaagatagtggaaaatatcaatgggggacaacagtcaagta

SEQ ID NO: 259862 - DNA, 53 bp, Artificial
  Synthetic oligonucleotide
atcacgtattgaatttagacggttagcgtctcaaggttttataccaggtattg

SEQ ID NO: 259863 - DNA, 53 bp, Artificial
  Synthetic oligonucleotide
ataagtgctgaagaagaaattagggcaacaagaggggtagaaagcatattatg

SEQ ID NO: 259864 - DNA, 53 bp, Artificial
  Synthetic oligonucleotide
ttataatgcaccaataattaattggccacgtttagtaagactatcatggtgct

SEQ ID NO: 259865 - DNA, 53 bp, Artificial
  Synthetic oligonucleotide
tataactgctactaaactacgtttagtaggtgataatattaaaaatgggattt

SEQ ID NO: 259866 - DNA, 53 bp, Artificial
  Synthetic oligonucleotide
ctgaagcacctactcttgagaccgatattcctgaatttatagcaggacggatt

SEQ ID NO: 259867 - DNA, 52 bp, Artificial
  Synthetic oligonucleotide
ttaatcctataggctttgactcatttggattacccacagaacaatattcaat

SEQ ID NO: 259868 - DNA, 52 bp, Artificial
  Synthetic oligonucleotide
ctacgatcatacttagcttgaacacgtacttttttagttaatctacgtacag

SEQ ID NO: 259869 - DNA, 52 bp, Artificial
  Synthetic oligonucleotide
gccacatctatcgcagattaatcctttataacgtttttttttatatttccca

SEQ ID NO: 259870 - DNA, 52 bp, Artificial
  Synthetic oligonucleotide
atgtaggttgctttagctgttagtacgtagtggacttgaagatacgatgatt

SEQ ID NO: 259871 - DNA, 60 bp, Artificial
  Synthetic oligonucleotide
gcagaaagtgtactgacatacaatatgccaagataaactatacaataactactgctagac

SEQ ID NO: 259872 - DNA, 52 bp, Artificial
  Synthetic oligonucleotide
ctttcagagtgacctcctactataggaacacgtatagaagtagaagtaattc

SEQ ID NO: 259873 - DNA, 52 bp, Artificial
  Synthetic oligonucleotide
attttgagcttctggagtaatatgacctactacaaatccatgagatcctcct

SEQ ID NO: 259874 - DNA, 52 bp, Artificial
  Synthetic oligonucleotide
gtccgtatttagctatgactggggaaataacccttagagggaagattcttcc

SEQ ID NO: 259875 - DNA, 52 bp, Artificial
  Synthetic oligonucleotide
ctgtatctagaccaaatgctattgatctaatagaattagtaattgataatcc

SEQ ID NO: 259876 - DNA, 51 bp, Artificial
  Synthetic oligonucleotide
ataagcattagttattgcttcaacaatagattcactaattgtaggatgtgg

SEQ ID NO: 259877 - DNA, 51 bp, Artificial
  Synthetic oligonucleotide
cgcttatgaaatttcggtactggtttatatcgctatgcctgcttggttaat

SEQ ID NO: 259878 - DNA, 51 bp, Artificial
  Synthetic oligonucleotide
cgcttcaccactgaattacaacgtacaaaagtacaaaacccaatagttagt

SEQ ID NO: 259879 - DNA, 50 bp, Artificial
  Synthetic oligonucleotide
cctatttaagatttagaacaagtatatttagttcaattttgagaattcgt

SEQ ID NO: 259880 - DNA, 50 bp, Artificial
  Synthetic oligonucleotide
tttgatgaatcaggatgtaatattccatgtactataatagaagctggacc

SEQ ID NO: 259881 - DNA, 50 bp, Artificial
  Synthetic oligonucleotide
ttgcgagaatagctcatttggtagagtactaccttgccaaggtagtggta

SEQ ID NO: 259882 - DNA, 55 bp, Artificial
  Synthetic oligonucleotide
caaggcccctcacgcctaattctatctgccacgaaacaagctcccggaacgtttc

SEQ ID NO: 259883 - DNA, 55 bp, Artificial
  Synthetic oligonucleotide
ctagatttgatctctacacgacctccaatagtgcgacttagacctctcatccatc

SEQ ID NO: 259884 - DNA, 55 bp, Artificial
  Synthetic oligonucleotide
gaacgccacgcatgccctcggtatacaggctccttggcattatgtgagctccagg

SEQ ID NO: 259885 - DNA, 55 bp, Artificial
  Synthetic oligonucleotide
gagcacggctctgctgccaagacccaatgcgttattcgcggagctcacgtggcga

SEQ ID NO: 259886 - DNA, 55 bp, Artificial
  Synthetic oligonucleotide
ttagcaccgcaggctcttactacctcaacaccacaccaataagccgcgccatcat

SEQ ID NO: 259887 - DNA, 55 bp, Artificial
  Synthetic oligonucleotide
tagtacgtctaggcgctacaccactacgctagacgttgctacaaccgcatgcggt

SEQ ID NO: 259888 - DNA, 55 bp, Artificial
  Synthetic oligonucleotide
gtctgcggtccttagcgctgtgtctgcaagccctttcctagcaccatgcgctgac

SEQ ID NO: 259889 - DNA, 55 bp, Artificial
  Synthetic oligonucleotide
ggggactggttcgccacgctaatcagcagagacttacccgcatatgctagaaagg

SEQ ID NO: 259890 - DNA, 55 bp, Artificial
  Synthetic oligonucleotide
ggcatggtagtgctaatgcaatggggctgctgggctatgcaccaacggattacac

SEQ ID NO: 259891 - DNA, 55 bp, Artificial
  Synthetic oligonucleotide
aatgtcccgcagcattgaactctcgacagtgaccctgccaactccgccgaccctc

SEQ ID NO: 259892 - DNA, 55 bp, Artificial
  Synthetic oligonucleotide
ggatagcatagctacggccaaagttgcggaggcgcttctaatggtgtcgcgcagg

SEQ ID NO: 259893 - DNA, 55 bp, Artificial
  Synthetic oligonucleotide
caccctgtggcgatataatgtacctcctactaccgcttccgtacagcaccagagc

SEQ ID NO: 259894 - DNA, 55 bp, Artificial
  Synthetic oligonucleotide
gcgtaagagatgcgccatgccttacgtccttagccagagcgacgcttccagggaa

SEQ ID NO: 259895 - DNA, 55 bp, Artificial
  Synthetic oligonucleotide
gccgtgcatctttactccaatcggccggctaacgcgctgtcataccgcgcacctg

SEQ ID NO: 259896 - DNA, 55 bp, Artificial
  Synthetic oligonucleotide
gcactatgccaaggctgactgcctccccatgtagccagtgtttgtagcgcatgcc

SEQ ID NO: 259897 - DNA, 55 bp, Artificial
  Synthetic oligonucleotide
gcaacgcaacctgtatgctgagttcaccctggccctaaacctctcagcccacggt

SEQ ID NO: 259898 - DNA, 53 bp, Artificial
  Synthetic oligonucleotide
agggctgccgtaaggtctggcgtaaagcccatagtgggatgcaacttgctact

SEQ ID NO: 259899 - DNA, 53 bp, Artificial
  Synthetic oligonucleotide
cacgcttgccaaccgtgcttagcgtacctttgtgctcctcagttacgctttgt

SEQ ID NO: 259900 - DNA, 52 bp, Artificial
  Synthetic oligonucleotide
gagcgcatcctgaaggcctcggttcactgactgtatgtactcccgtggtatc

SEQ ID NO: 259901 - DNA, 52 bp, Artificial
  Synthetic oligonucleotide
tgaaccatacaggatggtgcagtagtgattcgctacatcgggcggagcgagc

SEQ ID NO: 259902 - DNA, 51 bp, Artificial
  Synthetic oligonucleotide
agtgtagcagcgcctttgatggtatgccgcctccgttcagccaagcagggg

SEQ ID NO: 259903 - DNA, 51 bp, Artificial
  Synthetic oligonucleotide
agttgcaggtagtctgatgggactcgatgccacacctactcggggctcagt

SEQ ID NO: 259904 - DNA, 55 bp, Artificial
  Synthetic oligonucleotide
cccctggctatgtgcgcggatatgtagtaacctatgctaccagccgcccctgtga

SEQ ID NO: 259905 - DNA, 51 bp, Artificial
  Synthetic oligonucleotide
tcttgtggcggtggggaatcgcaagctaggcgttccgtttaggcaggccta

SEQ ID NO: 259906 - DNA, 50 bp, Artificial
  Synthetic oligonucleotide
cactactaccctgtccgccgcgcgaactacccttgcgcagtccgttacca

SEQ ID NO: 259907 - DNA, 50 bp, Artificial
  Synthetic oligonucleotide
aacctctcagcccacggttacatcagcaacagtggcgtaccgcgcccact

SEQ ID NO: 259908 - DNA, 50 bp, Artificial
  Synthetic oligonucleotide
aactgacagccgccctggcacctgaaccgatctaaggccctcactagccc

SEQ ID NO: 259909 - DNA, 50 bp, Artificial
  Synthetic oligonucleotide
aactgcagcagtgcccgttccgtacaagccagcatacggcgcacgatcta

SEQ ID NO: 259910 - DNA, 50 bp, Artificial
  Synthetic oligonucleotide
aagcagccggcggggaacgagtagtacgaagttaggagcagcctaggcga

SEQ ID NO: 259911 - DNA, 50 bp, Artificial
  Synthetic oligonucleotide
aaggtcgctagtgcgcccgctgtgcagaagcctgggggtcgactacttgg

SEQ ID NO: 259912 - DNA, 50 bp, Artificial
  Synthetic oligonucleotide
aatgccgaacctcctgcctatgtcgcctagcgtgagccgtgctccgaccc

SEQ ID NO: 259913 - DNA, 50 bp, Artificial
  Synthetic oligonucleotide
accctccactactagcacgtgcctcgccggagcatacggcgctattcagc

SEQ ID NO: 259914 - DNA, 50 bp, Artificial
  Synthetic oligonucleotide
acggcctctgtaaccgcgggccagtcgtactatacgcctgtgtctcgccc

SEQ ID NO: 259915 - DNA, 55 bp, Artificial
  Synthetic oligonucleotide
ccctgcactcacgacgaacccaaagctaggatccacagcacatgcggtcagaggc

SEQ ID NO: 259916 - DNA, 50 bp, Artificial
  Synthetic oligonucleotide
acgtcgccagcctgtacgtccgatcctggcattaccgtcggcctatggtc

SEQ ID NO: 259917 - DNA, 50 bp, Artificial
  Synthetic oligonucleotide
agacacgcgcactgcgtcctgcaacacccccgtctcgtgatttgcgagcg

SEQ ID NO: 259918 - DNA, 50 bp, Artificial
  Synthetic oligonucleotide
agagtgcgggaggggctaagggagctagaggtgcatgcagacccagtaga

SEQ ID NO: 259919 - DNA, 50 bp, Artificial
  Synthetic oligonucleotide
agcaacggacaaggctgttgaatgtgcctgcacgtcatggtaacccgcgc

SEQ ID NO: 259920 - DNA, 50 bp, Artificial
  Synthetic oligonucleotide
agcatcagtgcctaaggtcgctagtgcgcccgctgtgcagaagcctgggg

SEQ ID NO: 259921 - DNA, 50 bp, Artificial
  Synthetic oligonucleotide
agcctgggttggggtgtgccactataacaacgtgcccgtactgtccgcgc

SEQ ID NO: 259922 - DNA, 50 bp, Artificial
  Synthetic oligonucleotide
agcttgagtgccatgcccaggggagttcgcacgagtacaagcacgggctt

SEQ ID NO: 259923 - DNA, 50 bp, Artificial
  Synthetic oligonucleotide
aggagagagggctggtaacgcggcacttgaggaggtcgtggttgcagctg

SEQ ID NO: 259924 - DNA, 50 bp, Artificial
  Synthetic oligonucleotide
aggatgacacgcgcgcttggcactagccgggggtcacctgtacacacccc

SEQ ID NO: 259925 - DNA, 50 bp, Artificial
  Synthetic oligonucleotide
aggatggtgcagtagtgattcgctacatcgggcggagcgagcctcagccc

SEQ ID NO: 259926 - DNA, 55 bp, Artificial
  Synthetic oligonucleotide
cctggtgtgatacacggcgcatcacgctagcacaatgctgcacattggggcctgg

SEQ ID NO: 259927 - DNA, 50 bp, Artificial
  Synthetic oligonucleotide
aggcgtccttcgcataccgagtcacgcctaatgcaacgtgcctgacgtgc

SEQ ID NO: 259928 - DNA, 50 bp, Artificial
  Synthetic oligonucleotide
aggggcagggaaaggcctattgcaccgacagacagcctaccgtcgcacgc

SEQ ID NO: 259929 - DNA, 50 bp, Artificial
  Synthetic oligonucleotide
atccggccccggaataaccaacgccataactggcatagcaacggcgcaag

SEQ ID NO: 259930 - DNA, 50 bp, Artificial
  Synthetic oligonucleotide
atcctggcattaccgtcggcctatggtctgcctgcgtgccgtggtttgtt

SEQ ID NO: 259931 - DNA, 50 bp, Artificial
  Synthetic oligonucleotide
atgcactgtgaccggcataggagagagggctggtaacgcggcacttgagg

SEQ ID NO: 259932 - DNA, 50 bp, Artificial
  Synthetic oligonucleotide
atgcattggaaagcccgtgcttgtactcgtgcgaactcccctgggcatgg

SEQ ID NO: 259933 - DNA, 50 bp, Artificial
  Synthetic oligonucleotide
atgccccgtatactgcgctacgcgctacgtcgcaggccctgtgttgatta

SEQ ID NO: 259934 - DNA, 50 bp, Artificial
  Synthetic oligonucleotide
atgctgcctcctgcgtcgatggagcttgctggcacgccccggaaatctct

SEQ ID NO: 259935 - DNA, 50 bp, Artificial
  Synthetic oligonucleotide
atggcgcgaggctacgggagcgtatgcgctacaggatagcagtgtgctca

SEQ ID NO: 259936 - DNA, 50 bp, Artificial
  Synthetic oligonucleotide
atgggttcgactttggttccatgggtccgtgcactaggcgtcgcgttgcg

SEQ ID NO: 259937 - DNA, 55 bp, Artificial
  Synthetic oligonucleotide
cggcctctcgtgcagctatgctgattcgcattatccatagcgccctgaagtagcg

SEQ ID NO: 259938 - DNA, 55 bp, Artificial
  Synthetic oligonucleotide
cgtagtctgagcacagcctgcgcagggtctatgatacattgtgagccgcgaaggc

SEQ ID NO: 259939 - DNA, 55 bp, Artificial
  Synthetic oligonucleotide
cgtccgacgtggcaaatgtcctcctagcacggtcgattcgccagaagaggaatcg

SEQ ID NO: 259940 - DNA, 55 bp, Artificial
  Synthetic oligonucleotide
ctactgttcgcggcataggaccttagcctgcgctccaatccaaggaacgcaggcc

SEQ ID NO: 259941 - DNA, 52 bp, Artificial
  Synthetic oligonucleotide
atggagaaggatccgtttatgagggacaggggttatttcttcccgtatacgt

SEQ ID NO: 259942 - DNA, 55 bp, Artificial
  Synthetic oligonucleotide
cggaggcagaagtagaccgtctgataaagggcctggcaggataacgctgatggct

SEQ ID NO: 259943 - DNA, 55 bp, Artificial
  Synthetic oligonucleotide
cgtttatgccgggcttgcgcctgtataagacattcggtaatgttatgcggtgaag

SEQ ID NO: 259944 - DNA, 55 bp, Artificial
  Synthetic oligonucleotide
ctatcggcgccactacggcccctatattagccccggaattgaatataccggttgc

SEQ ID NO: 259945 - DNA, 55 bp, Artificial
  Synthetic oligonucleotide
ctccaccgaatggtagtatcgtaggagatcagccatttaagaatattgctacggc

SEQ ID NO: 259946 - DNA, 55 bp, Artificial
  Synthetic oligonucleotide
ctgggtcttgcaggaaggggtacttactcttacgatgagaaatacttcgctgagg

SEQ ID NO: 259947 - DNA, 55 bp, Artificial
  Synthetic oligonucleotide
gaccatgatataacgttgcggcaaagtatcggggagtttgcgccagcggtccata

SEQ ID NO: 259948 - DNA, 55 bp, Artificial
  Synthetic oligonucleotide
gaggattctttcacgtagggcgagggagcggagccaactcgatagtagcttactg

SEQ ID NO: 259949 - DNA, 55 bp, Artificial
  Synthetic oligonucleotide
gccgaaggaccgcctgctactacagattccatacgccatgcgtccagattggtaa

SEQ ID NO: 259950 - DNA, 55 bp, Artificial
  Synthetic oligonucleotide
gcctgtaacagaatgcccctgctgatgtaataatgtacagtcaaatttgacggga

SEQ ID NO: 259951 - DNA, 55 bp, Artificial
  Synthetic oligonucleotide
gcgagttgataagggtaacaaatatttccggtactctgctcagaatacgcgtatc

SEQ ID NO: 259952 - DNA, 55 bp, Artificial
  Synthetic oligonucleotide
caaactcccgccactggtagtacgtgaaggtgtgaaggtatcccgtgtggaatcc

SEQ ID NO: 259953 - DNA, 55 bp, Artificial
  Synthetic oligonucleotide
gcgatcccgcacctaatgtacgtttgagacctttctcagattcggacgcttcagc

SEQ ID NO: 259954 - DNA, 55 bp, Artificial
  Synthetic oligonucleotide
ggacttatgattacctgttgccttcgctggctcataatggcgctaatttcttccg

SEQ ID NO: 259955 - DNA, 55 bp, Artificial
  Synthetic oligonucleotide
ggatcatatcctcgccggagcgagacgttgtgcttataggataaaagaccgtgcc

SEQ ID NO: 259956 - DNA, 55 bp, Artificial
  Synthetic oligonucleotide
ggatggggaagtcaccattacgaccctgggagtggaagggatgcccttgctgcgt

SEQ ID NO: 259957 - DNA, 55 bp, Artificial
  Synthetic oligonucleotide
ttgaagcttcccgatcctatgcgacgtagcattgcagctgcgttaagtaaagcgc

SEQ ID NO: 259958 - DNA, 55 bp, Artificial
  Synthetic oligonucleotide
gttcacaacccagctgcacagagatatcgcaatgctgcgtaaagttaacgcgggc

SEQ ID NO: 259959 - DNA, 55 bp, Artificial
  Synthetic oligonucleotide
tctggaaatgcctcacttgtaggcatgagtcgtactgctcagtatgcagtccagg

SEQ ID NO: 259960 - DNA, 55 bp, Artificial
  Synthetic oligonucleotide
tgatcgtaggtaaaccaggtagctcgtatacgttctctatcgcgcagcgtatcgg

SEQ ID NO: 259961 - DNA, 54 bp, Artificial
  Synthetic oligonucleotide
atttgccatggttgtacggattatgaattgttacccgaaagtaggattgtttcg

SEQ ID NO: 259962 - DNA, 54 bp, Artificial
  Synthetic oligonucleotide
gtctgcccggatacttgtgtaaggcaaccaatcaacaataatcccgctatggtc

SEQ ID NO: 259963 - DNA, 55 bp, Artificial
  Synthetic oligonucleotide
cacagtatggcggcaccgtaccacgacccttgctatatgtcctgacagtgatcgg

SEQ ID NO: 259964 - DNA, 52 bp, Artificial
  Synthetic oligonucleotide
tgtacagaaacaatcgtactgactgacaaacaatacgccctgaaccattacc

SEQ ID NO: 259965 - DNA, 50 bp, Artificial
  Synthetic oligonucleotide
agcctgatgctgaaccgcgtgttgtgtgaggcgccctgggaacaaccttt

SEQ ID NO: 259966 - DNA, 50 bp, Artificial
  Synthetic oligonucleotide
agcctcgctgggcgcgttggctacggccctgtcagacgtacctggtaccg

SEQ ID NO: 259967 - DNA, 50 bp, Artificial
  Synthetic oligonucleotide
aaagacggtcagtctacccagaagatcgctccggccctcctgacgcccaa

SEQ ID NO: 259968 - DNA, 50 bp, Artificial
  Synthetic oligonucleotide
aaaggcacccgcgtgtgctttattgcccgtcctcttcacaggcagcggac

SEQ ID NO: 259969 - DNA, 49 bp, Artificial
  Synthetic oligonucleotide
aaatgggacctgacctttacccagggaggcccttttaagcccgccgacc

SEQ ID NO: 259970 - DNA, 50 bp, Artificial
  Synthetic oligonucleotide
aacgcgtcaaacaattcccccgtagccagatgtgcgcggaaactcaggcg

SEQ ID NO: 259971 - DNA, 50 bp, Artificial
  Synthetic oligonucleotide
aacggacgcgtcttcagtcgtgtccacttcgaagccatgctcctgtccga

SEQ ID NO: 259972 - DNA, 50 bp, Artificial
  Synthetic oligonucleotide
aagccggcagcattgttactggcgggtgcgtgtgtggacaaataccggtg

SEQ ID NO: 259973 - DNA, 50 bp, Artificial
  Synthetic oligonucleotide
aagcgcgggcattttgtacgccccgccagtagaccagcaaggtatccgga

SEQ ID NO: 259974 - DNA, 55 bp, Artificial
  Synthetic oligonucleotide
cagctaccagcggacagacgtcatattacgccacaataagtgtcttatatacgtt

SEQ ID NO: 259975 - DNA, 50 bp, Artificial
  Synthetic oligonucleotide
aagtacgcagattgtccacagagggctgtcgtccccgacttccctgggca

SEQ ID NO: 259976 - DNA, 50 bp, Artificial
  Synthetic oligonucleotide
aatccgctccagctgcatagtgtgcgcgttagcgcgcccaacaacacatc

SEQ ID NO: 259977 - DNA, 50 bp, Artificial
  Synthetic oligonucleotide
acagcccaactcccaccgcccaatcctcttaaaaacgggcgtcagtccgc

SEQ ID NO: 259978 - DNA, 50 bp, Artificial
  Synthetic oligonucleotide
acaggcgtccttcagtatagctggctttcgcaccgctcgccaggttggca

SEQ ID NO: 259979 - DNA, 50 bp, Artificial
  Synthetic oligonucleotide
acataggcagccgcatacctgatgttgcaggccggtccaccggtgatgcc

SEQ ID NO: 259980 - DNA, 50 bp, Artificial
  Synthetic oligonucleotide
accacccggatcgtttttacggaggggtgattggcggacaagcccgtcgg

SEQ ID NO: 259981 - DNA, 50 bp, Artificial
  Synthetic oligonucleotide
accgttacgcggtgcagagcgccaaagctggtgtgacggaagccaatacc

SEQ ID NO: 259982 - DNA, 50 bp, Artificial
  Synthetic oligonucleotide
acctgggtgctcccagcggccctaccggttctgcatccagcggaggatcc

SEQ ID NO: 259983 - DNA, 50 bp, Artificial
  Synthetic oligonucleotide
acgccacatggcggacaataccagctgacacttgccgatggtagccgcgt

SEQ ID NO: 259984 - DNA, 50 bp, Artificial
  Synthetic oligonucleotide
acgcctgcaaggaatccgagcaccatcgtggcagggtttctggatctgcc

SEQ ID NO: 259985 - DNA, 55 bp, Artificial
  Synthetic oligonucleotide
ccagtttaagactacctgcattttcccactccagcatacgatctacgaccttcag

SEQ ID NO: 259986 - DNA, 50 bp, Artificial
  Synthetic oligonucleotide
acggacacggcgagccccgcgctacatggctctatgagcagtcgaatgtc

SEQ ID NO: 259987 - DNA, 50 bp, Artificial
  Synthetic oligonucleotide
acggagctggctgattttaaggcggaactgagaacgctgcgcgcctggtt

SEQ ID NO: 259988 - DNA, 50 bp, Artificial
  Synthetic oligonucleotide
acggcctacaagttgcggcataaaggctgcgcgggaggaaccggtagagt

SEQ ID NO: 259989 - DNA, 50 bp, Artificial
  Synthetic oligonucleotide
acgggcataacaaagggcggcggactgccattcagcgggagatctggcgg

SEQ ID NO: 259990 - DNA, 50 bp, Artificial
  Synthetic oligonucleotide
acgtcgccacgaaactctacagcagcacgcacgccggtaggtgagaggtt

SEQ ID NO: 259991 - DNA, 50 bp, Artificial
  Synthetic oligonucleotide
actccgcgcgcatttgcagcactcagcacgcgttggtaatttgcctgctg

SEQ ID NO: 259992 - DNA, 50 bp, Artificial
  Synthetic oligonucleotide
agacctgtccgccagcaagtcgggctcttccggccagcatacctctcata

SEQ ID NO: 259993 - DNA, 50 bp, Artificial
  Synthetic oligonucleotide
agatacggggcagatccaggcaatgcggcttccgtgaaagtgcctgcctt

SEQ ID NO: 259994 - DNA, 50 bp, Artificial
  Synthetic oligonucleotide
agatcgtccgcttgggtacctctggcgctttacaggggaatgtgccggtg

SEQ ID NO: 259995 - DNA, 50 bp, Artificial
  Synthetic oligonucleotide
agcacgcctgtccgcaacagtattatgtgggcagccaaatgcgcaagcct

SEQ ID NO: 259996 - DNA, 55 bp, Artificial
  Synthetic oligonucleotide
ccgtctttgcaggatatgccgcccataaggagtctttgttcctgctcgatcatgc

SEQ ID NO: 259997 - DNA, 50 bp, Artificial
  Synthetic oligonucleotide
agcataagcacccggggtggtcggataacgcggtctgaaaccagactcgg

SEQ ID NO: 259998 - DNA, 50 bp, Artificial
  Synthetic oligonucleotide
agcatcagcggacccttacaggggtgccaggatgcaccggtgacattcaa

SEQ ID NO: 259999 - DNA, 50 bp, Artificial
  Synthetic oligonucleotide
agccagaggtcgatagacagcgtagctgtaccgcgcgcattccagggtgc

SEQ ID NO: 260000 - DNA, 50 bp, Artificial
  Synthetic oligonucleotide
agccaggtgtcacgcctgcaaggaatccgagcaccatcgtggcagggttt

SEQ ID NO: 260001 - DNA, 50 bp, Artificial
  Synthetic oligonucleotide
agcctccactaccgaacgcgtttgcaagccctccacactgcgtttgccat

SEQ ID NO: 260002 - DNA, 55 bp, Artificial
  Synthetic oligonucleotide
cctctggtcctatgggcccagctttaaaagccgactttcctgaggtcagcgcagc

SEQ ID NO: 260003 - DNA, 55 bp, Artificial
  Synthetic oligonucleotide
cgatggtacatggtaccggtacgcctacccaggacgttgtaaacgcgatcagagc

SEQ ID NO: 260004 - DNA, 55 bp, Artificial
  Synthetic oligonucleotide
cgcggctatcgactggatcagtaaacagtcctggtgtaacggaaagatcgctatg

SEQ ID NO: 260005 - DNA, 57 bp, Artificial
  Synthetic oligonucleotide
agagacgtttggcgtgttagtacccaaatgcctcgccagtggcctactcttgtagcc

SEQ ID NO: 260006 - DNA, 55 bp, Artificial
  Synthetic oligonucleotide
gatcaatgagtccgtattctttcgccttttcgggtgttagataaaatgtgcggtc

SEQ ID NO: 260007 - DNA, 55 bp, Artificial
  Synthetic oligonucleotide
ctgcatatgaaaatcgctatacttgggacgctaatttcccaggatatactgcgag

SEQ ID NO: 260008 - DNA, 55 bp, Artificial
  Synthetic oligonucleotide
ctgactgggaagttcctgaagcggctacgccaaaaccagttattggtcgtaagtc

SEQ ID NO: 260009 - DNA, 55 bp, Artificial
  Synthetic oligonucleotide
cgtgatgttgcgcgattacctctaaaagtacgatcaggataacctacaatacatc

SEQ ID NO: 260010 - DNA, 55 bp, Artificial
  Synthetic oligonucleotide
cgctataagttaagattgctaagcctcttgcttagtatatcgttggacatgagat

SEQ ID NO: 260011 - DNA, 55 bp, Artificial
  Synthetic oligonucleotide
accaattaattccagtatgaatgacgcctaagcgttgcaagatatcgttaacgac

SEQ ID NO: 260012 - DNA, 55 bp, Artificial
  Synthetic oligonucleotide
aggtctagtaggggtatctgatcaaggaaacgaattactagaaacgactatagac

SEQ ID NO: 260013 - DNA, 55 bp, Artificial
  Synthetic oligonucleotide
atcgtagtgatcgtttagtcacacttcgaccagaggggactgcaggagtcgcacg

SEQ ID NO: 260014 - DNA, 50 bp, Artificial
  Synthetic oligonucleotide
caaattacttacccgaatattcccttgatttccgcctttactccctattt

SEQ ID NO: 260015 - DNA, 54 bp, Artificial
  Synthetic oligonucleotide
cataactttacccaagatatatctgtttacccctgatattccttaccaaaggac

SEQ ID NO: 260016 - DNA, 60 bp, Artificial
  Synthetic oligonucleotide
tagtatcctcttggacggccagtaagccaacagcggttccgatgacgtgtaggagcacta

SEQ ID NO: 260017 - DNA, 55 bp, Artificial
  Synthetic oligonucleotide
ccaaaggctaggtttctcagcgtcaattgccagtgtaggaattattatagaacca

SEQ ID NO: 260018 - DNA, 55 bp, Artificial
  Synthetic oligonucleotide
ccataggatgctaaccagagatagcgagggatattttctcttacccttcctagtg

SEQ ID NO: 260019 - DNA, 55 bp, Artificial
  Synthetic oligonucleotide
cccattctcttaaaacgttacgcgataagccaaagtctctatagtatcctcttgg

SEQ ID NO: 260020 - DNA, 55 bp, Artificial
  Synthetic oligonucleotide
cgcccctaacgctaaattgtattcgtcagctgtaggagctctaaaaggtagtgga

SEQ ID NO: 260021 - DNA, 54 bp, Artificial
  Synthetic oligonucleotide
cccaagcattaatgtacttgggttgggttgctagtcgtttgcaatggaaaccta

SEQ ID NO: 260022 - DNA, 53 bp, Artificial
  Synthetic oligonucleotide
gaagtgcctctagttacacgtacagatattaactggggtcgccctgatgtaag

SEQ ID NO: 260023 - DNA, 52 bp, Artificial
  Synthetic oligonucleotide
gggtaacaaccgtcagaagtttcataaaggtggccggtagtatttaatccca

SEQ ID NO: 260024 - DNA, 53 bp, Artificial
  Synthetic oligonucleotide
cccttttatctctgatgcaactgtagtccgctctttgcgagacgctatagtaa

SEQ ID NO: 260025 - DNA, 53 bp, Artificial
  Synthetic oligonucleotide
ccgtttaactctcatcctaccgatcttgatcttatgggtgataacgcgcgtaa

SEQ ID NO: 260026 - DNA, 52 bp, Artificial
  Synthetic oligonucleotide
agtcgccaaatctccatctgcacgtaatacatcaaacttagttcccaaacca

SEQ ID NO: 260027 - DNA, 60 bp, Artificial
  Synthetic oligonucleotide
atggcgttctgtagctgcaaatttgtcagatttggctgctatgggggctgctccagtcgc

SEQ ID NO: 260028 - DNA, 51 bp, Artificial
  Synthetic oligonucleotide
ttttgacaacggggacgaacctatctacggaaaacactacatgccacgaaa

SEQ ID NO: 260029 - DNA, 50 bp, Artificial
  Synthetic oligonucleotide
ctctaacaaagatggacgaggacgtgaacctacatttcgtgttagcgttc

SEQ ID NO: 260030 - DNA, 50 bp, Artificial
  Synthetic oligonucleotide
ggggaataaagctatgaaagatccaaagcgcagcgcgttaggtatattat

SEQ ID NO: 260031 - DNA, 59 bp, Artificial
  Synthetic oligonucleotide
caaccattcgtcatattattccagagacattaaatgatcgttctttgctcaaagtagtc

SEQ ID NO: 260032 - DNA, 55 bp, Artificial
  Synthetic oligonucleotide
ctaaggttaaaaccgagaatatcgaattctataagtggatggcgagattctaaac

SEQ ID NO: 260033 - DNA, 55 bp, Artificial
  Synthetic oligonucleotide
tttcattcccatggacttagcaatgttggctacgtgcgaacctatctttccaagc

SEQ ID NO: 260034 - DNA, 55 bp, Artificial
  Synthetic oligonucleotide
tccaaacacaagtcctgtacccaaatcaggctgacacattattaaaacccaaggg

SEQ ID NO: 260035 - DNA, 55 bp, Artificial
  Synthetic oligonucleotide
ggttcatatcgaactatagcaccggctttcttagcttgagatacagtatcgtcgg

SEQ ID NO: 260036 - DNA, 55 bp, Artificial
  Synthetic oligonucleotide
gccgctcaggtatccatgaggcttatatgacaggtcgtggttccataacaatgag

SEQ ID NO: 260037 - DNA, 55 bp, Artificial
  Synthetic oligonucleotide
agcactgtcccaccggtgctcgatcttcccgtcacctatacacgtgtcgcacgcc

SEQ ID NO: 260038 - DNA, 55 bp, Artificial
  Synthetic oligonucleotide
gcggtataggtgtcgatgtgtctcgactattcgtttcgtcctgctttggcggaac

SEQ ID NO: 260039 - DNA, 55 bp, Artificial
  Synthetic oligonucleotide
tgtagcagaagaatggctgcttacctttcaccgactccatccaatggatcgcctg

SEQ ID NO: 260040 - DNA, 55 bp, Artificial
  Synthetic oligonucleotide
tatctcaccggtcgcccgccggagattttgcgcgacgtgcccgataacagtccgc

SEQ ID NO: 260041 - DNA, 55 bp, Artificial
  Synthetic oligonucleotide
tacgctacgggaggggcctattcaatcacagagcgagaagcgacgggcagagcca

SEQ ID NO: 260042 - DNA, 55 bp, Artificial
  Synthetic oligonucleotide
ggggaggtttatttgcctatcagacgcgacttgtggccggcggttacattctcct

SEQ ID NO: 260043 - DNA, 55 bp, Artificial
  Synthetic oligonucleotide
gtccgtattgatgaacatcgcgttgcgaccccattgctgggtaaaatagagctgt

SEQ ID NO: 260044 - DNA, 55 bp, Artificial
  Synthetic oligonucleotide
gtgacacgcggaggctgtttgtatgacagatttatcggcagaacatccaacggcc

SEQ ID NO: 260045 - DNA, 55 bp, Artificial
  Synthetic oligonucleotide
aaacggaaccgcaattccgagcatgccatccagccgtggccttgctagcctcgcg

SEQ ID NO: 260046 - DNA, 54 bp, Artificial
  Synthetic oligonucleotide
gcgtagtttgtccgcgtgggtcatttcgctgagaggcaaagtcgtcgcaacgct

SEQ ID NO: 260047 - DNA, 53 bp, Artificial
  Synthetic oligonucleotide
gtgcacgctgggcgggagccacttttccgtcgtgggcagagcggccttcacga

SEQ ID NO: 260048 - DNA, 55 bp, Artificial
  Synthetic oligonucleotide
catagaatcctttgctaagattccggggactcgtgcgtctttaggagaatgcccg

SEQ ID NO: 260049 - DNA, 53 bp, Artificial
  Synthetic oligonucleotide
gcgtcctttcgaaaagtgattccggccaacccttaatgagcacatcagaccac

SEQ ID NO: 260050 - DNA, 52 bp, Artificial
  Synthetic oligonucleotide
ccggcagtgagatcgtttggcccgcgaattacacagatgacgcggatgaaaa

SEQ ID NO: 260051 - DNA, 52 bp, Artificial
  Synthetic oligonucleotide
ctggtaagcgattgccaccgggtcaaaattgaacggtcgaacgttgagatga

SEQ ID NO: 260052 - DNA, 52 bp, Artificial
  Synthetic oligonucleotide
ggagttttgccgacgacctcgtattcttttccccatcgggcgtcccataaaa

SEQ ID NO: 260053 - DNA, 52 bp, Artificial
  Synthetic oligonucleotide
caactgtggtgtgcggaaaactccctctcgcgatgaccgggtaacaactgga

SEQ ID NO: 260054 - DNA, 52 bp, Artificial
  Synthetic oligonucleotide
aaggaattatccccggctaaatgaacgtgtcaagggcagcaaggtaactttt

SEQ ID NO: 260055 - DNA, 51 bp, Artificial
  Synthetic oligonucleotide
ggtgcgctcgagttccactacgcgttggccgactttcaacctggcgcgaag

SEQ ID NO: 260056 - DNA, 51 bp, Artificial
  Synthetic oligonucleotide
attttcgctccggaagacgacctggttggccatcatcgaaaggtgttgagc

SEQ ID NO: 260057 - DNA, 51 bp, Artificial
  Synthetic oligonucleotide
actaccatcgagcaaccagaagtagttagcccgggtggtcagtgaacattt

SEQ ID NO: 260058 - DNA, 50 bp, Artificial
  Synthetic oligonucleotide
cagtaatgaagagcgaactgcggaggccatggtgactaccttatcttccc

SEQ ID NO: 260059 - DNA, 53 bp, Artificial
  Synthetic oligonucleotide
cccgaacagtcaacgagtatcggtcgtaaagcgacggggtttgccccacagtc

SEQ ID NO: 260060 - DNA, 50 bp, Artificial
  Synthetic oligonucleotide
aatgcaccgccttctgggtgcctcccaaacagagcgccccaacgggaaag

SEQ ID NO: 260061 - DNA, 50 bp, Artificial
  Synthetic oligonucleotide
aatgagcgttgtcagggcgacgattggacgcggacgaatgttcggtgccc

SEQ ID NO: 260062 - DNA, 50 bp, Artificial
  Synthetic oligonucleotide
aatgaaggcccctcggccaggcaatccacccacgacacggtgtatgcgaa

SEQ ID NO: 260063 - DNA, 50 bp, Artificial
  Synthetic oligonucleotide
aatcgtttccgaatgcgccaatcccttcgccatagaccacccacgcccgc

SEQ ID NO: 260064 - DNA, 50 bp, Artificial
  Synthetic oligonucleotide
aatcgtcccgcacggtgaggagtgaggatcaaacgtcgacaagccagcgg

SEQ ID NO: 260065 - DNA, 50 bp, Artificial
  Synthetic oligonucleotide
aatcccgaggcggaatggttgccgacgggtggttacgaagtggcccacga

SEQ ID NO: 260066 - DNA, 50 bp, Artificial
  Synthetic oligonucleotide
aaaacgaacgctacggtggtgccttatcgcgtcggtttgccagccacgga

SEQ ID NO: 260067 - DNA, 50 bp, Artificial
  Synthetic oligonucleotide
aaaaggtggcgcagtttctgccgcctgccgagcacgcattcctcatcgaa

SEQ ID NO: 260068 - DNA, 50 bp, Artificial
  Synthetic oligonucleotide
aaacaccgcgcaaagatgtgggtcatgcttaggcagcagggccgcactcc

SEQ ID NO: 260069 - DNA, 50 bp, Artificial
  Synthetic oligonucleotide
aaacgcgcaaggtcgaattccgctgttttgccggcgggcttatctcagct

SEQ ID NO: 260070 - DNA, 55 bp, Artificial
  Synthetic oligonucleotide
aagatgcaagcgcagcgtcaatcccgccggagggccgattcttaacaagaaaccg

SEQ ID NO: 260071 - DNA, 50 bp, Artificial
  Synthetic oligonucleotide
aaacgtagcgcggccgccggtttctccacgcatctggttaaaccattcga

SEQ ID NO: 260072 - DNA, 50 bp, Artificial
  Synthetic oligonucleotide
aaacgtcggctcactcgaacccggcaaacgcggggatttcgtcgtgcttg

SEQ ID NO: 260073 - DNA, 50 bp, Artificial
  Synthetic oligonucleotide
aaactccgaacgtgaccgcgagggaagaactgggggacctcataccgcga

SEQ ID NO: 260074 - DNA, 50 bp, Artificial
  Synthetic oligonucleotide
aaatgcgcgcaggtccgttacatcagacgcgatgcgcccaccaagttcac

SEQ ID NO: 260075 - DNA, 50 bp, Artificial
  Synthetic oligonucleotide
aacaccggctccatgcgaatgctgccataggcgatatgcgaagcggacgc

SEQ ID NO: 260076 - DNA, 50 bp, Artificial
  Synthetic oligonucleotide
aacagcgaagccatatttgttgcccgacccctatcttgcgactccaatct

SEQ ID NO: 260077 - DNA, 50 bp, Artificial
  Synthetic oligonucleotide
aacatagcacgaatcatgtccccgcccccagacgcggcgtgcattacgaa

SEQ ID NO: 260078 - DNA, 50 bp, Artificial
  Synthetic oligonucleotide
aacatccgccttttaaccgccgccaaagggtgtttccctatccggcagga

SEQ ID NO: 260079 - DNA, 50 bp, Artificial
  Synthetic oligonucleotide
aaccggaggccgatcgcaggaccagtcttgcaccgcaaacgcgtattcag

SEQ ID NO: 260080 - DNA, 50 bp, Artificial
  Synthetic oligonucleotide
aacgctcgtggcccagcggagtcattgcggcagaagcgaacagtgggaga

SEQ ID NO: 260081 - DNA, 55 bp, Artificial
  Synthetic oligonucleotide
ccctcctgcgatttcaaacgagtcctccatcatgtctagcatttgggcgtccaac

SEQ ID NO: 260082 - DNA, 50 bp, Artificial
  Synthetic oligonucleotide
aactcgaatggggccgctatctctacaacagcgcacctccccgacgggat

SEQ ID NO: 260083 - DNA, 50 bp, Artificial
  Synthetic oligonucleotide
aatcacccccgacgcaggccagatctgtccgcataaccaacgccatttgc

SEQ ID NO: 260084 - DNA, 50 bp, Artificial
  Synthetic oligonucleotide
aatatcgcacgtaagcgacggggtttgccccgcagtcccataggcgtctc

SEQ ID NO: 260085 - DNA, 50 bp, Artificial
  Synthetic oligonucleotide
aagttacgatggtgccaccttccggacgcggtgcaacctccagttgtccg

SEQ ID NO: 260086 - DNA, 50 bp, Artificial
  Synthetic oligonucleotide
aagtctatgcgcaccctccgccacaacagtcccggcttcaaatcgtccct

SEQ ID NO: 260087 - DNA, 50 bp, Artificial
  Synthetic oligonucleotide
aagtagcaccgcacagaacgccccgcctttggcccatacctgcggccggg

SEQ ID NO: 260088 - DNA, 50 bp, Artificial
  Synthetic oligonucleotide
aaggtagtggcggtgggaagctcaagccgtgacgcggaggcgtgttggta

SEQ ID NO: 260089 - DNA, 50 bp, Artificial
  Synthetic oligonucleotide
aagggccgccaccggagcacatggcttactgagagcggaagcttgggtga

SEQ ID NO: 260090 - DNA, 50 bp, Artificial
  Synthetic oligonucleotide
aaggccttggctttacagtcgccgctgtgggtcgactcggtttccgcagg

SEQ ID NO: 260091 - DNA, 50 bp, Artificial
  Synthetic oligonucleotide
aaggccggccacttcgcacgccaaccccgcgaatctacaccggttcttgc

SEQ ID NO: 260092 - DNA, 54 bp, Artificial
  Synthetic oligonucleotide
cctctctagcaaatccctgggaacccggtttactcagaaacgtcaacatgtccc

SEQ ID NO: 260093 - DNA, 50 bp, Artificial
  Synthetic oligonucleotide
aagcggccgaaatccggagcgcatccctccgagtgtcatagcatgccttt

SEQ ID NO: 260094 - DNA, 50 bp, Artificial
  Synthetic oligonucleotide
aagcggagcgagtgcagagggcggaaacactctccgatgccctccaaccg

SEQ ID NO: 260095 - DNA, 50 bp, Artificial
  Synthetic oligonucleotide
aagcgcgtgcaaaagttcgtgccggttcatccctgacctcagtcggcact

SEQ ID NO: 260096 - DNA, 50 bp, Artificial
  Synthetic oligonucleotide
aagcgcgtccaatcgcaatcgtctcgcctccctgacattagcggacctga

SEQ ID NO: 260097 - DNA, 50 bp, Artificial
  Synthetic oligonucleotide
aagccgtttaatgatatgcagccagcccgtgcactccctgccacgccata

SEQ ID NO: 260098 - DNA, 50 bp, Artificial
  Synthetic oligonucleotide
aactgaggtgcctgctatcgcgcctttcggtcgacccgctacagagctgc

SEQ ID NO: 260099 - DNA, 50 bp, Artificial
  Synthetic oligonucleotide
aactgacgtggggctccgaaggtaaggccgctgaacggaaaggccttagc

SEQ ID NO: 260100 - DNA, 50 bp, Artificial
  Synthetic oligonucleotide
aactctgtgagcgccgcgtcggaactctgcttgccatcggctgttgagag

SEQ ID NO: 260101 - DNA, 55 bp, Artificial
  Synthetic oligonucleotide
cggcaagcgcacacagggagacacaaaacgtggggagtcgcatgggcgtcaagta

SEQ ID NO: 260102 - DNA, 54 bp, Artificial
  Synthetic oligonucleotide
cgttttcgagaccttcctttccggccatgtcgattacggacccgaatctctgga

SEQ ID NO: 260103 - DNA, 55 bp, Artificial
  Synthetic oligonucleotide
ctgggcattcccgcggattacctggccagtgattttgacacctataccagcgtgc

SEQ ID NO: 260104 - DNA, 55 bp, Artificial
  Synthetic oligonucleotide
ctgcatgcatgcgggacgataagaaaagcaggacgtgtggaccataaggacgcat

SEQ ID NO: 260105 - DNA, 55 bp, Artificial
  Synthetic oligonucleotide
cgaggtgggcagcagggaagtaaccatcggggatgtggcaagtatatactgtacc

SEQ ID NO: 260106 - DNA, 50 bp, Artificial
  Synthetic oligonucleotide
ttctccagaacatccctcaggacattcccggctgcccgtcaatcccccgg

SEQ ID NO: 260107 - DNA, 50 bp, Artificial
  Synthetic oligonucleotide
aaacccccggtcacactcctgcgttagctgcgaatcccccgtcaaccggg

SEQ ID NO: 260108 - DNA, 50 bp, Artificial
  Synthetic oligonucleotide
aaacgccccatgctgtatctgttcggggccagcgacgcaaccataggcta

SEQ ID NO: 260109 - DNA, 50 bp, Artificial
  Synthetic oligonucleotide
aaactggcaacctctcgctgtcgccacgcgggtctttcgcgatgccgagt

SEQ ID NO: 260110 - DNA, 50 bp, Artificial
  Synthetic oligonucleotide
aaataccttccgggaccgcgtctgtgtccggcatgcctttttgggcagtg

SEQ ID NO: 260111 - DNA, 50 bp, Artificial
  Synthetic oligonucleotide
tacagagccgtggcattacggcataacaggtgacggctgcacgcatcccg

SEQ ID NO: 260112 - DNA, 50 bp, Artificial
  Synthetic oligonucleotide
taaggcggtcatagcagccgcccggagtgcatggggtgttgcatgagagt

SEQ ID NO: 260113 - DNA, 50 bp, Artificial
  Synthetic oligonucleotide
aacacccgccttgccagacggttagggatggatgggttcaaaagggcgcg

SEQ ID NO: 260114 - DNA, 50 bp, Artificial
  Synthetic oligonucleotide
aacacggcctggctcctataatctaccgcccaccgttcctgtgcgtctgc

SEQ ID NO: 260115 - DNA, 50 bp, Artificial
  Synthetic oligonucleotide
aacaggggctggcgagaacccttaccgaggctgagcggcgtaccttaggt

SEQ ID NO: 260116 - DNA, 55 bp, Artificial
  Synthetic oligonucleotide
ccttcctggaagagtaagactcattcccgcctgcctggtatgccgacacgccgtg

SEQ ID NO: 260117 - DNA, 50 bp, Artificial
  Synthetic oligonucleotide
aaccccggatgttttgaaggatgcgcctgtgtttgcactgggatgcccgg

SEQ ID NO: 260118 - DNA, 50 bp, Artificial
  Synthetic oligonucleotide
aactgtagcggctgcggatcctgtgggtggctgccaggttgttccattca

SEQ ID NO: 260119 - DNA, 50 bp, Artificial
  Synthetic oligonucleotide
aagctgaccgattacgggctgttggacgtaaggagccaggaaccgcgtcc

SEQ ID NO: 260120 - DNA, 50 bp, Artificial
  Synthetic oligonucleotide
aagggggacctatacgggcagcggtcatggcagatacccatggcgtgctg

SEQ ID NO: 260121 - DNA, 50 bp, Artificial
  Synthetic oligonucleotide
gcggagcggtatcattgaggcactcacgcgaaggctcctgcctgtcatgc

SEQ ID NO: 260122 - DNA, 50 bp, Artificial
  Synthetic oligonucleotide
aagtacggccagccaggtccccttaccgcttgcttcacagcgctccaccg

SEQ ID NO: 260123 - DNA, 50 bp, Artificial
  Synthetic oligonucleotide
aagtccatatcccctccgcaggtccttgcctcggcccttacggtctcccc

SEQ ID NO: 260124 - DNA, 50 bp, Artificial
  Synthetic oligonucleotide
aatccgtgtggcggcgatcagtgaagtggtagcggccgaatacgccctcg

SEQ ID NO: 260125 - DNA, 50 bp, Artificial
  Synthetic oligonucleotide
aatcggttgcgcctttgtgtgccacctgggcgttcggtacggagccggaa

SEQ ID NO: 260126 - DNA, 50 bp, Artificial
  Synthetic oligonucleotide
aatggaccaggggaggttaatacgccggttgtctgcggtgggaggaccgt

SEQ ID NO: 260127 - DNA, 55 bp, Artificial
  Synthetic oligonucleotide
cctcgtactgcctttaccttgcctccattactgctacgatagggaagggcatagc

SEQ ID NO: 260128 - DNA, 50 bp, Artificial
  Synthetic oligonucleotide
agaagccacgtcttcccgttatgggacacggtgcaggccccttcgatggt

SEQ ID NO: 260129 - DNA, 50 bp, Artificial
  Synthetic oligonucleotide
agacacgctttatccgttgttgcacagcaggggcgactgtagccgccgcg

SEQ ID NO: 260130 - DNA, 50 bp, Artificial
  Synthetic oligonucleotide
agaccggctgttaccgcaacgcggtctcccttccggcggagcagaaaacc

SEQ ID NO: 260131 - DNA, 50 bp, Artificial
  Synthetic oligonucleotide
agaccgttttgcggagcgctaccgggccaaagcacgctacctgaacctgc

SEQ ID NO: 260132 - DNA, 50 bp, Artificial
  Synthetic oligonucleotide
agacttctggcgttccgcacgtcccaatgcactttgggcctgtccggtat

SEQ ID NO: 260133 - DNA, 50 bp, Artificial
  Synthetic oligonucleotide
cacgagatttcaagccggtcgaagtgacacgcaaatgcggccagcacgcg

SEQ ID NO: 260134 - DNA, 50 bp, Artificial
  Synthetic oligonucleotide
agaggcgggcctggattctgtctattacgcctccttgggcggcgaggagt

SEQ ID NO: 260135 - DNA, 50 bp, Artificial
  Synthetic oligonucleotide
caacctgcgcagcggaattggctgccgtcatactgctcccgagatgtccg

SEQ ID NO: 260136 - DNA, 50 bp, Artificial
  Synthetic oligonucleotide
caaccgcgctacgcgacgatggcagtactgagcctgcccgtacatcaacg

SEQ ID NO: 260137 - DNA, 50 bp, Artificial
  Synthetic oligonucleotide
caaagccaaaatcgccccggaacgcccattgatcaccgggcaacgtgtgg

SEQ ID NO: 260138 - DNA, 55 bp, Artificial
  Synthetic oligonucleotide
cctccgtatggtggcgtaattatatggaatacgtgttgtatgtgcatagcaagat

SEQ ID NO: 260139 - DNA, 50 bp, Artificial
  Synthetic oligonucleotide
atttggccgaggacggtaacacagccttgactgagggcgatggagcagcc

SEQ ID NO: 260140 - DNA, 50 bp, Artificial
  Synthetic oligonucleotide
attgatgaccctgaggcagacgacactatgcagccgtggggcggctatga

SEQ ID NO: 260141 - DNA, 50 bp, Artificial
  Synthetic oligonucleotide
attcgcctctccggtgtaaattccgttcggccccgctccgttggtcagca

SEQ ID NO: 260142 - DNA, 50 bp, Artificial
  Synthetic oligonucleotide
agcaccgccttggtattccggtacacattgccgatatgccccatgccgta

SEQ ID NO: 260143 - DNA, 50 bp, Artificial
  Synthetic oligonucleotide
atcttccccgggaggtcgccgcacgcgcatttgtacgatggtagtgatcc

SEQ ID NO: 260144 - DNA, 50 bp, Artificial
  Synthetic oligonucleotide
atccctcaggacattcccggctgcccgtcaatcccccggattacatccgg

SEQ ID NO: 260145 - DNA, 50 bp, Artificial
  Synthetic oligonucleotide
atacagccgatgttcgtttttcctttggtgcgcgggcctaacgacgccgg

SEQ ID NO: 260146 - DNA, 50 bp, Artificial
  Synthetic oligonucleotide
aggtggcccccaaagtgtgtcctgcgtgccaacatcccggcagcttcttt

SEQ ID NO: 260147 - DNA, 50 bp, Artificial
  Synthetic oligonucleotide
aggctcaagtgctggcttagaagctctagctgctggttcggttgacattg

SEQ ID NO: 260148 - DNA, 50 bp, Artificial
  Synthetic oligonucleotide
aggcgtgcgttaagcaccggagtaatgtccacctgtcccagaagtgccgc

SEQ ID NO: 260149 - DNA, 53 bp, Artificial
  Synthetic oligonucleotide
ccgtgtcccggaacaattcgtctatggccttcttatagccctttaaggaggta

SEQ ID NO: 260150 - DNA, 50 bp, Artificial
  Synthetic oligonucleotide
aggcggagctcccgtcgtagcagcgtggacaggcgttgtggttacggcaa

SEQ ID NO: 260151 - DNA, 50 bp, Artificial
  Synthetic oligonucleotide
agctcggctgctcccggaatgacgaagacgtaatgggccccggatttacc

SEQ ID NO: 260152 - DNA, 50 bp, Artificial
  Synthetic oligonucleotide
agctcaggtccgccggatccaagggacgattgtaggggcgaccgcagtaa

SEQ ID NO: 260153 - DNA, 50 bp, Artificial
  Synthetic oligonucleotide
accgcttctgccggacatacggttccaggcggacacaccgcttctgccgg

SEQ ID NO: 260154 - DNA, 50 bp, Artificial
  Synthetic oligonucleotide
cggcccccaccgtttatttgcggcctcccgtcgtttggttgcagcccgcc

SEQ ID NO: 260155 - DNA, 50 bp, Artificial
  Synthetic oligonucleotide
cggattgtgggggattcgagccgaggccgctaacacggcgatattcgacc

SEQ ID NO: 260156 - DNA, 50 bp, Artificial
  Synthetic oligonucleotide
accggaccggaagggacgggaagcaatactggtatcagcccgggtactga

SEQ ID NO: 260157 - DNA, 50 bp, Artificial
  Synthetic oligonucleotide
accggaccggctgagggggacatgggtccaggatgtgtggatgttccttg

SEQ ID NO: 260158 - DNA, 50 bp, Artificial
  Synthetic oligonucleotide
cgctccaaccggtgcatgtttgtctgccgaccagggatactgggaaccgc

SEQ ID NO: 260159 - DNA, 50 bp, Artificial
  Synthetic oligonucleotide
cgcctttgtgtgccacctgggcgttcggtacggagccggaactagacgga

SEQ ID NO: 260160 - DNA, 55 bp, Artificial
  Synthetic oligonucleotide
cccctgagatcatcggcgttatgcagaaggattgtgtcaagagcatttctgtccg

SEQ ID NO: 260161 - DNA, 50 bp, Artificial
  Synthetic oligonucleotide
cgccccatcggttcattggtactgaccacggatgagtcgcagttgcccgc

SEQ ID NO: 260162 - DNA, 50 bp, Artificial
  Synthetic oligonucleotide
cgccaagatttggccacgccggcatagtgcagtcctcgggccgaaaccag

SEQ ID NO: 260163 - DNA, 50 bp, Artificial
  Synthetic oligonucleotide
accgtcaaagcaaacgtgctccgttggctggacatccgttccgtccggcg

SEQ ID NO: 260164 - DNA, 50 bp, Artificial
  Synthetic oligonucleotide
acgccagattttcgggctttgcccggggcttcggagtctgccagattacg

SEQ ID NO: 260165 - DNA, 50 bp, Artificial
  Synthetic oligonucleotide
acggatgcagggatacggtggcggatgcacggtgccccatggcctgtgaa

SEQ ID NO: 260166 - DNA, 50 bp, Artificial
  Synthetic oligonucleotide
acggggatagactgcctggccgttgctatcgggacagcccacggtgcata

SEQ ID NO: 260167 - DNA, 50 bp, Artificial
  Synthetic oligonucleotide
acggttatgggacgggcggagctggtaagccgcatatgttccggtctgga

SEQ ID NO: 260168 - DNA, 50 bp, Artificial
  Synthetic oligonucleotide
ccggtgactgcgattgccacccgcatatcagcccctgtcacccgtccaag

SEQ ID NO: 260169 - DNA, 50 bp, Artificial
  Synthetic oligonucleotide
ccggggtgcctgacagaccgactctcgccgtgcgcaaagaatcgctgttc

SEQ ID NO: 260170 - DNA, 50 bp, Artificial
  Synthetic oligonucleotide
ccggccggctttcgcacatatatgttggtttgtctgggcgcggctctgac

SEQ ID NO: 260171 - DNA, 55 bp, Artificial
  Synthetic oligonucleotide
cccctccagcgacaccttgaaatcctcgtatagatgagccaatagctctgacctt

SEQ ID NO: 260172 - DNA, 50 bp, Artificial
  Synthetic oligonucleotide
ccgcttgctcctgccgaaaaccactcccgagccgactgcgatgaacagtc

SEQ ID NO: 260173 - DNA, 50 bp, Artificial
  Synthetic oligonucleotide
ccgagactatagacggccgcccagagatgctccgtctgctccgtgccatt

SEQ ID NO: 260174 - DNA, 50 bp, Artificial
  Synthetic oligonucleotide
cccgggttagagcatgcgggtcggagtggctgtctgtcggaatgggtttt

SEQ ID NO: 260175 - DNA, 50 bp, Artificial
  Synthetic oligonucleotide
acgtctttccatcccccgccccgtaactgcggcttaccaggggctgcatc

SEQ ID NO: 260176 - DNA, 50 bp, Artificial
  Synthetic oligonucleotide
actccctacccgtagtagctgcgatagctccccacggtagccgggggtag

SEQ ID NO: 260177 - DNA, 50 bp, Artificial
  Synthetic oligonucleotide
acttgctgaggacttgccaccaggcctcgcagccgccttgctttatctcg

SEQ ID NO: 260178 - DNA, 55 bp, Artificial
  Synthetic oligonucleotide
ccattgcaccttcgtcaccgcgtattataataggtgcacttcttgcggagaggtc

SEQ ID NO: 260179 - DNA, 55 bp, Artificial
  Synthetic oligonucleotide
ccaccctatgattaatgcgttcatacaagtattgacggggtaaattgcaggcgaa

SEQ ID NO: 260180 - DNA, 55 bp, Artificial
  Synthetic oligonucleotide
ccaaccggagagccggagtcattttatgcggacggcattgaatattacgtgatca

SEQ ID NO: 260181 - DNA, 55 bp, Artificial
  Synthetic oligonucleotide
ctgagtatgttaaagtagtgtggacactccatgatatgtgggctgtaacagggca

SEQ ID NO: 260182 - DNA, 55 bp, Artificial
  Synthetic oligonucleotide
cagccgcgataaatgactatttggcagagcagggagtaccggctttgcaaggcgg

SEQ ID NO: 260183 - DNA, 55 bp, Artificial
  Synthetic oligonucleotide
cagagtattgcagtgtttataccgataggtcagtaccgcagcgtgtttggccttg

SEQ ID NO: 260184 - DNA, 55 bp, Artificial
  Synthetic oligonucleotide
cagacctcagctccactttacggtgatagcggtttatctgttctattcggacacc

SEQ ID NO: 260185 - DNA, 55 bp, Artificial
  Synthetic oligonucleotide
cagaagatgcaattatgtattccttacagaaaaggggcgcagtacgcacgaaccg

SEQ ID NO: 260186 - DNA, 55 bp, Artificial
  Synthetic oligonucleotide
cacttatgctgttggcagttttcggtataggtacgcttaataccgttgttgcgtt

SEQ ID NO: 260187 - DNA, 55 bp, Artificial
  Synthetic oligonucleotide
caagttccagaagacgtgtctccgagataccctcagccggtatgatgtcggtcac

SEQ ID NO: 260188 - DNA, 55 bp, Artificial
  Synthetic oligonucleotide
atgtgtctcttgtagtgcctggaatcacgtacacggagtgctgcgataagtgaac

SEQ ID NO: 260189 - DNA, 55 bp, Artificial
  Synthetic oligonucleotide
atagcatccttcgccggacagggtgcgctttcccgtggcccaaagcacgcatacc

SEQ ID NO: 260190 - DNA, 55 bp, Artificial
  Synthetic oligonucleotide
atacgcggtgagatggggtaaaagaataattcgtcaagtgatgttaactcctcac

SEQ ID NO: 260191 - DNA, 55 bp, Artificial
  Synthetic oligonucleotide
ttggggaatcgaattaaaacgcgaccgatcaattctgtacgcgttgcctagagcc

SEQ ID NO: 260192 - DNA, 55 bp, Artificial
  Synthetic oligonucleotide
cgtccttatccctcttaagcacaacgagccggtctctcagatatcctaccgcaag

SEQ ID NO: 260193 - DNA, 55 bp, Artificial
  Synthetic oligonucleotide
ttatgtttagtcgccatatttggcctattcaccgtagtagactgctcaggcgggg

SEQ ID NO: 260194 - DNA, 55 bp, Artificial
  Synthetic oligonucleotide
ttagcggcagcaggtaggaaacacctgcgggacagtcgtttactcgtattgtccc

SEQ ID NO: 260195 - DNA, 55 bp, Artificial
  Synthetic oligonucleotide
tcgcgcaatggcagtacttcgtccggtcgaacttgaaataaccaactatcccgac

SEQ ID NO: 260196 - DNA, 55 bp, Artificial
  Synthetic oligonucleotide
tcaagtaccgtcataacgcctataatctgttctgccttaatcggtccctcgacag

SEQ ID NO: 260197 - DNA, 55 bp, Artificial
  Synthetic oligonucleotide
tagatcctggaccagtccacagagatgcgcagggccttaaatcccatctgcgaaa

SEQ ID NO: 260198 - DNA, 55 bp, Artificial
  Synthetic oligonucleotide
gttatcactgccatgtgtataaccgtgtccgcaccgcttgtatccagtactgcag

SEQ ID NO: 260199 - DNA, 55 bp, Artificial
  Synthetic oligonucleotide
gttaacatataggtaggggcaatcaggccctgtggagagagaacggaactatgtg

SEQ ID NO: 260200 - DNA, 55 bp, Artificial
  Synthetic oligonucleotide
gtgtgcaacatcctggcggaatatgcggcaaagcttcccaatgaatctgccagcg

SEQ ID NO: 260201 - DNA, 55 bp, Artificial
  Synthetic oligonucleotide
gtccgcggtgaaactgtgtacggttcatgtcgttgagaatgctgatccagtgcgg

SEQ ID NO: 260202 - DNA, 55 bp, Artificial
  Synthetic oligonucleotide
gggtccttaaccttctgttcctcaagcctgtcaagtgttctgctgccatatagga

SEQ ID NO: 260203 - DNA, 55 bp, Artificial
  Synthetic oligonucleotide
cggttcactgtgattgtcaggatatatgtaagcgaaacccaaattttgcgctcgc

SEQ ID NO: 260204 - DNA, 55 bp, Artificial
  Synthetic oligonucleotide
ggggtgcatgggcaccacggggaatttgaaggctattatgtgctgaagggacagg

SEQ ID NO: 260205 - DNA, 55 bp, Artificial
  Synthetic oligonucleotide
ggggcagactgacgtaagaaccgacatatatggtatcggggcggttatgtaccac

SEQ ID NO: 260206 - DNA, 55 bp, Artificial
  Synthetic oligonucleotide
ggcgcgtgaataattacgacaagcatagcagtcgcagtcttcctcaataggtcgg

SEQ ID NO: 260207 - DNA, 55 bp, Artificial
  Synthetic oligonucleotide
gctgggcaagaatttattgcactgcccatacacggttcccaaactttgacggagc

SEQ ID NO: 260208 - DNA, 55 bp, Artificial
  Synthetic oligonucleotide
gcgatgtcttcaactctccgcgcttcctgactagatcagacgcgactctcccacc

SEQ ID NO: 260209 - DNA, 55 bp, Artificial
  Synthetic oligonucleotide
gcgagtgaccggtgttcattaaatagggtagttgcttaagattgttccacgactg

SEQ ID NO: 260210 - DNA, 55 bp, Artificial
  Synthetic oligonucleotide
gcctgccgtaagagtaaagctgccgtcaagtatcttaattccgtccttgcctgca

SEQ ID NO: 260211 - DNA, 55 bp, Artificial
  Synthetic oligonucleotide
gccgccctcaatgcccggtcaagcacaaaaccactggatagcagcagtgtatccg

SEQ ID NO: 260212 - DNA, 55 bp, Artificial
  Synthetic oligonucleotide
gccgacagacattttgttacgctgctcacaaagcacacgcccgtctcccaaagtc

SEQ ID NO: 260213 - DNA, 55 bp, Artificial
  Synthetic oligonucleotide
gcagcctaaaatagccttggcgcatcaaaatatgattacttcggccgctaatttc

SEQ ID NO: 260214 - DNA, 55 bp, Artificial
  Synthetic oligonucleotide
cgggccgaaccgcatacaattgccttgcagctggtactgcgtcaagtagatctga

SEQ ID NO: 260215 - DNA, 55 bp, Artificial
  Synthetic oligonucleotide
gatacactctatcttgaatatgcaaggcgtacattccgaattttcctgtcgctcg

SEQ ID NO: 260216 - DNA, 55 bp, Artificial
  Synthetic oligonucleotide
gacactgcccgggtcatccttcaggccaaatgccatggtgaatccataggtgccc

SEQ ID NO: 260217 - DNA, 55 bp, Artificial
  Synthetic oligonucleotide
gaatatgcaatgctaagataaagtcagacgagacagtaaggatatcgctgattgg

SEQ ID NO: 260218 - DNA, 55 bp, Artificial
  Synthetic oligonucleotide
gaagtacggatgtgatgggttctgtaatacactgctataattcgactgcacatgg

SEQ ID NO: 260219 - DNA, 55 bp, Artificial
  Synthetic oligonucleotide
cttggggtgtaaggttaaccgctatgaaacggatgcagtggcacagcagtttgct

SEQ ID NO: 260220 - DNA, 55 bp, Artificial
  Synthetic oligonucleotide
cttccaagcatcggtccgaaacagctgtgcaggatatacatgagtgcatggcagg

SEQ ID NO: 260221 - DNA, 55 bp, Artificial
  Synthetic oligonucleotide
cttaactttgctgttgttacttggcaacgtagacgtgtgctggagctattttgtc

SEQ ID NO: 260222 - DNA, 55 bp, Artificial
  Synthetic oligonucleotide
ctggttgttctgcggcaattcataatcataagggtggcgtacaaatgcggattac

SEQ ID NO: 260223 - DNA, 55 bp, Artificial
  Synthetic oligonucleotide
aagtcgccggggccacgcaaacgcaaatcagcttccgccagttgataaccatcat

SEQ ID NO: 260224 - DNA, 55 bp, Artificial
  Synthetic oligonucleotide
acttaccccaaccagatgcggcctggccaagaccaatgcattgcgggtagtgagc

SEQ ID NO: 260225 - DNA, 55 bp, Artificial
  Synthetic oligonucleotide
cggcttactttaggcgacgcacagcaaatgcaaccgtattttactggaattgtcg

SEQ ID NO: 260226 - DNA, 55 bp, Artificial
  Synthetic oligonucleotide
aaggaaccagattcaggcaccatggcccgatgatgactcctgcgataatataacc

SEQ ID NO: 260227 - DNA, 54 bp, Artificial
  Synthetic oligonucleotide
cctactacggtgaggacaccctgatgatggcggttcctgaactgagcggcaggg

SEQ ID NO: 260228 - DNA, 54 bp, Artificial
  Synthetic oligonucleotide
gaactccggtaattagtgtgacttgagtctgttgttcctgggtacatcagtttt

SEQ ID NO: 260229 - DNA, 54 bp, Artificial
  Synthetic oligonucleotide
cctggatccccgtaattcggtctattccattttaagggaggccattatctgtga

SEQ ID NO: 260230 - DNA, 53 bp, Artificial
  Synthetic oligonucleotide
gggtagacgtcagcggtgtatccaaaggtaaaggctaccaaggtaacgtgaaa

SEQ ID NO: 260231 - DNA, 54 bp, Artificial
  Synthetic oligonucleotide
caaagattgccgagcaatataccggtacatgctaccctggatgtgagacgaagg

SEQ ID NO: 260232 - DNA, 54 bp, Artificial
  Synthetic oligonucleotide
aaaagtgtgggcacccaagtttcgagactgtccaactttgtcgtcgcaatggcc

SEQ ID NO: 260233 - DNA, 53 bp, Artificial
  Synthetic oligonucleotide
ccggccttatgcatgtcttcggccaatttagtcggggaatggaaaagtgggta

SEQ ID NO: 260234 - DNA, 52 bp, Artificial
  Synthetic oligonucleotide
gatcgtacattttgagcaggccggttacccatggcatcaaagacccctgaat

SEQ ID NO: 260235 - DNA, 52 bp, Artificial
  Synthetic oligonucleotide
cttcatttgggcgaagttcaactaatattgaggcgtaaggcgaattaagatg

SEQ ID NO: 260236 - DNA, 55 bp, Artificial
  Synthetic oligonucleotide
cggatatgcagccgaaaattaaggctaaacttgggcagtgggtgtatgtcacggc

SEQ ID NO: 260237 - DNA, 52 bp, Artificial
  Synthetic oligonucleotide
aggcagtgtgaacaacgaattcatgaagtacaccggggattggaggtttaac

SEQ ID NO: 260238 - DNA, 52 bp, Artificial
  Synthetic oligonucleotide
gcggtgaaacgcataaatttgagtttgcggtagcgggaagggacgtgcggca

SEQ ID NO: 260239 - DNA, 52 bp, Artificial
  Synthetic oligonucleotide
ggggcggcaattactgttgttgatgctaagaaatatcgtcgctatttgcaga

SEQ ID NO: 260240 - DNA, 51 bp, Artificial
  Synthetic oligonucleotide
ccgcgaaggagcggcaagagcataagcaggcattttagagcggccggtact

SEQ ID NO: 260241 - DNA, 51 bp, Artificial
  Synthetic oligonucleotide
ccctgaggcagacgacactatgcagccgtggggcggctatgacgtacctta

SEQ ID NO: 260242 - DNA, 51 bp, Artificial
  Synthetic oligonucleotide
aatcacagtacaaggcgtgtatggagcctgcacaggccgagggatgggtgc

SEQ ID NO: 260243 - DNA, 51 bp, Artificial
  Synthetic oligonucleotide
actgctccgacctgcgcacatgcctcaatctgaagcacccccggcataacg

SEQ ID NO: 260244 - DNA, 51 bp, Artificial
  Synthetic oligonucleotide
cagccttgcgttttccctgttcacgtcctgctattaacgcggccgctgcaa

SEQ ID NO: 260245 - DNA, 51 bp, Artificial
  Synthetic oligonucleotide
cagcctgcaaggggtttcgcacctaccgcagcgggtaaaatgtgccacttt

SEQ ID NO: 260246 - DNA, 51 bp, Artificial
  Synthetic oligonucleotide
aaaatacgacccgacatccggagtaagcctgggaagcggtgttaccattaa

SEQ ID NO: 260247 - DNA, 55 bp, Artificial
  Synthetic oligonucleotide
cggaacttgttaacggtgtcagaagcgagcaccacatatgcagtgagtgtgcatc

SEQ ID NO: 260248 - DNA, 51 bp, Artificial
  Synthetic oligonucleotide
aaggtacacagctgcgcggggcaacaggtgagaatgcggttattgtcgggg

SEQ ID NO: 260249 - DNA, 51 bp, Artificial
  Synthetic oligonucleotide
acggctgcacgcatcccggattgtatcagggaacgcagggcgcaagaatta

SEQ ID NO: 260250 - DNA, 51 bp, Artificial
  Synthetic oligonucleotide
agcgctctcaagctgtggagtcctgtgacagaccgtgacggcacgagtccg

SEQ ID NO: 260251 - DNA, 51 bp, Artificial
  Synthetic oligonucleotide
agccgagacaagagaagacgctgccaggagccttaaggaccaggggctgtt

SEQ ID NO: 260252 - DNA, 51 bp, Artificial
  Synthetic oligonucleotide
ataacaggtgacggctgcacgcatcccggattgtatcagggaacgcagggc

SEQ ID NO: 260253 - DNA, 51 bp, Artificial
  Synthetic oligonucleotide
attgcccagattcactgcgagagcacctgcgattgccgtaatcccggcgac

SEQ ID NO: 260254 - DNA, 50 bp, Artificial
  Synthetic oligonucleotide
acccttggccacccatcggccaagttgccagcggactgcaaaccctatcc

SEQ ID NO: 260255 - DNA, 50 bp, Artificial
  Synthetic oligonucleotide
aattgtctttacaaggtccgagggccagcccagggttgccactgcgttgg

SEQ ID NO: 260256 - DNA, 50 bp, Artificial
  Synthetic oligonucleotide
accctggaggcagactggcggattgcacggcctgactcccccttatcctc

SEQ ID NO: 260257 - DNA, 50 bp, Artificial
  Synthetic oligonucleotide
acaaggtccgagggccagcccagggttgccactgcgttggacagggcgtc

SEQ ID NO: 260258 - DNA, 55 bp, Artificial
  Synthetic oligonucleotide
cgatacaggtattcattacgtgccaagctgccgtactcttgcaaaacattgatta

SEQ ID NO: 260259 - DNA, 50 bp, Artificial
  Synthetic oligonucleotide
ctgccgaagacagctaggtcccgcaagggtcaaaggtaacacgcctgccg

SEQ ID NO: 260260 - DNA, 50 bp, Artificial
  Synthetic oligonucleotide
acagggtgcgctttcccgtggcccaaagcacgcatacccccaggcccaca

SEQ ID NO: 260261 - DNA, 50 bp, Artificial
  Synthetic oligonucleotide
acagcgctccatggcatagcagaaggggaggttccgcttcgacgccccaa

SEQ ID NO: 260262 - DNA, 50 bp, Artificial
  Synthetic oligonucleotide
accgccgttggctttgaccggtgccatttttggggcaatgctttccggcc

SEQ ID NO: 260263 - DNA, 50 bp, Artificial
  Synthetic oligonucleotide
acacaccgcttctgccggacatacggttccaggcggacacgctgcctcct

SEQ ID NO: 260264 - DNA, 50 bp, Artificial
  Synthetic oligonucleotide
acagacaggccccaaagggaatgacacacccataaccgtcccgctgggga

SEQ ID NO: 260265 - DNA, 50 bp, Artificial
  Synthetic oligonucleotide
acacagaaacccacttgccccggctacactttcctcggctggcgagtgct

SEQ ID NO: 260266 - DNA, 50 bp, Artificial
  Synthetic oligonucleotide
cgtcgttacggtggcggacggagcttcattgccggaggccccaaaactta

SEQ ID NO: 260267 - DNA, 50 bp, Artificial
  Synthetic oligonucleotide
acccttttggaggggagccatgacgttacccacggggaaaaggtggccta

SEQ ID NO: 260268 - DNA, 50 bp, Artificial
  Synthetic oligonucleotide
accgcaggaaggtccccatggagccgtcaatgcccagcccgtctaagaac

SEQ ID NO: 260269 - DNA, 55 bp, Artificial
  Synthetic oligonucleotide
cccatatgtcgcggtgtaacccataagtgctgtctctatttctcgctttattgct

SEQ ID NO: 260270 - DNA, 55 bp, Artificial
  Synthetic oligonucleotide
gcgctcactgtaatcgccaacaaactggatcgagagattgtccgtcggatcgatg

SEQ ID NO: 260271 - DNA, 55 bp, Artificial
  Synthetic oligonucleotide
gctggtcccctgggaaacgtgttccggtgagccgttaaccatcctccgatgatac

SEQ ID NO: 260272 - DNA, 55 bp, Artificial
  Synthetic oligonucleotide
ggactgactcgtcaccctaaagaggtagggtgcgatccccttgaggcgtctaaca

SEQ ID NO: 260273 - DNA, 55 bp, Artificial
  Synthetic oligonucleotide
ggcgccgctaggacaccggtcttcgatacagcgatagctggacagcactgattgg

SEQ ID NO: 260274 - DNA, 55 bp, Artificial
  Synthetic oligonucleotide
ggcgtagtacaacgacatcatcagtcgctctttctccggaagctgggctacggac

SEQ ID NO: 260275 - DNA, 55 bp, Artificial
  Synthetic oligonucleotide
gtactatcgcttcggctgtggacgcgacaagcgcgttaaagagttgtggggcgat

SEQ ID NO: 260276 - DNA, 55 bp, Artificial
  Synthetic oligonucleotide
gtagggagattgggacatgggtggcgtcgtactgcagatttatacggccaccgag

SEQ ID NO: 260277 - DNA, 55 bp, Artificial
  Synthetic oligonucleotide
gtcgagttggtgaaacgtgaggcattcgtcctcccatggaagttcgcagaactcc

SEQ ID NO: 260278 - DNA, 55 bp, Artificial
  Synthetic oligonucleotide
gtgagcacattcactttgtacacctgcgcaatatacgccgtgagtctgatggttc

SEQ ID NO: 260279 - DNA, 55 bp, Artificial
  Synthetic oligonucleotide
tattggccgtggcgtacacaccagtgatggaaccggggctggattctcgcgccag

SEQ ID NO: 260280 - DNA, 55 bp, Artificial
  Synthetic oligonucleotide
ccgggccgtaataagcgtgagcgtcatggcgtagggatcgagaatgagttgcccc

SEQ ID NO: 260281 - DNA, 55 bp, Artificial
  Synthetic oligonucleotide
tctgttgcgctctctgtgagagacgcttccccgccctggctggtttgcatggtca

SEQ ID NO: 260282 - DNA, 55 bp, Artificial
  Synthetic oligonucleotide
ttagtcgcttttgagcctcttatgctcaactcgtagcataaaccgcagattatta

SEQ ID NO: 260283 - DNA, 53 bp, Artificial
  Synthetic oligonucleotide
attctgtcagcgaatctgtagtgcgcgatggtcttgggaaaaccgtagcaggt

SEQ ID NO: 260284 - DNA, 53 bp, Artificial
  Synthetic oligonucleotide
tagagtctgcgaagcctgttccttcggccgcatactgggcaatcatttgtaca

SEQ ID NO: 260285 - DNA, 53 bp, Artificial
  Synthetic oligonucleotide
tagttgcccactcggtcctcatcacgattgagacgccacaagcgaatgtgtgt

SEQ ID NO: 260286 - DNA, 52 bp, Artificial
  Synthetic oligonucleotide
actcatcgcggaggaggccagtgggttcatctattacgtctccctcaagggg

SEQ ID NO: 260287 - DNA, 52 bp, Artificial
  Synthetic oligonucleotide
gggcaagagttgatgccctgttgaccctacattgtgagctccagcaacgaac

SEQ ID NO: 260288 - DNA, 52 bp, Artificial
  Synthetic oligonucleotide
ttgatcagtcgtctgcgatgctggctcgggctgccacgcgggtaccccaagc

SEQ ID NO: 260289 - DNA, 51 bp, Artificial
  Synthetic oligonucleotide
atgccccagggattagtttctggatcgatcgcttgtctcaccacgcgaatc

SEQ ID NO: 260290 - DNA, 50 bp, Artificial
  Synthetic oligonucleotide
cgccccttgatacttctggctcgcttgaccgtattactgatcgacttgtc

SEQ ID NO: 260291 - DNA, 55 bp, Artificial
  Synthetic oligonucleotide
cgattcaatgcgaaaagcgtcgagggcgacatcttgcgtggaggaagaaaacgcc

SEQ ID NO: 260292 - DNA, 50 bp, Artificial
  Synthetic oligonucleotide
attcgtaaccagcagtacaagttaatagagtacgcggagggccaacaggt

SEQ ID NO: 260293 - DNA, 50 bp, Artificial
  Synthetic oligonucleotide
acaacgcgctttctggtcatagggcgcagcgaggtgcctcccagcggcat

SEQ ID NO: 260294 - DNA, 50 bp, Artificial
  Synthetic oligonucleotide
aatttacagcggactcgcgcagatgggtccaccggggtacctcgacgggc

SEQ ID NO: 260295 - DNA, 50 bp, Artificial
  Synthetic oligonucleotide
aatgggctcaccgccctccgtcgacatcatccagattcgggtgcgggatt

SEQ ID NO: 260296 - DNA, 50 bp, Artificial
  Synthetic oligonucleotide
aactgggttacgcaggatggttcccctggcccgaccggctctggaggttt

SEQ ID NO: 260297 - DNA, 50 bp, Artificial
  Synthetic oligonucleotide
aacggcatccaacgggtaaccgtagacgtggggtcgtcgcggtcttcaga

SEQ ID NO: 260298 - DNA, 50 bp, Artificial
  Synthetic oligonucleotide
aacgctggtaaagcgcgcctcgcgccaactcacgccgccgtcaaaggata

SEQ ID NO: 260299 - DNA, 49 bp, Artificial
  Synthetic oligonucleotide
aacgccccggggtctgcccaaaggcggtcgggtggattccgtagaaccc

SEQ ID NO: 260300 - DNA, 50 bp, Artificial
  Synthetic oligonucleotide
aacgcaaaggcccagacggagcgcatcttcttgagcatgatccgcggtgg

SEQ ID NO: 260301 - DNA, 50 bp, Artificial
  Synthetic oligonucleotide
aacgacggtccgttgcgagcctcaagtgatcgtcgctcaagccagtgcac

SEQ ID NO: 260302 - DNA, 55 bp, Artificial
  Synthetic oligonucleotide
catgggtgtgcctgaaaactgatgaccggatacccgcaaattctcagtaaggcga

SEQ ID NO: 260303 - DNA, 50 bp, Artificial
  Synthetic oligonucleotide
aaccgaccagaaggccgaatgaaaccctgcaagcgctcgattcacgcgta

SEQ ID NO: 260304 - DNA, 50 bp, Artificial
  Synthetic oligonucleotide
aaccccgaggcctatcgggacagctttgcattgcgggcctacagtcgctg

SEQ ID NO: 260305 - DNA, 50 bp, Artificial
  Synthetic oligonucleotide
aaccccgaagcgcgttatggcactggtatggcagtggtcaccccaccacc

SEQ ID NO: 260306 - DNA, 50 bp, Artificial
  Synthetic oligonucleotide
aacaccgtagaaagccgagacgttgcgctgccagatcttgcgtcccgtgc

SEQ ID NO: 260307 - DNA, 50 bp, Artificial
  Synthetic oligonucleotide
aaagaggggacgggagtatagaagcgcgggcggtatgacgacaagccggg

SEQ ID NO: 260308 - DNA, 50 bp, Artificial
  Synthetic oligonucleotide
aaagacagtagcggctctggggattcggccgcgccaagtgtagcgacatc

SEQ ID NO: 260309 - DNA, 50 bp, Artificial
  Synthetic oligonucleotide
aaacgaccaccggcctcaaactgccagtcccccgcgtgaaaatcctggac

SEQ ID NO: 260310 - DNA, 50 bp, Artificial
  Synthetic oligonucleotide
aaacaggccgtctgtgccggttaacgccgtttgccgaagatcccggttcg

SEQ ID NO: 260311 - DNA, 50 bp, Artificial
  Synthetic oligonucleotide
aaaatcctgtctagcatcagcgggcccctagtgatcgtgcgacgcgccag

SEQ ID NO: 260312 - DNA, 50 bp, Artificial
  Synthetic oligonucleotide
aaaaccggagctgcacgagtaaggtagcgcgcctcaacgttcccatcgga

SEQ ID NO: 260313 - DNA, 55 bp, Artificial
  Synthetic oligonucleotide
cgcgattctcctcagcggtattaagagagggcggaagttcccagacaccgtcctc

SEQ ID NO: 260314 - DNA, 50 bp, Artificial
  Synthetic oligonucleotide
aaaaccgatcgacgctatgtggggtcagccggcctctatcgcgattggga

SEQ ID NO: 260315 - DNA, 50 bp, Artificial
  Synthetic oligonucleotide
aatgcttactccatgctgacggctttgtttggcaccttggcctcgggggc

SEQ ID NO: 260316 - DNA, 50 bp, Artificial
  Synthetic oligonucleotide
aatcgcggggataaactgcagcccgtcaccccagcttggcgtgagggtct

SEQ ID NO: 260317 - DNA, 50 bp, Artificial
  Synthetic oligonucleotide
aatcgccaaaccgtggaacattggttgggcctcctgcgtaagcaacgggg

SEQ ID NO: 260318 - DNA, 50 bp, Artificial
  Synthetic oligonucleotide
aatccgccacagtcaacccgcagtgccgggtatcaattctccccggagag

SEQ ID NO: 260319 - DNA, 50 bp, Artificial
  Synthetic oligonucleotide
aatccatcgaaaccacgcgggctgcccctgaaatcgcggtgcaatgctca

SEQ ID NO: 260320 - DNA, 50 bp, Artificial
  Synthetic oligonucleotide
aatcaggacggggcatctccgagcagcacagaacgcctgtatgccggacc

SEQ ID NO: 260321 - DNA, 50 bp, Artificial
  Synthetic oligonucleotide
aagttccgcgggaataccccgcaaacgggtttgtagcaggcgttgttgcc

SEQ ID NO: 260322 - DNA, 50 bp, Artificial
  Synthetic oligonucleotide
aagtgccggctttacgcctgctttgttccgtgagcgactgtccgaggacg

SEQ ID NO: 260323 - DNA, 50 bp, Artificial
  Synthetic oligonucleotide
aagtctgaagcggggataggatgcgcaatcgcgtacccctgagcgcgacc

SEQ ID NO: 260324 - DNA, 55 bp, Artificial
  Synthetic oligonucleotide
cgctccgtacgctctacactatcagcactcccagcaatatctcgcacgatcgggg

SEQ ID NO: 260325 - DNA, 50 bp, Artificial
  Synthetic oligonucleotide
aagtccagatgccgattcccccataagcgctcgaccctcagggcggggtt

SEQ ID NO: 260326 - DNA, 50 bp, Artificial
  Synthetic oligonucleotide
aagggggctcgccgttaccggctaccaacagggtgtaggaatcggcttcc

SEQ ID NO: 260327 - DNA, 50 bp, Artificial
  Synthetic oligonucleotide
aagggagtgccgtcactcacgtcgctattatctctcggggcacgcgctct

SEQ ID NO: 260328 - DNA, 50 bp, Artificial
  Synthetic oligonucleotide
aaggcgccctctctcctagcgcgacaatcccgacaggggccacgagggaa

SEQ ID NO: 260329 - DNA, 50 bp, Artificial
  Synthetic oligonucleotide
aaggcgattgataaagcacgactgggacgcgagttgacggccccagacct

SEQ ID NO: 260330 - DNA, 50 bp, Artificial
  Synthetic oligonucleotide
aagctcgcgatcgtaggtctcggaccacaggtgatacccgccctcggcct

SEQ ID NO: 260331 - DNA, 50 bp, Artificial
  Synthetic oligonucleotide
aagcgggtaagggcacgaggttccacaacgctggtaaagcgcgcctcgcg

SEQ ID NO: 260332 - DNA, 50 bp, Artificial
  Synthetic oligonucleotide
aagcatggacctctggccctatcgctgggaccacctcctgaggtatcgct

SEQ ID NO: 260333 - DNA, 55 bp, Artificial
  Synthetic oligonucleotide
cgttccgcggcacgctagcccggaatgcttgtctccatggatagcataatacccc

SEQ ID NO: 260334 - DNA, 55 bp, Artificial
  Synthetic oligonucleotide
ctccgcgtccctcaatacgccagtaacagaatcacgcttcggcgtgtttcgaatg

SEQ ID NO: 260335 - DNA, 55 bp, Artificial
  Synthetic oligonucleotide
gatcttggcgaagcccaagattccccgaccgtccaagccccacttgagcccttcg

SEQ ID NO: 260336 - DNA, 55 bp, Artificial
  Synthetic oligonucleotide
cttttcaagatacacttaactatgaaattcaacaggttgagggtttatctcttgg

SEQ ID NO: 260337 - DNA, 54 bp, Artificial
  Synthetic oligonucleotide
gggagggactttcttgaaaccagagtattcccttggcacgaaagatattactgg

SEQ ID NO: 260338 - DNA, 52 bp, Artificial
  Synthetic oligonucleotide
cccagtgggtctaggtaaacgctcctcgctacccgatgttaccaccaaaggt

SEQ ID NO: 260339 - DNA, 55 bp, Artificial
  Synthetic oligonucleotide
ccatgagaatatctccttgagagtctcctaccatgacagttttctcgggtgatgt

SEQ ID NO: 260340 - DNA, 55 bp, Artificial
  Synthetic oligonucleotide
ccagcgatcaggtgcgtttattagccatgaactttaacacaaccgttgatcgagt

SEQ ID NO: 260341 - DNA, 55 bp, Artificial
  Synthetic oligonucleotide
caactgctattagacgcagtagttgactatttaccctcacccctagatgttcccc

SEQ ID NO: 260342 - DNA, 55 bp, Artificial
  Synthetic oligonucleotide
gggtattgcccgtcgtaacgatgatccggggagtattgccagtcgtgagttaggc

SEQ ID NO: 260343 - DNA, 55 bp, Artificial
  Synthetic oligonucleotide
gtctggccttgtccagtgttgctcagtagactgacttgacaggaagtaagatgac

SEQ ID NO: 260344 - DNA, 55 bp, Artificial
  Synthetic oligonucleotide
atagctgtaaattttcgcgagaactgagcaaaacccgtctctctatctcttctag

SEQ ID NO: 260345 - DNA, 55 bp, Artificial
  Synthetic oligonucleotide
tcaatcatttgctatgctgggtatcaggagtgaacaacaatcgctctatcctaaa

SEQ ID NO: 260346 - DNA, 55 bp, Artificial
  Synthetic oligonucleotide
acaatacacccatagcgttccaccagtccccgtaaggcttcgtaagcccattctg

SEQ ID NO: 260347 - DNA, 55 bp, Artificial
  Synthetic oligonucleotide
gctaagccggcgttccaagcgtgtcttgctatcccagcgtgtttatgtagctgcg

SEQ ID NO: 260348 - DNA, 55 bp, Artificial
  Synthetic oligonucleotide
tgtagggcggtctaagttgtagatgcaagatatcactcgtagggtgggtaatgtc

SEQ ID NO: 260349 - DNA, 54 bp, Artificial
  Synthetic oligonucleotide
gctgtttgatcgaacttgccctaaactagattagttcacgggacttgcactaca

SEQ ID NO: 260350 - DNA, 53 bp, Artificial
  Synthetic oligonucleotide
cttacagtggttaataaatctcgtttacggtttcctgagactcgtatccgaat

SEQ ID NO: 260351 - DNA, 53 bp, Artificial
  Synthetic oligonucleotide
tcactggttaacggagtgatcaatttcaggtccgtagtctacccggctctctc

SEQ ID NO: 260352 - DNA, 53 bp, Artificial
  Synthetic oligonucleotide
ttttcattgggaaaagcgagatcgaccttttcaagcggtttatcgtcaggtta

SEQ ID NO: 260353 - DNA, 53 bp, Artificial
  Synthetic oligonucleotide
cccctaaagccaatgcaggagtctgagtcccgaataaaataacggcgatcgct

SEQ ID NO: 260354 - DNA, 52 bp, Artificial
  Synthetic oligonucleotide
attgagatacttggggtgcagcaataccaaccccgttggcatccctagctgt

SEQ ID NO: 260355 - DNA, 52 bp, Artificial
  Synthetic oligonucleotide
tagaggttgctcggcaattctatgagggtttactacagttaaacgtggctga

SEQ ID NO: 260356 - DNA, 50 bp, Artificial
  Synthetic oligonucleotide
aacctgtcccctttggtgtccctggagagttatatatcggaggtgacggg

SEQ ID NO: 260357 - DNA, 50 bp, Artificial
  Synthetic oligonucleotide
tttgtgggacgagttggggagggtttgcgtcttggagaagggcgatcgcc

SEQ ID NO: 260358 - DNA, 55 bp, Artificial
  Synthetic oligonucleotide
gaggtaataatcacaaacaagaaccaccctatggggcagacttagtcagactttg

SEQ ID NO: 260359 - DNA, 50 bp, Artificial
  Synthetic oligonucleotide
ttgcctgtcgtgtgggactgatgcctcctcgggtacatggtagcgcgtta

SEQ ID NO: 260360 - DNA, 50 bp, Artificial
  Synthetic oligonucleotide
aagcagccccgactttagccgccgcccatagcatttctcgggctgtatct

SEQ ID NO: 260361 - DNA, 50 bp, Artificial
  Synthetic oligonucleotide
tggcccaagtccctcgatacgatttttggtggggcccaaaccgtctgcga

SEQ ID NO: 260362 - DNA, 50 bp, Artificial
  Synthetic oligonucleotide
tcctcctctgtccacaggagctccacggtatagcctaccgcttgagcgcg

SEQ ID NO: 260363 - DNA, 50 bp, Artificial
  Synthetic oligonucleotide
tccatgtggggtcggcaatcgtagggcgcagcacactgggccacaaatgt

SEQ ID NO: 260364 - DNA, 50 bp, Artificial
  Synthetic oligonucleotide
tccatgctcacacctaatcctgaaaccggctgggatattatgacactcta

SEQ ID NO: 260365 - DNA, 50 bp, Artificial
  Synthetic oligonucleotide
accttccgcagatcccattgaaccccggaaccccgtaacattgggccaga

SEQ ID NO: 260366 - DNA, 50 bp, Artificial
  Synthetic oligonucleotide
agtaaactagcaaaacgctttcgctcaattcgtcaagacttagcacctct

SEQ ID NO: 260367 - DNA, 50 bp, Artificial
  Synthetic oligonucleotide
tcaaggtggccgtcagtcctaacctccgtctggcctgtagttctgccgta

SEQ ID NO: 260368 - DNA, 50 bp, Artificial
  Synthetic oligonucleotide
tatgttggcggtgctttgggggtcattcacgctgcggtaatggcacggtt

SEQ ID NO: 260369 - DNA, 55 bp, Artificial
  Synthetic oligonucleotide
ctatgggagccgaaactactacataagaattgccttgaggctgcatataaacccc

SEQ ID NO: 260370 - DNA, 50 bp, Artificial
  Synthetic oligonucleotide
taccgagaaaggtggtgtccgcaccgaaccgcaagacttttgcgtagcct

SEQ ID NO: 260371 - DNA, 50 bp, Artificial
  Synthetic oligonucleotide
taatgccagggaatggtcgtgtagctgatcccggttgggtgggtgttgcg

SEQ ID NO: 260372 - DNA, 50 bp, Artificial
  Synthetic oligonucleotide
taaatgaccccagataccagcccccaaaccgtccttatcacagccggccg

SEQ ID NO: 260373 - DNA, 50 bp, Artificial
  Synthetic oligonucleotide
gtggcgcgtccagtcctcctctgtccacaggagctccacggtatagccta

SEQ ID NO: 260374 - DNA, 50 bp, Artificial
  Synthetic oligonucleotide
gtggcgcgatgactccatcaaacggggtctagcggttgacggttgggcta

SEQ ID NO: 260375 - DNA, 50 bp, Artificial
  Synthetic oligonucleotide
atgcctagtgccgctacgggtcagttcctcactgcgctccgacgctatcg

SEQ ID NO: 260376 - DNA, 50 bp, Artificial
  Synthetic oligonucleotide
gtcgtgtagctgatcccggttgggtgggtgttgcgccgggtaacggggtg

SEQ ID NO: 260377 - DNA, 50 bp, Artificial
  Synthetic oligonucleotide
gtccggtgcggacaccacctttctcggtaacaccttcacgggcgtgcaaa

SEQ ID NO: 260378 - DNA, 50 bp, Artificial
  Synthetic oligonucleotide
gtccaccagtccatgtggggtcggcaatcgtagggcgcagcacactgggc

SEQ ID NO: 260379 - DNA, 50 bp, Artificial
  Synthetic oligonucleotide
gtaacccggccagtgccatttgggatgcttgttgtgatcgcgcgccgact

SEQ ID NO: 260380 - DNA, 55 bp, Artificial
  Synthetic oligonucleotide
cgtctaacatgggtcttcccagacggctatctcgcattaatggggttaatagtcg

SEQ ID NO: 260381 - DNA, 50 bp, Artificial
  Synthetic oligonucleotide
gtaaacagcagcgagggcgcatgagagggttggcacgtcgaggcagtacc

SEQ ID NO: 260382 - DNA, 50 bp, Artificial
  Synthetic oligonucleotide
ccgcaggacccgttcgagtaactgcggccgccacaaaactatcagccgtg

SEQ ID NO: 260383 - DNA, 50 bp, Artificial
  Synthetic oligonucleotide
cggatgaccaggggtttcccacagcgccggtctttaaactggtgccccaa

SEQ ID NO: 260384 - DNA, 50 bp, Artificial
  Synthetic oligonucleotide
gcccgtgaaggtgttaccgagaaaggtggtgtccgcaccggaccgcaaga

SEQ ID NO: 260385 - DNA, 50 bp, Artificial
  Synthetic oligonucleotide
gcgggctgccctgaagagattccaggcaaacctatggcttttctcgggga

SEQ ID NO: 260386 - DNA, 50 bp, Artificial
  Synthetic oligonucleotide
gccggcagacaaaccgagttatggcagcccgaagggcttaatgttgggct

SEQ ID NO: 260387 - DNA, 55 bp, Artificial
  Synthetic oligonucleotide
gctcacgcttacagacttccttctagtaagggttgtaagttactcctgaagtggg

SEQ ID NO: 260388 - DNA, 52 bp, Artificial
  Synthetic oligonucleotide
cgagagtaacccgccaagggagtttagaagaggtttggttgactgttaagcc

SEQ ID NO: 260389 - DNA, 55 bp, Artificial
  Synthetic oligonucleotide
ccgcccaagattgttcgattaaagtgccgtctgaggtagctaaaataacgctctg

SEQ ID NO: 260390 - DNA, 55 bp, Artificial
  Synthetic oligonucleotide
cccgtgctgagttaatgagtgctaacttggctggtgttattttacggggtgcaac

SEQ ID NO: 260391 - DNA, 55 bp, Artificial
  Synthetic oligonucleotide
catgccgtttcgcctcgaatctggcaatgtgttcagatacttggtcggacgcggg

SEQ ID NO: 260392 - DNA, 55 bp, Artificial
  Synthetic oligonucleotide
ctagccagaacgtccgggtgtggtgttgtgacggccaccgttgcagcagaacagg

SEQ ID NO: 260393 - DNA, 55 bp, Artificial
  Synthetic oligonucleotide
ctgccacggtgtgcggttgacttctagtggctcaacagtagccgcacaacctcac

SEQ ID NO: 260394 - DNA, 55 bp, Artificial
  Synthetic oligonucleotide
ctgccatgggaagacgtgcagtccatcgctgccgtgctcagggacgccagccgtt

SEQ ID NO: 260395 - DNA, 55 bp, Artificial
  Synthetic oligonucleotide
gacctccagcgtgaccaatcaacgtgagttgttggttaaggaacgctggtgtccg

SEQ ID NO: 260396 - DNA, 55 bp, Artificial
  Synthetic oligonucleotide
gcggtactcgtaccagtcgtccttgagcgagctcacgtgcaccagcccctccacg

SEQ ID NO: 260397 - DNA, 55 bp, Artificial
  Synthetic oligonucleotide
gctcagtaggagcaagaccgccgattcaaggttggctaaatctccgatacctggc

SEQ ID NO: 260398 - DNA, 55 bp, Artificial
  Synthetic oligonucleotide
ggacccatcgcgggaatcggatgcaacgtgggaatcagccatggccctgcacaac

SEQ ID NO: 260399 - DNA, 52 bp, Artificial
  Synthetic oligonucleotide
aatggggccatcccgtcccacgaccctgttttcatgtcccgttaccgcggcc

SEQ ID NO: 260400 - DNA, 55 bp, Artificial
  Synthetic oligonucleotide
gggccactattagcggcttcaccagactcaactgttctcctaatcgcgttggcgg

SEQ ID NO: 260401 - DNA, 55 bp, Artificial
  Synthetic oligonucleotide
gtaccacttagccatccaatccacttagcagtcagccctgctggactatcagttc

SEQ ID NO: 260402 - DNA, 55 bp, Artificial
  Synthetic oligonucleotide
cacagtgatacggcatgttaagggccttcccggaacgactcgagcgcaggcgatc

SEQ ID NO: 260403 - DNA, 55 bp, Artificial
  Synthetic oligonucleotide
gttcaactcactccattcggcgcacaacgtccagttcacgacagccatccagcgc

SEQ ID NO: 260404 - DNA, 55 bp, Artificial
  Synthetic oligonucleotide
tcaggcccatttcgaggcctgagcactgccaagggcaccgttctcccctagcagt

SEQ ID NO: 260405 - DNA, 55 bp, Artificial
  Synthetic oligonucleotide
tgaataccctgcctcgggcacatcgcgaaggcgatacgcgagaatgttgttgcgg

SEQ ID NO: 260406 - DNA, 54 bp, Artificial
  Synthetic oligonucleotide
cgtggctgagggcacacgtcgtccggcaaccgatgtgaacgcgaatagagagga

SEQ ID NO: 260407 - DNA, 53 bp, Artificial
  Synthetic oligonucleotide
ggaccgtcggctcgggagattgcgtttctaggatgcctccaggcatgacgaac

SEQ ID NO: 260408 - DNA, 53 bp, Artificial
  Synthetic oligonucleotide
atccacaagccagagatggttgggaggcggaccttcagaaacgagggcacaac

SEQ ID NO: 260409 - DNA, 53 bp, Artificial
  Synthetic oligonucleotide
ccggtctgaggagatccggagcacccttgctagattgcgggaaccctgacccc

SEQ ID NO: 260410 - DNA, 53 bp, Artificial
  Synthetic oligonucleotide
tgcgactctggcgggtagcacacgcgggttcgtcatcaatggagagtctgatt

SEQ ID NO: 260411 - DNA, 52 bp, Artificial
  Synthetic oligonucleotide
aaaacgctacgcaaaccagcccacttggggcccgattcacaacaaacgtggg

SEQ ID NO: 260412 - DNA, 51 bp, Artificial
  Synthetic oligonucleotide
aggtacaggacgtgggccactgcacggttcccagcttttcgccgtagggat

SEQ ID NO: 260413 - DNA, 55 bp, Artificial
  Synthetic oligonucleotide
cccatcagttcccgcggcattgtccctgtcggaaaggtcaacggcgaactgggag

SEQ ID NO: 260414 - DNA, 50 bp, Artificial
  Synthetic oligonucleotide
aaccgtgggcgacctacagattcgcttcacaagacgcaagggcatccgca

SEQ ID NO: 260415 - DNA, 50 bp, Artificial
  Synthetic oligonucleotide
aagctgtcatcctggcaggcggtcttggcacccgtctctccgaggaaacc

SEQ ID NO: 260416 - DNA, 50 bp, Artificial
  Synthetic oligonucleotide
aagttcacctggacgatgcaggtgcgtaggcccttggaggcgactgccct

SEQ ID NO: 260417 - DNA, 50 bp, Artificial
  Synthetic oligonucleotide
accgaaattctggcctcgaaccgtcagcacgccgactctaagccgggtgg

SEQ ID NO: 260418 - DNA, 50 bp, Artificial
  Synthetic oligonucleotide
actcacttgccttgctcccgataagacggctccgtctccccgcaccgcat

SEQ ID NO: 260419 - DNA, 50 bp, Artificial
  Synthetic oligonucleotide
actggtagccgccaggagctgagaaagcagacggggcaggcaattccagc

SEQ ID NO: 260420 - DNA, 50 bp, Artificial
  Synthetic oligonucleotide
acttgagaccccaagcgggcggcatgaggtcaagttcggcggcctcttgg

SEQ ID NO: 260421 - DNA, 50 bp, Artificial
  Synthetic oligonucleotide
agcacggccacacttctctgaagggtcaatgaagccgcccctttgggcac

SEQ ID NO: 260422 - DNA, 50 bp, Artificial
  Synthetic oligonucleotide
agccaatagattgcggtgcagatgcccccaggatgtgtcgccctcaccag

SEQ ID NO: 260423 - DNA, 50 bp, Artificial
  Synthetic oligonucleotide
agcccccgatctcccgactacccgtgctgcatcacaagatgtgagcgcct

SEQ ID NO: 260424 - DNA, 55 bp, Artificial
  Synthetic oligonucleotide
ccgcatggtgtccgtcgtgcgtcagtgacggcggatcctagggacgcgtggcttt

SEQ ID NO: 260425 - DNA, 50 bp, Artificial
  Synthetic oligonucleotide
atagagctgccgagtcttgtggcgagaggagaatccagcgtcattgtaga

SEQ ID NO: 260426 - DNA, 50 bp, Artificial
  Synthetic oligonucleotide
atcagggccggggcccacgagaagactcacttgccttgctcccgataaga

SEQ ID NO: 260427 - DNA, 50 bp, Artificial
  Synthetic oligonucleotide
atggggcatgccagtccgcccgcaggttccgatcccaccgcttcggaagt

SEQ ID NO: 260428 - DNA, 50 bp, Artificial
  Synthetic oligonucleotide
caagttgcccgcagcgcaggccggatttggagtgccgttaaggatcgtgg

SEQ ID NO: 260429 - DNA, 50 bp, Artificial
  Synthetic oligonucleotide
ccctcatcggctctttgtcgcgtggtgtccgtcgggtggcagtcaacgta

SEQ ID NO: 260430 - DNA, 50 bp, Artificial
  Synthetic oligonucleotide
ccctcaccgccccaggacacccagatgaaagcccggagtggagactccgg

SEQ ID NO: 260431 - DNA, 50 bp, Artificial
  Synthetic oligonucleotide
cccggcctgactagggtggacccgaagacaccaagcggatgacacgcggt

SEQ ID NO: 260432 - DNA, 50 bp, Artificial
  Synthetic oligonucleotide
caatcctcccgtcttccacgaccatgcgacggccgcggaaccccaccacg

SEQ ID NO: 260433 - DNA, 50 bp, Artificial
  Synthetic oligonucleotide
ccaacatgctgggggaggcgatttggcggatccacgaggaaagctccgtg

SEQ ID NO: 260434 - DNA, 50 bp, Artificial
  Synthetic oligonucleotide
caccctgtacgtaaaccgttgcagcagagcctatggggcggctcacgtgc

SEQ ID NO: 260435 - DNA, 55 bp, Artificial
  Synthetic oligonucleotide
atgcccctctgggagctcttgggcagacagtgtgtccagcacgccacccaacaag

SEQ ID NO: 260436 - DNA, 50 bp, Artificial
  Synthetic oligonucleotide
cagtgaggcccgttgctatggtgggcaactctgtgcgtgcaatcccgcta

SEQ ID NO: 260437 - DNA, 55 bp, Artificial
  Synthetic oligonucleotide
ccgtagccgttaccaggtcacctcggatttcattgttcgcttgccgcaagcaccc

SEQ ID NO: 260438 - DNA, 55 bp, Artificial
  Synthetic oligonucleotide
cgctcgcaggtgatcccctgctcggagaatcagcccactgcccgggcccaaaagt

SEQ ID NO: 260439 - DNA, 55 bp, Artificial
  Synthetic oligonucleotide
cggccggctaagcgtcttggggtttccgtatcctgtgtatttcgcatagggcaag

SEQ ID NO: 260440 - DNA, 54 bp, Artificial
  Synthetic oligonucleotide
cgggtacaaccgaactgggcctcgcagaacgcaagcgcccgtttcaactcggga

SEQ ID NO: 260441 - DNA, 55 bp, Artificial
  Synthetic oligonucleotide
cagtgcgtcaagaagggttcgggttattttacctgtatcaaaagagtatgttcaa

SEQ ID NO: 260442 - DNA, 60 bp, Artificial
  Synthetic oligonucleotide
cacaacagagactaactcgcgcctcaaccgaccaagagattattgtcctatggttagctg

SEQ ID NO: 260443 - DNA, 55 bp, Artificial
  Synthetic oligonucleotide
ctgcgtctttggtcatcttcttctcggcggtagtcgttgaggtttttaactttgc

SEQ ID NO: 260444 - DNA, 54 bp, Artificial
  Synthetic oligonucleotide
cgggttattccagggcgatcctctaaggtggtttccataataaagtgagcgacg

SEQ ID NO: 260445 - DNA, 53 bp, Artificial
  Synthetic oligonucleotide
gagggttctaggagttttgtccatcgacttattgtaggtttggttatagttac

SEQ ID NO: 260446 - DNA, 58 bp, Artificial
  Synthetic oligonucleotide
gtgtgggcatccctcgccattcctgtgttccgaaacccttacggaatgcgagcgcaaa

SEQ ID NO: 260447 - DNA, 53 bp, Artificial
  Synthetic oligonucleotide
gtggtccgaaagtcggacggtcttacgctttcatgcttaatcccgactttggt

SEQ ID NO: 260448 - DNA, 59 bp, Artificial
  Synthetic oligonucleotide
gatcgctcgctcggtaagcattagtaaacttataacgtgagagaattggatcgttagtc

SEQ ID NO: 260449 - DNA, 56 bp, Artificial
  Synthetic oligonucleotide
gatcgttccctgccaaccaacgggtgtagatttgcgttctgcctccgacgcggttc

SEQ ID NO: 260450 - DNA, 59 bp, Artificial
  Synthetic oligonucleotide
gatgaagccggtcaagaaatagcccaggagctaaagactattgcccctgaaacggctca

SEQ ID NO: 260451 - DNA, 55 bp, Artificial
  Synthetic oligonucleotide
tattgttgcccaaggcggataattgagccgaaatcccccctaattctcggtaagc

SEQ ID NO: 260452 - DNA, 59 bp, Artificial
  Synthetic oligonucleotide
gatggaagtgggtcatttgtagaccgagtagatgctgaaaccgactcctacgccgtaga

SEQ ID NO: 260453 - DNA, 59 bp, Artificial
  Synthetic oligonucleotide
tcggattcttgatattctattacatgattgacttttcctttggcataatttaaagcggc

SEQ ID NO: 260454 - DNA, 60 bp, Artificial
  Synthetic oligonucleotide
gattggcagcgtctattaagcagggtactgtcacagcctcactaatgatgcgtaagctca

SEQ ID NO: 260455 - DNA, 60 bp, Artificial
  Synthetic oligonucleotide
gtctgatcaattcgatctgatcatgctagactgccctctcgttttgaaccgcagcatggt

SEQ ID NO: 260456 - DNA, 59 bp, Artificial
  Synthetic oligonucleotide
tcagtctcggtagattcaaatcctggtagtcattaaccccaattagcagaatccacaac

SEQ ID NO: 260457 - DNA, 60 bp, Artificial
  Synthetic oligonucleotide
tccatctctggaggatttcatcctacactgcttagctctagctccagaggaacgctggaa

SEQ ID NO: 260458 - DNA, 59 bp, Artificial
  Synthetic oligonucleotide
gcaaacgcgaggacaagaggataacgattgtacgaagggataacgtgagcgtttgcata

SEQ ID NO: 260459 - DNA, 52 bp, Artificial
  Synthetic oligonucleotide
cccaattaggggcattcaaaggggctaagatctcggtagcgtaaacccctct

SEQ ID NO: 260460 - DNA, 53 bp, Artificial
  Synthetic oligonucleotide
cccaagttgaaccaaaactgataaggtatcattgaactgctttttaagggtgg

SEQ ID NO: 260461 - DNA, 56 bp, Artificial
  Synthetic oligonucleotide
gcaaacgtcatcccctttggcccaggagaagcctgggactggttaatatattcgga

SEQ ID NO: 260462 - DNA, 59 bp, Artificial
  Synthetic oligonucleotide
cgaaatgttcacgagtcggttgatatcgtcttatttgattaaagacttcagatgtaatg

SEQ ID NO: 260463 - DNA, 60 bp, Artificial
  Synthetic oligonucleotide
tagctttgaatactcgcagacaacctagatgtgccgtccccacagataacctcaaactac

SEQ ID NO: 260464 - DNA, 57 bp, Artificial
  Synthetic oligonucleotide
caagcggtttcagcaattaactgtcgtcccccgactgctaggattcaccacctagct

SEQ ID NO: 260465 - DNA, 60 bp, Artificial
  Synthetic oligonucleotide
ccttagtgcaggtatcagctaggcaagcgaacagatgacctaatgggattgctaaccaga

SEQ ID NO: 260466 - DNA, 55 bp, Artificial
  Synthetic oligonucleotide
taggttagggtggttgcccttagaacggctactgtcatcggatgaaatttctagg

SEQ ID NO: 260467 - DNA, 49 bp, Artificial
  Synthetic oligonucleotide
gttctagctcctaaacacttcggggttattcggaaacgttttggggtta

SEQ ID NO: 260468 - DNA, 54 bp, Artificial
  Synthetic oligonucleotide
gaccctaaccctaagctgacaactcctaggctgaccgatgacccttaaccttaa

SEQ ID NO: 260469 - DNA, 56 bp, Artificial
  Synthetic oligonucleotide
cctcttgccgctcgttcctccaatcgttataacccttcagagattctcgaaattac

SEQ ID NO: 260470 - DNA, 60 bp, Artificial
  Synthetic oligonucleotide
gaccgattggctgtctacactcccggcacttggttgagccttgcgtcccgctgccactct

SEQ ID NO: 260471 - DNA, 58 bp, Artificial
  Synthetic oligonucleotide
cctccggacattgaacccattgaccgtgacaaattagaacggtatcagacgagagaca

SEQ ID NO: 260472 - DNA, 57 bp, Artificial
  Synthetic oligonucleotide
tagtcaagttcgagtaaacgagagtcagacacggcaaccgactcgaacgacaaagcc

SEQ ID NO: 260473 - DNA, 60 bp, Artificial
  Synthetic oligonucleotide
tagtcgtagtgccgcagttgcctcactccggctctctcgtttgttgaatgaagcccaaag

SEQ ID NO: 260474 - DNA, 57 bp, Artificial
  Synthetic oligonucleotide
ccgggtcttttgttgcagtggcggacataaacacggctcccgcactactatccacca

SEQ ID NO: 260475 - DNA, 59 bp, Artificial
  Synthetic oligonucleotide
caagcatagaaaaggttcgcatagtatttttagcgtgagactgcacttcgtcttcctaa

SEQ ID NO: 260476 - DNA, 54 bp, Artificial
  Synthetic oligonucleotide
gttccataacttagaacgattataaacccaatcgggggcatcattaggggctaa

SEQ ID NO: 260477 - DNA, 60 bp, Artificial
  Synthetic oligonucleotide
tatataactcgcgccttgatgtatgggaaatggtgcagcagagaaataagtcggtgcagc

SEQ ID NO: 260478 - DNA, 60 bp, Artificial
  Synthetic oligonucleotide
tatcgggcatctagagcctgatctacaataagatttatccgacgcttatgctgactcatt

SEQ ID NO: 260479 - DNA, 54 bp, Artificial
  Synthetic oligonucleotide
ccgaaccgtagaaatgcaccgtgcttcgattggggatattgttaaacgagggtc

SEQ ID NO: 260480 - DNA, 58 bp, Artificial
  Synthetic oligonucleotide
aatgatgtgagttcctagaacttgaggcaacccccctatcacaatattcgctaaatta

SEQ ID NO: 260481 - DNA, 54 bp, Artificial
  Synthetic oligonucleotide
aattacccacaagggactagggactatttgacgagaatcataaatgacctcccc

SEQ ID NO: 260482 - DNA, 60 bp, Artificial
  Synthetic oligonucleotide
ttgaatagggcgatggtgcgacagggtgaagttgaagtagacacaggctctctagttaac

SEQ ID NO: 260483 - DNA, 60 bp, Artificial
  Synthetic oligonucleotide
ttctgtggcaattcctcgctccatcatagcggcgacatcgggacctaaatggatctgggg

SEQ ID NO: 260484 - DNA, 58 bp, Artificial
  Synthetic oligonucleotide
ttctgcgcccattgtcctaaggtgagaattagggtttttcgctgactagcaagacggc

SEQ ID NO: 260485 - DNA, 59 bp, Artificial
  Synthetic oligonucleotide
gggcagtacaaaacaacgaaccctctctcgataatcgcatcgtacgcagaaagtccata

SEQ ID NO: 260486 - DNA, 52 bp, Artificial
  Synthetic oligonucleotide
tcgtaactcatccttacctaacccaacgggggattactccagaaacgtctaa

SEQ ID NO: 260487 - DNA, 54 bp, Artificial
  Synthetic oligonucleotide
acagtaccctgccgaaaatcgtgaagcgctgggacgagggtttacccaagctaa

SEQ ID NO: 260488 - DNA, 54 bp, Artificial
  Synthetic oligonucleotide
acatccgtcccgacaaatctccccctactattccccgaacccacatcagaatcc

SEQ ID NO: 260489 - DNA, 57 bp, Artificial
  Synthetic oligonucleotide
acattcctagcgcgttatgcgaacagttgttagtagtttgaggttatctgtggggac

SEQ ID NO: 260490 - DNA, 54 bp, Artificial
  Synthetic oligonucleotide
ttcgagtcaatgtatggttagtggacccaacctagaaacggaacgggttagcag

SEQ ID NO: 260491 - DNA, 59 bp, Artificial
  Synthetic oligonucleotide
gggagttctcctgggcttgttcggcttgaagcagccccaatgggatatgtcttggcaat

SEQ ID NO: 260492 - DNA, 53 bp, Artificial
  Synthetic oligonucleotide
acccctgtttccaatacccgttatgttgggtcttaatcgcccgtaagacatca

SEQ ID NO: 260493 - DNA, 60 bp, Artificial
  Synthetic oligonucleotide
ttagtaagacaatgcacttaaagttcacgccttagcaccctgcgcgcacgtttatgtgct

SEQ ID NO: 260494 - DNA, 60 bp, Artificial
  Synthetic oligonucleotide
ttagccgtgatgatgctcgtaaactgatcactaactatctgacggcgtacattgaagagg

SEQ ID NO: 260495 - DNA, 55 bp, Artificial
  Synthetic oligonucleotide
actcaactaatcgggcccgtcgctcactttattatggaaaccaccttagaggatc

SEQ ID NO: 260496 - DNA, 54 bp, Artificial
  Synthetic oligonucleotide
ttagagcctgtagtgtctttaacttctactgaattaaggttaaaatcgtttcta

SEQ ID NO: 260497 - DNA, 60 bp, Artificial
  Synthetic oligonucleotide
gcgacaaccttctagcaccatcacggagattaataggcgatcgcgtaacgagtgaaccga

SEQ ID NO: 260498 - DNA, 53 bp, Artificial
  Synthetic oligonucleotide
actcctgtttaccctatacaagactcctgtttaccctatacaagactcctgtt

SEQ ID NO: 260499 - DNA, 60 bp, Artificial
  Synthetic oligonucleotide
agaaccatagatgcacctcacaggattaggccataacagtccgaccccttccttagtgca

SEQ ID NO: 260500 - DNA, 60 bp, Artificial
  Synthetic oligonucleotide
agaagccctgcgagaaacttggacgcagcgtcgatgcacaatggatgaactttggcacta

SEQ ID NO: 260501 - DNA, 58 bp, Artificial
  Synthetic oligonucleotide
ttaatcgtctcgcgtcaccggtacaagacacagggtagcccgactcaccaatgatcgg

SEQ ID NO: 260502 - DNA, 56 bp, Artificial
  Synthetic oligonucleotide
ggcatcttgggaaatgctcaaacgtcctcccttgcggggtagaacaattttgccac

SEQ ID NO: 260503 - DNA, 51 bp, Artificial
  Synthetic oligonucleotide
ttaaggcgggtttggctgtttgtagcgttagttcccagtttggtaattagt

SEQ ID NO: 260504 - DNA, 54 bp, Artificial
  Synthetic oligonucleotide
agcagccggtttacccatttaattaatgaccgagcgacgggcacttccgttaca

SEQ ID NO: 260505 - DNA, 59 bp, Artificial
  Synthetic oligonucleotide
ttaagcaaccgatagttctcattagacttgcaaatatggtagttagattcgtaggtcaa

SEQ ID NO: 260506 - DNA, 57 bp, Artificial
  Synthetic oligonucleotide
ggcagtaggcgaagattttgacttctccccgctctcaagaggcggagatttgacggg

SEQ ID NO: 260507 - DNA, 60 bp, Artificial
  Synthetic oligonucleotide
ggtggacaacttgatgcagtgcgggcacaggagttacgcgaacaaatgttagcagccggt

SEQ ID NO: 260508 - DNA, 60 bp, Artificial
  Synthetic oligonucleotide
tcgtgctgacttagcgatcgttccctgccaaccaacgggtgtagatttgcgttctgcctc

SEQ ID NO: 260509 - DNA, 57 bp, Artificial
  Synthetic oligonucleotide
aaacccgagcccctgtcacggcctggataggagagccgaatagcagtttgtttggca

SEQ ID NO: 260510 - DNA, 55 bp, Artificial
  Synthetic oligonucleotide
aaacgaatggtggccagttctcgttgtaaagcagcttcggtggtatagcgacggt

SEQ ID NO: 260511 - DNA, 58 bp, Artificial
  Synthetic oligonucleotide
aaacgatgatgtaccttcaggtccgatagaaatcaatggcacacccggtcgagataac

SEQ ID NO: 260512 - DNA, 51 bp, Artificial
  Synthetic oligonucleotide
aaacgcgccacgagggaattaacaacggagcgaagaatttaggggggcgcg

SEQ ID NO: 260513 - DNA, 60 bp, Artificial
  Synthetic oligonucleotide
aaatcgtgtttgaaattcattctgtgtccgataatctgaactgagaagatacatgacttc

SEQ ID NO: 260514 - DNA, 55 bp, Artificial
  Synthetic oligonucleotide
aaatggtggaagcctcaaaaactacacacctgttacctcagtaactacacaacta

SEQ ID NO: 260515 - DNA, 48 bp, Artificial
  Synthetic oligonucleotide
aaattatttggttgggtaggtaatccttaactttcgttcttcgggtag

SEQ ID NO: 260516 - DNA, 59 bp, Artificial
  Synthetic oligonucleotide
ggtgggctaatacttataagtcaaccgccgaagctattgagattatacaggctcttaga

SEQ ID NO: 260517 - DNA, 54 bp, Artificial
  Synthetic oligonucleotide
aacactccgaggttcttgcattaatggataggctttgggacggcgttttcttaa

SEQ ID NO: 260518 - DNA, 60 bp, Artificial
  Synthetic oligonucleotide
tttaactggtatcgtcgtctgagcaaagattatgaaaagttaccagagatgagtgaagcg

SEQ ID NO: 260519 - DNA, 60 bp, Artificial
  Synthetic oligonucleotide
gcgaccattctatcagttataacgacttaccaactgttcggaatgtgcgctctgatactt

SEQ ID NO: 260520 - DNA, 55 bp, Artificial
  Synthetic oligonucleotide
aacctctgggatagattaatgcagttaccaagagacggggaagcggtttttatga

SEQ ID NO: 260521 - DNA, 53 bp, Artificial
  Synthetic oligonucleotide
gggtttatacgccccgtcaaaattcgtagtccctcgtctctgaggttaatcgc

SEQ ID NO: 260522 - DNA, 57 bp, Artificial
  Synthetic oligonucleotide
gggttcgcattcgtctaaaagcttacaatgcgggtaactcccttctcgtctcagatc

SEQ ID NO: 260523 - DNA, 60 bp, Artificial
  Synthetic oligonucleotide
ttggcctagacgtagccaaagaagccctgcgagaaacttggacgcagcgtcgatgcacaa

SEQ ID NO: 260524 - DNA, 60 bp, Artificial
  Synthetic oligonucleotide
aagcgactgcggtagagatccgatttagcgagagagcgtacaaactctcggacactcaat

SEQ ID NO: 260525 - DNA, 53 bp, Artificial
  Synthetic oligonucleotide
aaggcgttgttacaggttttaggacaggagtgggtggagtcggggacttatga

SEQ ID NO: 260526 - DNA, 60 bp, Artificial
  Synthetic oligonucleotide
aaggtagcgcgattagcttatggctttcgcttagatctatcatttctgcggattaaattg

SEQ ID NO: 260527 - DNA, 50 bp, Artificial
  Synthetic oligonucleotide
gggttaaattggtcagacctaagaaacggtaaggctacagttttcggtaa

SEQ ID NO: 260528 - DNA, 57 bp, Artificial
  Synthetic oligonucleotide
gggtaaaccagacttaaggcatggttatattctctgatgccaaaatccactaaggta

SEQ ID NO: 260529 - DNA, 54 bp, Artificial
  Synthetic oligonucleotide
aagttttagccgtccaatctctatagaatcgttattactatgtatcgttaaacc

SEQ ID NO: 260530 - DNA, 60 bp, Artificial
  Synthetic oligonucleotide
gcaagtctcgcatttcggcattgactaactgcatttccgccccagagagaatgcggttag

SEQ ID NO: 260531 - DNA, 60 bp, Artificial
  Synthetic oligonucleotide
aataattctaagtacgattggatatcagaacgacctctgactatggctgctaagtgggct

SEQ ID NO: 260532 - DNA, 53 bp, Artificial
  Synthetic oligonucleotide
ttgccttaaagattacgaatgtaatacaagtttttcgttcacccctagtccaa

SEQ ID NO: 260533 - DNA, 56 bp, Artificial
  Synthetic oligonucleotide
aatacttagtgtagagacgatttaagcagcccaccaggggggcagttagcgcaggg

SEQ ID NO: 260534 - DNA, 55 bp, Artificial
  Synthetic oligonucleotide
ttgcccatccttgagaagtgttccaaaggtcacgccagggtctaaagtaactttc

SEQ ID NO: 260535 - DNA, 53 bp, Artificial
  Synthetic oligonucleotide
tgggtttcctccccatcaggacgagtaaccgtaatacgtcgtgcttcaaaccc

SEQ ID NO: 260536 - DNA, 58 bp, Artificial
  Synthetic oligonucleotide
tgggtcggctagagtttcagtcgatggagtagcttatgaagtcgaaccgtccttggcg

SEQ ID NO: 260537 - DNA, 52 bp, Artificial
  Synthetic oligonucleotide
aggggggccaataaccgccgtaaggaatgagacgtagaagtgtttaagggca

SEQ ID NO: 260538 - DNA, 58 bp, Artificial
  Synthetic oligonucleotide
tggttggtcagattatagtcaaagtgctggtcgttttattatcggtgttggtcaagga

SEQ ID NO: 260539 - DNA, 57 bp, Artificial
  Synthetic oligonucleotide
aggcgacgttgggacattcttcggtggcgacgactgaacgctatttacacgctagac

SEQ ID NO: 260540 - DNA, 55 bp, Artificial
  Synthetic oligonucleotide
aggtgtgggagtatgaacgcccggtctacacctgtcccctttgtggctggcacgg

SEQ ID NO: 260541 - DNA, 60 bp, Artificial
  Synthetic oligonucleotide
gtcggataagagtaattatccgacgcattatggtatcctgatgaggtcagtatcgggcat

SEQ ID NO: 260542 - DNA, 58 bp, Artificial
  Synthetic oligonucleotide
aggcaagttggcggttacgaagattcaaacataggtttgcttgcgctagtcataccca

SEQ ID NO: 260543 - DNA, 60 bp, Artificial
  Synthetic oligonucleotide
tgtagctagtgccgaggttatgctgtcatgggcgttaggaactagcgtccctaatcgtgg

SEQ ID NO: 260544 - DNA, 56 bp, Artificial
  Synthetic oligonucleotide
tgtgtgaaccattaaggaaactgttgagcaaatacagtttaaatcgtcaggaacgt

SEQ ID NO: 260545 - DNA, 58 bp, Artificial
  Synthetic oligonucleotide
ggaagtgtttttaacagtgcaatgacggatagtgaacctgctgaaatagtttctacac

SEQ ID NO: 260546 - DNA, 58 bp, Artificial
  Synthetic oligonucleotide
ggaacttgtatagagtgtacagggaacttgtatagagtgtacagggaacttgtataga

SEQ ID NO: 260547 - DNA, 59 bp, Artificial
  Synthetic oligonucleotide
agcgataggtcacatctaaaccaacggcgctgcttaagggtgggctgagaataggcgaa

SEQ ID NO: 260548 - DNA, 55 bp, Artificial
  Synthetic oligonucleotide
gtaataatctcaaccaaatagctaggtgggcaaaacttataagtcaaccgccgaa

SEQ ID NO: 260549 - DNA, 53 bp, Artificial
  Synthetic oligonucleotide
agtcaaccccgtctagatcgggaaaagggcaaatctcgtaagtacgaagtgcc

SEQ ID NO: 260550 - DNA, 56 bp, Artificial
  Synthetic oligonucleotide
agtcagctactaccacttacggaagggaatctcgcccttcaacattttacagatcg

SEQ ID NO: 260551 - DNA, 58 bp, Artificial
  Synthetic oligonucleotide
ggaactgaaccgagaattaaatcgactagcacatcagttctgttctgacgggtcgctt

SEQ ID NO: 260552 - DNA, 59 bp, Artificial
  Synthetic oligonucleotide
gtcctgccctggtaagttcgggaggtaaagcatccagcctattcagggtggcgatcgca

SEQ ID NO: 260553 - DNA, 60 bp, Artificial
  Synthetic oligonucleotide
gcagtggccgtcgagtcgtagtaattacccaccggattcagctggggcgttcgatctgca

SEQ ID NO: 260554 - DNA, 59 bp, Artificial
  Synthetic oligonucleotide
tgttccatcggcctgccgtaacgttcacgcacacagacggactcgttaacgatcgccta

SEQ ID NO: 260555 - DNA, 52 bp, Artificial
  Synthetic oligonucleotide
ggacttggtgccggtacagggggaagtctcggtgaggaggttaaggtctttc

SEQ ID NO: 260556 - DNA, 58 bp, Artificial
  Synthetic oligonucleotide
ccaacccctgatacacgcttctatggcttctggtgggcaacttgggtcactattcgtc

SEQ ID NO: 260557 - DNA, 57 bp, Artificial
  Synthetic oligonucleotide
atcgcagttggggacttaaccacgatgaagccattcatcgcctagaaaccggcggac

SEQ ID NO: 260558 - DNA, 59 bp, Artificial
  Synthetic oligonucleotide
tgtttgtataatcgcttgagaatatgtcgttcactactttgggtaagtgagctataaag

SEQ ID NO: 260559 - DNA, 54 bp, Artificial
  Synthetic oligonucleotide
tggggtcaccaataacccacacttctagattgggataacgccttaaaatctggg

SEQ ID NO: 260560 - DNA, 52 bp, Artificial
  Synthetic oligonucleotide
ccccatgtaagtcttgagggaggtcagaacctcttcttttcgttttagggct

SEQ ID NO: 260561 - DNA, 59 bp, Artificial
  Synthetic oligonucleotide
gatttaccttcgttattaatcaacgaaatcactttgagcacagctaaacaccagcgatc

SEQ ID NO: 260562 - DNA, 58 bp, Artificial
  Synthetic oligonucleotide
gattggttatcttttagtaccagctaagaaaattagctattctggactatctaggaca

SEQ ID NO: 260563 - DNA, 59 bp, Artificial
  Synthetic oligonucleotide
attgtatctactcgctggttctcccgtagaagattcttcactgaccaaggcagaggaga

SEQ ID NO: 260564 - DNA, 57 bp, Artificial
  Synthetic oligonucleotide
gcattttgcgagtgccgcaccccctaaaatacagttagtccccaagcgacggccatc

SEQ ID NO: 260565 - DNA, 59 bp, Artificial
  Synthetic oligonucleotide
gagtgccccaacaacatcgcacggatagcttgagtgccgcctatcgtaaccttgggggc

SEQ ID NO: 260566 - DNA, 59 bp, Artificial
  Synthetic oligonucleotide
gtggcgcgttggtcaggactggctcaataggggcagtcggcttattgggattcagtatc

SEQ ID NO: 260567 - DNA, 56 bp, Artificial
  Synthetic oligonucleotide
tatcttatccctcgtaatacagggaaaatgtctaatagggagtagaaactagcctg

SEQ ID NO: 260568 - DNA, 57 bp, Artificial
  Synthetic oligonucleotide
tgatacatggctccccgttactcctcatgggactggcggggtatccttccccttcaa

SEQ ID NO: 260569 - DNA, 55 bp, Artificial
  Synthetic oligonucleotide
aaggtcatgcctggggcccgcattttgacgatagtggtgacaaaattaaccgccc

SEQ ID NO: 260570 - DNA, 55 bp, Artificial
  Synthetic oligonucleotide
cctgccaaccaacgggtgtagatttgcgttctgcctccgacgcggttcgattaat

SEQ ID NO: 260571 - DNA, 55 bp, Artificial
  Synthetic oligonucleotide
gtagaagcctcgaagccaaccccctagactacatttaccgtggccaagacgcttg

SEQ ID NO: 260572 - DNA, 58 bp, Artificial
  Synthetic oligonucleotide
agaagcaactcgtcctctggcgaataaacccccgccttcaggaagagcatcgaatgcc

SEQ ID NO: 260573 - DNA, 54 bp, Artificial
  Synthetic oligonucleotide
acgctcctagcattgatcgaggtaacgcttagtaccgccccggtcacgggaacg

SEQ ID NO: 260574 - DNA, 55 bp, Artificial
  Synthetic oligonucleotide
gggcagctacggataaactatttagggctgccctcatagtctcccccaaggtttc

SEQ ID NO: 260575 - DNA, 56 bp, Artificial
  Synthetic oligonucleotide
ccaccgtctctgttcccaatgttatttttagtgctggcacaaccaatttagcggga

SEQ ID NO: 260576 - DNA, 52 bp, Artificial
  Synthetic oligonucleotide
gcgtacccttacggttaggacttggtgccggtacagggggaagtctcggtga

SEQ ID NO: 260577 - DNA, 53 bp, Artificial
  Synthetic oligonucleotide
ccgtggctcgttattctcccaagtctcccggtcccctgttggccgtgttacta

SEQ ID NO: 260578 - DNA, 54 bp, Artificial
  Synthetic oligonucleotide
aaagccgcccagtttagggtcattgcgtcacaagtcccatcggttagcaacccg

SEQ ID NO: 260579 - DNA, 58 bp, Artificial
  Synthetic oligonucleotide
gccggcattcggaaaaaggtcatgcctggggcccgcattttgacgatagtggtgacaa

SEQ ID NO: 260580 - DNA, 58 bp, Artificial
  Synthetic oligonucleotide
atgcttagtatgttactaagctcaatcccaagccttcatatcaccgaacgagttaaat

SEQ ID NO: 260581 - DNA, 58 bp, Artificial
  Synthetic oligonucleotide
aagcaaatcgactattcgagatgagcaacccactctattagttcaaaataagacaact

SEQ ID NO: 260582 - DNA, 51 bp, Artificial
  Synthetic oligonucleotide
caacggaagtatcctataaagttttacgggatagtaatggaaacgtcaaac

SEQ ID NO: 260583 - DNA, 57 bp, Artificial
  Synthetic oligonucleotide
ttagaatcaaatcgtaatccctttgctaccgtcgtcatggctcatttaaaagccttg

SEQ ID NO: 260584 - DNA, 56 bp, Artificial
  Synthetic oligonucleotide
gttattgatgaggtgggtaggttaatattaggggtgtttgattgaccaatgtaata

SEQ ID NO: 260585 - DNA, 58 bp, Artificial
  Synthetic oligonucleotide
gtaatcatcgggattaagattaactttcataagaaatactgtagtccagccaattcgc

SEQ ID NO: 260586 - DNA, 60 bp, Artificial
  Synthetic oligonucleotide
ccaccctactccaggaggcagtcaactcgacgcgagagcgcaatcgcttagaagggcatg

SEQ ID NO: 260587 - DNA, 58 bp, Artificial
  Synthetic oligonucleotide
cggcgaccttcatgcgttccttctaatgcttaagtccgcatacaaagacaatcgctac

SEQ ID NO: 260588 - DNA, 58 bp, Artificial
  Synthetic oligonucleotide
ctcgatagtagtaagactgttactacgattgattggacagaggtaatttatcctgata

SEQ ID NO: 260589 - DNA, 58 bp, Artificial
  Synthetic oligonucleotide
cgttcgcacgctcgcgaggttaaaagcatactcctgtattcgttctatcgtcaaagta

SEQ ID NO: 260590 - DNA, 55 bp, Artificial
  Synthetic oligonucleotide
ttacccgttcagtgatatgaaccgagggtatagaacttagtaacatcccgataat

SEQ ID NO: 260591 - DNA, 57 bp, Artificial
  Synthetic oligonucleotide
ccagtgcatggcgaggtgaaccatcaggttgtgttccagcttctaaacgaatgctaa

SEQ ID NO: 260592 - DNA, 56 bp, Artificial
  Synthetic oligonucleotide
agctaatcggctttggagttgctcaacacgccttaaaaggtagtctcgttgagtag

SEQ ID NO: 260593 - DNA, 57 bp, Artificial
  Synthetic oligonucleotide
ccgggggagagttagctagacaggatgcaattgggttcgtcgtcggtgcattgggga

SEQ ID NO: 260594 - DNA, 53 bp, Artificial
  Synthetic oligonucleotide
ccgactctcaggggttaatcaatggggcaacgggttaactaacaacacagacg

SEQ ID NO: 260595 - DNA, 57 bp, Artificial
  Synthetic oligonucleotide
cactgcaaacgatagtttgcgtaagtgcgctttcctttcggaaaggggatctagcta

SEQ ID NO: 260596 - DNA, 53 bp, Artificial
  Synthetic oligonucleotide
tccccatgcacctttagtcgggttttctgccgtagcgggtaacacgttaacgc

SEQ ID NO: 260597 - DNA, 60 bp, Artificial
  Synthetic oligonucleotide
gtcgcaaggatgaaggtgctgttccagaattaggaggctcttgagattcaatgggtttta

SEQ ID NO: 260598 - DNA, 57 bp, Artificial
  Synthetic oligonucleotide
cttgggaatggccagggacatcttcggctgtgacagcattggcgtaaccgtcgcctg

SEQ ID NO: 260599 - DNA, 52 bp, Artificial
  Synthetic oligonucleotide
gttgccatgtttgcttacctctagggggtttaacggcctcaaaccgctttag

SEQ ID NO: 260600 - DNA, 52 bp, Artificial
  Synthetic oligonucleotide
cttttgcgcggtcctaaagtcggacgttcttacgcttttcgtctaaatccta

SEQ ID NO: 260601 - DNA, 54 bp, Artificial
  Synthetic oligonucleotide
gtccggtactcgatgcgggggatacctgcgacttgaaccgtttgcgtttcgtag

SEQ ID NO: 260602 - DNA, 57 bp, Artificial
  Synthetic oligonucleotide
cgattgatttattagcatctcgactaagaactcctctacaaatcgagcagcatttat

SEQ ID NO: 260603 - DNA, 54 bp, Artificial
  Synthetic oligonucleotide
gggtgacaccgcgtcgggtacgctatgacattacaggacgacccgaaaccaaaa

SEQ ID NO: 260604 - DNA, 57 bp, Artificial
  Synthetic oligonucleotide
cgtctcttcaaccttatggtcttctcaaatcagatctgacggattggccagttgggt

SEQ ID NO: 260605 - DNA, 57 bp, Artificial
  Synthetic oligonucleotide
ctagggataattcgtcgagctttgttgagcggatataataacggtcctggttcatac

SEQ ID NO: 260606 - DNA, 55 bp, Artificial
  Synthetic oligonucleotide
ctcccaagtctcccggtcccctgttggccgtgttactagcaacagccaccgtcgc

SEQ ID NO: 260607 - DNA, 57 bp, Artificial
  Synthetic oligonucleotide
attaatggaggaaacagccactctatacggcatttcaatcgacactttataccgagc

SEQ ID NO: 260608 - DNA, 53 bp, Artificial
  Synthetic oligonucleotide
ccaaaccatccgatgggtttcctccccatcaggacgagtaaccgtaatacgtc

SEQ ID NO: 260609 - DNA, 56 bp, Artificial
  Synthetic oligonucleotide
ccctcgacgtagtgctgttctggcgagtctgggagttggttggagcgtccccactt

SEQ ID NO: 260610 - DNA, 56 bp, Artificial
  Synthetic oligonucleotide
gtggcgatattaagaatagatccaggtaagatacgaaatgtcatcgctgccgtcgg

SEQ ID NO: 260611 - DNA, 56 bp, Artificial
  Synthetic oligonucleotide
tattgacaacttagattgccccgtatgacagcctcgctagtttttcccctattagt

SEQ ID NO: 260612 - DNA, 56 bp, Artificial
  Synthetic oligonucleotide
aaggttttcgtcccataactgactcgactggcataatctaagcaagcggccacaat

SEQ ID NO: 260613 - DNA, 56 bp, Artificial
  Synthetic oligonucleotide
attgacacagcgtcgtaagtggctttatctgtatataagcgtactgacttttggtc

SEQ ID NO: 260614 - DNA, 56 bp, Artificial
  Synthetic oligonucleotide
ttgggtgccccaaaagccaagattttccgcacgtcagactcacgaattagtgagca

SEQ ID NO: 260615 - DNA, 56 bp, Artificial
  Synthetic oligonucleotide
ttctggcggttcaacaagtgataagtcacaatagtgaactactccaaataagctcc

SEQ ID NO: 260616 - DNA, 56 bp, Artificial
  Synthetic oligonucleotide
cacacctgtaacctgacaacaacacaccatgaacgtcaaagaattatgtgaccgct

SEQ ID NO: 260617 - DNA, 54 bp, Artificial
  Synthetic oligonucleotide
agtcaagaaccctagacattaataatggggccatttgggagaccactggtaact

SEQ ID NO: 260618 - DNA, 56 bp, Artificial
  Synthetic oligonucleotide
tagatccactggttcatgggaaagtcagagttgccgcgccaatggggatggactga

SEQ ID NO: 260619 - DNA, 60 bp, Artificial
  Synthetic oligonucleotide
gccaatgcgtctgataaatacattggtcaaccggaaaccctgcttaattatgatgcctcc

SEQ ID NO: 260620 - DNA, 56 bp, Artificial
  Synthetic oligonucleotide
tcgccgcagatagatccactggttcatgggaaagtcagagttgccgcgccaatggg

SEQ ID NO: 260621 - DNA, 56 bp, Artificial
  Synthetic oligonucleotide
tacctccagaaaaagcggctgttcctagtgctgcaccctcgttaacgcgcaaacga

SEQ ID NO: 260622 - DNA, 52 bp, Artificial
  Synthetic oligonucleotide
aaacaggatacgcggggcggctttcccttggtagtcgttgggggtaggcaga

SEQ ID NO: 260623 - DNA, 56 bp, Artificial
  Synthetic oligonucleotide
ttgttgtaggataggctcgttcaaaaattattgacgcgcaagacatatcatgagag

SEQ ID NO: 260624 - DNA, 52 bp, Artificial
  Synthetic oligonucleotide
ggggtgtaagtagaagaataggtatcatttaaccagggtctaagttcttttc

SEQ ID NO: 260625 - DNA, 56 bp, Artificial
  Synthetic oligonucleotide
gctggcttgattatgttttcaaagttttgttgaccgaaatgatcctcatcaacttc

SEQ ID NO: 260626 - DNA, 56 bp, Artificial
  Synthetic oligonucleotide
gctatagaagactgtgaaaaagctcgtaataagaattctaaaagtcaagaggccta

SEQ ID NO: 260627 - DNA, 54 bp, Artificial
  Synthetic oligonucleotide
gaaggaggactatccgactgccagtcaaatagttacggtagcccctccgccggg

SEQ ID NO: 260628 - DNA, 56 bp, Artificial
  Synthetic oligonucleotide
aaagatctcaatttcgagggcaagtagtagtaataaagacaaagatttgtcctgta

SEQ ID NO: 260629 - DNA, 56 bp, Artificial
  Synthetic oligonucleotide
atgtactacgatagtaacaagcctaaaatctaatttgcgctgctgtttggggggta

SEQ ID NO: 260630 - DNA, 58 bp, Artificial
  Synthetic oligonucleotide
catttctctatggcaaccggttcatcaaatacccagtaggagtggatcgatttcccac

SEQ ID NO: 260631 - DNA, 51 bp, Artificial
  Synthetic oligonucleotide
gctatcctatttacgtccttgacaaaggtcgggagttttttaaccctaaca

SEQ ID NO: 260632 - DNA, 55 bp, Artificial
  Synthetic oligonucleotide
ctcgacggggctgccgaatttctaatcgggatagcaaagctcgaataggttcacg

SEQ ID NO: 260633 - DNA, 55 bp, Artificial
  Synthetic oligonucleotide
gaatacagttttgagctcgggctaaccagtctgtcgtttgggccaactgcatcaa

SEQ ID NO: 260634 - DNA, 55 bp, Artificial
  Synthetic oligonucleotide
gaccattctaacgcctctcggacgatgttaatgaacctcgacacccgtagctggg

SEQ ID NO: 260635 - DNA, 55 bp, Artificial
  Synthetic oligonucleotide
gctcgtaaactgatcactaactatctgacggcgtacattgaagagggacagatcc

SEQ ID NO: 260636 - DNA, 55 bp, Artificial
  Synthetic oligonucleotide
gaagtcattattaccctctccggtgcgtggggagaaagagcgttagattttcgtg

SEQ ID NO: 260637 - DNA, 52 bp, Artificial
  Synthetic oligonucleotide
gggttacgccccaagattgttgtcctaaagtcgttgtaaaactctcctggtg

SEQ ID NO: 260638 - DNA, 53 bp, Artificial
  Synthetic oligonucleotide
gaactagccgttgtttcggggtgagggatttaactccgtctatccccgcagta

SEQ ID NO: 260639 - DNA, 55 bp, Artificial
  Synthetic oligonucleotide
gaagggttcgctttggtgatgttagcgagctacccatacagggaggatgctgtct

SEQ ID NO: 260640 - DNA, 55 bp, Artificial
  Synthetic oligonucleotide
ggatacttcggtagcttcagtagtcacttcgtcgaatttccgtcctatgaagcgt

SEQ ID NO: 260641 - DNA, 58 bp, Artificial
  Synthetic oligonucleotide
tccgtgcccccattgttgactctctcaccttgtatttggtcaaccgtggaattgtgga

SEQ ID NO: 260642 - DNA, 55 bp, Artificial
  Synthetic oligonucleotide
gttgagagattgagtcagctaacccttttaaagattgagggtcaaagtaatgtct

SEQ ID NO: 260643 - DNA, 55 bp, Artificial
  Synthetic oligonucleotide
ggtgcagtacgataaaataccgcttcaacgtagggtaaagctgcttcatacagcc

SEQ ID NO: 260644 - DNA, 55 bp, Artificial
  Synthetic oligonucleotide
gaagattgggaagtgtgaacagctagaacgagggcgtgtatagttgtgagaagct

SEQ ID NO: 260645 - DNA, 54 bp, Artificial
  Synthetic oligonucleotide
gggttcaatttgaaggtctttgagacgggtataaacggcagaacgggcgatgcc

SEQ ID NO: 260646 - DNA, 55 bp, Artificial
  Synthetic oligonucleotide
gttgagatactcagatccagagcttgactgatagcttggtcacttaaactctcgg

SEQ ID NO: 260647 - DNA, 55 bp, Artificial
  Synthetic oligonucleotide
gaagcttctgggaaagcgttgcagtttcaggagggagaacgttcttctcaaccgg

SEQ ID NO: 260648 - DNA, 49 bp, Artificial
  Synthetic oligonucleotide
ctggggtgacgttatccccttccttaactaaaattttctctaccgttcc

SEQ ID NO: 260649 - DNA, 55 bp, Artificial
  Synthetic oligonucleotide
gtttcgcaagctatggtagagccacgaaaattgtcactatatgcagatttacccg

SEQ ID NO: 260650 - DNA, 55 bp, Artificial
  Synthetic oligonucleotide
ctcgtggccagctaacagttaaggccgaagatggggttgttacaatagtaggtgt

SEQ ID NO: 260651 - DNA, 55 bp, Artificial
  Synthetic oligonucleotide
gtttgtgcccaaagtgacctcagtgccaatcttgccctcttaagccgggttgtgc

SEQ ID NO: 260652 - DNA, 56 bp, Artificial
  Synthetic oligonucleotide
cattaagggaagatttgcgctcgcattccgtaagggtttcggaacacaggaatggc

SEQ ID NO: 260653 - DNA, 52 bp, Artificial
  Synthetic oligonucleotide
ctggagagttttacgtaataccaaagtgtacgatcacttacccctgaaccct

SEQ ID NO: 260654 - DNA, 55 bp, Artificial
  Synthetic oligonucleotide
ctgcttcggtcttaagtcgccttaccaacatcagagcgatttaattatacgccct

SEQ ID NO: 260655 - DNA, 54 bp, Artificial
  Synthetic oligonucleotide
taacggtctgtaattcttggggaacagggttagactgagcggatgaaggggtct

SEQ ID NO: 260656 - DNA, 55 bp, Artificial
  Synthetic oligonucleotide
ggtctaggaggtatgacccgctattgggttgtaatgggaggcgtactccattata

SEQ ID NO: 260657 - DNA, 52 bp, Artificial
  Synthetic oligonucleotide
gcttgagggttgttacgggttccttggaggtttatttgtccgttaagctgtc

SEQ ID NO: 260658 - DNA, 55 bp, Artificial
  Synthetic oligonucleotide
ggtggctcttgatatgagtacctcgtcatcggtgtatattatcgtggcagtgtcc

SEQ ID NO: 260659 - DNA, 55 bp, Artificial
  Synthetic oligonucleotide
ctgcgctggcttcagactagaaggtatggactaagtacattatcagaactaaaga

SEQ ID NO: 260660 - DNA, 55 bp, Artificial
  Synthetic oligonucleotide
ctgcgcggagaaactcgccgtgtcctatacaataagtaaacgttctcccatagcg

SEQ ID NO: 260661 - DNA, 55 bp, Artificial
  Synthetic oligonucleotide
ggtcgaactggctaaaacacaagagcgactactcataaccactcaggctattgct

SEQ ID NO: 260662 - DNA, 55 bp, Artificial
  Synthetic oligonucleotide
gcttgcctccaccacacaaatccaattgcgatcgcccaatatccaaacggaaggg

SEQ ID NO: 260663 - DNA, 59 bp, Artificial
  Synthetic oligonucleotide
cagcggtcttatccatcttagaaattcatttgtccggtgtacctgccatttcagtcaaa

SEQ ID NO: 260664 - DNA, 54 bp, Artificial
  Synthetic oligonucleotide
tccgttgttggggaatgggataaccgcatcgtagaaacgcgagaaggatttaag

SEQ ID NO: 260665 - DNA, 55 bp, Artificial
  Synthetic oligonucleotide
ctgcacccatcgttaggctacccatcactaagtaaagatcctgggcggtaactgc

SEQ ID NO: 260666 - DNA, 55 bp, Artificial
  Synthetic oligonucleotide
ctgaaggtataacgagccgcatcattagcagttaatgtgccttctgtcggtgtgg

SEQ ID NO: 260667 - DNA, 55 bp, Artificial
  Synthetic oligonucleotide
ggtcgctttagcttgaccgtcaatactatcaattacatcagacgggcaacggaag

SEQ ID NO: 260668 - DNA, 55 bp, Artificial
  Synthetic oligonucleotide
gttgagcgatatccagtacagaactactggccggtgcttgaataaccgcaggaga

SEQ ID NO: 260669 - DNA, 55 bp, Artificial
  Synthetic oligonucleotide
gttgattgttttgatcaatctgcaatctgccctcttcaatctccaatgtttgctc

SEQ ID NO: 260670 - DNA, 55 bp, Artificial
  Synthetic oligonucleotide
ggagatagctacaatttagttcggtgttgcaacgcgattgaagagtcagccctcg

SEQ ID NO: 260671 - DNA, 55 bp, Artificial
  Synthetic oligonucleotide
gaaccattaaatcaacgatttgtaaagcgccagaggctaagatgctataaacagc

SEQ ID NO: 260672 - DNA, 55 bp, Artificial
  Synthetic oligonucleotide
gttgccaccgagcctatatatactcgtgctggtatgacgttcaaagtttatgacc

SEQ ID NO: 260673 - DNA, 54 bp, Artificial
  Synthetic oligonucleotide
gggtttcataggccgtattaatttcccgtaacgcctgaactaagcgagtccgca

SEQ ID NO: 260674 - DNA, 55 bp, Artificial
  Synthetic oligonucleotide
ctttgatcacgcggctctgaaatcagaataccgtctccgtatgaacctctcgcaa

SEQ ID NO: 260675 - DNA, 58 bp, Artificial
  Synthetic oligonucleotide
tcctttggccgttagcaaccagaacgttccaattccccaggctgctatgagaatcgtc

SEQ ID NO: 260676 - DNA, 54 bp, Artificial
  Synthetic oligonucleotide
ctttaactcgtttcagcacttcaggcttacccttaaggaactcctcaactgacc

SEQ ID NO: 260677 - DNA, 55 bp, Artificial
  Synthetic oligonucleotide
cttgtttaatttgggcgattatcacgcattggtagactatgctcacaacccggct

SEQ ID NO: 260678 - DNA, 55 bp, Artificial
  Synthetic oligonucleotide
gggtttcttggatcagtctaagagcttgaataacctcaatagcttcggcggtttg

SEQ ID NO: 260679 - DNA, 55 bp, Artificial
  Synthetic oligonucleotide
ctcgcctgtattcatccttcctatgcggacgagtacgacagttggatacgaatag

SEQ ID NO: 260680 - DNA, 55 bp, Artificial
  Synthetic oligonucleotide
cttgagaatctgatccaattgagccatcagtagcgaatataacaccaccaggtcc

SEQ ID NO: 260681 - DNA, 55 bp, Artificial
  Synthetic oligonucleotide
cttcagtgtgtcgactgattggttgggtaattctaactccaataactcaagctcg

SEQ ID NO: 260682 - DNA, 55 bp, Artificial
  Synthetic oligonucleotide
cttaccaattgggagttcaccatagttcgtcatcccattgggaaacttcgcgctc

SEQ ID NO: 260683 - DNA, 55 bp, Artificial
  Synthetic oligonucleotide
cttaaagtaccgaactcttaaaactgatgccgaatgtgtatgtaattggtggggc

SEQ ID NO: 260684 - DNA, 55 bp, Artificial
  Synthetic oligonucleotide
ctgttagggtcagccaaagatgccacttttgacttaatggatacggttttgacca

SEQ ID NO: 260685 - DNA, 55 bp, Artificial
  Synthetic oligonucleotide
ggtaatgctggtttatggggagggttaactgttgtcctcttatcagtgagtatta

SEQ ID NO: 260686 - DNA, 60 bp, Artificial
  Synthetic oligonucleotide
gccaggacttgagtggggctgttaatggacaagcaccctgatcgcaggttttatggcatg

SEQ ID NO: 260687 - DNA, 55 bp, Artificial
  Synthetic oligonucleotide
ggtagaaacgctatatcaagggttaaatgactgtttgcaacgctatgacactccc

SEQ ID NO: 260688 - DNA, 55 bp, Artificial
  Synthetic oligonucleotide
ctcgtcgctgtccgtgaatatagacttctccggcatctggttgcagcaatcccgc

SEQ ID NO: 260689 - DNA, 55 bp, Artificial
  Synthetic oligonucleotide
ggcgactgtatcgagacactcatcgctcctttgagcaatactgtcaagaccggtt

SEQ ID NO: 260690 - DNA, 54 bp, Artificial
  Synthetic oligonucleotide
gcccatcagcggccaactgggttaaattggaaccaaattcgtctaaagtaggag

SEQ ID NO: 260691 - DNA, 55 bp, Artificial
  Synthetic oligonucleotide
gcccagatagcgggtggaagtcacggttactccggccttaattaacttctgccca

SEQ ID NO: 260692 - DNA, 55 bp, Artificial
  Synthetic oligonucleotide
gccattcctgtcgtgcagtttgctaggacactaggttggcacgtaacagtgattg

SEQ ID NO: 260693 - DNA, 55 bp, Artificial
  Synthetic oligonucleotide
gcggatgcccctgttataatcggaattgcgtctaacccagtggcaattaattggg

SEQ ID NO: 260694 - DNA, 55 bp, Artificial
  Synthetic oligonucleotide
ggcggcattacagactaaagcatctaaaggacgactgagtgccctaaaatacttg

SEQ ID NO: 260695 - DNA, 54 bp, Artificial
  Synthetic oligonucleotide
gtcctgccgtttccgtagccggtaaggtttagcaagcacaaccctggcagaacc

SEQ ID NO: 260696 - DNA, 55 bp, Artificial
  Synthetic oligonucleotide
gtccttcttctatataagccgttaagtaattggtgatgatcttccgagcatcgtc

SEQ ID NO: 260697 - DNA, 55 bp, Artificial
  Synthetic oligonucleotide
tcgacaactacggacgggtcgttagtgctggactcgttgcctactctcaaaaact

SEQ ID NO: 260698 - DNA, 55 bp, Artificial
  Synthetic oligonucleotide
gtccaaacccaggacaattgtaagatttgcttcccgatgtaataggatgcgcccc

SEQ ID NO: 260699 - DNA, 52 bp, Artificial
  Synthetic oligonucleotide
ggcggtttagtctccaggcaaaataccccaatcaaccgattaacctttatcc

SEQ ID NO: 260700 - DNA, 54 bp, Artificial
  Synthetic oligonucleotide
ggcgtgggatatgtacccgtagaaaggtctagcgacgaaccgacggccctcgac

SEQ ID NO: 260701 - DNA, 55 bp, Artificial
  Synthetic oligonucleotide
ggctaaacccacaccactccagagatcagcccgtctcatggggtgaaattgggcg

SEQ ID NO: 260702 - DNA, 55 bp, Artificial
  Synthetic oligonucleotide
ggctagaatctatacggtgacaagacttgagccatccgttttaacctactgtttc

SEQ ID NO: 260703 - DNA, 55 bp, Artificial
  Synthetic oligonucleotide
gtcgaaattgtttaacgacacaatagcgtaaactaggagtatagcgatcgcgggc

SEQ ID NO: 260704 - DNA, 55 bp, Artificial
  Synthetic oligonucleotide
gccacccaagcatgaatttgtggggttgttccccgagtgggttgatagcgaaaag

SEQ ID NO: 260705 - DNA, 55 bp, Artificial
  Synthetic oligonucleotide
ggctgaagccgctagctctacgaaccaagcctgctcccggctaaaaggctcataa

SEQ ID NO: 260706 - DNA, 55 bp, Artificial
  Synthetic oligonucleotide
gggaaattgccccaccttatgaagaactcttggcaggcacagctattcgtttcca

SEQ ID NO: 260707 - DNA, 55 bp, Artificial
  Synthetic oligonucleotide
gccaagggttgggtcattatggttagcctagttgatggcgatctacagtcttccg

SEQ ID NO: 260708 - DNA, 56 bp, Artificial
  Synthetic oligonucleotide
tgaacactgctaagcgcgagtggttttgggggtatacctggaaaaccgctaagcca

SEQ ID NO: 260709 - DNA, 55 bp, Artificial
  Synthetic oligonucleotide
gccaacaattaccaagtcttcaggattacactcaggattagtgccgcaaagatgt

SEQ ID NO: 260710 - DNA, 55 bp, Artificial
  Synthetic oligonucleotide
gcggtagcccaagtcatgcgacggcgaatgctacgagttcgggaaaatagtaatt

SEQ ID NO: 260711 - DNA, 55 bp, Artificial
  Synthetic oligonucleotide
ggtttgccgttctcccatgtgagcggtactattaagcagtcctctcggctgtccg

SEQ ID NO: 260712 - DNA, 54 bp, Artificial
  Synthetic oligonucleotide
ggttggaaaagttaccaccatactccgggttgggcagtgcgttctgttgaccca

SEQ ID NO: 260713 - DNA, 55 bp, Artificial
  Synthetic oligonucleotide
ggcaaccggttcatcaaatacccagtaggagtggatcgatttcccacctgtatcg

SEQ ID NO: 260714 - DNA, 55 bp, Artificial
  Synthetic oligonucleotide
ggcacggcctgttaccaccccatgaagataagccctcactaattcgactaaggac

SEQ ID NO: 260715 - DNA, 55 bp, Artificial
  Synthetic oligonucleotide
gcgattagaaccctttaccctatttgagcatgacctcaactcttcaagccgattc

SEQ ID NO: 260716 - DNA, 55 bp, Artificial
  Synthetic oligonucleotide
gcgccctaagaatgttacaagatctgacggacttaagtcgagaagaggccggatt

SEQ ID NO: 260717 - DNA, 55 bp, Artificial
  Synthetic oligonucleotide
ggcatggttatattctctgatgccaaaatccactaaggtatggttccatgcttgg

SEQ ID NO: 260718 - DNA, 55 bp, Artificial
  Synthetic oligonucleotide
gcctgtgtcttgatctaccgaggctatatttctacgtttcattaggctctccaac

SEQ ID NO: 260719 - DNA, 58 bp, Artificial
  Synthetic oligonucleotide
atcccccaactgcctatcaaggaacctgttaagaggctgataagaattgtccctggca

SEQ ID NO: 260720 - DNA, 55 bp, Artificial
  Synthetic oligonucleotide
gcctcgcttgcggccgaatatgttcgtcaatccagaggggatcactatgacccaa

SEQ ID NO: 260721 - DNA, 53 bp, Artificial
  Synthetic oligonucleotide
ggcattaggggttccggtaaaccctctcactaaacactcttcagctaataagg

SEQ ID NO: 260722 - DNA, 55 bp, Artificial
  Synthetic oligonucleotide
ggcccaggagaagcctgggactggttaatatattcggatcttatcccgcgacgta

SEQ ID NO: 260723 - DNA, 55 bp, Artificial
  Synthetic oligonucleotide
gtaagtgcatctcggtcataccccagttttgtgccccaatcggggttggctcgcc

SEQ ID NO: 260724 - DNA, 55 bp, Artificial
  Synthetic oligonucleotide
gccggctacataacgccagtccggttcttcggggctacacatttctaaggcgcag

SEQ ID NO: 260725 - DNA, 53 bp, Artificial
  Synthetic oligonucleotide
ggccgctttaccgtattaagccctactattggtccatcgggcaagccctaccg

SEQ ID NO: 260726 - DNA, 54 bp, Artificial
  Synthetic oligonucleotide
gccgcccttaaagccgggattcccgctaccgttgacggatatcgggtagatatg

SEQ ID NO: 260727 - DNA, 55 bp, Artificial
  Synthetic oligonucleotide
gcgcgcatagctactctgagatacgcgcgctacgaagcggtacgcttaggagaca

SEQ ID NO: 260728 - DNA, 54 bp, Artificial
  Synthetic oligonucleotide
gtaaggtacaggtggcatacactaacgttccacccggtttgacccaggtagcag

SEQ ID NO: 260729 - DNA, 55 bp, Artificial
  Synthetic oligonucleotide
gccgataaagacgaattactctatattttggcagatagcgacagtaccaccctga

SEQ ID NO: 260730 - DNA, 53 bp, Artificial
  Synthetic oligonucleotide
atcatcgggtaattcggaaagttgaaccggtgcgtcggagagaggggggtcag

SEQ ID NO: 260731 - DNA, 55 bp, Artificial
  Synthetic oligonucleotide
gtcctcgcgcacatgcaactccaatcccggtatcacctcaaaccgcatccaggat

SEQ ID NO: 260732 - DNA, 55 bp, Artificial
  Synthetic oligonucleotide
gccgaatagagtgcgatctcgttgggttttaagtccttggttgaagaggaggtaa

SEQ ID NO: 260733 - DNA, 53 bp, Artificial
  Synthetic oligonucleotide
gcccgggatgagagacttttaaccaaggactaggaatcggttgacgagggacc

SEQ ID NO: 260734 - DNA, 55 bp, Artificial
  Synthetic oligonucleotide
gccccaagttggcgatcgggactgtagcgaaagacaacaccgtaagttcgacgac

SEQ ID NO: 260735 - DNA, 55 bp, Artificial
  Synthetic oligonucleotide
gtaacgttaaacccctcccattggaaacgctaatcagcgatcgatccctagtcga

SEQ ID NO: 260736 - DNA, 55 bp, Artificial
  Synthetic oligonucleotide
gagtgtacagggaacttgtatagagtgtacagggaacttgtatagagtgtacagg

SEQ ID NO: 260737 - DNA, 55 bp, Artificial
  Synthetic oligonucleotide
ggggaagatagtttccgcttttattctagtggtcgccatagttctaacagtgttc

SEQ ID NO: 260738 - DNA, 55 bp, Artificial
  Synthetic oligonucleotide
gctaaggcaggaccaccgtgaatgttagcatcattaatcttggtatagccgaccc

SEQ ID NO: 260739 - DNA, 55 bp, Artificial
  Synthetic oligonucleotide
gttatcccgataaggaaatgcaccaagtagtgatttacttgcggccaaacaggtc

SEQ ID NO: 260740 - DNA, 55 bp, Artificial
  Synthetic oligonucleotide
gaggtcgctactagaggctccccgtaatacggcgaacatatgggtaaagcccacc

SEQ ID NO: 260741 - DNA, 59 bp, Artificial
  Synthetic oligonucleotide
atcaggtcgccaagagtcctggtcatcggctaacaccgctaaactgactacagaccgcc

SEQ ID NO: 260742 - DNA, 55 bp, Artificial
  Synthetic oligonucleotide
ggggcatcgtataggcggtattagcactcttggagggcgtattagagaggatagg

SEQ ID NO: 260743 - DNA, 55 bp, Artificial
  Synthetic oligonucleotide
ggttccctctcgttgagcaaccatgcgtttagccactagacgggtgatggtatac

SEQ ID NO: 260744 - DNA, 55 bp, Artificial
  Synthetic oligonucleotide
ggatttaaagatgatccagcaggtggaacttatgatgcgtcatcaattactacgc

SEQ ID NO: 260745 - DNA, 55 bp, Artificial
  Synthetic oligonucleotide
gaggcgcgatggaaggggtaatcttgtctcataatatgcaatgcgcctataacag

SEQ ID NO: 260746 - DNA, 55 bp, Artificial
  Synthetic oligonucleotide
gaggcacctagattcaccctagttcttaccctgcgggcagacttttacggacaag

SEQ ID NO: 260747 - DNA, 55 bp, Artificial
  Synthetic oligonucleotide
gagcagactgggtgaaattttgagtaaacccaccacctttaacagcgatactcag

SEQ ID NO: 260748 - DNA, 55 bp, Artificial
  Synthetic oligonucleotide
gactctggaacggttactgaggtaatgcgccaaatttttcctgctccggctcgat

SEQ ID NO: 260749 - DNA, 55 bp, Artificial
  Synthetic oligonucleotide
gacgttacctcgacgctcggccaaccgacagcagtagtctgtatttgccggatta

SEQ ID NO: 260750 - DNA, 55 bp, Artificial
  Synthetic oligonucleotide
gacggtcttacgctttcatgcttaatcccgactttggttggaaaggcgatgtcgc

SEQ ID NO: 260751 - DNA, 55 bp, Artificial
  Synthetic oligonucleotide
gttcgaggggtagaacaatcaaggactcccgaagccattttagccgagatggaac

SEQ ID NO: 260752 - DNA, 60 bp, Artificial
  Synthetic oligonucleotide
gctccctaacgtggacagcagcatgtctgcttgcttctcaagccgggaaatagtctcctg

SEQ ID NO: 260753 - DNA, 55 bp, Artificial
  Synthetic oligonucleotide
gttcgcccaccttactgattttgttagggattggcctgtctgcgatcgccgttgc

SEQ ID NO: 260754 - DNA, 55 bp, Artificial
  Synthetic oligonucleotide
gaccttcataaatggttagttgctctggttaaaccggagtattcctggtactatg

SEQ ID NO: 260755 - DNA, 55 bp, Artificial
  Synthetic oligonucleotide
gaccggttgctcgtctcctggtacgatgtatccttcaactcgcgcattttgagat

SEQ ID NO: 260756 - DNA, 54 bp, Artificial
  Synthetic oligonucleotide
ggggtgtgccgcgtaacaaccgagtccaaccaagaatagcaactaggggagtat

SEQ ID NO: 260757 - DNA, 55 bp, Artificial
  Synthetic oligonucleotide
ggatattgctgatagttagattcaggggaagtaataggctgttgttctagtattg

SEQ ID NO: 260758 - DNA, 55 bp, Artificial
  Synthetic oligonucleotide
gtaggggcggaaactgagaacggatgggcatcggatattacccgcacctggccag

SEQ ID NO: 260759 - DNA, 54 bp, Artificial
  Synthetic oligonucleotide
gggtacaagcctgcctgggtggcatttcgggtgttagacttaccagaccaaccc

SEQ ID NO: 260760 - DNA, 55 bp, Artificial
  Synthetic oligonucleotide
gcattattcctacctgtctctccgcctgtaggtggtataactataagttttccag

SEQ ID NO: 260761 - DNA, 54 bp, Artificial
  Synthetic oligonucleotide
gggagggtagccgtacgctcgactgggagttttaacatttcgactgcaaaaggc

SEQ ID NO: 260762 - DNA, 55 bp, Artificial
  Synthetic oligonucleotide
gcagcgggacgcaaggctcaaccaagtgccgggagtgtagacagccaatcggtca

SEQ ID NO: 260763 - DNA, 60 bp, Artificial
  Synthetic oligonucleotide
atatagctaatagtggcaccctaagctttgatggcacagatggtcagactcgcaccgtta

SEQ ID NO: 260764 - DNA, 55 bp, Artificial
  Synthetic oligonucleotide
gcactgaggagtaaaccggccgttatggccctgatcgctatattactctcacttc

SEQ ID NO: 260765 - DNA, 55 bp, Artificial
  Synthetic oligonucleotide
ggatttgggatgggttcccagcccgttcgtagccctgcccgctaatccatgtacg

SEQ ID NO: 260766 - DNA, 55 bp, Artificial
  Synthetic oligonucleotide
gcaagagtttcagcctgagagcgataggtggataaaacgccggaggctgtgggcg

SEQ ID NO: 260767 - DNA, 55 bp, Artificial
  Synthetic oligonucleotide
gggcaaagtcactttattaaaaccgtagaagacttatacgagatcatggtaggaa

SEQ ID NO: 260768 - DNA, 55 bp, Artificial
  Synthetic oligonucleotide
gggcagctagcaatcgccgaacttccggtactgttaagcggacttccagcgatgc

SEQ ID NO: 260769 - DNA, 55 bp, Artificial
  Synthetic oligonucleotide
gcaaacacactggtatactaggaggattgcaagcaactctaaaatccagacttac

SEQ ID NO: 260770 - DNA, 53 bp, Artificial
  Synthetic oligonucleotide
gatttaaccgactcggtgaaccaaatggcggggaatttaactgcccaggtgag

SEQ ID NO: 260771 - DNA, 55 bp, Artificial
  Synthetic oligonucleotide
ggttcgactggggcggtagggatgagttggtcatagctggagaggtcgtgctgag

SEQ ID NO: 260772 - DNA, 55 bp, Artificial
  Synthetic oligonucleotide
gtcaaccacactaaccccaggataattgatcgggttaaattctataggcttgccg

SEQ ID NO: 260773 - DNA, 55 bp, Artificial
  Synthetic oligonucleotide
gtgaggatttcagcgcggccatagcggtttactttcataaaagtattgtacgctg

SEQ ID NO: 260774 - DNA, 60 bp, Artificial
  Synthetic oligonucleotide
tcgagccgttttattcaaataatctcgaatagaatcattacgccattgattaagttgtgc

SEQ ID NO: 260775 - DNA, 51 bp, Artificial
  Synthetic oligonucleotide
gctctaacctaattttagggcaaagtcactttattaaaaccgtagaagact

SEQ ID NO: 260776 - DNA, 54 bp, Artificial
  Synthetic oligonucleotide
gggcccttaccggattctcctagattgcgggttagaggatatccaacccttaca

SEQ ID NO: 260777 - DNA, 55 bp, Artificial
  Synthetic oligonucleotide
gtatgggaaatggtgcagcagagaaataagtcggtgcagcagaggtcgctagagc

SEQ ID NO: 260778 - DNA, 55 bp, Artificial
  Synthetic oligonucleotide
gtgatgcaaatgggtggaaaactgttgcgctcaattgggttagccaatgccaacg

SEQ ID NO: 260779 - DNA, 55 bp, Artificial
  Synthetic oligonucleotide
gatgcagtgcgggcacaggagttacgcgaacaaatgttagcagccggtttaccca

SEQ ID NO: 260780 - DNA, 53 bp, Artificial
  Synthetic oligonucleotide
ggggaacaccacgggcaaaacgttgggtatccagtaactccagcaaagccgta

SEQ ID NO: 260781 - DNA, 55 bp, Artificial
  Synthetic oligonucleotide
gtgcccgttttagacagttgtaagccctgaccgaaagctgtaattcttcgatggg

SEQ ID NO: 260782 - DNA, 55 bp, Artificial
  Synthetic oligonucleotide
gatccccaccagacatccgtaaacacttagctaagactcggaagtgaatcccgtg

SEQ ID NO: 260783 - DNA, 55 bp, Artificial
  Synthetic oligonucleotide
gtgcgtgtatgtgtcgcccattgaggtaattaggcgagataggtgagacgggagt

SEQ ID NO: 260784 - DNA, 54 bp, Artificial
  Synthetic oligonucleotide
gagttttgtccatcgacttattgtaggtttggttatagttactgcttcggttgg

SEQ ID NO: 260785 - DNA, 55 bp, Artificial
  Synthetic oligonucleotide
ccactggttgagccatcgtaagcatgccttgaccgtctatcgggagtatgccggg

SEQ ID NO: 260786 - DNA, 58 bp, Artificial
  Synthetic oligonucleotide
gctctattttagacgtgggatggggaataacccgtgacatgattgagtataaactctc

SEQ ID NO: 260787 - DNA, 55 bp, Artificial
  Synthetic oligonucleotide
ccaatgtatcccgatccatcatacctaaacgctgtcgaatggcggctaaacccac

SEQ ID NO: 260788 - DNA, 55 bp, Artificial
  Synthetic oligonucleotide
ccaagacggttactaaggtcttgtaatcgctgtcggttttcatctgcttgtcgat

SEQ ID NO: 260789 - DNA, 55 bp, Artificial
  Synthetic oligonucleotide
ccaaattagtcgatgaaccccaattagcgcaatttgctagaaccttagacctggg

SEQ ID NO: 260790 - DNA, 55 bp, Artificial
  Synthetic oligonucleotide
ccaaacaccaagactgctaccgtattgccttgactattgggtaacgccttagctg

SEQ ID NO: 260791 - DNA, 55 bp, Artificial
  Synthetic oligonucleotide
tccgccgtagcccagccaaccgaccaaactactcaaccgtgcgccatagctaaag

SEQ ID NO: 260792 - DNA, 55 bp, Artificial
  Synthetic oligonucleotide
cattcggatctcctgttggcacataattaacggtagaataatcgggaggaatcgg

SEQ ID NO: 260793 - DNA, 55 bp, Artificial
  Synthetic oligonucleotide
catagaccagactatctcccaaggctaccacctttaacggttgagacttaaagcg

SEQ ID NO: 260794 - DNA, 55 bp, Artificial
  Synthetic oligonucleotide
tcgacagaattataggctttaggacctcctccgacgggaatacaagcgacatctg

SEQ ID NO: 260795 - DNA, 55 bp, Artificial
  Synthetic oligonucleotide
cagggcgaatagcgattaattgtaggttccacgtttgatcggtcatccgttccgg

SEQ ID NO: 260796 - DNA, 55 bp, Artificial
  Synthetic oligonucleotide
caggattaggccataacagtccgaccccttccttagtgcaggtatcagctaggca

SEQ ID NO: 260797 - DNA, 58 bp, Artificial
  Synthetic oligonucleotide
atacccgtacagccgcttttcgaatgaatgttcaatccccccgcatggagccgataga

SEQ ID NO: 260798 - DNA, 55 bp, Artificial
  Synthetic oligonucleotide
caggaggcagtcaactcgacgcgagagcgcaatcgcttagaagggcatgaaggcc

SEQ ID NO: 260799 - DNA, 55 bp, Artificial
  Synthetic oligonucleotide
caggagcaacaatgaccttcaccgaaataaaacctagtccaatcttcaaccctac

SEQ ID NO: 260800 - DNA, 55 bp, Artificial
  Synthetic oligonucleotide
tcgagttccctcctggcgtgtaaccactgtgttattgcttcaaccgtcgggcgcg

SEQ ID NO: 260801 - DNA, 55 bp, Artificial
  Synthetic oligonucleotide
cagcccgtaggaatatcagtgcgagcaaatgaatgtgattgaggcatccattgac

SEQ ID NO: 260802 - DNA, 55 bp, Artificial
  Synthetic oligonucleotide
cagccaaaactcagtccactactccccagtacaccaccggaattgaacacagcgc

SEQ ID NO: 260803 - DNA, 55 bp, Artificial
  Synthetic oligonucleotide
tcgatacatttgcttaatgggtaaattgagccgagaagcaatgacctcttgggag

SEQ ID NO: 260804 - DNA, 55 bp, Artificial
  Synthetic oligonucleotide
cagaattgctggttttgccggaagtctacgctcagattcctacagtcaacaggct

SEQ ID NO: 260805 - DNA, 55 bp, Artificial
  Synthetic oligonucleotide
cactggcaattcggccataatcggactgaacagttgcgggctagatagggttgga

SEQ ID NO: 260806 - DNA, 55 bp, Artificial
  Synthetic oligonucleotide
cactggattgacctttatgccatagttgctgacgactgcgactgtaatagtgagc

SEQ ID NO: 260807 - DNA, 55 bp, Artificial
  Synthetic oligonucleotide
cacctgttacctcagtaactacacaactagaaagtcctgataacgcctattctct

SEQ ID NO: 260808 - DNA, 55 bp, Artificial
  Synthetic oligonucleotide
ataaccccccgtctctagaggtcgaactaataaaggctgaaggattccatgttga

SEQ ID NO: 260809 - DNA, 55 bp, Artificial
  Synthetic oligonucleotide
cccgcgatcgctcgattaaaagcatgaaatcccttgattcgagtttagatcgggc

SEQ ID NO: 260810 - DNA, 55 bp, Artificial
  Synthetic oligonucleotide
cccgccttgtgctgcgaaggcttgagcttcacccaatagcgatcggcttcccgaa

SEQ ID NO: 260811 - DNA, 52 bp, Artificial
  Synthetic oligonucleotide
ttctccctcccgaacctctctagaaaactcgttaactgcttccgtaattaac

SEQ ID NO: 260812 - DNA, 52 bp, Artificial
  Synthetic oligonucleotide
cccgacccaatggatacccctaaacacggattacccgtcaccattattacag

SEQ ID NO: 260813 - DNA, 55 bp, Artificial
  Synthetic oligonucleotide
cccgacaattccccggaggtttgactggtcagggtagcaaagtcatcgggagcta

SEQ ID NO: 260814 - DNA, 55 bp, Artificial
  Synthetic oligonucleotide
ccccttgcgtgtgccgaatggcgggattgacccgtcgcaaagttctccacgctga

SEQ ID NO: 260815 - DNA, 55 bp, Artificial
  Synthetic oligonucleotide
acccaaacttgtacatcggttaaagcgatggcactaacagtatgtttcgctccag

SEQ ID NO: 260816 - DNA, 55 bp, Artificial
  Synthetic oligonucleotide
tcaaccgccgaagctattgagattatacaggctcttagactcattgaacaatccc

SEQ ID NO: 260817 - DNA, 55 bp, Artificial
  Synthetic oligonucleotide
tcaatccttctatggcagttgcttataacagccggggaattgtttacagagagtt

SEQ ID NO: 260818 - DNA, 55 bp, Artificial
  Synthetic oligonucleotide
ccccgttaaggggacaagagccaccagtagcattgtggccgccagacggacggta

SEQ ID NO: 260819 - DNA, 57 bp, Artificial
  Synthetic oligonucleotide
gtagccctcacgacctttctcgcttggctacaagaagaacagtccattaaagccaaa

SEQ ID NO: 260820 - DNA, 54 bp, Artificial
  Synthetic oligonucleotide
ccccgtcaaatgacgaggtaaataacaagagaagacggtcattgaaaactgtaa

SEQ ID NO: 260821 - DNA, 55 bp, Artificial
  Synthetic oligonucleotide
ccccgatctctgatgttgaccgtccgacgaatactgcggtgaatcgcatccgcta

SEQ ID NO: 260822 - DNA, 55 bp, Artificial
  Synthetic oligonucleotide
ttattcctactgattcagtaaggcaaactttgagccgtgttagggataattgtga

SEQ ID NO: 260823 - DNA, 55 bp, Artificial
  Synthetic oligonucleotide
acgacctctccagctatgaccaactcatccctaccgccccagtcgaacccaaggg

SEQ ID NO: 260824 - DNA, 52 bp, Artificial
  Synthetic oligonucleotide
ccattcgcgctactcccgtccctgaaccttttactttattaggggttgcaac

SEQ ID NO: 260825 - DNA, 55 bp, Artificial
  Synthetic oligonucleotide
ccatgaggtcttgcggtcgtacacgcttttctgtgtcaaatagcttccctgtaga

SEQ ID NO: 260826 - DNA, 55 bp, Artificial
  Synthetic oligonucleotide
ccatctcccgcattgtttccctgagttccctcactggagcgatcgcggttaatat

SEQ ID NO: 260827 - DNA, 55 bp, Artificial
  Synthetic oligonucleotide
ccatcgagttagttgccccttcaacgaatccggctgtcatatcagtatcgccata

SEQ ID NO: 260828 - DNA, 55 bp, Artificial
  Synthetic oligonucleotide
ccaggtttctagactgctgtataggcttaaatctagataggctgtgactttagcg

SEQ ID NO: 260829 - DNA, 55 bp, Artificial
  Synthetic oligonucleotide
ccagggaagaggtattcgttctctgaattgggtctatattgccctagaaggtgtc

SEQ ID NO: 260830 - DNA, 58 bp, Artificial
  Synthetic oligonucleotide
gcttctactaaaccgactaaagcaggacaattggcccagactcctccatctatataac

SEQ ID NO: 260831 - DNA, 55 bp, Artificial
  Synthetic oligonucleotide
tccctgacggtctaaatactcaacagtaatcgcttgatatctgggaactaacccc

SEQ ID NO: 260832 - DNA, 55 bp, Artificial
  Synthetic oligonucleotide
ccagcttagtaatggtatcggctgttattagctaagaattcatctcttgcttgac

SEQ ID NO: 260833 - DNA, 55 bp, Artificial
  Synthetic oligonucleotide
ccagcttaagtattagcgatgtcactctcagcgaaggaaacaacggcactcaact

SEQ ID NO: 260834 - DNA, 55 bp, Artificial
  Synthetic oligonucleotide
atcagttataacgacttaccaactgttcggaatgtgcgctctgatacttgtgggg

SEQ ID NO: 260835 - DNA, 55 bp, Artificial
  Synthetic oligonucleotide
agagcctgatctacaataagatttatccgacgcttatgctgactcattccacccc

SEQ ID NO: 260836 - DNA, 55 bp, Artificial
  Synthetic oligonucleotide
atagggaagatcggttaaactttccaggggaggctgaactcgctaactatcgaca

SEQ ID NO: 260837 - DNA, 55 bp, Artificial
  Synthetic oligonucleotide
tgatcggttgagccattatctaccactagcacttcgaagttgtcacactcttgag

SEQ ID NO: 260838 - DNA, 55 bp, Artificial
  Synthetic oligonucleotide
atacattggtcaaccggaaaccctgcttaattatgatgcctcctgggaagaacga

SEQ ID NO: 260839 - DNA, 55 bp, Artificial
  Synthetic oligonucleotide
ataaagtcccatccgtgatggtaatattgggtgagtcgctgtccggtgacagtgc

SEQ ID NO: 260840 - DNA, 55 bp, Artificial
  Synthetic oligonucleotide
ataaagtatgtagccaagtgatggctttgactgtggtaggcggtgcccaagcagc

SEQ ID NO: 260841 - DNA, 57 bp, Artificial
  Synthetic oligonucleotide
gctttcccctccacgattagggacgctagttcctaacgcccatgacagcataacctc

SEQ ID NO: 260842 - DNA, 55 bp, Artificial
  Synthetic oligonucleotide
agagcttgtctaagttggtcaatttctgttcttagggactctatctcatcagtaa

SEQ ID NO: 260843 - DNA, 55 bp, Artificial
  Synthetic oligonucleotide
tgcacttaaagttcacgccttagcaccctgcgcgcacgtttatgtgctttcacta

SEQ ID NO: 260844 - DNA, 55 bp, Artificial
  Synthetic oligonucleotide
agttagtgccgttattttacaagcatttgggatgttcgcacatgatttatatcgg

SEQ ID NO: 260845 - DNA, 55 bp, Artificial
  Synthetic oligonucleotide
agttagcaccacaacagaccgtttaggggcaatgaaagggtcatctgagggcaga

SEQ ID NO: 260846 - DNA, 55 bp, Artificial
  Synthetic oligonucleotide
tgccgggaaggagattcctggtcgaagtcggggacactacgcagatagggaacgg

SEQ ID NO: 260847 - DNA, 55 bp, Artificial
  Synthetic oligonucleotide
agtagtgatcgctttgggtttagtgttcagttgcgtctttatctcgaagtagggg

SEQ ID NO: 260848 - DNA, 55 bp, Artificial
  Synthetic oligonucleotide
agtaattatccgtggatttgtctatgcagctattgccccaagtaggcttctaaga

SEQ ID NO: 260849 - DNA, 55 bp, Artificial
  Synthetic oligonucleotide
tggggcggctcttatacttccttggattagcgactgctgcaatggggtctatcct

SEQ ID NO: 260850 - DNA, 55 bp, Artificial
  Synthetic oligonucleotide
agatttaggctgacaagtaatctcagccgcttggcgtaattcggctaacgttgcc

SEQ ID NO: 260851 - DNA, 51 bp, Artificial
  Synthetic oligonucleotide
agccctttactgccacctttagagaagcctttaaactgttggttacgaatt

SEQ ID NO: 260852 - DNA, 49 bp, Artificial
  Synthetic oligonucleotide
agttaccaagagacggggaagcggtttttatgagtcggagggggaaccg

SEQ ID NO: 260853 - DNA, 54 bp, Artificial
  Synthetic oligonucleotide
ttaaatagttttgcgtcggaattgactccccaagtaacggcttcctatatcgtc

SEQ ID NO: 260854 - DNA, 55 bp, Artificial
  Synthetic oligonucleotide
tgttcaagcgatcgccttcccaagtctatccccggtcccacagaaacggtgttag

SEQ ID NO: 260855 - DNA, 55 bp, Artificial
  Synthetic oligonucleotide
agcgggatataatgtggttgtatatgataatctttcgacagggtctgcttctgcc

SEQ ID NO: 260856 - DNA, 55 bp, Artificial
  Synthetic oligonucleotide
aggtgccgggctagagctagatcgatctctccctctaagcgattgtctaggattg

SEQ ID NO: 260857 - DNA, 55 bp, Artificial
  Synthetic oligonucleotide
tggtaacaaaggatcgacggatcaacacgcttatgtacagcaattaagggaaggg

SEQ ID NO: 260858 - DNA, 55 bp, Artificial
  Synthetic oligonucleotide
tggtcagatcaggcaaggtcggagtgggctgaaacgtaaagtgtcccgtcaggcg

SEQ ID NO: 260859 - DNA, 55 bp, Artificial
  Synthetic oligonucleotide
caattccagttgattgcctgtttgttgagtcaccgttggggttcccaatccgtca

SEQ ID NO: 260860 - DNA, 53 bp, Artificial
  Synthetic oligonucleotide
acgttaattgataacccgagggcgttaagagggtactcagaagctttaagaga

SEQ ID NO: 260861 - DNA, 55 bp, Artificial
  Synthetic oligonucleotide
caagaaccctctcagtgtctctcacgtacagaggagttatcgatcgccgcatcgc

SEQ ID NO: 260862 - DNA, 55 bp, Artificial
  Synthetic oligonucleotide
caactcctaggctgaccgatgacccttaaccttaatccctagcgcgactctaggc

SEQ ID NO: 260863 - DNA, 60 bp, Artificial
  Synthetic oligonucleotide
tgctcatcactcttcagtgtgtcgactgattggttgggtaattctaactccaataactca

SEQ ID NO: 260864 - DNA, 55 bp, Artificial
  Synthetic oligonucleotide
caacgggctgctacagtagaagtgagtatcggcaccacttcagggagtgccagct

SEQ ID NO: 260865 - DNA, 55 bp, Artificial
  Synthetic oligonucleotide
actaagattactacttggaaagtactgatccgctcttaactagcttttcgcgcca

SEQ ID NO: 260866 - DNA, 55 bp, Artificial
  Synthetic oligonucleotide
caaccagaacgttccaattccccaggctgctatgagaatcgtccaaacccaggac

SEQ ID NO: 260867 - DNA, 55 bp, Artificial
  Synthetic oligonucleotide
caaaccgattaatgtgttgcgtccaatagggactgagtgctgcgatggtttcggg

SEQ ID NO: 260868 - DNA, 55 bp, Artificial
  Synthetic oligonucleotide
ttagatcaatctacgacgatagggacatccagactagctttgacaatgtatctta

SEQ ID NO: 260869 - DNA, 55 bp, Artificial
  Synthetic oligonucleotide
atgtgagctttacggctcagaattaatactagctgatagatggtttccgtcgagc

SEQ ID NO: 260870 - DNA, 55 bp, Artificial
  Synthetic oligonucleotide
actccctggcttggatatgatcgttaggagtttactgggttctgtagccgaacag

SEQ ID NO: 260871 - DNA, 55 bp, Artificial
  Synthetic oligonucleotide
atggtgcctgttccgttatagctggcaccggcggctagaggggtgtcattcccgg

SEQ ID NO: 260872 - DNA, 55 bp, Artificial
  Synthetic oligonucleotide
atggcgcacggttgagtagtttggtcggttggctgggctacggcggacatttgag

SEQ ID NO: 260873 - DNA, 55 bp, Artificial
  Synthetic oligonucleotide
tctgatctctttcctggcaacatcgacgctataagtaatctggaagcttcgtccc

SEQ ID NO: 260874 - DNA, 54 bp, Artificial
  Synthetic oligonucleotide
tggacccgtttgaggtacggaggtaacagcgtcgaattgaacttgatcccccta

SEQ ID NO: 260875 - DNA, 55 bp, Artificial
  Synthetic oligonucleotide
atgcggcggccgataattccattgtcgggaatacctgtctatatggggccacagg

SEQ ID NO: 260876 - DNA, 55 bp, Artificial
  Synthetic oligonucleotide
actggagtttagactaactcctcctgtaatcaaactgtacagtctagtctaatga

SEQ ID NO: 260877 - DNA, 55 bp, Artificial
  Synthetic oligonucleotide
atgaacgcccggtctacacctgtcccctttgtggctggcacggttctgctgccct

SEQ ID NO: 260878 - DNA, 55 bp, Artificial
  Synthetic oligonucleotide
tctgggtacgttttcactatagagtaggaagtcaaaggtggcgggacctataagc

SEQ ID NO: 260879 - DNA, 55 bp, Artificial
  Synthetic oligonucleotide
tctggttaatggtgtttaccaagctcgactacaagtcaaaccgagaaagtatcgc

SEQ ID NO: 260880 - DNA, 55 bp, Artificial
  Synthetic oligonucleotide
agaagccctagaaccctcactacatagcttcttgtatatcacagcagatcaagct

SEQ ID NO: 260881 - DNA, 55 bp, Artificial
  Synthetic oligonucleotide
ttaattcacctgctgctgagttcgacttgtaaggacaaacgacctctcatcctgc

SEQ ID NO: 260882 - DNA, 55 bp, Artificial
  Synthetic oligonucleotide
atcgactagcacatcagttctgttctgacgggtcgctttagcttgaccgtcaata

SEQ ID NO: 260883 - DNA, 55 bp, Artificial
  Synthetic oligonucleotide
tgaccttgcttacacaacttctagtatcccgacagtgaactaccaacgctcctga

SEQ ID NO: 260884 - DNA, 54 bp, Artificial
  Synthetic oligonucleotide
tgagaagtgttccaaaggtcacgccagggtctaaagtaactttcccatccaggg

SEQ ID NO: 260885 - DNA, 58 bp, Artificial
  Synthetic oligonucleotide
cagacttccttatagtggcgaggcgagtttttacaggggatatatcctagacagtcta

SEQ ID NO: 260886 - DNA, 57 bp, Artificial
  Synthetic oligonucleotide
agtgccgaggttatgctgtcatgggcgttaggaactagcgtccctaatcgtggaggg

SEQ ID NO: 260887 - DNA, 52 bp, Artificial
  Synthetic oligonucleotide
cggaggaccagccttagccgccgaagcggtaagtaacctattagaaggggtg

SEQ ID NO: 260888 - DNA, 55 bp, Artificial
  Synthetic oligonucleotide
cggactgccggcatttgccaacaactaatctaagtaagggctgtgtgacagaatc

SEQ ID NO: 260889 - DNA, 55 bp, Artificial
  Synthetic oligonucleotide
cggaatcgccaagtgtgaatttatccgagagaaccgtaaccccaatgcaacttag

SEQ ID NO: 260890 - DNA, 55 bp, Artificial
  Synthetic oligonucleotide
ttgtagcgccgacgggaaatgctcaggctctactggtgcgcactcaggatgtccc

SEQ ID NO: 260891 - DNA, 54 bp, Artificial
  Synthetic oligonucleotide
aaccgtgaatttctgcgccaatacgggtaattgactgtacgtctaacttatccc

SEQ ID NO: 260892 - DNA, 55 bp, Artificial
  Synthetic oligonucleotide
tacggcttgtgttacggaagtcatgtatcttctcagttcagattatcggacacag

SEQ ID NO: 260893 - DNA, 53 bp, Artificial
  Synthetic oligonucleotide
cgcttggatgtaccaaaccctaccccagagttttattccggcagaagaccaag

SEQ ID NO: 260894 - DNA, 55 bp, Artificial
  Synthetic oligonucleotide
tactggacttagctcaatcgctgccggaagcgcactgcaagctctcttagcagga

SEQ ID NO: 260895 - DNA, 55 bp, Artificial
  Synthetic oligonucleotide
cgcggccactccactaactgctctcgtttctcccaatgcttgtaagagtagggca

SEQ ID NO: 260896 - DNA, 55 bp, Artificial
  Synthetic oligonucleotide
aacgataaatttccactcgcttattctgagggtcaatcaaccatcctaattgtgc

SEQ ID NO: 260897 - DNA, 60 bp, Artificial
  Synthetic oligonucleotide
gcgactccccaaccaatggccgcagctaactcatacagactaacatcttgttgataagtg

SEQ ID NO: 260898 - DNA, 55 bp, Artificial
  Synthetic oligonucleotide
cgcgattccgggagtcattgtcaaagcggacaagcccagtgccagtagttttcga

SEQ ID NO: 260899 - DNA, 55 bp, Artificial
  Synthetic oligonucleotide
cgcgaaccaaaaggattaagagtcgatttatctagaagtctctaccgttatctag

SEQ ID NO: 260900 - DNA, 55 bp, Artificial
  Synthetic oligonucleotide
cgcctcgactgtaggacgcgatagggttatcgactgcttctgctgtcccttacct

SEQ ID NO: 260901 - DNA, 53 bp, Artificial
  Synthetic oligonucleotide
aacggagaggcccctaaattaaaacgtcgtcatttggctgctaatcaaaagga

SEQ ID NO: 260902 - DNA, 55 bp, Artificial
  Synthetic oligonucleotide
cgcccatataattgacgtggccatctcgcctttaacagtagttcccacagggatg

SEQ ID NO: 260903 - DNA, 55 bp, Artificial
  Synthetic oligonucleotide
cgccaaggagaagaataactcctatgaccagcagaggcattcccagcgtagttgg

SEQ ID NO: 260904 - DNA, 55 bp, Artificial
  Synthetic oligonucleotide
cgcaggccaatgacgtactcgcaaccattactgagcctcaaatggattgggacac

SEQ ID NO: 260905 - DNA, 55 bp, Artificial
  Synthetic oligonucleotide
cgcagacaacctagatgtgccgtccccacagataacctcaaactactaacaactg

SEQ ID NO: 260906 - DNA, 55 bp, Artificial
  Synthetic oligonucleotide
cgcaaagggcgaaccccgtagagtagcaaatagcgcaaacaggatgggcatttgt

SEQ ID NO: 260907 - DNA, 55 bp, Artificial
  Synthetic oligonucleotide
cgatttgtttggttaatgtactcacaattcgggtcaaattagccctagcttctcg

SEQ ID NO: 260908 - DNA, 54 bp, Artificial
  Synthetic oligonucleotide
tcgttttttgtcctacagaggcggtagcctcccctagctcggatatatttaggg

SEQ ID NO: 260909 - DNA, 55 bp, Artificial
  Synthetic oligonucleotide
aactcaccctcgatctggggttatttacagttgatgcgaccggctaatattgtga

SEQ ID NO: 260910 - DNA, 55 bp, Artificial
  Synthetic oligonucleotide
cgattgacgctgtattgttgtgatgcttctaacgcgcctgagtgatacactcgtt

SEQ ID NO: 260911 - DNA, 55 bp, Artificial
  Synthetic oligonucleotide
ctataagtcccactctctaaccgaaggatcgcgcatctggatagatggactcccc

SEQ ID NO: 260912 - DNA, 55 bp, Artificial
  Synthetic oligonucleotide
ctaaccctaagatatgatgtcgcgtccaagccatattagtgaagagtaaatcgtc

SEQ ID NO: 260913 - DNA, 55 bp, Artificial
  Synthetic oligonucleotide
ctaaccagcctgatcgggcaatcgtataatgacacaattacacaacgcctttacc

SEQ ID NO: 260914 - DNA, 55 bp, Artificial
  Synthetic oligonucleotide
cgttttcccgataccagaaggaccctctatcaccagtcctctaccaggtgtgcgt

SEQ ID NO: 260915 - DNA, 53 bp, Artificial
  Synthetic oligonucleotide
cgtttcccctttaacgtcgtcagatcacacaacgctaagaccttcttaaactc

SEQ ID NO: 260916 - DNA, 55 bp, Artificial
  Synthetic oligonucleotide
cgtttcacgtactgcgttggggaataggggtattcgatgataatgtcatagcccc

SEQ ID NO: 260917 - DNA, 55 bp, Artificial
  Synthetic oligonucleotide
cgtttatgtttgcagtccgctacagctacttatgaatcccttgactcccgtagtc

SEQ ID NO: 260918 - DNA, 55 bp, Artificial
  Synthetic oligonucleotide
cgttcttccatgacccgttgttgttctcgacgcagagcaaattcttcgagcgatc

SEQ ID NO: 260919 - DNA, 60 bp, Artificial
  Synthetic oligonucleotide
gtccatgattacacgcagagttacgtttcggctatatccttccaagtctcaatcggcaaa

SEQ ID NO: 260920 - DNA, 52 bp, Artificial
  Synthetic oligonucleotide
cgttcagagggaatagtacgggcaaaagacctcagagaacggggaattcctt

SEQ ID NO: 260921 - DNA, 52 bp, Artificial
  Synthetic oligonucleotide
cgttaggtaattgaccgctttgttcgtttctccaataaactaaggtatggtc

SEQ ID NO: 260922 - DNA, 55 bp, Artificial
  Synthetic oligonucleotide
cgtgcctgtatgatggttctccgaatttgtgttaaacgctacggaaggctccctc

SEQ ID NO: 260923 - DNA, 55 bp, Artificial
  Synthetic oligonucleotide
taatatctcgtctgccaatgggttcccctaataggacagcgcgaccactggtagg

SEQ ID NO: 260924 - DNA, 55 bp, Artificial
  Synthetic oligonucleotide
cgtcaagcctttgttaataatgtcgcgtaatcgctgcgttcctgcttccggtgca

SEQ ID NO: 260925 - DNA, 55 bp, Artificial
  Synthetic oligonucleotide
taatcagaatacgctcaaattgctgtttatacggtgcgcctggacagtatagcgg

SEQ ID NO: 260926 - DNA, 55 bp, Artificial
  Synthetic oligonucleotide
taatccaacgaaactgcttagtattgtctgccatcggttgaccatcgctatccgg

SEQ ID NO: 260927 - DNA, 55 bp, Artificial
  Synthetic oligonucleotide
cgggttggagattatatccggttgcaccggaactatgaaagtacgctcctgggga

SEQ ID NO: 260928 - DNA, 45 bp, Artificial
  Synthetic oligonucleotide
cggggttattcggaaacgttttggggttattcggaaacgttttgg

SEQ ID NO: 260929 - DNA, 55 bp, Artificial
  Synthetic oligonucleotide
cggggttatcccgtcgcaatgtggccactcctcgctctttggtgacaaccctgcg

SEQ ID NO: 260930 - DNA, 60 bp, Artificial
  Synthetic oligonucleotide
attaagagataggcgactgtatcgagacactcatcgctcctttgagcaatactgtcaaga

SEQ ID NO: 260931 - DNA, 55 bp, Artificial
  Synthetic oligonucleotide
cgggcaacatttgataaaatgcacgcagacgatcgcatggctcatgagaaactcg

SEQ ID NO: 260932 - DNA, 55 bp, Artificial
  Synthetic oligonucleotide
aaatagttgtgttttaccaagtgaggcacattttagcgatgctaaaccccgtgaa

SEQ ID NO: 260933 - DNA, 51 bp, Artificial
  Synthetic oligonucleotide
cgggaatgcccgtaggatttgggcgaacacgggaaaccagtacccctggcg

SEQ ID NO: 260934 - DNA, 55 bp, Artificial
  Synthetic oligonucleotide
cggcactagctctaatgacaacttaacaggatttgataacgccgacaccattata

SEQ ID NO: 260935 - DNA, 55 bp, Artificial
  Synthetic oligonucleotide
cggaggtggactgacaggacaagcggatgcggttaaactaggggtagctagagcc

SEQ ID NO: 260936 - DNA, 55 bp, Artificial
  Synthetic oligonucleotide
aaatgtgcatcgggacagtttcaggttagggctatggatgcagaggagtttcccc

SEQ ID NO: 260937 - DNA, 53 bp, Artificial
  Synthetic oligonucleotide
ccgtgtgattctcgaagccagtaaaattgaccagtttaaaccaggggaagtcc

SEQ ID NO: 260938 - DNA, 52 bp, Artificial
  Synthetic oligonucleotide
ccgggtgtccagctaaagatcgccgtttctgggtcaaaggttgccccggtgg

SEQ ID NO: 260939 - DNA, 55 bp, Artificial
  Synthetic oligonucleotide
ttggccaacaaagggatgctcggactcgtttgtggtcagtcgggttacgcccatc

SEQ ID NO: 260940 - DNA, 52 bp, Artificial
  Synthetic oligonucleotide
tataacttggtcaagacaacccgtatcggggtaagggatgaggttacggacg

SEQ ID NO: 260941 - DNA, 60 bp, Artificial
  Synthetic oligonucleotide
tctagccgtgtccgtgactatgttttggactacaacgctatcaatgaactacgcctgagc

SEQ ID NO: 260942 - DNA, 55 bp, Artificial
  Synthetic oligonucleotide
ttgctaacactcccttagacagtctggccacagactacgacctggaatatcgcat

SEQ ID NO: 260943 - DNA, 55 bp, Artificial
  Synthetic oligonucleotide
ccgcagactatggtaacgaactcgctaattcatttgggaacgtcttcggagcagc

SEQ ID NO: 260944 - DNA, 55 bp, Artificial
  Synthetic oligonucleotide
ccgatgggatgatgttaaatggagtacgcgcggccggtatttatcgcttgatggg

SEQ ID NO: 260945 - DNA, 53 bp, Artificial
  Synthetic oligonucleotide
aataaaactcggctcgtattcggggtaacatcgatgactcgaccaattaaacc

SEQ ID NO: 260946 - DNA, 55 bp, Artificial
  Synthetic oligonucleotide
ccgacgcattatggtatcctgatgaggtcagtatcgggcatctagagcctgatct

SEQ ID NO: 260947 - DNA, 55 bp, Artificial
  Synthetic oligonucleotide
aatcggagtattctgctacatgggtcgtcagtgggaattaagctatcgtttaggg

SEQ ID NO: 260948 - DNA, 52 bp, Artificial
  Synthetic oligonucleotide
ccctttcccctacctatcgcctgttgtggggtattcccggacggtctaatgc

SEQ ID NO: 260949 - DNA, 55 bp, Artificial
  Synthetic oligonucleotide
ttgagtatcgtatacgtttcctaatccagttaaacaagtagcatcgcattgaggg

SEQ ID NO: 260950 - DNA, 55 bp, Artificial
  Synthetic oligonucleotide
cccttcattaactcagagggacatctgatagtaaagcttgatgtggattgagttt

SEQ ID NO: 260951 - DNA, 55 bp, Artificial
  Synthetic oligonucleotide
cccttactgacgaatcgcgaataaacgacagtgacgtgcgcctccaatttaaagg

SEQ ID NO: 260952 - DNA, 60 bp, Artificial
  Synthetic oligonucleotide
gcgattccctgaccagcttcatccttatcagtagcgataataatttgtcccccttggctg

SEQ ID NO: 260953 - DNA, 55 bp, Artificial
  Synthetic oligonucleotide
ccctctctcgataatcgcatcgtacgcagaaagtccatagagaccctaggaagac

SEQ ID NO: 260954 - DNA, 55 bp, Artificial
  Synthetic oligonucleotide
aattagttcagtagttgaggcgttccctgtaattgtgtcgttcaaccatcagtag

SEQ ID NO: 260955 - DNA, 55 bp, Artificial
  Synthetic oligonucleotide
ccctatttatgatgtcgctttgagtcgccaagggacagagttagctaccgcttca

SEQ ID NO: 260956 - DNA, 53 bp, Artificial
  Synthetic oligonucleotide
acaattccgtcccgaaattagctggttagaacgggtgggtttgccgatcgcca

SEQ ID NO: 260957 - DNA, 55 bp, Artificial
  Synthetic oligonucleotide
acaccaggagttagcggtagcgtgcacattgccaacctaaatttagttagaacgc

SEQ ID NO: 260958 - DNA, 55 bp, Artificial
  Synthetic oligonucleotide
cccgtctcttgattacgagttcccgtcgctatcatcttctccttaccagtttgtc

SEQ ID NO: 260959 - DNA, 55 bp, Artificial
  Synthetic oligonucleotide
cccgtcaaaattcgtagtccctcgtctctgaggttaatcgctgcgtttacatccc

SEQ ID NO: 260960 - DNA, 54 bp, Artificial
  Synthetic oligonucleotide
cccggtcccctgttggccgtgttactagcaacagccaccgtcgctactttcaag

SEQ ID NO: 260961 - DNA, 55 bp, Artificial
  Synthetic oligonucleotide
cgactaaagcaggacaattggcccagactcctccatctatataactcgcgccttg

SEQ ID NO: 260962 - DNA, 55 bp, Artificial
  Synthetic oligonucleotide
cgacgacgaaacattgataaccaaggcagagaatgtctgctgcaatgtgcggctc

SEQ ID NO: 260963 - DNA, 57 bp, Artificial
  Synthetic oligonucleotide
tctagtcaaacgactagcagatgcccgcctagtggtcaccgggcgtcaagaaaaaac

SEQ ID NO: 260964 - DNA, 55 bp, Artificial
  Synthetic oligonucleotide
cgaagctgccttactcctggccccagaaactttacaggtgatgccatccgactgg

SEQ ID NO: 260965 - DNA, 55 bp, Artificial
  Synthetic oligonucleotide
ccttacacatggtagtgtctcagaatgttagccgtgttgaacctcgacgcgaccc

SEQ ID NO: 260966 - DNA, 55 bp, Artificial
  Synthetic oligonucleotide
cctgttgcatcgggaacccgactgagggagtcgttatcgtctccattgggccctg

SEQ ID NO: 260967 - DNA, 55 bp, Artificial
  Synthetic oligonucleotide
cgagatgacccgaattagaggcacaactaccactggcggtgagtttgaccacagg

SEQ ID NO: 260968 - DNA, 54 bp, Artificial
  Synthetic oligonucleotide
cgagtcagaacgggcattacccggtattattggacgaattaagcaggttttgac

SEQ ID NO: 260969 - DNA, 55 bp, Artificial
  Synthetic oligonucleotide
cctcggatgagtctggtaactcgactaagaggcggctaagagctaagggttttga

SEQ ID NO: 260970 - DNA, 51 bp, Artificial
  Synthetic oligonucleotide
cgataaggggtagaaccgtcaaataaatcgggatttcgtccaaaatcgagg

SEQ ID NO: 260971 - DNA, 55 bp, Artificial
  Synthetic oligonucleotide
ttggcttcccaaggagatacgttagtcgttgactctagcaactttagtgatcccg

SEQ ID NO: 260972 - DNA, 55 bp, Artificial
  Synthetic oligonucleotide
cgaggccgcactctggaatggctttactggtataaccagaatggccaacgctatc

SEQ ID NO: 260973 - DNA, 49 bp, Artificial
  Synthetic oligonucleotide
cctactcccaacgtggggaaagccttagaacgatttaaccccgatttag

SEQ ID NO: 260974 - DNA, 52 bp, Artificial
  Synthetic oligonucleotide
atgggccaatccccttacatcgttaccgtaaatttaaaacaagtaagcgtca

SEQ ID NO: 260975 - DNA, 55 bp, Artificial
  Synthetic oligonucleotide
cgatctatcatgacttgaacggttatcctattatggaacggtggttggtacatgg

SEQ ID NO: 260976 - DNA, 52 bp, Artificial
  Synthetic oligonucleotide
aagtccaattagacgagacgaacggggtagataaacggggaagattaacatc

SEQ ID NO: 260977 - DNA, 55 bp, Artificial
  Synthetic oligonucleotide
cgattaggattgagtttataccccatagcggctaactttcttgcatcttggggac

SEQ ID NO: 260978 - DNA, 55 bp, Artificial
  Synthetic oligonucleotide
cctaattgagcaatacccggttctaagggactaacaatctcattatgaccgtttg

SEQ ID NO: 260979 - DNA, 54 bp, Artificial
  Synthetic oligonucleotide
accaacgagagggagtcaaggggctttcccgtcagtgtcgagggagcgttcgtc

SEQ ID NO: 260980 - DNA, 54 bp, Artificial
  Synthetic oligonucleotide
acggttagatggggttttaggccccattgcattgctccgaggcggggttgcact

SEQ ID NO: 260981 - DNA, 54 bp, Artificial
  Synthetic oligonucleotide
aaaatcgcgttgtaattgagcgatgcgctggctaatttgtgagtcaacatcgtg

SEQ ID NO: 260982 - DNA, 54 bp, Artificial
  Synthetic oligonucleotide
acagagttgggggttacatctcgtagggttgggtacgatattacaggatatccc

SEQ ID NO: 260983 - DNA, 54 bp, Artificial
  Synthetic oligonucleotide
aaaagtatcgcggactctgcctcacctcagtggatcgcacagttcaaacagaag

SEQ ID NO: 260984 - DNA, 54 bp, Artificial
  Synthetic oligonucleotide
ttctttctgacccgtgccatactctgagtgatttcgacgggttctaagattccc

SEQ ID NO: 260985 - DNA, 56 bp, Artificial
  Synthetic oligonucleotide
atggcgtttgatacgctagtcgttttcccgataccagaaggaccctctatcaccag

SEQ ID NO: 260986 - DNA, 54 bp, Artificial
  Synthetic oligonucleotide
aaagttagagctttggtgcaggatatattcaagcaacgtcatctagtcccagac

SEQ ID NO: 260987 - DNA, 54 bp, Artificial
  Synthetic oligonucleotide
gggaaatatagatccaagtgcgattcgataaccatacttataagctatatccag

SEQ ID NO: 260988 - DNA, 54 bp, Artificial
  Synthetic oligonucleotide
acggaggtaaagctagtggtcgcgcccttgcttatctggctcatgcttacttgg

SEQ ID NO: 260989 - DNA, 54 bp, Artificial
  Synthetic oligonucleotide
agactaatggaaatttggaacgggccagagggagtctaaaaatctatcgacgcg

SEQ ID NO: 260990 - DNA, 54 bp, Artificial
  Synthetic oligonucleotide
aagaatatcgtagtagtcacctggcatagatcgttagtttcgcttgtttgtggg

SEQ ID NO: 260991 - DNA, 53 bp, Artificial
  Synthetic oligonucleotide
aagggtatactaagggctaaaatcaggctagtggtcatttggcctaattcggg

SEQ ID NO: 260992 - DNA, 54 bp, Artificial
  Synthetic oligonucleotide
aagtggttagcatggaggatatttcccctgacctcaaacgcgcggtcttagcga

SEQ ID NO: 260993 - DNA, 54 bp, Artificial
  Synthetic oligonucleotide
acttctagctcactcagtctgtttcagcgatttgctaaaagcttgcaggaggac

SEQ ID NO: 260994 - DNA, 54 bp, Artificial
  Synthetic oligonucleotide
tttactcccggattatgagctggattgcgccaataggccgctgctaaatctcgc

SEQ ID NO: 260995 - DNA, 54 bp, Artificial
  Synthetic oligonucleotide
ctccttcggctaggttgttgatgctccgactgacgcttcccatccccgtctgga

SEQ ID NO: 260996 - DNA, 60 bp, Artificial
  Synthetic oligonucleotide
gtcctcatcctccattttggatgtatcctcaagagaatcatctctgttgaccgtattatc

SEQ ID NO: 260997 - DNA, 58 bp, Artificial
  Synthetic oligonucleotide
gtcaatcaccgcaggacgataaggggattttcttaactctcgtgcttgccggatagag

SEQ ID NO: 260998 - DNA, 54 bp, Artificial
  Synthetic oligonucleotide
ctcgctgctattgcgttaagtgacgggacaaaaatagagaatcctcgctttctt

SEQ ID NO: 260999 - DNA, 54 bp, Artificial
  Synthetic oligonucleotide
cgttcaaatctatattaacgggttgtcctttacttagtgctgtttggacaactg

SEQ ID NO: 261000 - DNA, 54 bp, Artificial
  Synthetic oligonucleotide
taattcccatgattagttccagggctcctaaactcacgggagataattctatgg

SEQ ID NO: 261001 - DNA, 52 bp, Artificial
  Synthetic oligonucleotide
cttacgattgtagttttttgtactacacgcgggaaagttattacttcactta

SEQ ID NO: 261002 - DNA, 54 bp, Artificial
  Synthetic oligonucleotide
cttcaaggaatgttctagtgcggcatgatcttcttttaagtgttcgagttcaca

SEQ ID NO: 261003 - DNA, 54 bp, Artificial
  Synthetic oligonucleotide
tagatgattagcactcagatgtttgttgtaatgttccagcagtcggcgggtagg

SEQ ID NO: 261004 - DNA, 54 bp, Artificial
  Synthetic oligonucleotide
gaacggtgataggattagactgaccaatatcgttaagttcgacacgatttccca

SEQ ID NO: 261005 - DNA, 54 bp, Artificial
  Synthetic oligonucleotide
cgaggcagtggggatagcaaagaggactcctctgttccgaataggtattgcagt

SEQ ID NO: 261006 - DNA, 54 bp, Artificial
  Synthetic oligonucleotide
cctcatagactggttagaaacccattggacaacccctgcctttagtggctggtt

SEQ ID NO: 261007 - DNA, 54 bp, Artificial
  Synthetic oligonucleotide
gatggtcggttaatcgagtttctaggtctgtcgtgaatcctagataatgttgtg

SEQ ID NO: 261008 - DNA, 57 bp, Artificial
  Synthetic oligonucleotide
atcttggaggggttgaggatcacgaaagctacttttcccgatatatgacaaactcga

SEQ ID NO: 261009 - DNA, 54 bp, Artificial
  Synthetic oligonucleotide
tccccatttaatcggcgaattagctatctatcctatgaaatccccggacagtta

SEQ ID NO: 261010 - DNA, 54 bp, Artificial
  Synthetic oligonucleotide
gccgttgattttctggacgggaaatgtggcccactcaggacaagccaagacacc

SEQ ID NO: 261011 - DNA, 54 bp, Artificial
  Synthetic oligonucleotide
caattacgtttgttaccagttagtgaagcacaaagagaatatggggaagctgtc

SEQ ID NO: 261012 - DNA, 54 bp, Artificial
  Synthetic oligonucleotide
caacgcttctgtaggttatcagctttcccaatgtacaataaacgcttgtctggg

SEQ ID NO: 261013 - DNA, 54 bp, Artificial
  Synthetic oligonucleotide
aggggcaaagaaagcggcctgtttgctcagcctgggttgggctgcagtcgccct

SEQ ID NO: 261014 - DNA, 54 bp, Artificial
  Synthetic oligonucleotide
gtacctgtaatcgttagtccacgctcagtacgaataattgaggattgctcattc

SEQ ID NO: 261015 - DNA, 54 bp, Artificial
  Synthetic oligonucleotide
atgacctgattcaagtggggtggcaattatgtcgcaattccaagctctaattac

SEQ ID NO: 261016 - DNA, 54 bp, Artificial
  Synthetic oligonucleotide
gcggcttgccaagctaagttgatggcttacccaagggcgcaaccaccctggtta

SEQ ID NO: 261017 - DNA, 54 bp, Artificial
  Synthetic oligonucleotide
agtaactcgccaactgagcttaaggtttacccagaaattccagagggtcacaag

SEQ ID NO: 261018 - DNA, 54 bp, Artificial
  Synthetic oligonucleotide
tctgtgaggagattctaaaagcttggttagctgcggatgagtctagatcttcct

SEQ ID NO: 261019 - DNA, 60 bp, Artificial
  Synthetic oligonucleotide
atctctttatcgattactggacttagctcaatcgctgccggaagcgcactgcaagctctc

SEQ ID NO: 261020 - DNA, 53 bp, Artificial
  Synthetic oligonucleotide
gagtgaagcggctatttacgcggtcatgacatgaattatgtgacatcgtctgg

SEQ ID NO: 261021 - DNA, 53 bp, Artificial
  Synthetic oligonucleotide
cccttgcaaacgctttctggtcataacggttgggtggccggtgtggcttttag

SEQ ID NO: 261022 - DNA, 53 bp, Artificial
  Synthetic oligonucleotide
gaggctgtgtccggtactcgatgcgggggatacctgcgacttgaaccgtttgc

SEQ ID NO: 261023 - DNA, 53 bp, Artificial
  Synthetic oligonucleotide
gacttccagcgatgcttatgcttgcactcggcggaagaagggccgcttcacta

SEQ ID NO: 261024 - DNA, 53 bp, Artificial
  Synthetic oligonucleotide
tagtttttctgaatggcgtaacaaaagcgactaatggcgggttttgtctctcc

SEQ ID NO: 261025 - DNA, 53 bp, Artificial
  Synthetic oligonucleotide
tagtaatcgagtagtcccgttacaggatggctatcagctaaagctatgggttg

SEQ ID NO: 261026 - DNA, 53 bp, Artificial
  Synthetic oligonucleotide
atcaaacaatgcgcgactcaatgcgagtgccaagtggagtaccgagaatatga

SEQ ID NO: 261027 - DNA, 53 bp, Artificial
  Synthetic oligonucleotide
gtagcacctgggctatactcataaggtaaacaccacgttaatctgaatcctgg

SEQ ID NO: 261028 - DNA, 53 bp, Artificial
  Synthetic oligonucleotide
gtacgagataaccctttctggatatgctgtcgtgctatgcgctgtaaaaactg

SEQ ID NO: 261029 - DNA, 53 bp, Artificial
  Synthetic oligonucleotide
gtttacgaaccccattctctgtggaaaacctatcttgaacctgcctttcggga

SEQ ID NO: 261030 - DNA, 53 bp, Artificial
  Synthetic oligonucleotide
atcgttacggttttggatctgtccttcttctatataagccgttaagtaattgg

SEQ ID NO: 261031 - DNA, 53 bp, Artificial
  Synthetic oligonucleotide
ttaagagcattaagcgcaacagcccatttaatcgagggagaacagggcaaacc

SEQ ID NO: 261032 - DNA, 53 bp, Artificial
  Synthetic oligonucleotide
cttaatttcccctgatattaacgcttatggagcgactttagtgggaatccctg

SEQ ID NO: 261033 - DNA, 53 bp, Artificial
  Synthetic oligonucleotide
ggagtttatactgttgtgtattagggtaagctgcccaactagcggtagctgga

SEQ ID NO: 261034 - DNA, 53 bp, Artificial
  Synthetic oligonucleotide
ttacgcgcctcccgactcccacatccaaagcgttggggattggtataaccggc

SEQ ID NO: 261035 - DNA, 53 bp, Artificial
  Synthetic oligonucleotide
tctagtaaagggggaactgctgcttcgccggttttggctaaagcgcctaccgc

SEQ ID NO: 261036 - DNA, 53 bp, Artificial
  Synthetic oligonucleotide
ggccgttatgcagaaattcctacgatttctgaggctgcttattctcaggttcg

SEQ ID NO: 261037 - DNA, 53 bp, Artificial
  Synthetic oligonucleotide
cccccctgctacgaacagaggaggtctcgtgccccaagaacgaattctacggg

SEQ ID NO: 261038 - DNA, 53 bp, Artificial
  Synthetic oligonucleotide
ttccaccgttgcgggctgcattagcgacatcgcagttaccacgccacccgatg

SEQ ID NO: 261039 - DNA, 53 bp, Artificial
  Synthetic oligonucleotide
atcgactgcaatgccctgttgcttcagtagttgtagggcttgagtgaagtccc

SEQ ID NO: 261040 - DNA, 53 bp, Artificial
  Synthetic oligonucleotide
ttcgaccaagccttcaacggggcgagaacgtggaaggaatcattagcccccga

SEQ ID NO: 261041 - DNA, 59 bp, Artificial
  Synthetic oligonucleotide
atcgcaggcagcccaagcgttaggatggaatagtactcaatggcaacccagtttcgttg

SEQ ID NO: 261042 - DNA, 51 bp, Artificial
  Synthetic oligonucleotide
aatttgcctcattagccacaagaaggggtttaggggaaattagtaaacagg

SEQ ID NO: 261043 - DNA, 53 bp, Artificial
  Synthetic oligonucleotide
cccgattaatagcactaagtagaggctcgacggaaatccccttacaaacatac

SEQ ID NO: 261044 - DNA, 53 bp, Artificial
  Synthetic oligonucleotide
ccctataaaagccgctatagctactataccaaccgccaaggcaataggtcctc

SEQ ID NO: 261045 - DNA, 53 bp, Artificial
  Synthetic oligonucleotide
gataccgtccgtaaagggtcagtggccgtccccgttcgtccagccagggaata

SEQ ID NO: 261046 - DNA, 52 bp, Artificial
  Synthetic oligonucleotide
tatgaagagttagttttgtcttataatcagaatcccaatttttatgctccta

SEQ ID NO: 261047 - DNA, 52 bp, Artificial
  Synthetic oligonucleotide
tctaattgtagcggatctcctacgattacagcgcgtctactacgaactaata

SEQ ID NO: 261048 - DNA, 52 bp, Artificial
  Synthetic oligonucleotide
tgggtaggtattctttcatgtgagcttgggacacaaagctgatggcactcag

SEQ ID NO: 261049 - DNA, 52 bp, Artificial
  Synthetic oligonucleotide
gtttcctccccccgtcgatcatacttcgccgtcgtctcaggggacgcatgac

SEQ ID NO: 261050 - DNA, 52 bp, Artificial
  Synthetic oligonucleotide
taccttagaatttggagggggaacccataatctcaacagtggtagcagtgtg

SEQ ID NO: 261051 - DNA, 52 bp, Artificial
  Synthetic oligonucleotide
tcgaaccgcagcttgtgtcaacagtttattgagacactataccctagaatcc

SEQ ID NO: 261052 - DNA, 55 bp, Artificial
  Synthetic oligonucleotide
gctaagactgggtaagggtttgaccttgcttacacaacttctagtatcccgacag

SEQ ID NO: 261053 - DNA, 52 bp, Artificial
  Synthetic oligonucleotide
tcactattgttgtatagtgaaaatactccttaaagatccgaatctcagagtg

SEQ ID NO: 261054 - DNA, 52 bp, Artificial
  Synthetic oligonucleotide
tatgacgcaaacatccaagacagcaagcgttaccatccgatgccccctcgac

SEQ ID NO: 261055 - DNA, 52 bp, Artificial
  Synthetic oligonucleotide
ttccgaagggtaagacatctgctaacaaggtaacgggagtattattggtcgg

SEQ ID NO: 261056 - DNA, 52 bp, Artificial
  Synthetic oligonucleotide
tataagcgtaattatccgacacagtatggtattctaaggtcttagggatcgg

SEQ ID NO: 261057 - DNA, 52 bp, Artificial
  Synthetic oligonucleotide
tgagtggaaactggcctgtgcggggaacataacggctgatggagtagactag

SEQ ID NO: 261058 - DNA, 52 bp, Artificial
  Synthetic oligonucleotide
gttcgttagccctcctagcactaatcaaccgacaagctgaacctcgccatgt

SEQ ID NO: 261059 - DNA, 52 bp, Artificial
  Synthetic oligonucleotide
ggtgtaagattgttcggttttttgagcatctaatctccattttttggcagag

SEQ ID NO: 261060 - DNA, 52 bp, Artificial
  Synthetic oligonucleotide
gttccggttacactaactgctgtgcgttttaaataggtagattcccctttgc

SEQ ID NO: 261061 - DNA, 52 bp, Artificial
  Synthetic oligonucleotide
ggttcattggtcttcacgggatgccctagatattcggggtttaggggaaaga

SEQ ID NO: 261062 - DNA, 52 bp, Artificial
  Synthetic oligonucleotide
tcaaagcggtacgtcggaagctgtgggtactgactccttcgatttccagctt

SEQ ID NO: 261063 - DNA, 56 bp, Artificial
  Synthetic oligonucleotide
tcttaaaaactacacacctgttacctcagtaactacacaactagaaagtcctgata

SEQ ID NO: 261064 - DNA, 52 bp, Artificial
  Synthetic oligonucleotide
gagcaggattttcgccttggctcaacataatagtccctctcagttgacgagt

SEQ ID NO: 261065 - DNA, 52 bp, Artificial
  Synthetic oligonucleotide
cgtagtagggatttaatcgaaaagcataggagcgtccaactttgggacctct

SEQ ID NO: 261066 - DNA, 52 bp, Artificial
  Synthetic oligonucleotide
agagactgaagccgcacttcctggcgtgacgttagtggagggagtgacgctg

SEQ ID NO: 261067 - DNA, 52 bp, Artificial
  Synthetic oligonucleotide
atgtccgaggggtaacgatggaagcctgccgtctatgggagggagactataa

SEQ ID NO: 261068 - DNA, 52 bp, Artificial
  Synthetic oligonucleotide
gagtctgtgtaccttgatttgaaaagagggcatagccagaacgaggatcgag

SEQ ID NO: 261069 - DNA, 52 bp, Artificial
  Synthetic oligonucleotide
cggtcaaggtgggctgacgttcccagtccgccgagccaaaacccgcctcgag

SEQ ID NO: 261070 - DNA, 52 bp, Artificial
  Synthetic oligonucleotide
agacagtatttaggctttgggccctagtccgattttggcggcataaacagcc

SEQ ID NO: 261071 - DNA, 52 bp, Artificial
  Synthetic oligonucleotide
accaaatttgtattggtagggacttcggtagggattgctggatctgttcggt

SEQ ID NO: 261072 - DNA, 52 bp, Artificial
  Synthetic oligonucleotide
ccgacattggcatcacccgtcgggttacttaatgctaaattgatggttttgc

SEQ ID NO: 261073 - DNA, 52 bp, Artificial
  Synthetic oligonucleotide
atcgactttaaagcgttggattattgctgagagaactcgtgtagttatgctg

SEQ ID NO: 261074 - DNA, 58 bp, Artificial
  Synthetic oligonucleotide
tgaacacccctttaggtttggcgatagtcccccaagtttcggcaacatgagcagctgc

SEQ ID NO: 261075 - DNA, 52 bp, Artificial
  Synthetic oligonucleotide
gccgagattcagcactgactaagcgctcgctatccatgacgtgagggttgcc

SEQ ID NO: 261076 - DNA, 52 bp, Artificial
  Synthetic oligonucleotide
cggagggctatctttagcgccttatttatcggttgctattactcaaggggcc

SEQ ID NO: 261077 - DNA, 52 bp, Artificial
  Synthetic oligonucleotide
actgcccccacgccgagagaataaacccgactgccccaagcgaattggtcgt

SEQ ID NO: 261078 - DNA, 52 bp, Artificial
  Synthetic oligonucleotide
ccgttgaaaatcgtcccaattatccccattgtgttgattgtgggttgccacg

SEQ ID NO: 261079 - DNA, 52 bp, Artificial
  Synthetic oligonucleotide
gatcgatgactcagtctccgatgaaccgctaacgctcattatttggtctagg

SEQ ID NO: 261080 - DNA, 52 bp, Artificial
  Synthetic oligonucleotide
gccaacgtccagcctcaacacaggacacggggatctttaagctggtctgagc

SEQ ID NO: 261081 - DNA, 52 bp, Artificial
  Synthetic oligonucleotide
cgaaaattgaggtgacaaccactaaggatactgagttagaagcgcgaaccgg

SEQ ID NO: 261082 - DNA, 52 bp, Artificial
  Synthetic oligonucleotide
atagctccctctgggactttcgcgaagaactgagacggggtttggcggcaga

SEQ ID NO: 261083 - DNA, 52 bp, Artificial
  Synthetic oligonucleotide
actcggacagactaaataaaccgtcgattttaattcgtctttagcagcagga

SEQ ID NO: 261084 - DNA, 52 bp, Artificial
  Synthetic oligonucleotide
cttttaacggagggggagtgtgatgcgatgactttaaattgggcccggttac

SEQ ID NO: 261085 - DNA, 59 bp, Artificial
  Synthetic oligonucleotide
taatctatcggggcaatcgctactctgtcccctcgacccagaccctacaacctgcagcg

SEQ ID NO: 261086 - DNA, 52 bp, Artificial
  Synthetic oligonucleotide
agcggcttcgtggctcctcccaacaccaccgataagtagcttcgtcgttcct

SEQ ID NO: 261087 - DNA, 52 bp, Artificial
  Synthetic oligonucleotide
aaattaatagggaacacaggcgatcccaataatctaacaatgaccctggctt

SEQ ID NO: 261088 - DNA, 52 bp, Artificial
  Synthetic oligonucleotide
cataaatattaccccctaagcagtgccaaacgtggggttaagtaccacctag

SEQ ID NO: 261089 - DNA, 52 bp, Artificial
  Synthetic oligonucleotide
gaaccggagattcagccgcagatgaaacagtgtaggaatagccaagctccga

SEQ ID NO: 261090 - DNA, 52 bp, Artificial
  Synthetic oligonucleotide
cagatgatgagcactacgttgagaccgccaacttcctagggaaagttcaacg

SEQ ID NO: 261091 - DNA, 52 bp, Artificial
  Synthetic oligonucleotide
gacaacacaacaggcgatctcatcggggcaggacgcacaaagccgcactgtt

SEQ ID NO: 261092 - DNA, 52 bp, Artificial
  Synthetic oligonucleotide
caccgtgacgatgacttgttgatctaaattctcttgatcggaggcaacaata

SEQ ID NO: 261093 - DNA, 52 bp, Artificial
  Synthetic oligonucleotide
aggtaggagatcgggtgatccttgagagtgttctcggatcaaggctaacgct

SEQ ID NO: 261094 - DNA, 52 bp, Artificial
  Synthetic oligonucleotide
aagaaaactactgagtcaaagggggctaagaaggggtcaagtgcgtctcaaa

SEQ ID NO: 261095 - DNA, 52 bp, Artificial
  Synthetic oligonucleotide
aagcgaatgctcctatttgacggttatcggtgcaagagggacaagcgtaacc

SEQ ID NO: 261096 - DNA, 60 bp, Artificial
  Synthetic oligonucleotide
ctgggcttgttcggcttgaagcagccccaatgggatatgtcttggcaattgggcgagagt

SEQ ID NO: 261097 - DNA, 52 bp, Artificial
  Synthetic oligonucleotide
caactggtactgtacccgcctattctgacattacagggacgtttgaaggaga

SEQ ID NO: 261098 - DNA, 52 bp, Artificial
  Synthetic oligonucleotide
gacgttcatgatgtcttgataagcgttttcgagttcggttatcctgttcgat

SEQ ID NO: 261099 - DNA, 52 bp, Artificial
  Synthetic oligonucleotide
aatagatcctcagtacagttaactccctcacatcggtagagttgccagcata

SEQ ID NO: 261100 - DNA, 52 bp, Artificial
  Synthetic oligonucleotide
gacttatctatgaatgtgtccggtggagacagtaatgcttatgcttcagcct

SEQ ID NO: 261101 - DNA, 51 bp, Artificial
  Synthetic oligonucleotide
taacgtatcgacggcaattttggttctagggccaacataacgagagggagg

SEQ ID NO: 261102 - DNA, 51 bp, Artificial
  Synthetic oligonucleotide
taactcgtgtgccggtcattgctgataatttgactcgttacggtaactatc

SEQ ID NO: 261103 - DNA, 51 bp, Artificial
  Synthetic oligonucleotide
ctgaaaaccattctagctattaccctaatgcgaaaacgggatttctttacc

SEQ ID NO: 261104 - DNA, 51 bp, Artificial
  Synthetic oligonucleotide
cgggcaaaggcttgtttacaggatgctcagcaacatggattagtcatcgga

SEQ ID NO: 261105 - DNA, 51 bp, Artificial
  Synthetic oligonucleotide
gtttgcgaacactgagactaactgttgttcaaactcagtccgttcaagggg

SEQ ID NO: 261106 - DNA, 51 bp, Artificial
  Synthetic oligonucleotide
tgtgcctacaagggtgtttaagggactattttcggggacggtgagggtagt

SEQ ID NO: 261107 - DNA, 60 bp, Artificial
  Synthetic oligonucleotide
gccgccatctcaacaattgatcgaatctcagcccccgtgcagtattgactttcggcgagt

SEQ ID NO: 261108 - DNA, 56 bp, Artificial
  Synthetic oligonucleotide
tacacttcccttgaggtcgctactagaggctccccgtaatacggcgaacatatggg

SEQ ID NO: 261109 - DNA, 51 bp, Artificial
  Synthetic oligonucleotide
ctcgtcctaggggttggctactcgaactgatgcgatagacggttccagtag

SEQ ID NO: 261110 - DNA, 51 bp, Artificial
  Synthetic oligonucleotide
tacgcgactatactagcgataatatccaacccctgctatcgcctcaattag

SEQ ID NO: 261111 - DNA, 51 bp, Artificial
  Synthetic oligonucleotide
catagcgacgctgatacgtcacgccaatatctcggaacgagtggggcgtta

SEQ ID NO: 261112 - DNA, 51 bp, Artificial
  Synthetic oligonucleotide
cataatacgcaatttagaccccgcaagggattcactgggttggtctttgat

SEQ ID NO: 261113 - DNA, 51 bp, Artificial
  Synthetic oligonucleotide
tccgcgtctagacgcgagtctctatttaagagtgcgcgtgagcgcacccca

SEQ ID NO: 261114 - DNA, 51 bp, Artificial
  Synthetic oligonucleotide
ccaggactatgaaaccgacaaaattcaagccgatgaactttatacagggta

SEQ ID NO: 261115 - DNA, 51 bp, Artificial
  Synthetic oligonucleotide
tcgatcgttcttaagagccgcccgaatcttaggccatctggcgacagacca

SEQ ID NO: 261116 - DNA, 51 bp, Artificial
  Synthetic oligonucleotide
tcgattaaggagtcccgtagtcgttcaaaaacttgataagaacggcgatct

SEQ ID NO: 261117 - DNA, 51 bp, Artificial
  Synthetic oligonucleotide
tcgccaatctggtcttacacccggatacggagccactagagctagcaacaa

SEQ ID NO: 261118 - DNA, 51 bp, Artificial
  Synthetic oligonucleotide
tcgccgtttctgggtcaaaggttgccccggtgggtaaattagccgccacat

SEQ ID NO: 261119 - DNA, 56 bp, Artificial
  Synthetic oligonucleotide
tacagaggcggtagcctcccctagctcggatatatttaggggctgcccgttagcgg

SEQ ID NO: 261120 - DNA, 51 bp, Artificial
  Synthetic oligonucleotide
ccccatacacccgcgtttctcccttactcggattcacttgaacgggatttt

SEQ ID NO: 261121 - DNA, 51 bp, Artificial
  Synthetic oligonucleotide
ccccatgagccgccagtgggtcagcatacggtcaaccctataaggggcttc

SEQ ID NO: 261122 - DNA, 51 bp, Artificial
  Synthetic oligonucleotide
tcgtaatctgccagcgggctagggtctggtgatcctgcatcgggacgtaat

SEQ ID NO: 261123 - DNA, 51 bp, Artificial
  Synthetic oligonucleotide
cccctcgctaattgtctcctggaggcggctccaatcgtcaaaacgttcttg

SEQ ID NO: 261124 - DNA, 51 bp, Artificial
  Synthetic oligonucleotide
tctaataccgtctaataattcctgatgcttgactgatagattatgtgtagc

SEQ ID NO: 261125 - DNA, 51 bp, Artificial
  Synthetic oligonucleotide
tatgggtaaagcccaccatatttcgtccaggttgagtcttatagcctcggt

SEQ ID NO: 261126 - DNA, 51 bp, Artificial
  Synthetic oligonucleotide
attaattcttatcgttcctgtgacccgatcctactctgcccataccttacc

SEQ ID NO: 261127 - DNA, 51 bp, Artificial
  Synthetic oligonucleotide
atgttcgggatgcattagctgcagtagtcgaagcttatgaggacttagggc

SEQ ID NO: 261128 - DNA, 51 bp, Artificial
  Synthetic oligonucleotide
atggggaaccctgacggaatggcaccgcaacccgtcatagaaggggcgatc

SEQ ID NO: 261129 - DNA, 51 bp, Artificial
  Synthetic oligonucleotide
tatctgttctaagttaaggggattacatcgagtttgagttgtccctccggc

SEQ ID NO: 261130 - DNA, 60 bp, Artificial
  Synthetic oligonucleotide
ctggttgctgatgcgatcgagagtattcgggaagaggtgttaattcctgacacaggtaat

SEQ ID NO: 261131 - DNA, 51 bp, Artificial
  Synthetic oligonucleotide
tatctacttaatgatgccgctaatacttgggtttatgagcgttatctacgg

SEQ ID NO: 261132 - DNA, 51 bp, Artificial
  Synthetic oligonucleotide
ccgaataagtaacgcccttaatgcaatatttcgtccacctaccaaatcggc

SEQ ID NO: 261133 - DNA, 51 bp, Artificial
  Synthetic oligonucleotide
tagttaatatcgacagtcgggtaagttgtcggttactgtcggggtcgagtt

SEQ ID NO: 261134 - DNA, 51 bp, Artificial
  Synthetic oligonucleotide
tctgttggcacaactaataaggcaacgggatcatgaagggctaaagtgtcc

SEQ ID NO: 261135 - DNA, 51 bp, Artificial
  Synthetic oligonucleotide
atcctgaccgtaccttccgaggcaaccgcgccacctcccgttgggaattcg

SEQ ID NO: 261136 - DNA, 51 bp, Artificial
  Synthetic oligonucleotide
atcaaataagtgttcggccgctgctcccagaatcggatggcgcgccccaac

SEQ ID NO: 261137 - DNA, 51 bp, Artificial
  Synthetic oligonucleotide
atattagattacaacctgatagcgagagtttattaggggaagtcatcgact

SEQ ID NO: 261138 - DNA, 51 bp, Artificial
  Synthetic oligonucleotide
agaataccctgataaatcaaggggaatcgtgccgtctctaacaccttttcg

SEQ ID NO: 261139 - DNA, 51 bp, Artificial
  Synthetic oligonucleotide
gtgattcgttcaaccactcccccggttagcgcgactcccggcgtaccctac

SEQ ID NO: 261140 - DNA, 51 bp, Artificial
  Synthetic oligonucleotide
ttactatggggctaacaagagttcacgtcgtgaggccaatctagctttata

SEQ ID NO: 261141 - DNA, 60 bp, Artificial
  Synthetic oligonucleotide
gtttacggttgattatgctacagccaacaatacagctagtataggagatggtgactacac

SEQ ID NO: 261142 - DNA, 51 bp, Artificial
  Synthetic oligonucleotide
acctgtccccccatctgagagggtttaccctcagcatttgattggagtggc

SEQ ID NO: 261143 - DNA, 51 bp, Artificial
  Synthetic oligonucleotide
accgtagggttgggaggaccgagaatcatcacacccggaggaacggggact

SEQ ID NO: 261144 - DNA, 51 bp, Artificial
  Synthetic oligonucleotide
accgcgcaaaacgactttggagggagcttcccggctgtccaaaaacgcctt

SEQ ID NO: 261145 - DNA, 51 bp, Artificial
  Synthetic oligonucleotide
gccgcagaagctcccaccgctaacccagtagcaaaacccgcacctatgcca

SEQ ID NO: 261146 - DNA, 51 bp, Artificial
  Synthetic oligonucleotide
acaagtgtctgcttattatcccaccctatccggtgaacatcctaaaccgat

SEQ ID NO: 261147 - DNA, 51 bp, Artificial
  Synthetic oligonucleotide
aatttgggctatttagtcaggtaaacgtgatcgaaccttcacccaaactct

SEQ ID NO: 261148 - DNA, 51 bp, Artificial
  Synthetic oligonucleotide
gtcaacctcctaaaacttataccgcaaatgctacttattggtttgcacaag

SEQ ID NO: 261149 - DNA, 51 bp, Artificial
  Synthetic oligonucleotide
aattccctgacgacttcctgaggccagttcccttcacaacggcggccatgg

SEQ ID NO: 261150 - DNA, 51 bp, Artificial
  Synthetic oligonucleotide
gcttatggcggggattggctgggcttgtcatgtttacagggactgagctag

SEQ ID NO: 261151 - DNA, 51 bp, Artificial
  Synthetic oligonucleotide
aataccctggggtatctccccatacccctcaagtcaacaccggccccgact

SEQ ID NO: 261152 - DNA, 59 bp, Artificial
  Synthetic oligonucleotide
cgctcttatcatctcattgcgttatcacggattttaaactcactaccccctcgtcgctc

SEQ ID NO: 261153 - DNA, 51 bp, Artificial
  Synthetic oligonucleotide
aagttgcccaacatcttcaccactgagttgccaacccatcgctccggcatt

SEQ ID NO: 261154 - DNA, 51 bp, Artificial
  Synthetic oligonucleotide
aaccctcgcttgggcagtgctaagatcgggttgcggggacagcaagggaag

SEQ ID NO: 261155 - DNA, 51 bp, Artificial
  Synthetic oligonucleotide
gtaaacccgtatagccaatcaaaacgaccgtaacagaacctacccctatag

SEQ ID NO: 261156 - DNA, 51 bp, Artificial
  Synthetic oligonucleotide
gggaataggaactgcccccacgccgagagaataaacccgactgccccaagc

SEQ ID NO: 261157 - DNA, 51 bp, Artificial
  Synthetic oligonucleotide
aacccgcctgcggttgcacccatgattcccccagcaacagtggttgcgatc

SEQ ID NO: 261158 - DNA, 51 bp, Artificial
  Synthetic oligonucleotide
aaccccaacctcaaaccacagcccaatctccgcagcagggaggactcgtgc

SEQ ID NO: 261159 - DNA, 51 bp, Artificial
  Synthetic oligonucleotide
gggcaggactaccaacgctgcgaaaattagccaagggtttgtcatccgaac

SEQ ID NO: 261160 - DNA, 51 bp, Artificial
  Synthetic oligonucleotide
tttcatggagttccgtgctgcgaatcattagccctccaatactggttaaac

SEQ ID NO: 261161 - DNA, 51 bp, Artificial
  Synthetic oligonucleotide
ggtccgccacaaagaggaggtattgttgtccggtgggcgcattgccgggta

SEQ ID NO: 261162 - DNA, 51 bp, Artificial
  Synthetic oligonucleotide
gaaaagaagtcccatccgctagggtggccgttactcccgccccaggaggag

SEQ ID NO: 261163 - DNA, 56 bp, Artificial
  Synthetic oligonucleotide
cttggtaccagtcactccaaattggccttagaaacaggtcaagctaagttgtggat

SEQ ID NO: 261164 - DNA, 51 bp, Artificial
  Synthetic oligonucleotide
gaggttttgcttgaacgagagacagagacagcgcgagctatagttaagcct

SEQ ID NO: 261165 - DNA, 51 bp, Artificial
  Synthetic oligonucleotide
gagtttatagcagcttgtgaccccagtaaacgccccctaaaagtggagaat

SEQ ID NO: 261166 - DNA, 51 bp, Artificial
  Synthetic oligonucleotide
gagtgatgcggttgttattcatactacagtctataatttccgaaaaggtcc

SEQ ID NO: 261167 - DNA, 50 bp, Artificial
  Synthetic oligonucleotide
ttggggagtgaaacccagattagtaacaggagacagttggtactcatccg

SEQ ID NO: 261168 - DNA, 50 bp, Artificial
  Synthetic oligonucleotide
caatacatctgaattacgcagccgtattgaaggactgactacccgactcg

SEQ ID NO: 261169 - DNA, 50 bp, Artificial
  Synthetic oligonucleotide
aagtccatagagaccctaggaagactggaggcgaaacaagccttgtccgt

SEQ ID NO: 261170 - DNA, 50 bp, Artificial
  Synthetic oligonucleotide
agccgcaacacctccaactcccgattactcaacggggaactgcctagccg

SEQ ID NO: 261171 - DNA, 50 bp, Artificial
  Synthetic oligonucleotide
caaccatcggcattcaagacgacaaaggagggattatctaaccacgcttg

SEQ ID NO: 261172 - DNA, 50 bp, Artificial
  Synthetic oligonucleotide
agccacttgccaacgcgcggtttcgaggatcgtagcagcttgttgtcccc

SEQ ID NO: 261173 - DNA, 50 bp, Artificial
  Synthetic oligonucleotide
atttactaccccgttttattcccttgccgtctcatttgtgggagcaacct

SEQ ID NO: 261174 - DNA, 53 bp, Artificial
  Synthetic oligonucleotide
cgccgtagaagatacccgtttaagtatagccgggggcattcaaccgggagcat

SEQ ID NO: 261175 - DNA, 50 bp, Artificial
  Synthetic oligonucleotide
tctaaaggttgtccccttgagggagtgacgcgcatttcttgacagagtgc

SEQ ID NO: 261176 - DNA, 50 bp, Artificial
  Synthetic oligonucleotide
aatgcgccaattaacccgcctgcggttgcacccatgattcccccagcaac

SEQ ID NO: 261177 - DNA, 50 bp, Artificial
  Synthetic oligonucleotide
agcatcaaactcagttacgaaatcctgacgcgggaggtaaccccatgacc

SEQ ID NO: 261178 - DNA, 50 bp, Artificial
  Synthetic oligonucleotide
aattcatagactacaatcttatcactgcgtcgttggtgaggtcagcggtg

SEQ ID NO: 261179 - DNA, 50 bp, Artificial
  Synthetic oligonucleotide
aattcccaacgggaggtggcgcggttgcctcggaaggtacggtcaggata

SEQ ID NO: 261180 - DNA, 50 bp, Artificial
  Synthetic oligonucleotide
agcaacagaccgtcccctcgcaagtcacggcgcacgatccttctgggcag

SEQ ID NO: 261181 - DNA, 50 bp, Artificial
  Synthetic oligonucleotide
aactccgttgcgtagcacgacgtagtcgcactccgaaccccgaaccccga

SEQ ID NO: 261182 - DNA, 50 bp, Artificial
  Synthetic oligonucleotide
agccgcatcataactcatggctgtgcgccagttcacatctgcgccccata

SEQ ID NO: 261183 - DNA, 50 bp, Artificial
  Synthetic oligonucleotide
caccatcagcccagttacggccattaacccaaccgccaccgcccctagta

SEQ ID NO: 261184 - DNA, 50 bp, Artificial
  Synthetic oligonucleotide
agggtgggcccttggaacggactgcgaagcagggacgaagtctaacccaa

SEQ ID NO: 261185 - DNA, 51 bp, Artificial
  Synthetic oligonucleotide
cttttgacagtcggttaacagggtttcataggccgtattaatttcccgtaa

SEQ ID NO: 261186 - DNA, 49 bp, Artificial
  Synthetic oligonucleotide
agggggttttagggggtttccccctaaacagcagccccatgttagaatc

SEQ ID NO: 261187 - DNA, 50 bp, Artificial
  Synthetic oligonucleotide
aggggcaaccctcggccctttaggcgtgattgttggggcacaagccgggg

SEQ ID NO: 261188 - DNA, 50 bp, Artificial
  Synthetic oligonucleotide
tggttatatctccgcctcaactgtaggggatctttactacattattcgtc

SEQ ID NO: 261189 - DNA, 50 bp, Artificial
  Synthetic oligonucleotide
agccggcccatccgtcaaaggttgccccgccgtcacctgttgcccatcgc

SEQ ID NO: 261190 - DNA, 50 bp, Artificial
  Synthetic oligonucleotide
cagcgatcgcgccatttaaccgtcccttcactggccacaacccaacgacg

SEQ ID NO: 261191 - DNA, 50 bp, Artificial
  Synthetic oligonucleotide
aacaccagactctgctgggatgcccacgctgtgaccgtatgtaaggcaga

SEQ ID NO: 261192 - DNA, 50 bp, Artificial
  Synthetic oligonucleotide
cagcgatcgctttaattaccggatgggatgagtggtagacctgatacata

SEQ ID NO: 261193 - DNA, 50 bp, Artificial
  Synthetic oligonucleotide
cagttcacttacccccgcgccgccccactcttgggggactcttaaggcca

SEQ ID NO: 261194 - DNA, 50 bp, Artificial
  Synthetic oligonucleotide
aggcggggcccaatcttgccgcattgaacaagtgacctctttagcggacc

SEQ ID NO: 261195 - DNA, 50 bp, Artificial
  Synthetic oligonucleotide
agctccgaaacctggcagactgggggcataaatgcgatgagtccgggcta

SEQ ID NO: 261196 - DNA, 60 bp, Artificial
  Synthetic oligonucleotide
tagcgattgctgtctaacggactgccggcatttgccaacaactaatctaagtaagggctg

SEQ ID NO: 261197 - DNA, 50 bp, Artificial
  Synthetic oligonucleotide
agccttacccggacgcaaacaagaaatgccggttccggcggcccattatg

SEQ ID NO: 261198 - DNA, 50 bp, Artificial
  Synthetic oligonucleotide
agtggatggttcggggttatcccgtcgcaatgtggccactcctcgctctt

SEQ ID NO: 261199 - DNA, 50 bp, Artificial
  Synthetic oligonucleotide
agtgcggctttgtgcgtcctgccccgatgagatcgcctgttgtgttgtcg

SEQ ID NO: 261200 - DNA, 50 bp, Artificial
  Synthetic oligonucleotide
agtcaggtcgcttctgggtgtcgggttggcccctatagccatttgcgggg

SEQ ID NO: 261201 - DNA, 50 bp, Artificial
  Synthetic oligonucleotide
agtgggggtaacccaccccctcaacagctaaccattcccctccacgcgac

SEQ ID NO: 261202 - DNA, 50 bp, Artificial
  Synthetic oligonucleotide
ataaaggcgactttatggcttagggcaataagattcaggggcaatagttt

SEQ ID NO: 261203 - DNA, 50 bp, Artificial
  Synthetic oligonucleotide
tgggctctcggtcgatagcgtctgaggctcggtcccccatcggcgtaggc

SEQ ID NO: 261204 - DNA, 50 bp, Artificial
  Synthetic oligonucleotide
actcatggccgctaagacgcgggggttcgcattggatggaccaggaccta

SEQ ID NO: 261205 - DNA, 50 bp, Artificial
  Synthetic oligonucleotide
actagcttcgatgtattatgccaaagctgctcgatgtattgctcccaact

SEQ ID NO: 261206 - DNA, 50 bp, Artificial
  Synthetic oligonucleotide
agtaagcccccgcaggcgttaagctaactgccgcgatgccgccttgctgt

SEQ ID NO: 261207 - DNA, 58 bp, Artificial
  Synthetic oligonucleotide
cgcaactagccccttatcgacaaagttatcttgagcaaagtttctgactaattcttgc

SEQ ID NO: 261208 - DNA, 50 bp, Artificial
  Synthetic oligonucleotide
atcccgtaattcgtgggcctcgaagctaccggttgacgcgccactgggaa

SEQ ID NO: 261209 - DNA, 50 bp, Artificial
  Synthetic oligonucleotide
atccctatggagtgatagcctcagccgtaggaaccctcgccgggccctta

SEQ ID NO: 261210 - DNA, 50 bp, Artificial
  Synthetic oligonucleotide
tgaccactaggaagtccaaacagagaaccgctactctccaagcctttcag

SEQ ID NO: 261211 - DNA, 50 bp, Artificial
  Synthetic oligonucleotide
ttatagctggcaccggcggctagaggggtgtcattcccggcccaacgttc

SEQ ID NO: 261212 - DNA, 50 bp, Artificial
  Synthetic oligonucleotide
atcgaacccctcagatgaccgcctatcccgtcgaagacgcgcgaagcacc

SEQ ID NO: 261213 - DNA, 50 bp, Artificial
  Synthetic oligonucleotide
tcttgcctccttctacgtattcaacgtaagtgatcaggtcaaagttatcc

SEQ ID NO: 261214 - DNA, 50 bp, Artificial
  Synthetic oligonucleotide
tcttacaggtcattccgaatatgtttcgtctgtcgttatcagtgcggacg

SEQ ID NO: 261215 - DNA, 50 bp, Artificial
  Synthetic oligonucleotide
atcgacgctaaacccgtagattctaagatcggtgtagccgctacgactga

SEQ ID NO: 261216 - DNA, 50 bp, Artificial
  Synthetic oligonucleotide
accggcgcggcttgagaggtggtgctagtatcggggttcgcctctggggc

SEQ ID NO: 261217 - DNA, 50 bp, Artificial
  Synthetic oligonucleotide
tgggggttggcactcatgcgatggtgtcccgtgggtgcgagttctttcaa

SEQ ID NO: 261218 - DNA, 60 bp, Artificial
  Synthetic oligonucleotide
tcgcactggcttaaaggcatggagaactcagttccctatttggtgatgcagtctcctgat

SEQ ID NO: 261219 - DNA, 60 bp, Artificial
  Synthetic oligonucleotide
cgatgatgcggcaggacgaagttgaagtagacacaggatctctagtagacacgctcgttg

SEQ ID NO: 261220 - DNA, 50 bp, Artificial
  Synthetic oligonucleotide
accctcgaatctttgacctccgaagccgacgaggggtcaaccggtgcgat

SEQ ID NO: 261221 - DNA, 50 bp, Artificial
  Synthetic oligonucleotide
tctgtccccactaccagatcattttgttgtgtataacgttgtaacatgac

SEQ ID NO: 261222 - DNA, 50 bp, Artificial
  Synthetic oligonucleotide
atcgcaaccttctcggacgcagtatcgaagcggggccgctagaagacccc

SEQ ID NO: 261223 - DNA, 50 bp, Artificial
  Synthetic oligonucleotide
atcgctgccataatatccgccgggcgtagtacccgaatggtatcgggggc

SEQ ID NO: 261224 - DNA, 50 bp, Artificial
  Synthetic oligonucleotide
accagtgtgatcgccattcaacaccgtcccgccaaaggtgcgccgccgct

SEQ ID NO: 261225 - DNA, 50 bp, Artificial
  Synthetic oligonucleotide
tctgctgcaatgtgcggctcttaaccgcatgactcatctggggatgcccg

SEQ ID NO: 261226 - DNA, 50 bp, Artificial
  Synthetic oligonucleotide
atggaagcgtcaggcggggcccaatcttgccgcattgaacaagtgacctc

SEQ ID NO: 261227 - DNA, 50 bp, Artificial
  Synthetic oligonucleotide
acagggtttagcttcggtttggagttgttctagtaaggttcttgcccatt

SEQ ID NO: 261228 - DNA, 50 bp, Artificial
  Synthetic oligonucleotide
aggttacgccagaacagtttgccgctttagcagccgcgaaccgtgagcta

SEQ ID NO: 261229 - DNA, 50 bp, Artificial
  Synthetic oligonucleotide
aggtgctgtctgccatgcgactaacggcagttcgggcgatggaggcggtt

SEQ ID NO: 261230 - DNA, 60 bp, Artificial
  Synthetic oligonucleotide
cgatagggagaaatcaccccaatctcatctgtagagtaacctgcattcagaagatgctca

SEQ ID NO: 261231 - DNA, 50 bp, Artificial
  Synthetic oligonucleotide
gccactgccatcggttgacgtaattcagatcccgcgccccatcccaaagc

SEQ ID NO: 261232 - DNA, 50 bp, Artificial
  Synthetic oligonucleotide
gcacgcgcctcaagccattatacggtgggggattcaagccattgtcgggg

SEQ ID NO: 261233 - DNA, 50 bp, Artificial
  Synthetic oligonucleotide
gattgtgccccggcttgagtcaccgataacgcccctgctactgtcgccca

SEQ ID NO: 261234 - DNA, 50 bp, Artificial
  Synthetic oligonucleotide
gtcttgggtcgcctaggtgggggtcaggaggctgatgaatcgggaaccgc

SEQ ID NO: 261235 - DNA, 50 bp, Artificial
  Synthetic oligonucleotide
gtcttgtgattgctgttgggaggtaatattatgaatttcccttgactggt

SEQ ID NO: 261236 - DNA, 50 bp, Artificial
  Synthetic oligonucleotide
gattggatttgatggaggcgactgattatgctaaagcggtagatttccct

SEQ ID NO: 261237 - DNA, 50 bp, Artificial
  Synthetic oligonucleotide
gatgcgttgggggtaggtgctgtctgccatgcgactaacggcagttcggg

SEQ ID NO: 261238 - DNA, 50 bp, Artificial
  Synthetic oligonucleotide
gatatctctgaagtgggtcgccccttagcccgacggcccgccaatggtca

SEQ ID NO: 261239 - DNA, 50 bp, Artificial
  Synthetic oligonucleotide
gtggcaaaacgatattcaatgtcaaagccaacgaggtatcgaagattaag

SEQ ID NO: 261240 - DNA, 50 bp, Artificial
  Synthetic oligonucleotide
gataggcacgtccttgggctctcggtcgatagcgtctgaggctcggtccc

SEQ ID NO: 261241 - DNA, 60 bp, Artificial
  Synthetic oligonucleotide
tagcgcagggggtagtgaagaaataatgcgacgataggagcaacgatcttgcttgtcttc

SEQ ID NO: 261242 - DNA, 50 bp, Artificial
  Synthetic oligonucleotide
gagtatacaaaagcgatcgcgccggttgtgtacgcttttcttgccgttca

SEQ ID NO: 261243 - DNA, 50 bp, Artificial
  Synthetic oligonucleotide
gacgggttggagtacccccaacggaccagcatattcggggccgatacgtt

SEQ ID NO: 261244 - DNA, 50 bp, Artificial
  Synthetic oligonucleotide
gacgatttaggggcccaagcaacggtatgcggtgggggacgctatgacgg

SEQ ID NO: 261245 - DNA, 50 bp, Artificial
  Synthetic oligonucleotide
gacctcccactaatccggcagccccaacggtgcgccctaaacgagcaatg

SEQ ID NO: 261246 - DNA, 50 bp, Artificial
  Synthetic oligonucleotide
gaccctaaataactattcgtttgagccgatagctccatagcactagagct

SEQ ID NO: 261247 - DNA, 48 bp, Artificial
  Synthetic oligonucleotide
gacaatggcgggtttggttcccccggttgccgtatccccttttacccc

SEQ ID NO: 261248 - DNA, 50 bp, Artificial
  Synthetic oligonucleotide
gacaactgcataggcctcatccattgacacaaagagcgctcgatactttt

SEQ ID NO: 261249 - DNA, 50 bp, Artificial
  Synthetic oligonucleotide
gaacccgaattatcagcttttacgagctatctactctctatccctgaaag

SEQ ID NO: 261250 - DNA, 50 bp, Artificial
  Synthetic oligonucleotide
cttgttccgtagaggccacagggcctaaagagatttcaaatgagggaatg

SEQ ID NO: 261251 - DNA, 50 bp, Artificial
  Synthetic oligonucleotide
ctgtgggattcatgtccgagaggcggtggggaaaacgggagtggttgggg

SEQ ID NO: 261252 - DNA, 60 bp, Artificial
  Synthetic oligonucleotide
gttctttcgagcccacttagcagccatagtcagaggtcgttctgatatccaatcgtactt

SEQ ID NO: 261253 - DNA, 50 bp, Artificial
  Synthetic oligonucleotide
ctgtctaaaacggtagataatctcccattagccagactagaatccctgtc

SEQ ID NO: 261254 - DNA, 50 bp, Artificial
  Synthetic oligonucleotide
ctggggctgtagccagttggctaacttgggacactaggctgggtcgtccg

SEQ ID NO: 261255 - DNA, 50 bp, Artificial
  Synthetic oligonucleotide
ctggcgtagcgcacggtataggggttgtcccatcctttaccgatggggcg

SEQ ID NO: 261256 - DNA, 50 bp, Artificial
  Synthetic oligonucleotide
taaatgccccgagaaagccgatggttgaagggctatcccaagcagtataa

SEQ ID NO: 261257 - DNA, 50 bp, Artificial
  Synthetic oligonucleotide
ctgcgtcgtggccttctatgggatgtgtgaccgcttgtccgtggcggttc

SEQ ID NO: 261258 - DNA, 50 bp, Artificial
  Synthetic oligonucleotide
ctgcaccggggcgatgggaaaagataccattgtggaggttccctgcggta

SEQ ID NO: 261259 - DNA, 50 bp, Artificial
  Synthetic oligonucleotide
ctcgtggtcttaaccacacccgcaataaatcttcgctcaacatcgtgggc

SEQ ID NO: 261260 - DNA, 50 bp, Artificial
  Synthetic oligonucleotide
ggtggctactcgcgtttccagttgttgggagttatcttcaagcgactggg

SEQ ID NO: 261261 - DNA, 50 bp, Artificial
  Synthetic oligonucleotide
ggtagggttcccatctcgctgcgaggcatacaacggcgcaacgcacaagc

SEQ ID NO: 261262 - DNA, 50 bp, Artificial
  Synthetic oligonucleotide
gggtagaggcagcccggtggccgattcctcaagaaaagttagatactcag

SEQ ID NO: 261263 - DNA, 56 bp, Artificial
  Synthetic oligonucleotide
gacatagccgcttcatcgaatataacttggtcaagacaacccgtatcggggtaagg

SEQ ID NO: 261264 - DNA, 50 bp, Artificial
  Synthetic oligonucleotide
ggggcttcgacacttaatagtccactaactactgacgatcggctgttatt

SEQ ID NO: 261265 - DNA, 50 bp, Artificial
  Synthetic oligonucleotide
ggttcgatgggtcacactgtaacgggagttgtcggtgcggcctggagtcg

SEQ ID NO: 261266 - DNA, 50 bp, Artificial
  Synthetic oligonucleotide
ggcctgtggaaccggcgcttgtgcgtctgtggtagcaggggttttgacgg

SEQ ID NO: 261267 - DNA, 50 bp, Artificial
  Synthetic oligonucleotide
ggcctcgaagctaccggttgacgcgccactgggaacttgggcaataccga

SEQ ID NO: 261268 - DNA, 50 bp, Artificial
  Synthetic oligonucleotide
ggccctttaggcgtgattgttggggcacaagccgggggtttagtcggtca

SEQ ID NO: 261269 - DNA, 50 bp, Artificial
  Synthetic oligonucleotide
ggcaacccggtctgagccgacaataaccgcgtgacaatgggggcgacgtt

SEQ ID NO: 261270 - DNA, 50 bp, Artificial
  Synthetic oligonucleotide
ggatcggctcaaacacagggtacatccgcgccaccaagaagactccggct

SEQ ID NO: 261271 - DNA, 50 bp, Artificial
  Synthetic oligonucleotide
gtaccgccctcctctctgggatacccgcctgcggtaatgcgctgatcgcc

SEQ ID NO: 261272 - DNA, 50 bp, Artificial
  Synthetic oligonucleotide
ggagcgccacttgctccgtatcggaaaccgccaagaccgcagtggactca

SEQ ID NO: 261273 - DNA, 50 bp, Artificial
  Synthetic oligonucleotide
ggacttacccacgaatgttaaatatagggaacaattacctatttattccc

SEQ ID NO: 261274 - DNA, 52 bp, Artificial
  Synthetic oligonucleotide
ctccttagtcgtggggtggggtttgcgtctttgaccatagtcccaagcgggg

SEQ ID NO: 261275 - DNA, 50 bp, Artificial
  Synthetic oligonucleotide
ggaaagttctaaaggggtctctaaaattacactcatgagtgttctcctac

SEQ ID NO: 261276 - DNA, 50 bp, Artificial
  Synthetic oligonucleotide
gcttctgggtgtcgggttggcccctatagccatttgcggggtcaggcaca

SEQ ID NO: 261277 - DNA, 50 bp, Artificial
  Synthetic oligonucleotide
gctatctcccaacgcggaggagtcggaattgtccccctaacccccgatgc

SEQ ID NO: 261278 - DNA, 50 bp, Artificial
  Synthetic oligonucleotide
gcgtgtccccacgttagtcgtgcggggtgacaaagacccagtcgtgccgc

SEQ ID NO: 261279 - DNA, 50 bp, Artificial
  Synthetic oligonucleotide
gcgtccggctgcggttgtctcactcggactggctatcactttcgccccat

SEQ ID NO: 261280 - DNA, 50 bp, Artificial
  Synthetic oligonucleotide
gcggcccccgtcaaagcaccgccaataactcccccttgtgcgctcctgtt

SEQ ID NO: 261281 - DNA, 50 bp, Artificial
  Synthetic oligonucleotide
gcggccaaacttggtcccgtatccccctgagtgaaaaattgcccggtgcc

SEQ ID NO: 261282 - DNA, 50 bp, Artificial
  Synthetic oligonucleotide
gcgagagggcaaacgtgaccgttagcagtccccaaggacaagccgggaat

SEQ ID NO: 261283 - DNA, 50 bp, Artificial
  Synthetic oligonucleotide
gtccccaattgccgacaatacccgccccacaagctaaccccagacctcct

SEQ ID NO: 261284 - DNA, 50 bp, Artificial
  Synthetic oligonucleotide
gcctacgctgatggaggccccagtctgagacgctttcgagctagggcaca

SEQ ID NO: 261285 - DNA, 59 bp, Artificial
  Synthetic oligonucleotide
ctcagtagagctttcccctccacgattagggacgctagttcctaacgcccatgacagca

SEQ ID NO: 261286 - DNA, 50 bp, Artificial
  Synthetic oligonucleotide
gccatgcgactaacggcagttcgggcgatggaggcggttaattctgggcg

SEQ ID NO: 261287 - DNA, 50 bp, Artificial
  Synthetic oligonucleotide
gccatgactagccgccaatgcttgagcctgctcaaccacgccactatcgg

SEQ ID NO: 261288 - DNA, 50 bp, Artificial
  Synthetic oligonucleotide
gccagttgtgcccacagttgagtcggagggacgggagcaacagacggtgt

SEQ ID NO: 261289 - DNA, 50 bp, Artificial
  Synthetic oligonucleotide
tatccttggccactcgtagggtgagacgagcttgagagggctggggttgc

SEQ ID NO: 261290 - DNA, 50 bp, Artificial
  Synthetic oligonucleotide
ccctgcacgccacgctaaagcgaccccatcccctgtactcacagcaggat

SEQ ID NO: 261291 - DNA, 50 bp, Artificial
  Synthetic oligonucleotide
ccctcccaacaactggctatctgcgtttgggggtagtgcttgggcctggt

SEQ ID NO: 261292 - DNA, 50 bp, Artificial
  Synthetic oligonucleotide
ccctaccggtggagcaacagccctcggtacaacaggataagccggaaccg

SEQ ID NO: 261293 - DNA, 50 bp, Artificial
  Synthetic oligonucleotide
tatgcgagcttgggaacgggtgcgtcaactacaggcagaagatgccaccg

SEQ ID NO: 261294 - DNA, 50 bp, Artificial
  Synthetic oligonucleotide
cccgtactctcgtcgtagcaacagaccgtcccctcgcaagtcacggcgca

SEQ ID NO: 261295 - DNA, 50 bp, Artificial
  Synthetic oligonucleotide
cccctgcccgtctcggtatgccgttgctttgccactttgacaaggtcgta

SEQ ID NO: 261296 - DNA, 54 bp, Artificial
  Synthetic oligonucleotide
ctcagagaacggggaattcctttgcgaatacctccgtcgtctttctaatcaagg

SEQ ID NO: 261297 - DNA, 50 bp, Artificial
  Synthetic oligonucleotide
cccctctggactctccaccccggctccaacagaagaactcgggttaggga

SEQ ID NO: 261298 - DNA, 50 bp, Artificial
  Synthetic oligonucleotide
cccctcagggaagaacccaccgcgatcgcccctggtacgattgtcacggt

SEQ ID NO: 261299 - DNA, 50 bp, Artificial
  Synthetic oligonucleotide
tcaagtggcggcctggggagacgacaatcagtgggatgaagcaccaggga

SEQ ID NO: 261300 - DNA, 50 bp, Artificial
  Synthetic oligonucleotide
cccctcaaatttcgttaattcggatagtctcgctataactcacaaaagtc

SEQ ID NO: 261301 - DNA, 50 bp, Artificial
  Synthetic oligonucleotide
tcaccatagcccctgcacgccacgctaaagcgaccccatcccctgtactc

SEQ ID NO: 261302 - DNA, 50 bp, Artificial
  Synthetic oligonucleotide
tcagtgcgctacggatggcaaactgacccactgggccacacccccaaacc

SEQ ID NO: 261303 - DNA, 50 bp, Artificial
  Synthetic oligonucleotide
tcatagcgtcctccaccgcataccgttgcttgggcccctaaatcgtcgga

SEQ ID NO: 261304 - DNA, 50 bp, Artificial
  Synthetic oligonucleotide
tccaagtcgcatatccctggccttttgcaccgggtgggttaaccccaaga

SEQ ID NO: 261305 - DNA, 50 bp, Artificial
  Synthetic oligonucleotide
ccccagtacgggctgctaaggcactgcctacgtctccaaacaccagggta

SEQ ID NO: 261306 - DNA, 50 bp, Artificial
  Synthetic oligonucleotide
tcccactgcccgtcccgaaaatcaactcggaacgggaatccctgtgcgta

SEQ ID NO: 261307 - DNA, 58 bp, Artificial
  Synthetic oligonucleotide
ctcaagtgctagaaatagttcgttcagagggaatagtacgggcaaaagacctcagaga

SEQ ID NO: 261308 - DNA, 50 bp, Artificial
  Synthetic oligonucleotide
ccccacataaggcggcgggaactcgaatggagccattggtgtctgagcct

SEQ ID NO: 261309 - DNA, 50 bp, Artificial
  Synthetic oligonucleotide
ccccaacggaccagcatattcggggccgatacgttgttgcgctgcagccg

SEQ ID NO: 261310 - DNA, 50 bp, Artificial
  Synthetic oligonucleotide
cccatcagacagcagaccggaccgtcgggaacgagtgataagccccggtg

SEQ ID NO: 261311 - DNA, 50 bp, Artificial
  Synthetic oligonucleotide
tccgagtgagggcgcgttcccctcgataggtgcgatcgggataaccgaca

SEQ ID NO: 261312 - DNA, 50 bp, Artificial
  Synthetic oligonucleotide
cattcggtgatcgacccccatcagacagcagaccggaccgtcgggaacga

SEQ ID NO: 261313 - DNA, 50 bp, Artificial
  Synthetic oligonucleotide
tccgtagttctgggtcggctgcactaccccgtgttgggttgaaaacgcta

SEQ ID NO: 261314 - DNA, 50 bp, Artificial
  Synthetic oligonucleotide
cattatagccgcctgacatactgcgagtggccggacgttctacggtagtt

SEQ ID NO: 261315 - DNA, 50 bp, Artificial
  Synthetic oligonucleotide
catgaggattagccggcccatccgtcaaaggttgccccgccgtcacctgt

SEQ ID NO: 261316 - DNA, 50 bp, Artificial
  Synthetic oligonucleotide
tccttgtaccagtcccaccacaccccctaaacaggccaactcatcccgcg

SEQ ID NO: 261317 - DNA, 50 bp, Artificial
  Synthetic oligonucleotide
cgttccataggctgccggtgattttggcggctaagggggagagcaaagcc

SEQ ID NO: 261318 - DNA, 60 bp, Artificial
  Synthetic oligonucleotide
ctatggttaaataagcctgactacgttctgtggcaattcctcgctccatcatagcggcga

SEQ ID NO: 261319 - DNA, 50 bp, Artificial
  Synthetic oligonucleotide
cgtcatagccgtggggatcggctcaaacacagggtacatccgcgccacca

SEQ ID NO: 261320 - DNA, 50 bp, Artificial
  Synthetic oligonucleotide
cgggtcacgaaaagtaaccgagaaactcggttaactgtactgtttgaaca

SEQ ID NO: 261321 - DNA, 50 bp, Artificial
  Synthetic oligonucleotide
cgggacggcagtagcgaatgctttagcgggtgttacggagggggtaacga

SEQ ID NO: 261322 - DNA, 50 bp, Artificial
  Synthetic oligonucleotide
cggctgcaaactcattccgagtgagggcgcgttcccctcgataggtgcga

SEQ ID NO: 261323 - DNA, 50 bp, Artificial
  Synthetic oligonucleotide
cggcggtttgtagttcaggggtgcgctgtcgtagggattgattcattcga

SEQ ID NO: 261324 - DNA, 50 bp, Artificial
  Synthetic oligonucleotide
taccaccctagcgatgcttgccgcttggccagtcaccctcaagcctagat

SEQ ID NO: 261325 - DNA, 50 bp, Artificial
  Synthetic oligonucleotide
cggcggcggctaatagtcgaaaaacggcgaaaccaacccgtcttgcggac

SEQ ID NO: 261326 - DNA, 50 bp, Artificial
  Synthetic oligonucleotide
cggcatacggattcatcgcacggagggcacttttgttggtcagccacgct

SEQ ID NO: 261327 - DNA, 50 bp, Artificial
  Synthetic oligonucleotide
cggaaagcctagcatcttgaagcgactagttctagtttttgagcaattac

SEQ ID NO: 261328 - DNA, 50 bp, Artificial
  Synthetic oligonucleotide
tacgggttcccctaggcaggacaggagacggtgtagccataccccaatga

SEQ ID NO: 261329 - DNA, 56 bp, Artificial
  Synthetic oligonucleotide
cacatgcttaggcttagttatagcgtaggaaaatttttggtcgttaaggctgaaga

SEQ ID NO: 261330 - DNA, 57 bp, Artificial
  Synthetic oligonucleotide
ctatcaacgtaaattctgaagcttctgggaaagcgttgcagtttcaggagggagaac

SEQ ID NO: 261331 - DNA, 50 bp, Artificial
  Synthetic oligonucleotide
cgcgggcggggttgtctgatcggcacgaggggtcgacttatcgtatacgg

SEQ ID NO: 261332 - DNA, 50 bp, Artificial
  Synthetic oligonucleotide
cgccgtagtgcgtattgatgcggctagggaagtggcgcaacaagtgcctg

SEQ ID NO: 261333 - DNA, 50 bp, Artificial
  Synthetic oligonucleotide
tagcacgacggttgttaaccggtgaatctccccaactgcggcgacggtta

SEQ ID NO: 261334 - DNA, 50 bp, Artificial
  Synthetic oligonucleotide
tagccggccattctaccgccgttccggagccaatggtttgttcccattgg

SEQ ID NO: 261335 - DNA, 50 bp, Artificial
  Synthetic oligonucleotide
cgccatgggcgatcccccagtgaagatccggttagctgcccgtgacacaa

SEQ ID NO: 261336 - DNA, 50 bp, Artificial
  Synthetic oligonucleotide
cgatagcgtctgaggctcggtcccccatcggcgtaggcttgactgacgac

SEQ ID NO: 261337 - DNA, 50 bp, Artificial
  Synthetic oligonucleotide
taggggtagcgtcttgtttggcggttagtgcggcgatcgatcctgggtta

SEQ ID NO: 261338 - DNA, 50 bp, Artificial
  Synthetic oligonucleotide
ccttcccgaaaccacccaacgctgtccccattgtggggcgcaagttctct

SEQ ID NO: 261339 - DNA, 49 bp, Artificial
  Synthetic oligonucleotide
cctgtttcgacaatggcgggtttggttcccccggttgccgtatcccctt

SEQ ID NO: 261340 - DNA, 50 bp, Artificial
  Synthetic oligonucleotide
cctacggtaacatggggcattacccccggtcaagggatcggggtcagtga

SEQ ID NO: 261341 - DNA, 54 bp, Artificial
  Synthetic oligonucleotide
ctagggtgcgggtatcggcggagttacgactgtcgtatcgggtaggaacaaatc

SEQ ID NO: 261342 - DNA, 50 bp, Artificial
  Synthetic oligonucleotide
ccgtttcgctgccggggttatcttcgtttgactcggtgcgatcgcccctt

SEQ ID NO: 261343 - DNA, 50 bp, Artificial
  Synthetic oligonucleotide
ccgtctacgggaggctaaagcccgtctcagcaatgctcaagccggcggga

SEQ ID NO: 261344 - DNA, 50 bp, Artificial
  Synthetic oligonucleotide
ccggcgcttgtgcgtctgtggtagcaggggttttgacgggaaattgcgat

SEQ ID NO: 261345 - DNA, 50 bp, Artificial
  Synthetic oligonucleotide
ccgcttacggttgggggttccccgggtcgcagtttgcggtagagttctaa

SEQ ID NO: 261346 - DNA, 50 bp, Artificial
  Synthetic oligonucleotide
ccgatagacatcgagatcttgcattagatgtagaattggcgattgctgat

SEQ ID NO: 261347 - DNA, 50 bp, Artificial
  Synthetic oligonucleotide
ccgagtccttcctatcctgcccattttcggggtccgttgatcgccggagc

SEQ ID NO: 261348 - DNA, 60 bp, Artificial
  Synthetic oligonucleotide
ctaatcgctatgtagctcaatatttcgaggcagcgatcactcgtggtcaattacatccta

SEQ ID NO: 261349 - DNA, 60 bp, Artificial
  Synthetic oligonucleotide
taagcctgactacgttctgtggcaattcctcgctccatcatagcggcgacatcgggacct

SEQ ID NO: 261350 - DNA, 57 bp, Artificial
  Synthetic oligonucleotide
ctctgaaaccacccgttcaattctttttcgtgctgacttagcgatcgttccctgcca

SEQ ID NO: 261351 - DNA, 58 bp, Artificial
  Synthetic oligonucleotide
taaggtatggttccatgcttggaataacaccttagaatcgtggtctagtaaatatgtc

SEQ ID NO: 261352 - DNA, 52 bp, Artificial
  Synthetic oligonucleotide
taacccccattggacggaagcataggacaacgggggcacgggtaacggctgt

SEQ ID NO: 261353 - DNA, 57 bp, Artificial
  Synthetic oligonucleotide
cgtgtctcgccgtcttgctagtcagcgaaaaaccctaattctcaccttaggacaatg

SEQ ID NO: 261354 - DNA, 57 bp, Artificial
  Synthetic oligonucleotide
taacaaaattggcctagacgtagccaaagaagccctgcgagaaacttggacgcagcg

SEQ ID NO: 261355 - DNA, 54 bp, Artificial
  Synthetic oligonucleotide
taaattgacggaacgggagtaacgacgcttgagagtaatgtactgggagagggg

SEQ ID NO: 261356 - DNA, 59 bp, Artificial
  Synthetic oligonucleotide
gcggagtgtccgtgctcagggttgacaagagggccagcccgatagtagttaagcccata

SEQ ID NO: 261357 - DNA, 55 bp, Artificial
  Synthetic oligonucleotide
cgggctaagcacatccataaggaagcgtaccaagccgtaaatggccactttcagc

SEQ ID NO: 261358 - DNA, 55 bp, Artificial
  Synthetic oligonucleotide
cggctttgcgggtaggtggctgttggcgggcaaaggtcagtagattacgtactac

SEQ ID NO: 261359 - DNA, 55 bp, Artificial
  Synthetic oligonucleotide
cggctattacacattaaacccaggataagcagcacctaacgcatcagttctgatt

SEQ ID NO: 261360 - DNA, 55 bp, Artificial
  Synthetic oligonucleotide
cggcaagtttgagaagataggcacgattaatgttatcctgctgaccggctcaagc

SEQ ID NO: 261361 - DNA, 55 bp, Artificial
  Synthetic oligonucleotide
cggcaacgaggtaatgaaccctgacggaaatatcaaccgcaagatactgggtgag

SEQ ID NO: 261362 - DNA, 54 bp, Artificial
  Synthetic oligonucleotide
cggattgccgcatccgggcgtttaaattttgactataccaccaaagtaatgccc

SEQ ID NO: 261363 - DNA, 55 bp, Artificial
  Synthetic oligonucleotide
cgctgttcgtcaaagcattttacactaaagctagtgccaagggtcataacagcct

SEQ ID NO: 261364 - DNA, 52 bp, Artificial
  Synthetic oligonucleotide
gctaaaatccccggtatttacgtacccagcctgtataaggccgaatataacc

SEQ ID NO: 261365 - DNA, 55 bp, Artificial
  Synthetic oligonucleotide
gtaagcacgcttgagtcccgccgtaagtttacagttgtcggggagatgccgcccg

SEQ ID NO: 261366 - DNA, 55 bp, Artificial
  Synthetic oligonucleotide
ggttaaacggcagtgccataagccgttctgtcctaagccgcctctgcccgtatct

SEQ ID NO: 261367 - DNA, 54 bp, Artificial
  Synthetic oligonucleotide
cagcccgagaggggattcgaacccgctaacctaccgattacaagtcggttgcgc

SEQ ID NO: 261368 - DNA, 55 bp, Artificial
  Synthetic oligonucleotide
cttcgcgggttatctggtagcgtgaacgccccaaataggtaatcatgctttcgcc

SEQ ID NO: 261369 - DNA, 55 bp, Artificial
  Synthetic oligonucleotide
ggacgggcagagtgactctacataatactgagcgaaataggcggtatttacgttt

SEQ ID NO: 261370 - DNA, 55 bp, Artificial
  Synthetic oligonucleotide
gaacaccgcctccaagaacggaactggcaaccctttgatatatctccggaaagcc

SEQ ID NO: 261371 - DNA, 55 bp, Artificial
  Synthetic oligonucleotide
gactacctcgctaacttactacaaaagtccagattatagtccggctctccggatt

SEQ ID NO: 261372 - DNA, 55 bp, Artificial
  Synthetic oligonucleotide
gagttttcggcagattccatgccggctctgtttaacgcattggaaattccccgtg

SEQ ID NO: 261373 - DNA, 55 bp, Artificial
  Synthetic oligonucleotide
gcagaaccaagggtacttataccaccggacatgcgaattatgtagatgagggccg

SEQ ID NO: 261374 - DNA, 55 bp, Artificial
  Synthetic oligonucleotide
gcataaatcttttcagggtgagacagcaaatcttccagataacctatgcgtttca

SEQ ID NO: 261375 - DNA, 55 bp, Artificial
  Synthetic oligonucleotide
gccctgagggctatccctaagacgcgggattccgagttggaggggagttcgtctg

SEQ ID NO: 261376 - DNA, 55 bp, Artificial
  Synthetic oligonucleotide
gccgggccttgggcagagcgcatattccgccagactggttagcgaagtgctttcc

SEQ ID NO: 261377 - DNA, 55 bp, Artificial
  Synthetic oligonucleotide
gcgaaagaggataggcctggtagggccggtagtgagtgatcaccctcaggcgacg

SEQ ID NO: 261378 - DNA, 56 bp, Artificial
  Synthetic oligonucleotide
acgcctggtggtcaccggatgatatgtcccgcatctaccgggtggcttcccgttat

SEQ ID NO: 261379 - DNA, 55 bp, Artificial
  Synthetic oligonucleotide
gctttggacggcagctgaaaatcaaccggaccttgagccgtcagtacccacccgg

SEQ ID NO: 261380 - DNA, 52 bp, Artificial
  Synthetic oligonucleotide
ggtctgccccgtagttaaccacccggtttacggtatctgtcaggtagtacga

SEQ ID NO: 261381 - DNA, 55 bp, Artificial
  Synthetic oligonucleotide
gcttaactaccctctccatttcggcacatttcactgtagccgcttttgccctagc

SEQ ID NO: 261382 - DNA, 55 bp, Artificial
  Synthetic oligonucleotide
gggtcaaaagggttatgagattagaccgcagacgttctagtatagagattatcgc

SEQ ID NO: 261383 - DNA, 55 bp, Artificial
  Synthetic oligonucleotide
acaactgtggagcttagggaagtgagaatgtcggaatgagtagcgcaaggcgtgt

SEQ ID NO: 261384 - DNA, 55 bp, Artificial
  Synthetic oligonucleotide
ttaacccgtcttccttaatccagccttaatattgctgctgtatacttagtgcacg

SEQ ID NO: 261385 - DNA, 55 bp, Artificial
  Synthetic oligonucleotide
tgtgcctggatataggcggcagtaaaatccgctcggcggtagtgacccatgacgg

SEQ ID NO: 261386 - DNA, 55 bp, Artificial
  Synthetic oligonucleotide
ggctaaattaggccggcaaaagctagccagacaagattaaatagacggataatcc

SEQ ID NO: 261387 - DNA, 55 bp, Artificial
  Synthetic oligonucleotide
actcgcttcggccggagtagcctgcatcccagacggcagtattgacagtacagcc

SEQ ID NO: 261388 - DNA, 55 bp, Artificial
  Synthetic oligonucleotide
tgaaacagacgctaaaactgtagattcatacacctcactaccgaacacagttccg

SEQ ID NO: 261389 - DNA, 55 bp, Artificial
  Synthetic oligonucleotide
ctgagaatgctgggttttgatgcccgccgttttggcaacgggtctgaccgtcagc

SEQ ID NO: 261390 - DNA, 51 bp, Artificial
  Synthetic oligonucleotide
ggccgggtctgggtcaaaccgggtattccgccaggctggttaccgaagttc

SEQ ID NO: 261391 - DNA, 55 bp, Artificial
  Synthetic oligonucleotide
tagaaaacctgcccacagggcggcaaaatagagtatagtcaggcctactgaacgc

SEQ ID NO: 261392 - DNA, 55 bp, Artificial
  Synthetic oligonucleotide
tacttctcggagtatttcggagataaccgtctgctggaatgacccttgggcagcg

SEQ ID NO: 261393 - DNA, 55 bp, Artificial
  Synthetic oligonucleotide
ggtagtggctacccaacgcccgtcagtagatgtcatcaccgggcttattaaggct

SEQ ID NO: 261394 - DNA, 55 bp, Artificial
  Synthetic oligonucleotide
gtttcggttaaattcctccgccctataaaccagctgccttcatatgtgggcacgc

SEQ ID NO: 261395 - DNA, 55 bp, Artificial
  Synthetic oligonucleotide
cctggaaacaaccggtgaggtcagccatgacatagcggatataaacgccatgtgg

SEQ ID NO: 261396 - DNA, 55 bp, Artificial
  Synthetic oligonucleotide
ccggaaaactcaccccgcaggaatgggagattatgaagcagcatacagtcatcgg

SEQ ID NO: 261397 - DNA, 55 bp, Artificial
  Synthetic oligonucleotide
cccgccatagatactgtctatcacccagcctgaccaaccctgccggtaagggtag

SEQ ID NO: 261398 - DNA, 55 bp, Artificial
  Synthetic oligonucleotide
ccccgcagtcacgcaaaccctcgtggaaaagtataccagcgggagacaagtggta

SEQ ID NO: 261399 - DNA, 55 bp, Artificial
  Synthetic oligonucleotide
ccacagatgaatgttactaacgtgaaaagccttctgttggaacttgccggtataa

SEQ ID NO: 261400 - DNA, 55 bp, Artificial
  Synthetic oligonucleotide
cgttcggcgctggttatggacgaatatctgaggagcctttaattccggcggttca

SEQ ID NO: 261401 - DNA, 55 bp, Artificial
  Synthetic oligonucleotide
cattatcatgcggatgggtacgggtatccctgtatgggagattgtattggcagct

SEQ ID NO: 261402 - DNA, 55 bp, Artificial
  Synthetic oligonucleotide
cattacgcagagttttaaagttctcctccggtgtaccctgccatttagcagcacc

SEQ ID NO: 261403 - DNA, 55 bp, Artificial
  Synthetic oligonucleotide
cataagtaacgccactggggtcagtaacatcttcccagtcaaagacaacgggctg

SEQ ID NO: 261404 - DNA, 55 bp, Artificial
  Synthetic oligonucleotide
cactcctagcgtctgaccgctctgcgggcaagataataactgtaaaaggcgaggc

SEQ ID NO: 261405 - DNA, 55 bp, Artificial
  Synthetic oligonucleotide
gtctgtctcccaatggtgaagaaacggcctctcagatacgttctcaggacggaca

SEQ ID NO: 261406 - DNA, 54 bp, Artificial
  Synthetic oligonucleotide
gtgacaatgtaaccgtacgggttaacgccgtagtctatttcagagtggtagacc

SEQ ID NO: 261407 - DNA, 55 bp, Artificial
  Synthetic oligonucleotide
gttcggttgttgacgtagagttctcggcagattccatgccggctctgtttaacgc

SEQ ID NO: 261408 - DNA, 55 bp, Artificial
  Synthetic oligonucleotide
gttgttgacgtagagttttcggcagattccatgccggctctgtttaatgcgttgg

SEQ ID NO: 261409 - DNA, 54 bp, Artificial
  Synthetic oligonucleotide
tataatgacggtccggtgactattattctggacagtcgtgatcgtttgaacccc

SEQ ID NO: 261410 - DNA, 54 bp, Artificial
  Synthetic oligonucleotide
cagtccaaggtgaattacatgggaggacgccgctcaaccgaggcggtactgggg

SEQ ID NO: 261411 - DNA, 55 bp, Artificial
  Synthetic oligonucleotide
gtatttggatgctaaatctgctgaattacggacaaaaggcattcaagccaacgga

SEQ ID NO: 261412 - DNA, 52 bp, Artificial
  Synthetic oligonucleotide
gggaaaagcaaccgagagctcttttaacctggttttctcaaagctttcgtaa

SEQ ID NO: 261413 - DNA, 54 bp, Artificial
  Synthetic oligonucleotide
acagcataagggccagggtatgttcggtagcggagatagtgttgccggtggggg

SEQ ID NO: 261414 - DNA, 53 bp, Artificial
  Synthetic oligonucleotide
ggagatgtctgcgcctttacccacgcaaaccgaggatttgccaccccttcggt

SEQ ID NO: 261415 - DNA, 53 bp, Artificial
  Synthetic oligonucleotide
ggccgacagttatcatagcacggatatcatcttcggccaccagggaactttta

SEQ ID NO: 261416 - DNA, 53 bp, Artificial
  Synthetic oligonucleotide
ggtagattgtgactgcggggtcaggctgcgtgtcccacccggcttaaaggggc

SEQ ID NO: 261417 - DNA, 53 bp, Artificial
  Synthetic oligonucleotide
gcgcctttacccacgcatatggaagacttgcctcccctgcggtaaccgctgtt

SEQ ID NO: 261418 - DNA, 53 bp, Artificial
  Synthetic oligonucleotide
cttgaatacctgcgttcggtagggcgtgaggctgactaccagcctttggcggc

SEQ ID NO: 261419 - DNA, 50 bp, Artificial
  Synthetic oligonucleotide
cctgtaccaaacctacaaactggagtacaaccccgaaaccgaaatcttaa

SEQ ID NO: 261420 - DNA, 53 bp, Artificial
  Synthetic oligonucleotide
tacccggtcagagctggaaatagctttagagagtaatgcccggattatcggcc

SEQ ID NO: 261421 - DNA, 53 bp, Artificial
  Synthetic oligonucleotide
agggtttgcgtggttatacctccggtttggctgtaccgaattatgtcatagat

SEQ ID NO: 261422 - DNA, 54 bp, Artificial
  Synthetic oligonucleotide
cgtcccagtaatataatttcagccgtatcccaggtatttcaagtaccgacaacc

SEQ ID NO: 261423 - DNA, 53 bp, Artificial
  Synthetic oligonucleotide
ttatccgtgcggtttgcaaagtcagcccaaagctgattggatttggcactggg

SEQ ID NO: 261424 - DNA, 52 bp, Artificial
  Synthetic oligonucleotide
tggatagaacattcccgctcacccagataaactatgttgccctgtgaatcac

SEQ ID NO: 261425 - DNA, 52 bp, Artificial
  Synthetic oligonucleotide
tgttgtcgtggctgactaggagggttaatgggacgcaaagttcatccaatcg

SEQ ID NO: 261426 - DNA, 52 bp, Artificial
  Synthetic oligonucleotide
ttctgaaccatatacaacaaagcggactggaatatagtttcggagggcgttt

SEQ ID NO: 261427 - DNA, 52 bp, Artificial
  Synthetic oligonucleotide
atatttcagcctacgagtgcagcggacataccagccatgaaccaatgcggga

SEQ ID NO: 261428 - DNA, 52 bp, Artificial
  Synthetic oligonucleotide
aaagcgagggtttggccaagagtttatttatatgcaccagctcagtttcaga

SEQ ID NO: 261429 - DNA, 52 bp, Artificial
  Synthetic oligonucleotide
ctgcgtaaagcgggtataggtatataccagacatatgcccaaaagagtatta

SEQ ID NO: 261430 - DNA, 52 bp, Artificial
  Synthetic oligonucleotide
cgttagacccgtttattgtctttacgtctaacatctttgcggtgatgggcct

SEQ ID NO: 261431 - DNA, 51 bp, Artificial
  Synthetic oligonucleotide
agcacatcccatgtgtgttcgtagggctgtgggtgccggtagcagggatca

SEQ ID NO: 261432 - DNA, 51 bp, Artificial
  Synthetic oligonucleotide
actccggcggtcagccttattcggggagcggttagcggtgactttagcggg

SEQ ID NO: 261433 - DNA, 55 bp, Artificial
  Synthetic oligonucleotide
cgtatacatcttcttcggtacaaaccaccgccgaagacagcccgtgcaaagcggc

SEQ ID NO: 261434 - DNA, 51 bp, Artificial
  Synthetic oligonucleotide
atgcgcccggcacccaagctacgtcagtattgtcagcgcttaccccgtgtc

SEQ ID NO: 261435 - DNA, 51 bp, Artificial
  Synthetic oligonucleotide
atggcgggtttgcccaaggaagtacgcgaacggacggatgcgcttgattct

SEQ ID NO: 261436 - DNA, 51 bp, Artificial
  Synthetic oligonucleotide
attaagccgttcggcgcctcaaccgacagcaccctgatttcccccggcagg

SEQ ID NO: 261437 - DNA, 51 bp, Artificial
  Synthetic oligonucleotide
caaacgggtgcgtctgggttcgtccagccggggtacagaaccaagaagtcc

SEQ ID NO: 261438 - DNA, 51 bp, Artificial
  Synthetic oligonucleotide
gcgttgtgcctctgacgtagttaccgaaaccaccactaatgtcgtacctct

SEQ ID NO: 261439 - DNA, 51 bp, Artificial
  Synthetic oligonucleotide
gctcgtttatttcttatccggataaactggaaagtgtgccggattatgtaa

SEQ ID NO: 261440 - DNA, 50 bp, Artificial
  Synthetic oligonucleotide
ttaccccggatagtgtccaagcccagcggggaaaggcgtctgtacggtct

SEQ ID NO: 261441 - DNA, 50 bp, Artificial
  Synthetic oligonucleotide
acccagctgaaaatctattacgccacccaggcagacaccaatccgccttc

SEQ ID NO: 261442 - DNA, 50 bp, Artificial
  Synthetic oligonucleotide
acccgtccggctgaaagtcccctttgaacctttcgccagagcagggggct

SEQ ID NO: 261443 - DNA, 50 bp, Artificial
  Synthetic oligonucleotide
acgcaagaagcccggtctgaaacgtgcccgcaaggctcctcagtacacta

SEQ ID NO: 261444 - DNA, 55 bp, Artificial
  Synthetic oligonucleotide
cgtactggtagaccgctctgataccgctctgcagtttaacgcccctgttttcagc

SEQ ID NO: 261445 - DNA, 50 bp, Artificial
  Synthetic oligonucleotide
aaagcgagcatgccagacaaacaaggacggcagtcaccccctccggatta

SEQ ID NO: 261446 - DNA, 50 bp, Artificial
  Synthetic oligonucleotide
tcttttaccagcagccgggcttcatttatccgcggttcggggcggtaaaa

SEQ ID NO: 261447 - DNA, 50 bp, Artificial
  Synthetic oligonucleotide
tccggccgtttccagtggtcaactatcaggttgcgtcggttagccgggtc

SEQ ID NO: 261448 - DNA, 50 bp, Artificial
  Synthetic oligonucleotide
agctagtgaccttttgactacacctgatgacctcagattgtgtctttcca

SEQ ID NO: 261449 - DNA, 50 bp, Artificial
  Synthetic oligonucleotide
atagctttacgtagtactggcagcccctcggtttcagggtaacggtggtt

SEQ ID NO: 261450 - DNA, 50 bp, Artificial
  Synthetic oligonucleotide
attccagtgcgctcatgcccaccggcataagtttcgggtcggggtccagc

SEQ ID NO: 261451 - DNA, 50 bp, Artificial
  Synthetic oligonucleotide
ctgggacagatgcggcataaggttgagagtttcagtgacccgattaaggc

SEQ ID NO: 261452 - DNA, 50 bp, Artificial
  Synthetic oligonucleotide
gggttgcagattgttgccgggggtaccgtttgcctgaacccctccgccat

SEQ ID NO: 261453 - DNA, 55 bp, Artificial
  Synthetic oligonucleotide
cgcgcctgccagtggttctgtcgtataaatgcagggcaatacggcgtctgccggg

SEQ ID NO: 261454 - DNA, 55 bp, Artificial
  Synthetic oligonucleotide
gattcacctgaccgatatgaccacgggtgaactgacactacaggtatccggtgct

SEQ ID NO: 261455 - DNA, 55 bp, Artificial
  Synthetic oligonucleotide
gcacagccttatctccagtcagccggagtatactgaccgatgcccgctccacggt

SEQ ID NO: 261456 - DNA, 55 bp, Artificial
  Synthetic oligonucleotide
gcactcgcctgtcgttacctccgagaacactatggaggtgactggtccgtccatg

SEQ ID NO: 261457 - DNA, 55 bp, Artificial
  Synthetic oligonucleotide
gccagccacaccggaaacgttgactgtatagattttcccggagtcttccggagaa

SEQ ID NO: 261458 - DNA, 55 bp, Artificial
  Synthetic oligonucleotide
ttcggcgccagagtggtattcaacgaaatacctcgtcagttttccatgccgttca

SEQ ID NO: 261459 - DNA, 55 bp, Artificial
  Synthetic oligonucleotide
accaaccagaccttcattcgtgattacgaggcagctatctccgatggtaccgcca

SEQ ID NO: 261460 - DNA, 55 bp, Artificial
  Synthetic oligonucleotide
tcaccaacgccgcagtcatgtcccggatgaagatactgacccggggccgtcacct

SEQ ID NO: 261461 - DNA, 55 bp, Artificial
  Synthetic oligonucleotide
agcgccttccagaccagtaaagagtaccggccgagcgccattcttctgctatcag

SEQ ID NO: 261462 - DNA, 55 bp, Artificial
  Synthetic oligonucleotide
tataatatgcgttatcgggtgtcaaagaccggtgtccgtccggtcaaagcatacc

SEQ ID NO: 261463 - DNA, 54 bp, Artificial
  Synthetic oligonucleotide
gcgctggaaaagcctccggcctcccgggactggggttagacttgtgtcgcgaaa

SEQ ID NO: 261464 - DNA, 53 bp, Artificial
  Synthetic oligonucleotide
cgaaccggcgttaccctataaagtaaccgaaaacactgtttcattcaagcagc

SEQ ID NO: 261465 - DNA, 55 bp, Artificial
  Synthetic oligonucleotide
ggcatgcctatatcctgggtaaaaccgatgaatcgcttaatgcctggttctacaa

SEQ ID NO: 261466 - DNA, 55 bp, Artificial
  Synthetic oligonucleotide
ggggtatgtcagtctgatagcagaacttcaggatagattcccgataggtgagcga

SEQ ID NO: 261467 - DNA, 53 bp, Artificial
  Synthetic oligonucleotide
ttcagcctgtaaccgcaacccctgactgtttggatagggccggtttgcgggtc

SEQ ID NO: 261468 - DNA, 53 bp, Artificial
  Synthetic oligonucleotide
ccccgacttcaattggtcgcctgggaattgacccgcagctgtaatctgctgtg

SEQ ID NO: 261469 - DNA, 53 bp, Artificial
  Synthetic oligonucleotide
ggttcattgaaccaacgctcaatgggatcatcgattaaggtaaggagccgcgc

SEQ ID NO: 261470 - DNA, 51 bp, Artificial
  Synthetic oligonucleotide
aaggtcgccagaccaccaaggctttacccgtactggttgcggatagtattc

SEQ ID NO: 261471 - DNA, 51 bp, Artificial
  Synthetic oligonucleotide
tgtcgtcgcataatcgataaaactcacgacctggtctgtgcctataaaccc

SEQ ID NO: 261472 - DNA, 51 bp, Artificial
  Synthetic oligonucleotide
agcttccagtggcagtacaagctgacgacctgtttggaggatcttcccaga

SEQ ID NO: 261473 - DNA, 50 bp, Artificial
  Synthetic oligonucleotide
tatggattacacttatcgtatagttcgctcccgaattggataccggcatg

SEQ ID NO: 261474 - DNA, 50 bp, Artificial
  Synthetic oligonucleotide
ctaatccggctgttgtcagacaggacggcgcacggaagtttaccggggaa

SEQ ID NO: 261475 - DNA, 55 bp, Artificial
  Synthetic oligonucleotide
ccggcggacagtacggttgccactggtcttcatgggttattacaatccggtgctg

SEQ ID NO: 261476 - DNA, 50 bp, Artificial
  Synthetic oligonucleotide
cgtccccaagctacgcctattgcgatggactcgggcttttgcactggcct

SEQ ID NO: 261477 - DNA, 50 bp, Artificial
  Synthetic oligonucleotide
cgtactgctgtccggtacggcctcagcggtcctggtgtacggtatggctc

SEQ ID NO: 261478 - DNA, 50 bp, Artificial
  Synthetic oligonucleotide
cgtaccggcgggagtggtaacggcgctccgactggacagaggcttaccgc

SEQ ID NO: 261479 - DNA, 50 bp, Artificial
  Synthetic oligonucleotide
cggcggagcctcgcaaggacgctcggaaatggatccctcgcttgcgcgta

SEQ ID NO: 261480 - DNA, 50 bp, Artificial
  Synthetic oligonucleotide
cggatttccgaaactgcctcggcatagcctcgcagagacgggatgccgat

SEQ ID NO: 261481 - DNA, 50 bp, Artificial
  Synthetic oligonucleotide
cgctcgtcccgcccgaccaacttgttgatagtaggcgactaccgagcccg

SEQ ID NO: 261482 - DNA, 50 bp, Artificial
  Synthetic oligonucleotide
aaacggacaggacgcaaccgtacctgcctggcatcggaaacagggggacc

SEQ ID NO: 261483 - DNA, 50 bp, Artificial
  Synthetic oligonucleotide
aaccgctggcgactttatccgacagcaggcacctgatagccagtctccgc

SEQ ID NO: 261484 - DNA, 50 bp, Artificial
  Synthetic oligonucleotide
aacggcggtgggtaagcggtgtaaacggaaaggacgcttcagatgggcgc

SEQ ID NO: 261485 - DNA, 50 bp, Artificial
  Synthetic oligonucleotide
accaacggactgccgtacgctccctgcgccccttccaggctgttctgcca

SEQ ID NO: 261486 - DNA, 55 bp, Artificial
  Synthetic oligonucleotide
cccgttcaacggagctaacgtcattcagtgtccaattggaaagccgtccgcacag

SEQ ID NO: 261487 - DNA, 50 bp, Artificial
  Synthetic oligonucleotide
agacatttccctgcgcaagaaatcggaacaggaattgacggcactatatc

SEQ ID NO: 261488 - DNA, 50 bp, Artificial
  Synthetic oligonucleotide
agcgctcagacgctgacagccatggtggcagacgtgaactctgcagtggc

SEQ ID NO: 261489 - DNA, 50 bp, Artificial
  Synthetic oligonucleotide
agctgtcgattcgcgaacatagcgctggctccgctgggagtaactggcaa

SEQ ID NO: 261490 - DNA, 50 bp, Artificial
  Synthetic oligonucleotide
aggacgcaaccgtacctgcctggcatcggaaacagggggaccggagtctc

SEQ ID NO: 261491 - DNA, 50 bp, Artificial
  Synthetic oligonucleotide
aggcagcgttgaaatacgtactgctgtccggtacggcctcagcggtcctg

SEQ ID NO: 261492 - DNA, 50 bp, Artificial
  Synthetic oligonucleotide
agggcggaattcggttttccggcgcaagtctcccggtaacggtcgtgtac

SEQ ID NO: 261493 - DNA, 50 bp, Artificial
  Synthetic oligonucleotide
atggtcactagttttccgggggcctgactttcagccccgcagttccggct

SEQ ID NO: 261494 - DNA, 50 bp, Artificial
  Synthetic oligonucleotide
attcgcgaacatagcgctggctccgctgggagtaactggcaatccggtgc

SEQ ID NO: 261495 - DNA, 50 bp, Artificial
  Synthetic oligonucleotide
cagctcgccaggtgcctcgcgggtaatctcccacttagcccctgttgcga

SEQ ID NO: 261496 - DNA, 50 bp, Artificial
  Synthetic oligonucleotide
catgaggtgttgtaccggttgcccggggtcagttgggtcgctttcggtcc

SEQ ID NO: 261497 - DNA, 55 bp, Artificial
  Synthetic oligonucleotide
ctttcgccggtaacccgagcggtgtcgatggatagcagactgccgggcaggatat

SEQ ID NO: 261498 - DNA, 50 bp, Artificial
  Synthetic oligonucleotide
catggccggggttgttccagggacctacggtgtcccaggtgggttcggtt

SEQ ID NO: 261499 - DNA, 50 bp, Artificial
  Synthetic oligonucleotide
ccaccatcgggtaagtccgacgcatggcagaggggtcttcgtcgaccata

SEQ ID NO: 261500 - DNA, 50 bp, Artificial
  Synthetic oligonucleotide
cccggtagccgggtggtgatactcggcgggggaagggttgctttcgactg

SEQ ID NO: 261501 - DNA, 50 bp, Artificial
  Synthetic oligonucleotide
ccgatcaccagggtaatccagccaccggtacgcagtgagccaggttcggc

SEQ ID NO: 261502 - DNA, 50 bp, Artificial
  Synthetic oligonucleotide
ccggattatgagtgacgaactcccgcaggtcacgtttcccggacagggcg

SEQ ID NO: 261503 - DNA, 50 bp, Artificial
  Synthetic oligonucleotide
ccgggacgacctgtcaggcctgggcgttaatttcgatcgctggttctccg

SEQ ID NO: 261504 - DNA, 50 bp, Artificial
  Synthetic oligonucleotide
ccggggagtggaatagggcggaattcggttttccggcgcaagtctcccgg

SEQ ID NO: 261505 - DNA, 50 bp, Artificial
  Synthetic oligonucleotide
ccgtaaaggtcaaccactcgccggcaggcaacactggctccggcactcga

SEQ ID NO: 261506 - DNA, 50 bp, Artificial
  Synthetic oligonucleotide
ccgtgtgcggcctttaacgctcgtcccgcccgaccaacttgttgatagta

SEQ ID NO: 261507 - DNA, 50 bp, Artificial
  Synthetic oligonucleotide
cctggagcgcattgttatcagggggcgcggcacctatctttgcccggcct

SEQ ID NO: 261508 - DNA, 55 bp, Artificial
  Synthetic oligonucleotide
ccaggagcgagttttgaagcggagtggcggttagaagtactttcgggaatggagc

SEQ ID NO: 261509 - DNA, 50 bp, Artificial
  Synthetic oligonucleotide
cgaggcataacgaccccgtccgaagtattgcgcaacgcctactcaccgga

SEQ ID NO: 261510 - DNA, 50 bp, Artificial
  Synthetic oligonucleotide
cgccggtgcgtcggtttcgtcagtggttacagcatcgggcgacatgttca

SEQ ID NO: 261511 - DNA, 55 bp, Artificial
  Synthetic oligonucleotide
ccagcgcttctcatgagttcaagctgttttcccgactgctgaccaagagtttcga

SEQ ID NO: 261512 - DNA, 51 bp, Artificial
  Synthetic oligonucleotide
gaaaccatcggagtttggttgccaccgggttttgccatcgtaaccgacggt

SEQ ID NO: 261513 - DNA, 55 bp, Artificial
  Synthetic oligonucleotide
gaagattacacttatcaccgcaagtcggccgccatggctctcaccttcgcttttc

SEQ ID NO: 261514 - DNA, 55 bp, Artificial
  Synthetic oligonucleotide
aggcacgatttgccatgagccgtgcgtgtgccgagattgtctgaggtgtgagctg

SEQ ID NO: 261515 - DNA, 55 bp, Artificial
  Synthetic oligonucleotide
ctcgcaaatagcgcggaggcctatcggaaaagggattatgcgccagcaacccagt

SEQ ID NO: 261516 - DNA, 55 bp, Artificial
  Synthetic oligonucleotide
gcacccacctcgtaaccgcactgtcggttgaagctgacgcctgattactacttgt

SEQ ID NO: 261517 - DNA, 55 bp, Artificial
  Synthetic oligonucleotide
gcagggcgagatgatctttcgttaagacaccaaccaaattgcccaactctctacc

SEQ ID NO: 261518 - DNA, 55 bp, Artificial
  Synthetic oligonucleotide
gcgcgagatacgcaccactcacataaccgatcgctgtcccgttctcggctagcag

SEQ ID NO: 261519 - DNA, 55 bp, Artificial
  Synthetic oligonucleotide
gctccacagcaaagccaatcgataaagcggacaactgagtccacacaactgcaac

SEQ ID NO: 261520 - DNA, 55 bp, Artificial
  Synthetic oligonucleotide
ggattcggggaatccatctacatggagcacaaggagggacacggggaatccattt

SEQ ID NO: 261521 - DNA, 52 bp, Artificial
  Synthetic oligonucleotide
gggttctacgaagtcatttacgcaggtataaagggtttgttcgttaaggcga

SEQ ID NO: 261522 - DNA, 55 bp, Artificial
  Synthetic oligonucleotide
gtatactcctccctgcgctgaatcatggagtaacaggtgtcaggtaggatagcgg

SEQ ID NO: 261523 - DNA, 55 bp, Artificial
  Synthetic oligonucleotide
gtccccgttcggagatcaagctacgcatgggtcggaccaaaagcctcctgccgtg

SEQ ID NO: 261524 - DNA, 55 bp, Artificial
  Synthetic oligonucleotide
gttcagagggatcgagagtgaccgagtcatcatcatgctccagaggaaagtcgtc

SEQ ID NO: 261525 - DNA, 55 bp, Artificial
  Synthetic oligonucleotide
ataacgccatgcccactggaccttgtatggttttcaatccgcgcctccacagggg

SEQ ID NO: 261526 - DNA, 55 bp, Artificial
  Synthetic oligonucleotide
ttctgcatggatcggtagacaaccggatagtcacccgcatacgtctcggttcccc

SEQ ID NO: 261527 - DNA, 54 bp, Artificial
  Synthetic oligonucleotide
tattcgaccaaggaggagtatgtccgtcagtcttgcgatatgacaccgggcgtc

SEQ ID NO: 261528 - DNA, 54 bp, Artificial
  Synthetic oligonucleotide
acgtgctgtatcgggaacgggtgaggtactgcagtgcccaggtctttgtttcgg

SEQ ID NO: 261529 - DNA, 53 bp, Artificial
  Synthetic oligonucleotide
catcgcagagcagatctggattctcgacacttgagaggaacatggtgccattc

SEQ ID NO: 261530 - DNA, 52 bp, Artificial
  Synthetic oligonucleotide
catatctggcgaggcccgacctataagatcatcctcgctagcccgcccgact

SEQ ID NO: 261531 - DNA, 51 bp, Artificial
  Synthetic oligonucleotide
caatcacctcaaggggcagtggcaggttacagactcaccgctaacggttat

SEQ ID NO: 261532 - DNA, 50 bp, Artificial
  Synthetic oligonucleotide
acagcggccgtatcccggagcgcttgattcgccacccactggtctacgca

SEQ ID NO: 261533 - DNA, 50 bp, Artificial
  Synthetic oligonucleotide
acactagccccttcagactgactgcaaggttcaggcgccgatccccggag

SEQ ID NO: 261534 - DNA, 50 bp, Artificial
  Synthetic oligonucleotide
aagggaggcgaccgagtgccaaacaagcaggagatcacccactgtgccga

SEQ ID NO: 261535 - DNA, 50 bp, Artificial
  Synthetic oligonucleotide
aaggagcgaggcgggggcacgttcgaagtcttccgcaggtgagatgcacc

SEQ ID NO: 261536 - DNA, 55 bp, Artificial
  Synthetic oligonucleotide
caacgtgctgctcagctcgaatgtaacggcaataaccgaaaagcaggtaaccctc

SEQ ID NO: 261537 - DNA, 50 bp, Artificial
  Synthetic oligonucleotide
aagatcggtctcaccggcgtagatagcgcgtttggtctgcagggcaagcc

SEQ ID NO: 261538 - DNA, 50 bp, Artificial
  Synthetic oligonucleotide
gactcagtaaagggacgaagcacgccaatgactgaggaatccatggtaac

SEQ ID NO: 261539 - DNA, 50 bp, Artificial
  Synthetic oligonucleotide
aacgcgttgatggcaagcaaccaggtgacggcacacgtcaagcgagcttt

SEQ ID NO: 261540 - DNA, 50 bp, Artificial
  Synthetic oligonucleotide
aacgacgccacattacgaagcggcatctggcaaatctattgggggcgggc

SEQ ID NO: 261541 - DNA, 50 bp, Artificial
  Synthetic oligonucleotide
aacctcagccccggttggaggcaagccgataagccatgaatgcgccgtgg

SEQ ID NO: 261542 - DNA, 50 bp, Artificial
  Synthetic oligonucleotide
aaccctgccggtcaactgcacccacctattctgtaatgcaattaacttcc

SEQ ID NO: 261543 - DNA, 50 bp, Artificial
  Synthetic oligonucleotide
gctctgccgaaccagtggtgattatattcccttgccttgcgcttttcccc

SEQ ID NO: 261544 - DNA, 50 bp, Artificial
  Synthetic oligonucleotide
aacacccacgctcaccacaatcaggatcggccctagcgagaggatcgcac

SEQ ID NO: 261545 - DNA, 50 bp, Artificial
  Synthetic oligonucleotide
aacaagttccagtcccggactaacgctgcctctccccgcggaccatgcta

SEQ ID NO: 261546 - DNA, 50 bp, Artificial
  Synthetic oligonucleotide
aaatcaaacgctgggccggttcccgatcctatgggcgtggtgaggcctat

SEQ ID NO: 261547 - DNA, 55 bp, Artificial
  Synthetic oligonucleotide
cagccacaaggctagcgcactcaggtaagcgaagaggtagtgtcccaacgaaacc

SEQ ID NO: 261548 - DNA, 50 bp, Artificial
  Synthetic oligonucleotide
aaaggccaccctgcttagcccaggggcgcacgggacgtggtgaaccgtaa

SEQ ID NO: 261549 - DNA, 50 bp, Artificial
  Synthetic oligonucleotide
gttgaagtgtagaagagtgttatcgaacgggaccaggctggcgcttacag

SEQ ID NO: 261550 - DNA, 50 bp, Artificial
  Synthetic oligonucleotide
tcatgagcgatgtccagcagaaagagtttgagtcgacccgggagtgcaac

SEQ ID NO: 261551 - DNA, 50 bp, Artificial
  Synthetic oligonucleotide
aaaaccgtggatgtgcagcggtttaccgttagggcgatacggcgccacca

SEQ ID NO: 261552 - DNA, 50 bp, Artificial
  Synthetic oligonucleotide
agatagggccgtgcaagcaggcgcgatgtccgattgccgagttatccaga

SEQ ID NO: 261553 - DNA, 50 bp, Artificial
  Synthetic oligonucleotide
agatagttgccgacgaggtgtaggccggggagtgcctcgacacgcgctct

SEQ ID NO: 261554 - DNA, 50 bp, Artificial
  Synthetic oligonucleotide
agcaaccttccttggtgggctagtccggcccacgatcccctgtcgggcgt

SEQ ID NO: 261555 - DNA, 50 bp, Artificial
  Synthetic oligonucleotide
agcaatcctgcgagcactctgtcgtcgtctgcgggtgcccacccggtacc

SEQ ID NO: 261556 - DNA, 50 bp, Artificial
  Synthetic oligonucleotide
agcagagcagagtccggtatagaaggtcaccctgcgtcccgctgcggcgc

SEQ ID NO: 261557 - DNA, 50 bp, Artificial
  Synthetic oligonucleotide
agcagccaatcggcagtgtgaccggggaggaaagggttagatcggcaacg

SEQ ID NO: 261558 - DNA, 52 bp, Artificial
  Synthetic oligonucleotide
cccggttttccctggcgataaggtggctcctttcacgcccagtcgaccgaac

SEQ ID NO: 261559 - DNA, 50 bp, Artificial
  Synthetic oligonucleotide
agcagcgccgatcagtgcatcccccatcccaaagcgccagatgcgcgggt

SEQ ID NO: 261560 - DNA, 50 bp, Artificial
  Synthetic oligonucleotide
agccagtggctcgcccgtgagccgtgaaagcgccccaactcttccccgtg

SEQ ID NO: 261561 - DNA, 50 bp, Artificial
  Synthetic oligonucleotide
agcccgcctcggcaatatcccggcacgtcactccatactgcgcagccgta

SEQ ID NO: 261562 - DNA, 50 bp, Artificial
  Synthetic oligonucleotide
agcctcgccaatggtcgaagacaagagctcgcaggagtcgccgctgattc

SEQ ID NO: 261563 - DNA, 50 bp, Artificial
  Synthetic oligonucleotide
agcgtatgccggagcagaactcatgggggtccgattgcgcgccgacgtca

SEQ ID NO: 261564 - DNA, 50 bp, Artificial
  Synthetic oligonucleotide
agctccccatcgagacggcggaaccgtggttgccccattagtcggggtcg

SEQ ID NO: 261565 - DNA, 50 bp, Artificial
  Synthetic oligonucleotide
actgcaggcctggtgagaatgcgtaccacctcaggcggccgatgctgtgt

SEQ ID NO: 261566 - DNA, 50 bp, Artificial
  Synthetic oligonucleotide
aggcgatccgcgctatacgcctatccacaagctggagccattccgcctca

SEQ ID NO: 261567 - DNA, 50 bp, Artificial
  Synthetic oligonucleotide
aggcgcttaggcggcactgctcacgggttggagggttggcgcggcagatg

SEQ ID NO: 261568 - DNA, 50 bp, Artificial
  Synthetic oligonucleotide
aggcgggggcacgttcgaagtcttccgcaggtgagatgcaccagggcacg

SEQ ID NO: 261569 - DNA, 55 bp, Artificial
  Synthetic oligonucleotide
ccgatcagactacaggcggaagtactctatgggcaggaacacttcgatgtggtcc

SEQ ID NO: 261570 - DNA, 50 bp, Artificial
  Synthetic oligonucleotide
agggaagacaggaggcgttccctccaagctggtcgtagtcggactgctga

SEQ ID NO: 261571 - DNA, 50 bp, Artificial
  Synthetic oligonucleotide
accggcagagcctggtgttccgccccttctaccgctgggactcagccgac

SEQ ID NO: 261572 - DNA, 50 bp, Artificial
  Synthetic oligonucleotide
accgacgttacggcagcgtatgccggagcagaactcatgggggtccgatt

SEQ ID NO: 261573 - DNA, 50 bp, Artificial
  Synthetic oligonucleotide
accagctgccgaagcacggaggagcaccatgcaacgtcccaagcttccgt

SEQ ID NO: 261574 - DNA, 55 bp, Artificial
  Synthetic oligonucleotide
cggcaacacttcgccccacccttctcaggcaataggcggtagcggctcatgtgtt

SEQ ID NO: 261575 - DNA, 55 bp, Artificial
  Synthetic oligonucleotide
ctaagtgtcatacggcagaactgcgctggggttccatagggcacacgtactccgc

SEQ ID NO: 261576 - DNA, 55 bp, Artificial
  Synthetic oligonucleotide
ctattacattcatcagcagagaagcacagcgcgacatctttagtgaggctcaatg

SEQ ID NO: 261577 - DNA, 55 bp, Artificial
  Synthetic oligonucleotide
ttggtaagcgtattgatagacggagaagttagcgatgttacaacacgcagcgaag

SEQ ID NO: 261578 - DNA, 55 bp, Artificial
  Synthetic oligonucleotide
gcacgagagttcatccacgatctaaacactgcttgtacggcttctagtaactgtg

SEQ ID NO: 261579 - DNA, 55 bp, Artificial
  Synthetic oligonucleotide
ctgttgatcccaaagctctcgtccttggggcaagtgcaataggcgcaggtcttgc

SEQ ID NO: 261580 - DNA, 55 bp, Artificial
  Synthetic oligonucleotide
ctgagttgcggaacggctcttaaactttcgaatagatatgcttttatgccgttgg

SEQ ID NO: 261581 - DNA, 55 bp, Artificial
  Synthetic oligonucleotide
cgtgaagatatgccacagatagaaggcgtattagttgttgcgggtggaggagaca

SEQ ID NO: 261582 - DNA, 55 bp, Artificial
  Synthetic oligonucleotide
cggattaagtcgaacgagttcgtattgagcttgccataaaggtatgagcccgatg

SEQ ID NO: 261583 - DNA, 55 bp, Artificial
  Synthetic oligonucleotide
aatatcttgttgcgaaggagtacacgcacctgcaatgatggggtatatcccgtcc

SEQ ID NO: 261584 - DNA, 55 bp, Artificial
  Synthetic oligonucleotide
acgcaatacaaaggagcgttcacccaagcgctaagagacccgagagtcgatgggg

SEQ ID NO: 261585 - DNA, 55 bp, Artificial
  Synthetic oligonucleotide
agaaattacgattctgccactaggcgcaacggtgatgtcgttgacagagtttact

SEQ ID NO: 261586 - DNA, 55 bp, Artificial
  Synthetic oligonucleotide
ataacgaagaggcgtcggttacaataattggcgcagtctcgccaccaggaggaga

SEQ ID NO: 261587 - DNA, 55 bp, Artificial
  Synthetic oligonucleotide
cacctacacctatgaaatgttactcgcacctggtgcacactctcgagttgcaatc

SEQ ID NO: 261588 - DNA, 55 bp, Artificial
  Synthetic oligonucleotide
tggcacctcagggtttgggcgtgctatgcctaagcaataagatgcacgttgagcc

SEQ ID NO: 261589 - DNA, 55 bp, Artificial
  Synthetic oligonucleotide
cgccgtcaccaacccataagccgccattggcaattccagtagttgcgttccctcc

SEQ ID NO: 261590 - DNA, 55 bp, Artificial
  Synthetic oligonucleotide
cgcatctgtcgccgtagtctttaatttaactcccagtacattcgactcattggta

SEQ ID NO: 261591 - DNA, 55 bp, Artificial
  Synthetic oligonucleotide
ccccacttttgcatcgtatccaaacctttacttctgtcccaatccgctggaagca

SEQ ID NO: 261592 - DNA, 54 bp, Artificial
  Synthetic oligonucleotide
tagtctacccaaactagctgcagtgatgcccttacccaatccagatacaacgcc

SEQ ID NO: 261593 - DNA, 53 bp, Artificial
  Synthetic oligonucleotide
gttgtattctatagtaggccaagcgtattgcggcaagatgttgtcgtagccaa

SEQ ID NO: 261594 - DNA, 52 bp, Artificial
  Synthetic oligonucleotide
atgctcttctgctcccggcttatataaattccaaaaggcatcgcgagctacc

SEQ ID NO: 261595 - DNA, 52 bp, Artificial
  Synthetic oligonucleotide
caagtggtgccgtccagtctatatgcaggcttcacgatgcttatgatgatca

SEQ ID NO: 261596 - DNA, 52 bp, Artificial
  Synthetic oligonucleotide
caggaactaattacaacgtaacccaagtaaattatagattgggcgaagcggt

SEQ ID NO: 261597 - DNA, 51 bp, Artificial
  Synthetic oligonucleotide
accgataggaccacttctccgcaactaagccccgccgctaaggcaacgccc

SEQ ID NO: 261598 - DNA, 51 bp, Artificial
  Synthetic oligonucleotide
acctcggcttctacggctacatgctccacctcgcaccagtcgagctcggct

SEQ ID NO: 261599 - DNA, 55 bp, Artificial
  Synthetic oligonucleotide
tcgatagttacacaaggggccacagatggtattcaggctttgcacgtaaatatac

SEQ ID NO: 261600 - DNA, 51 bp, Artificial
  Synthetic oligonucleotide
gacgccatatcggccgggtacgctcaagcaaccctcgtctcctgtttgctc

SEQ ID NO: 261601 - DNA, 51 bp, Artificial
  Synthetic oligonucleotide
tatgtcgaacgtattggcgtatccccaaatctaagatgcgaaacagttatg

SEQ ID NO: 261602 - DNA, 50 bp, Artificial
  Synthetic oligonucleotide
gacggggcagtacgtttcgggaacgggagtgtggaccaacgacgttccgt

SEQ ID NO: 261603 - DNA, 51 bp, Artificial
  Synthetic oligonucleotide
taataactcagggggcgacatcagcttaggaggcggcatcggctcgggagg

SEQ ID NO: 261604 - DNA, 51 bp, Artificial
  Synthetic oligonucleotide
gagggcagttgccgggggtgtaacagttggttcggattcggcacatgcaac

SEQ ID NO: 261605 - DNA, 51 bp, Artificial
  Synthetic oligonucleotide
gtgtgtggaccggggcgtgcatgtatgatgacggggcagtacgtttcggga

SEQ ID NO: 261606 - DNA, 51 bp, Artificial
  Synthetic oligonucleotide
cgcatcaccgagtgggcgtgcgatggcaaatgaagcgagagtacgctcgat

SEQ ID NO: 261607 - DNA, 51 bp, Artificial
  Synthetic oligonucleotide
gcattcgtgtgacgagggagttcacgcggcatcgtatggcggggtgtggca

SEQ ID NO: 261608 - DNA, 51 bp, Artificial
  Synthetic oligonucleotide
cacccctgatgcgagagcaactctcgatgtggcaatcgcggctctcaccga

SEQ ID NO: 261609 - DNA, 51 bp, Artificial
  Synthetic oligonucleotide
gggcgtgcatgtatgatgacggggcagtacgtttcgggaacgggagtgtgg

SEQ ID NO: 261610 - DNA, 55 bp, Artificial
  Synthetic oligonucleotide
tcatgttttgacaggcggatttgctagcttgattgtaagagcattggtggctaat

SEQ ID NO: 261611 - DNA, 51 bp, Artificial
  Synthetic oligonucleotide
ggctcaggaggtggcatcagctcgggatgcgacatcagctcgggatgcgac

SEQ ID NO: 261612 - DNA, 51 bp, Artificial
  Synthetic oligonucleotide
ggatgtgacatcagctcgggatgcgacaatagctcgggatgcgacaatagc

SEQ ID NO: 261613 - DNA, 50 bp, Artificial
  Synthetic oligonucleotide
ctcatgcatagacggcagaagagtttagacgcagcgatacagaaattggc

SEQ ID NO: 261614 - DNA, 50 bp, Artificial
  Synthetic oligonucleotide
tactccctctaatcgtatcatttctgccgaaactgcaaagacaatcagtg

SEQ ID NO: 261615 - DNA, 50 bp, Artificial
  Synthetic oligonucleotide
tatctcgctccggttgcatgtggaaaggatgacgcactcggcaacccccg

SEQ ID NO: 261616 - DNA, 50 bp, Artificial
  Synthetic oligonucleotide
gggtggagcgagagttgggtgaccgtggcactgcaaaagaacgcgggctt

SEQ ID NO: 261617 - DNA, 50 bp, Artificial
  Synthetic oligonucleotide
tcgggaggtgacatcaactcaggatgcggcaacagctcgggaagcgacat

SEQ ID NO: 261618 - DNA, 55 bp, Artificial
  Synthetic oligonucleotide
gtctggtacgcaactttcttggcattagcaaactcttcggaagatctacctaacg

SEQ ID NO: 261619 - DNA, 55 bp, Artificial
  Synthetic oligonucleotide
gtaccttcaactttaatcggccttgcttccgaactctttgcatcaaatgtcaacg

SEQ ID NO: 261620 - DNA, 55 bp, Artificial
  Synthetic oligonucleotide
ggtcggcgcaatatcgataaagctgactgcgctataagagtgtgctccggaagca

SEQ ID NO: 261621 - DNA, 55 bp, Artificial
  Synthetic oligonucleotide
gggtcagatcttctgtggagcaattcagtataatgcgcaagtcttcgcggtcgtg

SEQ ID NO: 261622 - DNA, 55 bp, Artificial
  Synthetic oligonucleotide
gcccacggtgctattgcaatattgaagggtaacttggctccgctcggtgccgtcg

SEQ ID NO: 261623 - DNA, 60 bp, Artificial
  Synthetic oligonucleotide
actcctggcagacaaaaatccatcctaggtctttgctgtatccggttctctcgatctgag

SEQ ID NO: 261624 - DNA, 60 bp, Artificial
  Synthetic oligonucleotide
gccgaaaggcagcaaggtagggcgtggaaacgccttgtgtgcgcgagagcgcagcgagtc

SEQ ID NO: 261625 - DNA, 55 bp, Artificial
  Synthetic oligonucleotide
gtcaatttcgaacggacacagctgttactcgacataccggaattatcgccacaac

SEQ ID NO: 261626 - DNA, 54 bp, Artificial
  Synthetic oligonucleotide
gaatggggagacgaagtacaggatggccgcaacgagttcctcttgtttatcggc

SEQ ID NO: 261627 - DNA, 54 bp, Artificial
  Synthetic oligonucleotide
catacatgcctatctatgaagacggtcaagtaaccggcgtcgtcaaggttgcta

SEQ ID NO: 261628 - DNA, 54 bp, Artificial
  Synthetic oligonucleotide
accacacgttacgacaccggaatggatgttgttaccgatgcataagggcggtac

SEQ ID NO: 261629 - DNA, 54 bp, Artificial
  Synthetic oligonucleotide
gcaagaaatcggaaacgttcggctataatggagacttactcggaccaatgatcg

SEQ ID NO: 261630 - DNA, 54 bp, Artificial
  Synthetic oligonucleotide
ctttggcttgagagcgtcgccaagattgcgtggagtttttatttcacgcaaact

SEQ ID NO: 261631 - DNA, 54 bp, Artificial
  Synthetic oligonucleotide
ggggtaggaaatacatgtgtaagtgccgtagggcattggtgcttatggattcag

SEQ ID NO: 261632 - DNA, 54 bp, Artificial
  Synthetic oligonucleotide
aggaatcacgttcgcacagttgctcgagttccttctgacgtgctctcgcggcat

SEQ ID NO: 261633 - DNA, 54 bp, Artificial
  Synthetic oligonucleotide
atttcgcctcagtcttcgaacgggcgaaccgtgacgtgcagctcacgctacaga

SEQ ID NO: 261634 - DNA, 53 bp, Artificial
  Synthetic oligonucleotide
gtagagcgtcgtcaagttgttcacttccgccatccggtccatttcgaataacg

SEQ ID NO: 261635 - DNA, 60 bp, Artificial
  Synthetic oligonucleotide
gcagcgagtcatatcgtaggggcgagactcccctacaatcttggaacgcctagacatacg

SEQ ID NO: 261636 - DNA, 53 bp, Artificial
  Synthetic oligonucleotide
cgggccgtcaggggggcagcggtgcgatgagcgacttcgccctaaggcgttag

SEQ ID NO: 261637 - DNA, 53 bp, Artificial
  Synthetic oligonucleotide
tcacgctctataatacgtttcagccagatggcgagacacttgtcgatcgtggt

SEQ ID NO: 261638 - DNA, 53 bp, Artificial
  Synthetic oligonucleotide
ccggtacaatatgtcgcgaacaatcgaactgcactcttcctcgaaagtgacat

SEQ ID NO: 261639 - DNA, 51 bp, Artificial
  Synthetic oligonucleotide
atccgtctcgacggtcgtttcctttacgttagccttttccgtcgtgacatt

SEQ ID NO: 261640 - DNA, 52 bp, Artificial
  Synthetic oligonucleotide
cgcgcggttttgcgccttcccagacttgatacttgaactcgatcccagacaa

SEQ ID NO: 261641 - DNA, 52 bp, Artificial
  Synthetic oligonucleotide
tggtgttgccaatttccaacacagagacattttaataaatcggtaattcaag

SEQ ID NO: 261642 - DNA, 52 bp, Artificial
  Synthetic oligonucleotide
atggaatcgaatgccatgccgcagaacggttcaccgcttaatgtggagactc

SEQ ID NO: 261643 - DNA, 52 bp, Artificial
  Synthetic oligonucleotide
gttgaacggctcaaagaaactctagacgagtttagtgatgaacatatgatga

SEQ ID NO: 261644 - DNA, 51 bp, Artificial
  Synthetic oligonucleotide
agcgtgaagtaatggcgtgtgttgactggtacggaaatcaaatcacccggg

SEQ ID NO: 261645 - DNA, 51 bp, Artificial
  Synthetic oligonucleotide
cgaaacttgttcatgtttaacggataggttgagacgaccgtcatcgatcgt

SEQ ID NO: 261646 - DNA, 60 bp, Artificial
  Synthetic oligonucleotide
gagtcacactcaatcgacacactcacatccgaggaacgggagaacagtcttttgacgtct

SEQ ID NO: 261647 - DNA, 51 bp, Artificial
  Synthetic oligonucleotide
gctgctatcgcgcacacaaggcgtttccacgccctaccttgctgcctttcg

SEQ ID NO: 261648 - DNA, 51 bp, Artificial
  Synthetic oligonucleotide
tcggactcgggagagaagcttgtcacaaaggttatgaggtgaggttcttcc

SEQ ID NO: 261649 - DNA, 50 bp, Artificial
  Synthetic oligonucleotide
tctgaaacaagacgaaatggcgcaaagtatgaatttgctgactgatccag

SEQ ID NO: 261650 - DNA, 50 bp, Artificial
  Synthetic oligonucleotide
agcaactgaagcgttggcgatatgcgcaggcacgtgacgtcttccgcacg

SEQ ID NO: 261651 - DNA, 50 bp, Artificial
  Synthetic oligonucleotide
agagcgaccgagggattaggcccaacgacgtccggcaaccacctttaagg

SEQ ID NO: 261652 - DNA, 50 bp, Artificial
  Synthetic oligonucleotide
agagcagggacgtgagaaaggactgcagccgcttgcggactggttccggg

SEQ ID NO: 261653 - DNA, 50 bp, Artificial
  Synthetic oligonucleotide
agactactgagggcgccgtataacgtacctggggcgagttgaacccgccc

SEQ ID NO: 261654 - DNA, 50 bp, Artificial
  Synthetic oligonucleotide
agacgggcttgcagaagagttcggagggacagtcacgcggacagacgagg

SEQ ID NO: 261655 - DNA, 50 bp, Artificial
  Synthetic oligonucleotide
agacgcacatcccgccacccgtggaacgattcgattggctcgtcgtgacg

SEQ ID NO: 261656 - DNA, 50 bp, Artificial
  Synthetic oligonucleotide
agacacgtccggtcggacacgggtcgaaagtgccgtcatttccgggttgc

SEQ ID NO: 261657 - DNA, 56 bp, Artificial
  Synthetic oligonucleotide
atggattgaacggtacattcggtcctctctattcttatggagttaaagtactgaac

SEQ ID NO: 261658 - DNA, 50 bp, Artificial
  Synthetic oligonucleotide
acgttggactggcaggggcggtcggtgctttggctcgctatggactcggc

SEQ ID NO: 261659 - DNA, 50 bp, Artificial
  Synthetic oligonucleotide
acgtggagccgagttgatcgctggaccggaagcgcgcggatttgtcgtcg

SEQ ID NO: 261660 - DNA, 50 bp, Artificial
  Synthetic oligonucleotide
acgctatgcgcaaagcagtcgtctgttgcaggaaaccggggcgttggtcc

SEQ ID NO: 261661 - DNA, 50 bp, Artificial
  Synthetic oligonucleotide
acgcatcgccgtgctctctccccctggtaacacgagtccgtcaatcgctt

SEQ ID NO: 261662 - DNA, 50 bp, Artificial
  Synthetic oligonucleotide
acgagtcgtccccggtacgaaacacggaatccatcacgtgacgggcgtcg

SEQ ID NO: 261663 - DNA, 49 bp, Artificial
  Synthetic oligonucleotide
acgacacccactttaacggggataacggggttcccccggctaggcctga

SEQ ID NO: 261664 - DNA, 50 bp, Artificial
  Synthetic oligonucleotide
acgaactcgccatggggacggtcctgcaactttcgggtgttccgaacccg

SEQ ID NO: 261665 - DNA, 50 bp, Artificial
  Synthetic oligonucleotide
accttgtccgtgcgacggaacacaactggaacggtctcgggcgccatctg

SEQ ID NO: 261666 - DNA, 50 bp, Artificial
  Synthetic oligonucleotide
accgtccctttccgatccagccacatgccaagttaccgactccgggtgcg

SEQ ID NO: 261667 - DNA, 50 bp, Artificial
  Synthetic oligonucleotide
aaaacagccgcaagcatcgcactcacggttgccccaaacgaccgcaagtc

SEQ ID NO: 261668 - DNA, 60 bp, Artificial
  Synthetic oligonucleotide
attcaactagtcctgtatactcacatagcaacatgaatgtgtgtgcaacgtctgaatgag

SEQ ID NO: 261669 - DNA, 50 bp, Artificial
  Synthetic oligonucleotide
aaaggtggccgcatcgcagcatgggctccaaaaggcgtcgcagtcacact

SEQ ID NO: 261670 - DNA, 50 bp, Artificial
  Synthetic oligonucleotide
aaagtgggaaagccggctcgaccaaatcggcaaaggggaagcatccgcgg

SEQ ID NO: 261671 - DNA, 50 bp, Artificial
  Synthetic oligonucleotide
aaatcacgacgtcggtcggtgtcgcccatgggacctcgcttcccatcaaa

SEQ ID NO: 261672 - DNA, 50 bp, Artificial
  Synthetic oligonucleotide
aaatgggagcatcgcactcacggcgagtagcaccggccaaatccacggtt

SEQ ID NO: 261673 - DNA, 50 bp, Artificial
  Synthetic oligonucleotide
aaccgattccgggatgtgtgcggccagtgtcttcgcagtcgccacgtcga

SEQ ID NO: 261674 - DNA, 50 bp, Artificial
  Synthetic oligonucleotide
aaccggtcactcaactcatgcggccaagcggtcacacatcgaggcgcatt

SEQ ID NO: 261675 - DNA, 50 bp, Artificial
  Synthetic oligonucleotide
aacggccggacacgtcatgcgagtcaatcccttccgtccgggcataccat

SEQ ID NO: 261676 - DNA, 50 bp, Artificial
  Synthetic oligonucleotide
aagacgattgccccggtcatacgcatcatgaggctcggtgccggtacgag

SEQ ID NO: 261677 - DNA, 50 bp, Artificial
  Synthetic oligonucleotide
aagacgttaacggaactccggcgacgcttgacggaccaggatccgcatgc

SEQ ID NO: 261678 - DNA, 50 bp, Artificial
  Synthetic oligonucleotide
aatgattgcccgccttgactcggtcagcccgacgcaagtcatgttgcgtg

SEQ ID NO: 261679 - DNA, 59 bp, Artificial
  Synthetic oligonucleotide
cactgtttatcgtaggactgcctccggtcgtaccatatgaccctgtctgaacctctcaa

SEQ ID NO: 261680 - DNA, 50 bp, Artificial
  Synthetic oligonucleotide
aatggcgtcatgggtcggatttgaccgcgtgccgacactgcatcggtggt

SEQ ID NO: 261681 - DNA, 50 bp, Artificial
  Synthetic oligonucleotide
aattgacagccgacggggtgtgacgagtcaccaggcgaatccgtggttcg

SEQ ID NO: 261682 - DNA, 50 bp, Artificial
  Synthetic oligonucleotide
acagggtcgtcagcattgcgccgagagtcgcccctgacaaagagccgtcg

SEQ ID NO: 261683 - DNA, 50 bp, Artificial
  Synthetic oligonucleotide
accacatccgtcgccatgcgtaaagctccggaacatctccccgtcgagcg

SEQ ID NO: 261684 - DNA, 50 bp, Artificial
  Synthetic oligonucleotide
acccagtctcgtcgccataatgtggcaggagtccacgggacggtcatcga

SEQ ID NO: 261685 - DNA, 50 bp, Artificial
  Synthetic oligonucleotide
accccgagaagaatgtgttgtcccgtcaacccgaggcgtgcccgaagtgg

SEQ ID NO: 261686 - DNA, 50 bp, Artificial
  Synthetic oligonucleotide
cctgtacatagcctaagtcccgaagggatacggtaaaaatcgttgagagg

SEQ ID NO: 261687 - DNA, 50 bp, Artificial
  Synthetic oligonucleotide
ccgcccggtccacttcgcaacgacttgtccctggactatcggttctccgt

SEQ ID NO: 261688 - DNA, 50 bp, Artificial
  Synthetic oligonucleotide
ccgaggggagcaaccggaacatctgtccgacaccggactggatggacagc

SEQ ID NO: 261689 - DNA, 50 bp, Artificial
  Synthetic oligonucleotide
ccctgtcagcccagccacgcggtactcccagaggcaacaaacaagccctc

SEQ ID NO: 261690 - DNA, 58 bp, Artificial
  Synthetic oligonucleotide
cagaggctcgatgtcaataagtcgtgaaataaaaagcgttgacatagtaagtcctaaa

SEQ ID NO: 261691 - DNA, 50 bp, Artificial
  Synthetic oligonucleotide
ccccgttcagcgacatgaaccgtagccgtcgcgtgacccggtaccatatt

SEQ ID NO: 261692 - DNA, 50 bp, Artificial
  Synthetic oligonucleotide
ccccgacgaccgtttcccgacggattcatgcgctcgcgacattgttcgac

SEQ ID NO: 261693 - DNA, 50 bp, Artificial
  Synthetic oligonucleotide
cccagcgcgggatcgacctatccatcctcggtcttttcgtgacagcgggg

SEQ ID NO: 261694 - DNA, 50 bp, Artificial
  Synthetic oligonucleotide
cccagcgcaagcatccaatcgagtgcccgtttgacttccgtcccgaacgg

SEQ ID NO: 261695 - DNA, 50 bp, Artificial
  Synthetic oligonucleotide
caccaggcgaatccgtggttcgctttggaacacggcgcaacggaatcagc

SEQ ID NO: 261696 - DNA, 50 bp, Artificial
  Synthetic oligonucleotide
attgctgtcggaccgatgcggacgcacgagttgcgggctttacaaggcga

SEQ ID NO: 261697 - DNA, 50 bp, Artificial
  Synthetic oligonucleotide
atgcgctacggctgctccgtccttttgccccgttaccgtatgccggacga

SEQ ID NO: 261698 - DNA, 50 bp, Artificial
  Synthetic oligonucleotide
atgaaggcgtcgcaacgaatccggccgaggattatgcacggaacgggacg

SEQ ID NO: 261699 - DNA, 50 bp, Artificial
  Synthetic oligonucleotide
atgaaccgtagccgtcgcgtgacccggtaccatattcggacgctctccgc

SEQ ID NO: 261700 - DNA, 50 bp, Artificial
  Synthetic oligonucleotide
atcatgccggctgtgacggtcgcaaggacacccgatacttctagcgcgtc

SEQ ID NO: 261701 - DNA, 57 bp, Artificial
  Synthetic oligonucleotide
cagatggttcggcgagagtcgcctaaaactcgccacaaggtcacgacatcgttccgg

SEQ ID NO: 261702 - DNA, 50 bp, Artificial
  Synthetic oligonucleotide
atcacgacggtgcacctaccttatcgccgaactggggcgaaagcagctga

SEQ ID NO: 261703 - DNA, 50 bp, Artificial
  Synthetic oligonucleotide
atcaacgctccgcattgtgccgcaagcgaaagccccgactgaatccctgc

SEQ ID NO: 261704 - DNA, 50 bp, Artificial
  Synthetic oligonucleotide
agcccgcttatccgtccggcctgttgcaccgaccgagaggacatatttcg

SEQ ID NO: 261705 - DNA, 50 bp, Artificial
  Synthetic oligonucleotide
agcgactgacgtaccgcccgttccatcgaaggaataagtgcccacgcccc

SEQ ID NO: 261706 - DNA, 50 bp, Artificial
  Synthetic oligonucleotide
agcgcccaagtgaagtcggccgtcctactcgccggcttacgtgcctcggg

SEQ ID NO: 261707 - DNA, 50 bp, Artificial
  Synthetic oligonucleotide
agcggaagcgacgctcatgggaagtgacgcgacgtatgacttggccgtct

SEQ ID NO: 261708 - DNA, 50 bp, Artificial
  Synthetic oligonucleotide
aggcttacctgccacgggcagacgccaaggataaacgcgggaaaatcggt

SEQ ID NO: 261709 - DNA, 50 bp, Artificial
  Synthetic oligonucleotide
agggttgtttgctcgggcctcatggggacttgattaccatcgggccgtcg

SEQ ID NO: 261710 - DNA, 50 bp, Artificial
  Synthetic oligonucleotide
aggtcggtgcactcgtgtttgtggatgagtccggcacgtatcgcgtgacg

SEQ ID NO: 261711 - DNA, 50 bp, Artificial
  Synthetic oligonucleotide
agtagtcgacgcatcgccgtgctctctccccctggtaacacgagtccgtc

SEQ ID NO: 261712 - DNA, 58 bp, Artificial
  Synthetic oligonucleotide
catatggagcgaatgaatcgtactaaccatattcaaaagttagacaaggaacggtatc

SEQ ID NO: 261713 - DNA, 50 bp, Artificial
  Synthetic oligonucleotide
agtcaaggctttgcggcctttaagacggcgagcagccaagatccggcggc

SEQ ID NO: 261714 - DNA, 50 bp, Artificial
  Synthetic oligonucleotide
agtcccgacgactgttacggcacgccagtacggactgctggcttatccgc

SEQ ID NO: 261715 - DNA, 50 bp, Artificial
  Synthetic oligonucleotide
agtgacgagagtgcgagcgtggcgtccccatgtgatggaaggccgtcgtc

SEQ ID NO: 261716 - DNA, 50 bp, Artificial
  Synthetic oligonucleotide
agtgcttgcgacttcctgactgacgcgtacgacatcctgcaagagccggc

SEQ ID NO: 261717 - DNA, 50 bp, Artificial
  Synthetic oligonucleotide
agttggctcgaggcgaacgtcttcccgaccttcacgacggtcttcccgta

SEQ ID NO: 261718 - DNA, 50 bp, Artificial
  Synthetic oligonucleotide
ataaaggtgctgcagcaagcaaacggtacaggagcggggacaaggcacga

SEQ ID NO: 261719 - DNA, 50 bp, Artificial
  Synthetic oligonucleotide
ataacgtgtgaagccggaacagtcgaaactgacaggccccgtcgcaccga

SEQ ID NO: 261720 - DNA, 50 bp, Artificial
  Synthetic oligonucleotide
ataccgtgcatcgcgtggtccgcatccgaaaccgaacgcggatggaagga

SEQ ID NO: 261721 - DNA, 50 bp, Artificial
  Synthetic oligonucleotide
atcaaccggcttcaattcgtctggtgccgtgacacgcatgccttctgccg

SEQ ID NO: 261722 - DNA, 60 bp, Artificial
  Synthetic oligonucleotide
catccgactctcgctcgatgacgcaccgggtaacacaaaccatcatctcttccgctatgt

SEQ ID NO: 261723 - DNA, 60 bp, Artificial
  Synthetic oligonucleotide
gtctcaaccccgacatgtgacttgctgcgctgctatcgcgcacacaaggcgtttccacgc

SEQ ID NO: 261724 - DNA, 55 bp, Artificial
  Synthetic oligonucleotide
gaacacttgtttatacgggattcctccgacaacaaatcgtagcaactaacagaaa

SEQ ID NO: 261725 - DNA, 58 bp, Artificial
  Synthetic oligonucleotide
cttcctctacggtgcgagtaaccaaaatgaaccaccttgtggaagtgcaacatatgga

SEQ ID NO: 261726 - DNA, 55 bp, Artificial
  Synthetic oligonucleotide
ccggcccttcacgataggacaactgttgacgcttcgacccgataccgtcacggtc

SEQ ID NO: 261727 - DNA, 54 bp, Artificial
  Synthetic oligonucleotide
ccgggcatactccggtagggaagataggaaacggctggatgggcagactaaccc

SEQ ID NO: 261728 - DNA, 60 bp, Artificial
  Synthetic oligonucleotide
cctctcgtagcttctccttgcccactggcgcatgttgcttcgccaggtccaagaacttca

SEQ ID NO: 261729 - DNA, 60 bp, Artificial
  Synthetic oligonucleotide
cgaaaattgtttggcaagcctacagatctattaaggctgtaaattatcctgcaggagata

SEQ ID NO: 261730 - DNA, 57 bp, Artificial
  Synthetic oligonucleotide
cgcaagtcgtactcaacctgacctagagaaaccgacaaatccgaaggacgttgcgca

SEQ ID NO: 261731 - DNA, 60 bp, Artificial
  Synthetic oligonucleotide
cgcagcagctgatgcttccccgtatggcgacaccaatagcgctccactaaatagaacggc

SEQ ID NO: 261732 - DNA, 52 bp, Artificial
  Synthetic oligonucleotide
cggcccccacctactaacaggggggtaggaaatacatgtgtaagtgccgtag

SEQ ID NO: 261733 - DNA, 60 bp, Artificial
  Synthetic oligonucleotide
cttcaacggatccgtggcgacacgcttcgcctttgtcacactggaacggctcgtctgcac

SEQ ID NO: 261734 - DNA, 59 bp, Artificial
  Synthetic oligonucleotide
gtcgcttgcatctatatccgagtggcatgaatctttaccgtaagtctaaagggattaaa

SEQ ID NO: 261735 - DNA, 59 bp, Artificial
  Synthetic oligonucleotide
tcagctcaattgccgagtgaaaccattcgccccaagaggggaatgatgtacggaacgaa

SEQ ID NO: 261736 - DNA, 60 bp, Artificial
  Synthetic oligonucleotide
ttacgttgttacgctttaatccatgtgccgcgaggaccgattcatagtgcttgtgcagtt

SEQ ID NO: 261737 - DNA, 60 bp, Artificial
  Synthetic oligonucleotide
ttcagacgaattgtggtcacataaaaaaacgagcatgctctactggaacatgctcgttca

SEQ ID NO: 261738 - DNA, 60 bp, Artificial
  Synthetic oligonucleotide
tcgatgtgaacgatttgttcgcgaaaacgatgaagtataaaaagactgagatgattggat

SEQ ID NO: 261739 - DNA, 57 bp, Artificial
  Synthetic oligonucleotide
acgacgtatgacggccaaaagccgtcatacagtgggttatatgacgagtcgccgaaa

SEQ ID NO: 261740 - DNA, 60 bp, Artificial
  Synthetic oligonucleotide
ttcgaacaaacacggatacgatgaaccatcaactctcgaaaatcatgcataaagtcgata

SEQ ID NO: 261741 - DNA, 60 bp, Artificial
  Synthetic oligonucleotide
tgactcaagtaatgaatatagatccatcacatcaaacgctcaattccttagatgttttgg

SEQ ID NO: 261742 - DNA, 58 bp, Artificial
  Synthetic oligonucleotide
aaagtcgataactcgagtaatgagattttttcgagtatccaagtcatgagaggaacac

SEQ ID NO: 261743 - DNA, 58 bp, Artificial
  Synthetic oligonucleotide
tagtgcaagacgaggtatccgtatgtctaggcgttccaagactccggggtgtctcaac

SEQ ID NO: 261744 - DNA, 60 bp, Artificial
  Synthetic oligonucleotide
tttgcgtacccggaaagcgtagcgaagacggagcgcaaactgagacgcatgtccagttga

SEQ ID NO: 261745 - DNA, 59 bp, Artificial
  Synthetic oligonucleotide
gtccagttgagcaacggctcgcacgctactggatacacaactggaaggtacggccccca

SEQ ID NO: 261746 - DNA, 58 bp, Artificial
  Synthetic oligonucleotide
gtttccacgccctaccttgctgcctttcggcgactcgtcacataacccactgcacgac

SEQ ID NO: 261747 - DNA, 60 bp, Artificial
  Synthetic oligonucleotide
tctaggcgttccaagactccggggtgtctcaaccccgacatgtgacttgctgcgctgcta

SEQ ID NO: 261748 - DNA, 59 bp, Artificial
  Synthetic oligonucleotide
acgcgagcgacgaatgaaaagatgacacctctcgtgccgtttagactgcaaacagaact

SEQ ID NO: 261749 - DNA, 55 bp, Artificial
  Synthetic oligonucleotide
tcttaccttcttgattctccacggtcggggctaatcccttcctggtgtccttctg

SEQ ID NO: 261750 - DNA, 59 bp, Artificial
  Synthetic oligonucleotide
gttaaacctgcgctgttattgcttcatgatccacgtttcgagggagcattagacgagta

SEQ ID NO: 261751 - DNA, 57 bp, Artificial
  Synthetic oligonucleotide
atgattggattgcaacaccatctattttgtacgtcacaattcgtcaatagtccggag

SEQ ID NO: 261752 - DNA, 57 bp, Artificial
  Synthetic oligonucleotide
actcgagtaatgagattttttcgagtatccaagtcatgagaggaacacttgagagat

SEQ ID NO: 261753 - DNA, 57 bp, Artificial
  Synthetic oligonucleotide
gaatcaatcttcaaatcattacactaggtgtcgatacctctacggctgccggccgac

SEQ ID NO: 261754 - DNA, 56 bp, Artificial
  Synthetic oligonucleotide
tccgtattttgttactgcctattgtacgccttcttgatttttctgacaatacgtta

SEQ ID NO: 261755 - DNA, 56 bp, Artificial
  Synthetic oligonucleotide
aagtggcacaaaatgtgccactttcgtgttttcactggcacatttcgtgccatttc

SEQ ID NO: 261756 - DNA, 55 bp, Artificial
  Synthetic oligonucleotide
agggcattggtgcttatggattcaggtcacttttaaaactgtacacgttagcgtt

SEQ ID NO: 261757 - DNA, 55 bp, Artificial
  Synthetic oligonucleotide
aatacgcctacacggtcccgcctcaagacttgagctatagttttgtagacatgcc

SEQ ID NO: 261758 - DNA, 55 bp, Artificial
  Synthetic oligonucleotide
gaaatcatgacgtgtacagctacaacttggacacctactggcgcacatcgctccg

SEQ ID NO: 261759 - DNA, 53 bp, Artificial
  Synthetic oligonucleotide
ccgacgagtacgtattggtgggcccgtctggatacgcaaacggagttggaccg

SEQ ID NO: 261760 - DNA, 55 bp, Artificial
  Synthetic oligonucleotide
cactcacatccgaggaacgggagaacagtcttttgacgtctctctatgccgacca

SEQ ID NO: 261761 - DNA, 55 bp, Artificial
  Synthetic oligonucleotide
cttcgatgtagccacgcgtcccttctagaagactgagcagacgactaatcaacgt

SEQ ID NO: 261762 - DNA, 55 bp, Artificial
  Synthetic oligonucleotide
ccaacctgatgtattccgcccgtgtaaacgaacgaccgcaacgtctggatgggtc

SEQ ID NO: 261763 - DNA, 55 bp, Artificial
  Synthetic oligonucleotide
ccgagtggcatgaatctttaccgtaagtctaaagggattaaaatgcctgttcgtg

SEQ ID NO: 261764 - DNA, 55 bp, Artificial
  Synthetic oligonucleotide
cagtgggttatatgacgagtcgccgaaaggcagcaaggtagggcgtggaaacgcc

SEQ ID NO: 261765 - DNA, 55 bp, Artificial
  Synthetic oligonucleotide
ccaaatcatcgagcaagctgccgaacaattgaaccaagaaacgtctgccttcatc

SEQ ID NO: 261766 - DNA, 55 bp, Artificial
  Synthetic oligonucleotide
cacgtcctgtattgacgggtgttaacttctcggcggataaagacatcctgacatg

SEQ ID NO: 261767 - DNA, 55 bp, Artificial
  Synthetic oligonucleotide
ggcgaggttagaagtgacagtcttaactctttaagacagacgtttaagaagctcc

SEQ ID NO: 261768 - DNA, 55 bp, Artificial
  Synthetic oligonucleotide
ctgtgcctccggtgtccggtcacgaatggcagtcagtgtcttacaatcactgggc

SEQ ID NO: 261769 - DNA, 55 bp, Artificial
  Synthetic oligonucleotide
ctgaccctgtgtagggtcaatcggttcacaggttggatgtaaacgtgtcggccgt

SEQ ID NO: 261770 - DNA, 55 bp, Artificial
  Synthetic oligonucleotide
ctcgccacggttgctcaagtgacgcgattcccaaaggggacgaatcatctcgaca

SEQ ID NO: 261771 - DNA, 55 bp, Artificial
  Synthetic oligonucleotide
aaacgaattttccaccgacgaattcacagcgtgtgatgtatggctccggtgcctg

SEQ ID NO: 261772 - DNA, 55 bp, Artificial
  Synthetic oligonucleotide
ctcatggtcatacgatttcgatggtgcacaagcagatggctatacggatgtcacg

SEQ ID NO: 261773 - DNA, 55 bp, Artificial
  Synthetic oligonucleotide
ctcagacgatcacgtccggtcaaacgttgcataccaaatcgggacggcacactca

SEQ ID NO: 261774 - DNA, 55 bp, Artificial
  Synthetic oligonucleotide
cgtccacttagcaccccgtacagcctacctccgagcagacttccgactaaatagc

SEQ ID NO: 261775 - DNA, 55 bp, Artificial
  Synthetic oligonucleotide
cggacagcccgtctgacgagcatcgaacggttgttaaccaactggccggatgagg

SEQ ID NO: 261776 - DNA, 55 bp, Artificial
  Synthetic oligonucleotide
cggaattcgtgaaaataggattccccagtcggtttcatatcatacgatacgattg

SEQ ID NO: 261777 - DNA, 55 bp, Artificial
  Synthetic oligonucleotide
cgctcgttcagttccgtcacctcgtagatcgtgagggccatgttcttcatcggag

SEQ ID NO: 261778 - DNA, 60 bp, Artificial
  Synthetic oligonucleotide
gctaacgtcacaccacatgctggaaccgcattggtgaccgatctactttgttgcgtcggc

SEQ ID NO: 261779 - DNA, 55 bp, Artificial
  Synthetic oligonucleotide
cgcggatcttccgaatccactcgggatgccgcatgtgccatcgtttgagatgcac

SEQ ID NO: 261780 - DNA, 55 bp, Artificial
  Synthetic oligonucleotide
cgcggatacactgcagacggtcttcacggagacttgacgcaatcaaaacgtgacc

SEQ ID NO: 261781 - DNA, 55 bp, Artificial
  Synthetic oligonucleotide
cgatgaacccgtccgtttatcatgcggttcgctacggcacctcttcaggtgtgac

SEQ ID NO: 261782 - DNA, 55 bp, Artificial
  Synthetic oligonucleotide
cgatcgtaacgcacgggatgacggaagaactgtcagaacgattgctcggaagtga

SEQ ID NO: 261783 - DNA, 55 bp, Artificial
  Synthetic oligonucleotide
cgatcacgaatgaccaagccgaacgacataccaaaactactgacgatcgcagacc

SEQ ID NO: 261784 - DNA, 55 bp, Artificial
  Synthetic oligonucleotide
cgacccggtgggcgaccataaatactgcctgacaagtgtcagtatgtaaatgggc

SEQ ID NO: 261785 - DNA, 55 bp, Artificial
  Synthetic oligonucleotide
cttcccggttatcgcattgattgtgggatgtacattcctgattggcggttggtgg

SEQ ID NO: 261786 - DNA, 55 bp, Artificial
  Synthetic oligonucleotide
ttaaagtttccgaacgtcacaacaacggcttcctgttgtgagagatcaagctgag

SEQ ID NO: 261787 - DNA, 55 bp, Artificial
  Synthetic oligonucleotide
tggcaagcctacagatctattaaggctgtaaattatcctgcaggagatatcccta

SEQ ID NO: 261788 - DNA, 55 bp, Artificial
  Synthetic oligonucleotide
aggaagaccccgtcattttacattgctcaaactcactcgtgaacaaattggcacc

SEQ ID NO: 261789 - DNA, 60 bp, Artificial
  Synthetic oligonucleotide
gcgtggggcatggcatcaccatttactcgttagattcaacgatatgaccggtagcaagat

SEQ ID NO: 261790 - DNA, 55 bp, Artificial
  Synthetic oligonucleotide
ggggcgagactcccctacaatcttggaacgcctagacatacggatacctcgtcct

SEQ ID NO: 261791 - DNA, 55 bp, Artificial
  Synthetic oligonucleotide
gggcactccttatcttcgatatctcgcgaagggacgaaaacaatatgcaacgatc

SEQ ID NO: 261792 - DNA, 55 bp, Artificial
  Synthetic oligonucleotide
gggcacatgcggaacacgtcgccagactacgctaggctcgtattcctcgtgccac

SEQ ID NO: 261793 - DNA, 55 bp, Artificial
  Synthetic oligonucleotide
gggtacccggtcgcagggcacttcctaatcgtgaaatcacatatccggaaggggc

SEQ ID NO: 261794 - DNA, 55 bp, Artificial
  Synthetic oligonucleotide
gctttgcgagagagagtatgcaaggtcttccgctgcgttgatgaggtcgattgtt

SEQ ID NO: 261795 - DNA, 55 bp, Artificial
  Synthetic oligonucleotide
agcgaagacggagcgcaaactgagacgcatgtccagttgagcaacggctcgcacg

SEQ ID NO: 261796 - DNA, 55 bp, Artificial
  Synthetic oligonucleotide
gctacgccttgtgtcgccgcaaacagttgccgtctaaataaactgaacgtgatga

SEQ ID NO: 261797 - DNA, 55 bp, Artificial
  Synthetic oligonucleotide
agtgttgacttcttcccgatgactgtcgcaacacccgtgttacggtctttaccga

SEQ ID NO: 261798 - DNA, 55 bp, Artificial
  Synthetic oligonucleotide
gcgggcggatgtctatggggcgttcaagaatttgtgaggacattacctggcgtcc

SEQ ID NO: 261799 - DNA, 55 bp, Artificial
  Synthetic oligonucleotide
gccgtcatacagtgggttatatgacgagtcgccgaaaggcagcaaggtagggcgt

SEQ ID NO: 261800 - DNA, 59 bp, Artificial
  Synthetic oligonucleotide
gcctttcttccaggaggggtcacacgaaataaacgttactcaatcatgatgcgcttcga

SEQ ID NO: 261801 - DNA, 55 bp, Artificial
  Synthetic oligonucleotide
tcgcatgaagcagaggcgatcagtcgattgtcggagcaagatcaggtgaaacgtg

SEQ ID NO: 261802 - DNA, 55 bp, Artificial
  Synthetic oligonucleotide
gacggtcaagtaaccggcgtcgtcaaggttgctagcgatatcaccgatcggattg

SEQ ID NO: 261803 - DNA, 55 bp, Artificial
  Synthetic oligonucleotide
gactgagccacgtcgtgacgagtgtcccctcttcatagcgtacttcgagttccgg

SEQ ID NO: 261804 - DNA, 55 bp, Artificial
  Synthetic oligonucleotide
gttcggagcagcctgacgaatacgtgcatacttcgtggcaatgagtgattcgtgg

SEQ ID NO: 261805 - DNA, 55 bp, Artificial
  Synthetic oligonucleotide
agacaatcgaccagctcgaattatatttactcgagacgacagccgtatgtttcgg

SEQ ID NO: 261806 - DNA, 55 bp, Artificial
  Synthetic oligonucleotide
tagggcgtggaaacgccttgtgtgcgcgagagcgcagcgagtcatatcgtagggg

SEQ ID NO: 261807 - DNA, 55 bp, Artificial
  Synthetic oligonucleotide
tcgggttgtgagtactcagacgccgggatgtatgtcgcatccttcacggtaagta

SEQ ID NO: 261808 - DNA, 52 bp, Artificial
  Synthetic oligonucleotide
gatcgttaagttcgatgaggtcggtaaactcgttccgtttaagaaagtgcgt

SEQ ID NO: 261809 - DNA, 55 bp, Artificial
  Synthetic oligonucleotide
gcaaaaaaccgtaaggttgcgtgaaatgacaattcctcgcaatcttacgactggt

SEQ ID NO: 261810 - DNA, 55 bp, Artificial
  Synthetic oligonucleotide
gtcatcagtagtctattcaactacgtgcaacagtatttgatgtccggtgttgccc

SEQ ID NO: 261811 - DNA, 55 bp, Artificial
  Synthetic oligonucleotide
ttgctcgagaaggctataaggtggtagcacttgattactctcaagtggagcttag

SEQ ID NO: 261812 - DNA, 55 bp, Artificial
  Synthetic oligonucleotide
ggagaacgctgtatagtctgtttgacgattaagtggcacaacgccagtactaagc

SEQ ID NO: 261813 - DNA, 55 bp, Artificial
  Synthetic oligonucleotide
gcgtcctgtgttaatggttgtcggattattggctggcatcgtattaacgtatgtc

SEQ ID NO: 261814 - DNA, 55 bp, Artificial
  Synthetic oligonucleotide
gcgcttttgtcggtttgccgatttgacttttgagcaaagtgttccgccgggtgcg

SEQ ID NO: 261815 - DNA, 55 bp, Artificial
  Synthetic oligonucleotide
gcgatgttgaattgccgtgccaattgctgtacatcctgctaattgactgcccatg

SEQ ID NO: 261816 - DNA, 55 bp, Artificial
  Synthetic oligonucleotide
gcccgagcatgctaagcccaccgagtggcacactcaagctaagcgttccagtacg

SEQ ID NO: 261817 - DNA, 55 bp, Artificial
  Synthetic oligonucleotide
gcagcctagtaaaacgttgaggcttacgaggccatgcccagccgctatagtgatg

SEQ ID NO: 261818 - DNA, 55 bp, Artificial
  Synthetic oligonucleotide
gactcaagtgctaggatctctcttacccttggcaagattcgttttaactcgtcgg

SEQ ID NO: 261819 - DNA, 55 bp, Artificial
  Synthetic oligonucleotide
agcgccaaaggagagcccacaccgccacaaccgacaatacagatagacgcttgcc

SEQ ID NO: 261820 - DNA, 55 bp, Artificial
  Synthetic oligonucleotide
atataccacccctttaagtgtcgcgctttgataggctttgattgggcgaaccatt

SEQ ID NO: 261821 - DNA, 53 bp, Artificial
  Synthetic oligonucleotide
atgagacaagacccggtggttatacacgtgttcttaaatgtggttaccgtttc

SEQ ID NO: 261822 - DNA, 55 bp, Artificial
  Synthetic oligonucleotide
tggctgcgtaaacacaccaacgatatcgtactcatctttaatcagcgcggacagc

SEQ ID NO: 261823 - DNA, 55 bp, Artificial
  Synthetic oligonucleotide
caaggtttgtgccaccgtttagattctctgaagtcccgctgaccccagcgcctgc

SEQ ID NO: 261824 - DNA, 55 bp, Artificial
  Synthetic oligonucleotide
cccgactacctcccctatatgctgagtgacgagcgctaatagcttggagctagac

SEQ ID NO: 261825 - DNA, 55 bp, Artificial
  Synthetic oligonucleotide
cccttggattttgatccgacaaactatatgctgctcattcatattgtgcgctctc

SEQ ID NO: 261826 - DNA, 55 bp, Artificial
  Synthetic oligonucleotide
ccttctcaacgtgaattttccgcttgtaaacccaagatgccataggctctcttgc

SEQ ID NO: 261827 - DNA, 55 bp, Artificial
  Synthetic oligonucleotide
ctcggattaaaagggtagtattcaccacagacgccacccttctcctctacttgcc

SEQ ID NO: 261828 - DNA, 55 bp, Artificial
  Synthetic oligonucleotide
ctgctgataaggttaattccgtagtaacataacgacctaggtttgcagcagtgta

SEQ ID NO: 261829 - DNA, 55 bp, Artificial
  Synthetic oligonucleotide
ctggcgagcgcccgagcatgctaagcccaccgagtggcacactcaagctaagcgt

SEQ ID NO: 261830 - DNA, 54 bp, Artificial
  Synthetic oligonucleotide
cagggagtcattcaagacctagggtatgggttgactcatgtactatcttgggac

SEQ ID NO: 261831 - DNA, 53 bp, Artificial
  Synthetic oligonucleotide
agtaaatgaagaatcctgtcagttgcatccgttacttttgaaggcctcggggt

SEQ ID NO: 261832 - DNA, 52 bp, Artificial
  Synthetic oligonucleotide
ctaagtttgtggggtagtctaattgaagcaggaaatacggtgttgatagctc

SEQ ID NO: 261833 - DNA, 55 bp, Artificial
  Synthetic oligonucleotide
tggcagcaccccttaaatatttcatcgacacaacaagtgacctttggtttgaagg

SEQ ID NO: 261834 - DNA, 52 bp, Artificial
  Synthetic oligonucleotide
tgatccggattcagctattatctggcgaggacccatggtttcaggtgctcta

SEQ ID NO: 261835 - DNA, 52 bp, Artificial
  Synthetic oligonucleotide
aacatctaagcgtgccctctcttcgcgcaagctgataatacatctctcggtg

SEQ ID NO: 261836 - DNA, 50 bp, Artificial
  Synthetic oligonucleotide
ccgtgacaaatgcgcggatgcatgagtgggcaaaagcgcaagggtttgcg

SEQ ID NO: 261837 - DNA, 50 bp, Artificial
  Synthetic oligonucleotide
taaacaagccatgccaactgcctgccttaacggtggctgcatgtccccat

SEQ ID NO: 261838 - DNA, 50 bp, Artificial
  Synthetic oligonucleotide
tagaggtcatgagttagaagatgaggcacgtatgcgctactgtgaggtgt

SEQ ID NO: 261839 - DNA, 50 bp, Artificial
  Synthetic oligonucleotide
tcgcgacacaagagaccagctcacttcaaggggttattcgcatcaatagc

SEQ ID NO: 261840 - DNA, 50 bp, Artificial
  Synthetic oligonucleotide
aaatatcgccctcttgatcacgatacgcgccatctcccggataataatag

SEQ ID NO: 261841 - DNA, 55 bp, Artificial
  Synthetic oligonucleotide
tagagccgacttgtggcgttggctcgttctttgaatacatgccagaatcaatccg

SEQ ID NO: 261842 - DNA, 55 bp, Artificial
  Synthetic oligonucleotide
gtgccaatatatcaggttgaaaacgagcttcattagaaggtgagtcacgcagtca

SEQ ID NO: 261843 - DNA, 55 bp, Artificial
  Synthetic oligonucleotide
ggtagcctcatcttgagtgtgtcaagcatcgtgacgtcagtcgccagagcgcagg

SEQ ID NO: 261844 - DNA, 55 bp, Artificial
  Synthetic oligonucleotide
ggcacagggaaaatagctgacagcgaaattgcagctcttgtacgccaagagtttg

SEQ ID NO: 261845 - DNA, 55 bp, Artificial
  Synthetic oligonucleotide
ggatacacacaaccctctcaggcgccagttcatcttatatgcaacaaagtgtctc

SEQ ID NO: 261846 - DNA, 55 bp, Artificial
  Synthetic oligonucleotide
ggaggtggaggcgccaatattgagacaacaacaagacggcatattgagccattgg

SEQ ID NO: 261847 - DNA, 60 bp, Artificial
  Synthetic oligonucleotide
cggcggaatgttacacgcaatcatggccgcttctgctagcatggtcccactaccacacat

SEQ ID NO: 261848 - DNA, 55 bp, Artificial
  Synthetic oligonucleotide
gggtaagagacgtgtatacaaaatcgcaatacggaattccaaattatatgaccac

SEQ ID NO: 261849 - DNA, 54 bp, Artificial
  Synthetic oligonucleotide
ctctacccttagacggagccccagtaaagacacaacttcctgcctcttctaccc

SEQ ID NO: 261850 - DNA, 55 bp, Artificial
  Synthetic oligonucleotide
ctggcatcacgaagaagttagggtcgtcctcaccagacaagaattctacgccttt

SEQ ID NO: 261851 - DNA, 53 bp, Artificial
  Synthetic oligonucleotide
gtcaactacatgtgtaatttcggttacccattttgccggaattcctagtacgg

SEQ ID NO: 261852 - DNA, 55 bp, Artificial
  Synthetic oligonucleotide
tggaacaagttataccgtaacagcaaccaatggtggatgtacttcagtagcatca

SEQ ID NO: 261853 - DNA, 55 bp, Artificial
  Synthetic oligonucleotide
gaacttcttacccaggattttatactgcggttggaactttagctaatcatcctgc

SEQ ID NO: 261854 - DNA, 55 bp, Artificial
  Synthetic oligonucleotide
gagttcgtgtttatactaacgtaggatacacatacagagtgccaacatataccga

SEQ ID NO: 261855 - DNA, 55 bp, Artificial
  Synthetic oligonucleotide
gcttatgcaatacagtcacgacgacgaaaacttctcacttacccgatttgaatcg

SEQ ID NO: 261856 - DNA, 55 bp, Artificial
  Synthetic oligonucleotide
ggagtccttgcgtggcaaagtggtgtaagttatcctattggtgcacgtgtaacct

SEQ ID NO: 261857 - DNA, 55 bp, Artificial
  Synthetic oligonucleotide
ggcatcgctataagtcctggtggtaaaccagaattcttgtaagtgttgtaaggtg

SEQ ID NO: 261858 - DNA, 58 bp, Artificial
  Synthetic oligonucleotide
ccagatgcagggggtacttggtcgcctgctctaactagcggcacaagtgtttttgacc

SEQ ID NO: 261859 - DNA, 55 bp, Artificial
  Synthetic oligonucleotide
ggcgcaagaaagcaaacgtccgttttatcaactgagtgcgatacattctggcgtt

SEQ ID NO: 261860 - DNA, 55 bp, Artificial
  Synthetic oligonucleotide
aagcatttctataacgctagctcttgtaataccatgtagtactgacccatccaat

SEQ ID NO: 261861 - DNA, 55 bp, Artificial
  Synthetic oligonucleotide
ttatcggattacatcagccaattgcatctagttggacctgagggttcgctaacgc

SEQ ID NO: 261862 - DNA, 55 bp, Artificial
  Synthetic oligonucleotide
agaattatgctgctctacatggcttaccgactttagatctgttagcacatcagcc

SEQ ID NO: 261863 - DNA, 55 bp, Artificial
  Synthetic oligonucleotide
agagcgattgaagccgaactaatggctaaaggcatgactaagtctgaaaaccctg

SEQ ID NO: 261864 - DNA, 55 bp, Artificial
  Synthetic oligonucleotide
caagtcaatacttatttcgcgccttgtatagatttagtggttcaaacttatcccg

SEQ ID NO: 261865 - DNA, 55 bp, Artificial
  Synthetic oligonucleotide
cacgatggaccagcaagtattacaagcgatggaaacacgatgtactacggtagcg

SEQ ID NO: 261866 - DNA, 55 bp, Artificial
  Synthetic oligonucleotide
cacgttcagctcctgttgttccaaacgtatatattaaggattgattttgaggtac

SEQ ID NO: 261867 - DNA, 55 bp, Artificial
  Synthetic oligonucleotide
caggcatgacagttggaacaagttataccgtaacagcaaccaatggtggatgtac

SEQ ID NO: 261868 - DNA, 55 bp, Artificial
  Synthetic oligonucleotide
caggcgcaacaagtggaattggtagagctaccgctcacgagttcgctaaacacgg

SEQ ID NO: 261869 - DNA, 60 bp, Artificial
  Synthetic oligonucleotide
gggttgtgggcacggaatgcaattccgcactatctatgcggtgagaaattcgcgcggtcg

SEQ ID NO: 261870 - DNA, 55 bp, Artificial
  Synthetic oligonucleotide
ttaccgtagaaagttggagagcaattctaacgttatctgcttccgatagtatcgg

SEQ ID NO: 261871 - DNA, 55 bp, Artificial
  Synthetic oligonucleotide
gttacttgtggtatgggtgtgccgtctctgtaggtggttacatccaagttggtgc

SEQ ID NO: 261872 - DNA, 55 bp, Artificial
  Synthetic oligonucleotide
cccaatgttcgggtataatcatatagccgagttcggttctaaagtgctcaggttg

SEQ ID NO: 261873 - DNA, 55 bp, Artificial
  Synthetic oligonucleotide
ccgtctctaatgttcatgtttcgaagcatttcgcctgttggagttacgtgtatag

SEQ ID NO: 261874 - DNA, 55 bp, Artificial
  Synthetic oligonucleotide
tatggtactgaccaagccgtaatatcataagttaatgaatccgaaagtttggcgt

SEQ ID NO: 261875 - DNA, 55 bp, Artificial
  Synthetic oligonucleotide
cggagcggccaatcgttatttaggattgcattacggagaagtagtttggacacag

SEQ ID NO: 261876 - DNA, 54 bp, Artificial
  Synthetic oligonucleotide
taagctcttcgtaagttgaggactgcattaacataggccatatctgacttgcat

SEQ ID NO: 261877 - DNA, 54 bp, Artificial
  Synthetic oligonucleotide
taggtgttgtaaactctactttgttctcctgctccaaatatctcctcgttagag

SEQ ID NO: 261878 - DNA, 54 bp, Artificial
  Synthetic oligonucleotide
ctaaacgcaaataggtgtcttgcaattcaattgaacgtggtcctaaaacgtgcc

SEQ ID NO: 261879 - DNA, 54 bp, Artificial
  Synthetic oligonucleotide
cataaccacaagagtaccaacgtctttcaatgttgaggtagatgtgccagctat

SEQ ID NO: 261880 - DNA, 57 bp, Artificial
  Synthetic oligonucleotide
ttaccttgcaggttggcacaaccccaaaatgcaccgtccatggtactccagggtgtg

SEQ ID NO: 261881 - DNA, 53 bp, Artificial
  Synthetic oligonucleotide
ccttgcacacgataatcgttcaccacacgaattacctcgtccatcacatgatg

SEQ ID NO: 261882 - DNA, 53 bp, Artificial
  Synthetic oligonucleotide
atggttgcctacatgccagaagctacttcgggtgtagataatgctattgacgg

SEQ ID NO: 261883 - DNA, 52 bp, Artificial
  Synthetic oligonucleotide
gaacaactcccattaattttgccgtaacaccactctcaaaagctcctaattc

SEQ ID NO: 261884 - DNA, 52 bp, Artificial
  Synthetic oligonucleotide
cttcaaatcgcgtttcaagacgttgcccaccaacctcaaaatgtttaattag

SEQ ID NO: 261885 - DNA, 52 bp, Artificial
  Synthetic oligonucleotide
gtgatgtaacgttcttaacaggtacgaacccaatagcgagtttagcaccagg

SEQ ID NO: 261886 - DNA, 52 bp, Artificial
  Synthetic oligonucleotide
ccatcgttataagtgtaagtatgcgttgtgttgggctgtacattagtactac

SEQ ID NO: 261887 - DNA, 51 bp, Artificial
  Synthetic oligonucleotide
ttctcgatgtacgcgtactataatctctccagtggagtaggactttatcac

SEQ ID NO: 261888 - DNA, 51 bp, Artificial
  Synthetic oligonucleotide
cagtgtttcgatagaagttttgttatatccgtgtttagacagctggttccc

SEQ ID NO: 261889 - DNA, 51 bp, Artificial
  Synthetic oligonucleotide
accctgtatttatctagagctggtgctgtgctaaaagttaggctaatcgta

SEQ ID NO: 261890 - DNA, 51 bp, Artificial
  Synthetic oligonucleotide
aagctatctattaagcgattgaggtttaaccttggtgagtttctgagtagc

SEQ ID NO: 261891 - DNA, 56 bp, Artificial
  Synthetic oligonucleotide
ggtggcacaccagatgcagggggtacttggtcgcctgctctaactagcggcacaag

SEQ ID NO: 261892 - DNA, 50 bp, Artificial
  Synthetic oligonucleotide
tacgaaacggcaatagtaatgcaaagtccagtgtatagcaaagacggaaa

SEQ ID NO: 261893 - DNA, 50 bp, Artificial
  Synthetic oligonucleotide
gtctctagtgctatagacggcgtaaattatagtacagcattagataacgg

SEQ ID NO: 261894 - DNA, 50 bp, Artificial
  Synthetic oligonucleotide
gtcggtagtgtaggagtgaactgtagtgatatacgcttgctcaatttcgc

SEQ ID NO: 261895 - DNA, 50 bp, Artificial
  Synthetic oligonucleotide
gaacaagtagtgagcagaattggtgctgcagaggttcctactgatcctat

SEQ ID NO: 261896 - DNA, 50 bp, Artificial
  Synthetic oligonucleotide
tggctcacgagccgcttttacataaggtggtacatccttacggactaaag

SEQ ID NO: 261897 - DNA, 50 bp, Artificial
  Synthetic oligonucleotide
aaaggaataggtgagagcagtccaataactaaaccgagagttgtgcccac

SEQ ID NO: 261898 - DNA, 55 bp, Artificial
  Synthetic oligonucleotide
cgttatgtccatgcttactagcacatctacgctaggaacatttaacggagttgta

SEQ ID NO: 261899 - DNA, 55 bp, Artificial
  Synthetic oligonucleotide
tcacggaaattcgactgaatttaccgcaagtcacatttcgatagacagccgttcg

SEQ ID NO: 261900 - DNA, 50 bp, Artificial
  Synthetic oligonucleotide
ctaaccgttaaaccatcacgtattggtaacaaaaccgtttctactctagg

SEQ ID NO: 261901 - DNA, 55 bp, Artificial
  Synthetic oligonucleotide
ctcgtgcgtcatacctggtcctccgtgtaagagtaagacctttattgttgggttg

SEQ ID NO: 261902 - DNA, 59 bp, Artificial
  Synthetic oligonucleotide
gcacacaaattgtacgcaagagtaacacctacaaatactactataagataactatactc

SEQ ID NO: 261903 - DNA, 55 bp, Artificial
  Synthetic oligonucleotide
gatactaccgcccctactaaacgtctatagtctactgcaccgtgttcaaagaatc

SEQ ID NO: 261904 - DNA, 55 bp, Artificial
  Synthetic oligonucleotide
gacctacccaaactgatttggctagagctccttttataatagagttgtcgatgtc

SEQ ID NO: 261905 - DNA, 55 bp, Artificial
  Synthetic oligonucleotide
gaagctaatgtacagttaggtttcgctcctgatgaaagggactatactatcgccg

SEQ ID NO: 261906 - DNA, 55 bp, Artificial
  Synthetic oligonucleotide
ctttatatcgaacagtttctatgtgtactaggagaaactcaaggaccacagatca

SEQ ID NO: 261907 - DNA, 55 bp, Artificial
  Synthetic oligonucleotide
cttgtagaaggcgcactaaatgcagcaactgaagtaatatctactggtgattcac

SEQ ID NO: 261908 - DNA, 50 bp, Artificial
  Synthetic oligonucleotide
ctggtttgtttggttccactggtttgtttggttccactggtttgtttggt

SEQ ID NO: 261909 - DNA, 55 bp, Artificial
  Synthetic oligonucleotide
ctggatctttcagtggccaacctccagtttctgcatatattgcgacttcgtaacc

SEQ ID NO: 261910 - DNA, 55 bp, Artificial
  Synthetic oligonucleotide
ctgctcctaataagcaccctgttccaataactttcggcatcattgcagttccgtt

SEQ ID NO: 261911 - DNA, 55 bp, Artificial
  Synthetic oligonucleotide
tttagtgaagataccaagtgcgaatgtaccagctaaaggcacccctagaagtccg

SEQ ID NO: 261912 - DNA, 54 bp, Artificial
  Synthetic oligonucleotide
ttcacggtggatggttaggtaaccaaacagttgttaacactgctaacgtaggta

SEQ ID NO: 261913 - DNA, 53 bp, Artificial
  Synthetic oligonucleotide
gagtagcaggtcgtgtaccggttatcgcgggtagtggggttaacgatacggcc

SEQ ID NO: 261914 - DNA, 55 bp, Artificial
  Synthetic oligonucleotide
tgttaactccgcctattaattccggagctttagcttgcattattgtaagagcgcc

SEQ ID NO: 261915 - DNA, 55 bp, Artificial
  Synthetic oligonucleotide
tgagtttcgatagctgagaaactttggtgtaatccagtaattacgattggtgcgt

SEQ ID NO: 261916 - DNA, 55 bp, Artificial
  Synthetic oligonucleotide
tccacggtaggacaaaagttcaaatgtacagtggtaaagctaactgggatgtaat

SEQ ID NO: 261917 - DNA, 55 bp, Artificial
  Synthetic oligonucleotide
tacgaacggtgcattggcaaacacgttaaccatatcagctaagccagcgatactt

SEQ ID NO: 261918 - DNA, 55 bp, Artificial
  Synthetic oligonucleotide
taatcgctgccattggagccgcaagaactatcgctgccaagtaccaaggaagtac
